United States Patent Application Publication US 2015/0141320 A1 - sequence listing, part 36

SEQ ID NO: 1363454 - DNA, 15 bp, Homo sapiens
cagagatcattctac

SEQ ID NO: 1363455 - DNA, 15 bp, Homo sapiens
ccagagatcattcta

SEQ ID NO: 1363456 - DNA, 15 bp, Homo sapiens
cccagagatcattct

SEQ ID NO: 1363457 - DNA, 15 bp, Homo sapiens
acccagagatcattc

SEQ ID NO: 1363458 - DNA, 15 bp, Homo sapiens
aacccagagatcatt

SEQ ID NO: 1363459 - DNA, 15 bp, Homo sapiens
gaacccagagatcat

SEQ ID NO: 1363460 - DNA, 15 bp, Homo sapiens
agaacccagagatca

SEQ ID NO: 1363461 - DNA, 15 bp, Homo sapiens
tagaacccagagatc

SEQ ID NO: 1363462 - DNA, 15 bp, Homo sapiens
gtagaacccagagat

SEQ ID NO: 1363463 - DNA, 15 bp, Homo sapiens
ggtagaacccagaga

SEQ ID NO: 1363464 - DNA, 15 bp, Homo sapiens
aggtagaacccagag

SEQ ID NO: 1363465 - DNA, 15 bp, Homo sapiens
taggtagaacccaga

SEQ ID NO: 1363466 - DNA, 15 bp, Homo sapiens
ataggtagaacccag

SEQ ID NO: 1363467 - DNA, 15 bp, Homo sapiens
tataggtagaaccca

SEQ ID NO: 1363468 - DNA, 15 bp, Homo sapiens
ttataggtagaaccc

SEQ ID NO: 1363469 - DNA, 15 bp, Homo sapiens
cttataggtagaacc

SEQ ID NO: 1363470 - DNA, 15 bp, Homo sapiens
tcttataggtagaac

SEQ ID NO: 1363471 - DNA, 15 bp, Homo sapiens
ttcttataggtagaa

SEQ ID NO: 1363472 - DNA, 15 bp, Homo sapiens
cttcttataggtaga

SEQ ID NO: 1363473 - DNA, 15 bp, Homo sapiens
acttcttataggtag

SEQ ID NO: 1363474 - DNA, 15 bp, Homo sapiens
tacttcttataggta

SEQ ID NO: 1363475 - DNA, 15 bp, Homo sapiens
ctacttcttataggt

SEQ ID NO: 1363476 - DNA, 15 bp, Homo sapiens
tctacttcttatagg

SEQ ID NO: 1363477 - DNA, 15 bp, Homo sapiens
atctacttcttatag

SEQ ID NO: 1363478 - DNA, 15 bp, Homo sapiens
tatctacttcttata

SEQ ID NO: 1363479 - DNA, 15 bp, Homo sapiens
ttatctacttcttat

SEQ ID NO: 1363480 - DNA, 15 bp, Homo sapiens
tttatctacttctta

SEQ ID NO: 1363481 - DNA, 15 bp, Homo sapiens
ctttatctacttctt

SEQ ID NO: 1363482 - DNA, 15 bp, Homo sapiens
cctttatctacttct

SEQ ID NO: 1363483 - DNA, 15 bp, Homo sapiens
tcctttatctacttc

SEQ ID NO: 1363484 - DNA, 15 bp, Homo sapiens
ttcctttatctactt

SEQ ID NO: 1363485 - DNA, 15 bp, Homo sapiens
attcctttatctact

SEQ ID NO: 1363486 - DNA, 15 bp, Homo sapiens
aattcctttatctac

SEQ ID NO: 1363487 - DNA, 15 bp, Homo sapiens
caattcctttatcta

SEQ ID NO: 1363488 - DNA, 15 bp, Homo sapiens
ccaattcctttatct

SEQ ID NO: 1363489 - DNA, 15 bp, Homo sapiens
tccaattcctttatc

SEQ ID NO: 1363490 - DNA, 15 bp, Homo sapiens
ttccaattcctttat

SEQ ID NO: 1363491 - DNA, 15 bp, Homo sapiens
tttccaattccttta

SEQ ID NO: 1363492 - DNA, 15 bp, Homo sapiens
atttccaattccttt

SEQ ID NO: 1363493 - DNA, 15 bp, Homo sapiens
tatttccaattcctt

SEQ ID NO: 1363494 - DNA, 15 bp, Homo sapiens
ttatttccaattcct

SEQ ID NO: 1363495 - DNA, 15 bp, Homo sapiens
tttatttccaattcc

SEQ ID NO: 1363496 - DNA, 15 bp, Homo sapiens
ttttatttccaattc

SEQ ID NO: 1363497 - DNA, 15 bp, Homo sapiens
gttttatttccaatt

SEQ ID NO: 1363498 - DNA, 15 bp, Homo sapiens
tgttttatttccaat

SEQ ID NO: 1363499 - DNA, 15 bp, Homo sapiens
atgttttatttccaa

SEQ ID NO: 1363500 - DNA, 15 bp, Homo sapiens
gatgttttatttcca

SEQ ID NO: 1363501 - DNA, 15 bp, Homo sapiens
tgatgttttatttcc

SEQ ID NO: 1363502 - DNA, 15 bp, Homo sapiens
gtgatgttttatttc

SEQ ID NO: 1363503 - DNA, 15 bp, Homo sapiens
tgtgatgttttattt

SEQ ID NO: 1363504 - DNA, 15 bp, Homo sapiens
ctgtgatgttttatt

SEQ ID NO: 1363505 - DNA, 15 bp, Homo sapiens
gctgtgatgttttat

SEQ ID NO: 1363506 - DNA, 15 bp, Homo sapiens
agctgtgatgtttta

SEQ ID NO: 1363507 - DNA, 15 bp, Homo sapiens
cagctgtgatgtttt

SEQ ID NO: 1363508 - DNA, 15 bp, Homo sapiens
acagctgtgatgttt

SEQ ID NO: 1363509 - DNA, 15 bp, Homo sapiens
tacagctgtgatgtt

SEQ ID NO: 1363510 - DNA, 15 bp, Homo sapiens
ctacagctgtgatgt

SEQ ID NO: 1363511 - DNA, 15 bp, Homo sapiens
gctacagctgtgatg

SEQ ID NO: 1363512 - DNA, 15 bp, Homo sapiens
ggctacagctgtgat

SEQ ID NO: 1363513 - DNA, 15 bp, Homo sapiens
gggctacagctgtga

SEQ ID NO: 1363514 - DNA, 15 bp, Homo sapiens
tgggctacagctgtg

SEQ ID NO: 1363515 - DNA, 15 bp, Homo sapiens
ctgggctacagctgt

SEQ ID NO: 1363516 - DNA, 15 bp, Homo sapiens
tctgggctacagctg

SEQ ID NO: 1363517 - DNA, 15 bp, Homo sapiens
atctgggctacagct

SEQ ID NO: 1363518 - DNA, 15 bp, Homo sapiens
catctgggctacagc

SEQ ID NO: 1363519 - DNA, 15 bp, Homo sapiens
ccatctgggctacag

SEQ ID NO: 1363520 - DNA, 15 bp, Homo sapiens
tccatctgggctaca

SEQ ID NO: 1363521 - DNA, 15 bp, Homo sapiens
ctccatctgggctac

SEQ ID NO: 1363522 - DNA, 15 bp, Homo sapiens
actccatctgggcta

SEQ ID NO: 1363523 - DNA, 15 bp, Homo sapiens
cactccatctgggct

SEQ ID NO: 1363524 - DNA, 15 bp, Homo sapiens
gcactccatctgggc

SEQ ID NO: 1363525 - DNA, 15 bp, Homo sapiens
agcactccatctggg

SEQ ID NO: 1363526 - DNA, 15 bp, Homo sapiens
cagcactccatctgg

SEQ ID NO: 1363527 - DNA, 15 bp, Homo sapiens
tcagcactccatctg

SEQ ID NO: 1363528 - DNA, 15 bp, Homo sapiens
ctcagcactccatct

SEQ ID NO: 1363529 - DNA, 15 bp, Homo sapiens
tctcagcactccatc

SEQ ID NO: 1363530 - DNA, 15 bp, Homo sapiens
ttctcagcactccat

SEQ ID NO: 1363531 - DNA, 15 bp, Homo sapiens
tttctcagcactcca

SEQ ID NO: 1363532 - DNA, 15 bp, Homo sapiens
atttctcagcactcc

SEQ ID NO: 1363533 - DNA, 15 bp, Homo sapiens
catttctcagcactc

SEQ ID NO: 1363534 - DNA, 15 bp, Homo sapiens
tcatttctcagcact

SEQ ID NO: 1363535 - DNA, 15 bp, Homo sapiens
ttcatttctcagcac

SEQ ID NO: 1363536 - DNA, 15 bp, Homo sapiens
tttcatttctcagca

SEQ ID NO: 1363537 - DNA, 15 bp, Homo sapiens
ttttcatttctcagc

SEQ ID NO: 1363538 - DNA, 15 bp, Homo sapiens
cttttcatttctcag

SEQ ID NO: 1363539 - DNA, 15 bp, Homo sapiens
tcttttcatttctca

SEQ ID NO: 1363540 - DNA, 15 bp, Homo sapiens
ctcttttcatttctc

SEQ ID NO: 1363541 - DNA, 15 bp, Homo sapiens
tctcttttcatttct

SEQ ID NO: 1363542 - DNA, 15 bp, Homo sapiens
ttctcttttcatttc

SEQ ID NO: 1363543 - DNA, 15 bp, Homo sapiens
tttctcttttcattt

SEQ ID NO: 1363544 - DNA, 15 bp, Homo sapiens
ctttctcttttcatt

SEQ ID NO: 1363545 - DNA, 15 bp, Homo sapiens
gctttctcttttcat

SEQ ID NO: 1363546 - DNA, 15 bp, Homo sapiens
agctttctcttttca

SEQ ID NO: 1363547 - DNA, 15 bp, Homo sapiens
aagctttctcttttc

SEQ ID NO: 1363548 - DNA, 15 bp, Homo sapiens
aaagctttctctttt

SEQ ID NO: 1363549 - DNA, 15 bp, Homo sapiens
aaaagctttctcttt

SEQ ID NO: 1363550 - DNA, 15 bp, Homo sapiens
taaaagctttctctt

SEQ ID NO: 1363551 - DNA, 15 bp, Homo sapiens
cctaaaagctttctc

SEQ ID NO: 1363552 - DNA, 15 bp, Homo sapiens
ccctaaaagctttct

SEQ ID NO: 1363553 - DNA, 15 bp, Homo sapiens
accctaaaagctttc

SEQ ID NO: 1363554 - DNA, 15 bp, Homo sapiens
taccctaaaagcttt

SEQ ID NO: 1363555 - DNA, 15 bp, Homo sapiens
ttaccctaaaagctt

SEQ ID NO: 1363556 - DNA, 15 bp, Homo sapiens
gttaccctaaaagct

SEQ ID NO: 1363557 - DNA, 15 bp, Homo sapiens
agttaccctaaaagc

SEQ ID NO: 1363558 - DNA, 15 bp, Homo sapiens
cagttaccctaaaag

SEQ ID NO: 1363559 - DNA, 15 bp, Homo sapiens
ccagttaccctaaaa

SEQ ID NO: 1363560 - DNA, 15 bp, Homo sapiens
accagttaccctaaa

SEQ ID NO: 1363561 - DNA, 15 bp, Homo sapiens
taccagttaccctaa

SEQ ID NO: 1363562 - DNA, 15 bp, Homo sapiens
ttaccagttacccta

SEQ ID NO: 1363563 - DNA, 15 bp, Homo sapiens
cttaccagttaccct

SEQ ID NO: 1363564 - DNA, 15 bp, Homo sapiens
tcttaccagttaccc

SEQ ID NO: 1363565 - DNA, 15 bp, Homo sapiens
ttcttaccagttacc

SEQ ID NO: 1363566 - DNA, 15 bp, Homo sapiens
attcttaccagttac

SEQ ID NO: 1363567 - DNA, 15 bp, Homo sapiens
aattcttaccagtta

SEQ ID NO: 1363568 - DNA, 15 bp, Homo sapiens
taattcttaccagtt

SEQ ID NO: 1363569 - DNA, 15 bp, Homo sapiens
ttaattcttaccagt

SEQ ID NO: 1363570 - DNA, 15 bp, Homo sapiens
tttaattcttaccag

SEQ ID NO: 1363571 - DNA, 15 bp, Homo sapiens
gtttaattcttacca

SEQ ID NO: 1363572 - DNA, 15 bp, Homo sapiens
tgtttaattcttacc

SEQ ID NO: 1363573 - DNA, 15 bp, Homo sapiens
gtgtttaattcttac

SEQ ID NO: 1363574 - DNA, 15 bp, Homo sapiens
ggtgtttaattctta

SEQ ID NO: 1363575 - DNA, 15 bp, Homo sapiens
gggtgtttaattctt

SEQ ID NO: 1363576 - DNA, 15 bp, Homo sapiens
tgggtgtttaattct

SEQ ID NO: 1363577 - DNA, 15 bp, Homo sapiens
gtgggtgtttaattc

SEQ ID NO: 1363578 - DNA, 15 bp, Homo sapiens
tgtgggtgtttaatt

SEQ ID NO: 1363579 - DNA, 15 bp, Homo sapiens
ttgtgggtgtttaat

SEQ ID NO: 1363580 - DNA, 15 bp, Homo sapiens
cttgtgggtgtttaa

SEQ ID NO: 1363581 - DNA, 15 bp, Homo sapiens
ccttgtgggtgttta

SEQ ID NO: 1363582 - DNA, 15 bp, Homo sapiens
tccttgtgggtgttt

SEQ ID NO: 1363583 - DNA, 15 bp, Homo sapiens
gtccttgtgggtgtt

SEQ ID NO: 1363584 - DNA, 15 bp, Homo sapiens
tgtccttgtgggtgt

SEQ ID NO: 1363585 - DNA, 15 bp, Homo sapiens
ctgtccttgtgggtg

SEQ ID NO: 1363586 - DNA, 15 bp, Homo sapiens
actgtccttgtgggt

SEQ ID NO: 1363587 - DNA, 15 bp, Homo sapiens
tactgtccttgtggg

SEQ ID NO: 1363588 - DNA, 15 bp, Homo sapiens
ttactgtccttgtgg

SEQ ID NO: 1363589 - DNA, 15 bp, Homo sapiens
tttactgtccttgtg

SEQ ID NO: 1363590 - DNA, 15 bp, Homo sapiens
ctttactgtccttgt

SEQ ID NO: 1363591 - DNA, 15 bp, Homo sapiens
tctttactgtccttg

SEQ ID NO: 1363592 - DNA, 15 bp, Homo sapiens
atctttactgtcctt

SEQ ID NO: 1363593 - DNA, 15 bp, Homo sapiens
gatctttactgtcct

SEQ ID NO: 1363594 - DNA, 15 bp, Homo sapiens
ggatctttactgtcc

SEQ ID NO: 1363595 - DNA, 15 bp, Homo sapiens
gggatctttactgtc

SEQ ID NO: 1363596 - DNA, 15 bp, Homo sapiens
ggggatctttactgt

SEQ ID NO: 1363597 - DNA, 15 bp, Homo sapiens
gggggatctttactg

SEQ ID NO: 1363598 - DNA, 15 bp, Homo sapiens
ggggggatctttact

SEQ ID NO: 1363599 - DNA, 15 bp, Homo sapiens
aggggggatctttac

SEQ ID NO: 1363600 - DNA, 15 bp, Homo sapiens
aaggggggatcttta

SEQ ID NO: 1363601 - DNA, 15 bp, Homo sapiens
caaggggggatcttt

SEQ ID NO: 1363602 - DNA, 15 bp, Homo sapiens
ccaaggggggatctt

SEQ ID NO: 1363603 - DNA, 15 bp, Homo sapiens
accaaggggggatct

SEQ ID NO: 1363604 - DNA, 15 bp, Homo sapiens
aaccaaggggggatc

SEQ ID NO: 1363605 - DNA, 15 bp, Homo sapiens
caaccaaggggggat

SEQ ID NO: 1363606 - DNA, 15 bp, Homo sapiens
tcaaccaagggggga

SEQ ID NO: 1363607 - DNA, 15 bp, Homo sapiens
atcaaccaagggggg

SEQ ID NO: 1363608 - DNA, 15 bp, Homo sapiens
aatcaaccaaggggg

SEQ ID NO: 1363609 - DNA, 15 bp, Homo sapiens
aaatcaaccaagggg

SEQ ID NO: 1363610 - DNA, 15 bp, Homo sapiens
caaatcaaccaaggg

SEQ ID NO: 1363611 - DNA, 15 bp, Homo sapiens
gcaaatcaaccaagg

SEQ ID NO: 1363612 - DNA, 15 bp, Homo sapiens
ggcaaatcaaccaag

SEQ ID NO: 1363613 - DNA, 15 bp, Homo sapiens
aggcaaatcaaccaa

SEQ ID NO: 1363614 - DNA, 15 bp, Homo sapiens
aaggcaaatcaacca

SEQ ID NO: 1363615 - DNA, 15 bp, Homo sapiens
aaaggcaaatcaacc

SEQ ID NO: 1363616 - DNA, 15 bp, Homo sapiens
caaaggcaaatcaac

SEQ ID NO: 1363617 - DNA, 15 bp, Homo sapiens
tcaaaggcaaatcaa

SEQ ID NO: 1363618 - DNA, 15 bp, Homo sapiens
ctcaaaggcaaatca

SEQ ID NO: 1363619 - DNA, 15 bp, Homo sapiens
gctcaaaggcaaatc

SEQ ID NO: 1363620 - DNA, 15 bp, Homo sapiens
agctcaaaggcaaat

SEQ ID NO: 1363621 - DNA, 15 bp, Homo sapiens
aagctcaaaggcaaa

SEQ ID NO: 1363622 - DNA, 15 bp, Homo sapiens
gaaagctcaaaggca

SEQ ID NO: 1363623 - DNA, 15 bp, Homo sapiens
ggaaagctcaaaggc

SEQ ID NO: 1363624 - DNA, 15 bp, Homo sapiens
gggaaagctcaaagg

SEQ ID NO: 1363625 - DNA, 15 bp, Homo sapiens
tgggaaagctcaaag

SEQ ID NO: 1363626 - DNA, 15 bp, Homo sapiens
ttgggaaagctcaaa

SEQ ID NO: 1363627 - DNA, 15 bp, Homo sapiens
attgggaaagctcaa

SEQ ID NO: 1363628 - DNA, 15 bp, Homo sapiens
gattgggaaagctca

SEQ ID NO: 1363629 - DNA, 15 bp, Homo sapiens
agattgggaaagctc

SEQ ID NO: 1363630 - DNA, 15 bp, Homo sapiens
aagattgggaaagct

SEQ ID NO: 1363631 - DNA, 15 bp, Homo sapiens
aaagattgggaaagc

SEQ ID NO: 1363632 - DNA, 15 bp, Homo sapiens
aaaagattgggaaag

SEQ ID NO: 1363633 - DNA, 15 bp, Homo sapiens
gaaaagattgggaaa

SEQ ID NO: 1363634 - DNA, 15 bp, Homo sapiens
agaaaagattgggaa

SEQ ID NO: 1363635 - DNA, 15 bp, Homo sapiens
tagaaaagattggga

SEQ ID NO: 1363636 - DNA, 15 bp, Homo sapiens
ttagaaaagattggg

SEQ ID NO: 1363637 - DNA, 15 bp, Homo sapiens
tttagaaaagattgg

SEQ ID NO: 1363638 - DNA, 15 bp, Homo sapiens
ctttagaaaagattg

SEQ ID NO: 1363639 - DNA, 15 bp, Homo sapiens
tctttagaaaagatt

SEQ ID NO: 1363640 - DNA, 15 bp, Homo sapiens
ttctttagaaaagat

SEQ ID NO: 1363641 - DNA, 15 bp, Homo sapiens
attctttagaaaaga

SEQ ID NO: 1363642 - DNA, 15 bp, Homo sapiens
tattctttagaaaag

SEQ ID NO: 1363643 - DNA, 15 bp, Homo sapiens
atattctttagaaaa

SEQ ID NO: 1363644 - DNA, 15 bp, Homo sapiens
aatattctttagaaa

SEQ ID NO: 1363645 - DNA, 15 bp, Homo sapiens
gaatattctttagaa

SEQ ID NO: 1363646 - DNA, 15 bp, Homo sapiens
agaatattctttaga

SEQ ID NO: 1363647 - DNA, 15 bp, Homo sapiens
gagaatattctttag

SEQ ID NO: 1363648 - DNA, 15 bp, Homo sapiens
ggagaatattcttta

SEQ ID NO: 1363649 - DNA, 15 bp, Homo sapiens
tggagaatattcttt

SEQ ID NO: 1363650 - DNA, 15 bp, Homo sapiens
ttggagaatattctt

SEQ ID NO: 1363651 - DNA, 15 bp, Homo sapiens
tttggagaatattct

SEQ ID NO: 1363652 - DNA, 15 bp, Homo sapiens
ttttggagaatattc

SEQ ID NO: 1363653 - DNA, 15 bp, Homo sapiens
tttttggagaatatt

SEQ ID NO: 1363654 - DNA, 15 bp, Homo sapiens
gtttttggagaatat

SEQ ID NO: 1363655 - DNA, 15 bp, Homo sapiens
cgtttttggagaata

SEQ ID NO: 1363656 - DNA, 15 bp, Homo sapiens
tcgtttttggagaat

SEQ ID NO: 1363657 - DNA, 15 bp, Homo sapiens
gtcgtttttggagaa

SEQ ID NO: 1363658 - DNA, 15 bp, Homo sapiens
tgtcgtttttggaga

SEQ ID NO: 1363659 - DNA, 15 bp, Homo sapiens
ttgtcgtttttggag

SEQ ID NO: 1363660 - DNA, 15 bp, Homo sapiens
tttgtcgtttttgga

SEQ ID NO: 1363661 - DNA, 15 bp, Homo sapiens
ttttgtcgtttttgg

SEQ ID NO: 1363662 - DNA, 15 bp, Homo sapiens
gttttgtcgtttttg

SEQ ID NO: 1363663 - DNA, 15 bp, Homo sapiens
tgttttgtcgttttt

SEQ ID NO: 1363664 - DNA, 15 bp, Homo sapiens
ttgttttgtcgtttt

SEQ ID NO: 1363665 - DNA, 15 bp, Homo sapiens
tttgttttgtcgttt

SEQ ID NO: 1363666 - DNA, 15 bp, Homo sapiens
ttttgttttgtcgtt

SEQ ID NO: 1363667 - DNA, 15 bp, Homo sapiens
gttttgttttgtcgt

SEQ ID NO: 1363668 - DNA, 15 bp, Homo sapiens
cgttttgttttgtcg

SEQ ID NO: 1363669 - DNA, 15 bp, Homo sapiens
ccgttttgttttgtc

SEQ ID NO: 1363670 - DNA, 15 bp, Homo sapiens
tccgttttgttttgt

SEQ ID NO: 1363671 - DNA, 15 bp, Homo sapiens
ctccgttttgttttg

SEQ ID NO: 1363672 - DNA, 15 bp, Homo sapiens
tctccgttttgtttt

SEQ ID NO: 1363673 - DNA, 15 bp, Homo sapiens
ctctccgttttgttt

SEQ ID NO: 1363674 - DNA, 15 bp, Homo sapiens
tctctccgttttgtt

SEQ ID NO: 1363675 - DNA, 15 bp, Homo sapiens
ttctctccgttttgt

SEQ ID NO: 1363676 - DNA, 15 bp, Homo sapiens
tttctctccgttttg

SEQ ID NO: 1363677 - DNA, 15 bp, Homo sapiens
ttttctctccgtttt

SEQ ID NO: 1363678 - DNA, 15 bp, Homo sapiens
attttctctccgttt

SEQ ID NO: 1363679 - DNA, 15 bp, Homo sapiens
cattttctctccgtt

SEQ ID NO: 1363680 - DNA, 15 bp, Homo sapiens
gcattttctctccgt

SEQ ID NO: 1363681 - DNA, 15 bp, Homo sapiens
tgcattttctctccg

SEQ ID NO: 1363682 - DNA, 15 bp, Homo sapiens
ttgcattttctctcc

SEQ ID NO: 1363683 - DNA, 15 bp, Homo sapiens
cttgcattttctctc

SEQ ID NO: 1363684 - DNA, 15 bp, Homo sapiens
ccttgcattttctct

SEQ ID NO: 1363685 - DNA, 15 bp, Homo sapiens
tccttgcattttctc

SEQ ID NO: 1363686 - DNA, 15 bp, Homo sapiens
ttccttgcattttct

SEQ ID NO: 1363687 - DNA, 15 bp, Homo sapiens
tttccttgcattttc

SEQ ID NO: 1363688 - DNA, 15 bp, Homo sapiens
ctttccttgcatttt

SEQ ID NO: 1363689 - DNA, 15 bp, Homo sapiens
tctttccttgcattt

SEQ ID NO: 1363690 - DNA, 15 bp, Homo sapiens
ctctttccttgcatt

SEQ ID NO: 1363691 - DNA, 15 bp, Homo sapiens
actctttccttgcat

SEQ ID NO: 1363692 - DNA, 15 bp, Homo sapiens
aactctttccttgca

SEQ ID NO: 1363693 - DNA, 15 bp, Homo sapiens
taactctttccttgc

SEQ ID NO: 1363694 - DNA, 15 bp, Homo sapiens
ctaactctttccttg

SEQ ID NO: 1363695 - DNA, 15 bp, Homo sapiens
gctaactctttcctt

SEQ ID NO: 1363696 - DNA, 15 bp, Homo sapiens
ggctaactctttcct

SEQ ID NO: 1363697 - DNA, 15 bp, Homo sapiens
gggctaactctttcc

SEQ ID NO: 1363698 - DNA, 15 bp, Homo sapiens
agggctaactctttc

SEQ ID NO: 1363699 - DNA, 15 bp, Homo sapiens
cagggctaactcttt

SEQ ID NO: 1363700 - DNA, 15 bp, Homo sapiens
acagggctaactctt

SEQ ID NO: 1363701 - DNA, 15 bp, Homo sapiens
tacagggctaactct

SEQ ID NO: 1363702 - DNA, 15 bp, Homo sapiens
ctacagggctaactc

SEQ ID NO: 1363703 - DNA, 15 bp, Homo sapiens
tctacagggctaact

SEQ ID NO: 1363704 - DNA, 15 bp, Homo sapiens
ttctacagggctaac

SEQ ID NO: 1363705 - DNA, 15 bp, Homo sapiens
tttctacagggctaa

SEQ ID NO: 1363706 - DNA, 15 bp, Homo sapiens
ctttctacagggcta

SEQ ID NO: 1363707 - DNA, 15 bp, Homo sapiens
cctttctacagggct

SEQ ID NO: 1363708 - DNA, 15 bp, Homo sapiens
ccctttctacagggc

SEQ ID NO: 1363709 - DNA, 15 bp, Homo sapiens
gccctttctacaggg

SEQ ID NO: 1363710 - DNA, 15 bp, Homo sapiens
cgccctttctacagg

SEQ ID NO: 1363711 - DNA, 15 bp, Homo sapiens
tcgccctttctacag

SEQ ID NO: 1363712 - DNA, 15 bp, Homo sapiens
gtcgccctttctaca

SEQ ID NO: 1363713 - DNA, 15 bp, Homo sapiens
tgtcgccctttctac

SEQ ID NO: 1363714 - DNA, 15 bp, Homo sapiens
ctgtcgccctttcta

SEQ ID NO: 1363715 - DNA, 15 bp, Homo sapiens
actgtcgccctttct

SEQ ID NO: 1363716 - DNA, 15 bp, Homo sapiens
cactgtcgccctttc

SEQ ID NO: 1363717 - DNA, 15 bp, Homo sapiens
gcactgtcgcccttt

SEQ ID NO: 1363718 - DNA, 15 bp, Homo sapiens
agcactgtcgccctt

SEQ ID NO: 1363719 - DNA, 15 bp, Homo sapiens
cagcactgtcgccct

SEQ ID NO: 1363720 - DNA, 15 bp, Homo sapiens
acagcactgtcgccc

SEQ ID NO: 1363721 - DNA, 15 bp, Homo sapiens
cacagcactgtcgcc

SEQ ID NO: 1363722 - DNA, 15 bp, Homo sapiens
ccacagcactgtcgc

SEQ ID NO: 1363723 - DNA, 15 bp, Homo sapiens
accacagcactgtcg

SEQ ID NO: 1363724 - DNA, 15 bp, Homo sapiens
aaccacagcactgtc

SEQ ID NO: 1363725 - DNA, 15 bp, Homo sapiens
aaaccacagcactgt

SEQ ID NO: 1363726 - DNA, 15 bp, Homo sapiens
taaaccacagcactg

SEQ ID NO: 1363727 - DNA, 15 bp, Homo sapiens
gtaaaccacagcact

SEQ ID NO: 1363728 - DNA, 15 bp, Homo sapiens
agtaaaccacagcac

SEQ ID NO: 1363729 - DNA, 15 bp, Homo sapiens
cagtaaaccacagca

SEQ ID NO: 1363730 - DNA, 15 bp, Homo sapiens
ccagtaaaccacagc

SEQ ID NO: 1363731 - DNA, 15 bp, Homo sapiens
accagtaaaccacag

SEQ ID NO: 1363732 - DNA, 15 bp, Homo sapiens
gaccagtaaaccaca

SEQ ID NO: 1363733 - DNA, 15 bp, Homo sapiens
agaccagtaaaccac

SEQ ID NO: 1363734 - DNA, 15 bp, Homo sapiens
cagaccagtaaacca

SEQ ID NO: 1363735 - DNA, 15 bp, Homo sapiens
tcagaccagtaaacc

SEQ ID NO: 1363736 - DNA, 15 bp, Homo sapiens
ttcagaccagtaaac

SEQ ID NO: 1363737 - DNA, 15 bp, Homo sapiens
cttcagaccagtaaa

SEQ ID NO: 1363738 - DNA, 15 bp, Homo sapiens
tcttcagaccagtaa

SEQ ID NO: 1363739 - DNA, 15 bp, Homo sapiens
ctcttcagaccagta

SEQ ID NO: 1363740 - DNA, 15 bp, Homo sapiens
actcttcagaccagt

SEQ ID NO: 1363741 - DNA, 15 bp, Homo sapiens
cactcttcagaccag

SEQ ID NO: 1363742 - DNA, 15 bp, Homo sapiens
tcactcttcagacca

SEQ ID NO: 1363743 - DNA, 15 bp, Homo sapiens
ctcactcttcagacc

SEQ ID NO: 1363744 - DNA, 15 bp, Homo sapiens
cctcactcttcagac

SEQ ID NO: 1363745 - DNA, 15 bp, Homo sapiens
acctcactcttcaga

SEQ ID NO: 1363746 - DNA, 15 bp, Homo sapiens
aacctcactcttcag

SEQ ID NO: 1363747 - DNA, 15 bp, Homo sapiens
aaacctcactcttca

SEQ ID NO: 1363748 - DNA, 15 bp, Homo sapiens
aaaacctcactcttc

SEQ ID NO: 1363749 - DNA, 15 bp, Homo sapiens
gaaaacctcactctt

SEQ ID NO: 1363750 - DNA, 15 bp, Homo sapiens
tgaaaacctcactct

SEQ ID NO: 1363751 - DNA, 15 bp, Homo sapiens
ctgaaaacctcactc

SEQ ID NO: 1363752 - DNA, 15 bp, Homo sapiens
tctgaaaacctcact

SEQ ID NO: 1363753 - DNA, 15 bp, Homo sapiens
ctctgaaaacctcac

SEQ ID NO: 1363754 - DNA, 15 bp, Homo sapiens
cctctgaaaacctca

SEQ ID NO: 1363755 - DNA, 15 bp, Homo sapiens
gcctctgaaaacctc

SEQ ID NO: 1363756 - DNA, 15 bp, Homo sapiens
ggcctctgaaaacct

SEQ ID NO: 1363757 - DNA, 15 bp, Homo sapiens
tggcctctgaaaacc

SEQ ID NO: 1363758 - DNA, 15 bp, Homo sapiens
ctggcctctgaaaac

SEQ ID NO: 1363759 - DNA, 15 bp, Homo sapiens
cctggcctctgaaaa

SEQ ID NO: 1363760 - DNA, 15 bp, Homo sapiens
tcctggcctctgaaa

SEQ ID NO: 1363761 - DNA, 15 bp, Homo sapiens
ttcctggcctctgaa

SEQ ID NO: 1363762 - DNA, 15 bp, Homo sapiens
gttcctggcctctga

SEQ ID NO: 1363763 - DNA, 15 bp, Homo sapiens
cgttcctggcctctg

SEQ ID NO: 1363764 - DNA, 15 bp, Homo sapiens
gcgttcctggcctct

SEQ ID NO: 1363765 - DNA, 15 bp, Homo sapiens
ggcgttcctggcctc

SEQ ID NO: 1363766 - DNA, 15 bp, Homo sapiens
gggcgttcctggcct

SEQ ID NO: 1363767 - DNA, 15 bp, Homo sapiens
tgggcgttcctggcc

SEQ ID NO: 1363768 - DNA, 15 bp, Homo sapiens
ctgggcgttcctggc

SEQ ID NO: 1363769 - DNA, 15 bp, Homo sapiens
cctgggcgttcctgg

SEQ ID NO: 1363770 - DNA, 15 bp, Homo sapiens
acctgggcgttcctg

SEQ ID NO: 1363771 - DNA, 15 bp, Homo sapiens
gacctgggcgttcct

SEQ ID NO: 1363772 - DNA, 15 bp, Homo sapiens
ggacctgggcgttcc

SEQ ID NO: 1363773 - DNA, 15 bp, Homo sapiens
aggacctgggcgttc

SEQ ID NO: 1363774 - DNA, 15 bp, Homo sapiens
caggacctgggcgtt

SEQ ID NO: 1363775 - DNA, 15 bp, Homo sapiens
ccaggacctgggcgt

SEQ ID NO: 1363776 - DNA, 15 bp, Homo sapiens
cccaggacctgggcg

SEQ ID NO: 1363777 - DNA, 15 bp, Homo sapiens
gcccaggacctgggc

SEQ ID NO: 1363778 - DNA, 15 bp, Homo sapiens
agcccaggacctggg

SEQ ID NO: 1363779 - DNA, 15 bp, Homo sapiens
gagcccaggacctgg

SEQ ID NO: 1363780 - DNA, 15 bp, Homo sapiens
agagcccaggacctg

SEQ ID NO: 1363781 - DNA, 15 bp, Homo sapiens
cagagcccaggacct

SEQ ID NO: 1363782 - DNA, 15 bp, Homo sapiens
ccagagcccaggacc

SEQ ID NO: 1363783 - DNA, 15 bp, Homo sapiens
cccagagcccaggac

SEQ ID NO: 1363784 - DNA, 15 bp, Homo sapiens
gcccagagcccagga

SEQ ID NO: 1363785 - DNA, 15 bp, Homo sapiens
tgcccagagcccagg

SEQ ID NO: 1363786 - DNA, 15 bp, Homo sapiens
ctgcccagagcccag

SEQ ID NO: 1363787 - DNA, 15 bp, Homo sapiens
gctgcccagagccca

SEQ ID NO: 1363788 - DNA, 15 bp, Homo sapiens
tgctgcccagagccc

SEQ ID NO: 1363789 - DNA, 15 bp, Homo sapiens
gtgctgcccagagcc

SEQ ID NO: 1363790 - DNA, 15 bp, Homo sapiens
ggtgctgcccagagc

SEQ ID NO: 1363791 - DNA, 15 bp, Homo sapiens
tggtgctgcccagag

SEQ ID NO: 1363792 - DNA, 15 bp, Homo sapiens
ctggtgctgcccaga

SEQ ID NO: 1363793 - DNA, 15 bp, Homo sapiens
gctggtgctgcccag

SEQ ID NO: 1363794 - DNA, 15 bp, Homo sapiens
tgctggtgctgccca

SEQ ID NO: 1363795 - DNA, 15 bp, Homo sapiens
ctgctggtgctgccc

SEQ ID NO: 1363796 - DNA, 15 bp, Homo sapiens
tctgctggtgctgcc

SEQ ID NO: 1363797 - DNA, 15 bp, Homo sapiens
ctctgctggtgctgc

SEQ ID NO: 1363798 - DNA, 15 bp, Homo sapiens
tctctgctggtgctg

SEQ ID NO: 1363799 - DNA, 15 bp, Homo sapiens
ttctctgctggtgct

SEQ ID NO: 1363800 - DNA, 15 bp, Homo sapiens
cttctctgctggtgc

SEQ ID NO: 1363801 - DNA, 15 bp, Homo sapiens
ccttctctgctggtg

SEQ ID NO: 1363802 - DNA, 15 bp, Homo sapiens
gccttctctgctggt

SEQ ID NO: 1363803 - DNA, 15 bp, Homo sapiens
ggccttctctgctgg

SEQ ID NO: 1363804 - DNA, 15 bp, Homo sapiens
gggccttctctgctg

SEQ ID NO: 1363805 - DNA, 15 bp, Homo sapiens
agggccttctctgct

SEQ ID NO: 1363806 - DNA, 15 bp, Homo sapiens
tagggccttctctgc

SEQ ID NO: 1363807 - DNA, 15 bp, Homo sapiens
gtagggccttctctg

SEQ ID NO: 1363808 - DNA, 15 bp, Homo sapiens
ggtagggccttctct

SEQ ID NO: 1363809 - DNA, 15 bp, Homo sapiens
aggtagggccttctc

SEQ ID NO: 1363810 - DNA, 15 bp, Homo sapiens
caggtagggccttct

SEQ ID NO: 1363811 - DNA, 15 bp, Homo sapiens
gcaggtagggccttc

SEQ ID NO: 1363812 - DNA, 15 bp, Homo sapiens
ggcaggtagggcctt

SEQ ID NO: 1363813 - DNA, 15 bp, Homo sapiens
tggcaggtagggcct

SEQ ID NO: 1363814 - DNA, 15 bp, Homo sapiens
gtggcaggtagggcc

SEQ ID NO: 1363815 - DNA, 15 bp, Homo sapiens
tgtggcaggtagggc

SEQ ID NO: 1363816 - DNA, 15 bp, Homo sapiens
gtgtggcaggtaggg

SEQ ID NO: 1363817 - DNA, 15 bp, Homo sapiens
agtgtggcaggtagg

SEQ ID NO: 1363818 - DNA, 15 bp, Homo sapiens
aagtgtggcaggtag

SEQ ID NO: 1363819 - DNA, 15 bp, Homo sapiens
gaagtgtggcaggta

SEQ ID NO: 1363820 - DNA, 15 bp, Homo sapiens
agaagtgtggcaggt

SEQ ID NO: 1363821 - DNA, 15 bp, Homo sapiens
tagaagtgtggcagg

SEQ ID NO: 1363822 - DNA, 15 bp, Homo sapiens
ttagaagtgtggcag

SEQ ID NO: 1363823 - DNA, 15 bp, Homo sapiens
cttagaagtgtggca

SEQ ID NO: 1363824 - DNA, 15 bp, Homo sapiens
gcttagaagtgtggc

SEQ ID NO: 1363825 - DNA, 15 bp, Homo sapiens
tgcttagaagtgtgg

SEQ ID NO: 1363826 - DNA, 15 bp, Homo sapiens
ctgcttagaagtgtg

SEQ ID NO: 1363827 - DNA, 15 bp, Homo sapiens
tctgcttagaagtgt

SEQ ID NO: 1363828 - DNA, 15 bp, Homo sapiens
gtctgcttagaagtg

SEQ ID NO: 1363829 - DNA, 15 bp, Homo sapiens
tgtctgcttagaagt

SEQ ID NO: 1363830 - DNA, 15 bp, Homo sapiens
ttgtctgcttagaag

SEQ ID NO: 1363831 - DNA, 15 bp, Homo sapiens
tttgtctgcttagaa

SEQ ID NO: 1363832 - DNA, 15 bp, Homo sapiens
atttgtctgcttaga

SEQ ID NO: 1363833 - DNA, 15 bp, Homo sapiens
aatttgtctgcttag

SEQ ID NO: 1363834 - DNA, 15 bp, Homo sapiens
caatttgtctgctta

SEQ ID NO: 1363835 - DNA, 15 bp, Homo sapiens
ccaatttgtctgctt

SEQ ID NO: 1363836 - DNA, 15 bp, Homo sapiens
accaatttgtctgct

SEQ ID NO: 1363837 - DNA, 15 bp, Homo sapiens
gaccaatttgtctgc

SEQ ID NO: 1363838 - DNA, 15 bp, Homo sapiens
agaccaatttgtctg

SEQ ID NO: 1363839 - DNA, 15 bp, Homo sapiens
aagaccaatttgtct

SEQ ID NO: 1363840 - DNA, 15 bp, Homo sapiens
gaagaccaatttgtc

SEQ ID NO: 1363841 - DNA, 15 bp, Homo sapiens
agaagaccaatttgt

SEQ ID NO: 1363842 - DNA, 15 bp, Homo sapiens
cagaagaccaatttg

SEQ ID NO: 1363843 - DNA, 15 bp, Homo sapiens
tcagaagaccaattt

SEQ ID NO: 1363844 - DNA, 15 bp, Homo sapiens
ctcagaagaccaatt

SEQ ID NO: 1363845 - DNA, 15 bp, Homo sapiens
cctcagaagaccaat

SEQ ID NO: 1363846 - DNA, 15 bp, Homo sapiens
tcctcagaagaccaa

SEQ ID NO: 1363847 - DNA, 15 bp, Homo sapiens
atcctcagaagacca

SEQ ID NO: 1363848 - DNA, 15 bp, Homo sapiens
aatcctcagaagacc

SEQ ID NO: 1363849 - DNA, 15 bp, Homo sapiens
aaatcctcagaagac

SEQ ID NO: 1363850 - DNA, 15 bp, Homo sapiens
gaaatcctcagaaga

SEQ ID NO: 1363851 - DNA, 15 bp, Homo sapiens
ggaaatcctcagaag

SEQ ID NO: 1363852 - DNA, 15 bp, Homo sapiens
gggaaatcctcagaa

SEQ ID NO: 1363853 - DNA, 15 bp, Homo sapiens
ggggaaatcctcaga

SEQ ID NO: 1363854 - DNA, 15 bp, Homo sapiens
tggggaaatcctcag

SEQ ID NO: 1363855 - DNA, 15 bp, Homo sapiens
ttggggaaatcctca

SEQ ID NO: 1363856 - DNA, 15 bp, Homo sapiens
tttggggaaatcctc

SEQ ID NO: 1363857 - DNA, 15 bp, Homo sapiens
ctttggggaaatcct

SEQ ID NO: 1363858 - DNA, 15 bp, Homo sapiens
gctttggggaaatcc

SEQ ID NO: 1363859 - DNA, 15 bp, Homo sapiens
ggctttggggaaatc

SEQ ID NO: 1363860 - DNA, 15 bp, Homo sapiens
aggctttggggaaat

SEQ ID NO: 1363861 - DNA, 15 bp, Homo sapiens
caggctttggggaaa

SEQ ID NO: 1363862 - DNA, 15 bp, Homo sapiens
tcaggctttggggaa

SEQ ID NO: 1363863 - DNA, 15 bp, Homo sapiens
atcaggctttgggga

SEQ ID NO: 1363864 - DNA, 15 bp, Homo sapiens
catcaggctttgggg

SEQ ID NO: 1363865 - DNA, 15 bp, Homo sapiens
gcatcaggctttggg

SEQ ID NO: 1363866 - DNA, 15 bp, Homo sapiens
tgcatcaggctttgg

SEQ ID NO: 1363867 - DNA, 15 bp, Homo sapiens
atgcatcaggctttg

SEQ ID NO: 1363868 - DNA, 15 bp, Homo sapiens
catgcatcaggcttt

SEQ ID NO: 1363869 - DNA, 15 bp, Homo sapiens
tcatgcatcaggctt

SEQ ID NO: 1363870 - DNA, 15 bp, Homo sapiens
ttcatgcatcaggct

SEQ ID NO: 1363871 - DNA, 15 bp, Homo sapiens
tttcatgcatcaggc

SEQ ID NO: 1363872 - DNA, 15 bp, Homo sapiens
ctttcatgcatcagg

SEQ ID NO: 1363873 - DNA, 15 bp, Homo sapiens
actttcatgcatcag

SEQ ID NO: 1363874 - DNA, 15 bp, Homo sapiens
aactttcatgcatca

SEQ ID NO: 1363875 - DNA, 15 bp, Homo sapiens
taactttcatgcatc

SEQ ID NO: 1363876 - DNA, 15 bp, Homo sapiens
ataactttcatgcat

SEQ ID NO: 1363877 - DNA, 15 bp, Homo sapiens
aataactttcatgca

SEQ ID NO: 1363878 - DNA, 15 bp, Homo sapiens
gaataactttcatgc

SEQ ID NO: 1363879 - DNA, 15 bp, Homo sapiens
tgaataactttcatg

SEQ ID NO: 1363880 - DNA, 15 bp, Homo sapiens
atgaataactttcat

SEQ ID NO: 1363881 - DNA, 15 bp, Homo sapiens
tatgaataactttca

SEQ ID NO: 1363882 - DNA, 15 bp, Homo sapiens
atatgaataactttc

SEQ ID NO: 1363883 - DNA, 15 bp, Homo sapiens
tatatgaataacttt

SEQ ID NO: 1363884 - DNA, 15 bp, Homo sapiens
ttatatgaataactt

SEQ ID NO: 1363885 - DNA, 15 bp, Homo sapiens
tttatatgaataact

SEQ ID NO: 1363886 - DNA, 15 bp, Homo sapiens
ttttatatgaataac

SEQ ID NO: 1363887 - DNA, 15 bp, Homo sapiens
cttttatatgaataa

SEQ ID NO: 1363888 - DNA, 15 bp, Homo sapiens
acttttatatgaata

SEQ ID NO: 1363889 - DNA, 15 bp, Homo sapiens
tacttttatatgaat

SEQ ID NO: 1363890 - DNA, 15 bp, Homo sapiens
ctacttttatatgaa

SEQ ID NO: 1363891 - DNA, 15 bp, Homo sapiens
cctacttttatatga

SEQ ID NO: 1363892 - DNA, 15 bp, Homo sapiens
tcctacttttatatg

SEQ ID NO: 1363893 - DNA, 15 bp, Homo sapiens
ctcctacttttatat

SEQ ID NO: 1363894 - DNA, 15 bp, Homo sapiens
gctcctacttttata

SEQ ID NO: 1363895 - DNA, 15 bp, Homo sapiens
agctcctacttttat

SEQ ID NO: 1363896 - DNA, 15 bp, Homo sapiens
aagctcctactttta

SEQ ID NO: 1363897 - DNA, 15 bp, Homo sapiens
gaagctcctactttt

SEQ ID NO: 1363898 - DNA, 15 bp, Homo sapiens
ggaagctcctacttt

SEQ ID NO: 1363899 - DNA, 15 bp, Homo sapiens
gggaagctcctactt

SEQ ID NO: 1363900 - DNA, 15 bp, Homo sapiens
tgggaagctcctact

SEQ ID NO: 1363901 - DNA, 15 bp, Homo sapiens
ctgggaagctcctac

SEQ ID NO: 1363902 - DNA, 15 bp, Homo sapiens
tctgggaagctccta

SEQ ID NO: 1363903 - DNA, 15 bp, Homo sapiens
gtctgggaagctcct

SEQ ID NO: 1363904 - DNA, 15 bp, Homo sapiens
agtctgggaagctcc

SEQ ID NO: 1363905 - DNA, 15 bp, Homo sapiens
aagtctgggaagctc

SEQ ID NO: 1363906 - DNA, 15 bp, Homo sapiens
gaagtctgggaagct

SEQ ID NO: 1363907 - DNA, 15 bp, Homo sapiens
ggaagtctgggaagc

SEQ ID NO: 1363908 - DNA, 15 bp, Homo sapiens
aggaagtctgggaag

SEQ ID NO: 1363909 - DNA, 15 bp, Homo sapiens
caggaagtctgggaa

SEQ ID NO: 1363910 - DNA, 15 bp, Homo sapiens
tcaggaagtctggga

SEQ ID NO: 1363911 - DNA, 15 bp, Homo sapiens
ttcaggaagtctggg

SEQ ID NO: 1363912 - DNA, 15 bp, Homo sapiens
attcaggaagtctgg

SEQ ID NO: 1363913 - DNA, 15 bp, Homo sapiens
aattcaggaagtctg

SEQ ID NO: 1363914 - DNA, 15 bp, Homo sapiens
gaattcaggaagtct

SEQ ID NO: 1363915 - DNA, 15 bp, Homo sapiens
tgaattcaggaagtc

SEQ ID NO: 1363916 - DNA, 15 bp, Homo sapiens
gtgaattcaggaagt

SEQ ID NO: 1363917 - DNA, 15 bp, Homo sapiens
tgtgaattcaggaag

SEQ ID NO: 1363918 - DNA, 15 bp, Homo sapiens
ttgtgaattcaggaa

SEQ ID NO: 1363919 - DNA, 15 bp, Homo sapiens
gttgtgaattcagga

SEQ ID NO: 1363920 - DNA, 15 bp, Homo sapiens
ggttgtgaattcagg

SEQ ID NO: 1363921 - DNA, 15 bp, Homo sapiens
aggttgtgaattcag

SEQ ID NO: 1363922 - DNA, 15 bp, Homo sapiens
gaggttgtgaattca

SEQ ID NO: 1363923 - DNA, 15 bp, Homo sapiens
agaggttgtgaattc

SEQ ID NO: 1363924 - DNA, 15 bp, Homo sapiens
gagaggttgtgaatt

SEQ ID NO: 1363925 - DNA, 15 bp, Homo sapiens
tgagaggttgtgaat

SEQ ID NO: 1363926 - DNA, 15 bp, Homo sapiens
atgagaggttgtgaa

SEQ ID NO: 1363927 - DNA, 15 bp, Homo sapiens
gatgagaggttgtga

SEQ ID NO: 1363928 - DNA, 15 bp, Homo sapiens
tgatgagaggttgtg

SEQ ID NO: 1363929 - DNA, 15 bp, Homo sapiens
ctgatgagaggttgt

SEQ ID NO: 1363930 - DNA, 15 bp, Homo sapiens
tctgatgagaggttg

SEQ ID NO: 1363931 - DNA, 15 bp, Homo sapiens
ttctgatgagaggtt

SEQ ID NO: 1363932 - DNA, 15 bp, Homo sapiens
attctgatgagaggt

SEQ ID NO: 1363933 - DNA, 15 bp, Homo sapiens
aattctgatgagagg

SEQ ID NO: 1363934 - DNA, 15 bp, Homo sapiens
aaattctgatgagag

SEQ ID NO: 1363935 - DNA, 15 bp, Homo sapiens
taaattctgatgaga

SEQ ID NO: 1363936 - DNA, 15 bp, Homo sapiens
gtaaattctgatgag

SEQ ID NO: 1363937 - DNA, 15 bp, Homo sapiens
agtaaattctgatga

SEQ ID NO: 1363938 - DNA, 15 bp, Homo sapiens
aagtaaattctgatg

SEQ ID NO: 1363939 - DNA, 15 bp, Homo sapiens
aaagtaaattctgat

SEQ ID NO: 1363940 - DNA, 15 bp, Homo sapiens
aaaagtaaattctga

SEQ ID NO: 1363941 - DNA, 15 bp, Homo sapiens
taaaagtaaattctg

SEQ ID NO: 1363942 - DNA, 15 bp, Homo sapiens
ataaaagtaaattct

SEQ ID NO: 1363943 - DNA, 15 bp, Homo sapiens
gataaaagtaaattc

SEQ ID NO: 1363944 - DNA, 15 bp, Homo sapiens
tgataaaagtaaatt

SEQ ID NO: 1363945 - DNA, 15 bp, Homo sapiens
gtgataaaagtaaat

SEQ ID NO: 1363946 - DNA, 15 bp, Homo sapiens
tgtgataaaagtaaa

SEQ ID NO: 1363947 - DNA, 15 bp, Homo sapiens
ctgtgataaaagtaa

SEQ ID NO: 1363948 - DNA, 15 bp, Homo sapiens
cctgtgataaaagta

SEQ ID NO: 1363949 - DNA, 15 bp, Homo sapiens
ccctgtgataaaagt

SEQ ID NO: 1363950 - DNA, 15 bp, Homo sapiens
tccctgtgataaaag

SEQ ID NO: 1363951 - DNA, 15 bp, Homo sapiens
ttccctgtgataaaa

SEQ ID NO: 1363952 - DNA, 15 bp, Homo sapiens
tttccctgtgataaa

SEQ ID NO: 1363953 - DNA, 15 bp, Homo sapiens
ttttccctgtgataa

SEQ ID NO: 1363954 - DNA, 15 bp, Homo sapiens
gttttccctgtgata

SEQ ID NO: 1363955 - DNA, 15 bp, Homo sapiens
tgttttccctgtgat

SEQ ID NO: 1363956 - DNA, 15 bp, Homo sapiens
ttgttttccctgtga

SEQ ID NO: 1363957 - DNA, 15 bp, Homo sapiens
cttgttttccctgtg

SEQ ID NO: 1363958 - DNA, 15 bp, Homo sapiens
tcttgttttccctgt

SEQ ID NO: 1363959 - DNA, 15 bp, Homo sapiens
ctcttgttttccctg

SEQ ID NO: 1363960 - DNA, 15 bp, Homo sapiens
tctcttgttttccct

SEQ ID NO: 1363961 - DNA, 15 bp, Homo sapiens
atctcttgttttccc

SEQ ID NO: 1363962 - DNA, 15 bp, Homo sapiens
gatctcttgttttcc

SEQ ID NO: 1363963 - DNA, 15 bp, Homo sapiens
agatctcttgttttc

SEQ ID NO: 1363964 - DNA, 15 bp, Homo sapiens
cagatctcttgtttt

SEQ ID NO: 1363965 - DNA, 15 bp, Homo sapiens
acagatctcttgttt

SEQ ID NO: 1363966 - DNA, 15 bp, Homo sapiens
tacagatctcttgtt

SEQ ID NO: 1363967 - DNA, 15 bp, Homo sapiens
atacagatctcttgt

SEQ ID NO: 1363968 - DNA, 15 bp, Homo sapiens
gatacagatctcttg

SEQ ID NO: 1363969 - DNA, 15 bp, Homo sapiens
tgatacagatctctt

SEQ ID NO: 1363970 - DNA, 15 bp, Homo sapiens
gtgatacagatctct

SEQ ID NO: 1363971 - DNA, 15 bp, Homo sapiens
tgtgatacagatctc

SEQ ID NO: 1363972 - DNA, 15 bp, Homo sapiens
ctgtgatacagatct

SEQ ID NO: 1363973 - DNA, 15 bp, Homo sapiens
actgtgatacagatc

SEQ ID NO: 1363974 - DNA, 15 bp, Homo sapiens
tactgtgatacagat

SEQ ID NO: 1363975 - DNA, 15 bp, Homo sapiens
ttactgtgatacaga

SEQ ID NO: 1363976 - DNA, 15 bp, Homo sapiens
gttactgtgatacag

SEQ ID NO: 1363977 - DNA, 15 bp, Homo sapiens
agttactgtgataca

SEQ ID NO: 1363978 - DNA, 15 bp, Homo sapiens
tagttactgtgatac

SEQ ID NO: 1363979 - DNA, 15 bp, Homo sapiens
atagttactgtgata

SEQ ID NO: 1363980 - DNA, 15 bp, Homo sapiens
gatagttactgtgat

SEQ ID NO: 1363981 - DNA, 15 bp, Homo sapiens
tgatagttactgtga

SEQ ID NO: 1363982 - DNA, 15 bp, Homo sapiens
ctgatagttactgtg

SEQ ID NO: 1363983 - DNA, 15 bp, Homo sapiens
gctgatagttactgt

SEQ ID NO: 1363984 - DNA, 15 bp, Homo sapiens
ggctgatagttactg

SEQ ID NO: 1363985 - DNA, 15 bp, Homo sapiens
aggctgatagttact

SEQ ID NO: 1363986 - DNA, 15 bp, Homo sapiens
aaggctgatagttac

SEQ ID NO: 1363987 - DNA, 15 bp, Homo sapiens
gaaggctgatagtta

SEQ ID NO: 1363988 - DNA, 15 bp, Homo sapiens
agaaggctgatagtt

SEQ ID NO: 1363989 - DNA, 15 bp, Homo sapiens
aagaaggctgatagt

SEQ ID NO: 1363990 - DNA, 15 bp, Homo sapiens
aaagaaggctgatag

SEQ ID NO: 1363991 - DNA, 15 bp, Homo sapiens
aaaagaaggctgata

SEQ ID NO: 1363992 - DNA, 15 bp, Homo sapiens
taaaagaaggctgat

SEQ ID NO: 1363993 - DNA, 15 bp, Homo sapiens
gtaaaagaaggctga

SEQ ID NO: 1363994 - DNA, 15 bp, Homo sapiens
ggtaaaagaaggctg

SEQ ID NO: 1363995 - DNA, 15 bp, Homo sapiens
cggtaaaagaaggct

SEQ ID NO: 1363996 - DNA, 15 bp, Homo sapiens
ccggtaaaagaaggc

SEQ ID NO: 1363997 - DNA, 15 bp, Homo sapiens
cccggtaaaagaagg

SEQ ID NO: 1363998 - DNA, 15 bp, Homo sapiens
ccccggtaaaagaag

SEQ ID NO: 1363999 - DNA, 15 bp, Homo sapiens
tccccggtaaaagaa

SEQ ID NO: 1364000 - DNA, 15 bp, Homo sapiens
atccccggtaaaaga

SEQ ID NO: 1364001 - DNA, 15 bp, Homo sapiens
catccccggtaaaag

SEQ ID NO: 1364002 - DNA, 15 bp, Homo sapiens
ccatccccggtaaaa

SEQ ID NO: 1364003 - DNA, 15 bp, Homo sapiens
tccatccccggtaaa

SEQ ID NO: 1364004 - DNA, 15 bp, Homo sapiens
ttccatccccggtaa

SEQ ID NO: 1364005 - DNA, 15 bp, Homo sapiens
gttccatccccggta

SEQ ID NO: 1364006 - DNA, 15 bp, Homo sapiens
tgttccatccccggt

SEQ ID NO: 1364007 - DNA, 15 bp, Homo sapiens
ctgttccatccccgg

SEQ ID NO: 1364008 - DNA, 15 bp, Homo sapiens
gctgttccatccccg

SEQ ID NO: 1364009 - DNA, 15 bp, Homo sapiens
tgctgttccatcccc

SEQ ID NO: 1364010 - DNA, 15 bp, Homo sapiens
ttgctgttccatccc

SEQ ID NO: 1364011 - DNA, 15 bp, Homo sapiens
attgctgttccatcc

SEQ ID NO: 1364012 - DNA, 15 bp, Homo sapiens
cattgctgttccatc

SEQ ID NO: 1364013 - DNA, 15 bp, Homo sapiens
tcattgctgttccat

SEQ ID NO: 1364014 - DNA, 15 bp, Homo sapiens
ttcattgctgttcca

SEQ ID NO: 1364015 - DNA, 15 bp, Homo sapiens
tttcattgctgttcc

SEQ ID NO: 1364016 - DNA, 15 bp, Homo sapiens
gtttcattgctgttc

SEQ ID NO: 1364017 - DNA, 15 bp, Homo sapiens
ggtttcattgctgtt

SEQ ID NO: 1364018 - DNA, 15 bp, Homo sapiens
tggtttcattgctgt

SEQ ID NO: 1364019 - DNA, 15 bp, Homo sapiens
ttggtttcattgctg

SEQ ID NO: 1364020 - DNA, 15 bp, Homo sapiens
cttggtttcattgct

SEQ ID NO: 1364021 - DNA, 15 bp, Homo sapiens
acttggtttcattgc

SEQ ID NO: 1364022 - DNA, 15 bp, Homo sapiens
cacttggtttcattg

SEQ ID NO: 1364023 - DNA, 15 bp, Homo sapiens
ccacttggtttcatt

SEQ ID NO: 1364024 - DNA, 15 bp, Homo sapiens
cccacttggtttcat

SEQ ID NO: 1364025 - DNA, 15 bp, Homo sapiens
tcccacttggtttca

SEQ ID NO: 1364026 - DNA, 15 bp, Homo sapiens
gtcccacttggtttc

SEQ ID NO: 1364027 - DNA, 15 bp, Homo sapiens
agtcccacttggttt

SEQ ID NO: 1364028 - DNA, 15 bp, Homo sapiens
gagtcccacttggtt

SEQ ID NO: 1364029 - DNA, 15 bp, Homo sapiens
tgagtcccacttggt

SEQ ID NO: 1364030 - DNA, 15 bp, Homo sapiens
atgagtcccacttgg

SEQ ID NO: 1364031 - DNA, 15 bp, Homo sapiens
catgagtcccacttg

SEQ ID NO: 1364032 - DNA, 15 bp, Homo sapiens
acatgagtcccactt

SEQ ID NO: 1364033 - DNA, 15 bp, Homo sapiens
tacatgagtcccact

SEQ ID NO: 1364034 - DNA, 15 bp, Homo sapiens
atacatgagtcccac

SEQ ID NO: 1364035 - DNA, 15 bp, Homo sapiens
aatacatgagtccca

SEQ ID NO: 1364036 - DNA, 15 bp, Homo sapiens
gaatacatgagtccc

SEQ ID NO: 1364037 - DNA, 15 bp, Homo sapiens
agaatacatgagtcc

SEQ ID NO: 1364038 - DNA, 15 bp, Homo sapiens
gagaatacatgagtc

SEQ ID NO: 1364039 - DNA, 15 bp, Homo sapiens
ggagaatacatgagt

SEQ ID NO: 1364040 - DNA, 15 bp, Homo sapiens
tggagaatacatgag

SEQ ID NO: 1364041 - DNA, 15 bp, Homo sapiens
atggagaatacatga

SEQ ID NO: 1364042 - DNA, 15 bp, Homo sapiens
tatggagaatacatg

SEQ ID NO: 1364043 - DNA, 15 bp, Homo sapiens
ttatggagaatacat

SEQ ID NO: 1364044 - DNA, 15 bp, Homo sapiens
tttatggagaataca

SEQ ID NO: 1364045 - DNA, 15 bp, Homo sapiens
ctttatggagaatac

SEQ ID NO: 1364046 - DNA, 15 bp, Homo sapiens
cctttatggagaata

SEQ ID NO: 1364047 - DNA, 15 bp, Homo sapiens
tcctttatggagaat

SEQ ID NO: 1364048 - DNA, 15 bp, Homo sapiens
ctcctttatggagaa

SEQ ID NO: 1364049 - DNA, 15 bp, Homo sapiens
cctcctttatggaga

SEQ ID NO: 1364050 - DNA, 15 bp, Homo sapiens
gcctcctttatggag

SEQ ID NO: 1364051 - DNA, 15 bp, Homo sapiens
ggcctcctttatgga

SEQ ID NO: 1364052 - DNA, 15 bp, Homo sapiens
gggcctcctttatgg

SEQ ID NO: 1364053 - DNA, 15 bp, Homo sapiens
tgggcctcctttatg

SEQ ID NO: 1364054 - DNA, 15 bp, Homo sapiens
gtgggcctcctttat

SEQ ID NO: 1364055 - DNA, 15 bp, Homo sapiens
tgtgggcctccttta

SEQ ID NO: 1364056 - DNA, 15 bp, Homo sapiens
ttgtgggcctccttt

SEQ ID NO: 1364057 - DNA, 15 bp, Homo sapiens
tttgtgggcctcctt

SEQ ID NO: 1364058 - DNA, 15 bp, Homo sapiens
ttttgtgggcctcct

SEQ ID NO: 1364059 - DNA, 15 bp, Homo sapiens
cttttgtgggcctcc

SEQ ID NO: 1364060 - DNA, 15 bp, Homo sapiens
ccttttgtgggcctc

SEQ ID NO: 1364061 - DNA, 15 bp, Homo sapiens
gccttttgtgggcct

SEQ ID NO: 1364062 - DNA, 15 bp, Homo sapiens
ggccttttgtgggcc

SEQ ID NO: 1364063 - DNA, 15 bp, Homo sapiens
aggccttttgtgggc

SEQ ID NO: 1364064 - DNA, 15 bp, Homo sapiens
aaaggccttttgtgg

SEQ ID NO: 1364065 - DNA, 15 bp, Homo sapiens
aaaaggccttttgtg

SEQ ID NO: 1364066 - DNA, 15 bp, Homo sapiens
gaaaaggccttttgt

SEQ ID NO: 1364067 - DNA, 15 bp, Homo sapiens
agaaaaggccttttg

SEQ ID NO: 1364068 - DNA, 15 bp, Homo sapiens
gagaaaaggcctttt

SEQ ID NO: 1364069 - DNA, 15 bp, Homo sapiens
ggagaaaaggccttt

SEQ ID NO: 1364070 - DNA, 15 bp, Homo sapiens
aggagaaaaggcctt

SEQ ID NO: 1364071 - DNA, 15 bp, Homo sapiens
aaggagaaaaggcct

SEQ ID NO: 1364072 - DNA, 15 bp, Homo sapiens
aaaggagaaaaggcc

SEQ ID NO: 1364073 - DNA, 15 bp, Homo sapiens
taaaggagaaaaggc

SEQ ID NO: 1364074 - DNA, 15 bp, Homo sapiens
ctaaaggagaaaagg

SEQ ID NO: 1364075 - DNA, 15 bp, Homo sapiens
actaaaggagaaaag

SEQ ID NO: 1364076 - DNA, 15 bp, Homo sapiens
tactaaaggagaaaa

SEQ ID NO: 1364077 - DNA, 15 bp, Homo sapiens
ttactaaaggagaaa

SEQ ID NO: 1364078 - DNA, 15 bp, Homo sapiens
tttactaaaggagaa

SEQ ID NO: 1364079 - DNA, 15 bp, Homo sapiens
ttttactaaaggaga

SEQ ID NO: 1364080 - DNA, 15 bp, Homo sapiens
cttttactaaaggag

SEQ ID NO: 1364081 - DNA, 15 bp, Homo sapiens
ccttttactaaagga

SEQ ID NO: 1364082 - DNA, 15 bp, Homo sapiens
tccttttactaaagg

SEQ ID NO: 1364083 - DNA, 15 bp, Homo sapiens
ttccttttactaaag

SEQ ID NO: 1364084 - DNA, 15 bp, Homo sapiens
tttccttttactaaa

SEQ ID NO: 1364085 - DNA, 15 bp, Homo sapiens
atttccttttactaa

SEQ ID NO: 1364086 - DNA, 15 bp, Homo sapiens
tatttccttttacta

SEQ ID NO: 1364087 - DNA, 15 bp, Homo sapiens
atatttccttttact

SEQ ID NO: 1364088 - DNA, 15 bp, Homo sapiens
aatatttccttttac

SEQ ID NO: 1364089 - DNA, 15 bp, Homo sapiens
taatatttcctttta

SEQ ID NO: 1364090 - DNA, 15 bp, Homo sapiens
ataatatttcctttt

SEQ ID NO: 1364091 - DNA, 15 bp, Homo sapiens
aataatatttccttt

SEQ ID NO: 1364092 - DNA, 15 bp, Homo sapiens
aaataatatttcctt

SEQ ID NO: 1364093 - DNA, 15 bp, Homo sapiens
gaaataatatttcct

SEQ ID NO: 1364094 - DNA, 15 bp, Homo sapiens
ggaaataatatttcc

SEQ ID NO: 1364095 - DNA, 15 bp, Homo sapiens
aggaaataatatttc

SEQ ID NO: 1364096 - DNA, 15 bp, Homo sapiens
aaggaaataatattt

SEQ ID NO: 1364097 - DNA, 15 bp, Homo sapiens
aaaggaaataatatt

SEQ ID NO: 1364098 - DNA, 15 bp, Homo sapiens
aaaaggaaataatat

SEQ ID NO: 1364099 - DNA, 15 bp, Homo sapiens
aaaaaggaaataata

SEQ ID NO: 1364100 - DNA, 15 bp, Homo sapiens
caaaaaggaaataat

SEQ ID NO: 1364101 - DNA, 15 bp, Homo sapiens
tcaaaaaggaaataa

SEQ ID NO: 1364102 - DNA, 15 bp, Homo sapiens
ttcaaaaaggaaata

SEQ ID NO: 1364103 - DNA, 15 bp, Homo sapiens
tttcaaaaaggaaat

SEQ ID NO: 1364104 - DNA, 15 bp, Homo sapiens
ctttcaaaaaggaaa

SEQ ID NO: 1364105 - DNA, 15 bp, Homo sapiens
actttcaaaaaggaa

SEQ ID NO: 1364106 - DNA, 15 bp, Homo sapiens
cactttcaaaaagga

SEQ ID NO: 1364107 - DNA, 15 bp, Homo sapiens
ccactttcaaaaagg

SEQ ID NO: 1364108 - DNA, 15 bp, Homo sapiens
gccactttcaaaaag

SEQ ID NO: 1364109 - DNA, 15 bp, Homo sapiens
tgccactttcaaaaa

SEQ ID NO: 1364110 - DNA, 15 bp, Homo sapiens
ttgccactttcaaaa

SEQ ID NO: 1364111 - DNA, 15 bp, Homo sapiens
gttgccactttcaaa

SEQ ID NO: 1364112 - DNA, 15 bp, Homo sapiens
tgttgccactttcaa

SEQ ID NO: 1364113 - DNA, 15 bp, Homo sapiens
ttgttgccactttca

SEQ ID NO: 1364114 - DNA, 15 bp, Homo sapiens
attgttgccactttc

SEQ ID NO: 1364115 - DNA, 15 bp, Homo sapiens
aattgttgccacttt

SEQ ID NO: 1364116 - DNA, 15 bp, Homo sapiens
caattgttgccactt

SEQ ID NO: 1364117 - DNA, 15 bp, Homo sapiens
acaattgttgccact

SEQ ID NO: 1364118 - DNA, 15 bp, Homo sapiens
gacaattgttgccac

SEQ ID NO: 1364119 - DNA, 15 bp, Homo sapiens
agacaattgttgcca

SEQ ID NO: 1364120 - DNA, 15 bp, Homo sapiens
gagacaattgttgcc

SEQ ID NO: 1364121 - DNA, 15 bp, Homo sapiens
tgagacaattgttgc

SEQ ID NO: 1364122 - DNA, 15 bp, Homo sapiens
atgagacaattgttg

SEQ ID NO: 1364123 - DNA, 15 bp, Homo sapiens
tatgagacaattgtt

SEQ ID NO: 1364124 - DNA, 15 bp, Homo sapiens
ttatgagacaattgt

SEQ ID NO: 1364125 - DNA, 15 bp, Homo sapiens
gttatgagacaattg

SEQ ID NO: 1364126 - DNA, 15 bp, Homo sapiens
ggttatgagacaatt

SEQ ID NO: 1364127 - DNA, 15 bp, Homo sapiens
tggttatgagacaat

SEQ ID NO: 1364128 - DNA, 15 bp, Homo sapiens
ctggttatgagacaa

SEQ ID NO: 1364129 - DNA, 15 bp, Homo sapiens
tctggttatgagaca

SEQ ID NO: 1364130 - DNA, 15 bp, Homo sapiens
gtctggttatgagac

SEQ ID NO: 1364131 - DNA, 15 bp, Homo sapiens
tgtctggttatgaga

SEQ ID NO: 1364132 - DNA, 15 bp, Homo sapiens
atgtctggttatgag

SEQ ID NO: 1364133 - DNA, 15 bp, Homo sapiens
catgtctggttatga

SEQ ID NO: 1364134 - DNA, 15 bp, Homo sapiens
acatgtctggttatg

SEQ ID NO: 1364135 - DNA, 15 bp, Homo sapiens
tacatgtctggttat

SEQ ID NO: 1364136 - DNA, 15 bp, Homo sapiens
ttacatgtctggtta

SEQ ID NO: 1364137 - DNA, 15 bp, Homo sapiens
attacatgtctggtt

SEQ ID NO: 1364138 - DNA, 15 bp, Homo sapiens
aattacatgtctggt

SEQ ID NO: 1364139 - DNA, 15 bp, Homo sapiens
taattacatgtctgg

SEQ ID NO: 1364140 - DNA, 15 bp, Homo sapiens
ttaattacatgtctg

SEQ ID NO: 1364141 - DNA, 15 bp, Homo sapiens
cttaattacatgtct

SEQ ID NO: 1364142 - DNA, 15 bp, Homo sapiens
tcttaattacatgtc

SEQ ID NO: 1364143 - DNA, 15 bp, Homo sapiens
gtcttaattacatgt

SEQ ID NO: 1364144 - DNA, 15 bp, Homo sapiens
cgtcttaattacatg

SEQ ID NO: 1364145 - DNA, 15 bp, Homo sapiens
acgtcttaattacat

SEQ ID NO: 1364146 - DNA, 15 bp, Homo sapiens
tacgtcttaattaca

SEQ ID NO: 1364147 - DNA, 15 bp, Homo sapiens
ttacgtcttaattac

SEQ ID NO: 1364148 - DNA, 15 bp, Homo sapiens
tttacgtcttaatta

SEQ ID NO: 1364149 - DNA, 15 bp, Homo sapiens
gtttacgtcttaatt

SEQ ID NO: 1364150 - DNA, 15 bp, Homo sapiens
tgtttacgtcttaat

SEQ ID NO: 1364151 - DNA, 15 bp, Homo sapiens
atgtttacgtcttaa

SEQ ID NO: 1364152 - DNA, 15 bp, Homo sapiens
catgtttacgtctta

SEQ ID NO: 1364153 - DNA, 15 bp, Homo sapiens
tcatgtttacgtctt

SEQ ID NO: 1364154 - DNA, 15 bp, Homo sapiens
atcatgtttacgtct

SEQ ID NO: 1364155 - DNA, 15 bp, Homo sapiens
tatcatgtttacgtc

SEQ ID NO: 1364156 - DNA, 15 bp, Homo sapiens
ctatcatgtttacgt

SEQ ID NO: 1364157 - DNA, 15 bp, Homo sapiens
tctatcatgtttacg

SEQ ID NO: 1364158 - DNA, 15 bp, Homo sapiens
ttctatcatgtttac

SEQ ID NO: 1364159 - DNA, 15 bp, Homo sapiens
tttctatcatgttta

SEQ ID NO: 1364160 - DNA, 15 bp, Homo sapiens
ttttctatcatgttt

SEQ ID NO: 1364161 - DNA, 15 bp, Homo sapiens
gttttctatcatgtt

SEQ ID NO: 1364162 - DNA, 15 bp, Homo sapiens
ctgttttctatcatg

SEQ ID NO: 1364163 - DNA, 15 bp, Homo sapiens
cctgttttctatcat

SEQ ID NO: 1364164 - DNA, 15 bp, Homo sapiens
gcctgttttctatca

SEQ ID NO: 1364165 - DNA, 15 bp, Homo sapiens
agcctgttttctatc

SEQ ID NO: 1364166 - DNA, 15 bp, Homo sapiens
aagcctgttttctat

SEQ ID NO: 1364167 - DNA, 15 bp, Homo sapiens
taagcctgttttcta

SEQ ID NO: 1364168 - DNA, 15 bp, Homo sapiens
gtaagcctgttttct

SEQ ID NO: 1364169 - DNA, 15 bp, Homo sapiens
ggtaagcctgttttc

SEQ ID NO: 1364170 - DNA, 15 bp, Homo sapiens
aggtaagcctgtttt

SEQ ID NO: 1364171 - DNA, 15 bp, Homo sapiens
taggtaagcctgttt

SEQ ID NO: 1364172 - DNA, 15 bp, Homo sapiens
ataggtaagcctgtt

SEQ ID NO: 1364173 - DNA, 15 bp, Homo sapiens
gataggtaagcctgt

SEQ ID NO: 1364174 - DNA, 15 bp, Homo sapiens
tgataggtaagcctg

SEQ ID NO: 1364175 - DNA, 15 bp, Homo sapiens
ttgataggtaagcct

SEQ ID NO: 1364176 - DNA, 15 bp, Homo sapiens
attgataggtaagcc

SEQ ID NO: 1364177 - DNA, 15 bp, Homo sapiens
tattgataggtaagc

SEQ ID NO: 1364178 - DNA, 15 bp, Homo sapiens
atattgataggtaag

SEQ ID NO: 1364179 - DNA, 15 bp, Homo sapiens
catattgataggtaa

SEQ ID NO: 1364180 - DNA, 15 bp, Homo sapiens
tcatattgataggta

SEQ ID NO: 1364181 - DNA, 15 bp, Homo sapiens
gtcatattgataggt

SEQ ID NO: 1364182 - DNA, 15 bp, Homo sapiens
ggtcatattgatagg

SEQ ID NO: 1364183 - DNA, 15 bp, Homo sapiens
aggtcatattgatag

SEQ ID NO: 1364184 - DNA, 15 bp, Homo sapiens
taggtcatattgata

SEQ ID NO: 1364185 - DNA, 15 bp, Homo sapiens
ctaggtcatattgat

SEQ ID NO: 1364186 - DNA, 15 bp, Homo sapiens
cctaggtcatattga

SEQ ID NO: 1364187 - DNA, 15 bp, Homo sapiens
tcctaggtcatattg

SEQ ID NO: 1364188 - DNA, 15 bp, Homo sapiens
ttcctaggtcatatt

SEQ ID NO: 1364189 - DNA, 15 bp, Homo sapiens
cttcctaggtcatat

SEQ ID NO: 1364190 - DNA, 15 bp, Homo sapiens
acttcctaggtcata

SEQ ID NO: 1364191 - DNA, 15 bp, Homo sapiens
tacttcctaggtcat

SEQ ID NO: 1364192 - DNA, 15 bp, Homo sapiens
gtacttcctaggtca

SEQ ID NO: 1364193 - DNA, 15 bp, Homo sapiens
agtacttcctaggtc

SEQ ID NO: 1364194 - DNA, 15 bp, Homo sapiens
cagtacttcctaggt

SEQ ID NO: 1364195 - DNA, 15 bp, Homo sapiens
tcagtacttcctagg

SEQ ID NO: 1364196 - DNA, 15 bp, Homo sapiens
ctcagtacttcctag

SEQ ID NO: 1364197 - DNA, 15 bp, Homo sapiens
actcagtacttccta

SEQ ID NO: 1364198 - DNA, 15 bp, Homo sapiens
cactcagtacttcct

SEQ ID NO: 1364199 - DNA, 15 bp, Homo sapiens
ccactcagtacttcc

SEQ ID NO: 1364200 - DNA, 15 bp, Homo sapiens
cccactcagtacttc

SEQ ID NO: 1364201 - DNA, 15 bp, Homo sapiens
tcccactcagtactt

SEQ ID NO: 1364202 - DNA, 15 bp, Homo sapiens
gtcccactcagtact

SEQ ID NO: 1364203 - DNA, 15 bp, Homo sapiens
ggtcccactcagtac

SEQ ID NO: 1364204 - DNA, 15 bp, Homo sapiens
aggtcccactcagta

SEQ ID NO: 1364205 - DNA, 15 bp, Homo sapiens
gaggtcccactcagt

SEQ ID NO: 1364206 - DNA, 15 bp, Homo sapiens
tgaggtcccactcag

SEQ ID NO: 1364207 - DNA, 15 bp, Homo sapiens
ttgaggtcccactca

SEQ ID NO: 1364208 - DNA, 15 bp, Homo sapiens
attgaggtcccactc

SEQ ID NO: 1364209 - DNA, 15 bp, Homo sapiens
aattgaggtcccact

SEQ ID NO: 1364210 - DNA, 15 bp, Homo sapiens
taattgaggtcccac

SEQ ID NO: 1364211 - DNA, 15 bp, Homo sapiens
ataattgaggtccca

SEQ ID NO: 1364212 - DNA, 15 bp, Homo sapiens
tataattgaggtccc

SEQ ID NO: 1364213 - DNA, 15 bp, Homo sapiens
atataattgaggtcc

SEQ ID NO: 1364214 - DNA, 15 bp, Homo sapiens
aatataattgaggtc

SEQ ID NO: 1364215 - DNA, 15 bp, Homo sapiens
taatataattgaggt

SEQ ID NO: 1364216 - DNA, 15 bp, Homo sapiens
gtaatataattgagg

SEQ ID NO: 1364217 - DNA, 15 bp, Homo sapiens
tgtaatataattgag

SEQ ID NO: 1364218 - DNA, 15 bp, Homo sapiens
atgtaatataattga

SEQ ID NO: 1364219 - DNA, 15 bp, Homo sapiens
aatgtaatataattg

SEQ ID NO: 1364220 - DNA, 15 bp, Homo sapiens
taatgtaatataatt

SEQ ID NO: 1364221 - DNA, 15 bp, Homo sapiens
ttaatgtaatataat

SEQ ID NO: 1364222 - DNA, 15 bp, Homo sapiens
attaatgtaatataa

SEQ ID NO: 1364223 - DNA, 15 bp, Homo sapiens
cattaatgtaatata

SEQ ID NO: 1364224 - DNA, 15 bp, Homo sapiens
acattaatgtaatat

SEQ ID NO: 1364225 - DNA, 15 bp, Homo sapiens
tacattaatgtaata

SEQ ID NO: 1364226 - DNA, 15 bp, Homo sapiens
ttacattaatgtaat

SEQ ID NO: 1364227 - DNA, 15 bp, Homo sapiens
tttacattaatgtaa

SEQ ID NO: 1364228 - DNA, 15 bp, Homo sapiens
atttacattaatgta

SEQ ID NO: 1364229 - DNA, 15 bp, Homo sapiens
catttacattaatgt

SEQ ID NO: 1364230 - DNA, 15 bp, Homo sapiens
tcatttacattaatg

SEQ ID NO: 1364231 - DNA, 15 bp, Homo sapiens
ttcatttacattaat

SEQ ID NO: 1364232 - DNA, 15 bp, Homo sapiens
tttcatttacattaa

SEQ ID NO: 1364233 - DNA, 15 bp, Homo sapiens
ttttcatttacatta

SEQ ID NO: 1364234 - DNA, 15 bp, Homo sapiens
attttcatttacatt

SEQ ID NO: 1364235 - DNA, 15 bp, Homo sapiens
cattttcatttacat

SEQ ID NO: 1364236 - DNA, 15 bp, Homo sapiens
acattttcatttaca

SEQ ID NO: 1364237 - DNA, 15 bp, Homo sapiens
tacattttcatttac

SEQ ID NO: 1364238 - DNA, 15 bp, Homo sapiens
atacattttcattta

SEQ ID NO: 1364239 - DNA, 15 bp, Homo sapiens
tatacattttcattt

SEQ ID NO: 1364240 - DNA, 15 bp, Homo sapiens
atatacattttcatt

SEQ ID NO: 1364241 - DNA, 15 bp, Homo sapiens
aatatacattttcat

SEQ ID NO: 1364242 - DNA, 15 bp, Homo sapiens
aaatatacattttca

SEQ ID NO: 1364243 - DNA, 15 bp, Homo sapiens
taaatatacattttc

SEQ ID NO: 1364244 - DNA, 15 bp, Homo sapiens
ttaaatatacatttt

SEQ ID NO: 1364245 - DNA, 15 bp, Homo sapiens
attaaatatacattt

SEQ ID NO: 1364246 - DNA, 15 bp, Homo sapiens
aattaaatatacatt

SEQ ID NO: 1364247 - DNA, 15 bp, Homo sapiens
aaattaaatatacat

SEQ ID NO: 1364248 - DNA, 15 bp, Homo sapiens
gaaattaaatataca

SEQ ID NO: 1364249 - DNA, 15 bp, Homo sapiens
agaaattaaatatac

SEQ ID NO: 1364250 - DNA, 15 bp, Homo sapiens
aagaaattaaatata

SEQ ID NO: 1364251 - DNA, 15 bp, Homo sapiens
gaagaaattaaatat

SEQ ID NO: 1364252 - DNA, 15 bp, Homo sapiens
agaagaaattaaata

SEQ ID NO: 1364253 - DNA, 15 bp, Homo sapiens
cagaagaaattaaat

SEQ ID NO: 1364254 - DNA, 15 bp, Homo sapiens
tcagaagaaattaaa

SEQ ID NO: 1364255 - DNA, 15 bp, Homo sapiens
ctcagaagaaattaa

SEQ ID NO: 1364256 - DNA, 15 bp, Homo sapiens
tctcagaagaaatta

SEQ ID NO: 1364257 - DNA, 15 bp, Homo sapiens
atctcagaagaaatt

SEQ ID NO: 1364258 - DNA, 15 bp, Homo sapiens
tatctcagaagaaat

SEQ ID NO: 1364259 - DNA, 15 bp, Homo sapiens
atatctcagaagaaa

SEQ ID NO: 1364260 - DNA, 15 bp, Homo sapiens
gatatctcagaagaa

SEQ ID NO: 1364261 - DNA, 15 bp, Homo sapiens
agatatctcagaaga

SEQ ID NO: 1364262 - DNA, 15 bp, Homo sapiens
aagatatctcagaag

SEQ ID NO: 1364263 - DNA, 15 bp, Homo sapiens
gaagatatctcagaa

SEQ ID NO: 1364264 - DNA, 15 bp, Homo sapiens
tgaagatatctcaga

SEQ ID NO: 1364265 - DNA, 15 bp, Homo sapiens
gtgaagatatctcag

SEQ ID NO: 1364266 - DNA, 15 bp, Homo sapiens
tgtgaagatatctca

SEQ ID NO: 1364267 - DNA, 15 bp, Homo sapiens
ctgtgaagatatctc

SEQ ID NO: 1364268 - DNA, 15 bp, Homo sapiens
actgtgaagatatct

SEQ ID NO: 1364269 - DNA, 15 bp, Homo sapiens
gactgtgaagatatc

SEQ ID NO: 1364270 - DNA, 15 bp, Homo sapiens
agactgtgaagatat

SEQ ID NO: 1364271 - DNA, 15 bp, Homo sapiens
tagactgtgaagata

SEQ ID NO: 1364272 - DNA, 15 bp, Homo sapiens
ctagactgtgaagat

SEQ ID NO: 1364273 - DNA, 15 bp, Homo sapiens
actagactgtgaaga

SEQ ID NO: 1364274 - DNA, 15 bp, Homo sapiens
tactagactgtgaag

SEQ ID NO: 1364275 - DNA, 15 bp, Homo sapiens
ttactagactgtgaa

SEQ ID NO: 1364276 - DNA, 15 bp, Homo sapiens
tttactagactgtga

SEQ ID NO: 1364277 - DNA, 15 bp, Homo sapiens
atttactagactgtg

SEQ ID NO: 1364278 - DNA, 15 bp, Homo sapiens
catttactagactgt

SEQ ID NO: 1364279 - DNA, 15 bp, Homo sapiens
gcatttactagactg

SEQ ID NO: 1364280 - DNA, 15 bp, Homo sapiens
tgcatttactagact

SEQ ID NO: 1364281 - DNA, 15 bp, Homo sapiens
ttgcatttactagac

SEQ ID NO: 1364282 - DNA, 15 bp, Homo sapiens
tttgcatttactaga

SEQ ID NO: 1364283 - DNA, 15 bp, Homo sapiens
atttgcatttactag

SEQ ID NO: 1364284 - DNA, 15 bp, Homo sapiens
tatttgcatttacta

SEQ ID NO: 1364285 - DNA, 15 bp, Homo sapiens
ctatttgcatttact

SEQ ID NO: 1364286 - DNA, 15 bp, Homo sapiens
tctatttgcatttac

SEQ ID NO: 1364287 - DNA, 15 bp, Homo sapiens
ttctatttgcattta

SEQ ID NO: 1364288 - DNA, 15 bp, Homo sapiens
attctatttgcattt

SEQ ID NO: 1364289 - DNA, 15 bp, Homo sapiens
aattctatttgcatt

SEQ ID NO: 1364290 - DNA, 15 bp, Homo sapiens
taattctatttgcat

SEQ ID NO: 1364291 - DNA, 15 bp, Homo sapiens
ataattctatttgca

SEQ ID NO: 1364292 - DNA, 15 bp, Homo sapiens
aataattctatttgc

SEQ ID NO: 1364293 - DNA, 15 bp, Homo sapiens
aaataattctatttg

SEQ ID NO: 1364294 - DNA, 15 bp, Homo sapiens
gaaataattctattt

SEQ ID NO: 1364295 - DNA, 15 bp, Homo sapiens
agaaataattctatt

SEQ ID NO: 1364296 - DNA, 15 bp, Homo sapiens
cagaaataattctat

SEQ ID NO: 1364297 - DNA, 15 bp, Homo sapiens
tcagaaataattcta

SEQ ID NO: 1364298 - DNA, 15 bp, Homo sapiens
gtcagaaataattct

SEQ ID NO: 1364299 - DNA, 15 bp, Homo sapiens
tgtcagaaataattc

SEQ ID NO: 1364300 - DNA, 15 bp, Homo sapiens
ttgtcagaaataatt

SEQ ID NO: 1364301 - DNA, 15 bp, Homo sapiens
gttgtcagaaataat

SEQ ID NO: 1364302 - DNA, 15 bp, Homo sapiens
agttgtcagaaataa

SEQ ID NO: 1364303 - DNA, 15 bp, Homo sapiens
cagttgtcagaaata

SEQ ID NO: 1364304 - DNA, 15 bp, Homo sapiens
tcagttgtcagaaat

SEQ ID NO: 1364305 - DNA, 15 bp, Homo sapiens
ttcagttgtcagaaa

SEQ ID NO: 1364306 - DNA, 15 bp, Homo sapiens
tttcagttgtcagaa

SEQ ID NO: 1364307 - DNA, 15 bp, Homo sapiens
atttcagttgtcaga

SEQ ID NO: 1364308 - DNA, 15 bp, Homo sapiens
tatttcagttgtcag

SEQ ID NO: 1364309 - DNA, 15 bp, Homo sapiens
ttatttcagttgtca

SEQ ID NO: 1364310 - DNA, 15 bp, Homo sapiens
attatttcagttgtc

SEQ ID NO: 1364311 - DNA, 15 bp, Homo sapiens
aattatttcagttgt

SEQ ID NO: 1364312 - DNA, 15 bp, Homo sapiens
gaattatttcagttg

SEQ ID NO: 1364313 - DNA, 15 bp, Homo sapiens
ggaattatttcagtt

SEQ ID NO: 1364314 - DNA, 15 bp, Homo sapiens
gggaattatttcagt

SEQ ID NO: 1364315 - DNA, 15 bp, Homo sapiens
tttgggaattatttc

SEQ ID NO: 1364316 - DNA, 15 bp, Homo sapiens
atttgggaattattt

SEQ ID NO: 1364317 - DNA, 15 bp, Homo sapiens
tatttgggaattatt

SEQ ID NO: 1364318 - DNA, 15 bp, Homo sapiens
ttatttgggaattat

SEQ ID NO: 1364319 - DNA, 15 bp, Homo sapiens
cttatttgggaatta

SEQ ID NO: 1364320 - DNA, 15 bp, Homo sapiens
acttatttgggaatt

SEQ ID NO: 1364321 - DNA, 15 bp, Homo sapiens
gacttatttgggaat

SEQ ID NO: 1364322 - DNA, 15 bp, Homo sapiens
ggacttatttgggaa

SEQ ID NO: 1364323 - DNA, 15 bp, Homo sapiens
gggacttatttggga

SEQ ID NO: 1364324 - DNA, 15 bp, Homo sapiens
tgggacttatttggg

SEQ ID NO: 1364325 - DNA, 15 bp, Homo sapiens
ttgggacttatttgg

SEQ ID NO: 1364326 - DNA, 15 bp, Homo sapiens
tttgggacttatttg

SEQ ID NO: 1364327 - DNA, 15 bp, Homo sapiens
ttttgggacttattt

SEQ ID NO: 1364328 - DNA, 15 bp, Homo sapiens
gttttgggacttatt

SEQ ID NO: 1364329 - DNA, 15 bp, Homo sapiens
cgttttgggacttat

SEQ ID NO: 1364330 - DNA, 15 bp, Homo sapiens
tcgttttgggactta

SEQ ID NO: 1364331 - DNA, 15 bp, Homo sapiens
atcgttttgggactt

SEQ ID NO: 1364332 - DNA, 15 bp, Homo sapiens
aatcgttttgggact

SEQ ID NO: 1364333 - DNA, 15 bp, Homo sapiens
gaatcgttttgggac

SEQ ID NO: 1364334 - DNA, 15 bp, Homo sapiens
agaatcgttttggga

SEQ ID NO: 1364335 - DNA, 15 bp, Homo sapiens
gagaatcgttttggg

SEQ ID NO: 1364336 - DNA, 15 bp, Homo sapiens
ggagaatcgttttgg

SEQ ID NO: 1364337 - DNA, 15 bp, Homo sapiens
tggagaatcgttttg

SEQ ID NO: 1364338 - DNA, 15 bp, Homo sapiens
ctggagaatcgtttt

SEQ ID NO: 1364339 - DNA, 15 bp, Homo sapiens
cctggagaatcgttt

SEQ ID NO: 1364340 - DNA, 15 bp, Homo sapiens
tcctggagaatcgtt

SEQ ID NO: 1364341 - DNA, 15 bp, Homo sapiens
ttcctggagaatcgt

SEQ ID NO: 1364342 - DNA, 15 bp, Homo sapiens
gttcctggagaatcg

SEQ ID NO: 1364343 - DNA, 15 bp, Homo sapiens
tgttcctggagaatc

SEQ ID NO: 1364344 - DNA, 15 bp, Homo sapiens
ctgttcctggagaat

SEQ ID NO: 1364345 - DNA, 15 bp, Homo sapiens
cctgttcctggagaa

SEQ ID NO: 1364346 - DNA, 15 bp, Homo sapiens
gcctgttcctggaga

SEQ ID NO: 1364347 - DNA, 15 bp, Homo sapiens
tgcctgttcctggag

SEQ ID NO: 1364348 - DNA, 15 bp, Homo sapiens
ttgcctgttcctgga

SEQ ID NO: 1364349 - DNA, 15 bp, Homo sapiens
cttgcctgttcctgg

SEQ ID NO: 1364350 - DNA, 15 bp, Homo sapiens
gcttgcctgttcctg

SEQ ID NO: 1364351 - DNA, 15 bp, Homo sapiens
agcttgcctgttcct

SEQ ID NO: 1364352 - DNA, 15 bp, Homo sapiens
aagcttgcctgttcc

SEQ ID NO: 1364353 - DNA, 15 bp, Homo sapiens
aaagcttgcctgttc

SEQ ID NO: 1364354 - DNA, 15 bp, Homo sapiens
gaaagcttgcctgtt

SEQ ID NO: 1364355 - DNA, 15 bp, Homo sapiens
agaaagcttgcctgt

SEQ ID NO: 1364356 - DNA, 15 bp, Homo sapiens
aagaaagcttgcctg

SEQ ID NO: 1364357 - DNA, 15 bp, Homo sapiens
aaagaaagcttgcct

SEQ ID NO: 1364358 - DNA, 15 bp, Homo sapiens
gaaagaaagcttgcc

SEQ ID NO: 1364359 - DNA, 15 bp, Homo sapiens
tgaaagaaagcttgc

SEQ ID NO: 1364360 - DNA, 15 bp, Homo sapiens
gtgaaagaaagcttg

SEQ ID NO: 1364361 - DNA, 15 bp, Homo sapiens
agtgaaagaaagctt

SEQ ID NO: 1364362 - DNA, 15 bp, Homo sapiens
tagtgaaagaaagct

SEQ ID NO: 1364363 - DNA, 15 bp, Homo sapiens
ctagtgaaagaaagc

SEQ ID NO: 1364364 - DNA, 15 bp, Homo sapiens
gctagtgaaagaaag

SEQ ID NO: 1364365 - DNA, 15 bp, Homo sapiens
agctagtgaaagaaa

SEQ ID NO: 1364366 - DNA, 15 bp, Homo sapiens
tagctagtgaaagaa

SEQ ID NO: 1364367 - DNA, 15 bp, Homo sapiens
ctagctagtgaaaga

SEQ ID NO: 1364368 - DNA, 15 bp, Homo sapiens
gctagctagtgaaag

SEQ ID NO: 1364369 - DNA, 15 bp, Homo sapiens
tgctagctagtgaaa

SEQ ID NO: 1364370 - DNA, 15 bp, Homo sapiens
ctgctagctagtgaa

SEQ ID NO: 1364371 - DNA, 15 bp, Homo sapiens
cctgctagctagtga

SEQ ID NO: 1364372 - DNA, 15 bp, Homo sapiens
gcctgctagctagtg

SEQ ID NO: 1364373 - DNA, 15 bp, Homo sapiens
tgcctgctagctagt

SEQ ID NO: 1364374 - DNA, 15 bp, Homo sapiens
atgcctgctagctag

SEQ ID NO: 1364375 - DNA, 15 bp, Homo sapiens
aatgcctgctagcta

SEQ ID NO: 1364376 - DNA, 15 bp, Homo sapiens
gaatgcctgctagct

SEQ ID NO: 1364377 - DNA, 15 bp, Homo sapiens
tgaatgcctgctagc

SEQ ID NO: 1364378 - DNA, 15 bp, Homo sapiens
atgaatgcctgctag

SEQ ID NO: 1364379 - DNA, 15 bp, Homo sapiens
catgaatgcctgcta

SEQ ID NO: 1364380 - DNA, 15 bp, Homo sapiens
gcatgaatgcctgct

SEQ ID NO: 1364381 - DNA, 15 bp, Homo sapiens
agcatgaatgcctgc

SEQ ID NO: 1364382 - DNA, 15 bp, Homo sapiens
tagcatgaatgcctg

SEQ ID NO: 1364383 - DNA, 15 bp, Homo sapiens
ttagcatgaatgcct

SEQ ID NO: 1364384 - DNA, 15 bp, Homo sapiens
gttagcatgaatgcc

SEQ ID NO: 1364385 - DNA, 15 bp, Homo sapiens
tgttagcatgaatgc

SEQ ID NO: 1364386 - DNA, 15 bp, Homo sapiens
ttgttagcatgaatg

SEQ ID NO: 1364387 - DNA, 15 bp, Homo sapiens
tttgttagcatgaat

SEQ ID NO: 1364388 - DNA, 15 bp, Homo sapiens
gtttgttagcatgaa

SEQ ID NO: 1364389 - DNA, 15 bp, Homo sapiens
tgtttgttagcatga

SEQ ID NO: 1364390 - DNA, 15 bp, Homo sapiens
gtgtttgttagcatg

SEQ ID NO: 1364391 - DNA, 15 bp, Homo sapiens
agtgtttgttagcat

SEQ ID NO: 1364392 - DNA, 15 bp, Homo sapiens
cagtgtttgttagca

SEQ ID NO: 1364393 - DNA, 15 bp, Homo sapiens
tcagtgtttgttagc

SEQ ID NO: 1364394 - DNA, 15 bp, Homo sapiens
ttcagtgtttgttag

SEQ ID NO: 1364395 - DNA, 15 bp, Homo sapiens
attcagtgtttgtta

SEQ ID NO: 1364396 - DNA, 15 bp, Homo sapiens
aattcagtgtttgtt

SEQ ID NO: 1364397 - DNA, 15 bp, Homo sapiens
gaattcagtgtttgt

SEQ ID NO: 1364398 - DNA, 15 bp, Homo sapiens
tgaattcagtgtttg

SEQ ID NO: 1364399 - DNA, 15 bp, Homo sapiens
ttgaattcagtgttt

SEQ ID NO: 1364400 - DNA, 15 bp, Homo sapiens
tttgaattcagtgtt

SEQ ID NO: 1364401 - DNA, 15 bp, Homo sapiens
atttgaattcagtgt

SEQ ID NO: 1364402 - DNA, 15 bp, Homo sapiens
catttgaattcagtg

SEQ ID NO: 1364403 - DNA, 15 bp, Homo sapiens
tcatttgaattcagt

SEQ ID NO: 1364404 - DNA, 15 bp, Homo sapiens
atcatttgaattcag

SEQ ID NO: 1364405 - DNA, 15 bp, Homo sapiens
tatcatttgaattca

SEQ ID NO: 1364406 - DNA, 15 bp, Homo sapiens
atatcatttgaattc

SEQ ID NO: 1364407 - DNA, 15 bp, Homo sapiens
aatatcatttgaatt

SEQ ID NO: 1364408 - DNA, 15 bp, Homo sapiens
gaatatcatttgaat

SEQ ID NO: 1364409 - DNA, 15 bp, Homo sapiens
ggaatatcatttgaa

SEQ ID NO: 1364410 - DNA, 15 bp, Homo sapiens
aggaatatcatttga

SEQ ID NO: 1364411 - DNA, 15 bp, Homo sapiens
taggaatatcatttg

SEQ ID NO: 1364412 - DNA, 15 bp, Homo sapiens
ataggaatatcattt

SEQ ID NO: 1364413 - DNA, 15 bp, Homo sapiens
tataggaatatcatt

SEQ ID NO: 1364414 - DNA, 15 bp, Homo sapiens
ttataggaatatcat

SEQ ID NO: 1364415 - DNA, 15 bp, Homo sapiens
tttataggaatatca

SEQ ID NO: 1364416 - DNA, 15 bp, Homo sapiens
ctttataggaatatc

SEQ ID NO: 1364417 - DNA, 15 bp, Homo sapiens
actttataggaatat

SEQ ID NO: 1364418 - DNA, 15 bp, Homo sapiens
tactttataggaata

SEQ ID NO: 1364419 - DNA, 15 bp, Homo sapiens
ctactttataggaat

SEQ ID NO: 1364420 - DNA, 15 bp, Homo sapiens
tctactttataggaa

SEQ ID NO: 1364421 - DNA, 15 bp, Homo sapiens
ttctactttatagga

SEQ ID NO: 1364422 - DNA, 15 bp, Homo sapiens
tttctactttatagg

SEQ ID NO: 1364423 - DNA, 15 bp, Homo sapiens
atttctactttatag

SEQ ID NO: 1364424 - DNA, 15 bp, Homo sapiens
aatttctactttata

SEQ ID NO: 1364425 - DNA, 15 bp, Homo sapiens
taatttctactttat

SEQ ID NO: 1364426 - DNA, 15 bp, Homo sapiens
ataatttctacttta

SEQ ID NO: 1364427 - DNA, 15 bp, Homo sapiens
gataatttctacttt

SEQ ID NO: 1364428 - DNA, 15 bp, Homo sapiens
tgataatttctactt

SEQ ID NO: 1364429 - DNA, 15 bp, Homo sapiens
gtgataatttctact

SEQ ID NO: 1364430 - DNA, 15 bp, Homo sapiens
ggtgataatttctac

SEQ ID NO: 1364431 - DNA, 15 bp, Homo sapiens
aggtgataatttcta

SEQ ID NO: 1364432 - DNA, 15 bp, Homo sapiens
caggtgataatttct

SEQ ID NO: 1364433 - DNA, 15 bp, Homo sapiens
tcaggtgataatttc

SEQ ID NO: 1364434 - DNA, 15 bp, Homo sapiens
ctcaggtgataattt

SEQ ID NO: 1364435 - DNA, 15 bp, Homo sapiens
tctcaggtgataatt

SEQ ID NO: 1364436 - DNA, 15 bp, Homo sapiens
ttctcaggtgataat

SEQ ID NO: 1364437 - DNA, 15 bp, Homo sapiens
attctcaggtgataa

SEQ ID NO: 1364438 - DNA, 15 bp, Homo sapiens
aattctcaggtgata

SEQ ID NO: 1364439 - DNA, 15 bp, Homo sapiens
gaattctcaggtgat

SEQ ID NO: 1364440 - DNA, 15 bp, Homo sapiens
agaattctcaggtga

SEQ ID NO: 1364441 - DNA, 15 bp, Homo sapiens
aagaattctcaggtg

SEQ ID NO: 1364442 - DNA, 15 bp, Homo sapiens
gaagaattctcaggt

SEQ ID NO: 1364443 - DNA, 15 bp, Homo sapiens
agaagaattctcagg

SEQ ID NO: 1364444 - DNA, 15 bp, Homo sapiens
aagaagaattctcag

SEQ ID NO: 1364445 - DNA, 15 bp, Homo sapiens
caagaagaattctca

SEQ ID NO: 1364446 - DNA, 15 bp, Homo sapiens
tcaagaagaattctc

SEQ ID NO: 1364447 - DNA, 15 bp, Homo sapiens
ttcaagaagaattct

SEQ ID NO: 1364448 - DNA, 15 bp, Homo sapiens
attcaagaagaattc

SEQ ID NO: 1364449 - DNA, 15 bp, Homo sapiens
tattcaagaagaatt

SEQ ID NO: 1364450 - DNA, 15 bp, Homo sapiens
ttattcaagaagaat

SEQ ID NO: 1364451 - DNA, 15 bp, Homo sapiens
attattcaagaagaa

SEQ ID NO: 1364452 - DNA, 15 bp, Homo sapiens
cattattcaagaaga

SEQ ID NO: 1364453 - DNA, 15 bp, Homo sapiens
tcattattcaagaag

SEQ ID NO: 1364454 - DNA, 15 bp, Homo sapiens
atcattattcaagaa

SEQ ID NO: 1364455 - DNA, 15 bp, Homo sapiens
tatcattattcaaga

SEQ ID NO: 1364456 - DNA, 15 bp, Homo sapiens
atatcattattcaag

SEQ ID NO: 1364457 - DNA, 15 bp, Homo sapiens
aatatcattattcaa

SEQ ID NO: 1364458 - DNA, 15 bp, Homo sapiens
taatatcattattca

SEQ ID NO: 1364459 - DNA, 15 bp, Homo sapiens
ataatatcattattc

SEQ ID NO: 1364460 - DNA, 15 bp, Homo sapiens
tataatatcattatt

SEQ ID NO: 1364461 - DNA, 15 bp, Homo sapiens
ctataatatcattat

SEQ ID NO: 1364462 - DNA, 15 bp, Homo sapiens
gctataatatcatta

SEQ ID NO: 1364463 - DNA, 15 bp, Homo sapiens
tgctataatatcatt

SEQ ID NO: 1364464 - DNA, 15 bp, Homo sapiens
atgctataatatcat

SEQ ID NO: 1364465 - DNA, 15 bp, Homo sapiens
tatgctataatatca

SEQ ID NO: 1364466 - DNA, 15 bp, Homo sapiens
atatgctataatatc

SEQ ID NO: 1364467 - DNA, 15 bp, Homo sapiens
catatgctataatat

SEQ ID NO: 1364468 - DNA, 15 bp, Homo sapiens
acatatgctataata

SEQ ID NO: 1364469 - DNA, 15 bp, Homo sapiens
gacatatgctataat

SEQ ID NO: 1364470 - DNA, 15 bp, Homo sapiens
tgacatatgctataa

SEQ ID NO: 1364471 - DNA, 15 bp, Homo sapiens
ctgacatatgctata

SEQ ID NO: 1364472 - DNA, 15 bp, Homo sapiens
tctgacatatgctat

SEQ ID NO: 1364473 - DNA, 15 bp, Homo sapiens
ttctgacatatgcta

SEQ ID NO: 1364474 - DNA, 15 bp, Homo sapiens
tttctgacatatgct

SEQ ID NO: 1364475 - DNA, 15 bp, Homo sapiens
atttctgacatatgc

SEQ ID NO: 1364476 - DNA, 15 bp, Homo sapiens
catttctgacatatg

SEQ ID NO: 1364477 - DNA, 15 bp, Homo sapiens
acatttctgacatat

SEQ ID NO: 1364478 - DNA, 15 bp, Homo sapiens
cacatttctgacata

SEQ ID NO: 1364479 - DNA, 15 bp, Homo sapiens
acacatttctgacat

SEQ ID NO: 1364480 - DNA, 15 bp, Homo sapiens
aacacatttctgaca

SEQ ID NO: 1364481 - DNA, 15 bp, Homo sapiens
taacacatttctgac

SEQ ID NO: 1364482 - DNA, 15 bp, Homo sapiens
ttaacacatttctga

SEQ ID NO: 1364483 - DNA, 15 bp, Homo sapiens
attaacacatttctg

SEQ ID NO: 1364484 - DNA, 15 bp, Homo sapiens
gattaacacatttct

SEQ ID NO: 1364485 - DNA, 15 bp, Homo sapiens
tgattaacacatttc

SEQ ID NO: 1364486 - DNA, 15 bp, Homo sapiens
ctgattaacacattt

SEQ ID NO: 1364487 - DNA, 15 bp, Homo sapiens
actgattaacacatt

SEQ ID NO: 1364488 - DNA, 15 bp, Homo sapiens
cactgattaacacat

SEQ ID NO: 1364489 - DNA, 15 bp, Homo sapiens
acactgattaacaca

SEQ ID NO: 1364490 - DNA, 15 bp, Homo sapiens
tacactgattaacac

SEQ ID NO: 1364491 - DNA, 15 bp, Homo sapiens
ttacactgattaaca

SEQ ID NO: 1364492 - DNA, 15 bp, Homo sapiens
attacactgattaac

SEQ ID NO: 1364493 - DNA, 15 bp, Homo sapiens
tattacactgattaa

SEQ ID NO: 1364494 - DNA, 15 bp, Homo sapiens
ctattacactgatta

SEQ ID NO: 1364495 - DNA, 15 bp, Homo sapiens
gctattacactgatt

SEQ ID NO: 1364496 - DNA, 15 bp, Homo sapiens
tgctattacactgat

SEQ ID NO: 1364497 - DNA, 15 bp, Homo sapiens
ttgctattacactga

SEQ ID NO: 1364498 - DNA, 15 bp, Homo sapiens
tttgctattacactg

SEQ ID NO: 1364499 - DNA, 15 bp, Homo sapiens
ctttgctattacact

SEQ ID NO: 1364500 - DNA, 15 bp, Homo sapiens
cctttgctattacac

SEQ ID NO: 1364501 - DNA, 15 bp, Homo sapiens
acctttgctattaca

SEQ ID NO: 1364502 - DNA, 15 bp, Homo sapiens
tacctttgctattac

SEQ ID NO: 1364503 - DNA, 15 bp, Homo sapiens
ttacctttgctatta

SEQ ID NO: 1364504 - DNA, 15 bp, Homo sapiens
gttacctttgctatt

SEQ ID NO: 1364505 - DNA, 15 bp, Homo sapiens
tgttacctttgctat

SEQ ID NO: 1364506 - DNA, 15 bp, Homo sapiens
ctgttacctttgcta

SEQ ID NO: 1364507 - DNA, 15 bp, Homo sapiens
cctgttacctttgct

SEQ ID NO: 1364508 - DNA, 15 bp, Homo sapiens
ccctgttacctttgc

SEQ ID NO: 1364509 - DNA, 15 bp, Homo sapiens
accctgttacctttg

SEQ ID NO: 1364510 - DNA, 15 bp, Homo sapiens
caccctgttaccttt

SEQ ID NO: 1364511 - DNA, 15 bp, Homo sapiens
acaccctgttacctt

SEQ ID NO: 1364512 - DNA, 15 bp, Homo sapiens
aacaccctgttacct

SEQ ID NO: 1364513 - DNA, 15 bp, Homo sapiens
gaacaccctgttacc

SEQ ID NO: 1364514 - DNA, 15 bp, Homo sapiens
agaacaccctgttac

SEQ ID NO: 1364515 - DNA, 15 bp, Homo sapiens
aagaacaccctgtta

SEQ ID NO: 1364516 - DNA, 15 bp, Homo sapiens
caagaacaccctgtt

SEQ ID NO: 1364517 - DNA, 15 bp, Homo sapiens
gcaagaacaccctgt

SEQ ID NO: 1364518 - DNA, 15 bp, Homo sapiens
tgcaagaacaccctg

SEQ ID NO: 1364519 - DNA, 15 bp, Homo sapiens
ttgcaagaacaccct

SEQ ID NO: 1364520 - DNA, 15 bp, Homo sapiens
gttgcaagaacaccc

SEQ ID NO: 1364521 - DNA, 15 bp, Homo sapiens
ggttgcaagaacacc

SEQ ID NO: 1364522 - DNA, 15 bp, Homo sapiens
tggttgcaagaacac

SEQ ID NO: 1364523 - DNA, 15 bp, Homo sapiens
ctggttgcaagaaca

SEQ ID NO: 1364524 - DNA, 15 bp, Homo sapiens
gctggttgcaagaac

SEQ ID NO: 1364525 - DNA, 15 bp, Homo sapiens
agctggttgcaagaa

SEQ ID NO: 1364526 - DNA, 15 bp, Homo sapiens
tagctggttgcaaga

SEQ ID NO: 1364527 - DNA, 15 bp, Homo sapiens
ttagctggttgcaag

SEQ ID NO: 1364528 - DNA, 15 bp, Homo sapiens
tttagctggttgcaa

SEQ ID NO: 1364529 - DNA, 15 bp, Homo sapiens
ctttagctggttgca

SEQ ID NO: 1364530 - DNA, 15 bp, Homo sapiens
tctttagctggttgc

SEQ ID NO: 1364531 - DNA, 15 bp, Homo sapiens
ttctttagctggttg

SEQ ID NO: 1364532 - DNA, 15 bp, Homo sapiens
tttctttagctggtt

SEQ ID NO: 1364533 - DNA, 15 bp, Homo sapiens
atttctttagctggt

SEQ ID NO: 1364534 - DNA, 15 bp, Homo sapiens
catttctttagctgg

SEQ ID NO: 1364535 - DNA, 15 bp, Homo sapiens
gcatttctttagctg

SEQ ID NO: 1364536 - DNA, 15 bp, Homo sapiens
agcatttctttagct

SEQ ID NO: 1364537 - DNA, 15 bp, Homo sapiens
cagcatttctttagc

SEQ ID NO: 1364538 - DNA, 15 bp, Homo sapiens
cacagcatttcttta

SEQ ID NO: 1364539 - DNA, 15 bp, Homo sapiens
gcacagcatttcttt

SEQ ID NO: 1364540 - DNA, 15 bp, Homo sapiens
agcacagcatttctt

SEQ ID NO: 1364541 - DNA, 15 bp, Homo sapiens
gagcacagcatttct

SEQ ID NO: 1364542 - DNA, 15 bp, Homo sapiens
tgagcacagcatttc

SEQ ID NO: 1364543 - DNA, 15 bp, Homo sapiens
ctgagcacagcattt

SEQ ID NO: 1364544 - DNA, 15 bp, Homo sapiens
cctgagcacagcatt

SEQ ID NO: 1364545 - DNA, 15 bp, Homo sapiens
gcctgagcacagcat

SEQ ID NO: 1364546 - DNA, 15 bp, Homo sapiens
agcctgagcacagca

SEQ ID NO: 1364547 - DNA, 15 bp, Homo sapiens
cagcctgagcacagc

SEQ ID NO: 1364548 - DNA, 15 bp, Homo sapiens
ccagcctgagcacag

SEQ ID NO: 1364549 - DNA, 15 bp, Homo sapiens
cccagcctgagcaca

SEQ ID NO: 1364550 - DNA, 15 bp, Homo sapiens
acccagcctgagcac

SEQ ID NO: 1364551 - DNA, 15 bp, Homo sapiens
cacccagcctgagca

SEQ ID NO: 1364552 - DNA, 15 bp, Homo sapiens
gcacccagcctgagc

SEQ ID NO: 1364553 - DNA, 15 bp, Homo sapiens
cgcacccagcctgag

SEQ ID NO: 1364554 - DNA, 15 bp, Homo sapiens
ccgcacccagcctga

SEQ ID NO: 1364555 - DNA, 15 bp, Homo sapiens
accgcacccagcctg

SEQ ID NO: 1364556 - DNA, 15 bp, Homo sapiens
caccgcacccagcct

SEQ ID NO: 1364557 - DNA, 15 bp, Homo sapiens
gagccaccgcaccca

SEQ ID NO: 1364558 - DNA, 15 bp, Homo sapiens
tgagccaccgcaccc

SEQ ID NO: 1364559 - DNA, 15 bp, Homo sapiens
cgtgagccaccgcac

SEQ ID NO: 1364560 - DNA, 15 bp, Homo sapiens
acgtgagccaccgca

SEQ ID NO: 1364561 - DNA, 15 bp, Homo sapiens
aacgtgagccaccgc

SEQ ID NO: 1364562 - DNA, 15 bp, Homo sapiens
gaacgtgagccaccg

SEQ ID NO: 1364563 - DNA, 15 bp, Homo sapiens
tgaacgtgagccacc

SEQ ID NO: 1364564 - DNA, 15 bp, Homo sapiens
atgaacgtgagccac

SEQ ID NO: 1364565 - DNA, 15 bp, Homo sapiens
tatgaacgtgagcca

SEQ ID NO: 1364566 - DNA, 15 bp, Homo sapiens
ttatgaacgtgagcc

SEQ ID NO: 1364567 - DNA, 15 bp, Homo sapiens
attatgaacgtgagc

SEQ ID NO: 1364568 - DNA, 15 bp, Homo sapiens
gattatgaacgtgag

SEQ ID NO: 1364569 - DNA, 15 bp, Homo sapiens
ggattatgaacgtga

SEQ ID NO: 1364570 - DNA, 15 bp, Homo sapiens
gggattatgaacgtg

SEQ ID NO: 1364571 - DNA, 15 bp, Homo sapiens
tgggattatgaacgt

SEQ ID NO: 1364572 - DNA, 15 bp, Homo sapiens
ctgggattatgaacg

SEQ ID NO: 1364573 - DNA, 15 bp, Homo sapiens
tctgggattatgaac

SEQ ID NO: 1364574 - DNA, 15 bp, Homo sapiens
ttctgggattatgaa

SEQ ID NO: 1364575 - DNA, 15 bp, Homo sapiens
gttctgggattatga

SEQ ID NO: 1364576 - DNA, 15 bp, Homo sapiens
agttctgggattatg

SEQ ID NO: 1364577 - DNA, 15 bp, Homo sapiens
aagttctgggattat

SEQ ID NO: 1364578 - DNA, 15 bp, Homo sapiens
gatctgcctgcctca

SEQ ID NO: 1364579 - DNA, 15 bp, Homo sapiens
tgatctgcctgcctc

SEQ ID NO: 1364580 - DNA, 15 bp, Homo sapiens
ggtgatctgcctgcc

SEQ ID NO: 1364581 - DNA, 15 bp, Homo sapiens
gggtgatctgcctgc

SEQ ID NO: 1364582 - DNA, 15 bp, Homo sapiens
cgggtgatctgcctg

SEQ ID NO: 1364583 - DNA, 15 bp, Homo sapiens
tcgggtgatctgcct

SEQ ID NO: 1364584 - DNA, 15 bp, Homo sapiens
aaactcctgacctcg

SEQ ID NO: 1364585 - DNA, 15 bp, Homo sapiens
ccagactggtctcaa

SEQ ID NO: 1364586 - DNA, 15 bp, Homo sapiens
tccagactggtctca

SEQ ID NO: 1364587 - DNA, 15 bp, Homo sapiens
gttgtccagactggt

SEQ ID NO: 1364588 - DNA, 15 bp, Homo sapiens
tgttgtccagactgg

SEQ ID NO: 1364589 - DNA, 15 bp, Homo sapiens
ttgttgtccagactg

SEQ ID NO: 1364590 - DNA, 15 bp, Homo sapiens
cttgttgtccagact

SEQ ID NO: 1364591 - DNA, 15 bp, Homo sapiens
ccttgttgtccagac

SEQ ID NO: 1364592 - DNA, 15 bp, Homo sapiens
accttgttgtccaga

SEQ ID NO: 1364593 - DNA, 15 bp, Homo sapiens
caccttgttgtccag

SEQ ID NO: 1364594 - DNA, 15 bp, Homo sapiens
tcaccttgttgtcca

SEQ ID NO: 1364595 - DNA, 15 bp, Homo sapiens
ttcaccttgttgtcc

SEQ ID NO: 1364596 - DNA, 15 bp, Homo sapiens
tttcaccttgttgtc

SEQ ID NO: 1364597 - DNA, 15 bp, Homo sapiens
gtttcaccttgttgt

SEQ ID NO: 1364598 - DNA, 15 bp, Homo sapiens
ggtttcaccttgttg

SEQ ID NO: 1364599 - DNA, 15 bp, Homo sapiens
gggtttcaccttgtt

SEQ ID NO: 1364600 - DNA, 15 bp, Homo sapiens
ggggtttcaccttgt

SEQ ID NO: 1364601 - DNA, 15 bp, Homo sapiens
cggggtttcaccttg

SEQ ID NO: 1364602 - DNA, 15 bp, Homo sapiens
acggggtttcacctt

SEQ ID NO: 1364603 - DNA, 15 bp, Homo sapiens
gacggggtttcacct

SEQ ID NO: 1364604 - DNA, 15 bp, Homo sapiens
cagtagagacggggt

SEQ ID NO: 1364605 - DNA, 15 bp, Homo sapiens
tcagtagagacgggg

SEQ ID NO: 1364606 - DNA, 15 bp, Homo sapiens
ttcagtagagacggg

SEQ ID NO: 1364607 - DNA, 15 bp, Homo sapiens
tttcagtagagacgg

SEQ ID NO: 1364608 - DNA, 15 bp, Homo sapiens
ttttcagtagagacg

SEQ ID NO: 1364609 - DNA, 15 bp, Homo sapiens
gccacacccggctaa

SEQ ID NO: 1364610 - DNA, 15 bp, Homo sapiens
cgccacacccggcta

SEQ ID NO: 1364611 - DNA, 15 bp, Homo sapiens
ccgccacacccggct

SEQ ID NO: 1364612 - DNA, 15 bp, Homo sapiens
accgccacacccggc

SEQ ID NO: 1364613 - DNA, 15 bp, Homo sapiens
caccgccacacccgg

SEQ ID NO: 1364614 - DNA, 15 bp, Homo sapiens
ccaccgccacacccg

SEQ ID NO: 1364615 - DNA, 15 bp, Homo sapiens
cccaccgccacaccc

SEQ ID NO: 1364616 - DNA, 15 bp, Homo sapiens
acccaccgccacacc

SEQ ID NO: 1364617 - DNA, 15 bp, Homo sapiens
cacccaccgccacac

SEQ ID NO: 1364618 - DNA, 15 bp, Homo sapiens
gcacccaccgccaca

SEQ ID NO: 1364619 - DNA, 15 bp, Homo sapiens
ggcacccaccgccac

SEQ ID NO: 1364620 - DNA, 15 bp, Homo sapiens
aggcacccaccgcca

SEQ ID NO: 1364621 - DNA, 15 bp, Homo sapiens
caggcacccaccgcc

SEQ ID NO: 1364622 - DNA, 15 bp, Homo sapiens
acaggcacccaccgc

SEQ ID NO: 1364623 - DNA, 15 bp, Homo sapiens
tacaggcacccaccg

SEQ ID NO: 1364624 - DNA, 15 bp, Homo sapiens
cggttcaagcgattc

SEQ ID NO: 1364625 - DNA, 15 bp, Homo sapiens
ccggttcaagcgatt

SEQ ID NO: 1364626 - DNA, 15 bp, Homo sapiens
cccggttcaagcgat

SEQ ID NO: 1364627 - DNA, 15 bp, Homo sapiens
tcccggttcaagcga

SEQ ID NO: 1364628 - DNA, 15 bp, Homo sapiens
ctcccggttcaagcg

SEQ ID NO: 1364629 - DNA, 15 bp, Homo sapiens
tctcccggttcaagc

SEQ ID NO: 1364630 - DNA, 15 bp, Homo sapiens
atctcccggttcaag

SEQ ID NO: 1364631 - DNA, 15 bp, Homo sapiens
catctcccggttcaa

SEQ ID NO: 1364632 - DNA, 15 bp, Homo sapiens
ccatctcccggttca

SEQ ID NO: 1364633 - DNA, 15 bp, Homo sapiens
tccatctcccggttc

SEQ ID NO: 1364634 - DNA, 15 bp, Homo sapiens
ctccatctcccggtt

SEQ ID NO: 1364635 - DNA, 15 bp, Homo sapiens
cctccatctcccggt

SEQ ID NO: 1364636 - DNA, 15 bp, Homo sapiens
ggcagtggcgcgatc

SEQ ID NO: 1364637 - DNA, 15 bp, Homo sapiens
gggcagtggcgcgat

SEQ ID NO: 1364638 - DNA, 15 bp, Homo sapiens
agggcagtggcgcga

SEQ ID NO: 1364639 - DNA, 15 bp, Homo sapiens
tagggcagtggcgcg

SEQ ID NO: 1364640 - DNA, 15 bp, Homo sapiens
gtagggcagtggcgc

SEQ ID NO: 1364641 - DNA, 15 bp, Homo sapiens
tgtagggcagtggcg

SEQ ID NO: 1364642 - DNA, 15 bp, Homo sapiens
ctgtagggcagtggc

SEQ ID NO: 1364643 - DNA, 15 bp, Homo sapiens
actgtagggcagtgg

SEQ ID NO: 1364644 - DNA, 15 bp, Homo sapiens
gactgtagggcagtg

SEQ ID NO: 1364645 - DNA, 15 bp, Homo sapiens
agactgtagggcagt

SEQ ID NO: 1364646 - DNA, 15 bp, Homo sapiens
aagactgtagggcag

SEQ ID NO: 1364647 - DNA, 15 bp, Homo sapiens
taagactgtagggca

SEQ ID NO: 1364648 - DNA, 15 bp, Homo sapiens
ataagactgtagggc

SEQ ID NO: 1364649 - DNA, 15 bp, Homo sapiens
gataagactgtaggg

SEQ ID NO: 1364650 - DNA, 15 bp, Homo sapiens
tgataagactgtagg

SEQ ID NO: 1364651 - DNA, 15 bp, Homo sapiens
ttgataagactgtag

SEQ ID NO: 1364652 - DNA, 15 bp, Homo sapiens
gttgataagactgta

SEQ ID NO: 1364653 - DNA, 15 bp, Homo sapiens
tgttgataagactgt

SEQ ID NO: 1364654 - DNA, 15 bp, Homo sapiens
ttgttgataagactg

SEQ ID NO: 1364655 - DNA, 15 bp, Homo sapiens
tttgttgataagact

SEQ ID NO: 1364656 - DNA, 15 bp, Homo sapiens
ttttgttgataagac

SEQ ID NO: 1364657 - DNA, 15 bp, Homo sapiens
gttttgttgataaga

SEQ ID NO: 1364658 - DNA, 15 bp, Homo sapiens
cgttttgttgataag

SEQ ID NO: 1364659 - DNA, 15 bp, Homo sapiens
tcgttttgttgataa

SEQ ID NO: 1364660 - DNA, 15 bp, Homo sapiens
ctcgttttgttgata

SEQ ID NO: 1364661 - DNA, 15 bp, Homo sapiens
tctcgttttgttgat

SEQ ID NO: 1364662 - DNA, 15 bp, Homo sapiens
gtctcgttttgttga

SEQ ID NO: 1364663 - DNA, 15 bp, Homo sapiens
agtctcgttttgttg

SEQ ID NO: 1364664 - DNA, 15 bp, Homo sapiens
gagtctcgttttgtt

SEQ ID NO: 1364665 - DNA, 15 bp, Homo sapiens
agagtctcgttttgt

SEQ ID NO: 1364666 - DNA, 15 bp, Homo sapiens
cagagtctcgttttg

SEQ ID NO: 1364667 - DNA, 15 bp, Homo sapiens
acagagtctcgtttt

SEQ ID NO: 1364668 - DNA, 15 bp, Homo sapiens
gacagagtctcgttt

SEQ ID NO: 1364669 - DNA, 15 bp, Homo sapiens
agacagagtctcgtt

SEQ ID NO: 1364670 - DNA, 15 bp, Homo sapiens
gagacagagtctcgt

SEQ ID NO: 1364671 - DNA, 15 bp, Homo sapiens
tcctttatttattta

SEQ ID NO: 1364672 - DNA, 15 bp, Homo sapiens
ttcctttatttattt

SEQ ID NO: 1364673 - DNA, 15 bp, Homo sapiens
attcctttatttatt

SEQ ID NO: 1364674 - DNA, 15 bp, Homo sapiens
cattcctttatttat

SEQ ID NO: 1364675 - DNA, 15 bp, Homo sapiens
gcattcctttattta

SEQ ID NO: 1364676 - DNA, 15 bp, Homo sapiens
agcattcctttattt

SEQ ID NO: 1364677 - DNA, 15 bp, Homo sapiens
cagcattcctttatt

SEQ ID NO: 1364678 - DNA, 15 bp, Homo sapiens
acagcattcctttat

SEQ ID NO: 1364679 - DNA, 15 bp, Homo sapiens
tacagcattccttta

SEQ ID NO: 1364680 - DNA, 15 bp, Homo sapiens
gtacagcattccttt

SEQ ID NO: 1364681 - DNA, 15 bp, Homo sapiens
agtacagcattcctt

SEQ ID NO: 1364682 - DNA, 15 bp, Homo sapiens
gagtacagcattcct

SEQ ID NO: 1364683 - DNA, 15 bp, Homo sapiens
tgagtacagcattcc

SEQ ID NO: 1364684 - DNA, 15 bp, Homo sapiens
atgagtacagcattc

SEQ ID NO: 1364685 - DNA, 15 bp, Homo sapiens
aatgagtacagcatt

SEQ ID NO: 1364686 - DNA, 15 bp, Homo sapiens
aaatgagtacagcat

SEQ ID NO: 1364687 - DNA, 15 bp, Homo sapiens
aaaatgagtacagca

SEQ ID NO: 1364688 - DNA, 15 bp, Homo sapiens
caaaatgagtacagc

SEQ ID NO: 1364689 - DNA, 15 bp, Homo sapiens
tcaaaatgagtacag

SEQ ID NO: 1364690 - DNA, 15 bp, Homo sapiens
gtcaaaatgagtaca

SEQ ID NO: 1364691 - DNA, 15 bp, Homo sapiens
ggtcaaaatgagtac

SEQ ID NO: 1364692 - DNA, 15 bp, Homo sapiens
aggtcaaaatgagta

SEQ ID NO: 1364693 - DNA, 15 bp, Homo sapiens
taggtcaaaatgagt

SEQ ID NO: 1364694 - DNA, 15 bp, Homo sapiens
ataggtcaaaatgag

SEQ ID NO: 1364695 - DNA, 15 bp, Homo sapiens
tataggtcaaaatga

SEQ ID NO: 1364696 - DNA, 15 bp, Homo sapiens
atataggtcaaaatg

SEQ ID NO: 1364697 - DNA, 15 bp, Homo sapiens
gatataggtcaaaat

SEQ ID NO: 1364698 - DNA, 15 bp, Homo sapiens
ggatataggtcaaaa

SEQ ID NO: 1364699 - DNA, 15 bp, Homo sapiens
aggatataggtcaaa

SEQ ID NO: 1364700 - DNA, 15 bp, Homo sapiens
taggatataggtcaa

SEQ ID NO: 1364701 - DNA, 15 bp, Homo sapiens
ttaggatataggtca

SEQ ID NO: 1364702 - DNA, 15 bp, Homo sapiens
cttaggatataggtc

SEQ ID NO: 1364703 - DNA, 15 bp, Homo sapiens
acttaggatataggt

SEQ ID NO: 1364704 - DNA, 15 bp, Homo sapiens
gacttaggatatagg

SEQ ID NO: 1364705 - DNA, 15 bp, Homo sapiens
agacttaggatatag

SEQ ID NO: 1364706 - DNA, 15 bp, Homo sapiens
gagacttaggatata

SEQ ID NO: 1364707 - DNA, 15 bp, Homo sapiens
tgagacttaggatat

SEQ ID NO: 1364708 - DNA, 15 bp, Homo sapiens
gtgagacttaggata

SEQ ID NO: 1364709 - DNA, 15 bp, Homo sapiens
ggtgagacttaggat

SEQ ID NO: 1364710 - DNA, 15 bp, Homo sapiens
aggtgagacttagga

SEQ ID NO: 1364711 - DNA, 15 bp, Homo sapiens
caggtgagacttagg

SEQ ID NO: 1364712 - DNA, 15 bp, Homo sapiens
acaggtgagacttag

SEQ ID NO: 1364713 - DNA, 15 bp, Homo sapiens
cacaggtgagactta

SEQ ID NO: 1364714 - DNA, 15 bp, Homo sapiens
tcacaggtgagactt

SEQ ID NO: 1364715 - DNA, 15 bp, Homo sapiens
ttcacaggtgagact

SEQ ID NO: 1364716 - DNA, 15 bp, Homo sapiens
cttcacaggtgagac

SEQ ID NO: 1364717 - DNA, 15 bp, Homo sapiens
acttcacaggtgaga

SEQ ID NO: 1364718 - DNA, 15 bp, Homo sapiens
aacttcacaggtgag

SEQ ID NO: 1364719 - DNA, 15 bp, Homo sapiens
aaacttcacaggtga

SEQ ID NO: 1364720 - DNA, 15 bp, Homo sapiens
taaacttcacaggtg

SEQ ID NO: 1364721 - DNA, 15 bp, Homo sapiens
ttaaacttcacaggt

SEQ ID NO: 1364722 - DNA, 15 bp, Homo sapiens
tttaaacttcacagg

SEQ ID NO: 1364723 - DNA, 15 bp, Homo sapiens
gtttaaacttcacag

SEQ ID NO: 1364724 - DNA, 15 bp, Homo sapiens
tgtttaaacttcaca

SEQ ID NO: 1364725 - DNA, 15 bp, Homo sapiens
ctgtttaaacttcac

SEQ ID NO: 1364726 - DNA, 15 bp, Homo sapiens
gctgtttaaacttca

SEQ ID NO: 1364727 - DNA, 15 bp, Homo sapiens
tgctgtttaaacttc

SEQ ID NO: 1364728 - DNA, 15 bp, Homo sapiens
gtgctgtttaaactt

SEQ ID NO: 1364729 - DNA, 15 bp, Homo sapiens
tgtgctgtttaaact

SEQ ID NO: 1364730 - DNA, 15 bp, Homo sapiens
atgtgctgtttaaac

SEQ ID NO: 1364731 - DNA, 15 bp, Homo sapiens
tatgtgctgtttaaa

SEQ ID NO: 1364732 - DNA, 15 bp, Homo sapiens
atatgtgctgtttaa

SEQ ID NO: 1364733 - DNA, 15 bp, Homo sapiens
aatatgtgctgttta

SEQ ID NO: 1364734 - DNA, 15 bp, Homo sapiens
taatatgtgctgttt

SEQ ID NO: 1364735 - DNA, 15 bp, Homo sapiens
gtaatatgtgctgtt

SEQ ID NO: 1364736 - DNA, 15 bp, Homo sapiens
ggtaatatgtgctgt

SEQ ID NO: 1364737 - DNA, 15 bp, Homo sapiens
tggtaatatgtgctg

SEQ ID NO: 1364738 - DNA, 15 bp, Homo sapiens
gtggtaatatgtgct

SEQ ID NO: 1364739 - DNA, 15 bp, Homo sapiens
cgtggtaatatgtgc

SEQ ID NO: 1364740 - DNA, 15 bp, Homo sapiens
tcgtggtaatatgtg

SEQ ID NO: 1364741 - DNA, 15 bp, Homo sapiens
atcgtggtaatatgt

SEQ ID NO: 1364742 - DNA, 15 bp, Homo sapiens
aatcgtggtaatatg

SEQ ID NO: 1364743 - DNA, 15 bp, Homo sapiens
taatcgtggtaatat

SEQ ID NO: 1364744 - DNA, 15 bp, Homo sapiens
ttaatcgtggtaata

SEQ ID NO: 1364745 - DNA, 15 bp, Homo sapiens
tttaatcgtggtaat

SEQ ID NO: 1364746 - DNA, 15 bp, Homo sapiens
ttttaatcgtggtaa

SEQ ID NO: 1364747 - DNA, 15 bp, Homo sapiens
gttttaatcgtggta

SEQ ID NO: 1364748 - DNA, 15 bp, Homo sapiens
tgttttaatcgtggt

SEQ ID NO: 1364749 - DNA, 15 bp, Homo sapiens
atgttttaatcgtgg

SEQ ID NO: 1364750 - DNA, 15 bp, Homo sapiens
catgttttaatcgtg

SEQ ID NO: 1364751 - DNA, 15 bp, Homo sapiens
acatgttttaatcgt

SEQ ID NO: 1364752 - DNA, 15 bp, Homo sapiens
cacatgttttaatcg

SEQ ID NO: 1364753 - DNA, 15 bp, Homo sapiens
acacatgttttaatc

SEQ ID NO: 1364754 - DNA, 15 bp, Homo sapiens
aacacatgttttaat

SEQ ID NO: 1364755 - DNA, 15 bp, Homo sapiens
aaacacatgttttaa

SEQ ID NO: 1364756 - DNA, 15 bp, Homo sapiens
caaacacatgtttta

SEQ ID NO: 1364757 - DNA, 15 bp, Homo sapiens
caacaaacacatgtt

SEQ ID NO: 1364758 - DNA, 15 bp, Homo sapiens
ccaacaaacacatgt

SEQ ID NO: 1364759 - DNA, 15 bp, Homo sapiens
cccaacaaacacatg

SEQ ID NO: 1364760 - DNA, 15 bp, Homo sapiens
ccccaacaaacacat

SEQ ID NO: 1364761 - DNA, 15 bp, Homo sapiens
gccccaacaaacaca

SEQ ID NO: 1364762 - DNA, 15 bp, Homo sapiens
cgccccaacaaacac

SEQ ID NO: 1364763 - DNA, 15 bp, Homo sapiens
ccgccccaacaaaca

SEQ ID NO: 1364764 - DNA, 15 bp, Homo sapiens
cccgccccaacaaac

SEQ ID NO: 1364765 - DNA, 15 bp, Homo sapiens
ccccgccccaacaaa

SEQ ID NO: 1364766 - DNA, 15 bp, Homo sapiens
accccgccccaacaa

SEQ ID NO: 1364767 - DNA, 15 bp, Homo sapiens
taccccgccccaaca

SEQ ID NO: 1364768 - DNA, 15 bp, Homo sapiens
ctaccccgccccaac

SEQ ID NO: 1364769 - DNA, 15 bp, Homo sapiens
cctaccccgccccaa

SEQ ID NO: 1364770 - DNA, 15 bp, Homo sapiens
ccctaccccgcccca

SEQ ID NO: 1364771 - DNA, 15 bp, Homo sapiens
cccctaccccgcccc

SEQ ID NO: 1364772 - DNA, 15 bp, Homo sapiens
ccccctaccccgccc

SEQ ID NO: 1364773 - DNA, 15 bp, Homo sapiens
cccccctaccccgcc

SEQ ID NO: 1364774 - DNA, 15 bp, Homo sapiens
acccccctaccccgc

SEQ ID NO: 1364775 - DNA, 15 bp, Homo sapiens
cacccccctaccccg

SEQ ID NO: 1364776 - DNA, 15 bp, Homo sapiens
accacccccctaccc

SEQ ID NO: 1364777 - DNA, 15 bp, Homo sapiens
taccacccccctacc

SEQ ID NO: 1364778 - DNA, 15 bp, Homo sapiens
ttaccacccccctac

SEQ ID NO: 1364779 - DNA, 15 bp, Homo sapiens
tttaccaccccccta

SEQ ID NO: 1364780 - DNA, 15 bp, Homo sapiens
ctttaccacccccct

SEQ ID NO: 1364781 - DNA, 15 bp, Homo sapiens
cctttaccacccccc

SEQ ID NO: 1364782 - DNA, 15 bp, Homo sapiens
tcctttaccaccccc

SEQ ID NO: 1364783 - DNA, 15 bp, Homo sapiens
ctcctttaccacccc

SEQ ID NO: 1364784 - DNA, 15 bp, Homo sapiens
tctcctttaccaccc

SEQ ID NO: 1364785 - DNA, 15 bp, Homo sapiens
gtctcctttaccacc

SEQ ID NO: 1364786 - DNA, 15 bp, Homo sapiens
tgtctcctttaccac

SEQ ID NO: 1364787 - DNA, 15 bp, Homo sapiens
ttgtctcctttacca

SEQ ID NO: 1364788 - DNA, 15 bp, Homo sapiens
cttgtctcctttacc

SEQ ID NO: 1364789 - DNA, 15 bp, Homo sapiens
acttgtctcctttac

SEQ ID NO: 1364790 - DNA, 15 bp, Homo sapiens
tacttgtctccttta

SEQ ID NO: 1364791 - DNA, 15 bp, Homo sapiens
ctacttgtctccttt

SEQ ID NO: 1364792 - DNA, 15 bp, Homo sapiens
cctacttgtctcctt

SEQ ID NO: 1364793 - DNA, 15 bp, Homo sapiens
tcctacttgtctcct

SEQ ID NO: 1364794 - DNA, 15 bp, Homo sapiens
ctcctacttgtctcc

SEQ ID NO: 1364795 - DNA, 15 bp, Homo sapiens
gctcctacttgtctc

SEQ ID NO: 1364796 - DNA, 15 bp, Homo sapiens
tgctcctacttgtct

SEQ ID NO: 1364797 - DNA, 15 bp, Homo sapiens
ctgctcctacttgtc

SEQ ID NO: 1364798 - DNA, 15 bp, Homo sapiens
gctgctcctacttgt

SEQ ID NO: 1364799 - DNA, 15 bp, Homo sapiens
agctgctcctacttg

SEQ ID NO: 1364800 - DNA, 15 bp, Homo sapiens
cagctgctcctactt

SEQ ID NO: 1364801 - DNA, 15 bp, Homo sapiens
tcagctgctcctact

SEQ ID NO: 1364802 - DNA, 15 bp, Homo sapiens
ttcagctgctcctac

SEQ ID NO: 1364803 - DNA, 15 bp, Homo sapiens
cttcagctgctccta

SEQ ID NO: 1364804 - DNA, 15 bp, Homo sapiens
acttcagctgctcct

SEQ ID NO: 1364805 - DNA, 15 bp, Homo sapiens
aacttcagctgctcc

SEQ ID NO: 1364806 - DNA, 15 bp, Homo sapiens
taacttcagctgctc

SEQ ID NO: 1364807 - DNA, 15 bp, Homo sapiens
ttaacttcagctgct

SEQ ID NO: 1364808 - DNA, 15 bp, Homo sapiens
tttaacttcagctgc

SEQ ID NO: 1364809 - DNA, 15 bp, Homo sapiens
ttttaacttcagctg

SEQ ID NO: 1364810 - DNA, 15 bp, Homo sapiens
tttttaacttcagct

SEQ ID NO: 1364811 - DNA, 15 bp, Homo sapiens
ttttttaacttcagc

SEQ ID NO: 1364812 - DNA, 15 bp, Homo sapiens
tttttttaacttcag

SEQ ID NO: 1364813 - DNA, 15 bp, Homo sapiens
ctttttttaacttca

SEQ ID NO: 1364814 - DNA, 15 bp, Homo sapiens
tctttttttaacttc

SEQ ID NO: 1364815 - DNA, 15 bp, Homo sapiens
ttctttttttaactt

SEQ ID NO: 1364816 - DNA, 15 bp, Homo sapiens
tttctttttttaact

SEQ ID NO: 1364817 - DNA, 15 bp, Homo sapiens
ttttctttttttaac

SEQ ID NO: 1364818 - DNA, 15 bp, Homo sapiens
attttttcttttttt

SEQ ID NO: 1364819 - DNA, 15 bp, Homo sapiens
aattttttctttttt

SEQ ID NO: 1364820 - DNA, 15 bp, Homo sapiens
gaattttttcttttt

SEQ ID NO: 1364821 - DNA, 15 bp, Homo sapiens
tgaattttttctttt

SEQ ID NO: 1364822 - DNA, 15 bp, Homo sapiens
gtgaattttttcttt

SEQ ID NO: 1364823 - DNA, 15 bp, Homo sapiens
agtgaattttttctt

SEQ ID NO: 1364824 - DNA, 15 bp, Homo sapiens
gagtgaattttttct

SEQ ID NO: 1364825 - DNA, 15 bp, Homo sapiens
tgagtgaattttttc

SEQ ID NO: 1364826 - DNA, 15 bp, Homo sapiens
ctgagtgaatttttt

SEQ ID NO: 1364827 - DNA, 15 bp, Homo sapiens
actgagtgaattttt

SEQ ID NO: 1364828 - DNA, 15 bp, Homo sapiens
gactgagtgaatttt

SEQ ID NO: 1364829 - DNA, 15 bp, Homo sapiens
tgactgagtgaattt

SEQ ID NO: 1364830 - DNA, 15 bp, Homo sapiens
ttgactgagtgaatt

SEQ ID NO: 1364831 - DNA, 15 bp, Homo sapiens
tttgactgagtgaat

SEQ ID NO: 1364832 - DNA, 15 bp, Homo sapiens
gtttgactgagtgaa

SEQ ID NO: 1364833 - DNA, 15 bp, Homo sapiens
ggtttgactgagtga

SEQ ID NO: 1364834 - DNA, 15 bp, Homo sapiens
gggtttgactgagtg

SEQ ID NO: 1364835 - DNA, 15 bp, Homo sapiens
tgggtttgactgagt

SEQ ID NO: 1364836 - DNA, 15 bp, Homo sapiens
ttgggtttgactgag

SEQ ID NO: 1364837 - DNA, 15 bp, Homo sapiens
tttgggtttgactga

SEQ ID NO: 1364838 - DNA, 15 bp, Homo sapiens
atttgggtttgactg

SEQ ID NO: 1364839 - DNA, 15 bp, Homo sapiens
catttgggtttgact

SEQ ID NO: 1364840 - DNA, 15 bp, Homo sapiens
gcatttgggtttgac

SEQ ID NO: 1364841 - DNA, 15 bp, Homo sapiens
tgcatttgggtttga

SEQ ID NO: 1364842 - DNA, 15 bp, Homo sapiens
ctgcatttgggtttg

SEQ ID NO: 1364843 - DNA, 15 bp, Homo sapiens
cctgcatttgggttt

SEQ ID NO: 1364844 - DNA, 15 bp, Homo sapiens
ccctgcatttgggtt

SEQ ID NO: 1364845 - DNA, 15 bp, Homo sapiens
accctgcatttgggt

SEQ ID NO: 1364846 - DNA, 15 bp, Homo sapiens
caccctgcatttggg

SEQ ID NO: 1364847 - DNA, 15 bp, Homo sapiens
acaccctgcatttgg

SEQ ID NO: 1364848 - DNA, 15 bp, Homo sapiens
cacaccctgcatttg

SEQ ID NO: 1364849 - DNA, 15 bp, Homo sapiens
tcacaccctgcattt

SEQ ID NO: 1364850 - DNA, 15 bp, Homo sapiens
gtcacaccctgcatt

SEQ ID NO: 1364851 - DNA, 15 bp, Homo sapiens
ggtcacaccctgcat

SEQ ID NO: 1364852 - DNA, 15 bp, Homo sapiens
aggtcacaccctgca

SEQ ID NO: 1364853 - DNA, 15 bp, Homo sapiens
aaggtcacaccctgc

SEQ ID NO: 1364854 - DNA, 15 bp, Homo sapiens
gaaggtcacaccctg

SEQ ID NO: 1364855 - DNA, 15 bp, Homo sapiens
tgaaggtcacaccct

SEQ ID NO: 1364856 - DNA, 15 bp, Homo sapiens
ctgaaggtcacaccc

SEQ ID NO: 1364857 - DNA, 15 bp, Homo sapiens
cctgaaggtcacacc

SEQ ID NO: 1364858 - DNA, 15 bp, Homo sapiens
ccctgaaggtcacac

SEQ ID NO: 1364859 - DNA, 15 bp, Homo sapiens
accctgaaggtcaca

SEQ ID NO: 1364860 - DNA, 15 bp, Homo sapiens
aaccctgaaggtcac

SEQ ID NO: 1364861 - DNA, 15 bp, Homo sapiens
aaaccctgaaggtca

SEQ ID NO: 1364862 - DNA, 15 bp, Homo sapiens
aaaaccctgaaggtc

SEQ ID NO: 1364863 - DNA, 15 bp, Homo sapiens
aaaaaccctgaaggt

SEQ ID NO: 1364864 - DNA, 15 bp, Homo sapiens
taaaaaccctgaagg

SEQ ID NO: 1364865 - DNA, 15 bp, Homo sapiens
ataaaaaccctgaag

SEQ ID NO: 1364866 - DNA, 15 bp, Homo sapiens
aataaaaaccctgaa

SEQ ID NO: 1364867 - DNA, 15 bp, Homo sapiens
caataaaaaccctga

SEQ ID NO: 1364868 - DNA, 15 bp, Homo sapiens
tcaataaaaaccctg

SEQ ID NO: 1364869 - DNA, 15 bp, Homo sapiens
atcaataaaaaccct

SEQ ID NO: 1364870 - DNA, 15 bp, Homo sapiens
aatcaataaaaaccc

SEQ ID NO: 1364871 - DNA, 15 bp, Homo sapiens
caatcaataaaaacc

SEQ ID NO: 1364872 - DNA, 15 bp, Homo sapiens
tcaatcaataaaaac

SEQ ID NO: 1364873 - DNA, 15 bp, Homo sapiens
ctcaatcaataaaaa

SEQ ID NO: 1364874 - DNA, 15 bp, Homo sapiens
gctcaatcaataaaa

SEQ ID NO: 1364875 - DNA, 15 bp, Homo sapiens
tgctcaatcaataaa

SEQ ID NO: 1364876 - DNA, 15 bp, Homo sapiens
gtgctcaatcaataa

SEQ ID NO: 1364877 - DNA, 15 bp, Homo sapiens
ggtgctcaatcaata

SEQ ID NO: 1364878 - DNA, 15 bp, Homo sapiens
aggtgctcaatcaat

SEQ ID NO: 1364879 - DNA, 15 bp, Homo sapiens
taggtgctcaatcaa

SEQ ID NO: 1364880 - DNA, 15 bp, Homo sapiens
gtaggtgctcaatca

SEQ ID NO: 1364881 - DNA, 15 bp, Homo sapiens
agtaggtgctcaatc

SEQ ID NO: 1364882 - DNA, 15 bp, Homo sapiens
tagtaggtgctcaat

SEQ ID NO: 1364883 - DNA, 15 bp, Homo sapiens
atagtaggtgctcaa

SEQ ID NO: 1364884 - DNA, 15 bp, Homo sapiens
catagtaggtgctca

SEQ ID NO: 1364885 - DNA, 15 bp, Homo sapiens
gcatagtaggtgctc

SEQ ID NO: 1364886 - DNA, 15 bp, Homo sapiens
agcatagtaggtgct

SEQ ID NO: 1364887 - DNA, 15 bp, Homo sapiens
cagcatagtaggtgc

SEQ ID NO: 1364888 - DNA, 15 bp, Homo sapiens
ccagcatagtaggtg

SEQ ID NO: 1364889 - DNA, 15 bp, Homo sapiens
gccagcatagtaggt

SEQ ID NO: 1364890 - DNA, 15 bp, Homo sapiens
ggccagcatagtagg

SEQ ID NO: 1364891 - DNA, 15 bp, Homo sapiens
gggccagcatagtag

SEQ ID NO: 1364892 - DNA, 15 bp, Homo sapiens
agggccagcatagta

SEQ ID NO: 1364893 - DNA, 15 bp, Homo sapiens
gagggccagcatagt

SEQ ID NO: 1364894 - DNA, 15 bp, Homo sapiens
ggagggccagcatag

SEQ ID NO: 1364895 - DNA, 15 bp, Homo sapiens
cggagggccagcata

SEQ ID NO: 1364896 - DNA, 15 bp, Homo sapiens
gcggagggccagcat

SEQ ID NO: 1364897 - DNA, 15 bp, Homo sapiens
ggcggagggccagca

SEQ ID NO: 1364898 - DNA, 15 bp, Homo sapiens
tggcggagggccagc

SEQ ID NO: 1364899 - DNA, 15 bp, Homo sapiens
gtggcggagggccag

SEQ ID NO: 1364900 - DNA, 15 bp, Homo sapiens
agtggcggagggcca

SEQ ID NO: 1364901 - DNA, 15 bp, Homo sapiens
aagtggcggagggcc

SEQ ID NO: 1364902 - DNA, 15 bp, Homo sapiens
caagtggcggagggc

SEQ ID NO: 1364903 - DNA, 15 bp, Homo sapiens
gcaagtggcggaggg

SEQ ID NO: 1364904 - DNA, 15 bp, Homo sapiens
ggcaagtggcggagg

SEQ ID NO: 1364905 - DNA, 15 bp, Homo sapiens
aggcaagtggcggag

SEQ ID NO: 1364906 - DNA, 15 bp, Homo sapiens
caggcaagtggcgga

SEQ ID NO: 1364907 - DNA, 15 bp, Homo sapiens
gcaggcaagtggcgg

SEQ ID NO: 1364908 - DNA, 15 bp, Homo sapiens
agcaggcaagtggcg

SEQ ID NO: 1364909 - DNA, 15 bp, Homo sapiens
tagcaggcaagtggc

SEQ ID NO: 1364910 - DNA, 15 bp, Homo sapiens
ctagcaggcaagtgg

SEQ ID NO: 1364911 - DNA, 15 bp, Homo sapiens
tctagcaggcaagtg

SEQ ID NO: 1364912 - DNA, 15 bp, Homo sapiens
atctagcaggcaagt

SEQ ID NO: 1364913 - DNA, 15 bp, Homo sapiens
catctagcaggcaag

SEQ ID NO: 1364914 - DNA, 15 bp, Homo sapiens
gcatctagcaggcaa

SEQ ID NO: 1364915 - DNA, 15 bp, Homo sapiens
agcatctagcaggca

SEQ ID NO: 1364916 - DNA, 15 bp, Homo sapiens
gagcatctagcaggc

SEQ ID NO: 1364917 - DNA, 15 bp, Homo sapiens
agagcatctagcagg

SEQ ID NO: 1364918 - DNA, 15 bp, Homo sapiens
gagagcatctagcag

SEQ ID NO: 1364919 - DNA, 15 bp, Homo sapiens
agagagcatctagca

SEQ ID NO: 1364920 - DNA, 15 bp, Homo sapiens
cagagagcatctagc

SEQ ID NO: 1364921 - DNA, 15 bp, Homo sapiens
acagagagcatctag

SEQ ID NO: 1364922 - DNA, 15 bp, Homo sapiens
gacagagagcatcta

SEQ ID NO: 1364923 - DNA, 15 bp, Homo sapiens
agacagagagcatct

SEQ ID NO: 1364924 - DNA, 15 bp, Homo sapiens
gagacagagagcatc

SEQ ID NO: 1364925 - DNA, 15 bp, Homo sapiens
agagacagagagcat

SEQ ID NO: 1364926 - DNA, 15 bp, Homo sapiens
gagagacagagagca

SEQ ID NO: 1364927 - DNA, 15 bp, Homo sapiens
tgagagacagagagc

SEQ ID NO: 1364928 - DNA, 15 bp, Homo sapiens
ctgagagacagagag

SEQ ID NO: 1364929 - DNA, 15 bp, Homo sapiens
actgagagacagaga

SEQ ID NO: 1364930 - DNA, 15 bp, Homo sapiens
tactgagagacagag

SEQ ID NO: 1364931 - DNA, 15 bp, Homo sapiens
gtactgagagacaga

SEQ ID NO: 1364932 - DNA, 15 bp, Homo sapiens
ggtactgagagacag

SEQ ID NO: 1364933 - DNA, 15 bp, Homo sapiens
aggtactgagagaca

SEQ ID NO: 1364934 - DNA, 15 bp, Homo sapiens
gaggtactgagagac

SEQ ID NO: 1364935 - DNA, 15 bp, Homo sapiens
tgaggtactgagaga

SEQ ID NO: 1364936 - DNA, 15 bp, Homo sapiens
ctgaggtactgagag

SEQ ID NO: 1364937 - DNA, 15 bp, Homo sapiens
actgaggtactgaga

SEQ ID NO: 1364938 - DNA, 15 bp, Homo sapiens
aactgaggtactgag

SEQ ID NO: 1364939 - DNA, 15 bp, Homo sapiens
caactgaggtactga

SEQ ID NO: 1364940 - DNA, 15 bp, Homo sapiens
acaactgaggtactg

SEQ ID NO: 1364941 - DNA, 15 bp, Homo sapiens
aacaactgaggtact

SEQ ID NO: 1364942 - DNA, 15 bp, Homo sapiens
taacaactgaggtac

SEQ ID NO: 1364943 - DNA, 15 bp, Homo sapiens
ataacaactgaggta

SEQ ID NO: 1364944 - DNA, 15 bp, Homo sapiens
aataacaactgaggt

SEQ ID NO: 1364945 - DNA, 15 bp, Homo sapiens
taataacaactgagg

SEQ ID NO: 1364946 - DNA, 15 bp, Homo sapiens
gtaataacaactgag

SEQ ID NO: 1364947 - DNA, 15 bp, Homo sapiens
tgtaataacaactga

SEQ ID NO: 1364948 - DNA, 15 bp, Homo sapiens
atgtaataacaactg

SEQ ID NO: 1364949 - DNA, 15 bp, Homo sapiens
aatgtaataacaact

SEQ ID NO: 1364950 - DNA, 15 bp, Homo sapiens
gaatgtaataacaac

SEQ ID NO: 1364951 - DNA, 15 bp, Homo sapiens
ggaatgtaataacaa

SEQ ID NO: 1364952 - DNA, 15 bp, Homo sapiens
aggaatgtaataaca

SEQ ID NO: 1364953 - DNA, 15 bp, Homo sapiens
caggaatgtaataac

SEQ ID NO: 1364954 - DNA, 15 bp, Homo sapiens
gcaggaatgtaataa

SEQ ID NO: 1364955 - DNA, 15 bp, Homo sapiens
tgcaggaatgtaata

SEQ ID NO: 1364956 - DNA, 15 bp, Homo sapiens
ttgcaggaatgtaat

SEQ ID NO: 1364957 - DNA, 15 bp, Homo sapiens
tttgcaggaatgtaa

SEQ ID NO: 1364958 - DNA, 15 bp, Homo sapiens
ttttgcaggaatgta

SEQ ID NO: 1364959 - DNA, 15 bp, Homo sapiens
attttgcaggaatgt

SEQ ID NO: 1364960 - DNA, 15 bp, Homo sapiens
cattttgcaggaatg

SEQ ID NO: 1364961 - DNA, 15 bp, Homo sapiens
tcattttgcaggaat

SEQ ID NO: 1364962 - DNA, 15 bp, Homo sapiens
ctcattttgcaggaa

SEQ ID NO: 1364963 - DNA, 15 bp, Homo sapiens
cctcattttgcagga

SEQ ID NO: 1364964 - DNA, 15 bp, Homo sapiens
ccctcattttgcagg

SEQ ID NO: 1364965 - DNA, 15 bp, Homo sapiens
tccctcattttgcag

SEQ ID NO: 1364966 - DNA, 15 bp, Homo sapiens
ttccctcattttgca

SEQ ID NO: 1364967 - DNA, 15 bp, Homo sapiens
tttccctcattttgc

SEQ ID NO: 1364968 - DNA, 15 bp, Homo sapiens
atttccctcattttg

SEQ ID NO: 1364969 - DNA, 15 bp, Homo sapiens
tatttccctcatttt

SEQ ID NO: 1364970 - DNA, 15 bp, Homo sapiens
ctatttccctcattt

SEQ ID NO: 1364971 - DNA, 15 bp, Homo sapiens
cctatttccctcatt

SEQ ID NO: 1364972 - DNA, 15 bp, Homo sapiens
ccctatttccctcat

SEQ ID NO: 1364973 - DNA, 15 bp, Homo sapiens
accctatttccctca

SEQ ID NO: 1364974 - DNA, 15 bp, Homo sapiens
gaaccctatttccct

SEQ ID NO: 1364975 - DNA, 15 bp, Homo sapiens
ggaaccctatttccc

SEQ ID NO: 1364976 - DNA, 15 bp, Homo sapiens
gggaaccctatttcc

SEQ ID NO: 1364977 - DNA, 15 bp, Homo sapiens
tgggaaccctatttc

SEQ ID NO: 1364978 - DNA, 15 bp, Homo sapiens
ctgggaaccctattt

SEQ ID NO: 1364979 - DNA, 15 bp, Homo sapiens
cctgggaaccctatt

SEQ ID NO: 1364980 - DNA, 15 bp, Homo sapiens
acctgggaaccctat

SEQ ID NO: 1364981 - DNA, 15 bp, Homo sapiens
aacctgggaacccta

SEQ ID NO: 1364982 - DNA, 15 bp, Homo sapiens
caacctgggaaccct

SEQ ID NO: 1364983 - DNA, 15 bp, Homo sapiens
acaacctgggaaccc

SEQ ID NO: 1364984 - DNA, 15 bp, Homo sapiens
gacaacctgggaacc

SEQ ID NO: 1364985 - DNA, 15 bp, Homo sapiens
agacaacctgggaac

SEQ ID NO: 1364986 - DNA, 15 bp, Homo sapiens
tagacaacctgggaa

SEQ ID NO: 1364987 - DNA, 15 bp, Homo sapiens
ttagacaacctggga

SEQ ID NO: 1364988 - DNA, 15 bp, Homo sapiens
tttagacaacctggg

SEQ ID NO: 1364989 - DNA, 15 bp, Homo sapiens
atttagacaacctgg

SEQ ID NO: 1364990 - DNA, 15 bp, Homo sapiens
gatttagacaacctg

SEQ ID NO: 1364991 - DNA, 15 bp, Homo sapiens
agatttagacaacct

SEQ ID NO: 1364992 - DNA, 15 bp, Homo sapiens
tagatttagacaacc

SEQ ID NO: 1364993 - DNA, 15 bp, Homo sapiens
gtagatttagacaac

SEQ ID NO: 1364994 - DNA, 15 bp, Homo sapiens
tgtagatttagacaa

SEQ ID NO: 1364995 - DNA, 15 bp, Homo sapiens
ctgtgtagatttaga

SEQ ID NO: 1364996 - DNA, 15 bp, Homo sapiens
gctgtgtagatttag

SEQ ID NO: 1364997 - DNA, 15 bp, Homo sapiens
agctgtgtagattta

SEQ ID NO: 1364998 - DNA, 15 bp, Homo sapiens
tagctgtgtagattt

SEQ ID NO: 1364999 - DNA, 15 bp, Homo sapiens
ctagctgtgtagatt

SEQ ID NO: 1365000 - DNA, 15 bp, Homo sapiens
actagctgtgtagat

SEQ ID NO: 1365001 - DNA, 15 bp, Homo sapiens
tactagctgtgtaga

SEQ ID NO: 1365002 - DNA, 15 bp, Homo sapiens
ttactagctgtgtag

SEQ ID NO: 1365003 - DNA, 15 bp, Homo sapiens
cttactagctgtgta

SEQ ID NO: 1365004 - DNA, 15 bp, Homo sapiens
acttactagctgtgt

SEQ ID NO: 1365005 - DNA, 15 bp, Homo sapiens
tacttactagctgtg

SEQ ID NO: 1365006 - DNA, 15 bp, Homo sapiens
ctacttactagctgt

SEQ ID NO: 1365007 - DNA, 15 bp, Homo sapiens
gctacttactagctg

SEQ ID NO: 1365008 - DNA, 15 bp, Homo sapiens
tgctacttactagct

SEQ ID NO: 1365009 - DNA, 15 bp, Homo sapiens
ctgctacttactagc

SEQ ID NO: 1365010 - DNA, 15 bp, Homo sapiens
tctgctacttactag

SEQ ID NO: 1365011 - DNA, 15 bp, Homo sapiens
ctctgctacttacta

SEQ ID NO: 1365012 - DNA, 15 bp, Homo sapiens
cctctgctacttact

SEQ ID NO: 1365013 - DNA, 15 bp, Homo sapiens
gcctctgctacttac

SEQ ID NO: 1365014 - DNA, 15 bp, Homo sapiens
tgcctctgctactta

SEQ ID NO: 1365015 - DNA, 15 bp, Homo sapiens
ttgcctctgctactt

SEQ ID NO: 1365016 - DNA, 15 bp, Homo sapiens
attgcctctgctact

SEQ ID NO: 1365017 - DNA, 15 bp, Homo sapiens
tattgcctctgctac

SEQ ID NO: 1365018 - DNA, 15 bp, Homo sapiens
atattgcctctgcta

SEQ ID NO: 1365019 - DNA, 15 bp, Homo sapiens
aatattgcctctgct

SEQ ID NO: 1365020 - DNA, 15 bp, Homo sapiens
taatattgcctctgc

SEQ ID NO: 1365021 - DNA, 15 bp, Homo sapiens
ttaatattgcctctg

SEQ ID NO: 1365022 - DNA, 15 bp, Homo sapiens
tttaatattgcctct

SEQ ID NO: 1365023 - DNA, 15 bp, Homo sapiens
gtttaatattgcctc

SEQ ID NO: 1365024 - DNA, 15 bp, Homo sapiens
ggtttaatattgcct

SEQ ID NO: 1365025 - DNA, 15 bp, Homo sapiens
aggtttaatattgcc

SEQ ID NO: 1365026 - DNA, 15 bp, Homo sapiens
gaggtttaatattgc

SEQ ID NO: 1365027 - DNA, 15 bp, Homo sapiens
tgaggtttaatattg

SEQ ID NO: 1365028 - DNA, 15 bp, Homo sapiens
ttgaggtttaatatt

SEQ ID NO: 1365029 - DNA, 15 bp, Homo sapiens
attgaggtttaatat

SEQ ID NO: 1365030 - DNA, 15 bp, Homo sapiens
gattgaggtttaata

SEQ ID NO: 1365031 - DNA, 15 bp, Homo sapiens
agattgaggtttaat

SEQ ID NO: 1365032 - DNA, 15 bp, Homo sapiens
cagattgaggtttaa

SEQ ID NO: 1365033 - DNA, 15 bp, Homo sapiens
tcagattgaggttta

SEQ ID NO: 1365034 - DNA, 15 bp, Homo sapiens
gtcagattgaggttt

SEQ ID NO: 1365035 - DNA, 15 bp, Homo sapiens
agtcagattgaggtt

SEQ ID NO: 1365036 - DNA, 15 bp, Homo sapiens
gagtcagattgaggt

SEQ ID NO: 1365037 - DNA, 15 bp, Homo sapiens
ggagtcagattgagg

SEQ ID NO: 1365038 - DNA, 15 bp, Homo sapiens
tggagtcagattgag

SEQ ID NO: 1365039 - DNA, 15 bp, Homo sapiens
ctggagtcagattga

SEQ ID NO: 1365040 - DNA, 15 bp, Homo sapiens
tctggagtcagattg

SEQ ID NO: 1365041 - DNA, 15 bp, Homo sapiens
ttctggagtcagatt

SEQ ID NO: 1365042 - DNA, 15 bp, Homo sapiens
gttctggagtcagat

SEQ ID NO: 1365043 - DNA, 15 bp, Homo sapiens
ggttctggagtcaga

SEQ ID NO: 1365044 - DNA, 15 bp, Homo sapiens
gggttctggagtcag

SEQ ID NO: 1365045 - DNA, 15 bp, Homo sapiens
tgggttctggagtca

SEQ ID NO: 1365046 - DNA, 15 bp, Homo sapiens
atgggttctggagtc

SEQ ID NO: 1365047 - DNA, 15 bp, Homo sapiens
tatgggttctggagt

SEQ ID NO: 1365048 - DNA, 15 bp, Homo sapiens
atatgggttctggag

SEQ ID NO: 1365049 - DNA, 15 bp, Homo sapiens
catatgggttctgga

SEQ ID NO: 1365050 - DNA, 15 bp, Homo sapiens
acatatgggttctgg

SEQ ID NO: 1365051 - DNA, 15 bp, Homo sapiens
aacatatgggttctg

SEQ ID NO: 1365052 - DNA, 15 bp, Homo sapiens
aaacatatgggttct

SEQ ID NO: 1365053 - DNA, 15 bp, Homo sapiens
aaaacatatgggttc

SEQ ID NO: 1365054 - DNA, 15 bp, Homo sapiens
gaaaacatatgggtt

SEQ ID NO: 1365055 - DNA, 15 bp, Homo sapiens
ggaaaacatatgggt

SEQ ID NO: 1365056 - DNA, 15 bp, Homo sapiens
gggaaaacatatggg

SEQ ID NO: 1365057 - DNA, 15 bp, Homo sapiens
agggaaaacatatgg

SEQ ID NO: 1365058 - DNA, 15 bp, Homo sapiens
cagggaaaacatatg

SEQ ID NO: 1365059 - DNA, 15 bp, Homo sapiens
gcagggaaaacatat

SEQ ID NO: 1365060 - DNA, 15 bp, Homo sapiens
agcagggaaaacata

SEQ ID NO: 1365061 - DNA, 15 bp, Homo sapiens
cagcagggaaaacat

SEQ ID NO: 1365062 - DNA, 15 bp, Homo sapiens
gcagcagggaaaaca

SEQ ID NO: 1365063 - DNA, 15 bp, Homo sapiens
agcagcagggaaaac

SEQ ID NO: 1365064 - DNA, 15 bp, Homo sapiens
tagcagcagggaaaa

SEQ ID NO: 1365065 - DNA, 15 bp, Homo sapiens
gtagcagcagggaaa

SEQ ID NO: 1365066 - DNA, 15 bp, Homo sapiens
cgtagcagcagggaa

SEQ ID NO: 1365067 - DNA, 15 bp, Homo sapiens
tcgtagcagcaggga

SEQ ID NO: 1365068 - DNA, 15 bp, Homo sapiens
atcgtagcagcaggg

SEQ ID NO: 1365069 - DNA, 15 bp, Homo sapiens
gatcgtagcagcagg

SEQ ID NO: 1365070 - DNA, 15 bp, Homo sapiens
ggatcgtagcagcag

SEQ ID NO: 1365071 - DNA, 15 bp, Homo sapiens
gggatcgtagcagca

SEQ ID NO: 1365072 - DNA, 15 bp, Homo sapiens
ggggatcgtagcagc

SEQ ID NO: 1365073 - DNA, 15 bp, Homo sapiens
tggggatcgtagcag

SEQ ID NO: 1365074 - DNA, 15 bp, Homo sapiens
gtggggatcgtagca

SEQ ID NO: 1365075 - DNA, 15 bp, Homo sapiens
tgtggggatcgtagc

SEQ ID NO: 1365076 - DNA, 15 bp, Homo sapiens
ttgtggggatcgtag

SEQ ID NO: 1365077 - DNA, 15 bp, Homo sapiens
tttgtggggatcgta

SEQ ID NO: 1365078 - DNA, 15 bp, Homo sapiens
ttttgtggggatcgt

SEQ ID NO: 1365079 - DNA, 15 bp, Homo sapiens
cttttgtggggatcg

SEQ ID NO: 1365080 - DNA, 15 bp, Homo sapiens
tcttttgtggggatc

SEQ ID NO: 1365081 - DNA, 15 bp, Homo sapiens
ctcttttgtggggat

SEQ ID NO: 1365082 - DNA, 15 bp, Homo sapiens
cctcttttgtgggga

SEQ ID NO: 1365083 - DNA, 15 bp, Homo sapiens
acctcttttgtgggg

SEQ ID NO: 1365084 - DNA, 15 bp, Homo sapiens
gacctcttttgtggg

SEQ ID NO: 1365085 - DNA, 15 bp, Homo sapiens
ggacctcttttgtgg

SEQ ID NO: 1365086 - DNA, 15 bp, Homo sapiens
aggacctcttttgtg

SEQ ID NO: 1365087 - DNA, 15 bp, Homo sapiens
caggacctcttttgt

SEQ ID NO: 1365088 - DNA, 15 bp, Homo sapiens
gcaggacctcttttg

SEQ ID NO: 1365089 - DNA, 15 bp, Homo sapiens
tgcaggacctctttt

SEQ ID NO: 1365090 - DNA, 15 bp, Homo sapiens
gtgcaggacctcttt

SEQ ID NO: 1365091 - DNA, 15 bp, Homo sapiens
ggtgcaggacctctt

SEQ ID NO: 1365092 - DNA, 15 bp, Homo sapiens
tggtgcaggacctct

SEQ ID NO: 1365093 - DNA, 15 bp, Homo sapiens
gtggtgcaggacctc

SEQ ID NO: 1365094 - DNA, 15 bp, Homo sapiens
tgtggtgcaggacct

SEQ ID NO: 1365095 - DNA, 15 bp, Homo sapiens
gtgtggtgcaggacc

SEQ ID NO: 1365096 - DNA, 15 bp, Homo sapiens
tgtgtggtgcaggac

SEQ ID NO: 1365097 - DNA, 15 bp, Homo sapiens
ctgtgtggtgcagga

SEQ ID NO: 1365098 - DNA, 15 bp, Homo sapiens
cctgtgtggtgcagg

SEQ ID NO: 1365099 - DNA, 15 bp, Homo sapiens
tcctgtgtggtgcag

SEQ ID NO: 1365100 - DNA, 15 bp, Homo sapiens
atcctgtgtggtgca

SEQ ID NO: 1365101 - DNA, 15 bp, Homo sapiens
tatcctgtgtggtgc

SEQ ID NO: 1365102 - DNA, 15 bp, Homo sapiens
ctatcctgtgtggtg

SEQ ID NO: 1365103 - DNA, 15 bp, Homo sapiens
gctatcctgtgtggt

SEQ ID NO: 1365104 - DNA, 15 bp, Homo sapiens
agctatcctgtgtgg

SEQ ID NO: 1365105 - DNA, 15 bp, Homo sapiens
gagctatcctgtgtg

SEQ ID NO: 1365106 - DNA, 15 bp, Homo sapiens
agagctatcctgtgt

SEQ ID NO: 1365107 - DNA, 15 bp, Homo sapiens
cagagctatcctgtg

SEQ ID NO: 1365108 - DNA, 15 bp, Homo sapiens
tcagagctatcctgt

SEQ ID NO: 1365109 - DNA, 15 bp, Homo sapiens
ctcagagctatcctg

SEQ ID NO: 1365110 - DNA, 15 bp, Homo sapiens
actcagagctatcct

SEQ ID NO: 1365111 - DNA, 15 bp, Homo sapiens
aactcagagctatcc

SEQ ID NO: 1365112 - DNA, 15 bp, Homo sapiens
gaactcagagctatc

SEQ ID NO: 1365113 - DNA, 15 bp, Homo sapiens
tgaactcagagctat

SEQ ID NO: 1365114 - DNA, 15 bp, Homo sapiens
atgaactcagagcta

SEQ ID NO: 1365115 - DNA, 15 bp, Homo sapiens
aatgaactcagagct

SEQ ID NO: 1365116 - DNA, 15 bp, Homo sapiens
aaatgaactcagagc

SEQ ID NO: 1365117 - DNA, 15 bp, Homo sapiens
gaaatgaactcagag

SEQ ID NO: 1365118 - DNA, 15 bp, Homo sapiens
gaagaaatgaactca

SEQ ID NO: 1365119 - DNA, 15 bp, Homo sapiens
tgaagaaatgaactc

SEQ ID NO: 1365120 - DNA, 15 bp, Homo sapiens
ctgaagaaatgaact

SEQ ID NO: 1365121 - DNA, 15 bp, Homo sapiens
cctgaagaaatgaac

SEQ ID NO: 1365122 - DNA, 15 bp, Homo sapiens
gcctgaagaaatgaa

SEQ ID NO: 1365123 - DNA, 15 bp, Homo sapiens
agcctgaagaaatga

SEQ ID NO: 1365124 - DNA, 15 bp, Homo sapiens
cagcctgaagaaatg

SEQ ID NO: 1365125 - DNA, 15 bp, Homo sapiens
gcagcctgaagaaat

SEQ ID NO: 1365126 - DNA, 15 bp, Homo sapiens
agcagcctgaagaaa

SEQ ID NO: 1365127 - DNA, 15 bp, Homo sapiens
cagcagcctgaagaa

SEQ ID NO: 1365128 - DNA, 15 bp, Homo sapiens
ccagcagcctgaaga

SEQ ID NO: 1365129 - DNA, 15 bp, Homo sapiens
accagcagcctgaag

SEQ ID NO: 1365130 - DNA, 15 bp, Homo sapiens
caccagcagcctgaa

SEQ ID NO: 1365131 - DNA, 15 bp, Homo sapiens
acaccagcagcctga

SEQ ID NO: 1365132 - DNA, 15 bp, Homo sapiens
aacaccagcagcctg

SEQ ID NO: 1365133 - DNA, 15 bp, Homo sapiens
gaacaccagcagcct

SEQ ID NO: 1365134 - DNA, 15 bp, Homo sapiens
agaacaccagcagcc

SEQ ID NO: 1365135 - DNA, 15 bp, Homo sapiens
gagaacaccagcagc

SEQ ID NO: 1365136 - DNA, 15 bp, Homo sapiens
agagaacaccagcag

SEQ ID NO: 1365137 - DNA, 15 bp, Homo sapiens
gagagaacaccagca

SEQ ID NO: 1365138 - DNA, 15 bp, Homo sapiens
ggagagaacaccagc

SEQ ID NO: 1365139 - DNA, 15 bp, Homo sapiens
aggagagaacaccag

SEQ ID NO: 1365140 - DNA, 15 bp, Homo sapiens
taggagagaacacca

SEQ ID NO: 1365141 - DNA, 15 bp, Homo sapiens
ttaggagagaacacc

SEQ ID NO: 1365142 - DNA, 15 bp, Homo sapiens
attaggagagaacac

SEQ ID NO: 1365143 - DNA, 15 bp, Homo sapiens
aattaggagagaaca

SEQ ID NO: 1365144 - DNA, 15 bp, Homo sapiens
caattaggagagaac

SEQ ID NO: 1365145 - DNA, 15 bp, Homo sapiens
acaattaggagagaa

SEQ ID NO: 1365146 - DNA, 15 bp, Homo sapiens
aacaattaggagaga

SEQ ID NO: 1365147 - DNA, 15 bp, Homo sapiens
aaacaattaggagag

SEQ ID NO: 1365148 - DNA, 15 bp, Homo sapiens
aaaacaattaggaga

SEQ ID NO: 1365149 - DNA, 15 bp, Homo sapiens
caaaacaattaggag

SEQ ID NO: 1365150 - DNA, 15 bp, Homo sapiens
tcaaaacaattagga

SEQ ID NO: 1365151 - DNA, 15 bp, Homo sapiens
ttcaaaacaattagg

SEQ ID NO: 1365152 - DNA, 15 bp, Homo sapiens
attcaaaacaattag

SEQ ID NO: 1365153 - DNA, 15 bp, Homo sapiens
aattcaaaacaatta

SEQ ID NO: 1365154 - DNA, 15 bp, Homo sapiens
gaattcaaaacaatt

SEQ ID NO: 1365155 - DNA, 15 bp, Homo sapiens
agaattcaaaacaat

SEQ ID NO: 1365156 - DNA, 15 bp, Homo sapiens
aagaattcaaaacaa

SEQ ID NO: 1365157 - DNA, 15 bp, Homo sapiens
aaagaattcaaaaca

SEQ ID NO: 1365158 - DNA, 15 bp, Homo sapiens
caaagaattcaaaac

SEQ ID NO: 1365159 - DNA, 15 bp, Homo sapiens
tcaaagaattcaaaa

SEQ ID NO: 1365160 - DNA, 15 bp, Homo sapiens
ttcaaagaattcaaa

SEQ ID NO: 1365161 - DNA, 15 bp, Homo sapiens
tttcaaagaattcaa

SEQ ID NO: 1365162 - DNA, 15 bp, Homo sapiens
ctttcaaagaattca

SEQ ID NO: 1365163 - DNA, 15 bp, Homo sapiens
tctttcaaagaattc

SEQ ID NO: 1365164 - DNA, 15 bp, Homo sapiens
atctttcaaagaatt

SEQ ID NO: 1365165 - DNA, 15 bp, Homo sapiens
tatctttcaaagaat

SEQ ID NO: 1365166 - DNA, 15 bp, Homo sapiens
atatctttcaaagaa

SEQ ID NO: 1365167 - DNA, 15 bp, Homo sapiens
gatatctttcaaaga

SEQ ID NO: 1365168 - DNA, 15 bp, Homo sapiens
agatatctttcaaag

SEQ ID NO: 1365169 - DNA, 15 bp, Homo sapiens
gagatatctttcaaa

SEQ ID NO: 1365170 - DNA, 15 bp, Homo sapiens
tgagatatctttcaa

SEQ ID NO: 1365171 - DNA, 15 bp, Homo sapiens
ttgagatatctttca

SEQ ID NO: 1365172 - DNA, 15 bp, Homo sapiens
cttgagatatctttc

SEQ ID NO: 1365173 - DNA, 15 bp, Homo sapiens
ccttgagatatcttt

SEQ ID NO: 1365174 - DNA, 15 bp, Homo sapiens
accttgagatatctt

SEQ ID NO: 1365175 - DNA, 15 bp, Homo sapiens
aaccttgagatatct

SEQ ID NO: 1365176 - DNA, 15 bp, Homo sapiens
gaaccttgagatatc

SEQ ID NO: 1365177 - DNA, 15 bp, Homo sapiens
agaaccttgagatat

SEQ ID NO: 1365178 - DNA, 15 bp, Homo sapiens
gagaaccttgagata

SEQ ID NO: 1365179 - DNA, 15 bp, Homo sapiens
agagaaccttgagat

SEQ ID NO: 1365180 - DNA, 15 bp, Homo sapiens
aagagaaccttgaga

SEQ ID NO: 1365181 - DNA, 15 bp, Homo sapiens
aaagagaaccttgag

SEQ ID NO: 1365182 - DNA, 15 bp, Homo sapiens
gaaagagaaccttga

SEQ ID NO: 1365183 - DNA, 15 bp, Homo sapiens
tgaaagagaaccttg

SEQ ID NO: 1365184 - DNA, 15 bp, Homo sapiens
atgaaagagaacctt

SEQ ID NO: 1365185 - DNA, 15 bp, Homo sapiens
aatgaaagagaacct

SEQ ID NO: 1365186 - DNA, 15 bp, Homo sapiens
caatgaaagagaacc

SEQ ID NO: 1365187 - DNA, 15 bp, Homo sapiens
gcaatgaaagagaac

SEQ ID NO: 1365188 - DNA, 15 bp, Homo sapiens
agcaatgaaagagaa

SEQ ID NO: 1365189 - DNA, 15 bp, Homo sapiens
cagcaatgaaagaga

SEQ ID NO: 1365190 - DNA, 15 bp, Homo sapiens
tcagcaatgaaagag

SEQ ID NO: 1365191 - DNA, 15 bp, Homo sapiens
atcagcaatgaaaga

SEQ ID NO: 1365192 - DNA, 15 bp, Homo sapiens
aatcagcaatgaaag

SEQ ID NO: 1365193 - DNA, 15 bp, Homo sapiens
gaatcagcaatgaaa

SEQ ID NO: 1365194 - DNA, 15 bp, Homo sapiens
agaatcagcaatgaa

SEQ ID NO: 1365195 - DNA, 15 bp, Homo sapiens
aagaatcagcaatga

SEQ ID NO: 1365196 - DNA, 15 bp, Homo sapiens
taagaatcagcaatg

SEQ ID NO: 1365197 - DNA, 15 bp, Homo sapiens
ctaagaatcagcaat

SEQ ID NO: 1365198 - DNA, 15 bp, Homo sapiens
actaagaatcagcaa

SEQ ID NO: 1365199 - DNA, 15 bp, Homo sapiens
gactaagaatcagca

SEQ ID NO: 1365200 - DNA, 15 bp, Homo sapiens
tgactaagaatcagc

SEQ ID NO: 1365201 - DNA, 15 bp, Homo sapiens
gtgactaagaatcag

SEQ ID NO: 1365202 - DNA, 15 bp, Homo sapiens
agtgactaagaatca

SEQ ID NO: 1365203 - DNA, 15 bp, Homo sapiens
gagtgactaagaatc

SEQ ID NO: 1365204 - DNA, 15 bp, Homo sapiens
ggagtgactaagaat

SEQ ID NO: 1365205 - DNA, 15 bp, Homo sapiens
tggagtgactaagaa

SEQ ID NO: 1365206 - DNA, 15 bp, Homo sapiens
ctggagtgactaaga

SEQ ID NO: 1365207 - DNA, 15 bp, Homo sapiens
gctggagtgactaag

SEQ ID NO: 1365208 - DNA, 15 bp, Homo sapiens
ggctggagtgactaa

SEQ ID NO: 1365209 - DNA, 15 bp, Homo sapiens
aggctggagtgacta

SEQ ID NO: 1365210 - DNA, 15 bp, Homo sapiens
caggctggagtgact

SEQ ID NO: 1365211 - DNA, 15 bp, Homo sapiens
ccaggctggagtgac

SEQ ID NO: 1365212 - DNA, 15 bp, Homo sapiens
tccaggctggagtga

SEQ ID NO: 1365213 - DNA, 15 bp, Homo sapiens
actccaggctggagt

SEQ ID NO: 1365214 - DNA, 15 bp, Homo sapiens
aactccaggctggag

SEQ ID NO: 1365215 - DNA, 15 bp, Homo sapiens
caactccaggctgga

SEQ ID NO: 1365216 - DNA, 15 bp, Homo sapiens
tcaactccaggctgg

SEQ ID NO: 1365217 - DNA, 15 bp, Homo sapiens
ctcaactccaggctg

SEQ ID NO: 1365218 - DNA, 15 bp, Homo sapiens
tctcaactccaggct

SEQ ID NO: 1365219 - DNA, 15 bp, Homo sapiens
ctctcaactccaggc

SEQ ID NO: 1365220 - DNA, 15 bp, Homo sapiens
gctctcaactccagg

SEQ ID NO: 1365221 - DNA, 15 bp, Homo sapiens
agctctcaactccag

SEQ ID NO: 1365222 - DNA, 15 bp, Homo sapiens
gagctctcaactcca

SEQ ID NO: 1365223 - DNA, 15 bp, Homo sapiens
agagctctcaactcc

SEQ ID NO: 1365224 - DNA, 15 bp, Homo sapiens
aagagctctcaactc

SEQ ID NO: 1365225 - DNA, 15 bp, Homo sapiens
caagagctctcaact

SEQ ID NO: 1365226 - DNA, 15 bp, Homo sapiens
gcaagagctctcaac

SEQ ID NO: 1365227 - DNA, 15 bp, Homo sapiens
agcaagagctctcaa

SEQ ID NO: 1365228 - DNA, 15 bp, Homo sapiens
gagcaagagctctca

SEQ ID NO: 1365229 - DNA, 15 bp, Homo sapiens
agagcaagagctctc

SEQ ID NO: 1365230 - DNA, 15 bp, Homo sapiens
gagagcaagagctct

SEQ ID NO: 1365231 - DNA, 15 bp, Homo sapiens
tgagagcaagagctc

SEQ ID NO: 1365232 - DNA, 15 bp, Homo sapiens
ctgagagcaagagct

SEQ ID NO: 1365233 - DNA, 15 bp, Homo sapiens
gctgagagcaagagc

SEQ ID NO: 1365234 - DNA, 15 bp, Homo sapiens
tgctgagagcaagag

SEQ ID NO: 1365235 - DNA, 15 bp, Homo sapiens
atgctgagagcaaga

SEQ ID NO: 1365236 - DNA, 15 bp, Homo sapiens
tatgctgagagcaag

SEQ ID NO: 1365237 - DNA, 15 bp, Homo sapiens
ttatgctgagagcaa

SEQ ID NO: 1365238 - DNA, 15 bp, Homo sapiens
cttatgctgagagca

SEQ ID NO: 1365239 - DNA, 15 bp, Homo sapiens
ccttatgctgagagc

SEQ ID NO: 1365240 - DNA, 15 bp, Homo sapiens
gccttatgctgagag

SEQ ID NO: 1365241 - DNA, 15 bp, Homo sapiens
agccttatgctgaga

SEQ ID NO: 1365242 - DNA, 15 bp, Homo sapiens
gagccttatgctgag

SEQ ID NO: 1365243 - DNA, 15 bp, Homo sapiens
tgagccttatgctga

SEQ ID NO: 1365244 - DNA, 15 bp, Homo sapiens
ctgagccttatgctg

SEQ ID NO: 1365245 - DNA, 15 bp, Homo sapiens
gctgagccttatgct

SEQ ID NO: 1365246 - DNA, 15 bp, Homo sapiens
ggctgagccttatgc

SEQ ID NO: 1365247 - DNA, 15 bp, Homo sapiens
aggctgagccttatg

SEQ ID NO: 1365248 - DNA, 15 bp, Homo sapiens
aaggctgagccttat

SEQ ID NO: 1365249 - DNA, 15 bp, Homo sapiens
aaaggctgagcctta

SEQ ID NO: 1365250 - DNA, 15 bp, Homo sapiens
caaaggctgagcctt

SEQ ID NO: 1365251 - DNA, 15 bp, Homo sapiens
tcaaaggctgagcct

SEQ ID NO: 1365252 - DNA, 15 bp, Homo sapiens
ttcaaaggctgagcc

SEQ ID NO: 1365253 - DNA, 15 bp, Homo sapiens
cttcaaaggctgagc

SEQ ID NO: 1365254 - DNA, 15 bp, Homo sapiens
gcttcaaaggctgag

SEQ ID NO: 1365255 - DNA, 15 bp, Homo sapiens
agcttcaaaggctga

SEQ ID NO: 1365256 - DNA, 15 bp, Homo sapiens
cagcttcaaaggctg

SEQ ID NO: 1365257 - DNA, 15 bp, Homo sapiens
ccagcttcaaaggct

SEQ ID NO: 1365258 - DNA, 15 bp, Homo sapiens
tccagcttcaaaggc

SEQ ID NO: 1365259 - DNA, 15 bp, Homo sapiens
gtccagcttcaaagg

SEQ ID NO: 1365260 - DNA, 15 bp, Homo sapiens
agtccagcttcaaag

SEQ ID NO: 1365261 - DNA, 15 bp, Homo sapiens
cagtccagcttcaaa

SEQ ID NO: 1365262 - DNA, 15 bp, Homo sapiens
tcagtccagcttcaa

SEQ ID NO: 1365263 - DNA, 15 bp, Homo sapiens
gtcagtccagcttca

SEQ ID NO: 1365264 - DNA, 15 bp, Homo sapiens
ggtcagtccagcttc

SEQ ID NO: 1365265 - DNA, 15 bp, Homo sapiens
aggtcagtccagctt

SEQ ID NO: 1365266 - DNA, 15 bp, Homo sapiens
caggtcagtccagct

SEQ ID NO: 1365267 - DNA, 15 bp, Homo sapiens
ccaggtcagtccagc

SEQ ID NO: 1365268 - DNA, 15 bp, Homo sapiens
cccaggtcagtccag

SEQ ID NO: 1365269 - DNA, 15 bp, Homo sapiens
tcccaggtcagtcca

SEQ ID NO: 1365270 - DNA, 15 bp, Homo sapiens
ttcccaggtcagtcc

SEQ ID NO: 1365271 - DNA, 15 bp, Homo sapiens
gttcccaggtcagtc

SEQ ID NO: 1365272 - DNA, 15 bp, Homo sapiens
tgttcccaggtcagt

SEQ ID NO: 1365273 - DNA, 15 bp, Homo sapiens
ttgttcccaggtcag

SEQ ID NO: 1365274 - DNA, 15 bp, Homo sapiens
tttgttcccaggtca

SEQ ID NO: 1365275 - DNA, 15 bp, Homo sapiens
gtttgttcccaggtc

SEQ ID NO: 1365276 - DNA, 15 bp, Homo sapiens
agtttgttcccaggt

SEQ ID NO: 1365277 - DNA, 15 bp, Homo sapiens
gagtttgttcccagg

SEQ ID NO: 1365278 - DNA, 15 bp, Homo sapiens
ggagtttgttcccag

SEQ ID NO: 1365279 - DNA, 15 bp, Homo sapiens
tggagtttgttccca

SEQ ID NO: 1365280 - DNA, 15 bp, Homo sapiens
gtggagtttgttccc

SEQ ID NO: 1365281 - DNA, 15 bp, Homo sapiens
ggtggagtttgttcc

SEQ ID NO: 1365282 - DNA, 15 bp, Homo sapiens
aggtggagtttgttc

SEQ ID NO: 1365283 - DNA, 15 bp, Homo sapiens
gaggtggagtttgtt

SEQ ID NO: 1365284 - DNA, 15 bp, Homo sapiens
agaggtggagtttgt

SEQ ID NO: 1365285 - DNA, 15 bp, Homo sapiens
tagaggtggagtttg

SEQ ID NO: 1365286 - DNA, 15 bp, Homo sapiens
ttagaggtggagttt

SEQ ID NO: 1365287 - DNA, 15 bp, Homo sapiens
tttagaggtggagtt

SEQ ID NO: 1365288 - DNA, 15 bp, Homo sapiens
gtttagaggtggagt

SEQ ID NO: 1365289 - DNA, 15 bp, Homo sapiens
ggtttagaggtggag

SEQ ID NO: 1365290 - DNA, 15 bp, Homo sapiens
aggtttagaggtgga

SEQ ID NO: 1365291 - DNA, 15 bp, Homo sapiens
taggtttagaggtgg

SEQ ID NO: 1365292 - DNA, 15 bp, Homo sapiens
ataggtttagaggtg

SEQ ID NO: 1365293 - DNA, 15 bp, Homo sapiens
cataggtttagaggt

SEQ ID NO: 1365294 - DNA, 15 bp, Homo sapiens
acataggtttagagg

SEQ ID NO: 1365295 - DNA, 15 bp, Homo sapiens
cacataggtttagag

SEQ ID NO: 1365296 - DNA, 15 bp, Homo sapiens
tcacataggtttaga

SEQ ID NO: 1365297 - DNA, 15 bp, Homo sapiens
gtcacataggtttag

SEQ ID NO: 1365298 - DNA, 15 bp, Homo sapiens
ggtcacataggttta

SEQ ID NO: 1365299 - DNA, 15 bp, Homo sapiens
aggtcacataggttt

SEQ ID NO: 1365300 - DNA, 15 bp, Homo sapiens
aaggtcacataggtt

SEQ ID NO: 1365301 - DNA, 15 bp, Homo sapiens
caaggtcacataggt

SEQ ID NO: 1365302 - DNA, 15 bp, Homo sapiens
acaaggtcacatagg

SEQ ID NO: 1365303 - DNA, 15 bp, Homo sapiens
aacaaggtcacatag

SEQ ID NO: 1365304 - DNA, 15 bp, Homo sapiens
gaacaaggtcacata

SEQ ID NO: 1365305 - DNA, 15 bp, Homo sapiens
tgaacaaggtcacat

SEQ ID NO: 1365306 - DNA, 15 bp, Homo sapiens
ttgaacaaggtcaca

SEQ ID NO: 1365307 - DNA, 15 bp, Homo sapiens
cttgaacaaggtcac

SEQ ID NO: 1365308 - DNA, 15 bp, Homo sapiens
gcttgaacaaggtca

SEQ ID NO: 1365309 - DNA, 15 bp, Homo sapiens
agcttgaacaaggtc

SEQ ID NO: 1365310 - DNA, 15 bp, Homo sapiens
tagcttgaacaaggt

SEQ ID NO: 1365311 - DNA, 15 bp, Homo sapiens
atagcttgaacaagg

SEQ ID NO: 1365312 - DNA, 15 bp, Homo sapiens
catagcttgaacaag

SEQ ID NO: 1365313 - DNA, 15 bp, Homo sapiens
gcatagcttgaacaa

SEQ ID NO: 1365314 - DNA, 15 bp, Homo sapiens
ggcatagcttgaaca

SEQ ID NO: 1365315 - DNA, 15 bp, Homo sapiens
tggcatagcttgaac

SEQ ID NO: 1365316 - DNA, 15 bp, Homo sapiens
atggcatagcttgaa

SEQ ID NO: 1365317 - DNA, 15 bp, Homo sapiens
gatggcatagcttga

SEQ ID NO: 1365318 - DNA, 15 bp, Homo sapiens
agatggcatagcttg

SEQ ID NO: 1365319 - DNA, 15 bp, Homo sapiens
gagatggcatagctt

SEQ ID NO: 1365320 - DNA, 15 bp, Homo sapiens
agagatggcatagct

SEQ ID NO: 1365321 - DNA, 15 bp, Homo sapiens
gagagatggcatagc

SEQ ID NO: 1365322 - DNA, 15 bp, Homo sapiens
agagagatggcatag

SEQ ID NO: 1365323 - DNA, 15 bp, Homo sapiens
tagagagatggcata

SEQ ID NO: 1365324 - DNA, 15 bp, Homo sapiens
ttagagagatggcat

SEQ ID NO: 1365325 - DNA, 15 bp, Homo sapiens
tttagagagatggca

SEQ ID NO: 1365326 - DNA, 15 bp, Homo sapiens
atttagagagatggc

SEQ ID NO: 1365327 - DNA, 15 bp, Homo sapiens
gatttagagagatgg

SEQ ID NO: 1365328 - DNA, 15 bp, Homo sapiens
agatttagagagatg

SEQ ID NO: 1365329 - DNA, 15 bp, Homo sapiens
aagatttagagagat

SEQ ID NO: 1365330 - DNA, 15 bp, Homo sapiens
caagatttagagaga

SEQ ID NO: 1365331 - DNA, 15 bp, Homo sapiens
ccaagatttagagag

SEQ ID NO: 1365332 - DNA, 15 bp, Homo sapiens
cccaagatttagaga

SEQ ID NO: 1365333 - DNA, 15 bp, Homo sapiens
acccaagatttagag

SEQ ID NO: 1365334 - DNA, 15 bp, Homo sapiens
aacccaagatttaga

SEQ ID NO: 1365335 - DNA, 15 bp, Homo sapiens
aaacccaagatttag

SEQ ID NO: 1365336 - DNA, 15 bp, Homo sapiens
aaaacccaagattta

SEQ ID NO: 1365337 - DNA, 15 bp, Homo sapiens
gaaaacccaagattt

SEQ ID NO: 1365338 - DNA, 15 bp, Homo sapiens
tgaaaacccaagatt

SEQ ID NO: 1365339 - DNA, 15 bp, Homo sapiens
gtgaaaacccaagat

SEQ ID NO: 1365340 - DNA, 15 bp, Homo sapiens
ggtgaaaacccaaga

SEQ ID NO: 1365341 - DNA, 15 bp, Homo sapiens
aggtgaaaacccaag

SEQ ID NO: 1365342 - DNA, 15 bp, Homo sapiens
caggtgaaaacccaa

SEQ ID NO: 1365343 - DNA, 15 bp, Homo sapiens
acaggtgaaaaccca

SEQ ID NO: 1365344 - DNA, 15 bp, Homo sapiens
tacaggtgaaaaccc

SEQ ID NO: 1365345 - DNA, 15 bp, Homo sapiens
ttacaggtgaaaacc

SEQ ID NO: 1365346 - DNA, 15 bp, Homo sapiens
tttacaggtgaaaac

SEQ ID NO: 1365347 - DNA, 15 bp, Homo sapiens
ttttacaggtgaaaa

SEQ ID NO: 1365348 - DNA, 15 bp, Homo sapiens
attttacaggtgaaa

SEQ ID NO: 1365349 - DNA, 15 bp, Homo sapiens
tattttacaggtgaa

SEQ ID NO: 1365350 - DNA, 15 bp, Homo sapiens
ttattttacaggtga

SEQ ID NO: 1365351 - DNA, 15 bp, Homo sapiens
cttattttacaggtg

SEQ ID NO: 1365352 - DNA, 15 bp, Homo sapiens
ccttattttacaggt

SEQ ID NO: 1365353 - DNA, 15 bp, Homo sapiens
tccttattttacagg

SEQ ID NO: 1365354 - DNA, 15 bp, Homo sapiens
atccttattttacag

SEQ ID NO: 1365355 - DNA, 15 bp, Homo sapiens
tatccttattttaca

SEQ ID NO: 1365356 - DNA, 15 bp, Homo sapiens
ctatccttattttac

SEQ ID NO: 1365357 - DNA, 15 bp, Homo sapiens
actatccttatttta

SEQ ID NO: 1365358 - DNA, 15 bp, Homo sapiens
aactatccttatttt

SEQ ID NO: 1365359 - DNA, 15 bp, Homo sapiens
taactatccttattt

SEQ ID NO: 1365360 - DNA, 15 bp, Homo sapiens
gtaactatccttatt

SEQ ID NO: 1365361 - DNA, 15 bp, Homo sapiens
tgtaactatccttat

SEQ ID NO: 1365362 - DNA, 15 bp, Homo sapiens
gtgtaactatcctta

SEQ ID NO: 1365363 - DNA, 15 bp, Homo sapiens
ggtgtaactatcctt

SEQ ID NO: 1365364 - DNA, 15 bp, Homo sapiens
aggtgtaactatcct

SEQ ID NO: 1365365 - DNA, 15 bp, Homo sapiens
taggtgtaactatcc

SEQ ID NO: 1365366 - DNA, 15 bp, Homo sapiens
gtaggtgtaactatc

SEQ ID NO: 1365367 - DNA, 15 bp, Homo sapiens
ggtaggtgtaactat

SEQ ID NO: 1365368 - DNA, 15 bp, Homo sapiens
aggtaggtgtaacta

SEQ ID NO: 1365369 - DNA, 15 bp, Homo sapiens
gaggtaggtgtaact

SEQ ID NO: 1365370 - DNA, 15 bp, Homo sapiens
tgaggtaggtgtaac

SEQ ID NO: 1365371 - DNA, 15 bp, Homo sapiens
ttgaggtaggtgtaa

SEQ ID NO: 1365372 - DNA, 15 bp, Homo sapiens
tttgaggtaggtgta

SEQ ID NO: 1365373 - DNA, 15 bp, Homo sapiens
gtttgaggtaggtgt

SEQ ID NO: 1365374 - DNA, 15 bp, Homo sapiens
cgtttgaggtaggtg

SEQ ID NO: 1365375 - DNA, 15 bp, Homo sapiens
tcgtttgaggtaggt

SEQ ID NO: 1365376 - DNA, 15 bp, Homo sapiens
ctcgtttgaggtagg

SEQ ID NO: 1365377 - DNA, 15 bp, Homo sapiens
tctcgtttgaggtag

SEQ ID NO: 1365378 - DNA, 15 bp, Homo sapiens
gtctcgtttgaggta

SEQ ID NO: 1365379 - DNA, 15 bp, Homo sapiens
ggtctcgtttgaggt

SEQ ID NO: 1365380 - DNA, 15 bp, Homo sapiens
gggtctcgtttgagg

SEQ ID NO: 1365381 - DNA, 15 bp, Homo sapiens
agggtctcgtttgag

SEQ ID NO: 1365382 - DNA, 15 bp, Homo sapiens
aagggtctcgtttga

SEQ ID NO: 1365383 - DNA, 15 bp, Homo sapiens
aaagggtctcgtttg

SEQ ID NO: 1365384 - DNA, 15 bp, Homo sapiens
gaaagggtctcgttt

SEQ ID NO: 1365385 - DNA, 15 bp, Homo sapiens
tgaaagggtctcgtt

SEQ ID NO: 1365386 - DNA, 15 bp, Homo sapiens
ttgaaagggtctcgt

SEQ ID NO: 1365387 - DNA, 15 bp, Homo sapiens
tttgaaagggtctcg

SEQ ID NO: 1365388 - DNA, 15 bp, Homo sapiens
ttttgaaagggtctc

SEQ ID NO: 1365389 - DNA, 15 bp, Homo sapiens
attttgaaagggtct

SEQ ID NO: 1365390 - DNA, 15 bp, Homo sapiens
cattttgaaagggtc

SEQ ID NO: 1365391 - DNA, 15 bp, Homo sapiens
tcattttgaaagggt

SEQ ID NO: 1365392 - DNA, 15 bp, Homo sapiens
ctcattttgaaaggg

SEQ ID NO: 1365393 - DNA, 15 bp, Homo sapiens
cctcattttgaaagg

SEQ ID NO: 1365394 - DNA, 15 bp, Homo sapiens
acctcattttgaaag

SEQ ID NO: 1365395 - DNA, 15 bp, Homo sapiens
cacctcattttgaaa

SEQ ID NO: 1365396 - DNA, 15 bp, Homo sapiens
tcacctcattttgaa

SEQ ID NO: 1365397 - DNA, 15 bp, Homo sapiens
atcacctcattttga

SEQ ID NO: 1365398 - DNA, 15 bp, Homo sapiens
catcacctcattttg

SEQ ID NO: 1365399 - DNA, 15 bp, Homo sapiens
acatcacctcatttt

SEQ ID NO: 1365400 - DNA, 15 bp, Homo sapiens
aacatcacctcattt

SEQ ID NO: 1365401 - DNA, 15 bp, Homo sapiens
taacatcacctcatt

SEQ ID NO: 1365402 - DNA, 15 bp, Homo sapiens
gtaacatcacctcat

SEQ ID NO: 1365403 - DNA, 15 bp, Homo sapiens
tgtaacatcacctca

SEQ ID NO: 1365404 - DNA, 15 bp, Homo sapiens
atgtaacatcacctc

SEQ ID NO: 1365405 - DNA, 15 bp, Homo sapiens
tatgtaacatcacct

SEQ ID NO: 1365406 - DNA, 15 bp, Homo sapiens
ctatgtaacatcacc

SEQ ID NO: 1365407 - DNA, 15 bp, Homo sapiens
gctatgtaacatcac

SEQ ID NO: 1365408 - DNA, 15 bp, Homo sapiens
tgctatgtaacatca

SEQ ID NO: 1365409 - DNA, 15 bp, Homo sapiens
ttgctatgtaacatc

SEQ ID NO: 1365410 - DNA, 15 bp, Homo sapiens
cttgctatgtaacat

SEQ ID NO: 1365411 - DNA, 15 bp, Homo sapiens
gcttgctatgtaaca

SEQ ID NO: 1365412 - DNA, 15 bp, Homo sapiens
agcttgctatgtaac

SEQ ID NO: 1365413 - DNA, 15 bp, Homo sapiens
aagcttgctatgtaa

SEQ ID NO: 1365414 - DNA, 15 bp, Homo sapiens
taagcttgctatgta

SEQ ID NO: 1365415 - DNA, 15 bp, Homo sapiens
gtaagcttgctatgt

SEQ ID NO: 1365416 - DNA, 15 bp, Homo sapiens
ggtaagcttgctatg

SEQ ID NO: 1365417 - DNA, 15 bp, Homo sapiens
tggtaagcttgctat

SEQ ID NO: 1365418 - DNA, 15 bp, Homo sapiens
atggtaagcttgcta

SEQ ID NO: 1365419 - DNA, 15 bp, Homo sapiens
gatggtaagcttgct

SEQ ID NO: 1365420 - DNA, 15 bp, Homo sapiens
tgatggtaagcttgc

SEQ ID NO: 1365421 - DNA, 15 bp, Homo sapiens
ttgatggtaagcttg

SEQ ID NO: 1365422 - DNA, 15 bp, Homo sapiens
attgatggtaagctt

SEQ ID NO: 1365423 - DNA, 15 bp, Homo sapiens
cattgatggtaagct

SEQ ID NO: 1365424 - DNA, 15 bp, Homo sapiens
ccattgatggtaagc

SEQ ID NO: 1365425 - DNA, 15 bp, Homo sapiens
tccattgatggtaag

SEQ ID NO: 1365426 - DNA, 15 bp, Homo sapiens
atccattgatggtaa

SEQ ID NO: 1365427 - DNA, 15 bp, Homo sapiens
tatccattgatggta

SEQ ID NO: 1365428 - DNA, 15 bp, Homo sapiens
ttatccattgatggt

SEQ ID NO: 1365429 - DNA, 15 bp, Homo sapiens
tttatccattgatgg

SEQ ID NO: 1365430 - DNA, 15 bp, Homo sapiens
ttttatccattgatg

SEQ ID NO: 1365431 - DNA, 15 bp, Homo sapiens
cttttatccattgat

SEQ ID NO: 1365432 - DNA, 15 bp, Homo sapiens
gcttttatccattga

SEQ ID NO: 1365433 - DNA, 15 bp, Homo sapiens
agcttttatccattg

SEQ ID NO: 1365434 - DNA, 15 bp, Homo sapiens
tagcttttatccatt

SEQ ID NO: 1365435 - DNA, 15 bp, Homo sapiens
atagcttttatccat

SEQ ID NO: 1365436 - DNA, 15 bp, Homo sapiens
gatagcttttatcca

SEQ ID NO: 1365437 - DNA, 15 bp, Homo sapiens
ggatagcttttatcc

SEQ ID NO: 1365438 - DNA, 15 bp, Homo sapiens
aggatagcttttatc

SEQ ID NO: 1365439 - DNA, 15 bp, Homo sapiens
gaggatagcttttat

SEQ ID NO: 1365440 - DNA, 15 bp, Homo sapiens
tgaggatagctttta

SEQ ID NO: 1365441 - DNA, 15 bp, Homo sapiens
atgaggatagctttt

SEQ ID NO: 1365442 - DNA, 15 bp, Homo sapiens
catgaggatagcttt

SEQ ID NO: 1365443 - DNA, 15 bp, Homo sapiens
acatgaggatagctt

SEQ ID NO: 1365444 - DNA, 15 bp, Homo sapiens
gacatgaggatagct

SEQ ID NO: 1365445 - DNA, 15 bp, Homo sapiens
agacatgaggatagc

SEQ ID NO: 1365446 - DNA, 15 bp, Homo sapiens
cagacatgaggatag

SEQ ID NO: 1365447 - DNA, 15 bp, Homo sapiens
acagacatgaggata

SEQ ID NO: 1365448 - DNA, 15 bp, Homo sapiens
cacagacatgaggat

SEQ ID NO: 1365449 - DNA, 15 bp, Homo sapiens
ccacagacatgagga

SEQ ID NO: 1365450 - DNA, 15 bp, Homo sapiens
accacagacatgagg

SEQ ID NO: 1365451 - DNA, 15 bp, Homo sapiens
gaccacagacatgag

SEQ ID NO: 1365452 - DNA, 15 bp, Homo sapiens
agaccacagacatga

SEQ ID NO: 1365453 - DNA, 15 bp, Homo sapiens
cagaccacagacatg

SEQ ID NO: 1365454 - DNA, 15 bp, Homo sapiens
acagaccacagacat

SEQ ID NO: 1365455 - DNA, 15 bp, Homo sapiens
tacagaccacagaca

SEQ ID NO: 1365456 - DNA, 15 bp, Homo sapiens
ttacagaccacagac

SEQ ID NO: 1365457 - DNA, 15 bp, Homo sapiens
attacagaccacaga

SEQ ID NO: 1365458 - DNA, 15 bp, Homo sapiens
gattacagaccacag

SEQ ID NO: 1365459 - DNA, 15 bp, Homo sapiens
tgattacagaccaca

SEQ ID NO: 1365460 - DNA, 15 bp, Homo sapiens
ctgattacagaccac

SEQ ID NO: 1365461 - DNA, 15 bp, Homo sapiens
actgattacagacca

SEQ ID NO: 1365462 - DNA, 15 bp, Homo sapiens
aactgattacagacc

SEQ ID NO: 1365463 - DNA, 15 bp, Homo sapiens
taactgattacagac

SEQ ID NO: 1365464 - DNA, 15 bp, Homo sapiens
ataactgattacaga

SEQ ID NO: 1365465 - DNA, 15 bp, Homo sapiens
cataactgattacag

SEQ ID NO: 1365466 - DNA, 15 bp, Homo sapiens
ccataactgattaca

SEQ ID NO: 1365467 - DNA, 15 bp, Homo sapiens
accataactgattac

SEQ ID NO: 1365468 - DNA, 15 bp, Homo sapiens
aaccataactgatta

SEQ ID NO: 1365469 - DNA, 15 bp, Homo sapiens
aaaccataactgatt

SEQ ID NO: 1365470 - DNA, 15 bp, Homo sapiens
aaaaccataactgat

SEQ ID NO: 1365471 - DNA, 15 bp, Homo sapiens
caaaaccataactga

SEQ ID NO: 1365472 - DNA, 15 bp, Homo sapiens
gcaaaaccataactg

SEQ ID NO: 1365473 - DNA, 15 bp, Homo sapiens
agcaaaaccataact

SEQ ID NO: 1365474 - DNA, 15 bp, Homo sapiens
gagcaaaaccataac

SEQ ID NO: 1365475 - DNA, 15 bp, Homo sapiens
agagcaaaaccataa

SEQ ID NO: 1365476 - DNA, 15 bp, Homo sapiens
tagagcaaaaccata

SEQ ID NO: 1365477 - DNA, 15 bp, Homo sapiens
atagagcaaaaccat

SEQ ID NO: 1365478 - DNA, 15 bp, Homo sapiens
tatagagcaaaacca

SEQ ID NO: 1365479 - DNA, 15 bp, Homo sapiens
ttatagagcaaaacc

SEQ ID NO: 1365480 - DNA, 15 bp, Homo sapiens
attatagagcaaaac

SEQ ID NO: 1365481 - DNA, 15 bp, Homo sapiens
cattatagagcaaaa

SEQ ID NO: 1365482 - DNA, 15 bp, Homo sapiens
tcattatagagcaaa

SEQ ID NO: 1365483 - DNA, 15 bp, Homo sapiens
ctcattatagagcaa

SEQ ID NO: 1365484 - DNA, 15 bp, Homo sapiens
actcattatagagca

SEQ ID NO: 1365485 - DNA, 15 bp, Homo sapiens
cactcattatagagc

SEQ ID NO: 1365486 - DNA, 15 bp, Homo sapiens
acactcattatagag

SEQ ID NO: 1365487 - DNA, 15 bp, Homo sapiens
aacactcattataga

SEQ ID NO: 1365488 - DNA, 15 bp, Homo sapiens
aaacactcattatag

SEQ ID NO: 1365489 - DNA, 15 bp, Homo sapiens
aaaacactcattata

SEQ ID NO: 1365490 - DNA, 15 bp, Homo sapiens
caaaacactcattat

SEQ ID NO: 1365491 - DNA, 15 bp, Homo sapiens
acaaaacactcatta

SEQ ID NO: 1365492 - DNA, 15 bp, Homo sapiens
tacaaaacactcatt

SEQ ID NO: 1365493 - DNA, 15 bp, Homo sapiens
gtacaaaacactcat

SEQ ID NO: 1365494 - DNA, 15 bp, Homo sapiens
ggtacaaaacactca

SEQ ID NO: 1365495 - DNA, 15 bp, Homo sapiens
tggtacaaaacactc

SEQ ID NO: 1365496 - DNA, 15 bp, Homo sapiens
gtggtacaaaacact

SEQ ID NO: 1365497 - DNA, 15 bp, Homo sapiens
tgtggtacaaaacac

SEQ ID NO: 1365498 - DNA, 15 bp, Homo sapiens
gtgtggtacaaaaca

SEQ ID NO: 1365499 - DNA, 15 bp, Homo sapiens
agtgtggtacaaaac

SEQ ID NO: 1365500 - DNA, 15 bp, Homo sapiens
cagtgtggtacaaaa

SEQ ID NO: 1365501 - DNA, 15 bp, Homo sapiens
acagtgtggtacaaa

SEQ ID NO: 1365502 - DNA, 15 bp, Homo sapiens
gacagtgtggtacaa

SEQ ID NO: 1365503 - DNA, 15 bp, Homo sapiens
agacagtgtggtaca

SEQ ID NO: 1365504 - DNA, 15 bp, Homo sapiens
aagacagtgtggtac

SEQ ID NO: 1365505 - DNA, 15 bp, Homo sapiens
taagacagtgtggta

SEQ ID NO: 1365506 - DNA, 15 bp, Homo sapiens
ctaagacagtgtggt

SEQ ID NO: 1365507 - DNA, 15 bp, Homo sapiens
gctaagacagtgtgg

SEQ ID NO: 1365508 - DNA, 15 bp, Homo sapiens
caggctaagacagtg

SEQ ID NO: 1365509 - DNA, 15 bp, Homo sapiens
acaggctaagacagt

SEQ ID NO: 1365510 - DNA, 15 bp, Homo sapiens
aacaggctaagacag

SEQ ID NO: 1365511 - DNA, 15 bp, Homo sapiens
aaacaggctaagaca

SEQ ID NO: 1365512 - DNA, 15 bp, Homo sapiens
aaaacaggctaagac

SEQ ID NO: 1365513 - DNA, 15 bp, Homo sapiens
gaaaacaggctaaga

SEQ ID NO: 1365514 - DNA, 15 bp, Homo sapiens
agaaaacaggctaag

SEQ ID NO: 1365515 - DNA, 15 bp, Homo sapiens
tagaaaacaggctaa

SEQ ID NO: 1365516 - DNA, 15 bp, Homo sapiens
atagaaaacaggcta

SEQ ID NO: 1365517 - DNA, 15 bp, Homo sapiens
aatagaaaacaggct

SEQ ID NO: 1365518 - DNA, 15 bp, Homo sapiens
caatagaaaacaggc

SEQ ID NO: 1365519 - DNA, 15 bp, Homo sapiens
gcaatagaaaacagg

SEQ ID NO: 1365520 - DNA, 15 bp, Homo sapiens
agcaatagaaaacag

SEQ ID NO: 1365521 - DNA, 15 bp, Homo sapiens
tagcaatagaaaaca

SEQ ID NO: 1365522 - DNA, 15 bp, Homo sapiens
atagcaatagaaaac

SEQ ID NO: 1365523 - DNA, 15 bp, Homo sapiens
tatagcaatagaaaa

SEQ ID NO: 1365524 - DNA, 15 bp, Homo sapiens
ttatagcaatagaaa

SEQ ID NO: 1365525 - DNA, 15 bp, Homo sapiens
gttatagcaatagaa

SEQ ID NO: 1365526 - DNA, 15 bp, Homo sapiens
tgttatagcaataga

SEQ ID NO: 1365527 - DNA, 15 bp, Homo sapiens
ctgttatagcaatag

SEQ ID NO: 1365528 - DNA, 15 bp, Homo sapiens
tctgttatagcaata

SEQ ID NO: 1365529 - DNA, 15 bp, Homo sapiens
ttctgttatagcaat

SEQ ID NO: 1365530 - DNA, 15 bp, Homo sapiens
attctgttatagcaa

SEQ ID NO: 1365531 - DNA, 15 bp, Homo sapiens
ttcaggtattctgtt

SEQ ID NO: 1365532 - DNA, 15 bp, Homo sapiens
tttcaggtattctgt

SEQ ID NO: 1365533 - DNA, 15 bp, Homo sapiens
gtttcaggtattctg

SEQ ID NO: 1365534 - DNA, 15 bp, Homo sapiens
agtttcaggtattct

SEQ ID NO: 1365535 - DNA, 15 bp, Homo sapiens
cagtttcaggtattc

SEQ ID NO: 1365536 - DNA, 15 bp, Homo sapiens
ccagtttcaggtatt

SEQ ID NO: 1365537 - DNA, 15 bp, Homo sapiens
tccagtttcaggtat

SEQ ID NO: 1365538 - DNA, 15 bp, Homo sapiens
atccagtttcaggta

SEQ ID NO: 1365539 - DNA, 15 bp, Homo sapiens
tatccagtttcaggt

SEQ ID NO: 1365540 - DNA, 15 bp, Homo sapiens
ttatccagtttcagg

SEQ ID NO: 1365541 - DNA, 15 bp, Homo sapiens
gttatccagtttcag

SEQ ID NO: 1365542 - DNA, 15 bp, Homo sapiens
agttatccagtttca

SEQ ID NO: 1365543 - DNA, 15 bp, Homo sapiens
aagttatccagtttc

SEQ ID NO: 1365544 - DNA, 15 bp, Homo sapiens
taagttatccagttt

SEQ ID NO: 1365545 - DNA, 15 bp, Homo sapiens
ataagttatccagtt

SEQ ID NO: 1365546 - DNA, 15 bp, Homo sapiens
tataagttatccagt

SEQ ID NO: 1365547 - DNA, 15 bp, Homo sapiens
ttataagttatccag

SEQ ID NO: 1365548 - DNA, 15 bp, Homo sapiens
attataagttatcca

SEQ ID NO: 1365549 - DNA, 15 bp, Homo sapiens
cattataagttatcc

SEQ ID NO: 1365550 - DNA, 15 bp, Homo sapiens
tcattataagttatc

SEQ ID NO: 1365551 - DNA, 15 bp, Homo sapiens
ttcattataagttat

SEQ ID NO: 1365552 - DNA, 15 bp, Homo sapiens
tttcattataagtta

SEQ ID NO: 1365553 - DNA, 15 bp, Homo sapiens
ttttcattataagtt

SEQ ID NO: 1365554 - DNA, 15 bp, Homo sapiens
cttttcattataagt

SEQ ID NO: 1365555 - DNA, 15 bp, Homo sapiens
tcttttcattataag

SEQ ID NO: 1365556 - DNA, 15 bp, Homo sapiens
ttcttttcattataa

SEQ ID NO: 1365557 - DNA, 15 bp, Homo sapiens
cttcttttcattata

SEQ ID NO: 1365558 - DNA, 15 bp, Homo sapiens
acttcttttcattat

SEQ ID NO: 1365559 - DNA, 15 bp, Homo sapiens
aacttcttttcatta

SEQ ID NO: 1365560 - DNA, 15 bp, Homo sapiens
aaacttcttttcatt

SEQ ID NO: 1365561 - DNA, 15 bp, Homo sapiens
taaacttcttttcat

SEQ ID NO: 1365562 - DNA, 15 bp, Homo sapiens
ataaacttcttttca

SEQ ID NO: 1365563 - DNA, 15 bp, Homo sapiens
aataaacttcttttc

SEQ ID NO: 1365564 - DNA, 15 bp, Homo sapiens
aaataaacttctttt

SEQ ID NO: 1365565 - DNA, 15 bp, Homo sapiens
caaataaacttcttt

SEQ ID NO: 1365566 - DNA, 15 bp, Homo sapiens
ccaaataaacttctt

SEQ ID NO: 1365567 - DNA, 15 bp, Homo sapiens
gccaaataaacttct

SEQ ID NO: 1365568 - DNA, 15 bp, Homo sapiens
agccaaataaacttc

SEQ ID NO: 1365569 - DNA, 15 bp, Homo sapiens
cagccaaataaactt

SEQ ID NO: 1365570 - DNA, 15 bp, Homo sapiens
tcagccaaataaact

SEQ ID NO: 1365571 - DNA, 15 bp, Homo sapiens
atcagccaaataaac

SEQ ID NO: 1365572 - DNA, 15 bp, Homo sapiens
catcagccaaataaa

SEQ ID NO: 1365573 - DNA, 15 bp, Homo sapiens
ccatcagccaaataa

SEQ ID NO: 1365574 - DNA, 15 bp, Homo sapiens
accatcagccaaata

SEQ ID NO: 1365575 - DNA, 15 bp, Homo sapiens
aaccatcagccaaat

SEQ ID NO: 1365576 - DNA, 15 bp, Homo sapiens
gaaccatcagccaaa

SEQ ID NO: 1365577 - DNA, 15 bp, Homo sapiens
agaaccatcagccaa

SEQ ID NO: 1365578 - DNA, 15 bp, Homo sapiens
tagaaccatcagcca

SEQ ID NO: 1365579 - DNA, 15 bp, Homo sapiens
ctagaaccatcagcc

SEQ ID NO: 1365580 - DNA, 15 bp, Homo sapiens
tctagaaccatcagc

SEQ ID NO: 1365581 - DNA, 15 bp, Homo sapiens
ctctagaaccatcag

SEQ ID NO: 1365582 - DNA, 15 bp, Homo sapiens
cctctagaaccatca

SEQ ID NO: 1365583 - DNA, 15 bp, Homo sapiens
gcctctagaaccatc

SEQ ID NO: 1365584 - DNA, 15 bp, Homo sapiens
agcctctagaaccat

SEQ ID NO: 1365585 - DNA, 15 bp, Homo sapiens
cagcctctagaacca

SEQ ID NO: 1365586 - DNA, 15 bp, Homo sapiens
ccagcctctagaacc

SEQ ID NO: 1365587 - DNA, 15 bp, Homo sapiens
cccagcctctagaac

SEQ ID NO: 1365588 - DNA, 15 bp, Homo sapiens
tcccagcctctagaa

SEQ ID NO: 1365589 - DNA, 15 bp, Homo sapiens
ttcccagcctctaga

SEQ ID NO: 1365590 - DNA, 15 bp, Homo sapiens
cttcccagcctctag

SEQ ID NO: 1365591 - DNA, 15 bp, Homo sapiens
acttcccagcctcta

SEQ ID NO: 1365592 - DNA, 15 bp, Homo sapiens
aacttcccagcctct

SEQ ID NO: 1365593 - DNA, 15 bp, Homo sapiens
tcttgaacttcccag

SEQ ID NO: 1365594 - DNA, 15 bp, Homo sapiens
gtcttgaacttccca

SEQ ID NO: 1365595 - DNA, 15 bp, Homo sapiens
ggtcttgaacttccc

SEQ ID NO: 1365596 - DNA, 15 bp, Homo sapiens
aggtcttgaacttcc

SEQ ID NO: 1365597 - DNA, 15 bp, Homo sapiens
caggtcttgaacttc

SEQ ID NO: 1365598 - DNA, 15 bp, Homo sapiens
ccaggtcttgaactt

SEQ ID NO: 1365599 - DNA, 15 bp, Homo sapiens
tccaggtcttgaact

SEQ ID NO: 1365600 - DNA, 15 bp, Homo sapiens
ctccaggtcttgaac

SEQ ID NO: 1365601 - DNA, 15 bp, Homo sapiens
cctccaggtcttgaa

SEQ ID NO: 1365602 - DNA, 15 bp, Homo sapiens
gcctccaggtcttga

SEQ ID NO: 1365603 - DNA, 15 bp, Homo sapiens
agcctccaggtcttg

SEQ ID NO: 1365604 - DNA, 15 bp, Homo sapiens
tagcctccaggtctt

SEQ ID NO: 1365605 - DNA, 15 bp, Homo sapiens
gtagcctccaggtct

SEQ ID NO: 1365606 - DNA, 15 bp, Homo sapiens
tgtagcctccaggtc

SEQ ID NO: 1365607 - DNA, 15 bp, Homo sapiens
atgtagcctccaggt

SEQ ID NO: 1365608 - DNA, 15 bp, Homo sapiens
gatgtagcctccagg

SEQ ID NO: 1365609 - DNA, 15 bp, Homo sapiens
agatgtagcctccag

SEQ ID NO: 1365610 - DNA, 15 bp, Homo sapiens
cagatgtagcctcca

SEQ ID NO: 1365611 - DNA, 15 bp, Homo sapiens
ccagatgtagcctcc

SEQ ID NO: 1365612 - DNA, 15 bp, Homo sapiens
accagatgtagcctc

SEQ ID NO: 1365613 - DNA, 15 bp, Homo sapiens
caccagatgtagcct

SEQ ID NO: 1365614 - DNA, 15 bp, Homo sapiens
tcaccagatgtagcc

SEQ ID NO: 1365615 - DNA, 15 bp, Homo sapiens
ctcaccagatgtagc

SEQ ID NO: 1365616 - DNA, 15 bp, Homo sapiens
cctcaccagatgtag

SEQ ID NO: 1365617 - DNA, 15 bp, Homo sapiens
ccctcaccagatgta

SEQ ID NO: 1365618 - DNA, 15 bp, Homo sapiens
gccctcaccagatgt

SEQ ID NO: 1365619 - DNA, 15 bp, Homo sapiens
ggccctcaccagatg

SEQ ID NO: 1365620 - DNA, 15 bp, Homo sapiens
aggccctcaccagat

SEQ ID NO: 1365621 - DNA, 15 bp, Homo sapiens
gaggccctcaccaga

SEQ ID NO: 1365622 - DNA, 15 bp, Homo sapiens
tgaggccctcaccag

SEQ ID NO: 1365623 - DNA, 15 bp, Homo sapiens
atgaggccctcacca

SEQ ID NO: 1365624 - DNA, 15 bp, Homo sapiens
catgaggccctcacc

SEQ ID NO: 1365625 - DNA, 15 bp, Homo sapiens
gcatgaggccctcac

SEQ ID NO: 1365626 - DNA, 15 bp, Homo sapiens
agcatgaggccctca

SEQ ID NO: 1365627 - DNA, 15 bp, Homo sapiens
cagcatgaggccctc

SEQ ID NO: 1365628 - DNA, 15 bp, Homo sapiens
acagcatgaggccct

SEQ ID NO: 1365629 - DNA, 15 bp, Homo sapiens
cacagcatgaggccc

SEQ ID NO: 1365630 - DNA, 15 bp, Homo sapiens
acacagcatgaggcc

SEQ ID NO: 1365631 - DNA, 15 bp, Homo sapiens
gacacagcatgaggc

SEQ ID NO: 1365632 - DNA, 15 bp, Homo sapiens
tgacacagcatgagg

SEQ ID NO: 1365633 - DNA, 15 bp, Homo sapiens
atgacacagcatgag

SEQ ID NO: 1365634 - DNA, 15 bp, Homo sapiens
tatgacacagcatga

SEQ ID NO: 1365635 - DNA, 15 bp, Homo sapiens
ttatgacacagcatg

SEQ ID NO: 1365636 - DNA, 15 bp, Homo sapiens
gttatgacacagcat

SEQ ID NO: 1365637 - DNA, 15 bp, Homo sapiens
tgttatgacacagca

SEQ ID NO: 1365638 - DNA, 15 bp, Homo sapiens
atgttatgacacagc

SEQ ID NO: 1365639 - DNA, 15 bp, Homo sapiens
catgttatgacacag

SEQ ID NO: 1365640 - DNA, 15 bp, Homo sapiens
ccatgttatgacaca

SEQ ID NO: 1365641 - DNA, 15 bp, Homo sapiens
gccatgttatgacac

SEQ ID NO: 1365642 - DNA, 15 bp, Homo sapiens
tgccatgttatgaca

SEQ ID NO: 1365643 - DNA, 15 bp, Homo sapiens
ctgccatgttatgac

SEQ ID NO: 1365644 - DNA, 15 bp, Homo sapiens
tctgccatgttatga

SEQ ID NO: 1365645 - DNA, 15 bp, Homo sapiens
atctgccatgttatg

SEQ ID NO: 1365646 - DNA, 15 bp, Homo sapiens
catctgccatgttat

SEQ ID NO: 1365647 - DNA, 15 bp, Homo sapiens
ccatctgccatgtta

SEQ ID NO: 1365648 - DNA, 15 bp, Homo sapiens
gccatctgccatgtt

SEQ ID NO: 1365649 - DNA, 15 bp, Homo sapiens
tgccatctgccatgt

SEQ ID NO: 1365650 - DNA, 15 bp, Homo sapiens
atgccatctgccatg

SEQ ID NO: 1365651 - DNA, 15 bp, Homo sapiens
gatgccatctgccat

SEQ ID NO: 1365652 - DNA, 15 bp, Homo sapiens
tgatgccatctgcca

SEQ ID NO: 1365653 - DNA, 15 bp, Homo sapiens
gtgatgccatctgcc

SEQ ID NO: 1365654 - DNA, 15 bp, Homo sapiens
tgtgatgccatctgc

SEQ ID NO: 1365655 - DNA, 15 bp, Homo sapiens
atgtgatgccatctg

SEQ ID NO: 1365656 - DNA, 15 bp, Homo sapiens
catgtgatgccatct

SEQ ID NO: 1365657 - DNA, 15 bp, Homo sapiens
ccatgtgatgccatc

SEQ ID NO: 1365658 - DNA, 15 bp, Homo sapiens
tccatgtgatgccat

SEQ ID NO: 1365659 - DNA, 15 bp, Homo sapiens
ttccatgtgatgcca

SEQ ID NO: 1365660 - DNA, 15 bp, Homo sapiens
cttccatgtgatgcc

SEQ ID NO: 1365661 - DNA, 15 bp, Homo sapiens
ccttccatgtgatgc

SEQ ID NO: 1365662 - DNA, 15 bp, Homo sapiens
tccttccatgtgatg

SEQ ID NO: 1365663 - DNA, 15 bp, Homo sapiens
ctccttccatgtgat

SEQ ID NO: 1365664 - DNA, 15 bp, Homo sapiens
gctccttccatgtga

SEQ ID NO: 1365665 - DNA, 15 bp, Homo sapiens
tgctccttccatgtg

SEQ ID NO: 1365666 - DNA, 15 bp, Homo sapiens
atgctccttccatgt

SEQ ID NO: 1365667 - DNA, 15 bp, Homo sapiens
catgctccttccatg

SEQ ID NO: 1365668 - DNA, 15 bp, Homo sapiens
acatgctccttccat

SEQ ID NO: 1365669 - DNA, 15 bp, Homo sapiens
aacatgctccttcca

SEQ ID NO: 1365670 - DNA, 15 bp, Homo sapiens
gaacatgctccttcc

SEQ ID NO: 1365671 - DNA, 15 bp, Homo sapiens
tgaacatgctccttc

SEQ ID NO: 1365672 - DNA, 15 bp, Homo sapiens
ttgaacatgctcctt

SEQ ID NO: 1365673 - DNA, 15 bp, Homo sapiens
tttgaacatgctcct

SEQ ID NO: 1365674 - DNA, 15 bp, Homo sapiens
ttttgaacatgctcc

SEQ ID NO: 1365675 - DNA, 15 bp, Homo sapiens
cttttgaacatgctc

SEQ ID NO: 1365676 - DNA, 15 bp, Homo sapiens
tcttttgaacatgct

SEQ ID NO: 1365677 - DNA, 15 bp, Homo sapiens
ctcttttgaacatgc

SEQ ID NO: 1365678 - DNA, 15 bp, Homo sapiens
tctcttttgaacatg

SEQ ID NO: 1365679 - DNA, 15 bp, Homo sapiens
ttctcttttgaacat

SEQ ID NO: 1365680 - DNA, 15 bp, Homo sapiens
gttctcttttgaaca

SEQ ID NO: 1365681 - DNA, 15 bp, Homo sapiens
tgttctcttttgaac

SEQ ID NO: 1365682 - DNA, 15 bp, Homo sapiens
ttgttctcttttgaa

SEQ ID NO: 1365683 - DNA, 15 bp, Homo sapiens
tttgttctcttttga

SEQ ID NO: 1365684 - DNA, 15 bp, Homo sapiens
gtttgttctcttttg

SEQ ID NO: 1365685 - DNA, 15 bp, Homo sapiens
tgtttgttctctttt

SEQ ID NO: 1365686 - DNA, 15 bp, Homo sapiens
gtgtttgttctcttt

SEQ ID NO: 1365687 - DNA, 15 bp, Homo sapiens
tgtgtttgttctctt

SEQ ID NO: 1365688 - DNA, 15 bp, Homo sapiens
ttgtgtttgttctct

SEQ ID NO: 1365689 - DNA, 15 bp, Homo sapiens
cttgtgtttgttctc

SEQ ID NO: 1365690 - DNA, 15 bp, Homo sapiens
tcttgtgtttgttct

SEQ ID NO: 1365691 - DNA, 15 bp, Homo sapiens
ctcttgtgtttgttc

SEQ ID NO: 1365692 - DNA, 15 bp, Homo sapiens
cctcttgtgtttgtt

SEQ ID NO: 1365693 - DNA, 15 bp, Homo sapiens
gcctcttgtgtttgt

SEQ ID NO: 1365694 - DNA, 15 bp, Homo sapiens
tgcctcttgtgtttg

SEQ ID NO: 1365695 - DNA, 15 bp, Homo sapiens
ctgcctcttgtgttt

SEQ ID NO: 1365696 - DNA, 15 bp, Homo sapiens
gctgcctcttgtgtt

SEQ ID NO: 1365697 - DNA, 15 bp, Homo sapiens
ggctgcctcttgtgt

SEQ ID NO: 1365698 - DNA, 15 bp, Homo sapiens
aggctgcctcttgtg

SEQ ID NO: 1365699 - DNA, 15 bp, Homo sapiens
gaggctgcctcttgt

SEQ ID NO: 1365700 - DNA, 15 bp, Homo sapiens
tgaggctgcctcttg

SEQ ID NO: 1365701 - DNA, 15 bp, Homo sapiens
gtgaggctgcctctt

SEQ ID NO: 1365702 - DNA, 15 bp, Homo sapiens
agtgaggctgcctct

SEQ ID NO: 1365703 - DNA, 15 bp, Homo sapiens
aagtgaggctgcctc

SEQ ID NO: 1365704 - DNA, 15 bp, Homo sapiens
aaagtgaggctgcct

SEQ ID NO: 1365705 - DNA, 15 bp, Homo sapiens
taaagtgaggctgcc

SEQ ID NO: 1365706 - DNA, 15 bp, Homo sapiens
ataaagtgaggctgc

SEQ ID NO: 1365707 - DNA, 15 bp, Homo sapiens
tataaagtgaggctg

SEQ ID NO: 1365708 - DNA, 15 bp, Homo sapiens
ttataaagtgaggct

SEQ ID NO: 1365709 - DNA, 15 bp, Homo sapiens
attataaagtgaggc

SEQ ID NO: 1365710 - DNA, 15 bp, Homo sapiens
tattataaagtgagg

SEQ ID NO: 1365711 - DNA, 15 bp, Homo sapiens
ttattataaagtgag

SEQ ID NO: 1365712 - DNA, 15 bp, Homo sapiens
gttattataaagtga

SEQ ID NO: 1365713 - DNA, 15 bp, Homo sapiens
ggttattataaagtg

SEQ ID NO: 1365714 - DNA, 15 bp, Homo sapiens
gggttattataaagt

SEQ ID NO: 1365715 - DNA, 15 bp, Homo sapiens
tgggttattataaag

SEQ ID NO: 1365716 - DNA, 15 bp, Homo sapiens
gtgggttattataaa

SEQ ID NO: 1365717 - DNA, 15 bp, Homo sapiens
agtgggttattataa

SEQ ID NO: 1365718 - DNA, 15 bp, Homo sapiens
aagtgggttattata

SEQ ID NO: 1365719 - DNA, 15 bp, Homo sapiens
aaagtgggttattat

SEQ ID NO: 1365720 - DNA, 15 bp, Homo sapiens
gaaagtgggttatta

SEQ ID NO: 1365721 - DNA, 15 bp, Homo sapiens
tgaaagtgggttatt

SEQ ID NO: 1365722 - DNA, 15 bp, Homo sapiens
atgaaagtgggttat

SEQ ID NO: 1365723 - DNA, 15 bp, Homo sapiens
agtcaatgtacattt

SEQ ID NO: 1365724 - DNA, 15 bp, Homo sapiens
aagtcaatgtacatt

SEQ ID NO: 1365725 - DNA, 15 bp, Homo sapiens
caagtcaatgtacat

SEQ ID NO: 1365726 - DNA, 15 bp, Homo sapiens
tcaagtcaatgtaca

SEQ ID NO: 1365727 - DNA, 15 bp, Homo sapiens
atcaagtcaatgtac

SEQ ID NO: 1365728 - DNA, 15 bp, Homo sapiens
tatcaagtcaatgta

SEQ ID NO: 1365729 - DNA, 15 bp, Homo sapiens
ttatcaagtcaatgt

SEQ ID NO: 1365730 - DNA, 15 bp, Homo sapiens
attatcaagtcaatg

SEQ ID NO: 1365731 - DNA, 15 bp, Homo sapiens
cattatcaagtcaat

SEQ ID NO: 1365732 - DNA, 15 bp, Homo sapiens
tcattatcaagtcaa

SEQ ID NO: 1365733 - DNA, 15 bp, Homo sapiens
atcattatcaagtca

SEQ ID NO: 1365734 - DNA, 15 bp, Homo sapiens
catcattatcaagtc

SEQ ID NO: 1365735 - DNA, 15 bp, Homo sapiens
tcatcattatcaagt

SEQ ID NO: 1365736 - DNA, 15 bp, Homo sapiens
ctcatcattatcaag

SEQ ID NO: 1365737 - DNA, 15 bp, Homo sapiens
gctcatcattatcaa

SEQ ID NO: 1365738 - DNA, 15 bp, Homo sapiens
tgctcatcattatca

SEQ ID NO: 1365739 - DNA, 15 bp, Homo sapiens
atgctcatcattatc

SEQ ID NO: 1365740 - DNA, 15 bp, Homo sapiens
gatgctcatcattat

SEQ ID NO: 1365741 - DNA, 15 bp, Homo sapiens
agatgctcatcatta

SEQ ID NO: 1365742 - DNA, 15 bp, Homo sapiens
aagatgctcatcatt

SEQ ID NO: 1365743 - DNA, 15 bp, Homo sapiens
aaagatgctcatcat

SEQ ID NO: 1365744 - DNA, 15 bp, Homo sapiens
taaagatgctcatca

SEQ ID NO: 1365745 - DNA, 15 bp, Homo sapiens
ataaagatgctcatc

SEQ ID NO: 1365746 - DNA, 15 bp, Homo sapiens
tataaagatgctcat

SEQ ID NO: 1365747 - DNA, 15 bp, Homo sapiens
ttataaagatgctca

SEQ ID NO: 1365748 - DNA, 15 bp, Homo sapiens
attataaagatgctc

SEQ ID NO: 1365749 - DNA, 15 bp, Homo sapiens
gattataaagatgct

SEQ ID NO: 1365750 - DNA, 15 bp, Homo sapiens
ggattataaagatgc

SEQ ID NO: 1365751 - DNA, 15 bp, Homo sapiens
aggattataaagatg

SEQ ID NO: 1365752 - DNA, 15 bp, Homo sapiens
caggattataaagat

SEQ ID NO: 1365753 - DNA, 15 bp, Homo sapiens
ccaggattataaaga

SEQ ID NO: 1365754 - DNA, 15 bp, Homo sapiens
tccaggattataaag

SEQ ID NO: 1365755 - DNA, 15 bp, Homo sapiens
gtccaggattataaa

SEQ ID NO: 1365756 - DNA, 15 bp, Homo sapiens
agtccaggattataa

SEQ ID NO: 1365757 - DNA, 15 bp, Homo sapiens
aagtccaggattata

SEQ ID NO: 1365758 - DNA, 15 bp, Homo sapiens
aaagtccaggattat

SEQ ID NO: 1365759 - DNA, 15 bp, Homo sapiens
aaaagtccaggatta

SEQ ID NO: 1365760 - DNA, 15 bp, Homo sapiens
taaaagtccaggatt

SEQ ID NO: 1365761 - DNA, 15 bp, Homo sapiens
ttaaaagtccaggat

SEQ ID NO: 1365762 - DNA, 15 bp, Homo sapiens
attaaaagtccagga

SEQ ID NO: 1365763 - DNA, 15 bp, Homo sapiens
tattaaaagtccagg

SEQ ID NO: 1365764 - DNA, 15 bp, Homo sapiens
gtattaaaagtccag

SEQ ID NO: 1365765 - DNA, 15 bp, Homo sapiens
ggtattaaaagtcca

SEQ ID NO: 1365766 - DNA, 15 bp, Homo sapiens
tggtattaaaagtcc

SEQ ID NO: 1365767 - DNA, 15 bp, Homo sapiens
atggtattaaaagtc

SEQ ID NO: 1365768 - DNA, 15 bp, Homo sapiens
tatggtattaaaagt

SEQ ID NO: 1365769 - DNA, 15 bp, Homo sapiens
atatggtattaaaag

SEQ ID NO: 1365770 - DNA, 15 bp, Homo sapiens
aatatggtattaaaa

SEQ ID NO: 1365771 - DNA, 15 bp, Homo sapiens
aaatatggtattaaa

SEQ ID NO: 1365772 - DNA, 15 bp, Homo sapiens
aaaatatggtattaa

SEQ ID NO: 1365773 - DNA, 15 bp, Homo sapiens
aaaaatatggtatta

SEQ ID NO: 1365774 - DNA, 15 bp, Homo sapiens
aaaaaatatggtatt

SEQ ID NO: 1365775 - DNA, 15 bp, Homo sapiens
taaaaaatatggtat

SEQ ID NO: 1365776 - DNA, 15 bp, Homo sapiens
ataaaaaatatggta

SEQ ID NO: 1365777 - DNA, 15 bp, Homo sapiens
gataaaaaatatggt

SEQ ID NO: 1365778 - DNA, 15 bp, Homo sapiens
agataaaaaatatgg

SEQ ID NO: 1365779 - DNA, 15 bp, Homo sapiens
gagataaaaaatatg

SEQ ID NO: 1365780 - DNA, 15 bp, Homo sapiens
tgagataaaaaatat

SEQ ID NO: 1365781 - DNA, 15 bp, Homo sapiens
atgagataaaaaata

SEQ ID NO: 1365782 - DNA, 15 bp, Homo sapiens
aatgagataaaaaat

SEQ ID NO: 1365783 - DNA, 15 bp, Homo sapiens
aaatgagataaaaaa

SEQ ID NO: 1365784 - DNA, 15 bp, Homo sapiens
aaaatgagataaaaa

SEQ ID NO: 1365785 - DNA, 15 bp, Homo sapiens
taaaatgagataaaa

SEQ ID NO: 1365786 - DNA, 15 bp, Homo sapiens
ataaaatgagataaa

SEQ ID NO: 1365787 - DNA, 15 bp, Homo sapiens
cataaaatgagataa

SEQ ID NO: 1365788 - DNA, 15 bp, Homo sapiens
ccataaaatgagata

SEQ ID NO: 1365789 - DNA, 15 bp, Homo sapiens
tccataaaatgagat

SEQ ID NO: 1365790 - DNA, 15 bp, Homo sapiens
ttccataaaatgaga

SEQ ID NO: 1365791 - DNA, 15 bp, Homo sapiens
gttccataaaatgag

SEQ ID NO: 1365792 - DNA, 15 bp, Homo sapiens
agttccataaaatga

SEQ ID NO: 1365793 - DNA, 15 bp, Homo sapiens
aagttccataaaatg

SEQ ID NO: 1365794 - DNA, 15 bp, Homo sapiens
aaagttccataaaat

SEQ ID NO: 1365795 - DNA, 15 bp, Homo sapiens
caaagttccataaaa

SEQ ID NO: 1365796 - DNA, 15 bp, Homo sapiens
acaaagttccataaa

SEQ ID NO: 1365797 - DNA, 15 bp, Homo sapiens
cacaaagttccataa

SEQ ID NO: 1365798 - DNA, 15 bp, Homo sapiens
acacaaagttccata

SEQ ID NO: 1365799 - DNA, 15 bp, Homo sapiens
tacacaaagttccat

SEQ ID NO: 1365800 - DNA, 15 bp, Homo sapiens
gtacacaaagttcca

SEQ ID NO: 1365801 - DNA, 15 bp, Homo sapiens
agtacacaaagttcc

SEQ ID NO: 1365802 - DNA, 15 bp, Homo sapiens
cagtacacaaagttc

SEQ ID NO: 1365803 - DNA, 15 bp, Homo sapiens
acagtacacaaagtt

SEQ ID NO: 1365804 - DNA, 15 bp, Homo sapiens
aacagtacacaaagt

SEQ ID NO: 1365805 - DNA, 15 bp, Homo sapiens
taacagtacacaaag

SEQ ID NO: 1365806 - DNA, 15 bp, Homo sapiens
ttaacagtacacaaa

SEQ ID NO: 1365807 - DNA, 15 bp, Homo sapiens
tttaacagtacacaa

SEQ ID NO: 1365808 - DNA, 15 bp, Homo sapiens
ttttaacagtacaca

SEQ ID NO: 1365809 - DNA, 15 bp, Homo sapiens
tttttaacagtacac

SEQ ID NO: 1365810 - DNA, 15 bp, Homo sapiens
ctttttaacagtaca

SEQ ID NO: 1365811 - DNA, 15 bp, Homo sapiens
cctttttaacagtac

SEQ ID NO: 1365812 - DNA, 15 bp, Homo sapiens
ccctttttaacagta

SEQ ID NO: 1365813 - DNA, 15 bp, Homo sapiens
accctttttaacagt

SEQ ID NO: 1365814 - DNA, 15 bp, Homo sapiens
caccctttttaacag

SEQ ID NO: 1365815 - DNA, 15 bp, Homo sapiens
acaccctttttaaca

SEQ ID NO: 1365816 - DNA, 15 bp, Homo sapiens
aacaccctttttaac

SEQ ID NO: 1365817 - DNA, 15 bp, Homo sapiens
taacaccctttttaa

SEQ ID NO: 1365818 - DNA, 15 bp, Homo sapiens
gtaacacccttttta

SEQ ID NO: 1365819 - DNA, 15 bp, Homo sapiens
ggtaacacccttttt

SEQ ID NO: 1365820 - DNA, 15 bp, Homo sapiens
tggtaacaccctttt

SEQ ID NO: 1365821 - DNA, 15 bp, Homo sapiens
ctggtaacacccttt

SEQ ID NO: 1365822 - DNA, 15 bp, Homo sapiens
gctggtaacaccctt

SEQ ID NO: 1365823 - DNA, 15 bp, Homo sapiens
agctggtaacaccct

SEQ ID NO: 1365824 - DNA, 15 bp, Homo sapiens
tagctggtaacaccc

SEQ ID NO: 1365825 - DNA, 15 bp, Homo sapiens
ctagctggtaacacc

SEQ ID NO: 1365826 - DNA, 15 bp, Homo sapiens
tctagctggtaacac

SEQ ID NO: 1365827 - DNA, 15 bp, Homo sapiens
ttctagctggtaaca

SEQ ID NO: 1365828 - DNA, 15 bp, Homo sapiens
gttctagctggtaac

SEQ ID NO: 1365829 - DNA, 15 bp, Homo sapiens
ggttctagctggtaa

SEQ ID NO: 1365830 - DNA, 15 bp, Homo sapiens
cggttctagctggta

SEQ ID NO: 1365831 - DNA, 15 bp, Homo sapiens
gcggttctagctggt

SEQ ID NO: 1365832 - DNA, 15 bp, Homo sapiens
ggcggttctagctgg

SEQ ID NO: 1365833 - DNA, 15 bp, Homo sapiens
aggcggttctagctg

SEQ ID NO: 1365834 - DNA, 15 bp, Homo sapiens
aaggcggttctagct

SEQ ID NO: 1365835 - DNA, 15 bp, Homo sapiens
caaggcggttctagc

SEQ ID NO: 1365836 - DNA, 15 bp, Homo sapiens
gcaaggcggttctag

SEQ ID NO: 1365837 - DNA, 15 bp, Homo sapiens
tgcaaggcggttcta

SEQ ID NO: 1365838 - DNA, 15 bp, Homo sapiens
atgcaaggcggttct

SEQ ID NO: 1365839 - DNA, 15 bp, Homo sapiens
aatgcaaggcggttc

SEQ ID NO: 1365840 - DNA, 15 bp, Homo sapiens
aaatgcaaggcggtt

SEQ ID NO: 1365841 - DNA, 15 bp, Homo sapiens
caaatgcaaggcggt

SEQ ID NO: 1365842 - DNA, 15 bp, Homo sapiens
acaaatgcaaggcgg

SEQ ID NO: 1365843 - DNA, 15 bp, Homo sapiens
tacaaatgcaaggcg

SEQ ID NO: 1365844 - DNA, 15 bp, Homo sapiens
atacaaatgcaaggc

SEQ ID NO: 1365845 - DNA, 15 bp, Homo sapiens
tatacaaatgcaagg

SEQ ID NO: 1365846 - DNA, 15 bp, Homo sapiens
ctatacaaatgcaag

SEQ ID NO: 1365847 - DNA, 15 bp, Homo sapiens
gctatacaaatgcaa

SEQ ID NO: 1365848 - DNA, 15 bp, Homo sapiens
tgctatacaaatgca

SEQ ID NO: 1365849 - DNA, 15 bp, Homo sapiens
atgctatacaaatgc

SEQ ID NO: 1365850 - DNA, 15 bp, Homo sapiens
gatgctatacaaatg

SEQ ID NO: 1365851 - DNA, 15 bp, Homo sapiens
agatgctatacaaat

SEQ ID NO: 1365852 - DNA, 15 bp, Homo sapiens
aagatgctatacaaa

SEQ ID NO: 1365853 - DNA, 15 bp, Homo sapiens
taagatgctatacaa

SEQ ID NO: 1365854 - DNA, 15 bp, Homo sapiens
ctaagatgctataca

SEQ ID NO: 1365855 - DNA, 15 bp, Homo sapiens
tctaagatgctatac

SEQ ID NO: 1365856 - DNA, 15 bp, Homo sapiens
ttctaagatgctata

SEQ ID NO: 1365857 - DNA, 15 bp, Homo sapiens
cttctaagatgctat

SEQ ID NO: 1365858 - DNA, 15 bp, Homo sapiens
acttctaagatgcta

SEQ ID NO: 1365859 - DNA, 15 bp, Homo sapiens
aacttctaagatgct

SEQ ID NO: 1365860 - DNA, 15 bp, Homo sapiens
taacttctaagatgc

SEQ ID NO: 1365861 - DNA, 15 bp, Homo sapiens
ataacttctaagatg

SEQ ID NO: 1365862 - DNA, 15 bp, Homo sapiens
tataacttctaagat

SEQ ID NO: 1365863 - DNA, 15 bp, Homo sapiens
ttataacttctaaga

SEQ ID NO: 1365864 - DNA, 15 bp, Homo sapiens
cttataacttctaag

SEQ ID NO: 1365865 - DNA, 15 bp, Homo sapiens
gcttataacttctaa

SEQ ID NO: 1365866 - DNA, 15 bp, Homo sapiens
ggcttataacttcta

SEQ ID NO: 1365867 - DNA, 15 bp, Homo sapiens
cggcttataacttct

SEQ ID NO: 1365868 - DNA, 15 bp, Homo sapiens
ccggcttataacttc

SEQ ID NO: 1365869 - DNA, 15 bp, Homo sapiens
cccggcttataactt

SEQ ID NO: 1365870 - DNA, 15 bp, Homo sapiens
gcccggcttataact

SEQ ID NO: 1365871 - DNA, 15 bp, Homo sapiens
tgcccggcttataac

SEQ ID NO: 1365872 - DNA, 15 bp, Homo sapiens
gtgcccggcttataa

SEQ ID NO: 1365873 - DNA, 15 bp, Homo sapiens
tgtgcccggcttata

SEQ ID NO: 1365874 - DNA, 15 bp, Homo sapiens
ctgtgcccggcttat

SEQ ID NO: 1365875 - DNA, 15 bp, Homo sapiens
actgtgcccggctta

SEQ ID NO: 1365876 - DNA, 15 bp, Homo sapiens
cactgtgcccggctt

SEQ ID NO: 1365877 - DNA, 15 bp, Homo sapiens
ccactgtgcccggct

SEQ ID NO: 1365878 - DNA, 15 bp, Homo sapiens
accactgtgcccggc

SEQ ID NO: 1365879 - DNA, 15 bp, Homo sapiens
aaccactgtgcccgg

SEQ ID NO: 1365880 - DNA, 15 bp, Homo sapiens
gaaccactgtgcccg

SEQ ID NO: 1365881 - DNA, 15 bp, Homo sapiens
atgaaccactgtgcc

SEQ ID NO: 1365882 - DNA, 15 bp, Homo sapiens
catgaaccactgtgc

SEQ ID NO: 1365883 - DNA, 15 bp, Homo sapiens
gcatgaaccactgtg

SEQ ID NO: 1365884 - DNA, 15 bp, Homo sapiens
ggcatgaaccactgt

SEQ ID NO: 1365885 - DNA, 15 bp, Homo sapiens
aggcatgaaccactg

SEQ ID NO: 1365886 - DNA, 15 bp, Homo sapiens
caggcatgaaccact

SEQ ID NO: 1365887 - DNA, 15 bp, Homo sapiens
tctcagcctcccaaa

SEQ ID NO: 1365888 - DNA, 15 bp, Homo sapiens
ccccatctcagcctc

SEQ ID NO: 1365889 - DNA, 15 bp, Homo sapiens
cccccatctcagcct

SEQ ID NO: 1365890 - DNA, 15 bp, Homo sapiens
ccccccatctcagcc

SEQ ID NO: 1365891 - DNA, 15 bp, Homo sapiens
tccccccatctcagc

SEQ ID NO: 1365892 - DNA, 15 bp, Homo sapiens
atccccccatctcag

SEQ ID NO: 1365893 - DNA, 15 bp, Homo sapiens
gatccccccatctca

SEQ ID NO: 1365894 - DNA, 15 bp, Homo sapiens
tgatccccccatctc

SEQ ID NO: 1365895 - DNA, 15 bp, Homo sapiens
gtgatccccccatct

SEQ ID NO: 1365896 - DNA, 15 bp, Homo sapiens
cgtgatccccccatc

SEQ ID NO: 1365897 - DNA, 15 bp, Homo sapiens
tcgtgatccccccat

SEQ ID NO: 1365898 - DNA, 15 bp, Homo sapiens
ttcgtgatcccccca

SEQ ID NO: 1365899 - DNA, 15 bp, Homo sapiens
cttcgtgatcccccc

SEQ ID NO: 1365900 - DNA, 15 bp, Homo sapiens
acttcgtgatccccc

SEQ ID NO: 1365901 - DNA, 15 bp, Homo sapiens
gacttcgtgatcccc

SEQ ID NO: 1365902 - DNA, 15 bp, Homo sapiens
tgacttcgtgatccc

SEQ ID NO: 1365903 - DNA, 15 bp, Homo sapiens
ctgacttcgtgatcc

SEQ ID NO: 1365904 - DNA, 15 bp, Homo sapiens
cctgacttcgtgatc

SEQ ID NO: 1365905 - DNA, 15 bp, Homo sapiens
tcctgacttcgtgat

SEQ ID NO: 1365906 - DNA, 15 bp, Homo sapiens
ctcctgacttcgtga

SEQ ID NO: 1365907 - DNA, 15 bp, Homo sapiens
tctcctgacttcgtg

SEQ ID NO: 1365908 - DNA, 15 bp, Homo sapiens
atctcctgacttcgt

SEQ ID NO: 1365909 - DNA, 15 bp, Homo sapiens
gatctcctgacttcg

SEQ ID NO: 1365910 - DNA, 15 bp, Homo sapiens
cgatctcctgacttc

SEQ ID NO: 1365911 - DNA, 15 bp, Homo sapiens
ttgttagccaggatg

SEQ ID NO: 1365912 - DNA, 15 bp, Homo sapiens
cttgttagccaggat

SEQ ID NO: 1365913 - DNA, 15 bp, Homo sapiens
ccttgttagccagga

SEQ ID NO: 1365914 - DNA, 15 bp, Homo sapiens
accttgttagccagg

SEQ ID NO: 1365915 - DNA, 15 bp, Homo sapiens
caccttgttagccag

SEQ ID NO: 1365916 - DNA, 15 bp, Homo sapiens
tcaccttgttagcca

SEQ ID NO: 1365917 - DNA, 15 bp, Homo sapiens
ttcaccttgttagcc

SEQ ID NO: 1365918 - DNA, 15 bp, Homo sapiens
tttcaccttgttagc

SEQ ID NO: 1365919 - DNA, 15 bp, Homo sapiens
atttcaccttgttag

SEQ ID NO: 1365920 - DNA, 15 bp, Homo sapiens
gatttcaccttgtta

SEQ ID NO: 1365921 - DNA, 15 bp, Homo sapiens
ggatttcaccttgtt

SEQ ID NO: 1365922 - DNA, 15 bp, Homo sapiens
gggatttcaccttgt

SEQ ID NO: 1365923 - DNA, 15 bp, Homo sapiens
cgggatttcaccttg

SEQ ID NO: 1365924 - DNA, 15 bp, Homo sapiens
acgggatttcacctt

SEQ ID NO: 1365925 - DNA, 15 bp, Homo sapiens
gacgggatttcacct

SEQ ID NO: 1365926 - DNA, 15 bp, Homo sapiens
agagacgggatttca

SEQ ID NO: 1365927 - DNA, 15 bp, Homo sapiens
tagagacgggatttc

SEQ ID NO: 1365928 - DNA, 15 bp, Homo sapiens
gtagagacgggattt

SEQ ID NO: 1365929 - DNA, 15 bp, Homo sapiens
agtagagacgggatt

SEQ ID NO: 1365930 - DNA, 15 bp, Homo sapiens
tagtagagacgggat

SEQ ID NO: 1365931 - DNA, 15 bp, Homo sapiens
ttagtagagacggga

SEQ ID NO: 1365932 - DNA, 15 bp, Homo sapiens
agctaacttttttgt

SEQ ID NO: 1365933 - DNA, 15 bp, Homo sapiens
cagctaacttttttg

SEQ ID NO: 1365934 - DNA, 15 bp, Homo sapiens
gcccagctaactttt

SEQ ID NO: 1365935 - DNA, 15 bp, Homo sapiens
cgcccagctaacttt

SEQ ID NO: 1365936 - DNA, 15 bp, Homo sapiens
acgcccagctaactt

SEQ ID NO: 1365937 - DNA, 15 bp, Homo sapiens
cacgcccagctaact

SEQ ID NO: 1365938 - DNA, 15 bp, Homo sapiens
ccacgcccagctaac

SEQ ID NO: 1365939 - DNA, 15 bp, Homo sapiens
cccaccaccacgccc

SEQ ID NO: 1365940 - DNA, 15 bp, Homo sapiens
gcccaccaccacgcc

SEQ ID NO: 1365941 - DNA, 15 bp, Homo sapiens
cgcccaccaccacgc

SEQ ID NO: 1365942 - DNA, 15 bp, Homo sapiens
gcgcccaccaccacg

SEQ ID NO: 1365943 - DNA, 15 bp, Homo sapiens
ggcgcccaccaccac

SEQ ID NO: 1365944 - DNA, 15 bp, Homo sapiens
ctacaggcgcccacc

SEQ ID NO: 1365945 - DNA, 15 bp, Homo sapiens
tctacaggcgcccac

SEQ ID NO: 1365946 - DNA, 15 bp, Homo sapiens
gtctacaggcgccca

SEQ ID NO: 1365947 - DNA, 15 bp, Homo sapiens
ggtctacaggcgccc

SEQ ID NO: 1365948 - DNA, 15 bp, Homo sapiens
gggtctacaggcgcc

SEQ ID NO: 1365949 - DNA, 15 bp, Homo sapiens
tgggtctacaggcgc

SEQ ID NO: 1365950 - DNA, 15 bp, Homo sapiens
ctgggtctacaggcg

SEQ ID NO: 1365951 - DNA, 15 bp, Homo sapiens
gctgggtctacaggc

SEQ ID NO: 1365952 - DNA, 15 bp, Homo sapiens
agctgggtctacagg

SEQ ID NO: 1365953 - DNA, 15 bp, Homo sapiens
tagctgggtctacag

SEQ ID NO: 1365954 - DNA, 15 bp, Homo sapiens
gtagctgggtctaca

SEQ ID NO: 1365955 - DNA, 15 bp, Homo sapiens
agtagctgggtctac

SEQ ID NO: 1365956 - DNA, 15 bp, Homo sapiens
gagtagctgggtcta

SEQ ID NO: 1365957 - DNA, 15 bp, Homo sapiens
tgagtagctgggtct

SEQ ID NO: 1365958 - DNA, 15 bp, Homo sapiens
ctgagtagctgggtc

SEQ ID NO: 1365959 - DNA, 15 bp, Homo sapiens
tgggttcacgccatt

SEQ ID NO: 1365960 - DNA, 15 bp, Homo sapiens
ctgggttcacgccat

SEQ ID NO: 1365961 - DNA, 15 bp, Homo sapiens
cctgggttcacgcca

SEQ ID NO: 1365962 - DNA, 15 bp, Homo sapiens
tcctgggttcacgcc

SEQ ID NO: 1365963 - DNA, 15 bp, Homo sapiens
ctcctgggttcacgc

SEQ ID NO: 1365964 - DNA, 15 bp, Homo sapiens
cctcctgggttcacg

SEQ ID NO: 1365965 - DNA, 15 bp, Homo sapiens
tcctcctgggttcac

SEQ ID NO: 1365966 - DNA, 15 bp, Homo sapiens
ctcctcctgggttca

SEQ ID NO: 1365967 - DNA, 15 bp, Homo sapiens
cctcctcctgggttc

SEQ ID NO: 1365968 - DNA, 15 bp, Homo sapiens
tcctcctcctgggtt

SEQ ID NO: 1365969 - DNA, 15 bp, Homo sapiens
ctcctcctcctgggt

SEQ ID NO: 1365970 - DNA, 15 bp, Homo sapiens
gctcctcctcctggg

SEQ ID NO: 1365971 - DNA, 15 bp, Homo sapiens
agctcctcctcctgg

SEQ ID NO: 1365972 - DNA, 15 bp, Homo sapiens
aagctcctcctcctg

SEQ ID NO: 1365973 - DNA, 15 bp, Homo sapiens
caagctcctcctcct

SEQ ID NO: 1365974 - DNA, 15 bp, Homo sapiens
acaagctcctcctcc

SEQ ID NO: 1365975 - DNA, 15 bp, Homo sapiens
tacaagctcctcctc

SEQ ID NO: 1365976 - DNA, 15 bp, Homo sapiens
ctacaagctcctcct

SEQ ID NO: 1365977 - DNA, 15 bp, Homo sapiens
actacaagctcctcc

SEQ ID NO: 1365978 - DNA, 15 bp, Homo sapiens
cactacaagctcctc

SEQ ID NO: 1365979 - DNA, 15 bp, Homo sapiens
tcactacaagctcct

SEQ ID NO: 1365980 - DNA, 15 bp, Homo sapiens
ctcactacaagctcc

SEQ ID NO: 1365981 - DNA, 15 bp, Homo sapiens
gctcactacaagctc

SEQ ID NO: 1365982 - DNA, 15 bp, Homo sapiens
agctcactacaagct

SEQ ID NO: 1365983 - DNA, 15 bp, Homo sapiens
cagctcactacaagc

SEQ ID NO: 1365984 - DNA, 15 bp, Homo sapiens
tcagctcactacaag

SEQ ID NO: 1365985 - DNA, 15 bp, Homo sapiens
aatttcagctcacta

SEQ ID NO: 1365986 - DNA, 15 bp, Homo sapiens
caatttcagctcact

SEQ ID NO: 1365987 - DNA, 15 bp, Homo sapiens
gcaatttcagctcac

SEQ ID NO: 1365988 - DNA, 15 bp, Homo sapiens
tgcaatttcagctca

SEQ ID NO: 1365989 - DNA, 15 bp, Homo sapiens
gtgcaatttcagctc

SEQ ID NO: 1365990 - DNA, 15 bp, Homo sapiens
ggtgcaatttcagct

SEQ ID NO: 1365991 - DNA, 15 bp, Homo sapiens
tggtgcaatttcagc

SEQ ID NO: 1365992 - DNA, 15 bp, Homo sapiens
gtggtgcaatttcag

SEQ ID NO: 1365993 - DNA, 15 bp, Homo sapiens
agtggtgcaatttca

SEQ ID NO: 1365994 - DNA, 15 bp, Homo sapiens
cagtggtgcaatttc

SEQ ID NO: 1365995 - DNA, 15 bp, Homo sapiens
gcagtggtgcaattt

SEQ ID NO: 1365996 - DNA, 15 bp, Homo sapiens
tgcagtggtgcaatt

SEQ ID NO: 1365997 - DNA, 15 bp, Homo sapiens
ctctcccaggctgga

SEQ ID NO: 1365998 - DNA, 15 bp, Homo sapiens
tctctcccaggctgg

SEQ ID NO: 1365999 - DNA, 15 bp, Homo sapiens
ctctctcccaggctg

SEQ ID NO: 1366000 - DNA, 15 bp, Homo sapiens
tctctctcccaggct

SEQ ID NO: 1366001 - DNA, 15 bp, Homo sapiens
ctctctctcccaggc

SEQ ID NO: 1366002 - DNA, 15 bp, Homo sapiens
gctctctctcccagg

SEQ ID NO: 1366003 - DNA, 15 bp, Homo sapiens
cgctctctctcccag

SEQ ID NO: 1366004 - DNA, 15 bp, Homo sapiens
tcgctctctctccca

SEQ ID NO: 1366005 - DNA, 15 bp, Homo sapiens
ctcgctctctctccc

SEQ ID NO: 1366006 - DNA, 15 bp, Homo sapiens
tctcgctctctctcc

SEQ ID NO: 1366007 - DNA, 15 bp, Homo sapiens
gtctcgctctctctc

SEQ ID NO: 1366008 - DNA, 15 bp, Homo sapiens
agtctcgctctctct

SEQ ID NO: 1366009 - DNA, 15 bp, Homo sapiens
gagtctcgctctctc

SEQ ID NO: 1366010 - DNA, 15 bp, Homo sapiens
agagtctcgctctct

SEQ ID NO: 1366011 - DNA, 15 bp, Homo sapiens
cagagtctcgctctc

SEQ ID NO: 1366012 - DNA, 15 bp, Homo sapiens
attttgagacagagt

SEQ ID NO: 1366013 - DNA, 15 bp, Homo sapiens
tattttgagacagag

SEQ ID NO: 1366014 - DNA, 15 bp, Homo sapiens
ttattttgagacaga

SEQ ID NO: 1366015 - DNA, 15 bp, Homo sapiens
tttattttgagacag

SEQ ID NO: 1366016 - DNA, 15 bp, Homo sapiens
ctttattttgagaca

SEQ ID NO: 1366017 - DNA, 15 bp, Homo sapiens
tctttattttgagac

SEQ ID NO: 1366018 - DNA, 15 bp, Homo sapiens
ctctttattttgaga

SEQ ID NO: 1366019 - DNA, 15 bp, Homo sapiens
ttctctttattttga

SEQ ID NO: 1366020 - DNA, 15 bp, Homo sapiens
cttctctttattttg

SEQ ID NO: 1366021 - DNA, 15 bp, Homo sapiens
acttctctttatttt

SEQ ID NO: 1366022 - DNA, 15 bp, Homo sapiens
aacttctctttattt

SEQ ID NO: 1366023 - DNA, 15 bp, Homo sapiens
taacttctctttatt

SEQ ID NO: 1366024 - DNA, 15 bp, Homo sapiens
ataacttctctttat

SEQ ID NO: 1366025 - DNA, 15 bp, Homo sapiens
cataacttctcttta

SEQ ID NO: 1366026 - DNA, 15 bp, Homo sapiens
ccataacttctcttt

SEQ ID NO: 1366027 - DNA, 15 bp, Homo sapiens
tccataacttctctt

SEQ ID NO: 1366028 - DNA, 15 bp, Homo sapiens
ttccataacttctct

SEQ ID NO: 1366029 - DNA, 15 bp, Homo sapiens
cttccataacttctc

SEQ ID NO: 1366030 - DNA, 15 bp, Homo sapiens
tcttccataacttct

SEQ ID NO: 1366031 - DNA, 15 bp, Homo sapiens
ttcttccataacttc

SEQ ID NO: 1366032 - DNA, 15 bp, Homo sapiens
tttcttccataactt

SEQ ID NO: 1366033 - DNA, 15 bp, Homo sapiens
ctttcttccataact

SEQ ID NO: 1366034 - DNA, 15 bp, Homo sapiens
tctttcttccataac

SEQ ID NO: 1366035 - DNA, 15 bp, Homo sapiens
gtctttcttccataa

SEQ ID NO: 1366036 - DNA, 15 bp, Homo sapiens
tgtctttcttccata

SEQ ID NO: 1366037 - DNA, 15 bp, Homo sapiens
atgtctttcttccat

SEQ ID NO: 1366038 - DNA, 15 bp, Homo sapiens
gatgtctttcttcca

SEQ ID NO: 1366039 - DNA, 15 bp, Homo sapiens
ggatgtctttcttcc

SEQ ID NO: 1366040 - DNA, 15 bp, Homo sapiens
tggatgtctttcttc

SEQ ID NO: 1366041 - DNA, 15 bp, Homo sapiens
ctggatgtctttctt

SEQ ID NO: 1366042 - DNA, 15 bp, Homo sapiens
tctggatgtctttct

SEQ ID NO: 1366043 - DNA, 15 bp, Homo sapiens
atctggatgtctttc

SEQ ID NO: 1366044 - DNA, 15 bp, Homo sapiens
catctggatgtcttt

SEQ ID NO: 1366045 - DNA, 15 bp, Homo sapiens
tcatctggatgtctt

SEQ ID NO: 1366046 - DNA, 15 bp, Homo sapiens
atcatctggatgtct

SEQ ID NO: 1366047 - DNA, 15 bp, Homo sapiens
gatcatctggatgtc

SEQ ID NO: 1366048 - DNA, 15 bp, Homo sapiens
agatcatctggatgt

SEQ ID NO: 1366049 - DNA, 15 bp, Homo sapiens
cagatcatctggatg

SEQ ID NO: 1366050 - DNA, 15 bp, Homo sapiens
tcagatcatctggat

SEQ ID NO: 1366051 - DNA, 15 bp, Homo sapiens
atcagatcatctgga

SEQ ID NO: 1366052 - DNA, 15 bp, Homo sapiens
aatcagatcatctgg

SEQ ID NO: 1366053 - DNA, 15 bp, Homo sapiens
aaatcagatcatctg

SEQ ID NO: 1366054 - DNA, 15 bp, Homo sapiens
taaatcagatcatct

SEQ ID NO: 1366055 - DNA, 15 bp, Homo sapiens
ttaaatcagatcatc

SEQ ID NO: 1366056 - DNA, 15 bp, Homo sapiens
gttaaatcagatcat

SEQ ID NO: 1366057 - DNA, 15 bp, Homo sapiens
tgttaaatcagatca

SEQ ID NO: 1366058 - DNA, 15 bp, Homo sapiens
gtgttaaatcagatc

SEQ ID NO: 1366059 - DNA, 15 bp, Homo sapiens
ggtgttaaatcagat

SEQ ID NO: 1366060 - DNA, 15 bp, Homo sapiens
gggtgttaaatcaga

SEQ ID NO: 1366061 - DNA, 15 bp, Homo sapiens
tgggtgttaaatcag

SEQ ID NO: 1366062 - DNA, 15 bp, Homo sapiens
ttgggtgttaaatca

SEQ ID NO: 1366063 - DNA, 15 bp, Homo sapiens
tttgggtgttaaatc

SEQ ID NO: 1366064 - DNA, 15 bp, Homo sapiens
atttgggtgttaaat

SEQ ID NO: 1366065 - DNA, 15 bp, Homo sapiens
tatttgggtgttaaa

SEQ ID NO: 1366066 - DNA, 15 bp, Homo sapiens
gtatttgggtgttaa

SEQ ID NO: 1366067 - DNA, 15 bp, Homo sapiens
agtatttgggtgtta

SEQ ID NO: 1366068 - DNA, 15 bp, Homo sapiens
gagtatttgggtgtt

SEQ ID NO: 1366069 - DNA, 15 bp, Homo sapiens
agagtatttgggtgt

SEQ ID NO: 1366070 - DNA, 15 bp, Homo sapiens
cagagtatttgggtg

SEQ ID NO: 1366071 - DNA, 15 bp, Homo sapiens
ccagagtatttgggt

SEQ ID NO: 1366072 - DNA, 15 bp, Homo sapiens
tccagagtatttggg

SEQ ID NO: 1366073 - DNA, 15 bp, Homo sapiens
ttccagagtatttgg

SEQ ID NO: 1366074 - DNA, 15 bp, Homo sapiens
tttccagagtatttg

SEQ ID NO: 1366075 - DNA, 15 bp, Homo sapiens
ttttccagagtattt

SEQ ID NO: 1366076 - DNA, 15 bp, Homo sapiens
attttccagagtatt

SEQ ID NO: 1366077 - DNA, 15 bp, Homo sapiens
tattttccagagtat

SEQ ID NO: 1366078 - DNA, 15 bp, Homo sapiens
gtattttccagagta

SEQ ID NO: 1366079 - DNA, 15 bp, Homo sapiens
ggtattttccagagt

SEQ ID NO: 1366080 - DNA, 15 bp, Homo sapiens
aggtattttccagag

SEQ ID NO: 1366081 - DNA, 15 bp, Homo sapiens
gaggtattttccaga

SEQ ID NO: 1366082 - DNA, 15 bp, Homo sapiens
agaggtattttccag

SEQ ID NO: 1366083 - DNA, 15 bp, Homo sapiens
aagaggtattttcca

SEQ ID NO: 1366084 - DNA, 15 bp, Homo sapiens
aaagaggtattttcc

SEQ ID NO: 1366085 - DNA, 15 bp, Homo sapiens
gaaagaggtattttc

SEQ ID NO: 1366086 - DNA, 15 bp, Homo sapiens
agaaagaggtatttt

SEQ ID NO: 1366087 - DNA, 15 bp, Homo sapiens
gagaaagaggtattt

SEQ ID NO: 1366088 - DNA, 15 bp, Homo sapiens
ggagaaagaggtatt

SEQ ID NO: 1366089 - DNA, 15 bp, Homo sapiens
gggagaaagaggtat

SEQ ID NO: 1366090 - DNA, 15 bp, Homo sapiens
agggagaaagaggta

SEQ ID NO: 1366091 - DNA, 15 bp, Homo sapiens
aagggagaaagaggt

SEQ ID NO: 1366092 - DNA, 15 bp, Homo sapiens
gaagggagaaagagg

SEQ ID NO: 1366093 - DNA, 15 bp, Homo sapiens
ggaagggagaaagag

SEQ ID NO: 1366094 - DNA, 15 bp, Homo sapiens
aggaagggagaaaga

SEQ ID NO: 1366095 - DNA, 15 bp, Homo sapiens
aaggaagggagaaag

SEQ ID NO: 1366096 - DNA, 15 bp, Homo sapiens
aaaggaagggagaaa

SEQ ID NO: 1366097 - DNA, 15 bp, Homo sapiens
gaaaggaagggagaa

SEQ ID NO: 1366098 - DNA, 15 bp, Homo sapiens
agaaaggaagggaga

SEQ ID NO: 1366099 - DNA, 15 bp, Homo sapiens
gagaaaggaagggag

SEQ ID NO: 1366100 - DNA, 15 bp, Homo sapiens
agagaaaggaaggga

SEQ ID NO: 1366101 - DNA, 15 bp, Homo sapiens
tagagaaaggaaggg

SEQ ID NO: 1366102 - DNA, 15 bp, Homo sapiens
ctagagaaaggaagg

SEQ ID NO: 1366103 - DNA, 15 bp, Homo sapiens
tctagagaaaggaag

SEQ ID NO: 1366104 - DNA, 15 bp, Homo sapiens
ttctagagaaaggaa

SEQ ID NO: 1366105 - DNA, 15 bp, Homo sapiens
tttctagagaaagga

SEQ ID NO: 1366106 - DNA, 15 bp, Homo sapiens
ttttctagagaaagg

SEQ ID NO: 1366107 - DNA, 15 bp, Homo sapiens
cttttctagagaaag

SEQ ID NO: 1366108 - DNA, 15 bp, Homo sapiens
tcttttctagagaaa

SEQ ID NO: 1366109 - DNA, 15 bp, Homo sapiens
ttcttttctagagaa

SEQ ID NO: 1366110 - DNA, 15 bp, Homo sapiens
tttcttttctagaga

SEQ ID NO: 1366111 - DNA, 15 bp, Homo sapiens
ttttcttttctagag

SEQ ID NO: 1366112 - DNA, 15 bp, Homo sapiens
gttttcttttctaga

SEQ ID NO: 1366113 - DNA, 15 bp, Homo sapiens
tgttttcttttctag

SEQ ID NO: 1366114 - DNA, 15 bp, Homo sapiens
atgttttcttttcta

SEQ ID NO: 1366115 - DNA, 15 bp, Homo sapiens
tatgttttcttttct

SEQ ID NO: 1366116 - DNA, 15 bp, Homo sapiens
ctatgttttcttttc

SEQ ID NO: 1366117 - DNA, 15 bp, Homo sapiens
tctatgttttctttt

SEQ ID NO: 1366118 - DNA, 15 bp, Homo sapiens
gtctatgttttcttt

SEQ ID NO: 1366119 - DNA, 15 bp, Homo sapiens
ggtctatgttttctt

SEQ ID NO: 1366120 - DNA, 15 bp, Homo sapiens
aggtctatgttttct

SEQ ID NO: 1366121 - DNA, 15 bp, Homo sapiens
aaggtctatgttttc

SEQ ID NO: 1366122 - DNA, 15 bp, Homo sapiens
caaggtctatgtttt

SEQ ID NO: 1366123 - DNA, 15 bp, Homo sapiens
gcaaggtctatgttt

SEQ ID NO: 1366124 - DNA, 15 bp, Homo sapiens
tgcaaggtctatgtt

SEQ ID NO: 1366125 - DNA, 15 bp, Homo sapiens
atgcaaggtctatgt

SEQ ID NO: 1366126 - DNA, 15 bp, Homo sapiens
catgcaaggtctatg

SEQ ID NO: 1366127 - DNA, 15 bp, Homo sapiens
ccatgcaaggtctat

SEQ ID NO: 1366128 - DNA, 15 bp, Homo sapiens
tccatgcaaggtcta

SEQ ID NO: 1366129 - DNA, 15 bp, Homo sapiens
atccatgcaaggtct

SEQ ID NO: 1366130 - DNA, 15 bp, Homo sapiens
tatccatgcaaggtc

SEQ ID NO: 1366131 - DNA, 15 bp, Homo sapiens
ctatccatgcaaggt

SEQ ID NO: 1366132 - DNA, 15 bp, Homo sapiens
cctatccatgcaagg

SEQ ID NO: 1366133 - DNA, 15 bp, Homo sapiens
tcctatccatgcaag

SEQ ID NO: 1366134 - DNA, 15 bp, Homo sapiens
gtcctatccatgcaa

SEQ ID NO: 1366135 - DNA, 15 bp, Homo sapiens
agtcctatccatgca

SEQ ID NO: 1366136 - DNA, 15 bp, Homo sapiens
aagtcctatccatgc

SEQ ID NO: 1366137 - DNA, 15 bp, Homo sapiens
taagtcctatccatg

SEQ ID NO: 1366138 - DNA, 15 bp, Homo sapiens
ttaagtcctatccat

SEQ ID NO: 1366139 - DNA, 15 bp, Homo sapiens
tttaagtcctatcca

SEQ ID NO: 1366140 - DNA, 15 bp, Homo sapiens
ctttaagtcctatcc

SEQ ID NO: 1366141 - DNA, 15 bp, Homo sapiens
actttaagtcctatc

SEQ ID NO: 1366142 - DNA, 15 bp, Homo sapiens
cactttaagtcctat

SEQ ID NO: 1366143 - DNA, 15 bp, Homo sapiens
tcactttaagtccta

SEQ ID NO: 1366144 - DNA, 15 bp, Homo sapiens
ctcactttaagtcct

SEQ ID NO: 1366145 - DNA, 15 bp, Homo sapiens
actcactttaagtcc

SEQ ID NO: 1366146 - DNA, 15 bp, Homo sapiens
cactcactttaagtc

SEQ ID NO: 1366147 - DNA, 15 bp, Homo sapiens
tcactcactttaagt

SEQ ID NO: 1366148 - DNA, 15 bp, Homo sapiens
ctcactcactttaag

SEQ ID NO: 1366149 - DNA, 15 bp, Homo sapiens
actcactcactttaa

SEQ ID NO: 1366150 - DNA, 15 bp, Homo sapiens
tactcactcacttta

SEQ ID NO: 1366151 - DNA, 15 bp, Homo sapiens
ctactcactcacttt

SEQ ID NO: 1366152 - DNA, 15 bp, Homo sapiens
actactcactcactt

SEQ ID NO: 1366153 - DNA, 15 bp, Homo sapiens
tactactcactcact

SEQ ID NO: 1366154 - DNA, 15 bp, Homo sapiens
ttactactcactcac

SEQ ID NO: 1366155 - DNA, 15 bp, Homo sapiens
tttactactcactca

SEQ ID NO: 1366156 - DNA, 15 bp, Homo sapiens
ttttactactcactc

SEQ ID NO: 1366157 - DNA, 15 bp, Homo sapiens
attttactactcact

SEQ ID NO: 1366158 - DNA, 15 bp, Homo sapiens
aattttactactcac

SEQ ID NO: 1366159 - DNA, 15 bp, Homo sapiens
caattttactactca

SEQ ID NO: 1366160 - DNA, 15 bp, Homo sapiens
acaattttactactc

SEQ ID NO: 1366161 - DNA, 15 bp, Homo sapiens
tacaattttactact

SEQ ID NO: 1366162 - DNA, 15 bp, Homo sapiens
ctacaattttactac

SEQ ID NO: 1366163 - DNA, 15 bp, Homo sapiens
gctacaattttacta

SEQ ID NO: 1366164 - DNA, 15 bp, Homo sapiens
agctacaattttact

SEQ ID NO: 1366165 - DNA, 15 bp, Homo sapiens
aagctacaattttac

SEQ ID NO: 1366166 - DNA, 15 bp, Homo sapiens
caagctacaatttta

SEQ ID NO: 1366167 - DNA, 15 bp, Homo sapiens
tcaagctacaatttt

SEQ ID NO: 1366168 - DNA, 15 bp, Homo sapiens
ttcaagctacaattt

SEQ ID NO: 1366169 - DNA, 15 bp, Homo sapiens
gttcaagctacaatt

SEQ ID NO: 1366170 - DNA, 15 bp, Homo sapiens
agttcaagctacaat

SEQ ID NO: 1366171 - DNA, 15 bp, Homo sapiens
aagttcaagctacaa

SEQ ID NO: 1366172 - DNA, 15 bp, Homo sapiens
caagttcaagctaca

SEQ ID NO: 1366173 - DNA, 15 bp, Homo sapiens
ccaagttcaagctac

SEQ ID NO: 1366174 - DNA, 15 bp, Homo sapiens
cccaagttcaagcta

SEQ ID NO: 1366175 - DNA, 15 bp, Homo sapiens
acccaagttcaagct

SEQ ID NO: 1366176 - DNA, 15 bp, Homo sapiens
gacccaagttcaagc

SEQ ID NO: 1366177 - DNA, 15 bp, Homo sapiens
agacccaagttcaag

SEQ ID NO: 1366178 - DNA, 15 bp, Homo sapiens
aagacccaagttcaa

SEQ ID NO: 1366179 - DNA, 15 bp, Homo sapiens
gaagacccaagttca

SEQ ID NO: 1366180 - DNA, 15 bp, Homo sapiens
agaagacccaagttc

SEQ ID NO: 1366181 - DNA, 15 bp, Homo sapiens
gagaagacccaagtt

SEQ ID NO: 1366182 - DNA, 15 bp, Homo sapiens
tgagaagacccaagt

SEQ ID NO: 1366183 - DNA, 15 bp, Homo sapiens
gtgagaagacccaag

SEQ ID NO: 1366184 - DNA, 15 bp, Homo sapiens
agtgagaagacccaa

SEQ ID NO: 1366185 - DNA, 15 bp, Homo sapiens
gagtgagaagaccca

SEQ ID NO: 1366186 - DNA, 15 bp, Homo sapiens
agagtgagaagaccc

SEQ ID NO: 1366187 - DNA, 15 bp, Homo sapiens
tagagtgagaagacc

SEQ ID NO: 1366188 - DNA, 15 bp, Homo sapiens
ctagagtgagaagac

SEQ ID NO: 1366189 - DNA, 15 bp, Homo sapiens
actagagtgagaaga

SEQ ID NO: 1366190 - DNA, 15 bp, Homo sapiens
cactagagtgagaag

SEQ ID NO: 1366191 - DNA, 15 bp, Homo sapiens
tcactagagtgagaa

SEQ ID NO: 1366192 - DNA, 15 bp, Homo sapiens
gtcactagagtgaga

SEQ ID NO: 1366193 - DNA, 15 bp, Homo sapiens
tgtcactagagtgag

SEQ ID NO: 1366194 - DNA, 15 bp, Homo sapiens
atgtcactagagtga

SEQ ID NO: 1366195 - DNA, 15 bp, Homo sapiens
catgtcactagagtg

SEQ ID NO: 1366196 - DNA, 15 bp, Homo sapiens
acatgtcactagagt

SEQ ID NO: 1366197 - DNA, 15 bp, Homo sapiens
aacatgtcactagag

SEQ ID NO: 1366198 - DNA, 15 bp, Homo sapiens
gaacatgtcactaga

SEQ ID NO: 1366199 - DNA, 15 bp, Homo sapiens
tgaacatgtcactag

SEQ ID NO: 1366200 - DNA, 15 bp, Homo sapiens
atgaacatgtcacta

SEQ ID NO: 1366201 - DNA, 15 bp, Homo sapiens
tatgaacatgtcact

SEQ ID NO: 1366202 - DNA, 15 bp, Homo sapiens
gtatgaacatgtcac

SEQ ID NO: 1366203 - DNA, 15 bp, Homo sapiens
tgtatgaacatgtca

SEQ ID NO: 1366204 - DNA, 15 bp, Homo sapiens
gtgtatgaacatgtc

SEQ ID NO: 1366205 - DNA, 15 bp, Homo sapiens
agtgtatgaacatgt

SEQ ID NO: 1366206 - DNA, 15 bp, Homo sapiens
tagtgtatgaacatg

SEQ ID NO: 1366207 - DNA, 15 bp, Homo sapiens
gtagtgtatgaacat

SEQ ID NO: 1366208 - DNA, 15 bp, Homo sapiens
agtagtgtatgaaca

SEQ ID NO: 1366209 - DNA, 15 bp, Homo sapiens
gagtagtgtatgaac

SEQ ID NO: 1366210 - DNA, 15 bp, Homo sapiens
agagtagtgtatgaa

SEQ ID NO: 1366211 - DNA, 15 bp, Homo sapiens
cagagtagtgtatga

SEQ ID NO: 1366212 - DNA, 15 bp, Homo sapiens
gcagagtagtgtatg

SEQ ID NO: 1366213 - DNA, 15 bp, Homo sapiens
tgcagagtagtgtat

SEQ ID NO: 1366214 - DNA, 15 bp, Homo sapiens
ttgcagagtagtgta

SEQ ID NO: 1366215 - DNA, 15 bp, Homo sapiens
attgcagagtagtgt

SEQ ID NO: 1366216 - DNA, 15 bp, Homo sapiens
tattgcagagtagtg

SEQ ID NO: 1366217 - DNA, 15 bp, Homo sapiens
atattgcagagtagt

SEQ ID NO: 1366218 - DNA, 15 bp, Homo sapiens
gatattgcagagtag

SEQ ID NO: 1366219 - DNA, 15 bp, Homo sapiens
agatattgcagagta

SEQ ID NO: 1366220 - DNA, 15 bp, Homo sapiens
gagatattgcagagt

SEQ ID NO: 1366221 - DNA, 15 bp, Homo sapiens
ggagatattgcagag

SEQ ID NO: 1366222 - DNA, 15 bp, Homo sapiens
tggagatattgcaga

SEQ ID NO: 1366223 - DNA, 15 bp, Homo sapiens
gtggagatattgcag

SEQ ID NO: 1366224 - DNA, 15 bp, Homo sapiens
agtggagatattgca

SEQ ID NO: 1366225 - DNA, 15 bp, Homo sapiens
cagtggagatattgc

SEQ ID NO: 1366226 - DNA, 15 bp, Homo sapiens
tcagtggagatattg

SEQ ID NO: 1366227 - DNA, 15 bp, Homo sapiens
ttcagtggagatatt

SEQ ID NO: 1366228 - DNA, 15 bp, Homo sapiens
tttcagtggagatat

SEQ ID NO: 1366229 - DNA, 15 bp, Homo sapiens
gtttcagtggagata

SEQ ID NO: 1366230 - DNA, 15 bp, Homo sapiens
tgtttcagtggagat

SEQ ID NO: 1366231 - DNA, 15 bp, Homo sapiens
ttgtttcagtggaga

SEQ ID NO: 1366232 - DNA, 15 bp, Homo sapiens
attgtttcagtggag

SEQ ID NO: 1366233 - DNA, 15 bp, Homo sapiens
tattgtttcagtgga

SEQ ID NO: 1366234 - DNA, 15 bp, Homo sapiens
gtattgtttcagtgg

SEQ ID NO: 1366235 - DNA, 15 bp, Homo sapiens
tgtattgtttcagtg

SEQ ID NO: 1366236 - DNA, 15 bp, Homo sapiens
ttgtattgtttcagt

SEQ ID NO: 1366237 - DNA, 15 bp, Homo sapiens
attgtattgtttcag

SEQ ID NO: 1366238 - DNA, 15 bp, Homo sapiens
tattgtattgtttca

SEQ ID NO: 1366239 - DNA, 15 bp, Homo sapiens
atattgtattgtttc

SEQ ID NO: 1366240 - DNA, 15 bp, Homo sapiens
aatattgtattgttt

SEQ ID NO: 1366241 - DNA, 15 bp, Homo sapiens
taatattgtattgtt

SEQ ID NO: 1366242 - DNA, 15 bp, Homo sapiens
gtaatattgtattgt

SEQ ID NO: 1366243 - DNA, 15 bp, Homo sapiens
agtaatattgtattg

SEQ ID NO: 1366244 - DNA, 15 bp, Homo sapiens
cagtaatattgtatt

SEQ ID NO: 1366245 - DNA, 15 bp, Homo sapiens
acagtaatattgtat

SEQ ID NO: 1366246 - DNA, 15 bp, Homo sapiens
cacagtaatattgta

SEQ ID NO: 1366247 - DNA, 15 bp, Homo sapiens
ccacagtaatattgt

SEQ ID NO: 1366248 - DNA, 15 bp, Homo sapiens
tccacagtaatattg

SEQ ID NO: 1366249 - DNA, 15 bp, Homo sapiens
ttccacagtaatatt

SEQ ID NO: 1366250 - DNA, 15 bp, Homo sapiens
tttccacagtaatat

SEQ ID NO: 1366251 - DNA, 15 bp, Homo sapiens
gtttccacagtaata

SEQ ID NO: 1366252 - DNA, 15 bp, Homo sapiens
agtttccacagtaat

SEQ ID NO: 1366253 - DNA, 15 bp, Homo sapiens
aagtttccacagtaa

SEQ ID NO: 1366254 - DNA, 15 bp, Homo sapiens
taagtttccacagta

SEQ ID NO: 1366255 - DNA, 15 bp, Homo sapiens
gtaagtttccacagt

SEQ ID NO: 1366256 - DNA, 15 bp, Homo sapiens
ggtaagtttccacag

SEQ ID NO: 1366257 - DNA, 15 bp, Homo sapiens
tggtaagtttccaca

SEQ ID NO: 1366258 - DNA, 15 bp, Homo sapiens
ttggtaagtttccac

SEQ ID NO: 1366259 - DNA, 15 bp, Homo sapiens
tttggtaagtttcca

SEQ ID NO: 1366260 - DNA, 15 bp, Homo sapiens
ctttggtaagtttcc

SEQ ID NO: 1366261 - DNA, 15 bp, Homo sapiens
cctttggtaagtttc

SEQ ID NO: 1366262 - DNA, 15 bp, Homo sapiens
tcctttggtaagttt

SEQ ID NO: 1366263 - DNA, 15 bp, Homo sapiens
ttcctttggtaagtt

SEQ ID NO: 1366264 - DNA, 15 bp, Homo sapiens
tttcctttggtaagt

SEQ ID NO: 1366265 - DNA, 15 bp, Homo sapiens
ttttcctttggtaag

SEQ ID NO: 1366266 - DNA, 15 bp, Homo sapiens
cttttcctttggtaa

SEQ ID NO: 1366267 - DNA, 15 bp, Homo sapiens
tcttttcctttggta

SEQ ID NO: 1366268 - DNA, 15 bp, Homo sapiens
ctcttttcctttggt

SEQ ID NO: 1366269 - DNA, 15 bp, Homo sapiens
tctcttttcctttgg

SEQ ID NO: 1366270 - DNA, 15 bp, Homo sapiens
ttctcttttcctttg

SEQ ID NO: 1366271 - DNA, 15 bp, Homo sapiens
attctcttttccttt

SEQ ID NO: 1366272 - DNA, 15 bp, Homo sapiens
tattctcttttcctt

SEQ ID NO: 1366273 - DNA, 15 bp, Homo sapiens
gtattctcttttcct

SEQ ID NO: 1366274 - DNA, 15 bp, Homo sapiens
tgtattctcttttcc

SEQ ID NO: 1366275 - DNA, 15 bp, Homo sapiens
atgtattctcttttc

SEQ ID NO: 1366276 - DNA, 15 bp, Homo sapiens
gatgtattctctttt

SEQ ID NO: 1366277 - DNA, 15 bp, Homo sapiens
tgatgtattctcttt

SEQ ID NO: 1366278 - DNA, 15 bp, Homo sapiens
gtgatgtattctctt

SEQ ID NO: 1366279 - DNA, 15 bp, Homo sapiens
ggtgatgtattctct

SEQ ID NO: 1366280 - DNA, 15 bp, Homo sapiens
aggtgatgtattctc

SEQ ID NO: 1366281 - DNA, 15 bp, Homo sapiens
taggtgatgtattct

SEQ ID NO: 1366282 - DNA, 15 bp, Homo sapiens
ataggtgatgtattc

SEQ ID NO: 1366283 - DNA, 15 bp, Homo sapiens
cataggtgatgtatt

SEQ ID NO: 1366284 - DNA, 15 bp, Homo sapiens
acataggtgatgtat

SEQ ID NO: 1366285 - DNA, 15 bp, Homo sapiens
aacataggtgatgta

SEQ ID NO: 1366286 - DNA, 15 bp, Homo sapiens
aaacataggtgatgt

SEQ ID NO: 1366287 - DNA, 15 bp, Homo sapiens
aaaacataggtgatg

SEQ ID NO: 1366288 - DNA, 15 bp, Homo sapiens
gaaaacataggtgat

SEQ ID NO: 1366289 - DNA, 15 bp, Homo sapiens
agaaaacataggtga

SEQ ID NO: 1366290 - DNA, 15 bp, Homo sapiens
aagaaaacataggtg

SEQ ID NO: 1366291 - DNA, 15 bp, Homo sapiens
gaagaaaacataggt

SEQ ID NO: 1366292 - DNA, 15 bp, Homo sapiens
agaagaaaacatagg

SEQ ID NO: 1366293 - DNA, 15 bp, Homo sapiens
gagaagaaaacatag

SEQ ID NO: 1366294 - DNA, 15 bp, Homo sapiens
ggagaagaaaacata

SEQ ID NO: 1366295 - DNA, 15 bp, Homo sapiens
tggagaagaaaacat

SEQ ID NO: 1366296 - DNA, 15 bp, Homo sapiens
ctggagaagaaaaca

SEQ ID NO: 1366297 - DNA, 15 bp, Homo sapiens
tctggagaagaaaac

SEQ ID NO: 1366298 - DNA, 15 bp, Homo sapiens
gtctggagaagaaaa

SEQ ID NO: 1366299 - DNA, 15 bp, Homo sapiens
tgtctggagaagaaa

SEQ ID NO: 1366300 - DNA, 15 bp, Homo sapiens
ttgtctggagaagaa

SEQ ID NO: 1366301 - DNA, 15 bp, Homo sapiens
tttgtctggagaaga

SEQ ID NO: 1366302 - DNA, 15 bp, Homo sapiens
ctttgtctggagaag

SEQ ID NO: 1366303 - DNA, 15 bp, Homo sapiens
cctttgtctggagaa

SEQ ID NO: 1366304 - DNA, 15 bp, Homo sapiens
tcctttgtctggaga

SEQ ID NO: 1366305 - DNA, 15 bp, Homo sapiens
ttcctttgtctggag

SEQ ID NO: 1366306 - DNA, 15 bp, Homo sapiens
tttcctttgtctgga

SEQ ID NO: 1366307 - DNA, 15 bp, Homo sapiens
ctttcctttgtctgg

SEQ ID NO: 1366308 - DNA, 15 bp, Homo sapiens
cctttcctttgtctg

SEQ ID NO: 1366309 - DNA, 15 bp, Homo sapiens
tcctttcctttgtct

SEQ ID NO: 1366310 - DNA, 15 bp, Homo sapiens
ctcctttcctttgtc

SEQ ID NO: 1366311 - DNA, 15 bp, Homo sapiens
tctcctttcctttgt

SEQ ID NO: 1366312 - DNA, 15 bp, Homo sapiens
ctctcctttcctttg

SEQ ID NO: 1366313 - DNA, 15 bp, Homo sapiens
tctctcctttccttt

SEQ ID NO: 1366314 - DNA, 15 bp, Homo sapiens
ctctctcctttcctt

SEQ ID NO: 1366315 - DNA, 15 bp, Homo sapiens
tctctctcctttcct

SEQ ID NO: 1366316 - DNA, 15 bp, Homo sapiens
gtctctctcctttcc

SEQ ID NO: 1366317 - DNA, 15 bp, Homo sapiens
ggtctctctcctttc

SEQ ID NO: 1366318 - DNA, 15 bp, Homo sapiens
aggtctctctccttt

SEQ ID NO: 1366319 - DNA, 15 bp, Homo sapiens
aaggtctctctcctt

SEQ ID NO: 1366320 - DNA, 15 bp, Homo sapiens
taaggtctctctcct

SEQ ID NO: 1366321 - DNA, 15 bp, Homo sapiens
ttaaggtctctctcc

SEQ ID NO: 1366322 - DNA, 15 bp, Homo sapiens
tttaaggtctctctc

SEQ ID NO: 1366323 - DNA, 15 bp, Homo sapiens
ctttaaggtctctct

SEQ ID NO: 1366324 - DNA, 15 bp, Homo sapiens
actttaaggtctctc

SEQ ID NO: 1366325 - DNA, 15 bp, Homo sapiens
cactttaaggtctct

SEQ ID NO: 1366326 - DNA, 15 bp, Homo sapiens
acactttaaggtctc

SEQ ID NO: 1366327 - DNA, 15 bp, Homo sapiens
tacactttaaggtct

SEQ ID NO: 1366328 - DNA, 15 bp, Homo sapiens
ctacactttaaggtc

SEQ ID NO: 1366329 - DNA, 15 bp, Homo sapiens
actacactttaaggt

SEQ ID NO: 1366330 - DNA, 15 bp, Homo sapiens
cactacactttaagg

SEQ ID NO: 1366331 - DNA, 15 bp, Homo sapiens
acactacactttaag

SEQ ID NO: 1366332 - DNA, 15 bp, Homo sapiens
tacactacactttaa

SEQ ID NO: 1366333 - DNA, 15 bp, Homo sapiens
ttacactacacttta

SEQ ID NO: 1366334 - DNA, 15 bp, Homo sapiens
attacactacacttt

SEQ ID NO: 1366335 - DNA, 15 bp, Homo sapiens
aattacactacactt

SEQ ID NO: 1366336 - DNA, 15 bp, Homo sapiens
caattacactacact

SEQ ID NO: 1366337 - DNA, 15 bp, Homo sapiens
tcaattacactacac

SEQ ID NO: 1366338 - DNA, 15 bp, Homo sapiens
gtcaattacactaca

SEQ ID NO: 1366339 - DNA, 15 bp, Homo sapiens
tgtcaattacactac

SEQ ID NO: 1366340 - DNA, 15 bp, Homo sapiens
atgtcaattacacta

SEQ ID NO: 1366341 - DNA, 15 bp, Homo sapiens
aatgtcaattacact

SEQ ID NO: 1366342 - DNA, 15 bp, Homo sapiens
aaatgtcaattacac

SEQ ID NO: 1366343 - DNA, 15 bp, Homo sapiens
aaaatgtcaattaca

SEQ ID NO: 1366344 - DNA, 15 bp, Homo sapiens
taaaatgtcaattac

SEQ ID NO: 1366345 - DNA, 15 bp, Homo sapiens
ataaaatgtcaatta

SEQ ID NO: 1366346 - DNA, 15 bp, Homo sapiens
cataaaatgtcaatt

SEQ ID NO: 1366347 - DNA, 15 bp, Homo sapiens
gcataaaatgtcaat

SEQ ID NO: 1366348 - DNA, 15 bp, Homo sapiens
tgcataaaatgtcaa

SEQ ID NO: 1366349 - DNA, 15 bp, Homo sapiens
ttgcataaaatgtca

SEQ ID NO: 1366350 - DNA, 15 bp, Homo sapiens
tttgcataaaatgtc

SEQ ID NO: 1366351 - DNA, 15 bp, Homo sapiens
atttgcataaaatgt

SEQ ID NO: 1366352 - DNA, 15 bp, Homo sapiens
aatttgcataaaatg

SEQ ID NO: 1366353 - DNA, 15 bp, Homo sapiens
aaatttgcataaaat

SEQ ID NO: 1366354 - DNA, 15 bp, Homo sapiens
taaatttgcataaaa

SEQ ID NO: 1366355 - DNA, 15 bp, Homo sapiens
ctaaatttgcataaa

SEQ ID NO: 1366356 - DNA, 15 bp, Homo sapiens
tctaaatttgcataa

SEQ ID NO: 1366357 - DNA, 15 bp, Homo sapiens
atctaaatttgcata

SEQ ID NO: 1366358 - DNA, 15 bp, Homo sapiens
aatctaaatttgcat

SEQ ID NO: 1366359 - DNA, 15 bp, Homo sapiens
caatctaaatttgca

SEQ ID NO: 1366360 - DNA, 15 bp, Homo sapiens
acaatctaaatttgc

SEQ ID NO: 1366361 - DNA, 15 bp, Homo sapiens
cacaatctaaatttg

SEQ ID NO: 1366362 - DNA, 15 bp, Homo sapiens
gcacaatctaaattt

SEQ ID NO: 1366363 - DNA, 15 bp, Homo sapiens
tgcacaatctaaatt

SEQ ID NO: 1366364 - DNA, 15 bp, Homo sapiens
ttgcacaatctaaat

SEQ ID NO: 1366365 - DNA, 15 bp, Homo sapiens
tttgcacaatctaaa

SEQ ID NO: 1366366 - DNA, 15 bp, Homo sapiens
atttgcacaatctaa

SEQ ID NO: 1366367 - DNA, 15 bp, Homo sapiens
aatttgcacaatcta

SEQ ID NO: 1366368 - DNA, 15 bp, Homo sapiens
aaatttgcacaatct

SEQ ID NO: 1366369 - DNA, 15 bp, Homo sapiens
caaatttgcacaatc

SEQ ID NO: 1366370 - DNA, 15 bp, Homo sapiens
tcaaatttgcacaat

SEQ ID NO: 1366371 - DNA, 15 bp, Homo sapiens
ttcaaatttgcacaa

SEQ ID NO: 1366372 - DNA, 15 bp, Homo sapiens
tttcaaatttgcaca

SEQ ID NO: 1366373 - DNA, 15 bp, Homo sapiens
atttcaaatttgcac

SEQ ID NO: 1366374 - DNA, 15 bp, Homo sapiens
tatttcaaatttgca

SEQ ID NO: 1366375 - DNA, 15 bp, Homo sapiens
ctatttcaaatttgc

SEQ ID NO: 1366376 - DNA, 15 bp, Homo sapiens
actatttcaaatttg

SEQ ID NO: 1366377 - DNA, 15 bp, Homo sapiens
cactatttcaaattt

SEQ ID NO: 1366378 - DNA, 15 bp, Homo sapiens
acactatttcaaatt

SEQ ID NO: 1366379 - DNA, 15 bp, Homo sapiens
cacactatttcaaat

SEQ ID NO: 1366380 - DNA, 15 bp, Homo sapiens
tcacactatttcaaa

SEQ ID NO: 1366381 - DNA, 15 bp, Homo sapiens
atcacactatttcaa

SEQ ID NO: 1366382 - DNA, 15 bp, Homo sapiens
tatcacactatttca

SEQ ID NO: 1366383 - DNA, 15 bp, Homo sapiens
atatcacactatttc

SEQ ID NO: 1366384 - DNA, 15 bp, Homo sapiens
tatatcacactattt

SEQ ID NO: 1366385 - DNA, 15 bp, Homo sapiens
atatatcacactatt

SEQ ID NO: 1366386 - DNA, 15 bp, Homo sapiens
aatatatcacactat

SEQ ID NO: 1366387 - DNA, 15 bp, Homo sapiens
taatatatcacacta

SEQ ID NO: 1366388 - DNA, 15 bp, Homo sapiens
ttaatatatcacact

SEQ ID NO: 1366389 - DNA, 15 bp, Homo sapiens
tttaatatatcacac

SEQ ID NO: 1366390 - DNA, 15 bp, Homo sapiens
ttttaatatatcaca

SEQ ID NO: 1366391 - DNA, 15 bp, Homo sapiens
attttaatatatcac

SEQ ID NO: 1366392 - DNA, 15 bp, Homo sapiens
gattttaatatatca

SEQ ID NO: 1366393 - DNA, 15 bp, Homo sapiens
tgattttaatatatc

SEQ ID NO: 1366394 - DNA, 15 bp, Homo sapiens
gtgattttaatatat

SEQ ID NO: 1366395 - DNA, 15 bp, Homo sapiens
agtgattttaatata

SEQ ID NO: 1366396 - DNA, 15 bp, Homo sapiens
cagtgattttaatat

SEQ ID NO: 1366397 - DNA, 15 bp, Homo sapiens
acagtgattttaata

SEQ ID NO: 1366398 - DNA, 15 bp, Homo sapiens
tacagtgattttaat

SEQ ID NO: 1366399 - DNA, 15 bp, Homo sapiens
atacagtgattttaa

SEQ ID NO: 1366400 - DNA, 15 bp, Homo sapiens
tatacagtgatttta

SEQ ID NO: 1366401 - DNA, 15 bp, Homo sapiens
gtatacagtgatttt

SEQ ID NO: 1366402 - DNA, 15 bp, Homo sapiens
tgtatacagtgattt

SEQ ID NO: 1366403 - DNA, 15 bp, Homo sapiens
gtgtatacagtgatt

SEQ ID NO: 1366404 - DNA, 15 bp, Homo sapiens
tgtgtatacagtgat

SEQ ID NO: 1366405 - DNA, 15 bp, Homo sapiens
ttgtgtatacagtga

SEQ ID NO: 1366406 - DNA, 15 bp, Homo sapiens
tttgtgtatacagtg

SEQ ID NO: 1366407 - DNA, 15 bp, Homo sapiens
ttttgtgtatacagt

SEQ ID NO: 1366408 - DNA, 15 bp, Homo sapiens
attttgtgtatacag

SEQ ID NO: 1366409 - DNA, 15 bp, Homo sapiens
aattttgtgtataca

SEQ ID NO: 1366410 - DNA, 15 bp, Homo sapiens
aaattttgtgtatac

SEQ ID NO: 1366411 - DNA, 15 bp, Homo sapiens
aaaattttgtgtata

SEQ ID NO: 1366412 - DNA, 15 bp, Homo sapiens
taaaattttgtgtat

SEQ ID NO: 1366413 - DNA, 15 bp, Homo sapiens
ataaaattttgtgta

SEQ ID NO: 1366414 - DNA, 15 bp, Homo sapiens
tataaaattttgtgt

SEQ ID NO: 1366415 - DNA, 15 bp, Homo sapiens
atataaaattttgtg

SEQ ID NO: 1366416 - DNA, 15 bp, Homo sapiens
tatataaaattttgt

SEQ ID NO: 1366417 - DNA, 15 bp, Homo sapiens
ttatataaaattttg

SEQ ID NO: 1366418 - DNA, 15 bp, Homo sapiens
attatataaaatttt

SEQ ID NO: 1366419 - DNA, 15 bp, Homo sapiens
tattatataaaattt

SEQ ID NO: 1366420 - DNA, 15 bp, Homo sapiens
ttattatataaaatt

SEQ ID NO: 1366421 - DNA, 15 bp, Homo sapiens
tttattatataaaat

SEQ ID NO: 1366422 - DNA, 15 bp, Homo sapiens
ttttattatataaaa

SEQ ID NO: 1366423 - DNA, 15 bp, Homo sapiens
tttttattatataaa

SEQ ID NO: 1366424 - DNA, 15 bp, Homo sapiens
atttttattatataa

SEQ ID NO: 1366425 - DNA, 15 bp, Homo sapiens
gatttttattatata

SEQ ID NO: 1366426 - DNA, 15 bp, Homo sapiens
agatttttattatat

SEQ ID NO: 1366427 - DNA, 15 bp, Homo sapiens
cagatttttattata

SEQ ID NO: 1366428 - DNA, 15 bp, Homo sapiens
acagatttttattat

SEQ ID NO: 1366429 - DNA, 15 bp, Homo sapiens
cacagatttttatta

SEQ ID NO: 1366430 - DNA, 15 bp, Homo sapiens
acacagatttttatt

SEQ ID NO: 1366431 - DNA, 15 bp, Homo sapiens
aacacagatttttat

SEQ ID NO: 1366432 - DNA, 15 bp, Homo sapiens
aaacacagattttta

SEQ ID NO: 1366433 - DNA, 15 bp, Homo sapiens
aaaacacagattttt

SEQ ID NO: 1366434 - DNA, 15 bp, Homo sapiens
aaaaacacagatttt

SEQ ID NO: 1366435 - DNA, 15 bp, Homo sapiens
taaaaacacagattt

SEQ ID NO: 1366436 - DNA, 15 bp, Homo sapiens
ctaaaaacacagatt

SEQ ID NO: 1366437 - DNA, 15 bp, Homo sapiens
tctaaaaacacagat

SEQ ID NO: 1366438 - DNA, 15 bp, Homo sapiens
ttctaaaaacacaga

SEQ ID NO: 1366439 - DNA, 15 bp, Homo sapiens
tttctaaaaacacag

SEQ ID NO: 1366440 - DNA, 15 bp, Homo sapiens
atttctaaaaacaca

SEQ ID NO: 1366441 - DNA, 15 bp, Homo sapiens
gatttctaaaaacac

SEQ ID NO: 1366442 - DNA, 15 bp, Homo sapiens
tgatttctaaaaaca

SEQ ID NO: 1366443 - DNA, 15 bp, Homo sapiens
ctgatttctaaaaac

SEQ ID NO: 1366444 - DNA, 15 bp, Homo sapiens
cctgatttctaaaaa

SEQ ID NO: 1366445 - DNA, 15 bp, Homo sapiens
tcctgatttctaaaa

SEQ ID NO: 1366446 - DNA, 15 bp, Homo sapiens
ttcctgatttctaaa

SEQ ID NO: 1366447 - DNA, 15 bp, Homo sapiens
tttcctgatttctaa

SEQ ID NO: 1366448 - DNA, 15 bp, Homo sapiens
atttcctgatttcta

SEQ ID NO: 1366449 - DNA, 15 bp, Homo sapiens
catttcctgatttct

SEQ ID NO: 1366450 - DNA, 15 bp, Homo sapiens
acatttcctgatttc

SEQ ID NO: 1366451 - DNA, 15 bp, Homo sapiens
cacatttcctgattt

SEQ ID NO: 1366452 - DNA, 15 bp, Homo sapiens
acacatttcctgatt

SEQ ID NO: 1366453 - DNA, 15 bp, Homo sapiens
aacacatttcctgat

SEQ ID NO: 1366454 - DNA, 15 bp, Homo sapiens
taacacatttcctga

SEQ ID NO: 1366455 - DNA, 15 bp, Homo sapiens
ataacacatttcctg

SEQ ID NO: 1366456 - DNA, 15 bp, Homo sapiens
aataacacatttcct

SEQ ID NO: 1366457 - DNA, 15 bp, Homo sapiens
aaataacacatttcc

SEQ ID NO: 1366458 - DNA, 15 bp, Homo sapiens
gaaataacacatttc

SEQ ID NO: 1366459 - DNA, 15 bp, Homo sapiens
agaaataacacattt

SEQ ID NO: 1366460 - DNA, 15 bp, Homo sapiens
cagaaataacacatt

SEQ ID NO: 1366461 - DNA, 15 bp, Homo sapiens
tcagaaataacacat

SEQ ID NO: 1366462 - DNA, 15 bp, Homo sapiens
ttcagaaataacaca

SEQ ID NO: 1366463 - DNA, 15 bp, Homo sapiens
cttcagaaataacac

SEQ ID NO: 1366464 - DNA, 15 bp, Homo sapiens
acttcagaaataaca

SEQ ID NO: 1366465 - DNA, 15 bp, Homo sapiens
tacttcagaaataac

SEQ ID NO: 1366466 - DNA, 15 bp, Homo sapiens
ctacttcagaaataa

SEQ ID NO: 1366467 - DNA, 15 bp, Homo sapiens
tctacttcagaaata

SEQ ID NO: 1366468 - DNA, 15 bp, Homo sapiens
ttctacttcagaaat

SEQ ID NO: 1366469 - DNA, 15 bp, Homo sapiens
tttctacttcagaaa

SEQ ID NO: 1366470 - DNA, 15 bp, Homo sapiens
ctttctacttcagaa

SEQ ID NO: 1366471 - DNA, 15 bp, Homo sapiens
gctttctacttcaga

SEQ ID NO: 1366472 - DNA, 15 bp, Homo sapiens
ggctttctacttcag

SEQ ID NO: 1366473 - DNA, 15 bp, Homo sapiens
tggctttctacttca

SEQ ID NO: 1366474 - DNA, 15 bp, Homo sapiens
ttggctttctacttc

SEQ ID NO: 1366475 - DNA, 15 bp, Homo sapiens
cttggctttctactt

SEQ ID NO: 1366476 - DNA, 15 bp, Homo sapiens
acttggctttctact

SEQ ID NO: 1366477 - DNA, 15 bp, Homo sapiens
cacttggctttctac

SEQ ID NO: 1366478 - DNA, 15 bp, Homo sapiens
tcacttggctttcta

SEQ ID NO: 1366479 - DNA, 15 bp, Homo sapiens
ttcacttggctttct

SEQ ID NO: 1366480 - DNA, 15 bp, Homo sapiens
attcacttggctttc

SEQ ID NO: 1366481 - DNA, 15 bp, Homo sapiens
aattcacttggcttt

SEQ ID NO: 1366482 - DNA, 15 bp, Homo sapiens
taattcacttggctt

SEQ ID NO: 1366483 - DNA, 15 bp, Homo sapiens
ataattcacttggct

SEQ ID NO: 1366484 - DNA, 15 bp, Homo sapiens
tataattcacttggc

SEQ ID NO: 1366485 - DNA, 15 bp, Homo sapiens
ttataattcacttgg

SEQ ID NO: 1366486 - DNA, 15 bp, Homo sapiens
tttataattcacttg

SEQ ID NO: 1366487 - DNA, 15 bp, Homo sapiens
gtttataattcactt

SEQ ID NO: 1366488 - DNA, 15 bp, Homo sapiens
agtttataattcact

SEQ ID NO: 1366489 - DNA, 15 bp, Homo sapiens
cagtttataattcac

SEQ ID NO: 1366490 - DNA, 15 bp, Homo sapiens
acagtttataattca

SEQ ID NO: 1366491 - DNA, 15 bp, Homo sapiens
tacagtttataattc

SEQ ID NO: 1366492 - DNA, 15 bp, Homo sapiens
atacagtttataatt

SEQ ID NO: 1366493 - DNA, 15 bp, Homo sapiens
aatacagtttataat

SEQ ID NO: 1366494 - DNA, 15 bp, Homo sapiens
taatacagtttataa

SEQ ID NO: 1366495 - DNA, 15 bp, Homo sapiens
ataatacagtttata

SEQ ID NO: 1366496 - DNA, 15 bp, Homo sapiens
cataatacagtttat

SEQ ID NO: 1366497 - DNA, 15 bp, Homo sapiens
gcataatacagttta

SEQ ID NO: 1366498 - DNA, 15 bp, Homo sapiens
ggcataatacagttt

SEQ ID NO: 1366499 - DNA, 15 bp, Homo sapiens
tggcataatacagtt

SEQ ID NO: 1366500 - DNA, 15 bp, Homo sapiens
atggcataatacagt

SEQ ID NO: 1366501 - DNA, 15 bp, Homo sapiens
gatggcataatacag

SEQ ID NO: 1366502 - DNA, 15 bp, Homo sapiens
tgatggcataataca

SEQ ID NO: 1366503 - DNA, 15 bp, Homo sapiens
gtgatggcataatac

SEQ ID NO: 1366504 - DNA, 15 bp, Homo sapiens
ggtgatggcataata

SEQ ID NO: 1366505 - DNA, 15 bp, Homo sapiens
tggtgatggcataat

SEQ ID NO: 1366506 - DNA, 15 bp, Homo sapiens
ttggtgatggcataa

SEQ ID NO: 1366507 - DNA, 15 bp, Homo sapiens
tttggtgatggcata

SEQ ID NO: 1366508 - DNA, 15 bp, Homo sapiens
atttggtgatggcat

SEQ ID NO: 1366509 - DNA, 15 bp, Homo sapiens
catttggtgatggca

SEQ ID NO: 1366510 - DNA, 15 bp, Homo sapiens
ccatttggtgatggc

SEQ ID NO: 1366511 - DNA, 15 bp, Homo sapiens
gccatttggtgatgg

SEQ ID NO: 1366512 - DNA, 15 bp, Homo sapiens
tgccatttggtgatg

SEQ ID NO: 1366513 - DNA, 15 bp, Homo sapiens
ttgccatttggtgat

SEQ ID NO: 1366514 - DNA, 15 bp, Homo sapiens
tttgccatttggtga

SEQ ID NO: 1366515 - DNA, 15 bp, Homo sapiens
ttttgccatttggtg

SEQ ID NO: 1366516 - DNA, 15 bp, Homo sapiens
attttgccatttggt

SEQ ID NO: 1366517 - DNA, 15 bp, Homo sapiens
tattttgccatttgg

SEQ ID NO: 1366518 - DNA, 15 bp, Homo sapiens
ttattttgccatttg

SEQ ID NO: 1366519 - DNA, 15 bp, Homo sapiens
gttattttgccattt

SEQ ID NO: 1366520 - DNA, 15 bp, Homo sapiens
agttattttgccatt

SEQ ID NO: 1366521 - DNA, 15 bp, Homo sapiens
aagttattttgccat

SEQ ID NO: 1366522 - DNA, 15 bp, Homo sapiens
taagttattttgcca

SEQ ID NO: 1366523 - DNA, 15 bp, Homo sapiens
ataagttattttgcc

SEQ ID NO: 1366524 - DNA, 15 bp, Homo sapiens
gataagttattttgc

SEQ ID NO: 1366525 - DNA, 15 bp, Homo sapiens
ggataagttattttg

SEQ ID NO: 1366526 - DNA, 15 bp, Homo sapiens
aggataagttatttt

SEQ ID NO: 1366527 - DNA, 15 bp, Homo sapiens
aaggataagttattt

SEQ ID NO: 1366528 - DNA, 15 bp, Homo sapiens
aaaggataagttatt

SEQ ID NO: 1366529 - DNA, 15 bp, Homo sapiens
caaaggataagttat

SEQ ID NO: 1366530 - DNA, 15 bp, Homo sapiens
gcaaaggataagtta

SEQ ID NO: 1366531 - DNA, 15 bp, Homo sapiens
ggcaaaggataagtt

SEQ ID NO: 1366532 - DNA, 15 bp, Homo sapiens
tggcaaaggataagt

SEQ ID NO: 1366533 - DNA, 15 bp, Homo sapiens
ttggcaaaggataag

SEQ ID NO: 1366534 - DNA, 15 bp, Homo sapiens
tttggcaaaggataa

SEQ ID NO: 1366535 - DNA, 15 bp, Homo sapiens
ttttggcaaaggata

SEQ ID NO: 1366536 - DNA, 15 bp, Homo sapiens
attttggcaaaggat

SEQ ID NO: 1366537 - DNA, 15 bp, Homo sapiens
gattttggcaaagga

SEQ ID NO: 1366538 - DNA, 15 bp, Homo sapiens
tgattttggcaaagg

SEQ ID NO: 1366539 - DNA, 15 bp, Homo sapiens
atgattttggcaaag

SEQ ID NO: 1366540 - DNA, 15 bp, Homo sapiens
catgattttggcaaa

SEQ ID NO: 1366541 - DNA, 15 bp, Homo sapiens
acatgattttggcaa

SEQ ID NO: 1366542 - DNA, 15 bp, Homo sapiens
cacatgattttggca

SEQ ID NO: 1366543 - DNA, 15 bp, Homo sapiens
tcacatgattttggc

SEQ ID NO: 1366544 - DNA, 15 bp, Homo sapiens
ttcacatgattttgg

SEQ ID NO: 1366545 - DNA, 15 bp, Homo sapiens
attcacatgattttg

SEQ ID NO: 1366546 - DNA, 15 bp, Homo sapiens
gattcacatgatttt

SEQ ID NO: 1366547 - DNA, 15 bp, Homo sapiens
agattcacatgattt

SEQ ID NO: 1366548 - DNA, 15 bp, Homo sapiens
aagattcacatgatt

SEQ ID NO: 1366549 - DNA, 15 bp, Homo sapiens
taagattcacatgat

SEQ ID NO: 1366550 - DNA, 15 bp, Homo sapiens
ataagattcacatga

SEQ ID NO: 1366551 - DNA, 15 bp, Homo sapiens
gataagattcacatg

SEQ ID NO: 1366552 - DNA, 15 bp, Homo sapiens
tgataagattcacat

SEQ ID NO: 1366553 - DNA, 15 bp, Homo sapiens
atgataagattcaca

SEQ ID NO: 1366554 - DNA, 15 bp, Homo sapiens
aatgataagattcac

SEQ ID NO: 1366555 - DNA, 15 bp, Homo sapiens
caatgataagattca

SEQ ID NO: 1366556 - DNA, 15 bp, Homo sapiens
acaatgataagattc

SEQ ID NO: 1366557 - DNA, 15 bp, Homo sapiens
tacaatgataagatt

SEQ ID NO: 1366558 - DNA, 15 bp, Homo sapiens
atacaatgataagat

SEQ ID NO: 1366559 - DNA, 15 bp, Homo sapiens
catacaatgataaga

SEQ ID NO: 1366560 - DNA, 15 bp, Homo sapiens
acatacaatgataag

SEQ ID NO: 1366561 - DNA, 15 bp, Homo sapiens
tacatacaatgataa

SEQ ID NO: 1366562 - DNA, 15 bp, Homo sapiens
atacatacaatgata

SEQ ID NO: 1366563 - DNA, 15 bp, Homo sapiens
gatacatacaatgat

SEQ ID NO: 1366564 - DNA, 15 bp, Homo sapiens
tgatacatacaatga

SEQ ID NO: 1366565 - DNA, 15 bp, Homo sapiens
ctgatacatacaatg

SEQ ID NO: 1366566 - DNA, 15 bp, Homo sapiens
tctgatacatacaat

SEQ ID NO: 1366567 - DNA, 15 bp, Homo sapiens
ttctgatacatacaa

SEQ ID NO: 1366568 - DNA, 15 bp, Homo sapiens
gttctgatacataca

SEQ ID NO: 1366569 - DNA, 15 bp, Homo sapiens
agttctgatacatac

SEQ ID NO: 1366570 - DNA, 15 bp, Homo sapiens
aagttctgatacata

SEQ ID NO: 1366571 - DNA, 15 bp, Homo sapiens
aaagttctgatacat

SEQ ID NO: 1366572 - DNA, 15 bp, Homo sapiens
caaagttctgataca

SEQ ID NO: 1366573 - DNA, 15 bp, Homo sapiens
ccaaagttctgatac

SEQ ID NO: 1366574 - DNA, 15 bp, Homo sapiens
gccaaagttctgata

SEQ ID NO: 1366575 - DNA, 15 bp, Homo sapiens
tgccaaagttctgat

SEQ ID NO: 1366576 - DNA, 15 bp, Homo sapiens
ctgccaaagttctga

SEQ ID NO: 1366577 - DNA, 15 bp, Homo sapiens
tctgccaaagttctg

SEQ ID NO: 1366578 - DNA, 15 bp, Homo sapiens
atctgccaaagttct

SEQ ID NO: 1366579 - DNA, 15 bp, Homo sapiens
tatctgccaaagttc

SEQ ID NO: 1366580 - DNA, 15 bp, Homo sapiens
ttatctgccaaagtt

SEQ ID NO: 1366581 - DNA, 15 bp, Homo sapiens
attatctgccaaagt

SEQ ID NO: 1366582 - DNA, 15 bp, Homo sapiens
aattatctgccaaag

SEQ ID NO: 1366583 - DNA, 15 bp, Homo sapiens
gaattatctgccaaa

SEQ ID NO: 1366584 - DNA, 15 bp, Homo sapiens
agaattatctgccaa

SEQ ID NO: 1366585 - DNA, 15 bp, Homo sapiens
cagaattatctgcca

SEQ ID NO: 1366586 - DNA, 15 bp, Homo sapiens
ccagaattatctgcc

SEQ ID NO: 1366587 - DNA, 15 bp, Homo sapiens
accagaattatctgc

SEQ ID NO: 1366588 - DNA, 15 bp, Homo sapiens
caccagaattatctg

SEQ ID NO: 1366589 - DNA, 15 bp, Homo sapiens
tcaccagaattatct

SEQ ID NO: 1366590 - DNA, 15 bp, Homo sapiens
gtcaccagaattatc

SEQ ID NO: 1366591 - DNA, 15 bp, Homo sapiens
agtcaccagaattat

SEQ ID NO: 1366592 - DNA, 15 bp, Homo sapiens
tagtcaccagaatta

SEQ ID NO: 1366593 - DNA, 15 bp, Homo sapiens
atagtcaccagaatt

SEQ ID NO: 1366594 - DNA, 15 bp, Homo sapiens
aatagtcaccagaat

SEQ ID NO: 1366595 - DNA, 15 bp, Homo sapiens
aaatagtcaccagaa

SEQ ID NO: 1366596 - DNA, 15 bp, Homo sapiens
caaatagtcaccaga

SEQ ID NO: 1366597 - DNA, 15 bp, Homo sapiens
tcaaatagtcaccag

SEQ ID NO: 1366598 - DNA, 15 bp, Homo sapiens
gtcaaatagtcacca

SEQ ID NO: 1366599 - DNA, 15 bp, Homo sapiens
agtcaaatagtcacc

SEQ ID NO: 1366600 - DNA, 15 bp, Homo sapiens
aagtcaaatagtcac

SEQ ID NO: 1366601 - DNA, 15 bp, Homo sapiens
aaagtcaaatagtca

SEQ ID NO: 1366602 - DNA, 15 bp, Homo sapiens
aaaagtcaaatagtc

SEQ ID NO: 1366603 - DNA, 15 bp, Homo sapiens
taaaagtcaaatagt

SEQ ID NO: 1366604 - DNA, 15 bp, Homo sapiens
ctaaaagtcaaatag

SEQ ID NO: 1366605 - DNA, 15 bp, Homo sapiens
actaaaagtcaaata

SEQ ID NO: 1366606 - DNA, 15 bp, Homo sapiens
cactaaaagtcaaat

SEQ ID NO: 1366607 - DNA, 15 bp, Homo sapiens
acactaaaagtcaaa

SEQ ID NO: 1366608 - DNA, 15 bp, Homo sapiens
cacactaaaagtcaa

SEQ ID NO: 1366609 - DNA, 15 bp, Homo sapiens
tcacactaaaagtca

SEQ ID NO: 1366610 - DNA, 15 bp, Homo sapiens
atcacactaaaagtc

SEQ ID NO: 1366611 - DNA, 15 bp, Homo sapiens
catcacactaaaagt

SEQ ID NO: 1366612 - DNA, 15 bp, Homo sapiens
gcatcacactaaaag

SEQ ID NO: 1366613 - DNA, 15 bp, Homo sapiens
agcatcacactaaaa

SEQ ID NO: 1366614 - DNA, 15 bp, Homo sapiens
aagcatcacactaaa

SEQ ID NO: 1366615 - DNA, 15 bp, Homo sapiens
taagcatcacactaa

SEQ ID NO: 1366616 - DNA, 15 bp, Homo sapiens
gtaagcatcacacta

SEQ ID NO: 1366617 - DNA, 15 bp, Homo sapiens
agtaagcatcacact

SEQ ID NO: 1366618 - DNA, 15 bp, Homo sapiens
tagtaagcatcacac

SEQ ID NO: 1366619 - DNA, 15 bp, Homo sapiens
atagtaagcatcaca

SEQ ID NO: 1366620 - DNA, 15 bp, Homo sapiens
aatagtaagcatcac

SEQ ID NO: 1366621 - DNA, 15 bp, Homo sapiens
taatagtaagcatca

SEQ ID NO: 1366622 - DNA, 15 bp, Homo sapiens
ataatagtaagcatc

SEQ ID NO: 1366623 - DNA, 15 bp, Homo sapiens
cataatagtaagcat

SEQ ID NO: 1366624 - DNA, 15 bp, Homo sapiens
tcataatagtaagca

SEQ ID NO: 1366625 - DNA, 15 bp, Homo sapiens
ttcataatagtaagc

SEQ ID NO: 1366626 - DNA, 15 bp, Homo sapiens
attcataatagtaag

SEQ ID NO: 1366627 - DNA, 15 bp, Homo sapiens
cattcataatagtaa

SEQ ID NO: 1366628 - DNA, 15 bp, Homo sapiens
acattcataatagta

SEQ ID NO: 1366629 - DNA, 15 bp, Homo sapiens
tacattcataatagt

SEQ ID NO: 1366630 - DNA, 15 bp, Homo sapiens
atacattcataatag

SEQ ID NO: 1366631 - DNA, 15 bp, Homo sapiens
catacattcataata

SEQ ID NO: 1366632 - DNA, 15 bp, Homo sapiens
acatacattcataat

SEQ ID NO: 1366633 - DNA, 15 bp, Homo sapiens
tacatacattcataa

SEQ ID NO: 1366634 - DNA, 15 bp, Homo sapiens
ctacatacattcata

SEQ ID NO: 1366635 - DNA, 15 bp, Homo sapiens
gctacatacattcat

SEQ ID NO: 1366636 - DNA, 15 bp, Homo sapiens
ggctacatacattca

SEQ ID NO: 1366637 - DNA, 15 bp, Homo sapiens
aggctacatacattc

SEQ ID NO: 1366638 - DNA, 15 bp, Homo sapiens
aaggctacatacatt

SEQ ID NO: 1366639 - DNA, 15 bp, Homo sapiens
aaaggctacatacat

SEQ ID NO: 1366640 - DNA, 15 bp, Homo sapiens
aaaaggctacataca

SEQ ID NO: 1366641 - DNA, 15 bp, Homo sapiens
taaaaggctacatac

SEQ ID NO: 1366642 - DNA, 15 bp, Homo sapiens
ttaaaaggctacata

SEQ ID NO: 1366643 - DNA, 15 bp, Homo sapiens
attaaaaggctacat

SEQ ID NO: 1366644 - DNA, 15 bp, Homo sapiens
tattaaaaggctaca

SEQ ID NO: 1366645 - DNA, 15 bp, Homo sapiens
atattaaaaggctac

SEQ ID NO: 1366646 - DNA, 15 bp, Homo sapiens
tatattaaaaggcta

SEQ ID NO: 1366647 - DNA, 15 bp, Homo sapiens
gtatattaaaaggct

SEQ ID NO: 1366648 - DNA, 15 bp, Homo sapiens
agtatattaaaaggc

SEQ ID NO: 1366649 - DNA, 15 bp, Homo sapiens
tagtatattaaaagg

SEQ ID NO: 1366650 - DNA, 15 bp, Homo sapiens
atagtatattaaaag

SEQ ID NO: 1366651 - DNA, 15 bp, Homo sapiens
tatagtatattaaaa

SEQ ID NO: 1366652 - DNA, 15 bp, Homo sapiens
ttatagtatattaaa

SEQ ID NO: 1366653 - DNA, 15 bp, Homo sapiens
attatagtatattaa

SEQ ID NO: 1366654 - DNA, 15 bp, Homo sapiens
tattatagtatatta

SEQ ID NO: 1366655 - DNA, 15 bp, Homo sapiens
ttattatagtatatt

SEQ ID NO: 1366656 - DNA, 15 bp, Homo sapiens
tttattatagtatat

SEQ ID NO: 1366657 - DNA, 15 bp, Homo sapiens
ctttattatagtata

SEQ ID NO: 1366658 - DNA, 15 bp, Homo sapiens
actttattatagtat

SEQ ID NO: 1366659 - DNA, 15 bp, Homo sapiens
aactttattatagta

SEQ ID NO: 1366660 - DNA, 15 bp, Homo sapiens
aaactttattatagt

SEQ ID NO: 1366661 - DNA, 15 bp, Homo sapiens
gaaactttattatag

SEQ ID NO: 1366662 - DNA, 15 bp, Homo sapiens
agaaactttattata

SEQ ID NO: 1366663 - DNA, 15 bp, Homo sapiens
tagaaactttattat

SEQ ID NO: 1366664 - DNA, 15 bp, Homo sapiens
ttagaaactttatta

SEQ ID NO: 1366665 - DNA, 15 bp, Homo sapiens
attagaaactttatt

SEQ ID NO: 1366666 - DNA, 15 bp, Homo sapiens
aattagaaactttat

SEQ ID NO: 1366667 - DNA, 15 bp, Homo sapiens
taattagaaacttta

SEQ ID NO: 1366668 - DNA, 15 bp, Homo sapiens
ataattagaaacttt

SEQ ID NO: 1366669 - DNA, 15 bp, Homo sapiens
aataattagaaactt

SEQ ID NO: 1366670 - DNA, 15 bp, Homo sapiens
gaataattagaaact

SEQ ID NO: 1366671 - DNA, 15 bp, Homo sapiens
tgaataattagaaac

SEQ ID NO: 1366672 - DNA, 15 bp, Homo sapiens
atgaataattagaaa

SEQ ID NO: 1366673 - DNA, 15 bp, Homo sapiens
gatgaataattagaa

SEQ ID NO: 1366674 - DNA, 15 bp, Homo sapiens
tgatgaataattaga

SEQ ID NO: 1366675 - DNA, 15 bp, Homo sapiens
ttgatgaataattag

SEQ ID NO: 1366676 - DNA, 15 bp, Homo sapiens
tttgatgaataatta

SEQ ID NO: 1366677 - DNA, 15 bp, Homo sapiens
atttgatgaataatt

SEQ ID NO: 1366678 - DNA, 15 bp, Homo sapiens
gatttgatgaataat

SEQ ID NO: 1366679 - DNA, 15 bp, Homo sapiens
tgatttgatgaataa

SEQ ID NO: 1366680 - DNA, 15 bp, Homo sapiens
atgatttgatgaata

SEQ ID NO: 1366681 - DNA, 15 bp, Homo sapiens
tatgatttgatgaat

SEQ ID NO: 1366682 - DNA, 15 bp, Homo sapiens
ctatgatttgatgaa

SEQ ID NO: 1366683 - DNA, 15 bp, Homo sapiens
actatgatttgatga

SEQ ID NO: 1366684 - DNA, 15 bp, Homo sapiens
cactatgatttgatg

SEQ ID NO: 1366685 - DNA, 15 bp, Homo sapiens
gcactatgatttgat

SEQ ID NO: 1366686 - DNA, 15 bp, Homo sapiens
agcactatgatttga

SEQ ID NO: 1366687 - DNA, 15 bp, Homo sapiens
tagcactatgatttg

SEQ ID NO: 1366688 - DNA, 15 bp, Homo sapiens
ctagcactatgattt

SEQ ID NO: 1366689 - DNA, 15 bp, Homo sapiens
cctagcactatgatt

SEQ ID NO: 1366690 - DNA, 15 bp, Homo sapiens
ccctagcactatgat

SEQ ID NO: 1366691 - DNA, 15 bp, Homo sapiens
gccctagcactatga

SEQ ID NO: 1366692 - DNA, 15 bp, Homo sapiens
tgccctagcactatg

SEQ ID NO: 1366693 - DNA, 15 bp, Homo sapiens
ttgccctagcactat

SEQ ID NO: 1366694 - DNA, 15 bp, Homo sapiens
tttgccctagcacta

SEQ ID NO: 1366695 - DNA, 15 bp, Homo sapiens
ttttgccctagcact

SEQ ID NO: 1366696 - DNA, 15 bp, Homo sapiens
tttttgccctagcac

SEQ ID NO: 1366697 - DNA, 15 bp, Homo sapiens
ttttttgccctagca

SEQ ID NO: 1366698 - DNA, 15 bp, Homo sapiens
tttttttgccctagc

SEQ ID NO: 1366699 - DNA, 15 bp, Homo sapiens
ttttttttgccctag

SEQ ID NO: 1366700 - DNA, 15 bp, Homo sapiens
tttttttttgcccta

SEQ ID NO: 1366701 - DNA, 15 bp, Homo sapiens
ttttttttttgccct

SEQ ID NO: 1366702 - DNA, 15 bp, Homo sapiens
cttttttttttgccc

SEQ ID NO: 1366703 - DNA, 15 bp, Homo sapiens
gcttttttttttgcc

SEQ ID NO: 1366704 - DNA, 15 bp, Homo sapiens
ggcttttttttttgc

SEQ ID NO: 1366705 - DNA, 15 bp, Homo sapiens
aggcttttttttttg

SEQ ID NO: 1366706 - DNA, 15 bp, Homo sapiens
ggaggcttttttttt

SEQ ID NO: 1366707 - DNA, 15 bp, Homo sapiens
tggaggctttttttt

SEQ ID NO: 1366708 - DNA, 15 bp, Homo sapiens
ttggaggcttttttt

SEQ ID NO: 1366709 - DNA, 15 bp, Homo sapiens
tttggaggctttttt

SEQ ID NO: 1366710 - DNA, 15 bp, Homo sapiens
ttttggaggcttttt

SEQ ID NO: 1366711 - DNA, 15 bp, Homo sapiens
tttttggaggctttt

SEQ ID NO: 1366712 - DNA, 15 bp, Homo sapiens
atttttggaggcttt

SEQ ID NO: 1366713 - DNA, 15 bp, Homo sapiens
tatttttggaggctt

SEQ ID NO: 1366714 - DNA, 15 bp, Homo sapiens
ttatttttggaggct

SEQ ID NO: 1366715 - DNA, 15 bp, Homo sapiens
gttatttttggaggc

SEQ ID NO: 1366716 - DNA, 15 bp, Homo sapiens
tgttatttttggagg

SEQ ID NO: 1366717 - DNA, 15 bp, Homo sapiens
ttgttatttttggag

SEQ ID NO: 1366718 - DNA, 15 bp, Homo sapiens
gttgttatttttgga

SEQ ID NO: 1366719 - DNA, 15 bp, Homo sapiens
agttgttatttttgg

SEQ ID NO: 1366720 - DNA, 15 bp, Homo sapiens
aagttgttatttttg

SEQ ID NO: 1366721 - DNA, 15 bp, Homo sapiens
aaagttgttattttt

SEQ ID NO: 1366722 - DNA, 15 bp, Homo sapiens
caaagttgttatttt

SEQ ID NO: 1366723 - DNA, 15 bp, Homo sapiens
ccaaagttgttattt

SEQ ID NO: 1366724 - DNA, 15 bp, Homo sapiens
cccaaagttgttatt

SEQ ID NO: 1366725 - DNA, 15 bp, Homo sapiens
tcccaaagttgttat

SEQ ID NO: 1366726 - DNA, 15 bp, Homo sapiens
gtcccaaagttgtta

SEQ ID NO: 1366727 - DNA, 15 bp, Homo sapiens
tgtcccaaagttgtt

SEQ ID NO: 1366728 - DNA, 15 bp, Homo sapiens
ttgtcccaaagttgt

SEQ ID NO: 1366729 - DNA, 15 bp, Homo sapiens
tttgtcccaaagttg

SEQ ID NO: 1366730 - DNA, 15 bp, Homo sapiens
ctttgtcccaaagtt

SEQ ID NO: 1366731 - DNA, 15 bp, Homo sapiens
cctttgtcccaaagt

SEQ ID NO: 1366732 - DNA, 15 bp, Homo sapiens
acctttgtcccaaag

SEQ ID NO: 1366733 - DNA, 15 bp, Homo sapiens
aacctttgtcccaaa

SEQ ID NO: 1366734 - DNA, 15 bp, Homo sapiens
taacctttgtcccaa

SEQ ID NO: 1366735 - DNA, 15 bp, Homo sapiens
ctaacctttgtccca

SEQ ID NO: 1366736 - DNA, 15 bp, Homo sapiens
tctaacctttgtccc

SEQ ID NO: 1366737 - DNA, 15 bp, Homo sapiens
atctaacctttgtcc

SEQ ID NO: 1366738 - DNA, 15 bp, Homo sapiens
tatctaacctttgtc

SEQ ID NO: 1366739 - DNA, 15 bp, Homo sapiens
atatctaacctttgt

SEQ ID NO: 1366740 - DNA, 15 bp, Homo sapiens
catatctaacctttg

SEQ ID NO: 1366741 - DNA, 15 bp, Homo sapiens
gcatatctaaccttt

SEQ ID NO: 1366742 - DNA, 15 bp, Homo sapiens
agcatatctaacctt

SEQ ID NO: 1366743 - DNA, 15 bp, Homo sapiens
tagcatatctaacct

SEQ ID NO: 1366744 - DNA, 15 bp, Homo sapiens
ttagcatatctaacc

SEQ ID NO: 1366745 - DNA, 15 bp, Homo sapiens
tttagcatatctaac

SEQ ID NO: 1366746 - DNA, 15 bp, Homo sapiens
ttttagcatatctaa

SEQ ID NO: 1366747 - DNA, 15 bp, Homo sapiens
gttttagcatatcta

SEQ ID NO: 1366748 - DNA, 15 bp, Homo sapiens
tgttttagcatatct

SEQ ID NO: 1366749 - DNA, 15 bp, Homo sapiens
gtgttttagcatatc

SEQ ID NO: 1366750 - DNA, 15 bp, Homo sapiens
agtgttttagcatat

SEQ ID NO: 1366751 - DNA, 15 bp, Homo sapiens
aagtgttttagcata

SEQ ID NO: 1366752 - DNA, 15 bp, Homo sapiens
aaagtgttttagcat

SEQ ID NO: 1366753 - DNA, 15 bp, Homo sapiens
taaagtgttttagca

SEQ ID NO: 1366754 - DNA, 15 bp, Homo sapiens
ttaaagtgttttagc

SEQ ID NO: 1366755 - DNA, 15 bp, Homo sapiens
tttaaagtgttttag

SEQ ID NO: 1366756 - DNA, 15 bp, Homo sapiens
ctttaaagtgtttta

SEQ ID NO: 1366757 - DNA, 15 bp, Homo sapiens
tctttaaagtgtttt

SEQ ID NO: 1366758 - DNA, 15 bp, Homo sapiens
ctctttaaagtgttt

SEQ ID NO: 1366759 - DNA, 15 bp, Homo sapiens
tctctttaaagtgtt

SEQ ID NO: 1366760 - DNA, 15 bp, Homo sapiens
ttctctttaaagtgt

SEQ ID NO: 1366761 - DNA, 15 bp, Homo sapiens
gttctctttaaagtg

SEQ ID NO: 1366762 - DNA, 15 bp, Homo sapiens
agttctctttaaagt

SEQ ID NO: 1366763 - DNA, 15 bp, Homo sapiens
tagttctctttaaag

SEQ ID NO: 1366764 - DNA, 15 bp, Homo sapiens
ctagttctctttaaa

SEQ ID NO: 1366765 - DNA, 15 bp, Homo sapiens
tctagttctctttaa

SEQ ID NO: 1366766 - DNA, 15 bp, Homo sapiens
atctagttctcttta

SEQ ID NO: 1366767 - DNA, 15 bp, Homo sapiens
catctagttctcttt

SEQ ID NO: 1366768 - DNA, 15 bp, Homo sapiens
tcatctagttctctt

SEQ ID NO: 1366769 - DNA, 15 bp, Homo sapiens
gtcatctagttctct

SEQ ID NO: 1366770 - DNA, 15 bp, Homo sapiens
agtcatctagttctc

SEQ ID NO: 1366771 - DNA, 15 bp, Homo sapiens
cagtcatctagttct

SEQ ID NO: 1366772 - DNA, 15 bp, Homo sapiens
gcagtcatctagttc

SEQ ID NO: 1366773 - DNA, 15 bp, Homo sapiens
ggcagtcatctagtt

SEQ ID NO: 1366774 - DNA, 15 bp, Homo sapiens
tggcagtcatctagt

SEQ ID NO: 1366775 - DNA, 15 bp, Homo sapiens
atggcagtcatctag

SEQ ID NO: 1366776 - DNA, 15 bp, Homo sapiens
catggcagtcatcta

SEQ ID NO: 1366777 - DNA, 15 bp, Homo sapiens
tcatggcagtcatct

SEQ ID NO: 1366778 - DNA, 15 bp, Homo sapiens
ttcatggcagtcatc

SEQ ID NO: 1366779 - DNA, 15 bp, Homo sapiens
tttcatggcagtcat

SEQ ID NO: 1366780 - DNA, 15 bp, Homo sapiens
gtttcatggcagtca

SEQ ID NO: 1366781 - DNA, 15 bp, Homo sapiens
tgtttcatggcagtc

SEQ ID NO: 1366782 - DNA, 15 bp, Homo sapiens
ttgtttcatggcagt

SEQ ID NO: 1366783 - DNA, 15 bp, Homo sapiens
attgtttcatggcag

SEQ ID NO: 1366784 - DNA, 15 bp, Homo sapiens
cattgtttcatggca

SEQ ID NO: 1366785 - DNA, 15 bp, Homo sapiens
tcattgtttcatggc

SEQ ID NO: 1366786 - DNA, 15 bp, Homo sapiens
ttcattgtttcatgg

SEQ ID NO: 1366787 - DNA, 15 bp, Homo sapiens
gttcattgtttcatg

SEQ ID NO: 1366788 - DNA, 15 bp, Homo sapiens
agttcattgtttcat

SEQ ID NO: 1366789 - DNA, 15 bp, Homo sapiens
cagttcattgtttca

SEQ ID NO: 1366790 - DNA, 15 bp, Homo sapiens
gcagttcattgtttc

SEQ ID NO: 1366791 - DNA, 15 bp, Homo sapiens
agcagttcattgttt

SEQ ID NO: 1366792 - DNA, 15 bp, Homo sapiens
cagcagttcattgtt

SEQ ID NO: 1366793 - DNA, 15 bp, Homo sapiens
tcagcagttcattgt

SEQ ID NO: 1366794 - DNA, 15 bp, Homo sapiens
atcagcagttcattg

SEQ ID NO: 1366795 - DNA, 15 bp, Homo sapiens
aatcagcagttcatt

SEQ ID NO: 1366796 - DNA, 15 bp, Homo sapiens
aaatcagcagttcat

SEQ ID NO: 1366797 - DNA, 15 bp, Homo sapiens
taaatcagcagttca

SEQ ID NO: 1366798 - DNA, 15 bp, Homo sapiens
ctaaatcagcagttc

SEQ ID NO: 1366799 - DNA, 15 bp, Homo sapiens
cctaaatcagcagtt

SEQ ID NO: 1366800 - DNA, 15 bp, Homo sapiens
tcctaaatcagcagt

SEQ ID NO: 1366801 - DNA, 15 bp, Homo sapiens
ctcctaaatcagcag

SEQ ID NO: 1366802 - DNA, 15 bp, Homo sapiens
tctcctaaatcagca

SEQ ID NO: 1366803 - DNA, 15 bp, Homo sapiens
ctctcctaaatcagc

SEQ ID NO: 1366804 - DNA, 15 bp, Homo sapiens
tctctcctaaatcag

SEQ ID NO: 1366805 - DNA, 15 bp, Homo sapiens
ttctctcctaaatca

SEQ ID NO: 1366806 - DNA, 15 bp, Homo sapiens
cttctctcctaaatc

SEQ ID NO: 1366807 - DNA, 15 bp, Homo sapiens
acttctctcctaaat

SEQ ID NO: 1366808 - DNA, 15 bp, Homo sapiens
cacttctctcctaaa

SEQ ID NO: 1366809 - DNA, 15 bp, Homo sapiens
acacttctctcctaa

SEQ ID NO: 1366810 - DNA, 15 bp, Homo sapiens
cacacttctctccta

SEQ ID NO: 1366811 - DNA, 15 bp, Homo sapiens
tcacacttctctcct

SEQ ID NO: 1366812 - DNA, 15 bp, Homo sapiens
atcacacttctctcc

SEQ ID NO: 1366813 - DNA, 15 bp, Homo sapiens
tatcacacttctctc

SEQ ID NO: 1366814 - DNA, 15 bp, Homo sapiens
ttatcacacttctct

SEQ ID NO: 1366815 - DNA, 15 bp, Homo sapiens
tttatcacacttctc

SEQ ID NO: 1366816 - DNA, 15 bp, Homo sapiens
atttatcacacttct

SEQ ID NO: 1366817 - DNA, 15 bp, Homo sapiens
tatttatcacacttc

SEQ ID NO: 1366818 - DNA, 15 bp, Homo sapiens
ttatttatcacactt

SEQ ID NO: 1366819 - DNA, 15 bp, Homo sapiens
attatttatcacact

SEQ ID NO: 1366820 - DNA, 15 bp, Homo sapiens
tattatttatcacac

SEQ ID NO: 1366821 - DNA, 15 bp, Homo sapiens
ttattatttatcaca

SEQ ID NO: 1366822 - DNA, 15 bp, Homo sapiens
tttattatttatcac

SEQ ID NO: 1366823 - DNA, 15 bp, Homo sapiens
atttattatttatca

SEQ ID NO: 1366824 - DNA, 15 bp, Homo sapiens
tatttattatttatc

SEQ ID NO: 1366825 - DNA, 15 bp, Homo sapiens
ttatttattatttat

SEQ ID NO: 1366826 - DNA, 15 bp, Homo sapiens
attatttattattta

SEQ ID NO: 1366827 - DNA, 15 bp, Homo sapiens
aattatttattattt

SEQ ID NO: 1366828 - DNA, 15 bp, Homo sapiens
aaattatttattatt

SEQ ID NO: 1366829 - DNA, 15 bp, Homo sapiens
aaaattatttattat

SEQ ID NO: 1366830 - DNA, 15 bp, Homo sapiens
caaaattatttatta

SEQ ID NO: 1366831 - DNA, 15 bp, Homo sapiens
gcaaaattatttatt

SEQ ID NO: 1366832 - DNA, 15 bp, Homo sapiens
tgcaaaattatttat

SEQ ID NO: 1366833 - DNA, 15 bp, Homo sapiens
gtgcaaaattattta

SEQ ID NO: 1366834 - DNA, 15 bp, Homo sapiens
ggtgcaaaattattt

SEQ ID NO: 1366835 - DNA, 15 bp, Homo sapiens
tggtgcaaaattatt

SEQ ID NO: 1366836 - DNA, 15 bp, Homo sapiens
ttggtgcaaaattat

SEQ ID NO: 1366837 - DNA, 15 bp, Homo sapiens
tttggtgcaaaatta

SEQ ID NO: 1366838 - DNA, 15 bp, Homo sapiens
ttttggtgcaaaatt

SEQ ID NO: 1366839 - DNA, 15 bp, Homo sapiens
attttggtgcaaaat

SEQ ID NO: 1366840 - DNA, 15 bp, Homo sapiens
tattttggtgcaaaa

SEQ ID NO: 1366841 - DNA, 15 bp, Homo sapiens
atattttggtgcaaa

SEQ ID NO: 1366842 - DNA, 15 bp, Homo sapiens
tatattttggtgcaa

SEQ ID NO: 1366843 - DNA, 15 bp, Homo sapiens
atatattttggtgca

SEQ ID NO: 1366844 - DNA, 15 bp, Homo sapiens
tatatattttggtgc

SEQ ID NO: 1366845 - DNA, 15 bp, Homo sapiens
ttatatattttggtg

SEQ ID NO: 1366846 - DNA, 15 bp, Homo sapiens
tttatatattttggt

SEQ ID NO: 1366847 - DNA, 15 bp, Homo sapiens
ttttatatattttgg

SEQ ID NO: 1366848 - DNA, 15 bp, Homo sapiens
cttttatatattttg

SEQ ID NO: 1366849 - DNA, 15 bp, Homo sapiens
gcttttatatatttt

SEQ ID NO: 1366850 - DNA, 15 bp, Homo sapiens
tgcttttatatattt

SEQ ID NO: 1366851 - DNA, 15 bp, Homo sapiens
atgcttttatatatt

SEQ ID NO: 1366852 - DNA, 15 bp, Homo sapiens
gatgcttttatatat

SEQ ID NO: 1366853 - DNA, 15 bp, Homo sapiens
tgatgcttttatata

SEQ ID NO: 1366854 - DNA, 15 bp, Homo sapiens
atgatgcttttatat

SEQ ID NO: 1366855 - DNA, 15 bp, Homo sapiens
aatgatgcttttata

SEQ ID NO: 1366856 - DNA, 15 bp, Homo sapiens
caatgatgcttttat

SEQ ID NO: 1366857 - DNA, 15 bp, Homo sapiens
tcaatgatgctttta

SEQ ID NO: 1366858 - DNA, 15 bp, Homo sapiens
ttcaatgatgctttt

SEQ ID NO: 1366859 - DNA, 15 bp, Homo sapiens
cttcaatgatgcttt

SEQ ID NO: 1366860 - DNA, 15 bp, Homo sapiens
ccttcaatgatgctt

SEQ ID NO: 1366861 - DNA, 15 bp, Homo sapiens
tccttcaatgatgct

SEQ ID NO: 1366862 - DNA, 15 bp, Homo sapiens
ttccttcaatgatgc

SEQ ID NO: 1366863 - DNA, 15 bp, Homo sapiens
cttccttcaatgatg

SEQ ID NO: 1366864 - DNA, 15 bp, Homo sapiens
tcttccttcaatgat

SEQ ID NO: 1366865 - DNA, 15 bp, Homo sapiens
ctcttccttcaatga

SEQ ID NO: 1366866 - DNA, 15 bp, Homo sapiens
cctcttccttcaatg

SEQ ID NO: 1366867 - DNA, 15 bp, Homo sapiens
tcctcttccttcaat

SEQ ID NO: 1366868 - DNA, 15 bp, Homo sapiens
ctcctcttccttcaa

SEQ ID NO: 1366869 - DNA, 15 bp, Homo sapiens
tctcctcttccttca

SEQ ID NO: 1366870 - DNA, 15 bp, Homo sapiens
ctctcctcttccttc

SEQ ID NO: 1366871 - DNA, 15 bp, Homo sapiens
cctctcctcttcctt

SEQ ID NO: 1366872 - DNA, 15 bp, Homo sapiens
ccctctcctcttcct

SEQ ID NO: 1366873 - DNA, 15 bp, Homo sapiens
tccctctcctcttcc

SEQ ID NO: 1366874 - DNA, 15 bp, Homo sapiens
atccctctcctcttc

SEQ ID NO: 1366875 - DNA, 15 bp, Homo sapiens
tatccctctcctctt

SEQ ID NO: 1366876 - DNA, 15 bp, Homo sapiens
ttatccctctcctct

SEQ ID NO: 1366877 - DNA, 15 bp, Homo sapiens
cttatccctctcctc

SEQ ID NO: 1366878 - DNA, 15 bp, Homo sapiens
tcttatccctctcct

SEQ ID NO: 1366879 - DNA, 15 bp, Homo sapiens
ctcttatccctctcc

SEQ ID NO: 1366880 - DNA, 15 bp, Homo sapiens
cctcttatccctctc

SEQ ID NO: 1366881 - DNA, 15 bp, Homo sapiens
tcctcttatccctct

SEQ ID NO: 1366882 - DNA, 15 bp, Homo sapiens
ttcctcttatccctc

SEQ ID NO: 1366883 - DNA, 15 bp, Homo sapiens
cttcctcttatccct

SEQ ID NO: 1366884 - DNA, 15 bp, Homo sapiens
tcttcctcttatccc

SEQ ID NO: 1366885 - DNA, 15 bp, Homo sapiens
ctcttcctcttatcc

SEQ ID NO: 1366886 - DNA, 15 bp, Homo sapiens
cctcttcctcttatc

SEQ ID NO: 1366887 - DNA, 15 bp, Homo sapiens
tcctcttcctcttat

SEQ ID NO: 1366888 - DNA, 15 bp, Homo sapiens
ctcctcttcctctta

SEQ ID NO: 1366889 - DNA, 15 bp, Homo sapiens
tctcctcctcttcct

SEQ ID NO: 1366890 - DNA, 15 bp, Homo sapiens
ttctcctcctcttcc

SEQ ID NO: 1366891 - DNA, 15 bp, Homo sapiens
attctcctcctcttc

SEQ ID NO: 1366892 - DNA, 15 bp, Homo sapiens
cattctcctcctctt

SEQ ID NO: 1366893 - DNA, 15 bp, Homo sapiens
tcattctcctcctct

SEQ ID NO: 1366894 - DNA, 15 bp, Homo sapiens
ctcattctcctcctc

SEQ ID NO: 1366895 - DNA, 15 bp, Homo sapiens
tctcattctcctcct

SEQ ID NO: 1366896 - DNA, 15 bp, Homo sapiens
ttctcattctcctcc

SEQ ID NO: 1366897 - DNA, 15 bp, Homo sapiens
cttctcattctcctc

SEQ ID NO: 1366898 - DNA, 15 bp, Homo sapiens
ccttctcattctcct

SEQ ID NO: 1366899 - DNA, 15 bp, Homo sapiens
tccttctcattctcc

SEQ ID NO: 1366900 - DNA, 15 bp, Homo sapiens
ttccttctcattctc

SEQ ID NO: 1366901 - DNA, 15 bp, Homo sapiens
cttccttctcattct

SEQ ID NO: 1366902 - DNA, 15 bp, Homo sapiens
tcttccttctcattc

SEQ ID NO: 1366903 - DNA, 15 bp, Homo sapiens
ttcttccttctcatt

SEQ ID NO: 1366904 - DNA, 15 bp, Homo sapiens
cttcttccttctcat

SEQ ID NO: 1366905 - DNA, 15 bp, Homo sapiens
ccttcttccttctca

SEQ ID NO: 1366906 - DNA, 15 bp, Homo sapiens
tccttcttccttctc

SEQ ID NO: 1366907 - DNA, 15 bp, Homo sapiens
ttccttcttccttct

SEQ ID NO: 1366908 - DNA, 15 bp, Homo sapiens
cttccttcttccttc

SEQ ID NO: 1366909 - DNA, 15 bp, Homo sapiens
tcttccttcttcctt

SEQ ID NO: 1366910 - DNA, 15 bp, Homo sapiens
ctcttccttcttcct

SEQ ID NO: 1366911 - DNA, 15 bp, Homo sapiens
tctcttccttcttcc

SEQ ID NO: 1366912 - DNA, 15 bp, Homo sapiens
ttctcttccttcttc

SEQ ID NO: 1366913 - DNA, 15 bp, Homo sapiens
tttctcttccttctt

SEQ ID NO: 1366914 - DNA, 15 bp, Homo sapiens
ctttctcttccttct

SEQ ID NO: 1366915 - DNA, 15 bp, Homo sapiens
tctttctcttccttc

SEQ ID NO: 1366916 - DNA, 15 bp, Homo sapiens
ctctttctcttcctt

SEQ ID NO: 1366917 - DNA, 15 bp, Homo sapiens
cctctttctcttcct

SEQ ID NO: 1366918 - DNA, 15 bp, Homo sapiens
ccctctttctcttcc

SEQ ID NO: 1366919 - DNA, 15 bp, Homo sapiens
tccctctttctcttc

SEQ ID NO: 1366920 - DNA, 15 bp, Homo sapiens
ctccctctttctctt

SEQ ID NO: 1366921 - DNA, 15 bp, Homo sapiens
cctccctctttctct

SEQ ID NO: 1366922 - DNA, 15 bp, Homo sapiens
ccctccctctttctc

SEQ ID NO: 1366923 - DNA, 15 bp, Homo sapiens
tccctccctctttct

SEQ ID NO: 1366924 - DNA, 15 bp, Homo sapiens
ctccctccctctttc

SEQ ID NO: 1366925 - DNA, 15 bp, Homo sapiens
actccctccctcttt

SEQ ID NO: 1366926 - DNA, 15 bp, Homo sapiens
cactccctccctctt

SEQ ID NO: 1366927 - DNA, 15 bp, Homo sapiens
tcactccctccctct

SEQ ID NO: 1366928 - DNA, 15 bp, Homo sapiens
ctcactccctccctc

SEQ ID NO: 1366929 - DNA, 15 bp, Homo sapiens
cctcactccctccct

SEQ ID NO: 1366930 - DNA, 15 bp, Homo sapiens
ccctcactccctccc

SEQ ID NO: 1366931 - DNA, 15 bp, Homo sapiens
tccctcactccctcc

SEQ ID NO: 1366932 - DNA, 15 bp, Homo sapiens
ttccctcactccctc

SEQ ID NO: 1366933 - DNA, 15 bp, Homo sapiens
cttccctcactccct

SEQ ID NO: 1366934 - DNA, 15 bp, Homo sapiens
tcttccctcactccc

SEQ ID NO: 1366935 - DNA, 15 bp, Homo sapiens
ttcttccctcactcc

SEQ ID NO: 1366936 - DNA, 15 bp, Homo sapiens
gttcttccctcactc

SEQ ID NO: 1366937 - DNA, 15 bp, Homo sapiens
agttcttccctcact

SEQ ID NO: 1366938 - DNA, 15 bp, Homo sapiens
cagttcttccctcac

SEQ ID NO: 1366939 - DNA, 15 bp, Homo sapiens
tcagttcttccctca

SEQ ID NO: 1366940 - DNA, 15 bp, Homo sapiens
ctcagttcttccctc

SEQ ID NO: 1366941 - DNA, 15 bp, Homo sapiens
tctcagttcttccct

SEQ ID NO: 1366942 - DNA, 15 bp, Homo sapiens
gtctcagttcttccc

SEQ ID NO: 1366943 - DNA, 15 bp, Homo sapiens
tgtctcagttcttcc

SEQ ID NO: 1366944 - DNA, 15 bp, Homo sapiens
ttgtctcagttcttc

SEQ ID NO: 1366945 - DNA, 15 bp, Homo sapiens
attgtctcagttctt

SEQ ID NO: 1366946 - DNA, 15 bp, Homo sapiens
cattgtctcagttct

SEQ ID NO: 1366947 - DNA, 15 bp, Homo sapiens
ccattgtctcagttc

SEQ ID NO: 1366948 - DNA, 15 bp, Homo sapiens
cccattgtctcagtt

SEQ ID NO: 1366949 - DNA, 15 bp, Homo sapiens
ccccattgtctcagt

SEQ ID NO: 1366950 - DNA, 15 bp, Homo sapiens
tccccattgtctcag

SEQ ID NO: 1366951 - DNA, 15 bp, Homo sapiens
atccccattgtctca

SEQ ID NO: 1366952 - DNA, 15 bp, Homo sapiens
catccccattgtctc

SEQ ID NO: 1366953 - DNA, 15 bp, Homo sapiens
acatccccattgtct

SEQ ID NO: 1366954 - DNA, 15 bp, Homo sapiens
tacatccccattgtc

SEQ ID NO: 1366955 - DNA, 15 bp, Homo sapiens
ctacatccccattgt

SEQ ID NO: 1366956 - DNA, 15 bp, Homo sapiens
tctacatccccattg

SEQ ID NO: 1366957 - DNA, 15 bp, Homo sapiens
atctacatccccatt

SEQ ID NO: 1366958 - DNA, 15 bp, Homo sapiens
aatctacatccccat

SEQ ID NO: 1366959 - DNA, 15 bp, Homo sapiens
aaatctacatcccca

SEQ ID NO: 1366960 - DNA, 15 bp, Homo sapiens
aaaatctacatcccc

SEQ ID NO: 1366961 - DNA, 15 bp, Homo sapiens
aaaaatctacatccc

SEQ ID NO: 1366962 - DNA, 15 bp, Homo sapiens
caaaaatctacatcc

SEQ ID NO: 1366963 - DNA, 15 bp, Homo sapiens
acaaaaatctacatc

SEQ ID NO: 1366964 - DNA, 15 bp, Homo sapiens
gacaaaaatctacat

SEQ ID NO: 1366965 - DNA, 15 bp, Homo sapiens
ggacaaaaatctaca

SEQ ID NO: 1366966 - DNA, 15 bp, Homo sapiens
aggacaaaaatctac

SEQ ID NO: 1366967 - DNA, 15 bp, Homo sapiens
gaggacaaaaatcta

SEQ ID NO: 1366968 - DNA, 15 bp, Homo sapiens
agaggacaaaaatct

SEQ ID NO: 1366969 - DNA, 15 bp, Homo sapiens
cagaggacaaaaatc

SEQ ID NO: 1366970 - DNA, 15 bp, Homo sapiens
tcagaggacaaaaat

SEQ ID NO: 1366971 - DNA, 15 bp, Homo sapiens
gtcagaggacaaaaa

SEQ ID NO: 1366972 - DNA, 15 bp, Homo sapiens
tgtcagaggacaaaa

SEQ ID NO: 1366973 - DNA, 15 bp, Homo sapiens
atgtcagaggacaaa

SEQ ID NO: 1366974 - DNA, 15 bp, Homo sapiens
catgtcagaggacaa

SEQ ID NO: 1366975 - DNA, 15 bp, Homo sapiens
gcatgtcagaggaca

SEQ ID NO: 1366976 - DNA, 15 bp, Homo sapiens
tgcatgtcagaggac

SEQ ID NO: 1366977 - DNA, 15 bp, Homo sapiens
gtgcatgtcagagga

SEQ ID NO: 1366978 - DNA, 15 bp, Homo sapiens
agtgcatgtcagagg

SEQ ID NO: 1366979 - DNA, 15 bp, Homo sapiens
gagtgcatgtcagag

SEQ ID NO: 1366980 - DNA, 15 bp, Homo sapiens
agagtgcatgtcaga

SEQ ID NO: 1366981 - DNA, 15 bp, Homo sapiens
aagagtgcatgtcag

SEQ ID NO: 1366982 - DNA, 15 bp, Homo sapiens
gaagagtgcatgtca

SEQ ID NO: 1366983 - DNA, 15 bp, Homo sapiens
agaagagtgcatgtc

SEQ ID NO: 1366984 - DNA, 15 bp, Homo sapiens
aagaagagtgcatgt

SEQ ID NO: 1366985 - DNA, 15 bp, Homo sapiens
gaagaagagtgcatg

SEQ ID NO: 1366986 - DNA, 15 bp, Homo sapiens
agaagaagagtgcat

SEQ ID NO: 1366987 - DNA, 15 bp, Homo sapiens
aagaagaagagtgca

SEQ ID NO: 1366988 - DNA, 15 bp, Homo sapiens
aaagaagaagagtgc

SEQ ID NO: 1366989 - DNA, 15 bp, Homo sapiens
taaagaagaagagtg

SEQ ID NO: 1366990 - DNA, 15 bp, Homo sapiens
gtaaagaagaagagt

SEQ ID NO: 1366991 - DNA, 15 bp, Homo sapiens
tgtaaagaagaagag

SEQ ID NO: 1366992 - DNA, 15 bp, Homo sapiens
gtgtaaagaagaaga

SEQ ID NO: 1366993 - DNA, 15 bp, Homo sapiens
agtgtaaagaagaag

SEQ ID NO: 1366994 - DNA, 15 bp, Homo sapiens
aagtgtaaagaagaa

SEQ ID NO: 1366995 - DNA, 15 bp, Homo sapiens
taagtgtaaagaaga

SEQ ID NO: 1366996 - DNA, 15 bp, Homo sapiens
gtaagtgtaaagaag

SEQ ID NO: 1366997 - DNA, 15 bp, Homo sapiens
agtaagtgtaaagaa

SEQ ID NO: 1366998 - DNA, 15 bp, Homo sapiens
tagtaagtgtaaaga

SEQ ID NO: 1366999 - DNA, 15 bp, Homo sapiens
gtagtaagtgtaaag

SEQ ID NO: 1367000 - DNA, 15 bp, Homo sapiens
agtagtaagtgtaaa

SEQ ID NO: 1367001 - DNA, 15 bp, Homo sapiens
aagtagtaagtgtaa

SEQ ID NO: 1367002 - DNA, 15 bp, Homo sapiens
aaagtagtaagtgta

SEQ ID NO: 1367003 - DNA, 15 bp, Homo sapiens
caaagtagtaagtgt

SEQ ID NO: 1367004 - DNA, 15 bp, Homo sapiens
ccaaagtagtaagtg

SEQ ID NO: 1367005 - DNA, 15 bp, Homo sapiens
cccaaagtagtaagt

SEQ ID NO: 1367006 - DNA, 15 bp, Homo sapiens
tcccaaagtagtaag

SEQ ID NO: 1367007 - DNA, 15 bp, Homo sapiens
ttcccaaagtagtaa

SEQ ID NO: 1367008 - DNA, 15 bp, Homo sapiens
tttcccaaagtagta

SEQ ID NO: 1367009 - DNA, 15 bp, Homo sapiens
ttttcccaaagtagt

SEQ ID NO: 1367010 - DNA, 15 bp, Homo sapiens
attttcccaaagtag

SEQ ID NO: 1367011 - DNA, 15 bp, Homo sapiens
aattttcccaaagta

SEQ ID NO: 1367012 - DNA, 15 bp, Homo sapiens
taattttcccaaagt

SEQ ID NO: 1367013 - DNA, 15 bp, Homo sapiens
ctaattttcccaaag

SEQ ID NO: 1367014 - DNA, 15 bp, Homo sapiens
gctaattttcccaaa

SEQ ID NO: 1367015 - DNA, 15 bp, Homo sapiens
ggctaattttcccaa

SEQ ID NO: 1367016 - DNA, 15 bp, Homo sapiens
aggctaattttccca

SEQ ID NO: 1367017 - DNA, 15 bp, Homo sapiens
aaggctaattttccc

SEQ ID NO: 1367018 - DNA, 15 bp, Homo sapiens
caaggctaattttcc

SEQ ID NO: 1367019 - DNA, 15 bp, Homo sapiens
ccaaggctaattttc

SEQ ID NO: 1367020 - DNA, 15 bp, Homo sapiens
tccaaggctaatttt

SEQ ID NO: 1367021 - DNA, 15 bp, Homo sapiens
atccaaggctaattt

SEQ ID NO: 1367022 - DNA, 15 bp, Homo sapiens
aatccaaggctaatt

SEQ ID NO: 1367023 - DNA, 15 bp, Homo sapiens
taatccaaggctaat

SEQ ID NO: 1367024 - DNA, 15 bp, Homo sapiens
ataatccaaggctaa

SEQ ID NO: 1367025 - DNA, 15 bp, Homo sapiens
aataatccaaggcta

SEQ ID NO: 1367026 - DNA, 15 bp, Homo sapiens
aaataatccaaggct

SEQ ID NO: 1367027 - DNA, 15 bp, Homo sapiens
taaataatccaaggc

SEQ ID NO: 1367028 - DNA, 15 bp, Homo sapiens
ttaaataatccaagg

SEQ ID NO: 1367029 - DNA, 15 bp, Homo sapiens
tttaaataatccaag

SEQ ID NO: 1367030 - DNA, 15 bp, Homo sapiens
atttaaataatccaa

SEQ ID NO: 1367031 - DNA, 15 bp, Homo sapiens
aatttaaataatcca

SEQ ID NO: 1367032 - DNA, 15 bp, Homo sapiens
taatttaaataatcc

SEQ ID NO: 1367033 - DNA, 15 bp, Homo sapiens
ataatttaaataatc

SEQ ID NO: 1367034 - DNA, 15 bp, Homo sapiens
cataatttaaataat

SEQ ID NO: 1367035 - DNA, 15 bp, Homo sapiens
acataatttaaataa

SEQ ID NO: 1367036 - DNA, 15 bp, Homo sapiens
aacataatttaaata

SEQ ID NO: 1367037 - DNA, 15 bp, Homo sapiens
aaacataatttaaat

SEQ ID NO: 1367038 - DNA, 15 bp, Homo sapiens
aaaacataatttaaa

SEQ ID NO: 1367039 - DNA, 15 bp, Homo sapiens
taaaacataatttaa

SEQ ID NO: 1367040 - DNA, 15 bp, Homo sapiens
ataaaacataattta

SEQ ID NO: 1367041 - DNA, 15 bp, Homo sapiens
cataaaacataattt

SEQ ID NO: 1367042 - DNA, 15 bp, Homo sapiens
gcataaaacataatt

SEQ ID NO: 1367043 - DNA, 15 bp, Homo sapiens
tgcataaaacataat

SEQ ID NO: 1367044 - DNA, 15 bp, Homo sapiens
ttgcataaaacataa

SEQ ID NO: 1367045 - DNA, 15 bp, Homo sapiens
tttgcataaaacata

SEQ ID NO: 1367046 - DNA, 15 bp, Homo sapiens
ctttgcataaaacat

SEQ ID NO: 1367047 - DNA, 15 bp, Homo sapiens
actttgcataaaaca

SEQ ID NO: 1367048 - DNA, 15 bp, Homo sapiens
gactttgcataaaac

SEQ ID NO: 1367049 - DNA, 15 bp, Homo sapiens
tgactttgcataaaa

SEQ ID NO: 1367050 - DNA, 15 bp, Homo sapiens
atgactttgcataaa

SEQ ID NO: 1367051 - DNA, 15 bp, Homo sapiens
aatgactttgcataa

SEQ ID NO: 1367052 - DNA, 15 bp, Homo sapiens
taatgactttgcata

SEQ ID NO: 1367053 - DNA, 15 bp, Homo sapiens
ttaatgactttgcat

SEQ ID NO: 1367054 - DNA, 15 bp, Homo sapiens
attaatgactttgca

SEQ ID NO: 1367055 - DNA, 15 bp, Homo sapiens
tattaatgactttgc

SEQ ID NO: 1367056 - DNA, 15 bp, Homo sapiens
ttattaatgactttg

SEQ ID NO: 1367057 - DNA, 15 bp, Homo sapiens
gttattaatgacttt

SEQ ID NO: 1367058 - DNA, 15 bp, Homo sapiens
tgttattaatgactt

SEQ ID NO: 1367059 - DNA, 15 bp, Homo sapiens
ttgttattaatgact

SEQ ID NO: 1367060 - DNA, 15 bp, Homo sapiens
tttgttattaatgac

SEQ ID NO: 1367061 - DNA, 15 bp, Homo sapiens
gtttgttattaatga

SEQ ID NO: 1367062 - DNA, 15 bp, Homo sapiens
ggtttgttattaatg

SEQ ID NO: 1367063 - DNA, 15 bp, Homo sapiens
tggtttgttattaat

SEQ ID NO: 1367064 - DNA, 15 bp, Homo sapiens
gtggtttgttattaa

SEQ ID NO: 1367065 - DNA, 15 bp, Homo sapiens
agtggtttgttatta

SEQ ID NO: 1367066 - DNA, 15 bp, Homo sapiens
gagtggtttgttatt

SEQ ID NO: 1367067 - DNA, 15 bp, Homo sapiens
tgagtggtttgttat

SEQ ID NO: 1367068 - DNA, 15 bp, Homo sapiens
gtgagtggtttgtta

SEQ ID NO: 1367069 - DNA, 15 bp, Homo sapiens
tgtgagtggtttgtt

SEQ ID NO: 1367070 - DNA, 15 bp, Homo sapiens
atgtgagtggtttgt

SEQ ID NO: 1367071 - DNA, 15 bp, Homo sapiens
tatgtgagtggtttg

SEQ ID NO: 1367072 - DNA, 15 bp, Homo sapiens
ttatgtgagtggttt

SEQ ID NO: 1367073 - DNA, 15 bp, Homo sapiens
tttatgtgagtggtt

SEQ ID NO: 1367074 - DNA, 15 bp, Homo sapiens
ttttatgtgagtggt

SEQ ID NO: 1367075 - DNA, 15 bp, Homo sapiens
attttatgtgagtgg

SEQ ID NO: 1367076 - DNA, 15 bp, Homo sapiens
tattttatgtgagtg

SEQ ID NO: 1367077 - DNA, 15 bp, Homo sapiens
ttattttatgtgagt

SEQ ID NO: 1367078 - DNA, 15 bp, Homo sapiens
cttattttatgtgag

SEQ ID NO: 1367079 - DNA, 15 bp, Homo sapiens
tcttattttatgtga

SEQ ID NO: 1367080 - DNA, 15 bp, Homo sapiens
atcttattttatgtg

SEQ ID NO: 1367081 - DNA, 15 bp, Homo sapiens
aatcttattttatgt

SEQ ID NO: 1367082 - DNA, 15 bp, Homo sapiens
aaatcttattttatg

SEQ ID NO: 1367083 - DNA, 15 bp, Homo sapiens
gaaatcttattttat

SEQ ID NO: 1367084 - DNA, 15 bp, Homo sapiens
ggaaatcttatttta

SEQ ID NO: 1367085 - DNA, 15 bp, Homo sapiens
gggaaatcttatttt

SEQ ID NO: 1367086 - DNA, 15 bp, Homo sapiens
agggaaatcttattt

SEQ ID NO: 1367087 - DNA, 15 bp, Homo sapiens
aagggaaatcttatt

SEQ ID NO: 1367088 - DNA, 15 bp, Homo sapiens
aaagggaaatcttat

SEQ ID NO: 1367089 - DNA, 15 bp, Homo sapiens
gaaagggaaatctta

SEQ ID NO: 1367090 - DNA, 15 bp, Homo sapiens
agaaagggaaatctt

SEQ ID NO: 1367091 - DNA, 15 bp, Homo sapiens
tagaaagggaaatct

SEQ ID NO: 1367092 - DNA, 15 bp, Homo sapiens
ttagaaagggaaatc

SEQ ID NO: 1367093 - DNA, 15 bp, Homo sapiens
tttagaaagggaaat

SEQ ID NO: 1367094 - DNA, 15 bp, Homo sapiens
atttagaaagggaaa

SEQ ID NO: 1367095 - DNA, 15 bp, Homo sapiens
gatttagaaagggaa

SEQ ID NO: 1367096 - DNA, 15 bp, Homo sapiens
tgatttagaaaggga

SEQ ID NO: 1367097 - DNA, 15 bp, Homo sapiens
ttgatttagaaaggg

SEQ ID NO: 1367098 - DNA, 15 bp, Homo sapiens
attgatttagaaagg

SEQ ID NO: 1367099 - DNA, 15 bp, Homo sapiens
cattgatttagaaag

SEQ ID NO: 1367100 - DNA, 15 bp, Homo sapiens
gcattgatttagaaa

SEQ ID NO: 1367101 - DNA, 15 bp, Homo sapiens
tgcattgatttagaa

SEQ ID NO: 1367102 - DNA, 15 bp, Homo sapiens
ctgcattgatttaga

SEQ ID NO: 1367103 - DNA, 15 bp, Homo sapiens
actgcattgatttag

SEQ ID NO: 1367104 - DNA, 15 bp, Homo sapiens
gactgcattgattta

SEQ ID NO: 1367105 - DNA, 15 bp, Homo sapiens
tgactgcattgattt

SEQ ID NO: 1367106 - DNA, 15 bp, Homo sapiens
ctgactgcattgatt

SEQ ID NO: 1367107 - DNA, 15 bp, Homo sapiens
tctgactgcattgat

SEQ ID NO: 1367108 - DNA, 15 bp, Homo sapiens
atctgactgcattga

SEQ ID NO: 1367109 - DNA, 15 bp, Homo sapiens
aatctgactgcattg

SEQ ID NO: 1367110 - DNA, 15 bp, Homo sapiens
gaatctgactgcatt

SEQ ID NO: 1367111 - DNA, 15 bp, Homo sapiens
tgaatctgactgcat

SEQ ID NO: 1367112 - DNA, 15 bp, Homo sapiens
ctgaatctgactgca

SEQ ID NO: 1367113 - DNA, 15 bp, Homo sapiens
gctgaatctgactgc

SEQ ID NO: 1367114 - DNA, 15 bp, Homo sapiens
tgctgaatctgactg

SEQ ID NO: 1367115 - DNA, 15 bp, Homo sapiens
gtgctgaatctgact

SEQ ID NO: 1367116 - DNA, 15 bp, Homo sapiens
agtgctgaatctgac

SEQ ID NO: 1367117 - DNA, 15 bp, Homo sapiens
tagtgctgaatctga

SEQ ID NO: 1367118 - DNA, 15 bp, Homo sapiens
atagtgctgaatctg

SEQ ID NO: 1367119 - DNA, 15 bp, Homo sapiens
catagtgctgaatct

SEQ ID NO: 1367120 - DNA, 15 bp, Homo sapiens
ccatagtgctgaatc

SEQ ID NO: 1367121 - DNA, 15 bp, Homo sapiens
tccatagtgctgaat

SEQ ID NO: 1367122 - DNA, 15 bp, Homo sapiens
atccatagtgctgaa

SEQ ID NO: 1367123 - DNA, 15 bp, Homo sapiens
tatccatagtgctga

SEQ ID NO: 1367124 - DNA, 15 bp, Homo sapiens
ctatccatagtgctg

SEQ ID NO: 1367125 - DNA, 15 bp, Homo sapiens
actatccatagtgct

SEQ ID NO: 1367126 - DNA, 15 bp, Homo sapiens
aactatccatagtgc

SEQ ID NO: 1367127 - DNA, 15 bp, Homo sapiens
gaactatccatagtg

SEQ ID NO: 1367128 - DNA, 15 bp, Homo sapiens
tgaactatccatagt

SEQ ID NO: 1367129 - DNA, 15 bp, Homo sapiens
gtgaactatccatag

SEQ ID NO: 1367130 - DNA, 15 bp, Homo sapiens
agtgaactatccata

SEQ ID NO: 1367131 - DNA, 15 bp, Homo sapiens
gagtgaactatccat

SEQ ID NO: 1367132 - DNA, 15 bp, Homo sapiens
tgagtgaactatcca

SEQ ID NO: 1367133 - DNA, 15 bp, Homo sapiens
atgagtgaactatcc

SEQ ID NO: 1367134 - DNA, 15 bp, Homo sapiens
catgagtgaactatc

SEQ ID NO: 1367135 - DNA, 15 bp, Homo sapiens
ccatgagtgaactat

SEQ ID NO: 1367136 - DNA, 15 bp, Homo sapiens
tccatgagtgaacta

SEQ ID NO: 1367137 - DNA, 15 bp, Homo sapiens
ttccatgagtgaact

SEQ ID NO: 1367138 - DNA, 15 bp, Homo sapiens
cttccatgagtgaac

SEQ ID NO: 1367139 - DNA, 15 bp, Homo sapiens
tcttccatgagtgaa

SEQ ID NO: 1367140 - DNA, 15 bp, Homo sapiens
atcttccatgagtga

SEQ ID NO: 1367141 - DNA, 15 bp, Homo sapiens
aatcttccatgagtg

SEQ ID NO: 1367142 - DNA, 15 bp, Homo sapiens
caatcttccatgagt

SEQ ID NO: 1367143 - DNA, 15 bp, Homo sapiens
tcaatcttccatgag

SEQ ID NO: 1367144 - DNA, 15 bp, Homo sapiens
ttcaatcttccatga

SEQ ID NO: 1367145 - DNA, 15 bp, Homo sapiens
attcaatcttccatg

SEQ ID NO: 1367146 - DNA, 15 bp, Homo sapiens
gattcaatcttccat

SEQ ID NO: 1367147 - DNA, 15 bp, Homo sapiens
tgattcaatcttcca

SEQ ID NO: 1367148 - DNA, 15 bp, Homo sapiens
atgattcaatcttcc

SEQ ID NO: 1367149 - DNA, 15 bp, Homo sapiens
catgattcaatcttc

SEQ ID NO: 1367150 - DNA, 15 bp, Homo sapiens
tcatgattcaatctt

SEQ ID NO: 1367151 - DNA, 15 bp, Homo sapiens
gtcatgattcaatct

SEQ ID NO: 1367152 - DNA, 15 bp, Homo sapiens
tgtcatgattcaatc

SEQ ID NO: 1367153 - DNA, 15 bp, Homo sapiens
atgtcatgattcaat

SEQ ID NO: 1367154 - DNA, 15 bp, Homo sapiens
catgtcatgattcaa

SEQ ID NO: 1367155 - DNA, 15 bp, Homo sapiens
ccatgtcatgattca

SEQ ID NO: 1367156 - DNA, 15 bp, Homo sapiens
accatgtcatgattc

SEQ ID NO: 1367157 - DNA, 15 bp, Homo sapiens
caccatgtcatgatt

SEQ ID NO: 1367158 - DNA, 15 bp, Homo sapiens
acaccatgtcatgat

SEQ ID NO: 1367159 - DNA, 15 bp, Homo sapiens
tacaccatgtcatga

SEQ ID NO: 1367160 - DNA, 15 bp, Homo sapiens
gtacaccatgtcatg

SEQ ID NO: 1367161 - DNA, 15 bp, Homo sapiens
agtacaccatgtcat

SEQ ID NO: 1367162 - DNA, 15 bp, Homo sapiens
tagtacaccatgtca

SEQ ID NO: 1367163 - DNA, 15 bp, Homo sapiens
ttagtacaccatgtc

SEQ ID NO: 1367164 - DNA, 15 bp, Homo sapiens
tttagtacaccatgt

SEQ ID NO: 1367165 - DNA, 15 bp, Homo sapiens
ctttagtacaccatg

SEQ ID NO: 1367166 - DNA, 15 bp, Homo sapiens
cctttagtacaccat

SEQ ID NO: 1367167 - DNA, 15 bp, Homo sapiens
acctttagtacacca

SEQ ID NO: 1367168 - DNA, 15 bp, Homo sapiens
aacctttagtacacc

SEQ ID NO: 1367169 - DNA, 15 bp, Homo sapiens
caacctttagtacac

SEQ ID NO: 1367170 - DNA, 15 bp, Homo sapiens
ccaacctttagtaca

SEQ ID NO: 1367171 - DNA, 15 bp, Homo sapiens
tccaacctttagtac

SEQ ID NO: 1367172 - DNA, 15 bp, Homo sapiens
ttccaacctttagta

SEQ ID NO: 1367173 - DNA, 15 bp, Homo sapiens
attccaacctttagt

SEQ ID NO: 1367174 - DNA, 15 bp, Homo sapiens
cattccaacctttag

SEQ ID NO: 1367175 - DNA, 15 bp, Homo sapiens
tcattccaaccttta

SEQ ID NO: 1367176 - DNA, 15 bp, Homo sapiens
ttcattccaaccttt

SEQ ID NO: 1367177 - DNA, 15 bp, Homo sapiens
tttcattccaacctt

SEQ ID NO: 1367178 - DNA, 15 bp, Homo sapiens
gtttcattccaacct

SEQ ID NO: 1367179 - DNA, 15 bp, Homo sapiens
agtttcattccaacc

SEQ ID NO: 1367180 - DNA, 15 bp, Homo sapiens
gagtttcattccaac

SEQ ID NO: 1367181 - DNA, 15 bp, Homo sapiens
tgagtttcattccaa

SEQ ID NO: 1367182 - DNA, 15 bp, Homo sapiens
ctgagtttcattcca

SEQ ID NO: 1367183 - DNA, 15 bp, Homo sapiens
tctgagtttcattcc

SEQ ID NO: 1367184 - DNA, 15 bp, Homo sapiens
ctctgagtttcattc

SEQ ID NO: 1367185 - DNA, 15 bp, Homo sapiens
actctgagtttcatt

SEQ ID NO: 1367186 - DNA, 15 bp, Homo sapiens
aactctgagtttcat

SEQ ID NO: 1367187 - DNA, 15 bp, Homo sapiens
gaactctgagtttca

SEQ ID NO: 1367188 - DNA, 15 bp, Homo sapiens
agaactctgagtttc

SEQ ID NO: 1367189 - DNA, 15 bp, Homo sapiens
aagaactctgagttt

SEQ ID NO: 1367190 - DNA, 15 bp, Homo sapiens
gaagaactctgagtt

SEQ ID NO: 1367191 - DNA, 15 bp, Homo sapiens
agaagaactctgagt

SEQ ID NO: 1367192 - DNA, 15 bp, Homo sapiens
cagaagaactctgag

SEQ ID NO: 1367193 - DNA, 15 bp, Homo sapiens
gcagaagaactctga

SEQ ID NO: 1367194 - DNA, 15 bp, Homo sapiens
agcagaagaactctg

SEQ ID NO: 1367195 - DNA, 15 bp, Homo sapiens
aagcagaagaactct

SEQ ID NO: 1367196 - DNA, 15 bp, Homo sapiens
gaagcagaagaactc

SEQ ID NO: 1367197 - DNA, 15 bp, Homo sapiens
tgaagcagaagaact

SEQ ID NO: 1367198 - DNA, 15 bp, Homo sapiens
ttgaagcagaagaac

SEQ ID NO: 1367199 - DNA, 15 bp, Homo sapiens
tttgaagcagaagaa

SEQ ID NO: 1367200 - DNA, 15 bp, Homo sapiens
gtttgaagcagaaga

SEQ ID NO: 1367201 - DNA, 15 bp, Homo sapiens
cgtttgaagcagaag

SEQ ID NO: 1367202 - DNA, 15 bp, Homo sapiens
acgtttgaagcagaa

SEQ ID NO: 1367203 - DNA, 15 bp, Homo sapiens
aacgtttgaagcaga

SEQ ID NO: 1367204 - DNA, 15 bp, Homo sapiens
aaacgtttgaagcag

SEQ ID NO: 1367205 - DNA, 15 bp, Homo sapiens
aaaacgtttgaagca

SEQ ID NO: 1367206 - DNA, 15 bp, Homo sapiens
caaaacgtttgaagc

SEQ ID NO: 1367207 - DNA, 15 bp, Homo sapiens
ccaaaacgtttgaag

SEQ ID NO: 1367208 - DNA, 15 bp, Homo sapiens
gccaaaacgtttgaa

SEQ ID NO: 1367209 - DNA, 15 bp, Homo sapiens
tgccaaaacgtttga

SEQ ID NO: 1367210 - DNA, 15 bp, Homo sapiens
ctgccaaaacgtttg

SEQ ID NO: 1367211 - DNA, 15 bp, Homo sapiens
cctgccaaaacgttt

SEQ ID NO: 1367212 - DNA, 15 bp, Homo sapiens
ccctgccaaaacgtt

SEQ ID NO: 1367213 - DNA, 15 bp, Homo sapiens
tccctgccaaaacgt

SEQ ID NO: 1367214 - DNA, 15 bp, Homo sapiens
ttccctgccaaaacg

SEQ ID NO: 1367215 - DNA, 15 bp, Homo sapiens
attccctgccaaaac

SEQ ID NO: 1367216 - DNA, 15 bp, Homo sapiens
gattccctgccaaaa

SEQ ID NO: 1367217 - DNA, 15 bp, Homo sapiens
agattccctgccaaa

SEQ ID NO: 1367218 - DNA, 15 bp, Homo sapiens
tagattccctgccaa

SEQ ID NO: 1367219 - DNA, 15 bp, Homo sapiens
atagattccctgcca

SEQ ID NO: 1367220 - DNA, 15 bp, Homo sapiens
catagattccctgcc

SEQ ID NO: 1367221 - DNA, 15 bp, Homo sapiens
ccatagattccctgc

SEQ ID NO: 1367222 - DNA, 15 bp, Homo sapiens
tccatagattccctg

SEQ ID NO: 1367223 - DNA, 15 bp, Homo sapiens
ttccatagattccct

SEQ ID NO: 1367224 - DNA, 15 bp, Homo sapiens
attccatagattccc

SEQ ID NO: 1367225 - DNA, 15 bp, Homo sapiens
gattccatagattcc

SEQ ID NO: 1367226 - DNA, 15 bp, Homo sapiens
tgattccatagattc

SEQ ID NO: 1367227 - DNA, 15 bp, Homo sapiens
atgattccatagatt

SEQ ID NO: 1367228 - DNA, 15 bp, Homo sapiens
gatgattccatagat

SEQ ID NO: 1367229 - DNA, 15 bp, Homo sapiens
agatgattccataga

SEQ ID NO: 1367230 - DNA, 15 bp, Homo sapiens
aagatgattccatag

SEQ ID NO: 1367231 - DNA, 15 bp, Homo sapiens
aaagatgattccata

SEQ ID NO: 1367232 - DNA, 15 bp, Homo sapiens
taaagatgattccat

SEQ ID NO: 1367233 - DNA, 15 bp, Homo sapiens
ttaaagatgattcca

SEQ ID NO: 1367234 - DNA, 15 bp, Homo sapiens
tttaaagatgattcc

SEQ ID NO: 1367235 - DNA, 15 bp, Homo sapiens
ttttaaagatgattc

SEQ ID NO: 1367236 - DNA, 15 bp, Homo sapiens
cttttaaagatgatt

SEQ ID NO: 1367237 - DNA, 15 bp, Homo sapiens
acttttaaagatgat

SEQ ID NO: 1367238 - DNA, 15 bp, Homo sapiens
cacttttaaagatga

SEQ ID NO: 1367239 - DNA, 15 bp, Homo sapiens
tcacttttaaagatg

SEQ ID NO: 1367240 - DNA, 15 bp, Homo sapiens
gtcacttttaaagat

SEQ ID NO: 1367241 - DNA, 15 bp, Homo sapiens
agtcacttttaaaga

SEQ ID NO: 1367242 - DNA, 15 bp, Homo sapiens
gagtcacttttaaag

SEQ ID NO: 1367243 - DNA, 15 bp, Homo sapiens
tgagtcacttttaaa

SEQ ID NO: 1367244 - DNA, 15 bp, Homo sapiens
ttgagtcacttttaa

SEQ ID NO: 1367245 - DNA, 15 bp, Homo sapiens
cttgagtcactttta

SEQ ID NO: 1367246 - DNA, 15 bp, Homo sapiens
acttgagtcactttt

SEQ ID NO: 1367247 - DNA, 15 bp, Homo sapiens
cacttgagtcacttt

SEQ ID NO: 1367248 - DNA, 15 bp, Homo sapiens
tcacttgagtcactt

SEQ ID NO: 1367249 - DNA, 15 bp, Homo sapiens
atcacttgagtcact

SEQ ID NO: 1367250 - DNA, 15 bp, Homo sapiens
gatcacttgagtcac

SEQ ID NO: 1367251 - DNA, 15 bp, Homo sapiens
agatcacttgagtca

SEQ ID NO: 1367252 - DNA, 15 bp, Homo sapiens
tagatcacttgagtc

SEQ ID NO: 1367253 - DNA, 15 bp, Homo sapiens
ctagatcacttgagt

SEQ ID NO: 1367254 - DNA, 15 bp, Homo sapiens
gctagatcacttgag

SEQ ID NO: 1367255 - DNA, 15 bp, Homo sapiens
cgctagatcacttga

SEQ ID NO: 1367256 - DNA, 15 bp, Homo sapiens
tcgctagatcacttg

SEQ ID NO: 1367257 - DNA, 15 bp, Homo sapiens
atcgctagatcactt

SEQ ID NO: 1367258 - DNA, 15 bp, Homo sapiens
gatcgctagatcact

SEQ ID NO: 1367259 - DNA, 15 bp, Homo sapiens
agatcgctagatcac

SEQ ID NO: 1367260 - DNA, 15 bp, Homo sapiens
tagatcgctagatca

SEQ ID NO: 1367261 - DNA, 15 bp, Homo sapiens
atagatcgctagatc

SEQ ID NO: 1367262 - DNA, 15 bp, Homo sapiens
tatagatcgctagat

SEQ ID NO: 1367263 - DNA, 15 bp, Homo sapiens
ctatagatcgctaga

SEQ ID NO: 1367264 - DNA, 15 bp, Homo sapiens
cctatagatcgctag

SEQ ID NO: 1367265 - DNA, 15 bp, Homo sapiens
acctatagatcgcta

SEQ ID NO: 1367266 - DNA, 15 bp, Homo sapiens
gacctatagatcgct

SEQ ID NO: 1367267 - DNA, 15 bp, Homo sapiens
tgacctatagatcgc

SEQ ID NO: 1367268 - DNA, 15 bp, Homo sapiens
ttgacctatagatcg

SEQ ID NO: 1367269 - DNA, 15 bp, Homo sapiens
attgacctatagatc

SEQ ID NO: 1367270 - DNA, 15 bp, Homo sapiens
aattgacctatagat

SEQ ID NO: 1367271 - DNA, 15 bp, Homo sapiens
taattgacctataga

SEQ ID NO: 1367272 - DNA, 15 bp, Homo sapiens
ttaattgacctatag

SEQ ID NO: 1367273 - DNA, 15 bp, Homo sapiens
cttaattgacctata

SEQ ID NO: 1367274 - DNA, 15 bp, Homo sapiens
ccttaattgacctat

SEQ ID NO: 1367275 - DNA, 15 bp, Homo sapiens
gccttaattgaccta

SEQ ID NO: 1367276 - DNA, 15 bp, Homo sapiens
ggccttaattgacct

SEQ ID NO: 1367277 - DNA, 15 bp, Homo sapiens
aggccttaattgacc

SEQ ID NO: 1367278 - DNA, 15 bp, Homo sapiens
aaggccttaattgac

SEQ ID NO: 1367279 - DNA, 15 bp, Homo sapiens
aaaggccttaattga

SEQ ID NO: 1367280 - DNA, 15 bp, Homo sapiens
caaaggccttaattg

SEQ ID NO: 1367281 - DNA, 15 bp, Homo sapiens
tcaaaggccttaatt

SEQ ID NO: 1367282 - DNA, 15 bp, Homo sapiens
ctcaaaggccttaat

SEQ ID NO: 1367283 - DNA, 15 bp, Homo sapiens
actcaaaggccttaa

SEQ ID NO: 1367284 - DNA, 15 bp, Homo sapiens
aactcaaaggcctta

SEQ ID NO: 1367285 - DNA, 15 bp, Homo sapiens
aaactcaaaggcctt

SEQ ID NO: 1367286 - DNA, 15 bp, Homo sapiens
caaactcaaaggcct

SEQ ID NO: 1367287 - DNA, 15 bp, Homo sapiens
gcaaactcaaaggcc

SEQ ID NO: 1367288 - DNA, 15 bp, Homo sapiens
tgcaaactcaaaggc

SEQ ID NO: 1367289 - DNA, 15 bp, Homo sapiens
ttgcaaactcaaagg

SEQ ID NO: 1367290 - DNA, 15 bp, Homo sapiens
tttgcaaactcaaag

SEQ ID NO: 1367291 - DNA, 15 bp, Homo sapiens
ctttgcaaactcaaa

SEQ ID NO: 1367292 - DNA, 15 bp, Homo sapiens
actttgcaaactcaa

SEQ ID NO: 1367293 - DNA, 15 bp, Homo sapiens
tactttgcaaactca

SEQ ID NO: 1367294 - DNA, 15 bp, Homo sapiens
atactttgcaaactc

SEQ ID NO: 1367295 - DNA, 15 bp, Homo sapiens
aatactttgcaaact

SEQ ID NO: 1367296 - DNA, 15 bp, Homo sapiens
aaatactttgcaaac

SEQ ID NO: 1367297 - DNA, 15 bp, Homo sapiens
aaaatactttgcaaa

SEQ ID NO: 1367298 - DNA, 15 bp, Homo sapiens
aaaaatactttgcaa

SEQ ID NO: 1367299 - DNA, 15 bp, Homo sapiens
ataaaaatactttgc

SEQ ID NO: 1367300 - DNA, 15 bp, Homo sapiens
cataaaaatactttg

SEQ ID NO: 1367301 - DNA, 15 bp, Homo sapiens
acataaaaatacttt

SEQ ID NO: 1367302 - DNA, 15 bp, Homo sapiens
aacataaaaatactt

SEQ ID NO: 1367303 - DNA, 15 bp, Homo sapiens
aaacataaaaatact

SEQ ID NO: 1367304 - DNA, 15 bp, Homo sapiens
taaacataaaaatac

SEQ ID NO: 1367305 - DNA, 15 bp, Homo sapiens
ataaacataaaaata

SEQ ID NO: 1367306 - DNA, 15 bp, Homo sapiens
tataaacataaaaat

SEQ ID NO: 1367307 - DNA, 15 bp, Homo sapiens
ttataaacataaaaa

SEQ ID NO: 1367308 - DNA, 15 bp, Homo sapiens
attataaacataaaa

SEQ ID NO: 1367309 - DNA, 15 bp, Homo sapiens
gattataaacataaa

SEQ ID NO: 1367310 - DNA, 15 bp, Homo sapiens
agattataaacataa

SEQ ID NO: 1367311 - DNA, 15 bp, Homo sapiens
aagattataaacata

SEQ ID NO: 1367312 - DNA, 15 bp, Homo sapiens
aaagattataaacat

SEQ ID NO: 1367313 - DNA, 15 bp, Homo sapiens
aaaagattataaaca

SEQ ID NO: 1367314 - DNA, 15 bp, Homo sapiens
taaaagattataaac

SEQ ID NO: 1367315 - DNA, 15 bp, Homo sapiens
ataaaagattataaa

SEQ ID NO: 1367316 - DNA, 15 bp, Homo sapiens
aataaaagattataa

SEQ ID NO: 1367317 - DNA, 15 bp, Homo sapiens
aaataaaagattata

SEQ ID NO: 1367318 - DNA, 15 bp, Homo sapiens
aaaataaaagattat

SEQ ID NO: 1367319 - DNA, 15 bp, Homo sapiens
aaaaataaaagatta

SEQ ID NO: 1367320 - DNA, 15 bp, Homo sapiens
aaaaaataaaagatt

SEQ ID NO: 1367321 - DNA, 15 bp, Homo sapiens
aaaaaaataaaagat

SEQ ID NO: 1367322 - DNA, 15 bp, Homo sapiens
taaaaaaataaaaga

SEQ ID NO: 1367323 - DNA, 15 bp, Homo sapiens
ttaaaaaaataaaag

SEQ ID NO: 1367324 - DNA, 15 bp, Homo sapiens
cttaaaaaaataaaa

SEQ ID NO: 1367325 - DNA, 15 bp, Homo sapiens
tcttaaaaaaataaa

SEQ ID NO: 1367326 - DNA, 15 bp, Homo sapiens
atcttaaaaaaataa

SEQ ID NO: 1367327 - DNA, 15 bp, Homo sapiens
catcttaaaaaaata

SEQ ID NO: 1367328 - DNA, 15 bp, Homo sapiens
ccatcttaaaaaaat

SEQ ID NO: 1367329 - DNA, 15 bp, Homo sapiens
tccatcttaaaaaaa

SEQ ID NO: 1367330 - DNA, 15 bp, Homo sapiens
ctccatcttaaaaaa

SEQ ID NO: 1367331 - DNA, 15 bp, Homo sapiens
actccatcttaaaaa

SEQ ID NO: 1367332 - DNA, 15 bp, Homo sapiens
gactccatcttaaaa

SEQ ID NO: 1367333 - DNA, 15 bp, Homo sapiens
agactccatcttaaa

SEQ ID NO: 1367334 - DNA, 15 bp, Homo sapiens
gagactccatcttaa

SEQ ID NO: 1367335 - DNA, 15 bp, Homo sapiens
tgagactccatctta

SEQ ID NO: 1367336 - DNA, 15 bp, Homo sapiens
gtgagactccatctt

SEQ ID NO: 1367337 - DNA, 15 bp, Homo sapiens
gcagagtgagactcc

SEQ ID NO: 1367338 - DNA, 15 bp, Homo sapiens
ggcagagtgagactc

SEQ ID NO: 1367339 - DNA, 15 bp, Homo sapiens
aggcagagtgagact

SEQ ID NO: 1367340 - DNA, 15 bp, Homo sapiens
gaggcagagtgagac

SEQ ID NO: 1367341 - DNA, 15 bp, Homo sapiens
ggaggcagagtgaga

SEQ ID NO: 1367342 - DNA, 15 bp, Homo sapiens
gggaggcagagtgag

SEQ ID NO: 1367343 - DNA, 15 bp, Homo sapiens
tgggaggcagagtga

SEQ ID NO: 1367344 - DNA, 15 bp, Homo sapiens
ctgggaggcagagtg

SEQ ID NO: 1367345 - DNA, 15 bp, Homo sapiens
cctgggaggcagagt

SEQ ID NO: 1367346 - DNA, 15 bp, Homo sapiens
cagcctgggaggcag

SEQ ID NO: 1367347 - DNA, 15 bp, Homo sapiens
ccagcctgggaggca

SEQ ID NO: 1367348 - DNA, 15 bp, Homo sapiens
tccagcctgggaggc

SEQ ID NO: 1367349 - DNA, 15 bp, Homo sapiens
ctccagcctgggagg

SEQ ID NO: 1367350 - DNA, 15 bp, Homo sapiens
tacaccactgcactc

SEQ ID NO: 1367351 - DNA, 15 bp, Homo sapiens
ttacaccactgcact

SEQ ID NO: 1367352 - DNA, 15 bp, Homo sapiens
attacaccactgcac

SEQ ID NO: 1367353 - DNA, 15 bp, Homo sapiens
gattacaccactgca

SEQ ID NO: 1367354 - DNA, 15 bp, Homo sapiens
agattacaccactgc

SEQ ID NO: 1367355 - DNA, 15 bp, Homo sapiens
gagattacaccactg

SEQ ID NO: 1367356 - DNA, 15 bp, Homo sapiens
tgagattacaccact

SEQ ID NO: 1367357 - DNA, 15 bp, Homo sapiens
ttgagattacaccac

SEQ ID NO: 1367358 - DNA, 15 bp, Homo sapiens
gttgagattacacca

SEQ ID NO: 1367359 - DNA, 15 bp, Homo sapiens
agttgagattacacc

SEQ ID NO: 1367360 - DNA, 15 bp, Homo sapiens
gagttgagattacac

SEQ ID NO: 1367361 - DNA, 15 bp, Homo sapiens
tgagttgagattaca

SEQ ID NO: 1367362 - DNA, 15 bp, Homo sapiens
gtgagttgagattac

SEQ ID NO: 1367363 - DNA, 15 bp, Homo sapiens
agtgagttgagatta

SEQ ID NO: 1367364 - DNA, 15 bp, Homo sapiens
cagtgagttgagatt

SEQ ID NO: 1367365 - DNA, 15 bp, Homo sapiens
gcagtgagttgagat

SEQ ID NO: 1367366 - DNA, 15 bp, Homo sapiens
tgcagtgagttgaga

SEQ ID NO: 1367367 - DNA, 15 bp, Homo sapiens
ttgcagtgagttgag

SEQ ID NO: 1367368 - DNA, 15 bp, Homo sapiens
gttgcagtgagttga

SEQ ID NO: 1367369 - DNA, 15 bp, Homo sapiens
ggttgcagtgagttg

SEQ ID NO: 1367370 - DNA, 15 bp, Homo sapiens
aggttgcagtgagtt

SEQ ID NO: 1367371 - DNA, 15 bp, Homo sapiens
tgtggaggttgcagt

SEQ ID NO: 1367372 - DNA, 15 bp, Homo sapiens
atgtggaggttgcag

SEQ ID NO: 1367373 - DNA, 15 bp, Homo sapiens
gatgtggaggttgca

SEQ ID NO: 1367374 - DNA, 15 bp, Homo sapiens
ggatgtggaggttgc

SEQ ID NO: 1367375 - DNA, 15 bp, Homo sapiens
tggatgtggaggttg

SEQ ID NO: 1367376 - DNA, 15 bp, Homo sapiens
ctggatgtggaggtt

SEQ ID NO: 1367377 - DNA, 15 bp, Homo sapiens
tctggatgtggaggt

SEQ ID NO: 1367378 - DNA, 15 bp, Homo sapiens
ctctggatgtggagg

SEQ ID NO: 1367379 - DNA, 15 bp, Homo sapiens
actctggatgtggag

SEQ ID NO: 1367380 - DNA, 15 bp, Homo sapiens
aactctggatgtgga

SEQ ID NO: 1367381 - DNA, 15 bp, Homo sapiens
gaactctggatgtgg

SEQ ID NO: 1367382 - DNA, 15 bp, Homo sapiens
tgaactctggatgtg

SEQ ID NO: 1367383 - DNA, 15 bp, Homo sapiens
ttgaactctggatgt

SEQ ID NO: 1367384 - DNA, 15 bp, Homo sapiens
cttgaactctggatg

SEQ ID NO: 1367385 - DNA, 15 bp, Homo sapiens
gcttgaactctggat

SEQ ID NO: 1367386 - DNA, 15 bp, Homo sapiens
tgcttgaactctgga

SEQ ID NO: 1367387 - DNA, 15 bp, Homo sapiens
ttgcttgaactctgg

SEQ ID NO: 1367388 - DNA, 15 bp, Homo sapiens
attgcttgaactctg

SEQ ID NO: 1367389 - DNA, 15 bp, Homo sapiens
aattgcttgaactct

SEQ ID NO: 1367390 - DNA, 15 bp, Homo sapiens
gaattgcttgaactc

SEQ ID NO: 1367391 - DNA, 15 bp, Homo sapiens
cgagaattgcttgaa

SEQ ID NO: 1367392 - DNA, 15 bp, Homo sapiens
gcgagaattgcttga

SEQ ID NO: 1367393 - DNA, 15 bp, Homo sapiens
tgcgagaattgcttg

SEQ ID NO: 1367394 - DNA, 15 bp, Homo sapiens
gtgcgagaattgctt

SEQ ID NO: 1367395 - DNA, 15 bp, Homo sapiens
ggtgcgagaattgct

SEQ ID NO: 1367396 - DNA, 15 bp, Homo sapiens
aggtgcgagaattgc

SEQ ID NO: 1367397 - DNA, 15 bp, Homo sapiens
aaggtgcgagaattg

SEQ ID NO: 1367398 - DNA, 15 bp, Homo sapiens
taaggtgcgagaatt

SEQ ID NO: 1367399 - DNA, 15 bp, Homo sapiens
ctaaggtgcgagaat

SEQ ID NO: 1367400 - DNA, 15 bp, Homo sapiens
actaaggtgcgagaa

SEQ ID NO: 1367401 - DNA, 15 bp, Homo sapiens
gactaaggtgcgaga

SEQ ID NO: 1367402 - DNA, 15 bp, Homo sapiens
agactaaggtgcgag

SEQ ID NO: 1367403 - DNA, 15 bp, Homo sapiens
gagactaaggtgcga

SEQ ID NO: 1367404 - DNA, 15 bp, Homo sapiens
ggagactaaggtgcg

SEQ ID NO: 1367405 - DNA, 15 bp, Homo sapiens
gggagactaaggtgc

SEQ ID NO: 1367406 - DNA, 15 bp, Homo sapiens
cgggagactaaggtg

SEQ ID NO: 1367407 - DNA, 15 bp, Homo sapiens
tcgggagactaaggt

SEQ ID NO: 1367408 - DNA, 15 bp, Homo sapiens
ctcgggagactaagg

SEQ ID NO: 1367409 - DNA, 15 bp, Homo sapiens
actcgggagactaag

SEQ ID NO: 1367410 - DNA, 15 bp, Homo sapiens
tactcgggagactaa

SEQ ID NO: 1367411 - DNA, 15 bp, Homo sapiens
ctactcgggagacta

SEQ ID NO: 1367412 - DNA, 15 bp, Homo sapiens
gctactcgggagact

SEQ ID NO: 1367413 - DNA, 15 bp, Homo sapiens
agctactcgggagac

SEQ ID NO: 1367414 - DNA, 15 bp, Homo sapiens
cagctactcgggaga

SEQ ID NO: 1367415 - DNA, 15 bp, Homo sapiens
ctgtacacctgtagt

SEQ ID NO: 1367416 - DNA, 15 bp, Homo sapiens
gctgtacacctgtag

SEQ ID NO: 1367417 - DNA, 15 bp, Homo sapiens
tgctgtacacctgta

SEQ ID NO: 1367418 - DNA, 15 bp, Homo sapiens
atgctgtacacctgt

SEQ ID NO: 1367419 - DNA, 15 bp, Homo sapiens
tatgctgtacacctg

SEQ ID NO: 1367420 - DNA, 15 bp, Homo sapiens
ttatgctgtacacct

SEQ ID NO: 1367421 - DNA, 15 bp, Homo sapiens
attatgctgtacacc

SEQ ID NO: 1367422 - DNA, 15 bp, Homo sapiens
aattatgctgtacac

SEQ ID NO: 1367423 - DNA, 15 bp, Homo sapiens
gaattatgctgtaca

SEQ ID NO: 1367424 - DNA, 15 bp, Homo sapiens
ggaattatgctgtac

SEQ ID NO: 1367425 - DNA, 15 bp, Homo sapiens
gggaattatgctgta

SEQ ID NO: 1367426 - DNA, 15 bp, Homo sapiens
ggggaattatgctgt

SEQ ID NO: 1367427 - DNA, 15 bp, Homo sapiens
tggggaattatgctg

SEQ ID NO: 1367428 - DNA, 15 bp, Homo sapiens
atggggaattatgct

SEQ ID NO: 1367429 - DNA, 15 bp, Homo sapiens
aatggggaattatgc

SEQ ID NO: 1367430 - DNA, 15 bp, Homo sapiens
taatggggaattatg

SEQ ID NO: 1367431 - DNA, 15 bp, Homo sapiens
ttaatggggaattat

SEQ ID NO: 1367432 - DNA, 15 bp, Homo sapiens
cttaatggggaatta

SEQ ID NO: 1367433 - DNA, 15 bp, Homo sapiens
acttaatggggaatt

SEQ ID NO: 1367434 - DNA, 15 bp, Homo sapiens
gacttaatggggaat

SEQ ID NO: 1367435 - DNA, 15 bp, Homo sapiens
agacttaatggggaa

SEQ ID NO: 1367436 - DNA, 15 bp, Homo sapiens
aagacttaatgggga

SEQ ID NO: 1367437 - DNA, 15 bp, Homo sapiens
aaagacttaatgggg

SEQ ID NO: 1367438 - DNA, 15 bp, Homo sapiens
aaaagacttaatggg

SEQ ID NO: 1367439 - DNA, 15 bp, Homo sapiens
aaaaagacttaatgg

SEQ ID NO: 1367440 - DNA, 15 bp, Homo sapiens
aaaaaagacttaatg

SEQ ID NO: 1367441 - DNA, 15 bp, Homo sapiens
aaaaaaagacttaat

SEQ ID NO: 1367442 - DNA, 15 bp, Homo sapiens
aaaaaaaagacttaa

SEQ ID NO: 1367443 - DNA, 15 bp, Homo sapiens
aaaaaaaaagactta

SEQ ID NO: 1367444 - DNA, 15 bp, Homo sapiens
aaaaaaaaaagactt

SEQ ID NO: 1367445 - DNA, 15 bp, Homo sapiens
aaaaaaaaaaagact

SEQ ID NO: 1367446 - DNA, 15 bp, Homo sapiens
atcaaaaaaaaaaaa

SEQ ID NO: 1367447 - DNA, 15 bp, Homo sapiens
tatcaaaaaaaaaaa

SEQ ID NO: 1367448 - DNA, 15 bp, Homo sapiens
ctatcaaaaaaaaaa

SEQ ID NO: 1367449 - DNA, 15 bp, Homo sapiens
tctatcaaaaaaaaa

SEQ ID NO: 1367450 - DNA, 15 bp, Homo sapiens
ctctatcaaaaaaaa

SEQ ID NO: 1367451 - DNA, 15 bp, Homo sapiens
tctctatcaaaaaaa

SEQ ID NO: 1367452 - DNA, 15 bp, Homo sapiens
gtctctatcaaaaaa

SEQ ID NO: 1367453 - DNA, 15 bp, Homo sapiens
cgtctctatcaaaaa

SEQ ID NO: 1367454 - DNA, 15 bp, Homo sapiens
ccgtctctatcaaaa

SEQ ID NO: 1367455 - DNA, 15 bp, Homo sapiens
cccgtctctatcaaa

SEQ ID NO: 1367456 - DNA, 15 bp, Homo sapiens
ccccgtctctatcaa

SEQ ID NO: 1367457 - DNA, 15 bp, Homo sapiens
accccgtctctatca

SEQ ID NO: 1367458 - DNA, 15 bp, Homo sapiens
aaccccgtctctatc

SEQ ID NO: 1367459 - DNA, 15 bp, Homo sapiens
aaaccccgtctctat

SEQ ID NO: 1367460 - DNA, 15 bp, Homo sapiens
aaacatggtgaaacc

SEQ ID NO: 1367461 - DNA, 15 bp, Homo sapiens
gaaacatggtgaaac

SEQ ID NO: 1367462 - DNA, 15 bp, Homo sapiens
ggaaacatggtgaaa

SEQ ID NO: 1367463 - DNA, 15 bp, Homo sapiens
gggaaacatggtgaa

SEQ ID NO: 1367464 - DNA, 15 bp, Homo sapiens
tgggaaacatggtga

SEQ ID NO: 1367465 - DNA, 15 bp, Homo sapiens
ctgggaaacatggtg

SEQ ID NO: 1367466 - DNA, 15 bp, Homo sapiens
cctgggaaacatggt

SEQ ID NO: 1367467 - DNA, 15 bp, Homo sapiens
gcctgggaaacatgg

SEQ ID NO: 1367468 - DNA, 15 bp, Homo sapiens
agcctgggaaacatg

SEQ ID NO: 1367469 - DNA, 15 bp, Homo sapiens
cagcctgggaaacat

SEQ ID NO: 1367470 - DNA, 15 bp, Homo sapiens
ccagcctgggaaaca

SEQ ID NO: 1367471 - DNA, 15 bp, Homo sapiens
accagcctgggaaac

SEQ ID NO: 1367472 - DNA, 15 bp, Homo sapiens
gaccagcctgggaaa

SEQ ID NO: 1367473 - DNA, 15 bp, Homo sapiens
agaccagcctgggaa

SEQ ID NO: 1367474 - DNA, 15 bp, Homo sapiens
aagaccagcctggga

SEQ ID NO: 1367475 - DNA, 15 bp, Homo sapiens
aggtggatcatttga

SEQ ID NO: 1367476 - DNA, 15 bp, Homo sapiens
caggtggatcatttg

SEQ ID NO: 1367477 - DNA, 15 bp, Homo sapiens
gcaggtggatcattt

SEQ ID NO: 1367478 - DNA, 15 bp, Homo sapiens
ggcaggtggatcatt

SEQ ID NO: 1367479 - DNA, 15 bp, Homo sapiens
aggcaggtggatcat

SEQ ID NO: 1367480 - DNA, 15 bp, Homo sapiens
gaggctgaggcaggt

SEQ ID NO: 1367481 - DNA, 15 bp, Homo sapiens
agaggctgaggcagg

SEQ ID NO: 1367482 - DNA, 15 bp, Homo sapiens
gagaggctgaggcag

SEQ ID NO: 1367483 - DNA, 15 bp, Homo sapiens
tgagaggctgaggca

SEQ ID NO: 1367484 - DNA, 15 bp, Homo sapiens
ttgagaggctgaggc

SEQ ID NO: 1367485 - DNA, 15 bp, Homo sapiens
tttgagaggctgagg

SEQ ID NO: 1367486 - DNA, 15 bp, Homo sapiens
ctttgagaggctgag

SEQ ID NO: 1367487 - DNA, 15 bp, Homo sapiens
actttgagaggctga

SEQ ID NO: 1367488 - DNA, 15 bp, Homo sapiens
gactttgagaggctg

SEQ ID NO: 1367489 - DNA, 15 bp, Homo sapiens
ggactttgagaggct

SEQ ID NO: 1367490 - DNA, 15 bp, Homo sapiens
acctgtaatcccagg

SEQ ID NO: 1367491 - DNA, 15 bp, Homo sapiens
tgtggctcacacctg

SEQ ID NO: 1367492 - DNA, 15 bp, Homo sapiens
gtgtggctcacacct

SEQ ID NO: 1367493 - DNA, 15 bp, Homo sapiens
ggtgtggctcacacc

SEQ ID NO: 1367494 - DNA, 15 bp, Homo sapiens
aggtgtggctcacac

SEQ ID NO: 1367495 - DNA, 15 bp, Homo sapiens
caggtgtggctcaca

SEQ ID NO: 1367496 - DNA, 15 bp, Homo sapiens
ccaggtgtggctcac

SEQ ID NO: 1367497 - DNA, 15 bp, Homo sapiens
gccaggtgtggctca

SEQ ID NO: 1367498 - DNA, 15 bp, Homo sapiens
agccaggtgtggctc

SEQ ID NO: 1367499 - DNA, 15 bp, Homo sapiens
aagccaggtgtggct

SEQ ID NO: 1367500 - DNA, 15 bp, Homo sapiens
aaagccaggtgtggc

SEQ ID NO: 1367501 - DNA, 15 bp, Homo sapiens
aaaagccaggtgtgg

SEQ ID NO: 1367502 - DNA, 15 bp, Homo sapiens
aaaaagccaggtgtg

SEQ ID NO: 1367503 - DNA, 15 bp, Homo sapiens
taaaaagccaggtgt

SEQ ID NO: 1367504 - DNA, 15 bp, Homo sapiens
ttaaaaagccaggtg

SEQ ID NO: 1367505 - DNA, 15 bp, Homo sapiens
attaaaaagccaggt

SEQ ID NO: 1367506 - DNA, 15 bp, Homo sapiens
aattaaaaagccagg

SEQ ID NO: 1367507 - DNA, 15 bp, Homo sapiens
aaattaaaaagccag

SEQ ID NO: 1367508 - DNA, 15 bp, Homo sapiens
aaaattaaaaagcca

SEQ ID NO: 1367509 - DNA, 15 bp, Homo sapiens
aaaaattaaaaagcc

SEQ ID NO: 1367510 - DNA, 15 bp, Homo sapiens
aaaaaattaaaaagc

SEQ ID NO: 1367511 - DNA, 15 bp, Homo sapiens
aaaaaaattaaaaag

SEQ ID NO: 1367512 - DNA, 15 bp, Homo sapiens
taaaaaaaattaaaa

SEQ ID NO: 1367513 - DNA, 15 bp, Homo sapiens
ttaaaaaaaattaaa

SEQ ID NO: 1367514 - DNA, 15 bp, Homo sapiens
gttaaaaaaaattaa

SEQ ID NO: 1367515 - DNA, 15 bp, Homo sapiens
agttaaaaaaaatta

SEQ ID NO: 1367516 - DNA, 15 bp, Homo sapiens
aagttaaaaaaaatt

SEQ ID NO: 1367517 - DNA, 15 bp, Homo sapiens
aaagttaaaaaaaat

SEQ ID NO: 1367518 - DNA, 15 bp, Homo sapiens
aaaagttaaaaaaaa

SEQ ID NO: 1367519 - DNA, 15 bp, Homo sapiens
caaaagttaaaaaaa

SEQ ID NO: 1367520 - DNA, 15 bp, Homo sapiens
acaaaagttaaaaaa

SEQ ID NO: 1367521 - DNA, 15 bp, Homo sapiens
aacaaaagttaaaaa

SEQ ID NO: 1367522 - DNA, 15 bp, Homo sapiens
aaacaaaagttaaaa

SEQ ID NO: 1367523 - DNA, 15 bp, Homo sapiens
aaaacaaaagttaaa

SEQ ID NO: 1367524 - DNA, 15 bp, Homo sapiens
taaaacaaaagttaa

SEQ ID NO: 1367525 - DNA, 15 bp, Homo sapiens
ttaaaacaaaagtta

SEQ ID NO: 1367526 - DNA, 15 bp, Homo sapiens
cttaaaacaaaagtt

SEQ ID NO: 1367527 - DNA, 15 bp, Homo sapiens
acttaaaacaaaagt

SEQ ID NO: 1367528 - DNA, 15 bp, Homo sapiens
aacttaaaacaaaag

SEQ ID NO: 1367529 - DNA, 15 bp, Homo sapiens
gaacttaaaacaaaa

SEQ ID NO: 1367530 - DNA, 15 bp, Homo sapiens
tgaacttaaaacaaa

SEQ ID NO: 1367531 - DNA, 15 bp, Homo sapiens
ctgaacttaaaacaa

SEQ ID NO: 1367532 - DNA, 15 bp, Homo sapiens
cctgaacttaaaaca

SEQ ID NO: 1367533 - DNA, 15 bp, Homo sapiens
tcctgaacttaaaac

SEQ ID NO: 1367534 - DNA, 15 bp, Homo sapiens
ctcctgaacttaaaa

SEQ ID NO: 1367535 - DNA, 15 bp, Homo sapiens
actcctgaacttaaa

SEQ ID NO: 1367536 - DNA, 15 bp, Homo sapiens
tactcctgaacttaa

SEQ ID NO: 1367537 - DNA, 15 bp, Homo sapiens
gtactcctgaactta

SEQ ID NO: 1367538 - DNA, 15 bp, Homo sapiens
tgtactcctgaactt

SEQ ID NO: 1367539 - DNA, 15 bp, Homo sapiens
atgtactcctgaact

SEQ ID NO: 1367540 - DNA, 15 bp, Homo sapiens
catgtactcctgaac

SEQ ID NO: 1367541 - DNA, 15 bp, Homo sapiens
acatgtactcctgaa

SEQ ID NO: 1367542 - DNA, 15 bp, Homo sapiens
cacatgtactcctga

SEQ ID NO: 1367543 - DNA, 15 bp, Homo sapiens
gcacatgtactcctg

SEQ ID NO: 1367544 - DNA, 15 bp, Homo sapiens
tgcacatgtactcct

SEQ ID NO: 1367545 - DNA, 15 bp, Homo sapiens
ctgcacatgtactcc

SEQ ID NO: 1367546 - DNA, 15 bp, Homo sapiens
cctgcacatgtactc

SEQ ID NO: 1367547 - DNA, 15 bp, Homo sapiens
acctgcacatgtact

SEQ ID NO: 1367548 - DNA, 15 bp, Homo sapiens
aacctgcacatgtac

SEQ ID NO: 1367549 - DNA, 15 bp, Homo sapiens
aaacctgcacatgta

SEQ ID NO: 1367550 - DNA, 15 bp, Homo sapiens
aaaacctgcacatgt

SEQ ID NO: 1367551 - DNA, 15 bp, Homo sapiens
aaaaacctgcacatg

SEQ ID NO: 1367552 - DNA, 15 bp, Homo sapiens
aaaaaacctgcacat

SEQ ID NO: 1367553 - DNA, 15 bp, Homo sapiens
aaaaaaacctgcaca

SEQ ID NO: 1367554 - DNA, 15 bp, Homo sapiens
aaaaaaaacctgcac

SEQ ID NO: 1367555 - DNA, 15 bp, Homo sapiens
aaaaaaaaacctgca

SEQ ID NO: 1367556 - DNA, 15 bp, Homo sapiens
aaaaaaaaaacctgc

SEQ ID NO: 1367557 - DNA, 15 bp, Homo sapiens
gttaaaaaaaaaaaa

SEQ ID NO: 1367558 - DNA, 15 bp, Homo sapiens
tgttaaaaaaaaaaa

SEQ ID NO: 1367559 - DNA, 15 bp, Homo sapiens
atgttaaaaaaaaaa

SEQ ID NO: 1367560 - DNA, 15 bp, Homo sapiens
tatgttaaaaaaaaa

SEQ ID NO: 1367561 - DNA, 15 bp, Homo sapiens
ctatgttaaaaaaaa

SEQ ID NO: 1367562 - DNA, 15 bp, Homo sapiens
tctatgttaaaaaaa

SEQ ID NO: 1367563 - DNA, 15 bp, Homo sapiens
atctatgttaaaaaa

SEQ ID NO: 1367564 - DNA, 15 bp, Homo sapiens
tatctatgttaaaaa

SEQ ID NO: 1367565 - DNA, 15 bp, Homo sapiens
ttatctatgttaaaa

SEQ ID NO: 1367566 - DNA, 15 bp, Homo sapiens
tttatctatgttaaa

SEQ ID NO: 1367567 - DNA, 15 bp, Homo sapiens
gtttatctatgttaa

SEQ ID NO: 1367568 - DNA, 15 bp, Homo sapiens
agtttatctatgtta

SEQ ID NO: 1367569 - DNA, 15 bp, Homo sapiens
aagtttatctatgtt

SEQ ID NO: 1367570 - DNA, 15 bp, Homo sapiens
caagtttatctatgt

SEQ ID NO: 1367571 - DNA, 15 bp, Homo sapiens
acaagtttatctatg

SEQ ID NO: 1367572 - DNA, 15 bp, Homo sapiens
cacaagtttatctat

SEQ ID NO: 1367573 - DNA, 15 bp, Homo sapiens
acacaagtttatcta

SEQ ID NO: 1367574 - DNA, 15 bp, Homo sapiens
gacacaagtttatct

SEQ ID NO: 1367575 - DNA, 15 bp, Homo sapiens
tgacacaagtttatc

SEQ ID NO: 1367576 - DNA, 15 bp, Homo sapiens
atgacacaagtttat

SEQ ID NO: 1367577 - DNA, 15 bp, Homo sapiens
catgacacaagttta

SEQ ID NO: 1367578 - DNA, 15 bp, Homo sapiens
ccatgacacaagttt

SEQ ID NO: 1367579 - DNA, 15 bp, Homo sapiens
cccatgacacaagtt

SEQ ID NO: 1367580 - DNA, 15 bp, Homo sapiens
gcccatgacacaagt

SEQ ID NO: 1367581 - DNA, 15 bp, Homo sapiens
tgcccatgacacaag

SEQ ID NO: 1367582 - DNA, 15 bp, Homo sapiens
atgcccatgacacaa

SEQ ID NO: 1367583 - DNA, 15 bp, Homo sapiens
aatgcccatgacaca

SEQ ID NO: 1367584 - DNA, 15 bp, Homo sapiens
aaatgcccatgacac

SEQ ID NO: 1367585 - DNA, 15 bp, Homo sapiens
gaaatgcccatgaca

SEQ ID NO: 1367586 - DNA, 15 bp, Homo sapiens
agaaatgcccatgac

SEQ ID NO: 1367587 - DNA, 15 bp, Homo sapiens
aagaaatgcccatga

SEQ ID NO: 1367588 - DNA, 15 bp, Homo sapiens
taagaaatgcccatg

SEQ ID NO: 1367589 - DNA, 15 bp, Homo sapiens
ataagaaatgcccat

SEQ ID NO: 1367590 - DNA, 15 bp, Homo sapiens
aataagaaatgccca

SEQ ID NO: 1367591 - DNA, 15 bp, Homo sapiens
aaataagaaatgccc

SEQ ID NO: 1367592 - DNA, 15 bp, Homo sapiens
gaaataagaaatgcc

SEQ ID NO: 1367593 - DNA, 15 bp, Homo sapiens
tgaaataagaaatgc

SEQ ID NO: 1367594 - DNA, 15 bp, Homo sapiens
atgaaataagaaatg

SEQ ID NO: 1367595 - DNA, 15 bp, Homo sapiens
gatgaaataagaaat

SEQ ID NO: 1367596 - DNA, 15 bp, Homo sapiens
tgatgaaataagaaa

SEQ ID NO: 1367597 - DNA, 15 bp, Homo sapiens
gtgatgaaataagaa

SEQ ID NO: 1367598 - DNA, 15 bp, Homo sapiens
agtgatgaaataaga

SEQ ID NO: 1367599 - DNA, 15 bp, Homo sapiens
cagtgatgaaataag

SEQ ID NO: 1367600 - DNA, 15 bp, Homo sapiens
tcagtgatgaaataa

SEQ ID NO: 1367601 - DNA, 15 bp, Homo sapiens
ctcagtgatgaaata

SEQ ID NO: 1367602 - DNA, 15 bp, Homo sapiens
actcagtgatgaaat

SEQ ID NO: 1367603 - DNA, 15 bp, Homo sapiens
aactcagtgatgaaa

SEQ ID NO: 1367604 - DNA, 15 bp, Homo sapiens
taactcagtgatgaa

SEQ ID NO: 1367605 - DNA, 15 bp, Homo sapiens
ataactcagtgatga

SEQ ID NO: 1367606 - DNA, 15 bp, Homo sapiens
aataactcagtgatg

SEQ ID NO: 1367607 - DNA, 15 bp, Homo sapiens
taataactcagtgat

SEQ ID NO: 1367608 - DNA, 15 bp, Homo sapiens
ttaataactcagtga

SEQ ID NO: 1367609 - DNA, 15 bp, Homo sapiens
cttaataactcagtg

SEQ ID NO: 1367610 - DNA, 15 bp, Homo sapiens
gcttaataactcagt

SEQ ID NO: 1367611 - DNA, 15 bp, Homo sapiens
agcttaataactcag

SEQ ID NO: 1367612 - DNA, 15 bp, Homo sapiens
aagcttaataactca

SEQ ID NO: 1367613 - DNA, 15 bp, Homo sapiens
taagcttaataactc

SEQ ID NO: 1367614 - DNA, 15 bp, Homo sapiens
ctaagcttaataact

SEQ ID NO: 1367615 - DNA, 15 bp, Homo sapiens
actaagcttaataac

SEQ ID NO: 1367616 - DNA, 15 bp, Homo sapiens
tactaagcttaataa

SEQ ID NO: 1367617 - DNA, 15 bp, Homo sapiens
gtactaagcttaata

SEQ ID NO: 1367618 - DNA, 15 bp, Homo sapiens
ggtactaagcttaat

SEQ ID NO: 1367619 - DNA, 15 bp, Homo sapiens
gggtactaagcttaa

SEQ ID NO: 1367620 - DNA, 15 bp, Homo sapiens
tgggtactaagctta

SEQ ID NO: 1367621 - DNA, 15 bp, Homo sapiens
atgggtactaagctt

SEQ ID NO: 1367622 - DNA, 15 bp, Homo sapiens
aatgggtactaagct

SEQ ID NO: 1367623 - DNA, 15 bp, Homo sapiens
taatgggtactaagc

SEQ ID NO: 1367624 - DNA, 15 bp, Homo sapiens
ctaatgggtactaag

SEQ ID NO: 1367625 - DNA, 15 bp, Homo sapiens
actaatgggtactaa

SEQ ID NO: 1367626 - DNA, 15 bp, Homo sapiens
aactaatgggtacta

SEQ ID NO: 1367627 - DNA, 15 bp, Homo sapiens
taactaatgggtact

SEQ ID NO: 1367628 - DNA, 15 bp, Homo sapiens
ataactaatgggtac

SEQ ID NO: 1367629 - DNA, 15 bp, Homo sapiens
aataactaatgggta

SEQ ID NO: 1367630 - DNA, 15 bp, Homo sapiens
aaataactaatgggt

SEQ ID NO: 1367631 - DNA, 15 bp, Homo sapiens
aaaataactaatggg

SEQ ID NO: 1367632 - DNA, 15 bp, Homo sapiens
aaaaataactaatgg

SEQ ID NO: 1367633 - DNA, 15 bp, Homo sapiens
gaaaaataactaatg

SEQ ID NO: 1367634 - DNA, 15 bp, Homo sapiens
ggaaaaataactaat

SEQ ID NO: 1367635 - DNA, 15 bp, Homo sapiens
gggaaaaataactaa

SEQ ID NO: 1367636 - DNA, 15 bp, Homo sapiens
tgggaaaaataacta

SEQ ID NO: 1367637 - DNA, 15 bp, Homo sapiens
ttgggaaaaataact

SEQ ID NO: 1367638 - DNA, 15 bp, Homo sapiens
attgggaaaaataac

SEQ ID NO: 1367639 - DNA, 15 bp, Homo sapiens
aattgggaaaaataa

SEQ ID NO: 1367640 - DNA, 15 bp, Homo sapiens
taattgggaaaaata

SEQ ID NO: 1367641 - DNA, 15 bp, Homo sapiens
ataattgggaaaaat

SEQ ID NO: 1367642 - DNA, 15 bp, Homo sapiens
gataattgggaaaaa

SEQ ID NO: 1367643 - DNA, 15 bp, Homo sapiens
agataattgggaaaa

SEQ ID NO: 1367644 - DNA, 15 bp, Homo sapiens
cagataattgggaaa

SEQ ID NO: 1367645 - DNA, 15 bp, Homo sapiens
gcagataattgggaa

SEQ ID NO: 1367646 - DNA, 15 bp, Homo sapiens
agcagataattggga

SEQ ID NO: 1367647 - DNA, 15 bp, Homo sapiens
aagcagataattggg

SEQ ID NO: 1367648 - DNA, 15 bp, Homo sapiens
gaagcagataattgg

SEQ ID NO: 1367649 - DNA, 15 bp, Homo sapiens
agaagcagataattg

SEQ ID NO: 1367650 - DNA, 15 bp, Homo sapiens
aagaagcagataatt

SEQ ID NO: 1367651 - DNA, 15 bp, Homo sapiens
gaagaagcagataat

SEQ ID NO: 1367652 - DNA, 15 bp, Homo sapiens
ggaagaagcagataa

SEQ ID NO: 1367653 - DNA, 15 bp, Homo sapiens
gggaagaagcagata

SEQ ID NO: 1367654 - DNA, 15 bp, Homo sapiens
tgggaagaagcagat

SEQ ID NO: 1367655 - DNA, 15 bp, Homo sapiens
gtgggaagaagcaga

SEQ ID NO: 1367656 - DNA, 15 bp, Homo sapiens
ggtgggaagaagcag

SEQ ID NO: 1367657 - DNA, 15 bp, Homo sapiens
gggtgggaagaagca

SEQ ID NO: 1367658 - DNA, 15 bp, Homo sapiens
agggtgggaagaagc

SEQ ID NO: 1367659 - DNA, 15 bp, Homo sapiens
gagggtgggaagaag

SEQ ID NO: 1367660 - DNA, 15 bp, Homo sapiens
ggagggtgggaagaa

SEQ ID NO: 1367661 - DNA, 15 bp, Homo sapiens
tggagggtgggaaga

SEQ ID NO: 1367662 - DNA, 15 bp, Homo sapiens
ttggagggtgggaag

SEQ ID NO: 1367663 - DNA, 15 bp, Homo sapiens
gttggagggtgggaa

SEQ ID NO: 1367664 - DNA, 15 bp, Homo sapiens
ggttggagggtggga

SEQ ID NO: 1367665 - DNA, 15 bp, Homo sapiens
aggttggagggtggg

SEQ ID NO: 1367666 - DNA, 15 bp, Homo sapiens
gaggttggagggtgg

SEQ ID NO: 1367667 - DNA, 15 bp, Homo sapiens
agaggttggagggtg

SEQ ID NO: 1367668 - DNA, 15 bp, Homo sapiens
tagaggttggagggt

SEQ ID NO: 1367669 - DNA, 15 bp, Homo sapiens
ttagaggttggaggg

SEQ ID NO: 1367670 - DNA, 15 bp, Homo sapiens
attagaggttggagg

SEQ ID NO: 1367671 - DNA, 15 bp, Homo sapiens
tattagaggttggag

SEQ ID NO: 1367672 - DNA, 15 bp, Homo sapiens
ctattagaggttgga

SEQ ID NO: 1367673 - DNA, 15 bp, Homo sapiens
cctattagaggttgg

SEQ ID NO: 1367674 - DNA, 15 bp, Homo sapiens
ccctattagaggttg

SEQ ID NO: 1367675 - DNA, 15 bp, Homo sapiens
accctattagaggtt

SEQ ID NO: 1367676 - DNA, 15 bp, Homo sapiens
gaccctattagaggt

SEQ ID NO: 1367677 - DNA, 15 bp, Homo sapiens
ggaccctattagagg

SEQ ID NO: 1367678 - DNA, 15 bp, Homo sapiens
gggaccctattagag

SEQ ID NO: 1367679 - DNA, 15 bp, Homo sapiens
tgggaccctattaga

SEQ ID NO: 1367680 - DNA, 15 bp, Homo sapiens
ctgggaccctattag

SEQ ID NO: 1367681 - DNA, 15 bp, Homo sapiens
actgggaccctatta

SEQ ID NO: 1367682 - DNA, 15 bp, Homo sapiens
cactgggaccctatt

SEQ ID NO: 1367683 - DNA, 15 bp, Homo sapiens
acactgggaccctat

SEQ ID NO: 1367684 - DNA, 15 bp, Homo sapiens
cacactgggacccta

SEQ ID NO: 1367685 - DNA, 15 bp, Homo sapiens
acacactgggaccct

SEQ ID NO: 1367686 - DNA, 15 bp, Homo sapiens
cacacactgggaccc

SEQ ID NO: 1367687 - DNA, 15 bp, Homo sapiens
acacacactgggacc

SEQ ID NO: 1367688 - DNA, 15 bp, Homo sapiens
aacacacactgggac

SEQ ID NO: 1367689 - DNA, 15 bp, Homo sapiens
aaacacacactggga

SEQ ID NO: 1367690 - DNA, 15 bp, Homo sapiens
aaaacacacactggg

SEQ ID NO: 1367691 - DNA, 15 bp, Homo sapiens
aaaaacacacactgg

SEQ ID NO: 1367692 - DNA, 15 bp, Homo sapiens
gaaaaacacacactg

SEQ ID NO: 1367693 - DNA, 15 bp, Homo sapiens
ggaaaaacacacact

SEQ ID NO: 1367694 - DNA, 15 bp, Homo sapiens
gggaaaaacacacac

SEQ ID NO: 1367695 - DNA, 15 bp, Homo sapiens
tgggaaaaacacaca

SEQ ID NO: 1367696 - DNA, 15 bp, Homo sapiens
atgggaaaaacacac

SEQ ID NO: 1367697 - DNA, 15 bp, Homo sapiens
gatgggaaaaacaca

SEQ ID NO: 1367698 - DNA, 15 bp, Homo sapiens
agatgggaaaaacac

SEQ ID NO: 1367699 - DNA, 15 bp, Homo sapiens
gagatgggaaaaaca

SEQ ID NO: 1367700 - DNA, 15 bp, Homo sapiens
agagatgggaaaaac

SEQ ID NO: 1367701 - DNA, 15 bp, Homo sapiens
cagagatgggaaaaa

SEQ ID NO: 1367702 - DNA, 15 bp, Homo sapiens
acagagatgggaaaa

SEQ ID NO: 1367703 - DNA, 15 bp, Homo sapiens
cacagagatgggaaa

SEQ ID NO: 1367704 - DNA, 15 bp, Homo sapiens
gcacagagatgggaa

SEQ ID NO: 1367705 - DNA, 15 bp, Homo sapiens
gggcacagagatggg

SEQ ID NO: 1367706 - DNA, 15 bp, Homo sapiens
tgggcacagagatgg

SEQ ID NO: 1367707 - DNA, 15 bp, Homo sapiens
atgggcacagagatg

SEQ ID NO: 1367708 - DNA, 15 bp, Homo sapiens
tatgggcacagagat

SEQ ID NO: 1367709 - DNA, 15 bp, Homo sapiens
atatgggcacagaga

SEQ ID NO: 1367710 - DNA, 15 bp, Homo sapiens
catatgggcacagag

SEQ ID NO: 1367711 - DNA, 15 bp, Homo sapiens
acatatgggcacaga

SEQ ID NO: 1367712 - DNA, 15 bp, Homo sapiens
aacatatgggcacag

SEQ ID NO: 1367713 - DNA, 15 bp, Homo sapiens
gaacatatgggcaca

SEQ ID NO: 1367714 - DNA, 15 bp, Homo sapiens
agaacatatgggcac

SEQ ID NO: 1367715 - DNA, 15 bp, Homo sapiens
gagaacatatgggca

SEQ ID NO: 1367716 - DNA, 15 bp, Homo sapiens
tgagaacatatgggc

SEQ ID NO: 1367717 - DNA, 15 bp, Homo sapiens
atgagaacatatggg

SEQ ID NO: 1367718 - DNA, 15 bp, Homo sapiens
aatgagaacatatgg

SEQ ID NO: 1367719 - DNA, 15 bp, Homo sapiens
taatgagaacatatg

SEQ ID NO: 1367720 - DNA, 15 bp, Homo sapiens
ataatgagaacatat

SEQ ID NO: 1367721 - DNA, 15 bp, Homo sapiens
aataatgagaacata

SEQ ID NO: 1367722 - DNA, 15 bp, Homo sapiens
aaataatgagaacat

SEQ ID NO: 1367723 - DNA, 15 bp, Homo sapiens
taaataatgagaaca

SEQ ID NO: 1367724 - DNA, 15 bp, Homo sapiens
ctaaataatgagaac

SEQ ID NO: 1367725 - DNA, 15 bp, Homo sapiens
gctaaataatgagaa

SEQ ID NO: 1367726 - DNA, 15 bp, Homo sapiens
agctaaataatgaga

SEQ ID NO: 1367727 - DNA, 15 bp, Homo sapiens
gagctaaataatgag

SEQ ID NO: 1367728 - DNA, 15 bp, Homo sapiens
ggagctaaataatga

SEQ ID NO: 1367729 - DNA, 15 bp, Homo sapiens
gggagctaaataatg

SEQ ID NO: 1367730 - DNA, 15 bp, Homo sapiens
tgggagctaaataat

SEQ ID NO: 1367731 - DNA, 15 bp, Homo sapiens
gtgggagctaaataa

SEQ ID NO: 1367732 - DNA, 15 bp, Homo sapiens
ttaagtgggagctaa

SEQ ID NO: 1367733 - DNA, 15 bp, Homo sapiens
attaagtgggagcta

SEQ ID NO: 1367734 - DNA, 15 bp, Homo sapiens
tattaagtgggagct

SEQ ID NO: 1367735 - DNA, 15 bp, Homo sapiens
ttattaagtgggagc

SEQ ID NO: 1367736 - DNA, 15 bp, Homo sapiens
cttattaagtgggag

SEQ ID NO: 1367737 - DNA, 15 bp, Homo sapiens
acttattaagtggga

SEQ ID NO: 1367738 - DNA, 15 bp, Homo sapiens
cacttattaagtggg

SEQ ID NO: 1367739 - DNA, 15 bp, Homo sapiens
tcacttattaagtgg

SEQ ID NO: 1367740 - DNA, 15 bp, Homo sapiens
ttcacttattaagtg

SEQ ID NO: 1367741 - DNA, 15 bp, Homo sapiens
tttcacttattaagt

SEQ ID NO: 1367742 - DNA, 15 bp, Homo sapiens
ttttcacttattaag

SEQ ID NO: 1367743 - DNA, 15 bp, Homo sapiens
gttttcacttattaa

SEQ ID NO: 1367744 - DNA, 15 bp, Homo sapiens
tgttttcacttatta

SEQ ID NO: 1367745 - DNA, 15 bp, Homo sapiens
atgttttcacttatt

SEQ ID NO: 1367746 - DNA, 15 bp, Homo sapiens
catgttttcacttat

SEQ ID NO: 1367747 - DNA, 15 bp, Homo sapiens
acatgttttcactta

SEQ ID NO: 1367748 - DNA, 15 bp, Homo sapiens
cacatgttttcactt

SEQ ID NO: 1367749 - DNA, 15 bp, Homo sapiens
ccacatgttttcact

SEQ ID NO: 1367750 - DNA, 15 bp, Homo sapiens
accacatgttttcac

SEQ ID NO: 1367751 - DNA, 15 bp, Homo sapiens
taccacatgttttca

SEQ ID NO: 1367752 - DNA, 15 bp, Homo sapiens
ataccacatgttttc

SEQ ID NO: 1367753 - DNA, 15 bp, Homo sapiens
aataccacatgtttt

SEQ ID NO: 1367754 - DNA, 15 bp, Homo sapiens
aaataccacatgttt

SEQ ID NO: 1367755 - DNA, 15 bp, Homo sapiens
ccaaataccacatgt

SEQ ID NO: 1367756 - DNA, 15 bp, Homo sapiens
accaaataccacatg

SEQ ID NO: 1367757 - DNA, 15 bp, Homo sapiens
gaaaccaaataccac

SEQ ID NO: 1367758 - DNA, 15 bp, Homo sapiens
ggaaaccaaatacca

SEQ ID NO: 1367759 - DNA, 15 bp, Homo sapiens
aggaaaccaaatacc

SEQ ID NO: 1367760 - DNA, 15 bp, Homo sapiens
caggaaaccaaatac

SEQ ID NO: 1367761 - DNA, 15 bp, Homo sapiens
acaggaaaccaaata

SEQ ID NO: 1367762 - DNA, 15 bp, Homo sapiens
aacaggaaaccaaat

SEQ ID NO: 1367763 - DNA, 15 bp, Homo sapiens
gaacaggaaaccaaa

SEQ ID NO: 1367764 - DNA, 15 bp, Homo sapiens
ggaacaggaaaccaa

SEQ ID NO: 1367765 - DNA, 15 bp, Homo sapiens
aggaacaggaaacca

SEQ ID NO: 1367766 - DNA, 15 bp, Homo sapiens
caggaacaggaaacc

SEQ ID NO: 1367767 - DNA, 15 bp, Homo sapiens
acaggaacaggaaac

SEQ ID NO: 1367768 - DNA, 15 bp, Homo sapiens
cacaggaacaggaaa

SEQ ID NO: 1367769 - DNA, 15 bp, Homo sapiens
acacaggaacaggaa

SEQ ID NO: 1367770 - DNA, 15 bp, Homo sapiens
aacacaggaacagga

SEQ ID NO: 1367771 - DNA, 15 bp, Homo sapiens
gaacacaggaacagg

SEQ ID NO: 1367772 - DNA, 15 bp, Homo sapiens
tgaacacaggaacag

SEQ ID NO: 1367773 - DNA, 15 bp, Homo sapiens
atgaacacaggaaca

SEQ ID NO: 1367774 - DNA, 15 bp, Homo sapiens
aatgaacacaggaac

SEQ ID NO: 1367775 - DNA, 15 bp, Homo sapiens
aaatgaacacaggaa

SEQ ID NO: 1367776 - DNA, 15 bp, Homo sapiens
caaatgaacacagga

SEQ ID NO: 1367777 - DNA, 15 bp, Homo sapiens
gcaaatgaacacagg

SEQ ID NO: 1367778 - DNA, 15 bp, Homo sapiens
agcaaatgaacacag

SEQ ID NO: 1367779 - DNA, 15 bp, Homo sapiens
tagcaaatgaacaca

SEQ ID NO: 1367780 - DNA, 15 bp, Homo sapiens
ttagcaaatgaacac

SEQ ID NO: 1367781 - DNA, 15 bp, Homo sapiens
cttagcaaatgaaca

SEQ ID NO: 1367782 - DNA, 15 bp, Homo sapiens
ccttagcaaatgaac

SEQ ID NO: 1367783 - DNA, 15 bp, Homo sapiens
tccttagcaaatgaa

SEQ ID NO: 1367784 - DNA, 15 bp, Homo sapiens
atccttagcaaatga

SEQ ID NO: 1367785 - DNA, 15 bp, Homo sapiens
tatccttagcaaatg

SEQ ID NO: 1367786 - DNA, 15 bp, Homo sapiens
ttatccttagcaaat

SEQ ID NO: 1367787 - DNA, 15 bp, Homo sapiens
tttatccttagcaaa

SEQ ID NO: 1367788 - DNA, 15 bp, Homo sapiens
ctttatccttagcaa

SEQ ID NO: 1367789 - DNA, 15 bp, Homo sapiens
cctttatccttagca

SEQ ID NO: 1367790 - DNA, 15 bp, Homo sapiens
gcctttatccttagc

SEQ ID NO: 1367791 - DNA, 15 bp, Homo sapiens
ggcctttatccttag

SEQ ID NO: 1367792 - DNA, 15 bp, Homo sapiens
aggcctttatcctta

SEQ ID NO: 1367793 - DNA, 15 bp, Homo sapiens
gaggcctttatcctt

SEQ ID NO: 1367794 - DNA, 15 bp, Homo sapiens
ggaggcctttatcct

SEQ ID NO: 1367795 - DNA, 15 bp, Homo sapiens
tggaggcctttatcc

SEQ ID NO: 1367796 - DNA, 15 bp, Homo sapiens
ctggaggcctttatc

SEQ ID NO: 1367797 - DNA, 15 bp, Homo sapiens
gctggaggcctttat

SEQ ID NO: 1367798 - DNA, 15 bp, Homo sapiens
agctggaggccttta

SEQ ID NO: 1367799 - DNA, 15 bp, Homo sapiens
gagctggaggccttt

SEQ ID NO: 1367800 - DNA, 15 bp, Homo sapiens
ggagctggaggcctt

SEQ ID NO: 1367801 - DNA, 15 bp, Homo sapiens
tggagctggaggcct

SEQ ID NO: 1367802 - DNA, 15 bp, Homo sapiens
tcagggacatggatg

SEQ ID NO: 1367803 - DNA, 15 bp, Homo sapiens
ttcagggacatggat

SEQ ID NO: 1367804 - DNA, 15 bp, Homo sapiens
tttcagggacatgga

SEQ ID NO: 1367805 - DNA, 15 bp, Homo sapiens
ttttcagggacatgg

SEQ ID NO: 1367806 - DNA, 15 bp, Homo sapiens
cttttcagggacatg

SEQ ID NO: 1367807 - DNA, 15 bp, Homo sapiens
ccttttcagggacat

SEQ ID NO: 1367808 - DNA, 15 bp, Homo sapiens
tccttttcagggaca

SEQ ID NO: 1367809 - DNA, 15 bp, Homo sapiens
atccttttcagggac

SEQ ID NO: 1367810 - DNA, 15 bp, Homo sapiens
tatccttttcaggga

SEQ ID NO: 1367811 - DNA, 15 bp, Homo sapiens
gtatccttttcaggg

SEQ ID NO: 1367812 - DNA, 15 bp, Homo sapiens
tgtatccttttcagg

SEQ ID NO: 1367813 - DNA, 15 bp, Homo sapiens
ttgtatccttttcag

SEQ ID NO: 1367814 - DNA, 15 bp, Homo sapiens
gttgtatccttttca

SEQ ID NO: 1367815 - DNA, 15 bp, Homo sapiens
ggttgtatccttttc

SEQ ID NO: 1367816 - DNA, 15 bp, Homo sapiens
aggttgtatcctttt

SEQ ID NO: 1367817 - DNA, 15 bp, Homo sapiens
gaggttgtatccttt

SEQ ID NO: 1367818 - DNA, 15 bp, Homo sapiens
tgaggttgtatcctt

SEQ ID NO: 1367819 - DNA, 15 bp, Homo sapiens
atgaggttgtatcct

SEQ ID NO: 1367820 - DNA, 15 bp, Homo sapiens
aatgaggttgtatcc

SEQ ID NO: 1367821 - DNA, 15 bp, Homo sapiens
gaatgaggttgtatc

SEQ ID NO: 1367822 - DNA, 15 bp, Homo sapiens
agaatgaggttgtat

SEQ ID NO: 1367823 - DNA, 15 bp, Homo sapiens
aagaatgaggttgta

SEQ ID NO: 1367824 - DNA, 15 bp, Homo sapiens
aaagaatgaggttgt

SEQ ID NO: 1367825 - DNA, 15 bp, Homo sapiens
aaaagaatgaggttg

SEQ ID NO: 1367826 - DNA, 15 bp, Homo sapiens
aaaaagaatgaggtt

SEQ ID NO: 1367827 - DNA, 15 bp, Homo sapiens
taaaaagaatgaggt

SEQ ID NO: 1367828 - DNA, 15 bp, Homo sapiens
ataaaaagaatgagg

SEQ ID NO: 1367829 - DNA, 15 bp, Homo sapiens
cataaaaagaatgag

SEQ ID NO: 1367830 - DNA, 15 bp, Homo sapiens
ccataaaaagaatga

SEQ ID NO: 1367831 - DNA, 15 bp, Homo sapiens
gccataaaaagaatg

SEQ ID NO: 1367832 - DNA, 15 bp, Homo sapiens
agccataaaaagaat

SEQ ID NO: 1367833 - DNA, 15 bp, Homo sapiens
cagccataaaaagaa

SEQ ID NO: 1367834 - DNA, 15 bp, Homo sapiens
gcagccataaaaaga

SEQ ID NO: 1367835 - DNA, 15 bp, Homo sapiens
tatggaatactatgc

SEQ ID NO: 1367836 - DNA, 15 bp, Homo sapiens
ctatggaatactatg

SEQ ID NO: 1367837 - DNA, 15 bp, Homo sapiens
actatggaatactat

SEQ ID NO: 1367838 - DNA, 15 bp, Homo sapiens
cactatggaatacta

SEQ ID NO: 1367839 - DNA, 15 bp, Homo sapiens
acactatggaatact

SEQ ID NO: 1367840 - DNA, 15 bp, Homo sapiens
cacactatggaatac

SEQ ID NO: 1367841 - DNA, 15 bp, Homo sapiens
acacactatggaata

SEQ ID NO: 1367842 - DNA, 15 bp, Homo sapiens
tacacactatggaat

SEQ ID NO: 1367843 - DNA, 15 bp, Homo sapiens
atacacactatggaa

SEQ ID NO: 1367844 - DNA, 15 bp, Homo sapiens
catacacactatgga

SEQ ID NO: 1367845 - DNA, 15 bp, Homo sapiens
acatacacactatgg

SEQ ID NO: 1367846 - DNA, 15 bp, Homo sapiens
tacatacacactatg

SEQ ID NO: 1367847 - DNA, 15 bp, Homo sapiens
gtacatacacactat

SEQ ID NO: 1367848 - DNA, 15 bp, Homo sapiens
ggtacatacacacta

SEQ ID NO: 1367849 - DNA, 15 bp, Homo sapiens
tggtacatacacact

SEQ ID NO: 1367850 - DNA, 15 bp, Homo sapiens
gtggtacatacacac

SEQ ID NO: 1367851 - DNA, 15 bp, Homo sapiens
tgtggtacatacaca

SEQ ID NO: 1367852 - DNA, 15 bp, Homo sapiens
atgtggtacatacac

SEQ ID NO: 1367853 - DNA, 15 bp, Homo sapiens
catgtggtacataca

SEQ ID NO: 1367854 - DNA, 15 bp, Homo sapiens
acatgtggtacatac

SEQ ID NO: 1367855 - DNA, 15 bp, Homo sapiens
aacatgtggtacata

SEQ ID NO: 1367856 - DNA, 15 bp, Homo sapiens
taacatgtggtacat

SEQ ID NO: 1367857 - DNA, 15 bp, Homo sapiens
ataacatgtggtaca

SEQ ID NO: 1367858 - DNA, 15 bp, Homo sapiens
aataacatgtggtac

SEQ ID NO: 1367859 - DNA, 15 bp, Homo sapiens
aaataacatgtggta

SEQ ID NO: 1367860 - DNA, 15 bp, Homo sapiens
taaataacatgtggt

SEQ ID NO: 1367861 - DNA, 15 bp, Homo sapiens
ataaataacatgtgg

SEQ ID NO: 1367862 - DNA, 15 bp, Homo sapiens
gataaataacatgtg

SEQ ID NO: 1367863 - DNA, 15 bp, Homo sapiens
ggataaataacatgt

SEQ ID NO: 1367864 - DNA, 15 bp, Homo sapiens
tggataaataacatg

SEQ ID NO: 1367865 - DNA, 15 bp, Homo sapiens
ctggataaataacat

SEQ ID NO: 1367866 - DNA, 15 bp, Homo sapiens
actggataaataaca

SEQ ID NO: 1367867 - DNA, 15 bp, Homo sapiens
gactggataaataac

SEQ ID NO: 1367868 - DNA, 15 bp, Homo sapiens
agactggataaataa

SEQ ID NO: 1367869 - DNA, 15 bp, Homo sapiens
tagactggataaata

SEQ ID NO: 1367870 - DNA, 15 bp, Homo sapiens
atagactggataaat

SEQ ID NO: 1367871 - DNA, 15 bp, Homo sapiens
gatagactggataaa

SEQ ID NO: 1367872 - DNA, 15 bp, Homo sapiens
tgatagactggataa

SEQ ID NO: 1367873 - DNA, 15 bp, Homo sapiens
atgatagactggata

SEQ ID NO: 1367874 - DNA, 15 bp, Homo sapiens
ccaatgatagactgg

SEQ ID NO: 1367875 - DNA, 15 bp, Homo sapiens
accaatgatagactg

SEQ ID NO: 1367876 - DNA, 15 bp, Homo sapiens
caccaatgatagact

SEQ ID NO: 1367877 - DNA, 15 bp, Homo sapiens
ccaccaatgatagac

SEQ ID NO: 1367878 - DNA, 15 bp, Homo sapiens
cccaccaatgataga

SEQ ID NO: 1367879 - DNA, 15 bp, Homo sapiens
gcccaccaatgatag

SEQ ID NO: 1367880 - DNA, 15 bp, Homo sapiens
tgcccaccaatgata

SEQ ID NO: 1367881 - DNA, 15 bp, Homo sapiens
atgcccaccaatgat

SEQ ID NO: 1367882 - DNA, 15 bp, Homo sapiens
aatgcccaccaatga

SEQ ID NO: 1367883 - DNA, 15 bp, Homo sapiens
aaatgcccaccaatg

SEQ ID NO: 1367884 - DNA, 15 bp, Homo sapiens
taaatgcccaccaat

SEQ ID NO: 1367885 - DNA, 15 bp, Homo sapiens
ataaatgcccaccaa

SEQ ID NO: 1367886 - DNA, 15 bp, Homo sapiens
cataaatgcccacca

SEQ ID NO: 1367887 - DNA, 15 bp, Homo sapiens
acataaatgcccacc

SEQ ID NO: 1367888 - DNA, 15 bp, Homo sapiens
aacataaatgcccac

SEQ ID NO: 1367889 - DNA, 15 bp, Homo sapiens
caacataaatgccca

SEQ ID NO: 1367890 - DNA, 15 bp, Homo sapiens
tcaacataaatgccc

SEQ ID NO: 1367891 - DNA, 15 bp, Homo sapiens
atcaacataaatgcc

SEQ ID NO: 1367892 - DNA, 15 bp, Homo sapiens
aatcaacataaatgc

SEQ ID NO: 1367893 - DNA, 15 bp, Homo sapiens
gaatcaacataaatg

SEQ ID NO: 1367894 - DNA, 15 bp, Homo sapiens
ggaatcaacataaat

SEQ ID NO: 1367895 - DNA, 15 bp, Homo sapiens
tggaatcaacataaa

SEQ ID NO: 1367896 - DNA, 15 bp, Homo sapiens
atggaatcaacataa

SEQ ID NO: 1367897 - DNA, 15 bp, Homo sapiens
catggaatcaacata

SEQ ID NO: 1367898 - DNA, 15 bp, Homo sapiens
acatggaatcaacat

SEQ ID NO: 1367899 - DNA, 15 bp, Homo sapiens
gacatggaatcaaca

SEQ ID NO: 1367900 - DNA, 15 bp, Homo sapiens
agacatggaatcaac

SEQ ID NO: 1367901 - DNA, 15 bp, Homo sapiens
gagacatggaatcaa

SEQ ID NO: 1367902 - DNA, 15 bp, Homo sapiens
agagacatggaatca

SEQ ID NO: 1367903 - DNA, 15 bp, Homo sapiens
cagagacatggaatc

SEQ ID NO: 1367904 - DNA, 15 bp, Homo sapiens
gcagagacatggaat

SEQ ID NO: 1367905 - DNA, 15 bp, Homo sapiens
agcagagacatggaa

SEQ ID NO: 1367906 - DNA, 15 bp, Homo sapiens
tagcagagacatgga

SEQ ID NO: 1367907 - DNA, 15 bp, Homo sapiens
atagcagagacatgg

SEQ ID NO: 1367908 - DNA, 15 bp, Homo sapiens
aatagcagagacatg

SEQ ID NO: 1367909 - DNA, 15 bp, Homo sapiens
caatagcagagacat

SEQ ID NO: 1367910 - DNA, 15 bp, Homo sapiens
acaatagcagagaca

SEQ ID NO: 1367911 - DNA, 15 bp, Homo sapiens
cacaatagcagagac

SEQ ID NO: 1367912 - DNA, 15 bp, Homo sapiens
tcacaatagcagaga

SEQ ID NO: 1367913 - DNA, 15 bp, Homo sapiens
ttcacaatagcagag

SEQ ID NO: 1367914 - DNA, 15 bp, Homo sapiens
attcacaatagcaga

SEQ ID NO: 1367915 - DNA, 15 bp, Homo sapiens
tattcacaatagcag

SEQ ID NO: 1367916 - DNA, 15 bp, Homo sapiens
cattgcagcactatt

SEQ ID NO: 1367917 - DNA, 15 bp, Homo sapiens
gtatgttcattgcag

SEQ ID NO: 1367918 - DNA, 15 bp, Homo sapiens
cgtatgttcattgca

SEQ ID NO: 1367919 - DNA, 15 bp, Homo sapiens
gcgtatgttcattgc

SEQ ID NO: 1367920 - DNA, 15 bp, Homo sapiens
tgcgtatgttcattg

SEQ ID NO: 1367921 - DNA, 15 bp, Homo sapiens
atgcgtatgttcatt

SEQ ID NO: 1367922 - DNA, 15 bp, Homo sapiens
catgcgtatgttcat

SEQ ID NO: 1367923 - DNA, 15 bp, Homo sapiens
gcatgcgtatgttca

SEQ ID NO: 1367924 - DNA, 15 bp, Homo sapiens
tgcatgcgtatgttc

SEQ ID NO: 1367925 - DNA, 15 bp, Homo sapiens
atgcatgcgtatgtt

SEQ ID NO: 1367926 - DNA, 15 bp, Homo sapiens
catgcatgcgtatgt

SEQ ID NO: 1367927 - DNA, 15 bp, Homo sapiens
acatgcatgcgtatg

SEQ ID NO: 1367928 - DNA, 15 bp, Homo sapiens
cacatgcatgcgtat

SEQ ID NO: 1367929 - DNA, 15 bp, Homo sapiens
acacatgcatgcgta

SEQ ID NO: 1367930 - DNA, 15 bp, Homo sapiens
gacacatgcatgcgt

SEQ ID NO: 1367931 - DNA, 15 bp, Homo sapiens
agacacatgcatgcg

SEQ ID NO: 1367932 - DNA, 15 bp, Homo sapiens
aagacacatgcatgc

SEQ ID NO: 1367933 - DNA, 15 bp, Homo sapiens
aaagacacatgcatg

SEQ ID NO: 1367934 - DNA, 15 bp, Homo sapiens
taaagacacatgcat

SEQ ID NO: 1367935 - DNA, 15 bp, Homo sapiens
ttataaagacacatg

SEQ ID NO: 1367936 - DNA, 15 bp, Homo sapiens
attataaagacacat

SEQ ID NO: 1367937 - DNA, 15 bp, Homo sapiens
tattataaagacaca

SEQ ID NO: 1367938 - DNA, 15 bp, Homo sapiens
ctattataaagacac

SEQ ID NO: 1367939 - DNA, 15 bp, Homo sapiens
tctattataaagaca

SEQ ID NO: 1367940 - DNA, 15 bp, Homo sapiens
ttctattataaagac

SEQ ID NO: 1367941 - DNA, 15 bp, Homo sapiens
gttctattataaaga

SEQ ID NO: 1367942 - DNA, 15 bp, Homo sapiens
tgttctattataaag

SEQ ID NO: 1367943 - DNA, 15 bp, Homo sapiens
ttgttctattataaa

SEQ ID NO: 1367944 - DNA, 15 bp, Homo sapiens
attgttctattataa

SEQ ID NO: 1367945 - DNA, 15 bp, Homo sapiens
aattgttctattata

SEQ ID NO: 1367946 - DNA, 15 bp, Homo sapiens
aaattgttctattat

SEQ ID NO: 1367947 - DNA, 15 bp, Homo sapiens
taaattgttctatta

SEQ ID NO: 1367948 - DNA, 15 bp, Homo sapiens
ataaattgttctatt

SEQ ID NO: 1367949 - DNA, 15 bp, Homo sapiens
tataaattgttctat

SEQ ID NO: 1367950 - DNA, 15 bp, Homo sapiens
gtataaattgttcta

SEQ ID NO: 1367951 - DNA, 15 bp, Homo sapiens
agtataaattgttct

SEQ ID NO: 1367952 - DNA, 15 bp, Homo sapiens
gagtataaattgttc

SEQ ID NO: 1367953 - DNA, 15 bp, Homo sapiens
ggagtataaattgtt

SEQ ID NO: 1367954 - DNA, 15 bp, Homo sapiens
aggagtataaattgt

SEQ ID NO: 1367955 - DNA, 15 bp, Homo sapiens
aaggagtataaattg

SEQ ID NO: 1367956 - DNA, 15 bp, Homo sapiens
aaaggagtataaatt

SEQ ID NO: 1367957 - DNA, 15 bp, Homo sapiens
ccaaaggagtataaa

SEQ ID NO: 1367958 - DNA, 15 bp, Homo sapiens
cccaaaggagtataa

SEQ ID NO: 1367959 - DNA, 15 bp, Homo sapiens
ccccaaaggagtata

SEQ ID NO: 1367960 - DNA, 15 bp, Homo sapiens
tccccaaaggagtat

SEQ ID NO: 1367961 - DNA, 15 bp, Homo sapiens
atccccaaaggagta

SEQ ID NO: 1367962 - DNA, 15 bp, Homo sapiens
tatccccaaaggagt

SEQ ID NO: 1367963 - DNA, 15 bp, Homo sapiens
atatccccaaaggag

SEQ ID NO: 1367964 - DNA, 15 bp, Homo sapiens
tatatccccaaagga

SEQ ID NO: 1367965 - DNA, 15 bp, Homo sapiens
gtatatccccaaagg

SEQ ID NO: 1367966 - DNA, 15 bp, Homo sapiens
ggtatatccccaaag

SEQ ID NO: 1367967 - DNA, 15 bp, Homo sapiens
aggtatatccccaaa

SEQ ID NO: 1367968 - DNA, 15 bp, Homo sapiens
taggtatatccccaa

SEQ ID NO: 1367969 - DNA, 15 bp, Homo sapiens
ctaggtatatcccca

SEQ ID NO: 1367970 - DNA, 15 bp, Homo sapiens
actaggtatatcccc

SEQ ID NO: 1367971 - DNA, 15 bp, Homo sapiens
tactaggtatatccc

SEQ ID NO: 1367972 - DNA, 15 bp, Homo sapiens
ttactaggtatatcc

SEQ ID NO: 1367973 - DNA, 15 bp, Homo sapiens
attactaggtatatc

SEQ ID NO: 1367974 - DNA, 15 bp, Homo sapiens
aattactaggtatat

SEQ ID NO: 1367975 - DNA, 15 bp, Homo sapiens
caattactaggtata

SEQ ID NO: 1367976 - DNA, 15 bp, Homo sapiens
acaattactaggtat

SEQ ID NO: 1367977 - DNA, 15 bp, Homo sapiens
aacaattactaggta

SEQ ID NO: 1367978 - DNA, 15 bp, Homo sapiens
caacaattactaggt

SEQ ID NO: 1367979 - DNA, 15 bp, Homo sapiens
ccaacaattactagg

SEQ ID NO: 1367980 - DNA, 15 bp, Homo sapiens
cccaacaattactag

SEQ ID NO: 1367981 - DNA, 15 bp, Homo sapiens
acccaacaattacta

SEQ ID NO: 1367982 - DNA, 15 bp, Homo sapiens
cacccaacaattact

SEQ ID NO: 1367983 - DNA, 15 bp, Homo sapiens
ccacccaacaattac

SEQ ID NO: 1367984 - DNA, 15 bp, Homo sapiens
tccacccaacaatta

SEQ ID NO: 1367985 - DNA, 15 bp, Homo sapiens
ttccacccaacaatt

SEQ ID NO: 1367986 - DNA, 15 bp, Homo sapiens
attccacccaacaat

SEQ ID NO: 1367987 - DNA, 15 bp, Homo sapiens
cattccacccaacaa

SEQ ID NO: 1367988 - DNA, 15 bp, Homo sapiens
ccattccacccaaca

SEQ ID NO: 1367989 - DNA, 15 bp, Homo sapiens
accattccacccaac

SEQ ID NO: 1367990 - DNA, 15 bp, Homo sapiens
taccattccacccaa

SEQ ID NO: 1367991 - DNA, 15 bp, Homo sapiens
ataccattccaccca

SEQ ID NO: 1367992 - DNA, 15 bp, Homo sapiens
aataccattccaccc

SEQ ID NO: 1367993 - DNA, 15 bp, Homo sapiens
aaataccattccacc

SEQ ID NO: 1367994 - DNA, 15 bp, Homo sapiens
gaaataccattccac

SEQ ID NO: 1367995 - DNA, 15 bp, Homo sapiens
agaaataccattcca

SEQ ID NO: 1367996 - DNA, 15 bp, Homo sapiens
cagaaataccattcc

SEQ ID NO: 1367997 - DNA, 15 bp, Homo sapiens
acagaaataccattc

SEQ ID NO: 1367998 - DNA, 15 bp, Homo sapiens
gacagaaataccatt

SEQ ID NO: 1367999 - DNA, 15 bp, Homo sapiens
agacagaaataccat

SEQ ID NO: 1368000 - DNA, 15 bp, Homo sapiens
aagacagaaatacca

SEQ ID NO: 1368001 - DNA, 15 bp, Homo sapiens
aaagacagaaatacc

SEQ ID NO: 1368002 - DNA, 15 bp, Homo sapiens
taaagacagaaatac

SEQ ID NO: 1368003 - DNA, 15 bp, Homo sapiens
ctaaagacagaaata

SEQ ID NO: 1368004 - DNA, 15 bp, Homo sapiens
cctaaagacagaaat

SEQ ID NO: 1368005 - DNA, 15 bp, Homo sapiens
acctaaagacagaaa

SEQ ID NO: 1368006 - DNA, 15 bp, Homo sapiens
tacctaaagacagaa

SEQ ID NO: 1368007 - DNA, 15 bp, Homo sapiens
atacctaaagacaga

SEQ ID NO: 1368008 - DNA, 15 bp, Homo sapiens
aatacctaaagacag

SEQ ID NO: 1368009 - DNA, 15 bp, Homo sapiens
aaatacctaaagaca

SEQ ID NO: 1368010 - DNA, 15 bp, Homo sapiens
caaatacctaaagac

SEQ ID NO: 1368011 - DNA, 15 bp, Homo sapiens
tcaaatacctaaaga

SEQ ID NO: 1368012 - DNA, 15 bp, Homo sapiens
ctcaaatacctaaag

SEQ ID NO: 1368013 - DNA, 15 bp, Homo sapiens
cctcaaatacctaaa

SEQ ID NO: 1368014 - DNA, 15 bp, Homo sapiens
tcctcaaatacctaa

SEQ ID NO: 1368015 - DNA, 15 bp, Homo sapiens
ttcctcaaataccta

SEQ ID NO: 1368016 - DNA, 15 bp, Homo sapiens
attcctcaaatacct

SEQ ID NO: 1368017 - DNA, 15 bp, Homo sapiens
aattcctcaaatacc

SEQ ID NO: 1368018 - DNA, 15 bp, Homo sapiens
caattcctcaaatac

SEQ ID NO: 1368019 - DNA, 15 bp, Homo sapiens
gcaattcctcaaata

SEQ ID NO: 1368020 - DNA, 15 bp, Homo sapiens
ggcaattcctcaaat

SEQ ID NO: 1368021 - DNA, 15 bp, Homo sapiens
tggcaattcctcaaa

SEQ ID NO: 1368022 - DNA, 15 bp, Homo sapiens
gtggcaattcctcaa

SEQ ID NO: 1368023 - DNA, 15 bp, Homo sapiens
tgtggcaattcctca

SEQ ID NO: 1368024 - DNA, 15 bp, Homo sapiens
gtgtggcaattcctc

SEQ ID NO: 1368025 - DNA, 15 bp, Homo sapiens
agtgtggcaattcct

SEQ ID NO: 1368026 - DNA, 15 bp, Homo sapiens
tagtgtggcaattcc

SEQ ID NO: 1368027 - DNA, 15 bp, Homo sapiens
atagtgtggcaattc

SEQ ID NO: 1368028 - DNA, 15 bp, Homo sapiens
gatagtgtggcaatt

SEQ ID NO: 1368029 - DNA, 15 bp, Homo sapiens
agatagtgtggcaat

SEQ ID NO: 1368030 - DNA, 15 bp, Homo sapiens
aagatagtgtggcaa

SEQ ID NO: 1368031 - DNA, 15 bp, Homo sapiens
gaagatagtgtggca

SEQ ID NO: 1368032 - DNA, 15 bp, Homo sapiens
ggaagatagtgtggc

SEQ ID NO: 1368033 - DNA, 15 bp, Homo sapiens
tggaagatagtgtgg

SEQ ID NO: 1368034 - DNA, 15 bp, Homo sapiens
atggaagatagtgtg

SEQ ID NO: 1368035 - DNA, 15 bp, Homo sapiens
tatggaagatagtgt

SEQ ID NO: 1368036 - DNA, 15 bp, Homo sapiens
ttatggaagatagtg

SEQ ID NO: 1368037 - DNA, 15 bp, Homo sapiens
attatggaagatagt

SEQ ID NO: 1368038 - DNA, 15 bp, Homo sapiens
aattatggaagatag

SEQ ID NO: 1368039 - DNA, 15 bp, Homo sapiens
caattatggaagata

SEQ ID NO: 1368040 - DNA, 15 bp, Homo sapiens
acaattatggaagat

SEQ ID NO: 1368041 - DNA, 15 bp, Homo sapiens
aacaattatggaaga

SEQ ID NO: 1368042 - DNA, 15 bp, Homo sapiens
caacaattatggaag

SEQ ID NO: 1368043 - DNA, 15 bp, Homo sapiens
tcaacaattatggaa

SEQ ID NO: 1368044 - DNA, 15 bp, Homo sapiens
ttcaacaattatgga

SEQ ID NO: 1368045 - DNA, 15 bp, Homo sapiens
gttcaacaattatgg

SEQ ID NO: 1368046 - DNA, 15 bp, Homo sapiens
agttcaacaattatg

SEQ ID NO: 1368047 - DNA, 15 bp, Homo sapiens
tagttcaacaattat

SEQ ID NO: 1368048 - DNA, 15 bp, Homo sapiens
ttagttcaacaatta

SEQ ID NO: 1368049 - DNA, 15 bp, Homo sapiens
attagttcaacaatt

SEQ ID NO: 1368050 - DNA, 15 bp, Homo sapiens
aattagttcaacaat

SEQ ID NO: 1368051 - DNA, 15 bp, Homo sapiens
aaattagttcaacaa

SEQ ID NO: 1368052 - DNA, 15 bp, Homo sapiens
taaattagttcaaca

SEQ ID NO: 1368053 - DNA, 15 bp, Homo sapiens
atgtaaattagttca

SEQ ID NO: 1368054 - DNA, 15 bp, Homo sapiens
aatgtaaattagttc

SEQ ID NO: 1368055 - DNA, 15 bp, Homo sapiens
gaatgtaaattagtt

SEQ ID NO: 1368056 - DNA, 15 bp, Homo sapiens
ttggtgggaatgtaa

SEQ ID NO: 1368057 - DNA, 15 bp, Homo sapiens
gttggtgggaatgta

SEQ ID NO: 1368058 - DNA, 15 bp, Homo sapiens
tgttggtgggaatgt

SEQ ID NO: 1368059 - DNA, 15 bp, Homo sapiens
ctgttggtgggaatg

SEQ ID NO: 1368060 - DNA, 15 bp, Homo sapiens
actgttggtgggaat

SEQ ID NO: 1368061 - DNA, 15 bp, Homo sapiens
gactgttggtgggaa

SEQ ID NO: 1368062 - DNA, 15 bp, Homo sapiens
agactgttggtggga

SEQ ID NO: 1368063 - DNA, 15 bp, Homo sapiens
tagactgttggtggg

SEQ ID NO: 1368064 - DNA, 15 bp, Homo sapiens
atagactgttggtgg

SEQ ID NO: 1368065 - DNA, 15 bp, Homo sapiens
tatagactgttggtg

SEQ ID NO: 1368066 - DNA, 15 bp, Homo sapiens
ttatagactgttggt

SEQ ID NO: 1368067 - DNA, 15 bp, Homo sapiens
tttatagactgttgg

SEQ ID NO: 1368068 - DNA, 15 bp, Homo sapiens
atttatagactgttg

SEQ ID NO: 1368069 - DNA, 15 bp, Homo sapiens
tatttatagactgtt

SEQ ID NO: 1368070 - DNA, 15 bp, Homo sapiens
atatttatagactgt

SEQ ID NO: 1368071 - DNA, 15 bp, Homo sapiens
aatatttatagactg

SEQ ID NO: 1368072 - DNA, 15 bp, Homo sapiens
gaatatttatagact

SEQ ID NO: 1368073 - DNA, 15 bp, Homo sapiens
ggaatatttatagac

SEQ ID NO: 1368074 - DNA, 15 bp, Homo sapiens
tggaatatttataga

SEQ ID NO: 1368075 - DNA, 15 bp, Homo sapiens
atggaatatttatag

SEQ ID NO: 1368076 - DNA, 15 bp, Homo sapiens
aatggaatatttata

SEQ ID NO: 1368077 - DNA, 15 bp, Homo sapiens
aaatggaatatttat

SEQ ID NO: 1368078 - DNA, 15 bp, Homo sapiens
aaaatggaatattta

SEQ ID NO: 1368079 - DNA, 15 bp, Homo sapiens
aaaaatggaatattt

SEQ ID NO: 1368080 - DNA, 15 bp, Homo sapiens
aaaaaatggaatatt

SEQ ID NO: 1368081 - DNA, 15 bp, Homo sapiens
aaaaaaatggaatat

SEQ ID NO: 1368082 - DNA, 15 bp, Homo sapiens
aaaaaaaatggaata

SEQ ID NO: 1368083 - DNA, 15 bp, Homo sapiens
gaaaaaaaatggaat

SEQ ID NO: 1368084 - DNA, 15 bp, Homo sapiens
tgaaaaaaaatggaa

SEQ ID NO: 1368085 - DNA, 15 bp, Homo sapiens
gtgaaaaaaaatgga

SEQ ID NO: 1368086 - DNA, 15 bp, Homo sapiens
tgtgaaaaaaaatgg

SEQ ID NO: 1368087 - DNA, 15 bp, Homo sapiens
ttgtgaaaaaaaatg

SEQ ID NO: 1368088 - DNA, 15 bp, Homo sapiens
gttgtgaaaaaaaat

SEQ ID NO: 1368089 - DNA, 15 bp, Homo sapiens
ggttgtgaaaaaaaa

SEQ ID NO: 1368090 - DNA, 15 bp, Homo sapiens
aggttgtgaaaaaaa

SEQ ID NO: 1368091 - DNA, 15 bp, Homo sapiens
gaggttgtgaaaaaa

SEQ ID NO: 1368092 - DNA, 15 bp, Homo sapiens
tgaggttgtgaaaaa

SEQ ID NO: 1368093 - DNA, 15 bp, Homo sapiens
gtgaggttgtgaaaa

SEQ ID NO: 1368094 - DNA, 15 bp, Homo sapiens
ggtgaggttgtgaaa

SEQ ID NO: 1368095 - DNA, 15 bp, Homo sapiens
tggtgaggttgtgaa

SEQ ID NO: 1368096 - DNA, 15 bp, Homo sapiens
ctggtgaggttgtga

SEQ ID NO: 1368097 - DNA, 15 bp, Homo sapiens
gctggtgaggttgtg

SEQ ID NO: 1368098 - DNA, 15 bp, Homo sapiens
tgctggtgaggttgt

SEQ ID NO: 1368099 - DNA, 15 bp, Homo sapiens
gtgctggtgaggttg

SEQ ID NO: 1368100 - DNA, 15 bp, Homo sapiens
ggtgctggtgaggtt

SEQ ID NO: 1368101 - DNA, 15 bp, Homo sapiens
aggtgctggtgaggt

SEQ ID NO: 1368102 - DNA, 15 bp, Homo sapiens
caggtgctggtgagg

SEQ ID NO: 1368103 - DNA, 15 bp, Homo sapiens
acaggtgctggtgag

SEQ ID NO: 1368104 - DNA, 15 bp, Homo sapiens
aacaggtgctggtga

SEQ ID NO: 1368105 - DNA, 15 bp, Homo sapiens
taacaggtgctggtg

SEQ ID NO: 1368106 - DNA, 15 bp, Homo sapiens
ataacaggtgctggt

SEQ ID NO: 1368107 - DNA, 15 bp, Homo sapiens
aataacaggtgctgg

SEQ ID NO: 1368108 - DNA, 15 bp, Homo sapiens
aaataacaggtgctg

SEQ ID NO: 1368109 - DNA, 15 bp, Homo sapiens
aaaataacaggtgct

SEQ ID NO: 1368110 - DNA, 15 bp, Homo sapiens
aaaaataacaggtgc

SEQ ID NO: 1368111 - DNA, 15 bp, Homo sapiens
aaaaaataacaggtg

SEQ ID NO: 1368112 - DNA, 15 bp, Homo sapiens
caaaaaataacaggt

SEQ ID NO: 1368113 - DNA, 15 bp, Homo sapiens
tcaaaaaataacagg

SEQ ID NO: 1368114 - DNA, 15 bp, Homo sapiens
aaaagtcaaaaaata

SEQ ID NO: 1368115 - DNA, 15 bp, Homo sapiens
aaaaagtcaaaaaat

SEQ ID NO: 1368116 - DNA, 15 bp, Homo sapiens
tattaaaaagtcaaa

SEQ ID NO: 1368117 - DNA, 15 bp, Homo sapiens
ttattaaaaagtcaa

SEQ ID NO: 1368118 - DNA, 15 bp, Homo sapiens
attattaaaaagtca

SEQ ID NO: 1368119 - DNA, 15 bp, Homo sapiens
tattattaaaaagtc

SEQ ID NO: 1368120 - DNA, 15 bp, Homo sapiens
ctattattaaaaagt

SEQ ID NO: 1368121 - DNA, 15 bp, Homo sapiens
gctattattaaaaag

SEQ ID NO: 1368122 - DNA, 15 bp, Homo sapiens
tgctattattaaaaa

SEQ ID NO: 1368123 - DNA, 15 bp, Homo sapiens
ttgctattattaaaa

SEQ ID NO: 1368124 - DNA, 15 bp, Homo sapiens
attgctattattaaa

SEQ ID NO: 1368125 - DNA, 15 bp, Homo sapiens
aattgctattattaa

SEQ ID NO: 1368126 - DNA, 15 bp, Homo sapiens
gaattgctattatta

SEQ ID NO: 1368127 - DNA, 15 bp, Homo sapiens
agaattgctattatt

SEQ ID NO: 1368128 - DNA, 15 bp, Homo sapiens
cagaattgctattat

SEQ ID NO: 1368129 - DNA, 15 bp, Homo sapiens
tcagaattgctatta

SEQ ID NO: 1368130 - DNA, 15 bp, Homo sapiens
gtcagaattgctatt

SEQ ID NO: 1368131 - DNA, 15 bp, Homo sapiens
agtcagaattgctat

SEQ ID NO: 1368132 - DNA, 15 bp, Homo sapiens
cagtcagaattgcta

SEQ ID NO: 1368133 - DNA, 15 bp, Homo sapiens
ccagtcagaattgct

SEQ ID NO: 1368134 - DNA, 15 bp, Homo sapiens
cccagtcagaattgc

SEQ ID NO: 1368135 - DNA, 15 bp, Homo sapiens
ccccagtcagaattg

SEQ ID NO: 1368136 - DNA, 15 bp, Homo sapiens
accccagtcagaatt

SEQ ID NO: 1368137 - DNA, 15 bp, Homo sapiens
caccccagtcagaat

SEQ ID NO: 1368138 - DNA, 15 bp, Homo sapiens
tcaccccagtcagaa

SEQ ID NO: 1368139 - DNA, 15 bp, Homo sapiens
ctcaccccagtcaga

SEQ ID NO: 1368140 - DNA, 15 bp, Homo sapiens
tctcaccccagtcag

SEQ ID NO: 1368141 - DNA, 15 bp, Homo sapiens
atctcaccccagtca

SEQ ID NO: 1368142 - DNA, 15 bp, Homo sapiens
catctcaccccagtc

SEQ ID NO: 1368143 - DNA, 15 bp, Homo sapiens
ccatctcaccccagt

SEQ ID NO: 1368144 - DNA, 15 bp, Homo sapiens
accatctcaccccag

SEQ ID NO: 1368145 - DNA, 15 bp, Homo sapiens
taccatctcacccca

SEQ ID NO: 1368146 - DNA, 15 bp, Homo sapiens
ataccatctcacccc

SEQ ID NO: 1368147 - DNA, 15 bp, Homo sapiens
gataccatctcaccc

SEQ ID NO: 1368148 - DNA, 15 bp, Homo sapiens
agataccatctcacc

SEQ ID NO: 1368149 - DNA, 15 bp, Homo sapiens
gaaatcaaaaccaca

SEQ ID NO: 1368150 - DNA, 15 bp, Homo sapiens
tgaaatcaaaaccac

SEQ ID NO: 1368151 - DNA, 15 bp, Homo sapiens
atgaaatcaaaacca

SEQ ID NO: 1368152 - DNA, 15 bp, Homo sapiens
aatgaaatcaaaacc

SEQ ID NO: 1368153 - DNA, 15 bp, Homo sapiens
aaatgaaatcaaaac

SEQ ID NO: 1368154 - DNA, 15 bp, Homo sapiens
gaaatgaaatcaaaa

SEQ ID NO: 1368155 - DNA, 15 bp, Homo sapiens
agaaatgaaatcaaa

SEQ ID NO: 1368156 - DNA, 15 bp, Homo sapiens
gagaaatgaaatcaa

SEQ ID NO: 1368157 - DNA, 15 bp, Homo sapiens
agagaaatgaaatca

SEQ ID NO: 1368158 - DNA, 15 bp, Homo sapiens
tagagaaatgaaatc

SEQ ID NO: 1368159 - DNA, 15 bp, Homo sapiens
ttagagaaatgaaat

SEQ ID NO: 1368160 - DNA, 15 bp, Homo sapiens
attagagaaatgaaa

SEQ ID NO: 1368161 - DNA, 15 bp, Homo sapiens
cattagagaaatgaa

SEQ ID NO: 1368162 - DNA, 15 bp, Homo sapiens
ccattagagaaatga

SEQ ID NO: 1368163 - DNA, 15 bp, Homo sapiens
accattagagaaatg

SEQ ID NO: 1368164 - DNA, 15 bp, Homo sapiens
gaccattagagaaat

SEQ ID NO: 1368165 - DNA, 15 bp, Homo sapiens
tgaccattagagaaa

SEQ ID NO: 1368166 - DNA, 15 bp, Homo sapiens
ttgaccattagagaa

SEQ ID NO: 1368167 - DNA, 15 bp, Homo sapiens
attgaccattagaga

SEQ ID NO: 1368168 - DNA, 15 bp, Homo sapiens
cattgaccattagag

SEQ ID NO: 1368169 - DNA, 15 bp, Homo sapiens
tcattgaccattaga

SEQ ID NO: 1368170 - DNA, 15 bp, Homo sapiens
atcattgaccattag

SEQ ID NO: 1368171 - DNA, 15 bp, Homo sapiens
catcattgaccatta

SEQ ID NO: 1368172 - DNA, 15 bp, Homo sapiens
acatcattgaccatt

SEQ ID NO: 1368173 - DNA, 15 bp, Homo sapiens
aacatcattgaccat

SEQ ID NO: 1368174 - DNA, 15 bp, Homo sapiens
caacatcattgacca

SEQ ID NO: 1368175 - DNA, 15 bp, Homo sapiens
tcaacatcattgacc

SEQ ID NO: 1368176 - DNA, 15 bp, Homo sapiens
ctcaacatcattgac

SEQ ID NO: 1368177 - DNA, 15 bp, Homo sapiens
gctcaacatcattga

SEQ ID NO: 1368178 - DNA, 15 bp, Homo sapiens
agctcaacatcattg

SEQ ID NO: 1368179 - DNA, 15 bp, Homo sapiens
aagctcaacatcatt

SEQ ID NO: 1368180 - DNA, 15 bp, Homo sapiens
aaagctcaacatcat

SEQ ID NO: 1368181 - DNA, 15 bp, Homo sapiens
aaaagctcaacatca

SEQ ID NO: 1368182 - DNA, 15 bp, Homo sapiens
gaaaagctcaacatc

SEQ ID NO: 1368183 - DNA, 15 bp, Homo sapiens
agaaaagctcaacat

SEQ ID NO: 1368184 - DNA, 15 bp, Homo sapiens
aagaaaagctcaaca

SEQ ID NO: 1368185 - DNA, 15 bp, Homo sapiens
gaagaaaagctcaac

SEQ ID NO: 1368186 - DNA, 15 bp, Homo sapiens
tgaagaaaagctcaa

SEQ ID NO: 1368187 - DNA, 15 bp, Homo sapiens
atgaagaaaagctca

SEQ ID NO: 1368188 - DNA, 15 bp, Homo sapiens
tatgaagaaaagctc

SEQ ID NO: 1368189 - DNA, 15 bp, Homo sapiens
atatgaagaaaagct

SEQ ID NO: 1368190 - DNA, 15 bp, Homo sapiens
aatatgaagaaaagc

SEQ ID NO: 1368191 - DNA, 15 bp, Homo sapiens
gaatatgaagaaaag

SEQ ID NO: 1368192 - DNA, 15 bp, Homo sapiens
agaatatgaagaaaa

SEQ ID NO: 1368193 - DNA, 15 bp, Homo sapiens
gagaatatgaagaaa

SEQ ID NO: 1368194 - DNA, 15 bp, Homo sapiens
tgagaatatgaagaa

SEQ ID NO: 1368195 - DNA, 15 bp, Homo sapiens
atgagaatatgaaga

SEQ ID NO: 1368196 - DNA, 15 bp, Homo sapiens
aatgagaatatgaag

SEQ ID NO: 1368197 - DNA, 15 bp, Homo sapiens
caatgagaatatgaa

SEQ ID NO: 1368198 - DNA, 15 bp, Homo sapiens
ccaatgagaatatga

SEQ ID NO: 1368199 - DNA, 15 bp, Homo sapiens
gccaatgagaatatg

SEQ ID NO: 1368200 - DNA, 15 bp, Homo sapiens
ggccaatgagaatat

SEQ ID NO: 1368201 - DNA, 15 bp, Homo sapiens
tggccaatgagaata

SEQ ID NO: 1368202 - DNA, 15 bp, Homo sapiens
gtggccaatgagaat

SEQ ID NO: 1368203 - DNA, 15 bp, Homo sapiens
tgtggccaatgagaa

SEQ ID NO: 1368204 - DNA, 15 bp, Homo sapiens
atgtggccaatgaga

SEQ ID NO: 1368205 - DNA, 15 bp, Homo sapiens
catgtggccaatgag

SEQ ID NO: 1368206 - DNA, 15 bp, Homo sapiens
acatgtggccaatga

SEQ ID NO: 1368207 - DNA, 15 bp, Homo sapiens
tacatgtggccaatg

SEQ ID NO: 1368208 - DNA, 15 bp, Homo sapiens
atacatgtggccaat

SEQ ID NO: 1368209 - DNA, 15 bp, Homo sapiens
catacatgtggccaa

SEQ ID NO: 1368210 - DNA, 15 bp, Homo sapiens
acatacatgtggcca

SEQ ID NO: 1368211 - DNA, 15 bp, Homo sapiens
gacatacatgtggcc

SEQ ID NO: 1368212 - DNA, 15 bp, Homo sapiens
agacatacatgtggc

SEQ ID NO: 1368213 - DNA, 15 bp, Homo sapiens
aagacatacatgtgg

SEQ ID NO: 1368214 - DNA, 15 bp, Homo sapiens
gaagacatacatgtg

SEQ ID NO: 1368215 - DNA, 15 bp, Homo sapiens
agaagacatacatgt

SEQ ID NO: 1368216 - DNA, 15 bp, Homo sapiens
aagaagacatacatg

SEQ ID NO: 1368217 - DNA, 15 bp, Homo sapiens
aaagaagacatacat

SEQ ID NO: 1368218 - DNA, 15 bp, Homo sapiens
aaaagaagacataca

SEQ ID NO: 1368219 - DNA, 15 bp, Homo sapiens
caaaagaagacatac

SEQ ID NO: 1368220 - DNA, 15 bp, Homo sapiens
tcaaaagaagacata

SEQ ID NO: 1368221 - DNA, 15 bp, Homo sapiens
ttcaaaagaagacat

SEQ ID NO: 1368222 - DNA, 15 bp, Homo sapiens
tttcaaaagaagaca

SEQ ID NO: 1368223 - DNA, 15 bp, Homo sapiens
ttttcaaaagaagac

SEQ ID NO: 1368224 - DNA, 15 bp, Homo sapiens
gttttcaaaagaaga

SEQ ID NO: 1368225 - DNA, 15 bp, Homo sapiens
agttttcaaaagaag

SEQ ID NO: 1368226 - DNA, 15 bp, Homo sapiens
cagttttcaaaagaa

SEQ ID NO: 1368227 - DNA, 15 bp, Homo sapiens
acagttttcaaaaga

SEQ ID NO: 1368228 - DNA, 15 bp, Homo sapiens
gacagttttcaaaag

SEQ ID NO: 1368229 - DNA, 15 bp, Homo sapiens
agacagttttcaaaa

SEQ ID NO: 1368230 - DNA, 15 bp, Homo sapiens
tagacagttttcaaa

SEQ ID NO: 1368231 - DNA, 15 bp, Homo sapiens
atagacagttttcaa

SEQ ID NO: 1368232 - DNA, 15 bp, Homo sapiens
catagacagttttca

SEQ ID NO: 1368233 - DNA, 15 bp, Homo sapiens
acatagacagttttc

SEQ ID NO: 1368234 - DNA, 15 bp, Homo sapiens
gacatagacagtttt

SEQ ID NO: 1368235 - DNA, 15 bp, Homo sapiens
agacatagacagttt

SEQ ID NO: 1368236 - DNA, 15 bp, Homo sapiens
cagacatagacagtt

SEQ ID NO: 1368237 - DNA, 15 bp, Homo sapiens
gcagacatagacagt

SEQ ID NO: 1368238 - DNA, 15 bp, Homo sapiens
ggcagacatagacag

SEQ ID NO: 1368239 - DNA, 15 bp, Homo sapiens
gggcagacatagaca

SEQ ID NO: 1368240 - DNA, 15 bp, Homo sapiens
tgggcagacatagac

SEQ ID NO: 1368241 - DNA, 15 bp, Homo sapiens
ttgggcagacataga

SEQ ID NO: 1368242 - DNA, 15 bp, Homo sapiens
attgggcagacatag

SEQ ID NO: 1368243 - DNA, 15 bp, Homo sapiens
aattgggcagacata

SEQ ID NO: 1368244 - DNA, 15 bp, Homo sapiens
aaattgggcagacat

SEQ ID NO: 1368245 - DNA, 15 bp, Homo sapiens
aaaattgggcagaca

SEQ ID NO: 1368246 - DNA, 15 bp, Homo sapiens
aaaaattgggcagac

SEQ ID NO: 1368247 - DNA, 15 bp, Homo sapiens
taaaaattgggcaga

SEQ ID NO: 1368248 - DNA, 15 bp, Homo sapiens
ttaaaaattgggcag

SEQ ID NO: 1368249 - DNA, 15 bp, Homo sapiens
attaaaaattgggca

SEQ ID NO: 1368250 - DNA, 15 bp, Homo sapiens
cattaaaaattgggc

SEQ ID NO: 1368251 - DNA, 15 bp, Homo sapiens
ccattaaaaattggg

SEQ ID NO: 1368252 - DNA, 15 bp, Homo sapiens
cccattaaaaattgg

SEQ ID NO: 1368253 - DNA, 15 bp, Homo sapiens
ccccattaaaaattg

SEQ ID NO: 1368254 - DNA, 15 bp, Homo sapiens
accccattaaaaatt

SEQ ID NO: 1368255 - DNA, 15 bp, Homo sapiens
aaccccattaaaaat

SEQ ID NO: 1368256 - DNA, 15 bp, Homo sapiens
caaccccattaaaaa

SEQ ID NO: 1368257 - DNA, 15 bp, Homo sapiens
acaaccccattaaaa

SEQ ID NO: 1368258 - DNA, 15 bp, Homo sapiens
aacaaccccattaaa

SEQ ID NO: 1368259 - DNA, 15 bp, Homo sapiens
aaacaaccccattaa

SEQ ID NO: 1368260 - DNA, 15 bp, Homo sapiens
aaaacaaccccatta

SEQ ID NO: 1368261 - DNA, 15 bp, Homo sapiens
aaaaacaaccccatt

SEQ ID NO: 1368262 - DNA, 15 bp, Homo sapiens
aaaaaacaaccccat

SEQ ID NO: 1368263 - DNA, 15 bp, Homo sapiens
acaagaaaaaaacaa

SEQ ID NO: 1368264 - DNA, 15 bp, Homo sapiens
tacaagaaaaaaaca

SEQ ID NO: 1368265 - DNA, 15 bp, Homo sapiens
ttacaagaaaaaaac

SEQ ID NO: 1368266 - DNA, 15 bp, Homo sapiens
tttacaagaaaaaaa

SEQ ID NO: 1368267 - DNA, 15 bp, Homo sapiens
atttacaagaaaaaa

SEQ ID NO: 1368268 - DNA, 15 bp, Homo sapiens
aatttacaagaaaaa

SEQ ID NO: 1368269 - DNA, 15 bp, Homo sapiens
aaatttacaagaaaa

SEQ ID NO: 1368270 - DNA, 15 bp, Homo sapiens
caaatttacaagaaa

SEQ ID NO: 1368271 - DNA, 15 bp, Homo sapiens
acaaatttacaagaa

SEQ ID NO: 1368272 - DNA, 15 bp, Homo sapiens
aacaaatttacaaga

SEQ ID NO: 1368273 - DNA, 15 bp, Homo sapiens
aaacaaatttacaag

SEQ ID NO: 1368274 - DNA, 15 bp, Homo sapiens
taaacaaatttacaa

SEQ ID NO: 1368275 - DNA, 15 bp, Homo sapiens
ttaaacaaatttaca

SEQ ID NO: 1368276 - DNA, 15 bp, Homo sapiens
cttaaacaaatttac

SEQ ID NO: 1368277 - DNA, 15 bp, Homo sapiens
acttaaacaaattta

SEQ ID NO: 1368278 - DNA, 15 bp, Homo sapiens
aacttaaacaaattt

SEQ ID NO: 1368279 - DNA, 15 bp, Homo sapiens
gaacttaaacaaatt

SEQ ID NO: 1368280 - DNA, 15 bp, Homo sapiens
ggaacttaaacaaat

SEQ ID NO: 1368281 - DNA, 15 bp, Homo sapiens
aggaacttaaacaaa

SEQ ID NO: 1368282 - DNA, 15 bp, Homo sapiens
aaggaacttaaacaa

SEQ ID NO: 1368283 - DNA, 15 bp, Homo sapiens
taaggaacttaaaca

SEQ ID NO: 1368284 - DNA, 15 bp, Homo sapiens
ctaaggaacttaaac

SEQ ID NO: 1368285 - DNA, 15 bp, Homo sapiens
tctaaggaacttaaa

SEQ ID NO: 1368286 - DNA, 15 bp, Homo sapiens
ctctaaggaacttaa

SEQ ID NO: 1368287 - DNA, 15 bp, Homo sapiens
tctctaaggaactta

SEQ ID NO: 1368288 - DNA, 15 bp, Homo sapiens
atctctaaggaactt

SEQ ID NO: 1368289 - DNA, 15 bp, Homo sapiens
catctctaaggaact

SEQ ID NO: 1368290 - DNA, 15 bp, Homo sapiens
gcatctctaaggaac

SEQ ID NO: 1368291 - DNA, 15 bp, Homo sapiens
agcatctctaaggaa

SEQ ID NO: 1368292 - DNA, 15 bp, Homo sapiens
cagcatctctaagga

SEQ ID NO: 1368293 - DNA, 15 bp, Homo sapiens
ccagcatctctaagg

SEQ ID NO: 1368294 - DNA, 15 bp, Homo sapiens
tccagcatctctaag

SEQ ID NO: 1368295 - DNA, 15 bp, Homo sapiens
atccagcatctctaa

SEQ ID NO: 1368296 - DNA, 15 bp, Homo sapiens
tatccagcatctcta

SEQ ID NO: 1368297 - DNA, 15 bp, Homo sapiens
atatccagcatctct

SEQ ID NO: 1368298 - DNA, 15 bp, Homo sapiens
aatatccagcatctc

SEQ ID NO: 1368299 - DNA, 15 bp, Homo sapiens
taatatccagcatct

SEQ ID NO: 1368300 - DNA, 15 bp, Homo sapiens
ctaatatccagcatc

SEQ ID NO: 1368301 - DNA, 15 bp, Homo sapiens
tctaatatccagcat

SEQ ID NO: 1368302 - DNA, 15 bp, Homo sapiens
gtctaatatccagca

SEQ ID NO: 1368303 - DNA, 15 bp, Homo sapiens
ggtctaatatccagc

SEQ ID NO: 1368304 - DNA, 15 bp, Homo sapiens
aggtctaatatccag

SEQ ID NO: 1368305 - DNA, 15 bp, Homo sapiens
aaggtctaatatcca

SEQ ID NO: 1368306 - DNA, 15 bp, Homo sapiens
aaaggtctaatatcc

SEQ ID NO: 1368307 - DNA, 15 bp, Homo sapiens
caaaggtctaatatc

SEQ ID NO: 1368308 - DNA, 15 bp, Homo sapiens
acaaaggtctaatat

SEQ ID NO: 1368309 - DNA, 15 bp, Homo sapiens
gacaaaggtctaata

SEQ ID NO: 1368310 - DNA, 15 bp, Homo sapiens
tgacaaaggtctaat

SEQ ID NO: 1368311 - DNA, 15 bp, Homo sapiens
ctgacaaaggtctaa

SEQ ID NO: 1368312 - DNA, 15 bp, Homo sapiens
tctgacaaaggtcta

SEQ ID NO: 1368313 - DNA, 15 bp, Homo sapiens
atctgacaaaggtct

SEQ ID NO: 1368314 - DNA, 15 bp, Homo sapiens
catctgacaaaggtc

SEQ ID NO: 1368315 - DNA, 15 bp, Homo sapiens
gcatctgacaaaggt

SEQ ID NO: 1368316 - DNA, 15 bp, Homo sapiens
taaactatgcatctg

SEQ ID NO: 1368317 - DNA, 15 bp, Homo sapiens
gtaaactatgcatct

SEQ ID NO: 1368318 - DNA, 15 bp, Homo sapiens
tgtaaactatgcatc

SEQ ID NO: 1368319 - DNA, 15 bp, Homo sapiens
ttgtaaactatgcat

SEQ ID NO: 1368320 - DNA, 15 bp, Homo sapiens
tttgtaaactatgca

SEQ ID NO: 1368321 - DNA, 15 bp, Homo sapiens
ttttgtaaactatgc

SEQ ID NO: 1368322 - DNA, 15 bp, Homo sapiens
tttttgtaaactatg

SEQ ID NO: 1368323 - DNA, 15 bp, Homo sapiens
atttttgtaaactat

SEQ ID NO: 1368324 - DNA, 15 bp, Homo sapiens
aatttttgtaaacta

SEQ ID NO: 1368325 - DNA, 15 bp, Homo sapiens
aaatttttgtaaact

SEQ ID NO: 1368326 - DNA, 15 bp, Homo sapiens
aaaatttttgtaaac

SEQ ID NO: 1368327 - DNA, 15 bp, Homo sapiens
aaaaatttttgtaaa

SEQ ID NO: 1368328 - DNA, 15 bp, Homo sapiens
gaaaaatttttgtaa

SEQ ID NO: 1368329 - DNA, 15 bp, Homo sapiens
agaaaaatttttgta

SEQ ID NO: 1368330 - DNA, 15 bp, Homo sapiens
gagaaaaatttttgt

SEQ ID NO: 1368331 - DNA, 15 bp, Homo sapiens
ggagaaaaatttttg

SEQ ID NO: 1368332 - DNA, 15 bp, Homo sapiens
gggagaaaaattttt

SEQ ID NO: 1368333 - DNA, 15 bp, Homo sapiens
tgggagaaaaatttt

SEQ ID NO: 1368334 - DNA, 15 bp, Homo sapiens
atgggagaaaaattt

SEQ ID NO: 1368335 - DNA, 15 bp, Homo sapiens
aatgggagaaaaatt

SEQ ID NO: 1368336 - DNA, 15 bp, Homo sapiens
gaatgggagaaaaat

SEQ ID NO: 1368337 - DNA, 15 bp, Homo sapiens
agaatgggagaaaaa

SEQ ID NO: 1368338 - DNA, 15 bp, Homo sapiens
acaacctacagaatg

SEQ ID NO: 1368339 - DNA, 15 bp, Homo sapiens
gacaacctacagaat

SEQ ID NO: 1368340 - DNA, 15 bp, Homo sapiens
agacaacctacagaa

SEQ ID NO: 1368341 - DNA, 15 bp, Homo sapiens
cagacaacctacaga

SEQ ID NO: 1368342 - DNA, 15 bp, Homo sapiens
acagacaacctacag

SEQ ID NO: 1368343 - DNA, 15 bp, Homo sapiens
aacagacaacctaca

SEQ ID NO: 1368344 - DNA, 15 bp, Homo sapiens
aaacagacaacctac

SEQ ID NO: 1368345 - DNA, 15 bp, Homo sapiens
taaacagacaaccta

SEQ ID NO: 1368346 - DNA, 15 bp, Homo sapiens
gtaaacagacaacct

SEQ ID NO: 1368347 - DNA, 15 bp, Homo sapiens
agtaaacagacaacc

SEQ ID NO: 1368348 - DNA, 15 bp, Homo sapiens
gagtaaacagacaac

SEQ ID NO: 1368349 - DNA, 15 bp, Homo sapiens
agagtaaacagacaa

SEQ ID NO: 1368350 - DNA, 15 bp, Homo sapiens
cagagtaaacagaca

SEQ ID NO: 1368351 - DNA, 15 bp, Homo sapiens
tcagagtaaacagac

SEQ ID NO: 1368352 - DNA, 15 bp, Homo sapiens
atcagagtaaacaga

SEQ ID NO: 1368353 - DNA, 15 bp, Homo sapiens
catcagagtaaacag

SEQ ID NO: 1368354 - DNA, 15 bp, Homo sapiens
tcatcagagtaaaca

SEQ ID NO: 1368355 - DNA, 15 bp, Homo sapiens
atcatcagagtaaac

SEQ ID NO: 1368356 - DNA, 15 bp, Homo sapiens
tatcatcagagtaaa

SEQ ID NO: 1368357 - DNA, 15 bp, Homo sapiens
ctatcatcagagtaa

SEQ ID NO: 1368358 - DNA, 15 bp, Homo sapiens
actatcatcagagta

SEQ ID NO: 1368359 - DNA, 15 bp, Homo sapiens
aactatcatcagagt

SEQ ID NO: 1368360 - DNA, 15 bp, Homo sapiens
aaactatcatcagag

SEQ ID NO: 1368361 - DNA, 15 bp, Homo sapiens
gaaactatcatcaga

SEQ ID NO: 1368362 - DNA, 15 bp, Homo sapiens
agaaactatcatcag

SEQ ID NO: 1368363 - DNA, 15 bp, Homo sapiens
aagaaactatcatca

SEQ ID NO: 1368364 - DNA, 15 bp, Homo sapiens
aaagaaactatcatc

SEQ ID NO: 1368365 - DNA, 15 bp, Homo sapiens
aaaagaaactatcat

SEQ ID NO: 1368366 - DNA, 15 bp, Homo sapiens
caaaagaaactatca

SEQ ID NO: 1368367 - DNA, 15 bp, Homo sapiens
gcaaaagaaactatc

SEQ ID NO: 1368368 - DNA, 15 bp, Homo sapiens
agcaaaagaaactat

SEQ ID NO: 1368369 - DNA, 15 bp, Homo sapiens
cagcaaaagaaacta

SEQ ID NO: 1368370 - DNA, 15 bp, Homo sapiens
acagcaaaagaaact

SEQ ID NO: 1368371 - DNA, 15 bp, Homo sapiens
tacagcaaaagaaac

SEQ ID NO: 1368372 - DNA, 15 bp, Homo sapiens
gtacagcaaaagaaa

SEQ ID NO: 1368373 - DNA, 15 bp, Homo sapiens
tgtacagcaaaagaa

SEQ ID NO: 1368374 - DNA, 15 bp, Homo sapiens
ctgtacagcaaaaga

SEQ ID NO: 1368375 - DNA, 15 bp, Homo sapiens
tctgtacagcaaaag

SEQ ID NO: 1368376 - DNA, 15 bp, Homo sapiens
ttctgtacagcaaaa

SEQ ID NO: 1368377 - DNA, 15 bp, Homo sapiens
cttctgtacagcaaa

SEQ ID NO: 1368378 - DNA, 15 bp, Homo sapiens
gcttctgtacagcaa

SEQ ID NO: 1368379 - DNA, 15 bp, Homo sapiens
agcttctgtacagca

SEQ ID NO: 1368380 - DNA, 15 bp, Homo sapiens
gagcttctgtacagc

SEQ ID NO: 1368381 - DNA, 15 bp, Homo sapiens
agagcttctgtacag

SEQ ID NO: 1368382 - DNA, 15 bp, Homo sapiens
aagagcttctgtaca

SEQ ID NO: 1368383 - DNA, 15 bp, Homo sapiens
aaagagcttctgtac

SEQ ID NO: 1368384 - DNA, 15 bp, Homo sapiens
taaagagcttctgta

SEQ ID NO: 1368385 - DNA, 15 bp, Homo sapiens
ttaaagagcttctgt

SEQ ID NO: 1368386 - DNA, 15 bp, Homo sapiens
attaaagagcttctg

SEQ ID NO: 1368387 - DNA, 15 bp, Homo sapiens
aattaaagagcttct

SEQ ID NO: 1368388 - DNA, 15 bp, Homo sapiens
aaattaaagagcttc

SEQ ID NO: 1368389 - DNA, 15 bp, Homo sapiens
taaattaaagagctt

SEQ ID NO: 1368390 - DNA, 15 bp, Homo sapiens
ttaaattaaagagct

SEQ ID NO: 1368391 - DNA, 15 bp, Homo sapiens
attaaattaaagagc

SEQ ID NO: 1368392 - DNA, 15 bp, Homo sapiens
aattaaattaaagag

SEQ ID NO: 1368393 - DNA, 15 bp, Homo sapiens
taattaaattaaaga

SEQ ID NO: 1368394 - DNA, 15 bp, Homo sapiens
ctaattaaattaaag

SEQ ID NO: 1368395 - DNA, 15 bp, Homo sapiens
tctaattaaattaaa

SEQ ID NO: 1368396 - DNA, 15 bp, Homo sapiens
atctaattaaattaa

SEQ ID NO: 1368397 - DNA, 15 bp, Homo sapiens
gatctaattaaatta

SEQ ID NO: 1368398 - DNA, 15 bp, Homo sapiens
agatctaattaaatt

SEQ ID NO: 1368399 - DNA, 15 bp, Homo sapiens
gagatctaattaaat

SEQ ID NO: 1368400 - DNA, 15 bp, Homo sapiens
tgagatctaattaaa

SEQ ID NO: 1368401 - DNA, 15 bp, Homo sapiens
atgagatctaattaa

SEQ ID NO: 1368402 - DNA, 15 bp, Homo sapiens
aatgagatctaatta

SEQ ID NO: 1368403 - DNA, 15 bp, Homo sapiens
aaatgagatctaatt

SEQ ID NO: 1368404 - DNA, 15 bp, Homo sapiens
caaatgagatctaat

SEQ ID NO: 1368405 - DNA, 15 bp, Homo sapiens
acaaatgagatctaa

SEQ ID NO: 1368406 - DNA, 15 bp, Homo sapiens
gacaaatgagatcta

SEQ ID NO: 1368407 - DNA, 15 bp, Homo sapiens
tgacaaatgagatct

SEQ ID NO: 1368408 - DNA, 15 bp, Homo sapiens
ttgacaaatgagatc

SEQ ID NO: 1368409 - DNA, 15 bp, Homo sapiens
attgacaaatgagat

SEQ ID NO: 1368410 - DNA, 15 bp, Homo sapiens
aattgacaaatgaga

SEQ ID NO: 1368411 - DNA, 15 bp, Homo sapiens
aaattgacaaatgag

SEQ ID NO: 1368412 - DNA, 15 bp, Homo sapiens
aaaattgacaaatga

SEQ ID NO: 1368413 - DNA, 15 bp, Homo sapiens
aaaaattgacaaatg

SEQ ID NO: 1368414 - DNA, 15 bp, Homo sapiens
caaaaattgacaaat

SEQ ID NO: 1368415 - DNA, 15 bp, Homo sapiens
gcaaaaattgacaaa

SEQ ID NO: 1368416 - DNA, 15 bp, Homo sapiens
agcaaaaattgacaa

SEQ ID NO: 1368417 - DNA, 15 bp, Homo sapiens
aagcaaaaattgaca

SEQ ID NO: 1368418 - DNA, 15 bp, Homo sapiens
aaagcaaaaattgac

SEQ ID NO: 1368419 - DNA, 15 bp, Homo sapiens
aaaagcaaaaattga

SEQ ID NO: 1368420 - DNA, 15 bp, Homo sapiens
caaaagcaaaaattg

SEQ ID NO: 1368421 - DNA, 15 bp, Homo sapiens
acaaaagcaaaaatt

SEQ ID NO: 1368422 - DNA, 15 bp, Homo sapiens
aacaaaagcaaaaat

SEQ ID NO: 1368423 - DNA, 15 bp, Homo sapiens
caacaaaagcaaaaa

SEQ ID NO: 1368424 - DNA, 15 bp, Homo sapiens
gcaacaaaagcaaaa

SEQ ID NO: 1368425 - DNA, 15 bp, Homo sapiens
tgcaacaaaagcaaa

SEQ ID NO: 1368426 - DNA, 15 bp, Homo sapiens
ttgcaacaaaagcaa

SEQ ID NO: 1368427 - DNA, 15 bp, Homo sapiens
attgcaacaaaagca

SEQ ID NO: 1368428 - DNA, 15 bp, Homo sapiens
aattgcaacaaaagc

SEQ ID NO: 1368429 - DNA, 15 bp, Homo sapiens
caattgcaacaaaag

SEQ ID NO: 1368430 - DNA, 15 bp, Homo sapiens
gcaattgcaacaaaa

SEQ ID NO: 1368431 - DNA, 15 bp, Homo sapiens
agcaattgcaacaaa

SEQ ID NO: 1368432 - DNA, 15 bp, Homo sapiens
aagcaattgcaacaa

SEQ ID NO: 1368433 - DNA, 15 bp, Homo sapiens
aaagcaattgcaaca

SEQ ID NO: 1368434 - DNA, 15 bp, Homo sapiens
aaaagcaattgcaac

SEQ ID NO: 1368435 - DNA, 15 bp, Homo sapiens
taaaagcaattgcaa

SEQ ID NO: 1368436 - DNA, 15 bp, Homo sapiens
ctaaaagcaattgca

SEQ ID NO: 1368437 - DNA, 15 bp, Homo sapiens
gctaaaagcaattgc

SEQ ID NO: 1368438 - DNA, 15 bp, Homo sapiens
tgctaaaagcaattg

SEQ ID NO: 1368439 - DNA, 15 bp, Homo sapiens
atgctaaaagcaatt

SEQ ID NO: 1368440 - DNA, 15 bp, Homo sapiens
gatgctaaaagcaat

SEQ ID NO: 1368441 - DNA, 15 bp, Homo sapiens
agatgctaaaagcaa

SEQ ID NO: 1368442 - DNA, 15 bp, Homo sapiens
aagatgctaaaagca

SEQ ID NO: 1368443 - DNA, 15 bp, Homo sapiens
gaagatgctaaaagc

SEQ ID NO: 1368444 - DNA, 15 bp, Homo sapiens
tgaagatgctaaaag

SEQ ID NO: 1368445 - DNA, 15 bp, Homo sapiens
atgaagatgctaaaa

SEQ ID NO: 1368446 - DNA, 15 bp, Homo sapiens
gatgaagatgctaaa

SEQ ID NO: 1368447 - DNA, 15 bp, Homo sapiens
tgatgaagatgctaa

SEQ ID NO: 1368448 - DNA, 15 bp, Homo sapiens
atgatgaagatgcta

SEQ ID NO: 1368449 - DNA, 15 bp, Homo sapiens
catgatgaagatgct

SEQ ID NO: 1368450 - DNA, 15 bp, Homo sapiens
tcatgatgaagatgc

SEQ ID NO: 1368451 - DNA, 15 bp, Homo sapiens
ttcatgatgaagatg

SEQ ID NO: 1368452 - DNA, 15 bp, Homo sapiens
tttcatgatgaagat

SEQ ID NO: 1368453 - DNA, 15 bp, Homo sapiens
atttcatgatgaaga

SEQ ID NO: 1368454 - DNA, 15 bp, Homo sapiens
gatttcatgatgaag

SEQ ID NO: 1368455 - DNA, 15 bp, Homo sapiens
agatttcatgatgaa

SEQ ID NO: 1368456 - DNA, 15 bp, Homo sapiens
aagatttcatgatga

SEQ ID NO: 1368457 - DNA, 15 bp, Homo sapiens
aaagatttcatgatg

SEQ ID NO: 1368458 - DNA, 15 bp, Homo sapiens
caaagatttcatgat

SEQ ID NO: 1368459 - DNA, 15 bp, Homo sapiens
gcaaagatttcatga

SEQ ID NO: 1368460 - DNA, 15 bp, Homo sapiens
ggcaaagatttcatg

SEQ ID NO: 1368461 - DNA, 15 bp, Homo sapiens
gggcaaagatttcat

SEQ ID NO: 1368462 - DNA, 15 bp, Homo sapiens
tgggcaaagatttca

SEQ ID NO: 1368463 - DNA, 15 bp, Homo sapiens
atgggcaaagatttc

SEQ ID NO: 1368464 - DNA, 15 bp, Homo sapiens
catgggcaaagattt

SEQ ID NO: 1368465 - DNA, 15 bp, Homo sapiens
gcatgggcaaagatt

SEQ ID NO: 1368466 - DNA, 15 bp, Homo sapiens
ggcatgggcaaagat

SEQ ID NO: 1368467 - DNA, 15 bp, Homo sapiens
aggcatgggcaaaga

SEQ ID NO: 1368468 - DNA, 15 bp, Homo sapiens
taggcatgggcaaag

SEQ ID NO: 1368469 - DNA, 15 bp, Homo sapiens
ataggcatgggcaaa

SEQ ID NO: 1368470 - DNA, 15 bp, Homo sapiens
cataggcatgggcaa

SEQ ID NO: 1368471 - DNA, 15 bp, Homo sapiens
acataggcatgggca

SEQ ID NO: 1368472 - DNA, 15 bp, Homo sapiens
aacataggcatgggc

SEQ ID NO: 1368473 - DNA, 15 bp, Homo sapiens
aaacataggcatggg

SEQ ID NO: 1368474 - DNA, 15 bp, Homo sapiens
aaaacataggcatgg

SEQ ID NO: 1368475 - DNA, 15 bp, Homo sapiens
caaaacataggcatg

SEQ ID NO: 1368476 - DNA, 15 bp, Homo sapiens
tcaaaacataggcat

SEQ ID NO: 1368477 - DNA, 15 bp, Homo sapiens
ttcaaaacataggca

SEQ ID NO: 1368478 - DNA, 15 bp, Homo sapiens
attcaaaacataggc

SEQ ID NO: 1368479 - DNA, 15 bp, Homo sapiens
cattcaaaacatagg

SEQ ID NO: 1368480 - DNA, 15 bp, Homo sapiens
ccattcaaaacatag

SEQ ID NO: 1368481 - DNA, 15 bp, Homo sapiens
accattcaaaacata

SEQ ID NO: 1368482 - DNA, 15 bp, Homo sapiens
taccattcaaaacat

SEQ ID NO: 1368483 - DNA, 15 bp, Homo sapiens
ataccattcaaaaca

SEQ ID NO: 1368484 - DNA, 15 bp, Homo sapiens
aataccattcaaaac

SEQ ID NO: 1368485 - DNA, 15 bp, Homo sapiens
caataccattcaaaa

SEQ ID NO: 1368486 - DNA, 15 bp, Homo sapiens
gcaataccattcaaa

SEQ ID NO: 1368487 - DNA, 15 bp, Homo sapiens
ggcaataccattcaa

SEQ ID NO: 1368488 - DNA, 15 bp, Homo sapiens
aggcaataccattca

SEQ ID NO: 1368489 - DNA, 15 bp, Homo sapiens
taggcaataccattc

SEQ ID NO: 1368490 - DNA, 15 bp, Homo sapiens
ctaggcaataccatt

SEQ ID NO: 1368491 - DNA, 15 bp, Homo sapiens
cctaggcaataccat

SEQ ID NO: 1368492 - DNA, 15 bp, Homo sapiens
gcctaggcaatacca

SEQ ID NO: 1368493 - DNA, 15 bp, Homo sapiens
agcctaggcaatacc

SEQ ID NO: 1368494 - DNA, 15 bp, Homo sapiens
cagcctaggcaatac

SEQ ID NO: 1368495 - DNA, 15 bp, Homo sapiens
acagcctaggcaata

SEQ ID NO: 1368496 - DNA, 15 bp, Homo sapiens
gacagcctaggcaat

SEQ ID NO: 1368497 - DNA, 15 bp, Homo sapiens
agacagcctaggcaa

SEQ ID NO: 1368498 - DNA, 15 bp, Homo sapiens
aagacagcctaggca

SEQ ID NO: 1368499 - DNA, 15 bp, Homo sapiens
gaagacagcctaggc

SEQ ID NO: 1368500 - DNA, 15 bp, Homo sapiens
tgaagacagcctagg

SEQ ID NO: 1368501 - DNA, 15 bp, Homo sapiens
ttgaagacagcctag

SEQ ID NO: 1368502 - DNA, 15 bp, Homo sapiens
cttgaagacagccta

SEQ ID NO: 1368503 - DNA, 15 bp, Homo sapiens
ccttgaagacagcct

SEQ ID NO: 1368504 - DNA, 15 bp, Homo sapiens
tccttgaagacagcc

SEQ ID NO: 1368505 - DNA, 15 bp, Homo sapiens
ttccttgaagacagc

SEQ ID NO: 1368506 - DNA, 15 bp, Homo sapiens
attccttgaagacag

SEQ ID NO: 1368507 - DNA, 15 bp, Homo sapiens
aattccttgaagaca

SEQ ID NO: 1368508 - DNA, 15 bp, Homo sapiens
aaattccttgaagac

SEQ ID NO: 1368509 - DNA, 15 bp, Homo sapiens
aaaattccttgaaga

SEQ ID NO: 1368510 - DNA, 15 bp, Homo sapiens
taaaattccttgaag

SEQ ID NO: 1368511 - DNA, 15 bp, Homo sapiens
ataaaattccttgaa

SEQ ID NO: 1368512 - DNA, 15 bp, Homo sapiens
tataaaattccttga

SEQ ID NO: 1368513 - DNA, 15 bp, Homo sapiens
ctataaaattccttg

SEQ ID NO: 1368514 - DNA, 15 bp, Homo sapiens
actataaaattcctt

SEQ ID NO: 1368515 - DNA, 15 bp, Homo sapiens
aactataaaattcct

SEQ ID NO: 1368516 - DNA, 15 bp, Homo sapiens
aaactataaaattcc

SEQ ID NO: 1368517 - DNA, 15 bp, Homo sapiens
aaaactataaaattc

SEQ ID NO: 1368518 - DNA, 15 bp, Homo sapiens
caaaactataaaatt

SEQ ID NO: 1368519 - DNA, 15 bp, Homo sapiens
ccaaaactataaaat

SEQ ID NO: 1368520 - DNA, 15 bp, Homo sapiens
cccaaaactataaaa

SEQ ID NO: 1368521 - DNA, 15 bp, Homo sapiens
acccaaaactataaa

SEQ ID NO: 1368522 - DNA, 15 bp, Homo sapiens
aacccaaaactataa

SEQ ID NO: 1368523 - DNA, 15 bp, Homo sapiens
aaacccaaaactata

SEQ ID NO: 1368524 - DNA, 15 bp, Homo sapiens
aaaacccaaaactat

SEQ ID NO: 1368525 - DNA, 15 bp, Homo sapiens
taaaacccaaaacta

SEQ ID NO: 1368526 - DNA, 15 bp, Homo sapiens
ataaaacccaaaact

SEQ ID NO: 1368527 - DNA, 15 bp, Homo sapiens
tataaaacccaaaac

SEQ ID NO: 1368528 - DNA, 15 bp, Homo sapiens
atataaaacccaaaa

SEQ ID NO: 1368529 - DNA, 15 bp, Homo sapiens
aatataaaacccaaa

SEQ ID NO: 1368530 - DNA, 15 bp, Homo sapiens
aaatataaaacccaa

SEQ ID NO: 1368531 - DNA, 15 bp, Homo sapiens
taaatataaaaccca

SEQ ID NO: 1368532 - DNA, 15 bp, Homo sapiens
ttaaatataaaaccc

SEQ ID NO: 1368533 - DNA, 15 bp, Homo sapiens
cttaaatataaaacc

SEQ ID NO: 1368534 - DNA, 15 bp, Homo sapiens
acttaaatataaaac

SEQ ID NO: 1368535 - DNA, 15 bp, Homo sapiens
gacttaaatataaaa

SEQ ID NO: 1368536 - DNA, 15 bp, Homo sapiens
tgacttaaatataaa

SEQ ID NO: 1368537 - DNA, 15 bp, Homo sapiens
atgacttaaatataa

SEQ ID NO: 1368538 - DNA, 15 bp, Homo sapiens
aatgacttaaatata

SEQ ID NO: 1368539 - DNA, 15 bp, Homo sapiens
taatgacttaaatat

SEQ ID NO: 1368540 - DNA, 15 bp, Homo sapiens
ttaatgacttaaata

SEQ ID NO: 1368541 - DNA, 15 bp, Homo sapiens
attaatgacttaaat

SEQ ID NO: 1368542 - DNA, 15 bp, Homo sapiens
gattaatgacttaaa

SEQ ID NO: 1368543 - DNA, 15 bp, Homo sapiens
ggattaatgacttaa

SEQ ID NO: 1368544 - DNA, 15 bp, Homo sapiens
tggattaatgactta

SEQ ID NO: 1368545 - DNA, 15 bp, Homo sapiens
atggattaatgactt

SEQ ID NO: 1368546 - DNA, 15 bp, Homo sapiens
gatggattaatgact

SEQ ID NO: 1368547 - DNA, 15 bp, Homo sapiens
agatggattaatgac

SEQ ID NO: 1368548 - DNA, 15 bp, Homo sapiens
aagatggattaatga

SEQ ID NO: 1368549 - DNA, 15 bp, Homo sapiens
caagatggattaatg

SEQ ID NO: 1368550 - DNA, 15 bp, Homo sapiens
tcaagatggattaat

SEQ ID NO: 1368551 - DNA, 15 bp, Homo sapiens
ctcaagatggattaa

SEQ ID NO: 1368552 - DNA, 15 bp, Homo sapiens
actcaagatggatta

SEQ ID NO: 1368553 - DNA, 15 bp, Homo sapiens
aactcaagatggatt

SEQ ID NO: 1368554 - DNA, 15 bp, Homo sapiens
taactcaagatggat

SEQ ID NO: 1368555 - DNA, 15 bp, Homo sapiens
ttaactcaagatgga

SEQ ID NO: 1368556 - DNA, 15 bp, Homo sapiens
attaactcaagatgg

SEQ ID NO: 1368557 - DNA, 15 bp, Homo sapiens
aattaactcaagatg

SEQ ID NO: 1368558 - DNA, 15 bp, Homo sapiens
aaattaactcaagat

SEQ ID NO: 1368559 - DNA, 15 bp, Homo sapiens
aaaattaactcaaga

SEQ ID NO: 1368560 - DNA, 15 bp, Homo sapiens
aaaaattaactcaag

SEQ ID NO: 1368561 - DNA, 15 bp, Homo sapiens
caaaaattaactcaa

SEQ ID NO: 1368562 - DNA, 15 bp, Homo sapiens
gcaaaaattaactca

SEQ ID NO: 1368563 - DNA, 15 bp, Homo sapiens
tgcaaaaattaactc

SEQ ID NO: 1368564 - DNA, 15 bp, Homo sapiens
atgcaaaaattaact

SEQ ID NO: 1368565 - DNA, 15 bp, Homo sapiens
tatgcaaaaattaac

SEQ ID NO: 1368566 - DNA, 15 bp, Homo sapiens
atatgcaaaaattaa

SEQ ID NO: 1368567 - DNA, 15 bp, Homo sapiens
catatgcaaaaatta

SEQ ID NO: 1368568 - DNA, 15 bp, Homo sapiens
ccatatgcaaaaatt

SEQ ID NO: 1368569 - DNA, 15 bp, Homo sapiens
accatatgcaaaaat

SEQ ID NO: 1368570 - DNA, 15 bp, Homo sapiens
taccatatgcaaaaa

SEQ ID NO: 1368571 - DNA, 15 bp, Homo sapiens
ataccatatgcaaaa

SEQ ID NO: 1368572 - DNA, 15 bp, Homo sapiens
tataccatatgcaaa

SEQ ID NO: 1368573 - DNA, 15 bp, Homo sapiens
ttataccatatgcaa

SEQ ID NO: 1368574 - DNA, 15 bp, Homo sapiens
cttataccatatgca

SEQ ID NO: 1368575 - DNA, 15 bp, Homo sapiens
ccttataccatatgc

SEQ ID NO: 1368576 - DNA, 15 bp, Homo sapiens
tccttataccatatg

SEQ ID NO: 1368577 - DNA, 15 bp, Homo sapiens
ttccttataccatat

SEQ ID NO: 1368578 - DNA, 15 bp, Homo sapiens
cttccttataccata

SEQ ID NO: 1368579 - DNA, 15 bp, Homo sapiens
ccttccttataccat

SEQ ID NO: 1368580 - DNA, 15 bp, Homo sapiens
cccttccttatacca

SEQ ID NO: 1368581 - DNA, 15 bp, Homo sapiens
ccccttccttatacc

SEQ ID NO: 1368582 - DNA, 15 bp, Homo sapiens
accccttccttatac

SEQ ID NO: 1368583 - DNA, 15 bp, Homo sapiens
gaccccttccttata

SEQ ID NO: 1368584 - DNA, 15 bp, Homo sapiens
ggaccccttccttat

SEQ ID NO: 1368585 - DNA, 15 bp, Homo sapiens
tggaccccttcctta

SEQ ID NO: 1368586 - DNA, 15 bp, Homo sapiens
ttggaccccttcctt

SEQ ID NO: 1368587 - DNA, 15 bp, Homo sapiens
attggaccccttcct

SEQ ID NO: 1368588 - DNA, 15 bp, Homo sapiens
aattggaccccttcc

SEQ ID NO: 1368589 - DNA, 15 bp, Homo sapiens
aaattggaccccttc

SEQ ID NO: 1368590 - DNA, 15 bp, Homo sapiens
gaaattggacccctt

SEQ ID NO: 1368591 - DNA, 15 bp, Homo sapiens
tgaaattggacccct

SEQ ID NO: 1368592 - DNA, 15 bp, Homo sapiens
ttgaaattggacccc

SEQ ID NO: 1368593 - DNA, 15 bp, Homo sapiens
attgaaattggaccc

SEQ ID NO: 1368594 - DNA, 15 bp, Homo sapiens
gattgaaattggacc

SEQ ID NO: 1368595 - DNA, 15 bp, Homo sapiens
agattgaaattggac

SEQ ID NO: 1368596 - DNA, 15 bp, Homo sapiens
aagattgaaattgga

SEQ ID NO: 1368597 - DNA, 15 bp, Homo sapiens
gaagattgaaattgg

SEQ ID NO: 1368598 - DNA, 15 bp, Homo sapiens
agaagattgaaattg

SEQ ID NO: 1368599 - DNA, 15 bp, Homo sapiens
cagaagattgaaatt

SEQ ID NO: 1368600 - DNA, 15 bp, Homo sapiens
gcagaagattgaaat

SEQ ID NO: 1368601 - DNA, 15 bp, Homo sapiens
aatgcagaagattga

SEQ ID NO: 1368602 - DNA, 15 bp, Homo sapiens
aaatgcagaagattg

SEQ ID NO: 1368603 - DNA, 15 bp, Homo sapiens
caaatgcagaagatt

SEQ ID NO: 1368604 - DNA, 15 bp, Homo sapiens
ccaaatgcagaagat

SEQ ID NO: 1368605 - DNA, 15 bp, Homo sapiens
gccaaatgcagaaga

SEQ ID NO: 1368606 - DNA, 15 bp, Homo sapiens
agccaaatgcagaag

SEQ ID NO: 1368607 - DNA, 15 bp, Homo sapiens
tagccaaatgcagaa

SEQ ID NO: 1368608 - DNA, 15 bp, Homo sapiens
ctagccaaatgcaga

SEQ ID NO: 1368609 - DNA, 15 bp, Homo sapiens
gctagccaaatgcag

SEQ ID NO: 1368610 - DNA, 15 bp, Homo sapiens
ggctagccaaatgca

SEQ ID NO: 1368611 - DNA, 15 bp, Homo sapiens
tggctagccaaatgc

SEQ ID NO: 1368612 - DNA, 15 bp, Homo sapiens
ctggctagccaaatg

SEQ ID NO: 1368613 - DNA, 15 bp, Homo sapiens
actggctagccaaat

SEQ ID NO: 1368614 - DNA, 15 bp, Homo sapiens
aactggctagccaaa

SEQ ID NO: 1368615 - DNA, 15 bp, Homo sapiens
taactggctagccaa

SEQ ID NO: 1368616 - DNA, 15 bp, Homo sapiens
ttaactggctagcca

SEQ ID NO: 1368617 - DNA, 15 bp, Homo sapiens
gttaactggctagcc

SEQ ID NO: 1368618 - DNA, 15 bp, Homo sapiens
ggttaactggctagc

SEQ ID NO: 1368619 - DNA, 15 bp, Homo sapiens
gggttaactggctag

SEQ ID NO: 1368620 - DNA, 15 bp, Homo sapiens
tgggttaactggcta

SEQ ID NO: 1368621 - DNA, 15 bp, Homo sapiens
ctgggttaactggct

SEQ ID NO: 1368622 - DNA, 15 bp, Homo sapiens
gctgggttaactggc

SEQ ID NO: 1368623 - DNA, 15 bp, Homo sapiens
tgctgggttaactgg

SEQ ID NO: 1368624 - DNA, 15 bp, Homo sapiens
gtgctgggttaactg

SEQ ID NO: 1368625 - DNA, 15 bp, Homo sapiens
ggtgctgggttaact

SEQ ID NO: 1368626 - DNA, 15 bp, Homo sapiens
tggtgctgggttaac

SEQ ID NO: 1368627 - DNA, 15 bp, Homo sapiens
atggtgctgggttaa

SEQ ID NO: 1368628 - DNA, 15 bp, Homo sapiens
aatggtgctgggtta

SEQ ID NO: 1368629 - DNA, 15 bp, Homo sapiens
aaatggtgctgggtt

SEQ ID NO: 1368630 - DNA, 15 bp, Homo sapiens
taaatggtgctgggt

SEQ ID NO: 1368631 - DNA, 15 bp, Homo sapiens
ataaatggtgctggg

SEQ ID NO: 1368632 - DNA, 15 bp, Homo sapiens
aataaatggtgctgg

SEQ ID NO: 1368633 - DNA, 15 bp, Homo sapiens
caataaatggtgctg

SEQ ID NO: 1368634 - DNA, 15 bp, Homo sapiens
gttcaataaatggtg

SEQ ID NO: 1368635 - DNA, 15 bp, Homo sapiens
tgttcaataaatggt

SEQ ID NO: 1368636 - DNA, 15 bp, Homo sapiens
ctgttcaataaatgg

SEQ ID NO: 1368637 - DNA, 15 bp, Homo sapiens
cctgttcaataaatg

SEQ ID NO: 1368638 - DNA, 15 bp, Homo sapiens
ccctgttcaataaat

SEQ ID NO: 1368639 - DNA, 15 bp, Homo sapiens
tccctgttcaataaa

SEQ ID NO: 1368640 - DNA, 15 bp, Homo sapiens
ttccctgttcaataa

SEQ ID NO: 1368641 - DNA, 15 bp, Homo sapiens
attccctgttcaata

SEQ ID NO: 1368642 - DNA, 15 bp, Homo sapiens
gattccctgttcaat

SEQ ID NO: 1368643 - DNA, 15 bp, Homo sapiens
ggattccctgttcaa

SEQ ID NO: 1368644 - DNA, 15 bp, Homo sapiens
aggattccctgttca

SEQ ID NO: 1368645 - DNA, 15 bp, Homo sapiens
aaggattccctgttc

SEQ ID NO: 1368646 - DNA, 15 bp, Homo sapiens
aaaggattccctgtt

SEQ ID NO: 1368647 - DNA, 15 bp, Homo sapiens
gaaaggattccctgt

SEQ ID NO: 1368648 - DNA, 15 bp, Homo sapiens
ggaaaggattccctg

SEQ ID NO: 1368649 - DNA, 15 bp, Homo sapiens
gggaaaggattccct

SEQ ID NO: 1368650 - DNA, 15 bp, Homo sapiens
ggggaaaggattccc

SEQ ID NO: 1368651 - DNA, 15 bp, Homo sapiens
tggggaaaggattcc

SEQ ID NO: 1368652 - DNA, 15 bp, Homo sapiens
atggggaaaggattc

SEQ ID NO: 1368653 - DNA, 15 bp, Homo sapiens
aatggggaaaggatt

SEQ ID NO: 1368654 - DNA, 15 bp, Homo sapiens
aaatggggaaaggat

SEQ ID NO: 1368655 - DNA, 15 bp, Homo sapiens
gaaatggggaaagga

SEQ ID NO: 1368656 - DNA, 15 bp, Homo sapiens
agaaatggggaaagg

SEQ ID NO: 1368657 - DNA, 15 bp, Homo sapiens
aagaaatggggaaag

SEQ ID NO: 1368658 - DNA, 15 bp, Homo sapiens
caagaaatggggaaa

SEQ ID NO: 1368659 - DNA, 15 bp, Homo sapiens
acaagaaatggggaa

SEQ ID NO: 1368660 - DNA, 15 bp, Homo sapiens
aacaagaaatgggga

SEQ ID NO: 1368661 - DNA, 15 bp, Homo sapiens
aaacaagaaatgggg

SEQ ID NO: 1368662 - DNA, 15 bp, Homo sapiens
tgacaaacctgacaa

SEQ ID NO: 1368663 - DNA, 15 bp, Homo sapiens
ttgacaaacctgaca

SEQ ID NO: 1368664 - DNA, 15 bp, Homo sapiens
tttgacaaacctgac

SEQ ID NO: 1368665 - DNA, 15 bp, Homo sapiens
ctttgacaaacctga

SEQ ID NO: 1368666 - DNA, 15 bp, Homo sapiens
tctttgacaaacctg

SEQ ID NO: 1368667 - DNA, 15 bp, Homo sapiens
atctttgacaaacct

SEQ ID NO: 1368668 - DNA, 15 bp, Homo sapiens
tatctttgacaaacc

SEQ ID NO: 1368669 - DNA, 15 bp, Homo sapiens
ttatctttgacaaac

SEQ ID NO: 1368670 - DNA, 15 bp, Homo sapiens
cttatctttgacaaa

SEQ ID NO: 1368671 - DNA, 15 bp, Homo sapiens
tcttatctttgacaa

SEQ ID NO: 1368672 - DNA, 15 bp, Homo sapiens
atcttatctttgaca

SEQ ID NO: 1368673 - DNA, 15 bp, Homo sapiens
tatcttatctttgac

SEQ ID NO: 1368674 - DNA, 15 bp, Homo sapiens
ctatcttatctttga

SEQ ID NO: 1368675 - DNA, 15 bp, Homo sapiens
actatcttatctttg

SEQ ID NO: 1368676 - DNA, 15 bp, Homo sapiens
aactatcttatcttt

SEQ ID NO: 1368677 - DNA, 15 bp, Homo sapiens
caactatcttatctt

SEQ ID NO: 1368678 - DNA, 15 bp, Homo sapiens
acaactatcttatct

SEQ ID NO: 1368679 - DNA, 15 bp, Homo sapiens
tacaactatcttatc

SEQ ID NO: 1368680 - DNA, 15 bp, Homo sapiens
ctacaactatcttat

SEQ ID NO: 1368681 - DNA, 15 bp, Homo sapiens
cctacaactatctta

SEQ ID NO: 1368682 - DNA, 15 bp, Homo sapiens
acctacaactatctt

SEQ ID NO: 1368683 - DNA, 15 bp, Homo sapiens
cacctacaactatct

SEQ ID NO: 1368684 - DNA, 15 bp, Homo sapiens
acacctacaactatc

SEQ ID NO: 1368685 - DNA, 15 bp, Homo sapiens
cacacctacaactat

SEQ ID NO: 1368686 - DNA, 15 bp, Homo sapiens
gcacacctacaacta

SEQ ID NO: 1368687 - DNA, 15 bp, Homo sapiens
tgcacacctacaact

SEQ ID NO: 1368688 - DNA, 15 bp, Homo sapiens
ctgcacacctacaac

SEQ ID NO: 1368689 - DNA, 15 bp, Homo sapiens
gctgcacacctacaa

SEQ ID NO: 1368690 - DNA, 15 bp, Homo sapiens
ggctgcacacctaca

SEQ ID NO: 1368691 - DNA, 15 bp, Homo sapiens
aggctgcacacctac

SEQ ID NO: 1368692 - DNA, 15 bp, Homo sapiens
aaggctgcacaccta

SEQ ID NO: 1368693 - DNA, 15 bp, Homo sapiens
taaggctgcacacct

SEQ ID NO: 1368694 - DNA, 15 bp, Homo sapiens
ataaggctgcacacc

SEQ ID NO: 1368695 - DNA, 15 bp, Homo sapiens
aataaggctgcacac

SEQ ID NO: 1368696 - DNA, 15 bp, Homo sapiens
aaataaggctgcaca

SEQ ID NO: 1368697 - DNA, 15 bp, Homo sapiens
gaaataaggctgcac

SEQ ID NO: 1368698 - DNA, 15 bp, Homo sapiens
agaaataaggctgca

SEQ ID NO: 1368699 - DNA, 15 bp, Homo sapiens
cagaaataaggctgc

SEQ ID NO: 1368700 - DNA, 15 bp, Homo sapiens
ccagaaataaggctg

SEQ ID NO: 1368701 - DNA, 15 bp, Homo sapiens
cccagaaataaggct

SEQ ID NO: 1368702 - DNA, 15 bp, Homo sapiens
gcccagaaataaggc

SEQ ID NO: 1368703 - DNA, 15 bp, Homo sapiens
agcccagaaataagg

SEQ ID NO: 1368704 - DNA, 15 bp, Homo sapiens
gagcccagaaataag

SEQ ID NO: 1368705 - DNA, 15 bp, Homo sapiens
ggagcccagaaataa

SEQ ID NO: 1368706 - DNA, 15 bp, Homo sapiens
gggagcccagaaata

SEQ ID NO: 1368707 - DNA, 15 bp, Homo sapiens
agggagcccagaaat

SEQ ID NO: 1368708 - DNA, 15 bp, Homo sapiens
tagggagcccagaaa

SEQ ID NO: 1368709 - DNA, 15 bp, Homo sapiens
atagggagcccagaa

SEQ ID NO: 1368710 - DNA, 15 bp, Homo sapiens
aatagggagcccaga

SEQ ID NO: 1368711 - DNA, 15 bp, Homo sapiens
gaatagggagcccag

SEQ ID NO: 1368712 - DNA, 15 bp, Homo sapiens
agaatagggagccca

SEQ ID NO: 1368713 - DNA, 15 bp, Homo sapiens
cagaatagggagccc

SEQ ID NO: 1368714 - DNA, 15 bp, Homo sapiens
gcagaatagggagcc

SEQ ID NO: 1368715 - DNA, 15 bp, Homo sapiens
agcagaatagggagc

SEQ ID NO: 1368716 - DNA, 15 bp, Homo sapiens
gagcagaatagggag

SEQ ID NO: 1368717 - DNA, 15 bp, Homo sapiens
ggagcagaataggga

SEQ ID NO: 1368718 - DNA, 15 bp, Homo sapiens
tggagcagaataggg

SEQ ID NO: 1368719 - DNA, 15 bp, Homo sapiens
atggagcagaatagg

SEQ ID NO: 1368720 - DNA, 15 bp, Homo sapiens
aatggagcagaatag

SEQ ID NO: 1368721 - DNA, 15 bp, Homo sapiens
caatggagcagaata

SEQ ID NO: 1368722 - DNA, 15 bp, Homo sapiens
ccaatggagcagaat

SEQ ID NO: 1368723 - DNA, 15 bp, Homo sapiens
accaatggagcagaa

SEQ ID NO: 1368724 - DNA, 15 bp, Homo sapiens
gaccaatggagcaga

SEQ ID NO: 1368725 - DNA, 15 bp, Homo sapiens
agaccaatggagcag

SEQ ID NO: 1368726 - DNA, 15 bp, Homo sapiens
tagaccaatggagca

SEQ ID NO: 1368727 - DNA, 15 bp, Homo sapiens
atagaccaatggagc

SEQ ID NO: 1368728 - DNA, 15 bp, Homo sapiens
catagaccaatggag

SEQ ID NO: 1368729 - DNA, 15 bp, Homo sapiens
ccacatagaccaatg

SEQ ID NO: 1368730 - DNA, 15 bp, Homo sapiens
gccacatagaccaat

SEQ ID NO: 1368731 - DNA, 15 bp, Homo sapiens
agccacatagaccaa

SEQ ID NO: 1368732 - DNA, 15 bp, Homo sapiens
cagccacatagacca

SEQ ID NO: 1368733 - DNA, 15 bp, Homo sapiens
acagccacatagacc

SEQ ID NO: 1368734 - DNA, 15 bp, Homo sapiens
aacagccacatagac

SEQ ID NO: 1368735 - DNA, 15 bp, Homo sapiens
aaacagccacataga

SEQ ID NO: 1368736 - DNA, 15 bp, Homo sapiens
aaaacagccacatag

SEQ ID NO: 1368737 - DNA, 15 bp, Homo sapiens
aaaaacagccacata

SEQ ID NO: 1368738 - DNA, 15 bp, Homo sapiens
caaaaacagccacat

SEQ ID NO: 1368739 - DNA, 15 bp, Homo sapiens
acaaaaacagccaca

SEQ ID NO: 1368740 - DNA, 15 bp, Homo sapiens
cacaaaaacagccac

SEQ ID NO: 1368741 - DNA, 15 bp, Homo sapiens
acacaaaaacagcca

SEQ ID NO: 1368742 - DNA, 15 bp, Homo sapiens
gacacaaaaacagcc

SEQ ID NO: 1368743 - DNA, 15 bp, Homo sapiens
tgacacaaaaacagc

SEQ ID NO: 1368744 - DNA, 15 bp, Homo sapiens
ctgacacaaaaacag

SEQ ID NO: 1368745 - DNA, 15 bp, Homo sapiens
actgacacaaaaaca

SEQ ID NO: 1368746 - DNA, 15 bp, Homo sapiens
tactgacacaaaaac

SEQ ID NO: 1368747 - DNA, 15 bp, Homo sapiens
gtactgacacaaaaa

SEQ ID NO: 1368748 - DNA, 15 bp, Homo sapiens
ggtactgacacaaaa

SEQ ID NO: 1368749 - DNA, 15 bp, Homo sapiens
tggtactgacacaaa

SEQ ID NO: 1368750 - DNA, 15 bp, Homo sapiens
atggtactgacacaa

SEQ ID NO: 1368751 - DNA, 15 bp, Homo sapiens
catggtactgacaca

SEQ ID NO: 1368752 - DNA, 15 bp, Homo sapiens
gcatggtactgacac

SEQ ID NO: 1368753 - DNA, 15 bp, Homo sapiens
agcatggtactgaca

SEQ ID NO: 1368754 - DNA, 15 bp, Homo sapiens
cagcatggtactgac

SEQ ID NO: 1368755 - DNA, 15 bp, Homo sapiens
acagcatggtactga

SEQ ID NO: 1368756 - DNA, 15 bp, Homo sapiens
aagtaaccaaaacag

SEQ ID NO: 1368757 - DNA, 15 bp, Homo sapiens
gaagtaaccaaaaca

SEQ ID NO: 1368758 - DNA, 15 bp, Homo sapiens
tgaagtaaccaaaac

SEQ ID NO: 1368759 - DNA, 15 bp, Homo sapiens
ttgaagtaaccaaaa

SEQ ID NO: 1368760 - DNA, 15 bp, Homo sapiens
gttgaagtaaccaaa

SEQ ID NO: 1368761 - DNA, 15 bp, Homo sapiens
agttgaagtaaccaa

SEQ ID NO: 1368762 - DNA, 15 bp, Homo sapiens
gagttgaagtaacca

SEQ ID NO: 1368763 - DNA, 15 bp, Homo sapiens
agagttgaagtaacc

SEQ ID NO: 1368764 - DNA, 15 bp, Homo sapiens
cagagttgaagtaac

SEQ ID NO: 1368765 - DNA, 15 bp, Homo sapiens
acagagttgaagtaa

SEQ ID NO: 1368766 - DNA, 15 bp, Homo sapiens
tacagagttgaagta

SEQ ID NO: 1368767 - DNA, 15 bp, Homo sapiens
ctacagagttgaagt

SEQ ID NO: 1368768 - DNA, 15 bp, Homo sapiens
actacagagttgaag

SEQ ID NO: 1368769 - DNA, 15 bp, Homo sapiens
tactacagagttgaa

SEQ ID NO: 1368770 - DNA, 15 bp, Homo sapiens
atactacagagttga

SEQ ID NO: 1368771 - DNA, 15 bp, Homo sapiens
tatactacagagttg

SEQ ID NO: 1368772 - DNA, 15 bp, Homo sapiens
ctatactacagagtt

SEQ ID NO: 1368773 - DNA, 15 bp, Homo sapiens
actatactacagagt

SEQ ID NO: 1368774 - DNA, 15 bp, Homo sapiens
aactatactacagag

SEQ ID NO: 1368775 - DNA, 15 bp, Homo sapiens
aaactatactacaga

SEQ ID NO: 1368776 - DNA, 15 bp, Homo sapiens
caaactatactacag

SEQ ID NO: 1368777 - DNA, 15 bp, Homo sapiens
aacttcaaactatac

SEQ ID NO: 1368778 - DNA, 15 bp, Homo sapiens
caacttcaaactata

SEQ ID NO: 1368779 - DNA, 15 bp, Homo sapiens
ccaacttcaaactat

SEQ ID NO: 1368780 - DNA, 15 bp, Homo sapiens
cccaacttcaaacta

SEQ ID NO: 1368781 - DNA, 15 bp, Homo sapiens
acccaacttcaaact

SEQ ID NO: 1368782 - DNA, 15 bp, Homo sapiens
tacccaacttcaaac

SEQ ID NO: 1368783 - DNA, 15 bp, Homo sapiens
ctacccaacttcaaa

SEQ ID NO: 1368784 - DNA, 15 bp, Homo sapiens
actacccaacttcaa

SEQ ID NO: 1368785 - DNA, 15 bp, Homo sapiens
cactacccaacttca

SEQ ID NO: 1368786 - DNA, 15 bp, Homo sapiens
acactacccaacttc

SEQ ID NO: 1368787 - DNA, 15 bp, Homo sapiens
cacactacccaactt

SEQ ID NO: 1368788 - DNA, 15 bp, Homo sapiens
tcacactacccaact

SEQ ID NO: 1368789 - DNA, 15 bp, Homo sapiens
atcacactacccaac

SEQ ID NO: 1368790 - DNA, 15 bp, Homo sapiens
catcacactacccaa

SEQ ID NO: 1368791 - DNA, 15 bp, Homo sapiens
gcatcacactaccca

SEQ ID NO: 1368792 - DNA, 15 bp, Homo sapiens
ggcatcacactaccc

SEQ ID NO: 1368793 - DNA, 15 bp, Homo sapiens
aggcatcacactacc

SEQ ID NO: 1368794 - DNA, 15 bp, Homo sapiens
gaggcatcacactac

SEQ ID NO: 1368795 - DNA, 15 bp, Homo sapiens
agaggcatcacacta

SEQ ID NO: 1368796 - DNA, 15 bp, Homo sapiens
cagaggcatcacact

SEQ ID NO: 1368797 - DNA, 15 bp, Homo sapiens
ccagaggcatcacac

SEQ ID NO: 1368798 - DNA, 15 bp, Homo sapiens
gccagaggcatcaca

SEQ ID NO: 1368799 - DNA, 15 bp, Homo sapiens
agccagaggcatcac

SEQ ID NO: 1368800 - DNA, 15 bp, Homo sapiens
aagccagaggcatca

SEQ ID NO: 1368801 - DNA, 15 bp, Homo sapiens
aaagccagaggcatc

SEQ ID NO: 1368802 - DNA, 15 bp, Homo sapiens
taaagccagaggcat

SEQ ID NO: 1368803 - DNA, 15 bp, Homo sapiens
ataaagccagaggca

SEQ ID NO: 1368804 - DNA, 15 bp, Homo sapiens
tataaagccagaggc

SEQ ID NO: 1368805 - DNA, 15 bp, Homo sapiens
gtataaagccagagg

SEQ ID NO: 1368806 - DNA, 15 bp, Homo sapiens
ggtataaagccagag

SEQ ID NO: 1368807 - DNA, 15 bp, Homo sapiens
aggtataaagccaga

SEQ ID NO: 1368808 - DNA, 15 bp, Homo sapiens
aaggtataaagccag

SEQ ID NO: 1368809 - DNA, 15 bp, Homo sapiens
aaaggtataaagcca

SEQ ID NO: 1368810 - DNA, 15 bp, Homo sapiens
aaaaggtataaagcc

SEQ ID NO: 1368811 - DNA, 15 bp, Homo sapiens
caaaaggtataaagc

SEQ ID NO: 1368812 - DNA, 15 bp, Homo sapiens
gcaaaaggtataaag

SEQ ID NO: 1368813 - DNA, 15 bp, Homo sapiens
agcaaaaggtataaa

SEQ ID NO: 1368814 - DNA, 15 bp, Homo sapiens
aagcaaaaggtataa

SEQ ID NO: 1368815 - DNA, 15 bp, Homo sapiens
taagcaaaaggtata

SEQ ID NO: 1368816 - DNA, 15 bp, Homo sapiens
ctaagcaaaaggtat

SEQ ID NO: 1368817 - DNA, 15 bp, Homo sapiens
cctaagcaaaaggta

SEQ ID NO: 1368818 - DNA, 15 bp, Homo sapiens
tcctaagcaaaaggt

SEQ ID NO: 1368819 - DNA, 15 bp, Homo sapiens
atcctaagcaaaagg

SEQ ID NO: 1368820 - DNA, 15 bp, Homo sapiens
aatcctaagcaaaag

SEQ ID NO: 1368821 - DNA, 15 bp, Homo sapiens
caatcctaagcaaaa

SEQ ID NO: 1368822 - DNA, 15 bp, Homo sapiens
acaatcctaagcaaa

SEQ ID NO: 1368823 - DNA, 15 bp, Homo sapiens
cacaatcctaagcaa

SEQ ID NO: 1368824 - DNA, 15 bp, Homo sapiens
acacaatcctaagca

SEQ ID NO: 1368825 - DNA, 15 bp, Homo sapiens
gacacaatcctaagc

SEQ ID NO: 1368826 - DNA, 15 bp, Homo sapiens
tgacacaatcctaag

SEQ ID NO: 1368827 - DNA, 15 bp, Homo sapiens
ctgacacaatcctaa

SEQ ID NO: 1368828 - DNA, 15 bp, Homo sapiens
gctgacacaatccta

SEQ ID NO: 1368829 - DNA, 15 bp, Homo sapiens
agctgacacaatcct

SEQ ID NO: 1368830 - DNA, 15 bp, Homo sapiens
cagctgacacaatcc

SEQ ID NO: 1368831 - DNA, 15 bp, Homo sapiens
acagctgacacaatc

SEQ ID NO: 1368832 - DNA, 15 bp, Homo sapiens
aacagctgacacaat

SEQ ID NO: 1368833 - DNA, 15 bp, Homo sapiens
aaacagctgacacaa

SEQ ID NO: 1368834 - DNA, 15 bp, Homo sapiens
caaacagctgacaca

SEQ ID NO: 1368835 - DNA, 15 bp, Homo sapiens
ccaaacagctgacac

SEQ ID NO: 1368836 - DNA, 15 bp, Homo sapiens
cccaaacagctgaca

SEQ ID NO: 1368837 - DNA, 15 bp, Homo sapiens
gcccaaacagctgac

SEQ ID NO: 1368838 - DNA, 15 bp, Homo sapiens
agcccaaacagctga

SEQ ID NO: 1368839 - DNA, 15 bp, Homo sapiens
aagcccaaacagctg

SEQ ID NO: 1368840 - DNA, 15 bp, Homo sapiens
aaagcccaaacagct

SEQ ID NO: 1368841 - DNA, 15 bp, Homo sapiens
aaaagcccaaacagc

SEQ ID NO: 1368842 - DNA, 15 bp, Homo sapiens
caaaagcccaaacag

SEQ ID NO: 1368843 - DNA, 15 bp, Homo sapiens
acaaaagcccaaaca

SEQ ID NO: 1368844 - DNA, 15 bp, Homo sapiens
aacaaaagcccaaac

SEQ ID NO: 1368845 - DNA, 15 bp, Homo sapiens
caacaaaagcccaaa

SEQ ID NO: 1368846 - DNA, 15 bp, Homo sapiens
acaacaaaagcccaa

SEQ ID NO: 1368847 - DNA, 15 bp, Homo sapiens
cacaacaaaagccca

SEQ ID NO: 1368848 - DNA, 15 bp, Homo sapiens
acacaacaaaagccc

SEQ ID NO: 1368849 - DNA, 15 bp, Homo sapiens
aacacaacaaaagcc

SEQ ID NO: 1368850 - DNA, 15 bp, Homo sapiens
aaacacaacaaaagc

SEQ ID NO: 1368851 - DNA, 15 bp, Homo sapiens
aaaacacaacaaaag

SEQ ID NO: 1368852 - DNA, 15 bp, Homo sapiens
caaaacacaacaaaa

SEQ ID NO: 1368853 - DNA, 15 bp, Homo sapiens
acaaaacacaacaaa

SEQ ID NO: 1368854 - DNA, 15 bp, Homo sapiens
aacaaaacacaacaa

SEQ ID NO: 1368855 - DNA, 15 bp, Homo sapiens
aaacaaaacacaaca

SEQ ID NO: 1368856 - DNA, 15 bp, Homo sapiens
aaaacaaaacacaac

SEQ ID NO: 1368857 - DNA, 15 bp, Homo sapiens
taaaacaaaacacaa

SEQ ID NO: 1368858 - DNA, 15 bp, Homo sapiens
ataaaacaaaacaca

SEQ ID NO: 1368859 - DNA, 15 bp, Homo sapiens
tataaaacaaaacac

SEQ ID NO: 1368860 - DNA, 15 bp, Homo sapiens
atataaaacaaaaca

SEQ ID NO: 1368861 - DNA, 15 bp, Homo sapiens
tatataaaacaaaac

SEQ ID NO: 1368862 - DNA, 15 bp, Homo sapiens
ttatataaaacaaaa

SEQ ID NO: 1368863 - DNA, 15 bp, Homo sapiens
tttatataaaacaaa

SEQ ID NO: 1368864 - DNA, 15 bp, Homo sapiens
ctttatataaaacaa

SEQ ID NO: 1368865 - DNA, 15 bp, Homo sapiens
actttatataaaaca

SEQ ID NO: 1368866 - DNA, 15 bp, Homo sapiens
aactttatataaaac

SEQ ID NO: 1368867 - DNA, 15 bp, Homo sapiens
aaactttatataaaa

SEQ ID NO: 1368868 - DNA, 15 bp, Homo sapiens
taaactttatataaa

SEQ ID NO: 1368869 - DNA, 15 bp, Homo sapiens
ttaaactttatataa

SEQ ID NO: 1368870 - DNA, 15 bp, Homo sapiens
tttaaactttatata

SEQ ID NO: 1368871 - DNA, 15 bp, Homo sapiens
ctattttaaacttta

SEQ ID NO: 1368872 - DNA, 15 bp, Homo sapiens
tctattttaaacttt

SEQ ID NO: 1368873 - DNA, 15 bp, Homo sapiens
atctattttaaactt

SEQ ID NO: 1368874 - DNA, 15 bp, Homo sapiens
aatctattttaaact

SEQ ID NO: 1368875 - DNA, 15 bp, Homo sapiens
aaatctattttaaac

SEQ ID NO: 1368876 - DNA, 15 bp, Homo sapiens
aaaatctattttaaa

SEQ ID NO: 1368877 - DNA, 15 bp, Homo sapiens
aaaaatctattttaa

SEQ ID NO: 1368878 - DNA, 15 bp, Homo sapiens
gaaaaatctatttta

SEQ ID NO: 1368879 - DNA, 15 bp, Homo sapiens
agaaaaatctatttt

SEQ ID NO: 1368880 - DNA, 15 bp, Homo sapiens
tagaaaaatctattt

SEQ ID NO: 1368881 - DNA, 15 bp, Homo sapiens
ctagaaaaatctatt

SEQ ID NO: 1368882 - DNA, 15 bp, Homo sapiens
actagaaaaatctat

SEQ ID NO: 1368883 - DNA, 15 bp, Homo sapiens
aactagaaaaatcta

SEQ ID NO: 1368884 - DNA, 15 bp, Homo sapiens
taactagaaaaatct

SEQ ID NO: 1368885 - DNA, 15 bp, Homo sapiens
ataactagaaaaatc

SEQ ID NO: 1368886 - DNA, 15 bp, Homo sapiens
tataactagaaaaat

SEQ ID NO: 1368887 - DNA, 15 bp, Homo sapiens
atataactagaaaaa

SEQ ID NO: 1368888 - DNA, 15 bp, Homo sapiens
catataactagaaaa

SEQ ID NO: 1368889 - DNA, 15 bp, Homo sapiens
tcatataactagaaa

SEQ ID NO: 1368890 - DNA, 15 bp, Homo sapiens
ttcatataactagaa

SEQ ID NO: 1368891 - DNA, 15 bp, Homo sapiens
cttcatataactaga

SEQ ID NO: 1368892 - DNA, 15 bp, Homo sapiens
tcttcatataactag

SEQ ID NO: 1368893 - DNA, 15 bp, Homo sapiens
ttcttcatataacta

SEQ ID NO: 1368894 - DNA, 15 bp, Homo sapiens
attcttcatataact

SEQ ID NO: 1368895 - DNA, 15 bp, Homo sapiens
gattcttcatataac

SEQ ID NO: 1368896 - DNA, 15 bp, Homo sapiens
agattcttcatataa

SEQ ID NO: 1368897 - DNA, 15 bp, Homo sapiens
gagattcttcatata

SEQ ID NO: 1368898 - DNA, 15 bp, Homo sapiens
tgagattcttcatat

SEQ ID NO: 1368899 - DNA, 15 bp, Homo sapiens
ttgagattcttcata

SEQ ID NO: 1368900 - DNA, 15 bp, Homo sapiens
gttgagattcttcat

SEQ ID NO: 1368901 - DNA, 15 bp, Homo sapiens
tgttgagattcttca

SEQ ID NO: 1368902 - DNA, 15 bp, Homo sapiens
ctgttgagattcttc

SEQ ID NO: 1368903 - DNA, 15 bp, Homo sapiens
actgttgagattctt

SEQ ID NO: 1368904 - DNA, 15 bp, Homo sapiens
tactgttgagattct

SEQ ID NO: 1368905 - DNA, 15 bp, Homo sapiens
ctactgttgagattc

SEQ ID NO: 1368906 - DNA, 15 bp, Homo sapiens
actactgttgagatt

SEQ ID NO: 1368907 - DNA, 15 bp, Homo sapiens
aactactgttgagat

SEQ ID NO: 1368908 - DNA, 15 bp, Homo sapiens
aaactactgttgaga

SEQ ID NO: 1368909 - DNA, 15 bp, Homo sapiens
taaactactgttgag

SEQ ID NO: 1368910 - DNA, 15 bp, Homo sapiens
ttaaactactgttga

SEQ ID NO: 1368911 - DNA, 15 bp, Homo sapiens
attaaactactgttg

SEQ ID NO: 1368912 - DNA, 15 bp, Homo sapiens
tattaaactactgtt

SEQ ID NO: 1368913 - DNA, 15 bp, Homo sapiens
ttattaaactactgt

SEQ ID NO: 1368914 - DNA, 15 bp, Homo sapiens
cttattaaactactg

SEQ ID NO: 1368915 - DNA, 15 bp, Homo sapiens
tcttattaaactact

SEQ ID NO: 1368916 - DNA, 15 bp, Homo sapiens
ttcttattaaactac

SEQ ID NO: 1368917 - DNA, 15 bp, Homo sapiens
attcttattaaacta

SEQ ID NO: 1368918 - DNA, 15 bp, Homo sapiens
tattcttattaaact

SEQ ID NO: 1368919 - DNA, 15 bp, Homo sapiens
ctattcttattaaac

SEQ ID NO: 1368920 - DNA, 15 bp, Homo sapiens
gctattcttattaaa

SEQ ID NO: 1368921 - DNA, 15 bp, Homo sapiens
tgctattcttattaa

SEQ ID NO: 1368922 - DNA, 15 bp, Homo sapiens
atgctattcttatta

SEQ ID NO: 1368923 - DNA, 15 bp, Homo sapiens
aatgctattcttatt

SEQ ID NO: 1368924 - DNA, 15 bp, Homo sapiens
caatgctattcttat

SEQ ID NO: 1368925 - DNA, 15 bp, Homo sapiens
tcaatgctattctta

SEQ ID NO: 1368926 - DNA, 15 bp, Homo sapiens
ttcaatgctattctt

SEQ ID NO: 1368927 - DNA, 15 bp, Homo sapiens
attcaatgctattct

SEQ ID NO: 1368928 - DNA, 15 bp, Homo sapiens
aattcaatgctattc

SEQ ID NO: 1368929 - DNA, 15 bp, Homo sapiens
aaattcaatgctatt

SEQ ID NO: 1368930 - DNA, 15 bp, Homo sapiens
taaattcaatgctat

SEQ ID NO: 1368931 - DNA, 15 bp, Homo sapiens
ataaattcaatgcta

SEQ ID NO: 1368932 - DNA, 15 bp, Homo sapiens
tataaattcaatgct

SEQ ID NO: 1368933 - DNA, 15 bp, Homo sapiens
ttataaattcaatgc

SEQ ID NO: 1368934 - DNA, 15 bp, Homo sapiens
tttataaattcaatg

SEQ ID NO: 1368935 - DNA, 15 bp, Homo sapiens
atttataaattcaat

SEQ ID NO: 1368936 - DNA, 15 bp, Homo sapiens
aatttataaattcaa

SEQ ID NO: 1368937 - DNA, 15 bp, Homo sapiens
caatttataaattca

SEQ ID NO: 1368938 - DNA, 15 bp, Homo sapiens
gcaatttataaattc

SEQ ID NO: 1368939 - DNA, 15 bp, Homo sapiens
agcaatttataaatt

SEQ ID NO: 1368940 - DNA, 15 bp, Homo sapiens
aagcaatttataaat

SEQ ID NO: 1368941 - DNA, 15 bp, Homo sapiens
aaagcaatttataaa

SEQ ID NO: 1368942 - DNA, 15 bp, Homo sapiens
caaagcaatttataa

SEQ ID NO: 1368943 - DNA, 15 bp, Homo sapiens
ccaaagcaatttata

SEQ ID NO: 1368944 - DNA, 15 bp, Homo sapiens
cccaaagcaatttat

SEQ ID NO: 1368945 - DNA, 15 bp, Homo sapiens
gcccaaagcaattta

SEQ ID NO: 1368946 - DNA, 15 bp, Homo sapiens
tgcccaaagcaattt

SEQ ID NO: 1368947 - DNA, 15 bp, Homo sapiens
gtgcccaaagcaatt

SEQ ID NO: 1368948 - DNA, 15 bp, Homo sapiens
agtgcccaaagcaat

SEQ ID NO: 1368949 - DNA, 15 bp, Homo sapiens
tagtgcccaaagcaa

SEQ ID NO: 1368950 - DNA, 15 bp, Homo sapiens
atagtgcccaaagca

SEQ ID NO: 1368951 - DNA, 15 bp, Homo sapiens
catagtgcccaaagc

SEQ ID NO: 1368952 - DNA, 15 bp, Homo sapiens
ccatagtgcccaaag

SEQ ID NO: 1368953 - DNA, 15 bp, Homo sapiens
gccatagtgcccaaa

SEQ ID NO: 1368954 - DNA, 15 bp, Homo sapiens
ggccatagtgcccaa

SEQ ID NO: 1368955 - DNA, 15 bp, Homo sapiens
tggccatagtgccca

SEQ ID NO: 1368956 - DNA, 15 bp, Homo sapiens
atggccatagtgccc

SEQ ID NO: 1368957 - DNA, 15 bp, Homo sapiens
aatggccatagtgcc

SEQ ID NO: 1368958 - DNA, 15 bp, Homo sapiens
aaatggccatagtgc

SEQ ID NO: 1368959 - DNA, 15 bp, Homo sapiens
aaaatggccatagtg

SEQ ID NO: 1368960 - DNA, 15 bp, Homo sapiens
taaaatggccatagt

SEQ ID NO: 1368961 - DNA, 15 bp, Homo sapiens
ttaaaatggccatag

SEQ ID NO: 1368962 - DNA, 15 bp, Homo sapiens
attaaaatggccata

SEQ ID NO: 1368963 - DNA, 15 bp, Homo sapiens
cattaaaatggccat

SEQ ID NO: 1368964 - DNA, 15 bp, Homo sapiens
tcattaaaatggcca

SEQ ID NO: 1368965 - DNA, 15 bp, Homo sapiens
atcattaaaatggcc

SEQ ID NO: 1368966 - DNA, 15 bp, Homo sapiens
tatcattaaaatggc

SEQ ID NO: 1368967 - DNA, 15 bp, Homo sapiens
atatcattaaaatgg

SEQ ID NO: 1368968 - DNA, 15 bp, Homo sapiens
aatatcattaaaatg

SEQ ID NO: 1368969 - DNA, 15 bp, Homo sapiens
caatatcattaaaat

SEQ ID NO: 1368970 - DNA, 15 bp, Homo sapiens
tcaatatcattaaaa

SEQ ID NO: 1368971 - DNA, 15 bp, Homo sapiens
atcaatatcattaaa

SEQ ID NO: 1368972 - DNA, 15 bp, Homo sapiens
aatcaatatcattaa

SEQ ID NO: 1368973 - DNA, 15 bp, Homo sapiens
taatcaatatcatta

SEQ ID NO: 1368974 - DNA, 15 bp, Homo sapiens
ataatcaatatcatt

SEQ ID NO: 1368975 - DNA, 15 bp, Homo sapiens
aataatcaatatcat

SEQ ID NO: 1368976 - DNA, 15 bp, Homo sapiens
gaataatcaatatca

SEQ ID NO: 1368977 - DNA, 15 bp, Homo sapiens
tgaataatcaatatc

SEQ ID NO: 1368978 - DNA, 15 bp, Homo sapiens
atgaataatcaatat

SEQ ID NO: 1368979 - DNA, 15 bp, Homo sapiens
tatgaataatcaata

SEQ ID NO: 1368980 - DNA, 15 bp, Homo sapiens
atatgaataatcaat

SEQ ID NO: 1368981 - DNA, 15 bp, Homo sapiens
gatatgaataatcaa

SEQ ID NO: 1368982 - DNA, 15 bp, Homo sapiens
ggatatgaataatca

SEQ ID NO: 1368983 - DNA, 15 bp, Homo sapiens
tggatatgaataatc

SEQ ID NO: 1368984 - DNA, 15 bp, Homo sapiens
gtggatatgaataat

SEQ ID NO: 1368985 - DNA, 15 bp, Homo sapiens
cgtggatatgaataa

SEQ ID NO: 1368986 - DNA, 15 bp, Homo sapiens
tcgtggatatgaata

SEQ ID NO: 1368987 - DNA, 15 bp, Homo sapiens
ctcgtggatatgaat

SEQ ID NO: 1368988 - DNA, 15 bp, Homo sapiens
gctcgtggatatgaa

SEQ ID NO: 1368989 - DNA, 15 bp, Homo sapiens
tgctcgtggatatga

SEQ ID NO: 1368990 - DNA, 15 bp, Homo sapiens
atgctcgtggatatg

SEQ ID NO: 1368991 - DNA, 15 bp, Homo sapiens
catgctcgtggatat

SEQ ID NO: 1368992 - DNA, 15 bp, Homo sapiens
ccatgctcgtggata

SEQ ID NO: 1368993 - DNA, 15 bp, Homo sapiens
tccatgctcgtggat

SEQ ID NO: 1368994 - DNA, 15 bp, Homo sapiens
ttccatgctcgtgga

SEQ ID NO: 1368995 - DNA, 15 bp, Homo sapiens
attccatgctcgtgg

SEQ ID NO: 1368996 - DNA, 15 bp, Homo sapiens
cattccatgctcgtg

SEQ ID NO: 1368997 - DNA, 15 bp, Homo sapiens
acattccatgctcgt

SEQ ID NO: 1368998 - DNA, 15 bp, Homo sapiens
aacattccatgctcg

SEQ ID NO: 1368999 - DNA, 15 bp, Homo sapiens
aaacattccatgctc

SEQ ID NO: 1369000 - DNA, 15 bp, Homo sapiens
aaaacattccatgct

SEQ ID NO: 1369001 - DNA, 15 bp, Homo sapiens
gaaaacattccatgc

SEQ ID NO: 1369002 - DNA, 15 bp, Homo sapiens
ggaaaacattccatg

SEQ ID NO: 1369003 - DNA, 15 bp, Homo sapiens
gggaaaacattccat

SEQ ID NO: 1369004 - DNA, 15 bp, Homo sapiens
tgggaaaacattcca

SEQ ID NO: 1369005 - DNA, 15 bp, Homo sapiens
atgggaaaacattcc

SEQ ID NO: 1369006 - DNA, 15 bp, Homo sapiens
aatgggaaaacattc

SEQ ID NO: 1369007 - DNA, 15 bp, Homo sapiens
aaatgggaaaacatt

SEQ ID NO: 1369008 - DNA, 15 bp, Homo sapiens
caaatgggaaaacat

SEQ ID NO: 1369009 - DNA, 15 bp, Homo sapiens
acaaatgggaaaaca

SEQ ID NO: 1369010 - DNA, 15 bp, Homo sapiens
aacaaatgggaaaac

SEQ ID NO: 1369011 - DNA, 15 bp, Homo sapiens
aaacaaatgggaaaa

SEQ ID NO: 1369012 - DNA, 15 bp, Homo sapiens
caaacaaatgggaaa

SEQ ID NO: 1369013 - DNA, 15 bp, Homo sapiens
acaaacaaatgggaa

SEQ ID NO: 1369014 - DNA, 15 bp, Homo sapiens
cacaaacaaatggga

SEQ ID NO: 1369015 - DNA, 15 bp, Homo sapiens
acacaaacaaatggg

SEQ ID NO: 1369016 - DNA, 15 bp, Homo sapiens
tgacacaaacaaatg

SEQ ID NO: 1369017 - DNA, 15 bp, Homo sapiens
atgacacaaacaaat

SEQ ID NO: 1369018 - DNA, 15 bp, Homo sapiens
gatgacacaaacaaa

SEQ ID NO: 1369019 - DNA, 15 bp, Homo sapiens
agatgacacaaacaa

SEQ ID NO: 1369020 - DNA, 15 bp, Homo sapiens
gagatgacacaaaca

SEQ ID NO: 1369021 - DNA, 15 bp, Homo sapiens
agagatgacacaaac

SEQ ID NO: 1369022 - DNA, 15 bp, Homo sapiens
cagagatgacacaaa

SEQ ID NO: 1369023 - DNA, 15 bp, Homo sapiens
tcagagatgacacaa

SEQ ID NO: 1369024 - DNA, 15 bp, Homo sapiens
atcagagatgacaca

SEQ ID NO: 1369025 - DNA, 15 bp, Homo sapiens
aatcagagatgacac

SEQ ID NO: 1369026 - DNA, 15 bp, Homo sapiens
aaatcagagatgaca

SEQ ID NO: 1369027 - DNA, 15 bp, Homo sapiens
taaatcagagatgac

SEQ ID NO: 1369028 - DNA, 15 bp, Homo sapiens
ataaatcagagatga

SEQ ID NO: 1369029 - DNA, 15 bp, Homo sapiens
aataaatcagagatg

SEQ ID NO: 1369030 - DNA, 15 bp, Homo sapiens
aaataaatcagagat

SEQ ID NO: 1369031 - DNA, 15 bp, Homo sapiens
caaataaatcagaga

SEQ ID NO: 1369032 - DNA, 15 bp, Homo sapiens
tcaaataaatcagag

SEQ ID NO: 1369033 - DNA, 15 bp, Homo sapiens
ctcaaataaatcaga

SEQ ID NO: 1369034 - DNA, 15 bp, Homo sapiens
gctcaaataaatcag

SEQ ID NO: 1369035 - DNA, 15 bp, Homo sapiens
ggctcaaataaatca

SEQ ID NO: 1369036 - DNA, 15 bp, Homo sapiens
tggctcaaataaatc

SEQ ID NO: 1369037 - DNA, 15 bp, Homo sapiens
atggctcaaataaat

SEQ ID NO: 1369038 - DNA, 15 bp, Homo sapiens
catggctcaaataaa

SEQ ID NO: 1369039 - DNA, 15 bp, Homo sapiens
acatggctcaaataa

SEQ ID NO: 1369040 - DNA, 15 bp, Homo sapiens
aacatggctcaaata

SEQ ID NO: 1369041 - DNA, 15 bp, Homo sapiens
aaacatggctcaaat

SEQ ID NO: 1369042 - DNA, 15 bp, Homo sapiens
aaaacatggctcaaa

SEQ ID NO: 1369043 - DNA, 15 bp, Homo sapiens
caaaacatggctcaa

SEQ ID NO: 1369044 - DNA, 15 bp, Homo sapiens
gcaaaacatggctca

SEQ ID NO: 1369045 - DNA, 15 bp, Homo sapiens
tgcaaaacatggctc

SEQ ID NO: 1369046 - DNA, 15 bp, Homo sapiens
ctgcaaaacatggct

SEQ ID NO: 1369047 - DNA, 15 bp, Homo sapiens
actgcaaaacatggc

SEQ ID NO: 1369048 - DNA, 15 bp, Homo sapiens
aactgcaaaacatgg

SEQ ID NO: 1369049 - DNA, 15 bp, Homo sapiens
gaactgcaaaacatg

SEQ ID NO: 1369050 - DNA, 15 bp, Homo sapiens
agaactgcaaaacat

SEQ ID NO: 1369051 - DNA, 15 bp, Homo sapiens
gagaactgcaaaaca

SEQ ID NO: 1369052 - DNA, 15 bp, Homo sapiens
ggagaactgcaaaac

SEQ ID NO: 1369053 - DNA, 15 bp, Homo sapiens
taggagaactgcaaa

SEQ ID NO: 1369054 - DNA, 15 bp, Homo sapiens
ttaggagaactgcaa

SEQ ID NO: 1369055 - DNA, 15 bp, Homo sapiens
attaggagaactgca

SEQ ID NO: 1369056 - DNA, 15 bp, Homo sapiens
tattaggagaactgc

SEQ ID NO: 1369057 - DNA, 15 bp, Homo sapiens
ctattaggagaactg

SEQ ID NO: 1369058 - DNA, 15 bp, Homo sapiens
tctattaggagaact

SEQ ID NO: 1369059 - DNA, 15 bp, Homo sapiens
ctctattaggagaac

SEQ ID NO: 1369060 - DNA, 15 bp, Homo sapiens
tctctattaggagaa

SEQ ID NO: 1369061 - DNA, 15 bp, Homo sapiens
atctctattaggaga

SEQ ID NO: 1369062 - DNA, 15 bp, Homo sapiens
gatctctattaggag

SEQ ID NO: 1369063 - DNA, 15 bp, Homo sapiens
agatctctattagga

SEQ ID NO: 1369064 - DNA, 15 bp, Homo sapiens
aagatctctattagg

SEQ ID NO: 1369065 - DNA, 15 bp, Homo sapiens
aaagatctctattag

SEQ ID NO: 1369066 - DNA, 15 bp, Homo sapiens
gaaagatctctatta

SEQ ID NO: 1369067 - DNA, 15 bp, Homo sapiens
tgaaagatctctatt

SEQ ID NO: 1369068 - DNA, 15 bp, Homo sapiens
gtgaaagatctctat

SEQ ID NO: 1369069 - DNA, 15 bp, Homo sapiens
ggtgaaagatctcta

SEQ ID NO: 1369070 - DNA, 15 bp, Homo sapiens
aggtgaaagatctct

SEQ ID NO: 1369071 - DNA, 15 bp, Homo sapiens
gaggtgaaagatctc

SEQ ID NO: 1369072 - DNA, 15 bp, Homo sapiens
ggaggtgaaagatct

SEQ ID NO: 1369073 - DNA, 15 bp, Homo sapiens
gggaggtgaaagatc

SEQ ID NO: 1369074 - DNA, 15 bp, Homo sapiens
agggaggtgaaagat

SEQ ID NO: 1369075 - DNA, 15 bp, Homo sapiens
tagggaggtgaaaga

SEQ ID NO: 1369076 - DNA, 15 bp, Homo sapiens
ctagggaggtgaaag

SEQ ID NO: 1369077 - DNA, 15 bp, Homo sapiens
actagggaggtgaaa

SEQ ID NO: 1369078 - DNA, 15 bp, Homo sapiens
aactagggaggtgaa

SEQ ID NO: 1369079 - DNA, 15 bp, Homo sapiens
taactagggaggtga

SEQ ID NO: 1369080 - DNA, 15 bp, Homo sapiens
ctaactagggaggtg

SEQ ID NO: 1369081 - DNA, 15 bp, Homo sapiens
cctaactagggaggt

SEQ ID NO: 1369082 - DNA, 15 bp, Homo sapiens
acctaactagggagg

SEQ ID NO: 1369083 - DNA, 15 bp, Homo sapiens
cacctaactagggag

SEQ ID NO: 1369084 - DNA, 15 bp, Homo sapiens
acacctaactaggga

SEQ ID NO: 1369085 - DNA, 15 bp, Homo sapiens
tacacctaactaggg

SEQ ID NO: 1369086 - DNA, 15 bp, Homo sapiens
atacacctaactagg

SEQ ID NO: 1369087 - DNA, 15 bp, Homo sapiens
aatacacctaactag

SEQ ID NO: 1369088 - DNA, 15 bp, Homo sapiens
gaatacacctaacta

SEQ ID NO: 1369089 - DNA, 15 bp, Homo sapiens
ggaatacacctaact

SEQ ID NO: 1369090 - DNA, 15 bp, Homo sapiens
aggaatacacctaac

SEQ ID NO: 1369091 - DNA, 15 bp, Homo sapiens
taggaatacacctaa

SEQ ID NO: 1369092 - DNA, 15 bp, Homo sapiens
ctaggaatacaccta

SEQ ID NO: 1369093 - DNA, 15 bp, Homo sapiens
tctaggaatacacct

SEQ ID NO: 1369094 - DNA, 15 bp, Homo sapiens
gtctaggaatacacc

SEQ ID NO: 1369095 - DNA, 15 bp, Homo sapiens
tgtctaggaatacac

SEQ ID NO: 1369096 - DNA, 15 bp, Homo sapiens
atgtctaggaataca

SEQ ID NO: 1369097 - DNA, 15 bp, Homo sapiens
aatgtctaggaatac

SEQ ID NO: 1369098 - DNA, 15 bp, Homo sapiens
aaatgtctaggaata

SEQ ID NO: 1369099 - DNA, 15 bp, Homo sapiens
aaaatgtctaggaat

SEQ ID NO: 1369100 - DNA, 15 bp, Homo sapiens
taaaatgtctaggaa

SEQ ID NO: 1369101 - DNA, 15 bp, Homo sapiens
ataaaatgtctagga

SEQ ID NO: 1369102 - DNA, 15 bp, Homo sapiens
aataaaatgtctagg

SEQ ID NO: 1369103 - DNA, 15 bp, Homo sapiens
gaataaaatgtctag

SEQ ID NO: 1369104 - DNA, 15 bp, Homo sapiens
agaataaaatgtcta

SEQ ID NO: 1369105 - DNA, 15 bp, Homo sapiens
aagaataaaatgtct

SEQ ID NO: 1369106 - DNA, 15 bp, Homo sapiens
aaagaataaaatgtc

SEQ ID NO: 1369107 - DNA, 15 bp, Homo sapiens
aaaagaataaaatgt

SEQ ID NO: 1369108 - DNA, 15 bp, Homo sapiens
aaaaagaataaaatg

SEQ ID NO: 1369109 - DNA, 15 bp, Homo sapiens
caaaaagaataaaat

SEQ ID NO: 1369110 - DNA, 15 bp, Homo sapiens
acaaaaagaataaaa

SEQ ID NO: 1369111 - DNA, 15 bp, Homo sapiens
cacaaaaagaataaa

SEQ ID NO: 1369112 - DNA, 15 bp, Homo sapiens
ccacaaaaagaataa

SEQ ID NO: 1369113 - DNA, 15 bp, Homo sapiens
gccacaaaaagaata

SEQ ID NO: 1369114 - DNA, 15 bp, Homo sapiens
tgccacaaaaagaat

SEQ ID NO: 1369115 - DNA, 15 bp, Homo sapiens
ttgccacaaaaagaa

SEQ ID NO: 1369116 - DNA, 15 bp, Homo sapiens
attgccacaaaaaga

SEQ ID NO: 1369117 - DNA, 15 bp, Homo sapiens
aattgccacaaaaag

SEQ ID NO: 1369118 - DNA, 15 bp, Homo sapiens
caattgccacaaaaa

SEQ ID NO: 1369119 - DNA, 15 bp, Homo sapiens
acaattgccacaaaa

SEQ ID NO: 1369120 - DNA, 15 bp, Homo sapiens
cacaattgccacaaa

SEQ ID NO: 1369121 - DNA, 15 bp, Homo sapiens
tcacaattgccacaa

SEQ ID NO: 1369122 - DNA, 15 bp, Homo sapiens
ttcacaattgccaca

SEQ ID NO: 1369123 - DNA, 15 bp, Homo sapiens
attcacaattgccac

SEQ ID NO: 1369124 - DNA, 15 bp, Homo sapiens
cattcacaattgcca

SEQ ID NO: 1369125 - DNA, 15 bp, Homo sapiens
ccattcacaattgcc

SEQ ID NO: 1369126 - DNA, 15 bp, Homo sapiens
cccattcacaattgc

SEQ ID NO: 1369127 - DNA, 15 bp, Homo sapiens
ccccattcacaattg

SEQ ID NO: 1369128 - DNA, 15 bp, Homo sapiens
gccccattcacaatt

SEQ ID NO: 1369129 - DNA, 15 bp, Homo sapiens
agccccattcacaat

SEQ ID NO: 1369130 - DNA, 15 bp, Homo sapiens
tagccccattcacaa

SEQ ID NO: 1369131 - DNA, 15 bp, Homo sapiens
gtagccccattcaca

SEQ ID NO: 1369132 - DNA, 15 bp, Homo sapiens
tgtagccccattcac

SEQ ID NO: 1369133 - DNA, 15 bp, Homo sapiens
atgtagccccattca

SEQ ID NO: 1369134 - DNA, 15 bp, Homo sapiens
aatgtagccccattc

SEQ ID NO: 1369135 - DNA, 15 bp, Homo sapiens
gaatgtagccccatt

SEQ ID NO: 1369136 - DNA, 15 bp, Homo sapiens
ggaatgtagccccat

SEQ ID NO: 1369137 - DNA, 15 bp, Homo sapiens
aggaatgtagcccca

SEQ ID NO: 1369138 - DNA, 15 bp, Homo sapiens
caggaatgtagcccc

SEQ ID NO: 1369139 - DNA, 15 bp, Homo sapiens
acaggaatgtagccc

SEQ ID NO: 1369140 - DNA, 15 bp, Homo sapiens
aacaggaatgtagcc

SEQ ID NO: 1369141 - DNA, 15 bp, Homo sapiens
aaacaggaatgtagc

SEQ ID NO: 1369142 - DNA, 15 bp, Homo sapiens
aaaacaggaatgtag

SEQ ID NO: 1369143 - DNA, 15 bp, Homo sapiens
caaaacaggaatgta

SEQ ID NO: 1369144 - DNA, 15 bp, Homo sapiens
ccaaaacaggaatgt

SEQ ID NO: 1369145 - DNA, 15 bp, Homo sapiens
gccaaaacaggaatg

SEQ ID NO: 1369146 - DNA, 15 bp, Homo sapiens
agccaaaacaggaat

SEQ ID NO: 1369147 - DNA, 15 bp, Homo sapiens
gagccaaaacaggaa

SEQ ID NO: 1369148 - DNA, 15 bp, Homo sapiens
agagccaaaacagga

SEQ ID NO: 1369149 - DNA, 15 bp, Homo sapiens
aagagccaaaacagg

SEQ ID NO: 1369150 - DNA, 15 bp, Homo sapiens
caagagccaaaacag

SEQ ID NO: 1369151 - DNA, 15 bp, Homo sapiens
tcaagagccaaaaca

SEQ ID NO: 1369152 - DNA, 15 bp, Homo sapiens
gtcaagagccaaaac

SEQ ID NO: 1369153 - DNA, 15 bp, Homo sapiens
agtcaagagccaaaa

SEQ ID NO: 1369154 - DNA, 15 bp, Homo sapiens
aagtcaagagccaaa

SEQ ID NO: 1369155 - DNA, 15 bp, Homo sapiens
caagtcaagagccaa

SEQ ID NO: 1369156 - DNA, 15 bp, Homo sapiens
tcaagtcaagagcca

SEQ ID NO: 1369157 - DNA, 15 bp, Homo sapiens
gtcaagtcaagagcc

SEQ ID NO: 1369158 - DNA, 15 bp, Homo sapiens
agtcaagtcaagagc

SEQ ID NO: 1369159 - DNA, 15 bp, Homo sapiens
cagtcaagtcaagag

SEQ ID NO: 1369160 - DNA, 15 bp, Homo sapiens
acagtcaagtcaaga

SEQ ID NO: 1369161 - DNA, 15 bp, Homo sapiens
aacagtcaagtcaag

SEQ ID NO: 1369162 - DNA, 15 bp, Homo sapiens
caacagtcaagtcaa

SEQ ID NO: 1369163 - DNA, 15 bp, Homo sapiens
gcaacagtcaagtca

SEQ ID NO: 1369164 - DNA, 15 bp, Homo sapiens
agcaacagtcaagtc

SEQ ID NO: 1369165 - DNA, 15 bp, Homo sapiens
cagcaacagtcaagt

SEQ ID NO: 1369166 - DNA, 15 bp, Homo sapiens
ccagcaacagtcaag

SEQ ID NO: 1369167 - DNA, 15 bp, Homo sapiens
accagcaacagtcaa

SEQ ID NO: 1369168 - DNA, 15 bp, Homo sapiens
caccagcaacagtca

SEQ ID NO: 1369169 - DNA, 15 bp, Homo sapiens
acaccagcaacagtc

SEQ ID NO: 1369170 - DNA, 15 bp, Homo sapiens
tacaccagcaacagt

SEQ ID NO: 1369171 - DNA, 15 bp, Homo sapiens
atacaccagcaacag

SEQ ID NO: 1369172 - DNA, 15 bp, Homo sapiens
tatacaccagcaaca

SEQ ID NO: 1369173 - DNA, 15 bp, Homo sapiens
ctatacaccagcaac

SEQ ID NO: 1369174 - DNA, 15 bp, Homo sapiens
tctatacaccagcaa

SEQ ID NO: 1369175 - DNA, 15 bp, Homo sapiens
ttctatacaccagca

SEQ ID NO: 1369176 - DNA, 15 bp, Homo sapiens
tttctatacaccagc

SEQ ID NO: 1369177 - DNA, 15 bp, Homo sapiens
atttctatacaccag

SEQ ID NO: 1369178 - DNA, 15 bp, Homo sapiens
catttctatacacca

SEQ ID NO: 1369179 - DNA, 15 bp, Homo sapiens
gcatttctatacacc

SEQ ID NO: 1369180 - DNA, 15 bp, Homo sapiens
agcatttctatacac

SEQ ID NO: 1369181 - DNA, 15 bp, Homo sapiens
gagcatttctataca

SEQ ID NO: 1369182 - DNA, 15 bp, Homo sapiens
tgagcatttctatac

SEQ ID NO: 1369183 - DNA, 15 bp, Homo sapiens
atgagcatttctata

SEQ ID NO: 1369184 - DNA, 15 bp, Homo sapiens
catgagcatttctat

SEQ ID NO: 1369185 - DNA, 15 bp, Homo sapiens
tcatgagcatttcta

SEQ ID NO: 1369186 - DNA, 15 bp, Homo sapiens
atcatgagcatttct

SEQ ID NO: 1369187 - DNA, 15 bp, Homo sapiens
aatcatgagcatttc

SEQ ID NO: 1369188 - DNA, 15 bp, Homo sapiens
taatcatgagcattt

SEQ ID NO: 1369189 - DNA, 15 bp, Homo sapiens
ataatcatgagcatt

SEQ ID NO: 1369190 - DNA, 15 bp, Homo sapiens
aataatcatgagcat

SEQ ID NO: 1369191 - DNA, 15 bp, Homo sapiens
caataatcatgagca

SEQ ID NO: 1369192 - DNA, 15 bp, Homo sapiens
gcaataatcatgagc

SEQ ID NO: 1369193 - DNA, 15 bp, Homo sapiens
tgcaataatcatgag

SEQ ID NO: 1369194 - DNA, 15 bp, Homo sapiens
gtgcaataatcatga

SEQ ID NO: 1369195 - DNA, 15 bp, Homo sapiens
tgtgcaataatcatg

SEQ ID NO: 1369196 - DNA, 15 bp, Homo sapiens
atgtgcaataatcat

SEQ ID NO: 1369197 - DNA, 15 bp, Homo sapiens
aatgtgcaataatca

SEQ ID NO: 1369198 - DNA, 15 bp, Homo sapiens
caatgtgcaataatc

SEQ ID NO: 1369199 - DNA, 15 bp, Homo sapiens
tcaatgtgcaataat

SEQ ID NO: 1369200 - DNA, 15 bp, Homo sapiens
atcaatgtgcaataa

SEQ ID NO: 1369201 - DNA, 15 bp, Homo sapiens
aatcaatgtgcaata

SEQ ID NO: 1369202 - DNA, 15 bp, Homo sapiens
aaatcaatgtgcaat

SEQ ID NO: 1369203 - DNA, 15 bp, Homo sapiens
aaaatcaatgtgcaa

SEQ ID NO: 1369204 - DNA, 15 bp, Homo sapiens
caaaatcaatgtgca

SEQ ID NO: 1369205 - DNA, 15 bp, Homo sapiens
acaaaatcaatgtgc

SEQ ID NO: 1369206 - DNA, 15 bp, Homo sapiens
tacaaaatcaatgtg

SEQ ID NO: 1369207 - DNA, 15 bp, Homo sapiens
atacaaaatcaatgt

SEQ ID NO: 1369208 - DNA, 15 bp, Homo sapiens
gatacaaaatcaatg

SEQ ID NO: 1369209 - DNA, 15 bp, Homo sapiens
ggatacaaaatcaat

SEQ ID NO: 1369210 - DNA, 15 bp, Homo sapiens
aggatacaaaatcaa

SEQ ID NO: 1369211 - DNA, 15 bp, Homo sapiens
caggatacaaaatca

SEQ ID NO: 1369212 - DNA, 15 bp, Homo sapiens
tcaggatacaaaatc

SEQ ID NO: 1369213 - DNA, 15 bp, Homo sapiens
ctcaggatacaaaat

SEQ ID NO: 1369214 - DNA, 15 bp, Homo sapiens
tctcaggatacaaaa

SEQ ID NO: 1369215 - DNA, 15 bp, Homo sapiens
gtctcaggatacaaa

SEQ ID NO: 1369216 - DNA, 15 bp, Homo sapiens
agtctcaggatacaa

SEQ ID NO: 1369217 - DNA, 15 bp, Homo sapiens
aagtctcaggataca

SEQ ID NO: 1369218 - DNA, 15 bp, Homo sapiens
aaagtctcaggatac

SEQ ID NO: 1369219 - DNA, 15 bp, Homo sapiens
caaagtctcaggata

SEQ ID NO: 1369220 - DNA, 15 bp, Homo sapiens
gcaaagtctcaggat

SEQ ID NO: 1369221 - DNA, 15 bp, Homo sapiens
agcaaagtctcagga

SEQ ID NO: 1369222 - DNA, 15 bp, Homo sapiens
cagcaaagtctcagg

SEQ ID NO: 1369223 - DNA, 15 bp, Homo sapiens
tcagcaaagtctcag

SEQ ID NO: 1369224 - DNA, 15 bp, Homo sapiens
ttcagcaaagtctca

SEQ ID NO: 1369225 - DNA, 15 bp, Homo sapiens
gttcagcaaagtctc

SEQ ID NO: 1369226 - DNA, 15 bp, Homo sapiens
agttcagcaaagtct

SEQ ID NO: 1369227 - DNA, 15 bp, Homo sapiens
aagttcagcaaagtc

SEQ ID NO: 1369228 - DNA, 15 bp, Homo sapiens
caagttcagcaaagt

SEQ ID NO: 1369229 - DNA, 15 bp, Homo sapiens
acaagttcagcaaag

SEQ ID NO: 1369230 - DNA, 15 bp, Homo sapiens
aacaagttcagcaaa

SEQ ID NO: 1369231 - DNA, 15 bp, Homo sapiens
aaacaagttcagcaa

SEQ ID NO: 1369232 - DNA, 15 bp, Homo sapiens
taaacaagttcagca

SEQ ID NO: 1369233 - DNA, 15 bp, Homo sapiens
ataaacaagttcagc

SEQ ID NO: 1369234 - DNA, 15 bp, Homo sapiens
gataaacaagttcag

SEQ ID NO: 1369235 - DNA, 15 bp, Homo sapiens
tgataaacaagttca

SEQ ID NO: 1369236 - DNA, 15 bp, Homo sapiens
ctgataaacaagttc

SEQ ID NO: 1369237 - DNA, 15 bp, Homo sapiens
gctgataaacaagtt

SEQ ID NO: 1369238 - DNA, 15 bp, Homo sapiens
agctgataaacaagt

SEQ ID NO: 1369239 - DNA, 15 bp, Homo sapiens
aagctgataaacaag

SEQ ID NO: 1369240 - DNA, 15 bp, Homo sapiens
taagctgataaacaa

SEQ ID NO: 1369241 - DNA, 15 bp, Homo sapiens
ttaagctgataaaca

SEQ ID NO: 1369242 - DNA, 15 bp, Homo sapiens
cttaagctgataaac

SEQ ID NO: 1369243 - DNA, 15 bp, Homo sapiens
tcttaagctgataaa

SEQ ID NO: 1369244 - DNA, 15 bp, Homo sapiens
ttcttaagctgataa

SEQ ID NO: 1369245 - DNA, 15 bp, Homo sapiens
cttcttaagctgata

SEQ ID NO: 1369246 - DNA, 15 bp, Homo sapiens
gcttcttaagctgat

SEQ ID NO: 1369247 - DNA, 15 bp, Homo sapiens
tgcttcttaagctga

SEQ ID NO: 1369248 - DNA, 15 bp, Homo sapiens
atgcttcttaagctg

SEQ ID NO: 1369249 - DNA, 15 bp, Homo sapiens
aatgcttcttaagct

SEQ ID NO: 1369250 - DNA, 15 bp, Homo sapiens
aaatgcttcttaagc

SEQ ID NO: 1369251 - DNA, 15 bp, Homo sapiens
taaatgcttcttaag

SEQ ID NO: 1369252 - DNA, 15 bp, Homo sapiens
ctaaatgcttcttaa

SEQ ID NO: 1369253 - DNA, 15 bp, Homo sapiens
cctaaatgcttctta

SEQ ID NO: 1369254 - DNA, 15 bp, Homo sapiens
gcctaaatgcttctt

SEQ ID NO: 1369255 - DNA, 15 bp, Homo sapiens
agcctaaatgcttct

SEQ ID NO: 1369256 - DNA, 15 bp, Homo sapiens
cagcctaaatgcttc

SEQ ID NO: 1369257 - DNA, 15 bp, Homo sapiens
tcagcctaaatgctt

SEQ ID NO: 1369258 - DNA, 15 bp, Homo sapiens
ctcagcctaaatgct

SEQ ID NO: 1369259 - DNA, 15 bp, Homo sapiens
tctcagcctaaatgc

SEQ ID NO: 1369260 - DNA, 15 bp, Homo sapiens
gtctcagcctaaatg

SEQ ID NO: 1369261 - DNA, 15 bp, Homo sapiens
agtctcagcctaaat

SEQ ID NO: 1369262 - DNA, 15 bp, Homo sapiens
tagtctcagcctaaa

SEQ ID NO: 1369263 - DNA, 15 bp, Homo sapiens
atagtctcagcctaa

SEQ ID NO: 1369264 - DNA, 15 bp, Homo sapiens
catagtctcagccta

SEQ ID NO: 1369265 - DNA, 15 bp, Homo sapiens
ccatagtctcagcct

SEQ ID NO: 1369266 - DNA, 15 bp, Homo sapiens
cccatagtctcagcc

SEQ ID NO: 1369267 - DNA, 15 bp, Homo sapiens
ccccatagtctcagc

SEQ ID NO: 1369268 - DNA, 15 bp, Homo sapiens
accccatagtctcag

SEQ ID NO: 1369269 - DNA, 15 bp, Homo sapiens
aaccccatagtctca

SEQ ID NO: 1369270 - DNA, 15 bp, Homo sapiens
aaaccccatagtctc

SEQ ID NO: 1369271 - DNA, 15 bp, Homo sapiens
aaaaccccatagtct

SEQ ID NO: 1369272 - DNA, 15 bp, Homo sapiens
gaaaaccccatagtc

SEQ ID NO: 1369273 - DNA, 15 bp, Homo sapiens
agaaaaccccatagt

SEQ ID NO: 1369274 - DNA, 15 bp, Homo sapiens
tagaaaaccccatag

SEQ ID NO: 1369275 - DNA, 15 bp, Homo sapiens
ctagaaaaccccata

SEQ ID NO: 1369276 - DNA, 15 bp, Homo sapiens
tctagaaaaccccat

SEQ ID NO: 1369277 - DNA, 15 bp, Homo sapiens
atctagaaaacccca

SEQ ID NO: 1369278 - DNA, 15 bp, Homo sapiens
tatctagaaaacccc

SEQ ID NO: 1369279 - DNA, 15 bp, Homo sapiens
atatctagaaaaccc

SEQ ID NO: 1369280 - DNA, 15 bp, Homo sapiens
tatatctagaaaacc

SEQ ID NO: 1369281 - DNA, 15 bp, Homo sapiens
ctatatctagaaaac

SEQ ID NO: 1369282 - DNA, 15 bp, Homo sapiens
cctatatctagaaaa

SEQ ID NO: 1369283 - DNA, 15 bp, Homo sapiens
tcctatatctagaaa

SEQ ID NO: 1369284 - DNA, 15 bp, Homo sapiens
atcctatatctagaa

SEQ ID NO: 1369285 - DNA, 15 bp, Homo sapiens
gatcctatatctaga

SEQ ID NO: 1369286 - DNA, 15 bp, Homo sapiens
tgatcctatatctag

SEQ ID NO: 1369287 - DNA, 15 bp, Homo sapiens
atgatcctatatcta

SEQ ID NO: 1369288 - DNA, 15 bp, Homo sapiens
catgatcctatatct

SEQ ID NO: 1369289 - DNA, 15 bp, Homo sapiens
acatgatcctatatc

SEQ ID NO: 1369290 - DNA, 15 bp, Homo sapiens
gacatgatcctatat

SEQ ID NO: 1369291 - DNA, 15 bp, Homo sapiens
tgacatgatcctata

SEQ ID NO: 1369292 - DNA, 15 bp, Homo sapiens
atgacatgatcctat

SEQ ID NO: 1369293 - DNA, 15 bp, Homo sapiens
gatgacatgatccta

SEQ ID NO: 1369294 - DNA, 15 bp, Homo sapiens
agatgacatgatcct

SEQ ID NO: 1369295 - DNA, 15 bp, Homo sapiens
cagatgacatgatcc

SEQ ID NO: 1369296 - DNA, 15 bp, Homo sapiens
gcagatgacatgatc

SEQ ID NO: 1369297 - DNA, 15 bp, Homo sapiens
tgcagatgacatgat

SEQ ID NO: 1369298 - DNA, 15 bp, Homo sapiens
ttgcagatgacatga

SEQ ID NO: 1369299 - DNA, 15 bp, Homo sapiens
tttgcagatgacatg

SEQ ID NO: 1369300 - DNA, 15 bp, Homo sapiens
atttgcagatgacat

SEQ ID NO: 1369301 - DNA, 15 bp, Homo sapiens
aatttgcagatgaca

SEQ ID NO: 1369302 - DNA, 15 bp, Homo sapiens
taatttgcagatgac

SEQ ID NO: 1369303 - DNA, 15 bp, Homo sapiens
ctaatttgcagatga

SEQ ID NO: 1369304 - DNA, 15 bp, Homo sapiens
cctaatttgcagatg

SEQ ID NO: 1369305 - DNA, 15 bp, Homo sapiens
tcctaatttgcagat

SEQ ID NO: 1369306 - DNA, 15 bp, Homo sapiens
atcctaatttgcaga

SEQ ID NO: 1369307 - DNA, 15 bp, Homo sapiens
tatcctaatttgcag

SEQ ID NO: 1369308 - DNA, 15 bp, Homo sapiens
atatcctaatttgca

SEQ ID NO: 1369309 - DNA, 15 bp, Homo sapiens
aatatcctaatttgc

SEQ ID NO: 1369310 - DNA, 15 bp, Homo sapiens
aaatatcctaatttg

SEQ ID NO: 1369311 - DNA, 15 bp, Homo sapiens
aaaatatcctaattt

SEQ ID NO: 1369312 - DNA, 15 bp, Homo sapiens
caaaatatcctaatt

SEQ ID NO: 1369313 - DNA, 15 bp, Homo sapiens
tcaaaatatcctaat

SEQ ID NO: 1369314 - DNA, 15 bp, Homo sapiens
gtcaaaatatcctaa

SEQ ID NO: 1369315 - DNA, 15 bp, Homo sapiens
agtcaaaatatccta

SEQ ID NO: 1369316 - DNA, 15 bp, Homo sapiens
aagtcaaaatatcct

SEQ ID NO: 1369317 - DNA, 15 bp, Homo sapiens
gaagtcaaaatatcc

SEQ ID NO: 1369318 - DNA, 15 bp, Homo sapiens
ggaagtcaaaatatc

SEQ ID NO: 1369319 - DNA, 15 bp, Homo sapiens
tggaagtcaaaatat

SEQ ID NO: 1369320 - DNA, 15 bp, Homo sapiens
gtggaagtcaaaata

SEQ ID NO: 1369321 - DNA, 15 bp, Homo sapiens
agtggaagtcaaaat

SEQ ID NO: 1369322 - DNA, 15 bp, Homo sapiens
gagtggaagtcaaaa

SEQ ID NO: 1369323 - DNA, 15 bp, Homo sapiens
agagtggaagtcaaa

SEQ ID NO: 1369324 - DNA, 15 bp, Homo sapiens
aagagtggaagtcaa

SEQ ID NO: 1369325 - DNA, 15 bp, Homo sapiens
gaagagtggaagtca

SEQ ID NO: 1369326 - DNA, 15 bp, Homo sapiens
ggaagagtggaagtc

SEQ ID NO: 1369327 - DNA, 15 bp, Homo sapiens
aggaagagtggaagt

SEQ ID NO: 1369328 - DNA, 15 bp, Homo sapiens
caggaagagtggaag

SEQ ID NO: 1369329 - DNA, 15 bp, Homo sapiens
acaggaagagtggaa

SEQ ID NO: 1369330 - DNA, 15 bp, Homo sapiens
aacaggaagagtgga

SEQ ID NO: 1369331 - DNA, 15 bp, Homo sapiens
aaacaggaagagtgg

SEQ ID NO: 1369332 - DNA, 15 bp, Homo sapiens
caaacaggaagagtg

SEQ ID NO: 1369333 - DNA, 15 bp, Homo sapiens
ccaaacaggaagagt

SEQ ID NO: 1369334 - DNA, 15 bp, Homo sapiens
tccaaacaggaagag

SEQ ID NO: 1369335 - DNA, 15 bp, Homo sapiens
atccaaacaggaaga

SEQ ID NO: 1369336 - DNA, 15 bp, Homo sapiens
catccaaacaggaag

SEQ ID NO: 1369337 - DNA, 15 bp, Homo sapiens
acatccaaacaggaa

SEQ ID NO: 1369338 - DNA, 15 bp, Homo sapiens
gacatccaaacagga

SEQ ID NO: 1369339 - DNA, 15 bp, Homo sapiens
agacatccaaacagg

SEQ ID NO: 1369340 - DNA, 15 bp, Homo sapiens
aagacatccaaacag

SEQ ID NO: 1369341 - DNA, 15 bp, Homo sapiens
aaagacatccaaaca

SEQ ID NO: 1369342 - DNA, 15 bp, Homo sapiens
aaaagacatccaaac

SEQ ID NO: 1369343 - DNA, 15 bp, Homo sapiens
taaaagacatccaaa

SEQ ID NO: 1369344 - DNA, 15 bp, Homo sapiens
ataaaagacatccaa

SEQ ID NO: 1369345 - DNA, 15 bp, Homo sapiens
aataaaagacatcca

SEQ ID NO: 1369346 - DNA, 15 bp, Homo sapiens
aaataaaagacatcc

SEQ ID NO: 1369347 - DNA, 15 bp, Homo sapiens
gaaataaaagacatc

SEQ ID NO: 1369348 - DNA, 15 bp, Homo sapiens
agaaataaaagacat

SEQ ID NO: 1369349 - DNA, 15 bp, Homo sapiens
aagaaataaaagaca

SEQ ID NO: 1369350 - DNA, 15 bp, Homo sapiens
aaagaaataaaagac

SEQ ID NO: 1369351 - DNA, 15 bp, Homo sapiens
gaaagaaataaaaga

SEQ ID NO: 1369352 - DNA, 15 bp, Homo sapiens
agaaagaaataaaag

SEQ ID NO: 1369353 - DNA, 15 bp, Homo sapiens
aagaaagaaataaaa

SEQ ID NO: 1369354 - DNA, 15 bp, Homo sapiens
aaaagaaagaaataa

SEQ ID NO: 1369355 - DNA, 15 bp, Homo sapiens
caaaagaaagaaata

SEQ ID NO: 1369356 - DNA, 15 bp, Homo sapiens
gcaaaagaaagaaat

SEQ ID NO: 1369357 - DNA, 15 bp, Homo sapiens
ggcaaaagaaagaaa

SEQ ID NO: 1369358 - DNA, 15 bp, Homo sapiens
aggcaaaagaaagaa

SEQ ID NO: 1369359 - DNA, 15 bp, Homo sapiens
caggcaaaagaaaga

SEQ ID NO: 1369360 - DNA, 15 bp, Homo sapiens
tcaggcaaaagaaag

SEQ ID NO: 1369361 - DNA, 15 bp, Homo sapiens
atcaggcaaaagaaa

SEQ ID NO: 1369362 - DNA, 15 bp, Homo sapiens
aatcaggcaaaagaa

SEQ ID NO: 1369363 - DNA, 15 bp, Homo sapiens
caatcaggcaaaaga

SEQ ID NO: 1369364 - DNA, 15 bp, Homo sapiens
acaatcaggcaaaag

SEQ ID NO: 1369365 - DNA, 15 bp, Homo sapiens
gacaatcaggcaaaa

SEQ ID NO: 1369366 - DNA, 15 bp, Homo sapiens
ggacaatcaggcaaa

SEQ ID NO: 1369367 - DNA, 15 bp, Homo sapiens
aggacaatcaggcaa

SEQ ID NO: 1369368 - DNA, 15 bp, Homo sapiens
caggacaatcaggca

SEQ ID NO: 1369369 - DNA, 15 bp, Homo sapiens
ccaggacaatcaggc

SEQ ID NO: 1369370 - DNA, 15 bp, Homo sapiens
gccaggacaatcagg

SEQ ID NO: 1369371 - DNA, 15 bp, Homo sapiens
ggccaggacaatcag

SEQ ID NO: 1369372 - DNA, 15 bp, Homo sapiens
tggccaggacaatca

SEQ ID NO: 1369373 - DNA, 15 bp, Homo sapiens
ctggccaggacaatc

SEQ ID NO: 1369374 - DNA, 15 bp, Homo sapiens
cctggccaggacaat

SEQ ID NO: 1369375 - DNA, 15 bp, Homo sapiens
tcctggccaggacaa

SEQ ID NO: 1369376 - DNA, 15 bp, Homo sapiens
atcctggccaggaca

SEQ ID NO: 1369377 - DNA, 15 bp, Homo sapiens
catcctggccaggac

SEQ ID NO: 1369378 - DNA, 15 bp, Homo sapiens
acatcctggccagga

SEQ ID NO: 1369379 - DNA, 15 bp, Homo sapiens
gacatcctggccagg

SEQ ID NO: 1369380 - DNA, 15 bp, Homo sapiens
ggacatcctggccag

SEQ ID NO: 1369381 - DNA, 15 bp, Homo sapiens
tggacatcctggcca

SEQ ID NO: 1369382 - DNA, 15 bp, Homo sapiens
ttggacatcctggcc

SEQ ID NO: 1369383 - DNA, 15 bp, Homo sapiens
attggacatcctggc

SEQ ID NO: 1369384 - DNA, 15 bp, Homo sapiens
tattggacatcctgg

SEQ ID NO: 1369385 - DNA, 15 bp, Homo sapiens
gtattggacatcctg

SEQ ID NO: 1369386 - DNA, 15 bp, Homo sapiens
agtattggacatcct

SEQ ID NO: 1369387 - DNA, 15 bp, Homo sapiens
tagtattggacatcc

SEQ ID NO: 1369388 - DNA, 15 bp, Homo sapiens
atagtattggacatc

SEQ ID NO: 1369389 - DNA, 15 bp, Homo sapiens
aatagtattggacat

SEQ ID NO: 1369390 - DNA, 15 bp, Homo sapiens
aaatagtattggaca

SEQ ID NO: 1369391 - DNA, 15 bp, Homo sapiens
aaaatagtattggac

SEQ ID NO: 1369392 - DNA, 15 bp, Homo sapiens
caaaatagtattgga

SEQ ID NO: 1369393 - DNA, 15 bp, Homo sapiens
tcaaaatagtattgg

SEQ ID NO: 1369394 - DNA, 15 bp, Homo sapiens
ttcaaaatagtattg

SEQ ID NO: 1369395 - DNA, 15 bp, Homo sapiens
attcaaaatagtatt

SEQ ID NO: 1369396 - DNA, 15 bp, Homo sapiens
tattcaaaatagtat

SEQ ID NO: 1369397 - DNA, 15 bp, Homo sapiens
cctattcaaaatagt

SEQ ID NO: 1369398 - DNA, 15 bp, Homo sapiens
tcctattcaaaatag

SEQ ID NO: 1369399 - DNA, 15 bp, Homo sapiens
ctcctattcaaaata

SEQ ID NO: 1369400 - DNA, 15 bp, Homo sapiens
gctcctattcaaaat

SEQ ID NO: 1369401 - DNA, 15 bp, Homo sapiens
tgctcctattcaaaa

SEQ ID NO: 1369402 - DNA, 15 bp, Homo sapiens
ctgctcctattcaaa

SEQ ID NO: 1369403 - DNA, 15 bp, Homo sapiens
actgctcctattcaa

SEQ ID NO: 1369404 - DNA, 15 bp, Homo sapiens
cactgctcctattca

SEQ ID NO: 1369405 - DNA, 15 bp, Homo sapiens
tcactgctcctattc

SEQ ID NO: 1369406 - DNA, 15 bp, Homo sapiens
ctcactgctcctatt

SEQ ID NO: 1369407 - DNA, 15 bp, Homo sapiens
tctcactgctcctat

SEQ ID NO: 1369408 - DNA, 15 bp, Homo sapiens
ttctcactgctccta

SEQ ID NO: 1369409 - DNA, 15 bp, Homo sapiens
tttctcactgctcct

SEQ ID NO: 1369410 - DNA, 15 bp, Homo sapiens
ctttctcactgctcc

SEQ ID NO: 1369411 - DNA, 15 bp, Homo sapiens
cctttctcactgctc

SEQ ID NO: 1369412 - DNA, 15 bp, Homo sapiens
ccctttctcactgct

SEQ ID NO: 1369413 - DNA, 15 bp, Homo sapiens
accctttctcactgc

SEQ ID NO: 1369414 - DNA, 15 bp, Homo sapiens
taccctttctcactg

SEQ ID NO: 1369415 - DNA, 15 bp, Homo sapiens
ataccctttctcact

SEQ ID NO: 1369416 - DNA, 15 bp, Homo sapiens
gataccctttctcac

SEQ ID NO: 1369417 - DNA, 15 bp, Homo sapiens
agataccctttctca

SEQ ID NO: 1369418 - DNA, 15 bp, Homo sapiens
aagataccctttctc

SEQ ID NO: 1369419 - DNA, 15 bp, Homo sapiens
aaagataccctttct

SEQ ID NO: 1369420 - DNA, 15 bp, Homo sapiens
caaagataccctttc

SEQ ID NO: 1369421 - DNA, 15 bp, Homo sapiens
acaaagatacccttt

SEQ ID NO: 1369422 - DNA, 15 bp, Homo sapiens
aacaaagataccctt

SEQ ID NO: 1369423 - DNA, 15 bp, Homo sapiens
aaacaaagataccct

SEQ ID NO: 1369424 - DNA, 15 bp, Homo sapiens
aaaacaaagataccc

SEQ ID NO: 1369425 - DNA, 15 bp, Homo sapiens
caaaacaaagatacc

SEQ ID NO: 1369426 - DNA, 15 bp, Homo sapiens
acaaaacaaagatac

SEQ ID NO: 1369427 - DNA, 15 bp, Homo sapiens
cacaaaacaaagata

SEQ ID NO: 1369428 - DNA, 15 bp, Homo sapiens
gcacaaaacaaagat

SEQ ID NO: 1369429 - DNA, 15 bp, Homo sapiens
ggcacaaaacaaaga

SEQ ID NO: 1369430 - DNA, 15 bp, Homo sapiens
tggcacaaaacaaag

SEQ ID NO: 1369431 - DNA, 15 bp, Homo sapiens
ctggcacaaaacaaa

SEQ ID NO: 1369432 - DNA, 15 bp, Homo sapiens
actggcacaaaacaa

SEQ ID NO: 1369433 - DNA, 15 bp, Homo sapiens
aactggcacaaaaca

SEQ ID NO: 1369434 - DNA, 15 bp, Homo sapiens
caactggcacaaaac

SEQ ID NO: 1369435 - DNA, 15 bp, Homo sapiens
acaactggcacaaaa

SEQ ID NO: 1369436 - DNA, 15 bp, Homo sapiens
gacaactggcacaaa

SEQ ID NO: 1369437 - DNA, 15 bp, Homo sapiens
tgacaactggcacaa

SEQ ID NO: 1369438 - DNA, 15 bp, Homo sapiens
ttgacaactggcaca

SEQ ID NO: 1369439 - DNA, 15 bp, Homo sapiens
tttgacaactggcac

SEQ ID NO: 1369440 - DNA, 15 bp, Homo sapiens
ctttgacaactggca

SEQ ID NO: 1369441 - DNA, 15 bp, Homo sapiens
cctttgacaactggc

SEQ ID NO: 1369442 - DNA, 15 bp, Homo sapiens
ccctttgacaactgg

SEQ ID NO: 1369443 - DNA, 15 bp, Homo sapiens
tccctttgacaactg

SEQ ID NO: 1369444 - DNA, 15 bp, Homo sapiens
ttccctttgacaact

SEQ ID NO: 1369445 - DNA, 15 bp, Homo sapiens
attccctttgacaac

SEQ ID NO: 1369446 - DNA, 15 bp, Homo sapiens
cattccctttgacaa

SEQ ID NO: 1369447 - DNA, 15 bp, Homo sapiens
gcattccctttgaca

SEQ ID NO: 1369448 - DNA, 15 bp, Homo sapiens
agcattccctttgac

SEQ ID NO: 1369449 - DNA, 15 bp, Homo sapiens
aagcattccctttga

SEQ ID NO: 1369450 - DNA, 15 bp, Homo sapiens
gaagcattccctttg

SEQ ID NO: 1369451 - DNA, 15 bp, Homo sapiens
ggaagcattcccttt

SEQ ID NO: 1369452 - DNA, 15 bp, Homo sapiens
tggaagcattccctt

SEQ ID NO: 1369453 - DNA, 15 bp, Homo sapiens
ctggaagcattccct

SEQ ID NO: 1369454 - DNA, 15 bp, Homo sapiens
gctggaagcattccc

SEQ ID NO: 1369455 - DNA, 15 bp, Homo sapiens
agctggaagcattcc

SEQ ID NO: 1369456 - DNA, 15 bp, Homo sapiens
aagctggaagcattc

SEQ ID NO: 1369457 - DNA, 15 bp, Homo sapiens
aaagctggaagcatt

SEQ ID NO: 1369458 - DNA, 15 bp, Homo sapiens
aaaagctggaagcat

SEQ ID NO: 1369459 - DNA, 15 bp, Homo sapiens
caaaagctggaagca

SEQ ID NO: 1369460 - DNA, 15 bp, Homo sapiens
gcaaaagctggaagc

SEQ ID NO: 1369461 - DNA, 15 bp, Homo sapiens
ggcaaaagctggaag

SEQ ID NO: 1369462 - DNA, 15 bp, Homo sapiens
gggcaaaagctggaa

SEQ ID NO: 1369463 - DNA, 15 bp, Homo sapiens
tgggcaaaagctgga

SEQ ID NO: 1369464 - DNA, 15 bp, Homo sapiens
atgggcaaaagctgg

SEQ ID NO: 1369465 - DNA, 15 bp, Homo sapiens
aatgggcaaaagctg

SEQ ID NO: 1369466 - DNA, 15 bp, Homo sapiens
gaatgggcaaaagct

SEQ ID NO: 1369467 - DNA, 15 bp, Homo sapiens
tgaatgggcaaaagc

SEQ ID NO: 1369468 - DNA, 15 bp, Homo sapiens
ctgaatgggcaaaag

SEQ ID NO: 1369469 - DNA, 15 bp, Homo sapiens
actgaatgggcaaaa

SEQ ID NO: 1369470 - DNA, 15 bp, Homo sapiens
tactgaatgggcaaa

SEQ ID NO: 1369471 - DNA, 15 bp, Homo sapiens
atactgaatgggcaa

SEQ ID NO: 1369472 - DNA, 15 bp, Homo sapiens
catactgaatgggca

SEQ ID NO: 1369473 - DNA, 15 bp, Homo sapiens
tcatactgaatgggc

SEQ ID NO: 1369474 - DNA, 15 bp, Homo sapiens
catcatactgaatgg

SEQ ID NO: 1369475 - DNA, 15 bp, Homo sapiens
acatcatactgaatg

SEQ ID NO: 1369476 - DNA, 15 bp, Homo sapiens
caacatcatactgaa

SEQ ID NO: 1369477 - DNA, 15 bp, Homo sapiens
ccaacatcatactga

SEQ ID NO: 1369478 - DNA, 15 bp, Homo sapiens
gccaacatcatactg

SEQ ID NO: 1369479 - DNA, 15 bp, Homo sapiens
agccaacatcatact

SEQ ID NO: 1369480 - DNA, 15 bp, Homo sapiens
cagccaacatcatac

SEQ ID NO: 1369481 - DNA, 15 bp, Homo sapiens
acagccaacatcata

SEQ ID NO: 1369482 - DNA, 15 bp, Homo sapiens
cacagccaacatcat

SEQ ID NO: 1369483 - DNA, 15 bp, Homo sapiens
ccacagccaacatca

SEQ ID NO: 1369484 - DNA, 15 bp, Homo sapiens
tccacagccaacatc

SEQ ID NO: 1369485 - DNA, 15 bp, Homo sapiens
atccacagccaacat

SEQ ID NO: 1369486 - DNA, 15 bp, Homo sapiens
aatccacagccaaca

SEQ ID NO: 1369487 - DNA, 15 bp, Homo sapiens
aaatccacagccaac

SEQ ID NO: 1369488 - DNA, 15 bp, Homo sapiens
caaatccacagccaa

SEQ ID NO: 1369489 - DNA, 15 bp, Homo sapiens
acaaatccacagcca

SEQ ID NO: 1369490 - DNA, 15 bp, Homo sapiens
aacaaatccacagcc

SEQ ID NO: 1369491 - DNA, 15 bp, Homo sapiens
aaacaaatccacagc

SEQ ID NO: 1369492 - DNA, 15 bp, Homo sapiens
taaacaaatccacag

SEQ ID NO: 1369493 - DNA, 15 bp, Homo sapiens
ataaacaaatccaca

SEQ ID NO: 1369494 - DNA, 15 bp, Homo sapiens
tataaacaaatccac

SEQ ID NO: 1369495 - DNA, 15 bp, Homo sapiens
atataaacaaatcca

SEQ ID NO: 1369496 - DNA, 15 bp, Homo sapiens
catataaacaaatcc

SEQ ID NO: 1369497 - DNA, 15 bp, Homo sapiens
tcatataaacaaatc

SEQ ID NO: 1369498 - DNA, 15 bp, Homo sapiens
gtcatataaacaaat

SEQ ID NO: 1369499 - DNA, 15 bp, Homo sapiens
agtcatataaacaaa

SEQ ID NO: 1369500 - DNA, 15 bp, Homo sapiens
gagtcatataaacaa

SEQ ID NO: 1369501 - DNA, 15 bp, Homo sapiens
agagtcatataaaca

SEQ ID NO: 1369502 - DNA, 15 bp, Homo sapiens
aagagtcatataaac

SEQ ID NO: 1369503 - DNA, 15 bp, Homo sapiens
taagagtcatataaa

SEQ ID NO: 1369504 - DNA, 15 bp, Homo sapiens
ataagagtcatataa

SEQ ID NO: 1369505 - DNA, 15 bp, Homo sapiens
tataagagtcatata

SEQ ID NO: 1369506 - DNA, 15 bp, Homo sapiens
ttataagagtcatat

SEQ ID NO: 1369507 - DNA, 15 bp, Homo sapiens
attataagagtcata

SEQ ID NO: 1369508 - DNA, 15 bp, Homo sapiens
aattataagagtcat

SEQ ID NO: 1369509 - DNA, 15 bp, Homo sapiens
aaattataagagtca

SEQ ID NO: 1369510 - DNA, 15 bp, Homo sapiens
aaaattataagagtc

SEQ ID NO: 1369511 - DNA, 15 bp, Homo sapiens
caaaattataagagt

SEQ ID NO: 1369512 - DNA, 15 bp, Homo sapiens
tcaaaattataagag

SEQ ID NO: 1369513 - DNA, 15 bp, Homo sapiens
ctcaaaattataaga

SEQ ID NO: 1369514 - DNA, 15 bp, Homo sapiens
cctcaaaattataag

SEQ ID NO: 1369515 - DNA, 15 bp, Homo sapiens
acctcaaaattataa

SEQ ID NO: 1369516 - DNA, 15 bp, Homo sapiens
tacctcaaaattata

SEQ ID NO: 1369517 - DNA, 15 bp, Homo sapiens
atacctcaaaattat

SEQ ID NO: 1369518 - DNA, 15 bp, Homo sapiens
catacctcaaaatta

SEQ ID NO: 1369519 - DNA, 15 bp, Homo sapiens
acatacctcaaaatt

SEQ ID NO: 1369520 - DNA, 15 bp, Homo sapiens
aacatacctcaaaat

SEQ ID NO: 1369521 - DNA, 15 bp, Homo sapiens
gaacatacctcaaaa

SEQ ID NO: 1369522 - DNA, 15 bp, Homo sapiens
ggaacatacctcaaa

SEQ ID NO: 1369523 - DNA, 15 bp, Homo sapiens
aggaacatacctcaa

SEQ ID NO: 1369524 - DNA, 15 bp, Homo sapiens
aaggaacatacctca

SEQ ID NO: 1369525 - DNA, 15 bp, Homo sapiens
gaaggaacatacctc

SEQ ID NO: 1369526 - DNA, 15 bp, Homo sapiens
tgaaggaacatacct

SEQ ID NO: 1369527 - DNA, 15 bp, Homo sapiens
ttgaaggaacatacc

SEQ ID NO: 1369528 - DNA, 15 bp, Homo sapiens
attgaaggaacatac

SEQ ID NO: 1369529 - DNA, 15 bp, Homo sapiens
tattgaaggaacata

SEQ ID NO: 1369530 - DNA, 15 bp, Homo sapiens
ttattgaaggaacat

SEQ ID NO: 1369531 - DNA, 15 bp, Homo sapiens
gttattgaaggaaca

SEQ ID NO: 1369532 - DNA, 15 bp, Homo sapiens
cgttattgaaggaac

SEQ ID NO: 1369533 - DNA, 15 bp, Homo sapiens
tcgttattgaaggaa

SEQ ID NO: 1369534 - DNA, 15 bp, Homo sapiens
ctcgttattgaagga

SEQ ID NO: 1369535 - DNA, 15 bp, Homo sapiens
actcgttattgaagg

SEQ ID NO: 1369536 - DNA, 15 bp, Homo sapiens
aactcgttattgaag

SEQ ID NO: 1369537 - DNA, 15 bp, Homo sapiens
aaactcgttattgaa

SEQ ID NO: 1369538 - DNA, 15 bp, Homo sapiens
taaactcgttattga

SEQ ID NO: 1369539 - DNA, 15 bp, Homo sapiens
ataaactcgttattg

SEQ ID NO: 1369540 - DNA, 15 bp, Homo sapiens
aataaactcgttatt

SEQ ID NO: 1369541 - DNA, 15 bp, Homo sapiens
caataaactcgttat

SEQ ID NO: 1369542 - DNA, 15 bp, Homo sapiens
ccaataaactcgtta

SEQ ID NO: 1369543 - DNA, 15 bp, Homo sapiens
cccaataaactcgtt

SEQ ID NO: 1369544 - DNA, 15 bp, Homo sapiens
tcccaataaactcgt

SEQ ID NO: 1369545 - DNA, 15 bp, Homo sapiens
gtcccaataaactcg

SEQ ID NO: 1369546 - DNA, 15 bp, Homo sapiens
agtcccaataaactc

SEQ ID NO: 1369547 - DNA, 15 bp, Homo sapiens
aagtcccaataaact

SEQ ID NO: 1369548 - DNA, 15 bp, Homo sapiens
aaagtcccaataaac

SEQ ID NO: 1369549 - DNA, 15 bp, Homo sapiens
aaaagtcccaataaa

SEQ ID NO: 1369550 - DNA, 15 bp, Homo sapiens
aaaaagtcccaataa

SEQ ID NO: 1369551 - DNA, 15 bp, Homo sapiens
taaaaagtcccaata

SEQ ID NO: 1369552 - DNA, 15 bp, Homo sapiens
ttaaaaagtcccaat

SEQ ID NO: 1369553 - DNA, 15 bp, Homo sapiens
gttaaaaagtcccaa

SEQ ID NO: 1369554 - DNA, 15 bp, Homo sapiens
tgttaaaaagtccca

SEQ ID NO: 1369555 - DNA, 15 bp, Homo sapiens
atgttaaaaagtccc

SEQ ID NO: 1369556 - DNA, 15 bp, Homo sapiens
catgttaaaaagtcc

SEQ ID NO: 1369557 - DNA, 15 bp, Homo sapiens
tcatgttaaaaagtc

SEQ ID NO: 1369558 - DNA, 15 bp, Homo sapiens
ttcatgttaaaaagt

SEQ ID NO: 1369559 - DNA, 15 bp, Homo sapiens
attcatgttaaaaag

SEQ ID NO: 1369560 - DNA, 15 bp, Homo sapiens
cattcatgttaaaaa

SEQ ID NO: 1369561 - DNA, 15 bp, Homo sapiens
tcattcatgttaaaa

SEQ ID NO: 1369562 - DNA, 15 bp, Homo sapiens
ttcattcatgttaaa

SEQ ID NO: 1369563 - DNA, 15 bp, Homo sapiens
tttcattcatgttaa

SEQ ID NO: 1369564 - DNA, 15 bp, Homo sapiens
ctttcattcatgtta

SEQ ID NO: 1369565 - DNA, 15 bp, Homo sapiens
actttcattcatgtt

SEQ ID NO: 1369566 - DNA, 15 bp, Homo sapiens
aactttcattcatgt

SEQ ID NO: 1369567 - DNA, 15 bp, Homo sapiens
caactttcattcatg

SEQ ID NO: 1369568 - DNA, 15 bp, Homo sapiens
tcaactttcattcat

SEQ ID NO: 1369569 - DNA, 15 bp, Homo sapiens
ttcaactttcattca

SEQ ID NO: 1369570 - DNA, 15 bp, Homo sapiens
attcaactttcattc

SEQ ID NO: 1369571 - DNA, 15 bp, Homo sapiens
aattcaactttcatt

SEQ ID NO: 1369572 - DNA, 15 bp, Homo sapiens
aaattcaactttcat

SEQ ID NO: 1369573 - DNA, 15 bp, Homo sapiens
aaaattcaactttca

SEQ ID NO: 1369574 - DNA, 15 bp, Homo sapiens
taaaattcaactttc

SEQ ID NO: 1369575 - DNA, 15 bp, Homo sapiens
ataaaattcaacttt

SEQ ID NO: 1369576 - DNA, 15 bp, Homo sapiens
aataaaattcaactt

SEQ ID NO: 1369577 - DNA, 15 bp, Homo sapiens
caataaaattcaact

SEQ ID NO: 1369578 - DNA, 15 bp, Homo sapiens
tcaataaaattcaac

SEQ ID NO: 1369579 - DNA, 15 bp, Homo sapiens
ttcaataaaattcaa

SEQ ID NO: 1369580 - DNA, 15 bp, Homo sapiens
tttcaataaaattca

SEQ ID NO: 1369581 - DNA, 15 bp, Homo sapiens
ctttcaataaaattc

SEQ ID NO: 1369582 - DNA, 15 bp, Homo sapiens
gctttcaataaaatt

SEQ ID NO: 1369583 - DNA, 15 bp, Homo sapiens
tgctttcaataaaat

SEQ ID NO: 1369584 - DNA, 15 bp, Homo sapiens
atgctttcaataaaa

SEQ ID NO: 1369585 - DNA, 15 bp, Homo sapiens
aatgctttcaataaa

SEQ ID NO: 1369586 - DNA, 15 bp, Homo sapiens
aaatgctttcaataa

SEQ ID NO: 1369587 - DNA, 15 bp, Homo sapiens
aaaatgctttcaata

SEQ ID NO: 1369588 - DNA, 15 bp, Homo sapiens
gaaaatgctttcaat

SEQ ID NO: 1369589 - DNA, 15 bp, Homo sapiens
agaaaatgctttcaa

SEQ ID NO: 1369590 - DNA, 15 bp, Homo sapiens
tagaaaatgctttca

SEQ ID NO: 1369591 - DNA, 15 bp, Homo sapiens
gtagaaaatgctttc

SEQ ID NO: 1369592 - DNA, 15 bp, Homo sapiens
tgtagaaaatgcttt

SEQ ID NO: 1369593 - DNA, 15 bp, Homo sapiens
atgtagaaaatgctt

SEQ ID NO: 1369594 - DNA, 15 bp, Homo sapiens
tatgtagaaaatgct

SEQ ID NO: 1369595 - DNA, 15 bp, Homo sapiens
atatgtagaaaatgc

SEQ ID NO: 1369596 - DNA, 15 bp, Homo sapiens
tatatgtagaaaatg

SEQ ID NO: 1369597 - DNA, 15 bp, Homo sapiens
atatatgtagaaaat

SEQ ID NO: 1369598 - DNA, 15 bp, Homo sapiens
aatatatgtagaaaa

SEQ ID NO: 1369599 - DNA, 15 bp, Homo sapiens
caatatatgtagaaa

SEQ ID NO: 1369600 - DNA, 15 bp, Homo sapiens
tcaatatatgtagaa

SEQ ID NO: 1369601 - DNA, 15 bp, Homo sapiens
ctcaatatatgtaga

SEQ ID NO: 1369602 - DNA, 15 bp, Homo sapiens
tctcaatatatgtag

SEQ ID NO: 1369603 - DNA, 15 bp, Homo sapiens
atctcaatatatgta

SEQ ID NO: 1369604 - DNA, 15 bp, Homo sapiens
tatctcaatatatgt

SEQ ID NO: 1369605 - DNA, 15 bp, Homo sapiens
ttatctcaatatatg

SEQ ID NO: 1369606 - DNA, 15 bp, Homo sapiens
attatctcaatatat

SEQ ID NO: 1369607 - DNA, 15 bp, Homo sapiens
aattatctcaatata

SEQ ID NO: 1369608 - DNA, 15 bp, Homo sapiens
taattatctcaatat

SEQ ID NO: 1369609 - DNA, 15 bp, Homo sapiens
ataattatctcaata

SEQ ID NO: 1369610 - DNA, 15 bp, Homo sapiens
cataattatctcaat

SEQ ID NO: 1369611 - DNA, 15 bp, Homo sapiens
acataattatctcaa

SEQ ID NO: 1369612 - DNA, 15 bp, Homo sapiens
cacataattatctca

SEQ ID NO: 1369613 - DNA, 15 bp, Homo sapiens
ccacataattatctc

SEQ ID NO: 1369614 - DNA, 15 bp, Homo sapiens
accacataattatct

SEQ ID NO: 1369615 - DNA, 15 bp, Homo sapiens
aaccacataattatc

SEQ ID NO: 1369616 - DNA, 15 bp, Homo sapiens
aaaccacataattat

SEQ ID NO: 1369617 - DNA, 15 bp, Homo sapiens
aaaaccacataatta

SEQ ID NO: 1369618 - DNA, 15 bp, Homo sapiens
aaaaaccacataatt

SEQ ID NO: 1369619 - DNA, 15 bp, Homo sapiens
caaaaaccacataat

SEQ ID NO: 1369620 - DNA, 15 bp, Homo sapiens
acaaaaaccacataa

SEQ ID NO: 1369621 - DNA, 15 bp, Homo sapiens
gacaaaaaccacata

SEQ ID NO: 1369622 - DNA, 15 bp, Homo sapiens
agacaaaaaccacat

SEQ ID NO: 1369623 - DNA, 15 bp, Homo sapiens
aagacaaaaaccaca

SEQ ID NO: 1369624 - DNA, 15 bp, Homo sapiens
aaagacaaaaaccac

SEQ ID NO: 1369625 - DNA, 15 bp, Homo sapiens
taaagacaaaaacca

SEQ ID NO: 1369626 - DNA, 15 bp, Homo sapiens
ctaaagacaaaaacc

SEQ ID NO: 1369627 - DNA, 15 bp, Homo sapiens
gctaaagacaaaaac

SEQ ID NO: 1369628 - DNA, 15 bp, Homo sapiens
agctaaagacaaaaa

SEQ ID NO: 1369629 - DNA, 15 bp, Homo sapiens
gagctaaagacaaaa

SEQ ID NO: 1369630 - DNA, 15 bp, Homo sapiens
agagctaaagacaaa

SEQ ID NO: 1369631 - DNA, 15 bp, Homo sapiens
cagagctaaagacaa

SEQ ID NO: 1369632 - DNA, 15 bp, Homo sapiens
acagagctaaagaca

SEQ ID NO: 1369633 - DNA, 15 bp, Homo sapiens
aacagagctaaagac

SEQ ID NO: 1369634 - DNA, 15 bp, Homo sapiens
taacagagctaaaga

SEQ ID NO: 1369635 - DNA, 15 bp, Homo sapiens
ttaacagagctaaag

SEQ ID NO: 1369636 - DNA, 15 bp, Homo sapiens
attaacagagctaaa

SEQ ID NO: 1369637 - DNA, 15 bp, Homo sapiens
cattaacagagctaa

SEQ ID NO: 1369638 - DNA, 15 bp, Homo sapiens
acattaacagagcta

SEQ ID NO: 1369639 - DNA, 15 bp, Homo sapiens
cacattaacagagct

SEQ ID NO: 1369640 - DNA, 15 bp, Homo sapiens
tcacattaacagagc

SEQ ID NO: 1369641 - DNA, 15 bp, Homo sapiens
atcacattaacagag

SEQ ID NO: 1369642 - DNA, 15 bp, Homo sapiens
catcacattaacaga

SEQ ID NO: 1369643 - DNA, 15 bp, Homo sapiens
tcatcacattaacag

SEQ ID NO: 1369644 - DNA, 15 bp, Homo sapiens
ttcatcacattaaca

SEQ ID NO: 1369645 - DNA, 15 bp, Homo sapiens
attcatcacattaac

SEQ ID NO: 1369646 - DNA, 15 bp, Homo sapiens
gattcatcacattaa

SEQ ID NO: 1369647 - DNA, 15 bp, Homo sapiens
tgattcatcacatta

SEQ ID NO: 1369648 - DNA, 15 bp, Homo sapiens
gtgattcatcacatt

SEQ ID NO: 1369649 - DNA, 15 bp, Homo sapiens
tgtgattcatcacat

SEQ ID NO: 1369650 - DNA, 15 bp, Homo sapiens
atgtgattcatcaca

SEQ ID NO: 1369651 - DNA, 15 bp, Homo sapiens
aatgtgattcatcac

SEQ ID NO: 1369652 - DNA, 15 bp, Homo sapiens
aaatgtgattcatca

SEQ ID NO: 1369653 - DNA, 15 bp, Homo sapiens
taaatgtgattcatc

SEQ ID NO: 1369654 - DNA, 15 bp, Homo sapiens
ataaatgtgattcat

SEQ ID NO: 1369655 - DNA, 15 bp, Homo sapiens
aataaatgtgattca

SEQ ID NO: 1369656 - DNA, 15 bp, Homo sapiens
aaataaatgtgattc

SEQ ID NO: 1369657 - DNA, 15 bp, Homo sapiens
taaataaatgtgatt

SEQ ID NO: 1369658 - DNA, 15 bp, Homo sapiens
ataaataaatgtgat

SEQ ID NO: 1369659 - DNA, 15 bp, Homo sapiens
aataaataaatgtga

SEQ ID NO: 1369660 - DNA, 15 bp, Homo sapiens
aaataaataaatgtg

SEQ ID NO: 1369661 - DNA, 15 bp, Homo sapiens
caaataaataaatgt

SEQ ID NO: 1369662 - DNA, 15 bp, Homo sapiens
acaaataaataaatg

SEQ ID NO: 1369663 - DNA, 15 bp, Homo sapiens
tacaaataaataaat

SEQ ID NO: 1369664 - DNA, 15 bp, Homo sapiens
atacaaataaataaa

SEQ ID NO: 1369665 - DNA, 15 bp, Homo sapiens
tatacaaataaataa

SEQ ID NO: 1369666 - DNA, 15 bp, Homo sapiens
atatacaaataaata

SEQ ID NO: 1369667 - DNA, 15 bp, Homo sapiens
catatacaaataaat

SEQ ID NO: 1369668 - DNA, 15 bp, Homo sapiens
acatatacaaataaa

SEQ ID NO: 1369669 - DNA, 15 bp, Homo sapiens
aacatatacaaataa

SEQ ID NO: 1369670 - DNA, 15 bp, Homo sapiens
caacatatacaaata

SEQ ID NO: 1369671 - DNA, 15 bp, Homo sapiens
tcaacatatacaaat

SEQ ID NO: 1369672 - DNA, 15 bp, Homo sapiens
ttcaacatatacaaa

SEQ ID NO: 1369673 - DNA, 15 bp, Homo sapiens
gttcaacatatacaa

SEQ ID NO: 1369674 - DNA, 15 bp, Homo sapiens
ggttcaacatataca

SEQ ID NO: 1369675 - DNA, 15 bp, Homo sapiens
tggttcaacatatac

SEQ ID NO: 1369676 - DNA, 15 bp, Homo sapiens
ttggttcaacatata

SEQ ID NO: 1369677 - DNA, 15 bp, Homo sapiens
gttggttcaacatat

SEQ ID NO: 1369678 - DNA, 15 bp, Homo sapiens
ggttggttcaacata

SEQ ID NO: 1369679 - DNA, 15 bp, Homo sapiens
aggttggttcaacat

SEQ ID NO: 1369680 - DNA, 15 bp, Homo sapiens
aaggttggttcaaca

SEQ ID NO: 1369681 - DNA, 15 bp, Homo sapiens
caaggttggttcaac

SEQ ID NO: 1369682 - DNA, 15 bp, Homo sapiens
gcaaggttggttcaa

SEQ ID NO: 1369683 - DNA, 15 bp, Homo sapiens
tgcaaggttggttca

SEQ ID NO: 1369684 - DNA, 15 bp, Homo sapiens
atgcaaggttggttc

SEQ ID NO: 1369685 - DNA, 15 bp, Homo sapiens
gatgcaaggttggtt

SEQ ID NO: 1369686 - DNA, 15 bp, Homo sapiens
ggatgcaaggttggt

SEQ ID NO: 1369687 - DNA, 15 bp, Homo sapiens
gggatgcaaggttgg

SEQ ID NO: 1369688 - DNA, 15 bp, Homo sapiens
tgggatgcaaggttg

SEQ ID NO: 1369689 - DNA, 15 bp, Homo sapiens
ctgggatgcaaggtt

SEQ ID NO: 1369690 - DNA, 15 bp, Homo sapiens
tctgggatgcaaggt

SEQ ID NO: 1369691 - DNA, 15 bp, Homo sapiens
ttctgggatgcaagg

SEQ ID NO: 1369692 - DNA, 15 bp, Homo sapiens
tttctgggatgcaag

SEQ ID NO: 1369693 - DNA, 15 bp, Homo sapiens
atttctgggatgcaa

SEQ ID NO: 1369694 - DNA, 15 bp, Homo sapiens
tatttctgggatgca

SEQ ID NO: 1369695 - DNA, 15 bp, Homo sapiens
ttatttctgggatgc

SEQ ID NO: 1369696 - DNA, 15 bp, Homo sapiens
attatttctgggatg

SEQ ID NO: 1369697 - DNA, 15 bp, Homo sapiens
cattatttctgggat

SEQ ID NO: 1369698 - DNA, 15 bp, Homo sapiens
gcattatttctggga

SEQ ID NO: 1369699 - DNA, 15 bp, Homo sapiens
ggcattatttctggg

SEQ ID NO: 1369700 - DNA, 15 bp, Homo sapiens
aggcattatttctgg

SEQ ID NO: 1369701 - DNA, 15 bp, Homo sapiens
taggcattatttctg

SEQ ID NO: 1369702 - DNA, 15 bp, Homo sapiens
gtaggcattatttct

SEQ ID NO: 1369703 - DNA, 15 bp, Homo sapiens
agtaggcattatttc

SEQ ID NO: 1369704 - DNA, 15 bp, Homo sapiens
aagtaggcattattt

SEQ ID NO: 1369705 - DNA, 15 bp, Homo sapiens
caagtaggcattatt

SEQ ID NO: 1369706 - DNA, 15 bp, Homo sapiens
tcaagtaggcattat

SEQ ID NO: 1369707 - DNA, 15 bp, Homo sapiens
atcaagtaggcatta

SEQ ID NO: 1369708 - DNA, 15 bp, Homo sapiens
gatcaagtaggcatt

SEQ ID NO: 1369709 - DNA, 15 bp, Homo sapiens
tgatcaagtaggcat

SEQ ID NO: 1369710 - DNA, 15 bp, Homo sapiens
atgatcaagtaggca

SEQ ID NO: 1369711 - DNA, 15 bp, Homo sapiens
catgatcaagtaggc

SEQ ID NO: 1369712 - DNA, 15 bp, Homo sapiens
ccatgatcaagtagg

SEQ ID NO: 1369713 - DNA, 15 bp, Homo sapiens
accatgatcaagtag

SEQ ID NO: 1369714 - DNA, 15 bp, Homo sapiens
caccatgatcaagta

SEQ ID NO: 1369715 - DNA, 15 bp, Homo sapiens
tcaccatgatcaagt

SEQ ID NO: 1369716 - DNA, 15 bp, Homo sapiens
ttcaccatgatcaag

SEQ ID NO: 1369717 - DNA, 15 bp, Homo sapiens
gttcaccatgatcaa

SEQ ID NO: 1369718 - DNA, 15 bp, Homo sapiens
tgttcaccatgatca

SEQ ID NO: 1369719 - DNA, 15 bp, Homo sapiens
ttgttcaccatgatc

SEQ ID NO: 1369720 - DNA, 15 bp, Homo sapiens
cttgttcaccatgat

SEQ ID NO: 1369721 - DNA, 15 bp, Homo sapiens
acttgttcaccatga

SEQ ID NO: 1369722 - DNA, 15 bp, Homo sapiens
aacttgttcaccatg

SEQ ID NO: 1369723 - DNA, 15 bp, Homo sapiens
caacttgttcaccat

SEQ ID NO: 1369724 - DNA, 15 bp, Homo sapiens
acaacttgttcacca

SEQ ID NO: 1369725 - DNA, 15 bp, Homo sapiens
aacaacttgttcacc

SEQ ID NO: 1369726 - DNA, 15 bp, Homo sapiens
caacaacttgttcac

SEQ ID NO: 1369727 - DNA, 15 bp, Homo sapiens
tcaacaacttgttca

SEQ ID NO: 1369728 - DNA, 15 bp, Homo sapiens
atcaacaacttgttc

SEQ ID NO: 1369729 - DNA, 15 bp, Homo sapiens
tatcaacaacttgtt

SEQ ID NO: 1369730 - DNA, 15 bp, Homo sapiens
atatcaacaacttgt

SEQ ID NO: 1369731 - DNA, 15 bp, Homo sapiens
catatcaacaacttg

SEQ ID NO: 1369732 - DNA, 15 bp, Homo sapiens
gcatatcaacaactt

SEQ ID NO: 1369733 - DNA, 15 bp, Homo sapiens
agcatatcaacaact

SEQ ID NO: 1369734 - DNA, 15 bp, Homo sapiens
cagcatatcaacaac

SEQ ID NO: 1369735 - DNA, 15 bp, Homo sapiens
tcagcatatcaacaa

SEQ ID NO: 1369736 - DNA, 15 bp, Homo sapiens
atcagcatatcaaca

SEQ ID NO: 1369737 - DNA, 15 bp, Homo sapiens
catcagcatatcaac

SEQ ID NO: 1369738 - DNA, 15 bp, Homo sapiens
ccatcagcatatcaa

SEQ ID NO: 1369739 - DNA, 15 bp, Homo sapiens
tccatcagcatatca

SEQ ID NO: 1369740 - DNA, 15 bp, Homo sapiens
atccatcagcatatc

SEQ ID NO: 1369741 - DNA, 15 bp, Homo sapiens
aatccatcagcatat

SEQ ID NO: 1369742 - DNA, 15 bp, Homo sapiens
gaatccatcagcata

SEQ ID NO: 1369743 - DNA, 15 bp, Homo sapiens
agaatccatcagcat

SEQ ID NO: 1369744 - DNA, 15 bp, Homo sapiens
cagaatccatcagca

SEQ ID NO: 1369745 - DNA, 15 bp, Homo sapiens
acagaatccatcagc

SEQ ID NO: 1369746 - DNA, 15 bp, Homo sapiens
aacagaatccatcag

SEQ ID NO: 1369747 - DNA, 15 bp, Homo sapiens
aaacagaatccatca

SEQ ID NO: 1369748 - DNA, 15 bp, Homo sapiens
caaacagaatccatc

SEQ ID NO: 1369749 - DNA, 15 bp, Homo sapiens
gcaaacagaatccat

SEQ ID NO: 1369750 - DNA, 15 bp, Homo sapiens
ggcaaacagaatcca

SEQ ID NO: 1369751 - DNA, 15 bp, Homo sapiens
tggcaaacagaatcc

SEQ ID NO: 1369752 - DNA, 15 bp, Homo sapiens
ctggcaaacagaatc

SEQ ID NO: 1369753 - DNA, 15 bp, Homo sapiens
actggcaaacagaat

SEQ ID NO: 1369754 - DNA, 15 bp, Homo sapiens
tactggcaaacagaa

SEQ ID NO: 1369755 - DNA, 15 bp, Homo sapiens
atactggcaaacaga

SEQ ID NO: 1369756 - DNA, 15 bp, Homo sapiens
aatactggcaaacag

SEQ ID NO: 1369757 - DNA, 15 bp, Homo sapiens
aaatactggcaaaca

SEQ ID NO: 1369758 - DNA, 15 bp, Homo sapiens
aaaatactggcaaac

SEQ ID NO: 1369759 - DNA, 15 bp, Homo sapiens
caaaatactggcaaa

SEQ ID NO: 1369760 - DNA, 15 bp, Homo sapiens
gcaaaatactggcaa

SEQ ID NO: 1369761 - DNA, 15 bp, Homo sapiens
agcaaaatactggca

SEQ ID NO: 1369762 - DNA, 15 bp, Homo sapiens
cagcaaaatactggc

SEQ ID NO: 1369763 - DNA, 15 bp, Homo sapiens
tcagcaaaatactgg

SEQ ID NO: 1369764 - DNA, 15 bp, Homo sapiens
ctcagcaaaatactg

SEQ ID NO: 1369765 - DNA, 15 bp, Homo sapiens
cctcagcaaaatact

SEQ ID NO: 1369766 - DNA, 15 bp, Homo sapiens
tcctcagcaaaatac

SEQ ID NO: 1369767 - DNA, 15 bp, Homo sapiens
atcctcagcaaaata

SEQ ID NO: 1369768 - DNA, 15 bp, Homo sapiens
aatcctcagcaaaat

SEQ ID NO: 1369769 - DNA, 15 bp, Homo sapiens
aaatcctcagcaaaa

SEQ ID NO: 1369770 - DNA, 15 bp, Homo sapiens
aaaatcctcagcaaa

SEQ ID NO: 1369771 - DNA, 15 bp, Homo sapiens
aaaaatcctcagcaa

SEQ ID NO: 1369772 - DNA, 15 bp, Homo sapiens
taaaaatcctcagca

SEQ ID NO: 1369773 - DNA, 15 bp, Homo sapiens
gtaaaaatcctcagc

SEQ ID NO: 1369774 - DNA, 15 bp, Homo sapiens
tgtaaaaatcctcag

SEQ ID NO: 1369775 - DNA, 15 bp, Homo sapiens
atgtaaaaatcctca

SEQ ID NO: 1369776 - DNA, 15 bp, Homo sapiens
aatgtaaaaatcctc

SEQ ID NO: 1369777 - DNA, 15 bp, Homo sapiens
caatgtaaaaatcct

SEQ ID NO: 1369778 - DNA, 15 bp, Homo sapiens
tcaatgtaaaaatcc

SEQ ID NO: 1369779 - DNA, 15 bp, Homo sapiens
atcaatgtaaaaatc

SEQ ID NO: 1369780 - DNA, 15 bp, Homo sapiens
tatcaatgtaaaaat

SEQ ID NO: 1369781 - DNA, 15 bp, Homo sapiens
atatcaatgtaaaaa

SEQ ID NO: 1369782 - DNA, 15 bp, Homo sapiens
aatatcaatgtaaaa

SEQ ID NO: 1369783 - DNA, 15 bp, Homo sapiens
gaatatcaatgtaaa

SEQ ID NO: 1369784 - DNA, 15 bp, Homo sapiens
tgaatatcaatgtaa

SEQ ID NO: 1369785 - DNA, 15 bp, Homo sapiens
atgaatatcaatgta

SEQ ID NO: 1369786 - DNA, 15 bp, Homo sapiens
gatgaatatcaatgt

SEQ ID NO: 1369787 - DNA, 15 bp, Homo sapiens
tgatgaatatcaatg

SEQ ID NO: 1369788 - DNA, 15 bp, Homo sapiens
ttgatgaatatcaat

SEQ ID NO: 1369789 - DNA, 15 bp, Homo sapiens
cttgatgaatatcaa

SEQ ID NO: 1369790 - DNA, 15 bp, Homo sapiens
tcttgatgaatatca

SEQ ID NO: 1369791 - DNA, 15 bp, Homo sapiens
ttcttgatgaatatc

SEQ ID NO: 1369792 - DNA, 15 bp, Homo sapiens
attcttgatgaatat

SEQ ID NO: 1369793 - DNA, 15 bp, Homo sapiens
tattcttgatgaata

SEQ ID NO: 1369794 - DNA, 15 bp, Homo sapiens
atattcttgatgaat

SEQ ID NO: 1369795 - DNA, 15 bp, Homo sapiens
aatattcttgatgaa

SEQ ID NO: 1369796 - DNA, 15 bp, Homo sapiens
caatattcttgatga

SEQ ID NO: 1369797 - DNA, 15 bp, Homo sapiens
ccaatattcttgatg

SEQ ID NO: 1369798 - DNA, 15 bp, Homo sapiens
gccaatattcttgat

SEQ ID NO: 1369799 - DNA, 15 bp, Homo sapiens
ggccaatattcttga

SEQ ID NO: 1369800 - DNA, 15 bp, Homo sapiens
aggccaatattcttg

SEQ ID NO: 1369801 - DNA, 15 bp, Homo sapiens
caggccaatattctt

SEQ ID NO: 1369802 - DNA, 15 bp, Homo sapiens
tcaggccaatattct

SEQ ID NO: 1369803 - DNA, 15 bp, Homo sapiens
ttcaggccaatattc

SEQ ID NO: 1369804 - DNA, 15 bp, Homo sapiens
cttcaggccaatatt

SEQ ID NO: 1369805 - DNA, 15 bp, Homo sapiens
gcttcaggccaatat

SEQ ID NO: 1369806 - DNA, 15 bp, Homo sapiens
agcttcaggccaata

SEQ ID NO: 1369807 - DNA, 15 bp, Homo sapiens
aagcttcaggccaat

SEQ ID NO: 1369808 - DNA, 15 bp, Homo sapiens
aaagcttcaggccaa

SEQ ID NO: 1369809 - DNA, 15 bp, Homo sapiens
aaaagcttcaggcca

SEQ ID NO: 1369810 - DNA, 15 bp, Homo sapiens
aaaaagcttcaggcc

SEQ ID NO: 1369811 - DNA, 15 bp, Homo sapiens
aaaaaagcttcaggc

SEQ ID NO: 1369812 - DNA, 15 bp, Homo sapiens
aaaaaaagcttcagg

SEQ ID NO: 1369813 - DNA, 15 bp, Homo sapiens
aaaaaaaagcttcag

SEQ ID NO: 1369814 - DNA, 15 bp, Homo sapiens
gaaaaaaaagcttca

SEQ ID NO: 1369815 - DNA, 15 bp, Homo sapiens
agaaaaaaaagcttc

SEQ ID NO: 1369816 - DNA, 15 bp, Homo sapiens
cagaaaaaaaagctt

SEQ ID NO: 1369817 - DNA, 15 bp, Homo sapiens
acagaaaaaaaagct

SEQ ID NO: 1369818 - DNA, 15 bp, Homo sapiens
tacagaaaaaaaagc

SEQ ID NO: 1369819 - DNA, 15 bp, Homo sapiens
atacagaaaaaaaag

SEQ ID NO: 1369820 - DNA, 15 bp, Homo sapiens
gatacagaaaaaaaa

SEQ ID NO: 1369821 - DNA, 15 bp, Homo sapiens
agatacagaaaaaaa

SEQ ID NO: 1369822 - DNA, 15 bp, Homo sapiens
gagatacagaaaaaa

SEQ ID NO: 1369823 - DNA, 15 bp, Homo sapiens
agagatacagaaaaa

SEQ ID NO: 1369824 - DNA, 15 bp, Homo sapiens
cagagatacagaaaa

SEQ ID NO: 1369825 - DNA, 15 bp, Homo sapiens
ccagagatacagaaa

SEQ ID NO: 1369826 - DNA, 15 bp, Homo sapiens
cccagagatacagaa

SEQ ID NO: 1369827 - DNA, 15 bp, Homo sapiens
tcccagagatacaga

SEQ ID NO: 1369828 - DNA, 15 bp, Homo sapiens
ctcccagagatacag

SEQ ID NO: 1369829 - DNA, 15 bp, Homo sapiens
cctcccagagataca

SEQ ID NO: 1369830 - DNA, 15 bp, Homo sapiens
tcctcccagagatac

SEQ ID NO: 1369831 - DNA, 15 bp, Homo sapiens
atcctcccagagata

SEQ ID NO: 1369832 - DNA, 15 bp, Homo sapiens
aatcctcccagagat

SEQ ID NO: 1369833 - DNA, 15 bp, Homo sapiens
aaatcctcccagaga

SEQ ID NO: 1369834 - DNA, 15 bp, Homo sapiens
caaatcctcccagag

SEQ ID NO: 1369835 - DNA, 15 bp, Homo sapiens
ccaaatcctcccaga

SEQ ID NO: 1369836 - DNA, 15 bp, Homo sapiens
accaaatcctcccag

SEQ ID NO: 1369837 - DNA, 15 bp, Homo sapiens
taccaaatcctccca

SEQ ID NO: 1369838 - DNA, 15 bp, Homo sapiens
ataccaaatcctccc

SEQ ID NO: 1369839 - DNA, 15 bp, Homo sapiens
tataccaaatcctcc

SEQ ID NO: 1369840 - DNA, 15 bp, Homo sapiens
ttataccaaatcctc

SEQ ID NO: 1369841 - DNA, 15 bp, Homo sapiens
cttataccaaatcct

SEQ ID NO: 1369842 - DNA, 15 bp, Homo sapiens
ccttataccaaatcc

SEQ ID NO: 1369843 - DNA, 15 bp, Homo sapiens
tccttataccaaatc

SEQ ID NO: 1369844 - DNA, 15 bp, Homo sapiens
atccttataccaaat

SEQ ID NO: 1369845 - DNA, 15 bp, Homo sapiens
catccttataccaaa

SEQ ID NO: 1369846 - DNA, 15 bp, Homo sapiens
tcatccttataccaa

SEQ ID NO: 1369847 - DNA, 15 bp, Homo sapiens
atcatccttatacca

SEQ ID NO: 1369848 - DNA, 15 bp, Homo sapiens
catcatccttatacc

SEQ ID NO: 1369849 - DNA, 15 bp, Homo sapiens
gcatcatccttatac

SEQ ID NO: 1369850 - DNA, 15 bp, Homo sapiens
agcatcatccttata

SEQ ID NO: 1369851 - DNA, 15 bp, Homo sapiens
cagcatcatccttat

SEQ ID NO: 1369852 - DNA, 15 bp, Homo sapiens
ccagcatcatcctta

SEQ ID NO: 1369853 - DNA, 15 bp, Homo sapiens
gccagcatcatcctt

SEQ ID NO: 1369854 - DNA, 15 bp, Homo sapiens
ggccagcatcatcct

SEQ ID NO: 1369855 - DNA, 15 bp, Homo sapiens
aggccagcatcatcc

SEQ ID NO: 1369856 - DNA, 15 bp, Homo sapiens
gaggccagcatcatc

SEQ ID NO: 1369857 - DNA, 15 bp, Homo sapiens
ggaggccagcatcat

SEQ ID NO: 1369858 - DNA, 15 bp, Homo sapiens
aggaggccagcatca

SEQ ID NO: 1369859 - DNA, 15 bp, Homo sapiens
taggaggccagcatc

SEQ ID NO: 1369860 - DNA, 15 bp, Homo sapiens
gtaggaggccagcat

SEQ ID NO: 1369861 - DNA, 15 bp, Homo sapiens
tgtaggaggccagca

SEQ ID NO: 1369862 - DNA, 15 bp, Homo sapiens
ttgtaggaggccagc

SEQ ID NO: 1369863 - DNA, 15 bp, Homo sapiens
attgtaggaggccag

SEQ ID NO: 1369864 - DNA, 15 bp, Homo sapiens
cattgtaggaggcca

SEQ ID NO: 1369865 - DNA, 15 bp, Homo sapiens
tcattgtaggaggcc

SEQ ID NO: 1369866 - DNA, 15 bp, Homo sapiens
ctcattgtaggaggc

SEQ ID NO: 1369867 - DNA, 15 bp, Homo sapiens
actcattgtaggagg

SEQ ID NO: 1369868 - DNA, 15 bp, Homo sapiens
aactcattgtaggag

SEQ ID NO: 1369869 - DNA, 15 bp, Homo sapiens
taactcattgtagga

SEQ ID NO: 1369870 - DNA, 15 bp, Homo sapiens
ctaactcattgtagg

SEQ ID NO: 1369871 - DNA, 15 bp, Homo sapiens
cctaactcattgtag

SEQ ID NO: 1369872 - DNA, 15 bp, Homo sapiens
ccctaactcattgta

SEQ ID NO: 1369873 - DNA, 15 bp, Homo sapiens
tccctaactcattgt

SEQ ID NO: 1369874 - DNA, 15 bp, Homo sapiens
ctccctaactcattg

SEQ ID NO: 1369875 - DNA, 15 bp, Homo sapiens
cctccctaactcatt

SEQ ID NO: 1369876 - DNA, 15 bp, Homo sapiens
tcctccctaactcat

SEQ ID NO: 1369877 - DNA, 15 bp, Homo sapiens
ctcctccctaactca

SEQ ID NO: 1369878 - DNA, 15 bp, Homo sapiens
gctcctccctaactc

SEQ ID NO: 1369879 - DNA, 15 bp, Homo sapiens
ggctcctccctaact

SEQ ID NO: 1369880 - DNA, 15 bp, Homo sapiens
gggctcctccctaac

SEQ ID NO: 1369881 - DNA, 15 bp, Homo sapiens
ggggctcctccctaa

SEQ ID NO: 1369882 - DNA, 15 bp, Homo sapiens
aggggctcctcccta

SEQ ID NO: 1369883 - DNA, 15 bp, Homo sapiens
taggggctcctccct

SEQ ID NO: 1369884 - DNA, 15 bp, Homo sapiens
ctaggggctcctccc

SEQ ID NO: 1369885 - DNA, 15 bp, Homo sapiens
actaggggctcctcc

SEQ ID NO: 1369886 - DNA, 15 bp, Homo sapiens
gactaggggctcctc

SEQ ID NO: 1369887 - DNA, 15 bp, Homo sapiens
ggactaggggctcct

SEQ ID NO: 1369888 - DNA, 15 bp, Homo sapiens
aggactaggggctcc

SEQ ID NO: 1369889 - DNA, 15 bp, Homo sapiens
gaggactaggggctc

SEQ ID NO: 1369890 - DNA, 15 bp, Homo sapiens
tgaggactaggggct

SEQ ID NO: 1369891 - DNA, 15 bp, Homo sapiens
ttgaggactaggggc

SEQ ID NO: 1369892 - DNA, 15 bp, Homo sapiens
attgaggactagggg

SEQ ID NO: 1369893 - DNA, 15 bp, Homo sapiens
tattgaggactaggg

SEQ ID NO: 1369894 - DNA, 15 bp, Homo sapiens
atattgaggactagg

SEQ ID NO: 1369895 - DNA, 15 bp, Homo sapiens
aatattgaggactag

SEQ ID NO: 1369896 - DNA, 15 bp, Homo sapiens
aaatattgaggacta

SEQ ID NO: 1369897 - DNA, 15 bp, Homo sapiens
aaaatattgaggact

SEQ ID NO: 1369898 - DNA, 15 bp, Homo sapiens
caaaatattgaggac

SEQ ID NO: 1369899 - DNA, 15 bp, Homo sapiens
ccaaaatattgagga

SEQ ID NO: 1369900 - DNA, 15 bp, Homo sapiens
tccaaaatattgagg

SEQ ID NO: 1369901 - DNA, 15 bp, Homo sapiens
ttccaaaatattgag

SEQ ID NO: 1369902 - DNA, 15 bp, Homo sapiens
attccaaaatattga

SEQ ID NO: 1369903 - DNA, 15 bp, Homo sapiens
tattccaaaatattg

SEQ ID NO: 1369904 - DNA, 15 bp, Homo sapiens
ctattccaaaatatt

SEQ ID NO: 1369905 - DNA, 15 bp, Homo sapiens
actattccaaaatat

SEQ ID NO: 1369906 - DNA, 15 bp, Homo sapiens
aactattccaaaata

SEQ ID NO: 1369907 - DNA, 15 bp, Homo sapiens
aaactattccaaaat

SEQ ID NO: 1369908 - DNA, 15 bp, Homo sapiens
gaaactattccaaaa

SEQ ID NO: 1369909 - DNA, 15 bp, Homo sapiens
tgaaactattccaaa

SEQ ID NO: 1369910 - DNA, 15 bp, Homo sapiens
ctgaaactattccaa

SEQ ID NO: 1369911 - DNA, 15 bp, Homo sapiens
actgaaactattcca

SEQ ID NO: 1369912 - DNA, 15 bp, Homo sapiens
tactgaaactattcc

SEQ ID NO: 1369913 - DNA, 15 bp, Homo sapiens
ctactgaaactattc

SEQ ID NO: 1369914 - DNA, 15 bp, Homo sapiens
cctactgaaactatt

SEQ ID NO: 1369915 - DNA, 15 bp, Homo sapiens
tcctactgaaactat

SEQ ID NO: 1369916 - DNA, 15 bp, Homo sapiens
ttcctactgaaacta

SEQ ID NO: 1369917 - DNA, 15 bp, Homo sapiens
attcctactgaaact

SEQ ID NO: 1369918 - DNA, 15 bp, Homo sapiens
aattcctactgaaac

SEQ ID NO: 1369919 - DNA, 15 bp, Homo sapiens
caattcctactgaaa

SEQ ID NO: 1369920 - DNA, 15 bp, Homo sapiens
acaattcctactgaa

SEQ ID NO: 1369921 - DNA, 15 bp, Homo sapiens
tacaattcctactga

SEQ ID NO: 1369922 - DNA, 15 bp, Homo sapiens
gtacaattcctactg

SEQ ID NO: 1369923 - DNA, 15 bp, Homo sapiens
ggtacaattcctact

SEQ ID NO: 1369924 - DNA, 15 bp, Homo sapiens
tggtacaattcctac

SEQ ID NO: 1369925 - DNA, 15 bp, Homo sapiens
ctggtacaattccta

SEQ ID NO: 1369926 - DNA, 15 bp, Homo sapiens
gctggtacaattcct

SEQ ID NO: 1369927 - DNA, 15 bp, Homo sapiens
agctggtacaattcc

SEQ ID NO: 1369928 - DNA, 15 bp, Homo sapiens
gagctggtacaattc

SEQ ID NO: 1369929 - DNA, 15 bp, Homo sapiens
agagctggtacaatt

SEQ ID NO: 1369930 - DNA, 15 bp, Homo sapiens
aagagctggtacaat

SEQ ID NO: 1369931 - DNA, 15 bp, Homo sapiens
gaagagctggtacaa

SEQ ID NO: 1369932 - DNA, 15 bp, Homo sapiens
agaagagctggtaca

SEQ ID NO: 1369933 - DNA, 15 bp, Homo sapiens
aagaagagctggtac

SEQ ID NO: 1369934 - DNA, 15 bp, Homo sapiens
aaagaagagctggta

SEQ ID NO: 1369935 - DNA, 15 bp, Homo sapiens
caaagaagagctggt

SEQ ID NO: 1369936 - DNA, 15 bp, Homo sapiens
acaaagaagagctgg

SEQ ID NO: 1369937 - DNA, 15 bp, Homo sapiens
tacaaagaagagctg

SEQ ID NO: 1369938 - DNA, 15 bp, Homo sapiens
gtacaaagaagagct

SEQ ID NO: 1369939 - DNA, 15 bp, Homo sapiens
tgtacaaagaagagc

SEQ ID NO: 1369940 - DNA, 15 bp, Homo sapiens
atgtacaaagaagag

SEQ ID NO: 1369941 - DNA, 15 bp, Homo sapiens
gatgtacaaagaaga

SEQ ID NO: 1369942 - DNA, 15 bp, Homo sapiens
agatgtacaaagaag

SEQ ID NO: 1369943 - DNA, 15 bp, Homo sapiens
cagatgtacaaagaa

SEQ ID NO: 1369944 - DNA, 15 bp, Homo sapiens
ccagatgtacaaaga

SEQ ID NO: 1369945 - DNA, 15 bp, Homo sapiens
accagatgtacaaag

SEQ ID NO: 1369946 - DNA, 15 bp, Homo sapiens
caccagatgtacaaa

SEQ ID NO: 1369947 - DNA, 15 bp, Homo sapiens
tcaccagatgtacaa

SEQ ID NO: 1369948 - DNA, 15 bp, Homo sapiens
ttcaccagatgtaca

SEQ ID NO: 1369949 - DNA, 15 bp, Homo sapiens
tttcaccagatgtac

SEQ ID NO: 1369950 - DNA, 15 bp, Homo sapiens
atttcaccagatgta

SEQ ID NO: 1369951 - DNA, 15 bp, Homo sapiens
aatttcaccagatgt

SEQ ID NO: 1369952 - DNA, 15 bp, Homo sapiens
gaatttcaccagatg

SEQ ID NO: 1369953 - DNA, 15 bp, Homo sapiens
tgaatttcaccagat

SEQ ID NO: 1369954 - DNA, 15 bp, Homo sapiens
ctgaatttcaccaga

SEQ ID NO: 1369955 - DNA, 15 bp, Homo sapiens
gctgaatttcaccag

SEQ ID NO: 1369956 - DNA, 15 bp, Homo sapiens
agctgaatttcacca

SEQ ID NO: 1369957 - DNA, 15 bp, Homo sapiens
cagctgaatttcacc

SEQ ID NO: 1369958 - DNA, 15 bp, Homo sapiens
acagctgaatttcac

SEQ ID NO: 1369959 - DNA, 15 bp, Homo sapiens
cacagctgaatttca

SEQ ID NO: 1369960 - DNA, 15 bp, Homo sapiens
tcacagctgaatttc

SEQ ID NO: 1369961 - DNA, 15 bp, Homo sapiens
ttcacagctgaattt

SEQ ID NO: 1369962 - DNA, 15 bp, Homo sapiens
attcacagctgaatt

SEQ ID NO: 1369963 - DNA, 15 bp, Homo sapiens
gattcacagctgaat

SEQ ID NO: 1369964 - DNA, 15 bp, Homo sapiens
ggattcacagctgaa

SEQ ID NO: 1369965 - DNA, 15 bp, Homo sapiens
tggattcacagctga

SEQ ID NO: 1369966 - DNA, 15 bp, Homo sapiens
atggattcacagctg

SEQ ID NO: 1369967 - DNA, 15 bp, Homo sapiens
gatggattcacagct

SEQ ID NO: 1369968 - DNA, 15 bp, Homo sapiens
agatggattcacagc

SEQ ID NO: 1369969 - DNA, 15 bp, Homo sapiens
cagatggattcacag

SEQ ID NO: 1369970 - DNA, 15 bp, Homo sapiens
ccagatggattcaca

SEQ ID NO: 1369971 - DNA, 15 bp, Homo sapiens
accagatggattcac

SEQ ID NO: 1369972 - DNA, 15 bp, Homo sapiens
gaccagatggattca

SEQ ID NO: 1369973 - DNA, 15 bp, Homo sapiens
ggaccagatggattc

SEQ ID NO: 1369974 - DNA, 15 bp, Homo sapiens
aggaccagatggatt

SEQ ID NO: 1369975 - DNA, 15 bp, Homo sapiens
caggaccagatggat

SEQ ID NO: 1369976 - DNA, 15 bp, Homo sapiens
ccaggaccagatgga

SEQ ID NO: 1369977 - DNA, 15 bp, Homo sapiens
cccaggaccagatgg

SEQ ID NO: 1369978 - DNA, 15 bp, Homo sapiens
gcccaggaccagatg

SEQ ID NO: 1369979 - DNA, 15 bp, Homo sapiens
agcccaggaccagat

SEQ ID NO: 1369980 - DNA, 15 bp, Homo sapiens
aagcccaggaccaga

SEQ ID NO: 1369981 - DNA, 15 bp, Homo sapiens
aaagcccaggaccag

SEQ ID NO: 1369982 - DNA, 15 bp, Homo sapiens
aaaagcccaggacca

SEQ ID NO: 1369983 - DNA, 15 bp, Homo sapiens
aaaaagcccaggacc

SEQ ID NO: 1369984 - DNA, 15 bp, Homo sapiens
gaaaaaaagcccagg

SEQ ID NO: 1369985 - DNA, 15 bp, Homo sapiens
agaaaaaaagcccag

SEQ ID NO: 1369986 - DNA, 15 bp, Homo sapiens
aagaaaaaaagccca

SEQ ID NO: 1369987 - DNA, 15 bp, Homo sapiens
aaagaaaaaaagccc

SEQ ID NO: 1369988 - DNA, 15 bp, Homo sapiens
aaaagaaaaaaagcc

SEQ ID NO: 1369989 - DNA, 15 bp, Homo sapiens
aaaaagaaaaaaagc

SEQ ID NO: 1369990 - DNA, 15 bp, Homo sapiens
gaaaaagaaaaaaag

SEQ ID NO: 1369991 - DNA, 15 bp, Homo sapiens
agaaaaagaaaaaaa

SEQ ID NO: 1369992 - DNA, 15 bp, Homo sapiens
aagaaaaagaaaaaa

SEQ ID NO: 1369993 - DNA, 15 bp, Homo sapiens
aaagaaaaagaaaaa

SEQ ID NO: 1369994 - DNA, 15 bp, Homo sapiens
taaaaaaaaaaaaga

SEQ ID NO: 1369995 - DNA, 15 bp, Homo sapiens
ctaaaaaaaaaaaag

SEQ ID NO: 1369996 - DNA, 15 bp, Homo sapiens
aactaaaaaaaaaaa

SEQ ID NO: 1369997 - DNA, 15 bp, Homo sapiens
taactaaaaaaaaaa

SEQ ID NO: 1369998 - DNA, 15 bp, Homo sapiens
ctaactaaaaaaaaa

SEQ ID NO: 1369999 - DNA, 15 bp, Homo sapiens
actaactaaaaaaaa

SEQ ID NO: 1370000 - DNA, 15 bp, Homo sapiens
tactaactaaaaaaa

SEQ ID NO: 1370001 - DNA, 15 bp, Homo sapiens
ctactaactaaaaaa

SEQ ID NO: 1370002 - DNA, 15 bp, Homo sapiens
tctactaactaaaaa

SEQ ID NO: 1370003 - DNA, 15 bp, Homo sapiens
gtctactaactaaaa

SEQ ID NO: 1370004 - DNA, 15 bp, Homo sapiens
agtctactaactaaa

SEQ ID NO: 1370005 - DNA, 15 bp, Homo sapiens
tagtctactaactaa

SEQ ID NO: 1370006 - DNA, 15 bp, Homo sapiens
atagtctactaacta

SEQ ID NO: 1370007 - DNA, 15 bp, Homo sapiens
aatagtctactaact

SEQ ID NO: 1370008 - DNA, 15 bp, Homo sapiens
aaatagtctactaac

SEQ ID NO: 1370009 - DNA, 15 bp, Homo sapiens
taaatagtctactaa

SEQ ID NO: 1370010 - DNA, 15 bp, Homo sapiens
ataaatagtctacta

SEQ ID NO: 1370011 - DNA, 15 bp, Homo sapiens
aataaatagtctact

SEQ ID NO: 1370012 - DNA, 15 bp, Homo sapiens
taataaatagtctac

SEQ ID NO: 1370013 - DNA, 15 bp, Homo sapiens
gtaataaatagtcta

SEQ ID NO: 1370014 - DNA, 15 bp, Homo sapiens
agtaataaatagtct

SEQ ID NO: 1370015 - DNA, 15 bp, Homo sapiens
cagtaataaatagtc

SEQ ID NO: 1370016 - DNA, 15 bp, Homo sapiens
gcagtaataaatagt

SEQ ID NO: 1370017 - DNA, 15 bp, Homo sapiens
ggcagtaataaatag

SEQ ID NO: 1370018 - DNA, 15 bp, Homo sapiens
aggcagtaataaata

SEQ ID NO: 1370019 - DNA, 15 bp, Homo sapiens
gaggcagtaataaat

SEQ ID NO: 1370020 - DNA, 15 bp, Homo sapiens
tgaggcagtaataaa

SEQ ID NO: 1370021 - DNA, 15 bp, Homo sapiens
ttgaggcagtaataa

SEQ ID NO: 1370022 - DNA, 15 bp, Homo sapiens
attgaggcagtaata

SEQ ID NO: 1370023 - DNA, 15 bp, Homo sapiens
gaaattgaggcagta

SEQ ID NO: 1370024 - DNA, 15 bp, Homo sapiens
tgaaattgaggcagt

SEQ ID NO: 1370025 - DNA, 15 bp, Homo sapiens
ctgaaattgaggcag

SEQ ID NO: 1370026 - DNA, 15 bp, Homo sapiens
tctgaaattgaggca

SEQ ID NO: 1370027 - DNA, 15 bp, Homo sapiens
ctctgaaattgaggc

SEQ ID NO: 1370028 - DNA, 15 bp, Homo sapiens
tgagccagcccctat

SEQ ID NO: 1370029 - DNA, 15 bp, Homo sapiens
gtgagccagccccta

SEQ ID NO: 1370030 - DNA, 15 bp, Homo sapiens
agtgagccagcccct

SEQ ID NO: 1370031 - DNA, 15 bp, Homo sapiens
cagtgagccagcccc

SEQ ID NO: 1370032 - DNA, 15 bp, Homo sapiens
ccagtgagccagccc

SEQ ID NO: 1370033 - DNA, 15 bp, Homo sapiens
tccagtgagccagcc

SEQ ID NO: 1370034 - DNA, 15 bp, Homo sapiens
ctccagtgagccagc

SEQ ID NO: 1370035 - DNA, 15 bp, Homo sapiens
gctccagtgagccag

SEQ ID NO: 1370036 - DNA, 15 bp, Homo sapiens
agctccagtgagcca

SEQ ID NO: 1370037 - DNA, 15 bp, Homo sapiens
gagctccagtgagcc

SEQ ID NO: 1370038 - DNA, 15 bp, Homo sapiens
agagctccagtgagc

SEQ ID NO: 1370039 - DNA, 15 bp, Homo sapiens
cagagctccagtgag

SEQ ID NO: 1370040 - DNA, 15 bp, Homo sapiens
acagagctccagtga

SEQ ID NO: 1370041 - DNA, 15 bp, Homo sapiens
cacagagctccagtg

SEQ ID NO: 1370042 - DNA, 15 bp, Homo sapiens
gcacagagctccagt

SEQ ID NO: 1370043 - DNA, 15 bp, Homo sapiens
ggcacagagctccag

SEQ ID NO: 1370044 - DNA, 15 bp, Homo sapiens
tggcacagagctcca

SEQ ID NO: 1370045 - DNA, 15 bp, Homo sapiens
ctggcacagagctcc

SEQ ID NO: 1370046 - DNA, 15 bp, Homo sapiens
actggcacagagctc

SEQ ID NO: 1370047 - DNA, 15 bp, Homo sapiens
gactggcacagagct

SEQ ID NO: 1370048 - DNA, 15 bp, Homo sapiens
tgactggcacagagc

SEQ ID NO: 1370049 - DNA, 15 bp, Homo sapiens
ctgactggcacagag

SEQ ID NO: 1370050 - DNA, 15 bp, Homo sapiens
cctgactggcacaga

SEQ ID NO: 1370051 - DNA, 15 bp, Homo sapiens
acctgactggcacag

SEQ ID NO: 1370052 - DNA, 15 bp, Homo sapiens
tacctgactggcaca

SEQ ID NO: 1370053 - DNA, 15 bp, Homo sapiens
ttacctgactggcac

SEQ ID NO: 1370054 - DNA, 15 bp, Homo sapiens
cttacctgactggca

SEQ ID NO: 1370055 - DNA, 15 bp, Homo sapiens
ccttacctgactggc

SEQ ID NO: 1370056 - DNA, 15 bp, Homo sapiens
accttacctgactgg

SEQ ID NO: 1370057 - DNA, 15 bp, Homo sapiens
gaccttacctgactg

SEQ ID NO: 1370058 - DNA, 15 bp, Homo sapiens
agaccttacctgact

SEQ ID NO: 1370059 - DNA, 15 bp, Homo sapiens
cagaccttacctgac

SEQ ID NO: 1370060 - DNA, 15 bp, Homo sapiens
gcagaccttacctga

SEQ ID NO: 1370061 - DNA, 15 bp, Homo sapiens
ggcagaccttacctg

SEQ ID NO: 1370062 - DNA, 15 bp, Homo sapiens
tggcagaccttacct

SEQ ID NO: 1370063 - DNA, 15 bp, Homo sapiens
ctggcagaccttacc

SEQ ID NO: 1370064 - DNA, 15 bp, Homo sapiens
actggcagaccttac

SEQ ID NO: 1370065 - DNA, 15 bp, Homo sapiens
tactggcagacctta

SEQ ID NO: 1370066 - DNA, 15 bp, Homo sapiens
gtactggcagacctt

SEQ ID NO: 1370067 - DNA, 15 bp, Homo sapiens
tgtactggcagacct

SEQ ID NO: 1370068 - DNA, 15 bp, Homo sapiens
ctgtactggcagacc

SEQ ID NO: 1370069 - DNA, 15 bp, Homo sapiens
tctgtactggcagac

SEQ ID NO: 1370070 - DNA, 15 bp, Homo sapiens
ttctgtactggcaga

SEQ ID NO: 1370071 - DNA, 15 bp, Homo sapiens
cttctgtactggcag

SEQ ID NO: 1370072 - DNA, 15 bp, Homo sapiens
gcttctgtactggca

SEQ ID NO: 1370073 - DNA, 15 bp, Homo sapiens
agcttctgtactggc

SEQ ID NO: 1370074 - DNA, 15 bp, Homo sapiens
tagcttctgtactgg

SEQ ID NO: 1370075 - DNA, 15 bp, Homo sapiens
atagcttctgtactg

SEQ ID NO: 1370076 - DNA, 15 bp, Homo sapiens
catagcttctgtact

SEQ ID NO: 1370077 - DNA, 15 bp, Homo sapiens
ccatagcttctgtac

SEQ ID NO: 1370078 - DNA, 15 bp, Homo sapiens
accatagcttctgta

SEQ ID NO: 1370079 - DNA, 15 bp, Homo sapiens
caccatagcttctgt

SEQ ID NO: 1370080 - DNA, 15 bp, Homo sapiens
acaccatagcttctg

SEQ ID NO: 1370081 - DNA, 15 bp, Homo sapiens
cacaccatagcttct

SEQ ID NO: 1370082 - DNA, 15 bp, Homo sapiens
ccacaccatagcttc

SEQ ID NO: 1370083 - DNA, 15 bp, Homo sapiens
cccacaccatagctt

SEQ ID NO: 1370084 - DNA, 15 bp, Homo sapiens
gcccacaccatagct

SEQ ID NO: 1370085 - DNA, 15 bp, Homo sapiens
ggcccacaccatagc

SEQ ID NO: 1370086 - DNA, 15 bp, Homo sapiens
gggcccacaccatag

SEQ ID NO: 1370087 - DNA, 15 bp, Homo sapiens
ggggcccacaccata

SEQ ID NO: 1370088 - DNA, 15 bp, Homo sapiens
gggggcccacaccat

SEQ ID NO: 1370089 - DNA, 15 bp, Homo sapiens
ggggggcccacacca

SEQ ID NO: 1370090 - DNA, 15 bp, Homo sapiens
cggggggcccacacc

SEQ ID NO: 1370091 - DNA, 15 bp, Homo sapiens
ccggggggcccacac

SEQ ID NO: 1370092 - DNA, 15 bp, Homo sapiens
cccggggggcccaca

SEQ ID NO: 1370093 - DNA, 15 bp, Homo sapiens
gcccggggggcccac

SEQ ID NO: 1370094 - DNA, 15 bp, Homo sapiens
tgcccggggggccca

SEQ ID NO: 1370095 - DNA, 15 bp, Homo sapiens
gtgcccggggggccc

SEQ ID NO: 1370096 - DNA, 15 bp, Homo sapiens
ggtgcccggggggcc

SEQ ID NO: 1370097 - DNA, 15 bp, Homo sapiens
gggtgcccggggggc

SEQ ID NO: 1370098 - DNA, 15 bp, Homo sapiens
tgggtgcccgggggg

SEQ ID NO: 1370099 - DNA, 15 bp, Homo sapiens
ttgggtgcccggggg

SEQ ID NO: 1370100 - DNA, 15 bp, Homo sapiens
tttgggtgcccgggg

SEQ ID NO: 1370101 - DNA, 15 bp, Homo sapiens
ttttgggtgcccggg

SEQ ID NO: 1370102 - DNA, 15 bp, Homo sapiens
gttttgggtgcccgg

SEQ ID NO: 1370103 - DNA, 15 bp, Homo sapiens
agttttgggtgcccg

SEQ ID NO: 1370104 - DNA, 15 bp, Homo sapiens
cagttttgggtgccc

SEQ ID NO: 1370105 - DNA, 15 bp, Homo sapiens
gcagttttgggtgcc

SEQ ID NO: 1370106 - DNA, 15 bp, Homo sapiens
agcagttttgggtgc

SEQ ID NO: 1370107 - DNA, 15 bp, Homo sapiens
gagcagttttgggtg

SEQ ID NO: 1370108 - DNA, 15 bp, Homo sapiens
agagcagttttgggt

SEQ ID NO: 1370109 - DNA, 15 bp, Homo sapiens
cagagcagttttggg

SEQ ID NO: 1370110 - DNA, 15 bp, Homo sapiens
acagagcagttttgg

SEQ ID NO: 1370111 - DNA, 15 bp, Homo sapiens
tacagagcagttttg

SEQ ID NO: 1370112 - DNA, 15 bp, Homo sapiens
ttacagagcagtttt

SEQ ID NO: 1370113 - DNA, 15 bp, Homo sapiens
cttacagagcagttt

SEQ ID NO: 1370114 - DNA, 15 bp, Homo sapiens
gcttacagagcagtt

SEQ ID NO: 1370115 - DNA, 15 bp, Homo sapiens
agcttacagagcagt

SEQ ID NO: 1370116 - DNA, 15 bp, Homo sapiens
cagcttacagagcag

SEQ ID NO: 1370117 - DNA, 15 bp, Homo sapiens
ccagcttacagagca

SEQ ID NO: 1370118 - DNA, 15 bp, Homo sapiens
gccagcttacagagc

SEQ ID NO: 1370119 - DNA, 15 bp, Homo sapiens
tgccagcttacagag

SEQ ID NO: 1370120 - DNA, 15 bp, Homo sapiens
atgccagcttacaga

SEQ ID NO: 1370121 - DNA, 15 bp, Homo sapiens
catgccagcttacag

SEQ ID NO: 1370122 - DNA, 15 bp, Homo sapiens
tcatgccagcttaca

SEQ ID NO: 1370123 - DNA, 15 bp, Homo sapiens
gtcatgccagcttac

SEQ ID NO: 1370124 - DNA, 15 bp, Homo sapiens
ggtcatgccagctta

SEQ ID NO: 1370125 - DNA, 15 bp, Homo sapiens
tggtcatgccagctt

SEQ ID NO: 1370126 - DNA, 15 bp, Homo sapiens
ctggtcatgccagct

SEQ ID NO: 1370127 - DNA, 15 bp, Homo sapiens
cctggtcatgccagc

SEQ ID NO: 1370128 - DNA, 15 bp, Homo sapiens
gcctggtcatgccag

SEQ ID NO: 1370129 - DNA, 15 bp, Homo sapiens
agcctggtcatgcca

SEQ ID NO: 1370130 - DNA, 15 bp, Homo sapiens
cagcctggtcatgcc

SEQ ID NO: 1370131 - DNA, 15 bp, Homo sapiens
ccagcctggtcatgc

SEQ ID NO: 1370132 - DNA, 15 bp, Homo sapiens
cccagcctggtcatg

SEQ ID NO: 1370133 - DNA, 15 bp, Homo sapiens
ccccagcctggtcat

SEQ ID NO: 1370134 - DNA, 15 bp, Homo sapiens
gccccagcctggtca

SEQ ID NO: 1370135 - DNA, 15 bp, Homo sapiens
ggccccagcctggtc

SEQ ID NO: 1370136 - DNA, 15 bp, Homo sapiens
gggccccagcctggt

SEQ ID NO: 1370137 - DNA, 15 bp, Homo sapiens
agggccccagcctgg

SEQ ID NO: 1370138 - DNA, 15 bp, Homo sapiens
cagggccccagcctg

SEQ ID NO: 1370139 - DNA, 15 bp, Homo sapiens
ccagggccccagcct

SEQ ID NO: 1370140 - DNA, 15 bp, Homo sapiens
cccagggccccagcc

SEQ ID NO: 1370141 - DNA, 15 bp, Homo sapiens
tcccagggccccagc

SEQ ID NO: 1370142 - DNA, 15 bp, Homo sapiens
ctcccagggccccag

SEQ ID NO: 1370143 - DNA, 15 bp, Homo sapiens
tctcccagggcccca

SEQ ID NO: 1370144 - DNA, 15 bp, Homo sapiens
ctctcccagggcccc

SEQ ID NO: 1370145 - DNA, 15 bp, Homo sapiens
cctctcccagggccc

SEQ ID NO: 1370146 - DNA, 15 bp, Homo sapiens
gcctctcccagggcc

SEQ ID NO: 1370147 - DNA, 15 bp, Homo sapiens
ggcctctcccagggc

SEQ ID NO: 1370148 - DNA, 15 bp, Homo sapiens
tggcctctcccaggg

SEQ ID NO: 1370149 - DNA, 15 bp, Homo sapiens
ctggcctctcccagg

SEQ ID NO: 1370150 - DNA, 15 bp, Homo sapiens
cctggcctctcccag

SEQ ID NO: 1370151 - DNA, 15 bp, Homo sapiens
tcctggcctctccca

SEQ ID NO: 1370152 - DNA, 15 bp, Homo sapiens
ctcctggcctctccc

SEQ ID NO: 1370153 - DNA, 15 bp, Homo sapiens
tctcctggcctctcc

SEQ ID NO: 1370154 - DNA, 15 bp, Homo sapiens
gtctcctggcctctc

SEQ ID NO: 1370155 - DNA, 15 bp, Homo sapiens
ggtctcctggcctct

SEQ ID NO: 1370156 - DNA, 15 bp, Homo sapiens
tggtctcctggcctc

SEQ ID NO: 1370157 - DNA, 15 bp, Homo sapiens
ttggtctcctggcct

SEQ ID NO: 1370158 - DNA, 15 bp, Homo sapiens
cttggtctcctggcc

SEQ ID NO: 1370159 - DNA, 15 bp, Homo sapiens
ccttggtctcctggc

SEQ ID NO: 1370160 - DNA, 15 bp, Homo sapiens
cccttggtctcctgg

SEQ ID NO: 1370161 - DNA, 15 bp, Homo sapiens
ccccttggtctcctg

SEQ ID NO: 1370162 - DNA, 15 bp, Homo sapiens
accccttggtctcct

SEQ ID NO: 1370163 - DNA, 15 bp, Homo sapiens
caccccttggtctcc

SEQ ID NO: 1370164 - DNA, 15 bp, Homo sapiens
gcaccccttggtctc

SEQ ID NO: 1370165 - DNA, 15 bp, Homo sapiens
agcaccccttggtct

SEQ ID NO: 1370166 - DNA, 15 bp, Homo sapiens
gagcaccccttggtc

SEQ ID NO: 1370167 - DNA, 15 bp, Homo sapiens
tgagcaccccttggt

SEQ ID NO: 1370168 - DNA, 15 bp, Homo sapiens
ctgagcaccccttgg

SEQ ID NO: 1370169 - DNA, 15 bp, Homo sapiens
cctgagcaccccttg

SEQ ID NO: 1370170 - DNA, 15 bp, Homo sapiens
acctgagcacccctt

SEQ ID NO: 1370171 - DNA, 15 bp, Homo sapiens
gacctgagcacccct

SEQ ID NO: 1370172 - DNA, 15 bp, Homo sapiens
tgacctgagcacccc

SEQ ID NO: 1370173 - DNA, 15 bp, Homo sapiens
ctgacctgagcaccc

SEQ ID NO: 1370174 - DNA, 15 bp, Homo sapiens
actgacctgagcacc

SEQ ID NO: 1370175 - DNA, 15 bp, Homo sapiens
gactgacctgagcac

SEQ ID NO: 1370176 - DNA, 15 bp, Homo sapiens
ggactgacctgagca

SEQ ID NO: 1370177 - DNA, 15 bp, Homo sapiens
tggactgacctgagc

SEQ ID NO: 1370178 - DNA, 15 bp, Homo sapiens
ttggactgacctgag

SEQ ID NO: 1370179 - DNA, 15 bp, Homo sapiens
gttggactgacctga

SEQ ID NO: 1370180 - DNA, 15 bp, Homo sapiens
ggttggactgacctg

SEQ ID NO: 1370181 - DNA, 15 bp, Homo sapiens
gggttggactgacct

SEQ ID NO: 1370182 - DNA, 15 bp, Homo sapiens
ggggttggactgacc

SEQ ID NO: 1370183 - DNA, 15 bp, Homo sapiens
cggggttggactgac

SEQ ID NO: 1370184 - DNA, 15 bp, Homo sapiens
acggggttggactga

SEQ ID NO: 1370185 - DNA, 15 bp, Homo sapiens
gacggggttggactg

SEQ ID NO: 1370186 - DNA, 15 bp, Homo sapiens
agacggggttggact

SEQ ID NO: 1370187 - DNA, 15 bp, Homo sapiens
cagacggggttggac

SEQ ID NO: 1370188 - DNA, 15 bp, Homo sapiens
tcagacggggttgga

SEQ ID NO: 1370189 - DNA, 15 bp, Homo sapiens
atcagacggggttgg

SEQ ID NO: 1370190 - DNA, 15 bp, Homo sapiens
catcagacggggttg

SEQ ID NO: 1370191 - DNA, 15 bp, Homo sapiens
acatcagacggggtt

SEQ ID NO: 1370192 - DNA, 15 bp, Homo sapiens
gacatcagacggggt

SEQ ID NO: 1370193 - DNA, 15 bp, Homo sapiens
ggacatcagacgggg

SEQ ID NO: 1370194 - DNA, 15 bp, Homo sapiens
tggacatcagacggg

SEQ ID NO: 1370195 - DNA, 15 bp, Homo sapiens
ttggacatcagacgg

SEQ ID NO: 1370196 - DNA, 15 bp, Homo sapiens
cttggacatcagacg

SEQ ID NO: 1370197 - DNA, 15 bp, Homo sapiens
tcttggacatcagac

SEQ ID NO: 1370198 - DNA, 15 bp, Homo sapiens
gtcttggacatcaga

SEQ ID NO: 1370199 - DNA, 15 bp, Homo sapiens
ggtcttggacatcag

SEQ ID NO: 1370200 - DNA, 15 bp, Homo sapiens
tggtcttggacatca

SEQ ID NO: 1370201 - DNA, 15 bp, Homo sapiens
gtggtcttggacatc

SEQ ID NO: 1370202 - DNA, 15 bp, Homo sapiens
ggtggtcttggacat

SEQ ID NO: 1370203 - DNA, 15 bp, Homo sapiens
gggtggtcttggaca

SEQ ID NO: 1370204 - DNA, 15 bp, Homo sapiens
agggtggtcttggac

SEQ ID NO: 1370205 - DNA, 15 bp, Homo sapiens
cagggtggtcttgga

SEQ ID NO: 1370206 - DNA, 15 bp, Homo sapiens
gcagggtggtcttgg

SEQ ID NO: 1370207 - DNA, 15 bp, Homo sapiens
cgcagggtggtcttg

SEQ ID NO: 1370208 - DNA, 15 bp, Homo sapiens
ccgcagggtggtctt

SEQ ID NO: 1370209 - DNA, 15 bp, Homo sapiens
tccgcagggtggtct

SEQ ID NO: 1370210 - DNA, 15 bp, Homo sapiens
ctccgcagggtggtc

SEQ ID NO: 1370211 - DNA, 15 bp, Homo sapiens
tctccgcagggtggt

SEQ ID NO: 1370212 - DNA, 15 bp, Homo sapiens
atctccgcagggtgg

SEQ ID NO: 1370213 - DNA, 15 bp, Homo sapiens
gatctccgcagggtg

SEQ ID NO: 1370214 - DNA, 15 bp, Homo sapiens
tgatctccgcagggt

SEQ ID NO: 1370215 - DNA, 15 bp, Homo sapiens
ctgatctccgcaggg

SEQ ID NO: 1370216 - DNA, 15 bp, Homo sapiens
tctgatctccgcagg

SEQ ID NO: 1370217 - DNA, 15 bp, Homo sapiens
ttctgatctccgcag

SEQ ID NO: 1370218 - DNA, 15 bp, Homo sapiens
gttctgatctccgca

SEQ ID NO: 1370219 - DNA, 15 bp, Homo sapiens
agttctgatctccgc

SEQ ID NO: 1370220 - DNA, 15 bp, Homo sapiens
cagttctgatctccg

SEQ ID NO: 1370221 - DNA, 15 bp, Homo sapiens
tcagttctgatctcc

SEQ ID NO: 1370222 - DNA, 15 bp, Homo sapiens
gtcagttctgatctc

SEQ ID NO: 1370223 - DNA, 15 bp, Homo sapiens
tgtcagttctgatct

SEQ ID NO: 1370224 - DNA, 15 bp, Homo sapiens
ttgtcagttctgatc

SEQ ID NO: 1370225 - DNA, 15 bp, Homo sapiens
attgtcagttctgat

SEQ ID NO: 1370226 - DNA, 15 bp, Homo sapiens
aattgtcagttctga

SEQ ID NO: 1370227 - DNA, 15 bp, Homo sapiens
gaattgtcagttctg

SEQ ID NO: 1370228 - DNA, 15 bp, Homo sapiens
ggaattgtcagttct

SEQ ID NO: 1370229 - DNA, 15 bp, Homo sapiens
gggaattgtcagttc

SEQ ID NO: 1370230 - DNA, 15 bp, Homo sapiens
ggggaattgtcagtt

SEQ ID NO: 1370231 - DNA, 15 bp, Homo sapiens
aggggaattgtcagt

SEQ ID NO: 1370232 - DNA, 15 bp, Homo sapiens
taggggaattgtcag

SEQ ID NO: 1370233 - DNA, 15 bp, Homo sapiens
ctaggggaattgtca

SEQ ID NO: 1370234 - DNA, 15 bp, Homo sapiens
cctaggggaattgtc

SEQ ID NO: 1370235 - DNA, 15 bp, Homo sapiens
ccctaggggaattgt

SEQ ID NO: 1370236 - DNA, 15 bp, Homo sapiens
gccctaggggaattg

SEQ ID NO: 1370237 - DNA, 15 bp, Homo sapiens
agccctaggggaatt

SEQ ID NO: 1370238 - DNA, 15 bp, Homo sapiens
tagccctaggggaat

SEQ ID NO: 1370239 - DNA, 15 bp, Homo sapiens
ttagccctaggggaa

SEQ ID NO: 1370240 - DNA, 15 bp, Homo sapiens
tttagccctagggga

SEQ ID NO: 1370241 - DNA, 15 bp, Homo sapiens
ctttagccctagggg

SEQ ID NO: 1370242 - DNA, 15 bp, Homo sapiens
actttagccctaggg

SEQ ID NO: 1370243 - DNA, 15 bp, Homo sapiens
gactttagccctagg

SEQ ID NO: 1370244 - DNA, 15 bp, Homo sapiens
agactttagccctag

SEQ ID NO: 1370245 - DNA, 15 bp, Homo sapiens
gagactttagcccta

SEQ ID NO: 1370246 - DNA, 15 bp, Homo sapiens
ggagactttagccct

SEQ ID NO: 1370247 - DNA, 15 bp, Homo sapiens
aggagactttagccc

SEQ ID NO: 1370248 - DNA, 15 bp, Homo sapiens
taggagactttagcc

SEQ ID NO: 1370249 - DNA, 15 bp, Homo sapiens
ataggagactttagc

SEQ ID NO: 1370250 - DNA, 15 bp, Homo sapiens
cataggagactttag

SEQ ID NO: 1370251 - DNA, 15 bp, Homo sapiens
tcataggagacttta

SEQ ID NO: 1370252 - DNA, 15 bp, Homo sapiens
ctcataggagacttt

SEQ ID NO: 1370253 - DNA, 15 bp, Homo sapiens
tctcataggagactt

SEQ ID NO: 1370254 - DNA, 15 bp, Homo sapiens
ctctcataggagact

SEQ ID NO: 1370255 - DNA, 15 bp, Homo sapiens
gctctcataggagac

SEQ ID NO: 1370256 - DNA, 15 bp, Homo sapiens
tgctctcataggaga

SEQ ID NO: 1370257 - DNA, 15 bp, Homo sapiens
ttgctctcataggag

SEQ ID NO: 1370258 - DNA, 15 bp, Homo sapiens
attgctctcatagga

SEQ ID NO: 1370259 - DNA, 15 bp, Homo sapiens
aattgctctcatagg

SEQ ID NO: 1370260 - DNA, 15 bp, Homo sapiens
aaattgctctcatag

SEQ ID NO: 1370261 - DNA, 15 bp, Homo sapiens
caaattgctctcata

SEQ ID NO: 1370262 - DNA, 15 bp, Homo sapiens
tcaaattgctctcat

SEQ ID NO: 1370263 - DNA, 15 bp, Homo sapiens
ctcaaattgctctca

SEQ ID NO: 1370264 - DNA, 15 bp, Homo sapiens
gctcaaattgctctc

SEQ ID NO: 1370265 - DNA, 15 bp, Homo sapiens
agctcaaattgctct

SEQ ID NO: 1370266 - DNA, 15 bp, Homo sapiens
aagctcaaattgctc

SEQ ID NO: 1370267 - DNA, 15 bp, Homo sapiens
taagctcaaattgct

SEQ ID NO: 1370268 - DNA, 15 bp, Homo sapiens
ctaagctcaaattgc

SEQ ID NO: 1370269 - DNA, 15 bp, Homo sapiens
cctaagctcaaattg

SEQ ID NO: 1370270 - DNA, 15 bp, Homo sapiens
ccctaagctcaaatt

SEQ ID NO: 1370271 - DNA, 15 bp, Homo sapiens
cccctaagctcaaat

SEQ ID NO: 1370272 - DNA, 15 bp, Homo sapiens
ccccctaagctcaaa

SEQ ID NO: 1370273 - DNA, 15 bp, Homo sapiens
tccccctaagctcaa

SEQ ID NO: 1370274 - DNA, 15 bp, Homo sapiens
atccccctaagctca

SEQ ID NO: 1370275 - DNA, 15 bp, Homo sapiens
catccccctaagctc

SEQ ID NO: 1370276 - DNA, 15 bp, Homo sapiens
ccatccccctaagct

SEQ ID NO: 1370277 - DNA, 15 bp, Homo sapiens
gccatccccctaagc

SEQ ID NO: 1370278 - DNA, 15 bp, Homo sapiens
agccatccccctaag

SEQ ID NO: 1370279 - DNA, 15 bp, Homo sapiens
cagccatccccctaa

SEQ ID NO: 1370280 - DNA, 15 bp, Homo sapiens
acagccatcccccta

SEQ ID NO: 1370281 - DNA, 15 bp, Homo sapiens
gacagccatccccct

SEQ ID NO: 1370282 - DNA, 15 bp, Homo sapiens
ggacagccatccccc

SEQ ID NO: 1370283 - DNA, 15 bp, Homo sapiens
gggacagccatcccc

SEQ ID NO: 1370284 - DNA, 15 bp, Homo sapiens
agggacagccatccc

SEQ ID NO: 1370285 - DNA, 15 bp, Homo sapiens
cagggacagccatcc

SEQ ID NO: 1370286 - DNA, 15 bp, Homo sapiens
tcagggacagccatc

SEQ ID NO: 1370287 - DNA, 15 bp, Homo sapiens
gtcagggacagccat

SEQ ID NO: 1370288 - DNA, 15 bp, Homo sapiens
ggtcagggacagcca

SEQ ID NO: 1370289 - DNA, 15 bp, Homo sapiens
cggtcagggacagcc

SEQ ID NO: 1370290 - DNA, 15 bp, Homo sapiens
acggtcagggacagc

SEQ ID NO: 1370291 - DNA, 15 bp, Homo sapiens
cacggtcagggacag

SEQ ID NO: 1370292 - DNA, 15 bp, Homo sapiens
gcacggtcagggaca

SEQ ID NO: 1370293 - DNA, 15 bp, Homo sapiens
agcacggtcagggac

SEQ ID NO: 1370294 - DNA, 15 bp, Homo sapiens
gagcacggtcaggga

SEQ ID NO: 1370295 - DNA, 15 bp, Homo sapiens
ggagcacggtcaggg

SEQ ID NO: 1370296 - DNA, 15 bp, Homo sapiens
tggagcacggtcagg

SEQ ID NO: 1370297 - DNA, 15 bp, Homo sapiens
gtggagcacggtcag

SEQ ID NO: 1370298 - DNA, 15 bp, Homo sapiens
agtggagcacggtca

SEQ ID NO: 1370299 - DNA, 15 bp, Homo sapiens
tagtggagcacggtc

SEQ ID NO: 1370300 - DNA, 15 bp, Homo sapiens
gtagtggagcacggt

SEQ ID NO: 1370301 - DNA, 15 bp, Homo sapiens
tgtagtggagcacgg

SEQ ID NO: 1370302 - DNA, 15 bp, Homo sapiens
ctgtagtggagcacg

SEQ ID NO: 1370303 - DNA, 15 bp, Homo sapiens
tctgtagtggagcac

SEQ ID NO: 1370304 - DNA, 15 bp, Homo sapiens
gtctgtagtggagca

SEQ ID NO: 1370305 - DNA, 15 bp, Homo sapiens
tgtctgtagtggagc

SEQ ID NO: 1370306 - DNA, 15 bp, Homo sapiens
gtgtctgtagtggag

SEQ ID NO: 1370307 - DNA, 15 bp, Homo sapiens
agtgtctgtagtgga

SEQ ID NO: 1370308 - DNA, 15 bp, Homo sapiens
gagtgtctgtagtgg

SEQ ID NO: 1370309 - DNA, 15 bp, Homo sapiens
ggagtgtctgtagtg

SEQ ID NO: 1370310 - DNA, 15 bp, Homo sapiens
aggagtgtctgtagt

SEQ ID NO: 1370311 - DNA, 15 bp, Homo sapiens
caggagtgtctgtag

SEQ ID NO: 1370312 - DNA, 15 bp, Homo sapiens
gcaggagtgtctgta

SEQ ID NO: 1370313 - DNA, 15 bp, Homo sapiens
tgcaggagtgtctgt

SEQ ID NO: 1370314 - DNA, 15 bp, Homo sapiens
gtgcaggagtgtctg

SEQ ID NO: 1370315 - DNA, 15 bp, Homo sapiens
ggtgcaggagtgtct

SEQ ID NO: 1370316 - DNA, 15 bp, Homo sapiens
tggtgcaggagtgtc

SEQ ID NO: 1370317 - DNA, 15 bp, Homo sapiens
ttggtgcaggagtgt

SEQ ID NO: 1370318 - DNA, 15 bp, Homo sapiens
tttggtgcaggagtg

SEQ ID NO: 1370319 - DNA, 15 bp, Homo sapiens
gtttggtgcaggagt

SEQ ID NO: 1370320 - DNA, 15 bp, Homo sapiens
ggtttggtgcaggag

SEQ ID NO: 1370321 - DNA, 15 bp, Homo sapiens
gggtttggtgcagga

SEQ ID NO: 1370322 - DNA, 15 bp, Homo sapiens
agggtttggtgcagg

SEQ ID NO: 1370323 - DNA, 15 bp, Homo sapiens
gagggtttggtgcag

SEQ ID NO: 1370324 - DNA, 15 bp, Homo sapiens
agagggtttggtgca

SEQ ID NO: 1370325 - DNA, 15 bp, Homo sapiens
cagagggtttggtgc

SEQ ID NO: 1370326 - DNA, 15 bp, Homo sapiens
ccagagggtttggtg

SEQ ID NO: 1370327 - DNA, 15 bp, Homo sapiens
cccagagggtttggt

SEQ ID NO: 1370328 - DNA, 15 bp, Homo sapiens
gcccagagggtttgg

SEQ ID NO: 1370329 - DNA, 15 bp, Homo sapiens
agcccagagggtttg

SEQ ID NO: 1370330 - DNA, 15 bp, Homo sapiens
aagcccagagggttt

SEQ ID NO: 1370331 - DNA, 15 bp, Homo sapiens
gaagcccagagggtt

SEQ ID NO: 1370332 - DNA, 15 bp, Homo sapiens
tgaagcccagagggt

SEQ ID NO: 1370333 - DNA, 15 bp, Homo sapiens
gtgaagcccagaggg

SEQ ID NO: 1370334 - DNA, 15 bp, Homo sapiens
tgtgaagcccagagg

SEQ ID NO: 1370335 - DNA, 15 bp, Homo sapiens
atgtgaagcccagag

SEQ ID NO: 1370336 - DNA, 15 bp, Homo sapiens
gatgtgaagcccaga

SEQ ID NO: 1370337 - DNA, 15 bp, Homo sapiens
tgatgtgaagcccag

SEQ ID NO: 1370338 - DNA, 15 bp, Homo sapiens
ctgatgtgaagccca

SEQ ID NO: 1370339 - DNA, 15 bp, Homo sapiens
gctgatgtgaagccc

SEQ ID NO: 1370340 - DNA, 15 bp, Homo sapiens
agctgatgtgaagcc

SEQ ID NO: 1370341 - DNA, 15 bp, Homo sapiens
cagctgatgtgaagc

SEQ ID NO: 1370342 - DNA, 15 bp, Homo sapiens
ccagctgatgtgaag

SEQ ID NO: 1370343 - DNA, 15 bp, Homo sapiens
gccagctgatgtgaa

SEQ ID NO: 1370344 - DNA, 15 bp, Homo sapiens
agccagctgatgtga

SEQ ID NO: 1370345 - DNA, 15 bp, Homo sapiens
aagccagctgatgtg

SEQ ID NO: 1370346 - DNA, 15 bp, Homo sapiens
caagccagctgatgt

SEQ ID NO: 1370347 - DNA, 15 bp, Homo sapiens
gcaagccagctgatg

SEQ ID NO: 1370348 - DNA, 15 bp, Homo sapiens
ggcaagccagctgat

SEQ ID NO: 1370349 - DNA, 15 bp, Homo sapiens
tggcaagccagctga

SEQ ID NO: 1370350 - DNA, 15 bp, Homo sapiens
atggcaagccagctg

SEQ ID NO: 1370351 - DNA, 15 bp, Homo sapiens
gatggcaagccagct

SEQ ID NO: 1370352 - DNA, 15 bp, Homo sapiens
ggatggcaagccagc

SEQ ID NO: 1370353 - DNA, 15 bp, Homo sapiens
gggatggcaagccag

SEQ ID NO: 1370354 - DNA, 15 bp, Homo sapiens
tgggatggcaagcca

SEQ ID NO: 1370355 - DNA, 15 bp, Homo sapiens
gtgggatggcaagcc

SEQ ID NO: 1370356 - DNA, 15 bp, Homo sapiens
ggtgggatggcaagc

SEQ ID NO: 1370357 - DNA, 15 bp, Homo sapiens
tggtgggatggcaag

SEQ ID NO: 1370358 - DNA, 15 bp, Homo sapiens
gtggtgggatggcaa

SEQ ID NO: 1370359 - DNA, 15 bp, Homo sapiens
agtggtgggatggca

SEQ ID NO: 1370360 - DNA, 15 bp, Homo sapiens
aagtggtgggatggc

SEQ ID NO: 1370361 - DNA, 15 bp, Homo sapiens
gaagtggtgggatgg

SEQ ID NO: 1370362 - DNA, 15 bp, Homo sapiens
agaagtggtgggatg

SEQ ID NO: 1370363 - DNA, 15 bp, Homo sapiens
gagaagtggtgggat

SEQ ID NO: 1370364 - DNA, 15 bp, Homo sapiens
agagaagtggtggga

SEQ ID NO: 1370365 - DNA, 15 bp, Homo sapiens
tagagaagtggtggg

SEQ ID NO: 1370366 - DNA, 15 bp, Homo sapiens
ctagagaagtggtgg

SEQ ID NO: 1370367 - DNA, 15 bp, Homo sapiens
cctagagaagtggtg

SEQ ID NO: 1370368 - DNA, 15 bp, Homo sapiens
gcctagagaagtggt

SEQ ID NO: 1370369 - DNA, 15 bp, Homo sapiens
tgcctagagaagtgg

SEQ ID NO: 1370370 - DNA, 15 bp, Homo sapiens
ctgcctagagaagtg

SEQ ID NO: 1370371 - DNA, 15 bp, Homo sapiens
gctgcctagagaagt

SEQ ID NO: 1370372 - DNA, 15 bp, Homo sapiens
agctgcctagagaag

SEQ ID NO: 1370373 - DNA, 15 bp, Homo sapiens
gagctgcctagagaa

SEQ ID NO: 1370374 - DNA, 15 bp, Homo sapiens
agagctgcctagaga

SEQ ID NO: 1370375 - DNA, 15 bp, Homo sapiens
aagagctgcctagag

SEQ ID NO: 1370376 - DNA, 15 bp, Homo sapiens
caagagctgcctaga

SEQ ID NO: 1370377 - DNA, 15 bp, Homo sapiens
gcaagagctgcctag

SEQ ID NO: 1370378 - DNA, 15 bp, Homo sapiens
agcaagagctgccta

SEQ ID NO: 1370379 - DNA, 15 bp, Homo sapiens
cagcaagagctgcct

SEQ ID NO: 1370380 - DNA, 15 bp, Homo sapiens
gcagcaagagctgcc

SEQ ID NO: 1370381 - DNA, 15 bp, Homo sapiens
agcagcaagagctgc

SEQ ID NO: 1370382 - DNA, 15 bp, Homo sapiens
tagcagcaagagctg

SEQ ID NO: 1370383 - DNA, 15 bp, Homo sapiens
gtagcagcaagagct

SEQ ID NO: 1370384 - DNA, 15 bp, Homo sapiens
ggtagcagcaagagc

SEQ ID NO: 1370385 - DNA, 15 bp, Homo sapiens
aggtagcagcaagag

SEQ ID NO: 1370386 - DNA, 15 bp, Homo sapiens
gaggtagcagcaaga

SEQ ID NO: 1370387 - DNA, 15 bp, Homo sapiens
tgaggtagcagcaag

SEQ ID NO: 1370388 - DNA, 15 bp, Homo sapiens
ttgaggtagcagcaa

SEQ ID NO: 1370389 - DNA, 15 bp, Homo sapiens
cttgaggtagcagca

SEQ ID NO: 1370390 - DNA, 15 bp, Homo sapiens
acttgaggtagcagc

SEQ ID NO: 1370391 - DNA, 15 bp, Homo sapiens
cacttgaggtagcag

SEQ ID NO: 1370392 - DNA, 15 bp, Homo sapiens
acacttgaggtagca

SEQ ID NO: 1370393 - DNA, 15 bp, Homo sapiens
gacacttgaggtagc

SEQ ID NO: 1370394 - DNA, 15 bp, Homo sapiens
tgacacttgaggtag

SEQ ID NO: 1370395 - DNA, 15 bp, Homo sapiens
atgacacttgaggta

SEQ ID NO: 1370396 - DNA, 15 bp, Homo sapiens
catgacacttgaggt

SEQ ID NO: 1370397 - DNA, 15 bp, Homo sapiens
acatgacacttgagg

SEQ ID NO: 1370398 - DNA, 15 bp, Homo sapiens
cacatgacacttgag

SEQ ID NO: 1370399 - DNA, 15 bp, Homo sapiens
ccacatgacacttga

SEQ ID NO: 1370400 - DNA, 15 bp, Homo sapiens
accacatgacacttg

SEQ ID NO: 1370401 - DNA, 15 bp, Homo sapiens
caccacatgacactt

SEQ ID NO: 1370402 - DNA, 15 bp, Homo sapiens
ccaccacatgacact

SEQ ID NO: 1370403 - DNA, 15 bp, Homo sapiens
accaccacatgacac

SEQ ID NO: 1370404 - DNA, 15 bp, Homo sapiens
gaccaccacatgaca

SEQ ID NO: 1370405 - DNA, 15 bp, Homo sapiens
cgaccaccacatgac

SEQ ID NO: 1370406 - DNA, 15 bp, Homo sapiens
tcgaccaccacatga

SEQ ID NO: 1370407 - DNA, 15 bp, Homo sapiens
ctcgaccaccacatg

SEQ ID NO: 1370408 - DNA, 15 bp, Homo sapiens
cctcgaccaccacat

SEQ ID NO: 1370409 - DNA, 15 bp, Homo sapiens
ccctcgaccaccaca

SEQ ID NO: 1370410 - DNA, 15 bp, Homo sapiens
accctcgaccaccac

SEQ ID NO: 1370411 - DNA, 15 bp, Homo sapiens
aaccctcgaccacca

SEQ ID NO: 1370412 - DNA, 15 bp, Homo sapiens
gaaccctcgaccacc

SEQ ID NO: 1370413 - DNA, 15 bp, Homo sapiens
ggaaccctcgaccac

SEQ ID NO: 1370414 - DNA, 15 bp, Homo sapiens
gggaaccctcgacca

SEQ ID NO: 1370415 - DNA, 15 bp, Homo sapiens
ggggaaccctcgacc

SEQ ID NO: 1370416 - DNA, 15 bp, Homo sapiens
aggggaaccctcgac

SEQ ID NO: 1370417 - DNA, 15 bp, Homo sapiens
gaggggaaccctcga

SEQ ID NO: 1370418 - DNA, 15 bp, Homo sapiens
ggaggggaaccctcg

SEQ ID NO: 1370419 - DNA, 15 bp, Homo sapiens
aggaggggaaccctc

SEQ ID NO: 1370420 - DNA, 15 bp, Homo sapiens
caggaggggaaccct

SEQ ID NO: 1370421 - DNA, 15 bp, Homo sapiens
gcaggaggggaaccc

SEQ ID NO: 1370422 - DNA, 15 bp, Homo sapiens
ggcaggaggggaacc

SEQ ID NO: 1370423 - DNA, 15 bp, Homo sapiens
cggcaggaggggaac

SEQ ID NO: 1370424 - DNA, 15 bp, Homo sapiens
ccggcaggaggggaa

SEQ ID NO: 1370425 - DNA, 15 bp, Homo sapiens
cccggcaggagggga

SEQ ID NO: 1370426 - DNA, 15 bp, Homo sapiens
ccccggcaggagggg

SEQ ID NO: 1370427 - DNA, 15 bp, Homo sapiens
accccggcaggaggg

SEQ ID NO: 1370428 - DNA, 15 bp, Homo sapiens
aaccccggcaggagg

SEQ ID NO: 1370429 - DNA, 15 bp, Homo sapiens
gaaccccggcaggag

SEQ ID NO: 1370430 - DNA, 15 bp, Homo sapiens
agaaccccggcagga

SEQ ID NO: 1370431 - DNA, 15 bp, Homo sapiens
tagaaccccggcagg

SEQ ID NO: 1370432 - DNA, 15 bp, Homo sapiens
ctagaaccccggcag

SEQ ID NO: 1370433 - DNA, 15 bp, Homo sapiens
tctagaaccccggca

SEQ ID NO: 1370434 - DNA, 15 bp, Homo sapiens
ctctagaaccccggc

SEQ ID NO: 1370435 - DNA, 15 bp, Homo sapiens
cctctagaaccccgg

SEQ ID NO: 1370436 - DNA, 15 bp, Homo sapiens
gcctctagaaccccg

SEQ ID NO: 1370437 - DNA, 15 bp, Homo sapiens
ggcctctagaacccc

SEQ ID NO: 1370438 - DNA, 15 bp, Homo sapiens
aggcctctagaaccc

SEQ ID NO: 1370439 - DNA, 15 bp, Homo sapiens
caggcctctagaacc

SEQ ID NO: 1370440 - DNA, 15 bp, Homo sapiens
acaggcctctagaac

SEQ ID NO: 1370441 - DNA, 15 bp, Homo sapiens
cacaggcctctagaa

SEQ ID NO: 1370442 - DNA, 15 bp, Homo sapiens
ccacaggcctctaga

SEQ ID NO: 1370443 - DNA, 15 bp, Homo sapiens
gccacaggcctctag

SEQ ID NO: 1370444 - DNA, 15 bp, Homo sapiens
tgccacaggcctcta

SEQ ID NO: 1370445 - DNA, 15 bp, Homo sapiens
ttgccacaggcctct

SEQ ID NO: 1370446 - DNA, 15 bp, Homo sapiens
cttgccacaggcctc

SEQ ID NO: 1370447 - DNA, 15 bp, Homo sapiens
tcttgccacaggcct

SEQ ID NO: 1370448 - DNA, 15 bp, Homo sapiens
ttcttgccacaggcc

SEQ ID NO: 1370449 - DNA, 15 bp, Homo sapiens
tttcttgccacaggc

SEQ ID NO: 1370450 - DNA, 15 bp, Homo sapiens
ctttcttgccacagg

SEQ ID NO: 1370451 - DNA, 15 bp, Homo sapiens
tctttcttgccacag

SEQ ID NO: 1370452 - DNA, 15 bp, Homo sapiens
ctctttcttgccaca

SEQ ID NO: 1370453 - DNA, 15 bp, Homo sapiens
actctttcttgccac

SEQ ID NO: 1370454 - DNA, 15 bp, Homo sapiens
aactctttcttgcca

SEQ ID NO: 1370455 - DNA, 15 bp, Homo sapiens
aaactctttcttgcc

SEQ ID NO: 1370456 - DNA, 15 bp, Homo sapiens
gaaactctttcttgc

SEQ ID NO: 1370457 - DNA, 15 bp, Homo sapiens
agaaactctttcttg

SEQ ID NO: 1370458 - DNA, 15 bp, Homo sapiens
gagaaactctttctt

SEQ ID NO: 1370459 - DNA, 15 bp, Homo sapiens
ggagaaactctttct

SEQ ID NO: 1370460 - DNA, 15 bp, Homo sapiens
aggagaaactctttc

SEQ ID NO: 1370461 - DNA, 15 bp, Homo sapiens
aaggagaaactcttt

SEQ ID NO: 1370462 - DNA, 15 bp, Homo sapiens
caaggagaaactctt

SEQ ID NO: 1370463 - DNA, 15 bp, Homo sapiens
gcaaggagaaactct

SEQ ID NO: 1370464 - DNA, 15 bp, Homo sapiens
ggcaaggagaaactc

SEQ ID NO: 1370465 - DNA, 15 bp, Homo sapiens
tggcaaggagaaact

SEQ ID NO: 1370466 - DNA, 15 bp, Homo sapiens
ttggcaaggagaaac

SEQ ID NO: 1370467 - DNA, 15 bp, Homo sapiens
attggcaaggagaaa

SEQ ID NO: 1370468 - DNA, 15 bp, Homo sapiens
aattggcaaggagaa

SEQ ID NO: 1370469 - DNA, 15 bp, Homo sapiens
caattggcaaggaga

SEQ ID NO: 1370470 - DNA, 15 bp, Homo sapiens
tcaattggcaaggag

SEQ ID NO: 1370471 - DNA, 15 bp, Homo sapiens
ttcaattggcaagga

SEQ ID NO: 1370472 - DNA, 15 bp, Homo sapiens
gttcaattggcaagg

SEQ ID NO: 1370473 - DNA, 15 bp, Homo sapiens
agttcaattggcaag

SEQ ID NO: 1370474 - DNA, 15 bp, Homo sapiens
gagttcaattggcaa

SEQ ID NO: 1370475 - DNA, 15 bp, Homo sapiens
tgagttcaattggca

SEQ ID NO: 1370476 - DNA, 15 bp, Homo sapiens
gtgagttcaattggc

SEQ ID NO: 1370477 - DNA, 15 bp, Homo sapiens
ggtgagttcaattgg

SEQ ID NO: 1370478 - DNA, 15 bp, Homo sapiens
tggtgagttcaattg

SEQ ID NO: 1370479 - DNA, 15 bp, Homo sapiens
ctggtgagttcaatt

SEQ ID NO: 1370480 - DNA, 15 bp, Homo sapiens
actggtgagttcaat

SEQ ID NO: 1370481 - DNA, 15 bp, Homo sapiens
aactggtgagttcaa

SEQ ID NO: 1370482 - DNA, 15 bp, Homo sapiens
gaactggtgagttca

SEQ ID NO: 1370483 - DNA, 15 bp, Homo sapiens
ggaactggtgagttc

SEQ ID NO: 1370484 - DNA, 15 bp, Homo sapiens
gggaactggtgagtt

SEQ ID NO: 1370485 - DNA, 15 bp, Homo sapiens
ggggaactggtgagt

SEQ ID NO: 1370486 - DNA, 15 bp, Homo sapiens
aggggaactggtgag

SEQ ID NO: 1370487 - DNA, 15 bp, Homo sapiens
caggggaactggtga

SEQ ID NO: 1370488 - DNA, 15 bp, Homo sapiens
ccaggggaactggtg

SEQ ID NO: 1370489 - DNA, 15 bp, Homo sapiens
tccaggggaactggt

SEQ ID NO: 1370490 - DNA, 15 bp, Homo sapiens
ctccaggggaactgg

SEQ ID NO: 1370491 - DNA, 15 bp, Homo sapiens
gctccaggggaactg

SEQ ID NO: 1370492 - DNA, 15 bp, Homo sapiens
agctccaggggaact

SEQ ID NO: 1370493 - DNA, 15 bp, Homo sapiens
cagctccaggggaac

SEQ ID NO: 1370494 - DNA, 15 bp, Homo sapiens
acagctccaggggaa

SEQ ID NO: 1370495 - DNA, 15 bp, Homo sapiens
aacagctccagggga

SEQ ID NO: 1370496 - DNA, 15 bp, Homo sapiens
caacagctccagggg

SEQ ID NO: 1370497 - DNA, 15 bp, Homo sapiens
acaacagctccaggg

SEQ ID NO: 1370498 - DNA, 15 bp, Homo sapiens
cacaacagctccagg

SEQ ID NO: 1370499 - DNA, 15 bp, Homo sapiens
ccacaacagctccag

SEQ ID NO: 1370500 - DNA, 15 bp, Homo sapiens
accacaacagctcca

SEQ ID NO: 1370501 - DNA, 15 bp, Homo sapiens
aaccacaacagctcc

SEQ ID NO: 1370502 - DNA, 15 bp, Homo sapiens
gaaccacaacagctc

SEQ ID NO: 1370503 - DNA, 15 bp, Homo sapiens
tgaaccacaacagct

SEQ ID NO: 1370504 - DNA, 15 bp, Homo sapiens
ttgaaccacaacagc

SEQ ID NO: 1370505 - DNA, 15 bp, Homo sapiens
tttgaaccacaacag

SEQ ID NO: 1370506 - DNA, 15 bp, Homo sapiens
ttttgaaccacaaca

SEQ ID NO: 1370507 - DNA, 15 bp, Homo sapiens
tttttgaaccacaac

SEQ ID NO: 1370508 - DNA, 15 bp, Homo sapiens
atttttgaaccacaa

SEQ ID NO: 1370509 - DNA, 15 bp, Homo sapiens
catttttgaaccaca

SEQ ID NO: 1370510 - DNA, 15 bp, Homo sapiens
tcatttttgaaccac

SEQ ID NO: 1370511 - DNA, 15 bp, Homo sapiens
ctcatttttgaacca

SEQ ID NO: 1370512 - DNA, 15 bp, Homo sapiens
actcatttttgaacc

SEQ ID NO: 1370513 - DNA, 15 bp, Homo sapiens
gactcatttttgaac

SEQ ID NO: 1370514 - DNA, 15 bp, Homo sapiens
ggactcatttttgaa

SEQ ID NO: 1370515 - DNA, 15 bp, Homo sapiens
gggactcatttttga

SEQ ID NO: 1370516 - DNA, 15 bp, Homo sapiens
tgggactcatttttg

SEQ ID NO: 1370517 - DNA, 15 bp, Homo sapiens
ctgggactcattttt

SEQ ID NO: 1370518 - DNA, 15 bp, Homo sapiens
actgggactcatttt

SEQ ID NO: 1370519 - DNA, 15 bp, Homo sapiens
cactgggactcattt

SEQ ID NO: 1370520 - DNA, 15 bp, Homo sapiens
acactgggactcatt

SEQ ID NO: 1370521 - DNA, 15 bp, Homo sapiens
cacactgggactcat

SEQ ID NO: 1370522 - DNA, 15 bp, Homo sapiens
gcacactgggactca

SEQ ID NO: 1370523 - DNA, 15 bp, Homo sapiens
tgcacactgggactc

SEQ ID NO: 1370524 - DNA, 15 bp, Homo sapiens
ttgcacactgggact

SEQ ID NO: 1370525 - DNA, 15 bp, Homo sapiens
attgcacactgggac

SEQ ID NO: 1370526 - DNA, 15 bp, Homo sapiens
cattgcacactggga

SEQ ID NO: 1370527 - DNA, 15 bp, Homo sapiens
ccattgcacactggg

SEQ ID NO: 1370528 - DNA, 15 bp, Homo sapiens
gccattgcacactgg

SEQ ID NO: 1370529 - DNA, 15 bp, Homo sapiens
ggccattgcacactg

SEQ ID NO: 1370530 - DNA, 15 bp, Homo sapiens
gggccattgcacact

SEQ ID NO: 1370531 - DNA, 15 bp, Homo sapiens
tgggccattgcacac

SEQ ID NO: 1370532 - DNA, 15 bp, Homo sapiens
atgggccattgcaca

SEQ ID NO: 1370533 - DNA, 15 bp, Homo sapiens
catgggccattgcac

SEQ ID NO: 1370534 - DNA, 15 bp, Homo sapiens
gcatgggccattgca

SEQ ID NO: 1370535 - DNA, 15 bp, Homo sapiens
tgcatgggccattgc

SEQ ID NO: 1370536 - DNA, 15 bp, Homo sapiens
ttgcatgggccattg

SEQ ID NO: 1370537 - DNA, 15 bp, Homo sapiens
cttgcatgggccatt

SEQ ID NO: 1370538 - DNA, 15 bp, Homo sapiens
ccttgcatgggccat

SEQ ID NO: 1370539 - DNA, 15 bp, Homo sapiens
accttgcatgggcca

SEQ ID NO: 1370540 - DNA, 15 bp, Homo sapiens
gaccttgcatgggcc

SEQ ID NO: 1370541 - DNA, 15 bp, Homo sapiens
cgaccttgcatgggc

SEQ ID NO: 1370542 - DNA, 15 bp, Homo sapiens
ccgaccttgcatggg

SEQ ID NO: 1370543 - DNA, 15 bp, Homo sapiens
accgaccttgcatgg

SEQ ID NO: 1370544 - DNA, 15 bp, Homo sapiens
caccgaccttgcatg

SEQ ID NO: 1370545 - DNA, 15 bp, Homo sapiens
gcaccgaccttgcat

SEQ ID NO: 1370546 - DNA, 15 bp, Homo sapiens
ggcaccgaccttgca

SEQ ID NO: 1370547 - DNA, 15 bp, Homo sapiens
aggcaccgaccttgc

SEQ ID NO: 1370548 - DNA, 15 bp, Homo sapiens
aaggcaccgaccttg

SEQ ID NO: 1370549 - DNA, 15 bp, Homo sapiens
aaaggcaccgacctt

SEQ ID NO: 1370550 - DNA, 15 bp, Homo sapiens
gaaaggcaccgacct

SEQ ID NO: 1370551 - DNA, 15 bp, Homo sapiens
ggaaaggcaccgacc

SEQ ID NO: 1370552 - DNA, 15 bp, Homo sapiens
aggaaaggcaccgac

SEQ ID NO: 1370553 - DNA, 15 bp, Homo sapiens
gaggaaaggcaccga

SEQ ID NO: 1370554 - DNA, 15 bp, Homo sapiens
agaggaaaggcaccg

SEQ ID NO: 1370555 - DNA, 15 bp, Homo sapiens
cagaggaaaggcacc

SEQ ID NO: 1370556 - DNA, 15 bp, Homo sapiens
tcagaggaaaggcac

SEQ ID NO: 1370557 - DNA, 15 bp, Homo sapiens
ttcagaggaaaggca

SEQ ID NO: 1370558 - DNA, 15 bp, Homo sapiens
cttcagaggaaaggc

SEQ ID NO: 1370559 - DNA, 15 bp, Homo sapiens
tcttcagaggaaagg

SEQ ID NO: 1370560 - DNA, 15 bp, Homo sapiens
atcttcagaggaaag

SEQ ID NO: 1370561 - DNA, 15 bp, Homo sapiens
gatcttcagaggaaa

SEQ ID NO: 1370562 - DNA, 15 bp, Homo sapiens
agatcttcagaggaa

SEQ ID NO: 1370563 - DNA, 15 bp, Homo sapiens
cagatcttcagagga

SEQ ID NO: 1370564 - DNA, 15 bp, Homo sapiens
tcagatcttcagagg

SEQ ID NO: 1370565 - DNA, 15 bp, Homo sapiens
ttcagatcttcagag

SEQ ID NO: 1370566 - DNA, 15 bp, Homo sapiens
tttcagatcttcaga

SEQ ID NO: 1370567 - DNA, 15 bp, Homo sapiens
ctttcagatcttcag

SEQ ID NO: 1370568 - DNA, 15 bp, Homo sapiens
actttcagatcttca

SEQ ID NO: 1370569 - DNA, 15 bp, Homo sapiens
aactttcagatcttc

SEQ ID NO: 1370570 - DNA, 15 bp, Homo sapiens
gaactttcagatctt

SEQ ID NO: 1370571 - DNA, 15 bp, Homo sapiens
agaactttcagatct

SEQ ID NO: 1370572 - DNA, 15 bp, Homo sapiens
cagaactttcagatc

SEQ ID NO: 1370573 - DNA, 15 bp, Homo sapiens
ccagaactttcagat

SEQ ID NO: 1370574 - DNA, 15 bp, Homo sapiens
gccagaactttcaga

SEQ ID NO: 1370575 - DNA, 15 bp, Homo sapiens
ggccagaactttcag

SEQ ID NO: 1370576 - DNA, 15 bp, Homo sapiens
aggccagaactttca

SEQ ID NO: 1370577 - DNA, 15 bp, Homo sapiens
aaggccagaactttc

SEQ ID NO: 1370578 - DNA, 15 bp, Homo sapiens
aaaggccagaacttt

SEQ ID NO: 1370579 - DNA, 15 bp, Homo sapiens
aaaaggccagaactt

SEQ ID NO: 1370580 - DNA, 15 bp, Homo sapiens
aaaaaggccagaact

SEQ ID NO: 1370581 - DNA, 15 bp, Homo sapiens
gaaaaaggccagaac

SEQ ID NO: 1370582 - DNA, 15 bp, Homo sapiens
ggaaaaaggccagaa

SEQ ID NO: 1370583 - DNA, 15 bp, Homo sapiens
tggaaaaaggccaga

SEQ ID NO: 1370584 - DNA, 15 bp, Homo sapiens
ctggaaaaaggccag

SEQ ID NO: 1370585 - DNA, 15 bp, Homo sapiens
gctggaaaaaggcca

SEQ ID NO: 1370586 - DNA, 15 bp, Homo sapiens
tgctggaaaaaggcc

SEQ ID NO: 1370587 - DNA, 15 bp, Homo sapiens
ctgctggaaaaaggc

SEQ ID NO: 1370588 - DNA, 15 bp, Homo sapiens
gctgctggaaaaagg

SEQ ID NO: 1370589 - DNA, 15 bp, Homo sapiens
agctgctggaaaaag

SEQ ID NO: 1370590 - DNA, 15 bp, Homo sapiens
gagctgctggaaaaa

SEQ ID NO: 1370591 - DNA, 15 bp, Homo sapiens
agagctgctggaaaa

SEQ ID NO: 1370592 - DNA, 15 bp, Homo sapiens
tagagctgctggaaa

SEQ ID NO: 1370593 - DNA, 15 bp, Homo sapiens
ctagagctgctggaa

SEQ ID NO: 1370594 - DNA, 15 bp, Homo sapiens
cctagagctgctgga

SEQ ID NO: 1370595 - DNA, 15 bp, Homo sapiens
gcctagagctgctgg

SEQ ID NO: 1370596 - DNA, 15 bp, Homo sapiens
tgcctagagctgctg

SEQ ID NO: 1370597 - DNA, 15 bp, Homo sapiens
atgcctagagctgct

SEQ ID NO: 1370598 - DNA, 15 bp, Homo sapiens
gatgcctagagctgc

SEQ ID NO: 1370599 - DNA, 15 bp, Homo sapiens
agatgcctagagctg

SEQ ID NO: 1370600 - DNA, 15 bp, Homo sapiens
tagatgcctagagct

SEQ ID NO: 1370601 - DNA, 15 bp, Homo sapiens
atagatgcctagagc

SEQ ID NO: 1370602 - DNA, 15 bp, Homo sapiens
gatagatgcctagag

SEQ ID NO: 1370603 - DNA, 15 bp, Homo sapiens
ggatagatgcctaga

SEQ ID NO: 1370604 - DNA, 15 bp, Homo sapiens
tggatagatgcctag

SEQ ID NO: 1370605 - DNA, 15 bp, Homo sapiens
ttggatagatgccta

SEQ ID NO: 1370606 - DNA, 15 bp, Homo sapiens
cttggatagatgcct

SEQ ID NO: 1370607 - DNA, 15 bp, Homo sapiens
gcttggatagatgcc

SEQ ID NO: 1370608 - DNA, 15 bp, Homo sapiens
ggcttggatagatgc

SEQ ID NO: 1370609 - DNA, 15 bp, Homo sapiens
tggcttggatagatg

SEQ ID NO: 1370610 - DNA, 15 bp, Homo sapiens
ctggcttggatagat

SEQ ID NO: 1370611 - DNA, 15 bp, Homo sapiens
actggcttggataga

SEQ ID NO: 1370612 - DNA, 15 bp, Homo sapiens
tactggcttggatag

SEQ ID NO: 1370613 - DNA, 15 bp, Homo sapiens
atactggcttggata

SEQ ID NO: 1370614 - DNA, 15 bp, Homo sapiens
aatactggcttggat

SEQ ID NO: 1370615 - DNA, 15 bp, Homo sapiens
taatactggcttgga

SEQ ID NO: 1370616 - DNA, 15 bp, Homo sapiens
gtaatactggcttgg

SEQ ID NO: 1370617 - DNA, 15 bp, Homo sapiens
ggtaatactggcttg

SEQ ID NO: 1370618 - DNA, 15 bp, Homo sapiens
tggtaatactggctt

SEQ ID NO: 1370619 - DNA, 15 bp, Homo sapiens
ttggtaatactggct

SEQ ID NO: 1370620 - DNA, 15 bp, Homo sapiens
cttggtaatactggc

SEQ ID NO: 1370621 - DNA, 15 bp, Homo sapiens
tcttggtaatactgg

SEQ ID NO: 1370622 - DNA, 15 bp, Homo sapiens
atcttggtaatactg

SEQ ID NO: 1370623 - DNA, 15 bp, Homo sapiens
catcttggtaatact

SEQ ID NO: 1370624 - DNA, 15 bp, Homo sapiens
tcatcttggtaatac

SEQ ID NO: 1370625 - DNA, 15 bp, Homo sapiens
gtcatcttggtaata

SEQ ID NO: 1370626 - DNA, 15 bp, Homo sapiens
agtcatcttggtaat

SEQ ID NO: 1370627 - DNA, 15 bp, Homo sapiens
cagtcatcttggtaa

SEQ ID NO: 1370628 - DNA, 15 bp, Homo sapiens
tcagtcatcttggta

SEQ ID NO: 1370629 - DNA, 15 bp, Homo sapiens
ctcagtcatcttggt

SEQ ID NO: 1370630 - DNA, 15 bp, Homo sapiens
tctcagtcatcttgg

SEQ ID NO: 1370631 - DNA, 15 bp, Homo sapiens
ctctcagtcatcttg

SEQ ID NO: 1370632 - DNA, 15 bp, Homo sapiens
actctcagtcatctt

SEQ ID NO: 1370633 - DNA, 15 bp, Homo sapiens
aactctcagtcatct

SEQ ID NO: 1370634 - DNA, 15 bp, Homo sapiens
gaactctcagtcatc

SEQ ID NO: 1370635 - DNA, 15 bp, Homo sapiens
agaactctcagtcat

SEQ ID NO: 1370636 - DNA, 15 bp, Homo sapiens
aagaactctcagtca

SEQ ID NO: 1370637 - DNA, 15 bp, Homo sapiens
caagaactctcagtc

SEQ ID NO: 1370638 - DNA, 15 bp, Homo sapiens
tcaagaactctcagt

SEQ ID NO: 1370639 - DNA, 15 bp, Homo sapiens
gtcaagaactctcag

SEQ ID NO: 1370640 - DNA, 15 bp, Homo sapiens
agtcaagaactctca

SEQ ID NO: 1370641 - DNA, 15 bp, Homo sapiens
gagtcaagaactctc

SEQ ID NO: 1370642 - DNA, 15 bp, Homo sapiens
tgagtcaagaactct

SEQ ID NO: 1370643 - DNA, 15 bp, Homo sapiens
ttgagtcaagaactc

SEQ ID NO: 1370644 - DNA, 15 bp, Homo sapiens
cttgagtcaagaact

SEQ ID NO: 1370645 - DNA, 15 bp, Homo sapiens
gcttgagtcaagaac

SEQ ID NO: 1370646 - DNA, 15 bp, Homo sapiens
ggcttgagtcaagaa

SEQ ID NO: 1370647 - DNA, 15 bp, Homo sapiens
aggcttgagtcaaga

SEQ ID NO: 1370648 - DNA, 15 bp, Homo sapiens
taggcttgagtcaag

SEQ ID NO: 1370649 - DNA, 15 bp, Homo sapiens
gtaggcttgagtcaa

SEQ ID NO: 1370650 - DNA, 15 bp, Homo sapiens
tgtaggcttgagtca

SEQ ID NO: 1370651 - DNA, 15 bp, Homo sapiens
ctgtaggcttgagtc

SEQ ID NO: 1370652 - DNA, 15 bp, Homo sapiens
tctgtaggcttgagt

SEQ ID NO: 1370653 - DNA, 15 bp, Homo sapiens
ttctgtaggcttgag

SEQ ID NO: 1370654 - DNA, 15 bp, Homo sapiens
cttctgtaggcttga

SEQ ID NO: 1370655 - DNA, 15 bp, Homo sapiens
tcttctgtaggcttg

SEQ ID NO: 1370656 - DNA, 15 bp, Homo sapiens
gtcttctgtaggctt

SEQ ID NO: 1370657 - DNA, 15 bp, Homo sapiens
tgtcttctgtaggct

SEQ ID NO: 1370658 - DNA, 15 bp, Homo sapiens
gtgtcttctgtaggc

SEQ ID NO: 1370659 - DNA, 15 bp, Homo sapiens
agtgtcttctgtagg

SEQ ID NO: 1370660 - DNA, 15 bp, Homo sapiens
gagtgtcttctgtag

SEQ ID NO: 1370661 - DNA, 15 bp, Homo sapiens
tgagtgtcttctgta

SEQ ID NO: 1370662 - DNA, 15 bp, Homo sapiens
gtgagtgtcttctgt

SEQ ID NO: 1370663 - DNA, 15 bp, Homo sapiens
agtgagtgtcttctg

SEQ ID NO: 1370664 - DNA, 15 bp, Homo sapiens
aagtgagtgtcttct

SEQ ID NO: 1370665 - DNA, 15 bp, Homo sapiens
aaagtgagtgtcttc

SEQ ID NO: 1370666 - DNA, 15 bp, Homo sapiens
caaagtgagtgtctt

SEQ ID NO: 1370667 - DNA, 15 bp, Homo sapiens
gcaaagtgagtgtct

SEQ ID NO: 1370668 - DNA, 15 bp, Homo sapiens
ggcaaagtgagtgtc

SEQ ID NO: 1370669 - DNA, 15 bp, Homo sapiens
aggcaaagtgagtgt

SEQ ID NO: 1370670 - DNA, 15 bp, Homo sapiens
gaggcaaagtgagtg

SEQ ID NO: 1370671 - DNA, 15 bp, Homo sapiens
agaggcaaagtgagt

SEQ ID NO: 1370672 - DNA, 15 bp, Homo sapiens
aagaggcaaagtgag

SEQ ID NO: 1370673 - DNA, 15 bp, Homo sapiens
aaagaggcaaagtga

SEQ ID NO: 1370674 - DNA, 15 bp, Homo sapiens
aaaagaggcaaagtg

SEQ ID NO: 1370675 - DNA, 15 bp, Homo sapiens
taaaagaggcaaagt

SEQ ID NO: 1370676 - DNA, 15 bp, Homo sapiens
ttaaaagaggcaaag

SEQ ID NO: 1370677 - DNA, 15 bp, Homo sapiens
attaaaagaggcaaa

SEQ ID NO: 1370678 - DNA, 15 bp, Homo sapiens
aattaaaagaggcaa

SEQ ID NO: 1370679 - DNA, 15 bp, Homo sapiens
aaattaaaagaggca

SEQ ID NO: 1370680 - DNA, 15 bp, Homo sapiens
aaaattaaaagaggc

SEQ ID NO: 1370681 - DNA, 15 bp, Homo sapiens
gaaaattaaaagagg

SEQ ID NO: 1370682 - DNA, 15 bp, Homo sapiens
tgaaaattaaaagag

SEQ ID NO: 1370683 - DNA, 15 bp, Homo sapiens
ttgaaaattaaaaga

SEQ ID NO: 1370684 - DNA, 15 bp, Homo sapiens
tttgaaaattaaaag

SEQ ID NO: 1370685 - DNA, 15 bp, Homo sapiens
ttttgaaaattaaaa

SEQ ID NO: 1370686 - DNA, 15 bp, Homo sapiens
attttgaaaattaaa

SEQ ID NO: 1370687 - DNA, 15 bp, Homo sapiens
tattttgaaaattaa

SEQ ID NO: 1370688 - DNA, 15 bp, Homo sapiens
ttattttgaaaatta

SEQ ID NO: 1370689 - DNA, 15 bp, Homo sapiens
attattttgaaaatt

SEQ ID NO: 1370690 - DNA, 15 bp, Homo sapiens
aattattttgaaaat

SEQ ID NO: 1370691 - DNA, 15 bp, Homo sapiens
gaattattttgaaaa

SEQ ID NO: 1370692 - DNA, 15 bp, Homo sapiens
agaattattttgaaa

SEQ ID NO: 1370693 - DNA, 15 bp, Homo sapiens
cagaattattttgaa

SEQ ID NO: 1370694 - DNA, 15 bp, Homo sapiens
acagaattattttga

SEQ ID NO: 1370695 - DNA, 15 bp, Homo sapiens
cacagaattattttg

SEQ ID NO: 1370696 - DNA, 15 bp, Homo sapiens
gcacagaattatttt

SEQ ID NO: 1370697 - DNA, 15 bp, Homo sapiens
tgcacagaattattt

SEQ ID NO: 1370698 - DNA, 15 bp, Homo sapiens
ctgcacagaattatt

SEQ ID NO: 1370699 - DNA, 15 bp, Homo sapiens
tctgcacagaattat

SEQ ID NO: 1370700 - DNA, 15 bp, Homo sapiens
atctgcacagaatta

SEQ ID NO: 1370701 - DNA, 15 bp, Homo sapiens
tatctgcacagaatt

SEQ ID NO: 1370702 - DNA, 15 bp, Homo sapiens
atatctgcacagaat

SEQ ID NO: 1370703 - DNA, 15 bp, Homo sapiens
tatatctgcacagaa

SEQ ID NO: 1370704 - DNA, 15 bp, Homo sapiens
ttatatctgcacaga

SEQ ID NO: 1370705 - DNA, 15 bp, Homo sapiens
attatatctgcacag

SEQ ID NO: 1370706 - DNA, 15 bp, Homo sapiens
aattatatctgcaca

SEQ ID NO: 1370707 - DNA, 15 bp, Homo sapiens
taattatatctgcac

SEQ ID NO: 1370708 - DNA, 15 bp, Homo sapiens
gtaattatatctgca

SEQ ID NO: 1370709 - DNA, 15 bp, Homo sapiens
tgtaattatatctgc

SEQ ID NO: 1370710 - DNA, 15 bp, Homo sapiens
atgtaattatatctg

SEQ ID NO: 1370711 - DNA, 15 bp, Homo sapiens
aatgtaattatatct

SEQ ID NO: 1370712 - DNA, 15 bp, Homo sapiens
taatgtaattatatc

SEQ ID NO: 1370713 - DNA, 15 bp, Homo sapiens
ttaatgtaattatat

SEQ ID NO: 1370714 - DNA, 15 bp, Homo sapiens
attaatgtaattata

SEQ ID NO: 1370715 - DNA, 15 bp, Homo sapiens
aattaatgtaattat

SEQ ID NO: 1370716 - DNA, 15 bp, Homo sapiens
aaattaatgtaatta

SEQ ID NO: 1370717 - DNA, 15 bp, Homo sapiens
aaaattaatgtaatt

SEQ ID NO: 1370718 - DNA, 15 bp, Homo sapiens
taaaattaatgtaat

SEQ ID NO: 1370719 - DNA, 15 bp, Homo sapiens
gtaaaattaatgtaa

SEQ ID NO: 1370720 - DNA, 15 bp, Homo sapiens
tgtaaaattaatgta

SEQ ID NO: 1370721 - DNA, 15 bp, Homo sapiens
ttgtaaaattaatgt

SEQ ID NO: 1370722 - DNA, 15 bp, Homo sapiens
attgtaaaattaatg

SEQ ID NO: 1370723 - DNA, 15 bp, Homo sapiens
cattgtaaaattaat

SEQ ID NO: 1370724 - DNA, 15 bp, Homo sapiens
gcattgtaaaattaa

SEQ ID NO: 1370725 - DNA, 15 bp, Homo sapiens
tgcattgtaaaatta

SEQ ID NO: 1370726 - DNA, 15 bp, Homo sapiens
ttgcattgtaaaatt

SEQ ID NO: 1370727 - DNA, 15 bp, Homo sapiens
tttgcattgtaaaat

SEQ ID NO: 1370728 - DNA, 15 bp, Homo sapiens
atttgcattgtaaaa

SEQ ID NO: 1370729 - DNA, 15 bp, Homo sapiens
tatttgcattgtaaa

SEQ ID NO: 1370730 - DNA, 15 bp, Homo sapiens
atatttgcattgtaa

SEQ ID NO: 1370731 - DNA, 15 bp, Homo sapiens
aatatttgcattgta

SEQ ID NO: 1370732 - DNA, 15 bp, Homo sapiens
taatatttgcattgt

SEQ ID NO: 1370733 - DNA, 15 bp, Homo sapiens
ttaatatttgcattg

SEQ ID NO: 1370734 - DNA, 15 bp, Homo sapiens
attaatatttgcatt

SEQ ID NO: 1370735 - DNA, 15 bp, Homo sapiens
cattaatatttgcat

SEQ ID NO: 1370736 - DNA, 15 bp, Homo sapiens
gcattaatatttgca

SEQ ID NO: 1370737 - DNA, 15 bp, Homo sapiens
ggcattaatatttgc

SEQ ID NO: 1370738 - DNA, 15 bp, Homo sapiens
gggcattaatatttg

SEQ ID NO: 1370739 - DNA, 15 bp, Homo sapiens
tgggcattaatattt

SEQ ID NO: 1370740 - DNA, 15 bp, Homo sapiens
atgggcattaatatt

SEQ ID NO: 1370741 - DNA, 15 bp, Homo sapiens
catgggcattaatat

SEQ ID NO: 1370742 - DNA, 15 bp, Homo sapiens
acatgggcattaata

SEQ ID NO: 1370743 - DNA, 15 bp, Homo sapiens
aacatgggcattaat

SEQ ID NO: 1370744 - DNA, 15 bp, Homo sapiens
taacatgggcattaa

SEQ ID NO: 1370745 - DNA, 15 bp, Homo sapiens
ctaacatgggcatta

SEQ ID NO: 1370746 - DNA, 15 bp, Homo sapiens
actaacatgggcatt

SEQ ID NO: 1370747 - DNA, 15 bp, Homo sapiens
aactaacatgggcat

SEQ ID NO: 1370748 - DNA, 15 bp, Homo sapiens
caactaacatgggca

SEQ ID NO: 1370749 - DNA, 15 bp, Homo sapiens
gcaactaacatgggc

SEQ ID NO: 1370750 - DNA, 15 bp, Homo sapiens
agcaactaacatggg

SEQ ID NO: 1370751 - DNA, 15 bp, Homo sapiens
aagcaactaacatgg

SEQ ID NO: 1370752 - DNA, 15 bp, Homo sapiens
taagcaactaacatg

SEQ ID NO: 1370753 - DNA, 15 bp, Homo sapiens
ataagcaactaacat

SEQ ID NO: 1370754 - DNA, 15 bp, Homo sapiens
cataagcaactaaca

SEQ ID NO: 1370755 - DNA, 15 bp, Homo sapiens
ccataagcaactaac

SEQ ID NO: 1370756 - DNA, 15 bp, Homo sapiens
tccataagcaactaa

SEQ ID NO: 1370757 - DNA, 15 bp, Homo sapiens
atccataagcaacta

SEQ ID NO: 1370758 - DNA, 15 bp, Homo sapiens
tatccataagcaact

SEQ ID NO: 1370759 - DNA, 15 bp, Homo sapiens
gtatccataagcaac

SEQ ID NO: 1370760 - DNA, 15 bp, Homo sapiens
agtatccataagcaa

SEQ ID NO: 1370761 - DNA, 15 bp, Homo sapiens
tagtatccataagca

SEQ ID NO: 1370762 - DNA, 15 bp, Homo sapiens
ttagtatccataagc

SEQ ID NO: 1370763 - DNA, 15 bp, Homo sapiens
tttagtatccataag

SEQ ID NO: 1370764 - DNA, 15 bp, Homo sapiens
gtttagtatccataa

SEQ ID NO: 1370765 - DNA, 15 bp, Homo sapiens
agtttagtatccata

SEQ ID NO: 1370766 - DNA, 15 bp, Homo sapiens
tagtttagtatccat

SEQ ID NO: 1370767 - DNA, 15 bp, Homo sapiens
ctagtttagtatcca

SEQ ID NO: 1370768 - DNA, 15 bp, Homo sapiens
gctagtttagtatcc

SEQ ID NO: 1370769 - DNA, 15 bp, Homo sapiens
agctagtttagtatc

SEQ ID NO: 1370770 - DNA, 15 bp, Homo sapiens
aagctagtttagtat

SEQ ID NO: 1370771 - DNA, 15 bp, Homo sapiens
taagctagtttagta

SEQ ID NO: 1370772 - DNA, 15 bp, Homo sapiens
ttaagctagtttagt

SEQ ID NO: 1370773 - DNA, 15 bp, Homo sapiens
tttaagctagtttag

SEQ ID NO: 1370774 - DNA, 15 bp, Homo sapiens
ttttaagctagttta

SEQ ID NO: 1370775 - DNA, 15 bp, Homo sapiens
tttttaagctagttt

SEQ ID NO: 1370776 - DNA, 15 bp, Homo sapiens
ttttttaagctagtt

SEQ ID NO: 1370777 - DNA, 15 bp, Homo sapiens
tttttttaagctagt

SEQ ID NO: 1370778 - DNA, 15 bp, Homo sapiens
atttttttaagctag

SEQ ID NO: 1370779 - DNA, 15 bp, Homo sapiens
tatttttttaagcta

SEQ ID NO: 1370780 - DNA, 15 bp, Homo sapiens
gtatttttttaagct

SEQ ID NO: 1370781 - DNA, 15 bp, Homo sapiens
ggtatttttttaagc

SEQ ID NO: 1370782 - DNA, 15 bp, Homo sapiens
tggtatttttttaag

SEQ ID NO: 1370783 - DNA, 15 bp, Homo sapiens
ctggtatttttttaa

SEQ ID NO: 1370784 - DNA, 15 bp, Homo sapiens
tctggtattttttta

SEQ ID NO: 1370785 - DNA, 15 bp, Homo sapiens
atctggtattttttt

SEQ ID NO: 1370786 - DNA, 15 bp, Homo sapiens
gatctggtatttttt

SEQ ID NO: 1370787 - DNA, 15 bp, Homo sapiens
agatctggtattttt

SEQ ID NO: 1370788 - DNA, 15 bp, Homo sapiens
aagatctggtatttt

SEQ ID NO: 1370789 - DNA, 15 bp, Homo sapiens
gaagatctggtattt

SEQ ID NO: 1370790 - DNA, 15 bp, Homo sapiens
agaagatctggtatt

SEQ ID NO: 1370791 - DNA, 15 bp, Homo sapiens
gagaagatctggtat

SEQ ID NO: 1370792 - DNA, 15 bp, Homo sapiens
tgagaagatctggta

SEQ ID NO: 1370793 - DNA, 15 bp, Homo sapiens
gtgagaagatctggt

SEQ ID NO: 1370794 - DNA, 15 bp, Homo sapiens
tgtgagaagatctgg

SEQ ID NO: 1370795 - DNA, 15 bp, Homo sapiens
ttgtgagaagatctg

SEQ ID NO: 1370796 - DNA, 15 bp, Homo sapiens
gttgtgagaagatct

SEQ ID NO: 1370797 - DNA, 15 bp, Homo sapiens
ggttgtgagaagatc

SEQ ID NO: 1370798 - DNA, 15 bp, Homo sapiens
tggttgtgagaagat

SEQ ID NO: 1370799 - DNA, 15 bp, Homo sapiens
ttggttgtgagaaga

SEQ ID NO: 1370800 - DNA, 15 bp, Homo sapiens
attggttgtgagaag

SEQ ID NO: 1370801 - DNA, 15 bp, Homo sapiens
aattggttgtgagaa

SEQ ID NO: 1370802 - DNA, 15 bp, Homo sapiens
gaattggttgtgaga

SEQ ID NO: 1370803 - DNA, 15 bp, Homo sapiens
tgaattggttgtgag

SEQ ID NO: 1370804 - DNA, 15 bp, Homo sapiens
ctgaattggttgtga

SEQ ID NO: 1370805 - DNA, 15 bp, Homo sapiens
actgaattggttgtg

SEQ ID NO: 1370806 - DNA, 15 bp, Homo sapiens
tactgaattggttgt

SEQ ID NO: 1370807 - DNA, 15 bp, Homo sapiens
gtactgaattggttg

SEQ ID NO: 1370808 - DNA, 15 bp, Homo sapiens
agtactgaattggtt

SEQ ID NO: 1370809 - DNA, 15 bp, Homo sapiens
aagtactgaattggt

SEQ ID NO: 1370810 - DNA, 15 bp, Homo sapiens
taagtactgaattgg

SEQ ID NO: 1370811 - DNA, 15 bp, Homo sapiens
ataagtactgaattg

SEQ ID NO: 1370812 - DNA, 15 bp, Homo sapiens
gataagtactgaatt

SEQ ID NO: 1370813 - DNA, 15 bp, Homo sapiens
agataagtactgaat

SEQ ID NO: 1370814 - DNA, 15 bp, Homo sapiens
gagataagtactgaa

SEQ ID NO: 1370815 - DNA, 15 bp, Homo sapiens
ggagataagtactga

SEQ ID NO: 1370816 - DNA, 15 bp, Homo sapiens
aggagataagtactg

SEQ ID NO: 1370817 - DNA, 15 bp, Homo sapiens
taggagataagtact

SEQ ID NO: 1370818 - DNA, 15 bp, Homo sapiens
ataggagataagtac

SEQ ID NO: 1370819 - DNA, 15 bp, Homo sapiens
gataggagataagta

SEQ ID NO: 1370820 - DNA, 15 bp, Homo sapiens
tgataggagataagt

SEQ ID NO: 1370821 - DNA, 15 bp, Homo sapiens
ttgataggagataag

SEQ ID NO: 1370822 - DNA, 15 bp, Homo sapiens
gttgataggagataa

SEQ ID NO: 1370823 - DNA, 15 bp, Homo sapiens
agttgataggagata

SEQ ID NO: 1370824 - DNA, 15 bp, Homo sapiens
tagttgataggagat

SEQ ID NO: 1370825 - DNA, 15 bp, Homo sapiens
ttagttgataggaga

SEQ ID NO: 1370826 - DNA, 15 bp, Homo sapiens
tttagttgataggag

SEQ ID NO: 1370827 - DNA, 15 bp, Homo sapiens
atttagttgatagga

SEQ ID NO: 1370828 - DNA, 15 bp, Homo sapiens
tatttagttgatagg

SEQ ID NO: 1370829 - DNA, 15 bp, Homo sapiens
ttatttagttgatag

SEQ ID NO: 1370830 - DNA, 15 bp, Homo sapiens
attatttagttgata

SEQ ID NO: 1370831 - DNA, 15 bp, Homo sapiens
aattatttagttgat

SEQ ID NO: 1370832 - DNA, 15 bp, Homo sapiens
gaattatttagttga

SEQ ID NO: 1370833 - DNA, 15 bp, Homo sapiens
ggaattatttagttg

SEQ ID NO: 1370834 - DNA, 15 bp, Homo sapiens
tggaattatttagtt

SEQ ID NO: 1370835 - DNA, 15 bp, Homo sapiens
gtggaattatttagt

SEQ ID NO: 1370836 - DNA, 15 bp, Homo sapiens
agtggaattatttag

SEQ ID NO: 1370837 - DNA, 15 bp, Homo sapiens
aagtggaattattta

SEQ ID NO: 1370838 - DNA, 15 bp, Homo sapiens
gaagtggaattattt

SEQ ID NO: 1370839 - DNA, 15 bp, Homo sapiens
tgaagtggaattatt

SEQ ID NO: 1370840 - DNA, 15 bp, Homo sapiens
gtgaagtggaattat

SEQ ID NO: 1370841 - DNA, 15 bp, Homo sapiens
agtgaagtggaatta

SEQ ID NO: 1370842 - DNA, 15 bp, Homo sapiens
cagtgaagtggaatt

SEQ ID NO: 1370843 - DNA, 15 bp, Homo sapiens
acagtgaagtggaat

SEQ ID NO: 1370844 - DNA, 15 bp, Homo sapiens
gacagtgaagtggaa

SEQ ID NO: 1370845 - DNA, 15 bp, Homo sapiens
agacagtgaagtgga

SEQ ID NO: 1370846 - DNA, 15 bp, Homo sapiens
tagacagtgaagtgg

SEQ ID NO: 1370847 - DNA, 15 bp, Homo sapiens
ttagacagtgaagtg

SEQ ID NO: 1370848 - DNA, 15 bp, Homo sapiens
tttagacagtgaagt

SEQ ID NO: 1370849 - DNA, 15 bp, Homo sapiens
ttttagacagtgaag

SEQ ID NO: 1370850 - DNA, 15 bp, Homo sapiens
gttttagacagtgaa

SEQ ID NO: 1370851 - DNA, 15 bp, Homo sapiens
tgttttagacagtga

SEQ ID NO: 1370852 - DNA, 15 bp, Homo sapiens
atgttttagacagtg

SEQ ID NO: 1370853 - DNA, 15 bp, Homo sapiens
aatgttttagacagt

SEQ ID NO: 1370854 - DNA, 15 bp, Homo sapiens
aaatgttttagacag

SEQ ID NO: 1370855 - DNA, 15 bp, Homo sapiens
taaatgttttagaca

SEQ ID NO: 1370856 - DNA, 15 bp, Homo sapiens
ataaatgttttagac

SEQ ID NO: 1370857 - DNA, 15 bp, Homo sapiens
tataaatgttttaga

SEQ ID NO: 1370858 - DNA, 15 bp, Homo sapiens
ctataaatgttttag

SEQ ID NO: 1370859 - DNA, 15 bp, Homo sapiens
cctataaatgtttta

SEQ ID NO: 1370860 - DNA, 15 bp, Homo sapiens
tcctataaatgtttt

SEQ ID NO: 1370861 - DNA, 15 bp, Homo sapiens
atcctataaatgttt

SEQ ID NO: 1370862 - DNA, 15 bp, Homo sapiens
aatcctataaatgtt

SEQ ID NO: 1370863 - DNA, 15 bp, Homo sapiens
aaatcctataaatgt

SEQ ID NO: 1370864 - DNA, 15 bp, Homo sapiens
gaaatcctataaatg

SEQ ID NO: 1370865 - DNA, 15 bp, Homo sapiens
agaaatcctataaat

SEQ ID NO: 1370866 - DNA, 15 bp, Homo sapiens
aagaaatcctataaa

SEQ ID NO: 1370867 - DNA, 15 bp, Homo sapiens
aaagaaatcctataa

SEQ ID NO: 1370868 - DNA, 15 bp, Homo sapiens
taaagaaatcctata

SEQ ID NO: 1370869 - DNA, 15 bp, Homo sapiens
ttaaagaaatcctat

SEQ ID NO: 1370870 - DNA, 15 bp, Homo sapiens
tttaaagaaatccta

SEQ ID NO: 1370871 - DNA, 15 bp, Homo sapiens
ttttaaagaaatcct

SEQ ID NO: 1370872 - DNA, 15 bp, Homo sapiens
attttaaagaaatcc

SEQ ID NO: 1370873 - DNA, 15 bp, Homo sapiens
aattttaaagaaatc

SEQ ID NO: 1370874 - DNA, 15 bp, Homo sapiens
gaattttaaagaaat

SEQ ID NO: 1370875 - DNA, 15 bp, Homo sapiens
ggaattttaaagaaa

SEQ ID NO: 1370876 - DNA, 15 bp, Homo sapiens
tggaattttaaagaa

SEQ ID NO: 1370877 - DNA, 15 bp, Homo sapiens
atggaattttaaaga

SEQ ID NO: 1370878 - DNA, 15 bp, Homo sapiens
aatggaattttaaag

SEQ ID NO: 1370879 - DNA, 15 bp, Homo sapiens
aaatggaattttaaa

SEQ ID NO: 1370880 - DNA, 15 bp, Homo sapiens
aaaatggaattttaa

SEQ ID NO: 1370881 - DNA, 15 bp, Homo sapiens
taaaatggaatttta

SEQ ID NO: 1370882 - DNA, 15 bp, Homo sapiens
ttaaaatggaatttt

SEQ ID NO: 1370883 - DNA, 15 bp, Homo sapiens
gcttaaaatggaatt

SEQ ID NO: 1370884 - DNA, 15 bp, Homo sapiens
ggcttaaaatggaat

SEQ ID NO: 1370885 - DNA, 15 bp, Homo sapiens
aggcttaaaatggaa

SEQ ID NO: 1370886 - DNA, 15 bp, Homo sapiens
taggcttaaaatgga

SEQ ID NO: 1370887 - DNA, 15 bp, Homo sapiens
ttaggcttaaaatgg

SEQ ID NO: 1370888 - DNA, 15 bp, Homo sapiens
tttaggcttaaaatg

SEQ ID NO: 1370889 - DNA, 15 bp, Homo sapiens
ctttaggcttaaaat

SEQ ID NO: 1370890 - DNA, 15 bp, Homo sapiens
cctttaggcttaaaa

SEQ ID NO: 1370891 - DNA, 15 bp, Homo sapiens
gcctttaggcttaaa

SEQ ID NO: 1370892 - DNA, 15 bp, Homo sapiens
agcctttaggcttaa

SEQ ID NO: 1370893 - DNA, 15 bp, Homo sapiens
aagcctttaggctta

SEQ ID NO: 1370894 - DNA, 15 bp, Homo sapiens
taagcctttaggctt

SEQ ID NO: 1370895 - DNA, 15 bp, Homo sapiens
ttaagcctttaggct

SEQ ID NO: 1370896 - DNA, 15 bp, Homo sapiens
attaagcctttaggc

SEQ ID NO: 1370897 - DNA, 15 bp, Homo sapiens
tattaagcctttagg

SEQ ID NO: 1370898 - DNA, 15 bp, Homo sapiens
ttattaagcctttag

SEQ ID NO: 1370899 - DNA, 15 bp, Homo sapiens
tttattaagccttta

SEQ ID NO: 1370900 - DNA, 15 bp, Homo sapiens
ctttattaagccttt

SEQ ID NO: 1370901 - DNA, 15 bp, Homo sapiens
actttattaagcctt

SEQ ID NO: 1370902 - DNA, 15 bp, Homo sapiens
tactttattaagcct

SEQ ID NO: 1370903 - DNA, 15 bp, Homo sapiens
gtactttattaagcc

SEQ ID NO: 1370904 - DNA, 15 bp, Homo sapiens
tgtactttattaagc

SEQ ID NO: 1370905 - DNA, 15 bp, Homo sapiens
gtgtactttattaag

SEQ ID NO: 1370906 - DNA, 15 bp, Homo sapiens
tgtgtactttattaa

SEQ ID NO: 1370907 - DNA, 15 bp, Homo sapiens
atgtgtactttatta

SEQ ID NO: 1370908 - DNA, 15 bp, Homo sapiens
tatgtgtactttatt

SEQ ID NO: 1370909 - DNA, 15 bp, Homo sapiens
atatgtgtactttat

SEQ ID NO: 1370910 - DNA, 15 bp, Homo sapiens
tatatgtgtacttta

SEQ ID NO: 1370911 - DNA, 15 bp, Homo sapiens
atatatgtgtacttt

SEQ ID NO: 1370912 - DNA, 15 bp, Homo sapiens
aatatatgtgtactt

SEQ ID NO: 1370913 - DNA, 15 bp, Homo sapiens
aaatatatgtgtact

SEQ ID NO: 1370914 - DNA, 15 bp, Homo sapiens
aaaatatatgtgtac

SEQ ID NO: 1370915 - DNA, 15 bp, Homo sapiens
caaaatatatgtgta

SEQ ID NO: 1370916 - DNA, 15 bp, Homo sapiens
ccaaaatatatgtgt

SEQ ID NO: 1370917 - DNA, 15 bp, Homo sapiens
tccaaaatatatgtg

SEQ ID NO: 1370918 - DNA, 15 bp, Homo sapiens
ttccaaaatatatgt

SEQ ID NO: 1370919 - DNA, 15 bp, Homo sapiens
tttccaaaatatatg

SEQ ID NO: 1370920 - DNA, 15 bp, Homo sapiens
ctttccaaaatatat

SEQ ID NO: 1370921 - DNA, 15 bp, Homo sapiens
actttccaaaatata

SEQ ID NO: 1370922 - DNA, 15 bp, Homo sapiens
tactttccaaaatat

SEQ ID NO: 1370923 - DNA, 15 bp, Homo sapiens
atactttccaaaata

SEQ ID NO: 1370924 - DNA, 15 bp, Homo sapiens
tatactttccaaaat

SEQ ID NO: 1370925 - DNA, 15 bp, Homo sapiens
atatactttccaaaa

SEQ ID NO: 1370926 - DNA, 15 bp, Homo sapiens
tatatactttccaaa

SEQ ID NO: 1370927 - DNA, 15 bp, Homo sapiens
gtatatactttccaa

SEQ ID NO: 1370928 - DNA, 15 bp, Homo sapiens
tgtatatactttcca

SEQ ID NO: 1370929 - DNA, 15 bp, Homo sapiens
gtgtatatactttcc

SEQ ID NO: 1370930 - DNA, 15 bp, Homo sapiens
tgtgtatatactttc

SEQ ID NO: 1370931 - DNA, 15 bp, Homo sapiens
ttgtgtatatacttt

SEQ ID NO: 1370932 - DNA, 15 bp, Homo sapiens
cttgtgtatatactt

SEQ ID NO: 1370933 - DNA, 15 bp, Homo sapiens
gcttgtgtatatact

SEQ ID NO: 1370934 - DNA, 15 bp, Homo sapiens
agcttgtgtatatac

SEQ ID NO: 1370935 - DNA, 15 bp, Homo sapiens
gagcttgtgtatata

SEQ ID NO: 1370936 - DNA, 15 bp, Homo sapiens
agagcttgtgtatat

SEQ ID NO: 1370937 - DNA, 15 bp, Homo sapiens
gagagcttgtgtata

SEQ ID NO: 1370938 - DNA, 15 bp, Homo sapiens
agagagcttgtgtat

SEQ ID NO: 1370939 - DNA, 15 bp, Homo sapiens
aagagagcttgtgta

SEQ ID NO: 1370940 - DNA, 15 bp, Homo sapiens
taagagagcttgtgt

SEQ ID NO: 1370941 - DNA, 15 bp, Homo sapiens
ataagagagcttgtg

SEQ ID NO: 1370942 - DNA, 15 bp, Homo sapiens
tataagagagcttgt

SEQ ID NO: 1370943 - DNA, 15 bp, Homo sapiens
ctataagagagcttg

SEQ ID NO: 1370944 - DNA, 15 bp, Homo sapiens
gctataagagagctt

SEQ ID NO: 1370945 - DNA, 15 bp, Homo sapiens
ggctataagagagct

SEQ ID NO: 1370946 - DNA, 15 bp, Homo sapiens
aggctataagagagc

SEQ ID NO: 1370947 - DNA, 15 bp, Homo sapiens
gaggctataagagag

SEQ ID NO: 1370948 - DNA, 15 bp, Homo sapiens
ggaggctataagaga

SEQ ID NO: 1370949 - DNA, 15 bp, Homo sapiens
aggaggctataagag

SEQ ID NO: 1370950 - DNA, 15 bp, Homo sapiens
taggaggctataaga

SEQ ID NO: 1370951 - DNA, 15 bp, Homo sapiens
ataggaggctataag

SEQ ID NO: 1370952 - DNA, 15 bp, Homo sapiens
gataggaggctataa

SEQ ID NO: 1370953 - DNA, 15 bp, Homo sapiens
ggataggaggctata

SEQ ID NO: 1370954 - DNA, 15 bp, Homo sapiens
aggataggaggctat

SEQ ID NO: 1370955 - DNA, 15 bp, Homo sapiens
aaggataggaggcta

SEQ ID NO: 1370956 - DNA, 15 bp, Homo sapiens
taaggataggaggct

SEQ ID NO: 1370957 - DNA, 15 bp, Homo sapiens
gtaaggataggaggc

SEQ ID NO: 1370958 - DNA, 15 bp, Homo sapiens
ggtaaggataggagg

SEQ ID NO: 1370959 - DNA, 15 bp, Homo sapiens
tggtaaggataggag

SEQ ID NO: 1370960 - DNA, 15 bp, Homo sapiens
ctggtaaggatagga

SEQ ID NO: 1370961 - DNA, 15 bp, Homo sapiens
cctggtaaggatagg

SEQ ID NO: 1370962 - DNA, 15 bp, Homo sapiens
ccctggtaaggatag

SEQ ID NO: 1370963 - DNA, 15 bp, Homo sapiens
tccctggtaaggata

SEQ ID NO: 1370964 - DNA, 15 bp, Homo sapiens
ctccctggtaaggat

SEQ ID NO: 1370965 - DNA, 15 bp, Homo sapiens
cctccctggtaagga

SEQ ID NO: 1370966 - DNA, 15 bp, Homo sapiens
acctccctggtaagg

SEQ ID NO: 1370967 - DNA, 15 bp, Homo sapiens
tacctccctggtaag

SEQ ID NO: 1370968 - DNA, 15 bp, Homo sapiens
ttacctccctggtaa

SEQ ID NO: 1370969 - DNA, 15 bp, Homo sapiens
tttacctccctggta

SEQ ID NO: 1370970 - DNA, 15 bp, Homo sapiens
atttacctccctggt

SEQ ID NO: 1370971 - DNA, 15 bp, Homo sapiens
aatttacctccctgg

SEQ ID NO: 1370972 - DNA, 15 bp, Homo sapiens
taatttacctccctg

SEQ ID NO: 1370973 - DNA, 15 bp, Homo sapiens
ttaatttacctccct

SEQ ID NO: 1370974 - DNA, 15 bp, Homo sapiens
tttaatttacctccc

SEQ ID NO: 1370975 - DNA, 15 bp, Homo sapiens
atttaatttacctcc

SEQ ID NO: 1370976 - DNA, 15 bp, Homo sapiens
gatttaatttacctc

SEQ ID NO: 1370977 - DNA, 15 bp, Homo sapiens
ggatttaatttacct

SEQ ID NO: 1370978 - DNA, 15 bp, Homo sapiens
gggatttaatttacc

SEQ ID NO: 1370979 - DNA, 15 bp, Homo sapiens
agggatttaatttac

SEQ ID NO: 1370980 - DNA, 15 bp, Homo sapiens
cagggatttaattta

SEQ ID NO: 1370981 - DNA, 15 bp, Homo sapiens
ccagggatttaattt

SEQ ID NO: 1370982 - DNA, 15 bp, Homo sapiens
tccagggatttaatt

SEQ ID NO: 1370983 - DNA, 15 bp, Homo sapiens
gtccagggatttaat

SEQ ID NO: 1370984 - DNA, 15 bp, Homo sapiens
ggtccagggatttaa

SEQ ID NO: 1370985 - DNA, 15 bp, Homo sapiens
tggtccagggattta

SEQ ID NO: 1370986 - DNA, 15 bp, Homo sapiens
gtggtccagggattt

SEQ ID NO: 1370987 - DNA, 15 bp, Homo sapiens
agtggtccagggatt

SEQ ID NO: 1370988 - DNA, 15 bp, Homo sapiens
cagtggtccagggat

SEQ ID NO: 1370989 - DNA, 15 bp, Homo sapiens
ccagtggtccaggga

SEQ ID NO: 1370990 - DNA, 15 bp, Homo sapiens
tccagtggtccaggg

SEQ ID NO: 1370991 - DNA, 15 bp, Homo sapiens
ttccagtggtccagg

SEQ ID NO: 1370992 - DNA, 15 bp, Homo sapiens
gttccagtggtccag

SEQ ID NO: 1370993 - DNA, 15 bp, Homo sapiens
agttccagtggtcca

SEQ ID NO: 1370994 - DNA, 15 bp, Homo sapiens
aagttccagtggtcc

SEQ ID NO: 1370995 - DNA, 15 bp, Homo sapiens
taagttccagtggtc

SEQ ID NO: 1370996 - DNA, 15 bp, Homo sapiens
ctaagttccagtggt

SEQ ID NO: 1370997 - DNA, 15 bp, Homo sapiens
tctaagttccagtgg

SEQ ID NO: 1370998 - DNA, 15 bp, Homo sapiens
atctaagttccagtg

SEQ ID NO: 1370999 - DNA, 15 bp, Homo sapiens
aatctaagttccagt

SEQ ID NO: 1371000 - DNA, 15 bp, Homo sapiens
gaatctaagttccag

SEQ ID NO: 1371001 - DNA, 15 bp, Homo sapiens
tgaatctaagttcca

SEQ ID NO: 1371002 - DNA, 15 bp, Homo sapiens
ctgaatctaagttcc

SEQ ID NO: 1371003 - DNA, 15 bp, Homo sapiens
actgaatctaagttc

SEQ ID NO: 1371004 - DNA, 15 bp, Homo sapiens
cactgaatctaagtt

SEQ ID NO: 1371005 - DNA, 15 bp, Homo sapiens
tcactgaatctaagt

SEQ ID NO: 1371006 - DNA, 15 bp, Homo sapiens
ttcactgaatctaag

SEQ ID NO: 1371007 - DNA, 15 bp, Homo sapiens
tttcactgaatctaa

SEQ ID NO: 1371008 - DNA, 15 bp, Homo sapiens
ctttcactgaatcta

SEQ ID NO: 1371009 - DNA, 15 bp, Homo sapiens
cctttcactgaatct

SEQ ID NO: 1371010 - DNA, 15 bp, Homo sapiens
tcctttcactgaatc

SEQ ID NO: 1371011 - DNA, 15 bp, Homo sapiens
gtcctttcactgaat

SEQ ID NO: 1371012 - DNA, 15 bp, Homo sapiens
agtcctttcactgaa

SEQ ID NO: 1371013 - DNA, 15 bp, Homo sapiens
aagtcctttcactga

SEQ ID NO: 1371014 - DNA, 15 bp, Homo sapiens
aaagtcctttcactg

SEQ ID NO: 1371015 - DNA, 15 bp, Homo sapiens
aaaagtcctttcact

SEQ ID NO: 1371016 - DNA, 15 bp, Homo sapiens
gaaaagtcctttcac

SEQ ID NO: 1371017 - DNA, 15 bp, Homo sapiens
tgaaaagtcctttca

SEQ ID NO: 1371018 - DNA, 15 bp, Homo sapiens
ctgaaaagtcctttc

SEQ ID NO: 1371019 - DNA, 15 bp, Homo sapiens
cctgaaaagtccttt

SEQ ID NO: 1371020 - DNA, 15 bp, Homo sapiens
gcctgaaaagtcctt

SEQ ID NO: 1371021 - DNA, 15 bp, Homo sapiens
ggcctgaaaagtcct

SEQ ID NO: 1371022 - DNA, 15 bp, Homo sapiens
tggcctgaaaagtcc

SEQ ID NO: 1371023 - DNA, 15 bp, Homo sapiens
atggcctgaaaagtc

SEQ ID NO: 1371024 - DNA, 15 bp, Homo sapiens
tatggcctgaaaagt

SEQ ID NO: 1371025 - DNA, 15 bp, Homo sapiens
gtatggcctgaaaag

SEQ ID NO: 1371026 - DNA, 15 bp, Homo sapiens
tgtatggcctgaaaa

SEQ ID NO: 1371027 - DNA, 15 bp, Homo sapiens
ctgtatggcctgaaa

SEQ ID NO: 1371028 - DNA, 15 bp, Homo sapiens
actgtatggcctgaa

SEQ ID NO: 1371029 - DNA, 15 bp, Homo sapiens
cactgtatggcctga

SEQ ID NO: 1371030 - DNA, 15 bp, Homo sapiens
tcactgtatggcctg

SEQ ID NO: 1371031 - DNA, 15 bp, Homo sapiens
atcactgtatggcct

SEQ ID NO: 1371032 - DNA, 15 bp, Homo sapiens
tatcactgtatggcc

SEQ ID NO: 1371033 - DNA, 15 bp, Homo sapiens
atatcactgtatggc

SEQ ID NO: 1371034 - DNA, 15 bp, Homo sapiens
aatatcactgtatgg

SEQ ID NO: 1371035 - DNA, 15 bp, Homo sapiens
caatatcactgtatg

SEQ ID NO: 1371036 - DNA, 15 bp, Homo sapiens
ccaatatcactgtat

SEQ ID NO: 1371037 - DNA, 15 bp, Homo sapiens
cccaatatcactgta

SEQ ID NO: 1371038 - DNA, 15 bp, Homo sapiens
gcccaatatcactgt

SEQ ID NO: 1371039 - DNA, 15 bp, Homo sapiens
agcccaatatcactg

SEQ ID NO: 1371040 - DNA, 15 bp, Homo sapiens
tagcccaatatcact

SEQ ID NO: 1371041 - DNA, 15 bp, Homo sapiens
ctagcccaatatcac

SEQ ID NO: 1371042 - DNA, 15 bp, Homo sapiens
gctagcccaatatca

SEQ ID NO: 1371043 - DNA, 15 bp, Homo sapiens
ggctagcccaatatc

SEQ ID NO: 1371044 - DNA, 15 bp, Homo sapiens
gggctagcccaatat

SEQ ID NO: 1371045 - DNA, 15 bp, Homo sapiens
tgggctagcccaata

SEQ ID NO: 1371046 - DNA, 15 bp, Homo sapiens
ttgggctagcccaat

SEQ ID NO: 1371047 - DNA, 15 bp, Homo sapiens
attgggctagcccaa

SEQ ID NO: 1371048 - DNA, 15 bp, Homo sapiens
cattgggctagccca

SEQ ID NO: 1371049 - DNA, 15 bp, Homo sapiens
gcattgggctagccc

SEQ ID NO: 1371050 - DNA, 15 bp, Homo sapiens
ggcattgggctagcc

SEQ ID NO: 1371051 - DNA, 15 bp, Homo sapiens
gggcattgggctagc

SEQ ID NO: 1371052 - DNA, 15 bp, Homo sapiens
agggcattgggctag

SEQ ID NO: 1371053 - DNA, 15 bp, Homo sapiens
aagggcattgggcta

SEQ ID NO: 1371054 - DNA, 15 bp, Homo sapiens
gaagggcattgggct

SEQ ID NO: 1371055 - DNA, 15 bp, Homo sapiens
agaagggcattgggc

SEQ ID NO: 1371056 - DNA, 15 bp, Homo sapiens
aagaagggcattggg

SEQ ID NO: 1371057 - DNA, 15 bp, Homo sapiens
aaagaagggcattgg

SEQ ID NO: 1371058 - DNA, 15 bp, Homo sapiens
gaaagaagggcattg

SEQ ID NO: 1371059 - DNA, 15 bp, Homo sapiens
agaaagaagggcatt

SEQ ID NO: 1371060 - DNA, 15 bp, Homo sapiens
gagaaagaagggcat

SEQ ID NO: 1371061 - DNA, 15 bp, Homo sapiens
tgagaaagaagggca

SEQ ID NO: 1371062 - DNA, 15 bp, Homo sapiens
ttgagaaagaagggc

SEQ ID NO: 1371063 - DNA, 15 bp, Homo sapiens
tttgagaaagaaggg

SEQ ID NO: 1371064 - DNA, 15 bp, Homo sapiens
ttttgagaaagaagg

SEQ ID NO: 1371065 - DNA, 15 bp, Homo sapiens
cttttgagaaagaag

SEQ ID NO: 1371066 - DNA, 15 bp, Homo sapiens
ccttttgagaaagaa

SEQ ID NO: 1371067 - DNA, 15 bp, Homo sapiens
tccttttgagaaaga

SEQ ID NO: 1371068 - DNA, 15 bp, Homo sapiens
ttccttttgagaaag

SEQ ID NO: 1371069 - DNA, 15 bp, Homo sapiens
tttccttttgagaaa

SEQ ID NO: 1371070 - DNA, 15 bp, Homo sapiens
ttttccttttgagaa

SEQ ID NO: 1371071 - DNA, 15 bp, Homo sapiens
gttttccttttgaga

SEQ ID NO: 1371072 - DNA, 15 bp, Homo sapiens
tgttttccttttgag

SEQ ID NO: 1371073 - DNA, 15 bp, Homo sapiens
ttgttttccttttga

SEQ ID NO: 1371074 - DNA, 15 bp, Homo sapiens
cttgttttccttttg

SEQ ID NO: 1371075 - DNA, 15 bp, Homo sapiens
gcttgttttcctttt

SEQ ID NO: 1371076 - DNA, 15 bp, Homo sapiens
ggcttgttttccttt

SEQ ID NO: 1371077 - DNA, 15 bp, Homo sapiens
gggcttgttttcctt

SEQ ID NO: 1371078 - DNA, 15 bp, Homo sapiens
tgggcttgttttcct

SEQ ID NO: 1371079 - DNA, 15 bp, Homo sapiens
ttgggcttgttttcc

SEQ ID NO: 1371080 - DNA, 15 bp, Homo sapiens
cttgggcttgttttc

SEQ ID NO: 1371081 - DNA, 15 bp, Homo sapiens
tcttgggcttgtttt

SEQ ID NO: 1371082 - DNA, 15 bp, Homo sapiens
ttcttgggcttgttt

SEQ ID NO: 1371083 - DNA, 15 bp, Homo sapiens
cttcttgggcttgtt

SEQ ID NO: 1371084 - DNA, 15 bp, Homo sapiens
ccttcttgggcttgt

SEQ ID NO: 1371085 - DNA, 15 bp, Homo sapiens
accttcttgggcttg

SEQ ID NO: 1371086 - DNA, 15 bp, Homo sapiens
caccttcttgggctt

SEQ ID NO: 1371087 - DNA, 15 bp, Homo sapiens
tcaccttcttgggct

SEQ ID NO: 1371088 - DNA, 15 bp, Homo sapiens
ttcaccttcttgggc

SEQ ID NO: 1371089 - DNA, 15 bp, Homo sapiens
tttcaccttcttggg

SEQ ID NO: 1371090 - DNA, 15 bp, Homo sapiens
ttttcaccttcttgg

SEQ ID NO: 1371091 - DNA, 15 bp, Homo sapiens
cttttcaccttcttg

SEQ ID NO: 1371092 - DNA, 15 bp, Homo sapiens
tcttttcaccttctt

SEQ ID NO: 1371093 - DNA, 15 bp, Homo sapiens
atcttttcaccttct

SEQ ID NO: 1371094 - DNA, 15 bp, Homo sapiens
tatcttttcaccttc

SEQ ID NO: 1371095 - DNA, 15 bp, Homo sapiens
atatcttttcacctt

SEQ ID NO: 1371096 - DNA, 15 bp, Homo sapiens
catatcttttcacct

SEQ ID NO: 1371097 - DNA, 15 bp, Homo sapiens
gcatatcttttcacc

SEQ ID NO: 1371098 - DNA, 15 bp, Homo sapiens
agcatatcttttcac

SEQ ID NO: 1371099 - DNA, 15 bp, Homo sapiens
gagcatatcttttca

SEQ ID NO: 1371100 - DNA, 15 bp, Homo sapiens
agagcatatcttttc

SEQ ID NO: 1371101 - DNA, 15 bp, Homo sapiens
cagagcatatctttt

SEQ ID NO: 1371102 - DNA, 15 bp, Homo sapiens
ccagagcatatcttt

SEQ ID NO: 1371103 - DNA, 15 bp, Homo sapiens
tccagagcatatctt

SEQ ID NO: 1371104 - DNA, 15 bp, Homo sapiens
atccagagcatatct

SEQ ID NO: 1371105 - DNA, 15 bp, Homo sapiens
gatccagagcatatc

SEQ ID NO: 1371106 - DNA, 15 bp, Homo sapiens
ggatccagagcatat

SEQ ID NO: 1371107 - DNA, 15 bp, Homo sapiens
aggatccagagcata

SEQ ID NO: 1371108 - DNA, 15 bp, Homo sapiens
gaggatccagagcat

SEQ ID NO: 1371109 - DNA, 15 bp, Homo sapiens
tgaggatccagagca

SEQ ID NO: 1371110 - DNA, 15 bp, Homo sapiens
gtgaggatccagagc

SEQ ID NO: 1371111 - DNA, 15 bp, Homo sapiens
tgtgaggatccagag

SEQ ID NO: 1371112 - DNA, 15 bp, Homo sapiens
atgtgaggatccaga

SEQ ID NO: 1371113 - DNA, 15 bp, Homo sapiens
catgtgaggatccag

SEQ ID NO: 1371114 - DNA, 15 bp, Homo sapiens
ccatgtgaggatcca

SEQ ID NO: 1371115 - DNA, 15 bp, Homo sapiens
gccatgtgaggatcc

SEQ ID NO: 1371116 - DNA, 15 bp, Homo sapiens
ggccatgtgaggatc

SEQ ID NO: 1371117 - DNA, 15 bp, Homo sapiens
tggccatgtgaggat

SEQ ID NO: 1371118 - DNA, 15 bp, Homo sapiens
atggccatgtgagga

SEQ ID NO: 1371119 - DNA, 15 bp, Homo sapiens
aatggccatgtgagg

SEQ ID NO: 1371120 - DNA, 15 bp, Homo sapiens
aaatggccatgtgag

SEQ ID NO: 1371121 - DNA, 15 bp, Homo sapiens
gaaatggccatgtga

SEQ ID NO: 1371122 - DNA, 15 bp, Homo sapiens
ggaaatggccatgtg

SEQ ID NO: 1371123 - DNA, 15 bp, Homo sapiens
aggaaatggccatgt

SEQ ID NO: 1371124 - DNA, 15 bp, Homo sapiens
aaggaaatggccatg

SEQ ID NO: 1371125 - DNA, 15 bp, Homo sapiens
taaggaaatggccat

SEQ ID NO: 1371126 - DNA, 15 bp, Homo sapiens
gtaaggaaatggcca

SEQ ID NO: 1371127 - DNA, 15 bp, Homo sapiens
tgtaaggaaatggcc

SEQ ID NO: 1371128 - DNA, 15 bp, Homo sapiens
ctgtaaggaaatggc

SEQ ID NO: 1371129 - DNA, 15 bp, Homo sapiens
tctgtaaggaaatgg

SEQ ID NO: 1371130 - DNA, 15 bp, Homo sapiens
ttctgtaaggaaatg

SEQ ID NO: 1371131 - DNA, 15 bp, Homo sapiens
tttctgtaaggaaat

SEQ ID NO: 1371132 - DNA, 15 bp, Homo sapiens
ttttctgtaaggaaa

SEQ ID NO: 1371133 - DNA, 15 bp, Homo sapiens
attttctgtaaggaa

SEQ ID NO: 1371134 - DNA, 15 bp, Homo sapiens
tattttctgtaagga

SEQ ID NO: 1371135 - DNA, 15 bp, Homo sapiens
ttattttctgtaagg

SEQ ID NO: 1371136 - DNA, 15 bp, Homo sapiens
cttattttctgtaag

SEQ ID NO: 1371137 - DNA, 15 bp, Homo sapiens
tcttattttctgtaa

SEQ ID NO: 1371138 - DNA, 15 bp, Homo sapiens
ttcttattttctgta

SEQ ID NO: 1371139 - DNA, 15 bp, Homo sapiens
attcttattttctgt

SEQ ID NO: 1371140 - DNA, 15 bp, Homo sapiens
aattcttattttctg

SEQ ID NO: 1371141 - DNA, 15 bp, Homo sapiens
gaattcttattttct

SEQ ID NO: 1371142 - DNA, 15 bp, Homo sapiens
agaattcttattttc

SEQ ID NO: 1371143 - DNA, 15 bp, Homo sapiens
tagaattcttatttt

SEQ ID NO: 1371144 - DNA, 15 bp, Homo sapiens
ttagaattcttattt

SEQ ID NO: 1371145 - DNA, 15 bp, Homo sapiens
tttagaattcttatt

SEQ ID NO: 1371146 - DNA, 15 bp, Homo sapiens
atttagaattcttat

SEQ ID NO: 1371147 - DNA, 15 bp, Homo sapiens
tatttagaattctta

SEQ ID NO: 1371148 - DNA, 15 bp, Homo sapiens
atatttagaattctt

SEQ ID NO: 1371149 - DNA, 15 bp, Homo sapiens
gatatttagaattct

SEQ ID NO: 1371150 - DNA, 15 bp, Homo sapiens
ggatatttagaattc

SEQ ID NO: 1371151 - DNA, 15 bp, Homo sapiens
aggatatttagaatt

SEQ ID NO: 1371152 - DNA, 15 bp, Homo sapiens
gaggatatttagaat

SEQ ID NO: 1371153 - DNA, 15 bp, Homo sapiens
ggaggatatttagaa

SEQ ID NO: 1371154 - DNA, 15 bp, Homo sapiens
gggaggatatttaga

SEQ ID NO: 1371155 - DNA, 15 bp, Homo sapiens
tgggaggatatttag

SEQ ID NO: 1371156 - DNA, 15 bp, Homo sapiens
atgggaggatattta

SEQ ID NO: 1371157 - DNA, 15 bp, Homo sapiens
catgggaggatattt

SEQ ID NO: 1371158 - DNA, 15 bp, Homo sapiens
gcatgggaggatatt

SEQ ID NO: 1371159 - DNA, 15 bp, Homo sapiens
ggcatgggaggatat

SEQ ID NO: 1371160 - DNA, 15 bp, Homo sapiens
aggcatgggaggata

SEQ ID NO: 1371161 - DNA, 15 bp, Homo sapiens
taggcatgggaggat

SEQ ID NO: 1371162 - DNA, 15 bp, Homo sapiens
ttaggcatgggagga

SEQ ID NO: 1371163 - DNA, 15 bp, Homo sapiens
attaggcatgggagg

SEQ ID NO: 1371164 - DNA, 15 bp, Homo sapiens
tattaggcatgggag

SEQ ID NO: 1371165 - DNA, 15 bp, Homo sapiens
atattaggcatggga

SEQ ID NO: 1371166 - DNA, 15 bp, Homo sapiens
catattaggcatggg

SEQ ID NO: 1371167 - DNA, 15 bp, Homo sapiens
tcatattaggcatgg

SEQ ID NO: 1371168 - DNA, 15 bp, Homo sapiens
gtcatattaggcatg

SEQ ID NO: 1371169 - DNA, 15 bp, Homo sapiens
agtcatattaggcat

SEQ ID NO: 1371170 - DNA, 15 bp, Homo sapiens
cagtcatattaggca

SEQ ID NO: 1371171 - DNA, 15 bp, Homo sapiens
tcagtcatattaggc

SEQ ID NO: 1371172 - DNA, 15 bp, Homo sapiens
ctcagtcatattagg

SEQ ID NO: 1371173 - DNA, 15 bp, Homo sapiens
tctcagtcatattag

SEQ ID NO: 1371174 - DNA, 15 bp, Homo sapiens
atctcagtcatatta

SEQ ID NO: 1371175 - DNA, 15 bp, Homo sapiens
aatctcagtcatatt

SEQ ID NO: 1371176 - DNA, 15 bp, Homo sapiens
aaatctcagtcatat

SEQ ID NO: 1371177 - DNA, 15 bp, Homo sapiens
taaatctcagtcata

SEQ ID NO: 1371178 - DNA, 15 bp, Homo sapiens
ctaaatctcagtcat

SEQ ID NO: 1371179 - DNA, 15 bp, Homo sapiens
cctaaatctcagtca

SEQ ID NO: 1371180 - DNA, 15 bp, Homo sapiens
tcctaaatctcagtc

SEQ ID NO: 1371181 - DNA, 15 bp, Homo sapiens
ttcctaaatctcagt

SEQ ID NO: 1371182 - DNA, 15 bp, Homo sapiens
cttcctaaatctcag

SEQ ID NO: 1371183 - DNA, 15 bp, Homo sapiens
tcttcctaaatctca

SEQ ID NO: 1371184 - DNA, 15 bp, Homo sapiens
ctcttcctaaatctc

SEQ ID NO: 1371185 - DNA, 15 bp, Homo sapiens
tctcttcctaaatct

SEQ ID NO: 1371186 - DNA, 15 bp, Homo sapiens
atctcttcctaaatc

SEQ ID NO: 1371187 - DNA, 15 bp, Homo sapiens
aatctcttcctaaat

SEQ ID NO: 1371188 - DNA, 15 bp, Homo sapiens
aaatctcttcctaaa

SEQ ID NO: 1371189 - DNA, 15 bp, Homo sapiens
caaatctcttcctaa

SEQ ID NO: 1371190 - DNA, 15 bp, Homo sapiens
tcaaatctcttccta

SEQ ID NO: 1371191 - DNA, 15 bp, Homo sapiens
ctcaaatctcttcct

SEQ ID NO: 1371192 - DNA, 15 bp, Homo sapiens
tctcaaatctcttcc

SEQ ID NO: 1371193 - DNA, 15 bp, Homo sapiens
ttctcaaatctcttc

SEQ ID NO: 1371194 - DNA, 15 bp, Homo sapiens
cttctcaaatctctt

SEQ ID NO: 1371195 - DNA, 15 bp, Homo sapiens
tcttctcaaatctct

SEQ ID NO: 1371196 - DNA, 15 bp, Homo sapiens
atcttctcaaatctc

SEQ ID NO: 1371197 - DNA, 15 bp, Homo sapiens
tatcttctcaaatct

SEQ ID NO: 1371198 - DNA, 15 bp, Homo sapiens
atatcttctcaaatc

SEQ ID NO: 1371199 - DNA, 15 bp, Homo sapiens
aatatcttctcaaat

SEQ ID NO: 1371200 - DNA, 15 bp, Homo sapiens
aaatatcttctcaaa

SEQ ID NO: 1371201 - DNA, 15 bp, Homo sapiens
caaatatcttctcaa

SEQ ID NO: 1371202 - DNA, 15 bp, Homo sapiens
gcaaatatcttctca

SEQ ID NO: 1371203 - DNA, 15 bp, Homo sapiens
gttgcaaatatcttc

SEQ ID NO: 1371204 - DNA, 15 bp, Homo sapiens
tgttgcaaatatctt

SEQ ID NO: 1371205 - DNA, 15 bp, Homo sapiens
atgttgcaaatatct

SEQ ID NO: 1371206 - DNA, 15 bp, Homo sapiens
tatgttgcaaatatc

SEQ ID NO: 1371207 - DNA, 15 bp, Homo sapiens
atatgttgcaaatat

SEQ ID NO: 1371208 - DNA, 15 bp, Homo sapiens
tatatgttgcaaata

SEQ ID NO: 1371209 - DNA, 15 bp, Homo sapiens
atatatgttgcaaat

SEQ ID NO: 1371210 - DNA, 15 bp, Homo sapiens
aatatatgttgcaaa

SEQ ID NO: 1371211 - DNA, 15 bp, Homo sapiens
taatatatgttgcaa

SEQ ID NO: 1371212 - DNA, 15 bp, Homo sapiens
gtaatatatgttgca

SEQ ID NO: 1371213 - DNA, 15 bp, Homo sapiens
agtaatatatgttgc

SEQ ID NO: 1371214 - DNA, 15 bp, Homo sapiens
gagtaatatatgttg

SEQ ID NO: 1371215 - DNA, 15 bp, Homo sapiens
cgagtaatatatgtt

SEQ ID NO: 1371216 - DNA, 15 bp, Homo sapiens
acgagtaatatatgt

SEQ ID NO: 1371217 - DNA, 15 bp, Homo sapiens
cacgagtaatatatg

SEQ ID NO: 1371218 - DNA, 15 bp, Homo sapiens
tcacgagtaatatat

SEQ ID NO: 1371219 - DNA, 15 bp, Homo sapiens
gtcacgagtaatata

SEQ ID NO: 1371220 - DNA, 15 bp, Homo sapiens
tgtcacgagtaatat

SEQ ID NO: 1371221 - DNA, 15 bp, Homo sapiens
atgtcacgagtaata

SEQ ID NO: 1371222 - DNA, 15 bp, Homo sapiens
tatgtcacgagtaat

SEQ ID NO: 1371223 - DNA, 15 bp, Homo sapiens
ctatgtcacgagtaa

SEQ ID NO: 1371224 - DNA, 15 bp, Homo sapiens
tctatgtcacgagta

SEQ ID NO: 1371225 - DNA, 15 bp, Homo sapiens
ttctatgtcacgagt

SEQ ID NO: 1371226 - DNA, 15 bp, Homo sapiens
tttctatgtcacgag

SEQ ID NO: 1371227 - DNA, 15 bp, Homo sapiens
gtttctatgtcacga

SEQ ID NO: 1371228 - DNA, 15 bp, Homo sapiens
tgtttctatgtcacg

SEQ ID NO: 1371229 - DNA, 15 bp, Homo sapiens
ttgtttctatgtcac

SEQ ID NO: 1371230 - DNA, 15 bp, Homo sapiens
cttgtttctatgtca

SEQ ID NO: 1371231 - DNA, 15 bp, Homo sapiens
tcttgtttctatgtc

SEQ ID NO: 1371232 - DNA, 15 bp, Homo sapiens
ctcttgtttctatgt

SEQ ID NO: 1371233 - DNA, 15 bp, Homo sapiens
gctcttgtttctatg

SEQ ID NO: 1371234 - DNA, 15 bp, Homo sapiens
agctcttgtttctat

SEQ ID NO: 1371235 - DNA, 15 bp, Homo sapiens
gagctcttgtttcta

SEQ ID NO: 1371236 - DNA, 15 bp, Homo sapiens
tgagctcttgtttct

SEQ ID NO: 1371237 - DNA, 15 bp, Homo sapiens
atgagctcttgtttc

SEQ ID NO: 1371238 - DNA, 15 bp, Homo sapiens
aatgagctcttgttt

SEQ ID NO: 1371239 - DNA, 15 bp, Homo sapiens
taatgagctcttgtt

SEQ ID NO: 1371240 - DNA, 15 bp, Homo sapiens
gtaatgagctcttgt

SEQ ID NO: 1371241 - DNA, 15 bp, Homo sapiens
agtaatgagctcttg

SEQ ID NO: 1371242 - DNA, 15 bp, Homo sapiens
aagtaatgagctctt

SEQ ID NO: 1371243 - DNA, 15 bp, Homo sapiens
aaagtaatgagctct

SEQ ID NO: 1371244 - DNA, 15 bp, Homo sapiens
aaaagtaatgagctc

SEQ ID NO: 1371245 - DNA, 15 bp, Homo sapiens
aaaaagtaatgagct

SEQ ID NO: 1371246 - DNA, 15 bp, Homo sapiens
gaaaaagtaatgagc

SEQ ID NO: 1371247 - DNA, 15 bp, Homo sapiens
ggaaaaagtaatgag

SEQ ID NO: 1371248 - DNA, 15 bp, Homo sapiens
tggaaaaagtaatga

SEQ ID NO: 1371249 - DNA, 15 bp, Homo sapiens
ctggaaaaagtaatg

SEQ ID NO: 1371250 - DNA, 15 bp, Homo sapiens
gctggaaaaagtaat

SEQ ID NO: 1371251 - DNA, 15 bp, Homo sapiens
agctggaaaaagtaa

SEQ ID NO: 1371252 - DNA, 15 bp, Homo sapiens
tagctggaaaaagta

SEQ ID NO: 1371253 - DNA, 15 bp, Homo sapiens
ttagctggaaaaagt

SEQ ID NO: 1371254 - DNA, 15 bp, Homo sapiens
gttagctggaaaaag

SEQ ID NO: 1371255 - DNA, 15 bp, Homo sapiens
agttagctggaaaaa

SEQ ID NO: 1371256 - DNA, 15 bp, Homo sapiens
gagttagctggaaaa

SEQ ID NO: 1371257 - DNA, 15 bp, Homo sapiens
tgagttagctggaaa

SEQ ID NO: 1371258 - DNA, 15 bp, Homo sapiens
atgagttagctggaa

SEQ ID NO: 1371259 - DNA, 15 bp, Homo sapiens
gatgagttagctgga

SEQ ID NO: 1371260 - DNA, 15 bp, Homo sapiens
ggatgagttagctgg

SEQ ID NO: 1371261 - DNA, 15 bp, Homo sapiens
gggatgagttagctg

SEQ ID NO: 1371262 - DNA, 15 bp, Homo sapiens
ggggatgagttagct

SEQ ID NO: 1371263 - DNA, 15 bp, Homo sapiens
tggggatgagttagc

SEQ ID NO: 1371264 - DNA, 15 bp, Homo sapiens
ttggggatgagttag

SEQ ID NO: 1371265 - DNA, 15 bp, Homo sapiens
attggggatgagtta

SEQ ID NO: 1371266 - DNA, 15 bp, Homo sapiens
gattggggatgagtt

SEQ ID NO: 1371267 - DNA, 15 bp, Homo sapiens
tgattggggatgagt

SEQ ID NO: 1371268 - DNA, 15 bp, Homo sapiens
gtgattggggatgag

SEQ ID NO: 1371269 - DNA, 15 bp, Homo sapiens
ggtgattggggatga

SEQ ID NO: 1371270 - DNA, 15 bp, Homo sapiens
tggtgattggggatg

SEQ ID NO: 1371271 - DNA, 15 bp, Homo sapiens
ttggtgattggggat

SEQ ID NO: 1371272 - DNA, 15 bp, Homo sapiens
attggtgattgggga

SEQ ID NO: 1371273 - DNA, 15 bp, Homo sapiens
tattggtgattgggg

SEQ ID NO: 1371274 - DNA, 15 bp, Homo sapiens
atattggtgattggg

SEQ ID NO: 1371275 - DNA, 15 bp, Homo sapiens
gatattggtgattgg

SEQ ID NO: 1371276 - DNA, 15 bp, Homo sapiens
agatattggtgattg

SEQ ID NO: 1371277 - DNA, 15 bp, Homo sapiens
aagatattggtgatt

SEQ ID NO: 1371278 - DNA, 15 bp, Homo sapiens
aaagatattggtgat

SEQ ID NO: 1371279 - DNA, 15 bp, Homo sapiens
aaaagatattggtga

SEQ ID NO: 1371280 - DNA, 15 bp, Homo sapiens
aaaaagatattggtg

SEQ ID NO: 1371281 - DNA, 15 bp, Homo sapiens
caaaaagatattggt

SEQ ID NO: 1371282 - DNA, 15 bp, Homo sapiens
tcaaaaagatattgg

SEQ ID NO: 1371283 - DNA, 15 bp, Homo sapiens
atcaaaaagatattg

SEQ ID NO: 1371284 - DNA, 15 bp, Homo sapiens
catcaaaaagatatt

SEQ ID NO: 1371285 - DNA, 15 bp, Homo sapiens
tcatcaaaaagatat

SEQ ID NO: 1371286 - DNA, 15 bp, Homo sapiens
ctcatcaaaaagata

SEQ ID NO: 1371287 - DNA, 15 bp, Homo sapiens
actcatcaaaaagat

SEQ ID NO: 1371288 - DNA, 15 bp, Homo sapiens
tactcatcaaaaaga

SEQ ID NO: 1371289 - DNA, 15 bp, Homo sapiens
ctactcatcaaaaag

SEQ ID NO: 1371290 - DNA, 15 bp, Homo sapiens
actactcatcaaaaa

SEQ ID NO: 1371291 - DNA, 15 bp, Homo sapiens
cactactcatcaaaa

SEQ ID NO: 1371292 - DNA, 15 bp, Homo sapiens
acactactcatcaaa

SEQ ID NO: 1371293 - DNA, 15 bp, Homo sapiens
tacactactcatcaa

SEQ ID NO: 1371294 - DNA, 15 bp, Homo sapiens
ttacactactcatca

SEQ ID NO: 1371295 - DNA, 15 bp, Homo sapiens
tttacactactcatc

SEQ ID NO: 1371296 - DNA, 15 bp, Homo sapiens
ttttacactactcat

SEQ ID NO: 1371297 - DNA, 15 bp, Homo sapiens
tttttacactactca

SEQ ID NO: 1371298 - DNA, 15 bp, Homo sapiens
ttttttacactactc

SEQ ID NO: 1371299 - DNA, 15 bp, Homo sapiens
tttttttacactact

SEQ ID NO: 1371300 - DNA, 15 bp, Homo sapiens
ttttttttacactac

SEQ ID NO: 1371301 - DNA, 15 bp, Homo sapiens
tttttttttacacta

SEQ ID NO: 1371302 - DNA, 15 bp, Homo sapiens
ttttttttttacact

SEQ ID NO: 1371303 - DNA, 15 bp, Homo sapiens
tttttttttttacac

SEQ ID NO: 1371304 - DNA, 15 bp, Homo sapiens
gtttttttttttaca

SEQ ID NO: 1371305 - DNA, 15 bp, Homo sapiens
ggtttttttttttac

SEQ ID NO: 1371306 - DNA, 15 bp, Homo sapiens
tggttttttttttta

SEQ ID NO: 1371307 - DNA, 15 bp, Homo sapiens
ttggttttttttttt

SEQ ID NO: 1371308 - DNA, 15 bp, Homo sapiens
gttggtttttttttt

SEQ ID NO: 1371309 - DNA, 15 bp, Homo sapiens
tgttggttttttttt

SEQ ID NO: 1371310 - DNA, 15 bp, Homo sapiens
ttgttggtttttttt

SEQ ID NO: 1371311 - DNA, 15 bp, Homo sapiens
gttgttggttttttt

SEQ ID NO: 1371312 - DNA, 15 bp, Homo sapiens
tgttgttggtttttt

SEQ ID NO: 1371313 - DNA, 15 bp, Homo sapiens
ttgttgttggttttt

SEQ ID NO: 1371314 - DNA, 15 bp, Homo sapiens
cttgttgttggtttt

SEQ ID NO: 1371315 - DNA, 15 bp, Homo sapiens
tcttgttgttggttt

SEQ ID NO: 1371316 - DNA, 15 bp, Homo sapiens
ttcttgttgttggtt

SEQ ID NO: 1371317 - DNA, 15 bp, Homo sapiens
tttcttgttgttggt

SEQ ID NO: 1371318 - DNA, 15 bp, Homo sapiens
atttcttgttgttgg

SEQ ID NO: 1371319 - DNA, 15 bp, Homo sapiens
aatttcttgttgttg

SEQ ID NO: 1371320 - DNA, 15 bp, Homo sapiens
caatttcttgttgtt

SEQ ID NO: 1371321 - DNA, 15 bp, Homo sapiens
acaatttcttgttgt

SEQ ID NO: 1371322 - DNA, 15 bp, Homo sapiens
aacaatttcttgttg

SEQ ID NO: 1371323 - DNA, 15 bp, Homo sapiens
caacaatttcttgtt

SEQ ID NO: 1371324 - DNA, 15 bp, Homo sapiens
tcaacaatttcttgt

SEQ ID NO: 1371325 - DNA, 15 bp, Homo sapiens
atcaacaatttcttg

SEQ ID NO: 1371326 - DNA, 15 bp, Homo sapiens
catcaacaatttctt

SEQ ID NO: 1371327 - DNA, 15 bp, Homo sapiens
gcatcaacaatttct

SEQ ID NO: 1371328 - DNA, 15 bp, Homo sapiens
agcatcaacaatttc

SEQ ID NO: 1371329 - DNA, 15 bp, Homo sapiens
aagcatcaacaattt

SEQ ID NO: 1371330 - DNA, 15 bp, Homo sapiens
aaagcatcaacaatt

SEQ ID NO: 1371331 - DNA, 15 bp, Homo sapiens
taaagcatcaacaat

SEQ ID NO: 1371332 - DNA, 15 bp, Homo sapiens
ttaaagcatcaacaa

SEQ ID NO: 1371333 - DNA, 15 bp, Homo sapiens
tttaaagcatcaaca

SEQ ID NO: 1371334 - DNA, 15 bp, Homo sapiens
gtttaaagcatcaac

SEQ ID NO: 1371335 - DNA, 15 bp, Homo sapiens
agtttaaagcatcaa

SEQ ID NO: 1371336 - DNA, 15 bp, Homo sapiens
tagtttaaagcatca

SEQ ID NO: 1371337 - DNA, 15 bp, Homo sapiens
gtagtttaaagcatc

SEQ ID NO: 1371338 - DNA, 15 bp, Homo sapiens
agtagtttaaagcat

SEQ ID NO: 1371339 - DNA, 15 bp, Homo sapiens
gagtagtttaaagca

SEQ ID NO: 1371340 - DNA, 15 bp, Homo sapiens
agagtagtttaaagc

SEQ ID NO: 1371341 - DNA, 15 bp, Homo sapiens
aagagtagtttaaag

SEQ ID NO: 1371342 - DNA, 15 bp, Homo sapiens
gaagagtagtttaaa

SEQ ID NO: 1371343 - DNA, 15 bp, Homo sapiens
tgaagagtagtttaa

SEQ ID NO: 1371344 - DNA, 15 bp, Homo sapiens
ttgaagagtagttta

SEQ ID NO: 1371345 - DNA, 15 bp, Homo sapiens
tttgaagagtagttt

SEQ ID NO: 1371346 - DNA, 15 bp, Homo sapiens
gtttgaagagtagtt

SEQ ID NO: 1371347 - DNA, 15 bp, Homo sapiens
tgtttgaagagtagt

SEQ ID NO: 1371348 - DNA, 15 bp, Homo sapiens
ttgtttgaagagtag

SEQ ID NO: 1371349 - DNA, 15 bp, Homo sapiens
tttgtttgaagagta

SEQ ID NO: 1371350 - DNA, 15 bp, Homo sapiens
ctttgtttgaagagt

SEQ ID NO: 1371351 - DNA, 15 bp, Homo sapiens
actttgtttgaagag

SEQ ID NO: 1371352 - DNA, 15 bp, Homo sapiens
aactttgtttgaaga

SEQ ID NO: 1371353 - DNA, 15 bp, Homo sapiens
aaactttgtttgaag

SEQ ID NO: 1371354 - DNA, 15 bp, Homo sapiens
aaaactttgtttgaa

SEQ ID NO: 1371355 - DNA, 15 bp, Homo sapiens
taaaactttgtttga

SEQ ID NO: 1371356 - DNA, 15 bp, Homo sapiens
ttaaaactttgtttg

SEQ ID NO: 1371357 - DNA, 15 bp, Homo sapiens
tttaaaactttgttt

SEQ ID NO: 1371358 - DNA, 15 bp, Homo sapiens
ctttaaaactttgtt

SEQ ID NO: 1371359 - DNA, 15 bp, Homo sapiens
gctttaaaactttgt

SEQ ID NO: 1371360 - DNA, 15 bp, Homo sapiens
agctttaaaactttg

SEQ ID NO: 1371361 - DNA, 15 bp, Homo sapiens
tagctttaaaacttt

SEQ ID NO: 1371362 - DNA, 15 bp, Homo sapiens
atagctttaaaactt

SEQ ID NO: 1371363 - DNA, 15 bp, Homo sapiens
tatagctttaaaact

SEQ ID NO: 1371364 - DNA, 15 bp, Homo sapiens
ctatagctttaaaac

SEQ ID NO: 1371365 - DNA, 15 bp, Homo sapiens
tctatagctttaaaa

SEQ ID NO: 1371366 - DNA, 15 bp, Homo sapiens
ctctatagctttaaa

SEQ ID NO: 1371367 - DNA, 15 bp, Homo sapiens
tctctatagctttaa

SEQ ID NO: 1371368 - DNA, 15 bp, Homo sapiens
ctctctatagcttta

SEQ ID NO: 1371369 - DNA, 15 bp, Homo sapiens
tctctctatagcttt

SEQ ID NO: 1371370 - DNA, 15 bp, Homo sapiens
ttctctctatagctt

SEQ ID NO: 1371371 - DNA, 15 bp, Homo sapiens
attctctctatagct

SEQ ID NO: 1371372 - DNA, 15 bp, Homo sapiens
cattctctctatagc

SEQ ID NO: 1371373 - DNA, 15 bp, Homo sapiens
ccattctctctatag

SEQ ID NO: 1371374 - DNA, 15 bp, Homo sapiens
tccattctctctata

SEQ ID NO: 1371375 - DNA, 15 bp, Homo sapiens
atccattctctctat

SEQ ID NO: 1371376 - DNA, 15 bp, Homo sapiens
tatccattctctcta

SEQ ID NO: 1371377 - DNA, 15 bp, Homo sapiens
atatccattctctct

SEQ ID NO: 1371378 - DNA, 15 bp, Homo sapiens
aatatccattctctc

SEQ ID NO: 1371379 - DNA, 15 bp, Homo sapiens
taatatccattctct

SEQ ID NO: 1371380 - DNA, 15 bp, Homo sapiens
ctaatatccattctc

SEQ ID NO: 1371381 - DNA, 15 bp, Homo sapiens
gctaatatccattct

SEQ ID NO: 1371382 - DNA, 15 bp, Homo sapiens
ggctaatatccattc

SEQ ID NO: 1371383 - DNA, 15 bp, Homo sapiens
gggctaatatccatt

SEQ ID NO: 1371384 - DNA, 15 bp, Homo sapiens
agggctaatatccat

SEQ ID NO: 1371385 - DNA, 15 bp, Homo sapiens
aagggctaatatcca

SEQ ID NO: 1371386 - DNA, 15 bp, Homo sapiens
aaagggctaatatcc

SEQ ID NO: 1371387 - DNA, 15 bp, Homo sapiens
caaagggctaatatc

SEQ ID NO: 1371388 - DNA, 15 bp, Homo sapiens
acaaagggctaatat

SEQ ID NO: 1371389 - DNA, 15 bp, Homo sapiens
gacaaagggctaata

SEQ ID NO: 1371390 - DNA, 15 bp, Homo sapiens
tgacaaagggctaat

SEQ ID NO: 1371391 - DNA, 15 bp, Homo sapiens
ctgacaaagggctaa

SEQ ID NO: 1371392 - DNA, 15 bp, Homo sapiens
aggcaacctacagaa

SEQ ID NO: 1371393 - DNA, 15 bp, Homo sapiens
caggcaacctacaga

SEQ ID NO: 1371394 - DNA, 15 bp, Homo sapiens
acaggcaacctacag

SEQ ID NO: 1371395 - DNA, 15 bp, Homo sapiens
aacaggcaacctaca

SEQ ID NO: 1371396 - DNA, 15 bp, Homo sapiens
gaacaggcaacctac

SEQ ID NO: 1371397 - DNA, 15 bp, Homo sapiens
tgaacaggcaaccta

SEQ ID NO: 1371398 - DNA, 15 bp, Homo sapiens
gtgaacaggcaacct

SEQ ID NO: 1371399 - DNA, 15 bp, Homo sapiens
agtgaacaggcaacc

SEQ ID NO: 1371400 - DNA, 15 bp, Homo sapiens
gagtgaacaggcaac

SEQ ID NO: 1371401 - DNA, 15 bp, Homo sapiens
agagtgaacaggcaa

SEQ ID NO: 1371402 - DNA, 15 bp, Homo sapiens
cagagtgaacaggca

SEQ ID NO: 1371403 - DNA, 15 bp, Homo sapiens
tcagagtgaacaggc

SEQ ID NO: 1371404 - DNA, 15 bp, Homo sapiens
atcagagtgaacagg

SEQ ID NO: 1371405 - DNA, 15 bp, Homo sapiens
catcagagtgaacag

SEQ ID NO: 1371406 - DNA, 15 bp, Homo sapiens
ccatcagagtgaaca

SEQ ID NO: 1371407 - DNA, 15 bp, Homo sapiens
accatcagagtgaac

SEQ ID NO: 1371408 - DNA, 15 bp, Homo sapiens
caccatcagagtgaa

SEQ ID NO: 1371409 - DNA, 15 bp, Homo sapiens
ccaccatcagagtga

SEQ ID NO: 1371410 - DNA, 15 bp, Homo sapiens
accaccatcagagtg

SEQ ID NO: 1371411 - DNA, 15 bp, Homo sapiens
aaccaccatcagagt

SEQ ID NO: 1371412 - DNA, 15 bp, Homo sapiens
aaaccaccatcagag

SEQ ID NO: 1371413 - DNA, 15 bp, Homo sapiens
gaaaccaccatcaga

SEQ ID NO: 1371414 - DNA, 15 bp, Homo sapiens
agaaaccaccatcag

SEQ ID NO: 1371415 - DNA, 15 bp, Homo sapiens
aagaaaccaccatca

SEQ ID NO: 1371416 - DNA, 15 bp, Homo sapiens
aaagaaaccaccatc

SEQ ID NO: 1371417 - DNA, 15 bp, Homo sapiens
aaaagaaaccaccat

SEQ ID NO: 1371418 - DNA, 15 bp, Homo sapiens
caaaagaaaccacca

SEQ ID NO: 1371419 - DNA, 15 bp, Homo sapiens
gcaaaagaaaccacc

SEQ ID NO: 1371420 - DNA, 15 bp, Homo sapiens
agcaaaagaaaccac

SEQ ID NO: 1371421 - DNA, 15 bp, Homo sapiens
cagcaaaagaaacca

SEQ ID NO: 1371422 - DNA, 15 bp, Homo sapiens
acagcaaaagaaacc

SEQ ID NO: 1371423 - DNA, 15 bp, Homo sapiens
cacagcaaaagaaac

SEQ ID NO: 1371424 - DNA, 15 bp, Homo sapiens
gcacagcaaaagaaa

SEQ ID NO: 1371425 - DNA, 15 bp, Homo sapiens
tgcacagcaaaagaa

SEQ ID NO: 1371426 - DNA, 15 bp, Homo sapiens
ctgcacagcaaaaga

SEQ ID NO: 1371427 - DNA, 15 bp, Homo sapiens
tctgcacagcaaaag

SEQ ID NO: 1371428 - DNA, 15 bp, Homo sapiens
ttaaactaaagagct

SEQ ID NO: 1371429 - DNA, 15 bp, Homo sapiens
attaaactaaagagc

SEQ ID NO: 1371430 - DNA, 15 bp, Homo sapiens
aattaaactaaagag

SEQ ID NO: 1371431 - DNA, 15 bp, Homo sapiens
taattaaactaaaga

SEQ ID NO: 1371432 - DNA, 15 bp, Homo sapiens
ctaattaaactaaag

SEQ ID NO: 1371433 - DNA, 15 bp, Homo sapiens
tctaattaaactaaa

SEQ ID NO: 1371434 - DNA, 15 bp, Homo sapiens
atctaattaaactaa

SEQ ID NO: 1371435 - DNA, 15 bp, Homo sapiens
gatctaattaaacta

SEQ ID NO: 1371436 - DNA, 15 bp, Homo sapiens
ggatctaattaaact

SEQ ID NO: 1371437 - DNA, 15 bp, Homo sapiens
gggatctaattaaac

SEQ ID NO: 1371438 - DNA, 15 bp, Homo sapiens
cgggatctaattaaa

SEQ ID NO: 1371439 - DNA, 15 bp, Homo sapiens
acgggatctaattaa

SEQ ID NO: 1371440 - DNA, 15 bp, Homo sapiens
aacgggatctaatta

SEQ ID NO: 1371441 - DNA, 15 bp, Homo sapiens
aaacgggatctaatt

SEQ ID NO: 1371442 - DNA, 15 bp, Homo sapiens
caaacgggatctaat

SEQ ID NO: 1371443 - DNA, 15 bp, Homo sapiens
acaaacgggatctaa

SEQ ID NO: 1371444 - DNA, 15 bp, Homo sapiens
gacaaacgggatcta

SEQ ID NO: 1371445 - DNA, 15 bp, Homo sapiens
tgacaaacgggatct

SEQ ID NO: 1371446 - DNA, 15 bp, Homo sapiens
ttgacaaacgggatc

SEQ ID NO: 1371447 - DNA, 15 bp, Homo sapiens
attgacaaacgggat

SEQ ID NO: 1371448 - DNA, 15 bp, Homo sapiens
aattgacaaacggga

SEQ ID NO: 1371449 - DNA, 15 bp, Homo sapiens
aaattgacaaacggg

SEQ ID NO: 1371450 - DNA, 15 bp, Homo sapiens
aaaattgacaaacgg

SEQ ID NO: 1371451 - DNA, 15 bp, Homo sapiens
caaaattgacaaacg

SEQ ID NO: 1371452 - DNA, 15 bp, Homo sapiens
ccaaaattgacaaac

SEQ ID NO: 1371453 - DNA, 15 bp, Homo sapiens
caacaaaagccaaaa

SEQ ID NO: 1371454 - DNA, 15 bp, Homo sapiens
gcaacaaaagccaaa

SEQ ID NO: 1371455 - DNA, 15 bp, Homo sapiens
tggcaacaaaagcca

SEQ ID NO: 1371456 - DNA, 15 bp, Homo sapiens
atggcaacaaaagcc

SEQ ID NO: 1371457 - DNA, 15 bp, Homo sapiens
aatggcaacaaaagc

SEQ ID NO: 1371458 - DNA, 15 bp, Homo sapiens
caatggcaacaaaag

SEQ ID NO: 1371459 - DNA, 15 bp, Homo sapiens
gcaatggcaacaaaa

SEQ ID NO: 1371460 - DNA, 15 bp, Homo sapiens
agcaatggcaacaaa

SEQ ID NO: 1371461 - DNA, 15 bp, Homo sapiens
aagcaatggcaacaa

SEQ ID NO: 1371462 - DNA, 15 bp, Homo sapiens
aaagcaatggcaaca

SEQ ID NO: 1371463 - DNA, 15 bp, Homo sapiens
aaaagcaatggcaac

SEQ ID NO: 1371464 - DNA, 15 bp, Homo sapiens
caaaagcaatggcaa

SEQ ID NO: 1371465 - DNA, 15 bp, Homo sapiens
ccaaaagcaatggca

SEQ ID NO: 1371466 - DNA, 15 bp, Homo sapiens
accaaaagcaatggc

SEQ ID NO: 1371467 - DNA, 15 bp, Homo sapiens
caccaaaagcaatgg

SEQ ID NO: 1371468 - DNA, 15 bp, Homo sapiens
acaccaaaagcaatg

SEQ ID NO: 1371469 - DNA, 15 bp, Homo sapiens
aacaccaaaagcaat

SEQ ID NO: 1371470 - DNA, 15 bp, Homo sapiens
cttcatgtctaaaac

SEQ ID NO: 1371471 - DNA, 15 bp, Homo sapiens
acttcatgtctaaaa

SEQ ID NO: 1371472 - DNA, 15 bp, Homo sapiens
gacttcatgtctaaa

SEQ ID NO: 1371473 - DNA, 15 bp, Homo sapiens
ggacttcatgtctaa

SEQ ID NO: 1371474 - DNA, 15 bp, Homo sapiens
aggacttcatgtcta

SEQ ID NO: 1371475 - DNA, 15 bp, Homo sapiens
aaggacttcatgtct

SEQ ID NO: 1371476 - DNA, 15 bp, Homo sapiens
caaggacttcatgtc

SEQ ID NO: 1371477 - DNA, 15 bp, Homo sapiens
gcaaggacttcatgt

SEQ ID NO: 1371478 - DNA, 15 bp, Homo sapiens
ggcaaggacttcatg

SEQ ID NO: 1371479 - DNA, 15 bp, Homo sapiens
gggcaaggacttcat

SEQ ID NO: 1371480 - DNA, 15 bp, Homo sapiens
tgggcaaggacttca

SEQ ID NO: 1371481 - DNA, 15 bp, Homo sapiens
atgggcaaggacttc

SEQ ID NO: 1371482 - DNA, 15 bp, Homo sapiens
catgggcaaggactt

SEQ ID NO: 1371483 - DNA, 15 bp, Homo sapiens
gcatgggcaaggact

SEQ ID NO: 1371484 - DNA, 15 bp, Homo sapiens
ggcatgggcaaggac

SEQ ID NO: 1371485 - DNA, 15 bp, Homo sapiens
aggcatgggcaagga

SEQ ID NO: 1371486 - DNA, 15 bp, Homo sapiens
taggcatgggcaagg

SEQ ID NO: 1371487 - DNA, 15 bp, Homo sapiens
ataggcatgggcaag

SEQ ID NO: 1371488 - DNA, 15 bp, Homo sapiens
gacataggcatgggc

SEQ ID NO: 1371489 - DNA, 15 bp, Homo sapiens
ggacataggcatggg

SEQ ID NO: 1371490 - DNA, 15 bp, Homo sapiens
cattcaggacatagg

SEQ ID NO: 1371491 - DNA, 15 bp, Homo sapiens
ccattcaggacatag

SEQ ID NO: 1371492 - DNA, 15 bp, Homo sapiens
accattcaggacata

SEQ ID NO: 1371493 - DNA, 15 bp, Homo sapiens
taccattcaggacat

SEQ ID NO: 1371494 - DNA, 15 bp, Homo sapiens
ataccattcaggaca

SEQ ID NO: 1371495 - DNA, 15 bp, Homo sapiens
aataccattcaggac

SEQ ID NO: 1371496 - DNA, 15 bp, Homo sapiens
caataccattcagga

SEQ ID NO: 1371497 - DNA, 15 bp, Homo sapiens
gcaataccattcagg

SEQ ID NO: 1371498 - DNA, 15 bp, Homo sapiens
ggcaataccattcag

SEQ ID NO: 1371499 - DNA, 15 bp, Homo sapiens
acctaggcaatacca

SEQ ID NO: 1371500 - DNA, 15 bp, Homo sapiens
aacctaggcaatacc

SEQ ID NO: 1371501 - DNA, 15 bp, Homo sapiens
aaacctaggcaatac

SEQ ID NO: 1371502 - DNA, 15 bp, Homo sapiens
aaaacctaggcaata

SEQ ID NO: 1371503 - DNA, 15 bp, Homo sapiens
gaaaacctaggcaat

SEQ ID NO: 1371504 - DNA, 15 bp, Homo sapiens
agaaaacctaggcaa

SEQ ID NO: 1371505 - DNA, 15 bp, Homo sapiens
aagaaaacctaggca

SEQ ID NO: 1371506 - DNA, 15 bp, Homo sapiens
gaagaaaacctaggc

SEQ ID NO: 1371507 - DNA, 15 bp, Homo sapiens
agaagaaaacctagg

SEQ ID NO: 1371508 - DNA, 15 bp, Homo sapiens
tagaagaaaacctag

SEQ ID NO: 1371509 - DNA, 15 bp, Homo sapiens
ttagaagaaaaccta

SEQ ID NO: 1371510 - DNA, 15 bp, Homo sapiens
cttagaagaaaacct

SEQ ID NO: 1371511 - DNA, 15 bp, Homo sapiens
ccttagaagaaaacc

SEQ ID NO: 1371512 - DNA, 15 bp, Homo sapiens
accttagaagaaaac

SEQ ID NO: 1371513 - DNA, 15 bp, Homo sapiens
aaccttagaagaaaa

SEQ ID NO: 1371514 - DNA, 15 bp, Homo sapiens
aaaccttagaagaaa

SEQ ID NO: 1371515 - DNA, 15 bp, Homo sapiens
aaaaccttagaagaa

SEQ ID NO: 1371516 - DNA, 15 bp, Homo sapiens
aaaaaccttagaaga

SEQ ID NO: 1371517 - DNA, 15 bp, Homo sapiens
taaaaaccttagaag

SEQ ID NO: 1371518 - DNA, 15 bp, Homo sapiens
ataaaaaccttagaa

SEQ ID NO: 1371519 - DNA, 15 bp, Homo sapiens
cataaaaaccttaga

SEQ ID NO: 1371520 - DNA, 15 bp, Homo sapiens
ccataaaaaccttag

SEQ ID NO: 1371521 - DNA, 15 bp, Homo sapiens
accataaaaacctta

SEQ ID NO: 1371522 - DNA, 15 bp, Homo sapiens
aaccataaaaacctt

SEQ ID NO: 1371523 - DNA, 15 bp, Homo sapiens
aaaccataaaaacct

SEQ ID NO: 1371524 - DNA, 15 bp, Homo sapiens
aatgttagacctaaa

SEQ ID NO: 1371525 - DNA, 15 bp, Homo sapiens
aaatgttagacctaa

SEQ ID NO: 1371526 - DNA, 15 bp, Homo sapiens
taaatgttagaccta

SEQ ID NO: 1371527 - DNA, 15 bp, Homo sapiens
ttaaatgttagacct

SEQ ID NO: 1371528 - DNA, 15 bp, Homo sapiens
cttaaatgttagacc

SEQ ID NO: 1371529 - DNA, 15 bp, Homo sapiens
gcttaaatgttagac

SEQ ID NO: 1371530 - DNA, 15 bp, Homo sapiens
ggcttaaatgttaga

SEQ ID NO: 1371531 - DNA, 15 bp, Homo sapiens
aggcttaaatgttag

SEQ ID NO: 1371532 - DNA, 15 bp, Homo sapiens
aaggcttaaatgtta

SEQ ID NO: 1371533 - DNA, 15 bp, Homo sapiens
aaaggcttaaatgtt

SEQ ID NO: 1371534 - DNA, 15 bp, Homo sapiens
taaaggcttaaatgt

SEQ ID NO: 1371535 - DNA, 15 bp, Homo sapiens
ttaaaggcttaaatg

SEQ ID NO: 1371536 - DNA, 15 bp, Homo sapiens
attaaaggcttaaat

SEQ ID NO: 1371537 - DNA, 15 bp, Homo sapiens
gattaaaggcttaaa

SEQ ID NO: 1371538 - DNA, 15 bp, Homo sapiens
ggattaaaggcttaa

SEQ ID NO: 1371539 - DNA, 15 bp, Homo sapiens
tggattaaaggctta

SEQ ID NO: 1371540 - DNA, 15 bp, Homo sapiens
atggattaaaggctt

SEQ ID NO: 1371541 - DNA, 15 bp, Homo sapiens
gatggattaaaggct

SEQ ID NO: 1371542 - DNA, 15 bp, Homo sapiens
agatggattaaaggc

SEQ ID NO: 1371543 - DNA, 15 bp, Homo sapiens
aagatggattaaagg

SEQ ID NO: 1371544 - DNA, 15 bp, Homo sapiens
caagatggattaaag

SEQ ID NO: 1371545 - DNA, 15 bp, Homo sapiens
tcaagatggattaaa

SEQ ID NO: 1371546 - DNA, 15 bp, Homo sapiens
aattaattcaagatg

SEQ ID NO: 1371547 - DNA, 15 bp, Homo sapiens
caattaattcaagat

SEQ ID NO: 1371548 - DNA, 15 bp, Homo sapiens
acaattaattcaaga

SEQ ID NO: 1371549 - DNA, 15 bp, Homo sapiens
aacaattaattcaag

SEQ ID NO: 1371550 - DNA, 15 bp, Homo sapiens
caacaattaattcaa

SEQ ID NO: 1371551 - DNA, 15 bp, Homo sapiens
acaacaattaattca

SEQ ID NO: 1371552 - DNA, 15 bp, Homo sapiens
tacaacaattaattc

SEQ ID NO: 1371553 - DNA, 15 bp, Homo sapiens
atacaacaattaatt

SEQ ID NO: 1371554 - DNA, 15 bp, Homo sapiens
tatacaacaattaat

SEQ ID NO: 1371555 - DNA, 15 bp, Homo sapiens
ttatacaacaattaa

SEQ ID NO: 1371556 - DNA, 15 bp, Homo sapiens
cttatacaacaatta

SEQ ID NO: 1371557 - DNA, 15 bp, Homo sapiens
ccttatacaacaatt

SEQ ID NO: 1371558 - DNA, 15 bp, Homo sapiens
accttatacaacaat

SEQ ID NO: 1371559 - DNA, 15 bp, Homo sapiens
caccttatacaacaa

SEQ ID NO: 1371560 - DNA, 15 bp, Homo sapiens
acaccttatacaaca

SEQ ID NO: 1371561 - DNA, 15 bp, Homo sapiens
tacaccttatacaac

SEQ ID NO: 1371562 - DNA, 15 bp, Homo sapiens
tcttacaccttatac

SEQ ID NO: 1371563 - DNA, 15 bp, Homo sapiens
ttcttacaccttata

SEQ ID NO: 1371564 - DNA, 15 bp, Homo sapiens
tttcttacaccttat

SEQ ID NO: 1371565 - DNA, 15 bp, Homo sapiens
ctttcttacacctta

SEQ ID NO: 1371566 - DNA, 15 bp, Homo sapiens
cctttcttacacctt

SEQ ID NO: 1371567 - DNA, 15 bp, Homo sapiens
ccctttcttacacct

SEQ ID NO: 1371568 - DNA, 15 bp, Homo sapiens
tccctttcttacacc

SEQ ID NO: 1371569 - DNA, 15 bp, Homo sapiens
atccctttcttacac

SEQ ID NO: 1371570 - DNA, 15 bp, Homo sapiens
gatccctttcttaca

SEQ ID NO: 1371571 - DNA, 15 bp, Homo sapiens
ggatccctttcttac

SEQ ID NO: 1371572 - DNA, 15 bp, Homo sapiens
tggatccctttctta

SEQ ID NO: 1371573 - DNA, 15 bp, Homo sapiens
ctggatccctttctt

SEQ ID NO: 1371574 - DNA, 15 bp, Homo sapiens
actggatccctttct

SEQ ID NO: 1371575 - DNA, 15 bp, Homo sapiens
aactggatccctttc

SEQ ID NO: 1371576 - DNA, 15 bp, Homo sapiens
aaactggatcccttt

SEQ ID NO: 1371577 - DNA, 15 bp, Homo sapiens
gtatgtagaaagctg

SEQ ID NO: 1371578 - DNA, 15 bp, Homo sapiens
cgtatgtagaaagct

SEQ ID NO: 1371579 - DNA, 15 bp, Homo sapiens
ccgtatgtagaaagc

SEQ ID NO: 1371580 - DNA, 15 bp, Homo sapiens
gccgtatgtagaaag

SEQ ID NO: 1371581 - DNA, 15 bp, Homo sapiens
agccgtatgtagaaa

SEQ ID NO: 1371582 - DNA, 15 bp, Homo sapiens
tagccgtatgtagaa

SEQ ID NO: 1371583 - DNA, 15 bp, Homo sapiens
ctagccgtatgtaga

SEQ ID NO: 1371584 - DNA, 15 bp, Homo sapiens
gctagccgtatgtag

SEQ ID NO: 1371585 - DNA, 15 bp, Homo sapiens
ggctagccgtatgta

SEQ ID NO: 1371586 - DNA, 15 bp, Homo sapiens
tggctagccgtatgt

SEQ ID NO: 1371587 - DNA, 15 bp, Homo sapiens
gtggctagccgtatg

SEQ ID NO: 1371588 - DNA, 15 bp, Homo sapiens
agtggctagccgtat

SEQ ID NO: 1371589 - DNA, 15 bp, Homo sapiens
aagtggctagccgta

SEQ ID NO: 1371590 - DNA, 15 bp, Homo sapiens
aaagtggctagccgt

SEQ ID NO: 1371591 - DNA, 15 bp, Homo sapiens
gaaagtggctagccg

SEQ ID NO: 1371592 - DNA, 15 bp, Homo sapiens
ggaaagtggctagcc

SEQ ID NO: 1371593 - DNA, 15 bp, Homo sapiens
gggaaagtggctagc

SEQ ID NO: 1371594 - DNA, 15 bp, Homo sapiens
ggggaaagtggctag

SEQ ID NO: 1371595 - DNA, 15 bp, Homo sapiens
tggggaaagtggcta

SEQ ID NO: 1371596 - DNA, 15 bp, Homo sapiens
ctggggaaagtggct

SEQ ID NO: 1371597 - DNA, 15 bp, Homo sapiens
gctggggaaagtggc

SEQ ID NO: 1371598 - DNA, 15 bp, Homo sapiens
tgctggggaaagtgg

SEQ ID NO: 1371599 - DNA, 15 bp, Homo sapiens
gtgctggggaaagtg

SEQ ID NO: 1371600 - DNA, 15 bp, Homo sapiens
ggtgctggggaaagt

SEQ ID NO: 1371601 - DNA, 15 bp, Homo sapiens
tggtgctggggaaag

SEQ ID NO: 1371602 - DNA, 15 bp, Homo sapiens
atggtgctggggaaa

SEQ ID NO: 1371603 - DNA, 15 bp, Homo sapiens
aatggtgctggggaa

SEQ ID NO: 1371604 - DNA, 15 bp, Homo sapiens
aaatggtgctgggga

SEQ ID NO: 1371605 - DNA, 15 bp, Homo sapiens
caaatggtgctgggg

SEQ ID NO: 1371606 - DNA, 15 bp, Homo sapiens
gaaaggattccctat

SEQ ID NO: 1371607 - DNA, 15 bp, Homo sapiens
ggaaaggattcccta

SEQ ID NO: 1371608 - DNA, 15 bp, Homo sapiens
catctttgacaaacc

SEQ ID NO: 1371609 - DNA, 15 bp, Homo sapiens
tcatctttgacaaac

SEQ ID NO: 1371610 - DNA, 15 bp, Homo sapiens
ctcatctttgacaaa

SEQ ID NO: 1371611 - DNA, 15 bp, Homo sapiens
tctcatctttgacaa

SEQ ID NO: 1371612 - DNA, 15 bp, Homo sapiens
gtctcatctttgaca

SEQ ID NO: 1371613 - DNA, 15 bp, Homo sapiens
tgtctcatctttgac

SEQ ID NO: 1371614 - DNA, 15 bp, Homo sapiens
ctgtctcatctttga

SEQ ID NO: 1371615 - DNA, 15 bp, Homo sapiens
gctgtctcatctttg

SEQ ID NO: 1371616 - DNA, 15 bp, Homo sapiens
agctgtctcatcttt

SEQ ID NO: 1371617 - DNA, 15 bp, Homo sapiens
cagctgtctcatctt

SEQ ID NO: 1371618 - DNA, 15 bp, Homo sapiens
acagctgtctcatct

SEQ ID NO: 1371619 - DNA, 15 bp, Homo sapiens
tacagctgtctcatc

SEQ ID NO: 1371620 - DNA, 15 bp, Homo sapiens
ctacagctgtctcat

SEQ ID NO: 1371621 - DNA, 15 bp, Homo sapiens
tctacagctgtctca

SEQ ID NO: 1371622 - DNA, 15 bp, Homo sapiens
atctacagctgtctc

SEQ ID NO: 1371623 - DNA, 15 bp, Homo sapiens
catctacagctgtct

SEQ ID NO: 1371624 - DNA, 15 bp, Homo sapiens
acatctacagctgtc

SEQ ID NO: 1371625 - DNA, 15 bp, Homo sapiens
cacatctacagctgt

SEQ ID NO: 1371626 - DNA, 15 bp, Homo sapiens
acacatctacagctg

SEQ ID NO: 1371627 - DNA, 15 bp, Homo sapiens
cacacatctacagct

SEQ ID NO: 1371628 - DNA, 15 bp, Homo sapiens
ccacacatctacagc

SEQ ID NO: 1371629 - DNA, 15 bp, Homo sapiens
accacacatctacag

SEQ ID NO: 1371630 - DNA, 15 bp, Homo sapiens
taccacacatctaca

SEQ ID NO: 1371631 - DNA, 15 bp, Homo sapiens
ataccacacatctac

SEQ ID NO: 1371632 - DNA, 15 bp, Homo sapiens
aataccacacatcta

SEQ ID NO: 1371633 - DNA, 15 bp, Homo sapiens
taataccacacatct

SEQ ID NO: 1371634 - DNA, 15 bp, Homo sapiens
ataataccacacatc

SEQ ID NO: 1371635 - DNA, 15 bp, Homo sapiens
aataataccacacat

SEQ ID NO: 1371636 - DNA, 15 bp, Homo sapiens
aaataataccacaca

SEQ ID NO: 1371637 - DNA, 15 bp, Homo sapiens
gaaataataccacac

SEQ ID NO: 1371638 - DNA, 15 bp, Homo sapiens
agaaataataccaca

SEQ ID NO: 1371639 - DNA, 15 bp, Homo sapiens
cagaaataataccac

SEQ ID NO: 1371640 - DNA, 15 bp, Homo sapiens
taatggaacagaaca

SEQ ID NO: 1371641 - DNA, 15 bp, Homo sapiens
ctaatggaacagaac

SEQ ID NO: 1371642 - DNA, 15 bp, Homo sapiens
actaatggaacagaa

SEQ ID NO: 1371643 - DNA, 15 bp, Homo sapiens
gactaatggaacaga

SEQ ID NO: 1371644 - DNA, 15 bp, Homo sapiens
agactaatggaacag

SEQ ID NO: 1371645 - DNA, 15 bp, Homo sapiens
tagactaatggaaca

SEQ ID NO: 1371646 - DNA, 15 bp, Homo sapiens
atagactaatggaac

SEQ ID NO: 1371647 - DNA, 15 bp, Homo sapiens
tatagactaatggaa

SEQ ID NO: 1371648 - DNA, 15 bp, Homo sapiens
atatagactaatgga

SEQ ID NO: 1371649 - DNA, 15 bp, Homo sapiens
gatatagactaatgg

SEQ ID NO: 1371650 - DNA, 15 bp, Homo sapiens
agatatagactaatg

SEQ ID NO: 1371651 - DNA, 15 bp, Homo sapiens
gagatatagactaat

SEQ ID NO: 1371652 - DNA, 15 bp, Homo sapiens
agagatatagactaa

SEQ ID NO: 1371653 - DNA, 15 bp, Homo sapiens
cagagatatagacta

SEQ ID NO: 1371654 - DNA, 15 bp, Homo sapiens
acagagatatagact

SEQ ID NO: 1371655 - DNA, 15 bp, Homo sapiens
ggctacctgacttca

SEQ ID NO: 1371656 - DNA, 15 bp, Homo sapiens
aggctacctgacttc

SEQ ID NO: 1371657 - DNA, 15 bp, Homo sapiens
caggctacctgactt

SEQ ID NO: 1371658 - DNA, 15 bp, Homo sapiens
tcaggctacctgact

SEQ ID NO: 1371659 - DNA, 15 bp, Homo sapiens
atcaggctacctgac

SEQ ID NO: 1371660 - DNA, 15 bp, Homo sapiens
catcaggctacctga

SEQ ID NO: 1371661 - DNA, 15 bp, Homo sapiens
gcatcaggctacctg

SEQ ID NO: 1371662 - DNA, 15 bp, Homo sapiens
ggcatcaggctacct

SEQ ID NO: 1371663 - DNA, 15 bp, Homo sapiens
aggcatcaggctacc

SEQ ID NO: 1371664 - DNA, 15 bp, Homo sapiens
gaggcatcaggctac

SEQ ID NO: 1371665 - DNA, 15 bp, Homo sapiens
ggaggcatcaggcta

SEQ ID NO: 1371666 - DNA, 15 bp, Homo sapiens
tggaggcatcaggct

SEQ ID NO: 1371667 - DNA, 15 bp, Homo sapiens
ctggaggcatcaggc

SEQ ID NO: 1371668 - DNA, 15 bp, Homo sapiens
gctggaggcatcagg

SEQ ID NO: 1371669 - DNA, 15 bp, Homo sapiens
agctggaggcatcag

SEQ ID NO: 1371670 - DNA, 15 bp, Homo sapiens
ggaacaaagctggag

SEQ ID NO: 1371671 - DNA, 15 bp, Homo sapiens
aggaacaaagctgga

SEQ ID NO: 1371672 - DNA, 15 bp, Homo sapiens
aaggaacaaagctgg

SEQ ID NO: 1371673 - DNA, 15 bp, Homo sapiens
aaaggaacaaagctg

SEQ ID NO: 1371674 - DNA, 15 bp, Homo sapiens
caaaggaacaaagct

SEQ ID NO: 1371675 - DNA, 15 bp, Homo sapiens
ccaaaggaacaaagc

SEQ ID NO: 1371676 - DNA, 15 bp, Homo sapiens
gccaaaggaacaaag

SEQ ID NO: 1371677 - DNA, 15 bp, Homo sapiens
agccaaaggaacaaa

SEQ ID NO: 1371678 - DNA, 15 bp, Homo sapiens
aagccaaaggaacaa

SEQ ID NO: 1371679 - DNA, 15 bp, Homo sapiens
taagccaaaggaaca

SEQ ID NO: 1371680 - DNA, 15 bp, Homo sapiens
ctaagccaaaggaac

SEQ ID NO: 1371681 - DNA, 15 bp, Homo sapiens
cctaagccaaaggaa

SEQ ID NO: 1371682 - DNA, 15 bp, Homo sapiens
tcctaagccaaagga

SEQ ID NO: 1371683 - DNA, 15 bp, Homo sapiens
atcctaagccaaagg

SEQ ID NO: 1371684 - DNA, 15 bp, Homo sapiens
aatcctaagccaaag

SEQ ID NO: 1371685 - DNA, 15 bp, Homo sapiens
caatcctaagccaaa

SEQ ID NO: 1371686 - DNA, 15 bp, Homo sapiens
tcaatcctaagccaa

SEQ ID NO: 1371687 - DNA, 15 bp, Homo sapiens
gtcaatcctaagcca

SEQ ID NO: 1371688 - DNA, 15 bp, Homo sapiens
agtcaatcctaagcc

SEQ ID NO: 1371689 - DNA, 15 bp, Homo sapiens
ccaagtcaatcctaa

SEQ ID NO: 1371690 - DNA, 15 bp, Homo sapiens
gccaagtcaatccta

SEQ ID NO: 1371691 - DNA, 15 bp, Homo sapiens
tgccaagtcaatcct

SEQ ID NO: 1371692 - DNA, 15 bp, Homo sapiens
ttgccaagtcaatcc

SEQ ID NO: 1371693 - DNA, 15 bp, Homo sapiens
attgccaagtcaatc

SEQ ID NO: 1371694 - DNA, 15 bp, Homo sapiens
cattgccaagtcaat

SEQ ID NO: 1371695 - DNA, 15 bp, Homo sapiens
tcattgccaagtcaa

SEQ ID NO: 1371696 - DNA, 15 bp, Homo sapiens
ctcattgccaagtca

SEQ ID NO: 1371697 - DNA, 15 bp, Homo sapiens
cctcattgccaagtc

SEQ ID NO: 1371698 - DNA, 15 bp, Homo sapiens
ccctcattgccaagt

SEQ ID NO: 1371699 - DNA, 15 bp, Homo sapiens
gccctcattgccaag

SEQ ID NO: 1371700 - DNA, 15 bp, Homo sapiens
agccctcattgccaa

SEQ ID NO: 1371701 - DNA, 15 bp, Homo sapiens
gagccctcattgcca

SEQ ID NO: 1371702 - DNA, 15 bp, Homo sapiens
agagccctcattgcc

SEQ ID NO: 1371703 - DNA, 15 bp, Homo sapiens
aagagccctcattgc

SEQ ID NO: 1371704 - DNA, 15 bp, Homo sapiens
aaagagccctcattg

SEQ ID NO: 1371705 - DNA, 15 bp, Homo sapiens
aaaagagccctcatt

SEQ ID NO: 1371706 - DNA, 15 bp, Homo sapiens
aaaaagagccctcat

SEQ ID NO: 1371707 - DNA, 15 bp, Homo sapiens
aaaaaagagccctca

SEQ ID NO: 1371708 - DNA, 15 bp, Homo sapiens
caaaaaagagccctc

SEQ ID NO: 1371709 - DNA, 15 bp, Homo sapiens
ccaaaaaagagccct

SEQ ID NO: 1371710 - DNA, 15 bp, Homo sapiens
accaaaaaagagccc

SEQ ID NO: 1371711 - DNA, 15 bp, Homo sapiens
aaaccaaaaaagagc

SEQ ID NO: 1371712 - DNA, 15 bp, Homo sapiens
gaaaccaaaaaagag

SEQ ID NO: 1371713 - DNA, 15 bp, Homo sapiens
tgaaaccaaaaaaga

SEQ ID NO: 1371714 - DNA, 15 bp, Homo sapiens
atgaaaccaaaaaag

SEQ ID NO: 1371715 - DNA, 15 bp, Homo sapiens
tatgaaaccaaaaaa

SEQ ID NO: 1371716 - DNA, 15 bp, Homo sapiens
atatgaaaccaaaaa

SEQ ID NO: 1371717 - DNA, 15 bp, Homo sapiens
catatgaaaccaaaa

SEQ ID NO: 1371718 - DNA, 15 bp, Homo sapiens
tcatatgaaaccaaa

SEQ ID NO: 1371719 - DNA, 15 bp, Homo sapiens
ttcatatgaaaccaa

SEQ ID NO: 1371720 - DNA, 15 bp, Homo sapiens
gttcatatgaaacca

SEQ ID NO: 1371721 - DNA, 15 bp, Homo sapiens
agttcatatgaaacc

SEQ ID NO: 1371722 - DNA, 15 bp, Homo sapiens
aagttcatatgaaac

SEQ ID NO: 1371723 - DNA, 15 bp, Homo sapiens
aaagttcatatgaaa

SEQ ID NO: 1371724 - DNA, 15 bp, Homo sapiens
taaagttcatatgaa

SEQ ID NO: 1371725 - DNA, 15 bp, Homo sapiens
ttaaagttcatatga

SEQ ID NO: 1371726 - DNA, 15 bp, Homo sapiens
tttaaagttcatatg

SEQ ID NO: 1371727 - DNA, 15 bp, Homo sapiens
ctttaaagttcatat

SEQ ID NO: 1371728 - DNA, 15 bp, Homo sapiens
actttaaagttcata

SEQ ID NO: 1371729 - DNA, 15 bp, Homo sapiens
tactttaaagttcat

SEQ ID NO: 1371730 - DNA, 15 bp, Homo sapiens
ctactttaaagttca

SEQ ID NO: 1371731 - DNA, 15 bp, Homo sapiens
actactttaaagttc

SEQ ID NO: 1371732 - DNA, 15 bp, Homo sapiens
aaaaaaactacttta

SEQ ID NO: 1371733 - DNA, 15 bp, Homo sapiens
gaaaaaaactacttt

SEQ ID NO: 1371734 - DNA, 15 bp, Homo sapiens
ggaaaaaaactactt

SEQ ID NO: 1371735 - DNA, 15 bp, Homo sapiens
tggaaaaaaactact

SEQ ID NO: 1371736 - DNA, 15 bp, Homo sapiens
ttggaaaaaaactac

SEQ ID NO: 1371737 - DNA, 15 bp, Homo sapiens
attggaaaaaaacta

SEQ ID NO: 1371738 - DNA, 15 bp, Homo sapiens
aattggaaaaaaact

SEQ ID NO: 1371739 - DNA, 15 bp, Homo sapiens
gaattggaaaaaaac

SEQ ID NO: 1371740 - DNA, 15 bp, Homo sapiens
agaattggaaaaaaa

SEQ ID NO: 1371741 - DNA, 15 bp, Homo sapiens
cagaattggaaaaaa

SEQ ID NO: 1371742 - DNA, 15 bp, Homo sapiens
acagaattggaaaaa

SEQ ID NO: 1371743 - DNA, 15 bp, Homo sapiens
cacagaattggaaaa

SEQ ID NO: 1371744 - DNA, 15 bp, Homo sapiens
tcacagaattggaaa

SEQ ID NO: 1371745 - DNA, 15 bp, Homo sapiens
ttcacagaattggaa

SEQ ID NO: 1371746 - DNA, 15 bp, Homo sapiens
cttcacagaattgga

SEQ ID NO: 1371747 - DNA, 15 bp, Homo sapiens
tcttcacagaattgg

SEQ ID NO: 1371748 - DNA, 15 bp, Homo sapiens
ttcttcacagaattg

SEQ ID NO: 1371749 - DNA, 15 bp, Homo sapiens
tttcttcacagaatt

SEQ ID NO: 1371750 - DNA, 15 bp, Homo sapiens
ctttcttcacagaat

SEQ ID NO: 1371751 - DNA, 15 bp, Homo sapiens
actttcttcacagaa

SEQ ID NO: 1371752 - DNA, 15 bp, Homo sapiens
gactttcttcacaga

SEQ ID NO: 1371753 - DNA, 15 bp, Homo sapiens
tgactttcttcacag

SEQ ID NO: 1371754 - DNA, 15 bp, Homo sapiens
atgactttcttcaca

SEQ ID NO: 1371755 - DNA, 15 bp, Homo sapiens
aatgactttcttcac

SEQ ID NO: 1371756 - DNA, 15 bp, Homo sapiens
ccaatgccatcccca

SEQ ID NO: 1371757 - DNA, 15 bp, Homo sapiens
cccaatgccatcccc

SEQ ID NO: 1371758 - DNA, 15 bp, Homo sapiens
gcccaatgccatccc

SEQ ID NO: 1371759 - DNA, 15 bp, Homo sapiens
agcccaatgccatcc

SEQ ID NO: 1371760 - DNA, 15 bp, Homo sapiens
tagcccaatgccatc

SEQ ID NO: 1371761 - DNA, 15 bp, Homo sapiens
ttagcccaatgccat

SEQ ID NO: 1371762 - DNA, 15 bp, Homo sapiens
attagcccaatgcca

SEQ ID NO: 1371763 - DNA, 15 bp, Homo sapiens
tattagcccaatgcc

SEQ ID NO: 1371764 - DNA, 15 bp, Homo sapiens
atattagcccaatgc

SEQ ID NO: 1371765 - DNA, 15 bp, Homo sapiens
gatattagcccaatg

SEQ ID NO: 1371766 - DNA, 15 bp, Homo sapiens
ggatattagcccaat

SEQ ID NO: 1371767 - DNA, 15 bp, Homo sapiens
tggatattagcccaa

SEQ ID NO: 1371768 - DNA, 15 bp, Homo sapiens
ctggatattagccca

SEQ ID NO: 1371769 - DNA, 15 bp, Homo sapiens
tctggatattagccc

SEQ ID NO: 1371770 - DNA, 15 bp, Homo sapiens
ttctggatattagcc

SEQ ID NO: 1371771 - DNA, 15 bp, Homo sapiens
attctggatattagc

SEQ ID NO: 1371772 - DNA, 15 bp, Homo sapiens
gattctggatattag

SEQ ID NO: 1371773 - DNA, 15 bp, Homo sapiens
agattctggatatta

SEQ ID NO: 1371774 - DNA, 15 bp, Homo sapiens
tagattctggatatt

SEQ ID NO: 1371775 - DNA, 15 bp, Homo sapiens
gtagattctggatat

SEQ ID NO: 1371776 - DNA, 15 bp, Homo sapiens
tttgtagattctgga

SEQ ID NO: 1371777 - DNA, 15 bp, Homo sapiens
ctttgtagattctgg

SEQ ID NO: 1371778 - DNA, 15 bp, Homo sapiens
tctttgtagattctg

SEQ ID NO: 1371779 - DNA, 15 bp, Homo sapiens
ttctttgtagattct

SEQ ID NO: 1371780 - DNA, 15 bp, Homo sapiens
gttctttgtagattc

SEQ ID NO: 1371781 - DNA, 15 bp, Homo sapiens
agttctttgtagatt

SEQ ID NO: 1371782 - DNA, 15 bp, Homo sapiens
gagttctttgtagat

SEQ ID NO: 1371783 - DNA, 15 bp, Homo sapiens
tgagttctttgtaga

SEQ ID NO: 1371784 - DNA, 15 bp, Homo sapiens
ttgagttctttgtag

SEQ ID NO: 1371785 - DNA, 15 bp, Homo sapiens
tttgagttctttgta

SEQ ID NO: 1371786 - DNA, 15 bp, Homo sapiens
gtttgagttctttgt

SEQ ID NO: 1371787 - DNA, 15 bp, Homo sapiens
tgtttgagttctttg

SEQ ID NO: 1371788 - DNA, 15 bp, Homo sapiens
ttgtttgagttcttt

SEQ ID NO: 1371789 - DNA, 15 bp, Homo sapiens
tttgtttgagttctt

SEQ ID NO: 1371790 - DNA, 15 bp, Homo sapiens
atttgtttgagttct

SEQ ID NO: 1371791 - DNA, 15 bp, Homo sapiens
aatttgtttgagttc

SEQ ID NO: 1371792 - DNA, 15 bp, Homo sapiens
aaatttgtttgagtt

SEQ ID NO: 1371793 - DNA, 15 bp, Homo sapiens
taaatttgtttgagt

SEQ ID NO: 1371794 - DNA, 15 bp, Homo sapiens
gtaaatttgtttgag

SEQ ID NO: 1371795 - DNA, 15 bp, Homo sapiens
cttgtaaatttgttt

SEQ ID NO: 1371796 - DNA, 15 bp, Homo sapiens
tcttgtaaatttgtt

SEQ ID NO: 1371797 - DNA, 15 bp, Homo sapiens
ttcttgtaaatttgt

SEQ ID NO: 1371798 - DNA, 15 bp, Homo sapiens
tttcttgtaaatttg

SEQ ID NO: 1371799 - DNA, 15 bp, Homo sapiens
ttttcttgtaaattt

SEQ ID NO: 1371800 - DNA, 15 bp, Homo sapiens
tttttcttgtaaatt

SEQ ID NO: 1371801 - DNA, 15 bp, Homo sapiens
ttttttcttgtaaat

SEQ ID NO: 1371802 - DNA, 15 bp, Homo sapiens
tttttttcttgtaaa

SEQ ID NO: 1371803 - DNA, 15 bp, Homo sapiens
gtttttttcttgtaa

SEQ ID NO: 1371804 - DNA, 15 bp, Homo sapiens
tgtttttttcttgta

SEQ ID NO: 1371805 - DNA, 15 bp, Homo sapiens
ttgtttttttcttgt

SEQ ID NO: 1371806 - DNA, 15 bp, Homo sapiens
tttgtttttttcttg

SEQ ID NO: 1371807 - DNA, 15 bp, Homo sapiens
tgtttgtttttttct

SEQ ID NO: 1371808 - DNA, 15 bp, Homo sapiens
acccactttttgatg

SEQ ID NO: 1371809 - DNA, 15 bp, Homo sapiens
cacccactttttgat

SEQ ID NO: 1371810 - DNA, 15 bp, Homo sapiens
tcacccactttttga

SEQ ID NO: 1371811 - DNA, 15 bp, Homo sapiens
ttcacccactttttg

SEQ ID NO: 1371812 - DNA, 15 bp, Homo sapiens
cttcacccacttttt

SEQ ID NO: 1371813 - DNA, 15 bp, Homo sapiens
ccttcacccactttt

SEQ ID NO: 1371814 - DNA, 15 bp, Homo sapiens
tccttcacccacttt

SEQ ID NO: 1371815 - DNA, 15 bp, Homo sapiens
atccttcacccactt

SEQ ID NO: 1371816 - DNA, 15 bp, Homo sapiens
tatccttcacccact

SEQ ID NO: 1371817 - DNA, 15 bp, Homo sapiens
gtatccttcacccac

SEQ ID NO: 1371818 - DNA, 15 bp, Homo sapiens
cgtatccttcaccca

SEQ ID NO: 1371819 - DNA, 15 bp, Homo sapiens
tcgtatccttcaccc

SEQ ID NO: 1371820 - DNA, 15 bp, Homo sapiens
ttcgtatccttcacc

SEQ ID NO: 1371821 - DNA, 15 bp, Homo sapiens
gttcgtatccttcac

SEQ ID NO: 1371822 - DNA, 15 bp, Homo sapiens
tgttcgtatccttca

SEQ ID NO: 1371823 - DNA, 15 bp, Homo sapiens
ctgttcgtatccttc

SEQ ID NO: 1371824 - DNA, 15 bp, Homo sapiens
tctgttcgtatcctt

SEQ ID NO: 1371825 - DNA, 15 bp, Homo sapiens
gtctgttcgtatcct

SEQ ID NO: 1371826 - DNA, 15 bp, Homo sapiens
tgtctgttcgtatcc

SEQ ID NO: 1371827 - DNA, 15 bp, Homo sapiens
gtgtctgttcgtatc

SEQ ID NO: 1371828 - DNA, 15 bp, Homo sapiens
agtgtctgttcgtat

SEQ ID NO: 1371829 - DNA, 15 bp, Homo sapiens
aagtgtctgttcgta

SEQ ID NO: 1371830 - DNA, 15 bp, Homo sapiens
gaagtgtctgttcgt

SEQ ID NO: 1371831 - DNA, 15 bp, Homo sapiens
agaagtgtctgttcg

SEQ ID NO: 1371832 - DNA, 15 bp, Homo sapiens
gagaagtgtctgttc

SEQ ID NO: 1371833 - DNA, 15 bp, Homo sapiens
cttttgagaagtgtc

SEQ ID NO: 1371834 - DNA, 15 bp, Homo sapiens
tcttttgagaagtgt

SEQ ID NO: 1371835 - DNA, 15 bp, Homo sapiens
ttcttttgagaagtg

SEQ ID NO: 1371836 - DNA, 15 bp, Homo sapiens
cttcttttgagaagt

SEQ ID NO: 1371837 - DNA, 15 bp, Homo sapiens
tcttcttttgagaag

SEQ ID NO: 1371838 - DNA, 15 bp, Homo sapiens
gtcttcttttgagaa

SEQ ID NO: 1371839 - DNA, 15 bp, Homo sapiens
tgtcttcttttgaga

SEQ ID NO: 1371840 - DNA, 15 bp, Homo sapiens
atgtcttcttttgag

SEQ ID NO: 1371841 - DNA, 15 bp, Homo sapiens
aatgtcttcttttga

SEQ ID NO: 1371842 - DNA, 15 bp, Homo sapiens
aaatgtcttcttttg

SEQ ID NO: 1371843 - DNA, 15 bp, Homo sapiens
taaatgtcttctttt

SEQ ID NO: 1371844 - DNA, 15 bp, Homo sapiens
ataaatgtcttcttt

SEQ ID NO: 1371845 - DNA, 15 bp, Homo sapiens
cataaatgtcttctt

SEQ ID NO: 1371846 - DNA, 15 bp, Homo sapiens
gcataaatgtcttct

SEQ ID NO: 1371847 - DNA, 15 bp, Homo sapiens
tgcataaatgtcttc

SEQ ID NO: 1371848 - DNA, 15 bp, Homo sapiens
ctgcataaatgtctt

SEQ ID NO: 1371849 - DNA, 15 bp, Homo sapiens
gctgcataaatgtct

SEQ ID NO: 1371850 - DNA, 15 bp, Homo sapiens
ggctgcataaatgtc

SEQ ID NO: 1371851 - DNA, 15 bp, Homo sapiens
tggctgcataaatgt

SEQ ID NO: 1371852 - DNA, 15 bp, Homo sapiens
ttggctgcataaatg

SEQ ID NO: 1371853 - DNA, 15 bp, Homo sapiens
gttggctgcataaat

SEQ ID NO: 1371854 - DNA, 15 bp, Homo sapiens
tgttggctgcataaa

SEQ ID NO: 1371855 - DNA, 15 bp, Homo sapiens
ctgttggctgcataa

SEQ ID NO: 1371856 - DNA, 15 bp, Homo sapiens
tctgttggctgcata

SEQ ID NO: 1371857 - DNA, 15 bp, Homo sapiens
gtctgttggctgcat

SEQ ID NO: 1371858 - DNA, 15 bp, Homo sapiens
tgtctgttggctgca

SEQ ID NO: 1371859 - DNA, 15 bp, Homo sapiens
gtgtctgttggctgc

SEQ ID NO: 1371860 - DNA, 15 bp, Homo sapiens
tgtgtctgttggctg

SEQ ID NO: 1371861 - DNA, 15 bp, Homo sapiens
atgtgtctgttggct

SEQ ID NO: 1371862 - DNA, 15 bp, Homo sapiens
catgtgtctgttggc

SEQ ID NO: 1371863 - DNA, 15 bp, Homo sapiens
tcatgtgtctgttgg

SEQ ID NO: 1371864 - DNA, 15 bp, Homo sapiens
ttcatgtgtctgttg

SEQ ID NO: 1371865 - DNA, 15 bp, Homo sapiens
tttcatgtgtctgtt

SEQ ID NO: 1371866 - DNA, 15 bp, Homo sapiens
ttttcatgtgtctgt

SEQ ID NO: 1371867 - DNA, 15 bp, Homo sapiens
tttttcatgtgtctg

SEQ ID NO: 1371868 - DNA, 15 bp, Homo sapiens
ttttttcatgtgtct

SEQ ID NO: 1371869 - DNA, 15 bp, Homo sapiens
attttttcatgtgtc

SEQ ID NO: 1371870 - DNA, 15 bp, Homo sapiens
cattttttcatgtgt

SEQ ID NO: 1371871 - DNA, 15 bp, Homo sapiens
gcattttttcatgtg

SEQ ID NO: 1371872 - DNA, 15 bp, Homo sapiens
agcattttttcatgt

SEQ ID NO: 1371873 - DNA, 15 bp, Homo sapiens
gagcattttttcatg

SEQ ID NO: 1371874 - DNA, 15 bp, Homo sapiens
tgagcattttttcat

SEQ ID NO: 1371875 - DNA, 15 bp, Homo sapiens
atgagcattttttca

SEQ ID NO: 1371876 - DNA, 15 bp, Homo sapiens
gatgagcattttttc

SEQ ID NO: 1371877 - DNA, 15 bp, Homo sapiens
tgatgagcatttttt

SEQ ID NO: 1371878 - DNA, 15 bp, Homo sapiens
atgatgagcattttt

SEQ ID NO: 1371879 - DNA, 15 bp, Homo sapiens
gatgatgagcatttt

SEQ ID NO: 1371880 - DNA, 15 bp, Homo sapiens
tgatgatgagcattt

SEQ ID NO: 1371881 - DNA, 15 bp, Homo sapiens
gtgatgatgagcatt

SEQ ID NO: 1371882 - DNA, 15 bp, Homo sapiens
agtgatgatgagcat

SEQ ID NO: 1371883 - DNA, 15 bp, Homo sapiens
cagtgatgatgagca

SEQ ID NO: 1371884 - DNA, 15 bp, Homo sapiens
ccagtgatgatgagc

SEQ ID NO: 1371885 - DNA, 15 bp, Homo sapiens
gccagtgatgatgag

SEQ ID NO: 1371886 - DNA, 15 bp, Homo sapiens
ggccagtgatgatga

SEQ ID NO: 1371887 - DNA, 15 bp, Homo sapiens
tggccagtgatgatg

SEQ ID NO: 1371888 - DNA, 15 bp, Homo sapiens
atggccagtgatgat

SEQ ID NO: 1371889 - DNA, 15 bp, Homo sapiens
gatggccagtgatga

SEQ ID NO: 1371890 - DNA, 15 bp, Homo sapiens
tgatggccagtgatg

SEQ ID NO: 1371891 - DNA, 15 bp, Homo sapiens
ctgatggccagtgat

SEQ ID NO: 1371892 - DNA, 15 bp, Homo sapiens
tctgatggccagtga

SEQ ID NO: 1371893 - DNA, 15 bp, Homo sapiens
ctctgatggccagtg

SEQ ID NO: 1371894 - DNA, 15 bp, Homo sapiens
tctctgatggccagt

SEQ ID NO: 1371895 - DNA, 15 bp, Homo sapiens
ttctctgatggccag

SEQ ID NO: 1371896 - DNA, 15 bp, Homo sapiens
tttctctgatggcca

SEQ ID NO: 1371897 - DNA, 15 bp, Homo sapiens
atttctctgatggcc

SEQ ID NO: 1371898 - DNA, 15 bp, Homo sapiens
catttctctgatggc

SEQ ID NO: 1371899 - DNA, 15 bp, Homo sapiens
gcatttctctgatgg

SEQ ID NO: 1371900 - DNA, 15 bp, Homo sapiens
gtcattgtggttttg

SEQ ID NO: 1371901 - DNA, 15 bp, Homo sapiens
tgtcattgtggtttt

SEQ ID NO: 1371902 - DNA, 15 bp, Homo sapiens
atgtcattgtggttt

SEQ ID NO: 1371903 - DNA, 15 bp, Homo sapiens
tatgtcattgtggtt

SEQ ID NO: 1371904 - DNA, 15 bp, Homo sapiens
atatgtcattgtggt

SEQ ID NO: 1371905 - DNA, 15 bp, Homo sapiens
gatatgtcattgtgg

SEQ ID NO: 1371906 - DNA, 15 bp, Homo sapiens
tgatatgtcattgtg

SEQ ID NO: 1371907 - DNA, 15 bp, Homo sapiens
atgatatgtcattgt

SEQ ID NO: 1371908 - DNA, 15 bp, Homo sapiens
gatgatatgtcattg

SEQ ID NO: 1371909 - DNA, 15 bp, Homo sapiens
agatgatatgtcatt

SEQ ID NO: 1371910 - DNA, 15 bp, Homo sapiens
gagatgatatgtcat

SEQ ID NO: 1371911 - DNA, 15 bp, Homo sapiens
tgagatgatatgtca

SEQ ID NO: 1371912 - DNA, 15 bp, Homo sapiens
gtgagatgatatgtc

SEQ ID NO: 1371913 - DNA, 15 bp, Homo sapiens
tgtgagatgatatgt

SEQ ID NO: 1371914 - DNA, 15 bp, Homo sapiens
gtgtgagatgatatg

SEQ ID NO: 1371915 - DNA, 15 bp, Homo sapiens
ggtgtgagatgatat

SEQ ID NO: 1371916 - DNA, 15 bp, Homo sapiens
tggtgtgagatgata

SEQ ID NO: 1371917 - DNA, 15 bp, Homo sapiens
ctggtgtgagatgat

SEQ ID NO: 1371918 - DNA, 15 bp, Homo sapiens
actggtgtgagatga

SEQ ID NO: 1371919 - DNA, 15 bp, Homo sapiens
aactggtgtgagatg

SEQ ID NO: 1371920 - DNA, 15 bp, Homo sapiens
taactggtgtgagat

SEQ ID NO: 1371921 - DNA, 15 bp, Homo sapiens
ctaactggtgtgaga

SEQ ID NO: 1371922 - DNA, 15 bp, Homo sapiens
tctaactggtgtgag

SEQ ID NO: 1371923 - DNA, 15 bp, Homo sapiens
ttctaactggtgtga

SEQ ID NO: 1371924 - DNA, 15 bp, Homo sapiens
attctaactggtgtg

SEQ ID NO: 1371925 - DNA, 15 bp, Homo sapiens
cattctaactggtgt

SEQ ID NO: 1371926 - DNA, 15 bp, Homo sapiens
ccattctaactggtg

SEQ ID NO: 1371927 - DNA, 15 bp, Homo sapiens
gccattctaactggt

SEQ ID NO: 1371928 - DNA, 15 bp, Homo sapiens
gatgattgccattct

SEQ ID NO: 1371929 - DNA, 15 bp, Homo sapiens
tgatgattgccattc

SEQ ID NO: 1371930 - DNA, 15 bp, Homo sapiens
ttgatgattgccatt

SEQ ID NO: 1371931 - DNA, 15 bp, Homo sapiens
tttgatgattgccat

SEQ ID NO: 1371932 - DNA, 15 bp, Homo sapiens
ttttgatgattgcca

SEQ ID NO: 1371933 - DNA, 15 bp, Homo sapiens
tttttgatgattgcc

SEQ ID NO: 1371934 - DNA, 15 bp, Homo sapiens
ctttttgatgattgc

SEQ ID NO: 1371935 - DNA, 15 bp, Homo sapiens
actttttgatgattg

SEQ ID NO: 1371936 - DNA, 15 bp, Homo sapiens
gactttttgatgatt

SEQ ID NO: 1371937 - DNA, 15 bp, Homo sapiens
tgactttttgatgat

SEQ ID NO: 1371938 - DNA, 15 bp, Homo sapiens
ctgactttttgatga

SEQ ID NO: 1371939 - DNA, 15 bp, Homo sapiens
cctgactttttgatg

SEQ ID NO: 1371940 - DNA, 15 bp, Homo sapiens
tcctgactttttgat

SEQ ID NO: 1371941 - DNA, 15 bp, Homo sapiens
ttcctgactttttga

SEQ ID NO: 1371942 - DNA, 15 bp, Homo sapiens
tttcctgactttttg

SEQ ID NO: 1371943 - DNA, 15 bp, Homo sapiens
gtttcctgacttttt

SEQ ID NO: 1371944 - DNA, 15 bp, Homo sapiens
tgtttcctgactttt

SEQ ID NO: 1371945 - DNA, 15 bp, Homo sapiens
ttgtttcctgacttt

SEQ ID NO: 1371946 - DNA, 15 bp, Homo sapiens
gttgtttcctgactt

SEQ ID NO: 1371947 - DNA, 15 bp, Homo sapiens
tgttgtttcctgact

SEQ ID NO: 1371948 - DNA, 15 bp, Homo sapiens
ctgttgtttcctgac

SEQ ID NO: 1371949 - DNA, 15 bp, Homo sapiens
cctgttgtttcctga

SEQ ID NO: 1371950 - DNA, 15 bp, Homo sapiens
acctgttgtttcctg

SEQ ID NO: 1371951 - DNA, 15 bp, Homo sapiens
cacctgttgtttcct

SEQ ID NO: 1371952 - DNA, 15 bp, Homo sapiens
gcacctgttgtttcc

SEQ ID NO: 1371953 - DNA, 15 bp, Homo sapiens
agcacctgttgtttc

SEQ ID NO: 1371954 - DNA, 15 bp, Homo sapiens
cagcacctgttgttt

SEQ ID NO: 1371955 - DNA, 15 bp, Homo sapiens
ccagcacctgttgtt

SEQ ID NO: 1371956 - DNA, 15 bp, Homo sapiens
tccagcacctgttgt

SEQ ID NO: 1371957 - DNA, 15 bp, Homo sapiens
ctccagcacctgttg

SEQ ID NO: 1371958 - DNA, 15 bp, Homo sapiens
tctccagcacctgtt

SEQ ID NO: 1371959 - DNA, 15 bp, Homo sapiens
ctctccagcacctgt

SEQ ID NO: 1371960 - DNA, 15 bp, Homo sapiens
cctctccagcacctg

SEQ ID NO: 1371961 - DNA, 15 bp, Homo sapiens
tcctctccagcacct

SEQ ID NO: 1371962 - DNA, 15 bp, Homo sapiens
atcctctccagcacc

SEQ ID NO: 1371963 - DNA, 15 bp, Homo sapiens
catcctctccagcac

SEQ ID NO: 1371964 - DNA, 15 bp, Homo sapiens
gttcctatttctcca

SEQ ID NO: 1371965 - DNA, 15 bp, Homo sapiens
tgttcctatttctcc

SEQ ID NO: 1371966 - DNA, 15 bp, Homo sapiens
gtgttcctatttctc

SEQ ID NO: 1371967 - DNA, 15 bp, Homo sapiens
agtgttcctatttct

SEQ ID NO: 1371968 - DNA, 15 bp, Homo sapiens
aagtgttcctatttc

SEQ ID NO: 1371969 - DNA, 15 bp, Homo sapiens
aaagtgttcctattt

SEQ ID NO: 1371970 - DNA, 15 bp, Homo sapiens
aaaagtgttcctatt

SEQ ID NO: 1371971 - DNA, 15 bp, Homo sapiens
taaaagtgttcctat

SEQ ID NO: 1371972 - DNA, 15 bp, Homo sapiens
gtaaaagtgttccta

SEQ ID NO: 1371973 - DNA, 15 bp, Homo sapiens
tgtaaaagtgttcct

SEQ ID NO: 1371974 - DNA, 15 bp, Homo sapiens
gtgtaaaagtgttcc

SEQ ID NO: 1371975 - DNA, 15 bp, Homo sapiens
agtgtaaaagtgttc

SEQ ID NO: 1371976 - DNA, 15 bp, Homo sapiens
cagtgtaaaagtgtt

SEQ ID NO: 1371977 - DNA, 15 bp, Homo sapiens
acagtgtaaaagtgt

SEQ ID NO: 1371978 - DNA, 15 bp, Homo sapiens
aacagtgtaaaagtg

SEQ ID NO: 1371979 - DNA, 15 bp, Homo sapiens
caacagtgtaaaagt

SEQ ID NO: 1371980 - DNA, 15 bp, Homo sapiens
gtcccaccaacagtg

SEQ ID NO: 1371981 - DNA, 15 bp, Homo sapiens
agtcccaccaacagt

SEQ ID NO: 1371982 - DNA, 15 bp, Homo sapiens
cagtcccaccaacag

SEQ ID NO: 1371983 - DNA, 15 bp, Homo sapiens
acagtcccaccaaca

SEQ ID NO: 1371984 - DNA, 15 bp, Homo sapiens
tacagtcccaccaac

SEQ ID NO: 1371985 - DNA, 15 bp, Homo sapiens
ttacagtcccaccaa

SEQ ID NO: 1371986 - DNA, 15 bp, Homo sapiens
tttacagtcccacca

SEQ ID NO: 1371987 - DNA, 15 bp, Homo sapiens
gtttacagtcccacc

SEQ ID NO: 1371988 - DNA, 15 bp, Homo sapiens
agtttacagtcccac

SEQ ID NO: 1371989 - DNA, 15 bp, Homo sapiens
tagtttacagtccca

SEQ ID NO: 1371990 - DNA, 15 bp, Homo sapiens
ctagtttacagtccc

SEQ ID NO: 1371991 - DNA, 15 bp, Homo sapiens
actagtttacagtcc

SEQ ID NO: 1371992 - DNA, 15 bp, Homo sapiens
aactagtttacagtc

SEQ ID NO: 1371993 - DNA, 15 bp, Homo sapiens
gaactagtttacagt

SEQ ID NO: 1371994 - DNA, 15 bp, Homo sapiens
tgaactagtttacag

SEQ ID NO: 1371995 - DNA, 15 bp, Homo sapiens
ttgaactagtttaca

SEQ ID NO: 1371996 - DNA, 15 bp, Homo sapiens
gttgaactagtttac

SEQ ID NO: 1371997 - DNA, 15 bp, Homo sapiens
ggttgaactagttta

SEQ ID NO: 1371998 - DNA, 15 bp, Homo sapiens
tggttgaactagttt

SEQ ID NO: 1371999 - DNA, 15 bp, Homo sapiens
atggttgaactagtt

SEQ ID NO: 1372000 - DNA, 15 bp, Homo sapiens
aatggttgaactagt

SEQ ID NO: 1372001 - DNA, 15 bp, Homo sapiens
caatggttgaactag

SEQ ID NO: 1372002 - DNA, 15 bp, Homo sapiens
accacactgtcttcc

SEQ ID NO: 1372003 - DNA, 15 bp, Homo sapiens
caccacactgtcttc

SEQ ID NO: 1372004 - DNA, 15 bp, Homo sapiens
tcaccacactgtctt

SEQ ID NO: 1372005 - DNA, 15 bp, Homo sapiens
atcaccacactgtct

SEQ ID NO: 1372006 - DNA, 15 bp, Homo sapiens
aatcaccacactgtc

SEQ ID NO: 1372007 - DNA, 15 bp, Homo sapiens
gaatcaccacactgt

SEQ ID NO: 1372008 - DNA, 15 bp, Homo sapiens
ggaatcaccacactg

SEQ ID NO: 1372009 - DNA, 15 bp, Homo sapiens
aggaatcaccacact

SEQ ID NO: 1372010 - DNA, 15 bp, Homo sapiens
gaggaatcaccacac

SEQ ID NO: 1372011 - DNA, 15 bp, Homo sapiens
tgaggaatcaccaca

SEQ ID NO: 1372012 - DNA, 15 bp, Homo sapiens
ctgaggaatcaccac

SEQ ID NO: 1372013 - DNA, 15 bp, Homo sapiens
cctgaggaatcacca

SEQ ID NO: 1372014 - DNA, 15 bp, Homo sapiens
ccctgaggaatcacc

SEQ ID NO: 1372015 - DNA, 15 bp, Homo sapiens
tccctgaggaatcac

SEQ ID NO: 1372016 - DNA, 15 bp, Homo sapiens
atccctgaggaatca

SEQ ID NO: 1372017 - DNA, 15 bp, Homo sapiens
gatccctgaggaatc

SEQ ID NO: 1372018 - DNA, 15 bp, Homo sapiens
agatccctgaggaat

SEQ ID NO: 1372019 - DNA, 15 bp, Homo sapiens
tagatccctgaggaa

SEQ ID NO: 1372020 - DNA, 15 bp, Homo sapiens
ctagatccctgagga

SEQ ID NO: 1372021 - DNA, 15 bp, Homo sapiens
tctagatccctgagg

SEQ ID NO: 1372022 - DNA, 15 bp, Homo sapiens
ttctagatccctgag

SEQ ID NO: 1372023 - DNA, 15 bp, Homo sapiens
attctagatccctga

SEQ ID NO: 1372024 - DNA, 15 bp, Homo sapiens
aattctagatccctg

SEQ ID NO: 1372025 - DNA, 15 bp, Homo sapiens
taattctagatccct

SEQ ID NO: 1372026 - DNA, 15 bp, Homo sapiens
ctaattctagatccc

SEQ ID NO: 1372027 - DNA, 15 bp, Homo sapiens
tctaattctagatcc

SEQ ID NO: 1372028 - DNA, 15 bp, Homo sapiens
ttctaattctagatc

SEQ ID NO: 1372029 - DNA, 15 bp, Homo sapiens
tttctaattctagat

SEQ ID NO: 1372030 - DNA, 15 bp, Homo sapiens
atttctaattctaga

SEQ ID NO: 1372031 - DNA, 15 bp, Homo sapiens
tatttctaattctag

SEQ ID NO: 1372032 - DNA, 15 bp, Homo sapiens
gtatttctaattcta

SEQ ID NO: 1372033 - DNA, 15 bp, Homo sapiens
ggtatttctaattct

SEQ ID NO: 1372034 - DNA, 15 bp, Homo sapiens
tggtatttctaattc

SEQ ID NO: 1372035 - DNA, 15 bp, Homo sapiens
atggtatttctaatt

SEQ ID NO: 1372036 - DNA, 15 bp, Homo sapiens
aatggtatttctaat

SEQ ID NO: 1372037 - DNA, 15 bp, Homo sapiens
aaatggtatttctaa

SEQ ID NO: 1372038 - DNA, 15 bp, Homo sapiens
caaatggtatttcta

SEQ ID NO: 1372039 - DNA, 15 bp, Homo sapiens
ggctgggtcaaatgg

SEQ ID NO: 1372040 - DNA, 15 bp, Homo sapiens
tggctgggtcaaatg

SEQ ID NO: 1372041 - DNA, 15 bp, Homo sapiens
atggctgggtcaaat

SEQ ID NO: 1372042 - DNA, 15 bp, Homo sapiens
tatggctgggtcaaa

SEQ ID NO: 1372043 - DNA, 15 bp, Homo sapiens
gtatggctgggtcaa

SEQ ID NO: 1372044 - DNA, 15 bp, Homo sapiens
ggtatggctgggtca

SEQ ID NO: 1372045 - DNA, 15 bp, Homo sapiens
tggtatggctgggtc

SEQ ID NO: 1372046 - DNA, 15 bp, Homo sapiens
atggtatggctgggt

SEQ ID NO: 1372047 - DNA, 15 bp, Homo sapiens
aatggtatggctggg

SEQ ID NO: 1372048 - DNA, 15 bp, Homo sapiens
taatggtatggctgg

SEQ ID NO: 1372049 - DNA, 15 bp, Homo sapiens
gtaatggtatggctg

SEQ ID NO: 1372050 - DNA, 15 bp, Homo sapiens
ggtaatggtatggct

SEQ ID NO: 1372051 - DNA, 15 bp, Homo sapiens
tggtaatggtatggc

SEQ ID NO: 1372052 - DNA, 15 bp, Homo sapiens
atggtaatggtatgg

SEQ ID NO: 1372053 - DNA, 15 bp, Homo sapiens
aatggtaatggtatg

SEQ ID NO: 1372054 - DNA, 15 bp, Homo sapiens
aaatggtaatggtat

SEQ ID NO: 1372055 - DNA, 15 bp, Homo sapiens
aaaatggtaatggta

SEQ ID NO: 1372056 - DNA, 15 bp, Homo sapiens
caaaatggtaatggt

SEQ ID NO: 1372057 - DNA, 15 bp, Homo sapiens
ccaaaatggtaatgg

SEQ ID NO: 1372058 - DNA, 15 bp, Homo sapiens
cccaaaatggtaatg

SEQ ID NO: 1372059 - DNA, 15 bp, Homo sapiens
acccaaaatggtaat

SEQ ID NO: 1372060 - DNA, 15 bp, Homo sapiens
tacccaaaatggtaa

SEQ ID NO: 1372061 - DNA, 15 bp, Homo sapiens
atacccaaaatggta

SEQ ID NO: 1372062 - DNA, 15 bp, Homo sapiens
tatacccaaaatggt

SEQ ID NO: 1372063 - DNA, 15 bp, Homo sapiens
gtatacccaaaatgg

SEQ ID NO: 1372064 - DNA, 15 bp, Homo sapiens
agtatacccaaaatg

SEQ ID NO: 1372065 - DNA, 15 bp, Homo sapiens
cagtatacccaaaat

SEQ ID NO: 1372066 - DNA, 15 bp, Homo sapiens
ccagtatacccaaaa

SEQ ID NO: 1372067 - DNA, 15 bp, Homo sapiens
cccagtatacccaaa

SEQ ID NO: 1372068 - DNA, 15 bp, Homo sapiens
acccagtatacccaa

SEQ ID NO: 1372069 - DNA, 15 bp, Homo sapiens
tacccagtataccca

SEQ ID NO: 1372070 - DNA, 15 bp, Homo sapiens
atacccagtataccc

SEQ ID NO: 1372071 - DNA, 15 bp, Homo sapiens
tatacccagtatacc

SEQ ID NO: 1372072 - DNA, 15 bp, Homo sapiens
atatacccagtatac

SEQ ID NO: 1372073 - DNA, 15 bp, Homo sapiens
tatatacccagtata

SEQ ID NO: 1372074 - DNA, 15 bp, Homo sapiens
gtatatacccagtat

SEQ ID NO: 1372075 - DNA, 15 bp, Homo sapiens
ggtatatacccagta

SEQ ID NO: 1372076 - DNA, 15 bp, Homo sapiens
gggtatatacccagt

SEQ ID NO: 1372077 - DNA, 15 bp, Homo sapiens
tgggtatatacccag

SEQ ID NO: 1372078 - DNA, 15 bp, Homo sapiens
ttgggtatataccca

SEQ ID NO: 1372079 - DNA, 15 bp, Homo sapiens
cattgggtatatacc

SEQ ID NO: 1372080 - DNA, 15 bp, Homo sapiens
ccattgggtatatac

SEQ ID NO: 1372081 - DNA, 15 bp, Homo sapiens
tccattgggtatata

SEQ ID NO: 1372082 - DNA, 15 bp, Homo sapiens
ttccattgggtatat

SEQ ID NO: 1372083 - DNA, 15 bp, Homo sapiens
attccattgggtata

SEQ ID NO: 1372084 - DNA, 15 bp, Homo sapiens
tattccattgggtat

SEQ ID NO: 1372085 - DNA, 15 bp, Homo sapiens
atattccattgggta

SEQ ID NO: 1372086 - DNA, 15 bp, Homo sapiens
tatattccattgggt

SEQ ID NO: 1372087 - DNA, 15 bp, Homo sapiens
ttatattccattggg

SEQ ID NO: 1372088 - DNA, 15 bp, Homo sapiens
tttatattccattgg

SEQ ID NO: 1372089 - DNA, 15 bp, Homo sapiens
atttatattccattg

SEQ ID NO: 1372090 - DNA, 15 bp, Homo sapiens
gatttatattccatt

SEQ ID NO: 1372091 - DNA, 15 bp, Homo sapiens
tgatttatattccat

SEQ ID NO: 1372092 - DNA, 15 bp, Homo sapiens
atgatttatattcca

SEQ ID NO: 1372093 - DNA, 15 bp, Homo sapiens
catgatttatattcc

SEQ ID NO: 1372094 - DNA, 15 bp, Homo sapiens
gcatgatttatattc

SEQ ID NO: 1372095 - DNA, 15 bp, Homo sapiens
agcatgatttatatt

SEQ ID NO: 1372096 - DNA, 15 bp, Homo sapiens
cagcatgatttatat

SEQ ID NO: 1372097 - DNA, 15 bp, Homo sapiens
gcagcatgatttata

SEQ ID NO: 1372098 - DNA, 15 bp, Homo sapiens
agcagcatgatttat

SEQ ID NO: 1372099 - DNA, 15 bp, Homo sapiens
tagcagcatgattta

SEQ ID NO: 1372100 - DNA, 15 bp, Homo sapiens
atagcagcatgattt

SEQ ID NO: 1372101 - DNA, 15 bp, Homo sapiens
tatagcagcatgatt

SEQ ID NO: 1372102 - DNA, 15 bp, Homo sapiens
ttatagcagcatgat

SEQ ID NO: 1372103 - DNA, 15 bp, Homo sapiens
tttatagcagcatga

SEQ ID NO: 1372104 - DNA, 15 bp, Homo sapiens
ctttatagcagcatg

SEQ ID NO: 1372105 - DNA, 15 bp, Homo sapiens
tctttatagcagcat

SEQ ID NO: 1372106 - DNA, 15 bp, Homo sapiens
gtctttatagcagca

SEQ ID NO: 1372107 - DNA, 15 bp, Homo sapiens
tgtctttatagcagc

SEQ ID NO: 1372108 - DNA, 15 bp, Homo sapiens
gtgtctttatagcag

SEQ ID NO: 1372109 - DNA, 15 bp, Homo sapiens
tgtgtctttatagca

SEQ ID NO: 1372110 - DNA, 15 bp, Homo sapiens
atgtgtctttatagc

SEQ ID NO: 1372111 - DNA, 15 bp, Homo sapiens
catgtgtctttatag

SEQ ID NO: 1372112 - DNA, 15 bp, Homo sapiens
gcatgtgtctttata

SEQ ID NO: 1372113 - DNA, 15 bp, Homo sapiens
tgcatgtgtctttat

SEQ ID NO: 1372114 - DNA, 15 bp, Homo sapiens
gtgcatgtgtcttta

SEQ ID NO: 1372115 - DNA, 15 bp, Homo sapiens
tgtgcatgtgtcttt

SEQ ID NO: 1372116 - DNA, 15 bp, Homo sapiens
gtgtgcatgtgtctt

SEQ ID NO: 1372117 - DNA, 15 bp, Homo sapiens
cgtgtgcatgtgtct

SEQ ID NO: 1372118 - DNA, 15 bp, Homo sapiens
acgtgtgcatgtgtc

SEQ ID NO: 1372119 - DNA, 15 bp, Homo sapiens
tacgtgtgcatgtgt

SEQ ID NO: 1372120 - DNA, 15 bp, Homo sapiens
gtacgtgtgcatgtg

SEQ ID NO: 1372121 - DNA, 15 bp, Homo sapiens
tgtacgtgtgcatgt

SEQ ID NO: 1372122 - DNA, 15 bp, Homo sapiens
atgtacgtgtgcatg

SEQ ID NO: 1372123 - DNA, 15 bp, Homo sapiens
aatgtacgtgtgcat

SEQ ID NO: 1372124 - DNA, 15 bp, Homo sapiens
aaatgtacgtgtgca

SEQ ID NO: 1372125 - DNA, 15 bp, Homo sapiens
taaatgtacgtgtgc

SEQ ID NO: 1372126 - DNA, 15 bp, Homo sapiens
ataaatgtacgtgtg

SEQ ID NO: 1372127 - DNA, 15 bp, Homo sapiens
aataaatgtacgtgt

SEQ ID NO: 1372128 - DNA, 15 bp, Homo sapiens
caataaatgtacgtg

SEQ ID NO: 1372129 - DNA, 15 bp, Homo sapiens
gcaataaatgtacgt

SEQ ID NO: 1372130 - DNA, 15 bp, Homo sapiens
cgcaataaatgtacg

SEQ ID NO: 1372131 - DNA, 15 bp, Homo sapiens
ccgcaataaatgtac

SEQ ID NO: 1372132 - DNA, 15 bp, Homo sapiens
gccgcaataaatgta

SEQ ID NO: 1372133 - DNA, 15 bp, Homo sapiens
tgccgcaataaatgt

SEQ ID NO: 1372134 - DNA, 15 bp, Homo sapiens
gtgccgcaataaatg

SEQ ID NO: 1372135 - DNA, 15 bp, Homo sapiens
agtgccgcaataaat

SEQ ID NO: 1372136 - DNA, 15 bp, Homo sapiens
tagtgccgcaataaa

SEQ ID NO: 1372137 - DNA, 15 bp, Homo sapiens
gtagtgccgcaataa

SEQ ID NO: 1372138 - DNA, 15 bp, Homo sapiens
agtagtgccgcaata

SEQ ID NO: 1372139 - DNA, 15 bp, Homo sapiens
gagtagtgccgcaat

SEQ ID NO: 1372140 - DNA, 15 bp, Homo sapiens
tgagtagtgccgcaa

SEQ ID NO: 1372141 - DNA, 15 bp, Homo sapiens
gtgagtagtgccgca

SEQ ID NO: 1372142 - DNA, 15 bp, Homo sapiens
tgtgagtagtgccgc

SEQ ID NO: 1372143 - DNA, 15 bp, Homo sapiens
ttgtgagtagtgccg

SEQ ID NO: 1372144 - DNA, 15 bp, Homo sapiens
attgtgagtagtgcc

SEQ ID NO: 1372145 - DNA, 15 bp, Homo sapiens
tattgtgagtagtgc

SEQ ID NO: 1372146 - DNA, 15 bp, Homo sapiens
ctattgtgagtagtg

SEQ ID NO: 1372147 - DNA, 15 bp, Homo sapiens
gctattgtgagtagt

SEQ ID NO: 1372148 - DNA, 15 bp, Homo sapiens
tgctattgtgagtag

SEQ ID NO: 1372149 - DNA, 15 bp, Homo sapiens
ttgctattgtgagta

SEQ ID NO: 1372150 - DNA, 15 bp, Homo sapiens
tttgctattgtgagt

SEQ ID NO: 1372151 - DNA, 15 bp, Homo sapiens
ctttgctattgtgag

SEQ ID NO: 1372152 - DNA, 15 bp, Homo sapiens
ccaagtctttgctat

SEQ ID NO: 1372153 - DNA, 15 bp, Homo sapiens
tccaagtctttgcta

SEQ ID NO: 1372154 - DNA, 15 bp, Homo sapiens
ttccaagtctttgct

SEQ ID NO: 1372155 - DNA, 15 bp, Homo sapiens
gttccaagtctttgc

SEQ ID NO: 1372156 - DNA, 15 bp, Homo sapiens
ggttccaagtctttg

SEQ ID NO: 1372157 - DNA, 15 bp, Homo sapiens
tggttccaagtcttt

SEQ ID NO: 1372158 - DNA, 15 bp, Homo sapiens
ttggttccaagtctt

SEQ ID NO: 1372159 - DNA, 15 bp, Homo sapiens
gttggttccaagtct

SEQ ID NO: 1372160 - DNA, 15 bp, Homo sapiens
cgttggttccaagtc

SEQ ID NO: 1372161 - DNA, 15 bp, Homo sapiens
tcgttggttccaagt

SEQ ID NO: 1372162 - DNA, 15 bp, Homo sapiens
ttcgttggttccaag

SEQ ID NO: 1372163 - DNA, 15 bp, Homo sapiens
tttcgttggttccaa

SEQ ID NO: 1372164 - DNA, 15 bp, Homo sapiens
ttttcgttggttcca

SEQ ID NO: 1372165 - DNA, 15 bp, Homo sapiens
attttcgttggttcc

SEQ ID NO: 1372166 - DNA, 15 bp, Homo sapiens
cattttcgttggttc

SEQ ID NO: 1372167 - DNA, 15 bp, Homo sapiens
acattttcgttggtt

SEQ ID NO: 1372168 - DNA, 15 bp, Homo sapiens
gacattttcgttggt

SEQ ID NO: 1372169 - DNA, 15 bp, Homo sapiens
ggacattttcgttgg

SEQ ID NO: 1372170 - DNA, 15 bp, Homo sapiens
tggacattttcgttg

SEQ ID NO: 1372171 - DNA, 15 bp, Homo sapiens
atggacattttcgtt

SEQ ID NO: 1372172 - DNA, 15 bp, Homo sapiens
gatggacattttcgt

SEQ ID NO: 1372173 - DNA, 15 bp, Homo sapiens
tgatggacattttcg

SEQ ID NO: 1372174 - DNA, 15 bp, Homo sapiens
ttgatggacattttc

SEQ ID NO: 1372175 - DNA, 15 bp, Homo sapiens
attgatggacatttt

SEQ ID NO: 1372176 - DNA, 15 bp, Homo sapiens
cattgatggacattt

SEQ ID NO: 1372177 - DNA, 15 bp, Homo sapiens
tcattgatggacatt

SEQ ID NO: 1372178 - DNA, 15 bp, Homo sapiens
atcattgatggacat

SEQ ID NO: 1372179 - DNA, 15 bp, Homo sapiens
tatcattgatggaca

SEQ ID NO: 1372180 - DNA, 15 bp, Homo sapiens
aatccagtctatcat

SEQ ID NO: 1372181 - DNA, 15 bp, Homo sapiens
taatccagtctatca

SEQ ID NO: 1372182 - DNA, 15 bp, Homo sapiens
ttaatccagtctatc

SEQ ID NO: 1372183 - DNA, 15 bp, Homo sapiens
cttaatccagtctat

SEQ ID NO: 1372184 - DNA, 15 bp, Homo sapiens
tcttaatccagtcta

SEQ ID NO: 1372185 - DNA, 15 bp, Homo sapiens
ttcttaatccagtct

SEQ ID NO: 1372186 - DNA, 15 bp, Homo sapiens
tttcttaatccagtc

SEQ ID NO: 1372187 - DNA, 15 bp, Homo sapiens
ttttcttaatccagt

SEQ ID NO: 1372188 - DNA, 15 bp, Homo sapiens
attttcttaatccag

SEQ ID NO: 1372189 - DNA, 15 bp, Homo sapiens
cattttcttaatcca

SEQ ID NO: 1372190 - DNA, 15 bp, Homo sapiens
acattttcttaatcc

SEQ ID NO: 1372191 - DNA, 15 bp, Homo sapiens
cacattttcttaatc

SEQ ID NO: 1372192 - DNA, 15 bp, Homo sapiens
ccacattttcttaat

SEQ ID NO: 1372193 - DNA, 15 bp, Homo sapiens
gccacattttcttaa

SEQ ID NO: 1372194 - DNA, 15 bp, Homo sapiens
tgccacattttctta

SEQ ID NO: 1372195 - DNA, 15 bp, Homo sapiens
catggtgtatatgtg

SEQ ID NO: 1372196 - DNA, 15 bp, Homo sapiens
atagtattccatggt

SEQ ID NO: 1372197 - DNA, 15 bp, Homo sapiens
catagtattccatgg

SEQ ID NO: 1372198 - DNA, 15 bp, Homo sapiens
gcatagtattccatg

SEQ ID NO: 1372199 - DNA, 15 bp, Homo sapiens
tgcatagtattccat

SEQ ID NO: 1372200 - DNA, 15 bp, Homo sapiens
ctgcatagtattcca

SEQ ID NO: 1372201 - DNA, 15 bp, Homo sapiens
attttttatggctgc

SEQ ID NO: 1372202 - DNA, 15 bp, Homo sapiens
cattttttatggctg

SEQ ID NO: 1372203 - DNA, 15 bp, Homo sapiens
tcattttttatggct

SEQ ID NO: 1372204 - DNA, 15 bp, Homo sapiens
atcattttttatggc

SEQ ID NO: 1372205 - DNA, 15 bp, Homo sapiens
catcattttttatgg

SEQ ID NO: 1372206 - DNA, 15 bp, Homo sapiens
tcatcattttttatg

SEQ ID NO: 1372207 - DNA, 15 bp, Homo sapiens
ctcatcattttttat

SEQ ID NO: 1372208 - DNA, 15 bp, Homo sapiens
actcatcatttttta

SEQ ID NO: 1372209 - DNA, 15 bp, Homo sapiens
aactcatcatttttt

SEQ ID NO: 1372210 - DNA, 15 bp, Homo sapiens
gaactcatcattttt

SEQ ID NO: 1372211 - DNA, 15 bp, Homo sapiens
tgaactcatcatttt

SEQ ID NO: 1372212 - DNA, 15 bp, Homo sapiens
atgaactcatcattt

SEQ ID NO: 1372213 - DNA, 15 bp, Homo sapiens
catgaactcatcatt

SEQ ID NO: 1372214 - DNA, 15 bp, Homo sapiens
acatgaactcatcat

SEQ ID NO: 1372215 - DNA, 15 bp, Homo sapiens
gacatgaactcatca

SEQ ID NO: 1372216 - DNA, 15 bp, Homo sapiens
acaaaggacatgaac

SEQ ID NO: 1372217 - DNA, 15 bp, Homo sapiens
tacaaaggacatgaa

SEQ ID NO: 1372218 - DNA, 15 bp, Homo sapiens
ctacaaaggacatga

SEQ ID NO: 1372219 - DNA, 15 bp, Homo sapiens
cctacaaaggacatg

SEQ ID NO: 1372220 - DNA, 15 bp, Homo sapiens
ccctacaaaggacat

SEQ ID NO: 1372221 - DNA, 15 bp, Homo sapiens
cccctacaaaggaca

SEQ ID NO: 1372222 - DNA, 15 bp, Homo sapiens
gcccctacaaaggac

SEQ ID NO: 1372223 - DNA, 15 bp, Homo sapiens
tgcccctacaaagga

SEQ ID NO: 1372224 - DNA, 15 bp, Homo sapiens
atgcccctacaaagg

SEQ ID NO: 1372225 - DNA, 15 bp, Homo sapiens
catgcccctacaaag

SEQ ID NO: 1372226 - DNA, 15 bp, Homo sapiens
ccatgcccctacaaa

SEQ ID NO: 1372227 - DNA, 15 bp, Homo sapiens
tccatgcccctacaa

SEQ ID NO: 1372228 - DNA, 15 bp, Homo sapiens
atccatgcccctaca

SEQ ID NO: 1372229 - DNA, 15 bp, Homo sapiens
catccatgcccctac

SEQ ID NO: 1372230 - DNA, 15 bp, Homo sapiens
tcatccatgccccta

SEQ ID NO: 1372231 - DNA, 15 bp, Homo sapiens
ttcatccatgcccct

SEQ ID NO: 1372232 - DNA, 15 bp, Homo sapiens
cttcatccatgcccc

SEQ ID NO: 1372233 - DNA, 15 bp, Homo sapiens
gcttcatccatgccc

SEQ ID NO: 1372234 - DNA, 15 bp, Homo sapiens
agcttcatccatgcc

SEQ ID NO: 1372235 - DNA, 15 bp, Homo sapiens
cagcttcatccatgc

SEQ ID NO: 1372236 - DNA, 15 bp, Homo sapiens
tggtttccagcttca

SEQ ID NO: 1372237 - DNA, 15 bp, Homo sapiens
atggtttccagcttc

SEQ ID NO: 1372238 - DNA, 15 bp, Homo sapiens
atgatggtttccagc

SEQ ID NO: 1372239 - DNA, 15 bp, Homo sapiens
aatgatggtttccag

SEQ ID NO: 1372240 - DNA, 15 bp, Homo sapiens
gaatgatggtttcca

SEQ ID NO: 1372241 - DNA, 15 bp, Homo sapiens
agaatgatggtttcc

SEQ ID NO: 1372242 - DNA, 15 bp, Homo sapiens
gagaatgatggtttc

SEQ ID NO: 1372243 - DNA, 15 bp, Homo sapiens
tgagaatgatggttt

SEQ ID NO: 1372244 - DNA, 15 bp, Homo sapiens
ctgagaatgatggtt

SEQ ID NO: 1372245 - DNA, 15 bp, Homo sapiens
gctgagaatgatggt

SEQ ID NO: 1372246 - DNA, 15 bp, Homo sapiens
tgctgagaatgatgg

SEQ ID NO: 1372247 - DNA, 15 bp, Homo sapiens
ttgctgagaatgatg

SEQ ID NO: 1372248 - DNA, 15 bp, Homo sapiens
tttgctgagaatgat

SEQ ID NO: 1372249 - DNA, 15 bp, Homo sapiens
tgatagtttgctgag

SEQ ID NO: 1372250 - DNA, 15 bp, Homo sapiens
gtgatagtttgctga

SEQ ID NO: 1372251 - DNA, 15 bp, Homo sapiens
tgtgatagtttgctg

SEQ ID NO: 1372252 - DNA, 15 bp, Homo sapiens
ttgtgatagtttgct

SEQ ID NO: 1372253 - DNA, 15 bp, Homo sapiens
cttgtgatagtttgc

SEQ ID NO: 1372254 - DNA, 15 bp, Homo sapiens
ccttgtgatagtttg

SEQ ID NO: 1372255 - DNA, 15 bp, Homo sapiens
tccttgtgatagttt

SEQ ID NO: 1372256 - DNA, 15 bp, Homo sapiens
gtccttgtgatagtt

SEQ ID NO: 1372257 - DNA, 15 bp, Homo sapiens
tgtccttgtgatagt

SEQ ID NO: 1372258 - DNA, 15 bp, Homo sapiens
ttgtccttgtgatag

SEQ ID NO: 1372259 - DNA, 15 bp, Homo sapiens
tttgtccttgtgata

SEQ ID NO: 1372260 - DNA, 15 bp, Homo sapiens
ttttgtccttgtgat

SEQ ID NO: 1372261 - DNA, 15 bp, Homo sapiens
tttttgtccttgtga

SEQ ID NO: 1372262 - DNA, 15 bp, Homo sapiens
ttttttgtccttgtg

SEQ ID NO: 1372263 - DNA, 15 bp, Homo sapiens
gttttttgtccttgt

SEQ ID NO: 1372264 - DNA, 15 bp, Homo sapiens
ggttttttgtccttg

SEQ ID NO: 1372265 - DNA, 15 bp, Homo sapiens
tggttttttgtcctt

SEQ ID NO: 1372266 - DNA, 15 bp, Homo sapiens
ttggttttttgtcct

SEQ ID NO: 1372267 - DNA, 15 bp, Homo sapiens
tttggttttttgtcc

SEQ ID NO: 1372268 - DNA, 15 bp, Homo sapiens
gtttggttttttgtc

SEQ ID NO: 1372269 - DNA, 15 bp, Homo sapiens
tgtttggttttttgt

SEQ ID NO: 1372270 - DNA, 15 bp, Homo sapiens
gtgtttggttttttg

SEQ ID NO: 1372271 - DNA, 15 bp, Homo sapiens
ggtgtttggtttttt

SEQ ID NO: 1372272 - DNA, 15 bp, Homo sapiens
cggtgtttggttttt

SEQ ID NO: 1372273 - DNA, 15 bp, Homo sapiens
gttcccacctatgag

SEQ ID NO: 1372274 - DNA, 15 bp, Homo sapiens
agttcccacctatga

SEQ ID NO: 1372275 - DNA, 15 bp, Homo sapiens
cagttcccacctatg

SEQ ID NO: 1372276 - DNA, 15 bp, Homo sapiens
tcagttcccacctat

SEQ ID NO: 1372277 - DNA, 15 bp, Homo sapiens
ttcagttcccaccta

SEQ ID NO: 1372278 - DNA, 15 bp, Homo sapiens
gttcagttcccacct

SEQ ID NO: 1372279 - DNA, 15 bp, Homo sapiens
tgttcagttcccacc

SEQ ID NO: 1372280 - DNA, 15 bp, Homo sapiens
ttgttcagttcccac

SEQ ID NO: 1372281 - DNA, 15 bp, Homo sapiens
attgttcagttccca

SEQ ID NO: 1372282 - DNA, 15 bp, Homo sapiens
cattgttcagttccc

SEQ ID NO: 1372283 - DNA, 15 bp, Homo sapiens
tcattgttcagttcc

SEQ ID NO: 1372284 - DNA, 15 bp, Homo sapiens
ctcattgttcagttc

SEQ ID NO: 1372285 - DNA, 15 bp, Homo sapiens
tctcattgttcagtt

SEQ ID NO: 1372286 - DNA, 15 bp, Homo sapiens
ttctcattgttcagt

SEQ ID NO: 1372287 - DNA, 15 bp, Homo sapiens
cttcctgtgtccaag

SEQ ID NO: 1372288 - DNA, 15 bp, Homo sapiens
ccttcctgtgtccaa

SEQ ID NO: 1372289 - DNA, 15 bp, Homo sapiens
cccttcctgtgtcca

SEQ ID NO: 1372290 - DNA, 15 bp, Homo sapiens
ccccttcctgtgtcc

SEQ ID NO: 1372291 - DNA, 15 bp, Homo sapiens
tccccttcctgtgtc

SEQ ID NO: 1372292 - DNA, 15 bp, Homo sapiens
ttccccttcctgtgt

SEQ ID NO: 1372293 - DNA, 15 bp, Homo sapiens
gttccccttcctgtg

SEQ ID NO: 1372294 - DNA, 15 bp, Homo sapiens
tgttccccttcctgt

SEQ ID NO: 1372295 - DNA, 15 bp, Homo sapiens
atgttccccttcctg

SEQ ID NO: 1372296 - DNA, 15 bp, Homo sapiens
gatgttccccttcct

SEQ ID NO: 1372297 - DNA, 15 bp, Homo sapiens
tgatgttccccttcc

SEQ ID NO: 1372298 - DNA, 15 bp, Homo sapiens
gtgatgttccccttc

SEQ ID NO: 1372299 - DNA, 15 bp, Homo sapiens
tgtgatgttcccctt

SEQ ID NO: 1372300 - DNA, 15 bp, Homo sapiens
tagtgtgtgatgttc

SEQ ID NO: 1372301 - DNA, 15 bp, Homo sapiens
ctagtgtgtgatgtt

SEQ ID NO: 1372302 - DNA, 15 bp, Homo sapiens
cctagtgtgtgatgt

SEQ ID NO: 1372303 - DNA, 15 bp, Homo sapiens
ccctagtgtgtgatg

SEQ ID NO: 1372304 - DNA, 15 bp, Homo sapiens
gccctagtgtgtgat

SEQ ID NO: 1372305 - DNA, 15 bp, Homo sapiens
ggccctagtgtgtga

SEQ ID NO: 1372306 - DNA, 15 bp, Homo sapiens
aggccctagtgtgtg

SEQ ID NO: 1372307 - DNA, 15 bp, Homo sapiens
caggccctagtgtgt

SEQ ID NO: 1372308 - DNA, 15 bp, Homo sapiens
acaggccctagtgtg

SEQ ID NO: 1372309 - DNA, 15 bp, Homo sapiens
aacaggccctagtgt

SEQ ID NO: 1372310 - DNA, 15 bp, Homo sapiens
caacaggccctagtg

SEQ ID NO: 1372311 - DNA, 15 bp, Homo sapiens
acaacaggccctagt

SEQ ID NO: 1372312 - DNA, 15 bp, Homo sapiens
cacaacaggccctag

SEQ ID NO: 1372313 - DNA, 15 bp, Homo sapiens
ccacaacaggcccta

SEQ ID NO: 1372314 - DNA, 15 bp, Homo sapiens
cccacaacaggccct

SEQ ID NO: 1372315 - DNA, 15 bp, Homo sapiens
ccccacaacaggccc

SEQ ID NO: 1372316 - DNA, 15 bp, Homo sapiens
accccacaacaggcc

SEQ ID NO: 1372317 - DNA, 15 bp, Homo sapiens
caccccacaacaggc

SEQ ID NO: 1372318 - DNA, 15 bp, Homo sapiens
ccaccccacaacagg

SEQ ID NO: 1372319 - DNA, 15 bp, Homo sapiens
cccaccccacaacag

SEQ ID NO: 1372320 - DNA, 15 bp, Homo sapiens
ccccaccccacaaca

SEQ ID NO: 1372321 - DNA, 15 bp, Homo sapiens
cccccaccccacaac

SEQ ID NO: 1372322 - DNA, 15 bp, Homo sapiens
ccccccaccccacaa

SEQ ID NO: 1372323 - DNA, 15 bp, Homo sapiens
tccccccaccccaca

SEQ ID NO: 1372324 - DNA, 15 bp, Homo sapiens
ctccccccaccccac

SEQ ID NO: 1372325 - DNA, 15 bp, Homo sapiens
cctccccccacccca

SEQ ID NO: 1372326 - DNA, 15 bp, Homo sapiens
ccctccccccacccc

SEQ ID NO: 1372327 - DNA, 15 bp, Homo sapiens
cccctccccccaccc

SEQ ID NO: 1372328 - DNA, 15 bp, Homo sapiens
ccccctccccccacc

SEQ ID NO: 1372329 - DNA, 15 bp, Homo sapiens
cccccctccccccac

SEQ ID NO: 1372330 - DNA, 15 bp, Homo sapiens
tcccccctcccccca

SEQ ID NO: 1372331 - DNA, 15 bp, Homo sapiens
ctcccccctcccccc

SEQ ID NO: 1372332 - DNA, 15 bp, Homo sapiens
cctcccccctccccc

SEQ ID NO: 1372333 - DNA, 15 bp, Homo sapiens
ccctcccccctcccc

SEQ ID NO: 1372334 - DNA, 15 bp, Homo sapiens
tccctcccccctccc

SEQ ID NO: 1372335 - DNA, 15 bp, Homo sapiens
atccctcccccctcc

SEQ ID NO: 1372336 - DNA, 15 bp, Homo sapiens
tatccctcccccctc

SEQ ID NO: 1372337 - DNA, 15 bp, Homo sapiens
ctatccctcccccct

SEQ ID NO: 1372338 - DNA, 15 bp, Homo sapiens
gctatccctcccccc

SEQ ID NO: 1372339 - DNA, 15 bp, Homo sapiens
cgctatccctccccc

SEQ ID NO: 1372340 - DNA, 15 bp, Homo sapiens
acgctatccctcccc

SEQ ID NO: 1372341 - DNA, 15 bp, Homo sapiens
aacgctatccctccc

SEQ ID NO: 1372342 - DNA, 15 bp, Homo sapiens
taacgctatccctcc

SEQ ID NO: 1372343 - DNA, 15 bp, Homo sapiens
ctaacgctatccctc

SEQ ID NO: 1372344 - DNA, 15 bp, Homo sapiens
cctaacgctatccct

SEQ ID NO: 1372345 - DNA, 15 bp, Homo sapiens
tcctaacgctatccc

SEQ ID NO: 1372346 - DNA, 15 bp, Homo sapiens
ctcctaacgctatcc

SEQ ID NO: 1372347 - DNA, 15 bp, Homo sapiens
tctcctaacgctatc

SEQ ID NO: 1372348 - DNA, 15 bp, Homo sapiens
atctcctaacgctat

SEQ ID NO: 1372349 - DNA, 15 bp, Homo sapiens
tatctcctaacgcta

SEQ ID NO: 1372350 - DNA, 15 bp, Homo sapiens
atatctcctaacgct

SEQ ID NO: 1372351 - DNA, 15 bp, Homo sapiens
tatatctcctaacgc

SEQ ID NO: 1372352 - DNA, 15 bp, Homo sapiens
gtatatctcctaacg

SEQ ID NO: 1372353 - DNA, 15 bp, Homo sapiens
ggtatatctcctaac

SEQ ID NO: 1372354 - DNA, 15 bp, Homo sapiens
gtcatttacattagg

SEQ ID NO: 1372355 - DNA, 15 bp, Homo sapiens
tgtcatttacattag

SEQ ID NO: 1372356 - DNA, 15 bp, Homo sapiens
ttgtcatttacatta

SEQ ID NO: 1372357 - DNA, 15 bp, Homo sapiens
cttgtcatttacatt

SEQ ID NO: 1372358 - DNA, 15 bp, Homo sapiens
acttgtcatttacat

SEQ ID NO: 1372359 - DNA, 15 bp, Homo sapiens
taacttgtcatttac

SEQ ID NO: 1372360 - DNA, 15 bp, Homo sapiens
ttaacttgtcattta

SEQ ID NO: 1372361 - DNA, 15 bp, Homo sapiens
attaacttgtcattt

SEQ ID NO: 1372362 - DNA, 15 bp, Homo sapiens
cattaacttgtcatt

SEQ ID NO: 1372363 - DNA, 15 bp, Homo sapiens
ccattaacttgtcat

SEQ ID NO: 1372364 - DNA, 15 bp, Homo sapiens
cccattaacttgtca

SEQ ID NO: 1372365 - DNA, 15 bp, Homo sapiens
acccattaacttgtc

SEQ ID NO: 1372366 - DNA, 15 bp, Homo sapiens
cacccattaacttgt

SEQ ID NO: 1372367 - DNA, 15 bp, Homo sapiens
gcacccattaacttg

SEQ ID NO: 1372368 - DNA, 15 bp, Homo sapiens
tgcacccattaactt

SEQ ID NO: 1372369 - DNA, 15 bp, Homo sapiens
atgcaggtttgttac

SEQ ID NO: 1372370 - DNA, 15 bp, Homo sapiens
aatgcaggtttgtta

SEQ ID NO: 1372371 - DNA, 15 bp, Homo sapiens
aaatgcaggtttgtt

SEQ ID NO: 1372372 - DNA, 15 bp, Homo sapiens
aaaatgcaggtttgt

SEQ ID NO: 1372373 - DNA, 15 bp, Homo sapiens
caaaatgcaggtttg

SEQ ID NO: 1372374 - DNA, 15 bp, Homo sapiens
acaaaatgcaggttt

SEQ ID NO: 1372375 - DNA, 15 bp, Homo sapiens
cacaaaatgcaggtt

SEQ ID NO: 1372376 - DNA, 15 bp, Homo sapiens
gcacaaaatgcaggt

SEQ ID NO: 1372377 - DNA, 15 bp, Homo sapiens
tgcacaaaatgcagg

SEQ ID NO: 1372378 - DNA, 15 bp, Homo sapiens
gtgcacaaaatgcag

SEQ ID NO: 1372379 - DNA, 15 bp, Homo sapiens
tgtgcacaaaatgca

SEQ ID NO: 1372380 - DNA, 15 bp, Homo sapiens
atgtgcacaaaatgc

SEQ ID NO: 1372381 - DNA, 15 bp, Homo sapiens
catgtgcacaaaatg

SEQ ID NO: 1372382 - DNA, 15 bp, Homo sapiens
acatgtgcacaaaat

SEQ ID NO: 1372383 - DNA, 15 bp, Homo sapiens
tacatgtgcacaaaa

SEQ ID NO: 1372384 - DNA, 15 bp, Homo sapiens
gtacatgtgcacaaa

SEQ ID NO: 1372385 - DNA, 15 bp, Homo sapiens
ttttaagttctaggg

SEQ ID NO: 1372386 - DNA, 15 bp, Homo sapiens
tttttaagttctagg

SEQ ID NO: 1372387 - DNA, 15 bp, Homo sapiens
ctttttaagttctag

SEQ ID NO: 1372388 - DNA, 15 bp, Homo sapiens
actttttaagttcta

SEQ ID NO: 1372389 - DNA, 15 bp, Homo sapiens
tactttttaagttct

SEQ ID NO: 1372390 - DNA, 15 bp, Homo sapiens
atactttttaagttc

SEQ ID NO: 1372391 - DNA, 15 bp, Homo sapiens
tatactttttaagtt

SEQ ID NO: 1372392 - DNA, 15 bp, Homo sapiens
ttatactttttaagt

SEQ ID NO: 1372393 - DNA, 15 bp, Homo sapiens
attatactttttaag

SEQ ID NO: 1372394 - DNA, 15 bp, Homo sapiens
tattatactttttaa

SEQ ID NO: 1372395 - DNA, 15 bp, Homo sapiens
ttattatacttttta

SEQ ID NO: 1372396 - DNA, 15 bp, Homo sapiens
tttattatacttttt

SEQ ID NO: 1372397 - DNA, 15 bp, Homo sapiens
atttattatactttt

SEQ ID NO: 1372398 - DNA, 15 bp, Homo sapiens
tatttattatacttt

SEQ ID NO: 1372399 - DNA, 15 bp, Homo sapiens
atatttattatactt

SEQ ID NO: 1372400 - DNA, 15 bp, Homo sapiens
tatatttattatact

SEQ ID NO: 1372401 - DNA, 15 bp, Homo sapiens
atatatttattatac

SEQ ID NO: 1372402 - DNA, 15 bp, Homo sapiens
tatatatttattata

SEQ ID NO: 1372403 - DNA, 15 bp, Homo sapiens
atatatatttattat

SEQ ID NO: 1372404 - DNA, 15 bp, Homo sapiens
tatatatatttatta

SEQ ID NO: 1372405 - DNA, 15 bp, Homo sapiens
tatatatatatttat

SEQ ID NO: 1372406 - DNA, 15 bp, Homo sapiens
aatatatatatattt

SEQ ID NO: 1372407 - DNA, 15 bp, Homo sapiens
aaatatatatatatt

SEQ ID NO: 1372408 - DNA, 15 bp, Homo sapiens
ttaaatatatatata

SEQ ID NO: 1372409 - DNA, 15 bp, Homo sapiens
tttaaatatatatat

SEQ ID NO: 1372410 - DNA, 15 bp, Homo sapiens
ttttaaatatatata

SEQ ID NO: 1372411 - DNA, 15 bp, Homo sapiens
tttttaaatatatat

SEQ ID NO: 1372412 - DNA, 15 bp, Homo sapiens
atttttaaatatata

SEQ ID NO: 1372413 - DNA, 15 bp, Homo sapiens
tatttttaaatatat

SEQ ID NO: 1372414 - DNA, 15 bp, Homo sapiens
ttatttttaaatata

SEQ ID NO: 1372415 - DNA, 15 bp, Homo sapiens
tttatttttaaatat

SEQ ID NO: 1372416 - DNA, 15 bp, Homo sapiens
ctttatttttaaata

SEQ ID NO: 1372417 - DNA, 15 bp, Homo sapiens
tctttatttttaaat

SEQ ID NO: 1372418 - DNA, 15 bp, Homo sapiens
ttctttatttttaaa

SEQ ID NO: 1372419 - DNA, 15 bp, Homo sapiens
tttctttatttttaa

SEQ ID NO: 1372420 - DNA, 15 bp, Homo sapiens
atttctttattttta

SEQ ID NO: 1372421 - DNA, 15 bp, Homo sapiens
tatttctttattttt

SEQ ID NO: 1372422 - DNA, 15 bp, Homo sapiens
gtatttctttatttt

SEQ ID NO: 1372423 - DNA, 15 bp, Homo sapiens
tgtatttctttattt

SEQ ID NO: 1372424 - DNA, 15 bp, Homo sapiens
atgtatttctttatt

SEQ ID NO: 1372425 - DNA, 15 bp, Homo sapiens
tatgtatttctttat

SEQ ID NO: 1372426 - DNA, 15 bp, Homo sapiens
ttatgtatttcttta

SEQ ID NO: 1372427 - DNA, 15 bp, Homo sapiens
tttatgtatttcttt

SEQ ID NO: 1372428 - DNA, 15 bp, Homo sapiens
ttttatgtatttctt

SEQ ID NO: 1372429 - DNA, 15 bp, Homo sapiens
tttttatgtatttct

SEQ ID NO: 1372430 - DNA, 15 bp, Homo sapiens
atttttatgtatttc

SEQ ID NO: 1372431 - DNA, 15 bp, Homo sapiens
tatttttatgtattt

SEQ ID NO: 1372432 - DNA, 15 bp, Homo sapiens
ttatttttatgtatt

SEQ ID NO: 1372433 - DNA, 15 bp, Homo sapiens
tttatttttatgtat

SEQ ID NO: 1372434 - DNA, 15 bp, Homo sapiens
atttatttttatgta

SEQ ID NO: 1372435 - DNA, 15 bp, Homo sapiens
tatttatttttatgt

SEQ ID NO: 1372436 - DNA, 15 bp, Homo sapiens
ttatttatttttatg

SEQ ID NO: 1372437 - DNA, 15 bp, Homo sapiens
gctttatttatttat

SEQ ID NO: 1372438 - DNA, 15 bp, Homo sapiens
agctttatttattta

SEQ ID NO: 1372439 - DNA, 15 bp, Homo sapiens
tagctttatttattt

SEQ ID NO: 1372440 - DNA, 15 bp, Homo sapiens
ttagctttatttatt

SEQ ID NO: 1372441 - DNA, 15 bp, Homo sapiens
attagctttatttat

SEQ ID NO: 1372442 - DNA, 15 bp, Homo sapiens
cattagctttattta

SEQ ID NO: 1372443 - DNA, 15 bp, Homo sapiens
tcattagctttattt

SEQ ID NO: 1372444 - DNA, 15 bp, Homo sapiens
ctcattagctttatt

SEQ ID NO: 1372445 - DNA, 15 bp, Homo sapiens
tctcattagctttat

SEQ ID NO: 1372446 - DNA, 15 bp, Homo sapiens
ctctcattagcttta

SEQ ID NO: 1372447 - DNA, 15 bp, Homo sapiens
tctctcattagcttt

SEQ ID NO: 1372448 - DNA, 15 bp, Homo sapiens
ttctctcattagctt

SEQ ID NO: 1372449 - DNA, 15 bp, Homo sapiens
attctctcattagct

SEQ ID NO: 1372450 - DNA, 15 bp, Homo sapiens
aattctctcattagc

SEQ ID NO: 1372451 - DNA, 15 bp, Homo sapiens
aaattctctcattag

SEQ ID NO: 1372452 - DNA, 15 bp, Homo sapiens
caaattctctcatta

SEQ ID NO: 1372453 - DNA, 15 bp, Homo sapiens
gcaaattctctcatt

SEQ ID NO: 1372454 - DNA, 15 bp, Homo sapiens
ggcaaattctctcat

SEQ ID NO: 1372455 - DNA, 15 bp, Homo sapiens
aggcaaattctctca

SEQ ID NO: 1372456 - DNA, 15 bp, Homo sapiens
caggcaaattctctc

SEQ ID NO: 1372457 - DNA, 15 bp, Homo sapiens
ccaggcaaattctct

SEQ ID NO: 1372458 - DNA, 15 bp, Homo sapiens
accaggcaaattctc

SEQ ID NO: 1372459 - DNA, 15 bp, Homo sapiens
aaccaggcaaattct

SEQ ID NO: 1372460 - DNA, 15 bp, Homo sapiens
caaccaggcaaattc

SEQ ID NO: 1372461 - DNA, 15 bp, Homo sapiens
tcaaccaggcaaatt

SEQ ID NO: 1372462 - DNA, 15 bp, Homo sapiens
ctcaaccaggcaaat

SEQ ID NO: 1372463 - DNA, 15 bp, Homo sapiens
actcaaccaggcaaa

SEQ ID NO: 1372464 - DNA, 15 bp, Homo sapiens
cactcaaccaggcaa

SEQ ID NO: 1372465 - DNA, 15 bp, Homo sapiens
acactcaaccaggca

SEQ ID NO: 1372466 - DNA, 15 bp, Homo sapiens
cacactcaaccaggc

SEQ ID NO: 1372467 - DNA, 15 bp, Homo sapiens
tcacactcaaccagg

SEQ ID NO: 1372468 - DNA, 15 bp, Homo sapiens
ttcacactcaaccag

SEQ ID NO: 1372469 - DNA, 15 bp, Homo sapiens
tttcacactcaacca

SEQ ID NO: 1372470 - DNA, 15 bp, Homo sapiens
gtttcacactcaacc

SEQ ID NO: 1372471 - DNA, 15 bp, Homo sapiens
agtttcacactcaac

SEQ ID NO: 1372472 - DNA, 15 bp, Homo sapiens
cagtttcacactcaa

SEQ ID NO: 1372473 - DNA, 15 bp, Homo sapiens
tcagtttcacactca

SEQ ID NO: 1372474 - DNA, 15 bp, Homo sapiens
ctcagtttcacactc

SEQ ID NO: 1372475 - DNA, 15 bp, Homo sapiens
gctcagtttcacact

SEQ ID NO: 1372476 - DNA, 15 bp, Homo sapiens
ggctcagtttcacac

SEQ ID NO: 1372477 - DNA, 15 bp, Homo sapiens
gggctcagtttcaca

SEQ ID NO: 1372478 - DNA, 15 bp, Homo sapiens
ggggctcagtttcac

SEQ ID NO: 1372479 - DNA, 15 bp, Homo sapiens
tggggctcagtttca

SEQ ID NO: 1372480 - DNA, 15 bp, Homo sapiens
gtggggctcagtttc

SEQ ID NO: 1372481 - DNA, 15 bp, Homo sapiens
agtggggctcagttt

SEQ ID NO: 1372482 - DNA, 15 bp, Homo sapiens
cagtggggctcagtt

SEQ ID NO: 1372483 - DNA, 15 bp, Homo sapiens
tcagtggggctcagt

SEQ ID NO: 1372484 - DNA, 15 bp, Homo sapiens
ctcagtggggctcag

SEQ ID NO: 1372485 - DNA, 15 bp, Homo sapiens
gctcagtggggctca

SEQ ID NO: 1372486 - DNA, 15 bp, Homo sapiens
agctcagtggggctc

SEQ ID NO: 1372487 - DNA, 15 bp, Homo sapiens
cagctcagtggggct

SEQ ID NO: 1372488 - DNA, 15 bp, Homo sapiens
acagctcagtggggc

SEQ ID NO: 1372489 - DNA, 15 bp, Homo sapiens
tacagctcagtgggg

SEQ ID NO: 1372490 - DNA, 15 bp, Homo sapiens
atacagctcagtggg

SEQ ID NO: 1372491 - DNA, 15 bp, Homo sapiens
aatacagctcagtgg

SEQ ID NO: 1372492 - DNA, 15 bp, Homo sapiens
taatacagctcagtg

SEQ ID NO: 1372493 - DNA, 15 bp, Homo sapiens
gtaatacagctcagt

SEQ ID NO: 1372494 - DNA, 15 bp, Homo sapiens
tgtaatacagctcag

SEQ ID NO: 1372495 - DNA, 15 bp, Homo sapiens
ttgtaatacagctca

SEQ ID NO: 1372496 - DNA, 15 bp, Homo sapiens
cttgtaatacagctc

SEQ ID NO: 1372497 - DNA, 15 bp, Homo sapiens
tcttgtaatacagct

SEQ ID NO: 1372498 - DNA, 15 bp, Homo sapiens
ctcttgtaatacagc

SEQ ID NO: 1372499 - DNA, 15 bp, Homo sapiens
gctcttgtaatacag

SEQ ID NO: 1372500 - DNA, 15 bp, Homo sapiens
ggctcttgtaataca

SEQ ID NO: 1372501 - DNA, 15 bp, Homo sapiens
tggctcttgtaatac

SEQ ID NO: 1372502 - DNA, 15 bp, Homo sapiens
ttggctcttgtaata

SEQ ID NO: 1372503 - DNA, 15 bp, Homo sapiens
tttggctcttgtaat

SEQ ID NO: 1372504 - DNA, 15 bp, Homo sapiens
ctttggctcttgtaa

SEQ ID NO: 1372505 - DNA, 15 bp, Homo sapiens
cctttggctcttgta

SEQ ID NO: 1372506 - DNA, 15 bp, Homo sapiens
acctttggctcttgt

SEQ ID NO: 1372507 - DNA, 15 bp, Homo sapiens
gacctttggctcttg

SEQ ID NO: 1372508 - DNA, 15 bp, Homo sapiens
ggacctttggctctt

SEQ ID NO: 1372509 - DNA, 15 bp, Homo sapiens
aggacctttggctct

SEQ ID NO: 1372510 - DNA, 15 bp, Homo sapiens
gaggacctttggctc

SEQ ID NO: 1372511 - DNA, 15 bp, Homo sapiens
ggaggacctttggct

SEQ ID NO: 1372512 - DNA, 15 bp, Homo sapiens
gggaggacctttggc

SEQ ID NO: 1372513 - DNA, 15 bp, Homo sapiens
ggggaggacctttgg

SEQ ID NO: 1372514 - DNA, 15 bp, Homo sapiens
aggggaggacctttg

SEQ ID NO: 1372515 - DNA, 15 bp, Homo sapiens
taggggaggaccttt

SEQ ID NO: 1372516 - DNA, 15 bp, Homo sapiens
gtaggggaggacctt

SEQ ID NO: 1372517 - DNA, 15 bp, Homo sapiens
tgtaggggaggacct

SEQ ID NO: 1372518 - DNA, 15 bp, Homo sapiens
ctgtaggggaggacc

SEQ ID NO: 1372519 - DNA, 15 bp, Homo sapiens
cctgtaggggaggac

SEQ ID NO: 1372520 - DNA, 15 bp, Homo sapiens
tcctgtaggggagga

SEQ ID NO: 1372521 - DNA, 15 bp, Homo sapiens
atcctgtaggggagg

SEQ ID NO: 1372522 - DNA, 15 bp, Homo sapiens
aatcctgtaggggag

SEQ ID NO: 1372523 - DNA, 15 bp, Homo sapiens
aaatcctgtagggga

SEQ ID NO: 1372524 - DNA, 15 bp, Homo sapiens
aaaatcctgtagggg

SEQ ID NO: 1372525 - DNA, 15 bp, Homo sapiens
taaaatcctgtaggg

SEQ ID NO: 1372526 - DNA, 15 bp, Homo sapiens
gtaaaatcctgtagg

SEQ ID NO: 1372527 - DNA, 15 bp, Homo sapiens
agtaaaatcctgtag

SEQ ID NO: 1372528 - DNA, 15 bp, Homo sapiens
cagtaaaatcctgta

SEQ ID NO: 1372529 - DNA, 15 bp, Homo sapiens
acagtaaaatcctgt

SEQ ID NO: 1372530 - DNA, 15 bp, Homo sapiens
cacagtaaaatcctg

SEQ ID NO: 1372531 - DNA, 15 bp, Homo sapiens
tcacagtaaaatcct

SEQ ID NO: 1372532 - DNA, 15 bp, Homo sapiens
gtcacagtaaaatcc

SEQ ID NO: 1372533 - DNA, 15 bp, Homo sapiens
agtcacagtaaaatc

SEQ ID NO: 1372534 - DNA, 15 bp, Homo sapiens
cagtcacagtaaaat

SEQ ID NO: 1372535 - DNA, 15 bp, Homo sapiens
gcagtcacagtaaaa

SEQ ID NO: 1372536 - DNA, 15 bp, Homo sapiens
ggcagtcacagtaaa

SEQ ID NO: 1372537 - DNA, 15 bp, Homo sapiens
aggcagtcacagtaa

SEQ ID NO: 1372538 - DNA, 15 bp, Homo sapiens
taggcagtcacagta

SEQ ID NO: 1372539 - DNA, 15 bp, Homo sapiens
ataggcagtcacagt

SEQ ID NO: 1372540 - DNA, 15 bp, Homo sapiens
gataggcagtcacag

SEQ ID NO: 1372541 - DNA, 15 bp, Homo sapiens
tgataggcagtcaca

SEQ ID NO: 1372542 - DNA, 15 bp, Homo sapiens
ttgataggcagtcac

SEQ ID NO: 1372543 - DNA, 15 bp, Homo sapiens
tttgataggcagtca

SEQ ID NO: 1372544 - DNA, 15 bp, Homo sapiens
ttttgataggcagtc

SEQ ID NO: 1372545 - DNA, 15 bp, Homo sapiens
gttttgataggcagt

SEQ ID NO: 1372546 - DNA, 15 bp, Homo sapiens
agttttgataggcag

SEQ ID NO: 1372547 - DNA, 15 bp, Homo sapiens
gagttttgataggca

SEQ ID NO: 1372548 - DNA, 15 bp, Homo sapiens
tgagttttgataggc

SEQ ID NO: 1372549 - DNA, 15 bp, Homo sapiens
gtgagttttgatagg

SEQ ID NO: 1372550 - DNA, 15 bp, Homo sapiens
agtgagttttgatag

SEQ ID NO: 1372551 - DNA, 15 bp, Homo sapiens
aagtgagttttgata

SEQ ID NO: 1372552 - DNA, 15 bp, Homo sapiens
taagtgagttttgat

SEQ ID NO: 1372553 - DNA, 15 bp, Homo sapiens
ttaagtgagttttga

SEQ ID NO: 1372554 - DNA, 15 bp, Homo sapiens
attaagtgagttttg

SEQ ID NO: 1372555 - DNA, 15 bp, Homo sapiens
aattaagtgagtttt

SEQ ID NO: 1372556 - DNA, 15 bp, Homo sapiens
taattaagtgagttt

SEQ ID NO: 1372557 - DNA, 15 bp, Homo sapiens
ttaattaagtgagtt

SEQ ID NO: 1372558 - DNA, 15 bp, Homo sapiens
attaattaagtgagt

SEQ ID NO: 1372559 - DNA, 15 bp, Homo sapiens
cattaattaagtgag

SEQ ID NO: 1372560 - DNA, 15 bp, Homo sapiens
gcattaattaagtga

SEQ ID NO: 1372561 - DNA, 15 bp, Homo sapiens
ggcattaattaagtg

SEQ ID NO: 1372562 - DNA, 15 bp, Homo sapiens
tggcattaattaagt

SEQ ID NO: 1372563 - DNA, 15 bp, Homo sapiens
gtggcattaattaag

SEQ ID NO: 1372564 - DNA, 15 bp, Homo sapiens
agtggcattaattaa

SEQ ID NO: 1372565 - DNA, 15 bp, Homo sapiens
aagtggcattaatta

SEQ ID NO: 1372566 - DNA, 15 bp, Homo sapiens
taagtggcattaatt

SEQ ID NO: 1372567 - DNA, 15 bp, Homo sapiens
gtaagtggcattaat

SEQ ID NO: 1372568 - DNA, 15 bp, Homo sapiens
tgtaagtggcattaa

SEQ ID NO: 1372569 - DNA, 15 bp, Homo sapiens
atgtaagtggcatta

SEQ ID NO: 1372570 - DNA, 15 bp, Homo sapiens
aatgtaagtggcatt

SEQ ID NO: 1372571 - DNA, 15 bp, Homo sapiens
gaatgtaagtggcat

SEQ ID NO: 1372572 - DNA, 15 bp, Homo sapiens
agaatgtaagtggca

SEQ ID NO: 1372573 - DNA, 15 bp, Homo sapiens
tagaatgtaagtggc

SEQ ID NO: 1372574 - DNA, 15 bp, Homo sapiens
atagaatgtaagtgg

SEQ ID NO: 1372575 - DNA, 15 bp, Homo sapiens
catagaatgtaagtg

SEQ ID NO: 1372576 - DNA, 15 bp, Homo sapiens
acatagaatgtaagt

SEQ ID NO: 1372577 - DNA, 15 bp, Homo sapiens
tacatagaatgtaag

SEQ ID NO: 1372578 - DNA, 15 bp, Homo sapiens
ctacatagaatgtaa

SEQ ID NO: 1372579 - DNA, 15 bp, Homo sapiens
tctacatagaatgta

SEQ ID NO: 1372580 - DNA, 15 bp, Homo sapiens
gtctacatagaatgt

SEQ ID NO: 1372581 - DNA, 15 bp, Homo sapiens
agtctacatagaatg

SEQ ID NO: 1372582 - DNA, 15 bp, Homo sapiens
aagtctacatagaat

SEQ ID NO: 1372583 - DNA, 15 bp, Homo sapiens
aaagtctacatagaa

SEQ ID NO: 1372584 - DNA, 15 bp, Homo sapiens
aaaagtctacataga

SEQ ID NO: 1372585 - DNA, 15 bp, Homo sapiens
gaaaagtctacatag

SEQ ID NO: 1372586 - DNA, 15 bp, Homo sapiens
tgaaaagtctacata

SEQ ID NO: 1372587 - DNA, 15 bp, Homo sapiens
ttgaaaagtctacat

SEQ ID NO: 1372588 - DNA, 15 bp, Homo sapiens
cttgaaaagtctaca

SEQ ID NO: 1372589 - DNA, 15 bp, Homo sapiens
gcttgaaaagtctac

SEQ ID NO: 1372590 - DNA, 15 bp, Homo sapiens
tgcttgaaaagtcta

SEQ ID NO: 1372591 - DNA, 15 bp, Homo sapiens
ttgcttgaaaagtct

SEQ ID NO: 1372592 - DNA, 15 bp, Homo sapiens
tttgcttgaaaagtc

SEQ ID NO: 1372593 - DNA, 15 bp, Homo sapiens
ttttgcttgaaaagt

SEQ ID NO: 1372594 - DNA, 15 bp, Homo sapiens
tttttgcttgaaaag

SEQ ID NO: 1372595 - DNA, 15 bp, Homo sapiens
atttttgcttgaaaa

SEQ ID NO: 1372596 - DNA, 15 bp, Homo sapiens
tatttttgcttgaaa

SEQ ID NO: 1372597 - DNA, 15 bp, Homo sapiens
ttatttttgcttgaa

SEQ ID NO: 1372598 - DNA, 15 bp, Homo sapiens
tttatttttgcttga

SEQ ID NO: 1372599 - DNA, 15 bp, Homo sapiens
atttatttttgcttg

SEQ ID NO: 1372600 - DNA, 15 bp, Homo sapiens
aatttatttttgctt

SEQ ID NO: 1372601 - DNA, 15 bp, Homo sapiens
aaatttatttttgct

SEQ ID NO: 1372602 - DNA, 15 bp, Homo sapiens
gaaatttatttttgc

SEQ ID NO: 1372603 - DNA, 15 bp, Homo sapiens
tgaaatttatttttg

SEQ ID NO: 1372604 - DNA, 15 bp, Homo sapiens
atgaaatttattttt

SEQ ID NO: 1372605 - DNA, 15 bp, Homo sapiens
gatgaaatttatttt

SEQ ID NO: 1372606 - DNA, 15 bp, Homo sapiens
agatgaaatttattt

SEQ ID NO: 1372607 - DNA, 15 bp, Homo sapiens
tagatgaaatttatt

SEQ ID NO: 1372608 - DNA, 15 bp, Homo sapiens
ttagatgaaatttat

SEQ ID NO: 1372609 - DNA, 15 bp, Homo sapiens
attagatgaaattta

SEQ ID NO: 1372610 - DNA, 15 bp, Homo sapiens
cattagatgaaattt

SEQ ID NO: 1372611 - DNA, 15 bp, Homo sapiens
tcattagatgaaatt

SEQ ID NO: 1372612 - DNA, 15 bp, Homo sapiens
atcattagatgaaat

SEQ ID NO: 1372613 - DNA, 15 bp, Homo sapiens
aatcattagatgaaa

SEQ ID NO: 1372614 - DNA, 15 bp, Homo sapiens
aaatcattagatgaa

SEQ ID NO: 1372615 - DNA, 15 bp, Homo sapiens
aaaatcattagatga

SEQ ID NO: 1372616 - DNA, 15 bp, Homo sapiens
aaaaatcattagatg

SEQ ID NO: 1372617 - DNA, 15 bp, Homo sapiens
aaaaaatcattagat

SEQ ID NO: 1372618 - DNA, 15 bp, Homo sapiens
taaaaaatcattaga

SEQ ID NO: 1372619 - DNA, 15 bp, Homo sapiens
ttaaaaaatcattag

SEQ ID NO: 1372620 - DNA, 15 bp, Homo sapiens
tttaaaaaatcatta

SEQ ID NO: 1372621 - DNA, 15 bp, Homo sapiens
ctttaaaaaatcatt

SEQ ID NO: 1372622 - DNA, 15 bp, Homo sapiens
gctttaaaaaatcat

SEQ ID NO: 1372623 - DNA, 15 bp, Homo sapiens
agctttaaaaaatca

SEQ ID NO: 1372624 - DNA, 15 bp, Homo sapiens
gagctttaaaaaatc

SEQ ID NO: 1372625 - DNA, 15 bp, Homo sapiens
ggagctttaaaaaat

SEQ ID NO: 1372626 - DNA, 15 bp, Homo sapiens
tggagctttaaaaaa

SEQ ID NO: 1372627 - DNA, 15 bp, Homo sapiens
ttggagctttaaaaa

SEQ ID NO: 1372628 - DNA, 15 bp, Homo sapiens
attggagctttaaaa

SEQ ID NO: 1372629 - DNA, 15 bp, Homo sapiens
tattggagctttaaa

SEQ ID NO: 1372630 - DNA, 15 bp, Homo sapiens
ctattggagctttaa

SEQ ID NO: 1372631 - DNA, 15 bp, Homo sapiens
gctattggagcttta

SEQ ID NO: 1372632 - DNA, 15 bp, Homo sapiens
ggctattggagcttt

SEQ ID NO: 1372633 - DNA, 15 bp, Homo sapiens
aggctattggagctt

SEQ ID NO: 1372634 - DNA, 15 bp, Homo sapiens
aaggctattggagct

SEQ ID NO: 1372635 - DNA, 15 bp, Homo sapiens
gaaggctattggagc

SEQ ID NO: 1372636 - DNA, 15 bp, Homo sapiens
tgaaggctattggag

SEQ ID NO: 1372637 - DNA, 15 bp, Homo sapiens
gtgaaggctattgga

SEQ ID NO: 1372638 - DNA, 15 bp, Homo sapiens
tgtgaaggctattgg

SEQ ID NO: 1372639 - DNA, 15 bp, Homo sapiens
atgtgaaggctattg

SEQ ID NO: 1372640 - DNA, 15 bp, Homo sapiens
gatgtgaaggctatt

SEQ ID NO: 1372641 - DNA, 15 bp, Homo sapiens
agatgtgaaggctat

SEQ ID NO: 1372642 - DNA, 15 bp, Homo sapiens
tagatgtgaaggcta

SEQ ID NO: 1372643 - DNA, 15 bp, Homo sapiens
gtagatgtgaaggct

SEQ ID NO: 1372644 - DNA, 15 bp, Homo sapiens
tgtagatgtgaaggc

SEQ ID NO: 1372645 - DNA, 15 bp, Homo sapiens
gtgtagatgtgaagg

SEQ ID NO: 1372646 - DNA, 15 bp, Homo sapiens
tgtgtagatgtgaag

SEQ ID NO: 1372647 - DNA, 15 bp, Homo sapiens
ttgtgtagatgtgaa

SEQ ID NO: 1372648 - DNA, 15 bp, Homo sapiens
tttgtgtagatgtga

SEQ ID NO: 1372649 - DNA, 15 bp, Homo sapiens
atttgtgtagatgtg

SEQ ID NO: 1372650 - DNA, 15 bp, Homo sapiens
tatttgtgtagatgt

SEQ ID NO: 1372651 - DNA, 15 bp, Homo sapiens
atatttgtgtagatg

SEQ ID NO: 1372652 - DNA, 15 bp, Homo sapiens
gatatttgtgtagat

SEQ ID NO: 1372653 - DNA, 15 bp, Homo sapiens
tgatatttgtgtaga

SEQ ID NO: 1372654 - DNA, 15 bp, Homo sapiens
ctgatatttgtgtag

SEQ ID NO: 1372655 - DNA, 15 bp, Homo sapiens
actgatatttgtgta

SEQ ID NO: 1372656 - DNA, 15 bp, Homo sapiens
cactgatatttgtgt

SEQ ID NO: 1372657 - DNA, 15 bp, Homo sapiens
gcactgatatttgtg

SEQ ID NO: 1372658 - DNA, 15 bp, Homo sapiens
agcactgatatttgt

SEQ ID NO: 1372659 - DNA, 15 bp, Homo sapiens
tagcactgatatttg

SEQ ID NO: 1372660 - DNA, 15 bp, Homo sapiens
ttagcactgatattt

SEQ ID NO: 1372661 - DNA, 15 bp, Homo sapiens
tttagcactgatatt

SEQ ID NO: 1372662 - DNA, 15 bp, Homo sapiens
ttttagcactgatat

SEQ ID NO: 1372663 - DNA, 15 bp, Homo sapiens
tttttagcactgata

SEQ ID NO: 1372664 - DNA, 15 bp, Homo sapiens
ttttttagcactgat

SEQ ID NO: 1372665 - DNA, 15 bp, Homo sapiens
gttttttagcactga

SEQ ID NO: 1372666 - DNA, 15 bp, Homo sapiens
tgttttttagcactg

SEQ ID NO: 1372667 - DNA, 15 bp, Homo sapiens
ctgttttttagcact

SEQ ID NO: 1372668 - DNA, 15 bp, Homo sapiens
actgttttttagcac

SEQ ID NO: 1372669 - DNA, 15 bp, Homo sapiens
aactgttttttagca

SEQ ID NO: 1372670 - DNA, 15 bp, Homo sapiens
taactgttttttagc

SEQ ID NO: 1372671 - DNA, 15 bp, Homo sapiens
ttaactgttttttag

SEQ ID NO: 1372672 - DNA, 15 bp, Homo sapiens
attaactgtttttta

SEQ ID NO: 1372673 - DNA, 15 bp, Homo sapiens
gattaactgtttttt

SEQ ID NO: 1372674 - DNA, 15 bp, Homo sapiens
tgattaactgttttt

SEQ ID NO: 1372675 - DNA, 15 bp, Homo sapiens
ttgattaactgtttt

SEQ ID NO: 1372676 - DNA, 15 bp, Homo sapiens
cttgattaactgttt

SEQ ID NO: 1372677 - DNA, 15 bp, Homo sapiens
ccttgattaactgtt

SEQ ID NO: 1372678 - DNA, 15 bp, Homo sapiens
cccttgattaactgt

SEQ ID NO: 1372679 - DNA, 15 bp, Homo sapiens
tcccttgattaactg

SEQ ID NO: 1372680 - DNA, 15 bp, Homo sapiens
atcccttgattaact

SEQ ID NO: 1372681 - DNA, 15 bp, Homo sapiens
tatcccttgattaac

SEQ ID NO: 1372682 - DNA, 15 bp, Homo sapiens
atatcccttgattaa

SEQ ID NO: 1372683 - DNA, 15 bp, Homo sapiens
catatcccttgatta

SEQ ID NO: 1372684 - DNA, 15 bp, Homo sapiens
tcatatcccttgatt

SEQ ID NO: 1372685 - DNA, 15 bp, Homo sapiens
ttcatatcccttgat

SEQ ID NO: 1372686 - DNA, 15 bp, Homo sapiens
gttcatatcccttga

SEQ ID NO: 1372687 - DNA, 15 bp, Homo sapiens
ggttcatatcccttg

SEQ ID NO: 1372688 - DNA, 15 bp, Homo sapiens
cggttcatatccctt

SEQ ID NO: 1372689 - DNA, 15 bp, Homo sapiens
tcggttcatatccct

SEQ ID NO: 1372690 - DNA, 15 bp, Homo sapiens
ctcggttcatatccc

SEQ ID NO: 1372691 - DNA, 15 bp, Homo sapiens
actcggttcatatcc

SEQ ID NO: 1372692 - DNA, 15 bp, Homo sapiens
gactcggttcatatc

SEQ ID NO: 1372693 - DNA, 15 bp, Homo sapiens
agactcggttcatat

SEQ ID NO: 1372694 - DNA, 15 bp, Homo sapiens
cagactcggttcata

SEQ ID NO: 1372695 - DNA, 15 bp, Homo sapiens
tcagactcggttcat

SEQ ID NO: 1372696 - DNA, 15 bp, Homo sapiens
ctcagactcggttca

SEQ ID NO: 1372697 - DNA, 15 bp, Homo sapiens
tctcagactcggttc

SEQ ID NO: 1372698 - DNA, 15 bp, Homo sapiens
gtctcagactcggtt

SEQ ID NO: 1372699 - DNA, 15 bp, Homo sapiens
ggtctcagactcggt

SEQ ID NO: 1372700 - DNA, 15 bp, Homo sapiens
tggtctcagactcgg

SEQ ID NO: 1372701 - DNA, 15 bp, Homo sapiens
atggtctcagactcg

SEQ ID NO: 1372702 - DNA, 15 bp, Homo sapiens
gatggtctcagactc

SEQ ID NO: 1372703 - DNA, 15 bp, Homo sapiens
tgatggtctcagact

SEQ ID NO: 1372704 - DNA, 15 bp, Homo sapiens
gtgatggtctcagac

SEQ ID NO: 1372705 - DNA, 15 bp, Homo sapiens
agtgatggtctcaga

SEQ ID NO: 1372706 - DNA, 15 bp, Homo sapiens
cagtgatggtctcag

SEQ ID NO: 1372707 - DNA, 15 bp, Homo sapiens
acagtgatggtctca

SEQ ID NO: 1372708 - DNA, 15 bp, Homo sapiens
gacagtgatggtctc

SEQ ID NO: 1372709 - DNA, 15 bp, Homo sapiens
tgacagtgatggtct

SEQ ID NO: 1372710 - DNA, 15 bp, Homo sapiens
ttgacagtgatggtc

SEQ ID NO: 1372711 - DNA, 15 bp, Homo sapiens
tttgacagtgatggt

SEQ ID NO: 1372712 - DNA, 15 bp, Homo sapiens
atttgacagtgatgg

SEQ ID NO: 1372713 - DNA, 15 bp, Homo sapiens
gatttgacagtgatg

SEQ ID NO: 1372714 - DNA, 15 bp, Homo sapiens
agatttgacagtgat

SEQ ID NO: 1372715 - DNA, 15 bp, Homo sapiens
aagatttgacagtga

SEQ ID NO: 1372716 - DNA, 15 bp, Homo sapiens
aaagatttgacagtg

SEQ ID NO: 1372717 - DNA, 15 bp, Homo sapiens
caaagatttgacagt

SEQ ID NO: 1372718 - DNA, 15 bp, Homo sapiens
acaaagatttgacag

SEQ ID NO: 1372719 - DNA, 15 bp, Homo sapiens
aacaaagatttgaca

SEQ ID NO: 1372720 - DNA, 15 bp, Homo sapiens
gaacaaagatttgac

SEQ ID NO: 1372721 - DNA, 15 bp, Homo sapiens
tgaacaaagatttga

SEQ ID NO: 1372722 - DNA, 15 bp, Homo sapiens
atgaacaaagatttg

SEQ ID NO: 1372723 - DNA, 15 bp, Homo sapiens
catgaacaaagattt

SEQ ID NO: 1372724 - DNA, 15 bp, Homo sapiens
ccatgaacaaagatt

SEQ ID NO: 1372725 - DNA, 15 bp, Homo sapiens
tccatgaacaaagat

SEQ ID NO: 1372726 - DNA, 15 bp, Homo sapiens
ttccatgaacaaaga

SEQ ID NO: 1372727 - DNA, 15 bp, Homo sapiens
cttccatgaacaaag

SEQ ID NO: 1372728 - DNA, 15 bp, Homo sapiens
gcttccatgaacaaa

SEQ ID NO: 1372729 - DNA, 15 bp, Homo sapiens
tgcttccatgaacaa

SEQ ID NO: 1372730 - DNA, 15 bp, Homo sapiens
ctgcttccatgaaca

SEQ ID NO: 1372731 - DNA, 15 bp, Homo sapiens
cctgcttccatgaac

SEQ ID NO: 1372732 - DNA, 15 bp, Homo sapiens
acctgcttccatgaa

SEQ ID NO: 1372733 - DNA, 15 bp, Homo sapiens
cacctgcttccatga

SEQ ID NO: 1372734 - DNA, 15 bp, Homo sapiens
ccacctgcttccatg

SEQ ID NO: 1372735 - DNA, 15 bp, Homo sapiens
tccacctgcttccat

SEQ ID NO: 1372736 - DNA, 15 bp, Homo sapiens
ctccacctgcttcca

SEQ ID NO: 1372737 - DNA, 15 bp, Homo sapiens
actccacctgcttcc

SEQ ID NO: 1372738 - DNA, 15 bp, Homo sapiens
aactccacctgcttc

SEQ ID NO: 1372739 - DNA, 15 bp, Homo sapiens
taactccacctgctt

SEQ ID NO: 1372740 - DNA, 15 bp, Homo sapiens
ctaactccacctgct

SEQ ID NO: 1372741 - DNA, 15 bp, Homo sapiens
cctaactccacctgc

SEQ ID NO: 1372742 - DNA, 15 bp, Homo sapiens
ccctaactccacctg

SEQ ID NO: 1372743 - DNA, 15 bp, Homo sapiens
gccctaactccacct

SEQ ID NO: 1372744 - DNA, 15 bp, Homo sapiens
tgccctaactccacc

SEQ ID NO: 1372745 - DNA, 15 bp, Homo sapiens
ctgccctaactccac

SEQ ID NO: 1372746 - DNA, 15 bp, Homo sapiens
tctgccctaactcca

SEQ ID NO: 1372747 - DNA, 15 bp, Homo sapiens
atctgccctaactcc

SEQ ID NO: 1372748 - DNA, 15 bp, Homo sapiens
tatctgccctaactc

SEQ ID NO: 1372749 - DNA, 15 bp, Homo sapiens
gtatctgccctaact

SEQ ID NO: 1372750 - DNA, 15 bp, Homo sapiens
cgtatctgccctaac

SEQ ID NO: 1372751 - DNA, 15 bp, Homo sapiens
gcgtatctgccctaa

SEQ ID NO: 1372752 - DNA, 15 bp, Homo sapiens
ggcgtatctgcccta

SEQ ID NO: 1372753 - DNA, 15 bp, Homo sapiens
tggcgtatctgccct

SEQ ID NO: 1372754 - DNA, 15 bp, Homo sapiens
ctggcgtatctgccc

SEQ ID NO: 1372755 - DNA, 15 bp, Homo sapiens
tctggcgtatctgcc

SEQ ID NO: 1372756 - DNA, 15 bp, Homo sapiens
gtctggcgtatctgc

SEQ ID NO: 1372757 - DNA, 15 bp, Homo sapiens
tgtctggcgtatctg

SEQ ID NO: 1372758 - DNA, 15 bp, Homo sapiens
atgtctggcgtatct

SEQ ID NO: 1372759 - DNA, 15 bp, Homo sapiens
aatgtctggcgtatc

SEQ ID NO: 1372760 - DNA, 15 bp, Homo sapiens
gaatgtctggcgtat

SEQ ID NO: 1372761 - DNA, 15 bp, Homo sapiens
agaatgtctggcgta

SEQ ID NO: 1372762 - DNA, 15 bp, Homo sapiens
aagaatgtctggcgt

SEQ ID NO: 1372763 - DNA, 15 bp, Homo sapiens
gaagaatgtctggcg

SEQ ID NO: 1372764 - DNA, 15 bp, Homo sapiens
ggaagaatgtctggc

SEQ ID NO: 1372765 - DNA, 15 bp, Homo sapiens
aggaagaatgtctgg

SEQ ID NO: 1372766 - DNA, 15 bp, Homo sapiens
aaggaagaatgtctg

SEQ ID NO: 1372767 - DNA, 15 bp, Homo sapiens
taaggaagaatgtct

SEQ ID NO: 1372768 - DNA, 15 bp, Homo sapiens
gtaaggaagaatgtc

SEQ ID NO: 1372769 - DNA, 15 bp, Homo sapiens
agtaaggaagaatgt

SEQ ID NO: 1372770 - DNA, 15 bp, Homo sapiens
tagtaaggaagaatg

SEQ ID NO: 1372771 - DNA, 15 bp, Homo sapiens
ttagtaaggaagaat

SEQ ID NO: 1372772 - DNA, 15 bp, Homo sapiens
tttagtaaggaagaa

SEQ ID NO: 1372773 - DNA, 15 bp, Homo sapiens
ttttagtaaggaaga

SEQ ID NO: 1372774 - DNA, 15 bp, Homo sapiens
cttttagtaaggaag

SEQ ID NO: 1372775 - DNA, 15 bp, Homo sapiens
gcttttagtaaggaa

SEQ ID NO: 1372776 - DNA, 15 bp, Homo sapiens
tgcttttagtaagga

SEQ ID NO: 1372777 - DNA, 15 bp, Homo sapiens
atgcttttagtaagg

SEQ ID NO: 1372778 - DNA, 15 bp, Homo sapiens
gatgcttttagtaag

SEQ ID NO: 1372779 - DNA, 15 bp, Homo sapiens
agatgcttttagtaa

SEQ ID NO: 1372780 - DNA, 15 bp, Homo sapiens
tagatgcttttagta

SEQ ID NO: 1372781 - DNA, 15 bp, Homo sapiens
ctagatgcttttagt

SEQ ID NO: 1372782 - DNA, 15 bp, Homo sapiens
actagatgcttttag

SEQ ID NO: 1372783 - DNA, 15 bp, Homo sapiens
gactagatgctttta

SEQ ID NO: 1372784 - DNA, 15 bp, Homo sapiens
ggactagatgctttt

SEQ ID NO: 1372785 - DNA, 15 bp, Homo sapiens
gggactagatgcttt

SEQ ID NO: 1372786 - DNA, 15 bp, Homo sapiens
tgggactagatgctt

SEQ ID NO: 1372787 - DNA, 15 bp, Homo sapiens
gtgggactagatgct

SEQ ID NO: 1372788 - DNA, 15 bp, Homo sapiens
agtgggactagatgc

SEQ ID NO: 1372789 - DNA, 15 bp, Homo sapiens
cagtgggactagatg

SEQ ID NO: 1372790 - DNA, 15 bp, Homo sapiens
gcagtgggactagat

SEQ ID NO: 1372791 - DNA, 15 bp, Homo sapiens
ggcagtgggactaga

SEQ ID NO: 1372792 - DNA, 15 bp, Homo sapiens
aggcagtgggactag

SEQ ID NO: 1372793 - DNA, 15 bp, Homo sapiens
caggcagtgggacta

SEQ ID NO: 1372794 - DNA, 15 bp, Homo sapiens
tcaggcagtgggact

SEQ ID NO: 1372795 - DNA, 15 bp, Homo sapiens
atcaggcagtgggac

SEQ ID NO: 1372796 - DNA, 15 bp, Homo sapiens
tatcaggcagtggga

SEQ ID NO: 1372797 - DNA, 15 bp, Homo sapiens
gtatcaggcagtggg

SEQ ID NO: 1372798 - DNA, 15 bp, Homo sapiens
tgtatcaggcagtgg

SEQ ID NO: 1372799 - DNA, 15 bp, Homo sapiens
ttgtatcaggcagtg

SEQ ID NO: 1372800 - DNA, 15 bp, Homo sapiens
tttgtatcaggcagt

SEQ ID NO: 1372801 - DNA, 15 bp, Homo sapiens
ctttgtatcaggcag

SEQ ID NO: 1372802 - DNA, 15 bp, Homo sapiens
actttgtatcaggca

SEQ ID NO: 1372803 - DNA, 15 bp, Homo sapiens
cactttgtatcaggc

SEQ ID NO: 1372804 - DNA, 15 bp, Homo sapiens
tcactttgtatcagg

SEQ ID NO: 1372805 - DNA, 15 bp, Homo sapiens
ctcactttgtatcag

SEQ ID NO: 1372806 - DNA, 15 bp, Homo sapiens
actcactttgtatca

SEQ ID NO: 1372807 - DNA, 15 bp, Homo sapiens
aactcactttgtatc

SEQ ID NO: 1372808 - DNA, 15 bp, Homo sapiens
gaactcactttgtat

SEQ ID NO: 1372809 - DNA, 15 bp, Homo sapiens
agaactcactttgta

SEQ ID NO: 1372810 - DNA, 15 bp, Homo sapiens
aagaactcactttgt

SEQ ID NO: 1372811 - DNA, 15 bp, Homo sapiens
taagaactcactttg

SEQ ID NO: 1372812 - DNA, 15 bp, Homo sapiens
ttaagaactcacttt

SEQ ID NO: 1372813 - DNA, 15 bp, Homo sapiens
gttaagaactcactt

SEQ ID NO: 1372814 - DNA, 15 bp, Homo sapiens
tgttaagaactcact

SEQ ID NO: 1372815 - DNA, 15 bp, Homo sapiens
ttgttaagaactcac

SEQ ID NO: 1372816 - DNA, 15 bp, Homo sapiens
gttgttaagaactca

SEQ ID NO: 1372817 - DNA, 15 bp, Homo sapiens
agttgttaagaactc

SEQ ID NO: 1372818 - DNA, 15 bp, Homo sapiens
aagttgttaagaact

SEQ ID NO: 1372819 - DNA, 15 bp, Homo sapiens
aaagttgttaagaac

SEQ ID NO: 1372820 - DNA, 15 bp, Homo sapiens
aaaagttgttaagaa

SEQ ID NO: 1372821 - DNA, 15 bp, Homo sapiens
gaaaagttgttaaga

SEQ ID NO: 1372822 - DNA, 15 bp, Homo sapiens
ggaaaagttgttaag

SEQ ID NO: 1372823 - DNA, 15 bp, Homo sapiens
aggaaaagttgttaa

SEQ ID NO: 1372824 - DNA, 15 bp, Homo sapiens
aaggaaaagttgtta

SEQ ID NO: 1372825 - DNA, 15 bp, Homo sapiens
aaaggaaaagttgtt

SEQ ID NO: 1372826 - DNA, 15 bp, Homo sapiens
taaaggaaaagttgt

SEQ ID NO: 1372827 - DNA, 15 bp, Homo sapiens
gtaaaggaaaagttg

SEQ ID NO: 1372828 - DNA, 15 bp, Homo sapiens
agtaaaggaaaagtt

SEQ ID NO: 1372829 - DNA, 15 bp, Homo sapiens
aagtaaaggaaaagt

SEQ ID NO: 1372830 - DNA, 15 bp, Homo sapiens
gaagtaaaggaaaag

SEQ ID NO: 1372831 - DNA, 15 bp, Homo sapiens
agaagtaaaggaaaa

SEQ ID NO: 1372832 - DNA, 15 bp, Homo sapiens
cagaagtaaaggaaa

SEQ ID NO: 1372833 - DNA, 15 bp, Homo sapiens
gcagaagtaaaggaa

SEQ ID NO: 1372834 - DNA, 15 bp, Homo sapiens
agcagaagtaaagga

SEQ ID NO: 1372835 - DNA, 15 bp, Homo sapiens
aagcagaagtaaagg

SEQ ID NO: 1372836 - DNA, 15 bp, Homo sapiens
taagcagaagtaaag

SEQ ID NO: 1372837 - DNA, 15 bp, Homo sapiens
ttaagcagaagtaaa

SEQ ID NO: 1372838 - DNA, 15 bp, Homo sapiens
cttaagcagaagtaa

SEQ ID NO: 1372839 - DNA, 15 bp, Homo sapiens
acttaagcagaagta

SEQ ID NO: 1372840 - DNA, 15 bp, Homo sapiens
tacttaagcagaagt

SEQ ID NO: 1372841 - DNA, 15 bp, Homo sapiens
ctacttaagcagaag

SEQ ID NO: 1372842 - DNA, 15 bp, Homo sapiens
gctacttaagcagaa

SEQ ID NO: 1372843 - DNA, 15 bp, Homo sapiens
agctacttaagcaga

SEQ ID NO: 1372844 - DNA, 15 bp, Homo sapiens
aagctacttaagcag

SEQ ID NO: 1372845 - DNA, 15 bp, Homo sapiens
aaagctacttaagca

SEQ ID NO: 1372846 - DNA, 15 bp, Homo sapiens
taaagctacttaagc

SEQ ID NO: 1372847 - DNA, 15 bp, Homo sapiens
ataaagctacttaag

SEQ ID NO: 1372848 - DNA, 15 bp, Homo sapiens
gataaagctacttaa

SEQ ID NO: 1372849 - DNA, 15 bp, Homo sapiens
ggataaagctactta

SEQ ID NO: 1372850 - DNA, 15 bp, Homo sapiens
aggataaagctactt

SEQ ID NO: 1372851 - DNA, 15 bp, Homo sapiens
taggataaagctact

SEQ ID NO: 1372852 - DNA, 15 bp, Homo sapiens
gtaggataaagctac

SEQ ID NO: 1372853 - DNA, 15 bp, Homo sapiens
ggtaggataaagcta

SEQ ID NO: 1372854 - DNA, 15 bp, Homo sapiens
aggtaggataaagct

SEQ ID NO: 1372855 - DNA, 15 bp, Homo sapiens
caggtaggataaagc

SEQ ID NO: 1372856 - DNA, 15 bp, Homo sapiens
gcaggtaggataaag

SEQ ID NO: 1372857 - DNA, 15 bp, Homo sapiens
agcaggtaggataaa

SEQ ID NO: 1372858 - DNA, 15 bp, Homo sapiens
aagcaggtaggataa

SEQ ID NO: 1372859 - DNA, 15 bp, Homo sapiens
gaagcaggtaggata

SEQ ID NO: 1372860 - DNA, 15 bp, Homo sapiens
ggaagcaggtaggat

SEQ ID NO: 1372861 - DNA, 15 bp, Homo sapiens
aggaagcaggtagga

SEQ ID NO: 1372862 - DNA, 15 bp, Homo sapiens
caggaagcaggtagg

SEQ ID NO: 1372863 - DNA, 15 bp, Homo sapiens
gcaggaagcaggtag

SEQ ID NO: 1372864 - DNA, 15 bp, Homo sapiens
tgcaggaagcaggta

SEQ ID NO: 1372865 - DNA, 15 bp, Homo sapiens
ttgcaggaagcaggt

SEQ ID NO: 1372866 - DNA, 15 bp, Homo sapiens
gttgcaggaagcagg

SEQ ID NO: 1372867 - DNA, 15 bp, Homo sapiens
agttgcaggaagcag

SEQ ID NO: 1372868 - DNA, 15 bp, Homo sapiens
aagttgcaggaagca

SEQ ID NO: 1372869 - DNA, 15 bp, Homo sapiens
aaagttgcaggaagc

SEQ ID NO: 1372870 - DNA, 15 bp, Homo sapiens
taaagttgcaggaag

SEQ ID NO: 1372871 - DNA, 15 bp, Homo sapiens
ataaagttgcaggaa

SEQ ID NO: 1372872 - DNA, 15 bp, Homo sapiens
gataaagttgcagga

SEQ ID NO: 1372873 - DNA, 15 bp, Homo sapiens
tgataaagttgcagg

SEQ ID NO: 1372874 - DNA, 15 bp, Homo sapiens
atgataaagttgcag

SEQ ID NO: 1372875 - DNA, 15 bp, Homo sapiens
gatgataaagttgca

SEQ ID NO: 1372876 - DNA, 15 bp, Homo sapiens
tgatgataaagttgc

SEQ ID NO: 1372877 - DNA, 15 bp, Homo sapiens
atgatgataaagttg

SEQ ID NO: 1372878 - DNA, 15 bp, Homo sapiens
catgatgataaagtt

SEQ ID NO: 1372879 - DNA, 15 bp, Homo sapiens
acatgatgataaagt

SEQ ID NO: 1372880 - DNA, 15 bp, Homo sapiens
tacatgatgataaag

SEQ ID NO: 1372881 - DNA, 15 bp, Homo sapiens
atacatgatgataaa

SEQ ID NO: 1372882 - DNA, 15 bp, Homo sapiens
tatacatgatgataa

SEQ ID NO: 1372883 - DNA, 15 bp, Homo sapiens
atatacatgatgata

SEQ ID NO: 1372884 - DNA, 15 bp, Homo sapiens
tatatacatgatgat

SEQ ID NO: 1372885 - DNA, 15 bp, Homo sapiens
ctatatacatgatga

SEQ ID NO: 1372886 - DNA, 15 bp, Homo sapiens
actatatacatgatg

SEQ ID NO: 1372887 - DNA, 15 bp, Homo sapiens
tactatatacatgat

SEQ ID NO: 1372888 - DNA, 15 bp, Homo sapiens
ttactatatacatga

SEQ ID NO: 1372889 - DNA, 15 bp, Homo sapiens
attactatatacatg

SEQ ID NO: 1372890 - DNA, 15 bp, Homo sapiens
cattactatatacat

SEQ ID NO: 1372891 - DNA, 15 bp, Homo sapiens
ccattactatataca

SEQ ID NO: 1372892 - DNA, 15 bp, Homo sapiens
cccattactatatac

SEQ ID NO: 1372893 - DNA, 15 bp, Homo sapiens
gcccattactatata

SEQ ID NO: 1372894 - DNA, 15 bp, Homo sapiens
agcccattactatat

SEQ ID NO: 1372895 - DNA, 15 bp, Homo sapiens
aagcccattactata

SEQ ID NO: 1372896 - DNA, 15 bp, Homo sapiens
caagcccattactat

SEQ ID NO: 1372897 - DNA, 15 bp, Homo sapiens
acaagcccattacta

SEQ ID NO: 1372898 - DNA, 15 bp, Homo sapiens
aacaagcccattact

SEQ ID NO: 1372899 - DNA, 15 bp, Homo sapiens
caacaagcccattac

SEQ ID NO: 1372900 - DNA, 15 bp, Homo sapiens
ccaacaagcccatta

SEQ ID NO: 1372901 - DNA, 15 bp, Homo sapiens
accaacaagcccatt

SEQ ID NO: 1372902 - DNA, 15 bp, Homo sapiens
taccaacaagcccat

SEQ ID NO: 1372903 - DNA, 15 bp, Homo sapiens
ctaccaacaagccca

SEQ ID NO: 1372904 - DNA, 15 bp, Homo sapiens
cctaccaacaagccc

SEQ ID NO: 1372905 - DNA, 15 bp, Homo sapiens
ccctaccaacaagcc

SEQ ID NO: 1372906 - DNA, 15 bp, Homo sapiens
tccctaccaacaagc

SEQ ID NO: 1372907 - DNA, 15 bp, Homo sapiens
atccctaccaacaag

SEQ ID NO: 1372908 - DNA, 15 bp, Homo sapiens
catccctaccaacaa

SEQ ID NO: 1372909 - DNA, 15 bp, Homo sapiens
acatccctaccaaca

SEQ ID NO: 1372910 - DNA, 15 bp, Homo sapiens
tacatccctaccaac

SEQ ID NO: 1372911 - DNA, 15 bp, Homo sapiens
atacatccctaccaa

SEQ ID NO: 1372912 - DNA, 15 bp, Homo sapiens
aatacatccctacca

SEQ ID NO: 1372913 - DNA, 15 bp, Homo sapiens
aaatacatccctacc

SEQ ID NO: 1372914 - DNA, 15 bp, Homo sapiens
aaaatacatccctac

SEQ ID NO: 1372915 - DNA, 15 bp, Homo sapiens
gaaaatacatcccta

SEQ ID NO: 1372916 - DNA, 15 bp, Homo sapiens
tgaaaatacatccct

SEQ ID NO: 1372917 - DNA, 15 bp, Homo sapiens
ctgaaaatacatccc

SEQ ID NO: 1372918 - DNA, 15 bp, Homo sapiens
cctgaaaatacatcc

SEQ ID NO: 1372919 - DNA, 15 bp, Homo sapiens
gcctgaaaatacatc

SEQ ID NO: 1372920 - DNA, 15 bp, Homo sapiens
ggcctgaaaatacat

SEQ ID NO: 1372921 - DNA, 15 bp, Homo sapiens
tggcctgaaaataca

SEQ ID NO: 1372922 - DNA, 15 bp, Homo sapiens
ttggcctgaaaatac

SEQ ID NO: 1372923 - DNA, 15 bp, Homo sapiens
cttggcctgaaaata

SEQ ID NO: 1372924 - DNA, 15 bp, Homo sapiens
ccttggcctgaaaat

SEQ ID NO: 1372925 - DNA, 15 bp, Homo sapiens
tccttggcctgaaaa

SEQ ID NO: 1372926 - DNA, 15 bp, Homo sapiens
ttccttggcctgaaa

SEQ ID NO: 1372927 - DNA, 15 bp, Homo sapiens
tttccttggcctgaa

SEQ ID NO: 1372928 - DNA, 15 bp, Homo sapiens
ctttccttggcctga

SEQ ID NO: 1372929 - DNA, 15 bp, Homo sapiens
cctttccttggcctg

SEQ ID NO: 1372930 - DNA, 15 bp, Homo sapiens
acctttccttggcct

SEQ ID NO: 1372931 - DNA, 15 bp, Homo sapiens
aacctttccttggcc

SEQ ID NO: 1372932 - DNA, 15 bp, Homo sapiens
caacctttccttggc

SEQ ID NO: 1372933 - DNA, 15 bp, Homo sapiens
ccaacctttccttgg

SEQ ID NO: 1372934 - DNA, 15 bp, Homo sapiens
cccaacctttccttg

SEQ ID NO: 1372935 - DNA, 15 bp, Homo sapiens
tcccaacctttcctt

SEQ ID NO: 1372936 - DNA, 15 bp, Homo sapiens
ctcccaacctttcct

SEQ ID NO: 1372937 - DNA, 15 bp, Homo sapiens
tctcccaacctttcc

SEQ ID NO: 1372938 - DNA, 15 bp, Homo sapiens
gtctcccaacctttc

SEQ ID NO: 1372939 - DNA, 15 bp, Homo sapiens
tgtctcccaaccttt

SEQ ID NO: 1372940 - DNA, 15 bp, Homo sapiens
ttgtctcccaacctt

SEQ ID NO: 1372941 - DNA, 15 bp, Homo sapiens
cttgtctcccaacct

SEQ ID NO: 1372942 - DNA, 15 bp, Homo sapiens
tcttgtctcccaacc

SEQ ID NO: 1372943 - DNA, 15 bp, Homo sapiens
ctcttgtctcccaac

SEQ ID NO: 1372944 - DNA, 15 bp, Homo sapiens
cctcttgtctcccaa

SEQ ID NO: 1372945 - DNA, 15 bp, Homo sapiens
tcctcttgtctccca

SEQ ID NO: 1372946 - DNA, 15 bp, Homo sapiens
ctcctcttgtctccc

SEQ ID NO: 1372947 - DNA, 15 bp, Homo sapiens
tctcctcttgtctcc

SEQ ID NO: 1372948 - DNA, 15 bp, Homo sapiens
ttctcctcttgtctc

SEQ ID NO: 1372949 - DNA, 15 bp, Homo sapiens
cttctcctcttgtct

SEQ ID NO: 1372950 - DNA, 15 bp, Homo sapiens
ccttctcctcttgtc

SEQ ID NO: 1372951 - DNA, 15 bp, Homo sapiens
tccttctcctcttgt

SEQ ID NO: 1372952 - DNA, 15 bp, Homo sapiens
atccttctcctcttg

SEQ ID NO: 1372953 - DNA, 15 bp, Homo sapiens
catccttctcctctt

SEQ ID NO: 1372954 - DNA, 15 bp, Homo sapiens
tcatccttctcctct

SEQ ID NO: 1372955 - DNA, 15 bp, Homo sapiens
ttcatccttctcctc

SEQ ID NO: 1372956 - DNA, 15 bp, Homo sapiens
cttcatccttctcct

SEQ ID NO: 1372957 - DNA, 15 bp, Homo sapiens
tcttcatccttctcc

SEQ ID NO: 1372958 - DNA, 15 bp, Homo sapiens
atcttcatccttctc

SEQ ID NO: 1372959 - DNA, 15 bp, Homo sapiens
aatcttcatccttct

SEQ ID NO: 1372960 - DNA, 15 bp, Homo sapiens
taatcttcatccttc

SEQ ID NO: 1372961 - DNA, 15 bp, Homo sapiens
ctaatcttcatcctt

SEQ ID NO: 1372962 - DNA, 15 bp, Homo sapiens
actaatcttcatcct

SEQ ID NO: 1372963 - DNA, 15 bp, Homo sapiens
aactaatcttcatcc

SEQ ID NO: 1372964 - DNA, 15 bp, Homo sapiens
taactaatcttcatc

SEQ ID NO: 1372965 - DNA, 15 bp, Homo sapiens
ataactaatcttcat

SEQ ID NO: 1372966 - DNA, 15 bp, Homo sapiens
cataactaatcttca

SEQ ID NO: 1372967 - DNA, 15 bp, Homo sapiens
acataactaatcttc

SEQ ID NO: 1372968 - DNA, 15 bp, Homo sapiens
tacataactaatctt

SEQ ID NO: 1372969 - DNA, 15 bp, Homo sapiens
ctacataactaatct

SEQ ID NO: 1372970 - DNA, 15 bp, Homo sapiens
actacataactaatc

SEQ ID NO: 1372971 - DNA, 15 bp, Homo sapiens
aactacataactaat

SEQ ID NO: 1372972 - DNA, 15 bp, Homo sapiens
taactacataactaa

SEQ ID NO: 1372973 - DNA, 15 bp, Homo sapiens
ttaactacataacta

SEQ ID NO: 1372974 - DNA, 15 bp, Homo sapiens
attaactacataact

SEQ ID NO: 1372975 - DNA, 15 bp, Homo sapiens
aattaactacataac

SEQ ID NO: 1372976 - DNA, 15 bp, Homo sapiens
caattaactacataa

SEQ ID NO: 1372977 - DNA, 15 bp, Homo sapiens
acaattaactacata

SEQ ID NO: 1372978 - DNA, 15 bp, Homo sapiens
tacaattaactacat

SEQ ID NO: 1372979 - DNA, 15 bp, Homo sapiens
gtacaattaactaca

SEQ ID NO: 1372980 - DNA, 15 bp, Homo sapiens
tgtacaattaactac

SEQ ID NO: 1372981 - DNA, 15 bp, Homo sapiens
ctgtacaattaacta

SEQ ID NO: 1372982 - DNA, 15 bp, Homo sapiens
tctgtacaattaact

SEQ ID NO: 1372983 - DNA, 15 bp, Homo sapiens
atctgtacaattaac

SEQ ID NO: 1372984 - DNA, 15 bp, Homo sapiens
tatctgtacaattaa

SEQ ID NO: 1372985 - DNA, 15 bp, Homo sapiens
ctatctgtacaatta

SEQ ID NO: 1372986 - DNA, 15 bp, Homo sapiens
gctatctgtacaatt

SEQ ID NO: 1372987 - DNA, 15 bp, Homo sapiens
ggctatctgtacaat

SEQ ID NO: 1372988 - DNA, 15 bp, Homo sapiens
aggctatctgtacaa

SEQ ID NO: 1372989 - DNA, 15 bp, Homo sapiens
aaggctatctgtaca

SEQ ID NO: 1372990 - DNA, 15 bp, Homo sapiens
taaggctatctgtac

SEQ ID NO: 1372991 - DNA, 15 bp, Homo sapiens
ataaggctatctgta

SEQ ID NO: 1372992 - DNA, 15 bp, Homo sapiens
aataaggctatctgt

SEQ ID NO: 1372993 - DNA, 15 bp, Homo sapiens
gaataaggctatctg

SEQ ID NO: 1372994 - DNA, 15 bp, Homo sapiens
ggaataaggctatct

SEQ ID NO: 1372995 - DNA, 15 bp, Homo sapiens
gggaataaggctatc

SEQ ID NO: 1372996 - DNA, 15 bp, Homo sapiens
agggaataaggctat

SEQ ID NO: 1372997 - DNA, 15 bp, Homo sapiens
aagggaataaggcta

SEQ ID NO: 1372998 - DNA, 15 bp, Homo sapiens
aaagggaataaggct

SEQ ID NO: 1372999 - DNA, 15 bp, Homo sapiens
taaagggaataaggc

SEQ ID NO: 1373000 - DNA, 15 bp, Homo sapiens
ttaaagggaataagg

SEQ ID NO: 1373001 - DNA, 15 bp, Homo sapiens
cttaaagggaataag

SEQ ID NO: 1373002 - DNA, 15 bp, Homo sapiens
acttaaagggaataa

SEQ ID NO: 1373003 - DNA, 15 bp, Homo sapiens
aacttaaagggaata

SEQ ID NO: 1373004 - DNA, 15 bp, Homo sapiens
aaacttaaagggaat

SEQ ID NO: 1373005 - DNA, 15 bp, Homo sapiens
aaaacttaaagggaa

SEQ ID NO: 1373006 - DNA, 15 bp, Homo sapiens
taaaacttaaaggga

SEQ ID NO: 1373007 - DNA, 15 bp, Homo sapiens
ttaaaacttaaaggg

SEQ ID NO: 1373008 - DNA, 15 bp, Homo sapiens
cttaaaacttaaagg

SEQ ID NO: 1373009 - DNA, 15 bp, Homo sapiens
tcttaaaacttaaag

SEQ ID NO: 1373010 - DNA, 15 bp, Homo sapiens
atcttaaaacttaaa

SEQ ID NO: 1373011 - DNA, 15 bp, Homo sapiens
tatcttaaaacttaa

SEQ ID NO: 1373012 - DNA, 15 bp, Homo sapiens
ctatcttaaaactta

SEQ ID NO: 1373013 - DNA, 15 bp, Homo sapiens
actatcttaaaactt

SEQ ID NO: 1373014 - DNA, 15 bp, Homo sapiens
gactatcttaaaact

SEQ ID NO: 1373015 - DNA, 15 bp, Homo sapiens
tgactatcttaaaac

SEQ ID NO: 1373016 - DNA, 15 bp, Homo sapiens
ttgactatcttaaaa

SEQ ID NO: 1373017 - DNA, 15 bp, Homo sapiens
cttgactatcttaaa

SEQ ID NO: 1373018 - DNA, 15 bp, Homo sapiens
tcttgactatcttaa

SEQ ID NO: 1373019 - DNA, 15 bp, Homo sapiens
ttcttgactatctta

SEQ ID NO: 1373020 - DNA, 15 bp, Homo sapiens
tttcttgactatctt

SEQ ID NO: 1373021 - DNA, 15 bp, Homo sapiens
ttttcttgactatct

SEQ ID NO: 1373022 - DNA, 15 bp, Homo sapiens
tttttcttgactatc

SEQ ID NO: 1373023 - DNA, 15 bp, Homo sapiens
atttttcttgactat

SEQ ID NO: 1373024 - DNA, 15 bp, Homo sapiens
tatttttcttgacta

SEQ ID NO: 1373025 - DNA, 15 bp, Homo sapiens
atatttttcttgact

SEQ ID NO: 1373026 - DNA, 15 bp, Homo sapiens
aatatttttcttgac

SEQ ID NO: 1373027 - DNA, 15 bp, Homo sapiens
aaatatttttcttga

SEQ ID NO: 1373028 - DNA, 15 bp, Homo sapiens
tcaaatatttttctt

SEQ ID NO: 1373029 - DNA, 15 bp, Homo sapiens
ttcaaatatttttct

SEQ ID NO: 1373030 - DNA, 15 bp, Homo sapiens
cttcaaatatttttc

SEQ ID NO: 1373031 - DNA, 15 bp, Homo sapiens
ccttcaaatattttt

SEQ ID NO: 1373032 - DNA, 15 bp, Homo sapiens
tccttcaaatatttt

SEQ ID NO: 1373033 - DNA, 15 bp, Homo sapiens
atccttcaaatattt

SEQ ID NO: 1373034 - DNA, 15 bp, Homo sapiens
catccttcaaatatt

SEQ ID NO: 1373035 - DNA, 15 bp, Homo sapiens
tcatccttcaaatat

SEQ ID NO: 1373036 - DNA, 15 bp, Homo sapiens
atcatccttcaaata

SEQ ID NO: 1373037 - DNA, 15 bp, Homo sapiens
aatcatccttcaaat

SEQ ID NO: 1373038 - DNA, 15 bp, Homo sapiens
taatcatccttcaaa

SEQ ID NO: 1373039 - DNA, 15 bp, Homo sapiens
ttaatcatccttcaa

SEQ ID NO: 1373040 - DNA, 15 bp, Homo sapiens
attaatcatccttca

SEQ ID NO: 1373041 - DNA, 15 bp, Homo sapiens
tattaatcatccttc

SEQ ID NO: 1373042 - DNA, 15 bp, Homo sapiens
atattaatcatcctt

SEQ ID NO: 1373043 - DNA, 15 bp, Homo sapiens
aatattaatcatcct

SEQ ID NO: 1373044 - DNA, 15 bp, Homo sapiens
taatattaatcatcc

SEQ ID NO: 1373045 - DNA, 15 bp, Homo sapiens
ttaatattaatcatc

SEQ ID NO: 1373046 - DNA, 15 bp, Homo sapiens
gttaatattaatcat

SEQ ID NO: 1373047 - DNA, 15 bp, Homo sapiens
tgttaatattaatca

SEQ ID NO: 1373048 - DNA, 15 bp, Homo sapiens
ctgttaatattaatc

SEQ ID NO: 1373049 - DNA, 15 bp, Homo sapiens
cctgttaatattaat

SEQ ID NO: 1373050 - DNA, 15 bp, Homo sapiens
tcctgttaatattaa

SEQ ID NO: 1373051 - DNA, 15 bp, Homo sapiens
ttcctgttaatatta

SEQ ID NO: 1373052 - DNA, 15 bp, Homo sapiens
tttcctgttaatatt

SEQ ID NO: 1373053 - DNA, 15 bp, Homo sapiens
ttttcctgttaatat

SEQ ID NO: 1373054 - DNA, 15 bp, Homo sapiens
tttttcctgttaata

SEQ ID NO: 1373055 - DNA, 15 bp, Homo sapiens
ttttttcctgttaat

SEQ ID NO: 1373056 - DNA, 15 bp, Homo sapiens
cttttttcctgttaa

SEQ ID NO: 1373057 - DNA, 15 bp, Homo sapiens
ccttttttcctgtta

SEQ ID NO: 1373058 - DNA, 15 bp, Homo sapiens
cccttttttcctgtt

SEQ ID NO: 1373059 - DNA, 15 bp, Homo sapiens
tcccttttttcctgt

SEQ ID NO: 1373060 - DNA, 15 bp, Homo sapiens
ttcccttttttcctg

SEQ ID NO: 1373061 - DNA, 15 bp, Homo sapiens
tttcccttttttcct

SEQ ID NO: 1373062 - DNA, 15 bp, Homo sapiens
ctttcccttttttcc

SEQ ID NO: 1373063 - DNA, 15 bp, Homo sapiens
tctttcccttttttc

SEQ ID NO: 1373064 - DNA, 15 bp, Homo sapiens
ctctttccctttttt

SEQ ID NO: 1373065 - DNA, 15 bp, Homo sapiens
tctctttcccttttt

SEQ ID NO: 1373066 - DNA, 15 bp, Homo sapiens
ttctctttccctttt

SEQ ID NO: 1373067 - DNA, 15 bp, Homo sapiens
attctctttcccttt

SEQ ID NO: 1373068 - DNA, 15 bp, Homo sapiens
gattctctttccctt

SEQ ID NO: 1373069 - DNA, 15 bp, Homo sapiens
tgattctctttccct

SEQ ID NO: 1373070 - DNA, 15 bp, Homo sapiens
ctgattctctttccc

SEQ ID NO: 1373071 - DNA, 15 bp, Homo sapiens
actgattctctttcc

SEQ ID NO: 1373072 - DNA, 15 bp, Homo sapiens
tactgattctctttc

SEQ ID NO: 1373073 - DNA, 15 bp, Homo sapiens
ttactgattctcttt

SEQ ID NO: 1373074 - DNA, 15 bp, Homo sapiens
tttactgattctctt

SEQ ID NO: 1373075 - DNA, 15 bp, Homo sapiens
atttactgattctct

SEQ ID NO: 1373076 - DNA, 15 bp, Homo sapiens
tatttactgattctc

SEQ ID NO: 1373077 - DNA, 15 bp, Homo sapiens
ttatttactgattct

SEQ ID NO: 1373078 - DNA, 15 bp, Homo sapiens
tttatttactgattc

SEQ ID NO: 1373079 - DNA, 15 bp, Homo sapiens
gtttatttactgatt

SEQ ID NO: 1373080 - DNA, 15 bp, Homo sapiens
tgtttatttactgat

SEQ ID NO: 1373081 - DNA, 15 bp, Homo sapiens
ttgtttatttactga

SEQ ID NO: 1373082 - DNA, 15 bp, Homo sapiens
tttgtttatttactg

SEQ ID NO: 1373083 - DNA, 15 bp, Homo sapiens
ttttgtttatttact

SEQ ID NO: 1373084 - DNA, 15 bp, Homo sapiens
tttttgtttatttac

SEQ ID NO: 1373085 - DNA, 15 bp, Homo sapiens
ctttttgtttattta

SEQ ID NO: 1373086 - DNA, 15 bp, Homo sapiens
cctttttgtttattt

SEQ ID NO: 1373087 - DNA, 15 bp, Homo sapiens
tcctttttgtttatt

SEQ ID NO: 1373088 - DNA, 15 bp, Homo sapiens
ctcctttttgtttat

SEQ ID NO: 1373089 - DNA, 15 bp, Homo sapiens
tctcctttttgttta

SEQ ID NO: 1373090 - DNA, 15 bp, Homo sapiens
ctctcctttttgttt

SEQ ID NO: 1373091 - DNA, 15 bp, Homo sapiens
tctctcctttttgtt

SEQ ID NO: 1373092 - DNA, 15 bp, Homo sapiens
ctctctcctttttgt

SEQ ID NO: 1373093 - DNA, 15 bp, Homo sapiens
tctctctcctttttg

SEQ ID NO: 1373094 - DNA, 15 bp, Homo sapiens
atctctctccttttt

SEQ ID NO: 1373095 - DNA, 15 bp, Homo sapiens
catctctctcctttt

SEQ ID NO: 1373096 - DNA, 15 bp, Homo sapiens
tcatctctctccttt

SEQ ID NO: 1373097 - DNA, 15 bp, Homo sapiens
atcatctctctcctt

SEQ ID NO: 1373098 - DNA, 15 bp, Homo sapiens
catcatctctctcct

SEQ ID NO: 1373099 - DNA, 15 bp, Homo sapiens
tcatcatctctctcc

SEQ ID NO: 1373100 - DNA, 15 bp, Homo sapiens
gtcatcatctctctc

SEQ ID NO: 1373101 - DNA, 15 bp, Homo sapiens
tgtcatcatctctct

SEQ ID NO: 1373102 - DNA, 15 bp, Homo sapiens
attgtcatcatctct

SEQ ID NO: 1373103 - DNA, 15 bp, Homo sapiens
cattgtcatcatctc

SEQ ID NO: 1373104 - DNA, 15 bp, Homo sapiens
tcattgtcatcatct

SEQ ID NO: 1373105 - DNA, 15 bp, Homo sapiens
gtcattgtcatcatc

SEQ ID NO: 1373106 - DNA, 15 bp, Homo sapiens
ggtcattgtcatcat

SEQ ID NO: 1373107 - DNA, 15 bp, Homo sapiens
tggtcattgtcatca

SEQ ID NO: 1373108 - DNA, 15 bp, Homo sapiens
gtggtcattgtcatc

SEQ ID NO: 1373109 - DNA, 15 bp, Homo sapiens
cgtggtcattgtcat

SEQ ID NO: 1373110 - DNA, 15 bp, Homo sapiens
tcgtggtcattgtca

SEQ ID NO: 1373111 - DNA, 15 bp, Homo sapiens
ctcgtggtcattgtc

SEQ ID NO: 1373112 - DNA, 15 bp, Homo sapiens
actcgtggtcattgt

SEQ ID NO: 1373113 - DNA, 15 bp, Homo sapiens
aactcgtggtcattg

SEQ ID NO: 1373114 - DNA, 15 bp, Homo sapiens
gaactcgtggtcatt

SEQ ID NO: 1373115 - DNA, 15 bp, Homo sapiens
agaactcgtggtcat

SEQ ID NO: 1373116 - DNA, 15 bp, Homo sapiens
aagaactcgtggtca

SEQ ID NO: 1373117 - DNA, 15 bp, Homo sapiens
caagaactcgtggtc

SEQ ID NO: 1373118 - DNA, 15 bp, Homo sapiens
tcaagaactcgtggt

SEQ ID NO: 1373119 - DNA, 15 bp, Homo sapiens
gtcaagaactcgtgg

SEQ ID NO: 1373120 - DNA, 15 bp, Homo sapiens
ggtcaagaactcgtg

SEQ ID NO: 1373121 - DNA, 15 bp, Homo sapiens
tggtcaagaactcgt

SEQ ID NO: 1373122 - DNA, 15 bp, Homo sapiens
ttggtcaagaactcg

SEQ ID NO: 1373123 - DNA, 15 bp, Homo sapiens
attggtcaagaactc

SEQ ID NO: 1373124 - DNA, 15 bp, Homo sapiens
tattggtcaagaact

SEQ ID NO: 1373125 - DNA, 15 bp, Homo sapiens
ttattggtcaagaac

SEQ ID NO: 1373126 - DNA, 15 bp, Homo sapiens
attattggtcaagaa

SEQ ID NO: 1373127 - DNA, 15 bp, Homo sapiens
tattattggtcaaga

SEQ ID NO: 1373128 - DNA, 15 bp, Homo sapiens
atattattggtcaag

SEQ ID NO: 1373129 - DNA, 15 bp, Homo sapiens
aatattattggtcaa

SEQ ID NO: 1373130 - DNA, 15 bp, Homo sapiens
taatattattggtca

SEQ ID NO: 1373131 - DNA, 15 bp, Homo sapiens
ttaatattattggtc

SEQ ID NO: 1373132 - DNA, 15 bp, Homo sapiens
attaatattattggt

SEQ ID NO: 1373133 - DNA, 15 bp, Homo sapiens
tattaatattattgg

SEQ ID NO: 1373134 - DNA, 15 bp, Homo sapiens
ttattaatattattg

SEQ ID NO: 1373135 - DNA, 15 bp, Homo sapiens
gttattaatattatt

SEQ ID NO: 1373136 - DNA, 15 bp, Homo sapiens
ggttattaatattat

SEQ ID NO: 1373137 - DNA, 15 bp, Homo sapiens
tggttattaatatta

SEQ ID NO: 1373138 - DNA, 15 bp, Homo sapiens
atggttattaatatt

SEQ ID NO: 1373139 - DNA, 15 bp, Homo sapiens
gatggttattaatat

SEQ ID NO: 1373140 - DNA, 15 bp, Homo sapiens
agatggttattaata

SEQ ID NO: 1373141 - DNA, 15 bp, Homo sapiens
tagatggttattaat

SEQ ID NO: 1373142 - DNA, 15 bp, Homo sapiens
atagatggttattaa

SEQ ID NO: 1373143 - DNA, 15 bp, Homo sapiens
aatagatggttatta

SEQ ID NO: 1373144 - DNA, 15 bp, Homo sapiens
gaatagatggttatt

SEQ ID NO: 1373145 - DNA, 15 bp, Homo sapiens
tgaatagatggttat

SEQ ID NO: 1373146 - DNA, 15 bp, Homo sapiens
ctgaatagatggtta

SEQ ID NO: 1373147 - DNA, 15 bp, Homo sapiens
cctgaatagatggtt

SEQ ID NO: 1373148 - DNA, 15 bp, Homo sapiens
ccctgaatagatggt

SEQ ID NO: 1373149 - DNA, 15 bp, Homo sapiens
gccctgaatagatgg

SEQ ID NO: 1373150 - DNA, 15 bp, Homo sapiens
agccctgaatagatg

SEQ ID NO: 1373151 - DNA, 15 bp, Homo sapiens
gagccctgaatagat

SEQ ID NO: 1373152 - DNA, 15 bp, Homo sapiens
ggagccctgaataga

SEQ ID NO: 1373153 - DNA, 15 bp, Homo sapiens
aggagccctgaatag

SEQ ID NO: 1373154 - DNA, 15 bp, Homo sapiens
taggagccctgaata

SEQ ID NO: 1373155 - DNA, 15 bp, Homo sapiens
ataggagccctgaat

SEQ ID NO: 1373156 - DNA, 15 bp, Homo sapiens
aataggagccctgaa

SEQ ID NO: 1373157 - DNA, 15 bp, Homo sapiens
aaataggagccctga

SEQ ID NO: 1373158 - DNA, 15 bp, Homo sapiens
caaataggagccctg

SEQ ID NO: 1373159 - DNA, 15 bp, Homo sapiens
gcaaataggagccct

SEQ ID NO: 1373160 - DNA, 15 bp, Homo sapiens
agcaaataggagccc

SEQ ID NO: 1373161 - DNA, 15 bp, Homo sapiens
tagcaaataggagcc

SEQ ID NO: 1373162 - DNA, 15 bp, Homo sapiens
ttagcaaataggagc

SEQ ID NO: 1373163 - DNA, 15 bp, Homo sapiens
cttagcaaataggag

SEQ ID NO: 1373164 - DNA, 15 bp, Homo sapiens
acttagcaaatagga

SEQ ID NO: 1373165 - DNA, 15 bp, Homo sapiens
cacttagcaaatagg

SEQ ID NO: 1373166 - DNA, 15 bp, Homo sapiens
gcacttagcaaatag

SEQ ID NO: 1373167 - DNA, 15 bp, Homo sapiens
ggcacttagcaaata

SEQ ID NO: 1373168 - DNA, 15 bp, Homo sapiens
cggcacttagcaaat

SEQ ID NO: 1373169 - DNA, 15 bp, Homo sapiens
tcggcacttagcaaa

SEQ ID NO: 1373170 - DNA, 15 bp, Homo sapiens
ttcggcacttagcaa

SEQ ID NO: 1373171 - DNA, 15 bp, Homo sapiens
attcggcacttagca

SEQ ID NO: 1373172 - DNA, 15 bp, Homo sapiens
tattcggcacttagc

SEQ ID NO: 1373173 - DNA, 15 bp, Homo sapiens
gtattcggcacttag

SEQ ID NO: 1373174 - DNA, 15 bp, Homo sapiens
tgtattcggcactta

SEQ ID NO: 1373175 - DNA, 15 bp, Homo sapiens
atgtattcggcactt

SEQ ID NO: 1373176 - DNA, 15 bp, Homo sapiens
aatgtattcggcact

SEQ ID NO: 1373177 - DNA, 15 bp, Homo sapiens
gaatgtattcggcac

SEQ ID NO: 1373178 - DNA, 15 bp, Homo sapiens
agaatgtattcggca

SEQ ID NO: 1373179 - DNA, 15 bp, Homo sapiens
aagaatgtattcggc

SEQ ID NO: 1373180 - DNA, 15 bp, Homo sapiens
taagaatgtattcgg

SEQ ID NO: 1373181 - DNA, 15 bp, Homo sapiens
ataagaatgtattcg

SEQ ID NO: 1373182 - DNA, 15 bp, Homo sapiens
gataagaatgtattc

SEQ ID NO: 1373183 - DNA, 15 bp, Homo sapiens
agataagaatgtatt

SEQ ID NO: 1373184 - DNA, 15 bp, Homo sapiens
gagataagaatgtat

SEQ ID NO: 1373185 - DNA, 15 bp, Homo sapiens
agagataagaatgta

SEQ ID NO: 1373186 - DNA, 15 bp, Homo sapiens
tagagataagaatgt

SEQ ID NO: 1373187 - DNA, 15 bp, Homo sapiens
atagagataagaatg

SEQ ID NO: 1373188 - DNA, 15 bp, Homo sapiens
gatagagataagaat

SEQ ID NO: 1373189 - DNA, 15 bp, Homo sapiens
tgatagagataagaa

SEQ ID NO: 1373190 - DNA, 15 bp, Homo sapiens
ctgatagagataaga

SEQ ID NO: 1373191 - DNA, 15 bp, Homo sapiens
cctgatagagataag

SEQ ID NO: 1373192 - DNA, 15 bp, Homo sapiens
acctgatagagataa

SEQ ID NO: 1373193 - DNA, 15 bp, Homo sapiens
tacctgatagagata

SEQ ID NO: 1373194 - DNA, 15 bp, Homo sapiens
gtacctgatagagat

SEQ ID NO: 1373195 - DNA, 15 bp, Homo sapiens
agtacctgatagaga

SEQ ID NO: 1373196 - DNA, 15 bp, Homo sapiens
gagtacctgatagag

SEQ ID NO: 1373197 - DNA, 15 bp, Homo sapiens
tgagtacctgataga

SEQ ID NO: 1373198 - DNA, 15 bp, Homo sapiens
atgagtacctgatag

SEQ ID NO: 1373199 - DNA, 15 bp, Homo sapiens
tatgagtacctgata

SEQ ID NO: 1373200 - DNA, 15 bp, Homo sapiens
ctatgagtacctgat

SEQ ID NO: 1373201 - DNA, 15 bp, Homo sapiens
tctatgagtacctga

SEQ ID NO: 1373202 - DNA, 15 bp, Homo sapiens
gtctatgagtacctg

SEQ ID NO: 1373203 - DNA, 15 bp, Homo sapiens
agtctatgagtacct

SEQ ID NO: 1373204 - DNA, 15 bp, Homo sapiens
gagtctatgagtacc

SEQ ID NO: 1373205 - DNA, 15 bp, Homo sapiens
tgagtctatgagtac

SEQ ID NO: 1373206 - DNA, 15 bp, Homo sapiens
atgagtctatgagta

SEQ ID NO: 1373207 - DNA, 15 bp, Homo sapiens
aatgagtctatgagt

SEQ ID NO: 1373208 - DNA, 15 bp, Homo sapiens
aaatgagtctatgag

SEQ ID NO: 1373209 - DNA, 15 bp, Homo sapiens
aaaatgagtctatga

SEQ ID NO: 1373210 - DNA, 15 bp, Homo sapiens
caaaatgagtctatg

SEQ ID NO: 1373211 - DNA, 15 bp, Homo sapiens
gcaaaatgagtctat

SEQ ID NO: 1373212 - DNA, 15 bp, Homo sapiens
tgcaaaatgagtcta

SEQ ID NO: 1373213 - DNA, 15 bp, Homo sapiens
ttgcaaaatgagtct

SEQ ID NO: 1373214 - DNA, 15 bp, Homo sapiens
cttgcaaaatgagtc

SEQ ID NO: 1373215 - DNA, 15 bp, Homo sapiens
acttgcaaaatgagt

SEQ ID NO: 1373216 - DNA, 15 bp, Homo sapiens
cacttgcaaaatgag

SEQ ID NO: 1373217 - DNA, 15 bp, Homo sapiens
tcacttgcaaaatga

SEQ ID NO: 1373218 - DNA, 15 bp, Homo sapiens
ctcacttgcaaaatg

SEQ ID NO: 1373219 - DNA, 15 bp, Homo sapiens
tctcacttgcaaaat

SEQ ID NO: 1373220 - DNA, 15 bp, Homo sapiens
ttctcacttgcaaaa

SEQ ID NO: 1373221 - DNA, 15 bp, Homo sapiens
tttctcacttgcaaa

SEQ ID NO: 1373222 - DNA, 15 bp, Homo sapiens
ttttctcacttgcaa

SEQ ID NO: 1373223 - DNA, 15 bp, Homo sapiens
cttttctcacttgca

SEQ ID NO: 1373224 - DNA, 15 bp, Homo sapiens
ccttttctcacttgc

SEQ ID NO: 1373225 - DNA, 15 bp, Homo sapiens
cccttttctcacttg

SEQ ID NO: 1373226 - DNA, 15 bp, Homo sapiens
ccccttttctcactt

SEQ ID NO: 1373227 - DNA, 15 bp, Homo sapiens
accccttttctcact

SEQ ID NO: 1373228 - DNA, 15 bp, Homo sapiens
aaccccttttctcac

SEQ ID NO: 1373229 - DNA, 15 bp, Homo sapiens
caaccccttttctca

SEQ ID NO: 1373230 - DNA, 15 bp, Homo sapiens
tcaaccccttttctc

SEQ ID NO: 1373231 - DNA, 15 bp, Homo sapiens
ctcaaccccttttct

SEQ ID NO: 1373232 - DNA, 15 bp, Homo sapiens
actcaaccccttttc

SEQ ID NO: 1373233 - DNA, 15 bp, Homo sapiens
cactcaacccctttt

SEQ ID NO: 1373234 - DNA, 15 bp, Homo sapiens
ccactcaaccccttt

SEQ ID NO: 1373235 - DNA, 15 bp, Homo sapiens
tccactcaacccctt

SEQ ID NO: 1373236 - DNA, 15 bp, Homo sapiens
ctccactcaacccct

SEQ ID NO: 1373237 - DNA, 15 bp, Homo sapiens
cctccactcaacccc

SEQ ID NO: 1373238 - DNA, 15 bp, Homo sapiens
ccctccactcaaccc

SEQ ID NO: 1373239 - DNA, 15 bp, Homo sapiens
gccctccactcaacc

SEQ ID NO: 1373240 - DNA, 15 bp, Homo sapiens
ggccctccactcaac

SEQ ID NO: 1373241 - DNA, 15 bp, Homo sapiens
tggccctccactcaa

SEQ ID NO: 1373242 - DNA, 15 bp, Homo sapiens
gtggccctccactca

SEQ ID NO: 1373243 - DNA, 15 bp, Homo sapiens
tgtggccctccactc

SEQ ID NO: 1373244 - DNA, 15 bp, Homo sapiens
ctgtggccctccact

SEQ ID NO: 1373245 - DNA, 15 bp, Homo sapiens
tctgtggccctccac

SEQ ID NO: 1373246 - DNA, 15 bp, Homo sapiens
ttctgtggccctcca

SEQ ID NO: 1373247 - DNA, 15 bp, Homo sapiens
gttctgtggccctcc

SEQ ID NO: 1373248 - DNA, 15 bp, Homo sapiens
agttctgtggccctc

SEQ ID NO: 1373249 - DNA, 15 bp, Homo sapiens
cagttctgtggccct

SEQ ID NO: 1373250 - DNA, 15 bp, Homo sapiens
ccagttctgtggccc

SEQ ID NO: 1373251 - DNA, 15 bp, Homo sapiens
tccagttctgtggcc

SEQ ID NO: 1373252 - DNA, 15 bp, Homo sapiens
ttccagttctgtggc

SEQ ID NO: 1373253 - DNA, 15 bp, Homo sapiens
attccagttctgtgg

SEQ ID NO: 1373254 - DNA, 15 bp, Homo sapiens
cattccagttctgtg

SEQ ID NO: 1373255 - DNA, 15 bp, Homo sapiens
acattccagttctgt

SEQ ID NO: 1373256 - DNA, 15 bp, Homo sapiens
aacattccagttctg

SEQ ID NO: 1373257 - DNA, 15 bp, Homo sapiens
aaacattccagttct

SEQ ID NO: 1373258 - DNA, 15 bp, Homo sapiens
aaaacattccagttc

SEQ ID NO: 1373259 - DNA, 15 bp, Homo sapiens
aaaaacattccagtt

SEQ ID NO: 1373260 - DNA, 15 bp, Homo sapiens
caaaaacattccagt

SEQ ID NO: 1373261 - DNA, 15 bp, Homo sapiens
ccaaaaacattccag

SEQ ID NO: 1373262 - DNA, 15 bp, Homo sapiens
tccaaaaacattcca

SEQ ID NO: 1373263 - DNA, 15 bp, Homo sapiens
ctccaaaaacattcc

SEQ ID NO: 1373264 - DNA, 15 bp, Homo sapiens
actccaaaaacattc

SEQ ID NO: 1373265 - DNA, 15 bp, Homo sapiens
aactccaaaaacatt

SEQ ID NO: 1373266 - DNA, 15 bp, Homo sapiens
caactccaaaaacat

SEQ ID NO: 1373267 - DNA, 15 bp, Homo sapiens
ccaactccaaaaaca

SEQ ID NO: 1373268 - DNA, 15 bp, Homo sapiens
cccaactccaaaaac

SEQ ID NO: 1373269 - DNA, 15 bp, Homo sapiens
tcccaactccaaaaa

SEQ ID NO: 1373270 - DNA, 15 bp, Homo sapiens
atcccaactccaaaa

SEQ ID NO: 1373271 - DNA, 15 bp, Homo sapiens
aatcccaactccaaa

SEQ ID NO: 1373272 - DNA, 15 bp, Homo sapiens
aaatcccaactccaa

SEQ ID NO: 1373273 - DNA, 15 bp, Homo sapiens
caaatcccaactcca

SEQ ID NO: 1373274 - DNA, 15 bp, Homo sapiens
gcaaatcccaactcc

SEQ ID NO: 1373275 - DNA, 15 bp, Homo sapiens
ggcaaatcccaactc

SEQ ID NO: 1373276 - DNA, 15 bp, Homo sapiens
aggcaaatcccaact

SEQ ID NO: 1373277 - DNA, 15 bp, Homo sapiens
taggcaaatcccaac

SEQ ID NO: 1373278 - DNA, 15 bp, Homo sapiens
gtaggcaaatcccaa

SEQ ID NO: 1373279 - DNA, 15 bp, Homo sapiens
tgtaggcaaatccca

SEQ ID NO: 1373280 - DNA, 15 bp, Homo sapiens
atgtaggcaaatccc

SEQ ID NO: 1373281 - DNA, 15 bp, Homo sapiens
catgtaggcaaatcc

SEQ ID NO: 1373282 - DNA, 15 bp, Homo sapiens
gcatgtaggcaaatc

SEQ ID NO: 1373283 - DNA, 15 bp, Homo sapiens
agcatgtaggcaaat

SEQ ID NO: 1373284 - DNA, 15 bp, Homo sapiens
aagcatgtaggcaaa

SEQ ID NO: 1373285 - DNA, 15 bp, Homo sapiens
aaagcatgtaggcaa

SEQ ID NO: 1373286 - DNA, 15 bp, Homo sapiens
gaaagcatgtaggca

SEQ ID NO: 1373287 - DNA, 15 bp, Homo sapiens
ggaaagcatgtaggc

SEQ ID NO: 1373288 - DNA, 15 bp, Homo sapiens
tggaaagcatgtagg

SEQ ID NO: 1373289 - DNA, 15 bp, Homo sapiens
gtggaaagcatgtag

SEQ ID NO: 1373290 - DNA, 15 bp, Homo sapiens
ggtggaaagcatgta

SEQ ID NO: 1373291 - DNA, 15 bp, Homo sapiens
tggtggaaagcatgt

SEQ ID NO: 1373292 - DNA, 15 bp, Homo sapiens
atggtggaaagcatg

SEQ ID NO: 1373293 - DNA, 15 bp, Homo sapiens
aatggtggaaagcat

SEQ ID NO: 1373294 - DNA, 15 bp, Homo sapiens
gaatggtggaaagca

SEQ ID NO: 1373295 - DNA, 15 bp, Homo sapiens
ggaatggtggaaagc

SEQ ID NO: 1373296 - DNA, 15 bp, Homo sapiens
tggaatggtggaaag

SEQ ID NO: 1373297 - DNA, 15 bp, Homo sapiens
atggaatggtggaaa

SEQ ID NO: 1373298 - DNA, 15 bp, Homo sapiens
aatggaatggtggaa

SEQ ID NO: 1373299 - DNA, 15 bp, Homo sapiens
taatggaatggtgga

SEQ ID NO: 1373300 - DNA, 15 bp, Homo sapiens
ataatggaatggtgg

SEQ ID NO: 1373301 - DNA, 15 bp, Homo sapiens
aataatggaatggtg

SEQ ID NO: 1373302 - DNA, 15 bp, Homo sapiens
gaataatggaatggt

SEQ ID NO: 1373303 - DNA, 15 bp, Homo sapiens
ggaataatggaatgg

SEQ ID NO: 1373304 - DNA, 15 bp, Homo sapiens
gggaataatggaatg

SEQ ID NO: 1373305 - DNA, 15 bp, Homo sapiens
tgggaataatggaat

SEQ ID NO: 1373306 - DNA, 15 bp, Homo sapiens
ttgggaataatggaa

SEQ ID NO: 1373307 - DNA, 15 bp, Homo sapiens
cttgggaataatgga

SEQ ID NO: 1373308 - DNA, 15 bp, Homo sapiens
ccttgggaataatgg

SEQ ID NO: 1373309 - DNA, 15 bp, Homo sapiens
gccttgggaataatg

SEQ ID NO: 1373310 - DNA, 15 bp, Homo sapiens
agccttgggaataat

SEQ ID NO: 1373311 - DNA, 15 bp, Homo sapiens
aagccttgggaataa

SEQ ID NO: 1373312 - DNA, 15 bp, Homo sapiens
aaagccttgggaata

SEQ ID NO: 1373313 - DNA, 15 bp, Homo sapiens
aaaagccttgggaat

SEQ ID NO: 1373314 - DNA, 15 bp, Homo sapiens
aaaaagccttgggaa

SEQ ID NO: 1373315 - DNA, 15 bp, Homo sapiens
taaaaagccttggga

SEQ ID NO: 1373316 - DNA, 15 bp, Homo sapiens
ctaaaaagccttggg

SEQ ID NO: 1373317 - DNA, 15 bp, Homo sapiens
tctaaaaagccttgg

SEQ ID NO: 1373318 - DNA, 15 bp, Homo sapiens
ttctaaaaagccttg

SEQ ID NO: 1373319 - DNA, 15 bp, Homo sapiens
tttctaaaaagcctt

SEQ ID NO: 1373320 - DNA, 15 bp, Homo sapiens
ttttctaaaaagcct

SEQ ID NO: 1373321 - DNA, 15 bp, Homo sapiens
tttttctaaaaagcc

SEQ ID NO: 1373322 - DNA, 15 bp, Homo sapiens
gtttttctaaaaagc

SEQ ID NO: 1373323 - DNA, 15 bp, Homo sapiens
tgtttttctaaaaag

SEQ ID NO: 1373324 - DNA, 15 bp, Homo sapiens
ctgtttttctaaaaa

SEQ ID NO: 1373325 - DNA, 15 bp, Homo sapiens
tctgtttttctaaaa

SEQ ID NO: 1373326 - DNA, 15 bp, Homo sapiens
ttctgtttttctaaa

SEQ ID NO: 1373327 - DNA, 15 bp, Homo sapiens
cttctgtttttctaa

SEQ ID NO: 1373328 - DNA, 15 bp, Homo sapiens
acttctgtttttcta

SEQ ID NO: 1373329 - DNA, 15 bp, Homo sapiens
cacttctgtttttct

SEQ ID NO: 1373330 - DNA, 15 bp, Homo sapiens
ccacttctgtttttc

SEQ ID NO: 1373331 - DNA, 15 bp, Homo sapiens
gccacttctgttttt

SEQ ID NO: 1373332 - DNA, 15 bp, Homo sapiens
agccacttctgtttt

SEQ ID NO: 1373333 - DNA, 15 bp, Homo sapiens
tagccacttctgttt

SEQ ID NO: 1373334 - DNA, 15 bp, Homo sapiens
ctagccacttctgtt

SEQ ID NO: 1373335 - DNA, 15 bp, Homo sapiens
tctagccacttctgt

SEQ ID NO: 1373336 - DNA, 15 bp, Homo sapiens
atctagccacttctg

SEQ ID NO: 1373337 - DNA, 15 bp, Homo sapiens
tatctagccacttct

SEQ ID NO: 1373338 - DNA, 15 bp, Homo sapiens
ttatctagccacttc

SEQ ID NO: 1373339 - DNA, 15 bp, Homo sapiens
tttatctagccactt

SEQ ID NO: 1373340 - DNA, 15 bp, Homo sapiens
ctttatctagccact

SEQ ID NO: 1373341 - DNA, 15 bp, Homo sapiens
cctttatctagccac

SEQ ID NO: 1373342 - DNA, 15 bp, Homo sapiens
ccctttatctagcca

SEQ ID NO: 1373343 - DNA, 15 bp, Homo sapiens
cccctttatctagcc

SEQ ID NO: 1373344 - DNA, 15 bp, Homo sapiens
tcccctttatctagc

SEQ ID NO: 1373345 - DNA, 15 bp, Homo sapiens
ctcccctttatctag

SEQ ID NO: 1373346 - DNA, 15 bp, Homo sapiens
tctcccctttatcta

SEQ ID NO: 1373347 - DNA, 15 bp, Homo sapiens
ttctcccctttatct

SEQ ID NO: 1373348 - DNA, 15 bp, Homo sapiens
tttctcccctttatc

SEQ ID NO: 1373349 - DNA, 15 bp, Homo sapiens
ttttctcccctttat

SEQ ID NO: 1373350 - DNA, 15 bp, Homo sapiens
tttttctccccttta

SEQ ID NO: 1373351 - DNA, 15 bp, Homo sapiens
ttttttctccccttt

SEQ ID NO: 1373352 - DNA, 15 bp, Homo sapiens
cttttttctcccctt

SEQ ID NO: 1373353 - DNA, 15 bp, Homo sapiens
ccttttttctcccct

SEQ ID NO: 1373354 - DNA, 15 bp, Homo sapiens
tccttttttctcccc

SEQ ID NO: 1373355 - DNA, 15 bp, Homo sapiens
ttccttttttctccc

SEQ ID NO: 1373356 - DNA, 15 bp, Homo sapiens
tttccttttttctcc

SEQ ID NO: 1373357 - DNA, 15 bp, Homo sapiens
ttttccttttttctc

SEQ ID NO: 1373358 - DNA, 15 bp, Homo sapiens
cttttccttttttct

SEQ ID NO: 1373359 - DNA, 15 bp, Homo sapiens
ccttttccttttttc

SEQ ID NO: 1373360 - DNA, 15 bp, Homo sapiens
tccttttcctttttt

SEQ ID NO: 1373361 - DNA, 15 bp, Homo sapiens
cttccttttcctttt

SEQ ID NO: 1373362 - DNA, 15 bp, Homo sapiens
ccttccttttccttt

SEQ ID NO: 1373363 - DNA, 15 bp, Homo sapiens
accttccttttcctt

SEQ ID NO: 1373364 - DNA, 15 bp, Homo sapiens
taccttccttttcct

SEQ ID NO: 1373365 - DNA, 15 bp, Homo sapiens
ataccttccttttcc

SEQ ID NO: 1373366 - DNA, 15 bp, Homo sapiens
aataccttccttttc

SEQ ID NO: 1373367 - DNA, 15 bp, Homo sapiens
aaataccttcctttt

SEQ ID NO: 1373368 - DNA, 15 bp, Homo sapiens
taaataccttccttt

SEQ ID NO: 1373369 - DNA, 15 bp, Homo sapiens
ctaaataccttcctt

SEQ ID NO: 1373370 - DNA, 15 bp, Homo sapiens
actaaataccttcct

SEQ ID NO: 1373371 - DNA, 15 bp, Homo sapiens
aactaaataccttcc

SEQ ID NO: 1373372 - DNA, 15 bp, Homo sapiens
gaactaaataccttc

SEQ ID NO: 1373373 - DNA, 15 bp, Homo sapiens
agaactaaatacctt

SEQ ID NO: 1373374 - DNA, 15 bp, Homo sapiens
gagaactaaatacct

SEQ ID NO: 1373375 - DNA, 15 bp, Homo sapiens
ggagaactaaatacc

SEQ ID NO: 1373376 - DNA, 15 bp, Homo sapiens
tggagaactaaatac

SEQ ID NO: 1373377 - DNA, 15 bp, Homo sapiens
atggagaactaaata

SEQ ID NO: 1373378 - DNA, 15 bp, Homo sapiens
aatggagaactaaat

SEQ ID NO: 1373379 - DNA, 15 bp, Homo sapiens
aaatggagaactaaa

SEQ ID NO: 1373380 - DNA, 15 bp, Homo sapiens
caaatggagaactaa

SEQ ID NO: 1373381 - DNA, 15 bp, Homo sapiens
acaaatggagaacta

SEQ ID NO: 1373382 - DNA, 15 bp, Homo sapiens
tacaaatggagaact

SEQ ID NO: 1373383 - DNA, 15 bp, Homo sapiens
gtacaaatggagaac

SEQ ID NO: 1373384 - DNA, 15 bp, Homo sapiens
agtacaaatggagaa

SEQ ID NO: 1373385 - DNA, 15 bp, Homo sapiens
gagtacaaatggaga

SEQ ID NO: 1373386 - DNA, 15 bp, Homo sapiens
ggagtacaaatggag

SEQ ID NO: 1373387 - DNA, 15 bp, Homo sapiens
aggagtacaaatgga

SEQ ID NO: 1373388 - DNA, 15 bp, Homo sapiens
gaggagtacaaatgg

SEQ ID NO: 1373389 - DNA, 15 bp, Homo sapiens
agaggagtacaaatg

SEQ ID NO: 1373390 - DNA, 15 bp, Homo sapiens
cagaggagtacaaat

SEQ ID NO: 1373391 - DNA, 15 bp, Homo sapiens
ccagaggagtacaaa

SEQ ID NO: 1373392 - DNA, 15 bp, Homo sapiens
gccagaggagtacaa

SEQ ID NO: 1373393 - DNA, 15 bp, Homo sapiens
ggccagaggagtaca

SEQ ID NO: 1373394 - DNA, 15 bp, Homo sapiens
aggccagaggagtac

SEQ ID NO: 1373395 - DNA, 15 bp, Homo sapiens
gaggccagaggagta

SEQ ID NO: 1373396 - DNA, 15 bp, Homo sapiens
ggaggccagaggagt

SEQ ID NO: 1373397 - DNA, 15 bp, Homo sapiens
aggaggccagaggag

SEQ ID NO: 1373398 - DNA, 15 bp, Homo sapiens
caggaggccagagga

SEQ ID NO: 1373399 - DNA, 15 bp, Homo sapiens
gcaggaggccagagg

SEQ ID NO: 1373400 - DNA, 15 bp, Homo sapiens
agcaggaggccagag

SEQ ID NO: 1373401 - DNA, 15 bp, Homo sapiens
cagcaggaggccaga

SEQ ID NO: 1373402 - DNA, 15 bp, Homo sapiens
ccagcaggaggccag

SEQ ID NO: 1373403 - DNA, 15 bp, Homo sapiens
accagcaggaggcca

SEQ ID NO: 1373404 - DNA, 15 bp, Homo sapiens
gaccagcaggaggcc

SEQ ID NO: 1373405 - DNA, 15 bp, Homo sapiens
tgaccagcaggaggc

SEQ ID NO: 1373406 - DNA, 15 bp, Homo sapiens
atgaccagcaggagg

SEQ ID NO: 1373407 - DNA, 15 bp, Homo sapiens
aatgaccagcaggag

SEQ ID NO: 1373408 - DNA, 15 bp, Homo sapiens
aaatgaccagcagga

SEQ ID NO: 1373409 - DNA, 15 bp, Homo sapiens
gaaatgaccagcagg

SEQ ID NO: 1373410 - DNA, 15 bp, Homo sapiens
tgaaatgaccagcag

SEQ ID NO: 1373411 - DNA, 15 bp, Homo sapiens
ctgaaatgaccagca

SEQ ID NO: 1373412 - DNA, 15 bp, Homo sapiens
actgaaatgaccagc

SEQ ID NO: 1373413 - DNA, 15 bp, Homo sapiens
gactgaaatgaccag

SEQ ID NO: 1373414 - DNA, 15 bp, Homo sapiens
tgactgaaatgacca

SEQ ID NO: 1373415 - DNA, 15 bp, Homo sapiens
ctgactgaaatgacc

SEQ ID NO: 1373416 - DNA, 15 bp, Homo sapiens
cctgactgaaatgac

SEQ ID NO: 1373417 - DNA, 15 bp, Homo sapiens
ccctgactgaaatga

SEQ ID NO: 1373418 - DNA, 15 bp, Homo sapiens
cccctgactgaaatg

SEQ ID NO: 1373419 - DNA, 15 bp, Homo sapiens
tcccctgactgaaat

SEQ ID NO: 1373420 - DNA, 15 bp, Homo sapiens
atcccctgactgaaa

SEQ ID NO: 1373421 - DNA, 15 bp, Homo sapiens
catcccctgactgaa

SEQ ID NO: 1373422 - DNA, 15 bp, Homo sapiens
tcatcccctgactga

SEQ ID NO: 1373423 - DNA, 15 bp, Homo sapiens
atcatcccctgactg

SEQ ID NO: 1373424 - DNA, 15 bp, Homo sapiens
tatcatcccctgact

SEQ ID NO: 1373425 - DNA, 15 bp, Homo sapiens
atatcatcccctgac

SEQ ID NO: 1373426 - DNA, 15 bp, Homo sapiens
catatcatcccctga

SEQ ID NO: 1373427 - DNA, 15 bp, Homo sapiens
ccatatcatcccctg

SEQ ID NO: 1373428 - DNA, 15 bp, Homo sapiens
tccatatcatcccct

SEQ ID NO: 1373429 - DNA, 15 bp, Homo sapiens
ctccatatcatcccc

SEQ ID NO: 1373430 - DNA, 15 bp, Homo sapiens
tctccatatcatccc

SEQ ID NO: 1373431 - DNA, 15 bp, Homo sapiens
gtctccatatcatcc

SEQ ID NO: 1373432 - DNA, 15 bp, Homo sapiens
ggtctccatatcatc

SEQ ID NO: 1373433 - DNA, 15 bp, Homo sapiens
gggtctccatatcat

SEQ ID NO: 1373434 - DNA, 15 bp, Homo sapiens
agggtctccatatca

SEQ ID NO: 1373435 - DNA, 15 bp, Homo sapiens
cagggtctccatatc

SEQ ID NO: 1373436 - DNA, 15 bp, Homo sapiens
ccagggtctccatat

SEQ ID NO: 1373437 - DNA, 15 bp, Homo sapiens
accagggtctccata

SEQ ID NO: 1373438 - DNA, 15 bp, Homo sapiens
taccagggtctccat

SEQ ID NO: 1373439 - DNA, 15 bp, Homo sapiens
ttaccagggtctcca

SEQ ID NO: 1373440 - DNA, 15 bp, Homo sapiens
cttaccagggtctcc

SEQ ID NO: 1373441 - DNA, 15 bp, Homo sapiens
acttaccagggtctc

SEQ ID NO: 1373442 - DNA, 15 bp, Homo sapiens
gacttaccagggtct

SEQ ID NO: 1373443 - DNA, 15 bp, Homo sapiens
ggacttaccagggtc

SEQ ID NO: 1373444 - DNA, 15 bp, Homo sapiens
gggacttaccagggt

SEQ ID NO: 1373445 - DNA, 15 bp, Homo sapiens
tgggacttaccaggg

SEQ ID NO: 1373446 - DNA, 15 bp, Homo sapiens
atgggacttaccagg

SEQ ID NO: 1373447 - DNA, 15 bp, Homo sapiens
aatgggacttaccag

SEQ ID NO: 1373448 - DNA, 15 bp, Homo sapiens
gaatgggacttacca

SEQ ID NO: 1373449 - DNA, 15 bp, Homo sapiens
tgaatgggacttacc

SEQ ID NO: 1373450 - DNA, 15 bp, Homo sapiens
ctgaatgggacttac

SEQ ID NO: 1373451 - DNA, 15 bp, Homo sapiens
cctgaatgggactta

SEQ ID NO: 1373452 - DNA, 15 bp, Homo sapiens
gcctgaatgggactt

SEQ ID NO: 1373453 - DNA, 15 bp, Homo sapiens
tgcctgaatgggact

SEQ ID NO: 1373454 - DNA, 15 bp, Homo sapiens
gtgcctgaatgggac

SEQ ID NO: 1373455 - DNA, 15 bp, Homo sapiens
ggtgcctgaatggga

SEQ ID NO: 1373456 - DNA, 15 bp, Homo sapiens
gggtgcctgaatggg

SEQ ID NO: 1373457 - DNA, 15 bp, Homo sapiens
tgggtgcctgaatgg

SEQ ID NO: 1373458 - DNA, 15 bp, Homo sapiens
gtgggtgcctgaatg

SEQ ID NO: 1373459 - DNA, 15 bp, Homo sapiens
ggtgggtgcctgaat

SEQ ID NO: 1373460 - DNA, 15 bp, Homo sapiens
gggtgggtgcctgaa

SEQ ID NO: 1373461 - DNA, 15 bp, Homo sapiens
ggggtgggtgcctga

SEQ ID NO: 1373462 - DNA, 15 bp, Homo sapiens
gggggtgggtgcctg

SEQ ID NO: 1373463 - DNA, 15 bp, Homo sapiens
ggggggtgggtgcct

SEQ ID NO: 1373464 - DNA, 15 bp, Homo sapiens
gggggggtgggtgcc

SEQ ID NO: 1373465 - DNA, 15 bp, Homo sapiens
tgggggggtgggtgc

SEQ ID NO: 1373466 - DNA, 15 bp, Homo sapiens
ttgggggggtgggtg

SEQ ID NO: 1373467 - DNA, 15 bp, Homo sapiens
tttgggggggtgggt

SEQ ID NO: 1373468 - DNA, 15 bp, Homo sapiens
ttttgggggggtggg

SEQ ID NO: 1373469 - DNA, 15 bp, Homo sapiens
tttttgggggggtgg

SEQ ID NO: 1373470 - DNA, 15 bp, Homo sapiens
ttttttgggggggtg

SEQ ID NO: 1373471 - DNA, 15 bp, Homo sapiens
tttttttgggggggt

SEQ ID NO: 1373472 - DNA, 15 bp, Homo sapiens
actttttttgggggg

SEQ ID NO: 1373473 - DNA, 15 bp, Homo sapiens
tactttttttggggg

SEQ ID NO: 1373474 - DNA, 15 bp, Homo sapiens
ctactttttttgggg

SEQ ID NO: 1373475 - DNA, 15 bp, Homo sapiens
gctactttttttggg

SEQ ID NO: 1373476 - DNA, 15 bp, Homo sapiens
agctactttttttgg

SEQ ID NO: 1373477 - DNA, 15 bp, Homo sapiens
cagctactttttttg

SEQ ID NO: 1373478 - DNA, 15 bp, Homo sapiens
acagctacttttttt

SEQ ID NO: 1373479 - DNA, 15 bp, Homo sapiens
aacagctactttttt

SEQ ID NO: 1373480 - DNA, 15 bp, Homo sapiens
gaacagctacttttt

SEQ ID NO: 1373481 - DNA, 15 bp, Homo sapiens
cgaacagctactttt

SEQ ID NO: 1373482 - DNA, 15 bp, Homo sapiens
acgaacagctacttt

SEQ ID NO: 1373483 - DNA, 15 bp, Homo sapiens
cacgaacagctactt

SEQ ID NO: 1373484 - DNA, 15 bp, Homo sapiens
acacgaacagctact

SEQ ID NO: 1373485 - DNA, 15 bp, Homo sapiens
aacacgaacagctac

SEQ ID NO: 1373486 - DNA, 15 bp, Homo sapiens
gaacacgaacagcta

SEQ ID NO: 1373487 - DNA, 15 bp, Homo sapiens
tgaacacgaacagct

SEQ ID NO: 1373488 - DNA, 15 bp, Homo sapiens
atgaacacgaacagc

SEQ ID NO: 1373489 - DNA, 15 bp, Homo sapiens
aatgaacacgaacag

SEQ ID NO: 1373490 - DNA, 15 bp, Homo sapiens
taatgaacacgaaca

SEQ ID NO: 1373491 - DNA, 15 bp, Homo sapiens
ataatgaacacgaac

SEQ ID NO: 1373492 - DNA, 15 bp, Homo sapiens
aataatgaacacgaa

SEQ ID NO: 1373493 - DNA, 15 bp, Homo sapiens
gaataatgaacacga

SEQ ID NO: 1373494 - DNA, 15 bp, Homo sapiens
tgaataatgaacacg

SEQ ID NO: 1373495 - DNA, 15 bp, Homo sapiens
atgaataatgaacac

SEQ ID NO: 1373496 - DNA, 15 bp, Homo sapiens
catgaataatgaaca

SEQ ID NO: 1373497 - DNA, 15 bp, Homo sapiens
acatgaataatgaac

SEQ ID NO: 1373498 - DNA, 15 bp, Homo sapiens
aacatgaataatgaa

SEQ ID NO: 1373499 - DNA, 15 bp, Homo sapiens
caacatgaataatga

SEQ ID NO: 1373500 - DNA, 15 bp, Homo sapiens
tcaacatgaataatg

SEQ ID NO: 1373501 - DNA, 15 bp, Homo sapiens
ttcaacatgaataat

SEQ ID NO: 1373502 - DNA, 15 bp, Homo sapiens
tttcaacatgaataa

SEQ ID NO: 1373503 - DNA, 15 bp, Homo sapiens
atttcaacatgaata

SEQ ID NO: 1373504 - DNA, 15 bp, Homo sapiens
aatttcaacatgaat

SEQ ID NO: 1373505 - DNA, 15 bp, Homo sapiens
caatttcaacatgaa

SEQ ID NO: 1373506 - DNA, 15 bp, Homo sapiens
tcaatttcaacatga

SEQ ID NO: 1373507 - DNA, 15 bp, Homo sapiens
atcaatttcaacatg

SEQ ID NO: 1373508 - DNA, 15 bp, Homo sapiens
tatcaatttcaacat

SEQ ID NO: 1373509 - DNA, 15 bp, Homo sapiens
ttatcaatttcaaca

SEQ ID NO: 1373510 - DNA, 15 bp, Homo sapiens
tttatcaatttcaac

SEQ ID NO: 1373511 - DNA, 15 bp, Homo sapiens
ctttatcaatttcaa

SEQ ID NO: 1373512 - DNA, 15 bp, Homo sapiens
tctttatcaatttca

SEQ ID NO: 1373513 - DNA, 15 bp, Homo sapiens
ttctttatcaatttc

SEQ ID NO: 1373514 - DNA, 15 bp, Homo sapiens
tttctttatcaattt

SEQ ID NO: 1373515 - DNA, 15 bp, Homo sapiens
gtttctttatcaatt

SEQ ID NO: 1373516 - DNA, 15 bp, Homo sapiens
ggtttctttatcaat

SEQ ID NO: 1373517 - DNA, 15 bp, Homo sapiens
tggtttctttatcaa

SEQ ID NO: 1373518 - DNA, 15 bp, Homo sapiens
ttggtttctttatca

SEQ ID NO: 1373519 - DNA, 15 bp, Homo sapiens
cttggtttctttatc

SEQ ID NO: 1373520 - DNA, 15 bp, Homo sapiens
ccttggtttctttat

SEQ ID NO: 1373521 - DNA, 15 bp, Homo sapiens
cccttggtttcttta

SEQ ID NO: 1373522 - DNA, 15 bp, Homo sapiens
acccttggtttcttt

SEQ ID NO: 1373523 - DNA, 15 bp, Homo sapiens
aacccttggtttctt

SEQ ID NO: 1373524 - DNA, 15 bp, Homo sapiens
aaacccttggtttct

SEQ ID NO: 1373525 - DNA, 15 bp, Homo sapiens
aaaacccttggtttc

SEQ ID NO: 1373526 - DNA, 15 bp, Homo sapiens
taaaacccttggttt

SEQ ID NO: 1373527 - DNA, 15 bp, Homo sapiens
ttaaaacccttggtt

SEQ ID NO: 1373528 - DNA, 15 bp, Homo sapiens
attaaaacccttggt

SEQ ID NO: 1373529 - DNA, 15 bp, Homo sapiens
gattaaaacccttgg

SEQ ID NO: 1373530 - DNA, 15 bp, Homo sapiens
tgattaaaacccttg

SEQ ID NO: 1373531 - DNA, 15 bp, Homo sapiens
gtgattaaaaccctt

SEQ ID NO: 1373532 - DNA, 15 bp, Homo sapiens
tgtgattaaaaccct

SEQ ID NO: 1373533 - DNA, 15 bp, Homo sapiens
tgctgtgattaaaac

SEQ ID NO: 1373534 - DNA, 15 bp, Homo sapiens
ttgctgtgattaaaa

SEQ ID NO: 1373535 - DNA, 15 bp, Homo sapiens
tttgctgtgattaaa

SEQ ID NO: 1373536 - DNA, 15 bp, Homo sapiens
ctttgctgtgattaa

SEQ ID NO: 1373537 - DNA, 15 bp, Homo sapiens
tctttgctgtgatta

SEQ ID NO: 1373538 - DNA, 15 bp, Homo sapiens
ctctttgctgtgatt

SEQ ID NO: 1373539 - DNA, 15 bp, Homo sapiens
tctctttgctgtgat

SEQ ID NO: 1373540 - DNA, 15 bp, Homo sapiens
ttctctttgctgtga

SEQ ID NO: 1373541 - DNA, 15 bp, Homo sapiens
tttctctttgctgtg

SEQ ID NO: 1373542 - DNA, 15 bp, Homo sapiens
gtttctctttgctgt

SEQ ID NO: 1373543 - DNA, 15 bp, Homo sapiens
agtttctctttgctg

SEQ ID NO: 1373544 - DNA, 15 bp, Homo sapiens
cagtttctctttgct

SEQ ID NO: 1373545 - DNA, 15 bp, Homo sapiens
acagtttctctttgc

SEQ ID NO: 1373546 - DNA, 15 bp, Homo sapiens
aacagtttctctttg

SEQ ID NO: 1373547 - DNA, 15 bp, Homo sapiens
taacagtttctcttt

SEQ ID NO: 1373548 - DNA, 15 bp, Homo sapiens
ataacagtttctctt

SEQ ID NO: 1373549 - DNA, 15 bp, Homo sapiens
aataacagtttctct

SEQ ID NO: 1373550 - DNA, 15 bp, Homo sapiens
gaataacagtttctc

SEQ ID NO: 1373551 - DNA, 15 bp, Homo sapiens
agaataacagtttct

SEQ ID NO: 1373552 - DNA, 15 bp, Homo sapiens
aagaataacagtttc

SEQ ID NO: 1373553 - DNA, 15 bp, Homo sapiens
aaagaataacagttt

SEQ ID NO: 1373554 - DNA, 15 bp, Homo sapiens
taaagaataacagtt

SEQ ID NO: 1373555 - DNA, 15 bp, Homo sapiens
ctaaagaataacagt

SEQ ID NO: 1373556 - DNA, 15 bp, Homo sapiens
gctaaagaataacag

SEQ ID NO: 1373557 - DNA, 15 bp, Homo sapiens
agctaaagaataaca

SEQ ID NO: 1373558 - DNA, 15 bp, Homo sapiens
tagctaaagaataac

SEQ ID NO: 1373559 - DNA, 15 bp, Homo sapiens
ttagctaaagaataa

SEQ ID NO: 1373560 - DNA, 15 bp, Homo sapiens
gttagctaaagaata

SEQ ID NO: 1373561 - DNA, 15 bp, Homo sapiens
tgttagctaaagaat

SEQ ID NO: 1373562 - DNA, 15 bp, Homo sapiens
ctgttagctaaagaa

SEQ ID NO: 1373563 - DNA, 15 bp, Homo sapiens
actgttagctaaaga

SEQ ID NO: 1373564 - DNA, 15 bp, Homo sapiens
tactgttagctaaag

SEQ ID NO: 1373565 - DNA, 15 bp, Homo sapiens
gtactgttagctaaa

SEQ ID NO: 1373566 - DNA, 15 bp, Homo sapiens
agtactgttagctaa

SEQ ID NO: 1373567 - DNA, 15 bp, Homo sapiens
gagtactgttagcta

SEQ ID NO: 1373568 - DNA, 15 bp, Homo sapiens
tgagtactgttagct

SEQ ID NO: 1373569 - DNA, 15 bp, Homo sapiens
ctgagtactgttagc

SEQ ID NO: 1373570 - DNA, 15 bp, Homo sapiens
gctgagtactgttag

SEQ ID NO: 1373571 - DNA, 15 bp, Homo sapiens
agctgagtactgtta

SEQ ID NO: 1373572 - DNA, 15 bp, Homo sapiens
tagctgagtactgtt

SEQ ID NO: 1373573 - DNA, 15 bp, Homo sapiens
ttagctgagtactgt

SEQ ID NO: 1373574 - DNA, 15 bp, Homo sapiens
attagctgagtactg

SEQ ID NO: 1373575 - DNA, 15 bp, Homo sapiens
cattagctgagtact

SEQ ID NO: 1373576 - DNA, 15 bp, Homo sapiens
gcattagctgagtac

SEQ ID NO: 1373577 - DNA, 15 bp, Homo sapiens
agcattagctgagta

SEQ ID NO: 1373578 - DNA, 15 bp, Homo sapiens
cagcattagctgagt

SEQ ID NO: 1373579 - DNA, 15 bp, Homo sapiens
ccagcattagctgag

SEQ ID NO: 1373580 - DNA, 15 bp, Homo sapiens
tccagcattagctga

SEQ ID NO: 1373581 - DNA, 15 bp, Homo sapiens
gtccagcattagctg

SEQ ID NO: 1373582 - DNA, 15 bp, Homo sapiens
ggtccagcattagct

SEQ ID NO: 1373583 - DNA, 15 bp, Homo sapiens
tggtccagcattagc

SEQ ID NO: 1373584 - DNA, 15 bp, Homo sapiens
ttggtccagcattag

SEQ ID NO: 1373585 - DNA, 15 bp, Homo sapiens
tttggtccagcatta

SEQ ID NO: 1373586 - DNA, 15 bp, Homo sapiens
ttttggtccagcatt

SEQ ID NO: 1373587 - DNA, 15 bp, Homo sapiens
attttggtccagcat

SEQ ID NO: 1373588 - DNA, 15 bp, Homo sapiens
aattttggtccagca

SEQ ID NO: 1373589 - DNA, 15 bp, Homo sapiens
taattttggtccagc

SEQ ID NO: 1373590 - DNA, 15 bp, Homo sapiens
ataattttggtccag

SEQ ID NO: 1373591 - DNA, 15 bp, Homo sapiens
tataattttggtcca

SEQ ID NO: 1373592 - DNA, 15 bp, Homo sapiens
ctataattttggtcc

SEQ ID NO: 1373593 - DNA, 15 bp, Homo sapiens
cctataattttggtc

SEQ ID NO: 1373594 - DNA, 15 bp, Homo sapiens
tcctataattttggt

SEQ ID NO: 1373595 - DNA, 15 bp, Homo sapiens
ttcctataattttgg

SEQ ID NO: 1373596 - DNA, 15 bp, Homo sapiens
tttcctataattttg

SEQ ID NO: 1373597 - DNA, 15 bp, Homo sapiens
ttttcctataatttt

SEQ ID NO: 1373598 - DNA, 15 bp, Homo sapiens
attttcctataattt

SEQ ID NO: 1373599 - DNA, 15 bp, Homo sapiens
tattttcctataatt

SEQ ID NO: 1373600 - DNA, 15 bp, Homo sapiens
atattttcctataat

SEQ ID NO: 1373601 - DNA, 15 bp, Homo sapiens
tatattttcctataa

SEQ ID NO: 1373602 - DNA, 15 bp, Homo sapiens
atatattttcctata

SEQ ID NO: 1373603 - DNA, 15 bp, Homo sapiens
tatatattttcctat

SEQ ID NO: 1373604 - DNA, 15 bp, Homo sapiens
atatatattttccta

SEQ ID NO: 1373605 - DNA, 15 bp, Homo sapiens
tatatatattttcct

SEQ ID NO: 1373606 - DNA, 15 bp, Homo sapiens
ctatatatattttcc

SEQ ID NO: 1373607 - DNA, 15 bp, Homo sapiens
gctatatatattttc

SEQ ID NO: 1373608 - DNA, 15 bp, Homo sapiens
tgctatatatatttt

SEQ ID NO: 1373609 - DNA, 15 bp, Homo sapiens
atgctatatatattt

SEQ ID NO: 1373610 - DNA, 15 bp, Homo sapiens
tatgctatatatatt

SEQ ID NO: 1373611 - DNA, 15 bp, Homo sapiens
ttatgctatatatat

SEQ ID NO: 1373612 - DNA, 15 bp, Homo sapiens
tttatgctatatata

SEQ ID NO: 1373613 - DNA, 15 bp, Homo sapiens
atttatgctatatat

SEQ ID NO: 1373614 - DNA, 15 bp, Homo sapiens
catttatgctatata

SEQ ID NO: 1373615 - DNA, 15 bp, Homo sapiens
tcatttatgctatat

SEQ ID NO: 1373616 - DNA, 15 bp, Homo sapiens
ctcatttatgctata

SEQ ID NO: 1373617 - DNA, 15 bp, Homo sapiens
actcatttatgctat

SEQ ID NO: 1373618 - DNA, 15 bp, Homo sapiens
gactcatttatgcta

SEQ ID NO: 1373619 - DNA, 15 bp, Homo sapiens
tgactcatttatgct

SEQ ID NO: 1373620 - DNA, 15 bp, Homo sapiens
atgactcatttatgc

SEQ ID NO: 1373621 - DNA, 15 bp, Homo sapiens
tatgactcatttatg

SEQ ID NO: 1373622 - DNA, 15 bp, Homo sapiens
ttatgactcatttat

SEQ ID NO: 1373623 - DNA, 15 bp, Homo sapiens
tttatgactcattta

SEQ ID NO: 1373624 - DNA, 15 bp, Homo sapiens
ttttatgactcattt

SEQ ID NO: 1373625 - DNA, 15 bp, Homo sapiens
tttttatgactcatt

SEQ ID NO: 1373626 - DNA, 15 bp, Homo sapiens
gtttttatgactcat

SEQ ID NO: 1373627 - DNA, 15 bp, Homo sapiens
agtttttatgactca

SEQ ID NO: 1373628 - DNA, 15 bp, Homo sapiens
aagtttttatgactc

SEQ ID NO: 1373629 - DNA, 15 bp, Homo sapiens
aaagtttttatgact

SEQ ID NO: 1373630 - DNA, 15 bp, Homo sapiens
caaagtttttatgac

SEQ ID NO: 1373631 - DNA, 15 bp, Homo sapiens
tcaaagtttttatga

SEQ ID NO: 1373632 - DNA, 15 bp, Homo sapiens
ctcaaagtttttatg

SEQ ID NO: 1373633 - DNA, 15 bp, Homo sapiens
tctcaaagtttttat

SEQ ID NO: 1373634 - DNA, 15 bp, Homo sapiens
ctctcaaagttttta

SEQ ID NO: 1373635 - DNA, 15 bp, Homo sapiens
actctcaaagttttt

SEQ ID NO: 1373636 - DNA, 15 bp, Homo sapiens
gactctcaaagtttt

SEQ ID NO: 1373637 - DNA, 15 bp, Homo sapiens
tgactctcaaagttt

SEQ ID NO: 1373638 - DNA, 15 bp, Homo sapiens
gtgactctcaaagtt

SEQ ID NO: 1373639 - DNA, 15 bp, Homo sapiens
tgtgactctcaaagt

SEQ ID NO: 1373640 - DNA, 15 bp, Homo sapiens
atgtgactctcaaag

SEQ ID NO: 1373641 - DNA, 15 bp, Homo sapiens
catgtgactctcaaa

SEQ ID NO: 1373642 - DNA, 15 bp, Homo sapiens
tcatgtgactctcaa

SEQ ID NO: 1373643 - DNA, 15 bp, Homo sapiens
ttcatgtgactctca

SEQ ID NO: 1373644 - DNA, 15 bp, Homo sapiens
attcatgtgactctc

SEQ ID NO: 1373645 - DNA, 15 bp, Homo sapiens
cattcatgtgactct

SEQ ID NO: 1373646 - DNA, 15 bp, Homo sapiens
acattcatgtgactc

SEQ ID NO: 1373647 - DNA, 15 bp, Homo sapiens
tacattcatgtgact

SEQ ID NO: 1373648 - DNA, 15 bp, Homo sapiens
atacattcatgtgac

SEQ ID NO: 1373649 - DNA, 15 bp, Homo sapiens
catacattcatgtga

SEQ ID NO: 1373650 - DNA, 15 bp, Homo sapiens
tcatacattcatgtg

SEQ ID NO: 1373651 - DNA, 15 bp, Homo sapiens
ttcatacattcatgt

SEQ ID NO: 1373652 - DNA, 15 bp, Homo sapiens
gttcatacattcatg

SEQ ID NO: 1373653 - DNA, 15 bp, Homo sapiens
tgttcatacattcat

SEQ ID NO: 1373654 - DNA, 15 bp, Homo sapiens
atgttcatacattca

SEQ ID NO: 1373655 - DNA, 15 bp, Homo sapiens
aatgttcatacattc

SEQ ID NO: 1373656 - DNA, 15 bp, Homo sapiens
gaatgttcatacatt

SEQ ID NO: 1373657 - DNA, 15 bp, Homo sapiens
agaatgttcatacat

SEQ ID NO: 1373658 - DNA, 15 bp, Homo sapiens
gagaatgttcataca

SEQ ID NO: 1373659 - DNA, 15 bp, Homo sapiens
ggagaatgttcatac

SEQ ID NO: 1373660 - DNA, 15 bp, Homo sapiens
tggagaatgttcata

SEQ ID NO: 1373661 - DNA, 15 bp, Homo sapiens
gtggagaatgttcat

SEQ ID NO: 1373662 - DNA, 15 bp, Homo sapiens
tgtggagaatgttca

SEQ ID NO: 1373663 - DNA, 15 bp, Homo sapiens
ctgtggagaatgttc

SEQ ID NO: 1373664 - DNA, 15 bp, Homo sapiens
cctgtggagaatgtt

SEQ ID NO: 1373665 - DNA, 15 bp, Homo sapiens
gcctgtggagaatgt

SEQ ID NO: 1373666 - DNA, 15 bp, Homo sapiens
ggcctgtggagaatg

SEQ ID NO: 1373667 - DNA, 15 bp, Homo sapiens
aggcctgtggagaat

SEQ ID NO: 1373668 - DNA, 15 bp, Homo sapiens
aaggcctgtggagaa

SEQ ID NO: 1373669 - DNA, 15 bp, Homo sapiens
caaggcctgtggaga

SEQ ID NO: 1373670 - DNA, 15 bp, Homo sapiens
acaaggcctgtggag

SEQ ID NO: 1373671 - DNA, 15 bp, Homo sapiens
aacaaggcctgtgga

SEQ ID NO: 1373672 - DNA, 15 bp, Homo sapiens
aaacaaggcctgtgg

SEQ ID NO: 1373673 - DNA, 15 bp, Homo sapiens
taaacaaggcctgtg

SEQ ID NO: 1373674 - DNA, 15 bp, Homo sapiens
ataaacaaggcctgt

SEQ ID NO: 1373675 - DNA, 15 bp, Homo sapiens
cataaacaaggcctg

SEQ ID NO: 1373676 - DNA, 15 bp, Homo sapiens
acataaacaaggcct

SEQ ID NO: 1373677 - DNA, 15 bp, Homo sapiens
tacataaacaaggcc

SEQ ID NO: 1373678 - DNA, 15 bp, Homo sapiens
ttacataaacaaggc

SEQ ID NO: 1373679 - DNA, 15 bp, Homo sapiens
attacataaacaagg

SEQ ID NO: 1373680 - DNA, 15 bp, Homo sapiens
gattacataaacaag

SEQ ID NO: 1373681 - DNA, 15 bp, Homo sapiens
tgattacataaacaa

SEQ ID NO: 1373682 - DNA, 15 bp, Homo sapiens
atgattacataaaca

SEQ ID NO: 1373683 - DNA, 15 bp, Homo sapiens
catgattacataaac

SEQ ID NO: 1373684 - DNA, 15 bp, Homo sapiens
acatgattacataaa

SEQ ID NO: 1373685 - DNA, 15 bp, Homo sapiens
tacatgattacataa

SEQ ID NO: 1373686 - DNA, 15 bp, Homo sapiens
atacatgattacata

SEQ ID NO: 1373687 - DNA, 15 bp, Homo sapiens
gatacatgattacat

SEQ ID NO: 1373688 - DNA, 15 bp, Homo sapiens
agatacatgattaca

SEQ ID NO: 1373689 - DNA, 15 bp, Homo sapiens
tagatacatgattac

SEQ ID NO: 1373690 - DNA, 15 bp, Homo sapiens
gtagatacatgatta

SEQ ID NO: 1373691 - DNA, 15 bp, Homo sapiens
agtagatacatgatt

SEQ ID NO: 1373692 - DNA, 15 bp, Homo sapiens
aagtagatacatgat

SEQ ID NO: 1373693 - DNA, 15 bp, Homo sapiens
taagtagatacatga

SEQ ID NO: 1373694 - DNA, 15 bp, Homo sapiens
gtaagtagatacatg

SEQ ID NO: 1373695 - DNA, 15 bp, Homo sapiens
tgtaagtagatacat

SEQ ID NO: 1373696 - DNA, 15 bp, Homo sapiens
atgtaagtagataca

SEQ ID NO: 1373697 - DNA, 15 bp, Homo sapiens
catgtaagtagatac

SEQ ID NO: 1373698 - DNA, 15 bp, Homo sapiens
ccatgtaagtagata

SEQ ID NO: 1373699 - DNA, 15 bp, Homo sapiens
cccatgtaagtagat

SEQ ID NO: 1373700 - DNA, 15 bp, Homo sapiens
acccatgtaagtaga

SEQ ID NO: 1373701 - DNA, 15 bp, Homo sapiens
cacccatgtaagtag

SEQ ID NO: 1373702 - DNA, 15 bp, Homo sapiens
acacccatgtaagta

SEQ ID NO: 1373703 - DNA, 15 bp, Homo sapiens
cacacccatgtaagt

SEQ ID NO: 1373704 - DNA, 15 bp, Homo sapiens
acacacccatgtaag

SEQ ID NO: 1373705 - DNA, 15 bp, Homo sapiens
aacacacccatgtaa

SEQ ID NO: 1373706 - DNA, 15 bp, Homo sapiens
aaacacacccatgta

SEQ ID NO: 1373707 - DNA, 15 bp, Homo sapiens
taaacacacccatgt

SEQ ID NO: 1373708 - DNA, 15 bp, Homo sapiens
ataaacacacccatg

SEQ ID NO: 1373709 - DNA, 15 bp, Homo sapiens
gataaacacacccat

SEQ ID NO: 1373710 - DNA, 15 bp, Homo sapiens
agataaacacaccca

SEQ ID NO: 1373711 - DNA, 15 bp, Homo sapiens
aagataaacacaccc

SEQ ID NO: 1373712 - DNA, 15 bp, Homo sapiens
taagataaacacacc

SEQ ID NO: 1373713 - DNA, 15 bp, Homo sapiens
ctaagataaacacac

SEQ ID NO: 1373714 - DNA, 15 bp, Homo sapiens
gctaagataaacaca

SEQ ID NO: 1373715 - DNA, 15 bp, Homo sapiens
agctaagataaacac

SEQ ID NO: 1373716 - DNA, 15 bp, Homo sapiens
aagctaagataaaca

SEQ ID NO: 1373717 - DNA, 15 bp, Homo sapiens
aaagctaagataaac

SEQ ID NO: 1373718 - DNA, 15 bp, Homo sapiens
gaaaagctaagataa

SEQ ID NO: 1373719 - DNA, 15 bp, Homo sapiens
ggaaaagctaagata

SEQ ID NO: 1373720 - DNA, 15 bp, Homo sapiens
tggaaaagctaagat

SEQ ID NO: 1373721 - DNA, 15 bp, Homo sapiens
atggaaaagctaaga

SEQ ID NO: 1373722 - DNA, 15 bp, Homo sapiens
catggaaaagctaag

SEQ ID NO: 1373723 - DNA, 15 bp, Homo sapiens
acatggaaaagctaa

SEQ ID NO: 1373724 - DNA, 15 bp, Homo sapiens
cacatggaaaagcta

SEQ ID NO: 1373725 - DNA, 15 bp, Homo sapiens
ccacatggaaaagct

SEQ ID NO: 1373726 - DNA, 15 bp, Homo sapiens
tccacatggaaaagc

SEQ ID NO: 1373727 - DNA, 15 bp, Homo sapiens
ttccacatggaaaag

SEQ ID NO: 1373728 - DNA, 15 bp, Homo sapiens
gttccacatggaaaa

SEQ ID NO: 1373729 - DNA, 15 bp, Homo sapiens
ggttccacatggaaa

SEQ ID NO: 1373730 - DNA, 15 bp, Homo sapiens
gggttccacatggaa

SEQ ID NO: 1373731 - DNA, 15 bp, Homo sapiens
tgggttccacatgga

SEQ ID NO: 1373732 - DNA, 15 bp, Homo sapiens
ctgggttccacatgg

SEQ ID NO: 1373733 - DNA, 15 bp, Homo sapiens
gctgggttccacatg

SEQ ID NO: 1373734 - DNA, 15 bp, Homo sapiens
agctgggttccacat

SEQ ID NO: 1373735 - DNA, 15 bp, Homo sapiens
aagctgggttccaca

SEQ ID NO: 1373736 - DNA, 15 bp, Homo sapiens
caagctgggttccac

SEQ ID NO: 1373737 - DNA, 15 bp, Homo sapiens
gcaagctgggttcca

SEQ ID NO: 1373738 - DNA, 15 bp, Homo sapiens
agcaagctgggttcc

SEQ ID NO: 1373739 - DNA, 15 bp, Homo sapiens
cagcaagctgggttc

SEQ ID NO: 1373740 - DNA, 15 bp, Homo sapiens
acagcaagctgggtt

SEQ ID NO: 1373741 - DNA, 15 bp, Homo sapiens
tacagcaagctgggt

SEQ ID NO: 1373742 - DNA, 15 bp, Homo sapiens
ctacagcaagctggg

SEQ ID NO: 1373743 - DNA, 15 bp, Homo sapiens
tctacagcaagctgg

SEQ ID NO: 1373744 - DNA, 15 bp, Homo sapiens
gtctacagcaagctg

SEQ ID NO: 1373745 - DNA, 15 bp, Homo sapiens
ggtctacagcaagct

SEQ ID NO: 1373746 - DNA, 15 bp, Homo sapiens
gggtctacagcaagc

SEQ ID NO: 1373747 - DNA, 15 bp, Homo sapiens
tgggtctacagcaag

SEQ ID NO: 1373748 - DNA, 15 bp, Homo sapiens
ttgggtctacagcaa

SEQ ID NO: 1373749 - DNA, 15 bp, Homo sapiens
attgggtctacagca

SEQ ID NO: 1373750 - DNA, 15 bp, Homo sapiens
gattgggtctacagc

SEQ ID NO: 1373751 - DNA, 15 bp, Homo sapiens
agattgggtctacag

SEQ ID NO: 1373752 - DNA, 15 bp, Homo sapiens
gagattgggtctaca

SEQ ID NO: 1373753 - DNA, 15 bp, Homo sapiens
agagattgggtctac

SEQ ID NO: 1373754 - DNA, 15 bp, Homo sapiens
aagagattgggtcta

SEQ ID NO: 1373755 - DNA, 15 bp, Homo sapiens
aaagagattgggtct

SEQ ID NO: 1373756 - DNA, 15 bp, Homo sapiens
gaaagagattgggtc

SEQ ID NO: 1373757 - DNA, 15 bp, Homo sapiens
agaaagagattgggt

SEQ ID NO: 1373758 - DNA, 15 bp, Homo sapiens
tagaaagagattggg

SEQ ID NO: 1373759 - DNA, 15 bp, Homo sapiens
ttagaaagagattgg

SEQ ID NO: 1373760 - DNA, 15 bp, Homo sapiens
tttagaaagagattg

SEQ ID NO: 1373761 - DNA, 15 bp, Homo sapiens
gtttagaaagagatt

SEQ ID NO: 1373762 - DNA, 15 bp, Homo sapiens
tgtttagaaagagat

SEQ ID NO: 1373763 - DNA, 15 bp, Homo sapiens
ctgtttagaaagaga

SEQ ID NO: 1373764 - DNA, 15 bp, Homo sapiens
actgtttagaaagag

SEQ ID NO: 1373765 - DNA, 15 bp, Homo sapiens
cactgtttagaaaga

SEQ ID NO: 1373766 - DNA, 15 bp, Homo sapiens
tcactgtttagaaag

SEQ ID NO: 1373767 - DNA, 15 bp, Homo sapiens
ctcactgtttagaaa

SEQ ID NO: 1373768 - DNA, 15 bp, Homo sapiens
actcactgtttagaa

SEQ ID NO: 1373769 - DNA, 15 bp, Homo sapiens
tactcactgtttaga

SEQ ID NO: 1373770 - DNA, 15 bp, Homo sapiens
ttactcactgtttag

SEQ ID NO: 1373771 - DNA, 15 bp, Homo sapiens
attactcactgttta

SEQ ID NO: 1373772 - DNA, 15 bp, Homo sapiens
gattactcactgttt

SEQ ID NO: 1373773 - DNA, 15 bp, Homo sapiens
tgattactcactgtt

SEQ ID NO: 1373774 - DNA, 15 bp, Homo sapiens
ttgattactcactgt

SEQ ID NO: 1373775 - DNA, 15 bp, Homo sapiens
tttgattactcactg

SEQ ID NO: 1373776 - DNA, 15 bp, Homo sapiens
ttttgattactcact

SEQ ID NO: 1373777 - DNA, 15 bp, Homo sapiens
cttttgattactcac

SEQ ID NO: 1373778 - DNA, 15 bp, Homo sapiens
ccttttgattactca

SEQ ID NO: 1373779 - DNA, 15 bp, Homo sapiens
tccttttgattactc

SEQ ID NO: 1373780 - DNA, 15 bp, Homo sapiens
ttccttttgattact

SEQ ID NO: 1373781 - DNA, 15 bp, Homo sapiens
attccttttgattac

SEQ ID NO: 1373782 - DNA, 15 bp, Homo sapiens
aattccttttgatta

SEQ ID NO: 1373783 - DNA, 15 bp, Homo sapiens
gaattccttttgatt

SEQ ID NO: 1373784 - DNA, 15 bp, Homo sapiens
tgaattccttttgat

SEQ ID NO: 1373785 - DNA, 15 bp, Homo sapiens
atgaattccttttga

SEQ ID NO: 1373786 - DNA, 15 bp, Homo sapiens
gatgaattccttttg

SEQ ID NO: 1373787 - DNA, 15 bp, Homo sapiens
agatgaattcctttt

SEQ ID NO: 1373788 - DNA, 15 bp, Homo sapiens
cagatgaattccttt

SEQ ID NO: 1373789 - DNA, 15 bp, Homo sapiens
acagatgaattcctt

SEQ ID NO: 1373790 - DNA, 15 bp, Homo sapiens
cacagatgaattcct

SEQ ID NO: 1373791 - DNA, 15 bp, Homo sapiens
tcacagatgaattcc

SEQ ID NO: 1373792 - DNA, 15 bp, Homo sapiens
ctcacagatgaattc

SEQ ID NO: 1373793 - DNA, 15 bp, Homo sapiens
actcacagatgaatt

SEQ ID NO: 1373794 - DNA, 15 bp, Homo sapiens
tactcacagatgaat

SEQ ID NO: 1373795 - DNA, 15 bp, Homo sapiens
ttactcacagatgaa

SEQ ID NO: 1373796 - DNA, 15 bp, Homo sapiens
gttactcacagatga

SEQ ID NO: 1373797 - DNA, 15 bp, Homo sapiens
agttactcacagatg

SEQ ID NO: 1373798 - DNA, 15 bp, Homo sapiens
aagttactcacagat

SEQ ID NO: 1373799 - DNA, 15 bp, Homo sapiens
gaagttactcacaga

SEQ ID NO: 1373800 - DNA, 15 bp, Homo sapiens
tgaagttactcacag

SEQ ID NO: 1373801 - DNA, 15 bp, Homo sapiens
gtgaagttactcaca

SEQ ID NO: 1373802 - DNA, 15 bp, Homo sapiens
tgtgaagttactcac

SEQ ID NO: 1373803 - DNA, 15 bp, Homo sapiens
gtgtgaagttactca

SEQ ID NO: 1373804 - DNA, 15 bp, Homo sapiens
tgtgtgaagttactc

SEQ ID NO: 1373805 - DNA, 15 bp, Homo sapiens
atgtgtgaagttact

SEQ ID NO: 1373806 - DNA, 15 bp, Homo sapiens
aatgtgtgaagttac

SEQ ID NO: 1373807 - DNA, 15 bp, Homo sapiens
aaatgtgtgaagtta

SEQ ID NO: 1373808 - DNA, 15 bp, Homo sapiens
taaatgtgtgaagtt

SEQ ID NO: 1373809 - DNA, 15 bp, Homo sapiens
ataaatgtgtgaagt

SEQ ID NO: 1373810 - DNA, 15 bp, Homo sapiens
aataaatgtgtgaag

SEQ ID NO: 1373811 - DNA, 15 bp, Homo sapiens
taataaatgtgtgaa

SEQ ID NO: 1373812 - DNA, 15 bp, Homo sapiens
ataataaatgtgtga

SEQ ID NO: 1373813 - DNA, 15 bp, Homo sapiens
tataataaatgtgtg

SEQ ID NO: 1373814 - DNA, 15 bp, Homo sapiens
ttataataaatgtgt

SEQ ID NO: 1373815 - DNA, 15 bp, Homo sapiens
cttataataaatgtg

SEQ ID NO: 1373816 - DNA, 15 bp, Homo sapiens
tcttataataaatgt

SEQ ID NO: 1373817 - DNA, 15 bp, Homo sapiens
atcttataataaatg

SEQ ID NO: 1373818 - DNA, 15 bp, Homo sapiens
catcttataataaat

SEQ ID NO: 1373819 - DNA, 15 bp, Homo sapiens
acatcttataataaa

SEQ ID NO: 1373820 - DNA, 15 bp, Homo sapiens
aacatcttataataa

SEQ ID NO: 1373821 - DNA, 15 bp, Homo sapiens
taacatcttataata

SEQ ID NO: 1373822 - DNA, 15 bp, Homo sapiens
ctaacatcttataat

SEQ ID NO: 1373823 - DNA, 15 bp, Homo sapiens
tctaacatcttataa

SEQ ID NO: 1373824 - DNA, 15 bp, Homo sapiens
ctctaacatcttata

SEQ ID NO: 1373825 - DNA, 15 bp, Homo sapiens
actctaacatcttat

SEQ ID NO: 1373826 - DNA, 15 bp, Homo sapiens
cactctaacatctta

SEQ ID NO: 1373827 - DNA, 15 bp, Homo sapiens
tcactctaacatctt

SEQ ID NO: 1373828 - DNA, 15 bp, Homo sapiens
ctcactctaacatct

SEQ ID NO: 1373829 - DNA, 15 bp, Homo sapiens
cctcactctaacatc

SEQ ID NO: 1373830 - DNA, 15 bp, Homo sapiens
tcctcactctaacat

SEQ ID NO: 1373831 - DNA, 15 bp, Homo sapiens
ttcctcactctaaca

SEQ ID NO: 1373832 - DNA, 15 bp, Homo sapiens
gttcctcactctaac

SEQ ID NO: 1373833 - DNA, 15 bp, Homo sapiens
tgttcctcactctaa

SEQ ID NO: 1373834 - DNA, 15 bp, Homo sapiens
ttgttcctcactcta

SEQ ID NO: 1373835 - DNA, 15 bp, Homo sapiens
cttgttcctcactct

SEQ ID NO: 1373836 - DNA, 15 bp, Homo sapiens
ccttgttcctcactc

SEQ ID NO: 1373837 - DNA, 15 bp, Homo sapiens
accttgttcctcact

SEQ ID NO: 1373838 - DNA, 15 bp, Homo sapiens
caccttgttcctcac

SEQ ID NO: 1373839 - DNA, 15 bp, Homo sapiens
ccaccttgttcctca

SEQ ID NO: 1373840 - DNA, 15 bp, Homo sapiens
accaccttgttcctc

SEQ ID NO: 1373841 - DNA, 15 bp, Homo sapiens
aaccaccttgttcct

SEQ ID NO: 1373842 - DNA, 15 bp, Homo sapiens
aaaccaccttgttcc

SEQ ID NO: 1373843 - DNA, 15 bp, Homo sapiens
taaaccaccttgttc

SEQ ID NO: 1373844 - DNA, 15 bp, Homo sapiens
ttaaaccaccttgtt

SEQ ID NO: 1373845 - DNA, 15 bp, Homo sapiens
tttaaaccaccttgt

SEQ ID NO: 1373846 - DNA, 15 bp, Homo sapiens
atttaaaccaccttg

SEQ ID NO: 1373847 - DNA, 15 bp, Homo sapiens
catttaaaccacctt

SEQ ID NO: 1373848 - DNA, 15 bp, Homo sapiens
tcatttaaaccacct

SEQ ID NO: 1373849 - DNA, 15 bp, Homo sapiens
atcatttaaaccacc

SEQ ID NO: 1373850 - DNA, 15 bp, Homo sapiens
tatcatttaaaccac

SEQ ID NO: 1373851 - DNA, 15 bp, Homo sapiens
ctatcatttaaacca

SEQ ID NO: 1373852 - DNA, 15 bp, Homo sapiens
gctatcatttaaacc

SEQ ID NO: 1373853 - DNA, 15 bp, Homo sapiens
tgctatcatttaaac

SEQ ID NO: 1373854 - DNA, 15 bp, Homo sapiens
atgctatcatttaaa

SEQ ID NO: 1373855 - DNA, 15 bp, Homo sapiens
ttatgctatcattta

SEQ ID NO: 1373856 - DNA, 15 bp, Homo sapiens
tttatgctatcattt

SEQ ID NO: 1373857 - DNA, 15 bp, Homo sapiens
ctttatgctatcatt

SEQ ID NO: 1373858 - DNA, 15 bp, Homo sapiens
actttatgctatcat

SEQ ID NO: 1373859 - DNA, 15 bp, Homo sapiens
tactttatgctatca

SEQ ID NO: 1373860 - DNA, 15 bp, Homo sapiens
ttactttatgctatc

SEQ ID NO: 1373861 - DNA, 15 bp, Homo sapiens
gttactttatgctat

SEQ ID NO: 1373862 - DNA, 15 bp, Homo sapiens
tgttactttatgcta

SEQ ID NO: 1373863 - DNA, 15 bp, Homo sapiens
gtgttactttatgct

SEQ ID NO: 1373864 - DNA, 15 bp, Homo sapiens
tgtgttactttatgc

SEQ ID NO: 1373865 - DNA, 15 bp, Homo sapiens
ttgtgttactttatg

SEQ ID NO: 1373866 - DNA, 15 bp, Homo sapiens
attgtgttactttat

SEQ ID NO: 1373867 - DNA, 15 bp, Homo sapiens
aattgtgttacttta

SEQ ID NO: 1373868 - DNA, 15 bp, Homo sapiens
gaattgtgttacttt

SEQ ID NO: 1373869 - DNA, 15 bp, Homo sapiens
ggaattgtgttactt

SEQ ID NO: 1373870 - DNA, 15 bp, Homo sapiens
gggaattgtgttact

SEQ ID NO: 1373871 - DNA, 15 bp, Homo sapiens
tgggaattgtgttac

SEQ ID NO: 1373872 - DNA, 15 bp, Homo sapiens
ctgggaattgtgtta

SEQ ID NO: 1373873 - DNA, 15 bp, Homo sapiens
tctgggaattgtgtt

SEQ ID NO: 1373874 - DNA, 15 bp, Homo sapiens
ctctgggaattgtgt

SEQ ID NO: 1373875 - DNA, 15 bp, Homo sapiens
actctgggaattgtg

SEQ ID NO: 1373876 - DNA, 15 bp, Homo sapiens
aactctgggaattgt

SEQ ID NO: 1373877 - DNA, 15 bp, Homo sapiens
aaactctgggaattg

SEQ ID NO: 1373878 - DNA, 15 bp, Homo sapiens
aaaactctgggaatt

SEQ ID NO: 1373879 - DNA, 15 bp, Homo sapiens
taaaactctgggaat

SEQ ID NO: 1373880 - DNA, 15 bp, Homo sapiens
ttaaaactctgggaa

SEQ ID NO: 1373881 - DNA, 15 bp, Homo sapiens
cttaaaactctggga

SEQ ID NO: 1373882 - DNA, 15 bp, Homo sapiens
acttaaaactctggg

SEQ ID NO: 1373883 - DNA, 15 bp, Homo sapiens
gacttaaaactctgg

SEQ ID NO: 1373884 - DNA, 15 bp, Homo sapiens
ggacttaaaactctg

SEQ ID NO: 1373885 - DNA, 15 bp, Homo sapiens
tggacttaaaactct

SEQ ID NO: 1373886 - DNA, 15 bp, Homo sapiens
ctggacttaaaactc

SEQ ID NO: 1373887 - DNA, 15 bp, Homo sapiens
tctggacttaaaact

SEQ ID NO: 1373888 - DNA, 15 bp, Homo sapiens
ttctggacttaaaac

SEQ ID NO: 1373889 - DNA, 15 bp, Homo sapiens
tttctggacttaaaa

SEQ ID NO: 1373890 - DNA, 15 bp, Homo sapiens
ttttctggacttaaa

SEQ ID NO: 1373891 - DNA, 15 bp, Homo sapiens
tttttctggacttaa

SEQ ID NO: 1373892 - DNA, 15 bp, Homo sapiens
ttttttctggactta

SEQ ID NO: 1373893 - DNA, 15 bp, Homo sapiens
attttttctggactt

SEQ ID NO: 1373894 - DNA, 15 bp, Homo sapiens
aattttttctggact

SEQ ID NO: 1373895 - DNA, 15 bp, Homo sapiens
gaattttttctggac

SEQ ID NO: 1373896 - DNA, 15 bp, Homo sapiens
tgaattttttctgga

SEQ ID NO: 1373897 - DNA, 15 bp, Homo sapiens
ttgaattttttctgg

SEQ ID NO: 1373898 - DNA, 15 bp, Homo sapiens
cttgaattttttctg

SEQ ID NO: 1373899 - DNA, 15 bp, Homo sapiens
tcttgaattttttct

SEQ ID NO: 1373900 - DNA, 15 bp, Homo sapiens
ctcttgaattttttc

SEQ ID NO: 1373901 - DNA, 15 bp, Homo sapiens
actcttgaatttttt

SEQ ID NO: 1373902 - DNA, 15 bp, Homo sapiens
gactcttgaattttt

SEQ ID NO: 1373903 - DNA, 15 bp, Homo sapiens
tgactcttgaatttt

SEQ ID NO: 1373904 - DNA, 15 bp, Homo sapiens
ctgactcttgaattt

SEQ ID NO: 1373905 - DNA, 15 bp, Homo sapiens
cctgactcttgaatt

SEQ ID NO: 1373906 - DNA, 15 bp, Homo sapiens
acctgactcttgaat

SEQ ID NO: 1373907 - DNA, 15 bp, Homo sapiens
gacctgactcttgaa

SEQ ID NO: 1373908 - DNA, 15 bp, Homo sapiens
agacctgactcttga

SEQ ID NO: 1373909 - DNA, 15 bp, Homo sapiens
cagacctgactcttg

SEQ ID NO: 1373910 - DNA, 15 bp, Homo sapiens
acagacctgactctt

SEQ ID NO: 1373911 - DNA, 15 bp, Homo sapiens
cacagacctgactct

SEQ ID NO: 1373912 - DNA, 15 bp, Homo sapiens
ccacagacctgactc

SEQ ID NO: 1373913 - DNA, 15 bp, Homo sapiens
accacagacctgact

SEQ ID NO: 1373914 - DNA, 15 bp, Homo sapiens
caccacagacctgac

SEQ ID NO: 1373915 - DNA, 15 bp, Homo sapiens
tcaccacagacctga

SEQ ID NO: 1373916 - DNA, 15 bp, Homo sapiens
ttcaccacagacctg

SEQ ID NO: 1373917 - DNA, 15 bp, Homo sapiens
attcaccacagacct

SEQ ID NO: 1373918 - DNA, 15 bp, Homo sapiens
gattcaccacagacc

SEQ ID NO: 1373919 - DNA, 15 bp, Homo sapiens
agattcaccacagac

SEQ ID NO: 1373920 - DNA, 15 bp, Homo sapiens
gagattcaccacaga

SEQ ID NO: 1373921 - DNA, 15 bp, Homo sapiens
agagattcaccacag

SEQ ID NO: 1373922 - DNA, 15 bp, Homo sapiens
gagagattcaccaca

SEQ ID NO: 1373923 - DNA, 15 bp, Homo sapiens
tgagagattcaccac

SEQ ID NO: 1373924 - DNA, 15 bp, Homo sapiens
ttgagagattcacca

SEQ ID NO: 1373925 - DNA, 15 bp, Homo sapiens
cttgagagattcacc

SEQ ID NO: 1373926 - DNA, 15 bp, Homo sapiens
gcttgagagattcac

SEQ ID NO: 1373927 - DNA, 15 bp, Homo sapiens
tgcttgagagattca

SEQ ID NO: 1373928 - DNA, 15 bp, Homo sapiens
ttgcttgagagattc

SEQ ID NO: 1373929 - DNA, 15 bp, Homo sapiens
attgcttgagagatt

SEQ ID NO: 1373930 - DNA, 15 bp, Homo sapiens
tattgcttgagagat

SEQ ID NO: 1373931 - DNA, 15 bp, Homo sapiens
ttattgcttgagaga

SEQ ID NO: 1373932 - DNA, 15 bp, Homo sapiens
tttattgcttgagag

SEQ ID NO: 1373933 - DNA, 15 bp, Homo sapiens
ctttattgcttgaga

SEQ ID NO: 1373934 - DNA, 15 bp, Homo sapiens
tctttattgcttgag

SEQ ID NO: 1373935 - DNA, 15 bp, Homo sapiens
ttctttattgcttga

SEQ ID NO: 1373936 - DNA, 15 bp, Homo sapiens
tttctttattgcttg

SEQ ID NO: 1373937 - DNA, 15 bp, Homo sapiens
ttttctttattgctt

SEQ ID NO: 1373938 - DNA, 15 bp, Homo sapiens
attttctttattgct

SEQ ID NO: 1373939 - DNA, 15 bp, Homo sapiens
cattttctttattgc

SEQ ID NO: 1373940 - DNA, 15 bp, Homo sapiens
gcattttctttattg

SEQ ID NO: 1373941 - DNA, 15 bp, Homo sapiens
agcattttctttatt

SEQ ID NO: 1373942 - DNA, 15 bp, Homo sapiens
aagcattttctttat

SEQ ID NO: 1373943 - DNA, 15 bp, Homo sapiens
aaagcattttcttta

SEQ ID NO: 1373944 - DNA, 15 bp, Homo sapiens
gaaagcattttcttt

SEQ ID NO: 1373945 - DNA, 15 bp, Homo sapiens
cgaaagcattttctt

SEQ ID NO: 1373946 - DNA, 15 bp, Homo sapiens
acgaaagcattttct

SEQ ID NO: 1373947 - DNA, 15 bp, Homo sapiens
aacgaaagcattttc

SEQ ID NO: 1373948 - DNA, 15 bp, Homo sapiens
aaacgaaagcatttt

SEQ ID NO: 1373949 - DNA, 15 bp, Homo sapiens
taaacgaaagcattt

SEQ ID NO: 1373950 - DNA, 15 bp, Homo sapiens
ataaacgaaagcatt

SEQ ID NO: 1373951 - DNA, 15 bp, Homo sapiens
tataaacgaaagcat

SEQ ID NO: 1373952 - DNA, 15 bp, Homo sapiens
ctataaacgaaagca

SEQ ID NO: 1373953 - DNA, 15 bp, Homo sapiens
tctataaacgaaagc

SEQ ID NO: 1373954 - DNA, 15 bp, Homo sapiens
gtctataaacgaaag

SEQ ID NO: 1373955 - DNA, 15 bp, Homo sapiens
ggtctataaacgaaa

SEQ ID NO: 1373956 - DNA, 15 bp, Homo sapiens
tggtctataaacgaa

SEQ ID NO: 1373957 - DNA, 15 bp, Homo sapiens
ttggtctataaacga

SEQ ID NO: 1373958 - DNA, 15 bp, Homo sapiens
attggtctataaacg

SEQ ID NO: 1373959 - DNA, 15 bp, Homo sapiens
aattggtctataaac

SEQ ID NO: 1373960 - DNA, 15 bp, Homo sapiens
caattggtctataaa

SEQ ID NO: 1373961 - DNA, 15 bp, Homo sapiens
tcaattggtctataa

SEQ ID NO: 1373962 - DNA, 15 bp, Homo sapiens
gtcaattggtctata

SEQ ID NO: 1373963 - DNA, 15 bp, Homo sapiens
tgtcaattggtctat

SEQ ID NO: 1373964 - DNA, 15 bp, Homo sapiens
atgtcaattggtcta

SEQ ID NO: 1373965 - DNA, 15 bp, Homo sapiens
gatgtcaattggtct

SEQ ID NO: 1373966 - DNA, 15 bp, Homo sapiens
tgatgtcaattggtc

SEQ ID NO: 1373967 - DNA, 15 bp, Homo sapiens
ctgatgtcaattggt

SEQ ID NO: 1373968 - DNA, 15 bp, Homo sapiens
tctgatgtcaattgg

SEQ ID NO: 1373969 - DNA, 15 bp, Homo sapiens
ttctgatgtcaattg

SEQ ID NO: 1373970 - DNA, 15 bp, Homo sapiens
gttctgatgtcaatt

SEQ ID NO: 1373971 - DNA, 15 bp, Homo sapiens
agttctgatgtcaat

SEQ ID NO: 1373972 - DNA, 15 bp, Homo sapiens
aagttctgatgtcaa

SEQ ID NO: 1373973 - DNA, 15 bp, Homo sapiens
caagttctgatgtca

SEQ ID NO: 1373974 - DNA, 15 bp, Homo sapiens
ccaagttctgatgtc

SEQ ID NO: 1373975 - DNA, 15 bp, Homo sapiens
tccaagttctgatgt

SEQ ID NO: 1373976 - DNA, 15 bp, Homo sapiens
ctccaagttctgatg

SEQ ID NO: 1373977 - DNA, 15 bp, Homo sapiens
tctccaagttctgat

SEQ ID NO: 1373978 - DNA, 15 bp, Homo sapiens
ttctccaagttctga

SEQ ID NO: 1373979 - DNA, 15 bp, Homo sapiens
tttctccaagttctg

SEQ ID NO: 1373980 - DNA, 15 bp, Homo sapiens
ttttctccaagttct

SEQ ID NO: 1373981 - DNA, 15 bp, Homo sapiens
cttttctccaagttc

SEQ ID NO: 1373982 - DNA, 15 bp, Homo sapiens
tcttttctccaagtt

SEQ ID NO: 1373983 - DNA, 15 bp, Homo sapiens
ttcttttctccaagt

SEQ ID NO: 1373984 - DNA, 15 bp, Homo sapiens
attcttttctccaag

SEQ ID NO: 1373985 - DNA, 15 bp, Homo sapiens
gattcttttctccaa

SEQ ID NO: 1373986 - DNA, 15 bp, Homo sapiens
tgattcttttctcca

SEQ ID NO: 1373987 - DNA, 15 bp, Homo sapiens
atgattcttttctcc

SEQ ID NO: 1373988 - DNA, 15 bp, Homo sapiens
aatgattcttttctc

SEQ ID NO: 1373989 - DNA, 15 bp, Homo sapiens
aaatgattcttttct

SEQ ID NO: 1373990 - DNA, 15 bp, Homo sapiens
gaaatgattcttttc

SEQ ID NO: 1373991 - DNA, 15 bp, Homo sapiens
tgaaatgattctttt

SEQ ID NO: 1373992 - DNA, 15 bp, Homo sapiens
gtgaaatgattcttt

SEQ ID NO: 1373993 - DNA, 15 bp, Homo sapiens
agtgaaatgattctt

SEQ ID NO: 1373994 - DNA, 15 bp, Homo sapiens
aagtgaaatgattct

SEQ ID NO: 1373995 - DNA, 15 bp, Homo sapiens
aaagtgaaatgattc

SEQ ID NO: 1373996 - DNA, 15 bp, Homo sapiens
taaagtgaaatgatt

SEQ ID NO: 1373997 - DNA, 15 bp, Homo sapiens
ataaagtgaaatgat

SEQ ID NO: 1373998 - DNA, 15 bp, Homo sapiens
tataaagtgaaatga

SEQ ID NO: 1373999 - DNA, 15 bp, Homo sapiens
ttataaagtgaaatg

SEQ ID NO: 1374000 - DNA, 15 bp, Homo sapiens
attataaagtgaaat

SEQ ID NO: 1374001 - DNA, 15 bp, Homo sapiens
gcattataaagtgaa

SEQ ID NO: 1374002 - DNA, 15 bp, Homo sapiens
agcattataaagtga

SEQ ID NO: 1374003 - DNA, 15 bp, Homo sapiens
cagcattataaagtg

SEQ ID NO: 1374004 - DNA, 15 bp, Homo sapiens
ccagcattataaagt

SEQ ID NO: 1374005 - DNA, 15 bp, Homo sapiens
tccagcattataaag

SEQ ID NO: 1374006 - DNA, 15 bp, Homo sapiens
ttccagcattataaa

SEQ ID NO: 1374007 - DNA, 15 bp, Homo sapiens
attccagcattataa

SEQ ID NO: 1374008 - DNA, 15 bp, Homo sapiens
aattccagcattata

SEQ ID NO: 1374009 - DNA, 15 bp, Homo sapiens
aaattccagcattat

SEQ ID NO: 1374010 - DNA, 15 bp, Homo sapiens
caaattccagcatta

SEQ ID NO: 1374011 - DNA, 15 bp, Homo sapiens
tcaaattccagcatt

SEQ ID NO: 1374012 - DNA, 15 bp, Homo sapiens
ttcaaattccagcat

SEQ ID NO: 1374013 - DNA, 15 bp, Homo sapiens
tttcaaattccagca

SEQ ID NO: 1374014 - DNA, 15 bp, Homo sapiens
ctttcaaattccagc

SEQ ID NO: 1374015 - DNA, 15 bp, Homo sapiens
tctttcaaattccag

SEQ ID NO: 1374016 - DNA, 15 bp, Homo sapiens
atctttcaaattcca

SEQ ID NO: 1374017 - DNA, 15 bp, Homo sapiens
tatctttcaaattcc

SEQ ID NO: 1374018 - DNA, 15 bp, Homo sapiens
atatctttcaaattc

SEQ ID NO: 1374019 - DNA, 15 bp, Homo sapiens
catatctttcaaatt

SEQ ID NO: 1374020 - DNA, 15 bp, Homo sapiens
ccatatctttcaaat

SEQ ID NO: 1374021 - DNA, 15 bp, Homo sapiens
gccatatctttcaaa

SEQ ID NO: 1374022 - DNA, 15 bp, Homo sapiens
tgccatatctttcaa

SEQ ID NO: 1374023 - DNA, 15 bp, Homo sapiens
atgccatatctttca

SEQ ID NO: 1374024 - DNA, 15 bp, Homo sapiens
aatgccatatctttc

SEQ ID NO: 1374025 - DNA, 15 bp, Homo sapiens
taatgccatatcttt

SEQ ID NO: 1374026 - DNA, 15 bp, Homo sapiens
ctaatgccatatctt

SEQ ID NO: 1374027 - DNA, 15 bp, Homo sapiens
tctaatgccatatct

SEQ ID NO: 1374028 - DNA, 15 bp, Homo sapiens
ttctaatgccatatc

SEQ ID NO: 1374029 - DNA, 15 bp, Homo sapiens
tttctaatgccatat

SEQ ID NO: 1374030 - DNA, 15 bp, Homo sapiens
atttctaatgccata

SEQ ID NO: 1374031 - DNA, 15 bp, Homo sapiens
aatttctaatgccat

SEQ ID NO: 1374032 - DNA, 15 bp, Homo sapiens
caatttctaatgcca

SEQ ID NO: 1374033 - DNA, 15 bp, Homo sapiens
tcaatttctaatgcc

SEQ ID NO: 1374034 - DNA, 15 bp, Homo sapiens
gtcaatttctaatgc

SEQ ID NO: 1374035 - DNA, 15 bp, Homo sapiens
tgtcaatttctaatg

SEQ ID NO: 1374036 - DNA, 15 bp, Homo sapiens
ttgtcaatttctaat

SEQ ID NO: 1374037 - DNA, 15 bp, Homo sapiens
tttgtcaatttctaa

SEQ ID NO: 1374038 - DNA, 15 bp, Homo sapiens
ctttgtcaatttcta

SEQ ID NO: 1374039 - DNA, 15 bp, Homo sapiens
actttgtcaatttct

SEQ ID NO: 1374040 - DNA, 15 bp, Homo sapiens
gactttgtcaatttc

SEQ ID NO: 1374041 - DNA, 15 bp, Homo sapiens
agactttgtcaattt

SEQ ID NO: 1374042 - DNA, 15 bp, Homo sapiens
aagactttgtcaatt

SEQ ID NO: 1374043 - DNA, 15 bp, Homo sapiens
aaagactttgtcaat

SEQ ID NO: 1374044 - DNA, 15 bp, Homo sapiens
aaaagactttgtcaa

SEQ ID NO: 1374045 - DNA, 15 bp, Homo sapiens
aaaaagactttgtca

SEQ ID NO: 1374046 - DNA, 15 bp, Homo sapiens
taaaaagactttgtc

SEQ ID NO: 1374047 - DNA, 15 bp, Homo sapiens
ataaaaagactttgt

SEQ ID NO: 1374048 - DNA, 15 bp, Homo sapiens
cataaaaagactttg

SEQ ID NO: 1374049 - DNA, 15 bp, Homo sapiens
acataaaaagacttt

SEQ ID NO: 1374050 - DNA, 15 bp, Homo sapiens
aacataaaaagactt

SEQ ID NO: 1374051 - DNA, 15 bp, Homo sapiens
aaacataaaaagact

SEQ ID NO: 1374052 - DNA, 15 bp, Homo sapiens
taaacataaaaagac

SEQ ID NO: 1374053 - DNA, 15 bp, Homo sapiens
ttaaacataaaaaga

SEQ ID NO: 1374054 - DNA, 15 bp, Homo sapiens
attaaacataaaaag

SEQ ID NO: 1374055 - DNA, 15 bp, Homo sapiens
aattaaacataaaaa

SEQ ID NO: 1374056 - DNA, 15 bp, Homo sapiens
aaattaaacataaaa

SEQ ID NO: 1374057 - DNA, 15 bp, Homo sapiens
aaaattaaacataaa

SEQ ID NO: 1374058 - DNA, 15 bp, Homo sapiens
taaaattaaacataa

SEQ ID NO: 1374059 - DNA, 15 bp, Homo sapiens
ataaaattaaacata

SEQ ID NO: 1374060 - DNA, 15 bp, Homo sapiens
aataaaattaaacat

SEQ ID NO: 1374061 - DNA, 15 bp, Homo sapiens
aaataaaattaaaca

SEQ ID NO: 1374062 - DNA, 15 bp, Homo sapiens
taaataaaattaaac

SEQ ID NO: 1374063 - DNA, 15 bp, Homo sapiens
ttaaataaaattaaa

SEQ ID NO: 1374064 - DNA, 15 bp, Homo sapiens
tttaaataaaattaa

SEQ ID NO: 1374065 - DNA, 15 bp, Homo sapiens
ttttaaataaaatta

SEQ ID NO: 1374066 - DNA, 15 bp, Homo sapiens
attttaaataaaatt

SEQ ID NO: 1374067 - DNA, 15 bp, Homo sapiens
gattttaaataaaat

SEQ ID NO: 1374068 - DNA, 15 bp, Homo sapiens
agattttaaataaaa

SEQ ID NO: 1374069 - DNA, 15 bp, Homo sapiens
gagattttaaataaa

SEQ ID NO: 1374070 - DNA, 15 bp, Homo sapiens
ggagattttaaataa

SEQ ID NO: 1374071 - DNA, 15 bp, Homo sapiens
tggagattttaaata

SEQ ID NO: 1374072 - DNA, 15 bp, Homo sapiens
atggagattttaaat

SEQ ID NO: 1374073 - DNA, 15 bp, Homo sapiens
gatggagattttaaa

SEQ ID NO: 1374074 - DNA, 15 bp, Homo sapiens
agatggagattttaa

SEQ ID NO: 1374075 - DNA, 15 bp, Homo sapiens
aagatggagatttta

SEQ ID NO: 1374076 - DNA, 15 bp, Homo sapiens
gaagatggagatttt

SEQ ID NO: 1374077 - DNA, 15 bp, Homo sapiens
ggaagatggagattt

SEQ ID NO: 1374078 - DNA, 15 bp, Homo sapiens
tggaagatggagatt

SEQ ID NO: 1374079 - DNA, 15 bp, Homo sapiens
ctggaagatggagat

SEQ ID NO: 1374080 - DNA, 15 bp, Homo sapiens
cctggaagatggaga

SEQ ID NO: 1374081 - DNA, 15 bp, Homo sapiens
ccctggaagatggag

SEQ ID NO: 1374082 - DNA, 15 bp, Homo sapiens
tccctggaagatgga

SEQ ID NO: 1374083 - DNA, 15 bp, Homo sapiens
ttccctggaagatgg

SEQ ID NO: 1374084 - DNA, 15 bp, Homo sapiens
tttccctggaagatg

SEQ ID NO: 1374085 - DNA, 15 bp, Homo sapiens
ttttccctggaagat

SEQ ID NO: 1374086 - DNA, 15 bp, Homo sapiens
gttttccctggaaga

SEQ ID NO: 1374087 - DNA, 15 bp, Homo sapiens
tgttttccctggaag

SEQ ID NO: 1374088 - DNA, 15 bp, Homo sapiens
ttgttttccctggaa

SEQ ID NO: 1374089 - DNA, 15 bp, Homo sapiens
gttgttttccctgga

SEQ ID NO: 1374090 - DNA, 15 bp, Homo sapiens
ggttgttttccctgg

SEQ ID NO: 1374091 - DNA, 15 bp, Homo sapiens
tggttgttttccctg

SEQ ID NO: 1374092 - DNA, 15 bp, Homo sapiens
ctggttgttttccct

SEQ ID NO: 1374093 - DNA, 15 bp, Homo sapiens
cctggttgttttccc

SEQ ID NO: 1374094 - DNA, 15 bp, Homo sapiens
acctggttgttttcc

SEQ ID NO: 1374095 - DNA, 15 bp, Homo sapiens
aacctggttgttttc

SEQ ID NO: 1374096 - DNA, 15 bp, Homo sapiens
aaacctggttgtttt

SEQ ID NO: 1374097 - DNA, 15 bp, Homo sapiens
gaaacctggttgttt

SEQ ID NO: 1374098 - DNA, 15 bp, Homo sapiens
tgaaacctggttgtt

SEQ ID NO: 1374099 - DNA, 15 bp, Homo sapiens
ttgaaacctggttgt

SEQ ID NO: 1374100 - DNA, 15 bp, Homo sapiens
cttgaaacctggttg

SEQ ID NO: 1374101 - DNA, 15 bp, Homo sapiens
acttgaaacctggtt

SEQ ID NO: 1374102 - DNA, 15 bp, Homo sapiens
cacttgaaacctggt

SEQ ID NO: 1374103 - DNA, 15 bp, Homo sapiens
acacttgaaacctgg

SEQ ID NO: 1374104 - DNA, 15 bp, Homo sapiens
gacacttgaaacctg

SEQ ID NO: 1374105 - DNA, 15 bp, Homo sapiens
tgacacttgaaacct

SEQ ID NO: 1374106 - DNA, 15 bp, Homo sapiens
atgacacttgaaacc

SEQ ID NO: 1374107 - DNA, 15 bp, Homo sapiens
aatgacacttgaaac

SEQ ID NO: 1374108 - DNA, 15 bp, Homo sapiens
caatgacacttgaaa

SEQ ID NO: 1374109 - DNA, 15 bp, Homo sapiens
acaatgacacttgaa

SEQ ID NO: 1374110 - DNA, 15 bp, Homo sapiens
tacaatgacacttga

SEQ ID NO: 1374111 - DNA, 15 bp, Homo sapiens
ttacaatgacacttg

SEQ ID NO: 1374112 - DNA, 15 bp, Homo sapiens
tttacaatgacactt

SEQ ID NO: 1374113 - DNA, 15 bp, Homo sapiens
ttttacaatgacact

SEQ ID NO: 1374114 - DNA, 15 bp, Homo sapiens
tttttacaatgacac

SEQ ID NO: 1374115 - DNA, 15 bp, Homo sapiens
atttttacaatgaca

SEQ ID NO: 1374116 - DNA, 15 bp, Homo sapiens
aatttttacaatgac

SEQ ID NO: 1374117 - DNA, 15 bp, Homo sapiens
caatttttacaatga

SEQ ID NO: 1374118 - DNA, 15 bp, Homo sapiens
tcaatttttacaatg

SEQ ID NO: 1374119 - DNA, 15 bp, Homo sapiens
gtcaatttttacaat

SEQ ID NO: 1374120 - DNA, 15 bp, Homo sapiens
tgtcaatttttacaa

SEQ ID NO: 1374121 - DNA, 15 bp, Homo sapiens
atgtcaatttttaca

SEQ ID NO: 1374122 - DNA, 15 bp, Homo sapiens
catgtcaatttttac

SEQ ID NO: 1374123 - DNA, 15 bp, Homo sapiens
gcatgtcaattttta

SEQ ID NO: 1374124 - DNA, 15 bp, Homo sapiens
ggcatgtcaattttt

SEQ ID NO: 1374125 - DNA, 15 bp, Homo sapiens
gggcatgtcaatttt

SEQ ID NO: 1374126 - DNA, 15 bp, Homo sapiens
agggcatgtcaattt

SEQ ID NO: 1374127 - DNA, 15 bp, Homo sapiens
tagggcatgtcaatt

SEQ ID NO: 1374128 - DNA, 15 bp, Homo sapiens
atagggcatgtcaat

SEQ ID NO: 1374129 - DNA, 15 bp, Homo sapiens
catagggcatgtcaa

SEQ ID NO: 1374130 - DNA, 15 bp, Homo sapiens
acatagggcatgtca

SEQ ID NO: 1374131 - DNA, 15 bp, Homo sapiens
aacatagggcatgtc

SEQ ID NO: 1374132 - DNA, 15 bp, Homo sapiens
aaacatagggcatgt

SEQ ID NO: 1374133 - DNA, 15 bp, Homo sapiens
caaacatagggcatg

SEQ ID NO: 1374134 - DNA, 15 bp, Homo sapiens
tcaaacatagggcat

SEQ ID NO: 1374135 - DNA, 15 bp, Homo sapiens
atcaaacatagggca

SEQ ID NO: 1374136 - DNA, 15 bp, Homo sapiens
aatcaaacatagggc

SEQ ID NO: 1374137 - DNA, 15 bp, Homo sapiens
aaatcaaacataggg

SEQ ID NO: 1374138 - DNA, 15 bp, Homo sapiens
caaatcaaacatagg

SEQ ID NO: 1374139 - DNA, 15 bp, Homo sapiens
gcaaatcaaacatag

SEQ ID NO: 1374140 - DNA, 15 bp, Homo sapiens
agcaaatcaaacata

SEQ ID NO: 1374141 - DNA, 15 bp, Homo sapiens
tagcaaatcaaacat

SEQ ID NO: 1374142 - DNA, 15 bp, Homo sapiens
atagcaaatcaaaca

SEQ ID NO: 1374143 - DNA, 15 bp, Homo sapiens
catagcaaatcaaac

SEQ ID NO: 1374144 - DNA, 15 bp, Homo sapiens
acatagcaaatcaaa

SEQ ID NO: 1374145 - DNA, 15 bp, Homo sapiens
tacatagcaaatcaa

SEQ ID NO: 1374146 - DNA, 15 bp, Homo sapiens
ttacatagcaaatca

SEQ ID NO: 1374147 - DNA, 15 bp, Homo sapiens
tttacatagcaaatc

SEQ ID NO: 1374148 - DNA, 15 bp, Homo sapiens
atttacatagcaaat

SEQ ID NO: 1374149 - DNA, 15 bp, Homo sapiens
gatttacatagcaaa

SEQ ID NO: 1374150 - DNA, 15 bp, Homo sapiens
tgatttacatagcaa

SEQ ID NO: 1374151 - DNA, 15 bp, Homo sapiens
gtgatttacatagca

SEQ ID NO: 1374152 - DNA, 15 bp, Homo sapiens
tgtgatttacatagc

SEQ ID NO: 1374153 - DNA, 15 bp, Homo sapiens
gtgtgatttacatag

SEQ ID NO: 1374154 - DNA, 15 bp, Homo sapiens
agtgtgatttacata

SEQ ID NO: 1374155 - DNA, 15 bp, Homo sapiens
gagtgtgatttacat

SEQ ID NO: 1374156 - DNA, 15 bp, Homo sapiens
ggagtgtgatttaca

SEQ ID NO: 1374157 - DNA, 15 bp, Homo sapiens
gggagtgtgatttac

SEQ ID NO: 1374158 - DNA, 15 bp, Homo sapiens
tgggagtgtgattta

SEQ ID NO: 1374159 - DNA, 15 bp, Homo sapiens
ttgggagtgtgattt

SEQ ID NO: 1374160 - DNA, 15 bp, Homo sapiens
tttgggagtgtgatt

SEQ ID NO: 1374161 - DNA, 15 bp, Homo sapiens
gtttgggagtgtgat

SEQ ID NO: 1374162 - DNA, 15 bp, Homo sapiens
tgtttgggagtgtga

SEQ ID NO: 1374163 - DNA, 15 bp, Homo sapiens
ttgtttgggagtgtg

SEQ ID NO: 1374164 - DNA, 15 bp, Homo sapiens
tttgtttgggagtgt

SEQ ID NO: 1374165 - DNA, 15 bp, Homo sapiens
gtttgtttgggagtg

SEQ ID NO: 1374166 - DNA, 15 bp, Homo sapiens
tgtttgtttgggagt

SEQ ID NO: 1374167 - DNA, 15 bp, Homo sapiens
atgtttgtttgggag

SEQ ID NO: 1374168 - DNA, 15 bp, Homo sapiens
aatgtttgtttggga

SEQ ID NO: 1374169 - DNA, 15 bp, Homo sapiens
aaatgtttgtttggg

SEQ ID NO: 1374170 - DNA, 15 bp, Homo sapiens
aaaatgtttgtttgg

SEQ ID NO: 1374171 - DNA, 15 bp, Homo sapiens
gaaaatgtttgtttg

SEQ ID NO: 1374172 - DNA, 15 bp, Homo sapiens
agaaaatgtttgttt

SEQ ID NO: 1374173 - DNA, 15 bp, Homo sapiens
cagaaaatgtttgtt

SEQ ID NO: 1374174 - DNA, 15 bp, Homo sapiens
tcagaaaatgtttgt

SEQ ID NO: 1374175 - DNA, 15 bp, Homo sapiens
gtcagaaaatgtttg

SEQ ID NO: 1374176 - DNA, 15 bp, Homo sapiens
tgtcagaaaatgttt

SEQ ID NO: 1374177 - DNA, 15 bp, Homo sapiens
ctgtcagaaaatgtt

SEQ ID NO: 1374178 - DNA, 15 bp, Homo sapiens
actgtcagaaaatgt

SEQ ID NO: 1374179 - DNA, 15 bp, Homo sapiens
aactgtcagaaaatg

SEQ ID NO: 1374180 - DNA, 15 bp, Homo sapiens
gaactgtcagaaaat

SEQ ID NO: 1374181 - DNA, 15 bp, Homo sapiens
tgaactgtcagaaaa

SEQ ID NO: 1374182 - DNA, 15 bp, Homo sapiens
ttgaactgtcagaaa

SEQ ID NO: 1374183 - DNA, 15 bp, Homo sapiens
tttgaactgtcagaa

SEQ ID NO: 1374184 - DNA, 15 bp, Homo sapiens
gtttgaactgtcaga

SEQ ID NO: 1374185 - DNA, 15 bp, Homo sapiens
agtttgaactgtcag

SEQ ID NO: 1374186 - DNA, 15 bp, Homo sapiens
gagtttgaactgtca

SEQ ID NO: 1374187 - DNA, 15 bp, Homo sapiens
tgagtttgaactgtc

SEQ ID NO: 1374188 - DNA, 15 bp, Homo sapiens
atgagtttgaactgt

SEQ ID NO: 1374189 - DNA, 15 bp, Homo sapiens
gatgagtttgaactg

SEQ ID NO: 1374190 - DNA, 15 bp, Homo sapiens
cgatgagtttgaact

SEQ ID NO: 1374191 - DNA, 15 bp, Homo sapiens
acgatgagtttgaac

SEQ ID NO: 1374192 - DNA, 15 bp, Homo sapiens
cacgatgagtttgaa

SEQ ID NO: 1374193 - DNA, 15 bp, Homo sapiens
ccacgatgagtttga

SEQ ID NO: 1374194 - DNA, 15 bp, Homo sapiens
gccacgatgagtttg

SEQ ID NO: 1374195 - DNA, 15 bp, Homo sapiens
tgccacgatgagttt

SEQ ID NO: 1374196 - DNA, 15 bp, Homo sapiens
ctgccacgatgagtt

SEQ ID NO: 1374197 - DNA, 15 bp, Homo sapiens
gctgccacgatgagt

SEQ ID NO: 1374198 - DNA, 15 bp, Homo sapiens
agctgccacgatgag

SEQ ID NO: 1374199 - DNA, 15 bp, Homo sapiens
gagctgccacgatga

SEQ ID NO: 1374200 - DNA, 15 bp, Homo sapiens
ggagctgccacgatg

SEQ ID NO: 1374201 - DNA, 15 bp, Homo sapiens
gggagctgccacgat

SEQ ID NO: 1374202 - DNA, 15 bp, Homo sapiens
tgggagctgccacga

SEQ ID NO: 1374203 - DNA, 15 bp, Homo sapiens
ttgggagctgccacg

SEQ ID NO: 1374204 - DNA, 15 bp, Homo sapiens
cttgggagctgccac

SEQ ID NO: 1374205 - DNA, 15 bp, Homo sapiens
gcttgggagctgcca

SEQ ID NO: 1374206 - DNA, 15 bp, Homo sapiens
tgcttgggagctgcc

SEQ ID NO: 1374207 - DNA, 15 bp, Homo sapiens
ctgcttgggagctgc

SEQ ID NO: 1374208 - DNA, 15 bp, Homo sapiens
tctgcttgggagctg

SEQ ID NO: 1374209 - DNA, 15 bp, Homo sapiens
ctctgcttgggagct

SEQ ID NO: 1374210 - DNA, 15 bp, Homo sapiens
tctctgcttgggagc

SEQ ID NO: 1374211 - DNA, 15 bp, Homo sapiens
ctctctgcttgggag

SEQ ID NO: 1374212 - DNA, 15 bp, Homo sapiens
cctctctgcttggga

SEQ ID NO: 1374213 - DNA, 15 bp, Homo sapiens
acctctctgcttggg

SEQ ID NO: 1374214 - DNA, 15 bp, Homo sapiens
gacctctctgcttgg

SEQ ID NO: 1374215 - DNA, 15 bp, Homo sapiens
tgacctctctgcttg

SEQ ID NO: 1374216 - DNA, 15 bp, Homo sapiens
ttgacctctctgctt

SEQ ID NO: 1374217 - DNA, 15 bp, Homo sapiens
gttgacctctctgct

SEQ ID NO: 1374218 - DNA, 15 bp, Homo sapiens
agttgacctctctgc

SEQ ID NO: 1374219 - DNA, 15 bp, Homo sapiens
tagttgacctctctg

SEQ ID NO: 1374220 - DNA, 15 bp, Homo sapiens
ttagttgacctctct

SEQ ID NO: 1374221 - DNA, 15 bp, Homo sapiens
attagttgacctctc

SEQ ID NO: 1374222 - DNA, 15 bp, Homo sapiens
tattagttgacctct

SEQ ID NO: 1374223 - DNA, 15 bp, Homo sapiens
ttattagttgacctc

SEQ ID NO: 1374224 - DNA, 15 bp, Homo sapiens
cttattagttgacct

SEQ ID NO: 1374225 - DNA, 15 bp, Homo sapiens
tcttattagttgacc

SEQ ID NO: 1374226 - DNA, 15 bp, Homo sapiens
ctcttattagttgac

SEQ ID NO: 1374227 - DNA, 15 bp, Homo sapiens
tctcttattagttga

SEQ ID NO: 1374228 - DNA, 15 bp, Homo sapiens
atctcttattagttg

SEQ ID NO: 1374229 - DNA, 15 bp, Homo sapiens
tatctcttattagtt

SEQ ID NO: 1374230 - DNA, 15 bp, Homo sapiens
ctatctcttattagt

SEQ ID NO: 1374231 - DNA, 15 bp, Homo sapiens
actatctcttattag

SEQ ID NO: 1374232 - DNA, 15 bp, Homo sapiens
gactatctcttatta

SEQ ID NO: 1374233 - DNA, 15 bp, Homo sapiens
agactatctcttatt

SEQ ID NO: 1374234 - DNA, 15 bp, Homo sapiens
gagactatctcttat

SEQ ID NO: 1374235 - DNA, 15 bp, Homo sapiens
agagactatctctta

SEQ ID NO: 1374236 - DNA, 15 bp, Homo sapiens
aagagactatctctt

SEQ ID NO: 1374237 - DNA, 15 bp, Homo sapiens
gaagagactatctct

SEQ ID NO: 1374238 - DNA, 15 bp, Homo sapiens
ggaagagactatctc

SEQ ID NO: 1374239 - DNA, 15 bp, Homo sapiens
gggaagagactatct

SEQ ID NO: 1374240 - DNA, 15 bp, Homo sapiens
agggaagagactatc

SEQ ID NO: 1374241 - DNA, 15 bp, Homo sapiens
aagggaagagactat

SEQ ID NO: 1374242 - DNA, 15 bp, Homo sapiens
aaagggaagagacta

SEQ ID NO: 1374243 - DNA, 15 bp, Homo sapiens
aaaagggaagagact

SEQ ID NO: 1374244 - DNA, 15 bp, Homo sapiens
aaaaagggaagagac

SEQ ID NO: 1374245 - DNA, 15 bp, Homo sapiens
aaaaaagggaagaga

SEQ ID NO: 1374246 - DNA, 15 bp, Homo sapiens
taaaaaagggaagag

SEQ ID NO: 1374247 - DNA, 15 bp, Homo sapiens
ataaaaaagggaaga

SEQ ID NO: 1374248 - DNA, 15 bp, Homo sapiens
cataaaaaagggaag

SEQ ID NO: 1374249 - DNA, 15 bp, Homo sapiens
gcataaaaaagggaa

SEQ ID NO: 1374250 - DNA, 15 bp, Homo sapiens
agcataaaaaaggga

SEQ ID NO: 1374251 - DNA, 15 bp, Homo sapiens
tagcataaaaaaggg

SEQ ID NO: 1374252 - DNA, 15 bp, Homo sapiens
ctagcataaaaaagg

SEQ ID NO: 1374253 - DNA, 15 bp, Homo sapiens
gctagcataaaaaag

SEQ ID NO: 1374254 - DNA, 15 bp, Homo sapiens
agctagcataaaaaa

SEQ ID NO: 1374255 - DNA, 15 bp, Homo sapiens
cagctagcataaaaa

SEQ ID NO: 1374256 - DNA, 15 bp, Homo sapiens
acagctagcataaaa

SEQ ID NO: 1374257 - DNA, 15 bp, Homo sapiens
tacagctagcataaa

SEQ ID NO: 1374258 - DNA, 15 bp, Homo sapiens
ttacagctagcataa

SEQ ID NO: 1374259 - DNA, 15 bp, Homo sapiens
tttacagctagcata

SEQ ID NO: 1374260 - DNA, 15 bp, Homo sapiens
ttttacagctagcat

SEQ ID NO: 1374261 - DNA, 15 bp, Homo sapiens
attttacagctagca

SEQ ID NO: 1374262 - DNA, 15 bp, Homo sapiens
tattttacagctagc

SEQ ID NO: 1374263 - DNA, 15 bp, Homo sapiens
atattttacagctag

SEQ ID NO: 1374264 - DNA, 15 bp, Homo sapiens
aatattttacagcta

SEQ ID NO: 1374265 - DNA, 15 bp, Homo sapiens
gaatattttacagct

SEQ ID NO: 1374266 - DNA, 15 bp, Homo sapiens
agaatattttacagc

SEQ ID NO: 1374267 - DNA, 15 bp, Homo sapiens
cagaatattttacag

SEQ ID NO: 1374268 - DNA, 15 bp, Homo sapiens
ccagaatattttaca

SEQ ID NO: 1374269 - DNA, 15 bp, Homo sapiens
cccagaatattttac

SEQ ID NO: 1374270 - DNA, 15 bp, Homo sapiens
acccagaatatttta

SEQ ID NO: 1374271 - DNA, 15 bp, Homo sapiens
tacccagaatatttt

SEQ ID NO: 1374272 - DNA, 15 bp, Homo sapiens
atacccagaatattt

SEQ ID NO: 1374273 - DNA, 15 bp, Homo sapiens
gatacccagaatatt

SEQ ID NO: 1374274 - DNA, 15 bp, Homo sapiens
tgatacccagaatat

SEQ ID NO: 1374275 - DNA, 15 bp, Homo sapiens
gtgatacccagaata

SEQ ID NO: 1374276 - DNA, 15 bp, Homo sapiens
ggtgatacccagaat

SEQ ID NO: 1374277 - DNA, 15 bp, Homo sapiens
gggtgatacccagaa

SEQ ID NO: 1374278 - DNA, 15 bp, Homo sapiens
ggggtgatacccaga

SEQ ID NO: 1374279 - DNA, 15 bp, Homo sapiens
aggggtgatacccag

SEQ ID NO: 1374280 - DNA, 15 bp, Homo sapiens
caggggtgataccca

SEQ ID NO: 1374281 - DNA, 15 bp, Homo sapiens
gcaggggtgataccc

SEQ ID NO: 1374282 - DNA, 15 bp, Homo sapiens
tgcaggggtgatacc

SEQ ID NO: 1374283 - DNA, 15 bp, Homo sapiens
atgcaggggtgatac

SEQ ID NO: 1374284 - DNA, 15 bp, Homo sapiens
tatgcaggggtgata

SEQ ID NO: 1374285 - DNA, 15 bp, Homo sapiens
gtatgcaggggtgat

SEQ ID NO: 1374286 - DNA, 15 bp, Homo sapiens
tgtatgcaggggtga

SEQ ID NO: 1374287 - DNA, 15 bp, Homo sapiens
atgtatgcaggggtg

SEQ ID NO: 1374288 - DNA, 15 bp, Homo sapiens
aatgtatgcaggggt

SEQ ID NO: 1374289 - DNA, 15 bp, Homo sapiens
gaatgtatgcagggg

SEQ ID NO: 1374290 - DNA, 15 bp, Homo sapiens
ggaatgtatgcaggg

SEQ ID NO: 1374291 - DNA, 15 bp, Homo sapiens
tggaatgtatgcagg

SEQ ID NO: 1374292 - DNA, 15 bp, Homo sapiens
ttggaatgtatgcag

SEQ ID NO: 1374293 - DNA, 15 bp, Homo sapiens
tttggaatgtatgca

SEQ ID NO: 1374294 - DNA, 15 bp, Homo sapiens
gtttggaatgtatgc

SEQ ID NO: 1374295 - DNA, 15 bp, Homo sapiens
ggtttggaatgtatg

SEQ ID NO: 1374296 - DNA, 15 bp, Homo sapiens
aggtttggaatgtat

SEQ ID NO: 1374297 - DNA, 15 bp, Homo sapiens
taggtttggaatgta

SEQ ID NO: 1374298 - DNA, 15 bp, Homo sapiens
ctaggtttggaatgt

SEQ ID NO: 1374299 - DNA, 15 bp, Homo sapiens
tctaggtttggaatg

SEQ ID NO: 1374300 - DNA, 15 bp, Homo sapiens
ttctaggtttggaat

SEQ ID NO: 1374301 - DNA, 15 bp, Homo sapiens
cttctaggtttggaa

SEQ ID NO: 1374302 - DNA, 15 bp, Homo sapiens
gcttctaggtttgga

SEQ ID NO: 1374303 - DNA, 15 bp, Homo sapiens
tgcttctaggtttgg

SEQ ID NO: 1374304 - DNA, 15 bp, Homo sapiens
atgcttctaggtttg

SEQ ID NO: 1374305 - DNA, 15 bp, Homo sapiens
tatgcttctaggttt

SEQ ID NO: 1374306 - DNA, 15 bp, Homo sapiens
gtatgcttctaggtt

SEQ ID NO: 1374307 - DNA, 15 bp, Homo sapiens
agtatgcttctaggt

SEQ ID NO: 1374308 - DNA, 15 bp, Homo sapiens
tagtatgcttctagg

SEQ ID NO: 1374309 - DNA, 15 bp, Homo sapiens
atagtatgcttctag

SEQ ID NO: 1374310 - DNA, 15 bp, Homo sapiens
catagtatgcttcta

SEQ ID NO: 1374311 - DNA, 15 bp, Homo sapiens
acatagtatgcttct

SEQ ID NO: 1374312 - DNA, 15 bp, Homo sapiens
cacatagtatgcttc

SEQ ID NO: 1374313 - DNA, 15 bp, Homo sapiens
acacatagtatgctt

SEQ ID NO: 1374314 - DNA, 15 bp, Homo sapiens
aacacatagtatgct

SEQ ID NO: 1374315 - DNA, 15 bp, Homo sapiens
aaacacatagtatgc

SEQ ID NO: 1374316 - DNA, 15 bp, Homo sapiens
gaaacacatagtatg

SEQ ID NO: 1374317 - DNA, 15 bp, Homo sapiens
tgaaacacatagtat

SEQ ID NO: 1374318 - DNA, 15 bp, Homo sapiens
ttgaaacacatagta

SEQ ID NO: 1374319 - DNA, 15 bp, Homo sapiens
tttgaaacacatagt

SEQ ID NO: 1374320 - DNA, 15 bp, Homo sapiens
atttgaaacacatag

SEQ ID NO: 1374321 - DNA, 15 bp, Homo sapiens
aatttgaaacacata

SEQ ID NO: 1374322 - DNA, 15 bp, Homo sapiens
aaatttgaaacacat

SEQ ID NO: 1374323 - DNA, 15 bp, Homo sapiens
taaatttgaaacaca

SEQ ID NO: 1374324 - DNA, 15 bp, Homo sapiens
ataaatttgaaacac

SEQ ID NO: 1374325 - DNA, 15 bp, Homo sapiens
gataaatttgaaaca

SEQ ID NO: 1374326 - DNA, 15 bp, Homo sapiens
agataaatttgaaac

SEQ ID NO: 1374327 - DNA, 15 bp, Homo sapiens
tagataaatttgaaa

SEQ ID NO: 1374328 - DNA, 15 bp, Homo sapiens
ctagataaatttgaa

SEQ ID NO: 1374329 - DNA, 15 bp, Homo sapiens
tctagataaatttga

SEQ ID NO: 1374330 - DNA, 15 bp, Homo sapiens
gtctagataaatttg

SEQ ID NO: 1374331 - DNA, 15 bp, Homo sapiens
agtctagataaattt

SEQ ID NO: 1374332 - DNA, 15 bp, Homo sapiens
aagtctagataaatt

SEQ ID NO: 1374333 - DNA, 15 bp, Homo sapiens
taagtctagataaat

SEQ ID NO: 1374334 - DNA, 15 bp, Homo sapiens
ctaagtctagataaa

SEQ ID NO: 1374335 - DNA, 15 bp, Homo sapiens
tctaagtctagataa

SEQ ID NO: 1374336 - DNA, 15 bp, Homo sapiens
atctaagtctagata

SEQ ID NO: 1374337 - DNA, 15 bp, Homo sapiens
tatctaagtctagat

SEQ ID NO: 1374338 - DNA, 15 bp, Homo sapiens
atatctaagtctaga

SEQ ID NO: 1374339 - DNA, 15 bp, Homo sapiens
gatatctaagtctag

SEQ ID NO: 1374340 - DNA, 15 bp, Homo sapiens
agatatctaagtcta

SEQ ID NO: 1374341 - DNA, 15 bp, Homo sapiens
cagatatctaagtct

SEQ ID NO: 1374342 - DNA, 15 bp, Homo sapiens
acagatatctaagtc

SEQ ID NO: 1374343 - DNA, 15 bp, Homo sapiens
gacagatatctaagt

SEQ ID NO: 1374344 - DNA, 15 bp, Homo sapiens
agacagatatctaag

SEQ ID NO: 1374345 - DNA, 15 bp, Homo sapiens
tagacagatatctaa

SEQ ID NO: 1374346 - DNA, 15 bp, Homo sapiens
ctagacagatatcta

SEQ ID NO: 1374347 - DNA, 15 bp, Homo sapiens
tctagacagatatct

SEQ ID NO: 1374348 - DNA, 15 bp, Homo sapiens
atctagacagatatc

SEQ ID NO: 1374349 - DNA, 15 bp, Homo sapiens
tatctagacagatat

SEQ ID NO: 1374350 - DNA, 15 bp, Homo sapiens
atatctagacagata

SEQ ID NO: 1374351 - DNA, 15 bp, Homo sapiens
catatctagacagat

SEQ ID NO: 1374352 - DNA, 15 bp, Homo sapiens
ccatatctagacaga

SEQ ID NO: 1374353 - DNA, 15 bp, Homo sapiens
accatatctagacag

SEQ ID NO: 1374354 - DNA, 15 bp, Homo sapiens
taccatatctagaca

SEQ ID NO: 1374355 - DNA, 15 bp, Homo sapiens
ctaccatatctagac

SEQ ID NO: 1374356 - DNA, 15 bp, Homo sapiens
actaccatatctaga

SEQ ID NO: 1374357 - DNA, 15 bp, Homo sapiens
gactaccatatctag

SEQ ID NO: 1374358 - DNA, 15 bp, Homo sapiens
tgactaccatatcta

SEQ ID NO: 1374359 - DNA, 15 bp, Homo sapiens
atgactaccatatct

SEQ ID NO: 1374360 - DNA, 15 bp, Homo sapiens
aatgactaccatatc

SEQ ID NO: 1374361 - DNA, 15 bp, Homo sapiens
taatgactaccatat

SEQ ID NO: 1374362 - DNA, 15 bp, Homo sapiens
ctaatgactaccata

SEQ ID NO: 1374363 - DNA, 15 bp, Homo sapiens
gctaatgactaccat

SEQ ID NO: 1374364 - DNA, 15 bp, Homo sapiens
ggctaatgactacca

SEQ ID NO: 1374365 - DNA, 15 bp, Homo sapiens
tggctaatgactacc

SEQ ID NO: 1374366 - DNA, 15 bp, Homo sapiens
ttggctaatgactac

SEQ ID NO: 1374367 - DNA, 15 bp, Homo sapiens
tttggctaatgacta

SEQ ID NO: 1374368 - DNA, 15 bp, Homo sapiens
gtttggctaatgact

SEQ ID NO: 1374369 - DNA, 15 bp, Homo sapiens
tgtttggctaatgac

SEQ ID NO: 1374370 - DNA, 15 bp, Homo sapiens
ttgtttggctaatga

SEQ ID NO: 1374371 - DNA, 15 bp, Homo sapiens
cttgtttggctaatg

SEQ ID NO: 1374372 - DNA, 15 bp, Homo sapiens
ccttgtttggctaat

SEQ ID NO: 1374373 - DNA, 15 bp, Homo sapiens
gccttgtttggctaa

SEQ ID NO: 1374374 - DNA, 15 bp, Homo sapiens
agccttgtttggcta

SEQ ID NO: 1374375 - DNA, 15 bp, Homo sapiens
tagccttgtttggct

SEQ ID NO: 1374376 - DNA, 15 bp, Homo sapiens
ttagccttgtttggc

SEQ ID NO: 1374377 - DNA, 15 bp, Homo sapiens
tttagccttgtttgg

SEQ ID NO: 1374378 - DNA, 15 bp, Homo sapiens
atttagccttgtttg

SEQ ID NO: 1374379 - DNA, 15 bp, Homo sapiens
aatttagccttgttt

SEQ ID NO: 1374380 - DNA, 15 bp, Homo sapiens
taatttagccttgtt

SEQ ID NO: 1374381 - DNA, 15 bp, Homo sapiens
ttaatttagccttgt

SEQ ID NO: 1374382 - DNA, 15 bp, Homo sapiens
attaatttagccttg

SEQ ID NO: 1374383 - DNA, 15 bp, Homo sapiens
aattaatttagcctt

SEQ ID NO: 1374384 - DNA, 15 bp, Homo sapiens
taattaatttagcct

SEQ ID NO: 1374385 - DNA, 15 bp, Homo sapiens
ttaattaatttagcc

SEQ ID NO: 1374386 - DNA, 15 bp, Homo sapiens
tttaattaatttagc

SEQ ID NO: 1374387 - DNA, 15 bp, Homo sapiens
atttaattaatttag

SEQ ID NO: 1374388 - DNA, 15 bp, Homo sapiens
gatttaattaattta

SEQ ID NO: 1374389 - DNA, 15 bp, Homo sapiens
ggatttaattaattt

SEQ ID NO: 1374390 - DNA, 15 bp, Homo sapiens
tggatttaattaatt

SEQ ID NO: 1374391 - DNA, 15 bp, Homo sapiens
ttggatttaattaat

SEQ ID NO: 1374392 - DNA, 15 bp, Homo sapiens
gttggatttaattaa

SEQ ID NO: 1374393 - DNA, 15 bp, Homo sapiens
tgttggatttaatta

SEQ ID NO: 1374394 - DNA, 15 bp, Homo sapiens
ttgttggatttaatt

SEQ ID NO: 1374395 - DNA, 15 bp, Homo sapiens
tttgttggatttaat

SEQ ID NO: 1374396 - DNA, 15 bp, Homo sapiens
ttttgttggatttaa

SEQ ID NO: 1374397 - DNA, 15 bp, Homo sapiens
attttgttggattta

SEQ ID NO: 1374398 - DNA, 15 bp, Homo sapiens
aattttgttggattt

SEQ ID NO: 1374399 - DNA, 15 bp, Homo sapiens
taattttgttggatt

SEQ ID NO: 1374400 - DNA, 15 bp, Homo sapiens
ttaattttgttggat

SEQ ID NO: 1374401 - DNA, 15 bp, Homo sapiens
cttaattttgttgga

SEQ ID NO: 1374402 - DNA, 15 bp, Homo sapiens
tcttaattttgttgg

SEQ ID NO: 1374403 - DNA, 15 bp, Homo sapiens
ttcttaattttgttg

SEQ ID NO: 1374404 - DNA, 15 bp, Homo sapiens
attcttaattttgtt

SEQ ID NO: 1374405 - DNA, 15 bp, Homo sapiens
aattcttaattttgt

SEQ ID NO: 1374406 - DNA, 15 bp, Homo sapiens
gaattcttaattttg

SEQ ID NO: 1374407 - DNA, 15 bp, Homo sapiens
ggaattcttaatttt

SEQ ID NO: 1374408 - DNA, 15 bp, Homo sapiens
tggaattcttaattt

SEQ ID NO: 1374409 - DNA, 15 bp, Homo sapiens
atggaattcttaatt

SEQ ID NO: 1374410 - DNA, 15 bp, Homo sapiens
tatggaattcttaat

SEQ ID NO: 1374411 - DNA, 15 bp, Homo sapiens
atatggaattcttaa

SEQ ID NO: 1374412 - DNA, 15 bp, Homo sapiens
aatatggaattctta

SEQ ID NO: 1374413 - DNA, 15 bp, Homo sapiens
gaatatggaattctt

SEQ ID NO: 1374414 - DNA, 15 bp, Homo sapiens
ggaatatggaattct

SEQ ID NO: 1374415 - DNA, 15 bp, Homo sapiens
aggaatatggaattc

SEQ ID NO: 1374416 - DNA, 15 bp, Homo sapiens
caggaatatggaatt

SEQ ID NO: 1374417 - DNA, 15 bp, Homo sapiens
acaggaatatggaat

SEQ ID NO: 1374418 - DNA, 15 bp, Homo sapiens
gacaggaatatggaa

SEQ ID NO: 1374419 - DNA, 15 bp, Homo sapiens
agacaggaatatgga

SEQ ID NO: 1374420 - DNA, 15 bp, Homo sapiens
gagacaggaatatgg

SEQ ID NO: 1374421 - DNA, 15 bp, Homo sapiens
tgagacaggaatatg

SEQ ID NO: 1374422 - DNA, 15 bp, Homo sapiens
gtgagacaggaatat

SEQ ID NO: 1374423 - DNA, 15 bp, Homo sapiens
agtgagacaggaata

SEQ ID NO: 1374424 - DNA, 15 bp, Homo sapiens
tagtgagacaggaat

SEQ ID NO: 1374425 - DNA, 15 bp, Homo sapiens
ctagtgagacaggaa

SEQ ID NO: 1374426 - DNA, 15 bp, Homo sapiens
gctagtgagacagga

SEQ ID NO: 1374427 - DNA, 15 bp, Homo sapiens
ggctagtgagacagg

SEQ ID NO: 1374428 - DNA, 15 bp, Homo sapiens
tggctagtgagacag

SEQ ID NO: 1374429 - DNA, 15 bp, Homo sapiens
atggctagtgagaca

SEQ ID NO: 1374430 - DNA, 15 bp, Homo sapiens
tatggctagtgagac

SEQ ID NO: 1374431 - DNA, 15 bp, Homo sapiens
atatggctagtgaga

SEQ ID NO: 1374432 - DNA, 15 bp, Homo sapiens
aatatggctagtgag

SEQ ID NO: 1374433 - DNA, 15 bp, Homo sapiens
aaatatggctagtga

SEQ ID NO: 1374434 - DNA, 15 bp, Homo sapiens
gaaatatggctagtg

SEQ ID NO: 1374435 - DNA, 15 bp, Homo sapiens
tgaaatatggctagt

SEQ ID NO: 1374436 - DNA, 15 bp, Homo sapiens
ttgaaatatggctag

SEQ ID NO: 1374437 - DNA, 15 bp, Homo sapiens
cttgaaatatggcta

SEQ ID NO: 1374438 - DNA, 15 bp, Homo sapiens
acttgaaatatggct

SEQ ID NO: 1374439 - DNA, 15 bp, Homo sapiens
cacttgaaatatggc

SEQ ID NO: 1374440 - DNA, 15 bp, Homo sapiens
acacttgaaatatgg

SEQ ID NO: 1374441 - DNA, 15 bp, Homo sapiens
aacacttgaaatatg

SEQ ID NO: 1374442 - DNA, 15 bp, Homo sapiens
gaacacttgaaatat

SEQ ID NO: 1374443 - DNA, 15 bp, Homo sapiens
ggaacacttgaaata

SEQ ID NO: 1374444 - DNA, 15 bp, Homo sapiens
tggaacacttgaaat

SEQ ID NO: 1374445 - DNA, 15 bp, Homo sapiens
atggaacacttgaaa

SEQ ID NO: 1374446 - DNA, 15 bp, Homo sapiens
aatggaacacttgaa

SEQ ID NO: 1374447 - DNA, 15 bp, Homo sapiens
caatggaacacttga

SEQ ID NO: 1374448 - DNA, 15 bp, Homo sapiens
acaatggaacacttg

SEQ ID NO: 1374449 - DNA, 15 bp, Homo sapiens
gacaatggaacactt

SEQ ID NO: 1374450 - DNA, 15 bp, Homo sapiens
tgacaatggaacact

SEQ ID NO: 1374451 - DNA, 15 bp, Homo sapiens
atgacaatggaacac

SEQ ID NO: 1374452 - DNA, 15 bp, Homo sapiens
tatgacaatggaaca

SEQ ID NO: 1374453 - DNA, 15 bp, Homo sapiens
atatgacaatggaac

SEQ ID NO: 1374454 - DNA, 15 bp, Homo sapiens
catatgacaatggaa

SEQ ID NO: 1374455 - DNA, 15 bp, Homo sapiens
ccatatgacaatgga

SEQ ID NO: 1374456 - DNA, 15 bp, Homo sapiens
cccatatgacaatgg

SEQ ID NO: 1374457 - DNA, 15 bp, Homo sapiens
ccccatatgacaatg

SEQ ID NO: 1374458 - DNA, 15 bp, Homo sapiens
gccccatatgacaat

SEQ ID NO: 1374459 - DNA, 15 bp, Homo sapiens
agccccatatgacaa

SEQ ID NO: 1374460 - DNA, 15 bp, Homo sapiens
tagccccatatgaca

SEQ ID NO: 1374461 - DNA, 15 bp, Homo sapiens
ctagccccatatgac

SEQ ID NO: 1374462 - DNA, 15 bp, Homo sapiens
actagccccatatga

SEQ ID NO: 1374463 - DNA, 15 bp, Homo sapiens
cactagccccatatg

SEQ ID NO: 1374464 - DNA, 15 bp, Homo sapiens
ccactagccccatat

SEQ ID NO: 1374465 - DNA, 15 bp, Homo sapiens
gccactagccccata

SEQ ID NO: 1374466 - DNA, 15 bp, Homo sapiens
agccactagccccat

SEQ ID NO: 1374467 - DNA, 15 bp, Homo sapiens
tagccactagcccca

SEQ ID NO: 1374468 - DNA, 15 bp, Homo sapiens
atagccactagcccc

SEQ ID NO: 1374469 - DNA, 15 bp, Homo sapiens
aatagccactagccc

SEQ ID NO: 1374470 - DNA, 15 bp, Homo sapiens
caatagccactagcc

SEQ ID NO: 1374471 - DNA, 15 bp, Homo sapiens
acaatagccactagc

SEQ ID NO: 1374472 - DNA, 15 bp, Homo sapiens
tacaatagccactag

SEQ ID NO: 1374473 - DNA, 15 bp, Homo sapiens
atacaatagccacta

SEQ ID NO: 1374474 - DNA, 15 bp, Homo sapiens
aatacaatagccact

SEQ ID NO: 1374475 - DNA, 15 bp, Homo sapiens
aaatacaatagccac

SEQ ID NO: 1374476 - DNA, 15 bp, Homo sapiens
taaatacaatagcca

SEQ ID NO: 1374477 - DNA, 15 bp, Homo sapiens
ataaatacaatagcc

SEQ ID NO: 1374478 - DNA, 15 bp, Homo sapiens
aataaatacaatagc

SEQ ID NO: 1374479 - DNA, 15 bp, Homo sapiens
caataaatacaatag

SEQ ID NO: 1374480 - DNA, 15 bp, Homo sapiens
ccaataaatacaata

SEQ ID NO: 1374481 - DNA, 15 bp, Homo sapiens
gccaataaatacaat

SEQ ID NO: 1374482 - DNA, 15 bp, Homo sapiens
tgccaataaatacaa

SEQ ID NO: 1374483 - DNA, 15 bp, Homo sapiens
gtgccaataaataca

SEQ ID NO: 1374484 - DNA, 15 bp, Homo sapiens
tgtgccaataaatac

SEQ ID NO: 1374485 - DNA, 15 bp, Homo sapiens
atgtgccaataaata

SEQ ID NO: 1374486 - DNA, 15 bp, Homo sapiens
catgtgccaataaat

SEQ ID NO: 1374487 - DNA, 15 bp, Homo sapiens
ccatgtgccaataaa

SEQ ID NO: 1374488 - DNA, 15 bp, Homo sapiens
accatgtgccaataa

SEQ ID NO: 1374489 - DNA, 15 bp, Homo sapiens
aaccatgtgccaata

SEQ ID NO: 1374490 - DNA, 15 bp, Homo sapiens
taaccatgtgccaat

SEQ ID NO: 1374491 - DNA, 15 bp, Homo sapiens
ataaccatgtgccaa

SEQ ID NO: 1374492 - DNA, 15 bp, Homo sapiens
tataaccatgtgcca

SEQ ID NO: 1374493 - DNA, 15 bp, Homo sapiens
ctataaccatgtgcc

SEQ ID NO: 1374494 - DNA, 15 bp, Homo sapiens
tctataaccatgtgc

SEQ ID NO: 1374495 - DNA, 15 bp, Homo sapiens
ttctataaccatgtg

SEQ ID NO: 1374496 - DNA, 15 bp, Homo sapiens
attctataaccatgt

SEQ ID NO: 1374497 - DNA, 15 bp, Homo sapiens
tattctataaccatg

SEQ ID NO: 1374498 - DNA, 15 bp, Homo sapiens
atattctataaccat

SEQ ID NO: 1374499 - DNA, 15 bp, Homo sapiens
aatattctataacca

SEQ ID NO: 1374500 - DNA, 15 bp, Homo sapiens
aaatattctataacc

SEQ ID NO: 1374501 - DNA, 15 bp, Homo sapiens
gaaatattctataac

SEQ ID NO: 1374502 - DNA, 15 bp, Homo sapiens
agaaatattctataa

SEQ ID NO: 1374503 - DNA, 15 bp, Homo sapiens
tagaaatattctata

SEQ ID NO: 1374504 - DNA, 15 bp, Homo sapiens
atagaaatattctat

SEQ ID NO: 1374505 - DNA, 15 bp, Homo sapiens
gatagaaatattcta

SEQ ID NO: 1374506 - DNA, 15 bp, Homo sapiens
tgatagaaatattct

SEQ ID NO: 1374507 - DNA, 15 bp, Homo sapiens
atgatagaaatattc

SEQ ID NO: 1374508 - DNA, 15 bp, Homo sapiens
aatgatagaaatatt

SEQ ID NO: 1374509 - DNA, 15 bp, Homo sapiens
caatgatagaaatat

SEQ ID NO: 1374510 - DNA, 15 bp, Homo sapiens
gcaatgatagaaata

SEQ ID NO: 1374511 - DNA, 15 bp, Homo sapiens
tgcaatgatagaaat

SEQ ID NO: 1374512 - DNA, 15 bp, Homo sapiens
ttgcaatgatagaaa

SEQ ID NO: 1374513 - DNA, 15 bp, Homo sapiens
tttgcaatgatagaa

SEQ ID NO: 1374514 - DNA, 15 bp, Homo sapiens
ttttgcaatgataga

SEQ ID NO: 1374515 - DNA, 15 bp, Homo sapiens
tttttgcaatgatag

SEQ ID NO: 1374516 - DNA, 15 bp, Homo sapiens
ttttttgcaatgata

SEQ ID NO: 1374517 - DNA, 15 bp, Homo sapiens
tttttttgcaatgat

SEQ ID NO: 1374518 - DNA, 15 bp, Homo sapiens
ttttttttgcaatga

SEQ ID NO: 1374519 - DNA, 15 bp, Homo sapiens
tttttttttgcaatg

SEQ ID NO: 1374520 - DNA, 15 bp, Homo sapiens
atttttttttgcaat

SEQ ID NO: 1374521 - DNA, 15 bp, Homo sapiens
aatttttttttgcaa

SEQ ID NO: 1374522 - DNA, 15 bp, Homo sapiens
aaatttttttttgca

SEQ ID NO: 1374523 - DNA, 15 bp, Homo sapiens
aaaatttttttttgc

SEQ ID NO: 1374524 - DNA, 15 bp, Homo sapiens
gaagaaaattttttt

SEQ ID NO: 1374525 - DNA, 15 bp, Homo sapiens
tgaagaaaatttttt

SEQ ID NO: 1374526 - DNA, 15 bp, Homo sapiens
atgaagaaaattttt

SEQ ID NO: 1374527 - DNA, 15 bp, Homo sapiens
gatgaagaaaatttt

SEQ ID NO: 1374528 - DNA, 15 bp, Homo sapiens
tgatgaagaaaattt

SEQ ID NO: 1374529 - DNA, 15 bp, Homo sapiens
actgatgaagaaaat

SEQ ID NO: 1374530 - DNA, 15 bp, Homo sapiens
cactgatgaagaaaa

SEQ ID NO: 1374531 - DNA, 15 bp, Homo sapiens
gcactgatgaagaaa

SEQ ID NO: 1374532 - DNA, 15 bp, Homo sapiens
agcactgatgaagaa

SEQ ID NO: 1374533 - DNA, 15 bp, Homo sapiens
aagcactgatgaaga

SEQ ID NO: 1374534 - DNA, 15 bp, Homo sapiens
gaagcactgatgaag

SEQ ID NO: 1374535 - DNA, 15 bp, Homo sapiens
agaagcactgatgaa

SEQ ID NO: 1374536 - DNA, 15 bp, Homo sapiens
gagaagcactgatga

SEQ ID NO: 1374537 - DNA, 15 bp, Homo sapiens
agagaagcactgatg

SEQ ID NO: 1374538 - DNA, 15 bp, Homo sapiens
tagagaagcactgat

SEQ ID NO: 1374539 - DNA, 15 bp, Homo sapiens
ctagagaagcactga

SEQ ID NO: 1374540 - DNA, 15 bp, Homo sapiens
tctagagaagcactg

SEQ ID NO: 1374541 - DNA, 15 bp, Homo sapiens
gtctagagaagcact

SEQ ID NO: 1374542 - DNA, 15 bp, Homo sapiens
tgtctagagaagcac

SEQ ID NO: 1374543 - DNA, 15 bp, Homo sapiens
ttgtctagagaagca

SEQ ID NO: 1374544 - DNA, 15 bp, Homo sapiens
cttgtctagagaagc

SEQ ID NO: 1374545 - DNA, 15 bp, Homo sapiens
acttgtctagagaag

SEQ ID NO: 1374546 - DNA, 15 bp, Homo sapiens
tacttgtctagagaa

SEQ ID NO: 1374547 - DNA, 15 bp, Homo sapiens
atacttgtctagaga

SEQ ID NO: 1374548 - DNA, 15 bp, Homo sapiens
gatacttgtctagag

SEQ ID NO: 1374549 - DNA, 15 bp, Homo sapiens
agatacttgtctaga

SEQ ID NO: 1374550 - DNA, 15 bp, Homo sapiens
aagatacttgtctag

SEQ ID NO: 1374551 - DNA, 15 bp, Homo sapiens
gaagatacttgtcta

SEQ ID NO: 1374552 - DNA, 15 bp, Homo sapiens
ggaagatacttgtct

SEQ ID NO: 1374553 - DNA, 15 bp, Homo sapiens
gggaagatacttgtc

SEQ ID NO: 1374554 - DNA, 15 bp, Homo sapiens
agggaagatacttgt

SEQ ID NO: 1374555 - DNA, 15 bp, Homo sapiens
aagggaagatacttg

SEQ ID NO: 1374556 - DNA, 15 bp, Homo sapiens
gaagggaagatactt

SEQ ID NO: 1374557 - DNA, 15 bp, Homo sapiens
tgaagggaagatact

SEQ ID NO: 1374558 - DNA, 15 bp, Homo sapiens
gtgaagggaagatac

SEQ ID NO: 1374559 - DNA, 15 bp, Homo sapiens
tgtgaagggaagata

SEQ ID NO: 1374560 - DNA, 15 bp, Homo sapiens
ttgtgaagggaagat

SEQ ID NO: 1374561 - DNA, 15 bp, Homo sapiens
tttgtgaagggaaga

SEQ ID NO: 1374562 - DNA, 15 bp, Homo sapiens
ctttgtgaagggaag

SEQ ID NO: 1374563 - DNA, 15 bp, Homo sapiens
tctttgtgaagggaa

SEQ ID NO: 1374564 - DNA, 15 bp, Homo sapiens
atctttgtgaaggga

SEQ ID NO: 1374565 - DNA, 15 bp, Homo sapiens
catctttgtgaaggg

SEQ ID NO: 1374566 - DNA, 15 bp, Homo sapiens
ccatctttgtgaagg

SEQ ID NO: 1374567 - DNA, 15 bp, Homo sapiens
tccatctttgtgaag

SEQ ID NO: 1374568 - DNA, 15 bp, Homo sapiens
ttccatctttgtgaa

SEQ ID NO: 1374569 - DNA, 15 bp, Homo sapiens
tttccatctttgtga

SEQ ID NO: 1374570 - DNA, 15 bp, Homo sapiens
atttccatctttgtg

SEQ ID NO: 1374571 - DNA, 15 bp, Homo sapiens
gatttccatctttgt

SEQ ID NO: 1374572 - DNA, 15 bp, Homo sapiens
agatttccatctttg

SEQ ID NO: 1374573 - DNA, 15 bp, Homo sapiens
cagatttccatcttt

SEQ ID NO: 1374574 - DNA, 15 bp, Homo sapiens
acagatttccatctt

SEQ ID NO: 1374575 - DNA, 15 bp, Homo sapiens
aacagatttccatct

SEQ ID NO: 1374576 - DNA, 15 bp, Homo sapiens
aaacagatttccatc

SEQ ID NO: 1374577 - DNA, 15 bp, Homo sapiens
aaaacagatttccat

SEQ ID NO: 1374578 - DNA, 15 bp, Homo sapiens
aaaaacagatttcca

SEQ ID NO: 1374579 - DNA, 15 bp, Homo sapiens
taaaaacagatttcc

SEQ ID NO: 1374580 - DNA, 15 bp, Homo sapiens
ttaaaaacagatttc

SEQ ID NO: 1374581 - DNA, 15 bp, Homo sapiens
tttaaaaacagattt

SEQ ID NO: 1374582 - DNA, 15 bp, Homo sapiens
ctttaaaaacagatt

SEQ ID NO: 1374583 - DNA, 15 bp, Homo sapiens
tctttaaaaacagat

SEQ ID NO: 1374584 - DNA, 15 bp, Homo sapiens
atctttaaaaacaga

SEQ ID NO: 1374585 - DNA, 15 bp, Homo sapiens
tatctttaaaaacag

SEQ ID NO: 1374586 - DNA, 15 bp, Homo sapiens
gtatctttaaaaaca

SEQ ID NO: 1374587 - DNA, 15 bp, Homo sapiens
ggtatctttaaaaac

SEQ ID NO: 1374588 - DNA, 15 bp, Homo sapiens
aggtatctttaaaaa

SEQ ID NO: 1374589 - DNA, 15 bp, Homo sapiens
aaggtatctttaaaa

SEQ ID NO: 1374590 - DNA, 15 bp, Homo sapiens
caaggtatctttaaa

SEQ ID NO: 1374591 - DNA, 15 bp, Homo sapiens
acaaggtatctttaa

SEQ ID NO: 1374592 - DNA, 15 bp, Homo sapiens
aacaaggtatcttta

SEQ ID NO: 1374593 - DNA, 15 bp, Homo sapiens
caacaaggtatcttt

SEQ ID NO: 1374594 - DNA, 15 bp, Homo sapiens
ccaacaaggtatctt

SEQ ID NO: 1374595 - DNA, 15 bp, Homo sapiens
tccaacaaggtatct

SEQ ID NO: 1374596 - DNA, 15 bp, Homo sapiens
ttccaacaaggtatc

SEQ ID NO: 1374597 - DNA, 15 bp, Homo sapiens
cttccaacaaggtat

SEQ ID NO: 1374598 - DNA, 15 bp, Homo sapiens
ccttccaacaaggta

SEQ ID NO: 1374599 - DNA, 15 bp, Homo sapiens
cccttccaacaaggt

SEQ ID NO: 1374600 - DNA, 15 bp, Homo sapiens
tcccttccaacaagg

SEQ ID NO: 1374601 - DNA, 15 bp, Homo sapiens
ctcccttccaacaag

SEQ ID NO: 1374602 - DNA, 15 bp, Homo sapiens
tctcccttccaacaa

SEQ ID NO: 1374603 - DNA, 15 bp, Homo sapiens
ttctcccttccaaca

SEQ ID NO: 1374604 - DNA, 15 bp, Homo sapiens
gttctcccttccaac

SEQ ID NO: 1374605 - DNA, 15 bp, Homo sapiens
tgttctcccttccaa

SEQ ID NO: 1374606 - DNA, 15 bp, Homo sapiens
ttgttctcccttcca

SEQ ID NO: 1374607 - DNA, 15 bp, Homo sapiens
cttgttctcccttcc

SEQ ID NO: 1374608 - DNA, 15 bp, Homo sapiens
tcttgttctcccttc

SEQ ID NO: 1374609 - DNA, 15 bp, Homo sapiens
ttcttgttctccctt

SEQ ID NO: 1374610 - DNA, 15 bp, Homo sapiens
tttcttgttctccct

SEQ ID NO: 1374611 - DNA, 15 bp, Homo sapiens
ctttcttgttctccc

SEQ ID NO: 1374612 - DNA, 15 bp, Homo sapiens
gctttcttgttctcc

SEQ ID NO: 1374613 - DNA, 15 bp, Homo sapiens
tgctttcttgttctc

SEQ ID NO: 1374614 - DNA, 15 bp, Homo sapiens
ttgctttcttgttct

SEQ ID NO: 1374615 - DNA, 15 bp, Homo sapiens
attgctttcttgttc

SEQ ID NO: 1374616 - DNA, 15 bp, Homo sapiens
gattgctttcttgtt

SEQ ID NO: 1374617 - DNA, 15 bp, Homo sapiens
tgattgctttcttgt

SEQ ID NO: 1374618 - DNA, 15 bp, Homo sapiens
gtgattgctttcttg

SEQ ID NO: 1374619 - DNA, 15 bp, Homo sapiens
ggtgattgctttctt

SEQ ID NO: 1374620 - DNA, 15 bp, Homo sapiens
aggtgattgctttct

SEQ ID NO: 1374621 - DNA, 15 bp, Homo sapiens
aaggtgattgctttc

SEQ ID NO: 1374622 - DNA, 15 bp, Homo sapiens
taaggtgattgcttt

SEQ ID NO: 1374623 - DNA, 15 bp, Homo sapiens
gtaaggtgattgctt

SEQ ID NO: 1374624 - DNA, 15 bp, Homo sapiens
agtaaggtgattgct

SEQ ID NO: 1374625 - DNA, 15 bp, Homo sapiens
aagtaaggtgattgc

SEQ ID NO: 1374626 - DNA, 15 bp, Homo sapiens
gaagtaaggtgattg

SEQ ID NO: 1374627 - DNA, 15 bp, Homo sapiens
ggaagtaaggtgatt

SEQ ID NO: 1374628 - DNA, 15 bp, Homo sapiens
aggaagtaaggtgat

SEQ ID NO: 1374629 - DNA, 15 bp, Homo sapiens
gaggaagtaaggtga

SEQ ID NO: 1374630 - DNA, 15 bp, Homo sapiens
agaggaagtaaggtg

SEQ ID NO: 1374631 - DNA, 15 bp, Homo sapiens
gagaggaagtaaggt

SEQ ID NO: 1374632 - DNA, 15 bp, Homo sapiens
ggagaggaagtaagg

SEQ ID NO: 1374633 - DNA, 15 bp, Homo sapiens
aggagaggaagtaag

SEQ ID NO: 1374634 - DNA, 15 bp, Homo sapiens
taggagaggaagtaa

SEQ ID NO: 1374635 - DNA, 15 bp, Homo sapiens
gtaggagaggaagta

SEQ ID NO: 1374636 - DNA, 15 bp, Homo sapiens
tgtaggagaggaagt

SEQ ID NO: 1374637 - DNA, 15 bp, Homo sapiens
ttgtaggagaggaag

SEQ ID NO: 1374638 - DNA, 15 bp, Homo sapiens
attgtaggagaggaa

SEQ ID NO: 1374639 - DNA, 15 bp, Homo sapiens
aattgtaggagagga

SEQ ID NO: 1374640 - DNA, 15 bp, Homo sapiens
aaattgtaggagagg

SEQ ID NO: 1374641 - DNA, 15 bp, Homo sapiens
taaattgtaggagag

SEQ ID NO: 1374642 - DNA, 15 bp, Homo sapiens
ttaaattgtaggaga

SEQ ID NO: 1374643 - DNA, 15 bp, Homo sapiens
cttaaattgtaggag

SEQ ID NO: 1374644 - DNA, 15 bp, Homo sapiens
tcttaaattgtagga

SEQ ID NO: 1374645 - DNA, 15 bp, Homo sapiens
ttcttaaattgtagg

SEQ ID NO: 1374646 - DNA, 15 bp, Homo sapiens
gttcttaaattgtag

SEQ ID NO: 1374647 - DNA, 15 bp, Homo sapiens
tgttcttaaattgta

SEQ ID NO: 1374648 - DNA, 15 bp, Homo sapiens
atgttcttaaattgt

SEQ ID NO: 1374649 - DNA, 15 bp, Homo sapiens
catgttcttaaattg

SEQ ID NO: 1374650 - DNA, 15 bp, Homo sapiens
tcatgttcttaaatt

SEQ ID NO: 1374651 - DNA, 15 bp, Homo sapiens
ctcatgttcttaaat

SEQ ID NO: 1374652 - DNA, 15 bp, Homo sapiens
tctcatgttcttaaa

SEQ ID NO: 1374653 - DNA, 15 bp, Homo sapiens
gtctcatgttcttaa

SEQ ID NO: 1374654 - DNA, 15 bp, Homo sapiens
agtctcatgttctta

SEQ ID NO: 1374655 - DNA, 15 bp, Homo sapiens
gagtctcatgttctt

SEQ ID NO: 1374656 - DNA, 15 bp, Homo sapiens
tgagtctcatgttct

SEQ ID NO: 1374657 - DNA, 15 bp, Homo sapiens
ttgagtctcatgttc

SEQ ID NO: 1374658 - DNA, 15 bp, Homo sapiens
cttgagtctcatgtt

SEQ ID NO: 1374659 - DNA, 15 bp, Homo sapiens
tcttgagtctcatgt

SEQ ID NO: 1374660 - DNA, 15 bp, Homo sapiens
ctcttgagtctcatg

SEQ ID NO: 1374661 - DNA, 15 bp, Homo sapiens
cctcttgagtctcat

SEQ ID NO: 1374662 - DNA, 15 bp, Homo sapiens
acctcttgagtctca

SEQ ID NO: 1374663 - DNA, 15 bp, Homo sapiens
aacctcttgagtctc

SEQ ID NO: 1374664 - DNA, 15 bp, Homo sapiens
taacctcttgagtct

SEQ ID NO: 1374665 - DNA, 15 bp, Homo sapiens
ttaacctcttgagtc

SEQ ID NO: 1374666 - DNA, 15 bp, Homo sapiens
gttaacctcttgagt

SEQ ID NO: 1374667 - DNA, 15 bp, Homo sapiens
agttaacctcttgag

SEQ ID NO: 1374668 - DNA, 15 bp, Homo sapiens
cagttaacctcttga

SEQ ID NO: 1374669 - DNA, 15 bp, Homo sapiens
ccagttaacctcttg

SEQ ID NO: 1374670 - DNA, 15 bp, Homo sapiens
gccagttaacctctt

SEQ ID NO: 1374671 - DNA, 15 bp, Homo sapiens
agccagttaacctct

SEQ ID NO: 1374672 - DNA, 15 bp, Homo sapiens
aagccagttaacctc

SEQ ID NO: 1374673 - DNA, 15 bp, Homo sapiens
aaagccagttaacct

SEQ ID NO: 1374674 - DNA, 15 bp, Homo sapiens
caaagccagttaacc

SEQ ID NO: 1374675 - DNA, 15 bp, Homo sapiens
acaaagccagttaac

SEQ ID NO: 1374676 - DNA, 15 bp, Homo sapiens
aacaaagccagttaa

SEQ ID NO: 1374677 - DNA, 15 bp, Homo sapiens
taacaaagccagtta

SEQ ID NO: 1374678 - DNA, 15 bp, Homo sapiens
ttaacaaagccagtt

SEQ ID NO: 1374679 - DNA, 15 bp, Homo sapiens
tttaacaaagccagt

SEQ ID NO: 1374680 - DNA, 15 bp, Homo sapiens
gtttaacaaagccag

SEQ ID NO: 1374681 - DNA, 15 bp, Homo sapiens
agtttaacaaagcca

SEQ ID NO: 1374682 - DNA, 15 bp, Homo sapiens
gagtttaacaaagcc

SEQ ID NO: 1374683 - DNA, 15 bp, Homo sapiens
tgagtttaacaaagc

SEQ ID NO: 1374684 - DNA, 15 bp, Homo sapiens
ttgagtttaacaaag

SEQ ID NO: 1374685 - DNA, 15 bp, Homo sapiens
gttgagtttaacaaa

SEQ ID NO: 1374686 - DNA, 15 bp, Homo sapiens
tgttgagtttaacaa

SEQ ID NO: 1374687 - DNA, 15 bp, Homo sapiens
gtgttgagtttaaca

SEQ ID NO: 1374688 - DNA, 15 bp, Homo sapiens
ggtgttgagtttaac

SEQ ID NO: 1374689 - DNA, 15 bp, Homo sapiens
tggtgttgagtttaa

SEQ ID NO: 1374690 - DNA, 15 bp, Homo sapiens
ctggtgttgagttta

SEQ ID NO: 1374691 - DNA, 15 bp, Homo sapiens
actggtgttgagttt

SEQ ID NO: 1374692 - DNA, 15 bp, Homo sapiens
aactggtgttgagtt

SEQ ID NO: 1374693 - DNA, 15 bp, Homo sapiens
taactggtgttgagt

SEQ ID NO: 1374694 - DNA, 15 bp, Homo sapiens
ttaactggtgttgag

SEQ ID NO: 1374695 - DNA, 15 bp, Homo sapiens
attaactggtgttga

SEQ ID NO: 1374696 - DNA, 15 bp, Homo sapiens
cattaactggtgttg

SEQ ID NO: 1374697 - DNA, 15 bp, Homo sapiens
tcattaactggtgtt

SEQ ID NO: 1374698 - DNA, 15 bp, Homo sapiens
ctcattaactggtgt

SEQ ID NO: 1374699 - DNA, 15 bp, Homo sapiens
tctcattaactggtg

SEQ ID NO: 1374700 - DNA, 15 bp, Homo sapiens
ctctcattaactggt

SEQ ID NO: 1374701 - DNA, 15 bp, Homo sapiens
tctctcattaactgg

SEQ ID NO: 1374702 - DNA, 15 bp, Homo sapiens
ttctctcattaactg

SEQ ID NO: 1374703 - DNA, 15 bp, Homo sapiens
gttctctcattaact

SEQ ID NO: 1374704 - DNA, 15 bp, Homo sapiens
ggttctctcattaac

SEQ ID NO: 1374705 - DNA, 15 bp, Homo sapiens
tggttctctcattaa

SEQ ID NO: 1374706 - DNA, 15 bp, Homo sapiens
ttggttctctcatta

SEQ ID NO: 1374707 - DNA, 15 bp, Homo sapiens
cttggttctctcatt

SEQ ID NO: 1374708 - DNA, 15 bp, Homo sapiens
tcttggttctctcat

SEQ ID NO: 1374709 - DNA, 15 bp, Homo sapiens
gtcttggttctctca

SEQ ID NO: 1374710 - DNA, 15 bp, Homo sapiens
agtcttggttctctc

SEQ ID NO: 1374711 - DNA, 15 bp, Homo sapiens
tagtcttggttctct

SEQ ID NO: 1374712 - DNA, 15 bp, Homo sapiens
ttagtcttggttctc

SEQ ID NO: 1374713 - DNA, 15 bp, Homo sapiens
tttagtcttggttct

SEQ ID NO: 1374714 - DNA, 15 bp, Homo sapiens
ctttagtcttggttc

SEQ ID NO: 1374715 - DNA, 15 bp, Homo sapiens
actttagtcttggtt

SEQ ID NO: 1374716 - DNA, 15 bp, Homo sapiens
gactttagtcttggt

SEQ ID NO: 1374717 - DNA, 15 bp, Homo sapiens
ggactttagtcttgg

SEQ ID NO: 1374718 - DNA, 15 bp, Homo sapiens
tggactttagtcttg

SEQ ID NO: 1374719 - DNA, 15 bp, Homo sapiens
gtggactttagtctt

SEQ ID NO: 1374720 - DNA, 15 bp, Homo sapiens
ggtggactttagtct

SEQ ID NO: 1374721 - DNA, 15 bp, Homo sapiens
aggtggactttagtc

SEQ ID NO: 1374722 - DNA, 15 bp, Homo sapiens
aaggtggactttagt

SEQ ID NO: 1374723 - DNA, 15 bp, Homo sapiens
aaaggtggactttag

SEQ ID NO: 1374724 - DNA, 15 bp, Homo sapiens
gaaaggtggacttta

SEQ ID NO: 1374725 - DNA, 15 bp, Homo sapiens
agaaaggtggacttt

SEQ ID NO: 1374726 - DNA, 15 bp, Homo sapiens
aagaaaggtggactt

SEQ ID NO: 1374727 - DNA, 15 bp, Homo sapiens
caagaaaggtggact

SEQ ID NO: 1374728 - DNA, 15 bp, Homo sapiens
gcaagaaaggtggac

SEQ ID NO: 1374729 - DNA, 15 bp, Homo sapiens
tgcaagaaaggtgga

SEQ ID NO: 1374730 - DNA, 15 bp, Homo sapiens
atgcaagaaaggtgg

SEQ ID NO: 1374731 - DNA, 15 bp, Homo sapiens
gatgcaagaaaggtg

SEQ ID NO: 1374732 - DNA, 15 bp, Homo sapiens
tgatgcaagaaaggt

SEQ ID NO: 1374733 - DNA, 15 bp, Homo sapiens
atgatgcaagaaagg

SEQ ID NO: 1374734 - DNA, 15 bp, Homo sapiens
catgatgcaagaaag

SEQ ID NO: 1374735 - DNA, 15 bp, Homo sapiens
gcatgatgcaagaaa

SEQ ID NO: 1374736 - DNA, 15 bp, Homo sapiens
agcatgatgcaagaa

SEQ ID NO: 1374737 - DNA, 15 bp, Homo sapiens
gagcatgatgcaaga

SEQ ID NO: 1374738 - DNA, 15 bp, Homo sapiens
tgagcatgatgcaag

SEQ ID NO: 1374739 - DNA, 15 bp, Homo sapiens
atgagcatgatgcaa

SEQ ID NO: 1374740 - DNA, 15 bp, Homo sapiens
aatgagcatgatgca

SEQ ID NO: 1374741 - DNA, 15 bp, Homo sapiens
gaatgagcatgatgc

SEQ ID NO: 1374742 - DNA, 15 bp, Homo sapiens
ggaatgagcatgatg

SEQ ID NO: 1374743 - DNA, 15 bp, Homo sapiens
gggaatgagcatgat

SEQ ID NO: 1374744 - DNA, 15 bp, Homo sapiens
tgggaatgagcatga

SEQ ID NO: 1374745 - DNA, 15 bp, Homo sapiens
ctgggaatgagcatg

SEQ ID NO: 1374746 - DNA, 15 bp, Homo sapiens
cctgggaatgagcat

SEQ ID NO: 1374747 - DNA, 15 bp, Homo sapiens
gcctgggaatgagca

SEQ ID NO: 1374748 - DNA, 15 bp, Homo sapiens
agcctgggaatgagc

SEQ ID NO: 1374749 - DNA, 15 bp, Homo sapiens
tagcctgggaatgag

SEQ ID NO: 1374750 - DNA, 15 bp, Homo sapiens
atagcctgggaatga

SEQ ID NO: 1374751 - DNA, 15 bp, Homo sapiens
aatagcctgggaatg

SEQ ID NO: 1374752 - DNA, 15 bp, Homo sapiens
gaatagcctgggaat

SEQ ID NO: 1374753 - DNA, 15 bp, Homo sapiens
tgaatagcctgggaa

SEQ ID NO: 1374754 - DNA, 15 bp, Homo sapiens
gtgaatagcctggga

SEQ ID NO: 1374755 - DNA, 15 bp, Homo sapiens
tgtgaatagcctggg

SEQ ID NO: 1374756 - DNA, 15 bp, Homo sapiens
ctgtgaatagcctgg

SEQ ID NO: 1374757 - DNA, 15 bp, Homo sapiens
cctgtgaatagcctg

SEQ ID NO: 1374758 - DNA, 15 bp, Homo sapiens
ccctgtgaatagcct

SEQ ID NO: 1374759 - DNA, 15 bp, Homo sapiens
accctgtgaatagcc

SEQ ID NO: 1374760 - DNA, 15 bp, Homo sapiens
gaccctgtgaatagc

SEQ ID NO: 1374761 - DNA, 15 bp, Homo sapiens
cgaccctgtgaatag

SEQ ID NO: 1374762 - DNA, 15 bp, Homo sapiens
acgaccctgtgaata

SEQ ID NO: 1374763 - DNA, 15 bp, Homo sapiens
aacgaccctgtgaat

SEQ ID NO: 1374764 - DNA, 15 bp, Homo sapiens
aaacgaccctgtgaa

SEQ ID NO: 1374765 - DNA, 15 bp, Homo sapiens
gaaacgaccctgtga

SEQ ID NO: 1374766 - DNA, 15 bp, Homo sapiens
tgaaacgaccctgtg

SEQ ID NO: 1374767 - DNA, 15 bp, Homo sapiens
atgaaacgaccctgt

SEQ ID NO: 1374768 - DNA, 15 bp, Homo sapiens
aatgaaacgaccctg

SEQ ID NO: 1374769 - DNA, 15 bp, Homo sapiens
taatgaaacgaccct

SEQ ID NO: 1374770 - DNA, 15 bp, Homo sapiens
ttaatgaaacgaccc

SEQ ID NO: 1374771 - DNA, 15 bp, Homo sapiens
tttaatgaaacgacc

SEQ ID NO: 1374772 - DNA, 15 bp, Homo sapiens
atttaatgaaacgac

SEQ ID NO: 1374773 - DNA, 15 bp, Homo sapiens
catttaatgaaacga

SEQ ID NO: 1374774 - DNA, 15 bp, Homo sapiens
gcatttaatgaaacg

SEQ ID NO: 1374775 - DNA, 15 bp, Homo sapiens
agcatttaatgaaac

SEQ ID NO: 1374776 - DNA, 15 bp, Homo sapiens
tagcatttaatgaaa

SEQ ID NO: 1374777 - DNA, 15 bp, Homo sapiens
atagcatttaatgaa

SEQ ID NO: 1374778 - DNA, 15 bp, Homo sapiens
catagcatttaatga

SEQ ID NO: 1374779 - DNA, 15 bp, Homo sapiens
tcatagcatttaatg

SEQ ID NO: 1374780 - DNA, 15 bp, Homo sapiens
ttcatagcatttaat

SEQ ID NO: 1374781 - DNA, 15 bp, Homo sapiens
attcatagcatttaa

SEQ ID NO: 1374782 - DNA, 15 bp, Homo sapiens
tattcatagcattta

SEQ ID NO: 1374783 - DNA, 15 bp, Homo sapiens
ttattcatagcattt

SEQ ID NO: 1374784 - DNA, 15 bp, Homo sapiens
tttattcatagcatt

SEQ ID NO: 1374785 - DNA, 15 bp, Homo sapiens
atttattcatagcat

SEQ ID NO: 1374786 - DNA, 15 bp, Homo sapiens
catttattcatagca

SEQ ID NO: 1374787 - DNA, 15 bp, Homo sapiens
ccatttattcatagc

SEQ ID NO: 1374788 - DNA, 15 bp, Homo sapiens
accatttattcatag

SEQ ID NO: 1374789 - DNA, 15 bp, Homo sapiens
taccatttattcata

SEQ ID NO: 1374790 - DNA, 15 bp, Homo sapiens
ataccatttattcat

SEQ ID NO: 1374791 - DNA, 15 bp, Homo sapiens
tataccatttattca

SEQ ID NO: 1374792 - DNA, 15 bp, Homo sapiens
atataccatttattc

SEQ ID NO: 1374793 - DNA, 15 bp, Homo sapiens
aatataccatttatt

SEQ ID NO: 1374794 - DNA, 15 bp, Homo sapiens
aaatataccatttat

SEQ ID NO: 1374795 - DNA, 15 bp, Homo sapiens
caaatataccattta

SEQ ID NO: 1374796 - DNA, 15 bp, Homo sapiens
tcaaatataccattt

SEQ ID NO: 1374797 - DNA, 15 bp, Homo sapiens
ttcaaatataccatt

SEQ ID NO: 1374798 - DNA, 15 bp, Homo sapiens
attcaaatataccat

SEQ ID NO: 1374799 - DNA, 15 bp, Homo sapiens
cattcaaatatacca

SEQ ID NO: 1374800 - DNA, 15 bp, Homo sapiens
ccattcaaatatacc

SEQ ID NO: 1374801 - DNA, 15 bp, Homo sapiens
gccattcaaatatac

SEQ ID NO: 1374802 - DNA, 15 bp, Homo sapiens
ggccattcaaatata

SEQ ID NO: 1374803 - DNA, 15 bp, Homo sapiens
tggccattcaaatat

SEQ ID NO: 1374804 - DNA, 15 bp, Homo sapiens
ttggccattcaaata

SEQ ID NO: 1374805 - DNA, 15 bp, Homo sapiens
cttggccattcaaat

SEQ ID NO: 1374806 - DNA, 15 bp, Homo sapiens
tcttggccattcaaa

SEQ ID NO: 1374807 - DNA, 15 bp, Homo sapiens
atcttggccattcaa

SEQ ID NO: 1374808 - DNA, 15 bp, Homo sapiens
tatcttggccattca

SEQ ID NO: 1374809 - DNA, 15 bp, Homo sapiens
atatcttggccattc

SEQ ID NO: 1374810 - DNA, 15 bp, Homo sapiens
aatatcttggccatt

SEQ ID NO: 1374811 - DNA, 15 bp, Homo sapiens
aaatatcttggccat

SEQ ID NO: 1374812 - DNA, 15 bp, Homo sapiens
aaaatatcttggcca

SEQ ID NO: 1374813 - DNA, 15 bp, Homo sapiens
gaaaatatcttggcc

SEQ ID NO: 1374814 - DNA, 15 bp, Homo sapiens
ggaaaatatcttggc

SEQ ID NO: 1374815 - DNA, 15 bp, Homo sapiens
tggaaaatatcttgg

SEQ ID NO: 1374816 - DNA, 15 bp, Homo sapiens
ttggaaaatatcttg

SEQ ID NO: 1374817 - DNA, 15 bp, Homo sapiens
gttggaaaatatctt

SEQ ID NO: 1374818 - DNA, 15 bp, Homo sapiens
ggttggaaaatatct

SEQ ID NO: 1374819 - DNA, 15 bp, Homo sapiens
tggttggaaaatatc

SEQ ID NO: 1374820 - DNA, 15 bp, Homo sapiens
atggttggaaaatat

SEQ ID NO: 1374821 - DNA, 15 bp, Homo sapiens
gatggttggaaaata

SEQ ID NO: 1374822 - DNA, 15 bp, Homo sapiens
agatggttggaaaat

SEQ ID NO: 1374823 - DNA, 15 bp, Homo sapiens
aagatggttggaaaa

SEQ ID NO: 1374824 - DNA, 15 bp, Homo sapiens
gaagatggttggaaa

SEQ ID NO: 1374825 - DNA, 15 bp, Homo sapiens
tgaagatggttggaa

SEQ ID NO: 1374826 - DNA, 15 bp, Homo sapiens
ctgaagatggttgga

SEQ ID NO: 1374827 - DNA, 15 bp, Homo sapiens
actgaagatggttgg

SEQ ID NO: 1374828 - DNA, 15 bp, Homo sapiens
aactgaagatggttg

SEQ ID NO: 1374829 - DNA, 15 bp, Homo sapiens
gaactgaagatggtt

SEQ ID NO: 1374830 - DNA, 15 bp, Homo sapiens
ggaactgaagatggt

SEQ ID NO: 1374831 - DNA, 15 bp, Homo sapiens
aggaactgaagatgg

SEQ ID NO: 1374832 - DNA, 15 bp, Homo sapiens
caggaactgaagatg

SEQ ID NO: 1374833 - DNA, 15 bp, Homo sapiens
tcaggaactgaagat

SEQ ID NO: 1374834 - DNA, 15 bp, Homo sapiens
gtcaggaactgaaga

SEQ ID NO: 1374835 - DNA, 15 bp, Homo sapiens
agtcaggaactgaag

SEQ ID NO: 1374836 - DNA, 15 bp, Homo sapiens
gagtcaggaactgaa

SEQ ID NO: 1374837 - DNA, 15 bp, Homo sapiens
ggagtcaggaactga

SEQ ID NO: 1374838 - DNA, 15 bp, Homo sapiens
aggagtcaggaactg

SEQ ID NO: 1374839 - DNA, 15 bp, Homo sapiens
taggagtcaggaact

SEQ ID NO: 1374840 - DNA, 15 bp, Homo sapiens
ataggagtcaggaac

SEQ ID NO: 1374841 - DNA, 15 bp, Homo sapiens
tataggagtcaggaa

SEQ ID NO: 1374842 - DNA, 15 bp, Homo sapiens
ttataggagtcagga

SEQ ID NO: 1374843 - DNA, 15 bp, Homo sapiens
cttataggagtcagg

SEQ ID NO: 1374844 - DNA, 15 bp, Homo sapiens
tcttataggagtcag

SEQ ID NO: 1374845 - DNA, 15 bp, Homo sapiens
atcttataggagtca

SEQ ID NO: 1374846 - DNA, 15 bp, Homo sapiens
catcttataggagtc

SEQ ID NO: 1374847 - DNA, 15 bp, Homo sapiens
tcatcttataggagt

SEQ ID NO: 1374848 - DNA, 15 bp, Homo sapiens
ttcatcttataggag

SEQ ID NO: 1374849 - DNA, 15 bp, Homo sapiens
tttcatcttatagga

SEQ ID NO: 1374850 - DNA, 15 bp, Homo sapiens
atttcatcttatagg

SEQ ID NO: 1374851 - DNA, 15 bp, Homo sapiens
aatttcatcttatag

SEQ ID NO: 1374852 - DNA, 15 bp, Homo sapiens
aaatttcatcttata

SEQ ID NO: 1374853 - DNA, 15 bp, Homo sapiens
aaaatttcatcttat

SEQ ID NO: 1374854 - DNA, 15 bp, Homo sapiens
gaaaatttcatctta

SEQ ID NO: 1374855 - DNA, 15 bp, Homo sapiens
tgaaaatttcatctt

SEQ ID NO: 1374856 - DNA, 15 bp, Homo sapiens
gtgaaaatttcatct

SEQ ID NO: 1374857 - DNA, 15 bp, Homo sapiens
tgtgaaaatttcatc

SEQ ID NO: 1374858 - DNA, 15 bp, Homo sapiens
ttgtgaaaatttcat

SEQ ID NO: 1374859 - DNA, 15 bp, Homo sapiens
cttgtgaaaatttca

SEQ ID NO: 1374860 - DNA, 15 bp, Homo sapiens
acttgtgaaaatttc

SEQ ID NO: 1374861 - DNA, 15 bp, Homo sapiens
gacttgtgaaaattt

SEQ ID NO: 1374862 - DNA, 15 bp, Homo sapiens
agacttgtgaaaatt

SEQ ID NO: 1374863 - DNA, 15 bp, Homo sapiens
gagacttgtgaaaat

SEQ ID NO: 1374864 - DNA, 15 bp, Homo sapiens
ggagacttgtgaaaa

SEQ ID NO: 1374865 - DNA, 15 bp, Homo sapiens
tggagacttgtgaaa

SEQ ID NO: 1374866 - DNA, 15 bp, Homo sapiens
ctggagacttgtgaa

SEQ ID NO: 1374867 - DNA, 15 bp, Homo sapiens
cctggagacttgtga

SEQ ID NO: 1374868 - DNA, 15 bp, Homo sapiens
gcctggagacttgtg

SEQ ID NO: 1374869 - DNA, 15 bp, Homo sapiens
agcctggagacttgt

SEQ ID NO: 1374870 - DNA, 15 bp, Homo sapiens
gagcctggagacttg

SEQ ID NO: 1374871 - DNA, 15 bp, Homo sapiens
agagcctggagactt

SEQ ID NO: 1374872 - DNA, 15 bp, Homo sapiens
aagagcctggagact

SEQ ID NO: 1374873 - DNA, 15 bp, Homo sapiens
aaagagcctggagac

SEQ ID NO: 1374874 - DNA, 15 bp, Homo sapiens
gaaagagcctggaga

SEQ ID NO: 1374875 - DNA, 15 bp, Homo sapiens
tgaaagagcctggag

SEQ ID NO: 1374876 - DNA, 15 bp, Homo sapiens
atgaaagagcctgga

SEQ ID NO: 1374877 - DNA, 15 bp, Homo sapiens
aatgaaagagcctgg

SEQ ID NO: 1374878 - DNA, 15 bp, Homo sapiens
aaatgaaagagcctg

SEQ ID NO: 1374879 - DNA, 15 bp, Homo sapiens
gaaatgaaagagcct

SEQ ID NO: 1374880 - DNA, 15 bp, Homo sapiens
agaaatgaaagagcc

SEQ ID NO: 1374881 - DNA, 15 bp, Homo sapiens
tagaaatgaaagagc

SEQ ID NO: 1374882 - DNA, 15 bp, Homo sapiens
atagaaatgaaagag

SEQ ID NO: 1374883 - DNA, 15 bp, Homo sapiens
aatagaaatgaaaga

SEQ ID NO: 1374884 - DNA, 15 bp, Homo sapiens
aaatagaaatgaaag

SEQ ID NO: 1374885 - DNA, 15 bp, Homo sapiens
gaaatagaaatgaaa

SEQ ID NO: 1374886 - DNA, 15 bp, Homo sapiens
agaaatagaaatgaa

SEQ ID NO: 1374887 - DNA, 15 bp, Homo sapiens
tagaaatagaaatga

SEQ ID NO: 1374888 - DNA, 15 bp, Homo sapiens
gtagaaatagaaatg

SEQ ID NO: 1374889 - DNA, 15 bp, Homo sapiens
agtagaaatagaaat

SEQ ID NO: 1374890 - DNA, 15 bp, Homo sapiens
aagtagaaatagaaa

SEQ ID NO: 1374891 - DNA, 15 bp, Homo sapiens
gaagtagaaatagaa

SEQ ID NO: 1374892 - DNA, 15 bp, Homo sapiens
agaagtagaaataga

SEQ ID NO: 1374893 - DNA, 15 bp, Homo sapiens
gagaagtagaaatag

SEQ ID NO: 1374894 - DNA, 15 bp, Homo sapiens
agagaagtagaaata

SEQ ID NO: 1374895 - DNA, 15 bp, Homo sapiens
tagagaagtagaaat

SEQ ID NO: 1374896 - DNA, 15 bp, Homo sapiens
ctagagaagtagaaa

SEQ ID NO: 1374897 - DNA, 15 bp, Homo sapiens
cctagagaagtagaa

SEQ ID NO: 1374898 - DNA, 15 bp, Homo sapiens
acctagagaagtaga

SEQ ID NO: 1374899 - DNA, 15 bp, Homo sapiens
tacctagagaagtag

SEQ ID NO: 1374900 - DNA, 15 bp, Homo sapiens
atacctagagaagta

SEQ ID NO: 1374901 - DNA, 15 bp, Homo sapiens
tatacctagagaagt

SEQ ID NO: 1374902 - DNA, 15 bp, Homo sapiens
atatacctagagaag

SEQ ID NO: 1374903 - DNA, 15 bp, Homo sapiens
tatatacctagagaa

SEQ ID NO: 1374904 - DNA, 15 bp, Homo sapiens
gtatatacctagaga

SEQ ID NO: 1374905 - DNA, 15 bp, Homo sapiens
ggtatatacctagag

SEQ ID NO: 1374906 - DNA, 15 bp, Homo sapiens
tggtatatacctaga

SEQ ID NO: 1374907 - DNA, 15 bp, Homo sapiens
gtggtatatacctag

SEQ ID NO: 1374908 - DNA, 15 bp, Homo sapiens
ggtggtatataccta

SEQ ID NO: 1374909 - DNA, 15 bp, Homo sapiens
tggtggtatatacct

SEQ ID NO: 1374910 - DNA, 15 bp, Homo sapiens
atggtggtatatacc

SEQ ID NO: 1374911 - DNA, 15 bp, Homo sapiens
gatggtggtatatac

SEQ ID NO: 1374912 - DNA, 15 bp, Homo sapiens
tgatggtggtatata

SEQ ID NO: 1374913 - DNA, 15 bp, Homo sapiens
gtgatggtggtatat

SEQ ID NO: 1374914 - DNA, 15 bp, Homo sapiens
ggtgatggtggtata

SEQ ID NO: 1374915 - DNA, 15 bp, Homo sapiens
tggtgatggtggtat

SEQ ID NO: 1374916 - DNA, 15 bp, Homo sapiens
gtggtgatggtggta

SEQ ID NO: 1374917 - DNA, 15 bp, Homo sapiens
agtggtgatggtggt

SEQ ID NO: 1374918 - DNA, 15 bp, Homo sapiens
tagtggtgatggtgg

SEQ ID NO: 1374919 - DNA, 15 bp, Homo sapiens
atagtggtgatggtg

SEQ ID NO: 1374920 - DNA, 15 bp, Homo sapiens
gatagtggtgatggt

SEQ ID NO: 1374921 - DNA, 15 bp, Homo sapiens
tgatagtggtgatgg

SEQ ID NO: 1374922 - DNA, 15 bp, Homo sapiens
atgatagtggtgatg

SEQ ID NO: 1374923 - DNA, 15 bp, Homo sapiens
gatgatagtggtgat

SEQ ID NO: 1374924 - DNA, 15 bp, Homo sapiens
ggatgatagtggtga

SEQ ID NO: 1374925 - DNA, 15 bp, Homo sapiens
aggatgatagtggtg

SEQ ID NO: 1374926 - DNA, 15 bp, Homo sapiens
aaggatgatagtggt

SEQ ID NO: 1374927 - DNA, 15 bp, Homo sapiens
aaaggatgatagtgg

SEQ ID NO: 1374928 - DNA, 15 bp, Homo sapiens
gaaaggatgatagtg

SEQ ID NO: 1374929 - DNA, 15 bp, Homo sapiens
ggaaaggatgatagt

SEQ ID NO: 1374930 - DNA, 15 bp, Homo sapiens
aggaaaggatgatag

SEQ ID NO: 1374931 - DNA, 15 bp, Homo sapiens
gaggaaaggatgata

SEQ ID NO: 1374932 - DNA, 15 bp, Homo sapiens
ggaggaaaggatgat

SEQ ID NO: 1374933 - DNA, 15 bp, Homo sapiens
aggaggaaaggatga

SEQ ID NO: 1374934 - DNA, 15 bp, Homo sapiens
gaggaggaaaggatg

SEQ ID NO: 1374935 - DNA, 15 bp, Homo sapiens
agaggaggaaaggat

SEQ ID NO: 1374936 - DNA, 15 bp, Homo sapiens
aagaggaggaaagga

SEQ ID NO: 1374937 - DNA, 15 bp, Homo sapiens
gaagaggaggaaagg

SEQ ID NO: 1374938 - DNA, 15 bp, Homo sapiens
tgaagaggaggaaag

SEQ ID NO: 1374939 - DNA, 15 bp, Homo sapiens
ttgaagaggaggaaa

SEQ ID NO: 1374940 - DNA, 15 bp, Homo sapiens
tttgaagaggaggaa

SEQ ID NO: 1374941 - DNA, 15 bp, Homo sapiens
gtttgaagaggagga

SEQ ID NO: 1374942 - DNA, 15 bp, Homo sapiens
agtttgaagaggagg

SEQ ID NO: 1374943 - DNA, 15 bp, Homo sapiens
gagtttgaagaggag

SEQ ID NO: 1374944 - DNA, 15 bp, Homo sapiens
tgagtttgaagagga

SEQ ID NO: 1374945 - DNA, 15 bp, Homo sapiens
ttgagtttgaagagg

SEQ ID NO: 1374946 - DNA, 15 bp, Homo sapiens
tttgagtttgaagag

SEQ ID NO: 1374947 - DNA, 15 bp, Homo sapiens
atttgagtttgaaga

SEQ ID NO: 1374948 - DNA, 15 bp, Homo sapiens
gatttgagtttgaag

SEQ ID NO: 1374949 - DNA, 15 bp, Homo sapiens
ggatttgagtttgaa

SEQ ID NO: 1374950 - DNA, 15 bp, Homo sapiens
tggatttgagtttga

SEQ ID NO: 1374951 - DNA, 15 bp, Homo sapiens
ttggatttgagtttg

SEQ ID NO: 1374952 - DNA, 15 bp, Homo sapiens
cttggatttgagttt

SEQ ID NO: 1374953 - DNA, 15 bp, Homo sapiens
acttggatttgagtt

SEQ ID NO: 1374954 - DNA, 15 bp, Homo sapiens
aacttggatttgagt

SEQ ID NO: 1374955 - DNA, 15 bp, Homo sapiens
taacttggatttgag

SEQ ID NO: 1374956 - DNA, 15 bp, Homo sapiens
ctaacttggatttga

SEQ ID NO: 1374957 - DNA, 15 bp, Homo sapiens
gctaacttggatttg

SEQ ID NO: 1374958 - DNA, 15 bp, Homo sapiens
tgctaacttggattt

SEQ ID NO: 1374959 - DNA, 15 bp, Homo sapiens
atgctaacttggatt

SEQ ID NO: 1374960 - DNA, 15 bp, Homo sapiens
tatgctaacttggat

SEQ ID NO: 1374961 - DNA, 15 bp, Homo sapiens
ttatgctaacttgga

SEQ ID NO: 1374962 - DNA, 15 bp, Homo sapiens
tttatgctaacttgg

SEQ ID NO: 1374963 - DNA, 15 bp, Homo sapiens
gtttatgctaacttg

SEQ ID NO: 1374964 - DNA, 15 bp, Homo sapiens
agtttatgctaactt

SEQ ID NO: 1374965 - DNA, 15 bp, Homo sapiens
gagtttatgctaact

SEQ ID NO: 1374966 - DNA, 15 bp, Homo sapiens
agagtttatgctaac

SEQ ID NO: 1374967 - DNA, 15 bp, Homo sapiens
gagagtttatgctaa

SEQ ID NO: 1374968 - DNA, 15 bp, Homo sapiens
ggagagtttatgcta

SEQ ID NO: 1374969 - DNA, 15 bp, Homo sapiens
aggagagtttatgct

SEQ ID NO: 1374970 - DNA, 15 bp, Homo sapiens
caggagagtttatgc

SEQ ID NO: 1374971 - DNA, 15 bp, Homo sapiens
acaggagagtttatg

SEQ ID NO: 1374972 - DNA, 15 bp, Homo sapiens
tacaggagagtttat

SEQ ID NO: 1374973 - DNA, 15 bp, Homo sapiens
ttacaggagagttta

SEQ ID NO: 1374974 - DNA, 15 bp, Homo sapiens
cttacaggagagttt

SEQ ID NO: 1374975 - DNA, 15 bp, Homo sapiens
gcttacaggagagtt

SEQ ID NO: 1374976 - DNA, 15 bp, Homo sapiens
agcttacaggagagt

SEQ ID NO: 1374977 - DNA, 15 bp, Homo sapiens
gagcttacaggagag

SEQ ID NO: 1374978 - DNA, 15 bp, Homo sapiens
ggagcttacaggaga

SEQ ID NO: 1374979 - DNA, 15 bp, Homo sapiens
aggagcttacaggag

SEQ ID NO: 1374980 - DNA, 15 bp, Homo sapiens
aaggagcttacagga

SEQ ID NO: 1374981 - DNA, 15 bp, Homo sapiens
aaaggagcttacagg

SEQ ID NO: 1374982 - DNA, 15 bp, Homo sapiens
gaaaggagcttacag

SEQ ID NO: 1374983 - DNA, 15 bp, Homo sapiens
agaaaggagcttaca

SEQ ID NO: 1374984 - DNA, 15 bp, Homo sapiens
tagaaaggagcttac

SEQ ID NO: 1374985 - DNA, 15 bp, Homo sapiens
ctagaaaggagctta

SEQ ID NO: 1374986 - DNA, 15 bp, Homo sapiens
cctagaaaggagctt

SEQ ID NO: 1374987 - DNA, 15 bp, Homo sapiens
ccctagaaaggagct

SEQ ID NO: 1374988 - DNA, 15 bp, Homo sapiens
accctagaaaggagc

SEQ ID NO: 1374989 - DNA, 15 bp, Homo sapiens
aaccctagaaaggag

SEQ ID NO: 1374990 - DNA, 15 bp, Homo sapiens
aaaccctagaaagga

SEQ ID NO: 1374991 - DNA, 15 bp, Homo sapiens
aaaaccctagaaagg

SEQ ID NO: 1374992 - DNA, 15 bp, Homo sapiens
gaaaaccctagaaag

SEQ ID NO: 1374993 - DNA, 15 bp, Homo sapiens
agaaaaccctagaaa

SEQ ID NO: 1374994 - DNA, 15 bp, Homo sapiens
tagaaaaccctagaa

SEQ ID NO: 1374995 - DNA, 15 bp, Homo sapiens
ttagaaaaccctaga

SEQ ID NO: 1374996 - DNA, 15 bp, Homo sapiens
cttagaaaaccctag

SEQ ID NO: 1374997 - DNA, 15 bp, Homo sapiens
gcttagaaaacccta

SEQ ID NO: 1374998 - DNA, 15 bp, Homo sapiens
ggcttagaaaaccct

SEQ ID NO: 1374999 - DNA, 15 bp, Homo sapiens
tggcttagaaaaccc

SEQ ID NO: 1375000 - DNA, 15 bp, Homo sapiens
ttggcttagaaaacc

SEQ ID NO: 1375001 - DNA, 15 bp, Homo sapiens
tttggcttagaaaac

SEQ ID NO: 1375002 - DNA, 15 bp, Homo sapiens
ttttggcttagaaaa

SEQ ID NO: 1375003 - DNA, 15 bp, Homo sapiens
gttttggcttagaaa

SEQ ID NO: 1375004 - DNA, 15 bp, Homo sapiens
ggttttggcttagaa

SEQ ID NO: 1375005 - DNA, 15 bp, Homo sapiens
gggttttggcttaga

SEQ ID NO: 1375006 - DNA, 15 bp, Homo sapiens
tgggttttggcttag

SEQ ID NO: 1375007 - DNA, 15 bp, Homo sapiens
ctgggttttggctta

SEQ ID NO: 1375008 - DNA, 15 bp, Homo sapiens
tctgggttttggctt

SEQ ID NO: 1375009 - DNA, 15 bp, Homo sapiens
gtctgggttttggct

SEQ ID NO: 1375010 - DNA, 15 bp, Homo sapiens
agtctgggttttggc

SEQ ID NO: 1375011 - DNA, 15 bp, Homo sapiens
gagtctgggttttgg

SEQ ID NO: 1375012 - DNA, 15 bp, Homo sapiens
agagtctgggttttg

SEQ ID NO: 1375013 - DNA, 15 bp, Homo sapiens
gagagtctgggtttt

SEQ ID NO: 1375014 - DNA, 15 bp, Homo sapiens
agagagtctgggttt

SEQ ID NO: 1375015 - DNA, 15 bp, Homo sapiens
gagagagtctgggtt

SEQ ID NO: 1375016 - DNA, 15 bp, Homo sapiens
ggagagagtctgggt

SEQ ID NO: 1375017 - DNA, 15 bp, Homo sapiens
gggagagagtctggg

SEQ ID NO: 1375018 - DNA, 15 bp, Homo sapiens
tgggagagagtctgg

SEQ ID NO: 1375019 - DNA, 15 bp, Homo sapiens
atgggagagagtctg

SEQ ID NO: 1375020 - DNA, 15 bp, Homo sapiens
tatgggagagagtct

SEQ ID NO: 1375021 - DNA, 15 bp, Homo sapiens
ttatgggagagagtc

SEQ ID NO: 1375022 - DNA, 15 bp, Homo sapiens
tttatgggagagagt

SEQ ID NO: 1375023 - DNA, 15 bp, Homo sapiens
atttatgggagagag

SEQ ID NO: 1375024 - DNA, 15 bp, Homo sapiens
gatttatgggagaga

SEQ ID NO: 1375025 - DNA, 15 bp, Homo sapiens
ggatttatgggagag

SEQ ID NO: 1375026 - DNA, 15 bp, Homo sapiens
tggatttatgggaga

SEQ ID NO: 1375027 - DNA, 15 bp, Homo sapiens
atggatttatgggag

SEQ ID NO: 1375028 - DNA, 15 bp, Homo sapiens
catggatttatggga

SEQ ID NO: 1375029 - DNA, 15 bp, Homo sapiens
ccatggatttatggg

SEQ ID NO: 1375030 - DNA, 15 bp, Homo sapiens
accatggatttatgg

SEQ ID NO: 1375031 - DNA, 15 bp, Homo sapiens
aaccatggatttatg

SEQ ID NO: 1375032 - DNA, 15 bp, Homo sapiens
gaaccatggatttat

SEQ ID NO: 1375033 - DNA, 15 bp, Homo sapiens
ggaaccatggattta

SEQ ID NO: 1375034 - DNA, 15 bp, Homo sapiens
tggaaccatggattt

SEQ ID NO: 1375035 - DNA, 15 bp, Homo sapiens
ctggaaccatggatt

SEQ ID NO: 1375036 - DNA, 15 bp, Homo sapiens
tctggaaccatggat

SEQ ID NO: 1375037 - DNA, 15 bp, Homo sapiens
atctggaaccatgga

SEQ ID NO: 1375038 - DNA, 15 bp, Homo sapiens
gatctggaaccatgg

SEQ ID NO: 1375039 - DNA, 15 bp, Homo sapiens
agatctggaaccatg

SEQ ID NO: 1375040 - DNA, 15 bp, Homo sapiens
gagatctggaaccat

SEQ ID NO: 1375041 - DNA, 15 bp, Homo sapiens
tgagatctggaacca

SEQ ID NO: 1375042 - DNA, 15 bp, Homo sapiens
atgagatctggaacc

SEQ ID NO: 1375043 - DNA, 15 bp, Homo sapiens
catgagatctggaac

SEQ ID NO: 1375044 - DNA, 15 bp, Homo sapiens
gcatgagatctggaa

SEQ ID NO: 1375045 - DNA, 15 bp, Homo sapiens
agcatgagatctgga

SEQ ID NO: 1375046 - DNA, 15 bp, Homo sapiens
gagcatgagatctgg

SEQ ID NO: 1375047 - DNA, 15 bp, Homo sapiens
ggagcatgagatctg

SEQ ID NO: 1375048 - DNA, 15 bp, Homo sapiens
gggagcatgagatct

SEQ ID NO: 1375049 - DNA, 15 bp, Homo sapiens
tgggagcatgagatc

SEQ ID NO: 1375050 - DNA, 15 bp, Homo sapiens
ttgggagcatgagat

SEQ ID NO: 1375051 - DNA, 15 bp, Homo sapiens
gttgggagcatgaga

SEQ ID NO: 1375052 - DNA, 15 bp, Homo sapiens
ggttgggagcatgag

SEQ ID NO: 1375053 - DNA, 15 bp, Homo sapiens
gggttgggagcatga

SEQ ID NO: 1375054 - DNA, 15 bp, Homo sapiens
ggggttgggagcatg

SEQ ID NO: 1375055 - DNA, 15 bp, Homo sapiens
tggggttgggagcat

SEQ ID NO: 1375056 - DNA, 15 bp, Homo sapiens
ttggggttgggagca

SEQ ID NO: 1375057 - DNA, 15 bp, Homo sapiens
attggggttgggagc

SEQ ID NO: 1375058 - DNA, 15 bp, Homo sapiens
gattggggttgggag

SEQ ID NO: 1375059 - DNA, 15 bp, Homo sapiens
ggattggggttggga

SEQ ID NO: 1375060 - DNA, 15 bp, Homo sapiens
aggattggggttggg

SEQ ID NO: 1375061 - DNA, 15 bp, Homo sapiens
gaggattggggttgg

SEQ ID NO: 1375062 - DNA, 15 bp, Homo sapiens
tgaggattggggttg

SEQ ID NO: 1375063 - DNA, 15 bp, Homo sapiens
ttgaggattggggtt

SEQ ID NO: 1375064 - DNA, 15 bp, Homo sapiens
cttgaggattggggt

SEQ ID NO: 1375065 - DNA, 15 bp, Homo sapiens
gcttgaggattgggg

SEQ ID NO: 1375066 - DNA, 15 bp, Homo sapiens
agcttgaggattggg

SEQ ID NO: 1375067 - DNA, 15 bp, Homo sapiens
cagcttgaggattgg

SEQ ID NO: 1375068 - DNA, 15 bp, Homo sapiens
ccagcttgaggattg

SEQ ID NO: 1375069 - DNA, 15 bp, Homo sapiens
accagcttgaggatt

SEQ ID NO: 1375070 - DNA, 15 bp, Homo sapiens
taccagcttgaggat

SEQ ID NO: 1375071 - DNA, 15 bp, Homo sapiens
ctaccagcttgagga

SEQ ID NO: 1375072 - DNA, 15 bp, Homo sapiens
gctaccagcttgagg

SEQ ID NO: 1375073 - DNA, 15 bp, Homo sapiens
ggctaccagcttgag

SEQ ID NO: 1375074 - DNA, 15 bp, Homo sapiens
aggctaccagcttga

SEQ ID NO: 1375075 - DNA, 15 bp, Homo sapiens
taggctaccagcttg

SEQ ID NO: 1375076 - DNA, 15 bp, Homo sapiens
ttaggctaccagctt

SEQ ID NO: 1375077 - DNA, 15 bp, Homo sapiens
tttaggctaccagct

SEQ ID NO: 1375078 - DNA, 15 bp, Homo sapiens
gtttaggctaccagc

SEQ ID NO: 1375079 - DNA, 15 bp, Homo sapiens
ggtttaggctaccag

SEQ ID NO: 1375080 - DNA, 15 bp, Homo sapiens
tggtttaggctacca

SEQ ID NO: 1375081 - DNA, 15 bp, Homo sapiens
ctggtttaggctacc

SEQ ID NO: 1375082 - DNA, 15 bp, Homo sapiens
actggtttaggctac

SEQ ID NO: 1375083 - DNA, 15 bp, Homo sapiens
gactggtttaggcta

SEQ ID NO: 1375084 - DNA, 15 bp, Homo sapiens
tgactggtttaggct

SEQ ID NO: 1375085 - DNA, 15 bp, Homo sapiens
atgactggtttaggc

SEQ ID NO: 1375086 - DNA, 15 bp, Homo sapiens
tatgactggtttagg

SEQ ID NO: 1375087 - DNA, 15 bp, Homo sapiens
atatgactggtttag

SEQ ID NO: 1375088 - DNA, 15 bp, Homo sapiens
gatatgactggttta

SEQ ID NO: 1375089 - DNA, 15 bp, Homo sapiens
ggatatgactggttt

SEQ ID NO: 1375090 - DNA, 15 bp, Homo sapiens
aggatatgactggtt

SEQ ID NO: 1375091 - DNA, 15 bp, Homo sapiens
caggatatgactggt

SEQ ID NO: 1375092 - DNA, 15 bp, Homo sapiens
ccaggatatgactgg

SEQ ID NO: 1375093 - DNA, 15 bp, Homo sapiens
cccaggatatgactg

SEQ ID NO: 1375094 - DNA, 15 bp, Homo sapiens
tcccaggatatgact

SEQ ID NO: 1375095 - DNA, 15 bp, Homo sapiens
ttcccaggatatgac

SEQ ID NO: 1375096 - DNA, 15 bp, Homo sapiens
gttcccaggatatga

SEQ ID NO: 1375097 - DNA, 15 bp, Homo sapiens
ggttcccaggatatg

SEQ ID NO: 1375098 - DNA, 15 bp, Homo sapiens
aggttcccaggatat

SEQ ID NO: 1375099 - DNA, 15 bp, Homo sapiens
caggttcccaggata

SEQ ID NO: 1375100 - DNA, 15 bp, Homo sapiens
gcaggttcccaggat

SEQ ID NO: 1375101 - DNA, 15 bp, Homo sapiens
ggcaggttcccagga

SEQ ID NO: 1375102 - DNA, 15 bp, Homo sapiens
gggcaggttcccagg

SEQ ID NO: 1375103 - DNA, 15 bp, Homo sapiens
tgggcaggttcccag

SEQ ID NO: 1375104 - DNA, 15 bp, Homo sapiens
gtgggcaggttccca

SEQ ID NO: 1375105 - DNA, 15 bp, Homo sapiens
ggtgggcaggttccc

SEQ ID NO: 1375106 - DNA, 15 bp, Homo sapiens
gggtgggcaggttcc

SEQ ID NO: 1375107 - DNA, 15 bp, Homo sapiens
tgggtgggcaggttc

SEQ ID NO: 1375108 - DNA, 15 bp, Homo sapiens
gtgggtgggcaggtt

SEQ ID NO: 1375109 - DNA, 15 bp, Homo sapiens
agtgggtgggcaggt

SEQ ID NO: 1375110 - DNA, 15 bp, Homo sapiens
tagtgggtgggcagg

SEQ ID NO: 1375111 - DNA, 15 bp, Homo sapiens
gtagtgggtgggcag

SEQ ID NO: 1375112 - DNA, 15 bp, Homo sapiens
tgtagtgggtgggca

SEQ ID NO: 1375113 - DNA, 15 bp, Homo sapiens
atgtagtgggtgggc

SEQ ID NO: 1375114 - DNA, 15 bp, Homo sapiens
gatgtagtgggtggg

SEQ ID NO: 1375115 - DNA, 15 bp, Homo sapiens
ggatgtagtgggtgg

SEQ ID NO: 1375116 - DNA, 15 bp, Homo sapiens
gggatgtagtgggtg

SEQ ID NO: 1375117 - DNA, 15 bp, Homo sapiens
agggatgtagtgggt

SEQ ID NO: 1375118 - DNA, 15 bp, Homo sapiens
tagggatgtagtggg

SEQ ID NO: 1375119 - DNA, 15 bp, Homo sapiens
atagggatgtagtgg

SEQ ID NO: 1375120 - DNA, 15 bp, Homo sapiens
tatagggatgtagtg

SEQ ID NO: 1375121 - DNA, 15 bp, Homo sapiens
gtatagggatgtagt

SEQ ID NO: 1375122 - DNA, 15 bp, Homo sapiens
tgtatagggatgtag

SEQ ID NO: 1375123 - DNA, 15 bp, Homo sapiens
ctgtatagggatgta

SEQ ID NO: 1375124 - DNA, 15 bp, Homo sapiens
gctgtatagggatgt

SEQ ID NO: 1375125 - DNA, 15 bp, Homo sapiens
ggctgtatagggatg

SEQ ID NO: 1375126 - DNA, 15 bp, Homo sapiens
gggctgtatagggat

SEQ ID NO: 1375127 - DNA, 15 bp, Homo sapiens
agggctgtataggga

SEQ ID NO: 1375128 - DNA, 15 bp, Homo sapiens
aagggctgtataggg

SEQ ID NO: 1375129 - DNA, 15 bp, Homo sapiens
gaagggctgtatagg

SEQ ID NO: 1375130 - DNA, 15 bp, Homo sapiens
agaagggctgtatag

SEQ ID NO: 1375131 - DNA, 15 bp, Homo sapiens
cagaagggctgtata

SEQ ID NO: 1375132 - DNA, 15 bp, Homo sapiens
ccagaagggctgtat

SEQ ID NO: 1375133 - DNA, 15 bp, Homo sapiens
accagaagggctgta

SEQ ID NO: 1375134 - DNA, 15 bp, Homo sapiens
taccagaagggctgt

SEQ ID NO: 1375135 - DNA, 15 bp, Homo sapiens
ctaccagaagggctg

SEQ ID NO: 1375136 - DNA, 15 bp, Homo sapiens
gctaccagaagggct

SEQ ID NO: 1375137 - DNA, 15 bp, Homo sapiens
agctaccagaagggc

SEQ ID NO: 1375138 - DNA, 15 bp, Homo sapiens
aagctaccagaaggg

SEQ ID NO: 1375139 - DNA, 15 bp, Homo sapiens
gaagctaccagaagg

SEQ ID NO: 1375140 - DNA, 15 bp, Homo sapiens
tgaagctaccagaag

SEQ ID NO: 1375141 - DNA, 15 bp, Homo sapiens
gtgaagctaccagaa

SEQ ID NO: 1375142 - DNA, 15 bp, Homo sapiens
ggtgaagctaccaga

SEQ ID NO: 1375143 - DNA, 15 bp, Homo sapiens
aggtgaagctaccag

SEQ ID NO: 1375144 - DNA, 15 bp, Homo sapiens
gaggtgaagctacca

SEQ ID NO: 1375145 - DNA, 15 bp, Homo sapiens
tgaggtgaagctacc

SEQ ID NO: 1375146 - DNA, 15 bp, Homo sapiens
ctgaggtgaagctac

SEQ ID NO: 1375147 - DNA, 15 bp, Homo sapiens
tctgaggtgaagcta

SEQ ID NO: 1375148 - DNA, 15 bp, Homo sapiens
gtctgaggtgaagct

SEQ ID NO: 1375149 - DNA, 15 bp, Homo sapiens
agtctgaggtgaagc

SEQ ID NO: 1375150 - DNA, 15 bp, Homo sapiens
aagtctgaggtgaag

SEQ ID NO: 1375151 - DNA, 15 bp, Homo sapiens
aaagtctgaggtgaa

SEQ ID NO: 1375152 - DNA, 15 bp, Homo sapiens
aaaagtctgaggtga

SEQ ID NO: 1375153 - DNA, 15 bp, Homo sapiens
caaaagtctgaggtg

SEQ ID NO: 1375154 - DNA, 15 bp, Homo sapiens
tcaaaagtctgaggt

SEQ ID NO: 1375155 - DNA, 15 bp, Homo sapiens
ctcaaaagtctgagg

SEQ ID NO: 1375156 - DNA, 15 bp, Homo sapiens
gctcaaaagtctgag

SEQ ID NO: 1375157 - DNA, 15 bp, Homo sapiens
tgctcaaaagtctga

SEQ ID NO: 1375158 - DNA, 15 bp, Homo sapiens
ctgctcaaaagtctg

SEQ ID NO: 1375159 - DNA, 15 bp, Homo sapiens
tctgctcaaaagtct

SEQ ID NO: 1375160 - DNA, 15 bp, Homo sapiens
ctctgctcaaaagtc

SEQ ID NO: 1375161 - DNA, 15 bp, Homo sapiens
cctctgctcaaaagt

SEQ ID NO: 1375162 - DNA, 15 bp, Homo sapiens
gcctctgctcaaaag

SEQ ID NO: 1375163 - DNA, 15 bp, Homo sapiens
ggcctctgctcaaaa

SEQ ID NO: 1375164 - DNA, 15 bp, Homo sapiens
aggcctctgctcaaa

SEQ ID NO: 1375165 - DNA, 15 bp, Homo sapiens
taggcctctgctcaa

SEQ ID NO: 1375166 - DNA, 15 bp, Homo sapiens
ataggcctctgctca

SEQ ID NO: 1375167 - DNA, 15 bp, Homo sapiens
aataggcctctgctc

SEQ ID NO: 1375168 - DNA, 15 bp, Homo sapiens
gaataggcctctgct

SEQ ID NO: 1375169 - DNA, 15 bp, Homo sapiens
agaataggcctctgc

SEQ ID NO: 1375170 - DNA, 15 bp, Homo sapiens
cagaataggcctctg

SEQ ID NO: 1375171 - DNA, 15 bp, Homo sapiens
tcagaataggcctct

SEQ ID NO: 1375172 - DNA, 15 bp, Homo sapiens
ctcagaataggcctc

SEQ ID NO: 1375173 - DNA, 15 bp, Homo sapiens
actcagaataggcct

SEQ ID NO: 1375174 - DNA, 15 bp, Homo sapiens
gactcagaataggcc

SEQ ID NO: 1375175 - DNA, 15 bp, Homo sapiens
ggactcagaataggc

SEQ ID NO: 1375176 - DNA, 15 bp, Homo sapiens
gggactcagaatagg

SEQ ID NO: 1375177 - DNA, 15 bp, Homo sapiens
agggactcagaatag

SEQ ID NO: 1375178 - DNA, 15 bp, Homo sapiens
cagggactcagaata

SEQ ID NO: 1375179 - DNA, 15 bp, Homo sapiens
tcagggactcagaat

SEQ ID NO: 1375180 - DNA, 15 bp, Homo sapiens
ttcagggactcagaa

SEQ ID NO: 1375181 - DNA, 15 bp, Homo sapiens
gttcagggactcaga

SEQ ID NO: 1375182 - DNA, 15 bp, Homo sapiens
tgttcagggactcag

SEQ ID NO: 1375183 - DNA, 15 bp, Homo sapiens
ctgttcagggactca

SEQ ID NO: 1375184 - DNA, 15 bp, Homo sapiens
actgttcagggactc

SEQ ID NO: 1375185 - DNA, 15 bp, Homo sapiens
tactgttcagggact

SEQ ID NO: 1375186 - DNA, 15 bp, Homo sapiens
atactgttcagggac

SEQ ID NO: 1375187 - DNA, 15 bp, Homo sapiens
aatactgttcaggga

SEQ ID NO: 1375188 - DNA, 15 bp, Homo sapiens
caatactgttcaggg

SEQ ID NO: 1375189 - DNA, 15 bp, Homo sapiens
tcaatactgttcagg

SEQ ID NO: 1375190 - DNA, 15 bp, Homo sapiens
atcaatactgttcag

SEQ ID NO: 1375191 - DNA, 15 bp, Homo sapiens
catcaatactgttca

SEQ ID NO: 1375192 - DNA, 15 bp, Homo sapiens
ccatcaatactgttc

SEQ ID NO: 1375193 - DNA, 15 bp, Homo sapiens
tccatcaatactgtt

SEQ ID NO: 1375194 - DNA, 15 bp, Homo sapiens
ctccatcaatactgt

SEQ ID NO: 1375195 - DNA, 15 bp, Homo sapiens
cctccatcaatactg

SEQ ID NO: 1375196 - DNA, 15 bp, Homo sapiens
ccctccatcaatact

SEQ ID NO: 1375197 - DNA, 15 bp, Homo sapiens
cccctccatcaatac

SEQ ID NO: 1375198 - DNA, 15 bp, Homo sapiens
acccctccatcaata

SEQ ID NO: 1375199 - DNA, 15 bp, Homo sapiens
cacccctccatcaat

SEQ ID NO: 1375200 - DNA, 15 bp, Homo sapiens
tcacccctccatcaa

SEQ ID NO: 1375201 - DNA, 15 bp, Homo sapiens
atcacccctccatca

SEQ ID NO: 1375202 - DNA, 15 bp, Homo sapiens
aatcacccctccatc

SEQ ID NO: 1375203 - DNA, 15 bp, Homo sapiens
gaatcacccctccat

SEQ ID NO: 1375204 - DNA, 15 bp, Homo sapiens
ggaatcacccctcca

SEQ ID NO: 1375205 - DNA, 15 bp, Homo sapiens
gggaatcacccctcc

SEQ ID NO: 1375206 - DNA, 15 bp, Homo sapiens
agggaatcacccctc

SEQ ID NO: 1375207 - DNA, 15 bp, Homo sapiens
cagggaatcacccct

SEQ ID NO: 1375208 - DNA, 15 bp, Homo sapiens
ccagggaatcacccc

SEQ ID NO: 1375209 - DNA, 15 bp, Homo sapiens
tccagggaatcaccc

SEQ ID NO: 1375210 - DNA, 15 bp, Homo sapiens
gtccagggaatcacc

SEQ ID NO: 1375211 - DNA, 15 bp, Homo sapiens
tgtccagggaatcac

SEQ ID NO: 1375212 - DNA, 15 bp, Homo sapiens
ttgtccagggaatca

SEQ ID NO: 1375213 - DNA, 15 bp, Homo sapiens
attgtccagggaatc

SEQ ID NO: 1375214 - DNA, 15 bp, Homo sapiens
aattgtccagggaat

SEQ ID NO: 1375215 - DNA, 15 bp, Homo sapiens
aaattgtccagggaa

SEQ ID NO: 1375216 - DNA, 15 bp, Homo sapiens
aaaattgtccaggga

SEQ ID NO: 1375217 - DNA, 15 bp, Homo sapiens
gaaaattgtccaggg

SEQ ID NO: 1375218 - DNA, 15 bp, Homo sapiens
agaaaattgtccagg

SEQ ID NO: 1375219 - DNA, 15 bp, Homo sapiens
tagaaaattgtccag

SEQ ID NO: 1375220 - DNA, 15 bp, Homo sapiens
ctagaaaattgtcca

SEQ ID NO: 1375221 - DNA, 15 bp, Homo sapiens
cctagaaaattgtcc

SEQ ID NO: 1375222 - DNA, 15 bp, Homo sapiens
acctagaaaattgtc

SEQ ID NO: 1375223 - DNA, 15 bp, Homo sapiens
tacctagaaaattgt

SEQ ID NO: 1375224 - DNA, 15 bp, Homo sapiens
ctacctagaaaattg

SEQ ID NO: 1375225 - DNA, 15 bp, Homo sapiens
actacctagaaaatt

SEQ ID NO: 1375226 - DNA, 15 bp, Homo sapiens
gactacctagaaaat

SEQ ID NO: 1375227 - DNA, 15 bp, Homo sapiens
tgactacctagaaaa

SEQ ID NO: 1375228 - DNA, 15 bp, Homo sapiens
gtgactacctagaaa

SEQ ID NO: 1375229 - DNA, 15 bp, Homo sapiens
agtgactacctagaa

SEQ ID NO: 1375230 - DNA, 15 bp, Homo sapiens
aagtgactacctaga

SEQ ID NO: 1375231 - DNA, 15 bp, Homo sapiens
gaagtgactacctag

SEQ ID NO: 1375232 - DNA, 15 bp, Homo sapiens
ggaagtgactaccta

SEQ ID NO: 1375233 - DNA, 15 bp, Homo sapiens
aggaagtgactacct

SEQ ID NO: 1375234 - DNA, 15 bp, Homo sapiens
taggaagtgactacc

SEQ ID NO: 1375235 - DNA, 15 bp, Homo sapiens
ataggaagtgactac

SEQ ID NO: 1375236 - DNA, 15 bp, Homo sapiens
gataggaagtgacta

SEQ ID NO: 1375237 - DNA, 15 bp, Homo sapiens
ggataggaagtgact

SEQ ID NO: 1375238 - DNA, 15 bp, Homo sapiens
gggataggaagtgac

SEQ ID NO: 1375239 - DNA, 15 bp, Homo sapiens
tgggataggaagtga

SEQ ID NO: 1375240 - DNA, 15 bp, Homo sapiens
ttgggataggaagtg

SEQ ID NO: 1375241 - DNA, 15 bp, Homo sapiens
cttgggataggaagt

SEQ ID NO: 1375242 - DNA, 15 bp, Homo sapiens
gcttgggataggaag

SEQ ID NO: 1375243 - DNA, 15 bp, Homo sapiens
tgcttgggataggaa

SEQ ID NO: 1375244 - DNA, 15 bp, Homo sapiens
ctgcttgggatagga

SEQ ID NO: 1375245 - DNA, 15 bp, Homo sapiens
gctgcttgggatagg

SEQ ID NO: 1375246 - DNA, 15 bp, Homo sapiens
tgctgcttgggatag

SEQ ID NO: 1375247 - DNA, 15 bp, Homo sapiens
ttgctgcttgggata

SEQ ID NO: 1375248 - DNA, 15 bp, Homo sapiens
tttgctgcttgggat

SEQ ID NO: 1375249 - DNA, 15 bp, Homo sapiens
ctttgctgcttggga

SEQ ID NO: 1375250 - DNA, 15 bp, Homo sapiens
tctttgctgcttggg

SEQ ID NO: 1375251 - DNA, 15 bp, Homo sapiens
ttctttgctgcttgg

SEQ ID NO: 1375252 - DNA, 15 bp, Homo sapiens
cttctttgctgcttg

SEQ ID NO: 1375253 - DNA, 15 bp, Homo sapiens
ccttctttgctgctt

SEQ ID NO: 1375254 - DNA, 15 bp, Homo sapiens
cccttctttgctgct

SEQ ID NO: 1375255 - DNA, 15 bp, Homo sapiens
tcccttctttgctgc

SEQ ID NO: 1375256 - DNA, 15 bp, Homo sapiens
ttcccttctttgctg

SEQ ID NO: 1375257 - DNA, 15 bp, Homo sapiens
attcccttctttgct

SEQ ID NO: 1375258 - DNA, 15 bp, Homo sapiens
cattcccttctttgc

SEQ ID NO: 1375259 - DNA, 15 bp, Homo sapiens
tcattcccttctttg

SEQ ID NO: 1375260 - DNA, 15 bp, Homo sapiens
ttcattcccttcttt

SEQ ID NO: 1375261 - DNA, 15 bp, Homo sapiens
attcattcccttctt

SEQ ID NO: 1375262 - DNA, 15 bp, Homo sapiens
gattcattcccttct

SEQ ID NO: 1375263 - DNA, 15 bp, Homo sapiens
agattcattcccttc

SEQ ID NO: 1375264 - DNA, 15 bp, Homo sapiens
gagattcattccctt

SEQ ID NO: 1375265 - DNA, 15 bp, Homo sapiens
tgagattcattccct

SEQ ID NO: 1375266 - DNA, 15 bp, Homo sapiens
ctgagattcattccc

SEQ ID NO: 1375267 - DNA, 15 bp, Homo sapiens
cctgagattcattcc

SEQ ID NO: 1375268 - DNA, 15 bp, Homo sapiens
gcctgagattcattc

SEQ ID NO: 1375269 - DNA, 15 bp, Homo sapiens
ggcctgagattcatt

SEQ ID NO: 1375270 - DNA, 15 bp, Homo sapiens
aggcctgagattcat

SEQ ID NO: 1375271 - DNA, 15 bp, Homo sapiens
caggcctgagattca

SEQ ID NO: 1375272 - DNA, 15 bp, Homo sapiens
acaggcctgagattc

SEQ ID NO: 1375273 - DNA, 15 bp, Homo sapiens
cacaggcctgagatt

SEQ ID NO: 1375274 - DNA, 15 bp, Homo sapiens
tcacaggcctgagat

SEQ ID NO: 1375275 - DNA, 15 bp, Homo sapiens
ttcacaggcctgaga

SEQ ID NO: 1375276 - DNA, 15 bp, Homo sapiens
tttcacaggcctgag

SEQ ID NO: 1375277 - DNA, 15 bp, Homo sapiens
ttttcacaggcctga

SEQ ID NO: 1375278 - DNA, 15 bp, Homo sapiens
gttttcacaggcctg

SEQ ID NO: 1375279 - DNA, 15 bp, Homo sapiens
ggttttcacaggcct

SEQ ID NO: 1375280 - DNA, 15 bp, Homo sapiens
tggttttcacaggcc

SEQ ID NO: 1375281 - DNA, 15 bp, Homo sapiens
atggttttcacaggc

SEQ ID NO: 1375282 - DNA, 15 bp, Homo sapiens
catggttttcacagg

SEQ ID NO: 1375283 - DNA, 15 bp, Homo sapiens
gcatggttttcacag

SEQ ID NO: 1375284 - DNA, 15 bp, Homo sapiens
agcatggttttcaca

SEQ ID NO: 1375285 - DNA, 15 bp, Homo sapiens
cagcatggttttcac

SEQ ID NO: 1375286 - DNA, 15 bp, Homo sapiens
ggcagcatggttttc

SEQ ID NO: 1375287 - DNA, 15 bp, Homo sapiens
tggcagcatggtttt

SEQ ID NO: 1375288 - DNA, 15 bp, Homo sapiens
gtggcagcatggttt

SEQ ID NO: 1375289 - DNA, 15 bp, Homo sapiens
agtggcagcatggtt

SEQ ID NO: 1375290 - DNA, 15 bp, Homo sapiens
cagtggcagcatggt

SEQ ID NO: 1375291 - DNA, 15 bp, Homo sapiens
acagtggcagcatgg

SEQ ID NO: 1375292 - DNA, 15 bp, Homo sapiens
cacagtggcagcatg

SEQ ID NO: 1375293 - DNA, 15 bp, Homo sapiens
gcacagtggcagcat

SEQ ID NO: 1375294 - DNA, 15 bp, Homo sapiens
tgcacagtggcagca

SEQ ID NO: 1375295 - DNA, 15 bp, Homo sapiens
ctgcacagtggcagc

SEQ ID NO: 1375296 - DNA, 15 bp, Homo sapiens
gctgcacagtggcag

SEQ ID NO: 1375297 - DNA, 15 bp, Homo sapiens
tgctgcacagtggca

SEQ ID NO: 1375298 - DNA, 15 bp, Homo sapiens
ctgctgcacagtggc

SEQ ID NO: 1375299 - DNA, 15 bp, Homo sapiens
gctgctgcacagtgg

SEQ ID NO: 1375300 - DNA, 15 bp, Homo sapiens
agctgctgcacagtg

SEQ ID NO: 1375301 - DNA, 15 bp, Homo sapiens
aagctgctgcacagt

SEQ ID NO: 1375302 - DNA, 15 bp, Homo sapiens
gaagctgctgcacag

SEQ ID NO: 1375303 - DNA, 15 bp, Homo sapiens
agaagctgctgcaca

SEQ ID NO: 1375304 - DNA, 15 bp, Homo sapiens
aagaagctgctgcac

SEQ ID NO: 1375305 - DNA, 15 bp, Homo sapiens
caagaagctgctgca

SEQ ID NO: 1375306 - DNA, 15 bp, Homo sapiens
ccaagaagctgctgc

SEQ ID NO: 1375307 - DNA, 15 bp, Homo sapiens
cccaagaagctgctg

SEQ ID NO: 1375308 - DNA, 15 bp, Homo sapiens
ccccaagaagctgct

SEQ ID NO: 1375309 - DNA, 15 bp, Homo sapiens
cccccaagaagctgc

SEQ ID NO: 1375310 - DNA, 15 bp, Homo sapiens
acccccaagaagctg

SEQ ID NO: 1375311 - DNA, 15 bp, Homo sapiens
tacccccaagaagct

SEQ ID NO: 1375312 - DNA, 15 bp, Homo sapiens
ttacccccaagaagc

SEQ ID NO: 1375313 - DNA, 15 bp, Homo sapiens
cttacccccaagaag

SEQ ID NO: 1375314 - DNA, 15 bp, Homo sapiens
tcttacccccaagaa

SEQ ID NO: 1375315 - DNA, 15 bp, Homo sapiens
ctcttacccccaaga

SEQ ID NO: 1375316 - DNA, 15 bp, Homo sapiens
tctcttacccccaag

SEQ ID NO: 1375317 - DNA, 15 bp, Homo sapiens
atctcttacccccaa

SEQ ID NO: 1375318 - DNA, 15 bp, Homo sapiens
tatctcttaccccca

SEQ ID NO: 1375319 - DNA, 15 bp, Homo sapiens
ttatctcttaccccc

SEQ ID NO: 1375320 - DNA, 15 bp, Homo sapiens
attatctcttacccc

SEQ ID NO: 1375321 - DNA, 15 bp, Homo sapiens
tattatctcttaccc

SEQ ID NO: 1375322 - DNA, 15 bp, Homo sapiens
atattatctcttacc

SEQ ID NO: 1375323 - DNA, 15 bp, Homo sapiens
gatattatctcttac

SEQ ID NO: 1375324 - DNA, 15 bp, Homo sapiens
ggatattatctctta

SEQ ID NO: 1375325 - DNA, 15 bp, Homo sapiens
aggatattatctctt

SEQ ID NO: 1375326 - DNA, 15 bp, Homo sapiens
gaggatattatctct

SEQ ID NO: 1375327 - DNA, 15 bp, Homo sapiens
tgaggatattatctc

SEQ ID NO: 1375328 - DNA, 15 bp, Homo sapiens
gtgaggatattatct

SEQ ID NO: 1375329 - DNA, 15 bp, Homo sapiens
agtgaggatattatc

SEQ ID NO: 1375330 - DNA, 15 bp, Homo sapiens
aagtgaggatattat

SEQ ID NO: 1375331 - DNA, 15 bp, Homo sapiens
caagtgaggatatta

SEQ ID NO: 1375332 - DNA, 15 bp, Homo sapiens
acaagtgaggatatt

SEQ ID NO: 1375333 - DNA, 15 bp, Homo sapiens
gacaagtgaggatat

SEQ ID NO: 1375334 - DNA, 15 bp, Homo sapiens
agacaagtgaggata

SEQ ID NO: 1375335 - DNA, 15 bp, Homo sapiens
gagacaagtgaggat

SEQ ID NO: 1375336 - DNA, 15 bp, Homo sapiens
agagacaagtgagga

SEQ ID NO: 1375337 - DNA, 15 bp, Homo sapiens
aagagacaagtgagg

SEQ ID NO: 1375338 - DNA, 15 bp, Homo sapiens
taagagacaagtgag

SEQ ID NO: 1375339 - DNA, 15 bp, Homo sapiens
ctaagagacaagtga

SEQ ID NO: 1375340 - DNA, 15 bp, Homo sapiens
cctaagagacaagtg

SEQ ID NO: 1375341 - DNA, 15 bp, Homo sapiens
acctaagagacaagt

SEQ ID NO: 1375342 - DNA, 15 bp, Homo sapiens
gacctaagagacaag

SEQ ID NO: 1375343 - DNA, 15 bp, Homo sapiens
cgacctaagagacaa

SEQ ID NO: 1375344 - DNA, 15 bp, Homo sapiens
acgacctaagagaca

SEQ ID NO: 1375345 - DNA, 15 bp, Homo sapiens
aacgacctaagagac

SEQ ID NO: 1375346 - DNA, 15 bp, Homo sapiens
gaacgacctaagaga

SEQ ID NO: 1375347 - DNA, 15 bp, Homo sapiens
ggaacgacctaagag

SEQ ID NO: 1375348 - DNA, 15 bp, Homo sapiens
tggaacgacctaaga

SEQ ID NO: 1375349 - DNA, 15 bp, Homo sapiens
atggaacgacctaag

SEQ ID NO: 1375350 - DNA, 15 bp, Homo sapiens
tatggaacgacctaa

SEQ ID NO: 1375351 - DNA, 15 bp, Homo sapiens
ctatggaacgaccta

SEQ ID NO: 1375352 - DNA, 15 bp, Homo sapiens
cctatggaacgacct

SEQ ID NO: 1375353 - DNA, 15 bp, Homo sapiens
gcctatggaacgacc

SEQ ID NO: 1375354 - DNA, 15 bp, Homo sapiens
agcctatggaacgac

SEQ ID NO: 1375355 - DNA, 15 bp, Homo sapiens
tagcctatggaacga

SEQ ID NO: 1375356 - DNA, 15 bp, Homo sapiens
ttagcctatggaacg

SEQ ID NO: 1375357 - DNA, 15 bp, Homo sapiens
tttagcctatggaac

SEQ ID NO: 1375358 - DNA, 15 bp, Homo sapiens
ctttagcctatggaa

SEQ ID NO: 1375359 - DNA, 15 bp, Homo sapiens
gctttagcctatgga

SEQ ID NO: 1375360 - DNA, 15 bp, Homo sapiens
agctttagcctatgg

SEQ ID NO: 1375361 - DNA, 15 bp, Homo sapiens
cagctttagcctatg

SEQ ID NO: 1375362 - DNA, 15 bp, Homo sapiens
ccagctttagcctat

SEQ ID NO: 1375363 - DNA, 15 bp, Homo sapiens
gccagctttagccta

SEQ ID NO: 1375364 - DNA, 15 bp, Homo sapiens
ggccagctttagcct

SEQ ID NO: 1375365 - DNA, 15 bp, Homo sapiens
aggccagctttagcc

SEQ ID NO: 1375366 - DNA, 15 bp, Homo sapiens
taggccagctttagc

SEQ ID NO: 1375367 - DNA, 15 bp, Homo sapiens
ctaggccagctttag

SEQ ID NO: 1375368 - DNA, 15 bp, Homo sapiens
gctaggccagcttta

SEQ ID NO: 1375369 - DNA, 15 bp, Homo sapiens
ggctaggccagcttt

SEQ ID NO: 1375370 - DNA, 15 bp, Homo sapiens
tggctaggccagctt

SEQ ID NO: 1375371 - DNA, 15 bp, Homo sapiens
ttggctaggccagct

SEQ ID NO: 1375372 - DNA, 15 bp, Homo sapiens
cttggctaggccagc

SEQ ID NO: 1375373 - DNA, 15 bp, Homo sapiens
tcttggctaggccag

SEQ ID NO: 1375374 - DNA, 15 bp, Homo sapiens
ttcttggctaggcca

SEQ ID NO: 1375375 - DNA, 15 bp, Homo sapiens
gttcttggctaggcc

SEQ ID NO: 1375376 - DNA, 15 bp, Homo sapiens
agttcttggctaggc

SEQ ID NO: 1375377 - DNA, 15 bp, Homo sapiens
aagttcttggctagg

SEQ ID NO: 1375378 - DNA, 15 bp, Homo sapiens
caagttcttggctag

SEQ ID NO: 1375379 - DNA, 15 bp, Homo sapiens
acaagttcttggcta

SEQ ID NO: 1375380 - DNA, 15 bp, Homo sapiens
tacaagttcttggct

SEQ ID NO: 1375381 - DNA, 15 bp, Homo sapiens
atacaagttcttggc

SEQ ID NO: 1375382 - DNA, 15 bp, Homo sapiens
gatacaagttcttgg

SEQ ID NO: 1375383 - DNA, 15 bp, Homo sapiens
tgatacaagttcttg

SEQ ID NO: 1375384 - DNA, 15 bp, Homo sapiens
ctgatacaagttctt

SEQ ID NO: 1375385 - DNA, 15 bp, Homo sapiens
cctgatacaagttct

SEQ ID NO: 1375386 - DNA, 15 bp, Homo sapiens
acctgatacaagttc

SEQ ID NO: 1375387 - DNA, 15 bp, Homo sapiens
tacctgatacaagtt

SEQ ID NO: 1375388 - DNA, 15 bp, Homo sapiens
gtacctgatacaagt

SEQ ID NO: 1375389 - DNA, 15 bp, Homo sapiens
agtacctgatacaag

SEQ ID NO: 1375390 - DNA, 15 bp, Homo sapiens
cagtacctgatacaa

SEQ ID NO: 1375391 - DNA, 15 bp, Homo sapiens
acagtacctgataca

SEQ ID NO: 1375392 - DNA, 15 bp, Homo sapiens
cacagtacctgatac

SEQ ID NO: 1375393 - DNA, 15 bp, Homo sapiens
tcacagtacctgata

SEQ ID NO: 1375394 - DNA, 15 bp, Homo sapiens
ttcacagtacctgat

SEQ ID NO: 1375395 - DNA, 15 bp, Homo sapiens
tttcacagtacctga

SEQ ID NO: 1375396 - DNA, 15 bp, Homo sapiens
atttcacagtacctg

SEQ ID NO: 1375397 - DNA, 15 bp, Homo sapiens
aatttcacagtacct

SEQ ID NO: 1375398 - DNA, 15 bp, Homo sapiens
taatttcacagtacc

SEQ ID NO: 1375399 - DNA, 15 bp, Homo sapiens
ataatttcacagtac

SEQ ID NO: 1375400 - DNA, 15 bp, Homo sapiens
cataatttcacagta

SEQ ID NO: 1375401 - DNA, 15 bp, Homo sapiens
tcataatttcacagt

SEQ ID NO: 1375402 - DNA, 15 bp, Homo sapiens
ttcataatttcacag

SEQ ID NO: 1375403 - DNA, 15 bp, Homo sapiens
tttcataatttcaca

SEQ ID NO: 1375404 - DNA, 15 bp, Homo sapiens
ttttcataatttcac

SEQ ID NO: 1375405 - DNA, 15 bp, Homo sapiens
cttttcataatttca

SEQ ID NO: 1375406 - DNA, 15 bp, Homo sapiens
acttttcataatttc

SEQ ID NO: 1375407 - DNA, 15 bp, Homo sapiens
aacttttcataattt

SEQ ID NO: 1375408 - DNA, 15 bp, Homo sapiens
caacttttcataatt

SEQ ID NO: 1375409 - DNA, 15 bp, Homo sapiens
acaacttttcataat

SEQ ID NO: 1375410 - DNA, 15 bp, Homo sapiens
aacaacttttcataa

SEQ ID NO: 1375411 - DNA, 15 bp, Homo sapiens
aaacaacttttcata

SEQ ID NO: 1375412 - DNA, 15 bp, Homo sapiens
gaaacaacttttcat

SEQ ID NO: 1375413 - DNA, 15 bp, Homo sapiens
tgaaacaacttttca

SEQ ID NO: 1375414 - DNA, 15 bp, Homo sapiens
atgaaacaacttttc

SEQ ID NO: 1375415 - DNA, 15 bp, Homo sapiens
aatgaaacaactttt

SEQ ID NO: 1375416 - DNA, 15 bp, Homo sapiens
caatgaaacaacttt

SEQ ID NO: 1375417 - DNA, 15 bp, Homo sapiens
acaatgaaacaactt

SEQ ID NO: 1375418 - DNA, 15 bp, Homo sapiens
gacaatgaaacaact

SEQ ID NO: 1375419 - DNA, 15 bp, Homo sapiens
agacaatgaaacaac

SEQ ID NO: 1375420 - DNA, 15 bp, Homo sapiens
tagacaatgaaacaa

SEQ ID NO: 1375421 - DNA, 15 bp, Homo sapiens
atagacaatgaaaca

SEQ ID NO: 1375422 - DNA, 15 bp, Homo sapiens
gatagacaatgaaac

SEQ ID NO: 1375423 - DNA, 15 bp, Homo sapiens
agatagacaatgaaa

SEQ ID NO: 1375424 - DNA, 15 bp, Homo sapiens
aagatagacaatgaa

SEQ ID NO: 1375425 - DNA, 15 bp, Homo sapiens
gaagatagacaatga

SEQ ID NO: 1375426 - DNA, 15 bp, Homo sapiens
tgaagatagacaatg

SEQ ID NO: 1375427 - DNA, 15 bp, Homo sapiens
ttgaagatagacaat

SEQ ID NO: 1375428 - DNA, 15 bp, Homo sapiens
cttgaagatagacaa

SEQ ID NO: 1375429 - DNA, 15 bp, Homo sapiens
acttgaagatagaca

SEQ ID NO: 1375430 - DNA, 15 bp, Homo sapiens
tacttgaagatagac

SEQ ID NO: 1375431 - DNA, 15 bp, Homo sapiens
ttacttgaagataga

SEQ ID NO: 1375432 - DNA, 15 bp, Homo sapiens
attacttgaagatag

SEQ ID NO: 1375433 - DNA, 15 bp, Homo sapiens
tattacttgaagata

SEQ ID NO: 1375434 - DNA, 15 bp, Homo sapiens
atattacttgaagat

SEQ ID NO: 1375435 - DNA, 15 bp, Homo sapiens
tatattacttgaaga

SEQ ID NO: 1375436 - DNA, 15 bp, Homo sapiens
ttatattacttgaag

SEQ ID NO: 1375437 - DNA, 15 bp, Homo sapiens
tttatattacttgaa

SEQ ID NO: 1375438 - DNA, 15 bp, Homo sapiens
atttatattacttga

SEQ ID NO: 1375439 - DNA, 15 bp, Homo sapiens
catttatattacttg

SEQ ID NO: 1375440 - DNA, 15 bp, Homo sapiens
tcatttatattactt

SEQ ID NO: 1375441 - DNA, 15 bp, Homo sapiens
ctcatttatattact

SEQ ID NO: 1375442 - DNA, 15 bp, Homo sapiens
tctcatttatattac

SEQ ID NO: 1375443 - DNA, 15 bp, Homo sapiens
ctctcatttatatta

SEQ ID NO: 1375444 - DNA, 15 bp, Homo sapiens
tctctcatttatatt

SEQ ID NO: 1375445 - DNA, 15 bp, Homo sapiens
ctctctcatttatat

SEQ ID NO: 1375446 - DNA, 15 bp, Homo sapiens
actctctcatttata

SEQ ID NO: 1375447 - DNA, 15 bp, Homo sapiens
tactctctcatttat

SEQ ID NO: 1375448 - DNA, 15 bp, Homo sapiens
ctactctctcattta

SEQ ID NO: 1375449 - DNA, 15 bp, Homo sapiens
cctactctctcattt

SEQ ID NO: 1375450 - DNA, 15 bp, Homo sapiens
acctactctctcatt

SEQ ID NO: 1375451 - DNA, 15 bp, Homo sapiens
aacctactctctcat

SEQ ID NO: 1375452 - DNA, 15 bp, Homo sapiens
aaacctactctctca

SEQ ID NO: 1375453 - DNA, 15 bp, Homo sapiens
aaaacctactctctc

SEQ ID NO: 1375454 - DNA, 15 bp, Homo sapiens
taaaacctactctct

SEQ ID NO: 1375455 - DNA, 15 bp, Homo sapiens
ataaaacctactctc

SEQ ID NO: 1375456 - DNA, 15 bp, Homo sapiens
aataaaacctactct

SEQ ID NO: 1375457 - DNA, 15 bp, Homo sapiens
aaataaaacctactc

SEQ ID NO: 1375458 - DNA, 15 bp, Homo sapiens
aaaataaaacctact

SEQ ID NO: 1375459 - DNA, 15 bp, Homo sapiens
gaaaataaaacctac

SEQ ID NO: 1375460 - DNA, 15 bp, Homo sapiens
tgaaaataaaaccta

SEQ ID NO: 1375461 - DNA, 15 bp, Homo sapiens
atgaaaataaaacct

SEQ ID NO: 1375462 - DNA, 15 bp, Homo sapiens
tatgaaaataaaacc

SEQ ID NO: 1375463 - DNA, 15 bp, Homo sapiens
ttatgaaaataaaac

SEQ ID NO: 1375464 - DNA, 15 bp, Homo sapiens
tttatgaaaataaaa

SEQ ID NO: 1375465 - DNA, 15 bp, Homo sapiens
ttttatgaaaataaa

SEQ ID NO: 1375466 - DNA, 15 bp, Homo sapiens
attttatgaaaataa

SEQ ID NO: 1375467 - DNA, 15 bp, Homo sapiens
aattttatgaaaata

SEQ ID NO: 1375468 - DNA, 15 bp, Homo sapiens
taattttatgaaaat

SEQ ID NO: 1375469 - DNA, 15 bp, Homo sapiens
ttaattttatgaaaa

SEQ ID NO: 1375470 - DNA, 15 bp, Homo sapiens
tttaattttatgaaa

SEQ ID NO: 1375471 - DNA, 15 bp, Homo sapiens
ctttaattttatgaa

SEQ ID NO: 1375472 - DNA, 15 bp, Homo sapiens
tctttaattttatga

SEQ ID NO: 1375473 - DNA, 15 bp, Homo sapiens
atctttaattttatg

SEQ ID NO: 1375474 - DNA, 15 bp, Homo sapiens
aatctttaattttat

SEQ ID NO: 1375475 - DNA, 15 bp, Homo sapiens
taatctttaatttta

SEQ ID NO: 1375476 - DNA, 15 bp, Homo sapiens
gtaatctttaatttt

SEQ ID NO: 1375477 - DNA, 15 bp, Homo sapiens
tgtaatctttaattt

SEQ ID NO: 1375478 - DNA, 15 bp, Homo sapiens
ctgtaatctttaatt

SEQ ID NO: 1375479 - DNA, 15 bp, Homo sapiens
tctgtaatctttaat

SEQ ID NO: 1375480 - DNA, 15 bp, Homo sapiens
ttctgtaatctttaa

SEQ ID NO: 1375481 - DNA, 15 bp, Homo sapiens
tttctgtaatcttta

SEQ ID NO: 1375482 - DNA, 15 bp, Homo sapiens
atttctgtaatcttt

SEQ ID NO: 1375483 - DNA, 15 bp, Homo sapiens
catttctgtaatctt

SEQ ID NO: 1375484 - DNA, 15 bp, Homo sapiens
acatttctgtaatct

SEQ ID NO: 1375485 - DNA, 15 bp, Homo sapiens
aacatttctgtaatc

SEQ ID NO: 1375486 - DNA, 15 bp, Homo sapiens
caacatttctgtaat

SEQ ID NO: 1375487 - DNA, 15 bp, Homo sapiens
acaacatttctgtaa

SEQ ID NO: 1375488 - DNA, 15 bp, Homo sapiens
aacaacatttctgta

SEQ ID NO: 1375489 - DNA, 15 bp, Homo sapiens
gaacaacatttctgt

SEQ ID NO: 1375490 - DNA, 15 bp, Homo sapiens
tgaacaacatttctg

SEQ ID NO: 1375491 - DNA, 15 bp, Homo sapiens
ttgaacaacatttct

SEQ ID NO: 1375492 - DNA, 15 bp, Homo sapiens
tttgaacaacatttc

SEQ ID NO: 1375493 - DNA, 15 bp, Homo sapiens
atttgaacaacattt

SEQ ID NO: 1375494 - DNA, 15 bp, Homo sapiens
aatttgaacaacatt

SEQ ID NO: 1375495 - DNA, 15 bp, Homo sapiens
taatttgaacaacat

SEQ ID NO: 1375496 - DNA, 15 bp, Homo sapiens
ctaatttgaacaaca

SEQ ID NO: 1375497 - DNA, 15 bp, Homo sapiens
tctaatttgaacaac

SEQ ID NO: 1375498 - DNA, 15 bp, Homo sapiens
ctctaatttgaacaa

SEQ ID NO: 1375499 - DNA, 15 bp, Homo sapiens
gctctaatttgaaca

SEQ ID NO: 1375500 - DNA, 15 bp, Homo sapiens
agctctaatttgaac

SEQ ID NO: 1375501 - DNA, 15 bp, Homo sapiens
aagctctaatttgaa

SEQ ID NO: 1375502 - DNA, 15 bp, Homo sapiens
taagctctaatttga

SEQ ID NO: 1375503 - DNA, 15 bp, Homo sapiens
ttaagctctaatttg

SEQ ID NO: 1375504 - DNA, 15 bp, Homo sapiens
attaagctctaattt

SEQ ID NO: 1375505 - DNA, 15 bp, Homo sapiens
gattaagctctaatt

SEQ ID NO: 1375506 - DNA, 15 bp, Homo sapiens
tgattaagctctaat

SEQ ID NO: 1375507 - DNA, 15 bp, Homo sapiens
gtgattaagctctaa

SEQ ID NO: 1375508 - DNA, 15 bp, Homo sapiens
tgtgattaagctcta

SEQ ID NO: 1375509 - DNA, 15 bp, Homo sapiens
gtgtgattaagctct

SEQ ID NO: 1375510 - DNA, 15 bp, Homo sapiens
tgtgtgattaagctc

SEQ ID NO: 1375511 - DNA, 15 bp, Homo sapiens
ctgtgtgattaagct

SEQ ID NO: 1375512 - DNA, 15 bp, Homo sapiens
cctgtgtgattaagc

SEQ ID NO: 1375513 - DNA, 15 bp, Homo sapiens
tcctgtgtgattaag

SEQ ID NO: 1375514 - DNA, 15 bp, Homo sapiens
ttcctgtgtgattaa

SEQ ID NO: 1375515 - DNA, 15 bp, Homo sapiens
tttcctgtgtgatta

SEQ ID NO: 1375516 - DNA, 15 bp, Homo sapiens
ctttcctgtgtgatt

SEQ ID NO: 1375517 - DNA, 15 bp, Homo sapiens
tctttcctgtgtgat

SEQ ID NO: 1375518 - DNA, 15 bp, Homo sapiens
ttctttcctgtgtga

SEQ ID NO: 1375519 - DNA, 15 bp, Homo sapiens
attctttcctgtgtg

SEQ ID NO: 1375520 - DNA, 15 bp, Homo sapiens
cattctttcctgtgt

SEQ ID NO: 1375521 - DNA, 15 bp, Homo sapiens
gcattctttcctgtg

SEQ ID NO: 1375522 - DNA, 15 bp, Homo sapiens
agcattctttcctgt

SEQ ID NO: 1375523 - DNA, 15 bp, Homo sapiens
aagcattctttcctg

SEQ ID NO: 1375524 - DNA, 15 bp, Homo sapiens
taagcattctttcct

SEQ ID NO: 1375525 - DNA, 15 bp, Homo sapiens
ttaagcattctttcc

SEQ ID NO: 1375526 - DNA, 15 bp, Homo sapiens
tttaagcattctttc

SEQ ID NO: 1375527 - DNA, 15 bp, Homo sapiens
ttttaagcattcttt

SEQ ID NO: 1375528 - DNA, 15 bp, Homo sapiens
tttttaagcattctt

SEQ ID NO: 1375529 - DNA, 15 bp, Homo sapiens
atttttaagcattct

SEQ ID NO: 1375530 - DNA, 15 bp, Homo sapiens
tatttttaagcattc

SEQ ID NO: 1375531 - DNA, 15 bp, Homo sapiens
ttatttttaagcatt

SEQ ID NO: 1375532 - DNA, 15 bp, Homo sapiens
cttatttttaagcat

SEQ ID NO: 1375533 - DNA, 15 bp, Homo sapiens
acttatttttaagca

SEQ ID NO: 1375534 - DNA, 15 bp, Homo sapiens
aacttatttttaagc

SEQ ID NO: 1375535 - DNA, 15 bp, Homo sapiens
gaacttatttttaag

SEQ ID NO: 1375536 - DNA, 15 bp, Homo sapiens
ggaacttatttttaa

SEQ ID NO: 1375537 - DNA, 15 bp, Homo sapiens
tggaacttattttta

SEQ ID NO: 1375538 - DNA, 15 bp, Homo sapiens
ctggaacttattttt

SEQ ID NO: 1375539 - DNA, 15 bp, Homo sapiens
tctggaacttatttt

SEQ ID NO: 1375540 - DNA, 15 bp, Homo sapiens
atctggaacttattt

SEQ ID NO: 1375541 - DNA, 15 bp, Homo sapiens
tatctggaacttatt

SEQ ID NO: 1375542 - DNA, 15 bp, Homo sapiens
gtatctggaacttat

SEQ ID NO: 1375543 - DNA, 15 bp, Homo sapiens
tgtatctggaactta

SEQ ID NO: 1375544 - DNA, 15 bp, Homo sapiens
atgtatctggaactt

SEQ ID NO: 1375545 - DNA, 15 bp, Homo sapiens
tatgtatctggaact

SEQ ID NO: 1375546 - DNA, 15 bp, Homo sapiens
gtatgtatctggaac

SEQ ID NO: 1375547 - DNA, 15 bp, Homo sapiens
tgtatgtatctggaa

SEQ ID NO: 1375548 - DNA, 15 bp, Homo sapiens
gtgtatgtatctgga

SEQ ID NO: 1375549 - DNA, 15 bp, Homo sapiens
tgtgtatgtatctgg

SEQ ID NO: 1375550 - DNA, 15 bp, Homo sapiens
gtgtgtatgtatctg

SEQ ID NO: 1375551 - DNA, 15 bp, Homo sapiens
agtgtgtatgtatct

SEQ ID NO: 1375552 - DNA, 15 bp, Homo sapiens
gagtgtgtatgtatc

SEQ ID NO: 1375553 - DNA, 15 bp, Homo sapiens
ggagtgtgtatgtat

SEQ ID NO: 1375554 - DNA, 15 bp, Homo sapiens
tggagtgtgtatgta

SEQ ID NO: 1375555 - DNA, 15 bp, Homo sapiens
ctggagtgtgtatgt

SEQ ID NO: 1375556 - DNA, 15 bp, Homo sapiens
tctggagtgtgtatg

SEQ ID NO: 1375557 - DNA, 15 bp, Homo sapiens
ttctggagtgtgtat

SEQ ID NO: 1375558 - DNA, 15 bp, Homo sapiens
cttctggagtgtgta

SEQ ID NO: 1375559 - DNA, 15 bp, Homo sapiens
ccttctggagtgtgt

SEQ ID NO: 1375560 - DNA, 15 bp, Homo sapiens
cccttctggagtgtg

SEQ ID NO: 1375561 - DNA, 15 bp, Homo sapiens
acccttctggagtgt

SEQ ID NO: 1375562 - DNA, 15 bp, Homo sapiens
aacccttctggagtg

SEQ ID NO: 1375563 - DNA, 15 bp, Homo sapiens
taacccttctggagt

SEQ ID NO: 1375564 - DNA, 15 bp, Homo sapiens
ataacccttctggag

SEQ ID NO: 1375565 - DNA, 15 bp, Homo sapiens
cataacccttctgga

SEQ ID NO: 1375566 - DNA, 15 bp, Homo sapiens
tcataacccttctgg

SEQ ID NO: 1375567 - DNA, 15 bp, Homo sapiens
atcataacccttctg

SEQ ID NO: 1375568 - DNA, 15 bp, Homo sapiens
catcataacccttct

SEQ ID NO: 1375569 - DNA, 15 bp, Homo sapiens
acatcataacccttc

SEQ ID NO: 1375570 - DNA, 15 bp, Homo sapiens
aacatcataaccctt

SEQ ID NO: 1375571 - DNA, 15 bp, Homo sapiens
aaacatcataaccct

SEQ ID NO: 1375572 - DNA, 15 bp, Homo sapiens
caaacatcataaccc

SEQ ID NO: 1375573 - DNA, 15 bp, Homo sapiens
gcaaacatcataacc

SEQ ID NO: 1375574 - DNA, 15 bp, Homo sapiens
tgcaaacatcataac

SEQ ID NO: 1375575 - DNA, 15 bp, Homo sapiens
gtgcaaacatcataa

SEQ ID NO: 1375576 - DNA, 15 bp, Homo sapiens
agtgcaaacatcata

SEQ ID NO: 1375577 - DNA, 15 bp, Homo sapiens
aagtgcaaacatcat

SEQ ID NO: 1375578 - DNA, 15 bp, Homo sapiens
aaagtgcaaacatca

SEQ ID NO: 1375579 - DNA, 15 bp, Homo sapiens
caaagtgcaaacatc

SEQ ID NO: 1375580 - DNA, 15 bp, Homo sapiens
ccaaagtgcaaacat

SEQ ID NO: 1375581 - DNA, 15 bp, Homo sapiens
cccaaagtgcaaaca

SEQ ID NO: 1375582 - DNA, 15 bp, Homo sapiens
tcccaaagtgcaaac

SEQ ID NO: 1375583 - DNA, 15 bp, Homo sapiens
ttcccaaagtgcaaa

SEQ ID NO: 1375584 - DNA, 15 bp, Homo sapiens
tttcccaaagtgcaa

SEQ ID NO: 1375585 - DNA, 15 bp, Homo sapiens
ttttcccaaagtgca

SEQ ID NO: 1375586 - DNA, 15 bp, Homo sapiens
tttttcccaaagtgc

SEQ ID NO: 1375587 - DNA, 15 bp, Homo sapiens
gtttttcccaaagtg

SEQ ID NO: 1375588 - DNA, 15 bp, Homo sapiens
agtttttcccaaagt

SEQ ID NO: 1375589 - DNA, 15 bp, Homo sapiens
aagtttttcccaaag

SEQ ID NO: 1375590 - DNA, 15 bp, Homo sapiens
taagtttttcccaaa

SEQ ID NO: 1375591 - DNA, 15 bp, Homo sapiens
ttaagtttttcccaa

SEQ ID NO: 1375592 - DNA, 15 bp, Homo sapiens
tttaagtttttccca

SEQ ID NO: 1375593 - DNA, 15 bp, Homo sapiens
ttttaagtttttccc

SEQ ID NO: 1375594 - DNA, 15 bp, Homo sapiens
tttttaagtttttcc

SEQ ID NO: 1375595 - DNA, 15 bp, Homo sapiens
ttttttaagtttttc

SEQ ID NO: 1375596 - DNA, 15 bp, Homo sapiens
ctttttttaagtttt

SEQ ID NO: 1375597 - DNA, 15 bp, Homo sapiens
tctttttttaagttt

SEQ ID NO: 1375598 - DNA, 15 bp, Homo sapiens
ttctttttttaagtt

SEQ ID NO: 1375599 - DNA, 15 bp, Homo sapiens
attctttttttaagt

SEQ ID NO: 1375600 - DNA, 15 bp, Homo sapiens
cattctttttttaag

SEQ ID NO: 1375601 - DNA, 15 bp, Homo sapiens
gcattctttttttaa

SEQ ID NO: 1375602 - DNA, 15 bp, Homo sapiens
agcattcttttttta

SEQ ID NO: 1375603 - DNA, 15 bp, Homo sapiens
aagcattcttttttt

SEQ ID NO: 1375604 - DNA, 15 bp, Homo sapiens
aaagcattctttttt

SEQ ID NO: 1375605 - DNA, 15 bp, Homo sapiens
aaaagcattcttttt

SEQ ID NO: 1375606 - DNA, 15 bp, Homo sapiens
aaaaagcattctttt

SEQ ID NO: 1375607 - DNA, 15 bp, Homo sapiens
taaaaagcattcttt

SEQ ID NO: 1375608 - DNA, 15 bp, Homo sapiens
ataaaaagcattctt

SEQ ID NO: 1375609 - DNA, 15 bp, Homo sapiens
tataaaaagcattct

SEQ ID NO: 1375610 - DNA, 15 bp, Homo sapiens
ctataaaaagcattc

SEQ ID NO: 1375611 - DNA, 15 bp, Homo sapiens
actataaaaagcatt

SEQ ID NO: 1375612 - DNA, 15 bp, Homo sapiens
aactataaaaagcat

SEQ ID NO: 1375613 - DNA, 15 bp, Homo sapiens
caactataaaaagca

SEQ ID NO: 1375614 - DNA, 15 bp, Homo sapiens
acaactataaaaagc

SEQ ID NO: 1375615 - DNA, 15 bp, Homo sapiens
gacaactataaaaag

SEQ ID NO: 1375616 - DNA, 15 bp, Homo sapiens
agacaactataaaaa

SEQ ID NO: 1375617 - DNA, 15 bp, Homo sapiens
cagacaactataaaa

SEQ ID NO: 1375618 - DNA, 15 bp, Homo sapiens
acagacaactataaa

SEQ ID NO: 1375619 - DNA, 15 bp, Homo sapiens
tacagacaactataa

SEQ ID NO: 1375620 - DNA, 15 bp, Homo sapiens
ttacagacaactata

SEQ ID NO: 1375621 - DNA, 15 bp, Homo sapiens
cttacagacaactat

SEQ ID NO: 1375622 - DNA, 15 bp, Homo sapiens
tcttacagacaacta

SEQ ID NO: 1375623 - DNA, 15 bp, Homo sapiens
ctcttacagacaact

SEQ ID NO: 1375624 - DNA, 15 bp, Homo sapiens
gctcttacagacaac

SEQ ID NO: 1375625 - DNA, 15 bp, Homo sapiens
ggctcttacagacaa

SEQ ID NO: 1375626 - DNA, 15 bp, Homo sapiens
aggctcttacagaca

SEQ ID NO: 1375627 - DNA, 15 bp, Homo sapiens
aaggctcttacagac

SEQ ID NO: 1375628 - DNA, 15 bp, Homo sapiens
aaaggctcttacaga

SEQ ID NO: 1375629 - DNA, 15 bp, Homo sapiens
aaaaggctcttacag

SEQ ID NO: 1375630 - DNA, 15 bp, Homo sapiens
gaaaaggctcttaca

SEQ ID NO: 1375631 - DNA, 15 bp, Homo sapiens
agaaaaggctcttac

SEQ ID NO: 1375632 - DNA, 15 bp, Homo sapiens
aagaaaaggctctta

SEQ ID NO: 1375633 - DNA, 15 bp, Homo sapiens
aaagaaaaggctctt

SEQ ID NO: 1375634 - DNA, 15 bp, Homo sapiens
caaagaaaaggctct

SEQ ID NO: 1375635 - DNA, 15 bp, Homo sapiens
gcaaagaaaaggctc

SEQ ID NO: 1375636 - DNA, 15 bp, Homo sapiens
ggcaaagaaaaggct

SEQ ID NO: 1375637 - DNA, 15 bp, Homo sapiens
tggcaaagaaaaggc

SEQ ID NO: 1375638 - DNA, 15 bp, Homo sapiens
ttggcaaagaaaagg

SEQ ID NO: 1375639 - DNA, 15 bp, Homo sapiens
gttggcaaagaaaag

SEQ ID NO: 1375640 - DNA, 15 bp, Homo sapiens
tgttggcaaagaaaa

SEQ ID NO: 1375641 - DNA, 15 bp, Homo sapiens
ttgttggcaaagaaa

SEQ ID NO: 1375642 - DNA, 15 bp, Homo sapiens
tttgttggcaaagaa

SEQ ID NO: 1375643 - DNA, 15 bp, Homo sapiens
ttttgttggcaaaga

SEQ ID NO: 1375644 - DNA, 15 bp, Homo sapiens
gttttgttggcaaag

SEQ ID NO: 1375645 - DNA, 15 bp, Homo sapiens
ggttttgttggcaaa

SEQ ID NO: 1375646 - DNA, 15 bp, Homo sapiens
aggttttgttggcaa

SEQ ID NO: 1375647 - DNA, 15 bp, Homo sapiens
aaggttttgttggca

SEQ ID NO: 1375648 - DNA, 15 bp, Homo sapiens
aaaggttttgttggc

SEQ ID NO: 1375649 - DNA, 15 bp, Homo sapiens
taaaggttttgttgg

SEQ ID NO: 1375650 - DNA, 15 bp, Homo sapiens
ttaaaggttttgttg

SEQ ID NO: 1375651 - DNA, 15 bp, Homo sapiens
tttaaaggttttgtt

SEQ ID NO: 1375652 - DNA, 15 bp, Homo sapiens
ttttaaaggttttgt

SEQ ID NO: 1375653 - DNA, 15 bp, Homo sapiens
tttttaaaggttttg

SEQ ID NO: 1375654 - DNA, 15 bp, Homo sapiens
atttttaaaggtttt

SEQ ID NO: 1375655 - DNA, 15 bp, Homo sapiens
aatttttaaaggttt

SEQ ID NO: 1375656 - DNA, 15 bp, Homo sapiens
taatttttaaaggtt

SEQ ID NO: 1375657 - DNA, 15 bp, Homo sapiens
ataatttttaaaggt

SEQ ID NO: 1375658 - DNA, 15 bp, Homo sapiens
aataatttttaaagg

SEQ ID NO: 1375659 - DNA, 15 bp, Homo sapiens
caataatttttaaag

SEQ ID NO: 1375660 - DNA, 15 bp, Homo sapiens
acaataatttttaaa

SEQ ID NO: 1375661 - DNA, 15 bp, Homo sapiens
aacaataatttttaa

SEQ ID NO: 1375662 - DNA, 15 bp, Homo sapiens
taacaataattttta

SEQ ID NO: 1375663 - DNA, 15 bp, Homo sapiens
ataacaataattttt

SEQ ID NO: 1375664 - DNA, 15 bp, Homo sapiens
aataacaataatttt

SEQ ID NO: 1375665 - DNA, 15 bp, Homo sapiens
gaataacaataattt

SEQ ID NO: 1375666 - DNA, 15 bp, Homo sapiens
tgaataacaataatt

SEQ ID NO: 1375667 - DNA, 15 bp, Homo sapiens
atgaataacaataat

SEQ ID NO: 1375668 - DNA, 15 bp, Homo sapiens
aatgaataacaataa

SEQ ID NO: 1375669 - DNA, 15 bp, Homo sapiens
gaatgaataacaata

SEQ ID NO: 1375670 - DNA, 15 bp, Homo sapiens
ggaatgaataacaat

SEQ ID NO: 1375671 - DNA, 15 bp, Homo sapiens
aggaatgaataacaa

SEQ ID NO: 1375672 - DNA, 15 bp, Homo sapiens
taggaatgaataaca

SEQ ID NO: 1375673 - DNA, 15 bp, Homo sapiens
ataggaatgaataac

SEQ ID NO: 1375674 - DNA, 15 bp, Homo sapiens
cataggaatgaataa

SEQ ID NO: 1375675 - DNA, 15 bp, Homo sapiens
gcataggaatgaata

SEQ ID NO: 1375676 - DNA, 15 bp, Homo sapiens
agcataggaatgaat

SEQ ID NO: 1375677 - DNA, 15 bp, Homo sapiens
aagcataggaatgaa

SEQ ID NO: 1375678 - DNA, 15 bp, Homo sapiens
aaagcataggaatga

SEQ ID NO: 1375679 - DNA, 15 bp, Homo sapiens
aaaagcataggaatg

SEQ ID NO: 1375680 - DNA, 15 bp, Homo sapiens
caaaagcataggaat

SEQ ID NO: 1375681 - DNA, 15 bp, Homo sapiens
tcaaaagcataggaa

SEQ ID NO: 1375682 - DNA, 15 bp, Homo sapiens
ttcaaaagcatagga

SEQ ID NO: 1375683 - DNA, 15 bp, Homo sapiens
attcaaaagcatagg

SEQ ID NO: 1375684 - DNA, 15 bp, Homo sapiens
cattcaaaagcatag

SEQ ID NO: 1375685 - DNA, 15 bp, Homo sapiens
ccattcaaaagcata

SEQ ID NO: 1375686 - DNA, 15 bp, Homo sapiens
accattcaaaagcat

SEQ ID NO: 1375687 - DNA, 15 bp, Homo sapiens
taccattcaaaagca

SEQ ID NO: 1375688 - DNA, 15 bp, Homo sapiens
ttaccattcaaaagc

SEQ ID NO: 1375689 - DNA, 15 bp, Homo sapiens
attaccattcaaaag

SEQ ID NO: 1375690 - DNA, 15 bp, Homo sapiens
aattaccattcaaaa

SEQ ID NO: 1375691 - DNA, 15 bp, Homo sapiens
aaattaccattcaaa

SEQ ID NO: 1375692 - DNA, 15 bp, Homo sapiens
taaattaccattcaa

SEQ ID NO: 1375693 - DNA, 15 bp, Homo sapiens
ataaattaccattca

SEQ ID NO: 1375694 - DNA, 15 bp, Homo sapiens
tataaattaccattc

SEQ ID NO: 1375695 - DNA, 15 bp, Homo sapiens
atataaattaccatt

SEQ ID NO: 1375696 - DNA, 15 bp, Homo sapiens
aatataaattaccat

SEQ ID NO: 1375697 - DNA, 15 bp, Homo sapiens
gaatataaattacca

SEQ ID NO: 1375698 - DNA, 15 bp, Homo sapiens
ctgaatataaattac

SEQ ID NO: 1375699 - DNA, 15 bp, Homo sapiens
gctgaatataaatta

SEQ ID NO: 1375700 - DNA, 15 bp, Homo sapiens
tgctgaatataaatt

SEQ ID NO: 1375701 - DNA, 15 bp, Homo sapiens
atgctgaatataaat

SEQ ID NO: 1375702 - DNA, 15 bp, Homo sapiens
tatgctgaatataaa

SEQ ID NO: 1375703 - DNA, 15 bp, Homo sapiens
atatgctgaatataa

SEQ ID NO: 1375704 - DNA, 15 bp, Homo sapiens
gatatgctgaatata

SEQ ID NO: 1375705 - DNA, 15 bp, Homo sapiens
agatatgctgaatat

SEQ ID NO: 1375706 - DNA, 15 bp, Homo sapiens
cagatatgctgaata

SEQ ID NO: 1375707 - DNA, 15 bp, Homo sapiens
tcagatatgctgaat

SEQ ID NO: 1375708 - DNA, 15 bp, Homo sapiens
ttcagatatgctgaa

SEQ ID NO: 1375709 - DNA, 15 bp, Homo sapiens
tttcagatatgctga

SEQ ID NO: 1375710 - DNA, 15 bp, Homo sapiens
atttcagatatgctg

SEQ ID NO: 1375711 - DNA, 15 bp, Homo sapiens
tatttcagatatgct

SEQ ID NO: 1375712 - DNA, 15 bp, Homo sapiens
ttatttcagatatgc

SEQ ID NO: 1375713 - DNA, 15 bp, Homo sapiens
attatttcagatatg

SEQ ID NO: 1375714 - DNA, 15 bp, Homo sapiens
gattatttcagatat

SEQ ID NO: 1375715 - DNA, 15 bp, Homo sapiens
tgattatttcagata

SEQ ID NO: 1375716 - DNA, 15 bp, Homo sapiens
gtgattatttcagat

SEQ ID NO: 1375717 - DNA, 15 bp, Homo sapiens
tgtgattatttcaga

SEQ ID NO: 1375718 - DNA, 15 bp, Homo sapiens
ctgtgattatttcag

SEQ ID NO: 1375719 - DNA, 15 bp, Homo sapiens
actgtgattatttca

SEQ ID NO: 1375720 - DNA, 15 bp, Homo sapiens
aactgtgattatttc

SEQ ID NO: 1375721 - DNA, 15 bp, Homo sapiens
taactgtgattattt

SEQ ID NO: 1375722 - DNA, 15 bp, Homo sapiens
ttaactgtgattatt

SEQ ID NO: 1375723 - DNA, 15 bp, Homo sapiens
tttaactgtgattat

SEQ ID NO: 1375724 - DNA, 15 bp, Homo sapiens
ttttaactgtgatta

SEQ ID NO: 1375725 - DNA, 15 bp, Homo sapiens
cttttaactgtgatt

SEQ ID NO: 1375726 - DNA, 15 bp, Homo sapiens
ccttttaactgtgat

SEQ ID NO: 1375727 - DNA, 15 bp, Homo sapiens
tccttttaactgtga

SEQ ID NO: 1375728 - DNA, 15 bp, Homo sapiens
ttccttttaactgtg

SEQ ID NO: 1375729 - DNA, 15 bp, Homo sapiens
tttccttttaactgt

SEQ ID NO: 1375730 - DNA, 15 bp, Homo sapiens
atttccttttaactg

SEQ ID NO: 1375731 - DNA, 15 bp, Homo sapiens
tatttccttttaact

SEQ ID NO: 1375732 - DNA, 15 bp, Homo sapiens
gtatttccttttaac

SEQ ID NO: 1375733 - DNA, 15 bp, Homo sapiens
ggtatttccttttaa

SEQ ID NO: 1375734 - DNA, 15 bp, Homo sapiens
tggtatttcctttta

SEQ ID NO: 1375735 - DNA, 15 bp, Homo sapiens
ttggtatttcctttt

SEQ ID NO: 1375736 - DNA, 15 bp, Homo sapiens
tttggtatttccttt

SEQ ID NO: 1375737 - DNA, 15 bp, Homo sapiens
ttttggtatttcctt

SEQ ID NO: 1375738 - DNA, 15 bp, Homo sapiens
attttggtatttcct

SEQ ID NO: 1375739 - DNA, 15 bp, Homo sapiens
aattttggtatttcc

SEQ ID NO: 1375740 - DNA, 15 bp, Homo sapiens
caattttggtatttc

SEQ ID NO: 1375741 - DNA, 15 bp, Homo sapiens
ccaattttggtattt

SEQ ID NO: 1375742 - DNA, 15 bp, Homo sapiens
tccaattttggtatt

SEQ ID NO: 1375743 - DNA, 15 bp, Homo sapiens
ctccaattttggtat

SEQ ID NO: 1375744 - DNA, 15 bp, Homo sapiens
actccaattttggta

SEQ ID NO: 1375745 - DNA, 15 bp, Homo sapiens
gactccaattttggt

SEQ ID NO: 1375746 - DNA, 15 bp, Homo sapiens
tgactccaattttgg

SEQ ID NO: 1375747 - DNA, 15 bp, Homo sapiens
ttgactccaattttg

SEQ ID NO: 1375748 - DNA, 15 bp, Homo sapiens
tttgactccaatttt

SEQ ID NO: 1375749 - DNA, 15 bp, Homo sapiens
ctttgactccaattt

SEQ ID NO: 1375750 - DNA, 15 bp, Homo sapiens
gctttgactccaatt

SEQ ID NO: 1375751 - DNA, 15 bp, Homo sapiens
ggctttgactccaat

SEQ ID NO: 1375752 - DNA, 15 bp, Homo sapiens
tggctttgactccaa

SEQ ID NO: 1375753 - DNA, 15 bp, Homo sapiens
atggctttgactcca

SEQ ID NO: 1375754 - DNA, 15 bp, Homo sapiens
gatggctttgactcc

SEQ ID NO: 1375755 - DNA, 15 bp, Homo sapiens
agatggctttgactc

SEQ ID NO: 1375756 - DNA, 15 bp, Homo sapiens
gagatggctttgact

SEQ ID NO: 1375757 - DNA, 15 bp, Homo sapiens
ggagatggctttgac

SEQ ID NO: 1375758 - DNA, 15 bp, Homo sapiens
aggagatggctttga

SEQ ID NO: 1375759 - DNA, 15 bp, Homo sapiens
gaggagatggctttg

SEQ ID NO: 1375760 - DNA, 15 bp, Homo sapiens
ggaggagatggcttt

SEQ ID NO: 1375761 - DNA, 15 bp, Homo sapiens
tggaggagatggctt

SEQ ID NO: 1375762 - DNA, 15 bp, Homo sapiens
ctggaggagatggct

SEQ ID NO: 1375763 - DNA, 15 bp, Homo sapiens
cctggaggagatggc

SEQ ID NO: 1375764 - DNA, 15 bp, Homo sapiens
tcctggaggagatgg

SEQ ID NO: 1375765 - DNA, 15 bp, Homo sapiens
ttcctggaggagatg

SEQ ID NO: 1375766 - DNA, 15 bp, Homo sapiens
tttcctggaggagat

SEQ ID NO: 1375767 - DNA, 15 bp, Homo sapiens
gtttcctggaggaga

SEQ ID NO: 1375768 - DNA, 15 bp, Homo sapiens
tgtttcctggaggag

SEQ ID NO: 1375769 - DNA, 15 bp, Homo sapiens
ctgtttcctggagga

SEQ ID NO: 1375770 - DNA, 15 bp, Homo sapiens
tctgtttcctggagg

SEQ ID NO: 1375771 - DNA, 15 bp, Homo sapiens
ttctgtttcctggag

SEQ ID NO: 1375772 - DNA, 15 bp, Homo sapiens
attctgtttcctgga

SEQ ID NO: 1375773 - DNA, 15 bp, Homo sapiens
cattctgtttcctgg

SEQ ID NO: 1375774 - DNA, 15 bp, Homo sapiens
acattctgtttcctg

SEQ ID NO: 1375775 - DNA, 15 bp, Homo sapiens
gacattctgtttcct

SEQ ID NO: 1375776 - DNA, 15 bp, Homo sapiens
tgacattctgtttcc

SEQ ID NO: 1375777 - DNA, 15 bp, Homo sapiens
ttgacattctgtttc

SEQ ID NO: 1375778 - DNA, 15 bp, Homo sapiens
tttgacattctgttt

SEQ ID NO: 1375779 - DNA, 15 bp, Homo sapiens
atttgacattctgtt

SEQ ID NO: 1375780 - DNA, 15 bp, Homo sapiens
tatttgacattctgt

SEQ ID NO: 1375781 - DNA, 15 bp, Homo sapiens
gtatttgacattctg

SEQ ID NO: 1375782 - DNA, 15 bp, Homo sapiens
ggtatttgacattct

SEQ ID NO: 1375783 - DNA, 15 bp, Homo sapiens
aggtatttgacattc

SEQ ID NO: 1375784 - DNA, 15 bp, Homo sapiens
aaggtatttgacatt

SEQ ID NO: 1375785 - DNA, 15 bp, Homo sapiens
caaggtatttgacat

SEQ ID NO: 1375786 - DNA, 15 bp, Homo sapiens
ccaaggtatttgaca

SEQ ID NO: 1375787 - DNA, 15 bp, Homo sapiens
tccaaggtatttgac

SEQ ID NO: 1375788 - DNA, 15 bp, Homo sapiens
ctccaaggtatttga

SEQ ID NO: 1375789 - DNA, 15 bp, Homo sapiens
actccaaggtatttg

SEQ ID NO: 1375790 - DNA, 15 bp, Homo sapiens
gactccaaggtattt

SEQ ID NO: 1375791 - DNA, 15 bp, Homo sapiens
tgactccaaggtatt

SEQ ID NO: 1375792 - DNA, 15 bp, Homo sapiens
ctgactccaaggtat

SEQ ID NO: 1375793 - DNA, 15 bp, Homo sapiens
actgactccaaggta

SEQ ID NO: 1375794 - DNA, 15 bp, Homo sapiens
cactgactccaaggt

SEQ ID NO: 1375795 - DNA, 15 bp, Homo sapiens
ccactgactccaagg

SEQ ID NO: 1375796 - DNA, 15 bp, Homo sapiens
accactgactccaag

SEQ ID NO: 1375797 - DNA, 15 bp, Homo sapiens
taccactgactccaa

SEQ ID NO: 1375798 - DNA, 15 bp, Homo sapiens
ctaccactgactcca

SEQ ID NO: 1375799 - DNA, 15 bp, Homo sapiens
cctaccactgactcc

SEQ ID NO: 1375800 - DNA, 15 bp, Homo sapiens
tcctaccactgactc

SEQ ID NO: 1375801 - DNA, 15 bp, Homo sapiens
ctcctaccactgact

SEQ ID NO: 1375802 - DNA, 15 bp, Homo sapiens
tctcctaccactgac

SEQ ID NO: 1375803 - DNA, 15 bp, Homo sapiens
ttctcctaccactga

SEQ ID NO: 1375804 - DNA, 15 bp, Homo sapiens
tttctcctaccactg

SEQ ID NO: 1375805 - DNA, 15 bp, Homo sapiens
atttctcctaccact

SEQ ID NO: 1375806 - DNA, 15 bp, Homo sapiens
tatttctcctaccac

SEQ ID NO: 1375807 - DNA, 15 bp, Homo sapiens
ttatttctcctacca

SEQ ID NO: 1375808 - DNA, 15 bp, Homo sapiens
tttatttctcctacc

SEQ ID NO: 1375809 - DNA, 15 bp, Homo sapiens
ttttatttctcctac

SEQ ID NO: 1375810 - DNA, 15 bp, Homo sapiens
gttttatttctccta

SEQ ID NO: 1375811 - DNA, 15 bp, Homo sapiens
ggttttatttctcct

SEQ ID NO: 1375812 - DNA, 15 bp, Homo sapiens
gggttttatttctcc

SEQ ID NO: 1375813 - DNA, 15 bp, Homo sapiens
ggggttttatttctc

SEQ ID NO: 1375814 - DNA, 15 bp, Homo sapiens
tggggttttatttct

SEQ ID NO: 1375815 - DNA, 15 bp, Homo sapiens
atggggttttatttc

SEQ ID NO: 1375816 - DNA, 15 bp, Homo sapiens
gatggggttttattt

SEQ ID NO: 1375817 - DNA, 15 bp, Homo sapiens
agatggggttttatt

SEQ ID NO: 1375818 - DNA, 15 bp, Homo sapiens
gagatggggttttat

SEQ ID NO: 1375819 - DNA, 15 bp, Homo sapiens
ggagatggggtttta

SEQ ID NO: 1375820 - DNA, 15 bp, Homo sapiens
aggagatggggtttt

SEQ ID NO: 1375821 - DNA, 15 bp, Homo sapiens
aaggagatggggttt

SEQ ID NO: 1375822 - DNA, 15 bp, Homo sapiens
gaaggagatggggtt

SEQ ID NO: 1375823 - DNA, 15 bp, Homo sapiens
tgaaggagatggggt

SEQ ID NO: 1375824 - DNA, 15 bp, Homo sapiens
ctgaaggagatgggg

SEQ ID NO: 1375825 - DNA, 15 bp, Homo sapiens
gctgaaggagatggg

SEQ ID NO: 1375826 - DNA, 15 bp, Homo sapiens
ggctgaaggagatgg

SEQ ID NO: 1375827 - DNA, 15 bp, Homo sapiens
tggctgaaggagatg

SEQ ID NO: 1375828 - DNA, 15 bp, Homo sapiens
ttggctgaaggagat

SEQ ID NO: 1375829 - DNA, 15 bp, Homo sapiens
tttggctgaaggaga

SEQ ID NO: 1375830 - DNA, 15 bp, Homo sapiens
ttttggctgaaggag

SEQ ID NO: 1375831 - DNA, 15 bp, Homo sapiens
tttttggctgaagga

SEQ ID NO: 1375832 - DNA, 15 bp, Homo sapiens
gtttttggctgaagg

SEQ ID NO: 1375833 - DNA, 15 bp, Homo sapiens
tgtttttggctgaag

SEQ ID NO: 1375834 - DNA, 15 bp, Homo sapiens
atgtttttggctgaa

SEQ ID NO: 1375835 - DNA, 15 bp, Homo sapiens
aatgtttttggctga

SEQ ID NO: 1375836 - DNA, 15 bp, Homo sapiens
taatgtttttggctg

SEQ ID NO: 1375837 - DNA, 15 bp, Homo sapiens
gtaatgtttttggct

SEQ ID NO: 1375838 - DNA, 15 bp, Homo sapiens
tgtaatgtttttggc

SEQ ID NO: 1375839 - DNA, 15 bp, Homo sapiens
atgtaatgtttttgg

SEQ ID NO: 1375840 - DNA, 15 bp, Homo sapiens
tatgtaatgtttttg

SEQ ID NO: 1375841 - DNA, 15 bp, Homo sapiens
ctatgtaatgttttt

SEQ ID NO: 1375842 - DNA, 15 bp, Homo sapiens
tctatgtaatgtttt

SEQ ID NO: 1375843 - DNA, 15 bp, Homo sapiens
ttctatgtaatgttt

SEQ ID NO: 1375844 - DNA, 15 bp, Homo sapiens
tttctatgtaatgtt

SEQ ID NO: 1375845 - DNA, 15 bp, Homo sapiens
gtttctatgtaatgt

SEQ ID NO: 1375846 - DNA, 15 bp, Homo sapiens
tgtttctatgtaatg

SEQ ID NO: 1375847 - DNA, 15 bp, Homo sapiens
atgtttctatgtaat

SEQ ID NO: 1375848 - DNA, 15 bp, Homo sapiens
tatgtttctatgtaa

SEQ ID NO: 1375849 - DNA, 15 bp, Homo sapiens
ctatgtttctatgta

SEQ ID NO: 1375850 - DNA, 15 bp, Homo sapiens
tctatgtttctatgt

SEQ ID NO: 1375851 - DNA, 15 bp, Homo sapiens
gtctatgtttctatg

SEQ ID NO: 1375852 - DNA, 15 bp, Homo sapiens
tgtctatgtttctat

SEQ ID NO: 1375853 - DNA, 15 bp, Homo sapiens
atgtctatgtttcta

SEQ ID NO: 1375854 - DNA, 15 bp, Homo sapiens
tatgtctatgtttct

SEQ ID NO: 1375855 - DNA, 15 bp, Homo sapiens
ctatgtctatgtttc

SEQ ID NO: 1375856 - DNA, 15 bp, Homo sapiens
tctatgtctatgttt

SEQ ID NO: 1375857 - DNA, 15 bp, Homo sapiens
ttctatgtctatgtt

SEQ ID NO: 1375858 - DNA, 15 bp, Homo sapiens
cttctatgtctatgt

SEQ ID NO: 1375859 - DNA, 15 bp, Homo sapiens
gcttctatgtctatg

SEQ ID NO: 1375860 - DNA, 15 bp, Homo sapiens
cgcttctatgtctat

SEQ ID NO: 1375861 - DNA, 15 bp, Homo sapiens
ccgcttctatgtcta

SEQ ID NO: 1375862 - DNA, 15 bp, Homo sapiens
tccgcttctatgtct

SEQ ID NO: 1375863 - DNA, 15 bp, Homo sapiens
ctccgcttctatgtc

SEQ ID NO: 1375864 - DNA, 15 bp, Homo sapiens
cctccgcttctatgt

SEQ ID NO: 1375865 - DNA, 15 bp, Homo sapiens
tcctccgcttctatg

SEQ ID NO: 1375866 - DNA, 15 bp, Homo sapiens
ttcctccgcttctat

SEQ ID NO: 1375867 - DNA, 15 bp, Homo sapiens
cttcctccgcttcta

SEQ ID NO: 1375868 - DNA, 15 bp, Homo sapiens
tcttcctccgcttct

SEQ ID NO: 1375869 - DNA, 15 bp, Homo sapiens
ttcttcctccgcttc

SEQ ID NO: 1375870 - DNA, 15 bp, Homo sapiens
tttcttcctccgctt

SEQ ID NO: 1375871 - DNA, 15 bp, Homo sapiens
ctttcttcctccgct

SEQ ID NO: 1375872 - DNA, 15 bp, Homo sapiens
cctttcttcctccgc

SEQ ID NO: 1375873 - DNA, 15 bp, Homo sapiens
gcctttcttcctccg

SEQ ID NO: 1375874 - DNA, 15 bp, Homo sapiens
tgcctttcttcctcc

SEQ ID NO: 1375875 - DNA, 15 bp, Homo sapiens
gtgcctttcttcctc

SEQ ID NO: 1375876 - DNA, 15 bp, Homo sapiens
tgtgcctttcttcct

SEQ ID NO: 1375877 - DNA, 15 bp, Homo sapiens
ttgtgcctttcttcc

SEQ ID NO: 1375878 - DNA, 15 bp, Homo sapiens
tttgtgcctttcttc

SEQ ID NO: 1375879 - DNA, 15 bp, Homo sapiens
atttgtgcctttctt

SEQ ID NO: 1375880 - DNA, 15 bp, Homo sapiens
catttgtgcctttct

SEQ ID NO: 1375881 - DNA, 15 bp, Homo sapiens
acatttgtgcctttc

SEQ ID NO: 1375882 - DNA, 15 bp, Homo sapiens
tacatttgtgccttt

SEQ ID NO: 1375883 - DNA, 15 bp, Homo sapiens
ctacatttgtgcctt

SEQ ID NO: 1375884 - DNA, 15 bp, Homo sapiens
tctacatttgtgcct

SEQ ID NO: 1375885 - DNA, 15 bp, Homo sapiens
ttctacatttgtgcc

SEQ ID NO: 1375886 - DNA, 15 bp, Homo sapiens
cttctacatttgtgc

SEQ ID NO: 1375887 - DNA, 15 bp, Homo sapiens
tcttctacatttgtg

SEQ ID NO: 1375888 - DNA, 15 bp, Homo sapiens
gtcttctacatttgt

SEQ ID NO: 1375889 - DNA, 15 bp, Homo sapiens
tgtcttctacatttg

SEQ ID NO: 1375890 - DNA, 15 bp, Homo sapiens
atgtcttctacattt

SEQ ID NO: 1375891 - DNA, 15 bp, Homo sapiens
tatgtcttctacatt

SEQ ID NO: 1375892 - DNA, 15 bp, Homo sapiens
gtatgtcttctacat

SEQ ID NO: 1375893 - DNA, 15 bp, Homo sapiens
agtatgtcttctaca

SEQ ID NO: 1375894 - DNA, 15 bp, Homo sapiens
aagtatgtcttctac

SEQ ID NO: 1375895 - DNA, 15 bp, Homo sapiens
aaagtatgtcttcta

SEQ ID NO: 1375896 - DNA, 15 bp, Homo sapiens
caaagtatgtcttct

SEQ ID NO: 1375897 - DNA, 15 bp, Homo sapiens
ccaaagtatgtcttc

SEQ ID NO: 1375898 - DNA, 15 bp, Homo sapiens
gccaaagtatgtctt

SEQ ID NO: 1375899 - DNA, 15 bp, Homo sapiens
ggccaaagtatgtct

SEQ ID NO: 1375900 - DNA, 15 bp, Homo sapiens
aggccaaagtatgtc

SEQ ID NO: 1375901 - DNA, 15 bp, Homo sapiens
aaggccaaagtatgt

SEQ ID NO: 1375902 - DNA, 15 bp, Homo sapiens
gaaggccaaagtatg

SEQ ID NO: 1375903 - DNA, 15 bp, Homo sapiens
tgaaggccaaagtat

SEQ ID NO: 1375904 - DNA, 15 bp, Homo sapiens
atgaaggccaaagta

SEQ ID NO: 1375905 - DNA, 15 bp, Homo sapiens
aatgaaggccaaagt

SEQ ID NO: 1375906 - DNA, 15 bp, Homo sapiens
gaatgaaggccaaag

SEQ ID NO: 1375907 - DNA, 15 bp, Homo sapiens
agaatgaaggccaaa

SEQ ID NO: 1375908 - DNA, 15 bp, Homo sapiens
tagaatgaaggccaa

SEQ ID NO: 1375909 - DNA, 15 bp, Homo sapiens
atagaatgaaggcca

SEQ ID NO: 1375910 - DNA, 15 bp, Homo sapiens
catagaatgaaggcc

SEQ ID NO: 1375911 - DNA, 15 bp, Homo sapiens
tcatagaatgaaggc

SEQ ID NO: 1375912 - DNA, 15 bp, Homo sapiens
ttcatagaatgaagg

SEQ ID NO: 1375913 - DNA, 15 bp, Homo sapiens
cttcatagaatgaag

SEQ ID NO: 1375914 - DNA, 15 bp, Homo sapiens
gcttcatagaatgaa

SEQ ID NO: 1375915 - DNA, 15 bp, Homo sapiens
agcttcatagaatga

SEQ ID NO: 1375916 - DNA, 15 bp, Homo sapiens
gagcttcatagaatg

SEQ ID NO: 1375917 - DNA, 15 bp, Homo sapiens
ggagcttcatagaat

SEQ ID NO: 1375918 - DNA, 15 bp, Homo sapiens
aggagcttcatagaa

SEQ ID NO: 1375919 - DNA, 15 bp, Homo sapiens
caggagcttcataga

SEQ ID NO: 1375920 - DNA, 15 bp, Homo sapiens
gcaggagcttcatag

SEQ ID NO: 1375921 - DNA, 15 bp, Homo sapiens
agcaggagcttcata

SEQ ID NO: 1375922 - DNA, 15 bp, Homo sapiens
aagcaggagcttcat

SEQ ID NO: 1375923 - DNA, 15 bp, Homo sapiens
gaagcaggagcttca

SEQ ID NO: 1375924 - DNA, 15 bp, Homo sapiens
agaagcaggagcttc

SEQ ID NO: 1375925 - DNA, 15 bp, Homo sapiens
tagaagcaggagctt

SEQ ID NO: 1375926 - DNA, 15 bp, Homo sapiens
gtagaagcaggagct

SEQ ID NO: 1375927 - DNA, 15 bp, Homo sapiens
ggtagaagcaggagc

SEQ ID NO: 1375928 - DNA, 15 bp, Homo sapiens
tggtagaagcaggag

SEQ ID NO: 1375929 - DNA, 15 bp, Homo sapiens
gtggtagaagcagga

SEQ ID NO: 1375930 - DNA, 15 bp, Homo sapiens
ggtggtagaagcagg

SEQ ID NO: 1375931 - DNA, 15 bp, Homo sapiens
gggtggtagaagcag

SEQ ID NO: 1375932 - DNA, 15 bp, Homo sapiens
tgggtggtagaagca

SEQ ID NO: 1375933 - DNA, 15 bp, Homo sapiens
gtgggtggtagaagc

SEQ ID NO: 1375934 - DNA, 15 bp, Homo sapiens
tgtgggtggtagaag

SEQ ID NO: 1375935 - DNA, 15 bp, Homo sapiens
gtgtgggtggtagaa

SEQ ID NO: 1375936 - DNA, 15 bp, Homo sapiens
tgtgtgggtggtaga

SEQ ID NO: 1375937 - DNA, 15 bp, Homo sapiens
atgtgtgggtggtag

SEQ ID NO: 1375938 - DNA, 15 bp, Homo sapiens
gatgtgtgggtggta

SEQ ID NO: 1375939 - DNA, 15 bp, Homo sapiens
tgatgtgtgggtggt

SEQ ID NO: 1375940 - DNA, 15 bp, Homo sapiens
ctgatgtgtgggtgg

SEQ ID NO: 1375941 - DNA, 15 bp, Homo sapiens
tctgatgtgtgggtg

SEQ ID NO: 1375942 - DNA, 15 bp, Homo sapiens
gtctgatgtgtgggt

SEQ ID NO: 1375943 - DNA, 15 bp, Homo sapiens
ggtctgatgtgtggg

SEQ ID NO: 1375944 - DNA, 15 bp, Homo sapiens
tggtctgatgtgtgg

SEQ ID NO: 1375945 - DNA, 15 bp, Homo sapiens
ttggtctgatgtgtg

SEQ ID NO: 1375946 - DNA, 15 bp, Homo sapiens
cttggtctgatgtgt

SEQ ID NO: 1375947 - DNA, 15 bp, Homo sapiens
tcttggtctgatgtg

SEQ ID NO: 1375948 - DNA, 15 bp, Homo sapiens
gtcttggtctgatgt

SEQ ID NO: 1375949 - DNA, 15 bp, Homo sapiens
tgtcttggtctgatg

SEQ ID NO: 1375950 - DNA, 15 bp, Homo sapiens
gtgtcttggtctgat

SEQ ID NO: 1375951 - DNA, 15 bp, Homo sapiens
tgtgtcttggtctga

SEQ ID NO: 1375952 - DNA, 15 bp, Homo sapiens
gtgtgtcttggtctg

SEQ ID NO: 1375953 - DNA, 15 bp, Homo sapiens
ggtgtgtcttggtct

SEQ ID NO: 1375954 - DNA, 15 bp, Homo sapiens
aggtgtgtcttggtc

SEQ ID NO: 1375955 - DNA, 15 bp, Homo sapiens
aaggtgtgtcttggt

SEQ ID NO: 1375956 - DNA, 15 bp, Homo sapiens
aaaggtgtgtcttgg

SEQ ID NO: 1375957 - DNA, 15 bp, Homo sapiens
taaaggtgtgtcttg

SEQ ID NO: 1375958 - DNA, 15 bp, Homo sapiens
ttaaaggtgtgtctt

SEQ ID NO: 1375959 - DNA, 15 bp, Homo sapiens
tttaaaggtgtgtct

SEQ ID NO: 1375960 - DNA, 15 bp, Homo sapiens
atttaaaggtgtgtc

SEQ ID NO: 1375961 - DNA, 15 bp, Homo sapiens
tatttaaaggtgtgt

SEQ ID NO: 1375962 - DNA, 15 bp, Homo sapiens
atatttaaaggtgtg

SEQ ID NO: 1375963 - DNA, 15 bp, Homo sapiens
catatttaaaggtgt

SEQ ID NO: 1375964 - DNA, 15 bp, Homo sapiens
acatatttaaaggtg

SEQ ID NO: 1375965 - DNA, 15 bp, Homo sapiens
tacatatttaaaggt

SEQ ID NO: 1375966 - DNA, 15 bp, Homo sapiens
ctacatatttaaagg

SEQ ID NO: 1375967 - DNA, 15 bp, Homo sapiens
cctacatatttaaag

SEQ ID NO: 1375968 - DNA, 15 bp, Homo sapiens
ccctacatatttaaa

SEQ ID NO: 1375969 - DNA, 15 bp, Homo sapiens
tccctacatatttaa

SEQ ID NO: 1375970 - DNA, 15 bp, Homo sapiens
ctccctacatattta

SEQ ID NO: 1375971 - DNA, 15 bp, Homo sapiens
cctccctacatattt

SEQ ID NO: 1375972 - DNA, 15 bp, Homo sapiens
ccctccctacatatt

SEQ ID NO: 1375973 - DNA, 15 bp, Homo sapiens
tccctccctacatat

SEQ ID NO: 1375974 - DNA, 15 bp, Homo sapiens
ctccctccctacata

SEQ ID NO: 1375975 - DNA, 15 bp, Homo sapiens
cctccctccctacat

SEQ ID NO: 1375976 - DNA, 15 bp, Homo sapiens
ccctccctccctaca

SEQ ID NO: 1375977 - DNA, 15 bp, Homo sapiens
cccctccctccctac

SEQ ID NO: 1375978 - DNA, 15 bp, Homo sapiens
tcccctccctcccta

SEQ ID NO: 1375979 - DNA, 15 bp, Homo sapiens
ttcccctccctccct

SEQ ID NO: 1375980 - DNA, 15 bp, Homo sapiens
tttcccctccctccc

SEQ ID NO: 1375981 - DNA, 15 bp, Homo sapiens
ttttcccctccctcc

SEQ ID NO: 1375982 - DNA, 15 bp, Homo sapiens
attttcccctccctc

SEQ ID NO: 1375983 - DNA, 15 bp, Homo sapiens
aattttcccctccct

SEQ ID NO: 1375984 - DNA, 15 bp, Homo sapiens
aaattttcccctccc

SEQ ID NO: 1375985 - DNA, 15 bp, Homo sapiens
aaaattttcccctcc

SEQ ID NO: 1375986 - DNA, 15 bp, Homo sapiens
caaaattttcccctc

SEQ ID NO: 1375987 - DNA, 15 bp, Homo sapiens
acaaaattttcccct

SEQ ID NO: 1375988 - DNA, 15 bp, Homo sapiens
gacaaaattttcccc

SEQ ID NO: 1375989 - DNA, 15 bp, Homo sapiens
agacaaaattttccc

SEQ ID NO: 1375990 - DNA, 15 bp, Homo sapiens
aagacaaaattttcc

SEQ ID NO: 1375991 - DNA, 15 bp, Homo sapiens
caagacaaaattttc

SEQ ID NO: 1375992 - DNA, 15 bp, Homo sapiens
acaagacaaaatttt

SEQ ID NO: 1375993 - DNA, 15 bp, Homo sapiens
gacaagacaaaattt

SEQ ID NO: 1375994 - DNA, 15 bp, Homo sapiens
cgacaagacaaaatt

SEQ ID NO: 1375995 - DNA, 15 bp, Homo sapiens
ccgacaagacaaaat

SEQ ID NO: 1375996 - DNA, 15 bp, Homo sapiens
tccgacaagacaaaa

SEQ ID NO: 1375997 - DNA, 15 bp, Homo sapiens
ctccgacaagacaaa

SEQ ID NO: 1375998 - DNA, 15 bp, Homo sapiens
gctccgacaagacaa

SEQ ID NO: 1375999 - DNA, 15 bp, Homo sapiens
agctccgacaagaca

SEQ ID NO: 1376000 - DNA, 15 bp, Homo sapiens
gagctccgacaagac

SEQ ID NO: 1376001 - DNA, 15 bp, Homo sapiens
tgagctccgacaaga

SEQ ID NO: 1376002 - DNA, 15 bp, Homo sapiens
gtgagctccgacaag

SEQ ID NO: 1376003 - DNA, 15 bp, Homo sapiens
tgtgagctccgacaa

SEQ ID NO: 1376004 - DNA, 15 bp, Homo sapiens
ctgtgagctccgaca

SEQ ID NO: 1376005 - DNA, 15 bp, Homo sapiens
actgtgagctccgac

SEQ ID NO: 1376006 - DNA, 15 bp, Homo sapiens
gactgtgagctccga

SEQ ID NO: 1376007 - DNA, 15 bp, Homo sapiens
tgactgtgagctccg

SEQ ID NO: 1376008 - DNA, 15 bp, Homo sapiens
ctgactgtgagctcc

SEQ ID NO: 1376009 - DNA, 15 bp, Homo sapiens
actgactgtgagctc

SEQ ID NO: 1376010 - DNA, 15 bp, Homo sapiens
aactgactgtgagct

SEQ ID NO: 1376011 - DNA, 15 bp, Homo sapiens
caactgactgtgagc

SEQ ID NO: 1376012 - DNA, 15 bp, Homo sapiens
gcaactgactgtgag

SEQ ID NO: 1376013 - DNA, 15 bp, Homo sapiens
ggcaactgactgtga

SEQ ID NO: 1376014 - DNA, 15 bp, Homo sapiens
gggcaactgactgtg

SEQ ID NO: 1376015 - DNA, 15 bp, Homo sapiens
tgggcaactgactgt

SEQ ID NO: 1376016 - DNA, 15 bp, Homo sapiens
ttgggcaactgactg

SEQ ID NO: 1376017 - DNA, 15 bp, Homo sapiens
cttgggcaactgact

SEQ ID NO: 1376018 - DNA, 15 bp, Homo sapiens
ccttgggcaactgac

SEQ ID NO: 1376019 - DNA, 15 bp, Homo sapiens
gccttgggcaactga

SEQ ID NO: 1376020 - DNA, 15 bp, Homo sapiens
agccttgggcaactg

SEQ ID NO: 1376021 - DNA, 15 bp, Homo sapiens
cagccttgggcaact

SEQ ID NO: 1376022 - DNA, 15 bp, Homo sapiens
tcagccttgggcaac

SEQ ID NO: 1376023 - DNA, 15 bp, Homo sapiens
ttcagccttgggcaa

SEQ ID NO: 1376024 - DNA, 15 bp, Homo sapiens
gttcagccttgggca

SEQ ID NO: 1376025 - DNA, 15 bp, Homo sapiens
tgttcagccttgggc

SEQ ID NO: 1376026 - DNA, 15 bp, Homo sapiens
atgttcagccttggg

SEQ ID NO: 1376027 - DNA, 15 bp, Homo sapiens
catgttcagccttgg

SEQ ID NO: 1376028 - DNA, 15 bp, Homo sapiens
tcatgttcagccttg

SEQ ID NO: 1376029 - DNA, 15 bp, Homo sapiens
ttcatgttcagcctt

SEQ ID NO: 1376030 - DNA, 15 bp, Homo sapiens
attcatgttcagcct

SEQ ID NO: 1376031 - DNA, 15 bp, Homo sapiens
tattcatgttcagcc

SEQ ID NO: 1376032 - DNA, 15 bp, Homo sapiens
ttattcatgttcagc

SEQ ID NO: 1376033 - DNA, 15 bp, Homo sapiens
gttattcatgttcag

SEQ ID NO: 1376034 - DNA, 15 bp, Homo sapiens
ggttattcatgttca

SEQ ID NO: 1376035 - DNA, 15 bp, Homo sapiens
tggttattcatgttc

SEQ ID NO: 1376036 - DNA, 15 bp, Homo sapiens
gtggttattcatgtt

SEQ ID NO: 1376037 - DNA, 15 bp, Homo sapiens
agtggttattcatgt

SEQ ID NO: 1376038 - DNA, 15 bp, Homo sapiens
gagtggttattcatg

SEQ ID NO: 1376039 - DNA, 15 bp, Homo sapiens
ggagtggttattcat

SEQ ID NO: 1376040 - DNA, 15 bp, Homo sapiens
tggagtggttattca

SEQ ID NO: 1376041 - DNA, 15 bp, Homo sapiens
ttggagtggttattc

SEQ ID NO: 1376042 - DNA, 15 bp, Homo sapiens
cttggagtggttatt

SEQ ID NO: 1376043 - DNA, 15 bp, Homo sapiens
tcttggagtggttat

SEQ ID NO: 1376044 - DNA, 15 bp, Homo sapiens
gtcttggagtggtta

SEQ ID NO: 1376045 - DNA, 15 bp, Homo sapiens
tgtcttggagtggtt

SEQ ID NO: 1376046 - DNA, 15 bp, Homo sapiens
atgtcttggagtggt

SEQ ID NO: 1376047 - DNA, 15 bp, Homo sapiens
catgtcttggagtgg

SEQ ID NO: 1376048 - DNA, 15 bp, Homo sapiens
gcatgtcttggagtg

SEQ ID NO: 1376049 - DNA, 15 bp, Homo sapiens
tgcatgtcttggagt

SEQ ID NO: 1376050 - DNA, 15 bp, Homo sapiens
gtgcatgtcttggag

SEQ ID NO: 1376051 - DNA, 15 bp, Homo sapiens
agtgcatgtcttgga

SEQ ID NO: 1376052 - DNA, 15 bp, Homo sapiens
cagtgcatgtcttgg

SEQ ID NO: 1376053 - DNA, 15 bp, Homo sapiens
tcagtgcatgtcttg

SEQ ID NO: 1376054 - DNA, 15 bp, Homo sapiens
gtcagtgcatgtctt

SEQ ID NO: 1376055 - DNA, 15 bp, Homo sapiens
tgtcagtgcatgtct

SEQ ID NO: 1376056 - DNA, 15 bp, Homo sapiens
ttgtcagtgcatgtc

SEQ ID NO: 1376057 - DNA, 15 bp, Homo sapiens
gttgtcagtgcatgt

SEQ ID NO: 1376058 - DNA, 15 bp, Homo sapiens
ggttgtcagtgcatg

SEQ ID NO: 1376059 - DNA, 15 bp, Homo sapiens
gggttgtcagtgcat

SEQ ID NO: 1376060 - DNA, 15 bp, Homo sapiens
tgggttgtcagtgca

SEQ ID NO: 1376061 - DNA, 15 bp, Homo sapiens
atgtgggttgtcagt

SEQ ID NO: 1376062 - DNA, 15 bp, Homo sapiens
aatgtgggttgtcag

SEQ ID NO: 1376063 - DNA, 15 bp, Homo sapiens
aaatgtgggttgtca

SEQ ID NO: 1376064 - DNA, 15 bp, Homo sapiens
gaaatgtgggttgtc

SEQ ID NO: 1376065 - DNA, 15 bp, Homo sapiens
ggaaatgtgggttgt

SEQ ID NO: 1376066 - DNA, 15 bp, Homo sapiens
aggaaatgtgggttg

SEQ ID NO: 1376067 - DNA, 15 bp, Homo sapiens
caggaaatgtgggtt

SEQ ID NO: 1376068 - DNA, 15 bp, Homo sapiens
gcaggaaatgtgggt

SEQ ID NO: 1376069 - DNA, 15 bp, Homo sapiens
ggcaggaaatgtggg

SEQ ID NO: 1376070 - DNA, 15 bp, Homo sapiens
aggcaggaaatgtgg

SEQ ID NO: 1376071 - DNA, 15 bp, Homo sapiens
aaggcaggaaatgtg

SEQ ID NO: 1376072 - DNA, 15 bp, Homo sapiens
aaaggcaggaaatgt

SEQ ID NO: 1376073 - DNA, 15 bp, Homo sapiens
caaaggcaggaaatg

SEQ ID NO: 1376074 - DNA, 15 bp, Homo sapiens
ccaaaggcaggaaat

SEQ ID NO: 1376075 - DNA, 15 bp, Homo sapiens
accaaaggcaggaaa

SEQ ID NO: 1376076 - DNA, 15 bp, Homo sapiens
caccaaaggcaggaa

SEQ ID NO: 1376077 - DNA, 15 bp, Homo sapiens
acaccaaaggcagga

SEQ ID NO: 1376078 - DNA, 15 bp, Homo sapiens
gacaccaaaggcagg

SEQ ID NO: 1376079 - DNA, 15 bp, Homo sapiens
tgacaccaaaggcag

SEQ ID NO: 1376080 - DNA, 15 bp, Homo sapiens
ctgacaccaaaggca

SEQ ID NO: 1376081 - DNA, 15 bp, Homo sapiens
gctgacaccaaaggc

SEQ ID NO: 1376082 - DNA, 15 bp, Homo sapiens
tgctgacaccaaagg

SEQ ID NO: 1376083 - DNA, 15 bp, Homo sapiens
ttgctgacaccaaag

SEQ ID NO: 1376084 - DNA, 15 bp, Homo sapiens
gttgctgacaccaaa

SEQ ID NO: 1376085 - DNA, 15 bp, Homo sapiens
ggttgctgacaccaa

SEQ ID NO: 1376086 - DNA, 15 bp, Homo sapiens
tggttgctgacacca

SEQ ID NO: 1376087 - DNA, 15 bp, Homo sapiens
ctggttgctgacacc

SEQ ID NO: 1376088 - DNA, 15 bp, Homo sapiens
tctggttgctgacac

SEQ ID NO: 1376089 - DNA, 15 bp, Homo sapiens
ctctggttgctgaca

SEQ ID NO: 1376090 - DNA, 15 bp, Homo sapiens
tctctggttgctgac

SEQ ID NO: 1376091 - DNA, 15 bp, Homo sapiens
gtctctggttgctga

SEQ ID NO: 1376092 - DNA, 15 bp, Homo sapiens
tgtctctggttgctg

SEQ ID NO: 1376093 - DNA, 15 bp, Homo sapiens
ctgtctctggttgct

SEQ ID NO: 1376094 - DNA, 15 bp, Homo sapiens
tctgtctctggttgc

SEQ ID NO: 1376095 - DNA, 15 bp, Homo sapiens
ttctgtctctggttg

SEQ ID NO: 1376096 - DNA, 15 bp, Homo sapiens
cttctgtctctggtt

SEQ ID NO: 1376097 - DNA, 15 bp, Homo sapiens
ccttctgtctctggt

SEQ ID NO: 1376098 - DNA, 15 bp, Homo sapiens
accttctgtctctgg

SEQ ID NO: 1376099 - DNA, 15 bp, Homo sapiens
taccttctgtctctg

SEQ ID NO: 1376100 - DNA, 15 bp, Homo sapiens
ataccttctgtctct

SEQ ID NO: 1376101 - DNA, 15 bp, Homo sapiens
aataccttctgtctc

SEQ ID NO: 1376102 - DNA, 15 bp, Homo sapiens
aaataccttctgtct

SEQ ID NO: 1376103 - DNA, 15 bp, Homo sapiens
taaataccttctgtc

SEQ ID NO: 1376104 - DNA, 15 bp, Homo sapiens
ataaataccttctgt

SEQ ID NO: 1376105 - DNA, 15 bp, Homo sapiens
aataaataccttctg

SEQ ID NO: 1376106 - DNA, 15 bp, Homo sapiens
aaataaataccttct

SEQ ID NO: 1376107 - DNA, 15 bp, Homo sapiens
caaataaataccttc

SEQ ID NO: 1376108 - DNA, 15 bp, Homo sapiens
gcaaataaatacctt

SEQ ID NO: 1376109 - DNA, 15 bp, Homo sapiens
ggcaaataaatacct

SEQ ID NO: 1376110 - DNA, 15 bp, Homo sapiens
aggcaaataaatacc

SEQ ID NO: 1376111 - DNA, 15 bp, Homo sapiens
taggcaaataaatac

SEQ ID NO: 1376112 - DNA, 15 bp, Homo sapiens
gtaggcaaataaata

SEQ ID NO: 1376113 - DNA, 15 bp, Homo sapiens
agtaggcaaataaat

SEQ ID NO: 1376114 - DNA, 15 bp, Homo sapiens
aagtaggcaaataaa

SEQ ID NO: 1376115 - DNA, 15 bp, Homo sapiens
gaagtaggcaaataa

SEQ ID NO: 1376116 - DNA, 15 bp, Homo sapiens
agaagtaggcaaata

SEQ ID NO: 1376117 - DNA, 15 bp, Homo sapiens
gagaagtaggcaaat

SEQ ID NO: 1376118 - DNA, 15 bp, Homo sapiens
tgagaagtaggcaaa

SEQ ID NO: 1376119 - DNA, 15 bp, Homo sapiens
ttgagaagtaggcaa

SEQ ID NO: 1376120 - DNA, 15 bp, Homo sapiens
tttgagaagtaggca

SEQ ID NO: 1376121 - DNA, 15 bp, Homo sapiens
atttgagaagtaggc

SEQ ID NO: 1376122 - DNA, 15 bp, Homo sapiens
aatttgagaagtagg

SEQ ID NO: 1376123 - DNA, 15 bp, Homo sapiens
taatttgagaagtag

SEQ ID NO: 1376124 - DNA, 15 bp, Homo sapiens
gtaatttgagaagta

SEQ ID NO: 1376125 - DNA, 15 bp, Homo sapiens
ggtaatttgagaagt

SEQ ID NO: 1376126 - DNA, 15 bp, Homo sapiens
tggtaatttgagaag

SEQ ID NO: 1376127 - DNA, 15 bp, Homo sapiens
ctggtaatttgagaa

SEQ ID NO: 1376128 - DNA, 15 bp, Homo sapiens
gctggtaatttgaga

SEQ ID NO: 1376129 - DNA, 15 bp, Homo sapiens
ataccagaaggaaac

SEQ ID NO: 1376130 - DNA, 15 bp, Homo sapiens
gataccagaaggaaa

SEQ ID NO: 1376131 - DNA, 15 bp, Homo sapiens
tgataccagaaggaa

SEQ ID NO: 1376132 - DNA, 15 bp, Homo sapiens
atgataccagaagga

SEQ ID NO: 1376133 - DNA, 15 bp, Homo sapiens
aatgataccagaagg

SEQ ID NO: 1376134 - DNA, 15 bp, Homo sapiens
aaatgataccagaag

SEQ ID NO: 1376135 - DNA, 15 bp, Homo sapiens
taaatgataccagaa

SEQ ID NO: 1376136 - DNA, 15 bp, Homo sapiens
ataaatgataccaga

SEQ ID NO: 1376137 - DNA, 15 bp, Homo sapiens
gataaatgataccag

SEQ ID NO: 1376138 - DNA, 15 bp, Homo sapiens
agataaatgatacca

SEQ ID NO: 1376139 - DNA, 15 bp, Homo sapiens
aagataaatgatacc

SEQ ID NO: 1376140 - DNA, 15 bp, Homo sapiens
gaagataaatgatac

SEQ ID NO: 1376141 - DNA, 15 bp, Homo sapiens
agaagataaatgata

SEQ ID NO: 1376142 - DNA, 15 bp, Homo sapiens
cagaagataaatgat

SEQ ID NO: 1376143 - DNA, 15 bp, Homo sapiens
acagaagataaatga

SEQ ID NO: 1376144 - DNA, 15 bp, Homo sapiens
gacagaagataaatg

SEQ ID NO: 1376145 - DNA, 15 bp, Homo sapiens
tgacagaagataaat

SEQ ID NO: 1376146 - DNA, 15 bp, Homo sapiens
ctgacagaagataaa

SEQ ID NO: 1376147 - DNA, 15 bp, Homo sapiens
tctgacagaagataa

SEQ ID NO: 1376148 - DNA, 15 bp, Homo sapiens
ttctgacagaagata

SEQ ID NO: 1376149 - DNA, 15 bp, Homo sapiens
cttctgacagaagat

SEQ ID NO: 1376150 - DNA, 15 bp, Homo sapiens
tcttctgacagaaga

SEQ ID NO: 1376151 - DNA, 15 bp, Homo sapiens
atcttctgacagaag

SEQ ID NO: 1376152 - DNA, 15 bp, Homo sapiens
aatcttctgacagaa

SEQ ID NO: 1376153 - DNA, 15 bp, Homo sapiens
aaatcttctgacaga

SEQ ID NO: 1376154 - DNA, 15 bp, Homo sapiens
aaaatcttctgacag

SEQ ID NO: 1376155 - DNA, 15 bp, Homo sapiens
gaaaatcttctgaca

SEQ ID NO: 1376156 - DNA, 15 bp, Homo sapiens
agaaaatcttctgac

SEQ ID NO: 1376157 - DNA, 15 bp, Homo sapiens
aagaaaatcttctga

SEQ ID NO: 1376158 - DNA, 15 bp, Homo sapiens
aaagaaaatcttctg

SEQ ID NO: 1376159 - DNA, 15 bp, Homo sapiens
taaagaaaatcttct

SEQ ID NO: 1376160 - DNA, 15 bp, Homo sapiens
gtaaagaaaatcttc

SEQ ID NO: 1376161 - DNA, 15 bp, Homo sapiens
agtaaagaaaatctt

SEQ ID NO: 1376162 - DNA, 15 bp, Homo sapiens
cagtaaagaaaatct

SEQ ID NO: 1376163 - DNA, 15 bp, Homo sapiens
tcagtaaagaaaatc

SEQ ID NO: 1376164 - DNA, 15 bp, Homo sapiens
atcagtaaagaaaat

SEQ ID NO: 1376165 - DNA, 15 bp, Homo sapiens
aatcagtaaagaaaa

SEQ ID NO: 1376166 - DNA, 15 bp, Homo sapiens
gaatcagtaaagaaa

SEQ ID NO: 1376167 - DNA, 15 bp, Homo sapiens
agaatcagtaaagaa

SEQ ID NO: 1376168 - DNA, 15 bp, Homo sapiens
aagaatcagtaaaga

SEQ ID NO: 1376169 - DNA, 15 bp, Homo sapiens
aaagaatcagtaaag

SEQ ID NO: 1376170 - DNA, 15 bp, Homo sapiens
aaaagaatcagtaaa

SEQ ID NO: 1376171 - DNA, 15 bp, Homo sapiens
taaaagaatcagtaa

SEQ ID NO: 1376172 - DNA, 15 bp, Homo sapiens
ctaaaagaatcagta

SEQ ID NO: 1376173 - DNA, 15 bp, Homo sapiens
tctaaaagaatcagt

SEQ ID NO: 1376174 - DNA, 15 bp, Homo sapiens
ctctaaaagaatcag

SEQ ID NO: 1376175 - DNA, 15 bp, Homo sapiens
actctaaaagaatca

SEQ ID NO: 1376176 - DNA, 15 bp, Homo sapiens
tactctaaaagaatc

SEQ ID NO: 1376177 - DNA, 15 bp, Homo sapiens
ctactctaaaagaat

SEQ ID NO: 1376178 - DNA, 15 bp, Homo sapiens
cctactctaaaagaa

SEQ ID NO: 1376179 - DNA, 15 bp, Homo sapiens
acctactctaaaaga

SEQ ID NO: 1376180 - DNA, 15 bp, Homo sapiens
gacctactctaaaag

SEQ ID NO: 1376181 - DNA, 15 bp, Homo sapiens
agacctactctaaaa

SEQ ID NO: 1376182 - DNA, 15 bp, Homo sapiens
cagacctactctaaa

SEQ ID NO: 1376183 - DNA, 15 bp, Homo sapiens
tcagacctactctaa

SEQ ID NO: 1376184 - DNA, 15 bp, Homo sapiens
atcagacctactcta

SEQ ID NO: 1376185 - DNA, 15 bp, Homo sapiens
catcagacctactct

SEQ ID NO: 1376186 - DNA, 15 bp, Homo sapiens
ccatcagacctactc

SEQ ID NO: 1376187 - DNA, 15 bp, Homo sapiens
gccatcagacctact

SEQ ID NO: 1376188 - DNA, 15 bp, Homo sapiens
tgccatcagacctac

SEQ ID NO: 1376189 - DNA, 15 bp, Homo sapiens
ttgccatcagaccta

SEQ ID NO: 1376190 - DNA, 15 bp, Homo sapiens
gttgccatcagacct

SEQ ID NO: 1376191 - DNA, 15 bp, Homo sapiens
tgttgccatcagacc

SEQ ID NO: 1376192 - DNA, 15 bp, Homo sapiens
ttgttgccatcagac

SEQ ID NO: 1376193 - DNA, 15 bp, Homo sapiens
tttgttgccatcaga

SEQ ID NO: 1376194 - DNA, 15 bp, Homo sapiens
atttgttgccatcag

SEQ ID NO: 1376195 - DNA, 15 bp, Homo sapiens
aatttgttgccatca

SEQ ID NO: 1376196 - DNA, 15 bp, Homo sapiens
gaatttgttgccatc

SEQ ID NO: 1376197 - DNA, 15 bp, Homo sapiens
agaatttgttgccat

SEQ ID NO: 1376198 - DNA, 15 bp, Homo sapiens
aagaatttgttgcca

SEQ ID NO: 1376199 - DNA, 15 bp, Homo sapiens
aaagaatttgttgcc

SEQ ID NO: 1376200 - DNA, 15 bp, Homo sapiens
gaaagaatttgttgc

SEQ ID NO: 1376201 - DNA, 15 bp, Homo sapiens
tgaaagaatttgttg

SEQ ID NO: 1376202 - DNA, 15 bp, Homo sapiens
ctgaaagaatttgtt

SEQ ID NO: 1376203 - DNA, 15 bp, Homo sapiens
actgaaagaatttgt

SEQ ID NO: 1376204 - DNA, 15 bp, Homo sapiens
aactgaaagaatttg

SEQ ID NO: 1376205 - DNA, 15 bp, Homo sapiens
aaactgaaagaattt

SEQ ID NO: 1376206 - DNA, 15 bp, Homo sapiens
aaaactgaaagaatt

SEQ ID NO: 1376207 - DNA, 15 bp, Homo sapiens
gaaaactgaaagaat

SEQ ID NO: 1376208 - DNA, 15 bp, Homo sapiens
agaaaactgaaagaa

SEQ ID NO: 1376209 - DNA, 15 bp, Homo sapiens
aagaaaactgaaaga

SEQ ID NO: 1376210 - DNA, 15 bp, Homo sapiens
aaagaaaactgaaag

SEQ ID NO: 1376211 - DNA, 15 bp, Homo sapiens
caaagaaaactgaaa

SEQ ID NO: 1376212 - DNA, 15 bp, Homo sapiens
tcaaagaaaactgaa

SEQ ID NO: 1376213 - DNA, 15 bp, Homo sapiens
gtcaaagaaaactga

SEQ ID NO: 1376214 - DNA, 15 bp, Homo sapiens
agtcaaagaaaactg

SEQ ID NO: 1376215 - DNA, 15 bp, Homo sapiens
aagtcaaagaaaact

SEQ ID NO: 1376216 - DNA, 15 bp, Homo sapiens
caagtcaaagaaaac

SEQ ID NO: 1376217 - DNA, 15 bp, Homo sapiens
tcaagtcaaagaaaa

SEQ ID NO: 1376218 - DNA, 15 bp, Homo sapiens
gtcaagtcaaagaaa

SEQ ID NO: 1376219 - DNA, 15 bp, Homo sapiens
agtcaagtcaaagaa

SEQ ID NO: 1376220 - DNA, 15 bp, Homo sapiens
aagtcaagtcaaaga

SEQ ID NO: 1376221 - DNA, 15 bp, Homo sapiens
caagtcaagtcaaag

SEQ ID NO: 1376222 - DNA, 15 bp, Homo sapiens
tcaagtcaagtcaaa

SEQ ID NO: 1376223 - DNA, 15 bp, Homo sapiens
ttcaagtcaagtcaa

SEQ ID NO: 1376224 - DNA, 15 bp, Homo sapiens
tttcaagtcaagtca

SEQ ID NO: 1376225 - DNA, 15 bp, Homo sapiens
ctttcaagtcaagtc

SEQ ID NO: 1376226 - DNA, 15 bp, Homo sapiens
actttcaagtcaagt

SEQ ID NO: 1376227 - DNA, 15 bp, Homo sapiens
cactttcaagtcaag

SEQ ID NO: 1376228 - DNA, 15 bp, Homo sapiens
acactttcaagtcaa

SEQ ID NO: 1376229 - DNA, 15 bp, Homo sapiens
aacactttcaagtca

SEQ ID NO: 1376230 - DNA, 15 bp, Homo sapiens
aaacactttcaagtc

SEQ ID NO: 1376231 - DNA, 15 bp, Homo sapiens
aaaacactttcaagt

SEQ ID NO: 1376232 - DNA, 15 bp, Homo sapiens
aaaaacactttcaag

SEQ ID NO: 1376233 - DNA, 15 bp, Homo sapiens
taaaaacactttcaa

SEQ ID NO: 1376234 - DNA, 15 bp, Homo sapiens
ataaaaacactttca

SEQ ID NO: 1376235 - DNA, 15 bp, Homo sapiens
aataaaaacactttc

SEQ ID NO: 1376236 - DNA, 15 bp, Homo sapiens
aaataaaaacacttt

SEQ ID NO: 1376237 - DNA, 15 bp, Homo sapiens
aaaataaaaacactt

SEQ ID NO: 1376238 - DNA, 15 bp, Homo sapiens
taaaataaaaacact

SEQ ID NO: 1376239 - DNA, 15 bp, Homo sapiens
gtaaaataaaaacac

SEQ ID NO: 1376240 - DNA, 15 bp, Homo sapiens
ggtaaaataaaaaca

SEQ ID NO: 1376241 - DNA, 15 bp, Homo sapiens
aggtaaaataaaaac

SEQ ID NO: 1376242 - DNA, 15 bp, Homo sapiens
aaggtaaaataaaaa

SEQ ID NO: 1376243 - DNA, 15 bp, Homo sapiens
gaaggtaaaataaaa

SEQ ID NO: 1376244 - DNA, 15 bp, Homo sapiens
cgaaggtaaaataaa

SEQ ID NO: 1376245 - DNA, 15 bp, Homo sapiens
acgaaggtaaaataa

SEQ ID NO: 1376246 - DNA, 15 bp, Homo sapiens
aacgaaggtaaaata

SEQ ID NO: 1376247 - DNA, 15 bp, Homo sapiens
gaacgaaggtaaaat

SEQ ID NO: 1376248 - DNA, 15 bp, Homo sapiens
ggaacgaaggtaaaa

SEQ ID NO: 1376249 - DNA, 15 bp, Homo sapiens
aggaacgaaggtaaa

SEQ ID NO: 1376250 - DNA, 15 bp, Homo sapiens
caggaacgaaggtaa

SEQ ID NO: 1376251 - DNA, 15 bp, Homo sapiens
tcaggaacgaaggta

SEQ ID NO: 1376252 - DNA, 15 bp, Homo sapiens
ttcaggaacgaaggt

SEQ ID NO: 1376253 - DNA, 15 bp, Homo sapiens
cttcaggaacgaagg

SEQ ID NO: 1376254 - DNA, 15 bp, Homo sapiens
tcttcaggaacgaag

SEQ ID NO: 1376255 - DNA, 15 bp, Homo sapiens
ttcttcaggaacgaa

SEQ ID NO: 1376256 - DNA, 15 bp, Homo sapiens
attcttcaggaacga

SEQ ID NO: 1376257 - DNA, 15 bp, Homo sapiens
tattcttcaggaacg

SEQ ID NO: 1376258 - DNA, 15 bp, Homo sapiens
atattcttcaggaac

SEQ ID NO: 1376259 - DNA, 15 bp, Homo sapiens
aatattcttcaggaa

SEQ ID NO: 1376260 - DNA, 15 bp, Homo sapiens
aaatattcttcagga

SEQ ID NO: 1376261 - DNA, 15 bp, Homo sapiens
aaaatattcttcagg

SEQ ID NO: 1376262 - DNA, 15 bp, Homo sapiens
gaaaatattcttcag

SEQ ID NO: 1376263 - DNA, 15 bp, Homo sapiens
tgaaaatattcttca

SEQ ID NO: 1376264 - DNA, 15 bp, Homo sapiens
gtgaaaatattcttc

SEQ ID NO: 1376265 - DNA, 15 bp, Homo sapiens
agtgaaaatattctt

SEQ ID NO: 1376266 - DNA, 15 bp, Homo sapiens
cagtgaaaatattct

SEQ ID NO: 1376267 - DNA, 15 bp, Homo sapiens
acagtgaaaatattc

SEQ ID NO: 1376268 - DNA, 15 bp, Homo sapiens
tacagtgaaaatatt

SEQ ID NO: 1376269 - DNA, 15 bp, Homo sapiens
atacagtgaaaatat

SEQ ID NO: 1376270 - DNA, 15 bp, Homo sapiens
tatacagtgaaaata

SEQ ID NO: 1376271 - DNA, 15 bp, Homo sapiens
atatacagtgaaaat

SEQ ID NO: 1376272 - DNA, 15 bp, Homo sapiens
aatatacagtgaaaa

SEQ ID NO: 1376273 - DNA, 15 bp, Homo sapiens
caatatacagtgaaa

SEQ ID NO: 1376274 - DNA, 15 bp, Homo sapiens
tcaatatacagtgaa

SEQ ID NO: 1376275 - DNA, 15 bp, Homo sapiens
ttcaatatacagtga

SEQ ID NO: 1376276 - DNA, 15 bp, Homo sapiens
attcaatatacagtg

SEQ ID NO: 1376277 - DNA, 15 bp, Homo sapiens
aattcaatatacagt

SEQ ID NO: 1376278 - DNA, 15 bp, Homo sapiens
aaattcaatatacag

SEQ ID NO: 1376279 - DNA, 15 bp, Homo sapiens
aaaattcaatataca

SEQ ID NO: 1376280 - DNA, 15 bp, Homo sapiens
caaaattcaatatac

SEQ ID NO: 1376281 - DNA, 15 bp, Homo sapiens
ccaaaattcaatata

SEQ ID NO: 1376282 - DNA, 15 bp, Homo sapiens
accaaaattcaatat

SEQ ID NO: 1376283 - DNA, 15 bp, Homo sapiens
aaccaaaattcaata

SEQ ID NO: 1376284 - DNA, 15 bp, Homo sapiens
caaccaaaattcaat

SEQ ID NO: 1376285 - DNA, 15 bp, Homo sapiens
tcaaccaaaattcaa

SEQ ID NO: 1376286 - DNA, 15 bp, Homo sapiens
gtcaaccaaaattca

SEQ ID NO: 1376287 - DNA, 15 bp, Homo sapiens
tgtcaaccaaaattc

SEQ ID NO: 1376288 - DNA, 15 bp, Homo sapiens
ctgtcaaccaaaatt

SEQ ID NO: 1376289 - DNA, 15 bp, Homo sapiens
cctgtcaaccaaaat

SEQ ID NO: 1376290 - DNA, 15 bp, Homo sapiens
acctgtcaaccaaaa

SEQ ID NO: 1376291 - DNA, 15 bp, Homo sapiens
aacctgtcaaccaaa

SEQ ID NO: 1376292 - DNA, 15 bp, Homo sapiens
aaacctgtcaaccaa

SEQ ID NO: 1376293 - DNA, 15 bp, Homo sapiens
aaaacctgtcaacca

SEQ ID NO: 1376294 - DNA, 15 bp, Homo sapiens
aaaaacctgtcaacc

SEQ ID NO: 1376295 - DNA, 15 bp, Homo sapiens
aaaaaacctgtcaac

SEQ ID NO: 1376296 - DNA, 15 bp, Homo sapiens
aaaaaaacctgtcaa

SEQ ID NO: 1376297 - DNA, 15 bp, Homo sapiens
aaaaaaaacctgtca

SEQ ID NO: 1376298 - DNA, 15 bp, Homo sapiens
gaaaaaaaacctgtc

SEQ ID NO: 1376299 - DNA, 15 bp, Homo sapiens
tgaaaaaaaacctgt

SEQ ID NO: 1376300 - DNA, 15 bp, Homo sapiens
ttgaaaaaaaacctg

SEQ ID NO: 1376301 - DNA, 15 bp, Homo sapiens
tttgaaaaaaaacct

SEQ ID NO: 1376302 - DNA, 15 bp, Homo sapiens
atttgaaaaaaaacc

SEQ ID NO: 1376303 - DNA, 15 bp, Homo sapiens
tatttgaaaaaaaac

SEQ ID NO: 1376304 - DNA, 15 bp, Homo sapiens
atatttgaaaaaaaa

SEQ ID NO: 1376305 - DNA, 15 bp, Homo sapiens
aatatttgaaaaaaa

SEQ ID NO: 1376306 - DNA, 15 bp, Homo sapiens
aaatatttgaaaaaa

SEQ ID NO: 1376307 - DNA, 15 bp, Homo sapiens
gaaatatttgaaaaa

SEQ ID NO: 1376308 - DNA, 15 bp, Homo sapiens
agaaatatttgaaaa

SEQ ID NO: 1376309 - DNA, 15 bp, Homo sapiens
aagaaatatttgaaa

SEQ ID NO: 1376310 - DNA, 15 bp, Homo sapiens
aaagaaatatttgaa

SEQ ID NO: 1376311 - DNA, 15 bp, Homo sapiens
taaagaaatatttga

SEQ ID NO: 1376312 - DNA, 15 bp, Homo sapiens
ctaaagaaatatttg

SEQ ID NO: 1376313 - DNA, 15 bp, Homo sapiens
tctaaagaaatattt

SEQ ID NO: 1376314 - DNA, 15 bp, Homo sapiens
atctaaagaaatatt

SEQ ID NO: 1376315 - DNA, 15 bp, Homo sapiens
tatctaaagaaatat

SEQ ID NO: 1376316 - DNA, 15 bp, Homo sapiens
atatctaaagaaata

SEQ ID NO: 1376317 - DNA, 15 bp, Homo sapiens
aatatctaaagaaat

SEQ ID NO: 1376318 - DNA, 15 bp, Homo sapiens
aaatatctaaagaaa

SEQ ID NO: 1376319 - DNA, 15 bp, Homo sapiens
aaaatatctaaagaa

SEQ ID NO: 1376320 - DNA, 15 bp, Homo sapiens
aaaaatatctaaaga

SEQ ID NO: 1376321 - DNA, 15 bp, Homo sapiens
aaaaaatatctaaag

SEQ ID NO: 1376322 - DNA, 15 bp, Homo sapiens
taaaaaatatctaaa

SEQ ID NO: 1376323 - DNA, 15 bp, Homo sapiens
ctaaaaaatatctaa

SEQ ID NO: 1376324 - DNA, 15 bp, Homo sapiens
tctaaaaaatatcta

SEQ ID NO: 1376325 - DNA, 15 bp, Homo sapiens
atctaaaaaatatct

SEQ ID NO: 1376326 - DNA, 15 bp, Homo sapiens
tatctaaaaaatatc

SEQ ID NO: 1376327 - DNA, 15 bp, Homo sapiens
atatctaaaaaatat

SEQ ID NO: 1376328 - DNA, 15 bp, Homo sapiens
tatatctaaaaaata

SEQ ID NO: 1376329 - DNA, 15 bp, Homo sapiens
gtatatctaaaaaat

SEQ ID NO: 1376330 - DNA, 15 bp, Homo sapiens
tgtatatctaaaaaa

SEQ ID NO: 1376331 - DNA, 15 bp, Homo sapiens
gtgtatatctaaaaa

SEQ ID NO: 1376332 - DNA, 15 bp, Homo sapiens
agtgtatatctaaaa

SEQ ID NO: 1376333 - DNA, 15 bp, Homo sapiens
cagtgtatatctaaa

SEQ ID NO: 1376334 - DNA, 15 bp, Homo sapiens
gcagtgtatatctaa

SEQ ID NO: 1376335 - DNA, 15 bp, Homo sapiens
tgcagtgtatatcta

SEQ ID NO: 1376336 - DNA, 15 bp, Homo sapiens
atgcagtgtatatct

SEQ ID NO: 1376337 - DNA, 15 bp, Homo sapiens
gatgcagtgtatatc

SEQ ID NO: 1376338 - DNA, 15 bp, Homo sapiens
agatgcagtgtatat

SEQ ID NO: 1376339 - DNA, 15 bp, Homo sapiens
tagatgcagtgtata

SEQ ID NO: 1376340 - DNA, 15 bp, Homo sapiens
ttagatgcagtgtat

SEQ ID NO: 1376341 - DNA, 15 bp, Homo sapiens
tttagatgcagtgta

SEQ ID NO: 1376342 - DNA, 15 bp, Homo sapiens
ctttagatgcagtgt

SEQ ID NO: 1376343 - DNA, 15 bp, Homo sapiens
tctttagatgcagtg

SEQ ID NO: 1376344 - DNA, 15 bp, Homo sapiens
ttctttagatgcagt

SEQ ID NO: 1376345 - DNA, 15 bp, Homo sapiens
gttctttagatgcag

SEQ ID NO: 1376346 - DNA, 15 bp, Homo sapiens
tgttctttagatgca

SEQ ID NO: 1376347 - DNA, 15 bp, Homo sapiens
gtgttctttagatgc

SEQ ID NO: 1376348 - DNA, 15 bp, Homo sapiens
agtgttctttagatg

SEQ ID NO: 1376349 - DNA, 15 bp, Homo sapiens
cagtgttctttagat

SEQ ID NO: 1376350 - DNA, 15 bp, Homo sapiens
ccagtgttctttaga

SEQ ID NO: 1376351 - DNA, 15 bp, Homo sapiens
tccagtgttctttag

SEQ ID NO: 1376352 - DNA, 15 bp, Homo sapiens
ttccagtgttcttta

SEQ ID NO: 1376353 - DNA, 15 bp, Homo sapiens
attccagtgttcttt

SEQ ID NO: 1376354 - DNA, 15 bp, Homo sapiens
aattccagtgttctt

SEQ ID NO: 1376355 - DNA, 15 bp, Homo sapiens
caattccagtgttct

SEQ ID NO: 1376356 - DNA, 15 bp, Homo sapiens
gcaattccagtgttc

SEQ ID NO: 1376357 - DNA, 15 bp, Homo sapiens
agcaattccagtgtt

SEQ ID NO: 1376358 - DNA, 15 bp, Homo sapiens
aagcaattccagtgt

SEQ ID NO: 1376359 - DNA, 15 bp, Homo sapiens
aaagcaattccagtg

SEQ ID NO: 1376360 - DNA, 15 bp, Homo sapiens
aaaagcaattccagt

SEQ ID NO: 1376361 - DNA, 15 bp, Homo sapiens
taaaagcaattccag

SEQ ID NO: 1376362 - DNA, 15 bp, Homo sapiens
gtaaaagcaattcca

SEQ ID NO: 1376363 - DNA, 15 bp, Homo sapiens
tgtaaaagcaattcc

SEQ ID NO: 1376364 - DNA, 15 bp, Homo sapiens
ctgtaaaagcaattc

SEQ ID NO: 1376365 - DNA, 15 bp, Homo sapiens
tctgtaaaagcaatt

SEQ ID NO: 1376366 - DNA, 15 bp, Homo sapiens
gtctgtaaaagcaat

SEQ ID NO: 1376367 - DNA, 15 bp, Homo sapiens
ggtctgtaaaagcaa

SEQ ID NO: 1376368 - DNA, 15 bp, Homo sapiens
tggtctgtaaaagca

SEQ ID NO: 1376369 - DNA, 15 bp, Homo sapiens
ctggtctgtaaaagc

SEQ ID NO: 1376370 - DNA, 15 bp, Homo sapiens
tctggtctgtaaaag

SEQ ID NO: 1376371 - DNA, 15 bp, Homo sapiens
ctctggtctgtaaaa

SEQ ID NO: 1376372 - DNA, 15 bp, Homo sapiens
actctggtctgtaaa

SEQ ID NO: 1376373 - DNA, 15 bp, Homo sapiens
gactctggtctgtaa

SEQ ID NO: 1376374 - DNA, 15 bp, Homo sapiens
agactctggtctgta

SEQ ID NO: 1376375 - DNA, 15 bp, Homo sapiens
cagactctggtctgt

SEQ ID NO: 1376376 - DNA, 15 bp, Homo sapiens
gcagactctggtctg

SEQ ID NO: 1376377 - DNA, 15 bp, Homo sapiens
agcagactctggtct

SEQ ID NO: 1376378 - DNA, 15 bp, Homo sapiens
gagcagactctggtc

SEQ ID NO: 1376379 - DNA, 15 bp, Homo sapiens
ggagcagactctggt

SEQ ID NO: 1376380 - DNA, 15 bp, Homo sapiens
tggagcagactctgg

SEQ ID NO: 1376381 - DNA, 15 bp, Homo sapiens
atggagcagactctg

SEQ ID NO: 1376382 - DNA, 15 bp, Homo sapiens
aatggagcagactct

SEQ ID NO: 1376383 - DNA, 15 bp, Homo sapiens
aaatggagcagactc

SEQ ID NO: 1376384 - DNA, 15 bp, Homo sapiens
aaaatggagcagact

SEQ ID NO: 1376385 - DNA, 15 bp, Homo sapiens
aaaaatggagcagac

SEQ ID NO: 1376386 - DNA, 15 bp, Homo sapiens
aaaaaatggagcaga

SEQ ID NO: 1376387 - DNA, 15 bp, Homo sapiens
gaaaaaatggagcag

SEQ ID NO: 1376388 - DNA, 15 bp, Homo sapiens
agaaaaaatggagca

SEQ ID NO: 1376389 - DNA, 15 bp, Homo sapiens
gagaaaaaatggagc

SEQ ID NO: 1376390 - DNA, 15 bp, Homo sapiens
agagaaaaaatggag

SEQ ID NO: 1376391 - DNA, 15 bp, Homo sapiens
aagagaaaaaatgga

SEQ ID NO: 1376392 - DNA, 15 bp, Homo sapiens
aaagagaaaaaatgg

SEQ ID NO: 1376393 - DNA, 15 bp, Homo sapiens
taaagagaaaaaatg

SEQ ID NO: 1376394 - DNA, 15 bp, Homo sapiens
ataaagagaaaaaat

SEQ ID NO: 1376395 - DNA, 15 bp, Homo sapiens
cataaagagaaaaaa

SEQ ID NO: 1376396 - DNA, 15 bp, Homo sapiens
tcataaagagaaaaa

SEQ ID NO: 1376397 - DNA, 15 bp, Homo sapiens
atcataaagagaaaa

SEQ ID NO: 1376398 - DNA, 15 bp, Homo sapiens
tatcataaagagaaa

SEQ ID NO: 1376399 - DNA, 15 bp, Homo sapiens
ttatcataaagagaa

SEQ ID NO: 1376400 - DNA, 15 bp, Homo sapiens
cttatcataaagaga

SEQ ID NO: 1376401 - DNA, 15 bp, Homo sapiens
tcttatcataaagag

SEQ ID NO: 1376402 - DNA, 15 bp, Homo sapiens
ttcttatcataaaga

SEQ ID NO: 1376403 - DNA, 15 bp, Homo sapiens
attcttatcataaag

SEQ ID NO: 1376404 - DNA, 15 bp, Homo sapiens
tattcttatcataaa

SEQ ID NO: 1376405 - DNA, 15 bp, Homo sapiens
atattcttatcataa

SEQ ID NO: 1376406 - DNA, 15 bp, Homo sapiens
tatattcttatcata

SEQ ID NO: 1376407 - DNA, 15 bp, Homo sapiens
atatattcttatcat

SEQ ID NO: 1376408 - DNA, 15 bp, Homo sapiens
catatattcttatca

SEQ ID NO: 1376409 - DNA, 15 bp, Homo sapiens
tcatatattcttatc

SEQ ID NO: 1376410 - DNA, 15 bp, Homo sapiens
ttcatatattcttat

SEQ ID NO: 1376411 - DNA, 15 bp, Homo sapiens
tttcatatattctta

SEQ ID NO: 1376412 - DNA, 15 bp, Homo sapiens
atttcatatattctt

SEQ ID NO: 1376413 - DNA, 15 bp, Homo sapiens
tatttcatatattct

SEQ ID NO: 1376414 - DNA, 15 bp, Homo sapiens
ttatttcatatattc

SEQ ID NO: 1376415 - DNA, 15 bp, Homo sapiens
tttatttcatatatt

SEQ ID NO: 1376416 - DNA, 15 bp, Homo sapiens
ttttatttcatatat

SEQ ID NO: 1376417 - DNA, 15 bp, Homo sapiens
attttatttcatata

SEQ ID NO: 1376418 - DNA, 15 bp, Homo sapiens
tattttatttcatat

SEQ ID NO: 1376419 - DNA, 15 bp, Homo sapiens
ctattttatttcata

SEQ ID NO: 1376420 - DNA, 15 bp, Homo sapiens
tctattttatttcat

SEQ ID NO: 1376421 - DNA, 15 bp, Homo sapiens
gtctattttatttca

SEQ ID NO: 1376422 - DNA, 15 bp, Homo sapiens
tgtctattttatttc

SEQ ID NO: 1376423 - DNA, 15 bp, Homo sapiens
atgtctattttattt

SEQ ID NO: 1376424 - DNA, 15 bp, Homo sapiens
aatgtctattttatt

SEQ ID NO: 1376425 - DNA, 15 bp, Homo sapiens
gaatgtctattttat

SEQ ID NO: 1376426 - DNA, 15 bp, Homo sapiens
tgaatgtctatttta

SEQ ID NO: 1376427 - DNA, 15 bp, Homo sapiens
ttgaatgtctatttt

SEQ ID NO: 1376428 - DNA, 15 bp, Homo sapiens
tttgaatgtctattt

SEQ ID NO: 1376429 - DNA, 15 bp, Homo sapiens
atttgaatgtctatt

SEQ ID NO: 1376430 - DNA, 15 bp, Homo sapiens
tatttgaatgtctat

SEQ ID NO: 1376431 - DNA, 15 bp, Homo sapiens
atatttgaatgtcta

SEQ ID NO: 1376432 - DNA, 15 bp, Homo sapiens
tatatttgaatgtct

SEQ ID NO: 1376433 - DNA, 15 bp, Homo sapiens
atatatttgaatgtc

SEQ ID NO: 1376434 - DNA, 15 bp, Homo sapiens
aatatatttgaatgt

SEQ ID NO: 1376435 - DNA, 15 bp, Homo sapiens
taatatatttgaatg

SEQ ID NO: 1376436 - DNA, 15 bp, Homo sapiens
gtaatatatttgaat

SEQ ID NO: 1376437 - DNA, 15 bp, Homo sapiens
agtaatatatttgaa

SEQ ID NO: 1376438 - DNA, 15 bp, Homo sapiens
aagtaatatatttga

SEQ ID NO: 1376439 - DNA, 15 bp, Homo sapiens
taagtaatatatttg

SEQ ID NO: 1376440 - DNA, 15 bp, Homo sapiens
gtaagtaatatattt

SEQ ID NO: 1376441 - DNA, 15 bp, Homo sapiens
agtaagtaatatatt

SEQ ID NO: 1376442 - DNA, 15 bp, Homo sapiens
aagtaagtaatatat

SEQ ID NO: 1376443 - DNA, 15 bp, Homo sapiens
caagtaagtaatata

SEQ ID NO: 1376444 - DNA, 15 bp, Homo sapiens
gcaagtaagtaatat

SEQ ID NO: 1376445 - DNA, 15 bp, Homo sapiens
tgcaagtaagtaata

SEQ ID NO: 1376446 - DNA, 15 bp, Homo sapiens
gtgcaagtaagtaat

SEQ ID NO: 1376447 - DNA, 15 bp, Homo sapiens
agtgcaagtaagtaa

SEQ ID NO: 1376448 - DNA, 15 bp, Homo sapiens
aagtgcaagtaagta

SEQ ID NO: 1376449 - DNA, 15 bp, Homo sapiens
gaagtgcaagtaagt

SEQ ID NO: 1376450 - DNA, 15 bp, Homo sapiens
agaagtgcaagtaag

SEQ ID NO: 1376451 - DNA, 15 bp, Homo sapiens
cagaagtgcaagtaa

SEQ ID NO: 1376452 - DNA, 15 bp, Homo sapiens
gcagaagtgcaagta

SEQ ID NO: 1376453 - DNA, 15 bp, Homo sapiens
tgcagaagtgcaagt

SEQ ID NO: 1376454 - DNA, 15 bp, Homo sapiens
gtgcagaagtgcaag

SEQ ID NO: 1376455 - DNA, 15 bp, Homo sapiens
agtgcagaagtgcaa

SEQ ID NO: 1376456 - DNA, 15 bp, Homo sapiens
aagtgcagaagtgca

SEQ ID NO: 1376457 - DNA, 15 bp, Homo sapiens
caagtgcagaagtgc

SEQ ID NO: 1376458 - DNA, 15 bp, Homo sapiens
gcaagtgcagaagtg

SEQ ID NO: 1376459 - DNA, 15 bp, Homo sapiens
ggcaagtgcagaagt

SEQ ID NO: 1376460 - DNA, 15 bp, Homo sapiens
gggcaagtgcagaag

SEQ ID NO: 1376461 - DNA, 15 bp, Homo sapiens
agggcaagtgcagaa

SEQ ID NO: 1376462 - DNA, 15 bp, Homo sapiens
cagggcaagtgcaga

SEQ ID NO: 1376463 - DNA, 15 bp, Homo sapiens
tcagggcaagtgcag

SEQ ID NO: 1376464 - DNA, 15 bp, Homo sapiens
ttcagggcaagtgca

SEQ ID NO: 1376465 - DNA, 15 bp, Homo sapiens
cttcagggcaagtgc

SEQ ID NO: 1376466 - DNA, 15 bp, Homo sapiens
tcttcagggcaagtg

SEQ ID NO: 1376467 - DNA, 15 bp, Homo sapiens
aatcttcagggcaag

SEQ ID NO: 1376468 - DNA, 15 bp, Homo sapiens
aaatcttcagggcaa

SEQ ID NO: 1376469 - DNA, 15 bp, Homo sapiens
gaaatcttcagggca

SEQ ID NO: 1376470 - DNA, 15 bp, Homo sapiens
tgaaatcttcagggc

SEQ ID NO: 1376471 - DNA, 15 bp, Homo sapiens
ttgaaatcttcaggg

SEQ ID NO: 1376472 - DNA, 15 bp, Homo sapiens
tttgaaatcttcagg

SEQ ID NO: 1376473 - DNA, 15 bp, Homo sapiens
ctttgaaatcttcag

SEQ ID NO: 1376474 - DNA, 15 bp, Homo sapiens
actttgaaatcttca

SEQ ID NO: 1376475 - DNA, 15 bp, Homo sapiens
tactttgaaatcttc

SEQ ID NO: 1376476 - DNA, 15 bp, Homo sapiens
ctactttgaaatctt

SEQ ID NO: 1376477 - DNA, 15 bp, Homo sapiens
tctactttgaaatct

SEQ ID NO: 1376478 - DNA, 15 bp, Homo sapiens
ttctactttgaaatc

SEQ ID NO: 1376479 - DNA, 15 bp, Homo sapiens
tttctactttgaaat

SEQ ID NO: 1376480 - DNA, 15 bp, Homo sapiens
ttttctactttgaaa

SEQ ID NO: 1376481 - DNA, 15 bp, Homo sapiens
cttttctactttgaa

SEQ ID NO: 1376482 - DNA, 15 bp, Homo sapiens
acttttctactttga

SEQ ID NO: 1376483 - DNA, 15 bp, Homo sapiens
aacttttctactttg

SEQ ID NO: 1376484 - DNA, 15 bp, Homo sapiens
aaacttttctacttt

SEQ ID NO: 1376485 - DNA, 15 bp, Homo sapiens
gaaacttttctactt

SEQ ID NO: 1376486 - DNA, 15 bp, Homo sapiens
agaaacttttctact

SEQ ID NO: 1376487 - DNA, 15 bp, Homo sapiens
tagaaacttttctac

SEQ ID NO: 1376488 - DNA, 15 bp, Homo sapiens
atagaaacttttcta

SEQ ID NO: 1376489 - DNA, 15 bp, Homo sapiens
tatagaaacttttct

SEQ ID NO: 1376490 - DNA, 15 bp, Homo sapiens
ctatagaaacttttc

SEQ ID NO: 1376491 - DNA, 15 bp, Homo sapiens
gctatagaaactttt

SEQ ID NO: 1376492 - DNA, 15 bp, Homo sapiens
tgctatagaaacttt

SEQ ID NO: 1376493 - DNA, 15 bp, Homo sapiens
ttgctatagaaactt

SEQ ID NO: 1376494 - DNA, 15 bp, Homo sapiens
tttgctatagaaact

SEQ ID NO: 1376495 - DNA, 15 bp, Homo sapiens
gtttgctatagaaac

SEQ ID NO: 1376496 - DNA, 15 bp, Homo sapiens
tgtttgctatagaaa

SEQ ID NO: 1376497 - DNA, 15 bp, Homo sapiens
atgtttgctatagaa

SEQ ID NO: 1376498 - DNA, 15 bp, Homo sapiens
tatgtttgctataga

SEQ ID NO: 1376499 - DNA, 15 bp, Homo sapiens
ttatgtttgctatag

SEQ ID NO: 1376500 - DNA, 15 bp, Homo sapiens
tttatgtttgctata

SEQ ID NO: 1376501 - DNA, 15 bp, Homo sapiens
ttttatgtttgctat

SEQ ID NO: 1376502 - DNA, 15 bp, Homo sapiens
attttatgtttgcta

SEQ ID NO: 1376503 - DNA, 15 bp, Homo sapiens
cattttatgtttgct

SEQ ID NO: 1376504 - DNA, 15 bp, Homo sapiens
acattttatgtttgc

SEQ ID NO: 1376505 - DNA, 15 bp, Homo sapiens
aacattttatgtttg

SEQ ID NO: 1376506 - DNA, 15 bp, Homo sapiens
aaacattttatgttt

SEQ ID NO: 1376507 - DNA, 15 bp, Homo sapiens
taaacattttatgtt

SEQ ID NO: 1376508 - DNA, 15 bp, Homo sapiens
gtaaacattttatgt

SEQ ID NO: 1376509 - DNA, 15 bp, Homo sapiens
agtaaacattttatg

SEQ ID NO: 1376510 - DNA, 15 bp, Homo sapiens
aagtaaacattttat

SEQ ID NO: 1376511 - DNA, 15 bp, Homo sapiens
taagtaaacatttta

SEQ ID NO: 1376512 - DNA, 15 bp, Homo sapiens
ataagtaaacatttt

SEQ ID NO: 1376513 - DNA, 15 bp, Homo sapiens
cataagtaaacattt

SEQ ID NO: 1376514 - DNA, 15 bp, Homo sapiens
tcataagtaaacatt

SEQ ID NO: 1376515 - DNA, 15 bp, Homo sapiens
atcataagtaaacat

SEQ ID NO: 1376516 - DNA, 15 bp, Homo sapiens
tatcataagtaaaca

SEQ ID NO: 1376517 - DNA, 15 bp, Homo sapiens
ttatcataagtaaac

SEQ ID NO: 1376518 - DNA, 15 bp, Homo sapiens
attatcataagtaaa

SEQ ID NO: 1376519 - DNA, 15 bp, Homo sapiens
tattatcataagtaa

SEQ ID NO: 1376520 - DNA, 15 bp, Homo sapiens
atattatcataagta

SEQ ID NO: 1376521 - DNA, 15 bp, Homo sapiens
catattatcataagt

SEQ ID NO: 1376522 - DNA, 15 bp, Homo sapiens
tcatattatcataag

SEQ ID NO: 1376523 - DNA, 15 bp, Homo sapiens
ctcatattatcataa

SEQ ID NO: 1376524 - DNA, 15 bp, Homo sapiens
tctcatattatcata

SEQ ID NO: 1376525 - DNA, 15 bp, Homo sapiens
gtctcatattatcat

SEQ ID NO: 1376526 - DNA, 15 bp, Homo sapiens
tgtctcatattatca

SEQ ID NO: 1376527 - DNA, 15 bp, Homo sapiens
atgtctcatattatc

SEQ ID NO: 1376528 - DNA, 15 bp, Homo sapiens
aatgtctcatattat

SEQ ID NO: 1376529 - DNA, 15 bp, Homo sapiens
caatgtctcatatta

SEQ ID NO: 1376530 - DNA, 15 bp, Homo sapiens
tcaatgtctcatatt

SEQ ID NO: 1376531 - DNA, 15 bp, Homo sapiens
ctcaatgtctcatat

SEQ ID NO: 1376532 - DNA, 15 bp, Homo sapiens
gctcaatgtctcata

SEQ ID NO: 1376533 - DNA, 15 bp, Homo sapiens
ggctcaatgtctcat

SEQ ID NO: 1376534 - DNA, 15 bp, Homo sapiens
tggctcaatgtctca

SEQ ID NO: 1376535 - DNA, 15 bp, Homo sapiens
ttggctcaatgtctc

SEQ ID NO: 1376536 - DNA, 15 bp, Homo sapiens
attggctcaatgtct

SEQ ID NO: 1376537 - DNA, 15 bp, Homo sapiens
cattggctcaatgtc

SEQ ID NO: 1376538 - DNA, 15 bp, Homo sapiens
acattggctcaatgt

SEQ ID NO: 1376539 - DNA, 15 bp, Homo sapiens
tacattggctcaatg

SEQ ID NO: 1376540 - DNA, 15 bp, Homo sapiens
ctacattggctcaat

SEQ ID NO: 1376541 - DNA, 15 bp, Homo sapiens
gctacattggctcaa

SEQ ID NO: 1376542 - DNA, 15 bp, Homo sapiens
agctacattggctca

SEQ ID NO: 1376543 - DNA, 15 bp, Homo sapiens
gagctacattggctc

SEQ ID NO: 1376544 - DNA, 15 bp, Homo sapiens
ttgagctacattggc

SEQ ID NO: 1376545 - DNA, 15 bp, Homo sapiens
cttgagctacattgg

SEQ ID NO: 1376546 - DNA, 15 bp, Homo sapiens
tcttgagctacattg

SEQ ID NO: 1376547 - DNA, 15 bp, Homo sapiens
atcttgagctacatt

SEQ ID NO: 1376548 - DNA, 15 bp, Homo sapiens
gatcttgagctacat

SEQ ID NO: 1376549 - DNA, 15 bp, Homo sapiens
tgatcttgagctaca

SEQ ID NO: 1376550 - DNA, 15 bp, Homo sapiens
gtgatcttgagctac

SEQ ID NO: 1376551 - DNA, 15 bp, Homo sapiens
tgtgatcttgagcta

SEQ ID NO: 1376552 - DNA, 15 bp, Homo sapiens
ctgtgatcttgagct

SEQ ID NO: 1376553 - DNA, 15 bp, Homo sapiens
gctgtgatcttgagc

SEQ ID NO: 1376554 - DNA, 15 bp, Homo sapiens
ggctgtgatcttgag

SEQ ID NO: 1376555 - DNA, 15 bp, Homo sapiens
aggctgtgatcttga

SEQ ID NO: 1376556 - DNA, 15 bp, Homo sapiens
caggctgtgatcttg

SEQ ID NO: 1376557 - DNA, 15 bp, Homo sapiens
acaggctgtgatctt

SEQ ID NO: 1376558 - DNA, 15 bp, Homo sapiens
gacaggctgtgatct

SEQ ID NO: 1376559 - DNA, 15 bp, Homo sapiens
tgacaggctgtgatc

SEQ ID NO: 1376560 - DNA, 15 bp, Homo sapiens
gtgacaggctgtgat

SEQ ID NO: 1376561 - DNA, 15 bp, Homo sapiens
agtgacaggctgtga

SEQ ID NO: 1376562 - DNA, 15 bp, Homo sapiens
tagtgacaggctgtg

SEQ ID NO: 1376563 - DNA, 15 bp, Homo sapiens
atagtgacaggctgt

SEQ ID NO: 1376564 - DNA, 15 bp, Homo sapiens
aatagtgacaggctg

SEQ ID NO: 1376565 - DNA, 15 bp, Homo sapiens
aaatagtgacaggct

SEQ ID NO: 1376566 - DNA, 15 bp, Homo sapiens
aaaatagtgacaggc

SEQ ID NO: 1376567 - DNA, 15 bp, Homo sapiens
aaaaatagtgacagg

SEQ ID NO: 1376568 - DNA, 15 bp, Homo sapiens
taaaaatagtgacag

SEQ ID NO: 1376569 - DNA, 15 bp, Homo sapiens
ataaaaatagtgaca

SEQ ID NO: 1376570 - DNA, 15 bp, Homo sapiens
aataaaaatagtgac

SEQ ID NO: 1376571 - DNA, 15 bp, Homo sapiens
taataaaaatagtga

SEQ ID NO: 1376572 - DNA, 15 bp, Homo sapiens
ttaataaaaatagtg

SEQ ID NO: 1376573 - DNA, 15 bp, Homo sapiens
attaataaaaatagt

SEQ ID NO: 1376574 - DNA, 15 bp, Homo sapiens
aattaataaaaatag

SEQ ID NO: 1376575 - DNA, 15 bp, Homo sapiens
aaattaataaaaata

SEQ ID NO: 1376576 - DNA, 15 bp, Homo sapiens
caaattaataaaaat

SEQ ID NO: 1376577 - DNA, 15 bp, Homo sapiens
acaaattaataaaaa

SEQ ID NO: 1376578 - DNA, 15 bp, Homo sapiens
gacaaattaataaaa

SEQ ID NO: 1376579 - DNA, 15 bp, Homo sapiens
agacaaattaataaa

SEQ ID NO: 1376580 - DNA, 15 bp, Homo sapiens
aagacaaattaataa

SEQ ID NO: 1376581 - DNA, 15 bp, Homo sapiens
aaagacaaattaata

SEQ ID NO: 1376582 - DNA, 15 bp, Homo sapiens
gaaagacaaattaat

SEQ ID NO: 1376583 - DNA, 15 bp, Homo sapiens
agaaagacaaattaa

SEQ ID NO: 1376584 - DNA, 15 bp, Homo sapiens
gagaaagacaaatta

SEQ ID NO: 1376585 - DNA, 15 bp, Homo sapiens
ggagaaagacaaatt

SEQ ID NO: 1376586 - DNA, 15 bp, Homo sapiens
gggagaaagacaaat

SEQ ID NO: 1376587 - DNA, 15 bp, Homo sapiens
tgggagaaagacaaa

SEQ ID NO: 1376588 - DNA, 15 bp, Homo sapiens
atgggagaaagacaa

SEQ ID NO: 1376589 - DNA, 15 bp, Homo sapiens
tatgggagaaagaca

SEQ ID NO: 1376590 - DNA, 15 bp, Homo sapiens
ttatgggagaaagac

SEQ ID NO: 1376591 - DNA, 15 bp, Homo sapiens
attatgggagaaaga

SEQ ID NO: 1376592 - DNA, 15 bp, Homo sapiens
aattatgggagaaag

SEQ ID NO: 1376593 - DNA, 15 bp, Homo sapiens
aaattatgggagaaa

SEQ ID NO: 1376594 - DNA, 15 bp, Homo sapiens
taaattatgggagaa

SEQ ID NO: 1376595 - DNA, 15 bp, Homo sapiens
ataaattatgggaga

SEQ ID NO: 1376596 - DNA, 15 bp, Homo sapiens
aataaattatgggag

SEQ ID NO: 1376597 - DNA, 15 bp, Homo sapiens
caataaattatggga

SEQ ID NO: 1376598 - DNA, 15 bp, Homo sapiens
tcaataaattatggg

SEQ ID NO: 1376599 - DNA, 15 bp, Homo sapiens
ttcaataaattatgg

SEQ ID NO: 1376600 - DNA, 15 bp, Homo sapiens
tttcaataaattatg

SEQ ID NO: 1376601 - DNA, 15 bp, Homo sapiens
ttttcaataaattat

SEQ ID NO: 1376602 - DNA, 15 bp, Homo sapiens
cttttcaataaatta

SEQ ID NO: 1376603 - DNA, 15 bp, Homo sapiens
tcttttcaataaatt

SEQ ID NO: 1376604 - DNA, 15 bp, Homo sapiens
atcttttcaataaat

SEQ ID NO: 1376605 - DNA, 15 bp, Homo sapiens
tatcttttcaataaa

SEQ ID NO: 1376606 - DNA, 15 bp, Homo sapiens
atatcttttcaataa

SEQ ID NO: 1376607 - DNA, 15 bp, Homo sapiens
tatatcttttcaata

SEQ ID NO: 1376608 - DNA, 15 bp, Homo sapiens
atatatcttttcaat

SEQ ID NO: 1376609 - DNA, 15 bp, Homo sapiens
aatatatcttttcaa

SEQ ID NO: 1376610 - DNA, 15 bp, Homo sapiens
caatatatcttttca

SEQ ID NO: 1376611 - DNA, 15 bp, Homo sapiens
acaatatatcttttc

SEQ ID NO: 1376612 - DNA, 15 bp, Homo sapiens
gacaatatatctttt

SEQ ID NO: 1376613 - DNA, 15 bp, Homo sapiens
agacaatatatcttt

SEQ ID NO: 1376614 - DNA, 15 bp, Homo sapiens
gagacaatatatctt

SEQ ID NO: 1376615 - DNA, 15 bp, Homo sapiens
agagacaatatatct

SEQ ID NO: 1376616 - DNA, 15 bp, Homo sapiens
aagagacaatatatc

SEQ ID NO: 1376617 - DNA, 15 bp, Homo sapiens
aaagagacaatatat

SEQ ID NO: 1376618 - DNA, 15 bp, Homo sapiens
gaaagagacaatata

SEQ ID NO: 1376619 - DNA, 15 bp, Homo sapiens
tgaaagagacaatat

SEQ ID NO: 1376620 - DNA, 15 bp, Homo sapiens
atgaaagagacaata

SEQ ID NO: 1376621 - DNA, 15 bp, Homo sapiens
aatgaaagagacaat

SEQ ID NO: 1376622 - DNA, 15 bp, Homo sapiens
taatgaaagagacaa

SEQ ID NO: 1376623 - DNA, 15 bp, Homo sapiens
gtaatgaaagagaca

SEQ ID NO: 1376624 - DNA, 15 bp, Homo sapiens
tgtaatgaaagagac

SEQ ID NO: 1376625 - DNA, 15 bp, Homo sapiens
ctgtaatgaaagaga

SEQ ID NO: 1376626 - DNA, 15 bp, Homo sapiens
actgtaatgaaagag

SEQ ID NO: 1376627 - DNA, 15 bp, Homo sapiens
aactgtaatgaaaga

SEQ ID NO: 1376628 - DNA, 15 bp, Homo sapiens
aaactgtaatgaaag

SEQ ID NO: 1376629 - DNA, 15 bp, Homo sapiens
gaaactgtaatgaaa

SEQ ID NO: 1376630 - DNA, 15 bp, Homo sapiens
tgaaactgtaatgaa

SEQ ID NO: 1376631 - DNA, 15 bp, Homo sapiens
ctgaaactgtaatga

SEQ ID NO: 1376632 - DNA, 15 bp, Homo sapiens
gctgaaactgtaatg

SEQ ID NO: 1376633 - DNA, 15 bp, Homo sapiens
agctgaaactgtaat

SEQ ID NO: 1376634 - DNA, 15 bp, Homo sapiens
cagctgaaactgtaa

SEQ ID NO: 1376635 - DNA, 15 bp, Homo sapiens
acagctgaaactgta

SEQ ID NO: 1376636 - DNA, 15 bp, Homo sapiens
aacagctgaaactgt

SEQ ID NO: 1376637 - DNA, 15 bp, Homo sapiens
gaacagctgaaactg

SEQ ID NO: 1376638 - DNA, 15 bp, Homo sapiens
agaacagctgaaact

SEQ ID NO: 1376639 - DNA, 15 bp, Homo sapiens
aagaacagctgaaac

SEQ ID NO: 1376640 - DNA, 15 bp, Homo sapiens
aaagaacagctgaaa

SEQ ID NO: 1376641 - DNA, 15 bp, Homo sapiens
gaaagaacagctgaa

SEQ ID NO: 1376642 - DNA, 15 bp, Homo sapiens
tgaaagaacagctga

SEQ ID NO: 1376643 - DNA, 15 bp, Homo sapiens
atgaaagaacagctg

SEQ ID NO: 1376644 - DNA, 15 bp, Homo sapiens
aatgaaagaacagct

SEQ ID NO: 1376645 - DNA, 15 bp, Homo sapiens
caatgaaagaacagc

SEQ ID NO: 1376646 - DNA, 15 bp, Homo sapiens
tcaatgaaagaacag

SEQ ID NO: 1376647 - DNA, 15 bp, Homo sapiens
atcaatgaaagaaca

SEQ ID NO: 1376648 - DNA, 15 bp, Homo sapiens
aatcaatgaaagaac

SEQ ID NO: 1376649 - DNA, 15 bp, Homo sapiens
aaatcaatgaaagaa

SEQ ID NO: 1376650 - DNA, 15 bp, Homo sapiens
aaaatcaatgaaaga

SEQ ID NO: 1376651 - DNA, 15 bp, Homo sapiens
aaaaatcaatgaaag

SEQ ID NO: 1376652 - DNA, 15 bp, Homo sapiens
gaaaaatcaatgaaa

SEQ ID NO: 1376653 - DNA, 15 bp, Homo sapiens
ggaaaaatcaatgaa

SEQ ID NO: 1376654 - DNA, 15 bp, Homo sapiens
tggaaaaatcaatga

SEQ ID NO: 1376655 - DNA, 15 bp, Homo sapiens
atggaaaaatcaatg

SEQ ID NO: 1376656 - DNA, 15 bp, Homo sapiens
aatggaaaaatcaat

SEQ ID NO: 1376657 - DNA, 15 bp, Homo sapiens
gaatggaaaaatcaa

SEQ ID NO: 1376658 - DNA, 15 bp, Homo sapiens
agaatggaaaaatca

SEQ ID NO: 1376659 - DNA, 15 bp, Homo sapiens
cagaatggaaaaatc

SEQ ID NO: 1376660 - DNA, 15 bp, Homo sapiens
acagaatggaaaaat

SEQ ID NO: 1376661 - DNA, 15 bp, Homo sapiens
aacagaatggaaaaa

SEQ ID NO: 1376662 - DNA, 15 bp, Homo sapiens
caacagaatggaaaa

SEQ ID NO: 1376663 - DNA, 15 bp, Homo sapiens
gcaacagaatggaaa

SEQ ID NO: 1376664 - DNA, 15 bp, Homo sapiens
cgcaacagaatggaa

SEQ ID NO: 1376665 - DNA, 15 bp, Homo sapiens
tcgcaacagaatgga

SEQ ID NO: 1376666 - DNA, 15 bp, Homo sapiens
atcgcaacagaatgg

SEQ ID NO: 1376667 - DNA, 15 bp, Homo sapiens
gatcgcaacagaatg

SEQ ID NO: 1376668 - DNA, 15 bp, Homo sapiens
tgatcgcaacagaat

SEQ ID NO: 1376669 - DNA, 15 bp, Homo sapiens
gtgatcgcaacagaa

SEQ ID NO: 1376670 - DNA, 15 bp, Homo sapiens
tgtgatcgcaacaga

SEQ ID NO: 1376671 - DNA, 15 bp, Homo sapiens
atgtgatcgcaacag

SEQ ID NO: 1376672 - DNA, 15 bp, Homo sapiens
aatgtgatcgcaaca

SEQ ID NO: 1376673 - DNA, 15 bp, Homo sapiens
aaatgtgatcgcaac

SEQ ID NO: 1376674 - DNA, 15 bp, Homo sapiens
aaaatgtgatcgcaa

SEQ ID NO: 1376675 - DNA, 15 bp, Homo sapiens
gaaaatgtgatcgca

SEQ ID NO: 1376676 - DNA, 15 bp, Homo sapiens
tgaaaatgtgatcgc

SEQ ID NO: 1376677 - DNA, 15 bp, Homo sapiens
atgaaaatgtgatcg

SEQ ID NO: 1376678 - DNA, 15 bp, Homo sapiens
aatgaaaatgtgatc

SEQ ID NO: 1376679 - DNA, 15 bp, Homo sapiens
taatgaaaatgtgat

SEQ ID NO: 1376680 - DNA, 15 bp, Homo sapiens
gtaatgaaaatgtga

SEQ ID NO: 1376681 - DNA, 15 bp, Homo sapiens
agtaatgaaaatgtg

SEQ ID NO: 1376682 - DNA, 15 bp, Homo sapiens
gtagtaatgaaaatg

SEQ ID NO: 1376683 - DNA, 15 bp, Homo sapiens
ggtagtaatgaaaat

SEQ ID NO: 1376684 - DNA, 15 bp, Homo sapiens
gggtagtaatgaaaa

SEQ ID NO: 1376685 - DNA, 15 bp, Homo sapiens
agggtagtaatgaaa

SEQ ID NO: 1376686 - DNA, 15 bp, Homo sapiens
cagggtagtaatgaa

SEQ ID NO: 1376687 - DNA, 15 bp, Homo sapiens
ccagggtagtaatga

SEQ ID NO: 1376688 - DNA, 15 bp, Homo sapiens
gccagggtagtaatg

SEQ ID NO: 1376689 - DNA, 15 bp, Homo sapiens
agccagggtagtaat

SEQ ID NO: 1376690 - DNA, 15 bp, Homo sapiens
tagccagggtagtaa

SEQ ID NO: 1376691 - DNA, 15 bp, Homo sapiens
ctagccagggtagta

SEQ ID NO: 1376692 - DNA, 15 bp, Homo sapiens
tctagccagggtagt

SEQ ID NO: 1376693 - DNA, 15 bp, Homo sapiens
ctctagccagggtag

SEQ ID NO: 1376694 - DNA, 15 bp, Homo sapiens
tctctagccagggta

SEQ ID NO: 1376695 - DNA, 15 bp, Homo sapiens
atctctagccagggt

SEQ ID NO: 1376696 - DNA, 15 bp, Homo sapiens
gatctctagccaggg

SEQ ID NO: 1376697 - DNA, 15 bp, Homo sapiens
agatctctagccagg

SEQ ID NO: 1376698 - DNA, 15 bp, Homo sapiens
tagatctctagccag

SEQ ID NO: 1376699 - DNA, 15 bp, Homo sapiens
ttagatctctagcca

SEQ ID NO: 1376700 - DNA, 15 bp, Homo sapiens
tttagatctctagcc

SEQ ID NO: 1376701 - DNA, 15 bp, Homo sapiens
ttttagatctctagc

SEQ ID NO: 1376702 - DNA, 15 bp, Homo sapiens
tttttagatctctag

SEQ ID NO: 1376703 - DNA, 15 bp, Homo sapiens
ttttttagatctcta

SEQ ID NO: 1376704 - DNA, 15 bp, Homo sapiens
gttttttagatctct

SEQ ID NO: 1376705 - DNA, 15 bp, Homo sapiens
tgttttttagatctc

SEQ ID NO: 1376706 - DNA, 15 bp, Homo sapiens
ttgttttttagatct

SEQ ID NO: 1376707 - DNA, 15 bp, Homo sapiens
tttgttttttagatc

SEQ ID NO: 1376708 - DNA, 15 bp, Homo sapiens
gtttgttttttagat

SEQ ID NO: 1376709 - DNA, 15 bp, Homo sapiens
tgtttgttttttaga

SEQ ID NO: 1376710 - DNA, 15 bp, Homo sapiens
ttgtttgttttttag

SEQ ID NO: 1376711 - DNA, 15 bp, Homo sapiens
tttgtttgtttttta

SEQ ID NO: 1376712 - DNA, 15 bp, Homo sapiens
gttgtttgtttgttt

SEQ ID NO: 1376713 - DNA, 15 bp, Homo sapiens
tgttgtttgtttgtt

SEQ ID NO: 1376714 - DNA, 15 bp, Homo sapiens
ttgttgtttgtttgt

SEQ ID NO: 1376715 - DNA, 15 bp, Homo sapiens
tttgttgtttgtttg

SEQ ID NO: 1376716 - DNA, 15 bp, Homo sapiens
gtttgttgtttgttt

SEQ ID NO: 1376717 - DNA, 15 bp, Homo sapiens
agtttgttgtttgtt

SEQ ID NO: 1376718 - DNA, 15 bp, Homo sapiens
gagtttgttgtttgt

SEQ ID NO: 1376719 - DNA, 15 bp, Homo sapiens
agagtttgttgtttg

SEQ ID NO: 1376720 - DNA, 15 bp, Homo sapiens
tagagtttgttgttt

SEQ ID NO: 1376721 - DNA, 15 bp, Homo sapiens
atagagtttgttgtt

SEQ ID NO: 1376722 - DNA, 15 bp, Homo sapiens
gatagagtttgttgt

SEQ ID NO: 1376723 - DNA, 15 bp, Homo sapiens
agatagagtttgttg

SEQ ID NO: 1376724 - DNA, 15 bp, Homo sapiens
aagatagagtttgtt

SEQ ID NO: 1376725 - DNA, 15 bp, Homo sapiens
gaagatagagtttgt

SEQ ID NO: 1376726 - DNA, 15 bp, Homo sapiens
tgaagatagagtttg

SEQ ID NO: 1376727 - DNA, 15 bp, Homo sapiens
atgaagatagagttt

SEQ ID NO: 1376728 - DNA, 15 bp, Homo sapiens
aatgaagatagagtt

SEQ ID NO: 1376729 - DNA, 15 bp, Homo sapiens
taatgaagatagagt

SEQ ID NO: 1376730 - DNA, 15 bp, Homo sapiens
ttaatgaagatagag

SEQ ID NO: 1376731 - DNA, 15 bp, Homo sapiens
attaatgaagataga

SEQ ID NO: 1376732 - DNA, 15 bp, Homo sapiens
tattaatgaagatag

SEQ ID NO: 1376733 - DNA, 15 bp, Homo sapiens
ttattaatgaagata

SEQ ID NO: 1376734 - DNA, 15 bp, Homo sapiens
gttattaatgaagat

SEQ ID NO: 1376735 - DNA, 15 bp, Homo sapiens
tgttattaatgaaga

SEQ ID NO: 1376736 - DNA, 15 bp, Homo sapiens
gtgttattaatgaag

SEQ ID NO: 1376737 - DNA, 15 bp, Homo sapiens
ggtgttattaatgaa

SEQ ID NO: 1376738 - DNA, 15 bp, Homo sapiens
tggtgttattaatga

SEQ ID NO: 1376739 - DNA, 15 bp, Homo sapiens
gtggtgttattaatg

SEQ ID NO: 1376740 - DNA, 15 bp, Homo sapiens
ggtggtgttattaat

SEQ ID NO: 1376741 - DNA, 15 bp, Homo sapiens
aggtggtgttattaa

SEQ ID NO: 1376742 - DNA, 15 bp, Homo sapiens
caggtggtgttatta

SEQ ID NO: 1376743 - DNA, 15 bp, Homo sapiens
gcaggtggtgttatt

SEQ ID NO: 1376744 - DNA, 15 bp, Homo sapiens
ggcaggtggtgttat

SEQ ID NO: 1376745 - DNA, 15 bp, Homo sapiens
aggcaggtggtgtta

SEQ ID NO: 1376746 - DNA, 15 bp, Homo sapiens
gaggcaggtggtgtt

SEQ ID NO: 1376747 - DNA, 15 bp, Homo sapiens
ggaggcaggtggtgt

SEQ ID NO: 1376748 - DNA, 15 bp, Homo sapiens
gggaggcaggtggtg

SEQ ID NO: 1376749 - DNA, 15 bp, Homo sapiens
agggaggcaggtggt

SEQ ID NO: 1376750 - DNA, 15 bp, Homo sapiens
gagggaggcaggtgg

SEQ ID NO: 1376751 - DNA, 15 bp, Homo sapiens
cgagggaggcaggtg

SEQ ID NO: 1376752 - DNA, 15 bp, Homo sapiens
acgagggaggcaggt

SEQ ID NO: 1376753 - DNA, 15 bp, Homo sapiens
gacgagggaggcagg

SEQ ID NO: 1376754 - DNA, 15 bp, Homo sapiens
tgacgagggaggcag

SEQ ID NO: 1376755 - DNA, 15 bp, Homo sapiens
ctgacgagggaggca

SEQ ID NO: 1376756 - DNA, 15 bp, Homo sapiens
cctgacgagggaggc

SEQ ID NO: 1376757 - DNA, 15 bp, Homo sapiens
gcctgacgagggagg

SEQ ID NO: 1376758 - DNA, 15 bp, Homo sapiens
agcctgacgagggag

SEQ ID NO: 1376759 - DNA, 15 bp, Homo sapiens
cagcctgacgaggga

SEQ ID NO: 1376760 - DNA, 15 bp, Homo sapiens
gcagcctgacgaggg

SEQ ID NO: 1376761 - DNA, 15 bp, Homo sapiens
agcagcctgacgagg

SEQ ID NO: 1376762 - DNA, 15 bp, Homo sapiens
tagcagcctgacgag

SEQ ID NO: 1376763 - DNA, 15 bp, Homo sapiens
ttagcagcctgacga

SEQ ID NO: 1376764 - DNA, 15 bp, Homo sapiens
attagcagcctgacg

SEQ ID NO: 1376765 - DNA, 15 bp, Homo sapiens
aattagcagcctgac

SEQ ID NO: 1376766 - DNA, 15 bp, Homo sapiens
taattagcagcctga

SEQ ID NO: 1376767 - DNA, 15 bp, Homo sapiens
ttaattagcagcctg

SEQ ID NO: 1376768 - DNA, 15 bp, Homo sapiens
tttaattagcagcct

SEQ ID NO: 1376769 - DNA, 15 bp, Homo sapiens
atttaattagcagcc

SEQ ID NO: 1376770 - DNA, 15 bp, Homo sapiens
aatttaattagcagc

SEQ ID NO: 1376771 - DNA, 15 bp, Homo sapiens
taatttaattagcag

SEQ ID NO: 1376772 - DNA, 15 bp, Homo sapiens
ctaatttaattagca

SEQ ID NO: 1376773 - DNA, 15 bp, Homo sapiens
tctaatttaattagc

SEQ ID NO: 1376774 - DNA, 15 bp, Homo sapiens
ttctaatttaattag

SEQ ID NO: 1376775 - DNA, 15 bp, Homo sapiens
attctaatttaatta

SEQ ID NO: 1376776 - DNA, 15 bp, Homo sapiens
tattctaatttaatt

SEQ ID NO: 1376777 - DNA, 15 bp, Homo sapiens
ttattctaatttaat

SEQ ID NO: 1376778 - DNA, 15 bp, Homo sapiens
cttattctaatttaa

SEQ ID NO: 1376779 - DNA, 15 bp, Homo sapiens
acttattctaattta

SEQ ID NO: 1376780 - DNA, 15 bp, Homo sapiens
tacttattctaattt

SEQ ID NO: 1376781 - DNA, 15 bp, Homo sapiens
ttacttattctaatt

SEQ ID NO: 1376782 - DNA, 15 bp, Homo sapiens
cttacttattctaat

SEQ ID NO: 1376783 - DNA, 15 bp, Homo sapiens
gcttacttattctaa

SEQ ID NO: 1376784 - DNA, 15 bp, Homo sapiens
agcttacttattcta

SEQ ID NO: 1376785 - DNA, 15 bp, Homo sapiens
tagcttacttattct

SEQ ID NO: 1376786 - DNA, 15 bp, Homo sapiens
ttagcttacttattc

SEQ ID NO: 1376787 - DNA, 15 bp, Homo sapiens
attagcttacttatt

SEQ ID NO: 1376788 - DNA, 15 bp, Homo sapiens
tattagcttacttat

SEQ ID NO: 1376789 - DNA, 15 bp, Homo sapiens
ttattagcttactta

SEQ ID NO: 1376790 - DNA, 15 bp, Homo sapiens
gttattagcttactt

SEQ ID NO: 1376791 - DNA, 15 bp, Homo sapiens
tgttattagcttact

SEQ ID NO: 1376792 - DNA, 15 bp, Homo sapiens
ctgttattagcttac

SEQ ID NO: 1376793 - DNA, 15 bp, Homo sapiens
gctgttattagctta

SEQ ID NO: 1376794 - DNA, 15 bp, Homo sapiens
tgctgttattagctt

SEQ ID NO: 1376795 - DNA, 15 bp, Homo sapiens
ttgctgttattagct

SEQ ID NO: 1376796 - DNA, 15 bp, Homo sapiens
tttgctgttattagc

SEQ ID NO: 1376797 - DNA, 15 bp, Homo sapiens
ttttgctgttattag

SEQ ID NO: 1376798 - DNA, 15 bp, Homo sapiens
gttttgctgttatta

SEQ ID NO: 1376799 - DNA, 15 bp, Homo sapiens
agttttgctgttatt

SEQ ID NO: 1376800 - DNA, 15 bp, Homo sapiens
gagttttgctgttat

SEQ ID NO: 1376801 - DNA, 15 bp, Homo sapiens
agagttttgctgtta

SEQ ID NO: 1376802 - DNA, 15 bp, Homo sapiens
aagagttttgctgtt

SEQ ID NO: 1376803 - DNA, 15 bp, Homo sapiens
caagagttttgctgt

SEQ ID NO: 1376804 - DNA, 15 bp, Homo sapiens
gcaagagttttgctg

SEQ ID NO: 1376805 - DNA, 15 bp, Homo sapiens
agcaagagttttgct

SEQ ID NO: 1376806 - DNA, 15 bp, Homo sapiens
tagcaagagttttgc

SEQ ID NO: 1376807 - DNA, 15 bp, Homo sapiens
atagcaagagttttg

SEQ ID NO: 1376808 - DNA, 15 bp, Homo sapiens
aatagcaagagtttt

SEQ ID NO: 1376809 - DNA, 15 bp, Homo sapiens
aaatagcaagagttt

SEQ ID NO: 1376810 - DNA, 15 bp, Homo sapiens
taaatagcaagagtt

SEQ ID NO: 1376811 - DNA, 15 bp, Homo sapiens
ctaaatagcaagagt

SEQ ID NO: 1376812 - DNA, 15 bp, Homo sapiens
cctaaatagcaagag

SEQ ID NO: 1376813 - DNA, 15 bp, Homo sapiens
acctaaatagcaaga

SEQ ID NO: 1376814 - DNA, 15 bp, Homo sapiens
cacctaaatagcaag

SEQ ID NO: 1376815 - DNA, 15 bp, Homo sapiens
acacctaaatagcaa

SEQ ID NO: 1376816 - DNA, 15 bp, Homo sapiens
cacacctaaatagca

SEQ ID NO: 1376817 - DNA, 15 bp, Homo sapiens
acacacctaaatagc

SEQ ID NO: 1376818 - DNA, 15 bp, Homo sapiens
tacacacctaaatag

SEQ ID NO: 1376819 - DNA, 15 bp, Homo sapiens
atacacacctaaata

SEQ ID NO: 1376820 - DNA, 15 bp, Homo sapiens
aatacacacctaaat

SEQ ID NO: 1376821 - DNA, 15 bp, Homo sapiens
caatacacacctaaa

SEQ ID NO: 1376822 - DNA, 15 bp, Homo sapiens
tcaatacacacctaa

SEQ ID NO: 1376823 - DNA, 15 bp, Homo sapiens
ttcaatacacaccta

SEQ ID NO: 1376824 - DNA, 15 bp, Homo sapiens
cttcaatacacacct

SEQ ID NO: 1376825 - DNA, 15 bp, Homo sapiens
acttcaatacacacc

SEQ ID NO: 1376826 - DNA, 15 bp, Homo sapiens
tacttcaatacacac

SEQ ID NO: 1376827 - DNA, 15 bp, Homo sapiens
ttacttcaatacaca

SEQ ID NO: 1376828 - DNA, 15 bp, Homo sapiens
gttacttcaatacac

SEQ ID NO: 1376829 - DNA, 15 bp, Homo sapiens
tgttacttcaataca

SEQ ID NO: 1376830 - DNA, 15 bp, Homo sapiens
ctgttacttcaatac

SEQ ID NO: 1376831 - DNA, 15 bp, Homo sapiens
cctgttacttcaata

SEQ ID NO: 1376832 - DNA, 15 bp, Homo sapiens
tcctgttacttcaat

SEQ ID NO: 1376833 - DNA, 15 bp, Homo sapiens
ttcctgttacttcaa

SEQ ID NO: 1376834 - DNA, 15 bp, Homo sapiens
tttcctgttacttca

SEQ ID NO: 1376835 - DNA, 15 bp, Homo sapiens
atttcctgttacttc

SEQ ID NO: 1376836 - DNA, 15 bp, Homo sapiens
tatttcctgttactt

SEQ ID NO: 1376837 - DNA, 15 bp, Homo sapiens
ctatttcctgttact

SEQ ID NO: 1376838 - DNA, 15 bp, Homo sapiens
gctatttcctgttac

SEQ ID NO: 1376839 - DNA, 15 bp, Homo sapiens
ggctatttcctgtta

SEQ ID NO: 1376840 - DNA, 15 bp, Homo sapiens
tggctatttcctgtt

SEQ ID NO: 1376841 - DNA, 15 bp, Homo sapiens
atggctatttcctgt

SEQ ID NO: 1376842 - DNA, 15 bp, Homo sapiens
tatggctatttcctg

SEQ ID NO: 1376843 - DNA, 15 bp, Homo sapiens
atatggctatttcct

SEQ ID NO: 1376844 - DNA, 15 bp, Homo sapiens
tatatggctatttcc

SEQ ID NO: 1376845 - DNA, 15 bp, Homo sapiens
gtatatggctatttc

SEQ ID NO: 1376846 - DNA, 15 bp, Homo sapiens
ggtatatggctattt

SEQ ID NO: 1376847 - DNA, 15 bp, Homo sapiens
gggtatatggctatt

SEQ ID NO: 1376848 - DNA, 15 bp, Homo sapiens
agggtatatggctat

SEQ ID NO: 1376849 - DNA, 15 bp, Homo sapiens
aagggtatatggcta

SEQ ID NO: 1376850 - DNA, 15 bp, Homo sapiens
aaagggtatatggct

SEQ ID NO: 1376851 - DNA, 15 bp, Homo sapiens
aaaagggtatatggc

SEQ ID NO: 1376852 - DNA, 15 bp, Homo sapiens
caaaagggtatatgg

SEQ ID NO: 1376853 - DNA, 15 bp, Homo sapiens
tcaaaagggtatatg

SEQ ID NO: 1376854 - DNA, 15 bp, Homo sapiens
ttcaaaagggtatat

SEQ ID NO: 1376855 - DNA, 15 bp, Homo sapiens
tttcaaaagggtata

SEQ ID NO: 1376856 - DNA, 15 bp, Homo sapiens
atttcaaaagggtat

SEQ ID NO: 1376857 - DNA, 15 bp, Homo sapiens
tatttcaaaagggta

SEQ ID NO: 1376858 - DNA, 15 bp, Homo sapiens
gtatttcaaaagggt

SEQ ID NO: 1376859 - DNA, 15 bp, Homo sapiens
ggtatttcaaaaggg

SEQ ID NO: 1376860 - DNA, 15 bp, Homo sapiens
tggtatttcaaaagg

SEQ ID NO: 1376861 - DNA, 15 bp, Homo sapiens
ttggtatttcaaaag

SEQ ID NO: 1376862 - DNA, 15 bp, Homo sapiens
cttggtatttcaaaa

SEQ ID NO: 1376863 - DNA, 15 bp, Homo sapiens
ccttggtatttcaaa

SEQ ID NO: 1376864 - DNA, 15 bp, Homo sapiens
tccttggtatttcaa

SEQ ID NO: 1376865 - DNA, 15 bp, Homo sapiens
ttccttggtatttca

SEQ ID NO: 1376866 - DNA, 15 bp, Homo sapiens
tttccttggtatttc

SEQ ID NO: 1376867 - DNA, 15 bp, Homo sapiens
atttccttggtattt

SEQ ID NO: 1376868 - DNA, 15 bp, Homo sapiens
tatttccttggtatt

SEQ ID NO: 1376869 - DNA, 15 bp, Homo sapiens
atatttccttggtat

SEQ ID NO: 1376870 - DNA, 15 bp, Homo sapiens
gatatttccttggta

SEQ ID NO: 1376871 - DNA, 15 bp, Homo sapiens
agatatttccttggt

SEQ ID NO: 1376872 - DNA, 15 bp, Homo sapiens
tagatatttccttgg

SEQ ID NO: 1376873 - DNA, 15 bp, Homo sapiens
atagatatttccttg

SEQ ID NO: 1376874 - DNA, 15 bp, Homo sapiens
aatagatatttcctt

SEQ ID NO: 1376875 - DNA, 15 bp, Homo sapiens
gaatagatatttcct

SEQ ID NO: 1376876 - DNA, 15 bp, Homo sapiens
agaatagatatttcc

SEQ ID NO: 1376877 - DNA, 15 bp, Homo sapiens
tagaatagatatttc

SEQ ID NO: 1376878 - DNA, 15 bp, Homo sapiens
ctagaatagatattt

SEQ ID NO: 1376879 - DNA, 15 bp, Homo sapiens
gctagaatagatatt

SEQ ID NO: 1376880 - DNA, 15 bp, Homo sapiens
agctagaatagatat

SEQ ID NO: 1376881 - DNA, 15 bp, Homo sapiens
gagctagaatagata

SEQ ID NO: 1376882 - DNA, 15 bp, Homo sapiens
agagctagaatagat

SEQ ID NO: 1376883 - DNA, 15 bp, Homo sapiens
gagagctagaataga

SEQ ID NO: 1376884 - DNA, 15 bp, Homo sapiens
tgagagctagaatag

SEQ ID NO: 1376885 - DNA, 15 bp, Homo sapiens
ttgagagctagaata

SEQ ID NO: 1376886 - DNA, 15 bp, Homo sapiens
attgagagctagaat

SEQ ID NO: 1376887 - DNA, 15 bp, Homo sapiens
cattgagagctagaa

SEQ ID NO: 1376888 - DNA, 15 bp, Homo sapiens
acattgagagctaga

SEQ ID NO: 1376889 - DNA, 15 bp, Homo sapiens
aacattgagagctag

SEQ ID NO: 1376890 - DNA, 15 bp, Homo sapiens
gaacattgagagcta

SEQ ID NO: 1376891 - DNA, 15 bp, Homo sapiens
agaacattgagagct

SEQ ID NO: 1376892 - DNA, 15 bp, Homo sapiens
aagaacattgagagc

SEQ ID NO: 1376893 - DNA, 15 bp, Homo sapiens
caagaacattgagag

SEQ ID NO: 1376894 - DNA, 15 bp, Homo sapiens
tcaagaacattgaga

SEQ ID NO: 1376895 - DNA, 15 bp, Homo sapiens
ttcaagaacattgag

SEQ ID NO: 1376896 - DNA, 15 bp, Homo sapiens
attcaagaacattga

SEQ ID NO: 1376897 - DNA, 15 bp, Homo sapiens
gattcaagaacattg

SEQ ID NO: 1376898 - DNA, 15 bp, Homo sapiens
agattcaagaacatt

SEQ ID NO: 1376899 - DNA, 15 bp, Homo sapiens
tagattcaagaacat

SEQ ID NO: 1376900 - DNA, 15 bp, Homo sapiens
gtagattcaagaaca

SEQ ID NO: 1376901 - DNA, 15 bp, Homo sapiens
cgtagattcaagaac

SEQ ID NO: 1376902 - DNA, 15 bp, Homo sapiens
acgtagattcaagaa

SEQ ID NO: 1376903 - DNA, 15 bp, Homo sapiens
tacgtagattcaaga

SEQ ID NO: 1376904 - DNA, 15 bp, Homo sapiens
gtacgtagattcaag

SEQ ID NO: 1376905 - DNA, 15 bp, Homo sapiens
agtacgtagattcaa

SEQ ID NO: 1376906 - DNA, 15 bp, Homo sapiens
cagtacgtagattca

SEQ ID NO: 1376907 - DNA, 15 bp, Homo sapiens
ccagtacgtagattc

SEQ ID NO: 1376908 - DNA, 15 bp, Homo sapiens
gccagtacgtagatt

SEQ ID NO: 1376909 - DNA, 15 bp, Homo sapiens
ggccagtacgtagat

SEQ ID NO: 1376910 - DNA, 15 bp, Homo sapiens
aggccagtacgtaga

SEQ ID NO: 1376911 - DNA, 15 bp, Homo sapiens
gaggccagtacgtag

SEQ ID NO: 1376912 - DNA, 15 bp, Homo sapiens
tgaggccagtacgta

SEQ ID NO: 1376913 - DNA, 15 bp, Homo sapiens
ttgaggccagtacgt

SEQ ID NO: 1376914 - DNA, 15 bp, Homo sapiens
attgaggccagtacg

SEQ ID NO: 1376915 - DNA, 15 bp, Homo sapiens
tattgaggccagtac

SEQ ID NO: 1376916 - DNA, 15 bp, Homo sapiens
gtattgaggccagta

SEQ ID NO: 1376917 - DNA, 15 bp, Homo sapiens
tgtattgaggccagt

SEQ ID NO: 1376918 - DNA, 15 bp, Homo sapiens
atgtattgaggccag

SEQ ID NO: 1376919 - DNA, 15 bp, Homo sapiens
tatgtattgaggcca

SEQ ID NO: 1376920 - DNA, 15 bp, Homo sapiens
atatgtattgaggcc

SEQ ID NO: 1376921 - DNA, 15 bp, Homo sapiens
aatatgtattgaggc

SEQ ID NO: 1376922 - DNA, 15 bp, Homo sapiens
caatatgtattgagg

SEQ ID NO: 1376923 - DNA, 15 bp, Homo sapiens
gcaatatgtattgag

SEQ ID NO: 1376924 - DNA, 15 bp, Homo sapiens
agcaatatgtattga

SEQ ID NO: 1376925 - DNA, 15 bp, Homo sapiens
gagcaatatgtattg

SEQ ID NO: 1376926 - DNA, 15 bp, Homo sapiens
agagcaatatgtatt

SEQ ID NO: 1376927 - DNA, 15 bp, Homo sapiens
gagagcaatatgtat

SEQ ID NO: 1376928 - DNA, 15 bp, Homo sapiens
tgagagcaatatgta

SEQ ID NO: 1376929 - DNA, 15 bp, Homo sapiens
atgagagcaatatgt

SEQ ID NO: 1376930 - DNA, 15 bp, Homo sapiens
gatgagagcaatatg

SEQ ID NO: 1376931 - DNA, 15 bp, Homo sapiens
agatgagagcaatat

SEQ ID NO: 1376932 - DNA, 15 bp, Homo sapiens
tagatgagagcaata

SEQ ID NO: 1376933 - DNA, 15 bp, Homo sapiens
ttagatgagagcaat

SEQ ID NO: 1376934 - DNA, 15 bp, Homo sapiens
attagatgagagcaa

SEQ ID NO: 1376935 - DNA, 15 bp, Homo sapiens
gattagatgagagca

SEQ ID NO: 1376936 - DNA, 15 bp, Homo sapiens
ggattagatgagagc

SEQ ID NO: 1376937 - DNA, 15 bp, Homo sapiens
tggattagatgagag

SEQ ID NO: 1376938 - DNA, 15 bp, Homo sapiens
ttggattagatgaga

SEQ ID NO: 1376939 - DNA, 15 bp, Homo sapiens
tttggattagatgag

SEQ ID NO: 1376940 - DNA, 15 bp, Homo sapiens
ctttggattagatga

SEQ ID NO: 1376941 - DNA, 15 bp, Homo sapiens
actttggattagatg

SEQ ID NO: 1376942 - DNA, 15 bp, Homo sapiens
aactttggattagat

SEQ ID NO: 1376943 - DNA, 15 bp, Homo sapiens
gaactttggattaga

SEQ ID NO: 1376944 - DNA, 15 bp, Homo sapiens
ggaactttggattag

SEQ ID NO: 1376945 - DNA, 15 bp, Homo sapiens
gggaactttggatta

SEQ ID NO: 1376946 - DNA, 15 bp, Homo sapiens
tgggaactttggatt

SEQ ID NO: 1376947 - DNA, 15 bp, Homo sapiens
atgggaactttggat

SEQ ID NO: 1376948 - DNA, 15 bp, Homo sapiens
gatgggaactttgga

SEQ ID NO: 1376949 - DNA, 15 bp, Homo sapiens
agatgggaactttgg

SEQ ID NO: 1376950 - DNA, 15 bp, Homo sapiens
cagatgggaactttg

SEQ ID NO: 1376951 - DNA, 15 bp, Homo sapiens
ccagatgggaacttt

SEQ ID NO: 1376952 - DNA, 15 bp, Homo sapiens
accagatgggaactt

SEQ ID NO: 1376953 - DNA, 15 bp, Homo sapiens
gaccagatgggaact

SEQ ID NO: 1376954 - DNA, 15 bp, Homo sapiens
tgaccagatgggaac

SEQ ID NO: 1376955 - DNA, 15 bp, Homo sapiens
ttgaccagatgggaa

SEQ ID NO: 1376956 - DNA, 15 bp, Homo sapiens
cttgaccagatggga

SEQ ID NO: 1376957 - DNA, 15 bp, Homo sapiens
tcttgaccagatggg

SEQ ID NO: 1376958 - DNA, 15 bp, Homo sapiens
atcttgaccagatgg

SEQ ID NO: 1376959 - DNA, 15 bp, Homo sapiens
aatcttgaccagatg

SEQ ID NO: 1376960 - DNA, 15 bp, Homo sapiens
gaatcttgaccagat

SEQ ID NO: 1376961 - DNA, 15 bp, Homo sapiens
agaatcttgaccaga

SEQ ID NO: 1376962 - DNA, 15 bp, Homo sapiens
gagaatcttgaccag

SEQ ID NO: 1376963 - DNA, 15 bp, Homo sapiens
agagaatcttgacca

SEQ ID NO: 1376964 - DNA, 15 bp, Homo sapiens
aagagaatcttgacc

SEQ ID NO: 1376965 - DNA, 15 bp, Homo sapiens
gaagagaatcttgac

SEQ ID NO: 1376966 - DNA, 15 bp, Homo sapiens
ggaagagaatcttga

SEQ ID NO: 1376967 - DNA, 15 bp, Homo sapiens
gggaagagaatcttg

SEQ ID NO: 1376968 - DNA, 15 bp, Homo sapiens
ggggaagagaatctt

SEQ ID NO: 1376969 - DNA, 15 bp, Homo sapiens
tggggaagagaatct

SEQ ID NO: 1376970 - DNA, 15 bp, Homo sapiens
atggggaagagaatc

SEQ ID NO: 1376971 - DNA, 15 bp, Homo sapiens
tatggggaagagaat

SEQ ID NO: 1376972 - DNA, 15 bp, Homo sapiens
atatggggaagagaa

SEQ ID NO: 1376973 - DNA, 15 bp, Homo sapiens
aatatggggaagaga

SEQ ID NO: 1376974 - DNA, 15 bp, Homo sapiens
aaatatggggaagag

SEQ ID NO: 1376975 - DNA, 15 bp, Homo sapiens
aaaatatggggaaga

SEQ ID NO: 1376976 - DNA, 15 bp, Homo sapiens
ggaaaaatatgggga

SEQ ID NO: 1376977 - DNA, 15 bp, Homo sapiens
gggaaaaatatgggg

SEQ ID NO: 1376978 - DNA, 15 bp, Homo sapiens
ggggaaaaatatggg

SEQ ID NO: 1376979 - DNA, 15 bp, Homo sapiens
aggggaaaaatatgg

SEQ ID NO: 1376980 - DNA, 15 bp, Homo sapiens
aaggggaaaaatatg

SEQ ID NO: 1376981 - DNA, 15 bp, Homo sapiens
gaaggggaaaaatat

SEQ ID NO: 1376982 - DNA, 15 bp, Homo sapiens
ggaaggggaaaaata

SEQ ID NO: 1376983 - DNA, 15 bp, Homo sapiens
gggaaggggaaaaat

SEQ ID NO: 1376984 - DNA, 15 bp, Homo sapiens
ggggaaggggaaaaa

SEQ ID NO: 1376985 - DNA, 15 bp, Homo sapiens
aggggaaggggaaaa

SEQ ID NO: 1376986 - DNA, 15 bp, Homo sapiens
taggggaaggggaaa

SEQ ID NO: 1376987 - DNA, 15 bp, Homo sapiens
ataggggaaggggaa

SEQ ID NO: 1376988 - DNA, 15 bp, Homo sapiens
tataggggaagggga

SEQ ID NO: 1376989 - DNA, 15 bp, Homo sapiens
atataggggaagggg

SEQ ID NO: 1376990 - DNA, 15 bp, Homo sapiens
tatataggggaaggg

SEQ ID NO: 1376991 - DNA, 15 bp, Homo sapiens
gtatataggggaagg

SEQ ID NO: 1376992 - DNA, 15 bp, Homo sapiens
ggtatataggggaag

SEQ ID NO: 1376993 - DNA, 15 bp, Homo sapiens
aggtatataggggaa

SEQ ID NO: 1376994 - DNA, 15 bp, Homo sapiens
caggtatatagggga

SEQ ID NO: 1376995 - DNA, 15 bp, Homo sapiens
tcaggtatatagggg

SEQ ID NO: 1376996 - DNA, 15 bp, Homo sapiens
ttcaggtatataggg

SEQ ID NO: 1376997 - DNA, 15 bp, Homo sapiens
attcaggtatatagg

SEQ ID NO: 1376998 - DNA, 15 bp, Homo sapiens
tattcaggtatatag

SEQ ID NO: 1376999 - DNA, 15 bp, Homo sapiens
ttattcaggtatata

SEQ ID NO: 1377000 - DNA, 15 bp, Homo sapiens
attattcaggtatat

SEQ ID NO: 1377001 - DNA, 15 bp, Homo sapiens
aattattcaggtata

SEQ ID NO: 1377002 - DNA, 15 bp, Homo sapiens
aaattattcaggtat

SEQ ID NO: 1377003 - DNA, 15 bp, Homo sapiens
aaaattattcaggta

SEQ ID NO: 1377004 - DNA, 15 bp, Homo sapiens
taaaattattcaggt

SEQ ID NO: 1377005 - DNA, 15 bp, Homo sapiens
ctaaaattattcagg

SEQ ID NO: 1377006 - DNA, 15 bp, Homo sapiens
actaaaattattcag

SEQ ID NO: 1377007 - DNA, 15 bp, Homo sapiens
aactaaaattattca

SEQ ID NO: 1377008 - DNA, 15 bp, Homo sapiens
aaactaaaattattc

SEQ ID NO: 1377009 - DNA, 15 bp, Homo sapiens
gaaactaaaattatt

SEQ ID NO: 1377010 - DNA, 15 bp, Homo sapiens
cgaaactaaaattat

SEQ ID NO: 1377011 - DNA, 15 bp, Homo sapiens
gcgaaactaaaatta

SEQ ID NO: 1377012 - DNA, 15 bp, Homo sapiens
ggcgaaactaaaatt

SEQ ID NO: 1377013 - DNA, 15 bp, Homo sapiens
aggcgaaactaaaat

SEQ ID NO: 1377014 - DNA, 15 bp, Homo sapiens
aaggcgaaactaaaa

SEQ ID NO: 1377015 - DNA, 15 bp, Homo sapiens
aaaggcgaaactaaa

SEQ ID NO: 1377016 - DNA, 15 bp, Homo sapiens
aaaaggcgaaactaa

SEQ ID NO: 1377017 - DNA, 15 bp, Homo sapiens
taaaaggcgaaacta

SEQ ID NO: 1377018 - DNA, 15 bp, Homo sapiens
ctaaaaggcgaaact

SEQ ID NO: 1377019 - DNA, 15 bp, Homo sapiens
cctaaaaggcgaaac

SEQ ID NO: 1377020 - DNA, 15 bp, Homo sapiens
tcctaaaaggcgaaa

SEQ ID NO: 1377021 - DNA, 15 bp, Homo sapiens
gtcctaaaaggcgaa

SEQ ID NO: 1377022 - DNA, 15 bp, Homo sapiens
agtcctaaaaggcga

SEQ ID NO: 1377023 - DNA, 15 bp, Homo sapiens
gagtcctaaaaggcg

SEQ ID NO: 1377024 - DNA, 15 bp, Homo sapiens
tgagtcctaaaaggc

SEQ ID NO: 1377025 - DNA, 15 bp, Homo sapiens
ttgagtcctaaaagg

SEQ ID NO: 1377026 - DNA, 15 bp, Homo sapiens
tttgagtcctaaaag

SEQ ID NO: 1377027 - DNA, 15 bp, Homo sapiens
atttgagtcctaaaa

SEQ ID NO: 1377028 - DNA, 15 bp, Homo sapiens
tatttgagtcctaaa

SEQ ID NO: 1377029 - DNA, 15 bp, Homo sapiens
ttatttgagtcctaa

SEQ ID NO: 1377030 - DNA, 15 bp, Homo sapiens
tttatttgagtccta

SEQ ID NO: 1377031 - DNA, 15 bp, Homo sapiens
atttatttgagtcct

SEQ ID NO: 1377032 - DNA, 15 bp, Homo sapiens
aatttatttgagtcc

SEQ ID NO: 1377033 - DNA, 15 bp, Homo sapiens
caatttatttgagtc

SEQ ID NO: 1377034 - DNA, 15 bp, Homo sapiens
acaatttatttgagt

SEQ ID NO: 1377035 - DNA, 15 bp, Homo sapiens
gacaatttatttgag

SEQ ID NO: 1377036 - DNA, 15 bp, Homo sapiens
tgacaatttatttga

SEQ ID NO: 1377037 - DNA, 15 bp, Homo sapiens
gtgacaatttatttg

SEQ ID NO: 1377038 - DNA, 15 bp, Homo sapiens
agtgacaatttattt

SEQ ID NO: 1377039 - DNA, 15 bp, Homo sapiens
gagtgacaatttatt

SEQ ID NO: 1377040 - DNA, 15 bp, Homo sapiens
ggagtgacaatttat

SEQ ID NO: 1377041 - DNA, 15 bp, Homo sapiens
gggagtgacaattta

SEQ ID NO: 1377042 - DNA, 15 bp, Homo sapiens
tgggagtgacaattt

SEQ ID NO: 1377043 - DNA, 15 bp, Homo sapiens
atgggagtgacaatt

SEQ ID NO: 1377044 - DNA, 15 bp, Homo sapiens
aatgggagtgacaat

SEQ ID NO: 1377045 - DNA, 15 bp, Homo sapiens
aaatgggagtgacaa

SEQ ID NO: 1377046 - DNA, 15 bp, Homo sapiens
taaatgggagtgaca

SEQ ID NO: 1377047 - DNA, 15 bp, Homo sapiens
ctaaatgggagtgac

SEQ ID NO: 1377048 - DNA, 15 bp, Homo sapiens
tctaaatgggagtga

SEQ ID NO: 1377049 - DNA, 15 bp, Homo sapiens
ttctaaatgggagtg

SEQ ID NO: 1377050 - DNA, 15 bp, Homo sapiens
cttctaaatgggagt

SEQ ID NO: 1377051 - DNA, 15 bp, Homo sapiens
ccttctaaatgggag

SEQ ID NO: 1377052 - DNA, 15 bp, Homo sapiens
gccttctaaatggga

SEQ ID NO: 1377053 - DNA, 15 bp, Homo sapiens
agccttctaaatggg

SEQ ID NO: 1377054 - DNA, 15 bp, Homo sapiens
aagccttctaaatgg

SEQ ID NO: 1377055 - DNA, 15 bp, Homo sapiens
aaagccttctaaatg

SEQ ID NO: 1377056 - DNA, 15 bp, Homo sapiens
aaaagccttctaaat

SEQ ID NO: 1377057 - DNA, 15 bp, Homo sapiens
taaaagccttctaaa

SEQ ID NO: 1377058 - DNA, 15 bp, Homo sapiens
ataaaagccttctaa

SEQ ID NO: 1377059 - DNA, 15 bp, Homo sapiens
aataaaagccttcta

SEQ ID NO: 1377060 - DNA, 15 bp, Homo sapiens
taataaaagccttct

SEQ ID NO: 1377061 - DNA, 15 bp, Homo sapiens
ctaataaaagccttc

SEQ ID NO: 1377062 - DNA, 15 bp, Homo sapiens
actaataaaagcctt

SEQ ID NO: 1377063 - DNA, 15 bp, Homo sapiens
cactaataaaagcct

SEQ ID NO: 1377064 - DNA, 15 bp, Homo sapiens
acactaataaaagcc

SEQ ID NO: 1377065 - DNA, 15 bp, Homo sapiens
gacactaataaaagc

SEQ ID NO: 1377066 - DNA, 15 bp, Homo sapiens
ggacactaataaaag

SEQ ID NO: 1377067 - DNA, 15 bp, Homo sapiens
aggacactaataaaa

SEQ ID NO: 1377068 - DNA, 15 bp, Homo sapiens
gaggacactaataaa

SEQ ID NO: 1377069 - DNA, 15 bp, Homo sapiens
agaggacactaataa

SEQ ID NO: 1377070 - DNA, 15 bp, Homo sapiens
aagaggacactaata

SEQ ID NO: 1377071 - DNA, 15 bp, Homo sapiens
aaagaggacactaat

SEQ ID NO: 1377072 - DNA, 15 bp, Homo sapiens
gaaagaggacactaa

SEQ ID NO: 1377073 - DNA, 15 bp, Homo sapiens
agaaagaggacacta

SEQ ID NO: 1377074 - DNA, 15 bp, Homo sapiens
gagaaagaggacact

SEQ ID NO: 1377075 - DNA, 15 bp, Homo sapiens
ggagaaagaggacac

SEQ ID NO: 1377076 - DNA, 15 bp, Homo sapiens
tggagaaagaggaca

SEQ ID NO: 1377077 - DNA, 15 bp, Homo sapiens
gtggagaaagaggac

SEQ ID NO: 1377078 - DNA, 15 bp, Homo sapiens
ggtggagaaagagga

SEQ ID NO: 1377079 - DNA, 15 bp, Homo sapiens
cggtggagaaagagg

SEQ ID NO: 1377080 - DNA, 15 bp, Homo sapiens
acggtggagaaagag

SEQ ID NO: 1377081 - DNA, 15 bp, Homo sapiens
cacggtggagaaaga

SEQ ID NO: 1377082 - DNA, 15 bp, Homo sapiens
ccacggtggagaaag

SEQ ID NO: 1377083 - DNA, 15 bp, Homo sapiens
accacggtggagaaa

SEQ ID NO: 1377084 - DNA, 15 bp, Homo sapiens
taccacggtggagaa

SEQ ID NO: 1377085 - DNA, 15 bp, Homo sapiens
ctaccacggtggaga

SEQ ID NO: 1377086 - DNA, 15 bp, Homo sapiens
cctaccacggtggag

SEQ ID NO: 1377087 - DNA, 15 bp, Homo sapiens
gcctaccacggtgga

SEQ ID NO: 1377088 - DNA, 15 bp, Homo sapiens
tgcctaccacggtgg

SEQ ID NO: 1377089 - DNA, 15 bp, Homo sapiens
ctgcctaccacggtg

SEQ ID NO: 1377090 - DNA, 15 bp, Homo sapiens
tctgcctaccacggt

SEQ ID NO: 1377091 - DNA, 15 bp, Homo sapiens
ctctgcctaccacgg

SEQ ID NO: 1377092 - DNA, 15 bp, Homo sapiens
actctgcctaccacg

SEQ ID NO: 1377093 - DNA, 15 bp, Homo sapiens
tactctgcctaccac

SEQ ID NO: 1377094 - DNA, 15 bp, Homo sapiens
ctactctgcctacca

SEQ ID NO: 1377095 - DNA, 15 bp, Homo sapiens
actactctgcctacc

SEQ ID NO: 1377096 - DNA, 15 bp, Homo sapiens
tactactctgcctac

SEQ ID NO: 1377097 - DNA, 15 bp, Homo sapiens
ctactactctgccta

SEQ ID NO: 1377098 - DNA, 15 bp, Homo sapiens
tctactactctgcct

SEQ ID NO: 1377099 - DNA, 15 bp, Homo sapiens
gtctactactctgcc

SEQ ID NO: 1377100 - DNA, 15 bp, Homo sapiens
tgtctactactctgc

SEQ ID NO: 1377101 - DNA, 15 bp, Homo sapiens
gtgtctactactctg

SEQ ID NO: 1377102 - DNA, 15 bp, Homo sapiens
ggtgtctactactct

SEQ ID NO: 1377103 - DNA, 15 bp, Homo sapiens
gggtgtctactactc

SEQ ID NO: 1377104 - DNA, 15 bp, Homo sapiens
agggtgtctactact

SEQ ID NO: 1377105 - DNA, 15 bp, Homo sapiens
tagggtgtctactac

SEQ ID NO: 1377106 - DNA, 15 bp, Homo sapiens
ttagggtgtctacta

SEQ ID NO: 1377107 - DNA, 15 bp, Homo sapiens
tttagggtgtctact

SEQ ID NO: 1377108 - DNA, 15 bp, Homo sapiens
ctttagggtgtctac

SEQ ID NO: 1377109 - DNA, 15 bp, Homo sapiens
tctttagggtgtcta

SEQ ID NO: 1377110 - DNA, 15 bp, Homo sapiens
atctttagggtgtct

SEQ ID NO: 1377111 - DNA, 15 bp, Homo sapiens
catctttagggtgtc

SEQ ID NO: 1377112 - DNA, 15 bp, Homo sapiens
acatctttagggtgt

SEQ ID NO: 1377113 - DNA, 15 bp, Homo sapiens
gacatctttagggtg

SEQ ID NO: 1377114 - DNA, 15 bp, Homo sapiens
agacatctttagggt

SEQ ID NO: 1377115 - DNA, 15 bp, Homo sapiens
tagacatctttaggg

SEQ ID NO: 1377116 - DNA, 15 bp, Homo sapiens
atagacatctttagg

SEQ ID NO: 1377117 - DNA, 15 bp, Homo sapiens
catagacatctttag

SEQ ID NO: 1377118 - DNA, 15 bp, Homo sapiens
acatagacatcttta

SEQ ID NO: 1377119 - DNA, 15 bp, Homo sapiens
gacatagacatcttt

SEQ ID NO: 1377120 - DNA, 15 bp, Homo sapiens
ggacatagacatctt

SEQ ID NO: 1377121 - DNA, 15 bp, Homo sapiens
aggacatagacatct

SEQ ID NO: 1377122 - DNA, 15 bp, Homo sapiens
taggacatagacatc

SEQ ID NO: 1377123 - DNA, 15 bp, Homo sapiens
ttaggacatagacat

SEQ ID NO: 1377124 - DNA, 15 bp, Homo sapiens
attaggacatagaca

SEQ ID NO: 1377125 - DNA, 15 bp, Homo sapiens
gattaggacatagac

SEQ ID NO: 1377126 - DNA, 15 bp, Homo sapiens
agattaggacataga

SEQ ID NO: 1377127 - DNA, 15 bp, Homo sapiens
gagattaggacatag

SEQ ID NO: 1377128 - DNA, 15 bp, Homo sapiens
agagattaggacata

SEQ ID NO: 1377129 - DNA, 15 bp, Homo sapiens
tagagattaggacat

SEQ ID NO: 1377130 - DNA, 15 bp, Homo sapiens
ctagagattaggaca

SEQ ID NO: 1377131 - DNA, 15 bp, Homo sapiens
tctagagattaggac

SEQ ID NO: 1377132 - DNA, 15 bp, Homo sapiens
ttctagagattagga

SEQ ID NO: 1377133 - DNA, 15 bp, Homo sapiens
gttctagagattagg

SEQ ID NO: 1377134 - DNA, 15 bp, Homo sapiens
ggttctagagattag

SEQ ID NO: 1377135 - DNA, 15 bp, Homo sapiens
aggttctagagatta

SEQ ID NO: 1377136 - DNA, 15 bp, Homo sapiens
caggttctagagatt

SEQ ID NO: 1377137 - DNA, 15 bp, Homo sapiens
tcaggttctagagat

SEQ ID NO: 1377138 - DNA, 15 bp, Homo sapiens
ctcaggttctagaga

SEQ ID NO: 1377139 - DNA, 15 bp, Homo sapiens
tctcaggttctagag

SEQ ID NO: 1377140 - DNA, 15 bp, Homo sapiens
ttctcaggttctaga

SEQ ID NO: 1377141 - DNA, 15 bp, Homo sapiens
cttctcaggttctag

SEQ ID NO: 1377142 - DNA, 15 bp, Homo sapiens
tcttctcaggttcta

SEQ ID NO: 1377143 - DNA, 15 bp, Homo sapiens
atcttctcaggttct

SEQ ID NO: 1377144 - DNA, 15 bp, Homo sapiens
catcttctcaggttc

SEQ ID NO: 1377145 - DNA, 15 bp, Homo sapiens
acatcttctcaggtt

SEQ ID NO: 1377146 - DNA, 15 bp, Homo sapiens
aacatcttctcaggt

SEQ ID NO: 1377147 - DNA, 15 bp, Homo sapiens
taacatcttctcagg

SEQ ID NO: 1377148 - DNA, 15 bp, Homo sapiens
gtaacatcttctcag

SEQ ID NO: 1377149 - DNA, 15 bp, Homo sapiens
ggtaacatcttctca

SEQ ID NO: 1377150 - DNA, 15 bp, Homo sapiens
gggtaacatcttctc

SEQ ID NO: 1377151 - DNA, 15 bp, Homo sapiens
agggtaacatcttct

SEQ ID NO: 1377152 - DNA, 15 bp, Homo sapiens
tagggtaacatcttc

SEQ ID NO: 1377153 - DNA, 15 bp, Homo sapiens
gtagggtaacatctt

SEQ ID NO: 1377154 - DNA, 15 bp, Homo sapiens
agtagggtaacatct

SEQ ID NO: 1377155 - DNA, 15 bp, Homo sapiens
aagtagggtaacatc

SEQ ID NO: 1377156 - DNA, 15 bp, Homo sapiens
caagtagggtaacat

SEQ ID NO: 1377157 - DNA, 15 bp, Homo sapiens
ccaagtagggtaaca

SEQ ID NO: 1377158 - DNA, 15 bp, Homo sapiens
gccaagtagggtaac

SEQ ID NO: 1377159 - DNA, 15 bp, Homo sapiens
tgccaagtagggtaa

SEQ ID NO: 1377160 - DNA, 15 bp, Homo sapiens
ttgccaagtagggta

SEQ ID NO: 1377161 - DNA, 15 bp, Homo sapiens
cttgccaagtagggt

SEQ ID NO: 1377162 - DNA, 15 bp, Homo sapiens
tcttgccaagtaggg

SEQ ID NO: 1377163 - DNA, 15 bp, Homo sapiens
ctcttgccaagtagg

SEQ ID NO: 1377164 - DNA, 15 bp, Homo sapiens
cctcttgccaagtag

SEQ ID NO: 1377165 - DNA, 15 bp, Homo sapiens
tcctcttgccaagta

SEQ ID NO: 1377166 - DNA, 15 bp, Homo sapiens
ttcctcttgccaagt

SEQ ID NO: 1377167 - DNA, 15 bp, Homo sapiens
tttcctcttgccaag

SEQ ID NO: 1377168 - DNA, 15 bp, Homo sapiens
atttcctcttgccaa

SEQ ID NO: 1377169 - DNA, 15 bp, Homo sapiens
aatttcctcttgcca

SEQ ID NO: 1377170 - DNA, 15 bp, Homo sapiens
aaatttcctcttgcc

SEQ ID NO: 1377171 - DNA, 15 bp, Homo sapiens
caaatttcctcttgc

SEQ ID NO: 1377172 - DNA, 15 bp, Homo sapiens
gcaaatttcctcttg

SEQ ID NO: 1377173 - DNA, 15 bp, Homo sapiens
tgcaaatttcctctt

SEQ ID NO: 1377174 - DNA, 15 bp, Homo sapiens
ctgcaaatttcctct

SEQ ID NO: 1377175 - DNA, 15 bp, Homo sapiens
tctgcaaatttcctc

SEQ ID NO: 1377176 - DNA, 15 bp, Homo sapiens
atctgcaaatttcct

SEQ ID NO: 1377177 - DNA, 15 bp, Homo sapiens
catctgcaaatttcc

SEQ ID NO: 1377178 - DNA, 15 bp, Homo sapiens
acatctgcaaatttc

SEQ ID NO: 1377179 - DNA, 15 bp, Homo sapiens
cacatctgcaaattt

SEQ ID NO: 1377180 - DNA, 15 bp, Homo sapiens
tcacatctgcaaatt

SEQ ID NO: 1377181 - DNA, 15 bp, Homo sapiens
atcacatctgcaaat

SEQ ID NO: 1377182 - DNA, 15 bp, Homo sapiens
aatcacatctgcaaa

SEQ ID NO: 1377183 - DNA, 15 bp, Homo sapiens
taatcacatctgcaa

SEQ ID NO: 1377184 - DNA, 15 bp, Homo sapiens
ttaatcacatctgca

SEQ ID NO: 1377185 - DNA, 15 bp, Homo sapiens
cttaatcacatctgc

SEQ ID NO: 1377186 - DNA, 15 bp, Homo sapiens
acttaatcacatctg

SEQ ID NO: 1377187 - DNA, 15 bp, Homo sapiens
aacttaatcacatct

SEQ ID NO: 1377188 - DNA, 15 bp, Homo sapiens
taacttaatcacatc

SEQ ID NO: 1377189 - DNA, 15 bp, Homo sapiens
ttaacttaatcacat

SEQ ID NO: 1377190 - DNA, 15 bp, Homo sapiens
attaacttaatcaca

SEQ ID NO: 1377191 - DNA, 15 bp, Homo sapiens
tattaacttaatcac

SEQ ID NO: 1377192 - DNA, 15 bp, Homo sapiens
ttattaacttaatca

SEQ ID NO: 1377193 - DNA, 15 bp, Homo sapiens
gttattaacttaatc

SEQ ID NO: 1377194 - DNA, 15 bp, Homo sapiens
ggttattaacttaat

SEQ ID NO: 1377195 - DNA, 15 bp, Homo sapiens
aggttattaacttaa

SEQ ID NO: 1377196 - DNA, 15 bp, Homo sapiens
aaggttattaactta

SEQ ID NO: 1377197 - DNA, 15 bp, Homo sapiens
caaggttattaactt

SEQ ID NO: 1377198 - DNA, 15 bp, Homo sapiens
tcaaggttattaact

SEQ ID NO: 1377199 - DNA, 15 bp, Homo sapiens
ctcaaggttattaac

SEQ ID NO: 1377200 - DNA, 15 bp, Homo sapiens
tctcaaggttattaa

SEQ ID NO: 1377201 - DNA, 15 bp, Homo sapiens
atctcaaggttatta

SEQ ID NO: 1377202 - DNA, 15 bp, Homo sapiens
aatctcaaggttatt

SEQ ID NO: 1377203 - DNA, 15 bp, Homo sapiens
aaatctcaaggttat

SEQ ID NO: 1377204 - DNA, 15 bp, Homo sapiens
caaatctcaaggtta

SEQ ID NO: 1377205 - DNA, 15 bp, Homo sapiens
ccaaatctcaaggtt

SEQ ID NO: 1377206 - DNA, 15 bp, Homo sapiens
tccaaatctcaaggt

SEQ ID NO: 1377207 - DNA, 15 bp, Homo sapiens
ttccaaatctcaagg

SEQ ID NO: 1377208 - DNA, 15 bp, Homo sapiens
tttccaaatctcaag

SEQ ID NO: 1377209 - DNA, 15 bp, Homo sapiens
atttccaaatctcaa

SEQ ID NO: 1377210 - DNA, 15 bp, Homo sapiens
aatttccaaatctca

SEQ ID NO: 1377211 - DNA, 15 bp, Homo sapiens
taatttccaaatctc

SEQ ID NO: 1377212 - DNA, 15 bp, Homo sapiens
ataatttccaaatct

SEQ ID NO: 1377213 - DNA, 15 bp, Homo sapiens
gataatttccaaatc

SEQ ID NO: 1377214 - DNA, 15 bp, Homo sapiens
agataatttccaaat

SEQ ID NO: 1377215 - DNA, 15 bp, Homo sapiens
aagataatttccaaa

SEQ ID NO: 1377216 - DNA, 15 bp, Homo sapiens
caagataatttccaa

SEQ ID NO: 1377217 - DNA, 15 bp, Homo sapiens
acaagataatttcca

SEQ ID NO: 1377218 - DNA, 15 bp, Homo sapiens
tacaagataatttcc

SEQ ID NO: 1377219 - DNA, 15 bp, Homo sapiens
atacaagataatttc

SEQ ID NO: 1377220 - DNA, 15 bp, Homo sapiens
aatacaagataattt

SEQ ID NO: 1377221 - DNA, 15 bp, Homo sapiens
taatacaagataatt

SEQ ID NO: 1377222 - DNA, 15 bp, Homo sapiens
ataatacaagataat

SEQ ID NO: 1377223 - DNA, 15 bp, Homo sapiens
gataatacaagataa

SEQ ID NO: 1377224 - DNA, 15 bp, Homo sapiens
ggataatacaagata

SEQ ID NO: 1377225 - DNA, 15 bp, Homo sapiens
aggataatacaagat

SEQ ID NO: 1377226 - DNA, 15 bp, Homo sapiens
aaggataatacaaga

SEQ ID NO: 1377227 - DNA, 15 bp, Homo sapiens
caaggataatacaag

SEQ ID NO: 1377228 - DNA, 15 bp, Homo sapiens
acaaggataatacaa

SEQ ID NO: 1377229 - DNA, 15 bp, Homo sapiens
cacaaggataataca

SEQ ID NO: 1377230 - DNA, 15 bp, Homo sapiens
tcacaaggataatac

SEQ ID NO: 1377231 - DNA, 15 bp, Homo sapiens
ctcacaaggataata

SEQ ID NO: 1377232 - DNA, 15 bp, Homo sapiens
gctcacaaggataat

SEQ ID NO: 1377233 - DNA, 15 bp, Homo sapiens
ggctcacaaggataa

SEQ ID NO: 1377234 - DNA, 15 bp, Homo sapiens
gggctcacaaggata

SEQ ID NO: 1377235 - DNA, 15 bp, Homo sapiens
tgggctcacaaggat

SEQ ID NO: 1377236 - DNA, 15 bp, Homo sapiens
ttgggctcacaagga

SEQ ID NO: 1377237 - DNA, 15 bp, Homo sapiens
attgggctcacaagg

SEQ ID NO: 1377238 - DNA, 15 bp, Homo sapiens
gattgggctcacaag

SEQ ID NO: 1377239 - DNA, 15 bp, Homo sapiens
agattgggctcacaa

SEQ ID NO: 1377240 - DNA, 15 bp, Homo sapiens
tagattgggctcaca

SEQ ID NO: 1377241 - DNA, 15 bp, Homo sapiens
ttagattgggctcac

SEQ ID NO: 1377242 - DNA, 15 bp, Homo sapiens
attagattgggctca

SEQ ID NO: 1377243 - DNA, 15 bp, Homo sapiens
aattagattgggctc

SEQ ID NO: 1377244 - DNA, 15 bp, Homo sapiens
taattagattgggct

SEQ ID NO: 1377245 - DNA, 15 bp, Homo sapiens
ttaattagattgggc

SEQ ID NO: 1377246 - DNA, 15 bp, Homo sapiens
tttaattagattggg

SEQ ID NO: 1377247 - DNA, 15 bp, Homo sapiens
atttaattagattgg

SEQ ID NO: 1377248 - DNA, 15 bp, Homo sapiens
catttaattagattg

SEQ ID NO: 1377249 - DNA, 15 bp, Homo sapiens
tcatttaattagatt

SEQ ID NO: 1377250 - DNA, 15 bp, Homo sapiens
ctcatttaattagat

SEQ ID NO: 1377251 - DNA, 15 bp, Homo sapiens
actcatttaattaga

SEQ ID NO: 1377252 - DNA, 15 bp, Homo sapiens
aactcatttaattag

SEQ ID NO: 1377253 - DNA, 15 bp, Homo sapiens
aaactcatttaatta

SEQ ID NO: 1377254 - DNA, 15 bp, Homo sapiens
aaaactcatttaatt

SEQ ID NO: 1377255 - DNA, 15 bp, Homo sapiens
aaaaactcatttaat

SEQ ID NO: 1377256 - DNA, 15 bp, Homo sapiens
taaaaactcatttaa

SEQ ID NO: 1377257 - DNA, 15 bp, Homo sapiens
ctaaaaactcattta

SEQ ID NO: 1377258 - DNA, 15 bp, Homo sapiens
tctaaaaactcattt

SEQ ID NO: 1377259 - DNA, 15 bp, Homo sapiens
ttctaaaaactcatt

SEQ ID NO: 1377260 - DNA, 15 bp, Homo sapiens
cttctaaaaactcat

SEQ ID NO: 1377261 - DNA, 15 bp, Homo sapiens
acttctaaaaactca

SEQ ID NO: 1377262 - DNA, 15 bp, Homo sapiens
cacttctaaaaactc

SEQ ID NO: 1377263 - DNA, 15 bp, Homo sapiens
ccacttctaaaaact

SEQ ID NO: 1377264 - DNA, 15 bp, Homo sapiens
tccacttctaaaaac

SEQ ID NO: 1377265 - DNA, 15 bp, Homo sapiens
ctccacttctaaaaa

SEQ ID NO: 1377266 - DNA, 15 bp, Homo sapiens
tctccacttctaaaa

SEQ ID NO: 1377267 - DNA, 15 bp, Homo sapiens
ttctccacttctaaa

SEQ ID NO: 1377268 - DNA, 15 bp, Homo sapiens
tttctccacttctaa

SEQ ID NO: 1377269 - DNA, 15 bp, Homo sapiens
ttttctccacttcta

SEQ ID NO: 1377270 - DNA, 15 bp, Homo sapiens
gttttctccacttct

SEQ ID NO: 1377271 - DNA, 15 bp, Homo sapiens
agttttctccacttc

SEQ ID NO: 1377272 - DNA, 15 bp, Homo sapiens
aagttttctccactt

SEQ ID NO: 1377273 - DNA, 15 bp, Homo sapiens
aaagttttctccact

SEQ ID NO: 1377274 - DNA, 15 bp, Homo sapiens
aaaagttttctccac

SEQ ID NO: 1377275 - DNA, 15 bp, Homo sapiens
gaaaagttttctcca

SEQ ID NO: 1377276 - DNA, 15 bp, Homo sapiens
agaaaagttttctcc

SEQ ID NO: 1377277 - DNA, 15 bp, Homo sapiens
aagaaaagttttctc

SEQ ID NO: 1377278 - DNA, 15 bp, Homo sapiens
caagaaaagttttct

SEQ ID NO: 1377279 - DNA, 15 bp, Homo sapiens
ccaagaaaagttttc

SEQ ID NO: 1377280 - DNA, 15 bp, Homo sapiens
gccaagaaaagtttt

SEQ ID NO: 1377281 - DNA, 15 bp, Homo sapiens
agccaagaaaagttt

SEQ ID NO: 1377282 - DNA, 15 bp, Homo sapiens
tagccaagaaaagtt

SEQ ID NO: 1377283 - DNA, 15 bp, Homo sapiens
atagccaagaaaagt

SEQ ID NO: 1377284 - DNA, 15 bp, Homo sapiens
catagccaagaaaag

SEQ ID NO: 1377285 - DNA, 15 bp, Homo sapiens
ccatagccaagaaaa

SEQ ID NO: 1377286 - DNA, 15 bp, Homo sapiens
accatagccaagaaa

SEQ ID NO: 1377287 - DNA, 15 bp, Homo sapiens
gaccatagccaagaa

SEQ ID NO: 1377288 - DNA, 15 bp, Homo sapiens
tgaccatagccaaga

SEQ ID NO: 1377289 - DNA, 15 bp, Homo sapiens
ctgaccatagccaag

SEQ ID NO: 1377290 - DNA, 15 bp, Homo sapiens
tctgaccatagccaa

SEQ ID NO: 1377291 - DNA, 15 bp, Homo sapiens
ctctgaccatagcca

SEQ ID NO: 1377292 - DNA, 15 bp, Homo sapiens
tctctgaccatagcc

SEQ ID NO: 1377293 - DNA, 15 bp, Homo sapiens
ctctctgaccatagc

SEQ ID NO: 1377294 - DNA, 15 bp, Homo sapiens
tctctctgaccatag

SEQ ID NO: 1377295 - DNA, 15 bp, Homo sapiens
ctctctctgaccata

SEQ ID NO: 1377296 - DNA, 15 bp, Homo sapiens
tctctctctgaccat

SEQ ID NO: 1377297 - DNA, 15 bp, Homo sapiens
gtctctctctgacca

SEQ ID NO: 1377298 - DNA, 15 bp, Homo sapiens
tgtctctctctgacc

SEQ ID NO: 1377299 - DNA, 15 bp, Homo sapiens
atgtctctctctgac

SEQ ID NO: 1377300 - DNA, 15 bp, Homo sapiens
catgtctctctctga

SEQ ID NO: 1377301 - DNA, 15 bp, Homo sapiens
tcatgtctctctctg

SEQ ID NO: 1377302 - DNA, 15 bp, Homo sapiens
gtcatgtctctctct

SEQ ID NO: 1377303 - DNA, 15 bp, Homo sapiens
agtcatgtctctctc

SEQ ID NO: 1377304 - DNA, 15 bp, Homo sapiens
tagtcatgtctctct

SEQ ID NO: 1377305 - DNA, 15 bp, Homo sapiens
ttagtcatgtctctc

SEQ ID NO: 1377306 - DNA, 15 bp, Homo sapiens
cttagtcatgtctct

SEQ ID NO: 1377307 - DNA, 15 bp, Homo sapiens
ccttagtcatgtctc

SEQ ID NO: 1377308 - DNA, 15 bp, Homo sapiens
tccttagtcatgtct

SEQ ID NO: 1377309 - DNA, 15 bp, Homo sapiens
ttccttagtcatgtc

SEQ ID NO: 1377310 - DNA, 15 bp, Homo sapiens
cttccttagtcatgt

SEQ ID NO: 1377311 - DNA, 15 bp, Homo sapiens
tcttccttagtcatg

SEQ ID NO: 1377312 - DNA, 15 bp, Homo sapiens
ttcttccttagtcat

SEQ ID NO: 1377313 - DNA, 15 bp, Homo sapiens
tttcttccttagtca

SEQ ID NO: 1377314 - DNA, 15 bp, Homo sapiens
ttttcttccttagtc

SEQ ID NO: 1377315 - DNA, 15 bp, Homo sapiens
cttttcttccttagt

SEQ ID NO: 1377316 - DNA, 15 bp, Homo sapiens
acttttcttccttag

SEQ ID NO: 1377317 - DNA, 15 bp, Homo sapiens
gacttttcttcctta

SEQ ID NO: 1377318 - DNA, 15 bp, Homo sapiens
tgacttttcttcctt

SEQ ID NO: 1377319 - DNA, 15 bp, Homo sapiens
ctgacttttcttcct

SEQ ID NO: 1377320 - DNA, 15 bp, Homo sapiens
tctgacttttcttcc

SEQ ID NO: 1377321 - DNA, 15 bp, Homo sapiens
ctctgacttttcttc

SEQ ID NO: 1377322 - DNA, 15 bp, Homo sapiens
tctctgacttttctt

SEQ ID NO: 1377323 - DNA, 15 bp, Homo sapiens
ctctctgacttttct

SEQ ID NO: 1377324 - DNA, 15 bp, Homo sapiens
tctctctgacttttc

SEQ ID NO: 1377325 - DNA, 15 bp, Homo sapiens
atctctctgactttt

SEQ ID NO: 1377326 - DNA, 15 bp, Homo sapiens
catctctctgacttt

SEQ ID NO: 1377327 - DNA, 15 bp, Homo sapiens
gcatctctctgactt

SEQ ID NO: 1377328 - DNA, 15 bp, Homo sapiens
tgcatctctctgact

SEQ ID NO: 1377329 - DNA, 15 bp, Homo sapiens
ttgcatctctctgac

SEQ ID NO: 1377330 - DNA, 15 bp, Homo sapiens
gttgcatctctctga

SEQ ID NO: 1377331 - DNA, 15 bp, Homo sapiens
tgttgcatctctctg

SEQ ID NO: 1377332 - DNA, 15 bp, Homo sapiens
atgttgcatctctct

SEQ ID NO: 1377333 - DNA, 15 bp, Homo sapiens
aatgttgcatctctc

SEQ ID NO: 1377334 - DNA, 15 bp, Homo sapiens
caatgttgcatctct

SEQ ID NO: 1377335 - DNA, 15 bp, Homo sapiens
gcaatgttgcatctc

SEQ ID NO: 1377336 - DNA, 15 bp, Homo sapiens
agcaatgttgcatct

SEQ ID NO: 1377337 - DNA, 15 bp, Homo sapiens
cagcaatgttgcatc

SEQ ID NO: 1377338 - DNA, 15 bp, Homo sapiens
ccagcaatgttgcat

SEQ ID NO: 1377339 - DNA, 15 bp, Homo sapiens
gccagcaatgttgca

SEQ ID NO: 1377340 - DNA, 15 bp, Homo sapiens
agccagcaatgttgc

SEQ ID NO: 1377341 - DNA, 15 bp, Homo sapiens
aagccagcaatgttg

SEQ ID NO: 1377342 - DNA, 15 bp, Homo sapiens
aaagccagcaatgtt

SEQ ID NO: 1377343 - DNA, 15 bp, Homo sapiens
caaagccagcaatgt

SEQ ID NO: 1377344 - DNA, 15 bp, Homo sapiens
tcaaagccagcaatg

SEQ ID NO: 1377345 - DNA, 15 bp, Homo sapiens
ttcaaagccagcaat

SEQ ID NO: 1377346 - DNA, 15 bp, Homo sapiens
cttcaaagccagcaa

SEQ ID NO: 1377347 - DNA, 15 bp, Homo sapiens
tcttcaaagccagca

SEQ ID NO: 1377348 - DNA, 15 bp, Homo sapiens
atcttcaaagccagc

SEQ ID NO: 1377349 - DNA, 15 bp, Homo sapiens
catcttcaaagccag

SEQ ID NO: 1377350 - DNA, 15 bp, Homo sapiens
ccatcttcaaagcca

SEQ ID NO: 1377351 - DNA, 15 bp, Homo sapiens
tccatcttcaaagcc

SEQ ID NO: 1377352 - DNA, 15 bp, Homo sapiens
ctccatcttcaaagc

SEQ ID NO: 1377353 - DNA, 15 bp, Homo sapiens
cctccatcttcaaag

SEQ ID NO: 1377354 - DNA, 15 bp, Homo sapiens
tcctccatcttcaaa

SEQ ID NO: 1377355 - DNA, 15 bp, Homo sapiens
ttcctccatcttcaa

SEQ ID NO: 1377356 - DNA, 15 bp, Homo sapiens
cttcctccatcttca

SEQ ID NO: 1377357 - DNA, 15 bp, Homo sapiens
ccttcctccatcttc

SEQ ID NO: 1377358 - DNA, 15 bp, Homo sapiens
cccttcctccatctt

SEQ ID NO: 1377359 - DNA, 15 bp, Homo sapiens
tcccttcctccatct

SEQ ID NO: 1377360 - DNA, 15 bp, Homo sapiens
ctcccttcctccatc

SEQ ID NO: 1377361 - DNA, 15 bp, Homo sapiens
actcccttcctccat

SEQ ID NO: 1377362 - DNA, 15 bp, Homo sapiens
gactcccttcctcca

SEQ ID NO: 1377363 - DNA, 15 bp, Homo sapiens
tgactcccttcctcc

SEQ ID NO: 1377364 - DNA, 15 bp, Homo sapiens
atgactcccttcctc

SEQ ID NO: 1377365 - DNA, 15 bp, Homo sapiens
catgactcccttcct

SEQ ID NO: 1377366 - DNA, 15 bp, Homo sapiens
tcatgactcccttcc

SEQ ID NO: 1377367 - DNA, 15 bp, Homo sapiens
ctcatgactcccttc

SEQ ID NO: 1377368 - DNA, 15 bp, Homo sapiens
gctcatgactccctt

SEQ ID NO: 1377369 - DNA, 15 bp, Homo sapiens
ggctcatgactccct

SEQ ID NO: 1377370 - DNA, 15 bp, Homo sapiens
tggctcatgactccc

SEQ ID NO: 1377371 - DNA, 15 bp, Homo sapiens
ttggctcatgactcc

SEQ ID NO: 1377372 - DNA, 15 bp, Homo sapiens
tttggctcatgactc

SEQ ID NO: 1377373 - DNA, 15 bp, Homo sapiens
ttttggctcatgact

SEQ ID NO: 1377374 - DNA, 15 bp, Homo sapiens
tttttggctcatgac

SEQ ID NO: 1377375 - DNA, 15 bp, Homo sapiens
ttttttggctcatga

SEQ ID NO: 1377376 - DNA, 15 bp, Homo sapiens
tttttttggctcatg

SEQ ID NO: 1377377 - DNA, 15 bp, Homo sapiens
ctttttttggctcat

SEQ ID NO: 1377378 - DNA, 15 bp, Homo sapiens
actttttttggctca

SEQ ID NO: 1377379 - DNA, 15 bp, Homo sapiens
cactttttttggctc

SEQ ID NO: 1377380 - DNA, 15 bp, Homo sapiens
ccactttttttggct

SEQ ID NO: 1377381 - DNA, 15 bp, Homo sapiens
cccactttttttggc

SEQ ID NO: 1377382 - DNA, 15 bp, Homo sapiens
gcccactttttttgg

SEQ ID NO: 1377383 - DNA, 15 bp, Homo sapiens
tgcccactttttttg

SEQ ID NO: 1377384 - DNA, 15 bp, Homo sapiens
ttgcccacttttttt

SEQ ID NO: 1377385 - DNA, 15 bp, Homo sapiens
gttgcccactttttt

SEQ ID NO: 1377386 - DNA, 15 bp, Homo sapiens
ggttgcccacttttt

SEQ ID NO: 1377387 - DNA, 15 bp, Homo sapiens
aggttgcccactttt

SEQ ID NO: 1377388 - DNA, 15 bp, Homo sapiens
gaggttgcccacttt

SEQ ID NO: 1377389 - DNA, 15 bp, Homo sapiens
agaggttgcccactt

SEQ ID NO: 1377390 - DNA, 15 bp, Homo sapiens
tagaggttgcccact

SEQ ID NO: 1377391 - DNA, 15 bp, Homo sapiens
ctagaggttgcccac

SEQ ID NO: 1377392 - DNA, 15 bp, Homo sapiens
actagaggttgccca

SEQ ID NO: 1377393 - DNA, 15 bp, Homo sapiens
tactagaggttgccc

SEQ ID NO: 1377394 - DNA, 15 bp, Homo sapiens
ctactagaggttgcc

SEQ ID NO: 1377395 - DNA, 15 bp, Homo sapiens
gctactagaggttgc

SEQ ID NO: 1377396 - DNA, 15 bp, Homo sapiens
agctactagaggttg

SEQ ID NO: 1377397 - DNA, 15 bp, Homo sapiens
tagctactagaggtt

SEQ ID NO: 1377398 - DNA, 15 bp, Homo sapiens
ctagctactagaggt

SEQ ID NO: 1377399 - DNA, 15 bp, Homo sapiens
tctagctactagagg

SEQ ID NO: 1377400 - DNA, 15 bp, Homo sapiens
ttctagctactagag

SEQ ID NO: 1377401 - DNA, 15 bp, Homo sapiens
tttctagctactaga

SEQ ID NO: 1377402 - DNA, 15 bp, Homo sapiens
ttttctagctactag

SEQ ID NO: 1377403 - DNA, 15 bp, Homo sapiens
cttttctagctacta

SEQ ID NO: 1377404 - DNA, 15 bp, Homo sapiens
tcttttctagctact

SEQ ID NO: 1377405 - DNA, 15 bp, Homo sapiens
ttcttttctagctac

SEQ ID NO: 1377406 - DNA, 15 bp, Homo sapiens
tttcttttctagcta

SEQ ID NO: 1377407 - DNA, 15 bp, Homo sapiens
ttttcttttctagct

SEQ ID NO: 1377408 - DNA, 15 bp, Homo sapiens
cttttcttttctagc

SEQ ID NO: 1377409 - DNA, 15 bp, Homo sapiens
tcttttcttttctag

SEQ ID NO: 1377410 - DNA, 15 bp, Homo sapiens
ttcttttcttttcta

SEQ ID NO: 1377411 - DNA, 15 bp, Homo sapiens
cattttcttttcttt

SEQ ID NO: 1377412 - DNA, 15 bp, Homo sapiens
ccattttcttttctt

SEQ ID NO: 1377413 - DNA, 15 bp, Homo sapiens
accattttcttttct

SEQ ID NO: 1377414 - DNA, 15 bp, Homo sapiens
aaccattttcttttc

SEQ ID NO: 1377415 - DNA, 15 bp, Homo sapiens
aaaccattttctttt

SEQ ID NO: 1377416 - DNA, 15 bp, Homo sapiens
aaaaccattttcttt

SEQ ID NO: 1377417 - DNA, 15 bp, Homo sapiens
gaaaaccattttctt

SEQ ID NO: 1377418 - DNA, 15 bp, Homo sapiens
ggaaaaccattttct

SEQ ID NO: 1377419 - DNA, 15 bp, Homo sapiens
gggaaaaccattttc

SEQ ID NO: 1377420 - DNA, 15 bp, Homo sapiens
agggaaaaccatttt

SEQ ID NO: 1377421 - DNA, 15 bp, Homo sapiens
aagggaaaaccattt

SEQ ID NO: 1377422 - DNA, 15 bp, Homo sapiens
taagggaaaaccatt

SEQ ID NO: 1377423 - DNA, 15 bp, Homo sapiens
ctaagggaaaaccat

SEQ ID NO: 1377424 - DNA, 15 bp, Homo sapiens
tctaagggaaaacca

SEQ ID NO: 1377425 - DNA, 15 bp, Homo sapiens
ctctaagggaaaacc

SEQ ID NO: 1377426 - DNA, 15 bp, Homo sapiens
gctctaagggaaaac

SEQ ID NO: 1377427 - DNA, 15 bp, Homo sapiens
ggctctaagggaaaa

SEQ ID NO: 1377428 - DNA, 15 bp, Homo sapiens
aggctctaagggaaa

SEQ ID NO: 1377429 - DNA, 15 bp, Homo sapiens
gaggctctaagggaa

SEQ ID NO: 1377430 - DNA, 15 bp, Homo sapiens
agaggctctaaggga

SEQ ID NO: 1377431 - DNA, 15 bp, Homo sapiens
tagaggctctaaggg

SEQ ID NO: 1377432 - DNA, 15 bp, Homo sapiens
ctagaggctctaagg

SEQ ID NO: 1377433 - DNA, 15 bp, Homo sapiens
cctagaggctctaag

SEQ ID NO: 1377434 - DNA, 15 bp, Homo sapiens
tcctagaggctctaa

SEQ ID NO: 1377435 - DNA, 15 bp, Homo sapiens
ttcctagaggctcta

SEQ ID NO: 1377436 - DNA, 15 bp, Homo sapiens
cttcctagaggctct

SEQ ID NO: 1377437 - DNA, 15 bp, Homo sapiens
ccttcctagaggctc

SEQ ID NO: 1377438 - DNA, 15 bp, Homo sapiens
tccttcctagaggct

SEQ ID NO: 1377439 - DNA, 15 bp, Homo sapiens
ttccttcctagaggc

SEQ ID NO: 1377440 - DNA, 15 bp, Homo sapiens
attccttcctagagg

SEQ ID NO: 1377441 - DNA, 15 bp, Homo sapiens
cattccttcctagag

SEQ ID NO: 1377442 - DNA, 15 bp, Homo sapiens
gcattccttcctaga

SEQ ID NO: 1377443 - DNA, 15 bp, Homo sapiens
tgcattccttcctag

SEQ ID NO: 1377444 - DNA, 15 bp, Homo sapiens
atgcattccttccta

SEQ ID NO: 1377445 - DNA, 15 bp, Homo sapiens
gatgcattccttcct

SEQ ID NO: 1377446 - DNA, 15 bp, Homo sapiens
tgatgcattccttcc

SEQ ID NO: 1377447 - DNA, 15 bp, Homo sapiens
gtgatgcattccttc

SEQ ID NO: 1377448 - DNA, 15 bp, Homo sapiens
agtgatgcattcctt

SEQ ID NO: 1377449 - DNA, 15 bp, Homo sapiens
cagtgatgcattcct

SEQ ID NO: 1377450 - DNA, 15 bp, Homo sapiens
gcagtgatgcattcc

SEQ ID NO: 1377451 - DNA, 15 bp, Homo sapiens
tgcagtgatgcattc

SEQ ID NO: 1377452 - DNA, 15 bp, Homo sapiens
gtgcagtgatgcatt

SEQ ID NO: 1377453 - DNA, 15 bp, Homo sapiens
tgtgcagtgatgcat

SEQ ID NO: 1377454 - DNA, 15 bp, Homo sapiens
gtgtgcagtgatgca

SEQ ID NO: 1377455 - DNA, 15 bp, Homo sapiens
tgtgtgcagtgatgc

SEQ ID NO: 1377456 - DNA, 15 bp, Homo sapiens
gtgtgtgcagtgatg

SEQ ID NO: 1377457 - DNA, 15 bp, Homo sapiens
ggtgtgtgcagtgat

SEQ ID NO: 1377458 - DNA, 15 bp, Homo sapiens
aggtgtgtgcagtga

SEQ ID NO: 1377459 - DNA, 15 bp, Homo sapiens
aaggtgtgtgcagtg

SEQ ID NO: 1377460 - DNA, 15 bp, Homo sapiens
aaaggtgtgtgcagt

SEQ ID NO: 1377461 - DNA, 15 bp, Homo sapiens
taaaggtgtgtgcag

SEQ ID NO: 1377462 - DNA, 15 bp, Homo sapiens
ataaaggtgtgtgca

SEQ ID NO: 1377463 - DNA, 15 bp, Homo sapiens
aataaaggtgtgtgc

SEQ ID NO: 1377464 - DNA, 15 bp, Homo sapiens
aaataaaggtgtgtg

SEQ ID NO: 1377465 - DNA, 15 bp, Homo sapiens
aaaataaaggtgtgt

SEQ ID NO: 1377466 - DNA, 15 bp, Homo sapiens
taaaataaaggtgtg

SEQ ID NO: 1377467 - DNA, 15 bp, Homo sapiens
ctaaaataaaggtgt

SEQ ID NO: 1377468 - DNA, 15 bp, Homo sapiens
gctaaaataaaggtg

SEQ ID NO: 1377469 - DNA, 15 bp, Homo sapiens
ggctaaaataaaggt

SEQ ID NO: 1377470 - DNA, 15 bp, Homo sapiens
gggctaaaataaagg

SEQ ID NO: 1377471 - DNA, 15 bp, Homo sapiens
ggggctaaaataaag

SEQ ID NO: 1377472 - DNA, 15 bp, Homo sapiens
tggggctaaaataaa

SEQ ID NO: 1377473 - DNA, 15 bp, Homo sapiens
atggggctaaaataa

SEQ ID NO: 1377474 - DNA, 15 bp, Homo sapiens
catggggctaaaata

SEQ ID NO: 1377475 - DNA, 15 bp, Homo sapiens
tcatggggctaaaat

SEQ ID NO: 1377476 - DNA, 15 bp, Homo sapiens
ctcatggggctaaaa

SEQ ID NO: 1377477 - DNA, 15 bp, Homo sapiens
tctcatggggctaaa

SEQ ID NO: 1377478 - DNA, 15 bp, Homo sapiens
gtctcatggggctaa

SEQ ID NO: 1377479 - DNA, 15 bp, Homo sapiens
agtctcatggggcta

SEQ ID NO: 1377480 - DNA, 15 bp, Homo sapiens
aagtctcatggggct

SEQ ID NO: 1377481 - DNA, 15 bp, Homo sapiens
caagtctcatggggc

SEQ ID NO: 1377482 - DNA, 15 bp, Homo sapiens
acaagtctcatgggg

SEQ ID NO: 1377483 - DNA, 15 bp, Homo sapiens
cacaagtctcatggg

SEQ ID NO: 1377484 - DNA, 15 bp, Homo sapiens
acacaagtctcatgg

SEQ ID NO: 1377485 - DNA, 15 bp, Homo sapiens
gacacaagtctcatg

SEQ ID NO: 1377486 - DNA, 15 bp, Homo sapiens
tgacacaagtctcat

SEQ ID NO: 1377487 - DNA, 15 bp, Homo sapiens
ctgacacaagtctca

SEQ ID NO: 1377488 - DNA, 15 bp, Homo sapiens
tctgacacaagtctc

SEQ ID NO: 1377489 - DNA, 15 bp, Homo sapiens
ttctgacacaagtct

SEQ ID NO: 1377490 - DNA, 15 bp, Homo sapiens
attctgacacaagtc

SEQ ID NO: 1377491 - DNA, 15 bp, Homo sapiens
aattctgacacaagt

SEQ ID NO: 1377492 - DNA, 15 bp, Homo sapiens
gaattctgacacaag

SEQ ID NO: 1377493 - DNA, 15 bp, Homo sapiens
agaattctgacacaa

SEQ ID NO: 1377494 - DNA, 15 bp, Homo sapiens
tagaattctgacaca

SEQ ID NO: 1377495 - DNA, 15 bp, Homo sapiens
ttagaattctgacac

SEQ ID NO: 1377496 - DNA, 15 bp, Homo sapiens
gttagaattctgaca

SEQ ID NO: 1377497 - DNA, 15 bp, Homo sapiens
ggttagaattctgac

SEQ ID NO: 1377498 - DNA, 15 bp, Homo sapiens
aggttagaattctga

SEQ ID NO: 1377499 - DNA, 15 bp, Homo sapiens
gaggttagaattctg

SEQ ID NO: 1377500 - DNA, 15 bp, Homo sapiens
agaggttagaattct

SEQ ID NO: 1377501 - DNA, 15 bp, Homo sapiens
tagaggttagaattc

SEQ ID NO: 1377502 - DNA, 15 bp, Homo sapiens
ttagaggttagaatt

SEQ ID NO: 1377503 - DNA, 15 bp, Homo sapiens
tttagaggttagaat

SEQ ID NO: 1377504 - DNA, 15 bp, Homo sapiens
ttttagaggttagaa

SEQ ID NO: 1377505 - DNA, 15 bp, Homo sapiens
gttttagaggttaga

SEQ ID NO: 1377506 - DNA, 15 bp, Homo sapiens
agttttagaggttag

SEQ ID NO: 1377507 - DNA, 15 bp, Homo sapiens
tagttttagaggtta

SEQ ID NO: 1377508 - DNA, 15 bp, Homo sapiens
atagttttagaggtt

SEQ ID NO: 1377509 - DNA, 15 bp, Homo sapiens
tatagttttagaggt

SEQ ID NO: 1377510 - DNA, 15 bp, Homo sapiens
ttatagttttagagg

SEQ ID NO: 1377511 - DNA, 15 bp, Homo sapiens
cttatagttttagag

SEQ ID NO: 1377512 - DNA, 15 bp, Homo sapiens
tcttatagttttaga

SEQ ID NO: 1377513 - DNA, 15 bp, Homo sapiens
atcttatagttttag

SEQ ID NO: 1377514 - DNA, 15 bp, Homo sapiens
tatcttatagtttta

SEQ ID NO: 1377515 - DNA, 15 bp, Homo sapiens
ttatcttatagtttt

SEQ ID NO: 1377516 - DNA, 15 bp, Homo sapiens
attatcttatagttt

SEQ ID NO: 1377517 - DNA, 15 bp, Homo sapiens
tattatcttatagtt

SEQ ID NO: 1377518 - DNA, 15 bp, Homo sapiens
ttattatcttatagt

SEQ ID NO: 1377519 - DNA, 15 bp, Homo sapiens
tttattatcttatag

SEQ ID NO: 1377520 - DNA, 15 bp, Homo sapiens
atttattatcttata

SEQ ID NO: 1377521 - DNA, 15 bp, Homo sapiens
aatttattatcttat

SEQ ID NO: 1377522 - DNA, 15 bp, Homo sapiens
aaatttattatctta

SEQ ID NO: 1377523 - DNA, 15 bp, Homo sapiens
caaatttattatctt

SEQ ID NO: 1377524 - DNA, 15 bp, Homo sapiens
acaaatttattatct

SEQ ID NO: 1377525 - DNA, 15 bp, Homo sapiens
cacaaatttattatc

SEQ ID NO: 1377526 - DNA, 15 bp, Homo sapiens
acacaaatttattat

SEQ ID NO: 1377527 - DNA, 15 bp, Homo sapiens
aacacaaatttatta

SEQ ID NO: 1377528 - DNA, 15 bp, Homo sapiens
gaacacaaatttatt

SEQ ID NO: 1377529 - DNA, 15 bp, Homo sapiens
agaacacaaatttat

SEQ ID NO: 1377530 - DNA, 15 bp, Homo sapiens
aagaacacaaattta

SEQ ID NO: 1377531 - DNA, 15 bp, Homo sapiens
aaaagaacacaaatt

SEQ ID NO: 1377532 - DNA, 15 bp, Homo sapiens
taaaagaacacaaat

SEQ ID NO: 1377533 - DNA, 15 bp, Homo sapiens
ttaaaagaacacaaa

SEQ ID NO: 1377534 - DNA, 15 bp, Homo sapiens
cttaaaagaacacaa

SEQ ID NO: 1377535 - DNA, 15 bp, Homo sapiens
gcttaaaagaacaca

SEQ ID NO: 1377536 - DNA, 15 bp, Homo sapiens
agcttaaaagaacac

SEQ ID NO: 1377537 - DNA, 15 bp, Homo sapiens
tagcttaaaagaaca

SEQ ID NO: 1377538 - DNA, 15 bp, Homo sapiens
gtagcttaaaagaac

SEQ ID NO: 1377539 - DNA, 15 bp, Homo sapiens
agtagcttaaaagaa

SEQ ID NO: 1377540 - DNA, 15 bp, Homo sapiens
tagtagcttaaaaga

SEQ ID NO: 1377541 - DNA, 15 bp, Homo sapiens
ttagtagcttaaaag

SEQ ID NO: 1377542 - DNA, 15 bp, Homo sapiens
cttagtagcttaaaa

SEQ ID NO: 1377543 - DNA, 15 bp, Homo sapiens
acttagtagcttaaa

SEQ ID NO: 1377544 - DNA, 15 bp, Homo sapiens
aacttagtagcttaa

SEQ ID NO: 1377545 - DNA, 15 bp, Homo sapiens
aaacttagtagctta

SEQ ID NO: 1377546 - DNA, 15 bp, Homo sapiens
caaacttagtagctt

SEQ ID NO: 1377547 - DNA, 15 bp, Homo sapiens
acaaacttagtagct

SEQ ID NO: 1377548 - DNA, 15 bp, Homo sapiens
cacaaacttagtagc

SEQ ID NO: 1377549 - DNA, 15 bp, Homo sapiens
ccacaaacttagtag

SEQ ID NO: 1377550 - DNA, 15 bp, Homo sapiens
accacaaacttagta

SEQ ID NO: 1377551 - DNA, 15 bp, Homo sapiens
ttgctgtaacaaatt

SEQ ID NO: 1377552 - DNA, 15 bp, Homo sapiens
cttgctgtaacaaat

SEQ ID NO: 1377553 - DNA, 15 bp, Homo sapiens
tcttgctgtaacaaa

SEQ ID NO: 1377554 - DNA, 15 bp, Homo sapiens
ttcttgctgtaacaa

SEQ ID NO: 1377555 - DNA, 15 bp, Homo sapiens
attcttgctgtaaca

SEQ ID NO: 1377556 - DNA, 15 bp, Homo sapiens
tattcttgctgtaac

SEQ ID NO: 1377557 - DNA, 15 bp, Homo sapiens
ctattcttgctgtaa

SEQ ID NO: 1377558 - DNA, 15 bp, Homo sapiens
tctattcttgctgta

SEQ ID NO: 1377559 - DNA, 15 bp, Homo sapiens
ttctattcttgctgt

SEQ ID NO: 1377560 - DNA, 15 bp, Homo sapiens
tttctattcttgctg

SEQ ID NO: 1377561 - DNA, 15 bp, Homo sapiens
ttttctattcttgct

SEQ ID NO: 1377562 - DNA, 15 bp, Homo sapiens
gttttctattcttgc

SEQ ID NO: 1377563 - DNA, 15 bp, Homo sapiens
agttttctattcttg

SEQ ID NO: 1377564 - DNA, 15 bp, Homo sapiens
tagttttctattctt

SEQ ID NO: 1377565 - DNA, 15 bp, Homo sapiens
ttagttttctattct

SEQ ID NO: 1377566 - DNA, 15 bp, Homo sapiens
attagttttctattc

SEQ ID NO: 1377567 - DNA, 15 bp, Homo sapiens
tattagttttctatt

SEQ ID NO: 1377568 - DNA, 15 bp, Homo sapiens
atattagttttctat

SEQ ID NO: 1377569 - DNA, 15 bp, Homo sapiens
tatattagttttcta

SEQ ID NO: 1377570 - DNA, 15 bp, Homo sapiens
ttatattagttttct

SEQ ID NO: 1377571 - DNA, 15 bp, Homo sapiens
attatattagttttc

SEQ ID NO: 1377572 - DNA, 15 bp, Homo sapiens
gattatattagtttt

SEQ ID NO: 1377573 - DNA, 15 bp, Homo sapiens
ggattatattagttt

SEQ ID NO: 1377574 - DNA, 15 bp, Homo sapiens
gggattatattagtt

SEQ ID NO: 1377575 - DNA, 15 bp, Homo sapiens
ggggattatattagt

SEQ ID NO: 1377576 - DNA, 15 bp, Homo sapiens
aggggattatattag

SEQ ID NO: 1377577 - DNA, 15 bp, Homo sapiens
gaggggattatatta

SEQ ID NO: 1377578 - DNA, 15 bp, Homo sapiens
ggaggggattatatt

SEQ ID NO: 1377579 - DNA, 15 bp, Homo sapiens
tggaggggattatat

SEQ ID NO: 1377580 - DNA, 15 bp, Homo sapiens
ctggaggggattata

SEQ ID NO: 1377581 - DNA, 15 bp, Homo sapiens
cctggaggggattat

SEQ ID NO: 1377582 - DNA, 15 bp, Homo sapiens
gcctggaggggatta

SEQ ID NO: 1377583 - DNA, 15 bp, Homo sapiens
ggcctggaggggatt

SEQ ID NO: 1377584 - DNA, 15 bp, Homo sapiens
tggcctggaggggat

SEQ ID NO: 1377585 - DNA, 15 bp, Homo sapiens
ctggcctggagggga

SEQ ID NO: 1377586 - DNA, 15 bp, Homo sapiens
cctggcctggagggg

SEQ ID NO: 1377587 - DNA, 15 bp, Homo sapiens
acctggcctggaggg

SEQ ID NO: 1377588 - DNA, 15 bp, Homo sapiens
aacctggcctggagg

SEQ ID NO: 1377589 - DNA, 15 bp, Homo sapiens
taacctggcctggag

SEQ ID NO: 1377590 - DNA, 15 bp, Homo sapiens
ttaacctggcctgga

SEQ ID NO: 1377591 - DNA, 15 bp, Homo sapiens
tttaacctggcctgg

SEQ ID NO: 1377592 - DNA, 15 bp, Homo sapiens
atttaacctggcctg

SEQ ID NO: 1377593 - DNA, 15 bp, Homo sapiens
catttaacctggcct

SEQ ID NO: 1377594 - DNA, 15 bp, Homo sapiens
gcatttaacctggcc

SEQ ID NO: 1377595 - DNA, 15 bp, Homo sapiens
agcatttaacctggc

SEQ ID NO: 1377596 - DNA, 15 bp, Homo sapiens
tagcatttaacctgg

SEQ ID NO: 1377597 - DNA, 15 bp, Homo sapiens
gtagcatttaacctg

SEQ ID NO: 1377598 - DNA, 15 bp, Homo sapiens
agtagcatttaacct

SEQ ID NO: 1377599 - DNA, 15 bp, Homo sapiens
aagtagcatttaacc

SEQ ID NO: 1377600 - DNA, 15 bp, Homo sapiens
aaagtagcatttaac

SEQ ID NO: 1377601 - DNA, 15 bp, Homo sapiens
aaaagtagcatttaa

SEQ ID NO: 1377602 - DNA, 15 bp, Homo sapiens
taaaagtagcattta

SEQ ID NO: 1377603 - DNA, 15 bp, Homo sapiens
ttaaaagtagcattt

SEQ ID NO: 1377604 - DNA, 15 bp, Homo sapiens
tttaaaagtagcatt

SEQ ID NO: 1377605 - DNA, 15 bp, Homo sapiens
ttttaaaagtagcat

SEQ ID NO: 1377606 - DNA, 15 bp, Homo sapiens
cttttaaaagtagca

SEQ ID NO: 1377607 - DNA, 15 bp, Homo sapiens
acttttaaaagtagc

SEQ ID NO: 1377608 - DNA, 15 bp, Homo sapiens
aacttttaaaagtag

SEQ ID NO: 1377609 - DNA, 15 bp, Homo sapiens
gaacttttaaaagta

SEQ ID NO: 1377610 - DNA, 15 bp, Homo sapiens
agaacttttaaaagt

SEQ ID NO: 1377611 - DNA, 15 bp, Homo sapiens
aagaacttttaaaag

SEQ ID NO: 1377612 - DNA, 15 bp, Homo sapiens
caagaacttttaaaa

SEQ ID NO: 1377613 - DNA, 15 bp, Homo sapiens
gcaagaacttttaaa

SEQ ID NO: 1377614 - DNA, 15 bp, Homo sapiens
ggcaagaacttttaa

SEQ ID NO: 1377615 - DNA, 15 bp, Homo sapiens
tggcaagaactttta

SEQ ID NO: 1377616 - DNA, 15 bp, Homo sapiens
gtggcaagaactttt

SEQ ID NO: 1377617 - DNA, 15 bp, Homo sapiens
tgtggcaagaacttt

SEQ ID NO: 1377618 - DNA, 15 bp, Homo sapiens
atgtggcaagaactt

SEQ ID NO: 1377619 - DNA, 15 bp, Homo sapiens
aatgtggcaagaact

SEQ ID NO: 1377620 - DNA, 15 bp, Homo sapiens
gaatgtggcaagaac

SEQ ID NO: 1377621 - DNA, 15 bp, Homo sapiens
ggaatgtggcaagaa

SEQ ID NO: 1377622 - DNA, 15 bp, Homo sapiens
tggaatgtggcaaga

SEQ ID NO: 1377623 - DNA, 15 bp, Homo sapiens
gtggaatgtggcaag

SEQ ID NO: 1377624 - DNA, 15 bp, Homo sapiens
tgtggaatgtggcaa

SEQ ID NO: 1377625 - DNA, 15 bp, Homo sapiens
gtgtggaatgtggca

SEQ ID NO: 1377626 - DNA, 15 bp, Homo sapiens
tgtgtggaatgtggc

SEQ ID NO: 1377627 - DNA, 15 bp, Homo sapiens
atgtgtggaatgtgg

SEQ ID NO: 1377628 - DNA, 15 bp, Homo sapiens
tatgtgtggaatgtg

SEQ ID NO: 1377629 - DNA, 15 bp, Homo sapiens
gtatgtgtggaatgt

SEQ ID NO: 1377630 - DNA, 15 bp, Homo sapiens
agtatgtgtggaatg

SEQ ID NO: 1377631 - DNA, 15 bp, Homo sapiens
cagtatgtgtggaat

SEQ ID NO: 1377632 - DNA, 15 bp, Homo sapiens
gcagtatgtgtggaa

SEQ ID NO: 1377633 - DNA, 15 bp, Homo sapiens
taaggtttcaccatg

SEQ ID NO: 1377634 - DNA, 15 bp, Homo sapiens
ataaggtttcaccat

SEQ ID NO: 1377635 - DNA, 15 bp, Homo sapiens
gataaggtttcacca

SEQ ID NO: 1377636 - DNA, 15 bp, Homo sapiens
agataaggtttcacc

SEQ ID NO: 1377637 - DNA, 15 bp, Homo sapiens
gagataaggtttcac

SEQ ID NO: 1377638 - DNA, 15 bp, Homo sapiens
agagataaggtttca

SEQ ID NO: 1377639 - DNA, 15 bp, Homo sapiens
tagagataaggtttc

SEQ ID NO: 1377640 - DNA, 15 bp, Homo sapiens
ttagagataaggttt

SEQ ID NO: 1377641 - DNA, 15 bp, Homo sapiens
attagagataaggtt

SEQ ID NO: 1377642 - DNA, 15 bp, Homo sapiens
tattagagataaggt

SEQ ID NO: 1377643 - DNA, 15 bp, Homo sapiens
ttattagagataagg

SEQ ID NO: 1377644 - DNA, 15 bp, Homo sapiens
tttattagagataag

SEQ ID NO: 1377645 - DNA, 15 bp, Homo sapiens
ttttattagagataa

SEQ ID NO: 1377646 - DNA, 15 bp, Homo sapiens
tttttattagagata

SEQ ID NO: 1377647 - DNA, 15 bp, Homo sapiens
atttttattagagat

SEQ ID NO: 1377648 - DNA, 15 bp, Homo sapiens
tatttttattagaga

SEQ ID NO: 1377649 - DNA, 15 bp, Homo sapiens
gtatttttattagag

SEQ ID NO: 1377650 - DNA, 15 bp, Homo sapiens
tgtatttttattaga

SEQ ID NO: 1377651 - DNA, 15 bp, Homo sapiens
ttgtatttttattag

SEQ ID NO: 1377652 - DNA, 15 bp, Homo sapiens
tttgtatttttatta

SEQ ID NO: 1377653 - DNA, 15 bp, Homo sapiens
ttttgtatttttatt

SEQ ID NO: 1377654 - DNA, 15 bp, Homo sapiens
attttgtatttttat

SEQ ID NO: 1377655 - DNA, 15 bp, Homo sapiens
cattttgtattttta

SEQ ID NO: 1377656 - DNA, 15 bp, Homo sapiens
tcattttgtattttt

SEQ ID NO: 1377657 - DNA, 15 bp, Homo sapiens
ctcattttgtatttt

SEQ ID NO: 1377658 - DNA, 15 bp, Homo sapiens
gctcattttgtattt

SEQ ID NO: 1377659 - DNA, 15 bp, Homo sapiens
ggctcattttgtatt

SEQ ID NO: 1377660 - DNA, 15 bp, Homo sapiens
aggctcattttgtat

SEQ ID NO: 1377661 - DNA, 15 bp, Homo sapiens
caggctcattttgta

SEQ ID NO: 1377662 - DNA, 15 bp, Homo sapiens
gcaggctcattttgt

SEQ ID NO: 1377663 - DNA, 15 bp, Homo sapiens
ggcaggctcattttg

SEQ ID NO: 1377664 - DNA, 15 bp, Homo sapiens
tggcaggctcatttt

SEQ ID NO: 1377665 - DNA, 15 bp, Homo sapiens
atggcaggctcattt

SEQ ID NO: 1377666 - DNA, 15 bp, Homo sapiens
catggcaggctcatt

SEQ ID NO: 1377667 - DNA, 15 bp, Homo sapiens
ccatggcaggctcat

SEQ ID NO: 1377668 - DNA, 15 bp, Homo sapiens
accatggcaggctca

SEQ ID NO: 1377669 - DNA, 15 bp, Homo sapiens
caccatggcaggctc

SEQ ID NO: 1377670 - DNA, 15 bp, Homo sapiens
ccaccatggcaggct

SEQ ID NO: 1377671 - DNA, 15 bp, Homo sapiens
gccaccatggcaggc

SEQ ID NO: 1377672 - DNA, 15 bp, Homo sapiens
tgccaccatggcagg

SEQ ID NO: 1377673 - DNA, 15 bp, Homo sapiens
gtgccaccatggcag

SEQ ID NO: 1377674 - DNA, 15 bp, Homo sapiens
tgtgccaccatggca

SEQ ID NO: 1377675 - DNA, 15 bp, Homo sapiens
atgtgccaccatggc

SEQ ID NO: 1377676 - DNA, 15 bp, Homo sapiens
catgtgccaccatgg

SEQ ID NO: 1377677 - DNA, 15 bp, Homo sapiens
cgattctcctgcctt

SEQ ID NO: 1377678 - DNA, 15 bp, Homo sapiens
atcaagcgattctcc

SEQ ID NO: 1377679 - DNA, 15 bp, Homo sapiens
gatcaagcgattctc

SEQ ID NO: 1377680 - DNA, 15 bp, Homo sapiens
ggatcaagcgattct

SEQ ID NO: 1377681 - DNA, 15 bp, Homo sapiens
gggatcaagcgattc

SEQ ID NO: 1377682 - DNA, 15 bp, Homo sapiens
cgggatcaagcgatt

SEQ ID NO: 1377683 - DNA, 15 bp, Homo sapiens
acgggatcaagcgat

SEQ ID NO: 1377684 - DNA, 15 bp, Homo sapiens
cacgggatcaagcga

SEQ ID NO: 1377685 - DNA, 15 bp, Homo sapiens
ccacgggatcaagcg

SEQ ID NO: 1377686 - DNA, 15 bp, Homo sapiens
cccacgggatcaagc

SEQ ID NO: 1377687 - DNA, 15 bp, Homo sapiens
ccccacgggatcaag

SEQ ID NO: 1377688 - DNA, 15 bp, Homo sapiens
gccccacgggatcaa

SEQ ID NO: 1377689 - DNA, 15 bp, Homo sapiens
tgccccacgggatca

SEQ ID NO: 1377690 - DNA, 15 bp, Homo sapiens
ctgccccacgggatc

SEQ ID NO: 1377691 - DNA, 15 bp, Homo sapiens
tctgccccacgggat

SEQ ID NO: 1377692 - DNA, 15 bp, Homo sapiens
ctctgccccacggga

SEQ ID NO: 1377693 - DNA, 15 bp, Homo sapiens
actctgccccacggg

SEQ ID NO: 1377694 - DNA, 15 bp, Homo sapiens
aactctgccccacgg

SEQ ID NO: 1377695 - DNA, 15 bp, Homo sapiens
aaactctgccccacg

SEQ ID NO: 1377696 - DNA, 15 bp, Homo sapiens
caaactctgccccac

SEQ ID NO: 1377697 - DNA, 15 bp, Homo sapiens
gcaaactctgcccca

SEQ ID NO: 1377698 - DNA, 15 bp, Homo sapiens
tgcaaactctgcccc

SEQ ID NO: 1377699 - DNA, 15 bp, Homo sapiens
ctgcaaactctgccc

SEQ ID NO: 1377700 - DNA, 15 bp, Homo sapiens
actgcaaactctgcc

SEQ ID NO: 1377701 - DNA, 15 bp, Homo sapiens
cactgcaaactctgc

SEQ ID NO: 1377702 - DNA, 15 bp, Homo sapiens
tcactgcaaactctg

SEQ ID NO: 1377703 - DNA, 15 bp, Homo sapiens
ctcactgcaaactct

SEQ ID NO: 1377704 - DNA, 15 bp, Homo sapiens
gctcactgcaaactc

SEQ ID NO: 1377705 - DNA, 15 bp, Homo sapiens
ggctcactgcaaact

SEQ ID NO: 1377706 - DNA, 15 bp, Homo sapiens
aggctcactgcaaac

SEQ ID NO: 1377707 - DNA, 15 bp, Homo sapiens
taggctcactgcaaa

SEQ ID NO: 1377708 - DNA, 15 bp, Homo sapiens
ctaggctcactgcaa

SEQ ID NO: 1377709 - DNA, 15 bp, Homo sapiens
cctaggctcactgca

SEQ ID NO: 1377710 - DNA, 15 bp, Homo sapiens
acctaggctcactgc

SEQ ID NO: 1377711 - DNA, 15 bp, Homo sapiens
aacctaggctcactg

SEQ ID NO: 1377712 - DNA, 15 bp, Homo sapiens
caacctaggctcact

SEQ ID NO: 1377713 - DNA, 15 bp, Homo sapiens
acaacctaggctcac

SEQ ID NO: 1377714 - DNA, 15 bp, Homo sapiens
cacaacctaggctca

SEQ ID NO: 1377715 - DNA, 15 bp, Homo sapiens
gcacaacctaggctc

SEQ ID NO: 1377716 - DNA, 15 bp, Homo sapiens
ggcacaacctaggct

SEQ ID NO: 1377717 - DNA, 15 bp, Homo sapiens
cggcacaacctaggc

SEQ ID NO: 1377718 - DNA, 15 bp, Homo sapiens
gcggcacaacctagg

SEQ ID NO: 1377719 - DNA, 15 bp, Homo sapiens
agcggcacaacctag

SEQ ID NO: 1377720 - DNA, 15 bp, Homo sapiens
cagcggcacaaccta

SEQ ID NO: 1377721 - DNA, 15 bp, Homo sapiens
gcagcggcacaacct

SEQ ID NO: 1377722 - DNA, 15 bp, Homo sapiens
tgcagcggcacaacc

SEQ ID NO: 1377723 - DNA, 15 bp, Homo sapiens
gtgcagcggcacaac

SEQ ID NO: 1377724 - DNA, 15 bp, Homo sapiens
agtgcagcggcacaa

SEQ ID NO: 1377725 - DNA, 15 bp, Homo sapiens
gagtgcagcggcaca

SEQ ID NO: 1377726 - DNA, 15 bp, Homo sapiens
agctggagtgcagcg

SEQ ID NO: 1377727 - DNA, 15 bp, Homo sapiens
gcccaagctggagtg

SEQ ID NO: 1377728 - DNA, 15 bp, Homo sapiens
tgcccaagctggagt

SEQ ID NO: 1377729 - DNA, 15 bp, Homo sapiens
ttgcccaagctggag

SEQ ID NO: 1377730 - DNA, 15 bp, Homo sapiens
gttgcccaagctgga

SEQ ID NO: 1377731 - DNA, 15 bp, Homo sapiens
ttgttgcccaagctg

SEQ ID NO: 1377732 - DNA, 15 bp, Homo sapiens
cttgttgcccaagct

SEQ ID NO: 1377733 - DNA, 15 bp, Homo sapiens
tcttgttgcccaagc

SEQ ID NO: 1377734 - DNA, 15 bp, Homo sapiens
ctcttgttgcccaag

SEQ ID NO: 1377735 - DNA, 15 bp, Homo sapiens
gctcttgttgcccaa

SEQ ID NO: 1377736 - DNA, 15 bp, Homo sapiens
aattttgagacggag

SEQ ID NO: 1377737 - DNA, 15 bp, Homo sapiens
taattttgagacgga

SEQ ID NO: 1377738 - DNA, 15 bp, Homo sapiens
ttaattttgagacgg

SEQ ID NO: 1377739 - DNA, 15 bp, Homo sapiens
tttaattttgagacg

SEQ ID NO: 1377740 - DNA, 15 bp, Homo sapiens
ttttaattttgagac

SEQ ID NO: 1377741 - DNA, 15 bp, Homo sapiens
attttaattttgaga

SEQ ID NO: 1377742 - DNA, 15 bp, Homo sapiens
gattttaattttgag

SEQ ID NO: 1377743 - DNA, 15 bp, Homo sapiens
agattttaattttga

SEQ ID NO: 1377744 - DNA, 15 bp, Homo sapiens
cagattttaattttg

SEQ ID NO: 1377745 - DNA, 15 bp, Homo sapiens
tcagattttaatttt

SEQ ID NO: 1377746 - DNA, 15 bp, Homo sapiens
ttcagattttaattt

SEQ ID NO: 1377747 - DNA, 15 bp, Homo sapiens
attcagattttaatt

SEQ ID NO: 1377748 - DNA, 15 bp, Homo sapiens
gattcagattttaat

SEQ ID NO: 1377749 - DNA, 15 bp, Homo sapiens
agattcagattttaa

SEQ ID NO: 1377750 - DNA, 15 bp, Homo sapiens
cagattcagatttta

SEQ ID NO: 1377751 - DNA, 15 bp, Homo sapiens
tcagattcagatttt

SEQ ID NO: 1377752 - DNA, 15 bp, Homo sapiens
atcagattcagattt

SEQ ID NO: 1377753 - DNA, 15 bp, Homo sapiens
aatcagattcagatt

SEQ ID NO: 1377754 - DNA, 15 bp, Homo sapiens
taatcagattcagat

SEQ ID NO: 1377755 - DNA, 15 bp, Homo sapiens
ttaatcagattcaga

SEQ ID NO: 1377756 - DNA, 15 bp, Homo sapiens
cttaatcagattcag

SEQ ID NO: 1377757 - DNA, 15 bp, Homo sapiens
gcttaatcagattca

SEQ ID NO: 1377758 - DNA, 15 bp, Homo sapiens
ggcttaatcagattc

SEQ ID NO: 1377759 - DNA, 15 bp, Homo sapiens
aggcttaatcagatt

SEQ ID NO: 1377760 - DNA, 15 bp, Homo sapiens
caggcttaatcagat

SEQ ID NO: 1377761 - DNA, 15 bp, Homo sapiens
acaggcttaatcaga

SEQ ID NO: 1377762 - DNA, 15 bp, Homo sapiens
tacaggcttaatcag

SEQ ID NO: 1377763 - DNA, 15 bp, Homo sapiens
ctacaggcttaatca

SEQ ID NO: 1377764 - DNA, 15 bp, Homo sapiens
tctacaggcttaatc

SEQ ID NO: 1377765 - DNA, 15 bp, Homo sapiens
atctacaggcttaat

SEQ ID NO: 1377766 - DNA, 15 bp, Homo sapiens
gatctacaggcttaa

SEQ ID NO: 1377767 - DNA, 15 bp, Homo sapiens
agatctacaggctta

SEQ ID NO: 1377768 - DNA, 15 bp, Homo sapiens
tagatctacaggctt

SEQ ID NO: 1377769 - DNA, 15 bp, Homo sapiens
ttagatctacaggct

SEQ ID NO: 1377770 - DNA, 15 bp, Homo sapiens
gttagatctacaggc

SEQ ID NO: 1377771 - DNA, 15 bp, Homo sapiens
agttagatctacagg

SEQ ID NO: 1377772 - DNA, 15 bp, Homo sapiens
tagttagatctacag

SEQ ID NO: 1377773 - DNA, 15 bp, Homo sapiens
gtagttagatctaca

SEQ ID NO: 1377774 - DNA, 15 bp, Homo sapiens
cgtagttagatctac

SEQ ID NO: 1377775 - DNA, 15 bp, Homo sapiens
tcgtagttagatcta

SEQ ID NO: 1377776 - DNA, 15 bp, Homo sapiens
ttcgtagttagatct

SEQ ID NO: 1377777 - DNA, 15 bp, Homo sapiens
attcgtagttagatc

SEQ ID NO: 1377778 - DNA, 15 bp, Homo sapiens
tattcgtagttagat

SEQ ID NO: 1377779 - DNA, 15 bp, Homo sapiens
atattcgtagttaga

SEQ ID NO: 1377780 - DNA, 15 bp, Homo sapiens
tatattcgtagttag

SEQ ID NO: 1377781 - DNA, 15 bp, Homo sapiens
gtatattcgtagtta

SEQ ID NO: 1377782 - DNA, 15 bp, Homo sapiens
tgtatattcgtagtt

SEQ ID NO: 1377783 - DNA, 15 bp, Homo sapiens
ctgtatattcgtagt

SEQ ID NO: 1377784 - DNA, 15 bp, Homo sapiens
cctgtatattcgtag

SEQ ID NO: 1377785 - DNA, 15 bp, Homo sapiens
tcctgtatattcgta

SEQ ID NO: 1377786 - DNA, 15 bp, Homo sapiens
ttcctgtatattcgt

SEQ ID NO: 1377787 - DNA, 15 bp, Homo sapiens
cttcctgtatattcg

SEQ ID NO: 1377788 - DNA, 15 bp, Homo sapiens
acttcctgtatattc

SEQ ID NO: 1377789 - DNA, 15 bp, Homo sapiens
tacttcctgtatatt

SEQ ID NO: 1377790 - DNA, 15 bp, Homo sapiens
gtacttcctgtatat

SEQ ID NO: 1377791 - DNA, 15 bp, Homo sapiens
tgtacttcctgtata

SEQ ID NO: 1377792 - DNA, 15 bp, Homo sapiens
ctgtacttcctgtat

SEQ ID NO: 1377793 - DNA, 15 bp, Homo sapiens
cctgtacttcctgta

SEQ ID NO: 1377794 - DNA, 15 bp, Homo sapiens
ccctgtacttcctgt

SEQ ID NO: 1377795 - DNA, 15 bp, Homo sapiens
cccctgtacttcctg

SEQ ID NO: 1377796 - DNA, 15 bp, Homo sapiens
tcccctgtacttcct

SEQ ID NO: 1377797 - DNA, 15 bp, Homo sapiens
gtcccctgtacttcc

SEQ ID NO: 1377798 - DNA, 15 bp, Homo sapiens
tgtcccctgtacttc

SEQ ID NO: 1377799 - DNA, 15 bp, Homo sapiens
ctgtcccctgtactt

SEQ ID NO: 1377800 - DNA, 15 bp, Homo sapiens
tctgtcccctgtact

SEQ ID NO: 1377801 - DNA, 15 bp, Homo sapiens
ctctgtcccctgtac

SEQ ID NO: 1377802 - DNA, 15 bp, Homo sapiens
cctctgtcccctgta

SEQ ID NO: 1377803 - DNA, 15 bp, Homo sapiens
tcctctgtcccctgt

SEQ ID NO: 1377804 - DNA, 15 bp, Homo sapiens
gtcctctgtcccctg

SEQ ID NO: 1377805 - DNA, 15 bp, Homo sapiens
ggtcctctgtcccct

SEQ ID NO: 1377806 - DNA, 15 bp, Homo sapiens
aggtcctctgtcccc

SEQ ID NO: 1377807 - DNA, 15 bp, Homo sapiens
aaggtcctctgtccc

SEQ ID NO: 1377808 - DNA, 15 bp, Homo sapiens
taaggtcctctgtcc

SEQ ID NO: 1377809 - DNA, 15 bp, Homo sapiens
ataaggtcctctgtc

SEQ ID NO: 1377810 - DNA, 15 bp, Homo sapiens
aataaggtcctctgt

SEQ ID NO: 1377811 - DNA, 15 bp, Homo sapiens
taataaggtcctctg

SEQ ID NO: 1377812 - DNA, 15 bp, Homo sapiens
ctaataaggtcctct

SEQ ID NO: 1377813 - DNA, 15 bp, Homo sapiens
tctaataaggtcctc

SEQ ID NO: 1377814 - DNA, 15 bp, Homo sapiens
gtctaataaggtcct

SEQ ID NO: 1377815 - DNA, 15 bp, Homo sapiens
tgtctaataaggtcc

SEQ ID NO: 1377816 - DNA, 15 bp, Homo sapiens
ttgtctaataaggtc

SEQ ID NO: 1377817 - DNA, 15 bp, Homo sapiens
attgtctaataaggt

SEQ ID NO: 1377818 - DNA, 15 bp, Homo sapiens
cattgtctaataagg

SEQ ID NO: 1377819 - DNA, 15 bp, Homo sapiens
gcattgtctaataag

SEQ ID NO: 1377820 - DNA, 15 bp, Homo sapiens
ggcattgtctaataa

SEQ ID NO: 1377821 - DNA, 15 bp, Homo sapiens
tggcattgtctaata

SEQ ID NO: 1377822 - DNA, 15 bp, Homo sapiens
ctggcattgtctaat

SEQ ID NO: 1377823 - DNA, 15 bp, Homo sapiens
tctggcattgtctaa

SEQ ID NO: 1377824 - DNA, 15 bp, Homo sapiens
ttctggcattgtcta

SEQ ID NO: 1377825 - DNA, 15 bp, Homo sapiens
cttctggcattgtct

SEQ ID NO: 1377826 - DNA, 15 bp, Homo sapiens
tcttctggcattgtc

SEQ ID NO: 1377827 - DNA, 15 bp, Homo sapiens
ttcttctggcattgt

SEQ ID NO: 1377828 - DNA, 15 bp, Homo sapiens
gttcttctggcattg

SEQ ID NO: 1377829 - DNA, 15 bp, Homo sapiens
ggttcttctggcatt

SEQ ID NO: 1377830 - DNA, 15 bp, Homo sapiens
tggttcttctggcat

SEQ ID NO: 1377831 - DNA, 15 bp, Homo sapiens
gtggttcttctggca

SEQ ID NO: 1377832 - DNA, 15 bp, Homo sapiens
ggtggttcttctggc

SEQ ID NO: 1377833 - DNA, 15 bp, Homo sapiens
tggtggttcttctgg

SEQ ID NO: 1377834 - DNA, 15 bp, Homo sapiens
ctggtggttcttctg

SEQ ID NO: 1377835 - DNA, 15 bp, Homo sapiens
gctggtggttcttct

SEQ ID NO: 1377836 - DNA, 15 bp, Homo sapiens
tgctggtggttcttc

SEQ ID NO: 1377837 - DNA, 15 bp, Homo sapiens
ttgctggtggttctt

SEQ ID NO: 1377838 - DNA, 15 bp, Homo sapiens
tttgctggtggttct

SEQ ID NO: 1377839 - DNA, 15 bp, Homo sapiens
ttttgctggtggttc

SEQ ID NO: 1377840 - DNA, 15 bp, Homo sapiens
attttgctggtggtt

SEQ ID NO: 1377841 - DNA, 15 bp, Homo sapiens
gattttgctggtggt

SEQ ID NO: 1377842 - DNA, 15 bp, Homo sapiens
ggattttgctggtgg

SEQ ID NO: 1377843 - DNA, 15 bp, Homo sapiens
tggattttgctggtg

SEQ ID NO: 1377844 - DNA, 15 bp, Homo sapiens
ctggattttgctggt

SEQ ID NO: 1377845 - DNA, 15 bp, Homo sapiens
tctggattttgctgg

SEQ ID NO: 1377846 - DNA, 15 bp, Homo sapiens
gtctggattttgctg

SEQ ID NO: 1377847 - DNA, 15 bp, Homo sapiens
ggtctggattttgct

SEQ ID NO: 1377848 - DNA, 15 bp, Homo sapiens
cggtctggattttgc

SEQ ID NO: 1377849 - DNA, 15 bp, Homo sapiens
acggtctggattttg

SEQ ID NO: 1377850 - DNA, 15 bp, Homo sapiens
cacggtctggatttt

SEQ ID NO: 1377851 - DNA, 15 bp, Homo sapiens
ccacggtctggattt

SEQ ID NO: 1377852 - DNA, 15 bp, Homo sapiens
cccacggtctggatt

SEQ ID NO: 1377853 - DNA, 15 bp, Homo sapiens
tcccacggtctggat

SEQ ID NO: 1377854 - DNA, 15 bp, Homo sapiens
ttcccacggtctgga

SEQ ID NO: 1377855 - DNA, 15 bp, Homo sapiens
tttcccacggtctgg

SEQ ID NO: 1377856 - DNA, 15 bp, Homo sapiens
gtttcccacggtctg

SEQ ID NO: 1377857 - DNA, 15 bp, Homo sapiens
tgtttcccacggtct

SEQ ID NO: 1377858 - DNA, 15 bp, Homo sapiens
ttgtttcccacggtc

SEQ ID NO: 1377859 - DNA, 15 bp, Homo sapiens
attgtttcccacggt

SEQ ID NO: 1377860 - DNA, 15 bp, Homo sapiens
gattgtttcccacgg

SEQ ID NO: 1377861 - DNA, 15 bp, Homo sapiens
agattgtttcccacg

SEQ ID NO: 1377862 - DNA, 15 bp, Homo sapiens
tagattgtttcccac

SEQ ID NO: 1377863 - DNA, 15 bp, Homo sapiens
atagattgtttccca

SEQ ID NO: 1377864 - DNA, 15 bp, Homo sapiens
aatagattgtttccc

SEQ ID NO: 1377865 - DNA, 15 bp, Homo sapiens
aaatagattgtttcc

SEQ ID NO: 1377866 - DNA, 15 bp, Homo sapiens
gaaatagattgtttc

SEQ ID NO: 1377867 - DNA, 15 bp, Homo sapiens
agaaatagattgttt

SEQ ID NO: 1377868 - DNA, 15 bp, Homo sapiens
cagaaatagattgtt

SEQ ID NO: 1377869 - DNA, 15 bp, Homo sapiens
gcagaaatagattgt

SEQ ID NO: 1377870 - DNA, 15 bp, Homo sapiens
tgcagaaatagattg

SEQ ID NO: 1377871 - DNA, 15 bp, Homo sapiens
ttgcagaaatagatt

SEQ ID NO: 1377872 - DNA, 15 bp, Homo sapiens
gttgcagaaatagat

SEQ ID NO: 1377873 - DNA, 15 bp, Homo sapiens
ggttgcagaaataga

SEQ ID NO: 1377874 - DNA, 15 bp, Homo sapiens
tggttgcagaaatag

SEQ ID NO: 1377875 - DNA, 15 bp, Homo sapiens
ttggttgcagaaata

SEQ ID NO: 1377876 - DNA, 15 bp, Homo sapiens
cttggttgcagaaat

SEQ ID NO: 1377877 - DNA, 15 bp, Homo sapiens
ccttggttgcagaaa

SEQ ID NO: 1377878 - DNA, 15 bp, Homo sapiens
tccttggttgcagaa

SEQ ID NO: 1377879 - DNA, 15 bp, Homo sapiens
atccttggttgcaga

SEQ ID NO: 1377880 - DNA, 15 bp, Homo sapiens
aatccttggttgcag

SEQ ID NO: 1377881 - DNA, 15 bp, Homo sapiens
caatccttggttgca

SEQ ID NO: 1377882 - DNA, 15 bp, Homo sapiens
gcaatccttggttgc

SEQ ID NO: 1377883 - DNA, 15 bp, Homo sapiens
tgcaatccttggttg

SEQ ID NO: 1377884 - DNA, 15 bp, Homo sapiens
ttgcaatccttggtt

SEQ ID NO: 1377885 - DNA, 15 bp, Homo sapiens
cttgcaatccttggt

SEQ ID NO: 1377886 - DNA, 15 bp, Homo sapiens
ccttgcaatccttgg

SEQ ID NO: 1377887 - DNA, 15 bp, Homo sapiens
accttgcaatccttg

SEQ ID NO: 1377888 - DNA, 15 bp, Homo sapiens
taccttgcaatcctt

SEQ ID NO: 1377889 - DNA, 15 bp, Homo sapiens
ttaccttgcaatcct

SEQ ID NO: 1377890 - DNA, 15 bp, Homo sapiens
tttaccttgcaatcc

SEQ ID NO: 1377891 - DNA, 15 bp, Homo sapiens
ttttaccttgcaatc

SEQ ID NO: 1377892 - DNA, 15 bp, Homo sapiens
tttttaccttgcaat

SEQ ID NO: 1377893 - DNA, 15 bp, Homo sapiens
gtttttaccttgcaa

SEQ ID NO: 1377894 - DNA, 15 bp, Homo sapiens
tgtttttaccttgca

SEQ ID NO: 1377895 - DNA, 15 bp, Homo sapiens
ttgtttttaccttgc

SEQ ID NO: 1377896 - DNA, 15 bp, Homo sapiens
cttgtttttaccttg

SEQ ID NO: 1377897 - DNA, 15 bp, Homo sapiens
tcttgtttttacctt

SEQ ID NO: 1377898 - DNA, 15 bp, Homo sapiens
ctcttgtttttacct

SEQ ID NO: 1377899 - DNA, 15 bp, Homo sapiens
tctcttgtttttacc

SEQ ID NO: 1377900 - DNA, 15 bp, Homo sapiens
ctctcttgtttttac

SEQ ID NO: 1377901 - DNA, 15 bp, Homo sapiens
tctctcttgttttta

SEQ ID NO: 1377902 - DNA, 15 bp, Homo sapiens
ttctctcttgttttt

SEQ ID NO: 1377903 - DNA, 15 bp, Homo sapiens
tttctctcttgtttt

SEQ ID NO: 1377904 - DNA, 15 bp, Homo sapiens
ttttctctcttgttt

SEQ ID NO: 1377905 - DNA, 15 bp, Homo sapiens
tttttctctcttgtt

SEQ ID NO: 1377906 - DNA, 15 bp, Homo sapiens
ttttttctctcttgt

SEQ ID NO: 1377907 - DNA, 15 bp, Homo sapiens
cttttttctctcttg

SEQ ID NO: 1377908 - DNA, 15 bp, Homo sapiens
tcttttttctctctt

SEQ ID NO: 1377909 - DNA, 15 bp, Homo sapiens
gtcttttttctctct

SEQ ID NO: 1377910 - DNA, 15 bp, Homo sapiens
tgtcttttttctctc

SEQ ID NO: 1377911 - DNA, 15 bp, Homo sapiens
ctgtcttttttctct

SEQ ID NO: 1377912 - DNA, 15 bp, Homo sapiens
tctgtcttttttctc

SEQ ID NO: 1377913 - DNA, 15 bp, Homo sapiens
ctctgtcttttttct

SEQ ID NO: 1377914 - DNA, 15 bp, Homo sapiens
tctctgtcttttttc

SEQ ID NO: 1377915 - DNA, 15 bp, Homo sapiens
ctctctgtctttttt

SEQ ID NO: 1377916 - DNA, 15 bp, Homo sapiens
tctctctgtcttttt

SEQ ID NO: 1377917 - DNA, 15 bp, Homo sapiens
ctctctctgtctttt

SEQ ID NO: 1377918 - DNA, 15 bp, Homo sapiens
cctctctctgtcttt

SEQ ID NO: 1377919 - DNA, 15 bp, Homo sapiens
acctctctctgtctt

SEQ ID NO: 1377920 - DNA, 15 bp, Homo sapiens
gacctctctctgtct

SEQ ID NO: 1377921 - DNA, 15 bp, Homo sapiens
cgacctctctctgtc

SEQ ID NO: 1377922 - DNA, 15 bp, Homo sapiens
tcgacctctctctgt

SEQ ID NO: 1377923 - DNA, 15 bp, Homo sapiens
ctcgacctctctctg

SEQ ID NO: 1377924 - DNA, 15 bp, Homo sapiens
tctcgacctctctct

SEQ ID NO: 1377925 - DNA, 15 bp, Homo sapiens
ctctcgacctctctc

SEQ ID NO: 1377926 - DNA, 15 bp, Homo sapiens
tctctcgacctctct

SEQ ID NO: 1377927 - DNA, 15 bp, Homo sapiens
ttctctcgacctctc

SEQ ID NO: 1377928 - DNA, 15 bp, Homo sapiens
tttctctcgacctct

SEQ ID NO: 1377929 - DNA, 15 bp, Homo sapiens
ttttctctcgacctc

SEQ ID NO: 1377930 - DNA, 15 bp, Homo sapiens
attttctctcgacct

SEQ ID NO: 1377931 - DNA, 15 bp, Homo sapiens
cattttctctcgacc

SEQ ID NO: 1377932 - DNA, 15 bp, Homo sapiens
acattttctctcgac

SEQ ID NO: 1377933 - DNA, 15 bp, Homo sapiens
tacattttctctcga

SEQ ID NO: 1377934 - DNA, 15 bp, Homo sapiens
gtacattttctctcg

SEQ ID NO: 1377935 - DNA, 15 bp, Homo sapiens
tgtacattttctctc

SEQ ID NO: 1377936 - DNA, 15 bp, Homo sapiens
ctgtacattttctct

SEQ ID NO: 1377937 - DNA, 15 bp, Homo sapiens
tctgtacattttctc

SEQ ID NO: 1377938 - DNA, 15 bp, Homo sapiens
atctgtacattttct

SEQ ID NO: 1377939 - DNA, 15 bp, Homo sapiens
aatctgtacattttc

SEQ ID NO: 1377940 - DNA, 15 bp, Homo sapiens
taatctgtacatttt

SEQ ID NO: 1377941 - DNA, 15 bp, Homo sapiens
ttaatctgtacattt

SEQ ID NO: 1377942 - DNA, 15 bp, Homo sapiens
tttaatctgtacatt

SEQ ID NO: 1377943 - DNA, 15 bp, Homo sapiens
ttttaatctgtacat

SEQ ID NO: 1377944 - DNA, 15 bp, Homo sapiens
cttttaatctgtaca

SEQ ID NO: 1377945 - DNA, 15 bp, Homo sapiens
ccttttaatctgtac

SEQ ID NO: 1377946 - DNA, 15 bp, Homo sapiens
cccttttaatctgta

SEQ ID NO: 1377947 - DNA, 15 bp, Homo sapiens
tcccttttaatctgt

SEQ ID NO: 1377948 - DNA, 15 bp, Homo sapiens
atcccttttaatctg

SEQ ID NO: 1377949 - DNA, 15 bp, Homo sapiens
aatcccttttaatct

SEQ ID NO: 1377950 - DNA, 15 bp, Homo sapiens
aaatcccttttaatc

SEQ ID NO: 1377951 - DNA, 15 bp, Homo sapiens
taaatcccttttaat

SEQ ID NO: 1377952 - DNA, 15 bp, Homo sapiens
ttaaatcccttttaa

SEQ ID NO: 1377953 - DNA, 15 bp, Homo sapiens
cttaaatccctttta

SEQ ID NO: 1377954 - DNA, 15 bp, Homo sapiens
tcttaaatccctttt

SEQ ID NO: 1377955 - DNA, 15 bp, Homo sapiens
ttcttaaatcccttt

SEQ ID NO: 1377956 - DNA, 15 bp, Homo sapiens
tttcttaaatccctt

SEQ ID NO: 1377957 - DNA, 15 bp, Homo sapiens
atttcttaaatccct

SEQ ID NO: 1377958 - DNA, 15 bp, Homo sapiens
tatttcttaaatccc

SEQ ID NO: 1377959 - DNA, 15 bp, Homo sapiens
atatttcttaaatcc

SEQ ID NO: 1377960 - DNA, 15 bp, Homo sapiens
tatatttcttaaatc

SEQ ID NO: 1377961 - DNA, 15 bp, Homo sapiens
ctatatttcttaaat

SEQ ID NO: 1377962 - DNA, 15 bp, Homo sapiens
tctatatttcttaaa

SEQ ID NO: 1377963 - DNA, 15 bp, Homo sapiens
ttctatatttcttaa

SEQ ID NO: 1377964 - DNA, 15 bp, Homo sapiens
tttctatatttctta

SEQ ID NO: 1377965 - DNA, 15 bp, Homo sapiens
ttttctatatttctt

SEQ ID NO: 1377966 - DNA, 15 bp, Homo sapiens
tttttctatatttct

SEQ ID NO: 1377967 - DNA, 15 bp, Homo sapiens
ttttttctatatttc

SEQ ID NO: 1377968 - DNA, 15 bp, Homo sapiens
attttttctatattt

SEQ ID NO: 1377969 - DNA, 15 bp, Homo sapiens
aattttttctatatt

SEQ ID NO: 1377970 - DNA, 15 bp, Homo sapiens
aaattttttctatat

SEQ ID NO: 1377971 - DNA, 15 bp, Homo sapiens
caaattttttctata

SEQ ID NO: 1377972 - DNA, 15 bp, Homo sapiens
gcaaattttttctat

SEQ ID NO: 1377973 - DNA, 15 bp, Homo sapiens
cgcaaattttttcta

SEQ ID NO: 1377974 - DNA, 15 bp, Homo sapiens
tcgcaaattttttct

SEQ ID NO: 1377975 - DNA, 15 bp, Homo sapiens
ctcgcaaattttttc

SEQ ID NO: 1377976 - DNA, 15 bp, Homo sapiens
tctcgcaaatttttt

SEQ ID NO: 1377977 - DNA, 15 bp, Homo sapiens
atctcgcaaattttt

SEQ ID NO: 1377978 - DNA, 15 bp, Homo sapiens
tatctcgcaaatttt

SEQ ID NO: 1377979 - DNA, 15 bp, Homo sapiens
gtatctcgcaaattt

SEQ ID NO: 1377980 - DNA, 15 bp, Homo sapiens
tgtatctcgcaaatt

SEQ ID NO: 1377981 - DNA, 15 bp, Homo sapiens
ttgtatctcgcaaat

SEQ ID NO: 1377982 - DNA, 15 bp, Homo sapiens
gttgtatctcgcaaa

SEQ ID NO: 1377983 - DNA, 15 bp, Homo sapiens
tgttgtatctcgcaa

SEQ ID NO: 1377984 - DNA, 15 bp, Homo sapiens
ctgttgtatctcgca

SEQ ID NO: 1377985 - DNA, 15 bp, Homo sapiens
actgttgtatctcgc

SEQ ID NO: 1377986 - DNA, 15 bp, Homo sapiens
cactgttgtatctcg

SEQ ID NO: 1377987 - DNA, 15 bp, Homo sapiens
tcactgttgtatctc

SEQ ID NO: 1377988 - DNA, 15 bp, Homo sapiens
gtcactgttgtatct

SEQ ID NO: 1377989 - DNA, 15 bp, Homo sapiens
agtcactgttgtatc

SEQ ID NO: 1377990 - DNA, 15 bp, Homo sapiens
cagtcactgttgtat

SEQ ID NO: 1377991 - DNA, 15 bp, Homo sapiens
ccagtcactgttgta

SEQ ID NO: 1377992 - DNA, 15 bp, Homo sapiens
tccagtcactgttgt

SEQ ID NO: 1377993 - DNA, 15 bp, Homo sapiens
atccagtcactgttg

SEQ ID NO: 1377994 - DNA, 15 bp, Homo sapiens
tatccagtcactgtt

SEQ ID NO: 1377995 - DNA, 15 bp, Homo sapiens
atatccagtcactgt

SEQ ID NO: 1377996 - DNA, 15 bp, Homo sapiens
aatatccagtcactg

SEQ ID NO: 1377997 - DNA, 15 bp, Homo sapiens
aaatatccagtcact

SEQ ID NO: 1377998 - DNA, 15 bp, Homo sapiens
caaatatccagtcac

SEQ ID NO: 1377999 - DNA, 15 bp, Homo sapiens
tcaaatatccagtca

SEQ ID NO: 1378000 - DNA, 15 bp, Homo sapiens
atcaaatatccagtc

SEQ ID NO: 1378001 - DNA, 15 bp, Homo sapiens
aatcaaatatccagt

SEQ ID NO: 1378002 - DNA, 15 bp, Homo sapiens
taatcaaatatccag

SEQ ID NO: 1378003 - DNA, 15 bp, Homo sapiens
ataatcaaatatcca

SEQ ID NO: 1378004 - DNA, 15 bp, Homo sapiens
tataatcaaatatcc

SEQ ID NO: 1378005 - DNA, 15 bp, Homo sapiens
gtataatcaaatatc

SEQ ID NO: 1378006 - DNA, 15 bp, Homo sapiens
agtataatcaaatat

SEQ ID NO: 1378007 - DNA, 15 bp, Homo sapiens
tagtataatcaaata

SEQ ID NO: 1378008 - DNA, 15 bp, Homo sapiens
ttagtataatcaaat

SEQ ID NO: 1378009 - DNA, 15 bp, Homo sapiens
cttagtataatcaaa

SEQ ID NO: 1378010 - DNA, 15 bp, Homo sapiens
ccttagtataatcaa

SEQ ID NO: 1378011 - DNA, 15 bp, Homo sapiens
tccttagtataatca

SEQ ID NO: 1378012 - DNA, 15 bp, Homo sapiens
ttccttagtataatc

SEQ ID NO: 1378013 - DNA, 15 bp, Homo sapiens
attccttagtataat

SEQ ID NO: 1378014 - DNA, 15 bp, Homo sapiens
aattccttagtataa

SEQ ID NO: 1378015 - DNA, 15 bp, Homo sapiens
taattccttagtata

SEQ ID NO: 1378016 - DNA, 15 bp, Homo sapiens
ataattccttagtat

SEQ ID NO: 1378017 - DNA, 15 bp, Homo sapiens
aataattccttagta

SEQ ID NO: 1378018 - DNA, 15 bp, Homo sapiens
taataattccttagt

SEQ ID NO: 1378019 - DNA, 15 bp, Homo sapiens
ttaataattccttag

SEQ ID NO: 1378020 - DNA, 15 bp, Homo sapiens
tttaataattcctta

SEQ ID NO: 1378021 - DNA, 15 bp, Homo sapiens
ttttaataattcctt

SEQ ID NO: 1378022 - DNA, 15 bp, Homo sapiens
attttaataattcct

SEQ ID NO: 1378023 - DNA, 15 bp, Homo sapiens
aattttaataattcc

SEQ ID NO: 1378024 - DNA, 15 bp, Homo sapiens
aaattttaataattc

SEQ ID NO: 1378025 - DNA, 15 bp, Homo sapiens
aaaattttaataatt

SEQ ID NO: 1378026 - DNA, 15 bp, Homo sapiens
aaaaattttaataat

SEQ ID NO: 1378027 - DNA, 15 bp, Homo sapiens
caaaaattttaataa

SEQ ID NO: 1378028 - DNA, 15 bp, Homo sapiens
acaaaaattttaata

SEQ ID NO: 1378029 - DNA, 15 bp, Homo sapiens
tacaaaaattttaat

SEQ ID NO: 1378030 - DNA, 15 bp, Homo sapiens
ttacaaaaattttaa

SEQ ID NO: 1378031 - DNA, 15 bp, Homo sapiens
tttacaaaaatttta

SEQ ID NO: 1378032 - DNA, 15 bp, Homo sapiens
ttttacaaaaatttt

SEQ ID NO: 1378033 - DNA, 15 bp, Homo sapiens
attttacaaaaattt

SEQ ID NO: 1378034 - DNA, 15 bp, Homo sapiens
tattttacaaaaatt

SEQ ID NO: 1378035 - DNA, 15 bp, Homo sapiens
ttattttacaaaaat

SEQ ID NO: 1378036 - DNA, 15 bp, Homo sapiens
attattttacaaaaa

SEQ ID NO: 1378037 - DNA, 15 bp, Homo sapiens
tattattttacaaaa

SEQ ID NO: 1378038 - DNA, 15 bp, Homo sapiens
ttattattttacaaa

SEQ ID NO: 1378039 - DNA, 15 bp, Homo sapiens
attattattttacaa

SEQ ID NO: 1378040 - DNA, 15 bp, Homo sapiens
tattattattttaca

SEQ ID NO: 1378041 - DNA, 15 bp, Homo sapiens
atattattattttac

SEQ ID NO: 1378042 - DNA, 15 bp, Homo sapiens
aatattattatttta

SEQ ID NO: 1378043 - DNA, 15 bp, Homo sapiens
caatattattatttt

SEQ ID NO: 1378044 - DNA, 15 bp, Homo sapiens
acaatattattattt

SEQ ID NO: 1378045 - DNA, 15 bp, Homo sapiens
cacaatattattatt

SEQ ID NO: 1378046 - DNA, 15 bp, Homo sapiens
tcacaatattattat

SEQ ID NO: 1378047 - DNA, 15 bp, Homo sapiens
atcacaatattatta

SEQ ID NO: 1378048 - DNA, 15 bp, Homo sapiens
aatcacaatattatt

SEQ ID NO: 1378049 - DNA, 15 bp, Homo sapiens
caatcacaatattat

SEQ ID NO: 1378050 - DNA, 15 bp, Homo sapiens
acaatcacaatatta

SEQ ID NO: 1378051 - DNA, 15 bp, Homo sapiens
cacaatcacaatatt

SEQ ID NO: 1378052 - DNA, 15 bp, Homo sapiens
acacaatcacaatat

SEQ ID NO: 1378053 - DNA, 15 bp, Homo sapiens
aaacacaatcacaat

SEQ ID NO: 1378054 - DNA, 15 bp, Homo sapiens
aaaacacaatcacaa

SEQ ID NO: 1378055 - DNA, 15 bp, Homo sapiens
aaaaacacaatcaca

SEQ ID NO: 1378056 - DNA, 15 bp, Homo sapiens
aaaaaacacaatcac

SEQ ID NO: 1378057 - DNA, 15 bp, Homo sapiens
taaaaaacacaatca

SEQ ID NO: 1378058 - DNA, 15 bp, Homo sapiens
ttaaaaaacacaatc

SEQ ID NO: 1378059 - DNA, 15 bp, Homo sapiens
tttaaaaaacacaat

SEQ ID NO: 1378060 - DNA, 15 bp, Homo sapiens
ttttaaaaaacacaa

SEQ ID NO: 1378061 - DNA, 15 bp, Homo sapiens
cttttaaaaaacaca

SEQ ID NO: 1378062 - DNA, 15 bp, Homo sapiens
tcttttaaaaaacac

SEQ ID NO: 1378063 - DNA, 15 bp, Homo sapiens
ttcttttaaaaaaca

SEQ ID NO: 1378064 - DNA, 15 bp, Homo sapiens
attcttttaaaaaac

SEQ ID NO: 1378065 - DNA, 15 bp, Homo sapiens
gattcttttaaaaaa

SEQ ID NO: 1378066 - DNA, 15 bp, Homo sapiens
agattcttttaaaaa

SEQ ID NO: 1378067 - DNA, 15 bp, Homo sapiens
gagattcttttaaaa

SEQ ID NO: 1378068 - DNA, 15 bp, Homo sapiens
agagattcttttaaa

SEQ ID NO: 1378069 - DNA, 15 bp, Homo sapiens
tagagattcttttaa

SEQ ID NO: 1378070 - DNA, 15 bp, Homo sapiens
atagagattctttta

SEQ ID NO: 1378071 - DNA, 15 bp, Homo sapiens
aatagagattctttt

SEQ ID NO: 1378072 - DNA, 15 bp, Homo sapiens
caatagagattcttt

SEQ ID NO: 1378073 - DNA, 15 bp, Homo sapiens
tcaatagagattctt

SEQ ID NO: 1378074 - DNA, 15 bp, Homo sapiens
ttcaatagagattct

SEQ ID NO: 1378075 - DNA, 15 bp, Homo sapiens
tttcaatagagattc

SEQ ID NO: 1378076 - DNA, 15 bp, Homo sapiens
ttttcaatagagatt

SEQ ID NO: 1378077 - DNA, 15 bp, Homo sapiens
attttcaatagagat

SEQ ID NO: 1378078 - DNA, 15 bp, Homo sapiens
tattttcaatagaga

SEQ ID NO: 1378079 - DNA, 15 bp, Homo sapiens
ctattttcaatagag

SEQ ID NO: 1378080 - DNA, 15 bp, Homo sapiens
tctattttcaataga

SEQ ID NO: 1378081 - DNA, 15 bp, Homo sapiens
atctattttcaatag

SEQ ID NO: 1378082 - DNA, 15 bp, Homo sapiens
tatctattttcaata

SEQ ID NO: 1378083 - DNA, 15 bp, Homo sapiens
gtatctattttcaat

SEQ ID NO: 1378084 - DNA, 15 bp, Homo sapiens
agtatctattttcaa

SEQ ID NO: 1378085 - DNA, 15 bp, Homo sapiens
tagtatctattttca

SEQ ID NO: 1378086 - DNA, 15 bp, Homo sapiens
ttagtatctattttc

SEQ ID NO: 1378087 - DNA, 15 bp, Homo sapiens
attagtatctatttt

SEQ ID NO: 1378088 - DNA, 15 bp, Homo sapiens
gattagtatctattt

SEQ ID NO: 1378089 - DNA, 15 bp, Homo sapiens
agattagtatctatt

SEQ ID NO: 1378090 - DNA, 15 bp, Homo sapiens
tagattagtatctat

SEQ ID NO: 1378091 - DNA, 15 bp, Homo sapiens
gtagattagtatcta

SEQ ID NO: 1378092 - DNA, 15 bp, Homo sapiens
tgtagattagtatct

SEQ ID NO: 1378093 - DNA, 15 bp, Homo sapiens
ctgtagattagtatc

SEQ ID NO: 1378094 - DNA, 15 bp, Homo sapiens
actgtagattagtat

SEQ ID NO: 1378095 - DNA, 15 bp, Homo sapiens
tactgtagattagta

SEQ ID NO: 1378096 - DNA, 15 bp, Homo sapiens
ctactgtagattagt

SEQ ID NO: 1378097 - DNA, 15 bp, Homo sapiens
cctactgtagattag

SEQ ID NO: 1378098 - DNA, 15 bp, Homo sapiens
acctactgtagatta

SEQ ID NO: 1378099 - DNA, 15 bp, Homo sapiens
aacctactgtagatt

SEQ ID NO: 1378100 - DNA, 15 bp, Homo sapiens
aaacctactgtagat

SEQ ID NO: 1378101 - DNA, 15 bp, Homo sapiens
aaaacctactgtaga

SEQ ID NO: 1378102 - DNA, 15 bp, Homo sapiens
aaaaacctactgtag

SEQ ID NO: 1378103 - DNA, 15 bp, Homo sapiens
taaaaacctactgta

SEQ ID NO: 1378104 - DNA, 15 bp, Homo sapiens
ataaaaacctactgt

SEQ ID NO: 1378105 - DNA, 15 bp, Homo sapiens
aataaaaacctactg

SEQ ID NO: 1378106 - DNA, 15 bp, Homo sapiens
taataaaaacctact

SEQ ID NO: 1378107 - DNA, 15 bp, Homo sapiens
ataataaaaacctac

SEQ ID NO: 1378108 - DNA, 15 bp, Homo sapiens
aataataaaaaccta

SEQ ID NO: 1378109 - DNA, 15 bp, Homo sapiens
aaataataaaaacct

SEQ ID NO: 1378110 - DNA, 15 bp, Homo sapiens
caaataataaaaacc

SEQ ID NO: 1378111 - DNA, 15 bp, Homo sapiens
gcaaataataaaaac

SEQ ID NO: 1378112 - DNA, 15 bp, Homo sapiens
tgcaaataataaaaa

SEQ ID NO: 1378113 - DNA, 15 bp, Homo sapiens
ctgcaaataataaaa

SEQ ID NO: 1378114 - DNA, 15 bp, Homo sapiens
tctgcaaataataaa

SEQ ID NO: 1378115 - DNA, 15 bp, Homo sapiens
atctgcaaataataa

SEQ ID NO: 1378116 - DNA, 15 bp, Homo sapiens
aatctgcaaataata

SEQ ID NO: 1378117 - DNA, 15 bp, Homo sapiens
gaatctgcaaataat

SEQ ID NO: 1378118 - DNA, 15 bp, Homo sapiens
ggaatctgcaaataa

SEQ ID NO: 1378119 - DNA, 15 bp, Homo sapiens
tggaatctgcaaata

SEQ ID NO: 1378120 - DNA, 15 bp, Homo sapiens
atggaatctgcaaat

SEQ ID NO: 1378121 - DNA, 15 bp, Homo sapiens
tatggaatctgcaaa

SEQ ID NO: 1378122 - DNA, 15 bp, Homo sapiens
atatggaatctgcaa

SEQ ID NO: 1378123 - DNA, 15 bp, Homo sapiens
aatatggaatctgca

SEQ ID NO: 1378124 - DNA, 15 bp, Homo sapiens
aaatatggaatctgc

SEQ ID NO: 1378125 - DNA, 15 bp, Homo sapiens
taaatatggaatctg

SEQ ID NO: 1378126 - DNA, 15 bp, Homo sapiens
gtaaatatggaatct

SEQ ID NO: 1378127 - DNA, 15 bp, Homo sapiens
tgtaaatatggaatc

SEQ ID NO: 1378128 - DNA, 15 bp, Homo sapiens
ttgtaaatatggaat

SEQ ID NO: 1378129 - DNA, 15 bp, Homo sapiens
tttgtaaatatggaa

SEQ ID NO: 1378130 - DNA, 15 bp, Homo sapiens
atttgtaaatatgga

SEQ ID NO: 1378131 - DNA, 15 bp, Homo sapiens
aatttgtaaatatgg

SEQ ID NO: 1378132 - DNA, 15 bp, Homo sapiens
aaatttgtaaatatg

SEQ ID NO: 1378133 - DNA, 15 bp, Homo sapiens
taaatttgtaaatat

SEQ ID NO: 1378134 - DNA, 15 bp, Homo sapiens
gtaaatttgtaaata

SEQ ID NO: 1378135 - DNA, 15 bp, Homo sapiens
ggtaaatttgtaaat

SEQ ID NO: 1378136 - DNA, 15 bp, Homo sapiens
aggtaaatttgtaaa

SEQ ID NO: 1378137 - DNA, 15 bp, Homo sapiens
taggtaaatttgtaa

SEQ ID NO: 1378138 - DNA, 15 bp, Homo sapiens
gtaggtaaatttgta

SEQ ID NO: 1378139 - DNA, 15 bp, Homo sapiens
agtaggtaaatttgt

SEQ ID NO: 1378140 - DNA, 15 bp, Homo sapiens
aagtaggtaaatttg

SEQ ID NO: 1378141 - DNA, 15 bp, Homo sapiens
caagtaggtaaattt

SEQ ID NO: 1378142 - DNA, 15 bp, Homo sapiens
gcaagtaggtaaatt

SEQ ID NO: 1378143 - DNA, 15 bp, Homo sapiens
agcaagtaggtaaat

SEQ ID NO: 1378144 - DNA, 15 bp, Homo sapiens
tagcaagtaggtaaa

SEQ ID NO: 1378145 - DNA, 15 bp, Homo sapiens
atagcaagtaggtaa

SEQ ID NO: 1378146 - DNA, 15 bp, Homo sapiens
tatagcaagtaggta

SEQ ID NO: 1378147 - DNA, 15 bp, Homo sapiens
gtatagcaagtaggt

SEQ ID NO: 1378148 - DNA, 15 bp, Homo sapiens
tgtatagcaagtagg

SEQ ID NO: 1378149 - DNA, 15 bp, Homo sapiens
ttgtatagcaagtag

SEQ ID NO: 1378150 - DNA, 15 bp, Homo sapiens
attgtatagcaagta

SEQ ID NO: 1378151 - DNA, 15 bp, Homo sapiens
aattgtatagcaagt

SEQ ID NO: 1378152 - DNA, 15 bp, Homo sapiens
aaattgtatagcaag

SEQ ID NO: 1378153 - DNA, 15 bp, Homo sapiens
taaattgtatagcaa

SEQ ID NO: 1378154 - DNA, 15 bp, Homo sapiens
ataaattgtatagca

SEQ ID NO: 1378155 - DNA, 15 bp, Homo sapiens
aataaattgtatagc

SEQ ID NO: 1378156 - DNA, 15 bp, Homo sapiens
aaataaattgtatag

SEQ ID NO: 1378157 - DNA, 15 bp, Homo sapiens
caaataaattgtata

SEQ ID NO: 1378158 - DNA, 15 bp, Homo sapiens
acaaataaattgtat

SEQ ID NO: 1378159 - DNA, 15 bp, Homo sapiens
tacaaataaattgta

SEQ ID NO: 1378160 - DNA, 15 bp, Homo sapiens
ttacaaataaattgt

SEQ ID NO: 1378161 - DNA, 15 bp, Homo sapiens
gttacaaataaattg

SEQ ID NO: 1378162 - DNA, 15 bp, Homo sapiens
ggttacaaataaatt

SEQ ID NO: 1378163 - DNA, 15 bp, Homo sapiens
aggttacaaataaat

SEQ ID NO: 1378164 - DNA, 15 bp, Homo sapiens
gaggttacaaataaa

SEQ ID NO: 1378165 - DNA, 15 bp, Homo sapiens
tgaggttacaaataa

SEQ ID NO: 1378166 - DNA, 15 bp, Homo sapiens
ttgaggttacaaata

SEQ ID NO: 1378167 - DNA, 15 bp, Homo sapiens
tttgaggttacaaat

SEQ ID NO: 1378168 - DNA, 15 bp, Homo sapiens
ttttgaggttacaaa

SEQ ID NO: 1378169 - DNA, 15 bp, Homo sapiens
attttgaggttacaa

SEQ ID NO: 1378170 - DNA, 15 bp, Homo sapiens
gattttgaggttaca

SEQ ID NO: 1378171 - DNA, 15 bp, Homo sapiens
tgattttgaggttac

SEQ ID NO: 1378172 - DNA, 15 bp, Homo sapiens
ttgattttgaggtta

SEQ ID NO: 1378173 - DNA, 15 bp, Homo sapiens
gttgattttgaggtt

SEQ ID NO: 1378174 - DNA, 15 bp, Homo sapiens
tgttgattttgaggt

SEQ ID NO: 1378175 - DNA, 15 bp, Homo sapiens
gtgttgattttgagg

SEQ ID NO: 1378176 - DNA, 15 bp, Homo sapiens
agtgttgattttgag

SEQ ID NO: 1378177 - DNA, 15 bp, Homo sapiens
aagtgttgattttga

SEQ ID NO: 1378178 - DNA, 15 bp, Homo sapiens
caagtgttgattttg

SEQ ID NO: 1378179 - DNA, 15 bp, Homo sapiens
tcaagtgttgatttt

SEQ ID NO: 1378180 - DNA, 15 bp, Homo sapiens
ttcaagtgttgattt

SEQ ID NO: 1378181 - DNA, 15 bp, Homo sapiens
cttcaagtgttgatt

SEQ ID NO: 1378182 - DNA, 15 bp, Homo sapiens
tcttcaagtgttgat

SEQ ID NO: 1378183 - DNA, 15 bp, Homo sapiens
ttcttcaagtgttga

SEQ ID NO: 1378184 - DNA, 15 bp, Homo sapiens
gttcttcaagtgttg

SEQ ID NO: 1378185 - DNA, 15 bp, Homo sapiens
agttcttcaagtgtt

SEQ ID NO: 1378186 - DNA, 15 bp, Homo sapiens
aagttcttcaagtgt

SEQ ID NO: 1378187 - DNA, 15 bp, Homo sapiens
aaagttcttcaagtg

SEQ ID NO: 1378188 - DNA, 15 bp, Homo sapiens
gaaagttcttcaagt

SEQ ID NO: 1378189 - DNA, 15 bp, Homo sapiens
tgaaagttcttcaag

SEQ ID NO: 1378190 - DNA, 15 bp, Homo sapiens
gtgaaagttcttcaa

SEQ ID NO: 1378191 - DNA, 15 bp, Homo sapiens
tgtgaaagttcttca

SEQ ID NO: 1378192 - DNA, 15 bp, Homo sapiens
ctgtgaaagttcttc

SEQ ID NO: 1378193 - DNA, 15 bp, Homo sapiens
actgtgaaagttctt

SEQ ID NO: 1378194 - DNA, 15 bp, Homo sapiens
gactgtgaaagttct

SEQ ID NO: 1378195 - DNA, 15 bp, Homo sapiens
tgactgtgaaagttc

SEQ ID NO: 1378196 - DNA, 15 bp, Homo sapiens
atgactgtgaaagtt

SEQ ID NO: 1378197 - DNA, 15 bp, Homo sapiens
aatgactgtgaaagt

SEQ ID NO: 1378198 - DNA, 15 bp, Homo sapiens
gaatgactgtgaaag

SEQ ID NO: 1378199 - DNA, 15 bp, Homo sapiens
tgaatgactgtgaaa

SEQ ID NO: 1378200 - DNA, 15 bp, Homo sapiens
ctgaatgactgtgaa

SEQ ID NO: 1378201 - DNA, 15 bp, Homo sapiens
tctgaatgactgtga

SEQ ID NO: 1378202 - DNA, 15 bp, Homo sapiens
ctctgaatgactgtg

SEQ ID NO: 1378203 - DNA, 15 bp, Homo sapiens
tctctgaatgactgt

SEQ ID NO: 1378204 - DNA, 15 bp, Homo sapiens
gtctctgaatgactg

SEQ ID NO: 1378205 - DNA, 15 bp, Homo sapiens
tgtctctgaatgact

SEQ ID NO: 1378206 - DNA, 15 bp, Homo sapiens
atgtctctgaatgac

SEQ ID NO: 1378207 - DNA, 15 bp, Homo sapiens
tatgtctctgaatga

SEQ ID NO: 1378208 - DNA, 15 bp, Homo sapiens
gtatgtctctgaatg

SEQ ID NO: 1378209 - DNA, 15 bp, Homo sapiens
tgtatgtctctgaat

SEQ ID NO: 1378210 - DNA, 15 bp, Homo sapiens
atgtatgtctctgaa

SEQ ID NO: 1378211 - DNA, 15 bp, Homo sapiens
catgtatgtctctga

SEQ ID NO: 1378212 - DNA, 15 bp, Homo sapiens
acatgtatgtctctg

SEQ ID NO: 1378213 - DNA, 15 bp, Homo sapiens
cacatgtatgtctct

SEQ ID NO: 1378214 - DNA, 15 bp, Homo sapiens
gcacatgtatgtctc

SEQ ID NO: 1378215 - DNA, 15 bp, Homo sapiens
tgcacatgtatgtct

SEQ ID NO: 1378216 - DNA, 15 bp, Homo sapiens
ctgcacatgtatgtc

SEQ ID NO: 1378217 - DNA, 15 bp, Homo sapiens
tctgcacatgtatgt

SEQ ID NO: 1378218 - DNA, 15 bp, Homo sapiens
ctctgcacatgtatg

SEQ ID NO: 1378219 - DNA, 15 bp, Homo sapiens
tctctgcacatgtat

SEQ ID NO: 1378220 - DNA, 15 bp, Homo sapiens
ctctctgcacatgta

SEQ ID NO: 1378221 - DNA, 15 bp, Homo sapiens
cctctctgcacatgt

SEQ ID NO: 1378222 - DNA, 15 bp, Homo sapiens
gcctctctgcacatg

SEQ ID NO: 1378223 - DNA, 15 bp, Homo sapiens
tgcctctctgcacat

SEQ ID NO: 1378224 - DNA, 15 bp, Homo sapiens
ttgcctctctgcaca

SEQ ID NO: 1378225 - DNA, 15 bp, Homo sapiens
tttgcctctctgcac

SEQ ID NO: 1378226 - DNA, 15 bp, Homo sapiens
ttttgcctctctgca

SEQ ID NO: 1378227 - DNA, 15 bp, Homo sapiens
tttttgcctctctgc

SEQ ID NO: 1378228 - DNA, 15 bp, Homo sapiens
ttttttgcctctctg

SEQ ID NO: 1378229 - DNA, 15 bp, Homo sapiens
attttttgcctctct

SEQ ID NO: 1378230 - DNA, 15 bp, Homo sapiens
aattttttgcctctc

SEQ ID NO: 1378231 - DNA, 15 bp, Homo sapiens
aaattttttgcctct

SEQ ID NO: 1378232 - DNA, 15 bp, Homo sapiens
taaattttttgcctc

SEQ ID NO: 1378233 - DNA, 15 bp, Homo sapiens
ttaaattttttgcct

SEQ ID NO: 1378234 - DNA, 15 bp, Homo sapiens
cttaaattttttgcc

SEQ ID NO: 1378235 - DNA, 15 bp, Homo sapiens
acttaaattttttgc

SEQ ID NO: 1378236 - DNA, 15 bp, Homo sapiens
aacttaaattttttg

SEQ ID NO: 1378237 - DNA, 15 bp, Homo sapiens
caacttaaatttttt

SEQ ID NO: 1378238 - DNA, 15 bp, Homo sapiens
gcaacttaaattttt

SEQ ID NO: 1378239 - DNA, 15 bp, Homo sapiens
ggcaacttaaatttt

SEQ ID NO: 1378240 - DNA, 15 bp, Homo sapiens
aggcaacttaaattt

SEQ ID NO: 1378241 - DNA, 15 bp, Homo sapiens
caggcaacttaaatt

SEQ ID NO: 1378242 - DNA, 15 bp, Homo sapiens
tcaggcaacttaaat

SEQ ID NO: 1378243 - DNA, 15 bp, Homo sapiens
ttcaggcaacttaaa

SEQ ID NO: 1378244 - DNA, 15 bp, Homo sapiens
cttcaggcaacttaa

SEQ ID NO: 1378245 - DNA, 15 bp, Homo sapiens
acttcaggcaactta

SEQ ID NO: 1378246 - DNA, 15 bp, Homo sapiens
tacttcaggcaactt

SEQ ID NO: 1378247 - DNA, 15 bp, Homo sapiens
gtacttcaggcaact

SEQ ID NO: 1378248 - DNA, 15 bp, Homo sapiens
tgtacttcaggcaac

SEQ ID NO: 1378249 - DNA, 15 bp, Homo sapiens
atgtacttcaggcaa

SEQ ID NO: 1378250 - DNA, 15 bp, Homo sapiens
tatgtacttcaggca

SEQ ID NO: 1378251 - DNA, 15 bp, Homo sapiens
atatgtacttcaggc

SEQ ID NO: 1378252 - DNA, 15 bp, Homo sapiens
aatatgtacttcagg

SEQ ID NO: 1378253 - DNA, 15 bp, Homo sapiens
gaatatgtacttcag

SEQ ID NO: 1378254 - DNA, 15 bp, Homo sapiens
ggaatatgtacttca

SEQ ID NO: 1378255 - DNA, 15 bp, Homo sapiens
gggaatatgtacttc

SEQ ID NO: 1378256 - DNA, 15 bp, Homo sapiens
tgggaatatgtactt

SEQ ID NO: 1378257 - DNA, 15 bp, Homo sapiens
gtgggaatatgtact

SEQ ID NO: 1378258 - DNA, 15 bp, Homo sapiens
ggtgggaatatgtac

SEQ ID NO: 1378259 - DNA, 15 bp, Homo sapiens
aggtgggaatatgta

SEQ ID NO: 1378260 - DNA, 15 bp, Homo sapiens
caggtgggaatatgt

SEQ ID NO: 1378261 - DNA, 15 bp, Homo sapiens
tcaggtgggaatatg

SEQ ID NO: 1378262 - DNA, 15 bp, Homo sapiens
ctcaggtgggaatat

SEQ ID NO: 1378263 - DNA, 15 bp, Homo sapiens
cctcaggtgggaata

SEQ ID NO: 1378264 - DNA, 15 bp, Homo sapiens
gcctcaggtgggaat

SEQ ID NO: 1378265 - DNA, 15 bp, Homo sapiens
agcctcaggtgggaa

SEQ ID NO: 1378266 - DNA, 15 bp, Homo sapiens
cagcctcaggtggga

SEQ ID NO: 1378267 - DNA, 15 bp, Homo sapiens
tcagcctcaggtggg

SEQ ID NO: 1378268 - DNA, 15 bp, Homo sapiens
ttcagcctcaggtgg

SEQ ID NO: 1378269 - DNA, 15 bp, Homo sapiens
gttcagcctcaggtg

SEQ ID NO: 1378270 - DNA, 15 bp, Homo sapiens
tgttcagcctcaggt

SEQ ID NO: 1378271 - DNA, 15 bp, Homo sapiens
ttgttcagcctcagg

SEQ ID NO: 1378272 - DNA, 15 bp, Homo sapiens
cttgttcagcctcag

SEQ ID NO: 1378273 - DNA, 15 bp, Homo sapiens
ccttgttcagcctca

SEQ ID NO: 1378274 - DNA, 15 bp, Homo sapiens
gccttgttcagcctc

SEQ ID NO: 1378275 - DNA, 15 bp, Homo sapiens
tgccttgttcagcct

SEQ ID NO: 1378276 - DNA, 15 bp, Homo sapiens
ttgccttgttcagcc

SEQ ID NO: 1378277 - DNA, 15 bp, Homo sapiens
gttgccttgttcagc

SEQ ID NO: 1378278 - DNA, 15 bp, Homo sapiens
tgttgccttgttcag

SEQ ID NO: 1378279 - DNA, 15 bp, Homo sapiens
ctgttgccttgttca

SEQ ID NO: 1378280 - DNA, 15 bp, Homo sapiens
actgttgccttgttc

SEQ ID NO: 1378281 - DNA, 15 bp, Homo sapiens
aactgttgccttgtt

SEQ ID NO: 1378282 - DNA, 15 bp, Homo sapiens
caactgttgccttgt

SEQ ID NO: 1378283 - DNA, 15 bp, Homo sapiens
acaactgttgccttg

SEQ ID NO: 1378284 - DNA, 15 bp, Homo sapiens
tacaactgttgcctt

SEQ ID NO: 1378285 - DNA, 15 bp, Homo sapiens
gtacaactgttgcct

SEQ ID NO: 1378286 - DNA, 15 bp, Homo sapiens
tgtacaactgttgcc

SEQ ID NO: 1378287 - DNA, 15 bp, Homo sapiens
ctgtacaactgttgc

SEQ ID NO: 1378288 - DNA, 15 bp, Homo sapiens
gctgtacaactgttg

SEQ ID NO: 1378289 - DNA, 15 bp, Homo sapiens
agctgtacaactgtt

SEQ ID NO: 1378290 - DNA, 15 bp, Homo sapiens
gagctgtacaactgt

SEQ ID NO: 1378291 - DNA, 15 bp, Homo sapiens
agagctgtacaactg

SEQ ID NO: 1378292 - DNA, 15 bp, Homo sapiens
gagagctgtacaact

SEQ ID NO: 1378293 - DNA, 15 bp, Homo sapiens
tgagagctgtacaac

SEQ ID NO: 1378294 - DNA, 15 bp, Homo sapiens
atgagagctgtacaa

SEQ ID NO: 1378295 - DNA, 15 bp, Homo sapiens
tatgagagctgtaca

SEQ ID NO: 1378296 - DNA, 15 bp, Homo sapiens
gtatgagagctgtac

SEQ ID NO: 1378297 - DNA, 15 bp, Homo sapiens
agtatgagagctgta

SEQ ID NO: 1378298 - DNA, 15 bp, Homo sapiens
cagtatgagagctgt

SEQ ID NO: 1378299 - DNA, 15 bp, Homo sapiens
acagtatgagagctg

SEQ ID NO: 1378300 - DNA, 15 bp, Homo sapiens
tacagtatgagagct

SEQ ID NO: 1378301 - DNA, 15 bp, Homo sapiens
ttacagtatgagagc

SEQ ID NO: 1378302 - DNA, 15 bp, Homo sapiens
tttacagtatgagag

SEQ ID NO: 1378303 - DNA, 15 bp, Homo sapiens
ctttacagtatgaga

SEQ ID NO: 1378304 - DNA, 15 bp, Homo sapiens
actttacagtatgag

SEQ ID NO: 1378305 - DNA, 15 bp, Homo sapiens
tactttacagtatga

SEQ ID NO: 1378306 - DNA, 15 bp, Homo sapiens
atactttacagtatg

SEQ ID NO: 1378307 - DNA, 15 bp, Homo sapiens
tatactttacagtat

SEQ ID NO: 1378308 - DNA, 15 bp, Homo sapiens
gtatactttacagta

SEQ ID NO: 1378309 - DNA, 15 bp, Homo sapiens
agtatactttacagt

SEQ ID NO: 1378310 - DNA, 15 bp, Homo sapiens
aagtatactttacag

SEQ ID NO: 1378311 - DNA, 15 bp, Homo sapiens
aaagtatactttaca

SEQ ID NO: 1378312 - DNA, 15 bp, Homo sapiens
aaaagtatactttac

SEQ ID NO: 1378313 - DNA, 15 bp, Homo sapiens
aaaaagtatacttta

SEQ ID NO: 1378314 - DNA, 15 bp, Homo sapiens
taaaaagtatacttt

SEQ ID NO: 1378315 - DNA, 15 bp, Homo sapiens
ataaaaagtatactt

SEQ ID NO: 1378316 - DNA, 15 bp, Homo sapiens
cataaaaagtatact

SEQ ID NO: 1378317 - DNA, 15 bp, Homo sapiens
ccataaaaagtatac

SEQ ID NO: 1378318 - DNA, 15 bp, Homo sapiens
accataaaaagtata

SEQ ID NO: 1378319 - DNA, 15 bp, Homo sapiens
gaccataaaaagtat

SEQ ID NO: 1378320 - DNA, 15 bp, Homo sapiens
agaccataaaaagta

SEQ ID NO: 1378321 - DNA, 15 bp, Homo sapiens
tagaccataaaaagt

SEQ ID NO: 1378322 - DNA, 15 bp, Homo sapiens
atagaccataaaaag

SEQ ID NO: 1378323 - DNA, 15 bp, Homo sapiens
aatagaccataaaaa

SEQ ID NO: 1378324 - DNA, 15 bp, Homo sapiens
aaatagaccataaaa

SEQ ID NO: 1378325 - DNA, 15 bp, Homo sapiens
taaatagaccataaa

SEQ ID NO: 1378326 - DNA, 15 bp, Homo sapiens
ctaaatagaccataa

SEQ ID NO: 1378327 - DNA, 15 bp, Homo sapiens
actaaatagaccata

SEQ ID NO: 1378328 - DNA, 15 bp, Homo sapiens
cactaaatagaccat

SEQ ID NO: 1378329 - DNA, 15 bp, Homo sapiens
acactaaatagacca

SEQ ID NO: 1378330 - DNA, 15 bp, Homo sapiens
gacactaaatagacc

SEQ ID NO: 1378331 - DNA, 15 bp, Homo sapiens
tgacactaaatagac

SEQ ID NO: 1378332 - DNA, 15 bp, Homo sapiens
gtgacactaaataga

SEQ ID NO: 1378333 - DNA, 15 bp, Homo sapiens
tgtgacactaaatag

SEQ ID NO: 1378334 - DNA, 15 bp, Homo sapiens
atgtgacactaaata

SEQ ID NO: 1378335 - DNA, 15 bp, Homo sapiens
aatgtgacactaaat

SEQ ID NO: 1378336 - DNA, 15 bp, Homo sapiens
aaatgtgacactaaa

SEQ ID NO: 1378337 - DNA, 15 bp, Homo sapiens
aaaatgtgacactaa

SEQ ID NO: 1378338 - DNA, 15 bp, Homo sapiens
aaaaatgtgacacta

SEQ ID NO: 1378339 - DNA, 15 bp, Homo sapiens
caaaaatgtgacact

SEQ ID NO: 1378340 - DNA, 15 bp, Homo sapiens
acaaaaatgtgacac

SEQ ID NO: 1378341 - DNA, 15 bp, Homo sapiens
cacaaaaatgtgaca

SEQ ID NO: 1378342 - DNA, 15 bp, Homo sapiens
ccacaaaaatgtgac

SEQ ID NO: 1378343 - DNA, 15 bp, Homo sapiens
cccacaaaaatgtga

SEQ ID NO: 1378344 - DNA, 15 bp, Homo sapiens
acccacaaaaatgtg

SEQ ID NO: 1378345 - DNA, 15 bp, Homo sapiens
aacccacaaaaatgt

SEQ ID NO: 1378346 - DNA, 15 bp, Homo sapiens
aaacccacaaaaatg

SEQ ID NO: 1378347 - DNA, 15 bp, Homo sapiens
aaaacccacaaaaat

SEQ ID NO: 1378348 - DNA, 15 bp, Homo sapiens
caaaacccacaaaaa

SEQ ID NO: 1378349 - DNA, 15 bp, Homo sapiens
acaaaacccacaaaa

SEQ ID NO: 1378350 - DNA, 15 bp, Homo sapiens
aacaaaacccacaaa

SEQ ID NO: 1378351 - DNA, 15 bp, Homo sapiens
caacaaaacccacaa

SEQ ID NO: 1378352 - DNA, 15 bp, Homo sapiens
ccaacaaaacccaca

SEQ ID NO: 1378353 - DNA, 15 bp, Homo sapiens
accaacaaaacccac

SEQ ID NO: 1378354 - DNA, 15 bp, Homo sapiens
caccaacaaaaccca

SEQ ID NO: 1378355 - DNA, 15 bp, Homo sapiens
tcaccaacaaaaccc

SEQ ID NO: 1378356 - DNA, 15 bp, Homo sapiens
atcaccaacaaaacc

SEQ ID NO: 1378357 - DNA, 15 bp, Homo sapiens
aatcaccaacaaaac

SEQ ID NO: 1378358 - DNA, 15 bp, Homo sapiens
aaatcaccaacaaaa

SEQ ID NO: 1378359 - DNA, 15 bp, Homo sapiens
aaaatcaccaacaaa

SEQ ID NO: 1378360 - DNA, 15 bp, Homo sapiens
taaaatcaccaacaa

SEQ ID NO: 1378361 - DNA, 15 bp, Homo sapiens
ataaaatcaccaaca

SEQ ID NO: 1378362 - DNA, 15 bp, Homo sapiens
aataaaatcaccaac

SEQ ID NO: 1378363 - DNA, 15 bp, Homo sapiens
caataaaatcaccaa

SEQ ID NO: 1378364 - DNA, 15 bp, Homo sapiens
acaataaaatcacca

SEQ ID NO: 1378365 - DNA, 15 bp, Homo sapiens
aacaataaaatcacc

SEQ ID NO: 1378366 - DNA, 15 bp, Homo sapiens
aaacaataaaatcac

SEQ ID NO: 1378367 - DNA, 15 bp, Homo sapiens
taaacaataaaatca

SEQ ID NO: 1378368 - DNA, 15 bp, Homo sapiens
ttaaacaataaaatc

SEQ ID NO: 1378369 - DNA, 15 bp, Homo sapiens
tttaaacaataaaat

SEQ ID NO: 1378370 - DNA, 15 bp, Homo sapiens
ttttaaacaataaaa

SEQ ID NO: 1378371 - DNA, 15 bp, Homo sapiens
attttaaacaataaa

SEQ ID NO: 1378372 - DNA, 15 bp, Homo sapiens
cattttaaacaataa

SEQ ID NO: 1378373 - DNA, 15 bp, Homo sapiens
acattttaaacaata

SEQ ID NO: 1378374 - DNA, 15 bp, Homo sapiens
gacattttaaacaat

SEQ ID NO: 1378375 - DNA, 15 bp, Homo sapiens
ggacattttaaacaa

SEQ ID NO: 1378376 - DNA, 15 bp, Homo sapiens
gggacattttaaaca

SEQ ID NO: 1378377 - DNA, 15 bp, Homo sapiens
ggggacattttaaac

SEQ ID NO: 1378378 - DNA, 15 bp, Homo sapiens
gggggacattttaaa

SEQ ID NO: 1378379 - DNA, 15 bp, Homo sapiens
tgggggacattttaa

SEQ ID NO: 1378380 - DNA, 15 bp, Homo sapiens
ttgggggacatttta

SEQ ID NO: 1378381 - DNA, 15 bp, Homo sapiens
cttgggggacatttt

SEQ ID NO: 1378382 - DNA, 15 bp, Homo sapiens
gcttgggggacattt

SEQ ID NO: 1378383 - DNA, 15 bp, Homo sapiens
tgcttgggggacatt

SEQ ID NO: 1378384 - DNA, 15 bp, Homo sapiens
atgcttgggggacat

SEQ ID NO: 1378385 - DNA, 15 bp, Homo sapiens
tatgcttgggggaca

SEQ ID NO: 1378386 - DNA, 15 bp, Homo sapiens
ctatgcttgggggac

SEQ ID NO: 1378387 - DNA, 15 bp, Homo sapiens
actatgcttggggga

SEQ ID NO: 1378388 - DNA, 15 bp, Homo sapiens
tactatgcttggggg

SEQ ID NO: 1378389 - DNA, 15 bp, Homo sapiens
gtactatgcttgggg

SEQ ID NO: 1378390 - DNA, 15 bp, Homo sapiens
agtactatgcttggg

SEQ ID NO: 1378391 - DNA, 15 bp, Homo sapiens
cagtactatgcttgg

SEQ ID NO: 1378392 - DNA, 15 bp, Homo sapiens
tcagtactatgcttg

SEQ ID NO: 1378393 - DNA, 15 bp, Homo sapiens
ttcagtactatgctt

SEQ ID NO: 1378394 - DNA, 15 bp, Homo sapiens
cttcagtactatgct

SEQ ID NO: 1378395 - DNA, 15 bp, Homo sapiens
acttcagtactatgc

SEQ ID NO: 1378396 - DNA, 15 bp, Homo sapiens
cacttcagtactatg

SEQ ID NO: 1378397 - DNA, 15 bp, Homo sapiens
gcacttcagtactat

SEQ ID NO: 1378398 - DNA, 15 bp, Homo sapiens
agcacttcagtacta

SEQ ID NO: 1378399 - DNA, 15 bp, Homo sapiens
cagcacttcagtact

SEQ ID NO: 1378400 - DNA, 15 bp, Homo sapiens
acagcacttcagtac

SEQ ID NO: 1378401 - DNA, 15 bp, Homo sapiens
gacagcacttcagta

SEQ ID NO: 1378402 - DNA, 15 bp, Homo sapiens
agacagcacttcagt

SEQ ID NO: 1378403 - DNA, 15 bp, Homo sapiens
tagacagcacttcag

SEQ ID NO: 1378404 - DNA, 15 bp, Homo sapiens
ctagacagcacttca

SEQ ID NO: 1378405 - DNA, 15 bp, Homo sapiens
actagacagcacttc

SEQ ID NO: 1378406 - DNA, 15 bp, Homo sapiens
cactagacagcactt

SEQ ID NO: 1378407 - DNA, 15 bp, Homo sapiens
gcactagacagcact

SEQ ID NO: 1378408 - DNA, 15 bp, Homo sapiens
agcactagacagcac

SEQ ID NO: 1378409 - DNA, 15 bp, Homo sapiens
gagcactagacagca

SEQ ID NO: 1378410 - DNA, 15 bp, Homo sapiens
ggagcactagacagc

SEQ ID NO: 1378411 - DNA, 15 bp, Homo sapiens
tggagcactagacag

SEQ ID NO: 1378412 - DNA, 15 bp, Homo sapiens
ttggagcactagaca

SEQ ID NO: 1378413 - DNA, 15 bp, Homo sapiens
cttggagcactagac

SEQ ID NO: 1378414 - DNA, 15 bp, Homo sapiens
ccttggagcactaga

SEQ ID NO: 1378415 - DNA, 15 bp, Homo sapiens
accttggagcactag

SEQ ID NO: 1378416 - DNA, 15 bp, Homo sapiens
taccttggagcacta

SEQ ID NO: 1378417 - DNA, 15 bp, Homo sapiens
gtaccttggagcact

SEQ ID NO: 1378418 - DNA, 15 bp, Homo sapiens
cgtaccttggagcac

SEQ ID NO: 1378419 - DNA, 15 bp, Homo sapiens
tcgtaccttggagca

SEQ ID NO: 1378420 - DNA, 15 bp, Homo sapiens
ttcgtaccttggagc

SEQ ID NO: 1378421 - DNA, 15 bp, Homo sapiens
tttcgtaccttggag

SEQ ID NO: 1378422 - DNA, 15 bp, Homo sapiens
ttttcgtaccttgga

SEQ ID NO: 1378423 - DNA, 15 bp, Homo sapiens
cttttcgtaccttgg

SEQ ID NO: 1378424 - DNA, 15 bp, Homo sapiens
ccttttcgtaccttg

SEQ ID NO: 1378425 - DNA, 15 bp, Homo sapiens
gccttttcgtacctt

SEQ ID NO: 1378426 - DNA, 15 bp, Homo sapiens
agccttttcgtacct

SEQ ID NO: 1378427 - DNA, 15 bp, Homo sapiens
cagccttttcgtacc

SEQ ID NO: 1378428 - DNA, 15 bp, Homo sapiens
acagccttttcgtac

SEQ ID NO: 1378429 - DNA, 15 bp, Homo sapiens
cacagccttttcgta

SEQ ID NO: 1378430 - DNA, 15 bp, Homo sapiens
tcacagccttttcgt

SEQ ID NO: 1378431 - DNA, 15 bp, Homo sapiens
atcacagccttttcg

SEQ ID NO: 1378432 - DNA, 15 bp, Homo sapiens
catcacagccttttc

SEQ ID NO: 1378433 - DNA, 15 bp, Homo sapiens
acatcacagcctttt

SEQ ID NO: 1378434 - DNA, 15 bp, Homo sapiens
cacatcacagccttt

SEQ ID NO: 1378435 - DNA, 15 bp, Homo sapiens
gcacatcacagcctt

SEQ ID NO: 1378436 - DNA, 15 bp, Homo sapiens
agcacatcacagcct

SEQ ID NO: 1378437 - DNA, 15 bp, Homo sapiens
aagcacatcacagcc

SEQ ID NO: 1378438 - DNA, 15 bp, Homo sapiens
taagcacatcacagc

SEQ ID NO: 1378439 - DNA, 15 bp, Homo sapiens
ttaagcacatcacag

SEQ ID NO: 1378440 - DNA, 15 bp, Homo sapiens
attaagcacatcaca

SEQ ID NO: 1378441 - DNA, 15 bp, Homo sapiens
cattaagcacatcac

SEQ ID NO: 1378442 - DNA, 15 bp, Homo sapiens
ccattaagcacatca

SEQ ID NO: 1378443 - DNA, 15 bp, Homo sapiens
tccattaagcacatc

SEQ ID NO: 1378444 - DNA, 15 bp, Homo sapiens
ctccattaagcacat

SEQ ID NO: 1378445 - DNA, 15 bp, Homo sapiens
tctccattaagcaca

SEQ ID NO: 1378446 - DNA, 15 bp, Homo sapiens
ttctccattaagcac

SEQ ID NO: 1378447 - DNA, 15 bp, Homo sapiens
tttctccattaagca

SEQ ID NO: 1378448 - DNA, 15 bp, Homo sapiens
ttttctccattaagc

SEQ ID NO: 1378449 - DNA, 15 bp, Homo sapiens
gttttctccattaag

SEQ ID NO: 1378450 - DNA, 15 bp, Homo sapiens
tgttttctccattaa

SEQ ID NO: 1378451 - DNA, 15 bp, Homo sapiens
gtgttttctccatta

SEQ ID NO: 1378452 - DNA, 15 bp, Homo sapiens
tgtgttttctccatt

SEQ ID NO: 1378453 - DNA, 15 bp, Homo sapiens
atgtgttttctccat

SEQ ID NO: 1378454 - DNA, 15 bp, Homo sapiens
catgtgttttctcca

SEQ ID NO: 1378455 - DNA, 15 bp, Homo sapiens
acatgtgttttctcc

SEQ ID NO: 1378456 - DNA, 15 bp, Homo sapiens
cacatgtgttttctc

SEQ ID NO: 1378457 - DNA, 15 bp, Homo sapiens
acacatgtgttttct

SEQ ID NO: 1378458 - DNA, 15 bp, Homo sapiens
aacacatgtgttttc

SEQ ID NO: 1378459 - DNA, 15 bp, Homo sapiens
taacacatgtgtttt

SEQ ID NO: 1378460 - DNA, 15 bp, Homo sapiens
ttaacacatgtgttt

SEQ ID NO: 1378461 - DNA, 15 bp, Homo sapiens
tttaacacatgtgtt

SEQ ID NO: 1378462 - DNA, 15 bp, Homo sapiens
atttaacacatgtgt

SEQ ID NO: 1378463 - DNA, 15 bp, Homo sapiens
tatttaacacatgtg

SEQ ID NO: 1378464 - DNA, 15 bp, Homo sapiens
ttatttaacacatgt

SEQ ID NO: 1378465 - DNA, 15 bp, Homo sapiens
cttatttaacacatg

SEQ ID NO: 1378466 - DNA, 15 bp, Homo sapiens
acttatttaacacat

SEQ ID NO: 1378467 - DNA, 15 bp, Homo sapiens
aacttatttaacaca

SEQ ID NO: 1378468 - DNA, 15 bp, Homo sapiens
aaacttatttaacac

SEQ ID NO: 1378469 - DNA, 15 bp, Homo sapiens
gaaacttatttaaca

SEQ ID NO: 1378470 - DNA, 15 bp, Homo sapiens
tgaaacttatttaac

SEQ ID NO: 1378471 - DNA, 15 bp, Homo sapiens
atgaaacttatttaa

SEQ ID NO: 1378472 - DNA, 15 bp, Homo sapiens
aatgaaacttattta

SEQ ID NO: 1378473 - DNA, 15 bp, Homo sapiens
gaatgaaacttattt

SEQ ID NO: 1378474 - DNA, 15 bp, Homo sapiens
tgaatgaaacttatt

SEQ ID NO: 1378475 - DNA, 15 bp, Homo sapiens
ttgaatgaaacttat

SEQ ID NO: 1378476 - DNA, 15 bp, Homo sapiens
cttgaatgaaactta

SEQ ID NO: 1378477 - DNA, 15 bp, Homo sapiens
gcttgaatgaaactt

SEQ ID NO: 1378478 - DNA, 15 bp, Homo sapiens
tgcttgaatgaaact

SEQ ID NO: 1378479 - DNA, 15 bp, Homo sapiens
atgcttgaatgaaac

SEQ ID NO: 1378480 - DNA, 15 bp, Homo sapiens
catgcttgaatgaaa

SEQ ID NO: 1378481 - DNA, 15 bp, Homo sapiens
tcatgcttgaatgaa

SEQ ID NO: 1378482 - DNA, 15 bp, Homo sapiens
ctcatgcttgaatga

SEQ ID NO: 1378483 - DNA, 15 bp, Homo sapiens
actcatgcttgaatg

SEQ ID NO: 1378484 - DNA, 15 bp, Homo sapiens
aactcatgcttgaat

SEQ ID NO: 1378485 - DNA, 15 bp, Homo sapiens
taactcatgcttgaa

SEQ ID NO: 1378486 - DNA, 15 bp, Homo sapiens
ataactcatgcttga

SEQ ID NO: 1378487 - DNA, 15 bp, Homo sapiens
tataactcatgcttg

SEQ ID NO: 1378488 - DNA, 15 bp, Homo sapiens
ttataactcatgctt

SEQ ID NO: 1378489 - DNA, 15 bp, Homo sapiens
attataactcatgct

SEQ ID NO: 1378490 - DNA, 15 bp, Homo sapiens
cattataactcatgc

SEQ ID NO: 1378491 - DNA, 15 bp, Homo sapiens
tcattataactcatg

SEQ ID NO: 1378492 - DNA, 15 bp, Homo sapiens
atcattataactcat

SEQ ID NO: 1378493 - DNA, 15 bp, Homo sapiens
catcattataactca

SEQ ID NO: 1378494 - DNA, 15 bp, Homo sapiens
acatcattataactc

SEQ ID NO: 1378495 - DNA, 15 bp, Homo sapiens
aacatcattataact

SEQ ID NO: 1378496 - DNA, 15 bp, Homo sapiens
caacatcattataac

SEQ ID NO: 1378497 - DNA, 15 bp, Homo sapiens
gcaacatcattataa

SEQ ID NO: 1378498 - DNA, 15 bp, Homo sapiens
ggcaacatcattata

SEQ ID NO: 1378499 - DNA, 15 bp, Homo sapiens
gggcaacatcattat

SEQ ID NO: 1378500 - DNA, 15 bp, Homo sapiens
agggcaacatcatta

SEQ ID NO: 1378501 - DNA, 15 bp, Homo sapiens
cagggcaacatcatt

SEQ ID NO: 1378502 - DNA, 15 bp, Homo sapiens
tcagggcaacatcat

SEQ ID NO: 1378503 - DNA, 15 bp, Homo sapiens
ctcagggcaacatca

SEQ ID NO: 1378504 - DNA, 15 bp, Homo sapiens
actcagggcaacatc

SEQ ID NO: 1378505 - DNA, 15 bp, Homo sapiens
cactcagggcaacat

SEQ ID NO: 1378506 - DNA, 15 bp, Homo sapiens
gcactcagggcaaca

SEQ ID NO: 1378507 - DNA, 15 bp, Homo sapiens
tgcactcagggcaac

SEQ ID NO: 1378508 - DNA, 15 bp, Homo sapiens
ttgcactcagggcaa

SEQ ID NO: 1378509 - DNA, 15 bp, Homo sapiens
attgcactcagggca

SEQ ID NO: 1378510 - DNA, 15 bp, Homo sapiens
cattgcactcagggc

SEQ ID NO: 1378511 - DNA, 15 bp, Homo sapiens
acattgcactcaggg

SEQ ID NO: 1378512 - DNA, 15 bp, Homo sapiens
aacattgcactcagg

SEQ ID NO: 1378513 - DNA, 15 bp, Homo sapiens
taacattgcactcag

SEQ ID NO: 1378514 - DNA, 15 bp, Homo sapiens
ttaacattgcactca

SEQ ID NO: 1378515 - DNA, 15 bp, Homo sapiens
attaacattgcactc

SEQ ID NO: 1378516 - DNA, 15 bp, Homo sapiens
cattaacattgcact

SEQ ID NO: 1378517 - DNA, 15 bp, Homo sapiens
tcattaacattgcac

SEQ ID NO: 1378518 - DNA, 15 bp, Homo sapiens
ttcattaacattgca

SEQ ID NO: 1378519 - DNA, 15 bp, Homo sapiens
attcattaacattgc

SEQ ID NO: 1378520 - DNA, 15 bp, Homo sapiens
gattcattaacattg

SEQ ID NO: 1378521 - DNA, 15 bp, Homo sapiens
tgattcattaacatt

SEQ ID NO: 1378522 - DNA, 15 bp, Homo sapiens
ttgattcattaacat

SEQ ID NO: 1378523 - DNA, 15 bp, Homo sapiens
attgattcattaaca

SEQ ID NO: 1378524 - DNA, 15 bp, Homo sapiens
tattgattcattaac

SEQ ID NO: 1378525 - DNA, 15 bp, Homo sapiens
ttattgattcattaa

SEQ ID NO: 1378526 - DNA, 15 bp, Homo sapiens
attattgattcatta

SEQ ID NO: 1378527 - DNA, 15 bp, Homo sapiens
cattattgattcatt

SEQ ID NO: 1378528 - DNA, 15 bp, Homo sapiens
acattattgattcat

SEQ ID NO: 1378529 - DNA, 15 bp, Homo sapiens
tacattattgattca

SEQ ID NO: 1378530 - DNA, 15 bp, Homo sapiens
atacattattgattc

SEQ ID NO: 1378531 - DNA, 15 bp, Homo sapiens
tatacattattgatt

SEQ ID NO: 1378532 - DNA, 15 bp, Homo sapiens
atatacattattgat

SEQ ID NO: 1378533 - DNA, 15 bp, Homo sapiens
aatatacattattga

SEQ ID NO: 1378534 - DNA, 15 bp, Homo sapiens
taatatacattattg

SEQ ID NO: 1378535 - DNA, 15 bp, Homo sapiens
ataatatacattatt

SEQ ID NO: 1378536 - DNA, 15 bp, Homo sapiens
tataatatacattat

SEQ ID NO: 1378537 - DNA, 15 bp, Homo sapiens
atataatatacatta

SEQ ID NO: 1378538 - DNA, 15 bp, Homo sapiens
tatataatatacatt

SEQ ID NO: 1378539 - DNA, 15 bp, Homo sapiens
ttatataatatacat

SEQ ID NO: 1378540 - DNA, 15 bp, Homo sapiens
tttatataatataca

SEQ ID NO: 1378541 - DNA, 15 bp, Homo sapiens
ctttatataatatac

SEQ ID NO: 1378542 - DNA, 15 bp, Homo sapiens
actttatataatata

SEQ ID NO: 1378543 - DNA, 15 bp, Homo sapiens
cactttatataatat

SEQ ID NO: 1378544 - DNA, 15 bp, Homo sapiens
gcactttatataata

SEQ ID NO: 1378545 - DNA, 15 bp, Homo sapiens
tgcactttatataat

SEQ ID NO: 1378546 - DNA, 15 bp, Homo sapiens
atgcactttatataa

SEQ ID NO: 1378547 - DNA, 15 bp, Homo sapiens
aatgcactttatata

SEQ ID NO: 1378548 - DNA, 15 bp, Homo sapiens
aaatgcactttatat

SEQ ID NO: 1378549 - DNA, 15 bp, Homo sapiens
taaatgcactttata

SEQ ID NO: 1378550 - DNA, 15 bp, Homo sapiens
ttaaatgcactttat

SEQ ID NO: 1378551 - DNA, 15 bp, Homo sapiens
tttaaatgcacttta

SEQ ID NO: 1378552 - DNA, 15 bp, Homo sapiens
gtttaaatgcacttt

SEQ ID NO: 1378553 - DNA, 15 bp, Homo sapiens
tgtttaaatgcactt

SEQ ID NO: 1378554 - DNA, 15 bp, Homo sapiens
ttgtttaaatgcact

SEQ ID NO: 1378555 - DNA, 15 bp, Homo sapiens
tttgtttaaatgcac

SEQ ID NO: 1378556 - DNA, 15 bp, Homo sapiens
ttttgtttaaatgca

SEQ ID NO: 1378557 - DNA, 15 bp, Homo sapiens
tttttgtttaaatgc

SEQ ID NO: 1378558 - DNA, 15 bp, Homo sapiens
atttttgtttaaatg

SEQ ID NO: 1378559 - DNA, 15 bp, Homo sapiens
tatttttgtttaaat

SEQ ID NO: 1378560 - DNA, 15 bp, Homo sapiens
atatttttgtttaaa

SEQ ID NO: 1378561 - DNA, 15 bp, Homo sapiens
tatatttttgtttaa

SEQ ID NO: 1378562 - DNA, 15 bp, Homo sapiens
gtatatttttgttta

SEQ ID NO: 1378563 - DNA, 15 bp, Homo sapiens
tgtatatttttgttt

SEQ ID NO: 1378564 - DNA, 15 bp, Homo sapiens
atgtatatttttgtt

SEQ ID NO: 1378565 - DNA, 15 bp, Homo sapiens
catgtatatttttgt

SEQ ID NO: 1378566 - DNA, 15 bp, Homo sapiens
tcatgtatatttttg

SEQ ID NO: 1378567 - DNA, 15 bp, Homo sapiens
ttcatgtatattttt

SEQ ID NO: 1378568 - DNA, 15 bp, Homo sapiens
tttcatgtatatttt

SEQ ID NO: 1378569 - DNA, 15 bp, Homo sapiens
gtttcatgtatattt

SEQ ID NO: 1378570 - DNA, 15 bp, Homo sapiens
tgtttcatgtatatt

SEQ ID NO: 1378571 - DNA, 15 bp, Homo sapiens
ttgtttcatgtatat

SEQ ID NO: 1378572 - DNA, 15 bp, Homo sapiens
tttgtttcatgtata

SEQ ID NO: 1378573 - DNA, 15 bp, Homo sapiens
ctttgtttcatgtat

SEQ ID NO: 1378574 - DNA, 15 bp, Homo sapiens
actttgtttcatgta

SEQ ID NO: 1378575 - DNA, 15 bp, Homo sapiens
aactttgtttcatgt

SEQ ID NO: 1378576 - DNA, 15 bp, Homo sapiens
caactttgtttcatg

SEQ ID NO: 1378577 - DNA, 15 bp, Homo sapiens
acaactttgtttcat

SEQ ID NO: 1378578 - DNA, 15 bp, Homo sapiens
cacaactttgtttca

SEQ ID NO: 1378579 - DNA, 15 bp, Homo sapiens
acacaactttgtttc

SEQ ID NO: 1378580 - DNA, 15 bp, Homo sapiens
tacacaactttgttt

SEQ ID NO: 1378581 - DNA, 15 bp, Homo sapiens
atacacaactttgtt

SEQ ID NO: 1378582 - DNA, 15 bp, Homo sapiens
aatacacaactttgt

SEQ ID NO: 1378583 - DNA, 15 bp, Homo sapiens
caatacacaactttg

SEQ ID NO: 1378584 - DNA, 15 bp, Homo sapiens
tcaatacacaacttt

SEQ ID NO: 1378585 - DNA, 15 bp, Homo sapiens
atcaatacacaactt

SEQ ID NO: 1378586 - DNA, 15 bp, Homo sapiens
gatcaatacacaact

SEQ ID NO: 1378587 - DNA, 15 bp, Homo sapiens
agatcaatacacaac

SEQ ID NO: 1378588 - DNA, 15 bp, Homo sapiens
tagatcaatacacaa

SEQ ID NO: 1378589 - DNA, 15 bp, Homo sapiens
atagatcaatacaca

SEQ ID NO: 1378590 - DNA, 15 bp, Homo sapiens
aatagatcaatacac

SEQ ID NO: 1378591 - DNA, 15 bp, Homo sapiens
caatagatcaataca

SEQ ID NO: 1378592 - DNA, 15 bp, Homo sapiens
tcaatagatcaatac

SEQ ID NO: 1378593 - DNA, 15 bp, Homo sapiens
atcaatagatcaata

SEQ ID NO: 1378594 - DNA, 15 bp, Homo sapiens
catcaatagatcaat

SEQ ID NO: 1378595 - DNA, 15 bp, Homo sapiens
tcatcaatagatcaa

SEQ ID NO: 1378596 - DNA, 15 bp, Homo sapiens
ttcatcaatagatca

SEQ ID NO: 1378597 - DNA, 15 bp, Homo sapiens
tttcatcaatagatc

SEQ ID NO: 1378598 - DNA, 15 bp, Homo sapiens
ttttcatcaatagat

SEQ ID NO: 1378599 - DNA, 15 bp, Homo sapiens
attttcatcaataga

SEQ ID NO: 1378600 - DNA, 15 bp, Homo sapiens
cattttcatcaatag

SEQ ID NO: 1378601 - DNA, 15 bp, Homo sapiens
acattttcatcaata

SEQ ID NO: 1378602 - DNA, 15 bp, Homo sapiens
cacattttcatcaat

SEQ ID NO: 1378603 - DNA, 15 bp, Homo sapiens
tcacattttcatcaa

SEQ ID NO: 1378604 - DNA, 15 bp, Homo sapiens
gtcacattttcatca

SEQ ID NO: 1378605 - DNA, 15 bp, Homo sapiens
ggtcacattttcatc

SEQ ID NO: 1378606 - DNA, 15 bp, Homo sapiens
tggtcacattttcat

SEQ ID NO: 1378607 - DNA, 15 bp, Homo sapiens
ctggtcacattttca

SEQ ID NO: 1378608 - DNA, 15 bp, Homo sapiens
tctggtcacattttc

SEQ ID NO: 1378609 - DNA, 15 bp, Homo sapiens
ctctggtcacatttt

SEQ ID NO: 1378610 - DNA, 15 bp, Homo sapiens
cctctggtcacattt

SEQ ID NO: 1378611 - DNA, 15 bp, Homo sapiens
gcctctggtcacatt

SEQ ID NO: 1378612 - DNA, 15 bp, Homo sapiens
agcctctggtcacat

SEQ ID NO: 1378613 - DNA, 15 bp, Homo sapiens
gagcctctggtcaca

SEQ ID NO: 1378614 - DNA, 15 bp, Homo sapiens
tgagcctctggtcac

SEQ ID NO: 1378615 - DNA, 15 bp, Homo sapiens
gtgagcctctggtca

SEQ ID NO: 1378616 - DNA, 15 bp, Homo sapiens
tgtgagcctctggtc

SEQ ID NO: 1378617 - DNA, 15 bp, Homo sapiens
ctgtgagcctctggt

SEQ ID NO: 1378618 - DNA, 15 bp, Homo sapiens
cctgtgagcctctgg

SEQ ID NO: 1378619 - DNA, 15 bp, Homo sapiens
tcctgtgagcctctg

SEQ ID NO: 1378620 - DNA, 15 bp, Homo sapiens
ttcctgtgagcctct

SEQ ID NO: 1378621 - DNA, 15 bp, Homo sapiens
gttcctgtgagcctc

SEQ ID NO: 1378622 - DNA, 15 bp, Homo sapiens
ggttcctgtgagcct

SEQ ID NO: 1378623 - DNA, 15 bp, Homo sapiens
aggttcctgtgagcc

SEQ ID NO: 1378624 - DNA, 15 bp, Homo sapiens
taggttcctgtgagc

SEQ ID NO: 1378625 - DNA, 15 bp, Homo sapiens
ttaggttcctgtgag

SEQ ID NO: 1378626 - DNA, 15 bp, Homo sapiens
gttaggttcctgtga

SEQ ID NO: 1378627 - DNA, 15 bp, Homo sapiens
agttaggttcctgtg

SEQ ID NO: 1378628 - DNA, 15 bp, Homo sapiens
gagttaggttcctgt

SEQ ID NO: 1378629 - DNA, 15 bp, Homo sapiens
agagttaggttcctg

SEQ ID NO: 1378630 - DNA, 15 bp, Homo sapiens
cagagttaggttcct

SEQ ID NO: 1378631 - DNA, 15 bp, Homo sapiens
acagagttaggttcc

SEQ ID NO: 1378632 - DNA, 15 bp, Homo sapiens
tacagagttaggttc

SEQ ID NO: 1378633 - DNA, 15 bp, Homo sapiens
atacagagttaggtt

SEQ ID NO: 1378634 - DNA, 15 bp, Homo sapiens
aatacagagttaggt

SEQ ID NO: 1378635 - DNA, 15 bp, Homo sapiens
aaatacagagttagg

SEQ ID NO: 1378636 - DNA, 15 bp, Homo sapiens
gaaatacagagttag

SEQ ID NO: 1378637 - DNA, 15 bp, Homo sapiens
ggaaatacagagtta

SEQ ID NO: 1378638 - DNA, 15 bp, Homo sapiens
aggaaatacagagtt

SEQ ID NO: 1378639 - DNA, 15 bp, Homo sapiens
gaggaaatacagagt

SEQ ID NO: 1378640 - DNA, 15 bp, Homo sapiens
ggaggaaatacagag

SEQ ID NO: 1378641 - DNA, 15 bp, Homo sapiens
tggaggaaatacaga

SEQ ID NO: 1378642 - DNA, 15 bp, Homo sapiens
ctggaggaaatacag

SEQ ID NO: 1378643 - DNA, 15 bp, Homo sapiens
cctggaggaaataca

SEQ ID NO: 1378644 - DNA, 15 bp, Homo sapiens
tcctggaggaaatac

SEQ ID NO: 1378645 - DNA, 15 bp, Homo sapiens
ctcctggaggaaata

SEQ ID NO: 1378646 - DNA, 15 bp, Homo sapiens
actcctggaggaaat

SEQ ID NO: 1378647 - DNA, 15 bp, Homo sapiens
gactcctggaggaaa

SEQ ID NO: 1378648 - DNA, 15 bp, Homo sapiens
tgactcctggaggaa

SEQ ID NO: 1378649 - DNA, 15 bp, Homo sapiens
atgactcctggagga

SEQ ID NO: 1378650 - DNA, 15 bp, Homo sapiens
catgactcctggagg

SEQ ID NO: 1378651 - DNA, 15 bp, Homo sapiens
ccatgactcctggag

SEQ ID NO: 1378652 - DNA, 15 bp, Homo sapiens
accatgactcctgga

SEQ ID NO: 1378653 - DNA, 15 bp, Homo sapiens
aaccatgactcctgg

SEQ ID NO: 1378654 - DNA, 15 bp, Homo sapiens
aaaccatgactcctg

SEQ ID NO: 1378655 - DNA, 15 bp, Homo sapiens
taaaccatgactcct

SEQ ID NO: 1378656 - DNA, 15 bp, Homo sapiens
ctaaaccatgactcc

SEQ ID NO: 1378657 - DNA, 15 bp, Homo sapiens
actaaaccatgactc

SEQ ID NO: 1378658 - DNA, 15 bp, Homo sapiens
tactaaaccatgact

SEQ ID NO: 1378659 - DNA, 15 bp, Homo sapiens
gtactaaaccatgac

SEQ ID NO: 1378660 - DNA, 15 bp, Homo sapiens
agtactaaaccatga

SEQ ID NO: 1378661 - DNA, 15 bp, Homo sapiens
gagtactaaaccatg

SEQ ID NO: 1378662 - DNA, 15 bp, Homo sapiens
cgagtactaaaccat

SEQ ID NO: 1378663 - DNA, 15 bp, Homo sapiens
gcgagtactaaacca

SEQ ID NO: 1378664 - DNA, 15 bp, Homo sapiens
agcgagtactaaacc

SEQ ID NO: 1378665 - DNA, 15 bp, Homo sapiens
cagcgagtactaaac

SEQ ID NO: 1378666 - DNA, 15 bp, Homo sapiens
ccagcgagtactaaa

SEQ ID NO: 1378667 - DNA, 15 bp, Homo sapiens
gccagcgagtactaa

SEQ ID NO: 1378668 - DNA, 15 bp, Homo sapiens
agccagcgagtacta

SEQ ID NO: 1378669 - DNA, 15 bp, Homo sapiens
gagccagcgagtact

SEQ ID NO: 1378670 - DNA, 15 bp, Homo sapiens
tgagccagcgagtac

SEQ ID NO: 1378671 - DNA, 15 bp, Homo sapiens
ctgagccagcgagta

SEQ ID NO: 1378672 - DNA, 15 bp, Homo sapiens
actgagccagcgagt

SEQ ID NO: 1378673 - DNA, 15 bp, Homo sapiens
cactgagccagcgag

SEQ ID NO: 1378674 - DNA, 15 bp, Homo sapiens
acactgagccagcga

SEQ ID NO: 1378675 - DNA, 15 bp, Homo sapiens
aacactgagccagcg

SEQ ID NO: 1378676 - DNA, 15 bp, Homo sapiens
gaacactgagccagc

SEQ ID NO: 1378677 - DNA, 15 bp, Homo sapiens
tgaacactgagccag

SEQ ID NO: 1378678 - DNA, 15 bp, Homo sapiens
gtgaacactgagcca

SEQ ID NO: 1378679 - DNA, 15 bp, Homo sapiens
tgtgaacactgagcc

SEQ ID NO: 1378680 - DNA, 15 bp, Homo sapiens
ctgtgaacactgagc

SEQ ID NO: 1378681 - DNA, 15 bp, Homo sapiens
actgtgaacactgag

SEQ ID NO: 1378682 - DNA, 15 bp, Homo sapiens
cactgtgaacactga

SEQ ID NO: 1378683 - DNA, 15 bp, Homo sapiens
ccactgtgaacactg

SEQ ID NO: 1378684 - DNA, 15 bp, Homo sapiens
tccactgtgaacact

SEQ ID NO: 1378685 - DNA, 15 bp, Homo sapiens
atccactgtgaacac

SEQ ID NO: 1378686 - DNA, 15 bp, Homo sapiens
aatccactgtgaaca

SEQ ID NO: 1378687 - DNA, 15 bp, Homo sapiens
aaatccactgtgaac

SEQ ID NO: 1378688 - DNA, 15 bp, Homo sapiens
taaatccactgtgaa

SEQ ID NO: 1378689 - DNA, 15 bp, Homo sapiens
ataaatccactgtga

SEQ ID NO: 1378690 - DNA, 15 bp, Homo sapiens
cataaatccactgtg

SEQ ID NO: 1378691 - DNA, 15 bp, Homo sapiens
ccataaatccactgt

SEQ ID NO: 1378692 - DNA, 15 bp, Homo sapiens
tccataaatccactg

SEQ ID NO: 1378693 - DNA, 15 bp, Homo sapiens
ttccataaatccact

SEQ ID NO: 1378694 - DNA, 15 bp, Homo sapiens
gttccataaatccac

SEQ ID NO: 1378695 - DNA, 15 bp, Homo sapiens
cgttccataaatcca

SEQ ID NO: 1378696 - DNA, 15 bp, Homo sapiens
acgttccataaatcc

SEQ ID NO: 1378697 - DNA, 15 bp, Homo sapiens
tacgttccataaatc

SEQ ID NO: 1378698 - DNA, 15 bp, Homo sapiens
ttacgttccataaat

SEQ ID NO: 1378699 - DNA, 15 bp, Homo sapiens
gttacgttccataaa

SEQ ID NO: 1378700 - DNA, 15 bp, Homo sapiens
agttacgttccataa

SEQ ID NO: 1378701 - DNA, 15 bp, Homo sapiens
tagttacgttccata

SEQ ID NO: 1378702 - DNA, 15 bp, Homo sapiens
gtagttacgttccat

SEQ ID NO: 1378703 - DNA, 15 bp, Homo sapiens
ggtagttacgttcca

SEQ ID NO: 1378704 - DNA, 15 bp, Homo sapiens
tggtagttacgttcc

SEQ ID NO: 1378705 - DNA, 15 bp, Homo sapiens
gtggtagttacgttc

SEQ ID NO: 1378706 - DNA, 15 bp, Homo sapiens
tgtggtagttacgtt

SEQ ID NO: 1378707 - DNA, 15 bp, Homo sapiens
ttgtggtagttacgt

SEQ ID NO: 1378708 - DNA, 15 bp, Homo sapiens
tttgtggtagttacg

SEQ ID NO: 1378709 - DNA, 15 bp, Homo sapiens
atttgtggtagttac

SEQ ID NO: 1378710 - DNA, 15 bp, Homo sapiens
tatttgtggtagtta

SEQ ID NO: 1378711 - DNA, 15 bp, Homo sapiens
ttatttgtggtagtt

SEQ ID NO: 1378712 - DNA, 15 bp, Homo sapiens
attatttgtggtagt

SEQ ID NO: 1378713 - DNA, 15 bp, Homo sapiens
cattatttgtggtag

SEQ ID NO: 1378714 - DNA, 15 bp, Homo sapiens
tcattatttgtggta

SEQ ID NO: 1378715 - DNA, 15 bp, Homo sapiens
ctcattatttgtggt

SEQ ID NO: 1378716 - DNA, 15 bp, Homo sapiens
tctcattatttgtgg

SEQ ID NO: 1378717 - DNA, 15 bp, Homo sapiens
gtctcattatttgtg

SEQ ID NO: 1378718 - DNA, 15 bp, Homo sapiens
cgtctcattatttgt

SEQ ID NO: 1378719 - DNA, 15 bp, Homo sapiens
tcgtctcattatttg

SEQ ID NO: 1378720 - DNA, 15 bp, Homo sapiens
ctcgtctcattattt

SEQ ID NO: 1378721 - DNA, 15 bp, Homo sapiens
cctcgtctcattatt

SEQ ID NO: 1378722 - DNA, 15 bp, Homo sapiens
gcctcgtctcattat

SEQ ID NO: 1378723 - DNA, 15 bp, Homo sapiens
agcctcgtctcatta

SEQ ID NO: 1378724 - DNA, 15 bp, Homo sapiens
tagcctcgtctcatt

SEQ ID NO: 1378725 - DNA, 15 bp, Homo sapiens
atagcctcgtctcat

SEQ ID NO: 1378726 - DNA, 15 bp, Homo sapiens
gatagcctcgtctca

SEQ ID NO: 1378727 - DNA, 15 bp, Homo sapiens
agatagcctcgtctc

SEQ ID NO: 1378728 - DNA, 15 bp, Homo sapiens
aagatagcctcgtct

SEQ ID NO: 1378729 - DNA, 15 bp, Homo sapiens
taagatagcctcgtc

SEQ ID NO: 1378730 - DNA, 15 bp, Homo sapiens
gtaagatagcctcgt

SEQ ID NO: 1378731 - DNA, 15 bp, Homo sapiens
tgtaagatagcctcg

SEQ ID NO: 1378732 - DNA, 15 bp, Homo sapiens
ttgtaagatagcctc

SEQ ID NO: 1378733 - DNA, 15 bp, Homo sapiens
tttgtaagatagcct

SEQ ID NO: 1378734 - DNA, 15 bp, Homo sapiens
atttgtaagatagcc

SEQ ID NO: 1378735 - DNA, 15 bp, Homo sapiens
catttgtaagatagc

SEQ ID NO: 1378736 - DNA, 15 bp, Homo sapiens
acatttgtaagatag

SEQ ID NO: 1378737 - DNA, 15 bp, Homo sapiens
tacatttgtaagata

SEQ ID NO: 1378738 - DNA, 15 bp, Homo sapiens
ttacatttgtaagat

SEQ ID NO: 1378739 - DNA, 15 bp, Homo sapiens
attacatttgtaaga

SEQ ID NO: 1378740 - DNA, 15 bp, Homo sapiens
gattacatttgtaag

SEQ ID NO: 1378741 - DNA, 15 bp, Homo sapiens
tgattacatttgtaa

SEQ ID NO: 1378742 - DNA, 15 bp, Homo sapiens
gtgattacatttgta

SEQ ID NO: 1378743 - DNA, 15 bp, Homo sapiens
tgtgattacatttgt

SEQ ID NO: 1378744 - DNA, 15 bp, Homo sapiens
atgtgattacatttg

SEQ ID NO: 1378745 - DNA, 15 bp, Homo sapiens
catgtgattacattt

SEQ ID NO: 1378746 - DNA, 15 bp, Homo sapiens
tcatgtgattacatt

SEQ ID NO: 1378747 - DNA, 15 bp, Homo sapiens
gtcatgtgattacat

SEQ ID NO: 1378748 - DNA, 15 bp, Homo sapiens
agtcatgtgattaca

SEQ ID NO: 1378749 - DNA, 15 bp, Homo sapiens
gagtcatgtgattac

SEQ ID NO: 1378750 - DNA, 15 bp, Homo sapiens
agagtcatgtgatta

SEQ ID NO: 1378751 - DNA, 15 bp, Homo sapiens
cagagtcatgtgatt

SEQ ID NO: 1378752 - DNA, 15 bp, Homo sapiens
ccagagtcatgtgat

SEQ ID NO: 1378753 - DNA, 15 bp, Homo sapiens
cccagagtcatgtga

SEQ ID NO: 1378754 - DNA, 15 bp, Homo sapiens
tcccagagtcatgtg

SEQ ID NO: 1378755 - DNA, 15 bp, Homo sapiens
atcccagagtcatgt

SEQ ID NO: 1378756 - DNA, 15 bp, Homo sapiens
aatcccagagtcatg

SEQ ID NO: 1378757 - DNA, 15 bp, Homo sapiens
gaatcccagagtcat

SEQ ID NO: 1378758 - DNA, 15 bp, Homo sapiens
tgaatcccagagtca

SEQ ID NO: 1378759 - DNA, 15 bp, Homo sapiens
gtgaatcccagagtc

SEQ ID NO: 1378760 - DNA, 15 bp, Homo sapiens
agtgaatcccagagt

SEQ ID NO: 1378761 - DNA, 15 bp, Homo sapiens
aagtgaatcccagag

SEQ ID NO: 1378762 - DNA, 15 bp, Homo sapiens
aaagtgaatcccaga

SEQ ID NO: 1378763 - DNA, 15 bp, Homo sapiens
taaagtgaatcccag

SEQ ID NO: 1378764 - DNA, 15 bp, Homo sapiens
ttaaagtgaatccca

SEQ ID NO: 1378765 - DNA, 15 bp, Homo sapiens
tttaaagtgaatccc

SEQ ID NO: 1378766 - DNA, 15 bp, Homo sapiens
ttttaaagtgaatcc

SEQ ID NO: 1378767 - DNA, 15 bp, Homo sapiens
attttaaagtgaatc

SEQ ID NO: 1378768 - DNA, 15 bp, Homo sapiens
tattttaaagtgaat

SEQ ID NO: 1378769 - DNA, 15 bp, Homo sapiens
ttattttaaagtgaa

SEQ ID NO: 1378770 - DNA, 15 bp, Homo sapiens
attattttaaagtga

SEQ ID NO: 1378771 - DNA, 15 bp, Homo sapiens
gattattttaaagtg

SEQ ID NO: 1378772 - DNA, 15 bp, Homo sapiens
agattattttaaagt

SEQ ID NO: 1378773 - DNA, 15 bp, Homo sapiens
cagattattttaaag

SEQ ID NO: 1378774 - DNA, 15 bp, Homo sapiens
ccagattattttaaa

SEQ ID NO: 1378775 - DNA, 15 bp, Homo sapiens
cccagattattttaa

SEQ ID NO: 1378776 - DNA, 15 bp, Homo sapiens
tcccagattatttta

SEQ ID NO: 1378777 - DNA, 15 bp, Homo sapiens
atcccagattatttt

SEQ ID NO: 1378778 - DNA, 15 bp, Homo sapiens
catcccagattattt

SEQ ID NO: 1378779 - DNA, 15 bp, Homo sapiens
tcatcccagattatt

SEQ ID NO: 1378780 - DNA, 15 bp, Homo sapiens
ctcatcccagattat

SEQ ID NO: 1378781 - DNA, 15 bp, Homo sapiens
cctcatcccagatta

SEQ ID NO: 1378782 - DNA, 15 bp, Homo sapiens
tcctcatcccagatt

SEQ ID NO: 1378783 - DNA, 15 bp, Homo sapiens
ctcctcatcccagat

SEQ ID NO: 1378784 - DNA, 15 bp, Homo sapiens
gctcctcatcccaga

SEQ ID NO: 1378785 - DNA, 15 bp, Homo sapiens
tgctcctcatcccag

SEQ ID NO: 1378786 - DNA, 15 bp, Homo sapiens
ctgctcctcatccca

SEQ ID NO: 1378787 - DNA, 15 bp, Homo sapiens
actgctcctcatccc

SEQ ID NO: 1378788 - DNA, 15 bp, Homo sapiens
cactgctcctcatcc

SEQ ID NO: 1378789 - DNA, 15 bp, Homo sapiens
tcactgctcctcatc

SEQ ID NO: 1378790 - DNA, 15 bp, Homo sapiens
atcactgctcctcat

SEQ ID NO: 1378791 - DNA, 15 bp, Homo sapiens
catcactgctcctca

SEQ ID NO: 1378792 - DNA, 15 bp, Homo sapiens
ccatcactgctcctc

SEQ ID NO: 1378793 - DNA, 15 bp, Homo sapiens
cccatcactgctcct

SEQ ID NO: 1378794 - DNA, 15 bp, Homo sapiens
ccccatcactgctcc

SEQ ID NO: 1378795 - DNA, 15 bp, Homo sapiens
cccccatcactgctc

SEQ ID NO: 1378796 - DNA, 15 bp, Homo sapiens
atcccccatcactgc

SEQ ID NO: 1378797 - DNA, 15 bp, Homo sapiens
tatcccccatcactg

SEQ ID NO: 1378798 - DNA, 15 bp, Homo sapiens
ttatcccccatcact

SEQ ID NO: 1378799 - DNA, 15 bp, Homo sapiens
tttatcccccatcac

SEQ ID NO: 1378800 - DNA, 15 bp, Homo sapiens
gtttatcccccatca

SEQ ID NO: 1378801 - DNA, 15 bp, Homo sapiens
tgtttatcccccatc

SEQ ID NO: 1378802 - DNA, 15 bp, Homo sapiens
ctgtttatcccccat

SEQ ID NO: 1378803 - DNA, 15 bp, Homo sapiens
gctgtttatccccca

SEQ ID NO: 1378804 - DNA, 15 bp, Homo sapiens
tgctgtttatccccc

SEQ ID NO: 1378805 - DNA, 15 bp, Homo sapiens
ttgctgtttatcccc

SEQ ID NO: 1378806 - DNA, 15 bp, Homo sapiens
tttgctgtttatccc

SEQ ID NO: 1378807 - DNA, 15 bp, Homo sapiens
ttttgctgtttatcc

SEQ ID NO: 1378808 - DNA, 15 bp, Homo sapiens
cttttgctgtttatc

SEQ ID NO: 1378809 - DNA, 15 bp, Homo sapiens
tcttttgctgtttat

SEQ ID NO: 1378810 - DNA, 15 bp, Homo sapiens
gtcttttgctgttta

SEQ ID NO: 1378811 - DNA, 15 bp, Homo sapiens
tgtcttttgctgttt

SEQ ID NO: 1378812 - DNA, 15 bp, Homo sapiens
ctgtcttttgctgtt

SEQ ID NO: 1378813 - DNA, 15 bp, Homo sapiens
cctgtcttttgctgt

SEQ ID NO: 1378814 - DNA, 15 bp, Homo sapiens
gcctgtcttttgctg

SEQ ID NO: 1378815 - DNA, 15 bp, Homo sapiens
ggcctgtcttttgct

SEQ ID NO: 1378816 - DNA, 15 bp, Homo sapiens
tggcctgtcttttgc

SEQ ID NO: 1378817 - DNA, 15 bp, Homo sapiens
atggcctgtcttttg

SEQ ID NO: 1378818 - DNA, 15 bp, Homo sapiens
tatggcctgtctttt

SEQ ID NO: 1378819 - DNA, 15 bp, Homo sapiens
ctatggcctgtcttt

SEQ ID NO: 1378820 - DNA, 15 bp, Homo sapiens
tctatggcctgtctt

SEQ ID NO: 1378821 - DNA, 15 bp, Homo sapiens
atctatggcctgtct

SEQ ID NO: 1378822 - DNA, 15 bp, Homo sapiens
catctatggcctgtc

SEQ ID NO: 1378823 - DNA, 15 bp, Homo sapiens
tcatctatggcctgt

SEQ ID NO: 1378824 - DNA, 15 bp, Homo sapiens
atcatctatggcctg

SEQ ID NO: 1378825 - DNA, 15 bp, Homo sapiens
catcatctatggcct

SEQ ID NO: 1378826 - DNA, 15 bp, Homo sapiens
tcatcatctatggcc

SEQ ID NO: 1378827 - DNA, 15 bp, Homo sapiens
atcatcatctatggc

SEQ ID NO: 1378828 - DNA, 15 bp, Homo sapiens
tatcatcatctatgg

SEQ ID NO: 1378829 - DNA, 15 bp, Homo sapiens
ctatcatcatctatg

SEQ ID NO: 1378830 - DNA, 15 bp, Homo sapiens
actatcatcatctat

SEQ ID NO: 1378831 - DNA, 15 bp, Homo sapiens
aactatcatcatcta

SEQ ID NO: 1378832 - DNA, 15 bp, Homo sapiens
taactatcatcatct

SEQ ID NO: 1378833 - DNA, 15 bp, Homo sapiens
ttaactatcatcatc

SEQ ID NO: 1378834 - DNA, 15 bp, Homo sapiens
tttaactatcatcat

SEQ ID NO: 1378835 - DNA, 15 bp, Homo sapiens
ttttaactatcatca

SEQ ID NO: 1378836 - DNA, 15 bp, Homo sapiens
attttaactatcatc

SEQ ID NO: 1378837 - DNA, 15 bp, Homo sapiens
aattttaactatcat

SEQ ID NO: 1378838 - DNA, 15 bp, Homo sapiens
caattttaactatca

SEQ ID NO: 1378839 - DNA, 15 bp, Homo sapiens
gcaattttaactatc

SEQ ID NO: 1378840 - DNA, 15 bp, Homo sapiens
cgcaattttaactat

SEQ ID NO: 1378841 - DNA, 15 bp, Homo sapiens
gcgcaattttaacta

SEQ ID NO: 1378842 - DNA, 15 bp, Homo sapiens
tgcgcaattttaact

SEQ ID NO: 1378843 - DNA, 15 bp, Homo sapiens
ttgcgcaattttaac

SEQ ID NO: 1378844 - DNA, 15 bp, Homo sapiens
attgcgcaattttaa

SEQ ID NO: 1378845 - DNA, 15 bp, Homo sapiens
tattgcgcaatttta

SEQ ID NO: 1378846 - DNA, 15 bp, Homo sapiens
ttattgcgcaatttt

SEQ ID NO: 1378847 - DNA, 15 bp, Homo sapiens
tttattgcgcaattt

SEQ ID NO: 1378848 - DNA, 15 bp, Homo sapiens
atttattgcgcaatt

SEQ ID NO: 1378849 - DNA, 15 bp, Homo sapiens
tatttattgcgcaat

SEQ ID NO: 1378850 - DNA, 15 bp, Homo sapiens
atatttattgcgcaa

SEQ ID NO: 1378851 - DNA, 15 bp, Homo sapiens
aatatttattgcgca

SEQ ID NO: 1378852 - DNA, 15 bp, Homo sapiens
aaatatttattgcgc

SEQ ID NO: 1378853 - DNA, 15 bp, Homo sapiens
taaatatttattgcg

SEQ ID NO: 1378854 - DNA, 15 bp, Homo sapiens
ctaaatatttattgc

SEQ ID NO: 1378855 - DNA, 15 bp, Homo sapiens
cctaaatatttattg

SEQ ID NO: 1378856 - DNA, 15 bp, Homo sapiens
ccctaaatatttatt

SEQ ID NO: 1378857 - DNA, 15 bp, Homo sapiens
accctaaatatttat

SEQ ID NO: 1378858 - DNA, 15 bp, Homo sapiens
aaccctaaatattta

SEQ ID NO: 1378859 - DNA, 15 bp, Homo sapiens
aaaccctaaatattt

SEQ ID NO: 1378860 - DNA, 15 bp, Homo sapiens
gaaaccctaaatatt

SEQ ID NO: 1378861 - DNA, 15 bp, Homo sapiens
tgaaaccctaaatat

SEQ ID NO: 1378862 - DNA, 15 bp, Homo sapiens
atgaaaccctaaata

SEQ ID NO: 1378863 - DNA, 15 bp, Homo sapiens
aatgaaaccctaaat

SEQ ID NO: 1378864 - DNA, 15 bp, Homo sapiens
caatgaaaccctaaa

SEQ ID NO: 1378865 - DNA, 15 bp, Homo sapiens
acaatgaaaccctaa

SEQ ID NO: 1378866 - DNA, 15 bp, Homo sapiens
tacaatgaaacccta

SEQ ID NO: 1378867 - DNA, 15 bp, Homo sapiens
gtacaatgaaaccct

SEQ ID NO: 1378868 - DNA, 15 bp, Homo sapiens
agtacaatgaaaccc

SEQ ID NO: 1378869 - DNA, 15 bp, Homo sapiens
gagtacaatgaaacc

SEQ ID NO: 1378870 - DNA, 15 bp, Homo sapiens
agagtacaatgaaac

SEQ ID NO: 1378871 - DNA, 15 bp, Homo sapiens
tagagtacaatgaaa

SEQ ID NO: 1378872 - DNA, 15 bp, Homo sapiens
gtagagtacaatgaa

SEQ ID NO: 1378873 - DNA, 15 bp, Homo sapiens
agtagagtacaatga

SEQ ID NO: 1378874 - DNA, 15 bp, Homo sapiens
gagtagagtacaatg

SEQ ID NO: 1378875 - DNA, 15 bp, Homo sapiens
agagtagagtacaat

SEQ ID NO: 1378876 - DNA, 15 bp, Homo sapiens
aagagtagagtacaa

SEQ ID NO: 1378877 - DNA, 15 bp, Homo sapiens
caagagtagagtaca

SEQ ID NO: 1378878 - DNA, 15 bp, Homo sapiens
acaagagtagagtac

SEQ ID NO: 1378879 - DNA, 15 bp, Homo sapiens
cacaagagtagagta

SEQ ID NO: 1378880 - DNA, 15 bp, Homo sapiens
acacaagagtagagt

SEQ ID NO: 1378881 - DNA, 15 bp, Homo sapiens
tacacaagagtagag

SEQ ID NO: 1378882 - DNA, 15 bp, Homo sapiens
atacacaagagtaga

SEQ ID NO: 1378883 - DNA, 15 bp, Homo sapiens
gatacacaagagtag

SEQ ID NO: 1378884 - DNA, 15 bp, Homo sapiens
agatacacaagagta

SEQ ID NO: 1378885 - DNA, 15 bp, Homo sapiens
aagatacacaagagt

SEQ ID NO: 1378886 - DNA, 15 bp, Homo sapiens
aaagatacacaagag

SEQ ID NO: 1378887 - DNA, 15 bp, Homo sapiens
caaagatacacaaga

SEQ ID NO: 1378888 - DNA, 15 bp, Homo sapiens
tcaaagatacacaag

SEQ ID NO: 1378889 - DNA, 15 bp, Homo sapiens
ttcaaagatacacaa

SEQ ID NO: 1378890 - DNA, 15 bp, Homo sapiens
tttcaaagatacaca

SEQ ID NO: 1378891 - DNA, 15 bp, Homo sapiens
atttcaaagatacac

SEQ ID NO: 1378892 - DNA, 15 bp, Homo sapiens
tatttcaaagataca

SEQ ID NO: 1378893 - DNA, 15 bp, Homo sapiens
atatttcaaagatac

SEQ ID NO: 1378894 - DNA, 15 bp, Homo sapiens
aatatttcaaagata

SEQ ID NO: 1378895 - DNA, 15 bp, Homo sapiens
gaatatttcaaagat

SEQ ID NO: 1378896 - DNA, 15 bp, Homo sapiens
ggaatatttcaaaga

SEQ ID NO: 1378897 - DNA, 15 bp, Homo sapiens
tggaatatttcaaag

SEQ ID NO: 1378898 - DNA, 15 bp, Homo sapiens
atggaatatttcaaa

SEQ ID NO: 1378899 - DNA, 15 bp, Homo sapiens
tatggaatatttcaa

SEQ ID NO: 1378900 - DNA, 15 bp, Homo sapiens
ttatggaatatttca

SEQ ID NO: 1378901 - DNA, 15 bp, Homo sapiens
attatggaatatttc

SEQ ID NO: 1378902 - DNA, 15 bp, Homo sapiens
tattatggaatattt

SEQ ID NO: 1378903 - DNA, 15 bp, Homo sapiens
ttattatggaatatt

SEQ ID NO: 1378904 - DNA, 15 bp, Homo sapiens
tttattatggaatat

SEQ ID NO: 1378905 - DNA, 15 bp, Homo sapiens
ttttattatggaata

SEQ ID NO: 1378906 - DNA, 15 bp, Homo sapiens
tttttattatggaat

SEQ ID NO: 1378907 - DNA, 15 bp, Homo sapiens
ctttttattatggaa

SEQ ID NO: 1378908 - DNA, 15 bp, Homo sapiens
actttttattatgga

SEQ ID NO: 1378909 - DNA, 15 bp, Homo sapiens
gactttttattatgg

SEQ ID NO: 1378910 - DNA, 15 bp, Homo sapiens
tgactttttattatg

SEQ ID NO: 1378911 - DNA, 15 bp, Homo sapiens
atgactttttattat

SEQ ID NO: 1378912 - DNA, 15 bp, Homo sapiens
tatgactttttatta

SEQ ID NO: 1378913 - DNA, 15 bp, Homo sapiens
ttatgactttttatt

SEQ ID NO: 1378914 - DNA, 15 bp, Homo sapiens
tttatgactttttat

SEQ ID NO: 1378915 - DNA, 15 bp, Homo sapiens
ttttatgacttttta

SEQ ID NO: 1378916 - DNA, 15 bp, Homo sapiens
tttttatgacttttt

SEQ ID NO: 1378917 - DNA, 15 bp, Homo sapiens
atttttatgactttt

SEQ ID NO: 1378918 - DNA, 15 bp, Homo sapiens
tatttttatgacttt

SEQ ID NO: 1378919 - DNA, 15 bp, Homo sapiens
ctatttttatgactt

SEQ ID NO: 1378920 - DNA, 15 bp, Homo sapiens
tctatttttatgact

SEQ ID NO: 1378921 - DNA, 15 bp, Homo sapiens
ctctatttttatgac

SEQ ID NO: 1378922 - DNA, 15 bp, Homo sapiens
actctatttttatga

SEQ ID NO: 1378923 - DNA, 15 bp, Homo sapiens
tactctatttttatg

SEQ ID NO: 1378924 - DNA, 15 bp, Homo sapiens
ctactctatttttat

SEQ ID NO: 1378925 - DNA, 15 bp, Homo sapiens
tctactctattttta

SEQ ID NO: 1378926 - DNA, 15 bp, Homo sapiens
atctactctattttt

SEQ ID NO: 1378927 - DNA, 15 bp, Homo sapiens
tatctactctatttt

SEQ ID NO: 1378928 - DNA, 15 bp, Homo sapiens
ttatctactctattt

SEQ ID NO: 1378929 - DNA, 15 bp, Homo sapiens
tttatctactctatt

SEQ ID NO: 1378930 - DNA, 15 bp, Homo sapiens
atttatctactctat

SEQ ID NO: 1378931 - DNA, 15 bp, Homo sapiens
catttatctactcta

SEQ ID NO: 1378932 - DNA, 15 bp, Homo sapiens
ccatttatctactct

SEQ ID NO: 1378933 - DNA, 15 bp, Homo sapiens
cccatttatctactc

SEQ ID NO: 1378934 - DNA, 15 bp, Homo sapiens
ccccatttatctact

SEQ ID NO: 1378935 - DNA, 15 bp, Homo sapiens
accccatttatctac

SEQ ID NO: 1378936 - DNA, 15 bp, Homo sapiens
taccccatttatcta

SEQ ID NO: 1378937 - DNA, 15 bp, Homo sapiens
ctaccccatttatct

SEQ ID NO: 1378938 - DNA, 15 bp, Homo sapiens
tctaccccatttatc

SEQ ID NO: 1378939 - DNA, 15 bp, Homo sapiens
ttctaccccatttat

SEQ ID NO: 1378940 - DNA, 15 bp, Homo sapiens
atttctaccccattt

SEQ ID NO: 1378941 - DNA, 15 bp, Homo sapiens
aatttctaccccatt

SEQ ID NO: 1378942 - DNA, 15 bp, Homo sapiens
aaatttctaccccat

SEQ ID NO: 1378943 - DNA, 15 bp, Homo sapiens
aaaatttctacccca

SEQ ID NO: 1378944 - DNA, 15 bp, Homo sapiens
taaaatttctacccc

SEQ ID NO: 1378945 - DNA, 15 bp, Homo sapiens
ctaaaatttctaccc

SEQ ID NO: 1378946 - DNA, 15 bp, Homo sapiens
gctaaaatttctacc

SEQ ID NO: 1378947 - DNA, 15 bp, Homo sapiens
tgctaaaatttctac

SEQ ID NO: 1378948 - DNA, 15 bp, Homo sapiens
ctgctaaaatttcta

SEQ ID NO: 1378949 - DNA, 15 bp, Homo sapiens
cctgctaaaatttct

SEQ ID NO: 1378950 - DNA, 15 bp, Homo sapiens
acctgctaaaatttc

SEQ ID NO: 1378951 - DNA, 15 bp, Homo sapiens
tacctgctaaaattt

SEQ ID NO: 1378952 - DNA, 15 bp, Homo sapiens
ctacctgctaaaatt

SEQ ID NO: 1378953 - DNA, 15 bp, Homo sapiens
cctacctgctaaaat

SEQ ID NO: 1378954 - DNA, 15 bp, Homo sapiens
gcctacctgctaaaa

SEQ ID NO: 1378955 - DNA, 15 bp, Homo sapiens
tgcctacctgctaaa

SEQ ID NO: 1378956 - DNA, 15 bp, Homo sapiens
ctgcctacctgctaa

SEQ ID NO: 1378957 - DNA, 15 bp, Homo sapiens
gctgcctacctgcta

SEQ ID NO: 1378958 - DNA, 15 bp, Homo sapiens
tgctgcctacctgct

SEQ ID NO: 1378959 - DNA, 15 bp, Homo sapiens
ttgctgcctacctgc

SEQ ID NO: 1378960 - DNA, 15 bp, Homo sapiens
tttgctgcctacctg

SEQ ID NO: 1378961 - DNA, 15 bp, Homo sapiens
ctttgctgcctacct

SEQ ID NO: 1378962 - DNA, 15 bp, Homo sapiens
actttgctgcctacc

SEQ ID NO: 1378963 - DNA, 15 bp, Homo sapiens
aactttgctgcctac

SEQ ID NO: 1378964 - DNA, 15 bp, Homo sapiens
aaactttgctgccta

SEQ ID NO: 1378965 - DNA, 15 bp, Homo sapiens
taaactttgctgcct

SEQ ID NO: 1378966 - DNA, 15 bp, Homo sapiens
gtaaactttgctgcc

SEQ ID NO: 1378967 - DNA, 15 bp, Homo sapiens
tgtaaactttgctgc

SEQ ID NO: 1378968 - DNA, 15 bp, Homo sapiens
ttgtaaactttgctg

SEQ ID NO: 1378969 - DNA, 15 bp, Homo sapiens
attgtaaactttgct

SEQ ID NO: 1378970 - DNA, 15 bp, Homo sapiens
aattgtaaactttgc

SEQ ID NO: 1378971 - DNA, 15 bp, Homo sapiens
aaattgtaaactttg

SEQ ID NO: 1378972 - DNA, 15 bp, Homo sapiens
gaaattgtaaacttt

SEQ ID NO: 1378973 - DNA, 15 bp, Homo sapiens
tgaaattgtaaactt

SEQ ID NO: 1378974 - DNA, 15 bp, Homo sapiens
ctgaaattgtaaact

SEQ ID NO: 1378975 - DNA, 15 bp, Homo sapiens
actgaaattgtaaac

SEQ ID NO: 1378976 - DNA, 15 bp, Homo sapiens
aactgaaattgtaaa

SEQ ID NO: 1378977 - DNA, 15 bp, Homo sapiens
taactgaaattgtaa

SEQ ID NO: 1378978 - DNA, 15 bp, Homo sapiens
ttaactgaaattgta

SEQ ID NO: 1378979 - DNA, 15 bp, Homo sapiens
cttaactgaaattgt

SEQ ID NO: 1378980 - DNA, 15 bp, Homo sapiens
tcttaactgaaattg

SEQ ID NO: 1378981 - DNA, 15 bp, Homo sapiens
atcttaactgaaatt

SEQ ID NO: 1378982 - DNA, 15 bp, Homo sapiens
catcttaactgaaat

SEQ ID NO: 1378983 - DNA, 15 bp, Homo sapiens
ccatcttaactgaaa

SEQ ID NO: 1378984 - DNA, 15 bp, Homo sapiens
cccatcttaactgaa

SEQ ID NO: 1378985 - DNA, 15 bp, Homo sapiens
gcccatcttaactga

SEQ ID NO: 1378986 - DNA, 15 bp, Homo sapiens
tgcccatcttaactg

SEQ ID NO: 1378987 - DNA, 15 bp, Homo sapiens
ctgcccatcttaact

SEQ ID NO: 1378988 - DNA, 15 bp, Homo sapiens
cctgcccatcttaac

SEQ ID NO: 1378989 - DNA, 15 bp, Homo sapiens
acctgcccatcttaa

SEQ ID NO: 1378990 - DNA, 15 bp, Homo sapiens
cacctgcccatctta

SEQ ID NO: 1378991 - DNA, 15 bp, Homo sapiens
tcacctgcccatctt

SEQ ID NO: 1378992 - DNA, 15 bp, Homo sapiens
gtcacctgcccatct

SEQ ID NO: 1378993 - DNA, 15 bp, Homo sapiens
tgtcacctgcccatc

SEQ ID NO: 1378994 - DNA, 15 bp, Homo sapiens
atgtcacctgcccat

SEQ ID NO: 1378995 - DNA, 15 bp, Homo sapiens
aatgtcacctgccca

SEQ ID NO: 1378996 - DNA, 15 bp, Homo sapiens
aaatgtcacctgccc

SEQ ID NO: 1378997 - DNA, 15 bp, Homo sapiens
gaaatgtcacctgcc

SEQ ID NO: 1378998 - DNA, 15 bp, Homo sapiens
tgaaatgtcacctgc

SEQ ID NO: 1378999 - DNA, 15 bp, Homo sapiens
ctgaaatgtcacctg

SEQ ID NO: 1379000 - DNA, 15 bp, Homo sapiens
tctgaaatgtcacct

SEQ ID NO: 1379001 - DNA, 15 bp, Homo sapiens
ttctgaaatgtcacc

SEQ ID NO: 1379002 - DNA, 15 bp, Homo sapiens
tttctgaaatgtcac

SEQ ID NO: 1379003 - DNA, 15 bp, Homo sapiens
ctttctgaaatgtca

SEQ ID NO: 1379004 - DNA, 15 bp, Homo sapiens
tctttctgaaatgtc

SEQ ID NO: 1379005 - DNA, 15 bp, Homo sapiens
ctctttctgaaatgt

SEQ ID NO: 1379006 - DNA, 15 bp, Homo sapiens
cctctttctgaaatg

SEQ ID NO: 1379007 - DNA, 15 bp, Homo sapiens
acctctttctgaaat

SEQ ID NO: 1379008 - DNA, 15 bp, Homo sapiens
tacctctttctgaaa

SEQ ID NO: 1379009 - DNA, 15 bp, Homo sapiens
ttacctctttctgaa

SEQ ID NO: 1379010 - DNA, 15 bp, Homo sapiens
cttacctctttctga

SEQ ID NO: 1379011 - DNA, 15 bp, Homo sapiens
tcttacctctttctg

SEQ ID NO: 1379012 - DNA, 15 bp, Homo sapiens
ctcttacctctttct

SEQ ID NO: 1379013 - DNA, 15 bp, Homo sapiens
tctcttacctctttc

SEQ ID NO: 1379014 - DNA, 15 bp, Homo sapiens
ctctcttacctcttt

SEQ ID NO: 1379015 - DNA, 15 bp, Homo sapiens
actctcttacctctt

SEQ ID NO: 1379016 - DNA, 15 bp, Homo sapiens
aactctcttacctct

SEQ ID NO: 1379017 - DNA, 15 bp, Homo sapiens
caactctcttacctc

SEQ ID NO: 1379018 - DNA, 15 bp, Homo sapiens
ccaactctcttacct

SEQ ID NO: 1379019 - DNA, 15 bp, Homo sapiens
gccaactctcttacc

SEQ ID NO: 1379020 - DNA, 15 bp, Homo sapiens
ggccaactctcttac

SEQ ID NO: 1379021 - DNA, 15 bp, Homo sapiens
tggccaactctctta

SEQ ID NO: 1379022 - DNA, 15 bp, Homo sapiens
atggccaactctctt

SEQ ID NO: 1379023 - DNA, 15 bp, Homo sapiens
tatggccaactctct

SEQ ID NO: 1379024 - DNA, 15 bp, Homo sapiens
gtatggccaactctc

SEQ ID NO: 1379025 - DNA, 15 bp, Homo sapiens
tgtatggccaactct

SEQ ID NO: 1379026 - DNA, 15 bp, Homo sapiens
ctgtatggccaactc

SEQ ID NO: 1379027 - DNA, 15 bp, Homo sapiens
tctgtatggccaact

SEQ ID NO: 1379028 - DNA, 15 bp, Homo sapiens
atctgtatggccaac

SEQ ID NO: 1379029 - DNA, 15 bp, Homo sapiens
tatctgtatggccaa

SEQ ID NO: 1379030 - DNA, 15 bp, Homo sapiens
ctatctgtatggcca

SEQ ID NO: 1379031 - DNA, 15 bp, Homo sapiens
actatctgtatggcc

SEQ ID NO: 1379032 - DNA, 15 bp, Homo sapiens
aactatctgtatggc

SEQ ID NO: 1379033 - DNA, 15 bp, Homo sapiens
caactatctgtatgg

SEQ ID NO: 1379034 - DNA, 15 bp, Homo sapiens
ccaactatctgtatg

SEQ ID NO: 1379035 - DNA, 15 bp, Homo sapiens
tccaactatctgtat

SEQ ID NO: 1379036 - DNA, 15 bp, Homo sapiens
ttccaactatctgta

SEQ ID NO: 1379037 - DNA, 15 bp, Homo sapiens
gttccaactatctgt

SEQ ID NO: 1379038 - DNA, 15 bp, Homo sapiens
tgttccaactatctg

SEQ ID NO: 1379039 - DNA, 15 bp, Homo sapiens
ttgttccaactatct

SEQ ID NO: 1379040 - DNA, 15 bp, Homo sapiens
cttgttccaactatc

SEQ ID NO: 1379041 - DNA, 15 bp, Homo sapiens
tcttgttccaactat

SEQ ID NO: 1379042 - DNA, 15 bp, Homo sapiens
ctcttgttccaacta

SEQ ID NO: 1379043 - DNA, 15 bp, Homo sapiens
gctcttgttccaact

SEQ ID NO: 1379044 - DNA, 15 bp, Homo sapiens
tgctcttgttccaac

SEQ ID NO: 1379045 - DNA, 15 bp, Homo sapiens
ttgctcttgttccaa

SEQ ID NO: 1379046 - DNA, 15 bp, Homo sapiens
attgctcttgttcca

SEQ ID NO: 1379047 - DNA, 15 bp, Homo sapiens
gattgctcttgttcc

SEQ ID NO: 1379048 - DNA, 15 bp, Homo sapiens
tgattgctcttgttc

SEQ ID NO: 1379049 - DNA, 15 bp, Homo sapiens
ttgattgctcttgtt

SEQ ID NO: 1379050 - DNA, 15 bp, Homo sapiens
tttgattgctcttgt

SEQ ID NO: 1379051 - DNA, 15 bp, Homo sapiens
ctttgattgctcttg

SEQ ID NO: 1379052 - DNA, 15 bp, Homo sapiens
gctttgattgctctt

SEQ ID NO: 1379053 - DNA, 15 bp, Homo sapiens
tgctttgattgctct

SEQ ID NO: 1379054 - DNA, 15 bp, Homo sapiens
ctgctttgattgctc

SEQ ID NO: 1379055 - DNA, 15 bp, Homo sapiens
tctgctttgattgct

SEQ ID NO: 1379056 - DNA, 15 bp, Homo sapiens
ctctgctttgattgc

SEQ ID NO: 1379057 - DNA, 15 bp, Homo sapiens
tctctgctttgattg

SEQ ID NO: 1379058 - DNA, 15 bp, Homo sapiens
ctctctgctttgatt

SEQ ID NO: 1379059 - DNA, 15 bp, Homo sapiens
tctctctgctttgat

SEQ ID NO: 1379060 - DNA, 15 bp, Homo sapiens
ttctctctgctttga

SEQ ID NO: 1379061 - DNA, 15 bp, Homo sapiens
attctctctgctttg

SEQ ID NO: 1379062 - DNA, 15 bp, Homo sapiens
aattctctctgcttt

SEQ ID NO: 1379063 - DNA, 15 bp, Homo sapiens
caattctctctgctt

SEQ ID NO: 1379064 - DNA, 15 bp, Homo sapiens
acaattctctctgct

SEQ ID NO: 1379065 - DNA, 15 bp, Homo sapiens
aacaattctctctgc

SEQ ID NO: 1379066 - DNA, 15 bp, Homo sapiens
caacaattctctctg

SEQ ID NO: 1379067 - DNA, 15 bp, Homo sapiens
tcaacaattctctct

SEQ ID NO: 1379068 - DNA, 15 bp, Homo sapiens
atcaacaattctctc

SEQ ID NO: 1379069 - DNA, 15 bp, Homo sapiens
catcaacaattctct

SEQ ID NO: 1379070 - DNA, 15 bp, Homo sapiens
gcatcaacaattctc

SEQ ID NO: 1379071 - DNA, 15 bp, Homo sapiens
tgcatcaacaattct

SEQ ID NO: 1379072 - DNA, 15 bp, Homo sapiens
ttgcatcaacaattc

SEQ ID NO: 1379073 - DNA, 15 bp, Homo sapiens
tttgcatcaacaatt

SEQ ID NO: 1379074 - DNA, 15 bp, Homo sapiens
ctttgcatcaacaat

SEQ ID NO: 1379075 - DNA, 15 bp, Homo sapiens
cctttgcatcaacaa

SEQ ID NO: 1379076 - DNA, 15 bp, Homo sapiens
acctttgcatcaaca

SEQ ID NO: 1379077 - DNA, 15 bp, Homo sapiens
gacctttgcatcaac

SEQ ID NO: 1379078 - DNA, 15 bp, Homo sapiens
ggacctttgcatcaa

SEQ ID NO: 1379079 - DNA, 15 bp, Homo sapiens
aggacctttgcatca

SEQ ID NO: 1379080 - DNA, 15 bp, Homo sapiens
caggacctttgcatc

SEQ ID NO: 1379081 - DNA, 15 bp, Homo sapiens
tcaggacctttgcat

SEQ ID NO: 1379082 - DNA, 15 bp, Homo sapiens
ctcaggacctttgca

SEQ ID NO: 1379083 - DNA, 15 bp, Homo sapiens
cctcaggacctttgc

SEQ ID NO: 1379084 - DNA, 15 bp, Homo sapiens
gcctcaggacctttg

SEQ ID NO: 1379085 - DNA, 15 bp, Homo sapiens
tgcctcaggaccttt

SEQ ID NO: 1379086 - DNA, 15 bp, Homo sapiens
ctgcctcaggacctt

SEQ ID NO: 1379087 - DNA, 15 bp, Homo sapiens
cctgcctcaggacct

SEQ ID NO: 1379088 - DNA, 15 bp, Homo sapiens
tcctgcctcaggacc

SEQ ID NO: 1379089 - DNA, 15 bp, Homo sapiens
gtcctgcctcaggac

SEQ ID NO: 1379090 - DNA, 15 bp, Homo sapiens
tgtcctgcctcagga

SEQ ID NO: 1379091 - DNA, 15 bp, Homo sapiens
atgtcctgcctcagg

SEQ ID NO: 1379092 - DNA, 15 bp, Homo sapiens
gatgtcctgcctcag

SEQ ID NO: 1379093 - DNA, 15 bp, Homo sapiens
tgatgtcctgcctca

SEQ ID NO: 1379094 - DNA, 15 bp, Homo sapiens
gtgatgtcctgcctc

SEQ ID NO: 1379095 - DNA, 15 bp, Homo sapiens
agtgatgtcctgcct

SEQ ID NO: 1379096 - DNA, 15 bp, Homo sapiens
cagtgatgtcctgcc

SEQ ID NO: 1379097 - DNA, 15 bp, Homo sapiens
tcagtgatgtcctgc

SEQ ID NO: 1379098 - DNA, 15 bp, Homo sapiens
atcagtgatgtcctg

SEQ ID NO: 1379099 - DNA, 15 bp, Homo sapiens
tatcagtgatgtcct

SEQ ID NO: 1379100 - DNA, 15 bp, Homo sapiens
atatcagtgatgtcc

SEQ ID NO: 1379101 - DNA, 15 bp, Homo sapiens
tatatcagtgatgtc

SEQ ID NO: 1379102 - DNA, 15 bp, Homo sapiens
gtatatcagtgatgt

SEQ ID NO: 1379103 - DNA, 15 bp, Homo sapiens
agtatatcagtgatg

SEQ ID NO: 1379104 - DNA, 15 bp, Homo sapiens
gagtatatcagtgat

SEQ ID NO: 1379105 - DNA, 15 bp, Homo sapiens
ggagtatatcagtga

SEQ ID NO: 1379106 - DNA, 15 bp, Homo sapiens
tggagtatatcagtg

SEQ ID NO: 1379107 - DNA, 15 bp, Homo sapiens
ttggagtatatcagt

SEQ ID NO: 1379108 - DNA, 15 bp, Homo sapiens
cttggagtatatcag

SEQ ID NO: 1379109 - DNA, 15 bp, Homo sapiens
gcttggagtatatca

SEQ ID NO: 1379110 - DNA, 15 bp, Homo sapiens
tgcttggagtatatc

SEQ ID NO: 1379111 - DNA, 15 bp, Homo sapiens
gtgcttggagtatat

SEQ ID NO: 1379112 - DNA, 15 bp, Homo sapiens
tgtgcttggagtata

SEQ ID NO: 1379113 - DNA, 15 bp, Homo sapiens
ctgtgcttggagtat

SEQ ID NO: 1379114 - DNA, 15 bp, Homo sapiens
gctgtgcttggagta

SEQ ID NO: 1379115 - DNA, 15 bp, Homo sapiens
tgctgtgcttggagt

SEQ ID NO: 1379116 - DNA, 15 bp, Homo sapiens
ttgctgtgcttggag

SEQ ID NO: 1379117 - DNA, 15 bp, Homo sapiens
cttgctgtgcttgga

SEQ ID NO: 1379118 - DNA, 15 bp, Homo sapiens
ccttgctgtgcttgg

SEQ ID NO: 1379119 - DNA, 15 bp, Homo sapiens
tccttgctgtgcttg

SEQ ID NO: 1379120 - DNA, 15 bp, Homo sapiens
ttccttgctgtgctt

SEQ ID NO: 1379121 - DNA, 15 bp, Homo sapiens
cttccttgctgtgct

SEQ ID NO: 1379122 - DNA, 15 bp, Homo sapiens
gcttccttgctgtgc

SEQ ID NO: 1379123 - DNA, 15 bp, Homo sapiens
ggcttccttgctgtg

SEQ ID NO: 1379124 - DNA, 15 bp, Homo sapiens
tggcttccttgctgt

SEQ ID NO: 1379125 - DNA, 15 bp, Homo sapiens
ttggcttccttgctg

SEQ ID NO: 1379126 - DNA, 15 bp, Homo sapiens
attggcttccttgct

SEQ ID NO: 1379127 - DNA, 15 bp, Homo sapiens
cattggcttccttgc

SEQ ID NO: 1379128 - DNA, 15 bp, Homo sapiens
acattggcttccttg

SEQ ID NO: 1379129 - DNA, 15 bp, Homo sapiens
cacattggcttcctt

SEQ ID NO: 1379130 - DNA, 15 bp, Homo sapiens
ccacattggcttcct

SEQ ID NO: 1379131 - DNA, 15 bp, Homo sapiens
gccacattggcttcc

SEQ ID NO: 1379132 - DNA, 15 bp, Homo sapiens
agccacattggcttc

SEQ ID NO: 1379133 - DNA, 15 bp, Homo sapiens
cagccacattggctt

SEQ ID NO: 1379134 - DNA, 15 bp, Homo sapiens
ccagccacattggct

SEQ ID NO: 1379135 - DNA, 15 bp, Homo sapiens
tccagccacattggc

SEQ ID NO: 1379136 - DNA, 15 bp, Homo sapiens
ctccagccacattgg

SEQ ID NO: 1379137 - DNA, 15 bp, Homo sapiens
actccagccacattg

SEQ ID NO: 1379138 - DNA, 15 bp, Homo sapiens
tactccagccacatt

SEQ ID NO: 1379139 - DNA, 15 bp, Homo sapiens
ctactccagccacat

SEQ ID NO: 1379140 - DNA, 15 bp, Homo sapiens
tctactccagccaca

SEQ ID NO: 1379141 - DNA, 15 bp, Homo sapiens
ctctactccagccac

SEQ ID NO: 1379142 - DNA, 15 bp, Homo sapiens
actctactccagcca

SEQ ID NO: 1379143 - DNA, 15 bp, Homo sapiens
cactctactccagcc

SEQ ID NO: 1379144 - DNA, 15 bp, Homo sapiens
tcactctactccagc

SEQ ID NO: 1379145 - DNA, 15 bp, Homo sapiens
ctcactctactccag

SEQ ID NO: 1379146 - DNA, 15 bp, Homo sapiens
gctcactctactcca

SEQ ID NO: 1379147 - DNA, 15 bp, Homo sapiens
agctcactctactcc

SEQ ID NO: 1379148 - DNA, 15 bp, Homo sapiens
cagctcactctactc

SEQ ID NO: 1379149 - DNA, 15 bp, Homo sapiens
ccagctcactctact

SEQ ID NO: 1379150 - DNA, 15 bp, Homo sapiens
cccagctcactctac

SEQ ID NO: 1379151 - DNA, 15 bp, Homo sapiens
ccccagctcactcta

SEQ ID NO: 1379152 - DNA, 15 bp, Homo sapiens
gccccagctcactct

SEQ ID NO: 1379153 - DNA, 15 bp, Homo sapiens
tgccccagctcactc

SEQ ID NO: 1379154 - DNA, 15 bp, Homo sapiens
ctgccccagctcact

SEQ ID NO: 1379155 - DNA, 15 bp, Homo sapiens
tctgccccagctcac

SEQ ID NO: 1379156 - DNA, 15 bp, Homo sapiens
atctgccccagctca

SEQ ID NO: 1379157 - DNA, 15 bp, Homo sapiens
catctgccccagctc

SEQ ID NO: 1379158 - DNA, 15 bp, Homo sapiens
tcatctgccccagct

SEQ ID NO: 1379159 - DNA, 15 bp, Homo sapiens
ctcatctgccccagc

SEQ ID NO: 1379160 - DNA, 15 bp, Homo sapiens
tctcatctgccccag

SEQ ID NO: 1379161 - DNA, 15 bp, Homo sapiens
atctcatctgcccca

SEQ ID NO: 1379162 - DNA, 15 bp, Homo sapiens
gatctcatctgcccc

SEQ ID NO: 1379163 - DNA, 15 bp, Homo sapiens
tgatctcatctgccc

SEQ ID NO: 1379164 - DNA, 15 bp, Homo sapiens
ctgatctcatctgcc

SEQ ID NO: 1379165 - DNA, 15 bp, Homo sapiens
tctgatctcatctgc

SEQ ID NO: 1379166 - DNA, 15 bp, Homo sapiens
ctctgatctcatctg

SEQ ID NO: 1379167 - DNA, 15 bp, Homo sapiens
tctctgatctcatct

SEQ ID NO: 1379168 - DNA, 15 bp, Homo sapiens
ctctctgatctcatc

SEQ ID NO: 1379169 - DNA, 15 bp, Homo sapiens
cctctctgatctcat

SEQ ID NO: 1379170 - DNA, 15 bp, Homo sapiens
acctctctgatctca

SEQ ID NO: 1379171 - DNA, 15 bp, Homo sapiens
gacctctctgatctc

SEQ ID NO: 1379172 - DNA, 15 bp, Homo sapiens
tgacctctctgatct

SEQ ID NO: 1379173 - DNA, 15 bp, Homo sapiens
gtgacctctctgatc

SEQ ID NO: 1379174 - DNA, 15 bp, Homo sapiens
cgtgacctctctgat

SEQ ID NO: 1379175 - DNA, 15 bp, Homo sapiens
tcgtgacctctctga

SEQ ID NO: 1379176 - DNA, 15 bp, Homo sapiens
ctcgtgacctctctg

SEQ ID NO: 1379177 - DNA, 15 bp, Homo sapiens
tctcgtgacctctct

SEQ ID NO: 1379178 - DNA, 15 bp, Homo sapiens
ttctcgtgacctctc

SEQ ID NO: 1379179 - DNA, 15 bp, Homo sapiens
cttctcgtgacctct

SEQ ID NO: 1379180 - DNA, 15 bp, Homo sapiens
acttctcgtgacctc

SEQ ID NO: 1379181 - DNA, 15 bp, Homo sapiens
gacttctcgtgacct

SEQ ID NO: 1379182 - DNA, 15 bp, Homo sapiens
tgacttctcgtgacc

SEQ ID NO: 1379183 - DNA, 15 bp, Homo sapiens
ttgacttctcgtgac

SEQ ID NO: 1379184 - DNA, 15 bp, Homo sapiens
tttgacttctcgtga

SEQ ID NO: 1379185 - DNA, 15 bp, Homo sapiens
gtttgacttctcgtg

SEQ ID NO: 1379186 - DNA, 15 bp, Homo sapiens
tgtttgacttctcgt

SEQ ID NO: 1379187 - DNA, 15 bp, Homo sapiens
ttgtttgacttctcg

SEQ ID NO: 1379188 - DNA, 15 bp, Homo sapiens
gttgtttgacttctc

SEQ ID NO: 1379189 - DNA, 15 bp, Homo sapiens
tgttgtttgacttct

SEQ ID NO: 1379190 - DNA, 15 bp, Homo sapiens
gtgttgtttgacttc

SEQ ID NO: 1379191 - DNA, 15 bp, Homo sapiens
tgtgttgtttgactt

SEQ ID NO: 1379192 - DNA, 15 bp, Homo sapiens
ctgtgttgtttgact

SEQ ID NO: 1379193 - DNA, 15 bp, Homo sapiens
cctgtgttgtttgac

SEQ ID NO: 1379194 - DNA, 15 bp, Homo sapiens
tcctgtgttgtttga

SEQ ID NO: 1379195 - DNA, 15 bp, Homo sapiens
gtcctgtgttgtttg

SEQ ID NO: 1379196 - DNA, 15 bp, Homo sapiens
tgtcctgtgttgttt

SEQ ID NO: 1379197 - DNA, 15 bp, Homo sapiens
atgtcctgtgttgtt

SEQ ID NO: 1379198 - DNA, 15 bp, Homo sapiens
gatgtcctgtgttgt

SEQ ID NO: 1379199 - DNA, 15 bp, Homo sapiens
tgatgtcctgtgttg

SEQ ID NO: 1379200 - DNA, 15 bp, Homo sapiens
atgatgtcctgtgtt

SEQ ID NO: 1379201 - DNA, 15 bp, Homo sapiens
tatgatgtcctgtgt

SEQ ID NO: 1379202 - DNA, 15 bp, Homo sapiens
ctatgatgtcctgtg

SEQ ID NO: 1379203 - DNA, 15 bp, Homo sapiens
cctatgatgtcctgt

SEQ ID NO: 1379204 - DNA, 15 bp, Homo sapiens
gcctatgatgtcctg

SEQ ID NO: 1379205 - DNA, 15 bp, Homo sapiens
ggcctatgatgtcct

SEQ ID NO: 1379206 - DNA, 15 bp, Homo sapiens
aggcctatgatgtcc

SEQ ID NO: 1379207 - DNA, 15 bp, Homo sapiens
aaggcctatgatgtc

SEQ ID NO: 1379208 - DNA, 15 bp, Homo sapiens
aaaggcctatgatgt

SEQ ID NO: 1379209 - DNA, 15 bp, Homo sapiens
caaaggcctatgatg

SEQ ID NO: 1379210 - DNA, 15 bp, Homo sapiens
acaaaggcctatgat

SEQ ID NO: 1379211 - DNA, 15 bp, Homo sapiens
tacaaaggcctatga

SEQ ID NO: 1379212 - DNA, 15 bp, Homo sapiens
ttacaaaggcctatg

SEQ ID NO: 1379213 - DNA, 15 bp, Homo sapiens
cttacaaaggcctat

SEQ ID NO: 1379214 - DNA, 15 bp, Homo sapiens
ccttacaaaggccta

SEQ ID NO: 1379215 - DNA, 15 bp, Homo sapiens
cccttacaaaggcct

SEQ ID NO: 1379216 - DNA, 15 bp, Homo sapiens
ccccttacaaaggcc

SEQ ID NO: 1379217 - DNA, 15 bp, Homo sapiens
accccttacaaaggc

SEQ ID NO: 1379218 - DNA, 15 bp, Homo sapiens
aaccccttacaaagg

SEQ ID NO: 1379219 - DNA, 15 bp, Homo sapiens
aaaccccttacaaag

SEQ ID NO: 1379220 - DNA, 15 bp, Homo sapiens
caaaccccttacaaa

SEQ ID NO: 1379221 - DNA, 15 bp, Homo sapiens
tcaaaccccttacaa

SEQ ID NO: 1379222 - DNA, 15 bp, Homo sapiens
gtcaaaccccttaca

SEQ ID NO: 1379223 - DNA, 15 bp, Homo sapiens
agtcaaaccccttac

SEQ ID NO: 1379224 - DNA, 15 bp, Homo sapiens
aagtcaaacccctta

SEQ ID NO: 1379225 - DNA, 15 bp, Homo sapiens
aaagtcaaacccctt

SEQ ID NO: 1379226 - DNA, 15 bp, Homo sapiens
aaaagtcaaacccct

SEQ ID NO: 1379227 - DNA, 15 bp, Homo sapiens
taaaagtcaaacccc

SEQ ID NO: 1379228 - DNA, 15 bp, Homo sapiens
gtaaaagtcaaaccc

SEQ ID NO: 1379229 - DNA, 15 bp, Homo sapiens
agtaaaagtcaaacc

SEQ ID NO: 1379230 - DNA, 15 bp, Homo sapiens
gagtaaaagtcaaac

SEQ ID NO: 1379231 - DNA, 15 bp, Homo sapiens
agagtaaaagtcaaa

SEQ ID NO: 1379232 - DNA, 15 bp, Homo sapiens
cagagtaaaagtcaa

SEQ ID NO: 1379233 - DNA, 15 bp, Homo sapiens
ccagagtaaaagtca

SEQ ID NO: 1379234 - DNA, 15 bp, Homo sapiens
tccagagtaaaagtc

SEQ ID NO: 1379235 - DNA, 15 bp, Homo sapiens
atccagagtaaaagt

SEQ ID NO: 1379236 - DNA, 15 bp, Homo sapiens
aatccagagtaaaag

SEQ ID NO: 1379237 - DNA, 15 bp, Homo sapiens
caatccagagtaaaa

SEQ ID NO: 1379238 - DNA, 15 bp, Homo sapiens
tcaatccagagtaaa

SEQ ID NO: 1379239 - DNA, 15 bp, Homo sapiens
ttcaatccagagtaa

SEQ ID NO: 1379240 - DNA, 15 bp, Homo sapiens
attcaatccagagta

SEQ ID NO: 1379241 - DNA, 15 bp, Homo sapiens
tattcaatccagagt

SEQ ID NO: 1379242 - DNA, 15 bp, Homo sapiens
ctattcaatccagag

SEQ ID NO: 1379243 - DNA, 15 bp, Homo sapiens
cctattcaatccaga

SEQ ID NO: 1379244 - DNA, 15 bp, Homo sapiens
gcctattcaatccag

SEQ ID NO: 1379245 - DNA, 15 bp, Homo sapiens
tgcctattcaatcca

SEQ ID NO: 1379246 - DNA, 15 bp, Homo sapiens
ctgcctattcaatcc

SEQ ID NO: 1379247 - DNA, 15 bp, Homo sapiens
gctgcctattcaatc

SEQ ID NO: 1379248 - DNA, 15 bp, Homo sapiens
ggctgcctattcaat

SEQ ID NO: 1379249 - DNA, 15 bp, Homo sapiens
tggctgcctattcaa

SEQ ID NO: 1379250 - DNA, 15 bp, Homo sapiens
ttggctgcctattca

SEQ ID NO: 1379251 - DNA, 15 bp, Homo sapiens
attggctgcctattc

SEQ ID NO: 1379252 - DNA, 15 bp, Homo sapiens
cattggctgcctatt

SEQ ID NO: 1379253 - DNA, 15 bp, Homo sapiens
ccattggctgcctat

SEQ ID NO: 1379254 - DNA, 15 bp, Homo sapiens
tccattggctgccta

SEQ ID NO: 1379255 - DNA, 15 bp, Homo sapiens
ttccattggctgcct

SEQ ID NO: 1379256 - DNA, 15 bp, Homo sapiens
tttccattggctgcc

SEQ ID NO: 1379257 - DNA, 15 bp, Homo sapiens
ctttccattggctgc

SEQ ID NO: 1379258 - DNA, 15 bp, Homo sapiens
actttccattggctg

SEQ ID NO: 1379259 - DNA, 15 bp, Homo sapiens
aactttccattggct

SEQ ID NO: 1379260 - DNA, 15 bp, Homo sapiens
aaactttccattggc

SEQ ID NO: 1379261 - DNA, 15 bp, Homo sapiens
caaaactttccattg

SEQ ID NO: 1379262 - DNA, 15 bp, Homo sapiens
tcaaaactttccatt

SEQ ID NO: 1379263 - DNA, 15 bp, Homo sapiens
ctcaaaactttccat

SEQ ID NO: 1379264 - DNA, 15 bp, Homo sapiens
tctcaaaactttcca

SEQ ID NO: 1379265 - DNA, 15 bp, Homo sapiens
ttctcaaaactttcc

SEQ ID NO: 1379266 - DNA, 15 bp, Homo sapiens
cttctcaaaactttc

SEQ ID NO: 1379267 - DNA, 15 bp, Homo sapiens
tcttctcaaaacttt

SEQ ID NO: 1379268 - DNA, 15 bp, Homo sapiens
ctcttctcaaaactt

SEQ ID NO: 1379269 - DNA, 15 bp, Homo sapiens
cctcttctcaaaact

SEQ ID NO: 1379270 - DNA, 15 bp, Homo sapiens
tcctcttctcaaaac

SEQ ID NO: 1379271 - DNA, 15 bp, Homo sapiens
ctcctcttctcaaaa

SEQ ID NO: 1379272 - DNA, 15 bp, Homo sapiens
cctcctcttctcaaa

SEQ ID NO: 1379273 - DNA, 15 bp, Homo sapiens
ccctcctcttctcaa

SEQ ID NO: 1379274 - DNA, 15 bp, Homo sapiens
tccctcctcttctca

SEQ ID NO: 1379275 - DNA, 15 bp, Homo sapiens
atccctcctcttctc

SEQ ID NO: 1379276 - DNA, 15 bp, Homo sapiens
tatccctcctcttct

SEQ ID NO: 1379277 - DNA, 15 bp, Homo sapiens
atatccctcctcttc

SEQ ID NO: 1379278 - DNA, 15 bp, Homo sapiens
tatatccctcctctt

SEQ ID NO: 1379279 - DNA, 15 bp, Homo sapiens
ttatatccctcctct

SEQ ID NO: 1379280 - DNA, 15 bp, Homo sapiens
attatatccctcctc

SEQ ID NO: 1379281 - DNA, 15 bp, Homo sapiens
gattatatccctcct

SEQ ID NO: 1379282 - DNA, 15 bp, Homo sapiens
agattatatccctcc

SEQ ID NO: 1379283 - DNA, 15 bp, Homo sapiens
cagattatatccctc

SEQ ID NO: 1379284 - DNA, 15 bp, Homo sapiens
tcagattatatccct

SEQ ID NO: 1379285 - DNA, 15 bp, Homo sapiens
atcagattatatccc

SEQ ID NO: 1379286 - DNA, 15 bp, Homo sapiens
aatcagattatatcc

SEQ ID NO: 1379287 - DNA, 15 bp, Homo sapiens
aaatcagattatatc

SEQ ID NO: 1379288 - DNA, 15 bp, Homo sapiens
taaatcagattatat

SEQ ID NO: 1379289 - DNA, 15 bp, Homo sapiens
ttaaatcagattata

SEQ ID NO: 1379290 - DNA, 15 bp, Homo sapiens
atttaaatcagatta

SEQ ID NO: 1379291 - DNA, 15 bp, Homo sapiens
aatttaaatcagatt

SEQ ID NO: 1379292 - DNA, 15 bp, Homo sapiens
aaatttaaatcagat

SEQ ID NO: 1379293 - DNA, 15 bp, Homo sapiens
taaatttaaatcaga

SEQ ID NO: 1379294 - DNA, 15 bp, Homo sapiens
ataaatttaaatcag

SEQ ID NO: 1379295 - DNA, 15 bp, Homo sapiens
aataaatttaaatca

SEQ ID NO: 1379296 - DNA, 15 bp, Homo sapiens
aaataaatttaaatc

SEQ ID NO: 1379297 - DNA, 15 bp, Homo sapiens
aaaataaatttaaat

SEQ ID NO: 1379298 - DNA, 15 bp, Homo sapiens
taaaataaatttaaa

SEQ ID NO: 1379299 - DNA, 15 bp, Homo sapiens
ataaaataaatttaa

SEQ ID NO: 1379300 - DNA, 15 bp, Homo sapiens
aataaaataaattta

SEQ ID NO: 1379301 - DNA, 15 bp, Homo sapiens
aaataaaataaattt

SEQ ID NO: 1379302 - DNA, 15 bp, Homo sapiens
taaataaaataaatt

SEQ ID NO: 1379303 - DNA, 15 bp, Homo sapiens
gtctcaaaaaataaa

SEQ ID NO: 1379304 - DNA, 15 bp, Homo sapiens
tgtctcaaaaaataa

SEQ ID NO: 1379305 - DNA, 15 bp, Homo sapiens
ctgtctcaaaaaata

SEQ ID NO: 1379306 - DNA, 15 bp, Homo sapiens
tctgtctcaaaaaat

SEQ ID NO: 1379307 - DNA, 15 bp, Homo sapiens
ggagcgagactctgt

SEQ ID NO: 1379308 - DNA, 15 bp, Homo sapiens
cggagcgagactctg

SEQ ID NO: 1379309 - DNA, 15 bp, Homo sapiens
acggagcgagactct

SEQ ID NO: 1379310 - DNA, 15 bp, Homo sapiens
gacggagcgagactc

SEQ ID NO: 1379311 - DNA, 15 bp, Homo sapiens
cgacggagcgagact

SEQ ID NO: 1379312 - DNA, 15 bp, Homo sapiens
gcgacggagcgagac

SEQ ID NO: 1379313 - DNA, 15 bp, Homo sapiens
ggcgacggagcgaga

SEQ ID NO: 1379314 - DNA, 15 bp, Homo sapiens
gggcgacggagcgag

SEQ ID NO: 1379315 - DNA, 15 bp, Homo sapiens
tgggcgacggagcga

SEQ ID NO: 1379316 - DNA, 15 bp, Homo sapiens
ctgggcgacggagcg

SEQ ID NO: 1379317 - DNA, 15 bp, Homo sapiens
cctgggcgacggagc

SEQ ID NO: 1379318 - DNA, 15 bp, Homo sapiens
gcctgggcgacggag

SEQ ID NO: 1379319 - DNA, 15 bp, Homo sapiens
agcctgggcgacgga

SEQ ID NO: 1379320 - DNA, 15 bp, Homo sapiens
cagcctgggcgacgg

SEQ ID NO: 1379321 - DNA, 15 bp, Homo sapiens
ccagcctgggcgacg

SEQ ID NO: 1379322 - DNA, 15 bp, Homo sapiens
cctccagcctgggcg

SEQ ID NO: 1379323 - DNA, 15 bp, Homo sapiens
ccctccagcctgggc

SEQ ID NO: 1379324 - DNA, 15 bp, Homo sapiens
ttgccctccagcctg

SEQ ID NO: 1379325 - DNA, 15 bp, Homo sapiens
attgccctccagcct

SEQ ID NO: 1379326 - DNA, 15 bp, Homo sapiens
cattgccctccagcc

SEQ ID NO: 1379327 - DNA, 15 bp, Homo sapiens
tgccattgccctcca

SEQ ID NO: 1379328 - DNA, 15 bp, Homo sapiens
gtgccattgccctcc

SEQ ID NO: 1379329 - DNA, 15 bp, Homo sapiens
cgtgccattgccctc

SEQ ID NO: 1379330 - DNA, 15 bp, Homo sapiens
tcgtgccattgccct

SEQ ID NO: 1379331 - DNA, 15 bp, Homo sapiens
atcgtgccattgccc

SEQ ID NO: 1379332 - DNA, 15 bp, Homo sapiens
gatcgtgccattgcc

SEQ ID NO: 1379333 - DNA, 15 bp, Homo sapiens
agggaggctgaggca

SEQ ID NO: 1379334 - DNA, 15 bp, Homo sapiens
tagggaggctgaggc

SEQ ID NO: 1379335 - DNA, 15 bp, Homo sapiens
ctagggaggctgagg

SEQ ID NO: 1379336 - DNA, 15 bp, Homo sapiens
actagggaggctgag

SEQ ID NO: 1379337 - DNA, 15 bp, Homo sapiens
tactagggaggctga

SEQ ID NO: 1379338 - DNA, 15 bp, Homo sapiens
ctactagggaggctg

SEQ ID NO: 1379339 - DNA, 15 bp, Homo sapiens
gctactagggaggct

SEQ ID NO: 1379340 - DNA, 15 bp, Homo sapiens
agctactagggaggc

SEQ ID NO: 1379341 - DNA, 15 bp, Homo sapiens
cagctactagggagg

SEQ ID NO: 1379342 - DNA, 15 bp, Homo sapiens
ccagctactagggag

SEQ ID NO: 1379343 - DNA, 15 bp, Homo sapiens
cccagctactaggga

SEQ ID NO: 1379344 - DNA, 15 bp, Homo sapiens
tcccagctactaggg

SEQ ID NO: 1379345 - DNA, 15 bp, Homo sapiens
gtcccagctactagg

SEQ ID NO: 1379346 - DNA, 15 bp, Homo sapiens
agtcccagctactag

SEQ ID NO: 1379347 - DNA, 15 bp, Homo sapiens
tagtcccagctacta

SEQ ID NO: 1379348 - DNA, 15 bp, Homo sapiens
actgggcatggtggc

SEQ ID NO: 1379349 - DNA, 15 bp, Homo sapiens
aactgggcatggtgg

SEQ ID NO: 1379350 - DNA, 15 bp, Homo sapiens
caactgggcatggtg

SEQ ID NO: 1379351 - DNA, 15 bp, Homo sapiens
tcaactgggcatggt

SEQ ID NO: 1379352 - DNA, 15 bp, Homo sapiens
gtcaactgggcatgg

SEQ ID NO: 1379353 - DNA, 15 bp, Homo sapiens
agtcaactgggcatg

SEQ ID NO: 1379354 - DNA, 15 bp, Homo sapiens
aagtcaactgggcat

SEQ ID NO: 1379355 - DNA, 15 bp, Homo sapiens
aaagtcaactgggca

SEQ ID NO: 1379356 - DNA, 15 bp, Homo sapiens
aaaagtcaactgggc

SEQ ID NO: 1379357 - DNA, 15 bp, Homo sapiens
caaaagtcaactggg

SEQ ID NO: 1379358 - DNA, 15 bp, Homo sapiens
acaaaagtcaactgg

SEQ ID NO: 1379359 - DNA, 15 bp, Homo sapiens
tacaaaagtcaactg

SEQ ID NO: 1379360 - DNA, 15 bp, Homo sapiens
atacaaaagtcaact

SEQ ID NO: 1379361 - DNA, 15 bp, Homo sapiens
aatacaaaagtcaac

SEQ ID NO: 1379362 - DNA, 15 bp, Homo sapiens
aaatacaaaagtcaa

SEQ ID NO: 1379363 - DNA, 15 bp, Homo sapiens
aaaatacaaaagtca

SEQ ID NO: 1379364 - DNA, 15 bp, Homo sapiens
aaaaatacaaaagtc

SEQ ID NO: 1379365 - DNA, 15 bp, Homo sapiens
taaaaatacaaaagt

SEQ ID NO: 1379366 - DNA, 15 bp, Homo sapiens
cctaaaaatacaaaa

SEQ ID NO: 1379367 - DNA, 15 bp, Homo sapiens
tcctaaaaatacaaa

SEQ ID NO: 1379368 - DNA, 15 bp, Homo sapiens
ctcctaaaaatacaa

SEQ ID NO: 1379369 - DNA, 15 bp, Homo sapiens
cctcctaaaaataca

SEQ ID NO: 1379370 - DNA, 15 bp, Homo sapiens
ccctcctaaaaatac

SEQ ID NO: 1379371 - DNA, 15 bp, Homo sapiens
tccctcctaaaaata

SEQ ID NO: 1379372 - DNA, 15 bp, Homo sapiens
atccctcctaaaaat

SEQ ID NO: 1379373 - DNA, 15 bp, Homo sapiens
catccctcctaaaaa

SEQ ID NO: 1379374 - DNA, 15 bp, Homo sapiens
ccatccctcctaaaa

SEQ ID NO: 1379375 - DNA, 15 bp, Homo sapiens
cccatccctcctaaa

SEQ ID NO: 1379376 - DNA, 15 bp, Homo sapiens
ccccatccctcctaa

SEQ ID NO: 1379377 - DNA, 15 bp, Homo sapiens
accccatccctccta

SEQ ID NO: 1379378 - DNA, 15 bp, Homo sapiens
aaccccatccctcct

SEQ ID NO: 1379379 - DNA, 15 bp, Homo sapiens
aaaccccatccctcc

SEQ ID NO: 1379380 - DNA, 15 bp, Homo sapiens
gaaaccccatccctc

SEQ ID NO: 1379381 - DNA, 15 bp, Homo sapiens
cgaaaccccatccct

SEQ ID NO: 1379382 - DNA, 15 bp, Homo sapiens
gcgaaaccccatccc

SEQ ID NO: 1379383 - DNA, 15 bp, Homo sapiens
ggcgaaaccccatcc

SEQ ID NO: 1379384 - DNA, 15 bp, Homo sapiens
taacatggcgaaacc

SEQ ID NO: 1379385 - DNA, 15 bp, Homo sapiens
ctaacatggcgaaac

SEQ ID NO: 1379386 - DNA, 15 bp, Homo sapiens
gctaacatggcgaaa

SEQ ID NO: 1379387 - DNA, 15 bp, Homo sapiens
agctaacatggcgaa

SEQ ID NO: 1379388 - DNA, 15 bp, Homo sapiens
tagctaacatggcga

SEQ ID NO: 1379389 - DNA, 15 bp, Homo sapiens
ctagctaacatggcg

SEQ ID NO: 1379390 - DNA, 15 bp, Homo sapiens
cctagctaacatggc

SEQ ID NO: 1379391 - DNA, 15 bp, Homo sapiens
tcctagctaacatgg

SEQ ID NO: 1379392 - DNA, 15 bp, Homo sapiens
atcctagctaacatg

SEQ ID NO: 1379393 - DNA, 15 bp, Homo sapiens
catcctagctaacat

SEQ ID NO: 1379394 - DNA, 15 bp, Homo sapiens
ccatcctagctaaca

SEQ ID NO: 1379395 - DNA, 15 bp, Homo sapiens
accatcctagctaac

SEQ ID NO: 1379396 - DNA, 15 bp, Homo sapiens
gaccatcctagctaa

SEQ ID NO: 1379397 - DNA, 15 bp, Homo sapiens
agaccatcctagcta

SEQ ID NO: 1379398 - DNA, 15 bp, Homo sapiens
aagaccatcctagct

SEQ ID NO: 1379399 - DNA, 15 bp, Homo sapiens
caagaccatcctagc

SEQ ID NO: 1379400 - DNA, 15 bp, Homo sapiens
tcaagaccatcctag

SEQ ID NO: 1379401 - DNA, 15 bp, Homo sapiens
atcaagaccatccta

SEQ ID NO: 1379402 - DNA, 15 bp, Homo sapiens
gggccgaggcgggtg

SEQ ID NO: 1379403 - DNA, 15 bp, Homo sapiens
ggggccgaggcgggt

SEQ ID NO: 1379404 - DNA, 15 bp, Homo sapiens
gggggccgaggcggg

SEQ ID NO: 1379405 - DNA, 15 bp, Homo sapiens
ggggggccgaggcgg

SEQ ID NO: 1379406 - DNA, 15 bp, Homo sapiens
tggggggccgaggcg

SEQ ID NO: 1379407 - DNA, 15 bp, Homo sapiens
ttggggggccgaggc

SEQ ID NO: 1379408 - DNA, 15 bp, Homo sapiens
tttggggggccgagg

SEQ ID NO: 1379409 - DNA, 15 bp, Homo sapiens
ctttggggggccgag

SEQ ID NO: 1379410 - DNA, 15 bp, Homo sapiens
actttggggggccga

SEQ ID NO: 1379411 - DNA, 15 bp, Homo sapiens
cactttggggggccg

SEQ ID NO: 1379412 - DNA, 15 bp, Homo sapiens
gcactttggggggcc

SEQ ID NO: 1379413 - DNA, 15 bp, Homo sapiens
agcactttggggggc

SEQ ID NO: 1379414 - DNA, 15 bp, Homo sapiens
cagcactttgggggg

SEQ ID NO: 1379415 - DNA, 15 bp, Homo sapiens
ccagcactttggggg

SEQ ID NO: 1379416 - DNA, 15 bp, Homo sapiens
cccagcactttgggg

SEQ ID NO: 1379417 - DNA, 15 bp, Homo sapiens
agggctgggtgcggt

SEQ ID NO: 1379418 - DNA, 15 bp, Homo sapiens
aagggctgggtgcgg

SEQ ID NO: 1379419 - DNA, 15 bp, Homo sapiens
taagggctgggtgcg

SEQ ID NO: 1379420 - DNA, 15 bp, Homo sapiens
ttaagggctgggtgc

SEQ ID NO: 1379421 - DNA, 15 bp, Homo sapiens
tttaagggctgggtg

SEQ ID NO: 1379422 - DNA, 15 bp, Homo sapiens
atttaagggctgggt

SEQ ID NO: 1379423 - DNA, 15 bp, Homo sapiens
aatttaagggctggg

SEQ ID NO: 1379424 - DNA, 15 bp, Homo sapiens
aaatttaagggctgg

SEQ ID NO: 1379425 - DNA, 15 bp, Homo sapiens
aaaatttaagggctg

SEQ ID NO: 1379426 - DNA, 15 bp, Homo sapiens
aaaaatttaagggct

SEQ ID NO: 1379427 - DNA, 15 bp, Homo sapiens
taaaaatttaagggc

SEQ ID NO: 1379428 - DNA, 15 bp, Homo sapiens
ttaaaaatttaaggg

SEQ ID NO: 1379429 - DNA, 15 bp, Homo sapiens
cttaaaaatttaagg

SEQ ID NO: 1379430 - DNA, 15 bp, Homo sapiens
acttaaaaatttaag

SEQ ID NO: 1379431 - DNA, 15 bp, Homo sapiens
cacttaaaaatttaa

SEQ ID NO: 1379432 - DNA, 15 bp, Homo sapiens
tcacttaaaaattta

SEQ ID NO: 1379433 - DNA, 15 bp, Homo sapiens
atcacttaaaaattt

SEQ ID NO: 1379434 - DNA, 15 bp, Homo sapiens
gatcacttaaaaatt

SEQ ID NO: 1379435 - DNA, 15 bp, Homo sapiens
tgatcacttaaaaat

SEQ ID NO: 1379436 - DNA, 15 bp, Homo sapiens
atgatcacttaaaaa

SEQ ID NO: 1379437 - DNA, 15 bp, Homo sapiens
gatgatcacttaaaa

SEQ ID NO: 1379438 - DNA, 15 bp, Homo sapiens
agatgatcacttaaa

SEQ ID NO: 1379439 - DNA, 15 bp, Homo sapiens
cagatgatcacttaa

SEQ ID NO: 1379440 - DNA, 15 bp, Homo sapiens
ccagatgatcactta

SEQ ID NO: 1379441 - DNA, 15 bp, Homo sapiens
accagatgatcactt

SEQ ID NO: 1379442 - DNA, 15 bp, Homo sapiens
aaccagatgatcact

SEQ ID NO: 1379443 - DNA, 15 bp, Homo sapiens
aaaccagatgatcac

SEQ ID NO: 1379444 - DNA, 15 bp, Homo sapiens
gaaaccagatgatca

SEQ ID NO: 1379445 - DNA, 15 bp, Homo sapiens
agaaaccagatgatc

SEQ ID NO: 1379446 - DNA, 15 bp, Homo sapiens
cagaaaccagatgat

SEQ ID NO: 1379447 - DNA, 15 bp, Homo sapiens
acagaaaccagatga

SEQ ID NO: 1379448 - DNA, 15 bp, Homo sapiens
tacagaaaccagatg

SEQ ID NO: 1379449 - DNA, 15 bp, Homo sapiens
atacagaaaccagat

SEQ ID NO: 1379450 - DNA, 15 bp, Homo sapiens
aatacagaaaccaga

SEQ ID NO: 1379451 - DNA, 15 bp, Homo sapiens
caatacagaaaccag

SEQ ID NO: 1379452 - DNA, 15 bp, Homo sapiens
tcaatacagaaacca

SEQ ID NO: 1379453 - DNA, 15 bp, Homo sapiens
ttcaatacagaaacc

SEQ ID NO: 1379454 - DNA, 15 bp, Homo sapiens
attcaatacagaaac

SEQ ID NO: 1379455 - DNA, 15 bp, Homo sapiens
gattcaatacagaaa

SEQ ID NO: 1379456 - DNA, 15 bp, Homo sapiens
agattcaatacagaa

SEQ ID NO: 1379457 - DNA, 15 bp, Homo sapiens
tagattcaatacaga

SEQ ID NO: 1379458 - DNA, 15 bp, Homo sapiens
ttagattcaatacag

SEQ ID NO: 1379459 - DNA, 15 bp, Homo sapiens
tttagattcaataca

SEQ ID NO: 1379460 - DNA, 15 bp, Homo sapiens
gtttagattcaatac

SEQ ID NO: 1379461 - DNA, 15 bp, Homo sapiens
agtttagattcaata

SEQ ID NO: 1379462 - DNA, 15 bp, Homo sapiens
gagtttagattcaat

SEQ ID NO: 1379463 - DNA, 15 bp, Homo sapiens
agagtttagattcaa

SEQ ID NO: 1379464 - DNA, 15 bp, Homo sapiens
tagagtttagattca

SEQ ID NO: 1379465 - DNA, 15 bp, Homo sapiens
ttagagtttagattc

SEQ ID NO: 1379466 - DNA, 15 bp, Homo sapiens
tttagagtttagatt

SEQ ID NO: 1379467 - DNA, 15 bp, Homo sapiens
gtttagagtttagat

SEQ ID NO: 1379468 - DNA, 15 bp, Homo sapiens
agtttagagtttaga

SEQ ID NO: 1379469 - DNA, 15 bp, Homo sapiens
tagtttagagtttag

SEQ ID NO: 1379470 - DNA, 15 bp, Homo sapiens
atagtttagagttta

SEQ ID NO: 1379471 - DNA, 15 bp, Homo sapiens
catagtttagagttt

SEQ ID NO: 1379472 - DNA, 15 bp, Homo sapiens
tcatagtttagagtt

SEQ ID NO: 1379473 - DNA, 15 bp, Homo sapiens
ttcatagtttagagt

SEQ ID NO: 1379474 - DNA, 15 bp, Homo sapiens
tttcatagtttagag

SEQ ID NO: 1379475 - DNA, 15 bp, Homo sapiens
ttttcatagtttaga

SEQ ID NO: 1379476 - DNA, 15 bp, Homo sapiens
tttttcatagtttag

SEQ ID NO: 1379477 - DNA, 15 bp, Homo sapiens
atttttcatagttta

SEQ ID NO: 1379478 - DNA, 15 bp, Homo sapiens
aatttttcatagttt

SEQ ID NO: 1379479 - DNA, 15 bp, Homo sapiens
gaatttttcatagtt

SEQ ID NO: 1379480 - DNA, 15 bp, Homo sapiens
tgaatttttcatagt

SEQ ID NO: 1379481 - DNA, 15 bp, Homo sapiens
gtgaatttttcatag

SEQ ID NO: 1379482 - DNA, 15 bp, Homo sapiens
tgtgaatttttcata

SEQ ID NO: 1379483 - DNA, 15 bp, Homo sapiens
ttgtgaatttttcat

SEQ ID NO: 1379484 - DNA, 15 bp, Homo sapiens
attgtgaatttttca

SEQ ID NO: 1379485 - DNA, 15 bp, Homo sapiens
tattgtgaatttttc

SEQ ID NO: 1379486 - DNA, 15 bp, Homo sapiens
ttattgtgaattttt

SEQ ID NO: 1379487 - DNA, 15 bp, Homo sapiens
tttattgtgaatttt

SEQ ID NO: 1379488 - DNA, 15 bp, Homo sapiens
ttttattgtgaattt

SEQ ID NO: 1379489 - DNA, 15 bp, Homo sapiens
cttttattgtgaatt

SEQ ID NO: 1379490 - DNA, 15 bp, Homo sapiens
gcttttattgtgaat

SEQ ID NO: 1379491 - DNA, 15 bp, Homo sapiens
tgcttttattgtgaa

SEQ ID NO: 1379492 - DNA, 15 bp, Homo sapiens
ttgcttttattgtga

SEQ ID NO: 1379493 - DNA, 15 bp, Homo sapiens
tttgcttttattgtg

SEQ ID NO: 1379494 - DNA, 15 bp, Homo sapiens
ttttgcttttattgt

SEQ ID NO: 1379495 - DNA, 15 bp, Homo sapiens
tttttgcttttattg

SEQ ID NO: 1379496 - DNA, 15 bp, Homo sapiens
ttttttgcttttatt

SEQ ID NO: 1379497 - DNA, 15 bp, Homo sapiens
tttttttgcttttat

SEQ ID NO: 1379498 - DNA, 15 bp, Homo sapiens
gtttttttgctttta

SEQ ID NO: 1379499 - DNA, 15 bp, Homo sapiens
agtttttttgctttt

SEQ ID NO: 1379500 - DNA, 15 bp, Homo sapiens
gagtttttttgcttt

SEQ ID NO: 1379501 - DNA, 15 bp, Homo sapiens
tgagtttttttgctt

SEQ ID NO: 1379502 - DNA, 15 bp, Homo sapiens
ctgagtttttttgct

SEQ ID NO: 1379503 - DNA, 15 bp, Homo sapiens
tctgagtttttttgc

SEQ ID NO: 1379504 - DNA, 15 bp, Homo sapiens
ttctgagtttttttg

SEQ ID NO: 1379505 - DNA, 15 bp, Homo sapiens
cttctgagttttttt

SEQ ID NO: 1379506 - DNA, 15 bp, Homo sapiens
tcttctgagtttttt

SEQ ID NO: 1379507 - DNA, 15 bp, Homo sapiens
ttcttctgagttttt

SEQ ID NO: 1379508 - DNA, 15 bp, Homo sapiens
gttcttctgagtttt

SEQ ID NO: 1379509 - DNA, 15 bp, Homo sapiens
tgttcttctgagttt

SEQ ID NO: 1379510 - DNA, 15 bp, Homo sapiens
atgttcttctgagtt

SEQ ID NO: 1379511 - DNA, 15 bp, Homo sapiens
aatgttcttctgagt

SEQ ID NO: 1379512 - DNA, 15 bp, Homo sapiens
caatgttcttctgag

SEQ ID NO: 1379513 - DNA, 15 bp, Homo sapiens
acaatgttcttctga

SEQ ID NO: 1379514 - DNA, 15 bp, Homo sapiens
tacaatgttcttctg

SEQ ID NO: 1379515 - DNA, 15 bp, Homo sapiens
ctacaatgttcttct

SEQ ID NO: 1379516 - DNA, 15 bp, Homo sapiens
actacaatgttcttc

SEQ ID NO: 1379517 - DNA, 15 bp, Homo sapiens
tactacaatgttctt

SEQ ID NO: 1379518 - DNA, 15 bp, Homo sapiens
ttactacaatgttct

SEQ ID NO: 1379519 - DNA, 15 bp, Homo sapiens
attactacaatgttc

SEQ ID NO: 1379520 - DNA, 15 bp, Homo sapiens
cattactacaatgtt

SEQ ID NO: 1379521 - DNA, 15 bp, Homo sapiens
gcattactacaatgt

SEQ ID NO: 1379522 - DNA, 15 bp, Homo sapiens
tgcattactacaatg

SEQ ID NO: 1379523 - DNA, 15 bp, Homo sapiens
ttgcattactacaat

SEQ ID NO: 1379524 - DNA, 15 bp, Homo sapiens
cttgcattactacaa

SEQ ID NO: 1379525 - DNA, 15 bp, Homo sapiens
acttgcattactaca

SEQ ID NO: 1379526 - DNA, 15 bp, Homo sapiens
tacttgcattactac

SEQ ID NO: 1379527 - DNA, 15 bp, Homo sapiens
ttacttgcattacta

SEQ ID NO: 1379528 - DNA, 15 bp, Homo sapiens
cttacttgcattact

SEQ ID NO: 1379529 - DNA, 15 bp, Homo sapiens
tcttacttgcattac

SEQ ID NO: 1379530 - DNA, 15 bp, Homo sapiens
ttcttacttgcatta

SEQ ID NO: 1379531 - DNA, 15 bp, Homo sapiens
tttcttacttgcatt

SEQ ID NO: 1379532 - DNA, 15 bp, Homo sapiens
atttcttacttgcat

SEQ ID NO: 1379533 - DNA, 15 bp, Homo sapiens
tatttcttacttgca

SEQ ID NO: 1379534 - DNA, 15 bp, Homo sapiens
ttatttcttacttgc

SEQ ID NO: 1379535 - DNA, 15 bp, Homo sapiens
attatttcttacttg

SEQ ID NO: 1379536 - DNA, 15 bp, Homo sapiens
cattatttcttactt

SEQ ID NO: 1379537 - DNA, 15 bp, Homo sapiens
ccattatttcttact

SEQ ID NO: 1379538 - DNA, 15 bp, Homo sapiens
accattatttcttac

SEQ ID NO: 1379539 - DNA, 15 bp, Homo sapiens
taccattatttctta

SEQ ID NO: 1379540 - DNA, 15 bp, Homo sapiens
ctaccattatttctt

SEQ ID NO: 1379541 - DNA, 15 bp, Homo sapiens
gctaccattatttct

SEQ ID NO: 1379542 - DNA, 15 bp, Homo sapiens
agctaccattatttc

SEQ ID NO: 1379543 - DNA, 15 bp, Homo sapiens
cagctaccattattt

SEQ ID NO: 1379544 - DNA, 15 bp, Homo sapiens
ccagctaccattatt

SEQ ID NO: 1379545 - DNA, 15 bp, Homo sapiens
tccagctaccattat

SEQ ID NO: 1379546 - DNA, 15 bp, Homo sapiens
atccagctaccatta

SEQ ID NO: 1379547 - DNA, 15 bp, Homo sapiens
aatccagctaccatt

SEQ ID NO: 1379548 - DNA, 15 bp, Homo sapiens
caatccagctaccat

SEQ ID NO: 1379549 - DNA, 15 bp, Homo sapiens
tcaatccagctacca

SEQ ID NO: 1379550 - DNA, 15 bp, Homo sapiens
ctcaatccagctacc

SEQ ID NO: 1379551 - DNA, 15 bp, Homo sapiens
cctcaatccagctac

SEQ ID NO: 1379552 - DNA, 15 bp, Homo sapiens
acctcaatccagcta

SEQ ID NO: 1379553 - DNA, 15 bp, Homo sapiens
cacctcaatccagct

SEQ ID NO: 1379554 - DNA, 15 bp, Homo sapiens
acacctcaatccagc

SEQ ID NO: 1379555 - DNA, 15 bp, Homo sapiens
aacacctcaatccag

SEQ ID NO: 1379556 - DNA, 15 bp, Homo sapiens
caacacctcaatcca

SEQ ID NO: 1379557 - DNA, 15 bp, Homo sapiens
acaacacctcaatcc

SEQ ID NO: 1379558 - DNA, 15 bp, Homo sapiens
tacaacacctcaatc

SEQ ID NO: 1379559 - DNA, 15 bp, Homo sapiens
ctacaacacctcaat

SEQ ID NO: 1379560 - DNA, 15 bp, Homo sapiens
gctacaacacctcaa

SEQ ID NO: 1379561 - DNA, 15 bp, Homo sapiens
tgctacaacacctca

SEQ ID NO: 1379562 - DNA, 15 bp, Homo sapiens
ctgctacaacacctc

SEQ ID NO: 1379563 - DNA, 15 bp, Homo sapiens
actgctacaacacct

SEQ ID NO: 1379564 - DNA, 15 bp, Homo sapiens
cactgctacaacacc

SEQ ID NO: 1379565 - DNA, 15 bp, Homo sapiens
ccactgctacaacac

SEQ ID NO: 1379566 - DNA, 15 bp, Homo sapiens
tccactgctacaaca

SEQ ID NO: 1379567 - DNA, 15 bp, Homo sapiens
ctccactgctacaac

SEQ ID NO: 1379568 - DNA, 15 bp, Homo sapiens
cctccactgctacaa

SEQ ID NO: 1379569 - DNA, 15 bp, Homo sapiens
tcctccactgctaca

SEQ ID NO: 1379570 - DNA, 15 bp, Homo sapiens
ctcctccactgctac

SEQ ID NO: 1379571 - DNA, 15 bp, Homo sapiens
acctcctccactgct

SEQ ID NO: 1379572 - DNA, 15 bp, Homo sapiens
cacctcctccactgc

SEQ ID NO: 1379573 - DNA, 15 bp, Homo sapiens
tcacctcctccactg

SEQ ID NO: 1379574 - DNA, 15 bp, Homo sapiens
ttcacctcctccact

SEQ ID NO: 1379575 - DNA, 15 bp, Homo sapiens
tttcacctcctccac

SEQ ID NO: 1379576 - DNA, 15 bp, Homo sapiens
ttttcacctcctcca

SEQ ID NO: 1379577 - DNA, 15 bp, Homo sapiens
cttttcacctcctcc

SEQ ID NO: 1379578 - DNA, 15 bp, Homo sapiens
acttttcacctcctc

SEQ ID NO: 1379579 - DNA, 15 bp, Homo sapiens
cacttttcacctcct

SEQ ID NO: 1379580 - DNA, 15 bp, Homo sapiens
tcacttttcacctcc

SEQ ID NO: 1379581 - DNA, 15 bp, Homo sapiens
atcacttttcacctc

SEQ ID NO: 1379582 - DNA, 15 bp, Homo sapiens
aatcacttttcacct

SEQ ID NO: 1379583 - DNA, 15 bp, Homo sapiens
caatcacttttcacc

SEQ ID NO: 1379584 - DNA, 15 bp, Homo sapiens
tcaatcacttttcac

SEQ ID NO: 1379585 - DNA, 15 bp, Homo sapiens
ttcaatcacttttca

SEQ ID NO: 1379586 - DNA, 15 bp, Homo sapiens
attcaatcacttttc

SEQ ID NO: 1379587 - DNA, 15 bp, Homo sapiens
aattcaatcactttt

SEQ ID NO: 1379588 - DNA, 15 bp, Homo sapiens
gaattcaatcacttt

SEQ ID NO: 1379589 - DNA, 15 bp, Homo sapiens
agaattcaatcactt

SEQ ID NO: 1379590 - DNA, 15 bp, Homo sapiens
tagaattcaatcact

SEQ ID NO: 1379591 - DNA, 15 bp, Homo sapiens
ctagaattcaatcac

SEQ ID NO: 1379592 - DNA, 15 bp, Homo sapiens
cctagaattcaatca

SEQ ID NO: 1379593 - DNA, 15 bp, Homo sapiens
acctagaattcaatc

SEQ ID NO: 1379594 - DNA, 15 bp, Homo sapiens
cacctagaattcaat

SEQ ID NO: 1379595 - DNA, 15 bp, Homo sapiens
acacctagaattcaa

SEQ ID NO: 1379596 - DNA, 15 bp, Homo sapiens
tacacctagaattca

SEQ ID NO: 1379597 - DNA, 15 bp, Homo sapiens
atacacctagaattc

SEQ ID NO: 1379598 - DNA, 15 bp, Homo sapiens
aatacacctagaatt

SEQ ID NO: 1379599 - DNA, 15 bp, Homo sapiens
aaatacacctagaat

SEQ ID NO: 1379600 - DNA, 15 bp, Homo sapiens
aaaatacacctagaa

SEQ ID NO: 1379601 - DNA, 15 bp, Homo sapiens
taaaatacacctaga

SEQ ID NO: 1379602 - DNA, 15 bp, Homo sapiens
ttaaaatacacctag

SEQ ID NO: 1379603 - DNA, 15 bp, Homo sapiens
tttaaaatacaccta

SEQ ID NO: 1379604 - DNA, 15 bp, Homo sapiens
ttttaaaatacacct

SEQ ID NO: 1379605 - DNA, 15 bp, Homo sapiens
cttttaaaatacacc

SEQ ID NO: 1379606 - DNA, 15 bp, Homo sapiens
gcttttaaaatacac

SEQ ID NO: 1379607 - DNA, 15 bp, Homo sapiens
tgcttttaaaataca

SEQ ID NO: 1379608 - DNA, 15 bp, Homo sapiens
ctgcttttaaaatac

SEQ ID NO: 1379609 - DNA, 15 bp, Homo sapiens
tctgcttttaaaata

SEQ ID NO: 1379610 - DNA, 15 bp, Homo sapiens
ctctgcttttaaaat

SEQ ID NO: 1379611 - DNA, 15 bp, Homo sapiens
gctctgcttttaaaa

SEQ ID NO: 1379612 - DNA, 15 bp, Homo sapiens
ggctctgcttttaaa

SEQ ID NO: 1379613 - DNA, 15 bp, Homo sapiens
tggctctgcttttaa

SEQ ID NO: 1379614 - DNA, 15 bp, Homo sapiens
ttggctctgctttta

SEQ ID NO: 1379615 - DNA, 15 bp, Homo sapiens
attggctctgctttt

SEQ ID NO: 1379616 - DNA, 15 bp, Homo sapiens
tattggctctgcttt

SEQ ID NO: 1379617 - DNA, 15 bp, Homo sapiens
ttattggctctgctt

SEQ ID NO: 1379618 - DNA, 15 bp, Homo sapiens
attattggctctgct

SEQ ID NO: 1379619 - DNA, 15 bp, Homo sapiens
tattattggctctgc

SEQ ID NO: 1379620 - DNA, 15 bp, Homo sapiens
ctattattggctctg

SEQ ID NO: 1379621 - DNA, 15 bp, Homo sapiens
cctattattggctct

SEQ ID NO: 1379622 - DNA, 15 bp, Homo sapiens
tcctattattggctc

SEQ ID NO: 1379623 - DNA, 15 bp, Homo sapiens
atcctattattggct

SEQ ID NO: 1379624 - DNA, 15 bp, Homo sapiens
aatcctattattggc

SEQ ID NO: 1379625 - DNA, 15 bp, Homo sapiens
aaatcctattattgg

SEQ ID NO: 1379626 - DNA, 15 bp, Homo sapiens
aaaatcctattattg

SEQ ID NO: 1379627 - DNA, 15 bp, Homo sapiens
gaaaatcctattatt

SEQ ID NO: 1379628 - DNA, 15 bp, Homo sapiens
agaaaatcctattat

SEQ ID NO: 1379629 - DNA, 15 bp, Homo sapiens
cagaaaatcctatta

SEQ ID NO: 1379630 - DNA, 15 bp, Homo sapiens
tcagaaaatcctatt

SEQ ID NO: 1379631 - DNA, 15 bp, Homo sapiens
gtcagaaaatcctat

SEQ ID NO: 1379632 - DNA, 15 bp, Homo sapiens
ggtcagaaaatccta

SEQ ID NO: 1379633 - DNA, 15 bp, Homo sapiens
tggtcagaaaatcct

SEQ ID NO: 1379634 - DNA, 15 bp, Homo sapiens
ctggtcagaaaatcc

SEQ ID NO: 1379635 - DNA, 15 bp, Homo sapiens
actggtcagaaaatc

SEQ ID NO: 1379636 - DNA, 15 bp, Homo sapiens
aactggtcagaaaat

SEQ ID NO: 1379637 - DNA, 15 bp, Homo sapiens
caactggtcagaaaa

SEQ ID NO: 1379638 - DNA, 15 bp, Homo sapiens
ccaactggtcagaaa

SEQ ID NO: 1379639 - DNA, 15 bp, Homo sapiens
tccaactggtcagaa

SEQ ID NO: 1379640 - DNA, 15 bp, Homo sapiens
atccaactggtcaga

SEQ ID NO: 1379641 - DNA, 15 bp, Homo sapiens
catccaactggtcag

SEQ ID NO: 1379642 - DNA, 15 bp, Homo sapiens
acatccaactggtca

SEQ ID NO: 1379643 - DNA, 15 bp, Homo sapiens
cacatccaactggtc

SEQ ID NO: 1379644 - DNA, 15 bp, Homo sapiens
ccacatccaactggt

SEQ ID NO: 1379645 - DNA, 15 bp, Homo sapiens
cccacatccaactgg

SEQ ID NO: 1379646 - DNA, 15 bp, Homo sapiens
tcccacatccaactg

SEQ ID NO: 1379647 - DNA, 15 bp, Homo sapiens
atcccacatccaact

SEQ ID NO: 1379648 - DNA, 15 bp, Homo sapiens
tatcccacatccaac

SEQ ID NO: 1379649 - DNA, 15 bp, Homo sapiens
atatcccacatccaa

SEQ ID NO: 1379650 - DNA, 15 bp, Homo sapiens
catatcccacatcca

SEQ ID NO: 1379651 - DNA, 15 bp, Homo sapiens
tcatatcccacatcc

SEQ ID NO: 1379652 - DNA, 15 bp, Homo sapiens
ctcatatcccacatc

SEQ ID NO: 1379653 - DNA, 15 bp, Homo sapiens
tctcatatcccacat

SEQ ID NO: 1379654 - DNA, 15 bp, Homo sapiens
ctctcatatcccaca

SEQ ID NO: 1379655 - DNA, 15 bp, Homo sapiens
tctctcatatcccac

SEQ ID NO: 1379656 - DNA, 15 bp, Homo sapiens
ttctctcatatccca

SEQ ID NO: 1379657 - DNA, 15 bp, Homo sapiens
tttctctcatatccc

SEQ ID NO: 1379658 - DNA, 15 bp, Homo sapiens
ttttctctcatatcc

SEQ ID NO: 1379659 - DNA, 15 bp, Homo sapiens
cttttctctcatatc

SEQ ID NO: 1379660 - DNA, 15 bp, Homo sapiens
tcttttctctcatat

SEQ ID NO: 1379661 - DNA, 15 bp, Homo sapiens
ttcttttctctcata

SEQ ID NO: 1379662 - DNA, 15 bp, Homo sapiens
cttcttttctctcat

SEQ ID NO: 1379663 - DNA, 15 bp, Homo sapiens
ccttcttttctctca

SEQ ID NO: 1379664 - DNA, 15 bp, Homo sapiens
tccttcttttctctc

SEQ ID NO: 1379665 - DNA, 15 bp, Homo sapiens
atccttcttttctct

SEQ ID NO: 1379666 - DNA, 15 bp, Homo sapiens
gatccttcttttctc

SEQ ID NO: 1379667 - DNA, 15 bp, Homo sapiens
tgatccttcttttct

SEQ ID NO: 1379668 - DNA, 15 bp, Homo sapiens
ttgatccttcttttc

SEQ ID NO: 1379669 - DNA, 15 bp, Homo sapiens
tttgatccttctttt

SEQ ID NO: 1379670 - DNA, 15 bp, Homo sapiens
ttttgatccttcttt

SEQ ID NO: 1379671 - DNA, 15 bp, Homo sapiens
attttgatccttctt

SEQ ID NO: 1379672 - DNA, 15 bp, Homo sapiens
aattttgatccttct

SEQ ID NO: 1379673 - DNA, 15 bp, Homo sapiens
gaattttgatccttc

SEQ ID NO: 1379674 - DNA, 15 bp, Homo sapiens
agaattttgatcctt

SEQ ID NO: 1379675 - DNA, 15 bp, Homo sapiens
cagaattttgatcct

SEQ ID NO: 1379676 - DNA, 15 bp, Homo sapiens
acagaattttgatcc

SEQ ID NO: 1379677 - DNA, 15 bp, Homo sapiens
tacagaattttgatc

SEQ ID NO: 1379678 - DNA, 15 bp, Homo sapiens
ctacagaattttgat

SEQ ID NO: 1379679 - DNA, 15 bp, Homo sapiens
gctacagaattttga

SEQ ID NO: 1379680 - DNA, 15 bp, Homo sapiens
agctacagaattttg

SEQ ID NO: 1379681 - DNA, 15 bp, Homo sapiens
cagctacagaatttt

SEQ ID NO: 1379682 - DNA, 15 bp, Homo sapiens
tcagctacagaattt

SEQ ID NO: 1379683 - DNA, 15 bp, Homo sapiens
ctcagctacagaatt

SEQ ID NO: 1379684 - DNA, 15 bp, Homo sapiens
gctcagctacagaat

SEQ ID NO: 1379685 - DNA, 15 bp, Homo sapiens
tgctcagctacagaa

SEQ ID NO: 1379686 - DNA, 15 bp, Homo sapiens
ttgctcagctacaga

SEQ ID NO: 1379687 - DNA, 15 bp, Homo sapiens
gttgctcagctacag

SEQ ID NO: 1379688 - DNA, 15 bp, Homo sapiens
tgttgctcagctaca

SEQ ID NO: 1379689 - DNA, 15 bp, Homo sapiens
atgttgctcagctac

SEQ ID NO: 1379690 - DNA, 15 bp, Homo sapiens
gatgttgctcagcta

SEQ ID NO: 1379691 - DNA, 15 bp, Homo sapiens
agatgttgctcagct

SEQ ID NO: 1379692 - DNA, 15 bp, Homo sapiens
tagatgttgctcagc

SEQ ID NO: 1379693 - DNA, 15 bp, Homo sapiens
gtagatgttgctcag

SEQ ID NO: 1379694 - DNA, 15 bp, Homo sapiens
tgtagatgttgctca

SEQ ID NO: 1379695 - DNA, 15 bp, Homo sapiens
ctgtagatgttgctc

SEQ ID NO: 1379696 - DNA, 15 bp, Homo sapiens
cctgtagatgttgct

SEQ ID NO: 1379697 - DNA, 15 bp, Homo sapiens
acctgtagatgttgc

SEQ ID NO: 1379698 - DNA, 15 bp, Homo sapiens
aacctgtagatgttg

SEQ ID NO: 1379699 - DNA, 15 bp, Homo sapiens
caacctgtagatgtt

SEQ ID NO: 1379700 - DNA, 15 bp, Homo sapiens
tcaacctgtagatgt

SEQ ID NO: 1379701 - DNA, 15 bp, Homo sapiens
ctcaacctgtagatg

SEQ ID NO: 1379702 - DNA, 15 bp, Homo sapiens
actcaacctgtagat

SEQ ID NO: 1379703 - DNA, 15 bp, Homo sapiens
tactcaacctgtaga

SEQ ID NO: 1379704 - DNA, 15 bp, Homo sapiens
ctactcaacctgtag

SEQ ID NO: 1379705 - DNA, 15 bp, Homo sapiens
gctactcaacctgta

SEQ ID NO: 1379706 - DNA, 15 bp, Homo sapiens
ggctactcaacctgt

SEQ ID NO: 1379707 - DNA, 15 bp, Homo sapiens
gggctactcaacctg

SEQ ID NO: 1379708 - DNA, 15 bp, Homo sapiens
agggctactcaacct

SEQ ID NO: 1379709 - DNA, 15 bp, Homo sapiens
cagggctactcaacc

SEQ ID NO: 1379710 - DNA, 15 bp, Homo sapiens
acagggctactcaac

SEQ ID NO: 1379711 - DNA, 15 bp, Homo sapiens
cacagggctactcaa

SEQ ID NO: 1379712 - DNA, 15 bp, Homo sapiens
acacagggctactca

SEQ ID NO: 1379713 - DNA, 15 bp, Homo sapiens
aacacagggctactc

SEQ ID NO: 1379714 - DNA, 15 bp, Homo sapiens
aaacacagggctact

SEQ ID NO: 1379715 - DNA, 15 bp, Homo sapiens
gaaacacagggctac

SEQ ID NO: 1379716 - DNA, 15 bp, Homo sapiens
tgaaacacagggcta

SEQ ID NO: 1379717 - DNA, 15 bp, Homo sapiens
ttgaaacacagggct

SEQ ID NO: 1379718 - DNA, 15 bp, Homo sapiens
tttgaaacacagggc

SEQ ID NO: 1379719 - DNA, 15 bp, Homo sapiens
atttgaaacacaggg

SEQ ID NO: 1379720 - DNA, 15 bp, Homo sapiens
aatttgaaacacagg

SEQ ID NO: 1379721 - DNA, 15 bp, Homo sapiens
aaatttgaaacacag

SEQ ID NO: 1379722 - DNA, 15 bp, Homo sapiens
gaaatttgaaacaca

SEQ ID NO: 1379723 - DNA, 15 bp, Homo sapiens
tgaaatttgaaacac

SEQ ID NO: 1379724 - DNA, 15 bp, Homo sapiens
ctgaaatttgaaaca

SEQ ID NO: 1379725 - DNA, 15 bp, Homo sapiens
tctgaaatttgaaac

SEQ ID NO: 1379726 - DNA, 15 bp, Homo sapiens
atctgaaatttgaaa

SEQ ID NO: 1379727 - DNA, 15 bp, Homo sapiens
aatctgaaatttgaa

SEQ ID NO: 1379728 - DNA, 15 bp, Homo sapiens
aaatctgaaatttga

SEQ ID NO: 1379729 - DNA, 15 bp, Homo sapiens
aaaatctgaaatttg

SEQ ID NO: 1379730 - DNA, 15 bp, Homo sapiens
aaaaatctgaaattt

SEQ ID NO: 1379731 - DNA, 15 bp, Homo sapiens
aaaaaatctgaaatt

SEQ ID NO: 1379732 - DNA, 15 bp, Homo sapiens
gaaaaaatctgaaat

SEQ ID NO: 1379733 - DNA, 15 bp, Homo sapiens
tgaaaaaatctgaaa

SEQ ID NO: 1379734 - DNA, 15 bp, Homo sapiens
ctgaaaaaatctgaa

SEQ ID NO: 1379735 - DNA, 15 bp, Homo sapiens
cctgaaaaaatctga

SEQ ID NO: 1379736 - DNA, 15 bp, Homo sapiens
acctgaaaaaatctg

SEQ ID NO: 1379737 - DNA, 15 bp, Homo sapiens
aacctgaaaaaatct

SEQ ID NO: 1379738 - DNA, 15 bp, Homo sapiens
aaacctgaaaaaatc

SEQ ID NO: 1379739 - DNA, 15 bp, Homo sapiens
aaaacctgaaaaaat

SEQ ID NO: 1379740 - DNA, 15 bp, Homo sapiens
caaaacctgaaaaaa

SEQ ID NO: 1379741 - DNA, 15 bp, Homo sapiens
tcaaaacctgaaaaa

SEQ ID NO: 1379742 - DNA, 15 bp, Homo sapiens
ttcaaaacctgaaaa

SEQ ID NO: 1379743 - DNA, 15 bp, Homo sapiens
cttcaaaacctgaaa

SEQ ID NO: 1379744 - DNA, 15 bp, Homo sapiens
gcttcaaaacctgaa

SEQ ID NO: 1379745 - DNA, 15 bp, Homo sapiens
tgcttcaaaacctga

SEQ ID NO: 1379746 - DNA, 15 bp, Homo sapiens
atgcttcaaaacctg

SEQ ID NO: 1379747 - DNA, 15 bp, Homo sapiens
aatgcttcaaaacct

SEQ ID NO: 1379748 - DNA, 15 bp, Homo sapiens
aaatgcttcaaaacc

SEQ ID NO: 1379749 - DNA, 15 bp, Homo sapiens
caaatgcttcaaaac

SEQ ID NO: 1379750 - DNA, 15 bp, Homo sapiens
gcaaatgcttcaaaa

SEQ ID NO: 1379751 - DNA, 15 bp, Homo sapiens
tgcaaatgcttcaaa

SEQ ID NO: 1379752 - DNA, 15 bp, Homo sapiens
atgcaaatgcttcaa

SEQ ID NO: 1379753 - DNA, 15 bp, Homo sapiens
tatgcaaatgcttca

SEQ ID NO: 1379754 - DNA, 15 bp, Homo sapiens
atatgcaaatgcttc

SEQ ID NO: 1379755 - DNA, 15 bp, Homo sapiens
tatatgcaaatgctt

SEQ ID NO: 1379756 - DNA, 15 bp, Homo sapiens
gtatatgcaaatgct

SEQ ID NO: 1379757 - DNA, 15 bp, Homo sapiens
tgtatatgcaaatgc

SEQ ID NO: 1379758 - DNA, 15 bp, Homo sapiens
atgtatatgcaaatg

SEQ ID NO: 1379759 - DNA, 15 bp, Homo sapiens
tatgtatatgcaaat

SEQ ID NO: 1379760 - DNA, 15 bp, Homo sapiens
ttatgtatatgcaaa

SEQ ID NO: 1379761 - DNA, 15 bp, Homo sapiens
attatgtatatgcaa

SEQ ID NO: 1379762 - DNA, 15 bp, Homo sapiens
cattatgtatatgca

SEQ ID NO: 1379763 - DNA, 15 bp, Homo sapiens
tcattatgtatatgc

SEQ ID NO: 1379764 - DNA, 15 bp, Homo sapiens
ctcattatgtatatg

SEQ ID NO: 1379765 - DNA, 15 bp, Homo sapiens
tctcattatgtatat

SEQ ID NO: 1379766 - DNA, 15 bp, Homo sapiens
atctcattatgtata

SEQ ID NO: 1379767 - DNA, 15 bp, Homo sapiens
tatctcattatgtat

SEQ ID NO: 1379768 - DNA, 15 bp, Homo sapiens
ttatctcattatgta

SEQ ID NO: 1379769 - DNA, 15 bp, Homo sapiens
gttatctcattatgt

SEQ ID NO: 1379770 - DNA, 15 bp, Homo sapiens
agttatctcattatg

SEQ ID NO: 1379771 - DNA, 15 bp, Homo sapiens
aagttatctcattat

SEQ ID NO: 1379772 - DNA, 15 bp, Homo sapiens
caagttatctcatta

SEQ ID NO: 1379773 - DNA, 15 bp, Homo sapiens
ccaagttatctcatt

SEQ ID NO: 1379774 - DNA, 15 bp, Homo sapiens
cccaagttatctcat

SEQ ID NO: 1379775 - DNA, 15 bp, Homo sapiens
tcccaagttatctca

SEQ ID NO: 1379776 - DNA, 15 bp, Homo sapiens
ctcccaagttatctc

SEQ ID NO: 1379777 - DNA, 15 bp, Homo sapiens
cctcccaagttatct

SEQ ID NO: 1379778 - DNA, 15 bp, Homo sapiens
ccctcccaagttatc

SEQ ID NO: 1379779 - DNA, 15 bp, Homo sapiens
accctcccaagttat

SEQ ID NO: 1379780 - DNA, 15 bp, Homo sapiens
caccctcccaagtta

SEQ ID NO: 1379781 - DNA, 15 bp, Homo sapiens
gcaccctcccaagtt

SEQ ID NO: 1379782 - DNA, 15 bp, Homo sapiens
ggcaccctcccaagt

SEQ ID NO: 1379783 - DNA, 15 bp, Homo sapiens
gggcaccctcccaag

SEQ ID NO: 1379784 - DNA, 15 bp, Homo sapiens
tgggcaccctcccaa

SEQ ID NO: 1379785 - DNA, 15 bp, Homo sapiens
ttgggcaccctccca

SEQ ID NO: 1379786 - DNA, 15 bp, Homo sapiens
cttgggcaccctccc

SEQ ID NO: 1379787 - DNA, 15 bp, Homo sapiens
acttgggcaccctcc

SEQ ID NO: 1379788 - DNA, 15 bp, Homo sapiens
cacttgggcaccctc

SEQ ID NO: 1379789 - DNA, 15 bp, Homo sapiens
acacttgggcaccct

SEQ ID NO: 1379790 - DNA, 15 bp, Homo sapiens
tacacttgggcaccc

SEQ ID NO: 1379791 - DNA, 15 bp, Homo sapiens
ttacacttgggcacc

SEQ ID NO: 1379792 - DNA, 15 bp, Homo sapiens
cttacacttgggcac

SEQ ID NO: 1379793 - DNA, 15 bp, Homo sapiens
gcttacacttgggca

SEQ ID NO: 1379794 - DNA, 15 bp, Homo sapiens
ggcttacacttgggc

SEQ ID NO: 1379795 - DNA, 15 bp, Homo sapiens
gggcttacacttggg

SEQ ID NO: 1379796 - DNA, 15 bp, Homo sapiens
tgggcttacacttgg

SEQ ID NO: 1379797 - DNA, 15 bp, Homo sapiens
ttgggcttacacttg

SEQ ID NO: 1379798 - DNA, 15 bp, Homo sapiens
tttgggcttacactt

SEQ ID NO: 1379799 - DNA, 15 bp, Homo sapiens
ttttgggcttacact

SEQ ID NO: 1379800 - DNA, 15 bp, Homo sapiens
attttgggcttacac

SEQ ID NO: 1379801 - DNA, 15 bp, Homo sapiens
aattttgggcttaca

SEQ ID NO: 1379802 - DNA, 15 bp, Homo sapiens
gaattttgggcttac

SEQ ID NO: 1379803 - DNA, 15 bp, Homo sapiens
tgaattttgggctta

SEQ ID NO: 1379804 - DNA, 15 bp, Homo sapiens
atgaattttgggctt

SEQ ID NO: 1379805 - DNA, 15 bp, Homo sapiens
catgaattttgggct

SEQ ID NO: 1379806 - DNA, 15 bp, Homo sapiens
acatgaattttgggc

SEQ ID NO: 1379807 - DNA, 15 bp, Homo sapiens
tacatgaattttggg

SEQ ID NO: 1379808 - DNA, 15 bp, Homo sapiens
atacatgaattttgg

SEQ ID NO: 1379809 - DNA, 15 bp, Homo sapiens
catacatgaattttg

SEQ ID NO: 1379810 - DNA, 15 bp, Homo sapiens
acatacatgaatttt

SEQ ID NO: 1379811 - DNA, 15 bp, Homo sapiens
aacatacatgaattt

SEQ ID NO: 1379812 - DNA, 15 bp, Homo sapiens
aaacatacatgaatt

SEQ ID NO: 1379813 - DNA, 15 bp, Homo sapiens
gaaacatacatgaat

SEQ ID NO: 1379814 - DNA, 15 bp, Homo sapiens
tgaaacatacatgaa

SEQ ID NO: 1379815 - DNA, 15 bp, Homo sapiens
atgaaacatacatga

SEQ ID NO: 1379816 - DNA, 15 bp, Homo sapiens
tatgaaacatacatg

SEQ ID NO: 1379817 - DNA, 15 bp, Homo sapiens
atatgaaacatacat

SEQ ID NO: 1379818 - DNA, 15 bp, Homo sapiens
catatgaaacataca

SEQ ID NO: 1379819 - DNA, 15 bp, Homo sapiens
gcatatgaaacatac

SEQ ID NO: 1379820 - DNA, 15 bp, Homo sapiens
tgcatatgaaacata

SEQ ID NO: 1379821 - DNA, 15 bp, Homo sapiens
gtgcatatgaaacat

SEQ ID NO: 1379822 - DNA, 15 bp, Homo sapiens
ggtgcatatgaaaca

SEQ ID NO: 1379823 - DNA, 15 bp, Homo sapiens
aggtgcatatgaaac

SEQ ID NO: 1379824 - DNA, 15 bp, Homo sapiens
aaggtgcatatgaaa

SEQ ID NO: 1379825 - DNA, 15 bp, Homo sapiens
taaggtgcatatgaa

SEQ ID NO: 1379826 - DNA, 15 bp, Homo sapiens
ataaggtgcatatga

SEQ ID NO: 1379827 - DNA, 15 bp, Homo sapiens
tataaggtgcatatg

SEQ ID NO: 1379828 - DNA, 15 bp, Homo sapiens
gtataaggtgcatat

SEQ ID NO: 1379829 - DNA, 15 bp, Homo sapiens
tgtataaggtgcata

SEQ ID NO: 1379830 - DNA, 15 bp, Homo sapiens
gtgtataaggtgcat

SEQ ID NO: 1379831 - DNA, 15 bp, Homo sapiens
tgtgtataaggtgca

SEQ ID NO: 1379832 - DNA, 15 bp, Homo sapiens
atgtgtataaggtgc

SEQ ID NO: 1379833 - DNA, 15 bp, Homo sapiens
tatgtgtataaggtg

SEQ ID NO: 1379834 - DNA, 15 bp, Homo sapiens
ctatgtgtataaggt

SEQ ID NO: 1379835 - DNA, 15 bp, Homo sapiens
cctatgtgtataagg

SEQ ID NO: 1379836 - DNA, 15 bp, Homo sapiens
gcctatgtgtataag

SEQ ID NO: 1379837 - DNA, 15 bp, Homo sapiens
agcctatgtgtataa

SEQ ID NO: 1379838 - DNA, 15 bp, Homo sapiens
cagcctatgtgtata

SEQ ID NO: 1379839 - DNA, 15 bp, Homo sapiens
tcagcctatgtgtat

SEQ ID NO: 1379840 - DNA, 15 bp, Homo sapiens
ttcagcctatgtgta

SEQ ID NO: 1379841 - DNA, 15 bp, Homo sapiens
cttcagcctatgtgt

SEQ ID NO: 1379842 - DNA, 15 bp, Homo sapiens
ccttcagcctatgtg

SEQ ID NO: 1379843 - DNA, 15 bp, Homo sapiens
accttcagcctatgt

SEQ ID NO: 1379844 - DNA, 15 bp, Homo sapiens
taccttcagcctatg

SEQ ID NO: 1379845 - DNA, 15 bp, Homo sapiens
ttaccttcagcctat

SEQ ID NO: 1379846 - DNA, 15 bp, Homo sapiens
attaccttcagccta

SEQ ID NO: 1379847 - DNA, 15 bp, Homo sapiens
aattaccttcagcct

SEQ ID NO: 1379848 - DNA, 15 bp, Homo sapiens
aaattaccttcagcc

SEQ ID NO: 1379849 - DNA, 15 bp, Homo sapiens
aaaattaccttcagc

SEQ ID NO: 1379850 - DNA, 15 bp, Homo sapiens
taaaattaccttcag

SEQ ID NO: 1379851 - DNA, 15 bp, Homo sapiens
ctaaaattaccttca

SEQ ID NO: 1379852 - DNA, 15 bp, Homo sapiens
tctaaaattaccttc

SEQ ID NO: 1379853 - DNA, 15 bp, Homo sapiens
gtctaaaattacctt

SEQ ID NO: 1379854 - DNA, 15 bp, Homo sapiens
tgtctaaaattacct

SEQ ID NO: 1379855 - DNA, 15 bp, Homo sapiens
ttgtctaaaattacc

SEQ ID NO: 1379856 - DNA, 15 bp, Homo sapiens
attgtctaaaattac

SEQ ID NO: 1379857 - DNA, 15 bp, Homo sapiens
tattgtctaaaatta

SEQ ID NO: 1379858 - DNA, 15 bp, Homo sapiens
atattgtctaaaatt

SEQ ID NO: 1379859 - DNA, 15 bp, Homo sapiens
aatattgtctaaaat

SEQ ID NO: 1379860 - DNA, 15 bp, Homo sapiens
aaatattgtctaaaa

SEQ ID NO: 1379861 - DNA, 15 bp, Homo sapiens
aaaatattgtctaaa

SEQ ID NO: 1379862 - DNA, 15 bp, Homo sapiens
aaaaatattgtctaa

SEQ ID NO: 1379863 - DNA, 15 bp, Homo sapiens
aaaaaatattgtcta

SEQ ID NO: 1379864 - DNA, 15 bp, Homo sapiens
taaaaaatattgtct

SEQ ID NO: 1379865 - DNA, 15 bp, Homo sapiens
gtaaaaaatattgtc

SEQ ID NO: 1379866 - DNA, 15 bp, Homo sapiens
agtaaaaaatattgt

SEQ ID NO: 1379867 - DNA, 15 bp, Homo sapiens
tagtaaaaaatattg

SEQ ID NO: 1379868 - DNA, 15 bp, Homo sapiens
ttagtaaaaaatatt

SEQ ID NO: 1379869 - DNA, 15 bp, Homo sapiens
attagtaaaaaatat

SEQ ID NO: 1379870 - DNA, 15 bp, Homo sapiens
aattagtaaaaaata

SEQ ID NO: 1379871 - DNA, 15 bp, Homo sapiens
aaattagtaaaaaat

SEQ ID NO: 1379872 - DNA, 15 bp, Homo sapiens
aaaattagtaaaaaa

SEQ ID NO: 1379873 - DNA, 15 bp, Homo sapiens
caaaattagtaaaaa

SEQ ID NO: 1379874 - DNA, 15 bp, Homo sapiens
acaaaattagtaaaa

SEQ ID NO: 1379875 - DNA, 15 bp, Homo sapiens
cacaaaattagtaaa

SEQ ID NO: 1379876 - DNA, 15 bp, Homo sapiens
gcacaaaattagtaa

SEQ ID NO: 1379877 - DNA, 15 bp, Homo sapiens
tgcacaaaattagta

SEQ ID NO: 1379878 - DNA, 15 bp, Homo sapiens
atgcacaaaattagt

SEQ ID NO: 1379879 - DNA, 15 bp, Homo sapiens
catgcacaaaattag

SEQ ID NO: 1379880 - DNA, 15 bp, Homo sapiens
tcatgcacaaaatta

SEQ ID NO: 1379881 - DNA, 15 bp, Homo sapiens
ttcatgcacaaaatt

SEQ ID NO: 1379882 - DNA, 15 bp, Homo sapiens
tttcatgcacaaaat

SEQ ID NO: 1379883 - DNA, 15 bp, Homo sapiens
gtttcatgcacaaaa

SEQ ID NO: 1379884 - DNA, 15 bp, Homo sapiens
tgtttcatgcacaaa

SEQ ID NO: 1379885 - DNA, 15 bp, Homo sapiens
ttgtttcatgcacaa

SEQ ID NO: 1379886 - DNA, 15 bp, Homo sapiens
gctttgtttcatgca

SEQ ID NO: 1379887 - DNA, 15 bp, Homo sapiens
agctttgtttcatgc

SEQ ID NO: 1379888 - DNA, 15 bp, Homo sapiens
aagctttgtttcatg

SEQ ID NO: 1379889 - DNA, 15 bp, Homo sapiens
taagctttgtttcat

SEQ ID NO: 1379890 - DNA, 15 bp, Homo sapiens
ataagctttgtttca

SEQ ID NO: 1379891 - DNA, 15 bp, Homo sapiens
cataagctttgtttc

SEQ ID NO: 1379892 - DNA, 15 bp, Homo sapiens
acataagctttgttt

SEQ ID NO: 1379893 - DNA, 15 bp, Homo sapiens
aacataagctttgtt

SEQ ID NO: 1379894 - DNA, 15 bp, Homo sapiens
taacataagctttgt

SEQ ID NO: 1379895 - DNA, 15 bp, Homo sapiens
ctaacataagctttg

SEQ ID NO: 1379896 - DNA, 15 bp, Homo sapiens
actaacataagcttt

SEQ ID NO: 1379897 - DNA, 15 bp, Homo sapiens
tactaacataagctt

SEQ ID NO: 1379898 - DNA, 15 bp, Homo sapiens
gtactaacataagct

SEQ ID NO: 1379899 - DNA, 15 bp, Homo sapiens
ggtactaacataagc

SEQ ID NO: 1379900 - DNA, 15 bp, Homo sapiens
aggtactaacataag

SEQ ID NO: 1379901 - DNA, 15 bp, Homo sapiens
taggtactaacataa

SEQ ID NO: 1379902 - DNA, 15 bp, Homo sapiens
ataggtactaacata

SEQ ID NO: 1379903 - DNA, 15 bp, Homo sapiens
cataggtactaacat

SEQ ID NO: 1379904 - DNA, 15 bp, Homo sapiens
acataggtactaaca

SEQ ID NO: 1379905 - DNA, 15 bp, Homo sapiens
cacataggtactaac

SEQ ID NO: 1379906 - DNA, 15 bp, Homo sapiens
acacataggtactaa

SEQ ID NO: 1379907 - DNA, 15 bp, Homo sapiens
cacacataggtacta

SEQ ID NO: 1379908 - DNA, 15 bp, Homo sapiens
tcacacataggtact

SEQ ID NO: 1379909 - DNA, 15 bp, Homo sapiens
ttcacacataggtac

SEQ ID NO: 1379910 - DNA, 15 bp, Homo sapiens
cttcacacataggta

SEQ ID NO: 1379911 - DNA, 15 bp, Homo sapiens
acttcacacataggt

SEQ ID NO: 1379912 - DNA, 15 bp, Homo sapiens
aacttcacacatagg

SEQ ID NO: 1379913 - DNA, 15 bp, Homo sapiens
aaacttcacacatag

SEQ ID NO: 1379914 - DNA, 15 bp, Homo sapiens
aaaacttcacacata

SEQ ID NO: 1379915 - DNA, 15 bp, Homo sapiens
gaaaacttcacacat

SEQ ID NO: 1379916 - DNA, 15 bp, Homo sapiens
ggaaaacttcacaca

SEQ ID NO: 1379917 - DNA, 15 bp, Homo sapiens
tggaaaacttcacac

SEQ ID NO: 1379918 - DNA, 15 bp, Homo sapiens
gtggaaaacttcaca

SEQ ID NO: 1379919 - DNA, 15 bp, Homo sapiens
agtggaaaacttcac

SEQ ID NO: 1379920 - DNA, 15 bp, Homo sapiens
aagtggaaaacttca

SEQ ID NO: 1379921 - DNA, 15 bp, Homo sapiens
caagtggaaaacttc

SEQ ID NO: 1379922 - DNA, 15 bp, Homo sapiens
acaagtggaaaactt

SEQ ID NO: 1379923 - DNA, 15 bp, Homo sapiens
cacaagtggaaaact

SEQ ID NO: 1379924 - DNA, 15 bp, Homo sapiens
ccacaagtggaaaac

SEQ ID NO: 1379925 - DNA, 15 bp, Homo sapiens
gccacaagtggaaaa

SEQ ID NO: 1379926 - DNA, 15 bp, Homo sapiens
tgccacaagtggaaa

SEQ ID NO: 1379927 - DNA, 15 bp, Homo sapiens
atgccacaagtggaa

SEQ ID NO: 1379928 - DNA, 15 bp, Homo sapiens
gatgccacaagtgga

SEQ ID NO: 1379929 - DNA, 15 bp, Homo sapiens
tgatgccacaagtgg

SEQ ID NO: 1379930 - DNA, 15 bp, Homo sapiens
atgatgccacaagtg

SEQ ID NO: 1379931 - DNA, 15 bp, Homo sapiens
catgatgccacaagt

SEQ ID NO: 1379932 - DNA, 15 bp, Homo sapiens
gcatgatgccacaag

SEQ ID NO: 1379933 - DNA, 15 bp, Homo sapiens
ggcatgatgccacaa

SEQ ID NO: 1379934 - DNA, 15 bp, Homo sapiens
aggcatgatgccaca

SEQ ID NO: 1379935 - DNA, 15 bp, Homo sapiens
aaggcatgatgccac

SEQ ID NO: 1379936 - DNA, 15 bp, Homo sapiens
gaaggcatgatgcca

SEQ ID NO: 1379937 - DNA, 15 bp, Homo sapiens
tgaaggcatgatgcc

SEQ ID NO: 1379938 - DNA, 15 bp, Homo sapiens
gtgaaggcatgatgc

SEQ ID NO: 1379939 - DNA, 15 bp, Homo sapiens
agtgaaggcatgatg

SEQ ID NO: 1379940 - DNA, 15 bp, Homo sapiens
gagtgaaggcatgat

SEQ ID NO: 1379941 - DNA, 15 bp, Homo sapiens
tgagtgaaggcatga

SEQ ID NO: 1379942 - DNA, 15 bp, Homo sapiens
ttgagtgaaggcatg

SEQ ID NO: 1379943 - DNA, 15 bp, Homo sapiens
tttgagtgaaggcat

SEQ ID NO: 1379944 - DNA, 15 bp, Homo sapiens
ttttgagtgaaggca

SEQ ID NO: 1379945 - DNA, 15 bp, Homo sapiens
tttttgagtgaaggc

SEQ ID NO: 1379946 - DNA, 15 bp, Homo sapiens
gtttttgagtgaagg

SEQ ID NO: 1379947 - DNA, 15 bp, Homo sapiens
agtttttgagtgaag

SEQ ID NO: 1379948 - DNA, 15 bp, Homo sapiens
aagtttttgagtgaa

SEQ ID NO: 1379949 - DNA, 15 bp, Homo sapiens
aaagtttttgagtga

SEQ ID NO: 1379950 - DNA, 15 bp, Homo sapiens
aaaagtttttgagtg

SEQ ID NO: 1379951 - DNA, 15 bp, Homo sapiens
caaaagtttttgagt

SEQ ID NO: 1379952 - DNA, 15 bp, Homo sapiens
ccaaaagtttttgag

SEQ ID NO: 1379953 - DNA, 15 bp, Homo sapiens
tccaaaagtttttga

SEQ ID NO: 1379954 - DNA, 15 bp, Homo sapiens
atccaaaagtttttg

SEQ ID NO: 1379955 - DNA, 15 bp, Homo sapiens
aatccaaaagttttt

SEQ ID NO: 1379956 - DNA, 15 bp, Homo sapiens
aaatccaaaagtttt

SEQ ID NO: 1379957 - DNA, 15 bp, Homo sapiens
aaaatccaaaagttt

SEQ ID NO: 1379958 - DNA, 15 bp, Homo sapiens
caaaatccaaaagtt

SEQ ID NO: 1379959 - DNA, 15 bp, Homo sapiens
ccaaaatccaaaagt

SEQ ID NO: 1379960 - DNA, 15 bp, Homo sapiens
tccaaaatccaaaag

SEQ ID NO: 1379961 - DNA, 15 bp, Homo sapiens
ctccaaaatccaaaa

SEQ ID NO: 1379962 - DNA, 15 bp, Homo sapiens
gctccaaaatccaaa

SEQ ID NO: 1379963 - DNA, 15 bp, Homo sapiens
tgctccaaaatccaa

SEQ ID NO: 1379964 - DNA, 15 bp, Homo sapiens
atgctccaaaatcca

SEQ ID NO: 1379965 - DNA, 15 bp, Homo sapiens
aatgctccaaaatcc

SEQ ID NO: 1379966 - DNA, 15 bp, Homo sapiens
aaatgctccaaaatc

SEQ ID NO: 1379967 - DNA, 15 bp, Homo sapiens
gaaatgctccaaaat

SEQ ID NO: 1379968 - DNA, 15 bp, Homo sapiens
cgaaatgctccaaaa

SEQ ID NO: 1379969 - DNA, 15 bp, Homo sapiens
ccgaaatgctccaaa

SEQ ID NO: 1379970 - DNA, 15 bp, Homo sapiens
tccgaaatgctccaa

SEQ ID NO: 1379971 - DNA, 15 bp, Homo sapiens
atccgaaatgctcca

SEQ ID NO: 1379972 - DNA, 15 bp, Homo sapiens
catccgaaatgctcc

SEQ ID NO: 1379973 - DNA, 15 bp, Homo sapiens
acatccgaaatgctc

SEQ ID NO: 1379974 - DNA, 15 bp, Homo sapiens
aacatccgaaatgct

SEQ ID NO: 1379975 - DNA, 15 bp, Homo sapiens
caacatccgaaatgc

SEQ ID NO: 1379976 - DNA, 15 bp, Homo sapiens
ccaacatccgaaatg

SEQ ID NO: 1379977 - DNA, 15 bp, Homo sapiens
tccaacatccgaaat

SEQ ID NO: 1379978 - DNA, 15 bp, Homo sapiens
gtccaacatccgaaa

SEQ ID NO: 1379979 - DNA, 15 bp, Homo sapiens
agtccaacatccgaa

SEQ ID NO: 1379980 - DNA, 15 bp, Homo sapiens
aagtccaacatccga

SEQ ID NO: 1379981 - DNA, 15 bp, Homo sapiens
aaagtccaacatccg

SEQ ID NO: 1379982 - DNA, 15 bp, Homo sapiens
gaaagtccaacatcc

SEQ ID NO: 1379983 - DNA, 15 bp, Homo sapiens
tgaaagtccaacatc

SEQ ID NO: 1379984 - DNA, 15 bp, Homo sapiens
ctgaaagtccaacat

SEQ ID NO: 1379985 - DNA, 15 bp, Homo sapiens
tctgaaagtccaaca

SEQ ID NO: 1379986 - DNA, 15 bp, Homo sapiens
atctgaaagtccaac

SEQ ID NO: 1379987 - DNA, 15 bp, Homo sapiens
aatctgaaagtccaa

SEQ ID NO: 1379988 - DNA, 15 bp, Homo sapiens
taatctgaaagtcca

SEQ ID NO: 1379989 - DNA, 15 bp, Homo sapiens
ttaatctgaaagtcc

SEQ ID NO: 1379990 - DNA, 15 bp, Homo sapiens
cttaatctgaaagtc

SEQ ID NO: 1379991 - DNA, 15 bp, Homo sapiens
ccttaatctgaaagt

SEQ ID NO: 1379992 - DNA, 15 bp, Homo sapiens
tccttaatctgaaag

SEQ ID NO: 1379993 - DNA, 15 bp, Homo sapiens
atccttaatctgaaa

SEQ ID NO: 1379994 - DNA, 15 bp, Homo sapiens
catccttaatctgaa

SEQ ID NO: 1379995 - DNA, 15 bp, Homo sapiens
gcatccttaatctga

SEQ ID NO: 1379996 - DNA, 15 bp, Homo sapiens
agcatccttaatctg

SEQ ID NO: 1379997 - DNA, 15 bp, Homo sapiens
gagcatccttaatct

SEQ ID NO: 1379998 - DNA, 15 bp, Homo sapiens
tgagcatccttaatc

SEQ ID NO: 1379999 - DNA, 15 bp, Homo sapiens
ttgagcatccttaat

SEQ ID NO: 1380000 - DNA, 15 bp, Homo sapiens
attgagcatccttaa

SEQ ID NO: 1380001 - DNA, 15 bp, Homo sapiens
aattgagcatcctta

SEQ ID NO: 1380002 - DNA, 15 bp, Homo sapiens
caattgagcatcctt

SEQ ID NO: 1380003 - DNA, 15 bp, Homo sapiens
acaattgagcatcct

SEQ ID NO: 1380004 - DNA, 15 bp, Homo sapiens
tacaattgagcatcc

SEQ ID NO: 1380005 - DNA, 15 bp, Homo sapiens
atacaattgagcatc

SEQ ID NO: 1380006 - DNA, 15 bp, Homo sapiens
gatacaattgagcat

SEQ ID NO: 1380007 - DNA, 15 bp, Homo sapiens
agatacaattgagca

SEQ ID NO: 1380008 - DNA, 15 bp, Homo sapiens
aagatacaattgagc

SEQ ID NO: 1380009 - DNA, 15 bp, Homo sapiens
caagatacaattgag

SEQ ID NO: 1380010 - DNA, 15 bp, Homo sapiens
acaagatacaattga

SEQ ID NO: 1380011 - DNA, 15 bp, Homo sapiens
aacaagatacaattg

SEQ ID NO: 1380012 - DNA, 15 bp, Homo sapiens
aaacaagatacaatt

SEQ ID NO: 1380013 - DNA, 15 bp, Homo sapiens
taaacaagatacaat

SEQ ID NO: 1380014 - DNA, 15 bp, Homo sapiens
ataaacaagatacaa

SEQ ID NO: 1380015 - DNA, 15 bp, Homo sapiens
aataaacaagataca

SEQ ID NO: 1380016 - DNA, 15 bp, Homo sapiens
aaataaacaagatac

SEQ ID NO: 1380017 - DNA, 15 bp, Homo sapiens
aaaataaacaagata

SEQ ID NO: 1380018 - DNA, 15 bp, Homo sapiens
aaaaataaacaagat

SEQ ID NO: 1380019 - DNA, 15 bp, Homo sapiens
caaaaataaacaaga

SEQ ID NO: 1380020 - DNA, 15 bp, Homo sapiens
acaaaaataaacaag

SEQ ID NO: 1380021 - DNA, 15 bp, Homo sapiens
cacaaaaataaacaa

SEQ ID NO: 1380022 - DNA, 15 bp, Homo sapiens
gcacaaaaataaaca

SEQ ID NO: 1380023 - DNA, 15 bp, Homo sapiens
agcacaaaaataaac

SEQ ID NO: 1380024 - DNA, 15 bp, Homo sapiens
aagcacaaaaataaa

SEQ ID NO: 1380025 - DNA, 15 bp, Homo sapiens
gaagcacaaaaataa

SEQ ID NO: 1380026 - DNA, 15 bp, Homo sapiens
ggaagcacaaaaata

SEQ ID NO: 1380027 - DNA, 15 bp, Homo sapiens
aggaagcacaaaaat

SEQ ID NO: 1380028 - DNA, 15 bp, Homo sapiens
gaggaagcacaaaaa

SEQ ID NO: 1380029 - DNA, 15 bp, Homo sapiens
tgaggaagcacaaaa

SEQ ID NO: 1380030 - DNA, 15 bp, Homo sapiens
ctgaggaagcacaaa

SEQ ID NO: 1380031 - DNA, 15 bp, Homo sapiens
actgaggaagcacaa

SEQ ID NO: 1380032 - DNA, 15 bp, Homo sapiens
gactgaggaagcaca

SEQ ID NO: 1380033 - DNA, 15 bp, Homo sapiens
agactgaggaagcac

SEQ ID NO: 1380034 - DNA, 15 bp, Homo sapiens
gagactgaggaagca

SEQ ID NO: 1380035 - DNA, 15 bp, Homo sapiens
ggagactgaggaagc

SEQ ID NO: 1380036 - DNA, 15 bp, Homo sapiens
gggagactgaggaag

SEQ ID NO: 1380037 - DNA, 15 bp, Homo sapiens
agggagactgaggaa

SEQ ID NO: 1380038 - DNA, 15 bp, Homo sapiens
aagggagactgagga

SEQ ID NO: 1380039 - DNA, 15 bp, Homo sapiens
gaagggagactgagg

SEQ ID NO: 1380040 - DNA, 15 bp, Homo sapiens
tgaagggagactgag

SEQ ID NO: 1380041 - DNA, 15 bp, Homo sapiens
gtgaagggagactga

SEQ ID NO: 1380042 - DNA, 15 bp, Homo sapiens
agtgaagggagactg

SEQ ID NO: 1380043 - DNA, 15 bp, Homo sapiens
tagtgaagggagact

SEQ ID NO: 1380044 - DNA, 15 bp, Homo sapiens
ttagtgaagggagac

SEQ ID NO: 1380045 - DNA, 15 bp, Homo sapiens
tttagtgaagggaga

SEQ ID NO: 1380046 - DNA, 15 bp, Homo sapiens
ttttagtgaagggag

SEQ ID NO: 1380047 - DNA, 15 bp, Homo sapiens
attttagtgaaggga

SEQ ID NO: 1380048 - DNA, 15 bp, Homo sapiens
tattttagtgaaggg

SEQ ID NO: 1380049 - DNA, 15 bp, Homo sapiens
ttattttagtgaagg

SEQ ID NO: 1380050 - DNA, 15 bp, Homo sapiens
tttattttagtgaag

SEQ ID NO: 1380051 - DNA, 15 bp, Homo sapiens
ttttattttagtgaa

SEQ ID NO: 1380052 - DNA, 15 bp, Homo sapiens
tttttattttagtga

SEQ ID NO: 1380053 - DNA, 15 bp, Homo sapiens
gtttttattttagtg

SEQ ID NO: 1380054 - DNA, 15 bp, Homo sapiens
tgtttttattttagt

SEQ ID NO: 1380055 - DNA, 15 bp, Homo sapiens
gtgtttttattttag

SEQ ID NO: 1380056 - DNA, 15 bp, Homo sapiens
ggtgtttttatttta

SEQ ID NO: 1380057 - DNA, 15 bp, Homo sapiens
tggtgtttttatttt

SEQ ID NO: 1380058 - DNA, 15 bp, Homo sapiens
atggtgtttttattt

SEQ ID NO: 1380059 - DNA, 15 bp, Homo sapiens
aatggtgtttttatt

SEQ ID NO: 1380060 - DNA, 15 bp, Homo sapiens
taatggtgtttttat

SEQ ID NO: 1380061 - DNA, 15 bp, Homo sapiens
ttaatggtgttttta

SEQ ID NO: 1380062 - DNA, 15 bp, Homo sapiens
cttaatggtgttttt

SEQ ID NO: 1380063 - DNA, 15 bp, Homo sapiens
acttaatggtgtttt

SEQ ID NO: 1380064 - DNA, 15 bp, Homo sapiens
cacttaatggtgttt

SEQ ID NO: 1380065 - DNA, 15 bp, Homo sapiens
gcacttaatggtgtt

SEQ ID NO: 1380066 - DNA, 15 bp, Homo sapiens
tgcacttaatggtgt

SEQ ID NO: 1380067 - DNA, 15 bp, Homo sapiens
ttgcacttaatggtg

SEQ ID NO: 1380068 - DNA, 15 bp, Homo sapiens
cttgcacttaatggt

SEQ ID NO: 1380069 - DNA, 15 bp, Homo sapiens
tcttgcacttaatgg

SEQ ID NO: 1380070 - DNA, 15 bp, Homo sapiens
ttcttgcacttaatg

SEQ ID NO: 1380071 - DNA, 15 bp, Homo sapiens
gttcttgcacttaat

SEQ ID NO: 1380072 - DNA, 15 bp, Homo sapiens
agttcttgcacttaa

SEQ ID NO: 1380073 - DNA, 15 bp, Homo sapiens
aagttcttgcactta

SEQ ID NO: 1380074 - DNA, 15 bp, Homo sapiens
gaagttcttgcactt

SEQ ID NO: 1380075 - DNA, 15 bp, Homo sapiens
tgaagttcttgcact

SEQ ID NO: 1380076 - DNA, 15 bp, Homo sapiens
ctgaagttcttgcac

SEQ ID NO: 1380077 - DNA, 15 bp, Homo sapiens
gctgaagttcttgca

SEQ ID NO: 1380078 - DNA, 15 bp, Homo sapiens
ggctgaagttcttgc

SEQ ID NO: 1380079 - DNA, 15 bp, Homo sapiens
tggctgaagttcttg

SEQ ID NO: 1380080 - DNA, 15 bp, Homo sapiens
atggctgaagttctt

SEQ ID NO: 1380081 - DNA, 15 bp, Homo sapiens
gatggctgaagttct

SEQ ID NO: 1380082 - DNA, 15 bp, Homo sapiens
agatggctgaagttc

SEQ ID NO: 1380083 - DNA, 15 bp, Homo sapiens
cagatggctgaagtt

SEQ ID NO: 1380084 - DNA, 15 bp, Homo sapiens
ccagatggctgaagt

SEQ ID NO: 1380085 - DNA, 15 bp, Homo sapiens
accagatggctgaag

SEQ ID NO: 1380086 - DNA, 15 bp, Homo sapiens
gaccagatggctgaa

SEQ ID NO: 1380087 - DNA, 15 bp, Homo sapiens
ggaccagatggctga

SEQ ID NO: 1380088 - DNA, 15 bp, Homo sapiens
tggaccagatggctg

SEQ ID NO: 1380089 - DNA, 15 bp, Homo sapiens
gtggaccagatggct

SEQ ID NO: 1380090 - DNA, 15 bp, Homo sapiens
agtggaccagatggc

SEQ ID NO: 1380091 - DNA, 15 bp, Homo sapiens
cagtggaccagatgg

SEQ ID NO: 1380092 - DNA, 15 bp, Homo sapiens
tcagtggaccagatg

SEQ ID NO: 1380093 - DNA, 15 bp, Homo sapiens
atcagtggaccagat

SEQ ID NO: 1380094 - DNA, 15 bp, Homo sapiens
tatcagtggaccaga

SEQ ID NO: 1380095 - DNA, 15 bp, Homo sapiens
atatcagtggaccag

SEQ ID NO: 1380096 - DNA, 15 bp, Homo sapiens
tatatcagtggacca

SEQ ID NO: 1380097 - DNA, 15 bp, Homo sapiens
gtatatcagtggacc

SEQ ID NO: 1380098 - DNA, 15 bp, Homo sapiens
ggtatatcagtggac

SEQ ID NO: 1380099 - DNA, 15 bp, Homo sapiens
aggtatatcagtgga

SEQ ID NO: 1380100 - DNA, 15 bp, Homo sapiens
gaggtatatcagtgg

SEQ ID NO: 1380101 - DNA, 15 bp, Homo sapiens
agaggtatatcagtg

SEQ ID NO: 1380102 - DNA, 15 bp, Homo sapiens
cagaggtatatcagt

SEQ ID NO: 1380103 - DNA, 15 bp, Homo sapiens
ccagaggtatatcag

SEQ ID NO: 1380104 - DNA, 15 bp, Homo sapiens
gccagaggtatatca

SEQ ID NO: 1380105 - DNA, 15 bp, Homo sapiens
tgccagaggtatatc

SEQ ID NO: 1380106 - DNA, 15 bp, Homo sapiens
gtgccagaggtatat

SEQ ID NO: 1380107 - DNA, 15 bp, Homo sapiens
ggtgccagaggtata

SEQ ID NO: 1380108 - DNA, 15 bp, Homo sapiens
aggtgccagaggtat

SEQ ID NO: 1380109 - DNA, 15 bp, Homo sapiens
caggtgccagaggta

SEQ ID NO: 1380110 - DNA, 15 bp, Homo sapiens
ccaggtgccagaggt

SEQ ID NO: 1380111 - DNA, 15 bp, Homo sapiens
gccaggtgccagagg

SEQ ID NO: 1380112 - DNA, 15 bp, Homo sapiens
tgccaggtgccagag

SEQ ID NO: 1380113 - DNA, 15 bp, Homo sapiens
ctgccaggtgccaga

SEQ ID NO: 1380114 - DNA, 15 bp, Homo sapiens
tctgccaggtgccag

SEQ ID NO: 1380115 - DNA, 15 bp, Homo sapiens
ctctgccaggtgcca

SEQ ID NO: 1380116 - DNA, 15 bp, Homo sapiens
tctctgccaggtgcc

SEQ ID NO: 1380117 - DNA, 15 bp, Homo sapiens
ctctctgccaggtgc

SEQ ID NO: 1380118 - DNA, 15 bp, Homo sapiens
gctctctgccaggtg

SEQ ID NO: 1380119 - DNA, 15 bp, Homo sapiens
ggctctctgccaggt

SEQ ID NO: 1380120 - DNA, 15 bp, Homo sapiens
aggctctctgccagg

SEQ ID NO: 1380121 - DNA, 15 bp, Homo sapiens
caggctctctgccag

SEQ ID NO: 1380122 - DNA, 15 bp, Homo sapiens
ccaggctctctgcca

SEQ ID NO: 1380123 - DNA, 15 bp, Homo sapiens
gccaggctctctgcc

SEQ ID NO: 1380124 - DNA, 15 bp, Homo sapiens
tgccaggctctctgc

SEQ ID NO: 1380125 - DNA, 15 bp, Homo sapiens
gtgccaggctctctg

SEQ ID NO: 1380126 - DNA, 15 bp, Homo sapiens
tgtgccaggctctct

SEQ ID NO: 1380127 - DNA, 15 bp, Homo sapiens
atgtgccaggctctc

SEQ ID NO: 1380128 - DNA, 15 bp, Homo sapiens
tatgtgccaggctct

SEQ ID NO: 1380129 - DNA, 15 bp, Homo sapiens
ctatgtgccaggctc

SEQ ID NO: 1380130 - DNA, 15 bp, Homo sapiens
actatgtgccaggct

SEQ ID NO: 1380131 - DNA, 15 bp, Homo sapiens
tactatgtgccaggc

SEQ ID NO: 1380132 - DNA, 15 bp, Homo sapiens
ctactatgtgccagg

SEQ ID NO: 1380133 - DNA, 15 bp, Homo sapiens
cctactatgtgccag

SEQ ID NO: 1380134 - DNA, 15 bp, Homo sapiens
acctactatgtgcca

SEQ ID NO: 1380135 - DNA, 15 bp, Homo sapiens
cacctactatgtgcc

SEQ ID NO: 1380136 - DNA, 15 bp, Homo sapiens
gcacctactatgtgc

SEQ ID NO: 1380137 - DNA, 15 bp, Homo sapiens
agcacctactatgtg

SEQ ID NO: 1380138 - DNA, 15 bp, Homo sapiens
aagcacctactatgt

SEQ ID NO: 1380139 - DNA, 15 bp, Homo sapiens
taagcacctactatg

SEQ ID NO: 1380140 - DNA, 15 bp, Homo sapiens
ctaagcacctactat

SEQ ID NO: 1380141 - DNA, 15 bp, Homo sapiens
actaagcacctacta

SEQ ID NO: 1380142 - DNA, 15 bp, Homo sapiens
cactaagcacctact

SEQ ID NO: 1380143 - DNA, 15 bp, Homo sapiens
tcactaagcacctac

SEQ ID NO: 1380144 - DNA, 15 bp, Homo sapiens
atcactaagcaccta

SEQ ID NO: 1380145 - DNA, 15 bp, Homo sapiens
tatcactaagcacct

SEQ ID NO: 1380146 - DNA, 15 bp, Homo sapiens
gtatcactaagcacc

SEQ ID NO: 1380147 - DNA, 15 bp, Homo sapiens
agtatcactaagcac

SEQ ID NO: 1380148 - DNA, 15 bp, Homo sapiens
aagtatcactaagca

SEQ ID NO: 1380149 - DNA, 15 bp, Homo sapiens
caagtatcactaagc

SEQ ID NO: 1380150 - DNA, 15 bp, Homo sapiens
acaagtatcactaag

SEQ ID NO: 1380151 - DNA, 15 bp, Homo sapiens
tacaagtatcactaa

SEQ ID NO: 1380152 - DNA, 15 bp, Homo sapiens
ctacaagtatcacta

SEQ ID NO: 1380153 - DNA, 15 bp, Homo sapiens
tctacaagtatcact

SEQ ID NO: 1380154 - DNA, 15 bp, Homo sapiens
ttctacaagtatcac

SEQ ID NO: 1380155 - DNA, 15 bp, Homo sapiens
tttctacaagtatca

SEQ ID NO: 1380156 - DNA, 15 bp, Homo sapiens
ttttctacaagtatc

SEQ ID NO: 1380157 - DNA, 15 bp, Homo sapiens
tttttctacaagtat

SEQ ID NO: 1380158 - DNA, 15 bp, Homo sapiens
ttttttctacaagta

SEQ ID NO: 1380159 - DNA, 15 bp, Homo sapiens
attttttctacaagt

SEQ ID NO: 1380160 - DNA, 15 bp, Homo sapiens
aattttttctacaag

SEQ ID NO: 1380161 - DNA, 15 bp, Homo sapiens
taattttttctacaa

SEQ ID NO: 1380162 - DNA, 15 bp, Homo sapiens
ctaattttttctaca

SEQ ID NO: 1380163 - DNA, 15 bp, Homo sapiens
gctaattttttctac

SEQ ID NO: 1380164 - DNA, 15 bp, Homo sapiens
agctaattttttcta

SEQ ID NO: 1380165 - DNA, 15 bp, Homo sapiens
cagctaattttttct

SEQ ID NO: 1380166 - DNA, 15 bp, Homo sapiens
gcagctaattttttc

SEQ ID NO: 1380167 - DNA, 15 bp, Homo sapiens
tgcagctaatttttt

SEQ ID NO: 1380168 - DNA, 15 bp, Homo sapiens
gtgcagctaattttt

SEQ ID NO: 1380169 - DNA, 15 bp, Homo sapiens
tgtgcagctaatttt

SEQ ID NO: 1380170 - DNA, 15 bp, Homo sapiens
ctgtgcagctaattt

SEQ ID NO: 1380171 - DNA, 15 bp, Homo sapiens
gctgtgcagctaatt

SEQ ID NO: 1380172 - DNA, 15 bp, Homo sapiens
agctgtgcagctaat

SEQ ID NO: 1380173 - DNA, 15 bp, Homo sapiens
aagctgtgcagctaa

SEQ ID NO: 1380174 - DNA, 15 bp, Homo sapiens
caagctgtgcagcta

SEQ ID NO: 1380175 - DNA, 15 bp, Homo sapiens
acaagctgtgcagct

SEQ ID NO: 1380176 - DNA, 15 bp, Homo sapiens
gacaagctgtgcagc

SEQ ID NO: 1380177 - DNA, 15 bp, Homo sapiens
agacaagctgtgcag

SEQ ID NO: 1380178 - DNA, 15 bp, Homo sapiens
gagacaagctgtgca

SEQ ID NO: 1380179 - DNA, 15 bp, Homo sapiens
agagacaagctgtgc

SEQ ID NO: 1380180 - DNA, 15 bp, Homo sapiens
cagagacaagctgtg

SEQ ID NO: 1380181 - DNA, 15 bp, Homo sapiens
gcagagacaagctgt

SEQ ID NO: 1380182 - DNA, 15 bp, Homo sapiens
agcagagacaagctg

SEQ ID NO: 1380183 - DNA, 15 bp, Homo sapiens
aagcagagacaagct

SEQ ID NO: 1380184 - DNA, 15 bp, Homo sapiens
caagcagagacaagc

SEQ ID NO: 1380185 - DNA, 15 bp, Homo sapiens
tcaagcagagacaag

SEQ ID NO: 1380186 - DNA, 15 bp, Homo sapiens
ttcaagcagagacaa

SEQ ID NO: 1380187 - DNA, 15 bp, Homo sapiens
attcaagcagagaca

SEQ ID NO: 1380188 - DNA, 15 bp, Homo sapiens
cattcaagcagagac

SEQ ID NO: 1380189 - DNA, 15 bp, Homo sapiens
acattcaagcagaga

SEQ ID NO: 1380190 - DNA, 15 bp, Homo sapiens
aacattcaagcagag

SEQ ID NO: 1380191 - DNA, 15 bp, Homo sapiens
caacattcaagcaga

SEQ ID NO: 1380192 - DNA, 15 bp, Homo sapiens
ccaacattcaagcag

SEQ ID NO: 1380193 - DNA, 15 bp, Homo sapiens
gccaacattcaagca

SEQ ID NO: 1380194 - DNA, 15 bp, Homo sapiens
tgccaacattcaagc

SEQ ID NO: 1380195 - DNA, 15 bp, Homo sapiens
atgccaacattcaag

SEQ ID NO: 1380196 - DNA, 15 bp, Homo sapiens
catgccaacattcaa

SEQ ID NO: 1380197 - DNA, 15 bp, Homo sapiens
gcatgccaacattca

SEQ ID NO: 1380198 - DNA, 15 bp, Homo sapiens
tgcatgccaacattc

SEQ ID NO: 1380199 - DNA, 15 bp, Homo sapiens
gtgcatgccaacatt

SEQ ID NO: 1380200 - DNA, 15 bp, Homo sapiens
tgtgcatgccaacat

SEQ ID NO: 1380201 - DNA, 15 bp, Homo sapiens
ttgtgcatgccaaca

SEQ ID NO: 1380202 - DNA, 15 bp, Homo sapiens
attgtgcatgccaac

SEQ ID NO: 1380203 - DNA, 15 bp, Homo sapiens
aattgtgcatgccaa

SEQ ID NO: 1380204 - DNA, 15 bp, Homo sapiens
gaattgtgcatgcca

SEQ ID NO: 1380205 - DNA, 15 bp, Homo sapiens
agaattgtgcatgcc

SEQ ID NO: 1380206 - DNA, 15 bp, Homo sapiens
tagaattgtgcatgc

SEQ ID NO: 1380207 - DNA, 15 bp, Homo sapiens
ctagaattgtgcatg

SEQ ID NO: 1380208 - DNA, 15 bp, Homo sapiens
gctagaattgtgcat

SEQ ID NO: 1380209 - DNA, 15 bp, Homo sapiens
cgctagaattgtgca

SEQ ID NO: 1380210 - DNA, 15 bp, Homo sapiens
acgctagaattgtgc

SEQ ID NO: 1380211 - DNA, 15 bp, Homo sapiens
aacgctagaattgtg

SEQ ID NO: 1380212 - DNA, 15 bp, Homo sapiens
taacgctagaattgt

SEQ ID NO: 1380213 - DNA, 15 bp, Homo sapiens
gtaacgctagaattg

SEQ ID NO: 1380214 - DNA, 15 bp, Homo sapiens
ggtaacgctagaatt

SEQ ID NO: 1380215 - DNA, 15 bp, Homo sapiens
aggtaacgctagaat

SEQ ID NO: 1380216 - DNA, 15 bp, Homo sapiens
taggtaacgctagaa

SEQ ID NO: 1380217 - DNA, 15 bp, Homo sapiens
ataggtaacgctaga

SEQ ID NO: 1380218 - DNA, 15 bp, Homo sapiens
aataggtaacgctag

SEQ ID NO: 1380219 - DNA, 15 bp, Homo sapiens
taataggtaacgcta

SEQ ID NO: 1380220 - DNA, 15 bp, Homo sapiens
ataataggtaacgct

SEQ ID NO: 1380221 - DNA, 15 bp, Homo sapiens
aataataggtaacgc

SEQ ID NO: 1380222 - DNA, 15 bp, Homo sapiens
aaataataggtaacg

SEQ ID NO: 1380223 - DNA, 15 bp, Homo sapiens
aaaataataggtaac

SEQ ID NO: 1380224 - DNA, 15 bp, Homo sapiens
caaaataataggtaa

SEQ ID NO: 1380225 - DNA, 15 bp, Homo sapiens
acaaaataataggta

SEQ ID NO: 1380226 - DNA, 15 bp, Homo sapiens
gacaaaataataggt

SEQ ID NO: 1380227 - DNA, 15 bp, Homo sapiens
ggacaaaataatagg

SEQ ID NO: 1380228 - DNA, 15 bp, Homo sapiens
tggacaaaataatag

SEQ ID NO: 1380229 - DNA, 15 bp, Homo sapiens
ctggacaaaataata

SEQ ID NO: 1380230 - DNA, 15 bp, Homo sapiens
actggacaaaataat

SEQ ID NO: 1380231 - DNA, 15 bp, Homo sapiens
gactggacaaaataa

SEQ ID NO: 1380232 - DNA, 15 bp, Homo sapiens
agactggacaaaata

SEQ ID NO: 1380233 - DNA, 15 bp, Homo sapiens
aagactggacaaaat

SEQ ID NO: 1380234 - DNA, 15 bp, Homo sapiens
aaagactggacaaaa

SEQ ID NO: 1380235 - DNA, 15 bp, Homo sapiens
taaagactggacaaa

SEQ ID NO: 1380236 - DNA, 15 bp, Homo sapiens
ttaaagactggacaa

SEQ ID NO: 1380237 - DNA, 15 bp, Homo sapiens
tttaaagactggaca

SEQ ID NO: 1380238 - DNA, 15 bp, Homo sapiens
atttaaagactggac

SEQ ID NO: 1380239 - DNA, 15 bp, Homo sapiens
aatttaaagactgga

SEQ ID NO: 1380240 - DNA, 15 bp, Homo sapiens
gaatttaaagactgg

SEQ ID NO: 1380241 - DNA, 15 bp, Homo sapiens
ggaatttaaagactg

SEQ ID NO: 1380242 - DNA, 15 bp, Homo sapiens
aggaatttaaagact

SEQ ID NO: 1380243 - DNA, 15 bp, Homo sapiens
caggaatttaaagac

SEQ ID NO: 1380244 - DNA, 15 bp, Homo sapiens
tcaggaatttaaaga

SEQ ID NO: 1380245 - DNA, 15 bp, Homo sapiens
gtcaggaatttaaag

SEQ ID NO: 1380246 - DNA, 15 bp, Homo sapiens
ggtcaggaatttaaa

SEQ ID NO: 1380247 - DNA, 15 bp, Homo sapiens
gggtcaggaatttaa

SEQ ID NO: 1380248 - DNA, 15 bp, Homo sapiens
tgggtcaggaattta

SEQ ID NO: 1380249 - DNA, 15 bp, Homo sapiens
ttgggtcaggaattt

SEQ ID NO: 1380250 - DNA, 15 bp, Homo sapiens
cttgggtcaggaatt

SEQ ID NO: 1380251 - DNA, 15 bp, Homo sapiens
ccttgggtcaggaat

SEQ ID NO: 1380252 - DNA, 15 bp, Homo sapiens
accttgggtcaggaa

SEQ ID NO: 1380253 - DNA, 15 bp, Homo sapiens
caccttgggtcagga

SEQ ID NO: 1380254 - DNA, 15 bp, Homo sapiens
acaccttgggtcagg

SEQ ID NO: 1380255 - DNA, 15 bp, Homo sapiens
cacaccttgggtcag

SEQ ID NO: 1380256 - DNA, 15 bp, Homo sapiens
tcacaccttgggtca

SEQ ID NO: 1380257 - DNA, 15 bp, Homo sapiens
ttcacaccttgggtc

SEQ ID NO: 1380258 - DNA, 15 bp, Homo sapiens
tttcacaccttgggt

SEQ ID NO: 1380259 - DNA, 15 bp, Homo sapiens
gtttcacaccttggg

SEQ ID NO: 1380260 - DNA, 15 bp, Homo sapiens
ggtttcacaccttgg

SEQ ID NO: 1380261 - DNA, 15 bp, Homo sapiens
tggtttcacaccttg

SEQ ID NO: 1380262 - DNA, 15 bp, Homo sapiens
gtggtttcacacctt

SEQ ID NO: 1380263 - DNA, 15 bp, Homo sapiens
agtggtttcacacct

SEQ ID NO: 1380264 - DNA, 15 bp, Homo sapiens
aagtggtttcacacc

SEQ ID NO: 1380265 - DNA, 15 bp, Homo sapiens
caagtggtttcacac

SEQ ID NO: 1380266 - DNA, 15 bp, Homo sapiens
gcaagtggtttcaca

SEQ ID NO: 1380267 - DNA, 15 bp, Homo sapiens
ggcaagtggtttcac

SEQ ID NO: 1380268 - DNA, 15 bp, Homo sapiens
aggcaagtggtttca

SEQ ID NO: 1380269 - DNA, 15 bp, Homo sapiens
caggcaagtggtttc

SEQ ID NO: 1380270 - DNA, 15 bp, Homo sapiens
acaggcaagtggttt

SEQ ID NO: 1380271 - DNA, 15 bp, Homo sapiens
cacaggcaagtggtt

SEQ ID NO: 1380272 - DNA, 15 bp, Homo sapiens
acacaggcaagtggt

SEQ ID NO: 1380273 - DNA, 15 bp, Homo sapiens
aacacaggcaagtgg

SEQ ID NO: 1380274 - DNA, 15 bp, Homo sapiens
gaacacaggcaagtg

SEQ ID NO: 1380275 - DNA, 15 bp, Homo sapiens
tgaacacaggcaagt

SEQ ID NO: 1380276 - DNA, 15 bp, Homo sapiens
ttgaacacaggcaag

SEQ ID NO: 1380277 - DNA, 15 bp, Homo sapiens
tttgaacacaggcaa

SEQ ID NO: 1380278 - DNA, 15 bp, Homo sapiens
ctttgaacacaggca

SEQ ID NO: 1380279 - DNA, 15 bp, Homo sapiens
tctttgaacacaggc

SEQ ID NO: 1380280 - DNA, 15 bp, Homo sapiens
ttctttgaacacagg

SEQ ID NO: 1380281 - DNA, 15 bp, Homo sapiens
gttctttgaacacag

SEQ ID NO: 1380282 - DNA, 15 bp, Homo sapiens
tgttctttgaacaca

SEQ ID NO: 1380283 - DNA, 15 bp, Homo sapiens
ctgttctttgaacac

SEQ ID NO: 1380284 - DNA, 15 bp, Homo sapiens
cctgttctttgaaca

SEQ ID NO: 1380285 - DNA, 15 bp, Homo sapiens
acctgttctttgaac

SEQ ID NO: 1380286 - DNA, 15 bp, Homo sapiens
aacctgttctttgaa

SEQ ID NO: 1380287 - DNA, 15 bp, Homo sapiens
taacctgttctttga

SEQ ID NO: 1380288 - DNA, 15 bp, Homo sapiens
ttaacctgttctttg

SEQ ID NO: 1380289 - DNA, 15 bp, Homo sapiens
cttaacctgttcttt

SEQ ID NO: 1380290 - DNA, 15 bp, Homo sapiens
acttaacctgttctt

SEQ ID NO: 1380291 - DNA, 15 bp, Homo sapiens
cacttaacctgttct

SEQ ID NO: 1380292 - DNA, 15 bp, Homo sapiens
ccacttaacctgttc

SEQ ID NO: 1380293 - DNA, 15 bp, Homo sapiens
gccacttaacctgtt

SEQ ID NO: 1380294 - DNA, 15 bp, Homo sapiens
tgccacttaacctgt

SEQ ID NO: 1380295 - DNA, 15 bp, Homo sapiens
ttgccacttaacctg

SEQ ID NO: 1380296 - DNA, 15 bp, Homo sapiens
tttgccacttaacct

SEQ ID NO: 1380297 - DNA, 15 bp, Homo sapiens
ttttgccacttaacc

SEQ ID NO: 1380298 - DNA, 15 bp, Homo sapiens
gttttgccacttaac

SEQ ID NO: 1380299 - DNA, 15 bp, Homo sapiens
ggttttgccacttaa

SEQ ID NO: 1380300 - DNA, 15 bp, Homo sapiens
tggttttgccactta

SEQ ID NO: 1380301 - DNA, 15 bp, Homo sapiens
ctggttttgccactt

SEQ ID NO: 1380302 - DNA, 15 bp, Homo sapiens
cctggttttgccact

SEQ ID NO: 1380303 - DNA, 15 bp, Homo sapiens
acctggttttgccac

SEQ ID NO: 1380304 - DNA, 15 bp, Homo sapiens
aacctggttttgcca

SEQ ID NO: 1380305 - DNA, 15 bp, Homo sapiens
aaacctggttttgcc

SEQ ID NO: 1380306 - DNA, 15 bp, Homo sapiens
aaaacctggttttgc

SEQ ID NO: 1380307 - DNA, 15 bp, Homo sapiens
taaaacctggttttg

SEQ ID NO: 1380308 - DNA, 15 bp, Homo sapiens
ctaaaacctggtttt

SEQ ID NO: 1380309 - DNA, 15 bp, Homo sapiens
tctaaaacctggttt

SEQ ID NO: 1380310 - DNA, 15 bp, Homo sapiens
gtctaaaacctggtt

SEQ ID NO: 1380311 - DNA, 15 bp, Homo sapiens
ggtctaaaacctggt

SEQ ID NO: 1380312 - DNA, 15 bp, Homo sapiens
gggtctaaaacctgg

SEQ ID NO: 1380313 - DNA, 15 bp, Homo sapiens
tgggtctaaaacctg

SEQ ID NO: 1380314 - DNA, 15 bp, Homo sapiens
ttgggtctaaaacct

SEQ ID NO: 1380315 - DNA, 15 bp, Homo sapiens
cttgggtctaaaacc

SEQ ID NO: 1380316 - DNA, 15 bp, Homo sapiens
acttgggtctaaaac

SEQ ID NO: 1380317 - DNA, 15 bp, Homo sapiens
gacttgggtctaaaa

SEQ ID NO: 1380318 - DNA, 15 bp, Homo sapiens
ggacttgggtctaaa

SEQ ID NO: 1380319 - DNA, 15 bp, Homo sapiens
aggacttgggtctaa

SEQ ID NO: 1380320 - DNA, 15 bp, Homo sapiens
gaggacttgggtcta

SEQ ID NO: 1380321 - DNA, 15 bp, Homo sapiens
agaggacttgggtct

SEQ ID NO: 1380322 - DNA, 15 bp, Homo sapiens
cagaggacttgggtc

SEQ ID NO: 1380323 - DNA, 15 bp, Homo sapiens
tcagaggacttgggt

SEQ ID NO: 1380324 - DNA, 15 bp, Homo sapiens
atcagaggacttggg

SEQ ID NO: 1380325 - DNA, 15 bp, Homo sapiens
aatcagaggacttgg

SEQ ID NO: 1380326 - DNA, 15 bp, Homo sapiens
gaatcagaggacttg

SEQ ID NO: 1380327 - DNA, 15 bp, Homo sapiens
ggaatcagaggactt

SEQ ID NO: 1380328 - DNA, 15 bp, Homo sapiens
tggaatcagaggact

SEQ ID NO: 1380329 - DNA, 15 bp, Homo sapiens
ttggaatcagaggac

SEQ ID NO: 1380330 - DNA, 15 bp, Homo sapiens
tttggaatcagagga

SEQ ID NO: 1380331 - DNA, 15 bp, Homo sapiens
atttggaatcagagg

SEQ ID NO: 1380332 - DNA, 15 bp, Homo sapiens
aatttggaatcagag

SEQ ID NO: 1380333 - DNA, 15 bp, Homo sapiens
aaatttggaatcaga

SEQ ID NO: 1380334 - DNA, 15 bp, Homo sapiens
caaatttggaatcag

SEQ ID NO: 1380335 - DNA, 15 bp, Homo sapiens
ccaaatttggaatca

SEQ ID NO: 1380336 - DNA, 15 bp, Homo sapiens
tccaaatttggaatc

SEQ ID NO: 1380337 - DNA, 15 bp, Homo sapiens
ctccaaatttggaat

SEQ ID NO: 1380338 - DNA, 15 bp, Homo sapiens
gctccaaatttggaa

SEQ ID NO: 1380339 - DNA, 15 bp, Homo sapiens
ggctccaaatttgga

SEQ ID NO: 1380340 - DNA, 15 bp, Homo sapiens
tggctccaaatttgg

SEQ ID NO: 1380341 - DNA, 15 bp, Homo sapiens
ctggctccaaatttg

SEQ ID NO: 1380342 - DNA, 15 bp, Homo sapiens
tctggctccaaattt

SEQ ID NO: 1380343 - DNA, 15 bp, Homo sapiens
atctggctccaaatt

SEQ ID NO: 1380344 - DNA, 15 bp, Homo sapiens
aatctggctccaaat

SEQ ID NO: 1380345 - DNA, 15 bp, Homo sapiens
gaatctggctccaaa

SEQ ID NO: 1380346 - DNA, 15 bp, Homo sapiens
ggaatctggctccaa

SEQ ID NO: 1380347 - DNA, 15 bp, Homo sapiens
tggaatctggctcca

SEQ ID NO: 1380348 - DNA, 15 bp, Homo sapiens
ctggaatctggctcc

SEQ ID NO: 1380349 - DNA, 15 bp, Homo sapiens
tctggaatctggctc

SEQ ID NO: 1380350 - DNA, 15 bp, Homo sapiens
ttctggaatctggct

SEQ ID NO: 1380351 - DNA, 15 bp, Homo sapiens
cttctggaatctggc

SEQ ID NO: 1380352 - DNA, 15 bp, Homo sapiens
tcttctggaatctgg

SEQ ID NO: 1380353 - DNA, 15 bp, Homo sapiens
ttcttctggaatctg

SEQ ID NO: 1380354 - DNA, 15 bp, Homo sapiens
attcttctggaatct

SEQ ID NO: 1380355 - DNA, 15 bp, Homo sapiens
aattcttctggaatc

SEQ ID NO: 1380356 - DNA, 15 bp, Homo sapiens
gaattcttctggaat

SEQ ID NO: 1380357 - DNA, 15 bp, Homo sapiens
agaattcttctggaa

SEQ ID NO: 1380358 - DNA, 15 bp, Homo sapiens
gagaattcttctgga

SEQ ID NO: 1380359 - DNA, 15 bp, Homo sapiens
ggagaattcttctgg

SEQ ID NO: 1380360 - DNA, 15 bp, Homo sapiens
tggagaattcttctg

SEQ ID NO: 1380361 - DNA, 15 bp, Homo sapiens
atggagaattcttct

SEQ ID NO: 1380362 - DNA, 15 bp, Homo sapiens
aatggagaattcttc

SEQ ID NO: 1380363 - DNA, 15 bp, Homo sapiens
gaatggagaattctt

SEQ ID NO: 1380364 - DNA, 15 bp, Homo sapiens
agaatggagaattct

SEQ ID NO: 1380365 - DNA, 15 bp, Homo sapiens
tagaatggagaattc

SEQ ID NO: 1380366 - DNA, 15 bp, Homo sapiens
ttagaatggagaatt

SEQ ID NO: 1380367 - DNA, 15 bp, Homo sapiens
attagaatggagaat

SEQ ID NO: 1380368 - DNA, 15 bp, Homo sapiens
gattagaatggagaa

SEQ ID NO: 1380369 - DNA, 15 bp, Homo sapiens
ggattagaatggaga

SEQ ID NO: 1380370 - DNA, 15 bp, Homo sapiens
gggattagaatggag

SEQ ID NO: 1380371 - DNA, 15 bp, Homo sapiens
tgggattagaatgga

SEQ ID NO: 1380372 - DNA, 15 bp, Homo sapiens
gtgggattagaatgg

SEQ ID NO: 1380373 - DNA, 15 bp, Homo sapiens
ggtgggattagaatg

SEQ ID NO: 1380374 - DNA, 15 bp, Homo sapiens
aggtgggattagaat

SEQ ID NO: 1380375 - DNA, 15 bp, Homo sapiens
aaggtgggattagaa

SEQ ID NO: 1380376 - DNA, 15 bp, Homo sapiens
gaaggtgggattaga

SEQ ID NO: 1380377 - DNA, 15 bp, Homo sapiens
agaaggtgggattag

SEQ ID NO: 1380378 - DNA, 15 bp, Homo sapiens
aagaaggtgggatta

SEQ ID NO: 1380379 - DNA, 15 bp, Homo sapiens
gaagaaggtgggatt

SEQ ID NO: 1380380 - DNA, 15 bp, Homo sapiens
ggaagaaggtgggat

SEQ ID NO: 1380381 - DNA, 15 bp, Homo sapiens
aggaagaaggtggga

SEQ ID NO: 1380382 - DNA, 15 bp, Homo sapiens
taggaagaaggtggg

SEQ ID NO: 1380383 - DNA, 15 bp, Homo sapiens
gtaggaagaaggtgg

SEQ ID NO: 1380384 - DNA, 15 bp, Homo sapiens
tgtaggaagaaggtg

SEQ ID NO: 1380385 - DNA, 15 bp, Homo sapiens
ttgtaggaagaaggt

SEQ ID NO: 1380386 - DNA, 15 bp, Homo sapiens
cttgtaggaagaagg

SEQ ID NO: 1380387 - DNA, 15 bp, Homo sapiens
acttgtaggaagaag

SEQ ID NO: 1380388 - DNA, 15 bp, Homo sapiens
gacttgtaggaagaa

SEQ ID NO: 1380389 - DNA, 15 bp, Homo sapiens
tgacttgtaggaaga

SEQ ID NO: 1380390 - DNA, 15 bp, Homo sapiens
ttgacttgtaggaag

SEQ ID NO: 1380391 - DNA, 15 bp, Homo sapiens
tttgacttgtaggaa

SEQ ID NO: 1380392 - DNA, 15 bp, Homo sapiens
ctttgacttgtagga

SEQ ID NO: 1380393 - DNA, 15 bp, Homo sapiens
tctttgacttgtagg

SEQ ID NO: 1380394 - DNA, 15 bp, Homo sapiens
ttctttgacttgtag

SEQ ID NO: 1380395 - DNA, 15 bp, Homo sapiens
gttctttgacttgta

SEQ ID NO: 1380396 - DNA, 15 bp, Homo sapiens
ggttctttgacttgt

SEQ ID NO: 1380397 - DNA, 15 bp, Homo sapiens
cggttctttgacttg

SEQ ID NO: 1380398 - DNA, 15 bp, Homo sapiens
tcggttctttgactt

SEQ ID NO: 1380399 - DNA, 15 bp, Homo sapiens
ctcggttctttgact

SEQ ID NO: 1380400 - DNA, 15 bp, Homo sapiens
actcggttctttgac

SEQ ID NO: 1380401 - DNA, 15 bp, Homo sapiens
aactcggttctttga

SEQ ID NO: 1380402 - DNA, 15 bp, Homo sapiens
taactcggttctttg

SEQ ID NO: 1380403 - DNA, 15 bp, Homo sapiens
ttaactcggttcttt

SEQ ID NO: 1380404 - DNA, 15 bp, Homo sapiens
gttaactcggttctt

SEQ ID NO: 1380405 - DNA, 15 bp, Homo sapiens
agttaactcggttct

SEQ ID NO: 1380406 - DNA, 15 bp, Homo sapiens
cagttaactcggttc

SEQ ID NO: 1380407 - DNA, 15 bp, Homo sapiens
ccagttaactcggtt

SEQ ID NO: 1380408 - DNA, 15 bp, Homo sapiens
accagttaactcggt

SEQ ID NO: 1380409 - DNA, 15 bp, Homo sapiens
caccagttaactcgg

SEQ ID NO: 1380410 - DNA, 15 bp, Homo sapiens
acaccagttaactcg

SEQ ID NO: 1380411 - DNA, 15 bp, Homo sapiens
gacaccagttaactc

SEQ ID NO: 1380412 - DNA, 15 bp, Homo sapiens
agacaccagttaact

SEQ ID NO: 1380413 - DNA, 15 bp, Homo sapiens
aagacaccagttaac

SEQ ID NO: 1380414 - DNA, 15 bp, Homo sapiens
gaagacaccagttaa

SEQ ID NO: 1380415 - DNA, 15 bp, Homo sapiens
tgaagacaccagtta

SEQ ID NO: 1380416 - DNA, 15 bp, Homo sapiens
ttgaagacaccagtt

SEQ ID NO: 1380417 - DNA, 15 bp, Homo sapiens
attgaagacaccagt

SEQ ID NO: 1380418 - DNA, 15 bp, Homo sapiens
gattgaagacaccag

SEQ ID NO: 1380419 - DNA, 15 bp, Homo sapiens
tgattgaagacacca

SEQ ID NO: 1380420 - DNA, 15 bp, Homo sapiens
ttgattgaagacacc

SEQ ID NO: 1380421 - DNA, 15 bp, Homo sapiens
attgattgaagacac

SEQ ID NO: 1380422 - DNA, 15 bp, Homo sapiens
aattgattgaagaca

SEQ ID NO: 1380423 - DNA, 15 bp, Homo sapiens
caattgattgaagac

SEQ ID NO: 1380424 - DNA, 15 bp, Homo sapiens
tcaattgattgaaga

SEQ ID NO: 1380425 - DNA, 15 bp, Homo sapiens
atcaattgattgaag

SEQ ID NO: 1380426 - DNA, 15 bp, Homo sapiens
aatcaattgattgaa

SEQ ID NO: 1380427 - DNA, 15 bp, Homo sapiens
taatcaattgattga

SEQ ID NO: 1380428 - DNA, 15 bp, Homo sapiens
gtaatcaattgattg

SEQ ID NO: 1380429 - DNA, 15 bp, Homo sapiens
tgtaatcaattgatt

SEQ ID NO: 1380430 - DNA, 15 bp, Homo sapiens
ctgtaatcaattgat

SEQ ID NO: 1380431 - DNA, 15 bp, Homo sapiens
actgtaatcaattga

SEQ ID NO: 1380432 - DNA, 15 bp, Homo sapiens
tactgtaatcaattg

SEQ ID NO: 1380433 - DNA, 15 bp, Homo sapiens
atactgtaatcaatt

SEQ ID NO: 1380434 - DNA, 15 bp, Homo sapiens
tatactgtaatcaat

SEQ ID NO: 1380435 - DNA, 15 bp, Homo sapiens
atatactgtaatcaa

SEQ ID NO: 1380436 - DNA, 15 bp, Homo sapiens
gatatactgtaatca

SEQ ID NO: 1380437 - DNA, 15 bp, Homo sapiens
agatatactgtaatc

SEQ ID NO: 1380438 - DNA, 15 bp, Homo sapiens
tagatatactgtaat

SEQ ID NO: 1380439 - DNA, 15 bp, Homo sapiens
atagatatactgtaa

SEQ ID NO: 1380440 - DNA, 15 bp, Homo sapiens
aatagatatactgta

SEQ ID NO: 1380441 - DNA, 15 bp, Homo sapiens
taatagatatactgt

SEQ ID NO: 1380442 - DNA, 15 bp, Homo sapiens
ttaatagatatactg

SEQ ID NO: 1380443 - DNA, 15 bp, Homo sapiens
tttaatagatatact

SEQ ID NO: 1380444 - DNA, 15 bp, Homo sapiens
ttttaatagatatac

SEQ ID NO: 1380445 - DNA, 15 bp, Homo sapiens
cttttaatagatata

SEQ ID NO: 1380446 - DNA, 15 bp, Homo sapiens
ccttttaatagatat

SEQ ID NO: 1380447 - DNA, 15 bp, Homo sapiens
gccttttaatagata

SEQ ID NO: 1380448 - DNA, 15 bp, Homo sapiens
ggccttttaatagat

SEQ ID NO: 1380449 - DNA, 15 bp, Homo sapiens
aggccttttaataga

SEQ ID NO: 1380450 - DNA, 15 bp, Homo sapiens
taggccttttaatag

SEQ ID NO: 1380451 - DNA, 15 bp, Homo sapiens
gtaggccttttaata

SEQ ID NO: 1380452 - DNA, 15 bp, Homo sapiens
ggtaggccttttaat

SEQ ID NO: 1380453 - DNA, 15 bp, Homo sapiens
tggtaggccttttaa

SEQ ID NO: 1380454 - DNA, 15 bp, Homo sapiens
ttggtaggcctttta

SEQ ID NO: 1380455 - DNA, 15 bp, Homo sapiens
cttggtaggcctttt

SEQ ID NO: 1380456 - DNA, 15 bp, Homo sapiens
tcttggtaggccttt

SEQ ID NO: 1380457 - DNA, 15 bp, Homo sapiens
ttcttggtaggcctt

SEQ ID NO: 1380458 - DNA, 15 bp, Homo sapiens
gttcttggtaggcct

SEQ ID NO: 1380459 - DNA, 15 bp, Homo sapiens
ggttcttggtaggcc

SEQ ID NO: 1380460 - DNA, 15 bp, Homo sapiens
tggttcttggtaggc

SEQ ID NO: 1380461 - DNA, 15 bp, Homo sapiens
gtggttcttggtagg

SEQ ID NO: 1380462 - DNA, 15 bp, Homo sapiens
agtggttcttggtag

SEQ ID NO: 1380463 - DNA, 15 bp, Homo sapiens
aagtggttcttggta

SEQ ID NO: 1380464 - DNA, 15 bp, Homo sapiens
aaagtggttcttggt

SEQ ID NO: 1380465 - DNA, 15 bp, Homo sapiens
aaaagtggttcttgg

SEQ ID NO: 1380466 - DNA, 15 bp, Homo sapiens
caaaagtggttcttg

SEQ ID NO: 1380467 - DNA, 15 bp, Homo sapiens
acaaaagtggttctt

SEQ ID NO: 1380468 - DNA, 15 bp, Homo sapiens
gacaaaagtggttct

SEQ ID NO: 1380469 - DNA, 15 bp, Homo sapiens
agacaaaagtggttc

SEQ ID NO: 1380470 - DNA, 15 bp, Homo sapiens
gagacaaaagtggtt

SEQ ID NO: 1380471 - DNA, 15 bp, Homo sapiens
tgagacaaaagtggt

SEQ ID NO: 1380472 - DNA, 15 bp, Homo sapiens
atgagacaaaagtgg

SEQ ID NO: 1380473 - DNA, 15 bp, Homo sapiens
aatgagacaaaagtg

SEQ ID NO: 1380474 - DNA, 15 bp, Homo sapiens
aaatgagacaaaagt

SEQ ID NO: 1380475 - DNA, 15 bp, Homo sapiens
aaaatgagacaaaag

SEQ ID NO: 1380476 - DNA, 15 bp, Homo sapiens
aaaaatgagacaaaa

SEQ ID NO: 1380477 - DNA, 15 bp, Homo sapiens
taaaaatgagacaaa

SEQ ID NO: 1380478 - DNA, 15 bp, Homo sapiens
ttaaaaatgagacaa

SEQ ID NO: 1380479 - DNA, 15 bp, Homo sapiens
attaaaaatgagaca

SEQ ID NO: 1380480 - DNA, 15 bp, Homo sapiens
cattaaaaatgagac

SEQ ID NO: 1380481 - DNA, 15 bp, Homo sapiens
tcattaaaaatgaga

SEQ ID NO: 1380482 - DNA, 15 bp, Homo sapiens
gtcattaaaaatgag

SEQ ID NO: 1380483 - DNA, 15 bp, Homo sapiens
agtcattaaaaatga

SEQ ID NO: 1380484 - DNA, 15 bp, Homo sapiens
aagtcattaaaaatg

SEQ ID NO: 1380485 - DNA, 15 bp, Homo sapiens
gaagtcattaaaaat

SEQ ID NO: 1380486 - DNA, 15 bp, Homo sapiens
ggaagtcattaaaaa

SEQ ID NO: 1380487 - DNA, 15 bp, Homo sapiens
tggaagtcattaaaa

SEQ ID NO: 1380488 - DNA, 15 bp, Homo sapiens
ttggaagtcattaaa

SEQ ID NO: 1380489 - DNA, 15 bp, Homo sapiens
tttggaagtcattaa

SEQ ID NO: 1380490 - DNA, 15 bp, Homo sapiens
ctttggaagtcatta

SEQ ID NO: 1380491 - DNA, 15 bp, Homo sapiens
tctttggaagtcatt

SEQ ID NO: 1380492 - DNA, 15 bp, Homo sapiens
atctttggaagtcat

SEQ ID NO: 1380493 - DNA, 15 bp, Homo sapiens
aatctttggaagtca

SEQ ID NO: 1380494 - DNA, 15 bp, Homo sapiens
gaatctttggaagtc

SEQ ID NO: 1380495 - DNA, 15 bp, Homo sapiens
ggaatctttggaagt

SEQ ID NO: 1380496 - DNA, 15 bp, Homo sapiens
gggaatctttggaag

SEQ ID NO: 1380497 - DNA, 15 bp, Homo sapiens
tgggaatctttggaa

SEQ ID NO: 1380498 - DNA, 15 bp, Homo sapiens
gtgggaatctttgga

SEQ ID NO: 1380499 - DNA, 15 bp, Homo sapiens
tgtgggaatctttgg

SEQ ID NO: 1380500 - DNA, 15 bp, Homo sapiens
ttgtgggaatctttg

SEQ ID NO: 1380501 - DNA, 15 bp, Homo sapiens
tttgtgggaatcttt

SEQ ID NO: 1380502 - DNA, 15 bp, Homo sapiens
gtttgtgggaatctt

SEQ ID NO: 1380503 - DNA, 15 bp, Homo sapiens
agtttgtgggaatct

SEQ ID NO: 1380504 - DNA, 15 bp, Homo sapiens
gagtttgtgggaatc

SEQ ID NO: 1380505 - DNA, 15 bp, Homo sapiens
agagtttgtgggaat

SEQ ID NO: 1380506 - DNA, 15 bp, Homo sapiens
gagagtttgtgggaa

SEQ ID NO: 1380507 - DNA, 15 bp, Homo sapiens
tgagagtttgtggga

SEQ ID NO: 1380508 - DNA, 15 bp, Homo sapiens
gtgagagtttgtggg

SEQ ID NO: 1380509 - DNA, 15 bp, Homo sapiens
agtgagagtttgtgg

SEQ ID NO: 1380510 - DNA, 15 bp, Homo sapiens
tagtgagagtttgtg

SEQ ID NO: 1380511 - DNA, 15 bp, Homo sapiens
ttagtgagagtttgt

SEQ ID NO: 1380512 - DNA, 15 bp, Homo sapiens
gttagtgagagtttg

SEQ ID NO: 1380513 - DNA, 15 bp, Homo sapiens
cgttagtgagagttt

SEQ ID NO: 1380514 - DNA, 15 bp, Homo sapiens
acgttagtgagagtt

SEQ ID NO: 1380515 - DNA, 15 bp, Homo sapiens
aacgttagtgagagt

SEQ ID NO: 1380516 - DNA, 15 bp, Homo sapiens
gaacgttagtgagag

SEQ ID NO: 1380517 - DNA, 15 bp, Homo sapiens
tgaacgttagtgaga

SEQ ID NO: 1380518 - DNA, 15 bp, Homo sapiens
atgaacgttagtgag

SEQ ID NO: 1380519 - DNA, 15 bp, Homo sapiens
tatgaacgttagtga

SEQ ID NO: 1380520 - DNA, 15 bp, Homo sapiens
atatgaacgttagtg

SEQ ID NO: 1380521 - DNA, 15 bp, Homo sapiens
aatatgaacgttagt

SEQ ID NO: 1380522 - DNA, 15 bp, Homo sapiens
gaatatgaacgttag

SEQ ID NO: 1380523 - DNA, 15 bp, Homo sapiens
tgaatatgaacgtta

SEQ ID NO: 1380524 - DNA, 15 bp, Homo sapiens
ttgaatatgaacgtt

SEQ ID NO: 1380525 - DNA, 15 bp, Homo sapiens
cttgaatatgaacgt

SEQ ID NO: 1380526 - DNA, 15 bp, Homo sapiens
acttgaatatgaacg

SEQ ID NO: 1380527 - DNA, 15 bp, Homo sapiens
aacttgaatatgaac

SEQ ID NO: 1380528 - DNA, 15 bp, Homo sapiens
aaacttgaatatgaa

SEQ ID NO: 1380529 - DNA, 15 bp, Homo sapiens
aaaacttgaatatga

SEQ ID NO: 1380530 - DNA, 15 bp, Homo sapiens
gaaaacttgaatatg

SEQ ID NO: 1380531 - DNA, 15 bp, Homo sapiens
agaaaacttgaatat

SEQ ID NO: 1380532 - DNA, 15 bp, Homo sapiens
cagaaaacttgaata

SEQ ID NO: 1380533 - DNA, 15 bp, Homo sapiens
tcagaaaacttgaat

SEQ ID NO: 1380534 - DNA, 15 bp, Homo sapiens
ttcagaaaacttgaa

SEQ ID NO: 1380535 - DNA, 15 bp, Homo sapiens
tttcagaaaacttga

SEQ ID NO: 1380536 - DNA, 15 bp, Homo sapiens
ttttcagaaaacttg

SEQ ID NO: 1380537 - DNA, 15 bp, Homo sapiens
attttcagaaaactt

SEQ ID NO: 1380538 - DNA, 15 bp, Homo sapiens
gattttcagaaaact

SEQ ID NO: 1380539 - DNA, 15 bp, Homo sapiens
ggattttcagaaaac

SEQ ID NO: 1380540 - DNA, 15 bp, Homo sapiens
aggattttcagaaaa

SEQ ID NO: 1380541 - DNA, 15 bp, Homo sapiens
aaggattttcagaaa

SEQ ID NO: 1380542 - DNA, 15 bp, Homo sapiens
taaggattttcagaa

SEQ ID NO: 1380543 - DNA, 15 bp, Homo sapiens
ataaggattttcaga

SEQ ID NO: 1380544 - DNA, 15 bp, Homo sapiens
aataaggattttcag

SEQ ID NO: 1380545 - DNA, 15 bp, Homo sapiens
gaataaggattttca

SEQ ID NO: 1380546 - DNA, 15 bp, Homo sapiens
agaataaggattttc

SEQ ID NO: 1380547 - DNA, 15 bp, Homo sapiens
aagaataaggatttt

SEQ ID NO: 1380548 - DNA, 15 bp, Homo sapiens
caagaataaggattt

SEQ ID NO: 1380549 - DNA, 15 bp, Homo sapiens
acaagaataaggatt

SEQ ID NO: 1380550 - DNA, 15 bp, Homo sapiens
tacaagaataaggat

SEQ ID NO: 1380551 - DNA, 15 bp, Homo sapiens
atacaagaataagga

SEQ ID NO: 1380552 - DNA, 15 bp, Homo sapiens
catacaagaataagg

SEQ ID NO: 1380553 - DNA, 15 bp, Homo sapiens
gcatacaagaataag

SEQ ID NO: 1380554 - DNA, 15 bp, Homo sapiens
ggcatacaagaataa

SEQ ID NO: 1380555 - DNA, 15 bp, Homo sapiens
tggcatacaagaata

SEQ ID NO: 1380556 - DNA, 15 bp, Homo sapiens
ctggcatacaagaat

SEQ ID NO: 1380557 - DNA, 15 bp, Homo sapiens
gctggcatacaagaa

SEQ ID NO: 1380558 - DNA, 15 bp, Homo sapiens
agctggcatacaaga

SEQ ID NO: 1380559 - DNA, 15 bp, Homo sapiens
tagctggcatacaag

SEQ ID NO: 1380560 - DNA, 15 bp, Homo sapiens
ttagctggcatacaa

SEQ ID NO: 1380561 - DNA, 15 bp, Homo sapiens
cttagctggcataca

SEQ ID NO: 1380562 - DNA, 15 bp, Homo sapiens
tcttagctggcatac

SEQ ID NO: 1380563 - DNA, 15 bp, Homo sapiens
atcttagctggcata

SEQ ID NO: 1380564 - DNA, 15 bp, Homo sapiens
gatcttagctggcat

SEQ ID NO: 1380565 - DNA, 15 bp, Homo sapiens
agatcttagctggca

SEQ ID NO: 1380566 - DNA, 15 bp, Homo sapiens
aagatcttagctggc

SEQ ID NO: 1380567 - DNA, 15 bp, Homo sapiens
aaagatcttagctgg

SEQ ID NO: 1380568 - DNA, 15 bp, Homo sapiens
aaaagatcttagctg

SEQ ID NO: 1380569 - DNA, 15 bp, Homo sapiens
gaaaagatcttagct

SEQ ID NO: 1380570 - DNA, 15 bp, Homo sapiens
tgaaaagatcttagc

SEQ ID NO: 1380571 - DNA, 15 bp, Homo sapiens
gtgaaaagatcttag

SEQ ID NO: 1380572 - DNA, 15 bp, Homo sapiens
ggtgaaaagatctta

SEQ ID NO: 1380573 - DNA, 15 bp, Homo sapiens
aggtgaaaagatctt

SEQ ID NO: 1380574 - DNA, 15 bp, Homo sapiens
aaggtgaaaagatct

SEQ ID NO: 1380575 - DNA, 15 bp, Homo sapiens
gaaggtgaaaagatc

SEQ ID NO: 1380576 - DNA, 15 bp, Homo sapiens
tgaaggtgaaaagat

SEQ ID NO: 1380577 - DNA, 15 bp, Homo sapiens
tatgaaggtgaaaag

SEQ ID NO: 1380578 - DNA, 15 bp, Homo sapiens
ttatgaaggtgaaaa

SEQ ID NO: 1380579 - DNA, 15 bp, Homo sapiens
tttatgaaggtgaaa

SEQ ID NO: 1380580 - DNA, 15 bp, Homo sapiens
atttatgaaggtgaa

SEQ ID NO: 1380581 - DNA, 15 bp, Homo sapiens
gatttatgaaggtga

SEQ ID NO: 1380582 - DNA, 15 bp, Homo sapiens
agatttatgaaggtg

SEQ ID NO: 1380583 - DNA, 15 bp, Homo sapiens
gagatttatgaaggt

SEQ ID NO: 1380584 - DNA, 15 bp, Homo sapiens
agagatttatgaagg

SEQ ID NO: 1380585 - DNA, 15 bp, Homo sapiens
cagagatttatgaag

SEQ ID NO: 1380586 - DNA, 15 bp, Homo sapiens
gcagagatttatgaa

SEQ ID NO: 1380587 - DNA, 15 bp, Homo sapiens
ggcagagatttatga

SEQ ID NO: 1380588 - DNA, 15 bp, Homo sapiens
tggcagagatttatg

SEQ ID NO: 1380589 - DNA, 15 bp, Homo sapiens
gtggcagagatttat

SEQ ID NO: 1380590 - DNA, 15 bp, Homo sapiens
tgtggcagagattta

SEQ ID NO: 1380591 - DNA, 15 bp, Homo sapiens
ttgtggcagagattt

SEQ ID NO: 1380592 - DNA, 15 bp, Homo sapiens
attgtggcagagatt

SEQ ID NO: 1380593 - DNA, 15 bp, Homo sapiens
aattgtggcagagat

SEQ ID NO: 1380594 - DNA, 15 bp, Homo sapiens
taattgtggcagaga

SEQ ID NO: 1380595 - DNA, 15 bp, Homo sapiens
ctaattgtggcagag

SEQ ID NO: 1380596 - DNA, 15 bp, Homo sapiens
gctaattgtggcaga

SEQ ID NO: 1380597 - DNA, 15 bp, Homo sapiens
ggctaattgtggcag

SEQ ID NO: 1380598 - DNA, 15 bp, Homo sapiens
gggctaattgtggca

SEQ ID NO: 1380599 - DNA, 15 bp, Homo sapiens
tgggctaattgtggc

SEQ ID NO: 1380600 - DNA, 15 bp, Homo sapiens
atgggctaattgtgg

SEQ ID NO: 1380601 - DNA, 15 bp, Homo sapiens
aatgggctaattgtg

SEQ ID NO: 1380602 - DNA, 15 bp, Homo sapiens
ataatgggctaattg

SEQ ID NO: 1380603 - DNA, 15 bp, Homo sapiens
gataatgggctaatt

SEQ ID NO: 1380604 - DNA, 15 bp, Homo sapiens
tgataatgggctaat

SEQ ID NO: 1380605 - DNA, 15 bp, Homo sapiens
ctgataatgggctaa

SEQ ID NO: 1380606 - DNA, 15 bp, Homo sapiens
tctgataatgggcta

SEQ ID NO: 1380607 - DNA, 15 bp, Homo sapiens
atctgataatgggct

SEQ ID NO: 1380608 - DNA, 15 bp, Homo sapiens
gatctgataatgggc

SEQ ID NO: 1380609 - DNA, 15 bp, Homo sapiens
tgatctgataatggg

SEQ ID NO: 1380610 - DNA, 15 bp, Homo sapiens
ttgatctgataatgg

SEQ ID NO: 1380611 - DNA, 15 bp, Homo sapiens
attgatctgataatg

SEQ ID NO: 1380612 - DNA, 15 bp, Homo sapiens
tattgatctgataat

SEQ ID NO: 1380613 - DNA, 15 bp, Homo sapiens
atattgatctgataa

SEQ ID NO: 1380614 - DNA, 15 bp, Homo sapiens
gatattgatctgata

SEQ ID NO: 1380615 - DNA, 15 bp, Homo sapiens
ggatattgatctgat

SEQ ID NO: 1380616 - DNA, 15 bp, Homo sapiens
aggatattgatctga

SEQ ID NO: 1380617 - DNA, 15 bp, Homo sapiens
gaggatattgatctg

SEQ ID NO: 1380618 - DNA, 15 bp, Homo sapiens
tgaggatattgatct

SEQ ID NO: 1380619 - DNA, 15 bp, Homo sapiens
atgaggatattgatc

SEQ ID NO: 1380620 - DNA, 15 bp, Homo sapiens
gatgaggatattgat

SEQ ID NO: 1380621 - DNA, 15 bp, Homo sapiens
tgatgaggatattga

SEQ ID NO: 1380622 - DNA, 15 bp, Homo sapiens
atgatgaggatattg

SEQ ID NO: 1380623 - DNA, 15 bp, Homo sapiens
catgatgaggatatt

SEQ ID NO: 1380624 - DNA, 15 bp, Homo sapiens
tcatgatgaggatat

SEQ ID NO: 1380625 - DNA, 15 bp, Homo sapiens
atcatgatgaggata

SEQ ID NO: 1380626 - DNA, 15 bp, Homo sapiens
aatcatgatgaggat

SEQ ID NO: 1380627 - DNA, 15 bp, Homo sapiens
aaatcatgatgagga

SEQ ID NO: 1380628 - DNA, 15 bp, Homo sapiens
taaatcatgatgagg

SEQ ID NO: 1380629 - DNA, 15 bp, Homo sapiens
ataaatcatgatgag

SEQ ID NO: 1380630 - DNA, 15 bp, Homo sapiens
gataaatcatgatga

SEQ ID NO: 1380631 - DNA, 15 bp, Homo sapiens
agataaatcatgatg

SEQ ID NO: 1380632 - DNA, 15 bp, Homo sapiens
gagataaatcatgat

SEQ ID NO: 1380633 - DNA, 15 bp, Homo sapiens
agagataaatcatga

SEQ ID NO: 1380634 - DNA, 15 bp, Homo sapiens
cagagataaatcatg

SEQ ID NO: 1380635 - DNA, 15 bp, Homo sapiens
acagagataaatcat

SEQ ID NO: 1380636 - DNA, 15 bp, Homo sapiens
tacagagataaatca

SEQ ID NO: 1380637 - DNA, 15 bp, Homo sapiens
ctacagagataaatc

SEQ ID NO: 1380638 - DNA, 15 bp, Homo sapiens
gctacagagataaat

SEQ ID NO: 1380639 - DNA, 15 bp, Homo sapiens
tgctacagagataaa

SEQ ID NO: 1380640 - DNA, 15 bp, Homo sapiens
ctgctacagagataa

SEQ ID NO: 1380641 - DNA, 15 bp, Homo sapiens
tctgctacagagata

SEQ ID NO: 1380642 - DNA, 15 bp, Homo sapiens
ctctgctacagagat

SEQ ID NO: 1380643 - DNA, 15 bp, Homo sapiens
actctgctacagaga

SEQ ID NO: 1380644 - DNA, 15 bp, Homo sapiens
tactctgctacagag

SEQ ID NO: 1380645 - DNA, 15 bp, Homo sapiens
ctactctgctacaga

SEQ ID NO: 1380646 - DNA, 15 bp, Homo sapiens
actactctgctacag

SEQ ID NO: 1380647 - DNA, 15 bp, Homo sapiens
cactactctgctaca

SEQ ID NO: 1380648 - DNA, 15 bp, Homo sapiens
tcactactctgctac

SEQ ID NO: 1380649 - DNA, 15 bp, Homo sapiens
ttcactactctgcta

SEQ ID NO: 1380650 - DNA, 15 bp, Homo sapiens
attcactactctgct

SEQ ID NO: 1380651 - DNA, 15 bp, Homo sapiens
tattcactactctgc

SEQ ID NO: 1380652 - DNA, 15 bp, Homo sapiens
ttattcactactctg

SEQ ID NO: 1380653 - DNA, 15 bp, Homo sapiens
cttattcactactct

SEQ ID NO: 1380654 - DNA, 15 bp, Homo sapiens
tcttattcactactc

SEQ ID NO: 1380655 - DNA, 15 bp, Homo sapiens
gtcttattcactact

SEQ ID NO: 1380656 - DNA, 15 bp, Homo sapiens
agtcttattcactac

SEQ ID NO: 1380657 - DNA, 15 bp, Homo sapiens
tagtcttattcacta

SEQ ID NO: 1380658 - DNA, 15 bp, Homo sapiens
ctagtcttattcact

SEQ ID NO: 1380659 - DNA, 15 bp, Homo sapiens
cctagtcttattcac

SEQ ID NO: 1380660 - DNA, 15 bp, Homo sapiens
ccctagtcttattca

SEQ ID NO: 1380661 - DNA, 15 bp, Homo sapiens
tccctagtcttattc

SEQ ID NO: 1380662 - DNA, 15 bp, Homo sapiens
ctccctagtcttatt

SEQ ID NO: 1380663 - DNA, 15 bp, Homo sapiens
actccctagtcttat

SEQ ID NO: 1380664 - DNA, 15 bp, Homo sapiens
gactccctagtctta

SEQ ID NO: 1380665 - DNA, 15 bp, Homo sapiens
tgactccctagtctt

SEQ ID NO: 1380666 - DNA, 15 bp, Homo sapiens
ctgactccctagtct

SEQ ID NO: 1380667 - DNA, 15 bp, Homo sapiens
tctgactccctagtc

SEQ ID NO: 1380668 - DNA, 15 bp, Homo sapiens
atctgactccctagt

SEQ ID NO: 1380669 - DNA, 15 bp, Homo sapiens
aatctgactccctag

SEQ ID NO: 1380670 - DNA, 15 bp, Homo sapiens
aaatctgactcccta

SEQ ID NO: 1380671 - DNA, 15 bp, Homo sapiens
taaatctgactccct

SEQ ID NO: 1380672 - DNA, 15 bp, Homo sapiens
gtaaatctgactccc

SEQ ID NO: 1380673 - DNA, 15 bp, Homo sapiens
ggtaaatctgactcc

SEQ ID NO: 1380674 - DNA, 15 bp, Homo sapiens
aggtaaatctgactc

SEQ ID NO: 1380675 - DNA, 15 bp, Homo sapiens
aaggtaaatctgact

SEQ ID NO: 1380676 - DNA, 15 bp, Homo sapiens
gaaggtaaatctgac

SEQ ID NO: 1380677 - DNA, 15 bp, Homo sapiens
agaaggtaaatctga

SEQ ID NO: 1380678 - DNA, 15 bp, Homo sapiens
aagaaggtaaatctg

SEQ ID NO: 1380679 - DNA, 15 bp, Homo sapiens
taagaaggtaaatct

SEQ ID NO: 1380680 - DNA, 15 bp, Homo sapiens
ctaagaaggtaaatc

SEQ ID NO: 1380681 - DNA, 15 bp, Homo sapiens
gctaagaaggtaaat

SEQ ID NO: 1380682 - DNA, 15 bp, Homo sapiens
tgctaagaaggtaaa

SEQ ID NO: 1380683 - DNA, 15 bp, Homo sapiens
ctgctaagaaggtaa

SEQ ID NO: 1380684 - DNA, 15 bp, Homo sapiens
gctgctaagaaggta

SEQ ID NO: 1380685 - DNA, 15 bp, Homo sapiens
agctgctaagaaggt

SEQ ID NO: 1380686 - DNA, 15 bp, Homo sapiens
gagctgctaagaagg

SEQ ID NO: 1380687 - DNA, 15 bp, Homo sapiens
agagctgctaagaag

SEQ ID NO: 1380688 - DNA, 15 bp, Homo sapiens
gagagctgctaagaa

SEQ ID NO: 1380689 - DNA, 15 bp, Homo sapiens
ggagagctgctaaga

SEQ ID NO: 1380690 - DNA, 15 bp, Homo sapiens
aggagagctgctaag

SEQ ID NO: 1380691 - DNA, 15 bp, Homo sapiens
caggagagctgctaa

SEQ ID NO: 1380692 - DNA, 15 bp, Homo sapiens
gcaggagagctgcta

SEQ ID NO: 1380693 - DNA, 15 bp, Homo sapiens
ggcaggagagctgct

SEQ ID NO: 1380694 - DNA, 15 bp, Homo sapiens
gggcaggagagctgc

SEQ ID NO: 1380695 - DNA, 15 bp, Homo sapiens
agggcaggagagctg

SEQ ID NO: 1380696 - DNA, 15 bp, Homo sapiens
cagggcaggagagct

SEQ ID NO: 1380697 - DNA, 15 bp, Homo sapiens
tcagggcaggagagc

SEQ ID NO: 1380698 - DNA, 15 bp, Homo sapiens
ttcagggcaggagag

SEQ ID NO: 1380699 - DNA, 15 bp, Homo sapiens
attcagggcaggaga

SEQ ID NO: 1380700 - DNA, 15 bp, Homo sapiens
aattcagggcaggag

SEQ ID NO: 1380701 - DNA, 15 bp, Homo sapiens
taattcagggcagga

SEQ ID NO: 1380702 - DNA, 15 bp, Homo sapiens
ttaattcagggcagg

SEQ ID NO: 1380703 - DNA, 15 bp, Homo sapiens
tttaattcagggcag

SEQ ID NO: 1380704 - DNA, 15 bp, Homo sapiens
gtttaattcagggca

SEQ ID NO: 1380705 - DNA, 15 bp, Homo sapiens
tgtttaattcagggc

SEQ ID NO: 1380706 - DNA, 15 bp, Homo sapiens
ctgtttaattcaggg

SEQ ID NO: 1380707 - DNA, 15 bp, Homo sapiens
cctgtttaattcagg

SEQ ID NO: 1380708 - DNA, 15 bp, Homo sapiens
tcctgtttaattcag

SEQ ID NO: 1380709 - DNA, 15 bp, Homo sapiens
atcctgtttaattca

SEQ ID NO: 1380710 - DNA, 15 bp, Homo sapiens
catcctgtttaattc

SEQ ID NO: 1380711 - DNA, 15 bp, Homo sapiens
gcatcctgtttaatt

SEQ ID NO: 1380712 - DNA, 15 bp, Homo sapiens
ggcatcctgtttaat

SEQ ID NO: 1380713 - DNA, 15 bp, Homo sapiens
gggcatcctgtttaa

SEQ ID NO: 1380714 - DNA, 15 bp, Homo sapiens
ggggcatcctgttta

SEQ ID NO: 1380715 - DNA, 15 bp, Homo sapiens
tggggcatcctgttt

SEQ ID NO: 1380716 - DNA, 15 bp, Homo sapiens
ctggggcatcctgtt

SEQ ID NO: 1380717 - DNA, 15 bp, Homo sapiens
gctggggcatcctgt

SEQ ID NO: 1380718 - DNA, 15 bp, Homo sapiens
tgctggggcatcctg

SEQ ID NO: 1380719 - DNA, 15 bp, Homo sapiens
atgctggggcatcct

SEQ ID NO: 1380720 - DNA, 15 bp, Homo sapiens
catgctggggcatcc

SEQ ID NO: 1380721 - DNA, 15 bp, Homo sapiens
acatgctggggcatc

SEQ ID NO: 1380722 - DNA, 15 bp, Homo sapiens
aacatgctggggcat

SEQ ID NO: 1380723 - DNA, 15 bp, Homo sapiens
caacatgctggggca

SEQ ID NO: 1380724 - DNA, 15 bp, Homo sapiens
gcaacatgctggggc

SEQ ID NO: 1380725 - DNA, 15 bp, Homo sapiens
ggcaacatgctgggg

SEQ ID NO: 1380726 - DNA, 15 bp, Homo sapiens
aggcaacatgctggg

SEQ ID NO: 1380727 - DNA, 15 bp, Homo sapiens
aaggcaacatgctgg

SEQ ID NO: 1380728 - DNA, 15 bp, Homo sapiens
gaaggcaacatgctg

SEQ ID NO: 1380729 - DNA, 15 bp, Homo sapiens
agaaggcaacatgct

SEQ ID NO: 1380730 - DNA, 15 bp, Homo sapiens
cagaaggcaacatgc

SEQ ID NO: 1380731 - DNA, 15 bp, Homo sapiens
gcagaaggcaacatg

SEQ ID NO: 1380732 - DNA, 15 bp, Homo sapiens
agcagaaggcaacat

SEQ ID NO: 1380733 - DNA, 15 bp, Homo sapiens
tagcagaaggcaaca

SEQ ID NO: 1380734 - DNA, 15 bp, Homo sapiens
gtagcagaaggcaac

SEQ ID NO: 1380735 - DNA, 15 bp, Homo sapiens
tgtagcagaaggcaa

SEQ ID NO: 1380736 - DNA, 15 bp, Homo sapiens
ttgtagcagaaggca

SEQ ID NO: 1380737 - DNA, 15 bp, Homo sapiens
cttgtagcagaaggc

SEQ ID NO: 1380738 - DNA, 15 bp, Homo sapiens
gcttgtagcagaagg

SEQ ID NO: 1380739 - DNA, 15 bp, Homo sapiens
agcttgtagcagaag

SEQ ID NO: 1380740 - DNA, 15 bp, Homo sapiens
aagcttgtagcagaa

SEQ ID NO: 1380741 - DNA, 15 bp, Homo sapiens
aaagcttgtagcaga

SEQ ID NO: 1380742 - DNA, 15 bp, Homo sapiens
taaagcttgtagcag

SEQ ID NO: 1380743 - DNA, 15 bp, Homo sapiens
ctaaagcttgtagca

SEQ ID NO: 1380744 - DNA, 15 bp, Homo sapiens
actaaagcttgtagc

SEQ ID NO: 1380745 - DNA, 15 bp, Homo sapiens
cactaaagcttgtag

SEQ ID NO: 1380746 - DNA, 15 bp, Homo sapiens
acactaaagcttgta

SEQ ID NO: 1380747 - DNA, 15 bp, Homo sapiens
gacactaaagcttgt

SEQ ID NO: 1380748 - DNA, 15 bp, Homo sapiens
agacactaaagcttg

SEQ ID NO: 1380749 - DNA, 15 bp, Homo sapiens
cagacactaaagctt

SEQ ID NO: 1380750 - DNA, 15 bp, Homo sapiens
acagacactaaagct

SEQ ID NO: 1380751 - DNA, 15 bp, Homo sapiens
gacagacactaaagc

SEQ ID NO: 1380752 - DNA, 15 bp, Homo sapiens
agacagacactaaag

SEQ ID NO: 1380753 - DNA, 15 bp, Homo sapiens
cagacagacactaaa

SEQ ID NO: 1380754 - DNA, 15 bp, Homo sapiens
acagacagacactaa

SEQ ID NO: 1380755 - DNA, 15 bp, Homo sapiens
tacagacagacacta

SEQ ID NO: 1380756 - DNA, 15 bp, Homo sapiens
ttacagacagacact

SEQ ID NO: 1380757 - DNA, 15 bp, Homo sapiens
tttacagacagacac

SEQ ID NO: 1380758 - DNA, 15 bp, Homo sapiens
gtttacagacagaca

SEQ ID NO: 1380759 - DNA, 15 bp, Homo sapiens
tgtttacagacagac

SEQ ID NO: 1380760 - DNA, 15 bp, Homo sapiens
ttgtttacagacaga

SEQ ID NO: 1380761 - DNA, 15 bp, Homo sapiens
tttgtttacagacag

SEQ ID NO: 1380762 - DNA, 15 bp, Homo sapiens
gtttgtttacagaca

SEQ ID NO: 1380763 - DNA, 15 bp, Homo sapiens
ggtttgtttacagac

SEQ ID NO: 1380764 - DNA, 15 bp, Homo sapiens
gggtttgtttacaga

SEQ ID NO: 1380765 - DNA, 15 bp, Homo sapiens
tgggtttgtttacag

SEQ ID NO: 1380766 - DNA, 15 bp, Homo sapiens
ttgggtttgtttaca

SEQ ID NO: 1380767 - DNA, 15 bp, Homo sapiens
cttgggtttgtttac

SEQ ID NO: 1380768 - DNA, 15 bp, Homo sapiens
acttgggtttgttta

SEQ ID NO: 1380769 - DNA, 15 bp, Homo sapiens
tacttgggtttgttt

SEQ ID NO: 1380770 - DNA, 15 bp, Homo sapiens
ttacttgggtttgtt

SEQ ID NO: 1380771 - DNA, 15 bp, Homo sapiens
cttacttgggtttgt

SEQ ID NO: 1380772 - DNA, 15 bp, Homo sapiens
ccttacttgggtttg

SEQ ID NO: 1380773 - DNA, 15 bp, Homo sapiens
accttacttgggttt

SEQ ID NO: 1380774 - DNA, 15 bp, Homo sapiens
aaccttacttgggtt

SEQ ID NO: 1380775 - DNA, 15 bp, Homo sapiens
caaccttacttgggt

SEQ ID NO: 1380776 - DNA, 15 bp, Homo sapiens
tcaaccttacttggg

SEQ ID NO: 1380777 - DNA, 15 bp, Homo sapiens
ttcaaccttacttgg

SEQ ID NO: 1380778 - DNA, 15 bp, Homo sapiens
tttcaaccttacttg

SEQ ID NO: 1380779 - DNA, 15 bp, Homo sapiens
ttttcaaccttactt

SEQ ID NO: 1380780 - DNA, 15 bp, Homo sapiens
cttttcaaccttact

SEQ ID NO: 1380781 - DNA, 15 bp, Homo sapiens
gcttttcaaccttac

SEQ ID NO: 1380782 - DNA, 15 bp, Homo sapiens
tgcttttcaacctta

SEQ ID NO: 1380783 - DNA, 15 bp, Homo sapiens
gtgcttttcaacctt

SEQ ID NO: 1380784 - DNA, 15 bp, Homo sapiens
agtgcttttcaacct

SEQ ID NO: 1380785 - DNA, 15 bp, Homo sapiens
gagtgcttttcaacc

SEQ ID NO: 1380786 - DNA, 15 bp, Homo sapiens
ggagtgcttttcaac

SEQ ID NO: 1380787 - DNA, 15 bp, Homo sapiens
aggagtgcttttcaa

SEQ ID NO: 1380788 - DNA, 15 bp, Homo sapiens
aaggagtgcttttca

SEQ ID NO: 1380789 - DNA, 15 bp, Homo sapiens
taaggagtgcttttc

SEQ ID NO: 1380790 - DNA, 15 bp, Homo sapiens
ataaggagtgctttt

SEQ ID NO: 1380791 - DNA, 15 bp, Homo sapiens
cataaggagtgcttt

SEQ ID NO: 1380792 - DNA, 15 bp, Homo sapiens
tcataaggagtgctt

SEQ ID NO: 1380793 - DNA, 15 bp, Homo sapiens
ttcataaggagtgct

SEQ ID NO: 1380794 - DNA, 15 bp, Homo sapiens
cttcataaggagtgc

SEQ ID NO: 1380795 - DNA, 15 bp, Homo sapiens
acttcataaggagtg

SEQ ID NO: 1380796 - DNA, 15 bp, Homo sapiens
tacttcataaggagt

SEQ ID NO: 1380797 - DNA, 15 bp, Homo sapiens
ttacttcataaggag

SEQ ID NO: 1380798 - DNA, 15 bp, Homo sapiens
cttacttcataagga

SEQ ID NO: 1380799 - DNA, 15 bp, Homo sapiens
tcttacttcataagg

SEQ ID NO: 1380800 - DNA, 15 bp, Homo sapiens
atcttacttcataag

SEQ ID NO: 1380801 - DNA, 15 bp, Homo sapiens
tatcttacttcataa

SEQ ID NO: 1380802 - DNA, 15 bp, Homo sapiens
ctatcttacttcata

SEQ ID NO: 1380803 - DNA, 15 bp, Homo sapiens
gctatcttacttcat

SEQ ID NO: 1380804 - DNA, 15 bp, Homo sapiens
ggctatcttacttca

SEQ ID NO: 1380805 - DNA, 15 bp, Homo sapiens
tggctatcttacttc

SEQ ID NO: 1380806 - DNA, 15 bp, Homo sapiens
ctggctatcttactt

SEQ ID NO: 1380807 - DNA, 15 bp, Homo sapiens
tctggctatcttact

SEQ ID NO: 1380808 - DNA, 15 bp, Homo sapiens
ctctggctatcttac

SEQ ID NO: 1380809 - DNA, 15 bp, Homo sapiens
tctctggctatctta

SEQ ID NO: 1380810 - DNA, 15 bp, Homo sapiens
ctctctggctatctt

SEQ ID NO: 1380811 - DNA, 15 bp, Homo sapiens
actctctggctatct

SEQ ID NO: 1380812 - DNA, 15 bp, Homo sapiens
cactctctggctatc

SEQ ID NO: 1380813 - DNA, 15 bp, Homo sapiens
tcactctctggctat

SEQ ID NO: 1380814 - DNA, 15 bp, Homo sapiens
gtcactctctggcta

SEQ ID NO: 1380815 - DNA, 15 bp, Homo sapiens
tgtcactctctggct

SEQ ID NO: 1380816 - DNA, 15 bp, Homo sapiens
ctgtcactctctggc

SEQ ID NO: 1380817 - DNA, 15 bp, Homo sapiens
cctgtcactctctgg

SEQ ID NO: 1380818 - DNA, 15 bp, Homo sapiens
ccctgtcactctctg

SEQ ID NO: 1380819 - DNA, 15 bp, Homo sapiens
tccctgtcactctct

SEQ ID NO: 1380820 - DNA, 15 bp, Homo sapiens
atccctgtcactctc

SEQ ID NO: 1380821 - DNA, 15 bp, Homo sapiens
catccctgtcactct

SEQ ID NO: 1380822 - DNA, 15 bp, Homo sapiens
gcatccctgtcactc

SEQ ID NO: 1380823 - DNA, 15 bp, Homo sapiens
ggcatccctgtcact

SEQ ID NO: 1380824 - DNA, 15 bp, Homo sapiens
tggcatccctgtcac

SEQ ID NO: 1380825 - DNA, 15 bp, Homo sapiens
gtggcatccctgtca

SEQ ID NO: 1380826 - DNA, 15 bp, Homo sapiens
tgtggcatccctgtc

SEQ ID NO: 1380827 - DNA, 15 bp, Homo sapiens
gtgtggcatccctgt

SEQ ID NO: 1380828 - DNA, 15 bp, Homo sapiens
ggtgtggcatccctg

SEQ ID NO: 1380829 - DNA, 15 bp, Homo sapiens
tggtgtggcatccct

SEQ ID NO: 1380830 - DNA, 15 bp, Homo sapiens
ctggtgtggcatccc

SEQ ID NO: 1380831 - DNA, 15 bp, Homo sapiens
tctggtgtggcatcc

SEQ ID NO: 1380832 - DNA, 15 bp, Homo sapiens
ctctggtgtggcatc

SEQ ID NO: 1380833 - DNA, 15 bp, Homo sapiens
tctctggtgtggcat

SEQ ID NO: 1380834 - DNA, 15 bp, Homo sapiens
ttctctggtgtggca

SEQ ID NO: 1380835 - DNA, 15 bp, Homo sapiens
cttctctggtgtggc

SEQ ID NO: 1380836 - DNA, 15 bp, Homo sapiens
gcttctctggtgtgg

SEQ ID NO: 1380837 - DNA, 15 bp, Homo sapiens
agcttctctggtgtg

SEQ ID NO: 1380838 - DNA, 15 bp, Homo sapiens
cagcttctctggtgt

SEQ ID NO: 1380839 - DNA, 15 bp, Homo sapiens
tcagcttctctggtg

SEQ ID NO: 1380840 - DNA, 15 bp, Homo sapiens
ctcagcttctctggt

SEQ ID NO: 1380841 - DNA, 15 bp, Homo sapiens
gctcagcttctctgg

SEQ ID NO: 1380842 - DNA, 15 bp, Homo sapiens
tgctcagcttctctg

SEQ ID NO: 1380843 - DNA, 15 bp, Homo sapiens
ctgctcagcttctct

SEQ ID NO: 1380844 - DNA, 15 bp, Homo sapiens
actgctcagcttctc

SEQ ID NO: 1380845 - DNA, 15 bp, Homo sapiens
gactgctcagcttct

SEQ ID NO: 1380846 - DNA, 15 bp, Homo sapiens
agactgctcagcttc

SEQ ID NO: 1380847 - DNA, 15 bp, Homo sapiens
cagactgctcagctt

SEQ ID NO: 1380848 - DNA, 15 bp, Homo sapiens
gcagactgctcagct

SEQ ID NO: 1380849 - DNA, 15 bp, Homo sapiens
ggcagactgctcagc

SEQ ID NO: 1380850 - DNA, 15 bp, Homo sapiens
gggcagactgctcag

SEQ ID NO: 1380851 - DNA, 15 bp, Homo sapiens
ggggcagactgctca

SEQ ID NO: 1380852 - DNA, 15 bp, Homo sapiens
aggggcagactgctc

SEQ ID NO: 1380853 - DNA, 15 bp, Homo sapiens
caggggcagactgct

SEQ ID NO: 1380854 - DNA, 15 bp, Homo sapiens
ccaggggcagactgc

SEQ ID NO: 1380855 - DNA, 15 bp, Homo sapiens
cccaggggcagactg

SEQ ID NO: 1380856 - DNA, 15 bp, Homo sapiens
gcccaggggcagact

SEQ ID NO: 1380857 - DNA, 15 bp, Homo sapiens
tgcccaggggcagac

SEQ ID NO: 1380858 - DNA, 15 bp, Homo sapiens
ctgcccaggggcaga

SEQ ID NO: 1380859 - DNA, 15 bp, Homo sapiens
gctgcccaggggcag

SEQ ID NO: 1380860 - DNA, 15 bp, Homo sapiens
tgctgcccaggggca

SEQ ID NO: 1380861 - DNA, 15 bp, Homo sapiens
atgctgcccaggggc

SEQ ID NO: 1380862 - DNA, 15 bp, Homo sapiens
gatgctgcccagggg

SEQ ID NO: 1380863 - DNA, 15 bp, Homo sapiens
ggatgctgcccaggg

SEQ ID NO: 1380864 - DNA, 15 bp, Homo sapiens
tggatgctgcccagg

SEQ ID NO: 1380865 - DNA, 15 bp, Homo sapiens
ctggatgctgcccag

SEQ ID NO: 1380866 - DNA, 15 bp, Homo sapiens
actggatgctgccca

SEQ ID NO: 1380867 - DNA, 15 bp, Homo sapiens
gactggatgctgccc

SEQ ID NO: 1380868 - DNA, 15 bp, Homo sapiens
agactggatgctgcc

SEQ ID NO: 1380869 - DNA, 15 bp, Homo sapiens
cagactggatgctgc

SEQ ID NO: 1380870 - DNA, 15 bp, Homo sapiens
gcagactggatgctg

SEQ ID NO: 1380871 - DNA, 15 bp, Homo sapiens
ggcagactggatgct

SEQ ID NO: 1380872 - DNA, 15 bp, Homo sapiens
tggcagactggatgc

SEQ ID NO: 1380873 - DNA, 15 bp, Homo sapiens
gtggcagactggatg

SEQ ID NO: 1380874 - DNA, 15 bp, Homo sapiens
ggtggcagactggat

SEQ ID NO: 1380875 - DNA, 15 bp, Homo sapiens
gggtggcagactgga

SEQ ID NO: 1380876 - DNA, 15 bp, Homo sapiens
tgggtggcagactgg

SEQ ID NO: 1380877 - DNA, 15 bp, Homo sapiens
gtgggtggcagactg

SEQ ID NO: 1380878 - DNA, 15 bp, Homo sapiens
ggtgggtggcagact

SEQ ID NO: 1380879 - DNA, 15 bp, Homo sapiens
tggtgggtggcagac

SEQ ID NO: 1380880 - DNA, 15 bp, Homo sapiens
ctggtgggtggcaga

SEQ ID NO: 1380881 - DNA, 15 bp, Homo sapiens
gctggtgggtggcag

SEQ ID NO: 1380882 - DNA, 15 bp, Homo sapiens
agctggtgggtggca

SEQ ID NO: 1380883 - DNA, 15 bp, Homo sapiens
cagctggtgggtggc

SEQ ID NO: 1380884 - DNA, 15 bp, Homo sapiens
ccagctggtgggtgg

SEQ ID NO: 1380885 - DNA, 15 bp, Homo sapiens
accagctggtgggtg

SEQ ID NO: 1380886 - DNA, 15 bp, Homo sapiens
gaccagctggtgggt

SEQ ID NO: 1380887 - DNA, 15 bp, Homo sapiens
tgaccagctggtggg

SEQ ID NO: 1380888 - DNA, 15 bp, Homo sapiens
ctgaccagctggtgg

SEQ ID NO: 1380889 - DNA, 15 bp, Homo sapiens
tctgaccagctggtg

SEQ ID NO: 1380890 - DNA, 15 bp, Homo sapiens
ttctgaccagctggt

SEQ ID NO: 1380891 - DNA, 15 bp, Homo sapiens
gttctgaccagctgg

SEQ ID NO: 1380892 - DNA, 15 bp, Homo sapiens
agttctgaccagctg

SEQ ID NO: 1380893 - DNA, 15 bp, Homo sapiens
tagttctgaccagct

SEQ ID NO: 1380894 - DNA, 15 bp, Homo sapiens
ttagttctgaccagc

SEQ ID NO: 1380895 - DNA, 15 bp, Homo sapiens
cttagttctgaccag

SEQ ID NO: 1380896 - DNA, 15 bp, Homo sapiens
ccttagttctgacca

SEQ ID NO: 1380897 - DNA, 15 bp, Homo sapiens
gccttagttctgacc

SEQ ID NO: 1380898 - DNA, 15 bp, Homo sapiens
tgccttagttctgac

SEQ ID NO: 1380899 - DNA, 15 bp, Homo sapiens
ctgccttagttctga

SEQ ID NO: 1380900 - DNA, 15 bp, Homo sapiens
cctgccttagttctg

SEQ ID NO: 1380901 - DNA, 15 bp, Homo sapiens
tcctgccttagttct

SEQ ID NO: 1380902 - DNA, 15 bp, Homo sapiens
gtcctgccttagttc

SEQ ID NO: 1380903 - DNA, 15 bp, Homo sapiens
tgtcctgccttagtt

SEQ ID NO: 1380904 - DNA, 15 bp, Homo sapiens
ctgtcctgccttagt

SEQ ID NO: 1380905 - DNA, 15 bp, Homo sapiens
tctgtcctgccttag

SEQ ID NO: 1380906 - DNA, 15 bp, Homo sapiens
ctctgtcctgcctta

SEQ ID NO: 1380907 - DNA, 15 bp, Homo sapiens
cctctgtcctgcctt

SEQ ID NO: 1380908 - DNA, 15 bp, Homo sapiens
ccctctgtcctgcct

SEQ ID NO: 1380909 - DNA, 15 bp, Homo sapiens
tccctctgtcctgcc

SEQ ID NO: 1380910 - DNA, 15 bp, Homo sapiens
gtccctctgtcctgc

SEQ ID NO: 1380911 - DNA, 15 bp, Homo sapiens
tgtccctctgtcctg

SEQ ID NO: 1380912 - DNA, 15 bp, Homo sapiens
gtgtccctctgtcct

SEQ ID NO: 1380913 - DNA, 15 bp, Homo sapiens
tgtgtccctctgtcc

SEQ ID NO: 1380914 - DNA, 15 bp, Homo sapiens
ctgtgtccctctgtc

SEQ ID NO: 1380915 - DNA, 15 bp, Homo sapiens
cctgtgtccctctgt

SEQ ID NO: 1380916 - DNA, 15 bp, Homo sapiens
tcctgtgtccctctg

SEQ ID NO: 1380917 - DNA, 15 bp, Homo sapiens
ctcctgtgtccctct

SEQ ID NO: 1380918 - DNA, 15 bp, Homo sapiens
tctcctgtgtccctc

SEQ ID NO: 1380919 - DNA, 15 bp, Homo sapiens
atctcctgtgtccct

SEQ ID NO: 1380920 - DNA, 15 bp, Homo sapiens
catctcctgtgtccc

SEQ ID NO: 1380921 - DNA, 15 bp, Homo sapiens
ccatctcctgtgtcc

SEQ ID NO: 1380922 - DNA, 15 bp, Homo sapiens
gccatctcctgtgtc

SEQ ID NO: 1380923 - DNA, 15 bp, Homo sapiens
ggccatctcctgtgt

SEQ ID NO: 1380924 - DNA, 15 bp, Homo sapiens
aggccatctcctgtg

SEQ ID NO: 1380925 - DNA, 15 bp, Homo sapiens
caggccatctcctgt

SEQ ID NO: 1380926 - DNA, 15 bp, Homo sapiens
ccaggccatctcctg

SEQ ID NO: 1380927 - DNA, 15 bp, Homo sapiens
tccaggccatctcct

SEQ ID NO: 1380928 - DNA, 15 bp, Homo sapiens
atccaggccatctcc

SEQ ID NO: 1380929 - DNA, 15 bp, Homo sapiens
gatccaggccatctc

SEQ ID NO: 1380930 - DNA, 15 bp, Homo sapiens
tgatccaggccatct

SEQ ID NO: 1380931 - DNA, 15 bp, Homo sapiens
gtgatccaggccatc

SEQ ID NO: 1380932 - DNA, 15 bp, Homo sapiens
tgtgatccaggccat

SEQ ID NO: 1380933 - DNA, 15 bp, Homo sapiens
ctgtgatccaggcca

SEQ ID NO: 1380934 - DNA, 15 bp, Homo sapiens
actgtgatccaggcc

SEQ ID NO: 1380935 - DNA, 15 bp, Homo sapiens
aactgtgatccaggc

SEQ ID NO: 1380936 - DNA, 15 bp, Homo sapiens
gaactgtgatccagg

SEQ ID NO: 1380937 - DNA, 15 bp, Homo sapiens
agaactgtgatccag

SEQ ID NO: 1380938 - DNA, 15 bp, Homo sapiens
gagaactgtgatcca

SEQ ID NO: 1380939 - DNA, 15 bp, Homo sapiens
tgagaactgtgatcc

SEQ ID NO: 1380940 - DNA, 15 bp, Homo sapiens
ttgagaactgtgatc

SEQ ID NO: 1380941 - DNA, 15 bp, Homo sapiens
tttgagaactgtgat

SEQ ID NO: 1380942 - DNA, 15 bp, Homo sapiens
ttttgagaactgtga

SEQ ID NO: 1380943 - DNA, 15 bp, Homo sapiens
gttttgagaactgtg

SEQ ID NO: 1380944 - DNA, 15 bp, Homo sapiens
tgttttgagaactgt

SEQ ID NO: 1380945 - DNA, 15 bp, Homo sapiens
ctgttttgagaactg

SEQ ID NO: 1380946 - DNA, 15 bp, Homo sapiens
actgttttgagaact

SEQ ID NO: 1380947 - DNA, 15 bp, Homo sapiens
tactgttttgagaac

SEQ ID NO: 1380948 - DNA, 15 bp, Homo sapiens
atactgttttgagaa

SEQ ID NO: 1380949 - DNA, 15 bp, Homo sapiens
catactgttttgaga

SEQ ID NO: 1380950 - DNA, 15 bp, Homo sapiens
tcatactgttttgag

SEQ ID NO: 1380951 - DNA, 15 bp, Homo sapiens
gtcatactgttttga

SEQ ID NO: 1380952 - DNA, 15 bp, Homo sapiens
agtcatactgttttg

SEQ ID NO: 1380953 - DNA, 15 bp, Homo sapiens
aagtcatactgtttt

SEQ ID NO: 1380954 - DNA, 15 bp, Homo sapiens
gaagtcatactgttt

SEQ ID NO: 1380955 - DNA, 15 bp, Homo sapiens
tgaagtcatactgtt

SEQ ID NO: 1380956 - DNA, 15 bp, Homo sapiens
gtgaagtcatactgt

SEQ ID NO: 1380957 - DNA, 15 bp, Homo sapiens
agtgaagtcatactg

SEQ ID NO: 1380958 - DNA, 15 bp, Homo sapiens
gagtgaagtcatact

SEQ ID NO: 1380959 - DNA, 15 bp, Homo sapiens
ggagtgaagtcatac

SEQ ID NO: 1380960 - DNA, 15 bp, Homo sapiens
tggagtgaagtcata

SEQ ID NO: 1380961 - DNA, 15 bp, Homo sapiens
ctggagtgaagtcat

SEQ ID NO: 1380962 - DNA, 15 bp, Homo sapiens
cctggagtgaagtca

SEQ ID NO: 1380963 - DNA, 15 bp, Homo sapiens
ccctggagtgaagtc

SEQ ID NO: 1380964 - DNA, 15 bp, Homo sapiens
accctggagtgaagt

SEQ ID NO: 1380965 - DNA, 15 bp, Homo sapiens
caccctggagtgaag

SEQ ID NO: 1380966 - DNA, 15 bp, Homo sapiens
gcaccctggagtgaa

SEQ ID NO: 1380967 - DNA, 15 bp, Homo sapiens
ggcaccctggagtga

SEQ ID NO: 1380968 - DNA, 15 bp, Homo sapiens
tggcaccctggagtg

SEQ ID NO: 1380969 - DNA, 15 bp, Homo sapiens
ttggcaccctggagt

SEQ ID NO: 1380970 - DNA, 15 bp, Homo sapiens
cttggcaccctggag

SEQ ID NO: 1380971 - DNA, 15 bp, Homo sapiens
tcttggcaccctgga

SEQ ID NO: 1380972 - DNA, 15 bp, Homo sapiens
ttcttggcaccctgg

SEQ ID NO: 1380973 - DNA, 15 bp, Homo sapiens
tttcttggcaccctg

SEQ ID NO: 1380974 - DNA, 15 bp, Homo sapiens
ctttcttggcaccct

SEQ ID NO: 1380975 - DNA, 15 bp, Homo sapiens
cctttcttggcaccc

SEQ ID NO: 1380976 - DNA, 15 bp, Homo sapiens
gcctttcttggcacc

SEQ ID NO: 1380977 - DNA, 15 bp, Homo sapiens
gtgcctttcttggca

SEQ ID NO: 1380978 - DNA, 15 bp, Homo sapiens
ggtgcctttcttggc

SEQ ID NO: 1380979 - DNA, 15 bp, Homo sapiens
tggtgcctttcttgg

SEQ ID NO: 1380980 - DNA, 15 bp, Homo sapiens
ttggtgcctttcttg

SEQ ID NO: 1380981 - DNA, 15 bp, Homo sapiens
tttggtgcctttctt

SEQ ID NO: 1380982 - DNA, 15 bp, Homo sapiens
ttttggtgcctttct

SEQ ID NO: 1380983 - DNA, 15 bp, Homo sapiens
tttttggtgcctttc

SEQ ID NO: 1380984 - DNA, 15 bp, Homo sapiens
atttttggtgccttt

SEQ ID NO: 1380985 - DNA, 15 bp, Homo sapiens
tatttttggtgcctt

SEQ ID NO: 1380986 - DNA, 15 bp, Homo sapiens
ttatttttggtgcct

SEQ ID NO: 1380987 - DNA, 15 bp, Homo sapiens
tttatttttggtgcc

SEQ ID NO: 1380988 - DNA, 15 bp, Homo sapiens
ttttatttttggtgc

SEQ ID NO: 1380989 - DNA, 15 bp, Homo sapiens
gtttttatttttggt

SEQ ID NO: 1380990 - DNA, 15 bp, Homo sapiens
agtttttatttttgg

SEQ ID NO: 1380991 - DNA, 15 bp, Homo sapiens
tagtttttatttttg

SEQ ID NO: 1380992 - DNA, 15 bp, Homo sapiens
ctagtttttattttt

SEQ ID NO: 1380993 - DNA, 15 bp, Homo sapiens
actagtttttatttt

SEQ ID NO: 1380994 - DNA, 15 bp, Homo sapiens
tactagtttttattt

SEQ ID NO: 1380995 - DNA, 15 bp, Homo sapiens
ttactagtttttatt

SEQ ID NO: 1380996 - DNA, 15 bp, Homo sapiens
gttactagtttttat

SEQ ID NO: 1380997 - DNA, 15 bp, Homo sapiens
tgttactagttttta

SEQ ID NO: 1380998 - DNA, 15 bp, Homo sapiens
ttgttactagttttt

SEQ ID NO: 1380999 - DNA, 15 bp, Homo sapiens
gttgttactagtttt

SEQ ID NO: 1381000 - DNA, 15 bp, Homo sapiens
tgttgttactagttt

SEQ ID NO: 1381001 - DNA, 15 bp, Homo sapiens
ttgttgttactagtt

SEQ ID NO: 1381002 - DNA, 15 bp, Homo sapiens
tttgttgttactagt

SEQ ID NO: 1381003 - DNA, 15 bp, Homo sapiens
ttttgttgttactag

SEQ ID NO: 1381004 - DNA, 15 bp, Homo sapiens
tttttgttgttacta

SEQ ID NO: 1381005 - DNA, 15 bp, Homo sapiens
gtttttgttgttact

SEQ ID NO: 1381006 - DNA, 15 bp, Homo sapiens
ggtttttgttgttac

SEQ ID NO: 1381007 - DNA, 15 bp, Homo sapiens
gggtttttgttgtta

SEQ ID NO: 1381008 - DNA, 15 bp, Homo sapiens
tgggtttttgttgtt

SEQ ID NO: 1381009 - DNA, 15 bp, Homo sapiens
ttgggtttttgttgt

SEQ ID NO: 1381010 - DNA, 15 bp, Homo sapiens
tttgggtttttgttg

SEQ ID NO: 1381011 - DNA, 15 bp, Homo sapiens
ctttgggtttttgtt

SEQ ID NO: 1381012 - DNA, 15 bp, Homo sapiens
gctttgggtttttgt

SEQ ID NO: 1381013 - DNA, 15 bp, Homo sapiens
ggctttgggtttttg

SEQ ID NO: 1381014 - DNA, 15 bp, Homo sapiens
aggctttgggttttt

SEQ ID NO: 1381015 - DNA, 15 bp, Homo sapiens
caggctttgggtttt

SEQ ID NO: 1381016 - DNA, 15 bp, Homo sapiens
gcaggctttgggttt

SEQ ID NO: 1381017 - DNA, 15 bp, Homo sapiens
tgcaggctttgggtt

SEQ ID NO: 1381018 - DNA, 15 bp, Homo sapiens
ttgcaggctttgggt

SEQ ID NO: 1381019 - DNA, 15 bp, Homo sapiens
tttgcaggctttggg

SEQ ID NO: 1381020 - DNA, 15 bp, Homo sapiens
atttgcaggctttgg

SEQ ID NO: 1381021 - DNA, 15 bp, Homo sapiens
gatttgcaggctttg

SEQ ID NO: 1381022 - DNA, 15 bp, Homo sapiens
cgatttgcaggcttt

SEQ ID NO: 1381023 - DNA, 15 bp, Homo sapiens
ccgatttgcaggctt

SEQ ID NO: 1381024 - DNA, 15 bp, Homo sapiens
tccgatttgcaggct

SEQ ID NO: 1381025 - DNA, 15 bp, Homo sapiens
ctccgatttgcaggc

SEQ ID NO: 1381026 - DNA, 15 bp, Homo sapiens
actccgatttgcagg

SEQ ID NO: 1381027 - DNA, 15 bp, Homo sapiens
aactccgatttgcag

SEQ ID NO: 1381028 - DNA, 15 bp, Homo sapiens
caactccgatttgca

SEQ ID NO: 1381029 - DNA, 15 bp, Homo sapiens
gcaactccgatttgc

SEQ ID NO: 1381030 - DNA, 15 bp, Homo sapiens
agcaactccgatttg

SEQ ID NO: 1381031 - DNA, 15 bp, Homo sapiens
aagcaactccgattt

SEQ ID NO: 1381032 - DNA, 15 bp, Homo sapiens
aaagcaactccgatt

SEQ ID NO: 1381033 - DNA, 15 bp, Homo sapiens
gaaagcaactccgat

SEQ ID NO: 1381034 - DNA, 15 bp, Homo sapiens
agaaagcaactccga

SEQ ID NO: 1381035 - DNA, 15 bp, Homo sapiens
tagaaagcaactccg

SEQ ID NO: 1381036 - DNA, 15 bp, Homo sapiens
gtagaaagcaactcc

SEQ ID NO: 1381037 - DNA, 15 bp, Homo sapiens
ggtagaaagcaactc

SEQ ID NO: 1381038 - DNA, 15 bp, Homo sapiens
aggtagaaagcaact

SEQ ID NO: 1381039 - DNA, 15 bp, Homo sapiens
taggtagaaagcaac

SEQ ID NO: 1381040 - DNA, 15 bp, Homo sapiens
ataggtagaaagcaa

SEQ ID NO: 1381041 - DNA, 15 bp, Homo sapiens
tataggtagaaagca

SEQ ID NO: 1381042 - DNA, 15 bp, Homo sapiens
ttataggtagaaagc

SEQ ID NO: 1381043 - DNA, 15 bp, Homo sapiens
tttataggtagaaag

SEQ ID NO: 1381044 - DNA, 15 bp, Homo sapiens
atttataggtagaaa

SEQ ID NO: 1381045 - DNA, 15 bp, Homo sapiens
tatttataggtagaa

SEQ ID NO: 1381046 - DNA, 15 bp, Homo sapiens
ctatttataggtaga

SEQ ID NO: 1381047 - DNA, 15 bp, Homo sapiens
tctatttataggtag

SEQ ID NO: 1381048 - DNA, 15 bp, Homo sapiens
ctctatttataggta

SEQ ID NO: 1381049 - DNA, 15 bp, Homo sapiens
gctctatttataggt

SEQ ID NO: 1381050 - DNA, 15 bp, Homo sapiens
tgctctatttatagg

SEQ ID NO: 1381051 - DNA, 15 bp, Homo sapiens
ctgctctatttatag

SEQ ID NO: 1381052 - DNA, 15 bp, Homo sapiens
tctgctctatttata

SEQ ID NO: 1381053 - DNA, 15 bp, Homo sapiens
atctgctctatttat

SEQ ID NO: 1381054 - DNA, 15 bp, Homo sapiens
aatctgctctattta

SEQ ID NO: 1381055 - DNA, 15 bp, Homo sapiens
taatctgctctattt

SEQ ID NO: 1381056 - DNA, 15 bp, Homo sapiens
ataatctgctctatt

SEQ ID NO: 1381057 - DNA, 15 bp, Homo sapiens
gataatctgctctat

SEQ ID NO: 1381058 - DNA, 15 bp, Homo sapiens
agataatctgctcta

SEQ ID NO: 1381059 - DNA, 15 bp, Homo sapiens
cagataatctgctct

SEQ ID NO: 1381060 - DNA, 15 bp, Homo sapiens
gcagataatctgctc

SEQ ID NO: 1381061 - DNA, 15 bp, Homo sapiens
tgcagataatctgct

SEQ ID NO: 1381062 - DNA, 15 bp, Homo sapiens
tatgcagataatctg

SEQ ID NO: 1381063 - DNA, 15 bp, Homo sapiens
ttatgcagataatct

SEQ ID NO: 1381064 - DNA, 15 bp, Homo sapiens
attatgcagataatc

SEQ ID NO: 1381065 - DNA, 15 bp, Homo sapiens
tattatgcagataat

SEQ ID NO: 1381066 - DNA, 15 bp, Homo sapiens
atattatgcagataa

SEQ ID NO: 1381067 - DNA, 15 bp, Homo sapiens
gatattatgcagata

SEQ ID NO: 1381068 - DNA, 15 bp, Homo sapiens
ggatattatgcagat

SEQ ID NO: 1381069 - DNA, 15 bp, Homo sapiens
tggatattatgcaga

SEQ ID NO: 1381070 - DNA, 15 bp, Homo sapiens
ctggatattatgcag

SEQ ID NO: 1381071 - DNA, 15 bp, Homo sapiens
actggatattatgca

SEQ ID NO: 1381072 - DNA, 15 bp, Homo sapiens
aactggatattatgc

SEQ ID NO: 1381073 - DNA, 15 bp, Homo sapiens
gaactggatattatg

SEQ ID NO: 1381074 - DNA, 15 bp, Homo sapiens
tgaactggatattat

SEQ ID NO: 1381075 - DNA, 15 bp, Homo sapiens
gtgaactggatatta

SEQ ID NO: 1381076 - DNA, 15 bp, Homo sapiens
agtgaactggatatt

SEQ ID NO: 1381077 - DNA, 15 bp, Homo sapiens
gagtgaactggatat

SEQ ID NO: 1381078 - DNA, 15 bp, Homo sapiens
ggagtgaactggata

SEQ ID NO: 1381079 - DNA, 15 bp, Homo sapiens
aggagtgaactggat

SEQ ID NO: 1381080 - DNA, 15 bp, Homo sapiens
aaggagtgaactgga

SEQ ID NO: 1381081 - DNA, 15 bp, Homo sapiens
taaggagtgaactgg

SEQ ID NO: 1381082 - DNA, 15 bp, Homo sapiens
ctaaggagtgaactg

SEQ ID NO: 1381083 - DNA, 15 bp, Homo sapiens
actaaggagtgaact

SEQ ID NO: 1381084 - DNA, 15 bp, Homo sapiens
tactaaggagtgaac

SEQ ID NO: 1381085 - DNA, 15 bp, Homo sapiens
atactaaggagtgaa

SEQ ID NO: 1381086 - DNA, 15 bp, Homo sapiens
catactaaggagtga

SEQ ID NO: 1381087 - DNA, 15 bp, Homo sapiens
gcatactaaggagtg

SEQ ID NO: 1381088 - DNA, 15 bp, Homo sapiens
cgcatactaaggagt

SEQ ID NO: 1381089 - DNA, 15 bp, Homo sapiens
tcgcatactaaggag

SEQ ID NO: 1381090 - DNA, 15 bp, Homo sapiens
ctcgcatactaagga

SEQ ID NO: 1381091 - DNA, 15 bp, Homo sapiens
gctcgcatactaagg

SEQ ID NO: 1381092 - DNA, 15 bp, Homo sapiens
ggctcgcatactaag

SEQ ID NO: 1381093 - DNA, 15 bp, Homo sapiens
tggctcgcatactaa

SEQ ID NO: 1381094 - DNA, 15 bp, Homo sapiens
ttggctcgcatacta

SEQ ID NO: 1381095 - DNA, 15 bp, Homo sapiens
gttggctcgcatact

SEQ ID NO: 1381096 - DNA, 15 bp, Homo sapiens
cgttggctcgcatac

SEQ ID NO: 1381097 - DNA, 15 bp, Homo sapiens
gcgttggctcgcata

SEQ ID NO: 1381098 - DNA, 15 bp, Homo sapiens
tgcgttggctcgcat

SEQ ID NO: 1381099 - DNA, 15 bp, Homo sapiens
gtgcgttggctcgca

SEQ ID NO: 1381100 - DNA, 15 bp, Homo sapiens
tgtgcgttggctcgc

SEQ ID NO: 1381101 - DNA, 15 bp, Homo sapiens
gtgtgcgttggctcg

SEQ ID NO: 1381102 - DNA, 15 bp, Homo sapiens
agtgtgcgttggctc

SEQ ID NO: 1381103 - DNA, 15 bp, Homo sapiens
gagtgtgcgttggct

SEQ ID NO: 1381104 - DNA, 15 bp, Homo sapiens
agagtgtgcgttggc

SEQ ID NO: 1381105 - DNA, 15 bp, Homo sapiens
cagagtgtgcgttgg

SEQ ID NO: 1381106 - DNA, 15 bp, Homo sapiens
tcagagtgtgcgttg

SEQ ID NO: 1381107 - DNA, 15 bp, Homo sapiens
ttcagagtgtgcgtt

SEQ ID NO: 1381108 - DNA, 15 bp, Homo sapiens
cttcagagtgtgcgt

SEQ ID NO: 1381109 - DNA, 15 bp, Homo sapiens
tcttcagagtgtgcg

SEQ ID NO: 1381110 - DNA, 15 bp, Homo sapiens
ctcttcagagtgtgc

SEQ ID NO: 1381111 - DNA, 15 bp, Homo sapiens
actcttcagagtgtg

SEQ ID NO: 1381112 - DNA, 15 bp, Homo sapiens
gactcttcagagtgt

SEQ ID NO: 1381113 - DNA, 15 bp, Homo sapiens
ggactcttcagagtg

SEQ ID NO: 1381114 - DNA, 15 bp, Homo sapiens
aggactcttcagagt

SEQ ID NO: 1381115 - DNA, 15 bp, Homo sapiens
caggactcttcagag

SEQ ID NO: 1381116 - DNA, 15 bp, Homo sapiens
ccaggactcttcaga

SEQ ID NO: 1381117 - DNA, 15 bp, Homo sapiens
gccaggactcttcag

SEQ ID NO: 1381118 - DNA, 15 bp, Homo sapiens
agccaggactcttca

SEQ ID NO: 1381119 - DNA, 15 bp, Homo sapiens
tagccaggactcttc

SEQ ID NO: 1381120 - DNA, 15 bp, Homo sapiens
ttagccaggactctt

SEQ ID NO: 1381121 - DNA, 15 bp, Homo sapiens
cttagccaggactct

SEQ ID NO: 1381122 - DNA, 15 bp, Homo sapiens
ccttagccaggactc

SEQ ID NO: 1381123 - DNA, 15 bp, Homo sapiens
cccttagccaggact

SEQ ID NO: 1381124 - DNA, 15 bp, Homo sapiens
ccccttagccaggac

SEQ ID NO: 1381125 - DNA, 15 bp, Homo sapiens
accccttagccagga

SEQ ID NO: 1381126 - DNA, 15 bp, Homo sapiens
aaccccttagccagg

SEQ ID NO: 1381127 - DNA, 15 bp, Homo sapiens
caaccccttagccag

SEQ ID NO: 1381128 - DNA, 15 bp, Homo sapiens
tcaaccccttagcca

SEQ ID NO: 1381129 - DNA, 15 bp, Homo sapiens
ctcaaccccttagcc

SEQ ID NO: 1381130 - DNA, 15 bp, Homo sapiens
tctcaaccccttagc

SEQ ID NO: 1381131 - DNA, 15 bp, Homo sapiens
ctctcaaccccttag

SEQ ID NO: 1381132 - DNA, 15 bp, Homo sapiens
gctctcaacccctta

SEQ ID NO: 1381133 - DNA, 15 bp, Homo sapiens
ggctctcaacccctt

SEQ ID NO: 1381134 - DNA, 15 bp, Homo sapiens
gggctctcaacccct

SEQ ID NO: 1381135 - DNA, 15 bp, Homo sapiens
tgggctctcaacccc

SEQ ID NO: 1381136 - DNA, 15 bp, Homo sapiens
ctgggctctcaaccc

SEQ ID NO: 1381137 - DNA, 15 bp, Homo sapiens
actgggctctcaacc

SEQ ID NO: 1381138 - DNA, 15 bp, Homo sapiens
aactgggctctcaac

SEQ ID NO: 1381139 - DNA, 15 bp, Homo sapiens
aaactgggctctcaa

SEQ ID NO: 1381140 - DNA, 15 bp, Homo sapiens
aaaactgggctctca

SEQ ID NO: 1381141 - DNA, 15 bp, Homo sapiens
caaaactgggctctc

SEQ ID NO: 1381142 - DNA, 15 bp, Homo sapiens
ccaaaactgggctct

SEQ ID NO: 1381143 - DNA, 15 bp, Homo sapiens
tccaaaactgggctc

SEQ ID NO: 1381144 - DNA, 15 bp, Homo sapiens
ctccaaaactgggct

SEQ ID NO: 1381145 - DNA, 15 bp, Homo sapiens
cctccaaaactgggc

SEQ ID NO: 1381146 - DNA, 15 bp, Homo sapiens
ccctccaaaactggg

SEQ ID NO: 1381147 - DNA, 15 bp, Homo sapiens
accctccaaaactgg

SEQ ID NO: 1381148 - DNA, 15 bp, Homo sapiens
caccctccaaaactg

SEQ ID NO: 1381149 - DNA, 15 bp, Homo sapiens
acaccctccaaaact

SEQ ID NO: 1381150 - DNA, 15 bp, Homo sapiens
cacaccctccaaaac

SEQ ID NO: 1381151 - DNA, 15 bp, Homo sapiens
acacaccctccaaaa

SEQ ID NO: 1381152 - DNA, 15 bp, Homo sapiens
aacacaccctccaaa

SEQ ID NO: 1381153 - DNA, 15 bp, Homo sapiens
aaacacaccctccaa

SEQ ID NO: 1381154 - DNA, 15 bp, Homo sapiens
taaacacaccctcca

SEQ ID NO: 1381155 - DNA, 15 bp, Homo sapiens
ttaaacacaccctcc

SEQ ID NO: 1381156 - DNA, 15 bp, Homo sapiens
tttaaacacaccctc

SEQ ID NO: 1381157 - DNA, 15 bp, Homo sapiens
ttttaaacacaccct

SEQ ID NO: 1381158 - DNA, 15 bp, Homo sapiens
gttttaaacacaccc

SEQ ID NO: 1381159 - DNA, 15 bp, Homo sapiens
tgttttaaacacacc

SEQ ID NO: 1381160 - DNA, 15 bp, Homo sapiens
ttgttttaaacacac

SEQ ID NO: 1381161 - DNA, 15 bp, Homo sapiens
gttgttttaaacaca

SEQ ID NO: 1381162 - DNA, 15 bp, Homo sapiens
ggttgttttaaacac

SEQ ID NO: 1381163 - DNA, 15 bp, Homo sapiens
cggttgttttaaaca

SEQ ID NO: 1381164 - DNA, 15 bp, Homo sapiens
tcggttgttttaaac

SEQ ID NO: 1381165 - DNA, 15 bp, Homo sapiens
ctcggttgttttaaa

SEQ ID NO: 1381166 - DNA, 15 bp, Homo sapiens
actcggttgttttaa

SEQ ID NO: 1381167 - DNA, 15 bp, Homo sapiens
aactcggttgtttta

SEQ ID NO: 1381168 - DNA, 15 bp, Homo sapiens
gaactcggttgtttt

SEQ ID NO: 1381169 - DNA, 15 bp, Homo sapiens
tgaactcggttgttt

SEQ ID NO: 1381170 - DNA, 15 bp, Homo sapiens
ttgaactcggttgtt

SEQ ID NO: 1381171 - DNA, 15 bp, Homo sapiens
cttgaactcggttgt

SEQ ID NO: 1381172 - DNA, 15 bp, Homo sapiens
acttgaactcggttg

SEQ ID NO: 1381173 - DNA, 15 bp, Homo sapiens
aacttgaactcggtt

SEQ ID NO: 1381174 - DNA, 15 bp, Homo sapiens
gaacttgaactcggt

SEQ ID NO: 1381175 - DNA, 15 bp, Homo sapiens
ggaacttgaactcgg

SEQ ID NO: 1381176 - DNA, 15 bp, Homo sapiens
tggaacttgaactcg

SEQ ID NO: 1381177 - DNA, 15 bp, Homo sapiens
ctggaacttgaactc

SEQ ID NO: 1381178 - DNA, 15 bp, Homo sapiens
gctggaacttgaact

SEQ ID NO: 1381179 - DNA, 15 bp, Homo sapiens
agctggaacttgaac

SEQ ID NO: 1381180 - DNA, 15 bp, Homo sapiens
gagctggaacttgaa

SEQ ID NO: 1381181 - DNA, 15 bp, Homo sapiens
ggagctggaacttga

SEQ ID NO: 1381182 - DNA, 15 bp, Homo sapiens
aggagctggaacttg

SEQ ID NO: 1381183 - DNA, 15 bp, Homo sapiens
aaggagctggaactt

SEQ ID NO: 1381184 - DNA, 15 bp, Homo sapiens
gaaggagctggaact

SEQ ID NO: 1381185 - DNA, 15 bp, Homo sapiens
tgaaggagctggaac

SEQ ID NO: 1381186 - DNA, 15 bp, Homo sapiens
gtgaaggagctggaa

SEQ ID NO: 1381187 - DNA, 15 bp, Homo sapiens
tgtgaaggagctgga

SEQ ID NO: 1381188 - DNA, 15 bp, Homo sapiens
ttgtgaaggagctgg

SEQ ID NO: 1381189 - DNA, 15 bp, Homo sapiens
gttgtgaaggagctg

SEQ ID NO: 1381190 - DNA, 15 bp, Homo sapiens
agttgtgaaggagct

SEQ ID NO: 1381191 - DNA, 15 bp, Homo sapiens
gagttgtgaaggagc

SEQ ID NO: 1381192 - DNA, 15 bp, Homo sapiens
tgagttgtgaaggag

SEQ ID NO: 1381193 - DNA, 15 bp, Homo sapiens
gtgagttgtgaagga

SEQ ID NO: 1381194 - DNA, 15 bp, Homo sapiens
agtgagttgtgaagg

SEQ ID NO: 1381195 - DNA, 15 bp, Homo sapiens
cagtgagttgtgaag

SEQ ID NO: 1381196 - DNA, 15 bp, Homo sapiens
acagtgagttgtgaa

SEQ ID NO: 1381197 - DNA, 15 bp, Homo sapiens
cacagtgagttgtga

SEQ ID NO: 1381198 - DNA, 15 bp, Homo sapiens
gcacagtgagttgtg

SEQ ID NO: 1381199 - DNA, 15 bp, Homo sapiens
ggcacagtgagttgt

SEQ ID NO: 1381200 - DNA, 15 bp, Homo sapiens
tggcacagtgagttg

SEQ ID NO: 1381201 - DNA, 15 bp, Homo sapiens
atggcacagtgagtt

SEQ ID NO: 1381202 - DNA, 15 bp, Homo sapiens
catggcacagtgagt

SEQ ID NO: 1381203 - DNA, 15 bp, Homo sapiens
tcatggcacagtgag

SEQ ID NO: 1381204 - DNA, 15 bp, Homo sapiens
gtcatggcacagtga

SEQ ID NO: 1381205 - DNA, 15 bp, Homo sapiens
agtcatggcacagtg

SEQ ID NO: 1381206 - DNA, 15 bp, Homo sapiens
aagtcatggcacagt

SEQ ID NO: 1381207 - DNA, 15 bp, Homo sapiens
aaagtcatggcacag

SEQ ID NO: 1381208 - DNA, 15 bp, Homo sapiens
aaaagtcatggcaca

SEQ ID NO: 1381209 - DNA, 15 bp, Homo sapiens
aaaaagtcatggcac

SEQ ID NO: 1381210 - DNA, 15 bp, Homo sapiens
gaaaaagtcatggca

SEQ ID NO: 1381211 - DNA, 15 bp, Homo sapiens
agaaaaagtcatggc

SEQ ID NO: 1381212 - DNA, 15 bp, Homo sapiens
tagaaaaagtcatgg

SEQ ID NO: 1381213 - DNA, 15 bp, Homo sapiens
ttagaaaaagtcatg

SEQ ID NO: 1381214 - DNA, 15 bp, Homo sapiens
cttagaaaaagtcat

SEQ ID NO: 1381215 - DNA, 15 bp, Homo sapiens
gcttagaaaaagtca

SEQ ID NO: 1381216 - DNA, 15 bp, Homo sapiens
agcttagaaaaagtc

SEQ ID NO: 1381217 - DNA, 15 bp, Homo sapiens
gagcttagaaaaagt

SEQ ID NO: 1381218 - DNA, 15 bp, Homo sapiens
tgagcttagaaaaag

SEQ ID NO: 1381219 - DNA, 15 bp, Homo sapiens
ctgagcttagaaaaa

SEQ ID NO: 1381220 - DNA, 15 bp, Homo sapiens
actgagcttagaaaa

SEQ ID NO: 1381221 - DNA, 15 bp, Homo sapiens
aactgagcttagaaa

SEQ ID NO: 1381222 - DNA, 15 bp, Homo sapiens
aaactgagcttagaa

SEQ ID NO: 1381223 - DNA, 15 bp, Homo sapiens
gaaactgagcttaga

SEQ ID NO: 1381224 - DNA, 15 bp, Homo sapiens
ggaaactgagcttag

SEQ ID NO: 1381225 - DNA, 15 bp, Homo sapiens
tggaaactgagctta

SEQ ID NO: 1381226 - DNA, 15 bp, Homo sapiens
ttggaaactgagctt

SEQ ID NO: 1381227 - DNA, 15 bp, Homo sapiens
attggaaactgagct

SEQ ID NO: 1381228 - DNA, 15 bp, Homo sapiens
gattggaaactgagc

SEQ ID NO: 1381229 - DNA, 15 bp, Homo sapiens
agattggaaactgag

SEQ ID NO: 1381230 - DNA, 15 bp, Homo sapiens
aagattggaaactga

SEQ ID NO: 1381231 - DNA, 15 bp, Homo sapiens
aaagattggaaactg

SEQ ID NO: 1381232 - DNA, 15 bp, Homo sapiens
taaagattggaaact

SEQ ID NO: 1381233 - DNA, 15 bp, Homo sapiens
gtaaagattggaaac

SEQ ID NO: 1381234 - DNA, 15 bp, Homo sapiens
tgtaaagattggaaa

SEQ ID NO: 1381235 - DNA, 15 bp, Homo sapiens
atgtaaagattggaa

SEQ ID NO: 1381236 - DNA, 15 bp, Homo sapiens
tatgtaaagattgga

SEQ ID NO: 1381237 - DNA, 15 bp, Homo sapiens
atatgtaaagattgg

SEQ ID NO: 1381238 - DNA, 15 bp, Homo sapiens
gatatgtaaagattg

SEQ ID NO: 1381239 - DNA, 15 bp, Homo sapiens
agatatgtaaagatt

SEQ ID NO: 1381240 - DNA, 15 bp, Homo sapiens
tagatatgtaaagat

SEQ ID NO: 1381241 - DNA, 15 bp, Homo sapiens
ttagatatgtaaaga

SEQ ID NO: 1381242 - DNA, 15 bp, Homo sapiens
tttagatatgtaaag

SEQ ID NO: 1381243 - DNA, 15 bp, Homo sapiens
atttagatatgtaaa

SEQ ID NO: 1381244 - DNA, 15 bp, Homo sapiens
gatttagatatgtaa

SEQ ID NO: 1381245 - DNA, 15 bp, Homo sapiens
tgatttagatatgta

SEQ ID NO: 1381246 - DNA, 15 bp, Homo sapiens
ttgatttagatatgt

SEQ ID NO: 1381247 - DNA, 15 bp, Homo sapiens
attgatttagatatg

SEQ ID NO: 1381248 - DNA, 15 bp, Homo sapiens
tattgatttagatat

SEQ ID NO: 1381249 - DNA, 15 bp, Homo sapiens
gtattgatttagata

SEQ ID NO: 1381250 - DNA, 15 bp, Homo sapiens
tgtattgatttagat

SEQ ID NO: 1381251 - DNA, 15 bp, Homo sapiens
atgtattgatttaga

SEQ ID NO: 1381252 - DNA, 15 bp, Homo sapiens
tatgtattgatttag

SEQ ID NO: 1381253 - DNA, 15 bp, Homo sapiens
atatgtattgattta

SEQ ID NO: 1381254 - DNA, 15 bp, Homo sapiens
gatatgtattgattt

SEQ ID NO: 1381255 - DNA, 15 bp, Homo sapiens
agatatgtattgatt

SEQ ID NO: 1381256 - DNA, 15 bp, Homo sapiens
tagatatgtattgat

SEQ ID NO: 1381257 - DNA, 15 bp, Homo sapiens
ttagatatgtattga

SEQ ID NO: 1381258 - DNA, 15 bp, Homo sapiens
tttagatatgtattg

SEQ ID NO: 1381259 - DNA, 15 bp, Homo sapiens
ctttagatatgtatt

SEQ ID NO: 1381260 - DNA, 15 bp, Homo sapiens
actttagatatgtat

SEQ ID NO: 1381261 - DNA, 15 bp, Homo sapiens
cactttagatatgta

SEQ ID NO: 1381262 - DNA, 15 bp, Homo sapiens
ccactttagatatgt

SEQ ID NO: 1381263 - DNA, 15 bp, Homo sapiens
tccactttagatatg

SEQ ID NO: 1381264 - DNA, 15 bp, Homo sapiens
ctccactttagatat

SEQ ID NO: 1381265 - DNA, 15 bp, Homo sapiens
cctccactttagata

SEQ ID NO: 1381266 - DNA, 15 bp, Homo sapiens
acctccactttagat

SEQ ID NO: 1381267 - DNA, 15 bp, Homo sapiens
tacctccactttaga

SEQ ID NO: 1381268 - DNA, 15 bp, Homo sapiens
ttacctccactttag

SEQ ID NO: 1381269 - DNA, 15 bp, Homo sapiens
cttacctccacttta

SEQ ID NO: 1381270 - DNA, 15 bp, Homo sapiens
gcttacctccacttt

SEQ ID NO: 1381271 - DNA, 15 bp, Homo sapiens
agcttacctccactt

SEQ ID NO: 1381272 - DNA, 15 bp, Homo sapiens
gagcttacctccact

SEQ ID NO: 1381273 - DNA, 15 bp, Homo sapiens
agagcttacctccac

SEQ ID NO: 1381274 - DNA, 15 bp, Homo sapiens
tagagcttacctcca

SEQ ID NO: 1381275 - DNA, 15 bp, Homo sapiens
atagagcttacctcc

SEQ ID NO: 1381276 - DNA, 15 bp, Homo sapiens
aatagagcttacctc

SEQ ID NO: 1381277 - DNA, 15 bp, Homo sapiens
aaatagagcttacct

SEQ ID NO: 1381278 - DNA, 15 bp, Homo sapiens
gaaatagagcttacc

SEQ ID NO: 1381279 - DNA, 15 bp, Homo sapiens
agaaatagagcttac

SEQ ID NO: 1381280 - DNA, 15 bp, Homo sapiens
cagaaatagagctta

SEQ ID NO: 1381281 - DNA, 15 bp, Homo sapiens
tcagaaatagagctt

SEQ ID NO: 1381282 - DNA, 15 bp, Homo sapiens
ctcagaaatagagct

SEQ ID NO: 1381283 - DNA, 15 bp, Homo sapiens
gctcagaaatagagc

SEQ ID NO: 1381284 - DNA, 15 bp, Homo sapiens
tgctcagaaatagag

SEQ ID NO: 1381285 - DNA, 15 bp, Homo sapiens
atgctcagaaataga

SEQ ID NO: 1381286 - DNA, 15 bp, Homo sapiens
aatgctcagaaatag

SEQ ID NO: 1381287 - DNA, 15 bp, Homo sapiens
caatgctcagaaata

SEQ ID NO: 1381288 - DNA, 15 bp, Homo sapiens
acaatgctcagaaat

SEQ ID NO: 1381289 - DNA, 15 bp, Homo sapiens
tacaatgctcagaaa

SEQ ID NO: 1381290 - DNA, 15 bp, Homo sapiens
atacaatgctcagaa

SEQ ID NO: 1381291 - DNA, 15 bp, Homo sapiens
tatacaatgctcaga

SEQ ID NO: 1381292 - DNA, 15 bp, Homo sapiens
gtatacaatgctcag

SEQ ID NO: 1381293 - DNA, 15 bp, Homo sapiens
tgtatacaatgctca

SEQ ID NO: 1381294 - DNA, 15 bp, Homo sapiens
atgtatacaatgctc

SEQ ID NO: 1381295 - DNA, 15 bp, Homo sapiens
aatgtatacaatgct

SEQ ID NO: 1381296 - DNA, 15 bp, Homo sapiens
aaatgtatacaatgc

SEQ ID NO: 1381297 - DNA, 15 bp, Homo sapiens
aaaatgtatacaatg

SEQ ID NO: 1381298 - DNA, 15 bp, Homo sapiens
taaaatgtatacaat

SEQ ID NO: 1381299 - DNA, 15 bp, Homo sapiens
ttaaaatgtatacaa

SEQ ID NO: 1381300 - DNA, 15 bp, Homo sapiens
cttaaaatgtataca

SEQ ID NO: 1381301 - DNA, 15 bp, Homo sapiens
acttaaaatgtatac

SEQ ID NO: 1381302 - DNA, 15 bp, Homo sapiens
cacttaaaatgtata

SEQ ID NO: 1381303 - DNA, 15 bp, Homo sapiens
acacttaaaatgtat

SEQ ID NO: 1381304 - DNA, 15 bp, Homo sapiens
cacacttaaaatgta

SEQ ID NO: 1381305 - DNA, 15 bp, Homo sapiens
tcacacttaaaatgt

SEQ ID NO: 1381306 - DNA, 15 bp, Homo sapiens
atcacacttaaaatg

SEQ ID NO: 1381307 - DNA, 15 bp, Homo sapiens
catcacacttaaaat

SEQ ID NO: 1381308 - DNA, 15 bp, Homo sapiens
tcatcacacttaaaa

SEQ ID NO: 1381309 - DNA, 15 bp, Homo sapiens
atcatcacacttaaa

SEQ ID NO: 1381310 - DNA, 15 bp, Homo sapiens
tatcatcacacttaa

SEQ ID NO: 1381311 - DNA, 15 bp, Homo sapiens
atatcatcacactta

SEQ ID NO: 1381312 - DNA, 15 bp, Homo sapiens
catatcatcacactt

SEQ ID NO: 1381313 - DNA, 15 bp, Homo sapiens
gcatatcatcacact

SEQ ID NO: 1381314 - DNA, 15 bp, Homo sapiens
tgcatatcatcacac

SEQ ID NO: 1381315 - DNA, 15 bp, Homo sapiens
atgcatatcatcaca

SEQ ID NO: 1381316 - DNA, 15 bp, Homo sapiens
tatgcatatcatcac

SEQ ID NO: 1381317 - DNA, 15 bp, Homo sapiens
gtatgcatatcatca

SEQ ID NO: 1381318 - DNA, 15 bp, Homo sapiens
ggtatgcatatcatc

SEQ ID NO: 1381319 - DNA, 15 bp, Homo sapiens
tggtatgcatatcat

SEQ ID NO: 1381320 - DNA, 15 bp, Homo sapiens
ctggtatgcatatca

SEQ ID NO: 1381321 - DNA, 15 bp, Homo sapiens
cctggtatgcatatc

SEQ ID NO: 1381322 - DNA, 15 bp, Homo sapiens
gcctggtatgcatat

SEQ ID NO: 1381323 - DNA, 15 bp, Homo sapiens
agcctggtatgcata

SEQ ID NO: 1381324 - DNA, 15 bp, Homo sapiens
aagcctggtatgcat

SEQ ID NO: 1381325 - DNA, 15 bp, Homo sapiens
taagcctggtatgca

SEQ ID NO: 1381326 - DNA, 15 bp, Homo sapiens
ctaagcctggtatgc

SEQ ID NO: 1381327 - DNA, 15 bp, Homo sapiens
actaagcctggtatg

SEQ ID NO: 1381328 - DNA, 15 bp, Homo sapiens
tactaagcctggtat

SEQ ID NO: 1381329 - DNA, 15 bp, Homo sapiens
gtactaagcctggta

SEQ ID NO: 1381330 - DNA, 15 bp, Homo sapiens
agtactaagcctggt

SEQ ID NO: 1381331 - DNA, 15 bp, Homo sapiens
cagtactaagcctgg

SEQ ID NO: 1381332 - DNA, 15 bp, Homo sapiens
ccagtactaagcctg

SEQ ID NO: 1381333 - DNA, 15 bp, Homo sapiens
accagtactaagcct

SEQ ID NO: 1381334 - DNA, 15 bp, Homo sapiens
taccagtactaagcc

SEQ ID NO: 1381335 - DNA, 15 bp, Homo sapiens
gtaccagtactaagc

SEQ ID NO: 1381336 - DNA, 15 bp, Homo sapiens
tgtaccagtactaag

SEQ ID NO: 1381337 - DNA, 15 bp, Homo sapiens
atgtaccagtactaa

SEQ ID NO: 1381338 - DNA, 15 bp, Homo sapiens
catgtaccagtacta

SEQ ID NO: 1381339 - DNA, 15 bp, Homo sapiens
acatgtaccagtact

SEQ ID NO: 1381340 - DNA, 15 bp, Homo sapiens
tacatgtaccagtac

SEQ ID NO: 1381341 - DNA, 15 bp, Homo sapiens
ttacatgtaccagta

SEQ ID NO: 1381342 - DNA, 15 bp, Homo sapiens
gttacatgtaccagt

SEQ ID NO: 1381343 - DNA, 15 bp, Homo sapiens
agttacatgtaccag

SEQ ID NO: 1381344 - DNA, 15 bp, Homo sapiens
gagttacatgtacca

SEQ ID NO: 1381345 - DNA, 15 bp, Homo sapiens
ggagttacatgtacc

SEQ ID NO: 1381346 - DNA, 15 bp, Homo sapiens
aggagttacatgtac

SEQ ID NO: 1381347 - DNA, 15 bp, Homo sapiens
aaggagttacatgta

SEQ ID NO: 1381348 - DNA, 15 bp, Homo sapiens
caaggagttacatgt

SEQ ID NO: 1381349 - DNA, 15 bp, Homo sapiens
tcaaggagttacatg

SEQ ID NO: 1381350 - DNA, 15 bp, Homo sapiens
atcaaggagttacat

SEQ ID NO: 1381351 - DNA, 15 bp, Homo sapiens
tatcaaggagttaca

SEQ ID NO: 1381352 - DNA, 15 bp, Homo sapiens
ttatcaaggagttac

SEQ ID NO: 1381353 - DNA, 15 bp, Homo sapiens
tttatcaaggagtta

SEQ ID NO: 1381354 - DNA, 15 bp, Homo sapiens
atttatcaaggagtt

SEQ ID NO: 1381355 - DNA, 15 bp, Homo sapiens
aatttatcaaggagt

SEQ ID NO: 1381356 - DNA, 15 bp, Homo sapiens
caatttatcaaggag

SEQ ID NO: 1381357 - DNA, 15 bp, Homo sapiens
acaatttatcaagga

SEQ ID NO: 1381358 - DNA, 15 bp, Homo sapiens
aacaatttatcaagg

SEQ ID NO: 1381359 - DNA, 15 bp, Homo sapiens
aaacaatttatcaag

SEQ ID NO: 1381360 - DNA, 15 bp, Homo sapiens
gaaacaatttatcaa

SEQ ID NO: 1381361 - DNA, 15 bp, Homo sapiens
tgaaacaatttatca

SEQ ID NO: 1381362 - DNA, 15 bp, Homo sapiens
atgaaacaatttatc

SEQ ID NO: 1381363 - DNA, 15 bp, Homo sapiens
catgaaacaatttat

SEQ ID NO: 1381364 - DNA, 15 bp, Homo sapiens
ccatgaaacaattta

SEQ ID NO: 1381365 - DNA, 15 bp, Homo sapiens
accatgaaacaattt

SEQ ID NO: 1381366 - DNA, 15 bp, Homo sapiens
aaccatgaaacaatt

SEQ ID NO: 1381367 - DNA, 15 bp, Homo sapiens
taaccatgaaacaat

SEQ ID NO: 1381368 - DNA, 15 bp, Homo sapiens
ataaccatgaaacaa

SEQ ID NO: 1381369 - DNA, 15 bp, Homo sapiens
aataaccatgaaaca

SEQ ID NO: 1381370 - DNA, 15 bp, Homo sapiens
caataaccatgaaac

SEQ ID NO: 1381371 - DNA, 15 bp, Homo sapiens
acaataaccatgaaa

SEQ ID NO: 1381372 - DNA, 15 bp, Homo sapiens
aacaataaccatgaa

SEQ ID NO: 1381373 - DNA, 15 bp, Homo sapiens
taacaataaccatga

SEQ ID NO: 1381374 - DNA, 15 bp, Homo sapiens
gtaacaataaccatg

SEQ ID NO: 1381375 - DNA, 15 bp, Homo sapiens
tgtaacaataaccat

SEQ ID NO: 1381376 - DNA, 15 bp, Homo sapiens
atgtaacaataacca

SEQ ID NO: 1381377 - DNA, 15 bp, Homo sapiens
gatgtaacaataacc

SEQ ID NO: 1381378 - DNA, 15 bp, Homo sapiens
agatgtaacaataac

SEQ ID NO: 1381379 - DNA, 15 bp, Homo sapiens
gagatgtaacaataa

SEQ ID NO: 1381380 - DNA, 15 bp, Homo sapiens
tgagatgtaacaata

SEQ ID NO: 1381381 - DNA, 15 bp, Homo sapiens
ttgagatgtaacaat

SEQ ID NO: 1381382 - DNA, 15 bp, Homo sapiens
tttgagatgtaacaa

SEQ ID NO: 1381383 - DNA, 15 bp, Homo sapiens
ttttgagatgtaaca

SEQ ID NO: 1381384 - DNA, 15 bp, Homo sapiens
cttttgagatgtaac

SEQ ID NO: 1381385 - DNA, 15 bp, Homo sapiens
tcttttgagatgtaa

SEQ ID NO: 1381386 - DNA, 15 bp, Homo sapiens
gtcttttgagatgta

SEQ ID NO: 1381387 - DNA, 15 bp, Homo sapiens
tgtcttttgagatgt

SEQ ID NO: 1381388 - DNA, 15 bp, Homo sapiens
ctgtcttttgagatg

SEQ ID NO: 1381389 - DNA, 15 bp, Homo sapiens
tctgtcttttgagat

SEQ ID NO: 1381390 - DNA, 15 bp, Homo sapiens
ctctgtcttttgaga

SEQ ID NO: 1381391 - DNA, 15 bp, Homo sapiens
gctctgtcttttgag

SEQ ID NO: 1381392 - DNA, 15 bp, Homo sapiens
tgctctgtcttttga

SEQ ID NO: 1381393 - DNA, 15 bp, Homo sapiens
ctgctctgtcttttg

SEQ ID NO: 1381394 - DNA, 15 bp, Homo sapiens
tctgctctgtctttt

SEQ ID NO: 1381395 - DNA, 15 bp, Homo sapiens
ttctgctctgtcttt

SEQ ID NO: 1381396 - DNA, 15 bp, Homo sapiens
attctgctctgtctt

SEQ ID NO: 1381397 - DNA, 15 bp, Homo sapiens
gattctgctctgtct

SEQ ID NO: 1381398 - DNA, 15 bp, Homo sapiens
tgattctgctctgtc

SEQ ID NO: 1381399 - DNA, 15 bp, Homo sapiens
ctgattctgctctgt

SEQ ID NO: 1381400 - DNA, 15 bp, Homo sapiens
actgattctgctctg

SEQ ID NO: 1381401 - DNA, 15 bp, Homo sapiens
gactgattctgctct

SEQ ID NO: 1381402 - DNA, 15 bp, Homo sapiens
tgactgattctgctc

SEQ ID NO: 1381403 - DNA, 15 bp, Homo sapiens
ctgactgattctgct

SEQ ID NO: 1381404 - DNA, 15 bp, Homo sapiens
tctgactgattctgc

SEQ ID NO: 1381405 - DNA, 15 bp, Homo sapiens
ttctgactgattctg

SEQ ID NO: 1381406 - DNA, 15 bp, Homo sapiens
cttctgactgattct

SEQ ID NO: 1381407 - DNA, 15 bp, Homo sapiens
acttctgactgattc

SEQ ID NO: 1381408 - DNA, 15 bp, Homo sapiens
cacttctgactgatt

SEQ ID NO: 1381409 - DNA, 15 bp, Homo sapiens
gcacttctgactgat

SEQ ID NO: 1381410 - DNA, 15 bp, Homo sapiens
tgcacttctgactga

SEQ ID NO: 1381411 - DNA, 15 bp, Homo sapiens
ttgcacttctgactg

SEQ ID NO: 1381412 - DNA, 15 bp, Homo sapiens
cttgcacttctgact

SEQ ID NO: 1381413 - DNA, 15 bp, Homo sapiens
tcttgcacttctgac

SEQ ID NO: 1381414 - DNA, 15 bp, Homo sapiens
ctcttgcacttctga

SEQ ID NO: 1381415 - DNA, 15 bp, Homo sapiens
tctcttgcacttctg

SEQ ID NO: 1381416 - DNA, 15 bp, Homo sapiens
ttctcttgcacttct

SEQ ID NO: 1381417 - DNA, 15 bp, Homo sapiens
cttctcttgcacttc

SEQ ID NO: 1381418 - DNA, 15 bp, Homo sapiens
tcttctcttgcactt

SEQ ID NO: 1381419 - DNA, 15 bp, Homo sapiens
ctcttctcttgcact

SEQ ID NO: 1381420 - DNA, 15 bp, Homo sapiens
actcttctcttgcac

SEQ ID NO: 1381421 - DNA, 15 bp, Homo sapiens
tactcttctcttgca

SEQ ID NO: 1381422 - DNA, 15 bp, Homo sapiens
ttactcttctcttgc

SEQ ID NO: 1381423 - DNA, 15 bp, Homo sapiens
cttactcttctcttg

SEQ ID NO: 1381424 - DNA, 15 bp, Homo sapiens
ccttactcttctctt

SEQ ID NO: 1381425 - DNA, 15 bp, Homo sapiens
tccttactcttctct

SEQ ID NO: 1381426 - DNA, 15 bp, Homo sapiens
atccttactcttctc

SEQ ID NO: 1381427 - DNA, 15 bp, Homo sapiens
aatccttactcttct

SEQ ID NO: 1381428 - DNA, 15 bp, Homo sapiens
taatccttactcttc

SEQ ID NO: 1381429 - DNA, 15 bp, Homo sapiens
ttaatccttactctt

SEQ ID NO: 1381430 - DNA, 15 bp, Homo sapiens
attaatccttactct

SEQ ID NO: 1381431 - DNA, 15 bp, Homo sapiens
cattaatccttactc

SEQ ID NO: 1381432 - DNA, 15 bp, Homo sapiens
ccattaatccttact

SEQ ID NO: 1381433 - DNA, 15 bp, Homo sapiens
tccattaatccttac

SEQ ID NO: 1381434 - DNA, 15 bp, Homo sapiens
ttccattaatcctta

SEQ ID NO: 1381435 - DNA, 15 bp, Homo sapiens
tttccattaatcctt

SEQ ID NO: 1381436 - DNA, 15 bp, Homo sapiens
ttttccattaatcct

SEQ ID NO: 1381437 - DNA, 15 bp, Homo sapiens
cttttccattaatcc

SEQ ID NO: 1381438 - DNA, 15 bp, Homo sapiens
ccttttccattaatc

SEQ ID NO: 1381439 - DNA, 15 bp, Homo sapiens
cccttttccattaat

SEQ ID NO: 1381440 - DNA, 15 bp, Homo sapiens
ccccttttccattaa

SEQ ID NO: 1381441 - DNA, 15 bp, Homo sapiens
accccttttccatta

SEQ ID NO: 1381442 - DNA, 15 bp, Homo sapiens
aaccccttttccatt

SEQ ID NO: 1381443 - DNA, 15 bp, Homo sapiens
caaccccttttccat

SEQ ID NO: 1381444 - DNA, 15 bp, Homo sapiens
ccaaccccttttcca

SEQ ID NO: 1381445 - DNA, 15 bp, Homo sapiens
tccaaccccttttcc

SEQ ID NO: 1381446 - DNA, 15 bp, Homo sapiens
ttccaaccccttttc

SEQ ID NO: 1381447 - DNA, 15 bp, Homo sapiens
cttccaacccctttt

SEQ ID NO: 1381448 - DNA, 15 bp, Homo sapiens
tcttccaaccccttt

SEQ ID NO: 1381449 - DNA, 15 bp, Homo sapiens
ttcttccaacccctt

SEQ ID NO: 1381450 - DNA, 15 bp, Homo sapiens
cttcttccaacccct

SEQ ID NO: 1381451 - DNA, 15 bp, Homo sapiens
tcttcttccaacccc

SEQ ID NO: 1381452 - DNA, 15 bp, Homo sapiens
ctcttcttccaaccc

SEQ ID NO: 1381453 - DNA, 15 bp, Homo sapiens
tctcttcttccaacc

SEQ ID NO: 1381454 - DNA, 15 bp, Homo sapiens
gtctcttcttccaac

SEQ ID NO: 1381455 - DNA, 15 bp, Homo sapiens
agtctcttcttccaa

SEQ ID NO: 1381456 - DNA, 15 bp, Homo sapiens
gagtctcttcttcca

SEQ ID NO: 1381457 - DNA, 15 bp, Homo sapiens
tgagtctcttcttcc

SEQ ID NO: 1381458 - DNA, 15 bp, Homo sapiens
gtgagtctcttcttc

SEQ ID NO: 1381459 - DNA, 15 bp, Homo sapiens
agtgagtctcttctt

SEQ ID NO: 1381460 - DNA, 15 bp, Homo sapiens
aagtgagtctcttct

SEQ ID NO: 1381461 - DNA, 15 bp, Homo sapiens
aaagtgagtctcttc

SEQ ID NO: 1381462 - DNA, 15 bp, Homo sapiens
aaaagtgagtctctt

SEQ ID NO: 1381463 - DNA, 15 bp, Homo sapiens
aaaaagtgagtctct

SEQ ID NO: 1381464 - DNA, 15 bp, Homo sapiens
gaaaaagtgagtctc

SEQ ID NO: 1381465 - DNA, 15 bp, Homo sapiens
agaaaaagtgagtct

SEQ ID NO: 1381466 - DNA, 15 bp, Homo sapiens
tagaaaaagtgagtc

SEQ ID NO: 1381467 - DNA, 15 bp, Homo sapiens
atagaaaaagtgagt

SEQ ID NO: 1381468 - DNA, 15 bp, Homo sapiens
catagaaaaagtgag

SEQ ID NO: 1381469 - DNA, 15 bp, Homo sapiens
acatagaaaaagtga

SEQ ID NO: 1381470 - DNA, 15 bp, Homo sapiens
tacatagaaaaagtg

SEQ ID NO: 1381471 - DNA, 15 bp, Homo sapiens
ttacatagaaaaagt

SEQ ID NO: 1381472 - DNA, 15 bp, Homo sapiens
attacatagaaaaag

SEQ ID NO: 1381473 - DNA, 15 bp, Homo sapiens
cattacatagaaaaa

SEQ ID NO: 1381474 - DNA, 15 bp, Homo sapiens
tcattacatagaaaa

SEQ ID NO: 1381475 - DNA, 15 bp, Homo sapiens
ctcattacatagaaa

SEQ ID NO: 1381476 - DNA, 15 bp, Homo sapiens
tctcattacatagaa

SEQ ID NO: 1381477 - DNA, 15 bp, Homo sapiens
ctctcattacataga

SEQ ID NO: 1381478 - DNA, 15 bp, Homo sapiens
actctcattacatag

SEQ ID NO: 1381479 - DNA, 15 bp, Homo sapiens
gactctcattacata

SEQ ID NO: 1381480 - DNA, 15 bp, Homo sapiens
tgactctcattacat

SEQ ID NO: 1381481 - DNA, 15 bp, Homo sapiens
ctgactctcattaca

SEQ ID NO: 1381482 - DNA, 15 bp, Homo sapiens
gctgactctcattac

SEQ ID NO: 1381483 - DNA, 15 bp, Homo sapiens
tgctgactctcatta

SEQ ID NO: 1381484 - DNA, 15 bp, Homo sapiens
gtgctgactctcatt

SEQ ID NO: 1381485 - DNA, 15 bp, Homo sapiens
ggtgctgactctcat

SEQ ID NO: 1381486 - DNA, 15 bp, Homo sapiens
cggtgctgactctca

SEQ ID NO: 1381487 - DNA, 15 bp, Homo sapiens
acggtgctgactctc

SEQ ID NO: 1381488 - DNA, 15 bp, Homo sapiens
cacggtgctgactct

SEQ ID NO: 1381489 - DNA, 15 bp, Homo sapiens
gcacggtgctgactc

SEQ ID NO: 1381490 - DNA, 15 bp, Homo sapiens
agcacggtgctgact

SEQ ID NO: 1381491 - DNA, 15 bp, Homo sapiens
aagcacggtgctgac

SEQ ID NO: 1381492 - DNA, 15 bp, Homo sapiens
caagcacggtgctga

SEQ ID NO: 1381493 - DNA, 15 bp, Homo sapiens
tcaagcacggtgctg

SEQ ID NO: 1381494 - DNA, 15 bp, Homo sapiens
atcaagcacggtgct

SEQ ID NO: 1381495 - DNA, 15 bp, Homo sapiens
catcaagcacggtgc

SEQ ID NO: 1381496 - DNA, 15 bp, Homo sapiens
tcatcaagcacggtg

SEQ ID NO: 1381497 - DNA, 15 bp, Homo sapiens
gtcatcaagcacggt

SEQ ID NO: 1381498 - DNA, 15 bp, Homo sapiens
tgtcatcaagcacgg

SEQ ID NO: 1381499 - DNA, 15 bp, Homo sapiens
ttgtcatcaagcacg

SEQ ID NO: 1381500 - DNA, 15 bp, Homo sapiens
attgtcatcaagcac

SEQ ID NO: 1381501 - DNA, 15 bp, Homo sapiens
tattgtcatcaagca

SEQ ID NO: 1381502 - DNA, 15 bp, Homo sapiens
ctattgtcatcaagc

SEQ ID NO: 1381503 - DNA, 15 bp, Homo sapiens
gctattgtcatcaag

SEQ ID NO: 1381504 - DNA, 15 bp, Homo sapiens
tgctattgtcatcaa

SEQ ID NO: 1381505 - DNA, 15 bp, Homo sapiens
gtgctattgtcatca

SEQ ID NO: 1381506 - DNA, 15 bp, Homo sapiens
tgtgctattgtcatc

SEQ ID NO: 1381507 - DNA, 15 bp, Homo sapiens
ctgtgctattgtcat

SEQ ID NO: 1381508 - DNA, 15 bp, Homo sapiens
tctgtgctattgtca

SEQ ID NO: 1381509 - DNA, 15 bp, Homo sapiens
ctctgtgctattgtc

SEQ ID NO: 1381510 - DNA, 15 bp, Homo sapiens
cctctgtgctattgt

SEQ ID NO: 1381511 - DNA, 15 bp, Homo sapiens
ccctctgtgctattg

SEQ ID NO: 1381512 - DNA, 15 bp, Homo sapiens
tccctctgtgctatt

SEQ ID NO: 1381513 - DNA, 15 bp, Homo sapiens
gtccctctgtgctat

SEQ ID NO: 1381514 - DNA, 15 bp, Homo sapiens
tgtccctctgtgcta

SEQ ID NO: 1381515 - DNA, 15 bp, Homo sapiens
ctgtccctctgtgct

SEQ ID NO: 1381516 - DNA, 15 bp, Homo sapiens
tctgtccctctgtgc

SEQ ID NO: 1381517 - DNA, 15 bp, Homo sapiens
ctctgtccctctgtg

SEQ ID NO: 1381518 - DNA, 15 bp, Homo sapiens
attgtctctgtccct

SEQ ID NO: 1381519 - DNA, 15 bp, Homo sapiens
gattgtctctgtccc

SEQ ID NO: 1381520 - DNA, 15 bp, Homo sapiens
ggattgtctctgtcc

SEQ ID NO: 1381521 - DNA, 15 bp, Homo sapiens
gggattgtctctgtc

SEQ ID NO: 1381522 - DNA, 15 bp, Homo sapiens
tgggattgtctctgt

SEQ ID NO: 1381523 - DNA, 15 bp, Homo sapiens
ttgggattgtctctg

SEQ ID NO: 1381524 - DNA, 15 bp, Homo sapiens
cttgggattgtctct

SEQ ID NO: 1381525 - DNA, 15 bp, Homo sapiens
tcttgggattgtctc

SEQ ID NO: 1381526 - DNA, 15 bp, Homo sapiens
ttcttgggattgtct

SEQ ID NO: 1381527 - DNA, 15 bp, Homo sapiens
gttcttgggattgtc

SEQ ID NO: 1381528 - DNA, 15 bp, Homo sapiens
tgttcttgggattgt

SEQ ID NO: 1381529 - DNA, 15 bp, Homo sapiens
gtgttcttgggattg

SEQ ID NO: 1381530 - DNA, 15 bp, Homo sapiens
tgtgttcttgggatt

SEQ ID NO: 1381531 - DNA, 15 bp, Homo sapiens
ttgtgttcttgggat

SEQ ID NO: 1381532 - DNA, 15 bp, Homo sapiens
tttgtgttcttggga

SEQ ID NO: 1381533 - DNA, 15 bp, Homo sapiens
ttttgtgttcttggg

SEQ ID NO: 1381534 - DNA, 15 bp, Homo sapiens
attttgtgttcttgg

SEQ ID NO: 1381535 - DNA, 15 bp, Homo sapiens
tattttgtgttcttg

SEQ ID NO: 1381536 - DNA, 15 bp, Homo sapiens
gtattttgtgttctt

SEQ ID NO: 1381537 - DNA, 15 bp, Homo sapiens
tgtattttgtgttct

SEQ ID NO: 1381538 - DNA, 15 bp, Homo sapiens
ctgtattttgtgttc

SEQ ID NO: 1381539 - DNA, 15 bp, Homo sapiens
tctgtattttgtgtt

SEQ ID NO: 1381540 - DNA, 15 bp, Homo sapiens
atctgtattttgtgt

SEQ ID NO: 1381541 - DNA, 15 bp, Homo sapiens
catctgtattttgtg

SEQ ID NO: 1381542 - DNA, 15 bp, Homo sapiens
acatctgtattttgt

SEQ ID NO: 1381543 - DNA, 15 bp, Homo sapiens
cacatctgtattttg

SEQ ID NO: 1381544 - DNA, 15 bp, Homo sapiens
acacatctgtatttt

SEQ ID NO: 1381545 - DNA, 15 bp, Homo sapiens
gacacatctgtattt

SEQ ID NO: 1381546 - DNA, 15 bp, Homo sapiens
agacacatctgtatt

SEQ ID NO: 1381547 - DNA, 15 bp, Homo sapiens
tagacacatctgtat

SEQ ID NO: 1381548 - DNA, 15 bp, Homo sapiens
gtagacacatctgta

SEQ ID NO: 1381549 - DNA, 15 bp, Homo sapiens
ggtagacacatctgt

SEQ ID NO: 1381550 - DNA, 15 bp, Homo sapiens
tggtagacacatctg

SEQ ID NO: 1381551 - DNA, 15 bp, Homo sapiens
atggtagacacatct

SEQ ID NO: 1381552 - DNA, 15 bp, Homo sapiens
gatggtagacacatc

SEQ ID NO: 1381553 - DNA, 15 bp, Homo sapiens
tgatggtagacacat

SEQ ID NO: 1381554 - DNA, 15 bp, Homo sapiens
ctgatggtagacaca

SEQ ID NO: 1381555 - DNA, 15 bp, Homo sapiens
cctgatggtagacac

SEQ ID NO: 1381556 - DNA, 15 bp, Homo sapiens
ccctgatggtagaca

SEQ ID NO: 1381557 - DNA, 15 bp, Homo sapiens
tccctgatggtagac

SEQ ID NO: 1381558 - DNA, 15 bp, Homo sapiens
atccctgatggtaga

SEQ ID NO: 1381559 - DNA, 15 bp, Homo sapiens
tatccctgatggtag

SEQ ID NO: 1381560 - DNA, 15 bp, Homo sapiens
ttatccctgatggta

SEQ ID NO: 1381561 - DNA, 15 bp, Homo sapiens
attatccctgatggt

SEQ ID NO: 1381562 - DNA, 15 bp, Homo sapiens
aattatccctgatgg

SEQ ID NO: 1381563 - DNA, 15 bp, Homo sapiens
gaattatccctgatg

SEQ ID NO: 1381564 - DNA, 15 bp, Homo sapiens
tgaattatccctgat

SEQ ID NO: 1381565 - DNA, 15 bp, Homo sapiens
ttgaattatccctga

SEQ ID NO: 1381566 - DNA, 15 bp, Homo sapiens
gttgaattatccctg

SEQ ID NO: 1381567 - DNA, 15 bp, Homo sapiens
agttgaattatccct

SEQ ID NO: 1381568 - DNA, 15 bp, Homo sapiens
tagttgaattatccc

SEQ ID NO: 1381569 - DNA, 15 bp, Homo sapiens
atagttgaattatcc

SEQ ID NO: 1381570 - DNA, 15 bp, Homo sapiens
catagttgaattatc

SEQ ID NO: 1381571 - DNA, 15 bp, Homo sapiens
acatagttgaattat

SEQ ID NO: 1381572 - DNA, 15 bp, Homo sapiens
gacatagttgaatta

SEQ ID NO: 1381573 - DNA, 15 bp, Homo sapiens
ggacatagttgaatt

SEQ ID NO: 1381574 - DNA, 15 bp, Homo sapiens
tggacatagttgaat

SEQ ID NO: 1381575 - DNA, 15 bp, Homo sapiens
ctggacatagttgaa

SEQ ID NO: 1381576 - DNA, 15 bp, Homo sapiens
actggacatagttga

SEQ ID NO: 1381577 - DNA, 15 bp, Homo sapiens
tactggacatagttg

SEQ ID NO: 1381578 - DNA, 15 bp, Homo sapiens
ttactggacatagtt

SEQ ID NO: 1381579 - DNA, 15 bp, Homo sapiens
tttactggacatagt

SEQ ID NO: 1381580 - DNA, 15 bp, Homo sapiens
ttttactggacatag

SEQ ID NO: 1381581 - DNA, 15 bp, Homo sapiens
attttactggacata

SEQ ID NO: 1381582 - DNA, 15 bp, Homo sapiens
cattttactggacat

SEQ ID NO: 1381583 - DNA, 15 bp, Homo sapiens
acattttactggaca

SEQ ID NO: 1381584 - DNA, 15 bp, Homo sapiens
aacattttactggac

SEQ ID NO: 1381585 - DNA, 15 bp, Homo sapiens
aaacattttactgga

SEQ ID NO: 1381586 - DNA, 15 bp, Homo sapiens
taaacattttactgg

SEQ ID NO: 1381587 - DNA, 15 bp, Homo sapiens
ataaacattttactg

SEQ ID NO: 1381588 - DNA, 15 bp, Homo sapiens
tataaacattttact

SEQ ID NO: 1381589 - DNA, 15 bp, Homo sapiens
ctataaacattttac

SEQ ID NO: 1381590 - DNA, 15 bp, Homo sapiens
cctataaacatttta

SEQ ID NO: 1381591 - DNA, 15 bp, Homo sapiens
tcctataaacatttt

SEQ ID NO: 1381592 - DNA, 15 bp, Homo sapiens
ctcctataaacattt

SEQ ID NO: 1381593 - DNA, 15 bp, Homo sapiens
actcctataaacatt

SEQ ID NO: 1381594 - DNA, 15 bp, Homo sapiens
tactcctataaacat

SEQ ID NO: 1381595 - DNA, 15 bp, Homo sapiens
gtactcctataaaca

SEQ ID NO: 1381596 - DNA, 15 bp, Homo sapiens
tgtactcctataaac

SEQ ID NO: 1381597 - DNA, 15 bp, Homo sapiens
ttgtactcctataaa

SEQ ID NO: 1381598 - DNA, 15 bp, Homo sapiens
tttgtactcctataa

SEQ ID NO: 1381599 - DNA, 15 bp, Homo sapiens
atttgtactcctata

SEQ ID NO: 1381600 - DNA, 15 bp, Homo sapiens
tatttgtactcctat

SEQ ID NO: 1381601 - DNA, 15 bp, Homo sapiens
ttatttgtactccta

SEQ ID NO: 1381602 - DNA, 15 bp, Homo sapiens
tttatttgtactcct

SEQ ID NO: 1381603 - DNA, 15 bp, Homo sapiens
ctttatttgtactcc

SEQ ID NO: 1381604 - DNA, 15 bp, Homo sapiens
actttatttgtactc

SEQ ID NO: 1381605 - DNA, 15 bp, Homo sapiens
gactttatttgtact

SEQ ID NO: 1381606 - DNA, 15 bp, Homo sapiens
agactttatttgtac

SEQ ID NO: 1381607 - DNA, 15 bp, Homo sapiens
cagactttatttgta

SEQ ID NO: 1381608 - DNA, 15 bp, Homo sapiens
gcagactttatttgt

SEQ ID NO: 1381609 - DNA, 15 bp, Homo sapiens
ggcagactttatttg

SEQ ID NO: 1381610 - DNA, 15 bp, Homo sapiens
cggcagactttattt

SEQ ID NO: 1381611 - DNA, 15 bp, Homo sapiens
ccggcagactttatt

SEQ ID NO: 1381612 - DNA, 15 bp, Homo sapiens
accggcagactttat

SEQ ID NO: 1381613 - DNA, 15 bp, Homo sapiens
aaccggcagacttta

SEQ ID NO: 1381614 - DNA, 15 bp, Homo sapiens
aaaccggcagacttt

SEQ ID NO: 1381615 - DNA, 15 bp, Homo sapiens
aaaaccggcagactt

SEQ ID NO: 1381616 - DNA, 15 bp, Homo sapiens
aaaaaccggcagact

SEQ ID NO: 1381617 - DNA, 15 bp, Homo sapiens
caaaaaccggcagac

SEQ ID NO: 1381618 - DNA, 15 bp, Homo sapiens
ccaaaaaccggcaga

SEQ ID NO: 1381619 - DNA, 15 bp, Homo sapiens
accaaaaaccggcag

SEQ ID NO: 1381620 - DNA, 15 bp, Homo sapiens
caccaaaaaccggca

SEQ ID NO: 1381621 - DNA, 15 bp, Homo sapiens
acaccaaaaaccggc

SEQ ID NO: 1381622 - DNA, 15 bp, Homo sapiens
gacaccaaaaaccgg

SEQ ID NO: 1381623 - DNA, 15 bp, Homo sapiens
agacaccaaaaaccg

SEQ ID NO: 1381624 - DNA, 15 bp, Homo sapiens
tagacaccaaaaacc

SEQ ID NO: 1381625 - DNA, 15 bp, Homo sapiens
gtagacaccaaaaac

SEQ ID NO: 1381626 - DNA, 15 bp, Homo sapiens
agtagacaccaaaaa

SEQ ID NO: 1381627 - DNA, 15 bp, Homo sapiens
tagtagacaccaaaa

SEQ ID NO: 1381628 - DNA, 15 bp, Homo sapiens
gtagtagacaccaaa

SEQ ID NO: 1381629 - DNA, 15 bp, Homo sapiens
tgtagtagacaccaa

SEQ ID NO: 1381630 - DNA, 15 bp, Homo sapiens
gtgtagtagacacca

SEQ ID NO: 1381631 - DNA, 15 bp, Homo sapiens
tgtgtagtagacacc

SEQ ID NO: 1381632 - DNA, 15 bp, Homo sapiens
atgtgtagtagacac

SEQ ID NO: 1381633 - DNA, 15 bp, Homo sapiens
aatgtgtagtagaca

SEQ ID NO: 1381634 - DNA, 15 bp, Homo sapiens
aaatgtgtagtagac

SEQ ID NO: 1381635 - DNA, 15 bp, Homo sapiens
caaatgtgtagtaga

SEQ ID NO: 1381636 - DNA, 15 bp, Homo sapiens
ccaaatgtgtagtag

SEQ ID NO: 1381637 - DNA, 15 bp, Homo sapiens
gccaaatgtgtagta

SEQ ID NO: 1381638 - DNA, 15 bp, Homo sapiens
tgccaaatgtgtagt

SEQ ID NO: 1381639 - DNA, 15 bp, Homo sapiens
gtgccaaatgtgtag

SEQ ID NO: 1381640 - DNA, 15 bp, Homo sapiens
tgtgccaaatgtgta

SEQ ID NO: 1381641 - DNA, 15 bp, Homo sapiens
atgtgccaaatgtgt

SEQ ID NO: 1381642 - DNA, 15 bp, Homo sapiens
aatgtgccaaatgtg

SEQ ID NO: 1381643 - DNA, 15 bp, Homo sapiens
aaatgtgccaaatgt

SEQ ID NO: 1381644 - DNA, 15 bp, Homo sapiens
gaaatgtgccaaatg

SEQ ID NO: 1381645 - DNA, 15 bp, Homo sapiens
tgaaatgtgccaaat

SEQ ID NO: 1381646 - DNA, 15 bp, Homo sapiens
gtgaaatgtgccaaa

SEQ ID NO: 1381647 - DNA, 15 bp, Homo sapiens
tgtgaaatgtgccaa

SEQ ID NO: 1381648 - DNA, 15 bp, Homo sapiens
gtgtgaaatgtgcca

SEQ ID NO: 1381649 - DNA, 15 bp, Homo sapiens
tgtgtgaaatgtgcc

SEQ ID NO: 1381650 - DNA, 15 bp, Homo sapiens
atgtgtgaaatgtgc

SEQ ID NO: 1381651 - DNA, 15 bp, Homo sapiens
gatgtgtgaaatgtg

SEQ ID NO: 1381652 - DNA, 15 bp, Homo sapiens
agatgtgtgaaatgt

SEQ ID NO: 1381653 - DNA, 15 bp, Homo sapiens
aagatgtgtgaaatg

SEQ ID NO: 1381654 - DNA, 15 bp, Homo sapiens
aaagatgtgtgaaat

SEQ ID NO: 1381655 - DNA, 15 bp, Homo sapiens
aaaagatgtgtgaaa

SEQ ID NO: 1381656 - DNA, 15 bp, Homo sapiens
aaaaagatgtgtgaa

SEQ ID NO: 1381657 - DNA, 15 bp, Homo sapiens
aaaaaagatgtgtga

SEQ ID NO: 1381658 - DNA, 15 bp, Homo sapiens
taaaaaagatgtgtg

SEQ ID NO: 1381659 - DNA, 15 bp, Homo sapiens
ttaaaaaagatgtgt

SEQ ID NO: 1381660 - DNA, 15 bp, Homo sapiens
attaaaaaagatgtg

SEQ ID NO: 1381661 - DNA, 15 bp, Homo sapiens
tattaaaaaagatgt

SEQ ID NO: 1381662 - DNA, 15 bp, Homo sapiens
gtattaaaaaagatg

SEQ ID NO: 1381663 - DNA, 15 bp, Homo sapiens
agtattaaaaaagat

SEQ ID NO: 1381664 - DNA, 15 bp, Homo sapiens
gagtattaaaaaaga

SEQ ID NO: 1381665 - DNA, 15 bp, Homo sapiens
tgagtattaaaaaag

SEQ ID NO: 1381666 - DNA, 15 bp, Homo sapiens
atgagtattaaaaaa

SEQ ID NO: 1381667 - DNA, 15 bp, Homo sapiens
tatgagtattaaaaa

SEQ ID NO: 1381668 - DNA, 15 bp, Homo sapiens
ttatgagtattaaaa

SEQ ID NO: 1381669 - DNA, 15 bp, Homo sapiens
gttatgagtattaaa

SEQ ID NO: 1381670 - DNA, 15 bp, Homo sapiens
tgttatgagtattaa

SEQ ID NO: 1381671 - DNA, 15 bp, Homo sapiens
atgttatgagtatta

SEQ ID NO: 1381672 - DNA, 15 bp, Homo sapiens
tatgttatgagtatt

SEQ ID NO: 1381673 - DNA, 15 bp, Homo sapiens
gtatgttatgagtat

SEQ ID NO: 1381674 - DNA, 15 bp, Homo sapiens
ggtatgttatgagta

SEQ ID NO: 1381675 - DNA, 15 bp, Homo sapiens
aggtatgttatgagt

SEQ ID NO: 1381676 - DNA, 15 bp, Homo sapiens
caggtatgttatgag

SEQ ID NO: 1381677 - DNA, 15 bp, Homo sapiens
tcaggtatgttatga

SEQ ID NO: 1381678 - DNA, 15 bp, Homo sapiens
gtcaggtatgttatg

SEQ ID NO: 1381679 - DNA, 15 bp, Homo sapiens
cgtcaggtatgttat

SEQ ID NO: 1381680 - DNA, 15 bp, Homo sapiens
gcgtcaggtatgtta

SEQ ID NO: 1381681 - DNA, 15 bp, Homo sapiens
agcgtcaggtatgtt

SEQ ID NO: 1381682 - DNA, 15 bp, Homo sapiens
gagcgtcaggtatgt

SEQ ID NO: 1381683 - DNA, 15 bp, Homo sapiens
tgagcgtcaggtatg

SEQ ID NO: 1381684 - DNA, 15 bp, Homo sapiens
ctgagcgtcaggtat

SEQ ID NO: 1381685 - DNA, 15 bp, Homo sapiens
tctgagcgtcaggta

SEQ ID NO: 1381686 - DNA, 15 bp, Homo sapiens
ctctgagcgtcaggt

SEQ ID NO: 1381687 - DNA, 15 bp, Homo sapiens
cctctgagcgtcagg

SEQ ID NO: 1381688 - DNA, 15 bp, Homo sapiens
tcctctgagcgtcag

SEQ ID NO: 1381689 - DNA, 15 bp, Homo sapiens
ctcctctgagcgtca

SEQ ID NO: 1381690 - DNA, 15 bp, Homo sapiens
tctcctctgagcgtc

SEQ ID NO: 1381691 - DNA, 15 bp, Homo sapiens
gtctcctctgagcgt

SEQ ID NO: 1381692 - DNA, 15 bp, Homo sapiens
tgtctcctctgagcg

SEQ ID NO: 1381693 - DNA, 15 bp, Homo sapiens
gtgtctcctctgagc

SEQ ID NO: 1381694 - DNA, 15 bp, Homo sapiens
tgtgtctcctctgag

SEQ ID NO: 1381695 - DNA, 15 bp, Homo sapiens
ttgtgtctcctctga

SEQ ID NO: 1381696 - DNA, 15 bp, Homo sapiens
cttgtgtctcctctg

SEQ ID NO: 1381697 - DNA, 15 bp, Homo sapiens
ccttgtgtctcctct

SEQ ID NO: 1381698 - DNA, 15 bp, Homo sapiens
tccttgtgtctcctc

SEQ ID NO: 1381699 - DNA, 15 bp, Homo sapiens
atccttgtgtctcct

SEQ ID NO: 1381700 - DNA, 15 bp, Homo sapiens
aatccttgtgtctcc

SEQ ID NO: 1381701 - DNA, 15 bp, Homo sapiens
caatccttgtgtctc

SEQ ID NO: 1381702 - DNA, 15 bp, Homo sapiens
gcaatccttgtgtct

SEQ ID NO: 1381703 - DNA, 15 bp, Homo sapiens
ggcaatccttgtgtc

SEQ ID NO: 1381704 - DNA, 15 bp, Homo sapiens
gggcaatccttgtgt

SEQ ID NO: 1381705 - DNA, 15 bp, Homo sapiens
agggcaatccttgtg

SEQ ID NO: 1381706 - DNA, 15 bp, Homo sapiens
cagggcaatccttgt

SEQ ID NO: 1381707 - DNA, 15 bp, Homo sapiens
ccagggcaatccttg

SEQ ID NO: 1381708 - DNA, 15 bp, Homo sapiens
cccagggcaatcctt

SEQ ID NO: 1381709 - DNA, 15 bp, Homo sapiens
tcccagggcaatcct

SEQ ID NO: 1381710 - DNA, 15 bp, Homo sapiens
atcccagggcaatcc

SEQ ID NO: 1381711 - DNA, 15 bp, Homo sapiens
aatcccagggcaatc

SEQ ID NO: 1381712 - DNA, 15 bp, Homo sapiens
gaatcccagggcaat

SEQ ID NO: 1381713 - DNA, 15 bp, Homo sapiens
ggaatcccagggcaa

SEQ ID NO: 1381714 - DNA, 15 bp, Homo sapiens
tggaatcccagggca

SEQ ID NO: 1381715 - DNA, 15 bp, Homo sapiens
ctggaatcccagggc

SEQ ID NO: 1381716 - DNA, 15 bp, Homo sapiens
tctggaatcccaggg

SEQ ID NO: 1381717 - DNA, 15 bp, Homo sapiens
gtctggaatcccagg

SEQ ID NO: 1381718 - DNA, 15 bp, Homo sapiens
agtctggaatcccag

SEQ ID NO: 1381719 - DNA, 15 bp, Homo sapiens
tagtctggaatccca

SEQ ID NO: 1381720 - DNA, 15 bp, Homo sapiens
ctagtctggaatccc

SEQ ID NO: 1381721 - DNA, 15 bp, Homo sapiens
actagtctggaatcc

SEQ ID NO: 1381722 - DNA, 15 bp, Homo sapiens
cactagtctggaatc

SEQ ID NO: 1381723 - DNA, 15 bp, Homo sapiens
tcactagtctggaat

SEQ ID NO: 1381724 - DNA, 15 bp, Homo sapiens
ctcactagtctggaa

SEQ ID NO: 1381725 - DNA, 15 bp, Homo sapiens
actcactagtctgga

SEQ ID NO: 1381726 - DNA, 15 bp, Homo sapiens
cactcactagtctgg

SEQ ID NO: 1381727 - DNA, 15 bp, Homo sapiens
tcactcactagtctg

SEQ ID NO: 1381728 - DNA, 15 bp, Homo sapiens
atcactcactagtct

SEQ ID NO: 1381729 - DNA, 15 bp, Homo sapiens
tatcactcactagtc

SEQ ID NO: 1381730 - DNA, 15 bp, Homo sapiens
ctatcactcactagt

SEQ ID NO: 1381731 - DNA, 15 bp, Homo sapiens
tctatcactcactag

SEQ ID NO: 1381732 - DNA, 15 bp, Homo sapiens
ctctatcactcacta

SEQ ID NO: 1381733 - DNA, 15 bp, Homo sapiens
gctctatcactcact

SEQ ID NO: 1381734 - DNA, 15 bp, Homo sapiens
agctctatcactcac

SEQ ID NO: 1381735 - DNA, 15 bp, Homo sapiens
tagctctatcactca

SEQ ID NO: 1381736 - DNA, 15 bp, Homo sapiens
ctagctctatcactc

SEQ ID NO: 1381737 - DNA, 15 bp, Homo sapiens
cctagctctatcact

SEQ ID NO: 1381738 - DNA, 15 bp, Homo sapiens
gcctagctctatcac

SEQ ID NO: 1381739 - DNA, 15 bp, Homo sapiens
agcctagctctatca

SEQ ID NO: 1381740 - DNA, 15 bp, Homo sapiens
cagcctagctctatc

SEQ ID NO: 1381741 - DNA, 15 bp, Homo sapiens
gcagcctagctctat

SEQ ID NO: 1381742 - DNA, 15 bp, Homo sapiens
tgcagcctagctcta

SEQ ID NO: 1381743 - DNA, 15 bp, Homo sapiens
ttgcagcctagctct

SEQ ID NO: 1381744 - DNA, 15 bp, Homo sapiens
tttgcagcctagctc

SEQ ID NO: 1381745 - DNA, 15 bp, Homo sapiens
gtttgcagcctagct

SEQ ID NO: 1381746 - DNA, 15 bp, Homo sapiens
ggtttgcagcctagc

SEQ ID NO: 1381747 - DNA, 15 bp, Homo sapiens
gggtttgcagcctag

SEQ ID NO: 1381748 - DNA, 15 bp, Homo sapiens
tgggtttgcagccta

SEQ ID NO: 1381749 - DNA, 15 bp, Homo sapiens
ttgggtttgcagcct

SEQ ID NO: 1381750 - DNA, 15 bp, Homo sapiens
gttgggtttgcagcc

SEQ ID NO: 1381751 - DNA, 15 bp, Homo sapiens
tgttgggtttgcagc

SEQ ID NO: 1381752 - DNA, 15 bp, Homo sapiens
gtgttgggtttgcag

SEQ ID NO: 1381753 - DNA, 15 bp, Homo sapiens
agtgttgggtttgca

SEQ ID NO: 1381754 - DNA, 15 bp, Homo sapiens
gagtgttgggtttgc

SEQ ID NO: 1381755 - DNA, 15 bp, Homo sapiens
ggagtgttgggtttg

SEQ ID NO: 1381756 - DNA, 15 bp, Homo sapiens
gggagtgttgggttt

SEQ ID NO: 1381757 - DNA, 15 bp, Homo sapiens
ggggagtgttgggtt

SEQ ID NO: 1381758 - DNA, 15 bp, Homo sapiens
aggggagtgttgggt

SEQ ID NO: 1381759 - DNA, 15 bp, Homo sapiens
caggggagtgttggg

SEQ ID NO: 1381760 - DNA, 15 bp, Homo sapiens
ccaggggagtgttgg

SEQ ID NO: 1381761 - DNA, 15 bp, Homo sapiens
tccaggggagtgttg

SEQ ID NO: 1381762 - DNA, 15 bp, Homo sapiens
gtccaggggagtgtt

SEQ ID NO: 1381763 - DNA, 15 bp, Homo sapiens
cgtccaggggagtgt

SEQ ID NO: 1381764 - DNA, 15 bp, Homo sapiens
gcgtccaggggagtg

SEQ ID NO: 1381765 - DNA, 15 bp, Homo sapiens
agcgtccaggggagt

SEQ ID NO: 1381766 - DNA, 15 bp, Homo sapiens
cagcgtccaggggag

SEQ ID NO: 1381767 - DNA, 15 bp, Homo sapiens
tcagcgtccagggga

SEQ ID NO: 1381768 - DNA, 15 bp, Homo sapiens
ttcagcgtccagggg

SEQ ID NO: 1381769 - DNA, 15 bp, Homo sapiens
attcagcgtccaggg

SEQ ID NO: 1381770 - DNA, 15 bp, Homo sapiens
tattcagcgtccagg

SEQ ID NO: 1381771 - DNA, 15 bp, Homo sapiens
ttattcagcgtccag

SEQ ID NO: 1381772 - DNA, 15 bp, Homo sapiens
tttattcagcgtcca

SEQ ID NO: 1381773 - DNA, 15 bp, Homo sapiens
atttattcagcgtcc

SEQ ID NO: 1381774 - DNA, 15 bp, Homo sapiens
catttattcagcgtc

SEQ ID NO: 1381775 - DNA, 15 bp, Homo sapiens
acatttattcagcgt

SEQ ID NO: 1381776 - DNA, 15 bp, Homo sapiens
gacatttattcagcg

SEQ ID NO: 1381777 - DNA, 15 bp, Homo sapiens
agacatttattcagc

SEQ ID NO: 1381778 - DNA, 15 bp, Homo sapiens
aagacatttattcag

SEQ ID NO: 1381779 - DNA, 15 bp, Homo sapiens
aaagacatttattca

SEQ ID NO: 1381780 - DNA, 15 bp, Homo sapiens
aaaagacatttattc

SEQ ID NO: 1381781 - DNA, 15 bp, Homo sapiens
gaaaagacatttatt

SEQ ID NO: 1381782 - DNA, 15 bp, Homo sapiens
ggaaaagacatttat

SEQ ID NO: 1381783 - DNA, 15 bp, Homo sapiens
tggaaaagacattta

SEQ ID NO: 1381784 - DNA, 15 bp, Homo sapiens
ctggaaaagacattt

SEQ ID NO: 1381785 - DNA, 15 bp, Homo sapiens
tctggaaaagacatt

SEQ ID NO: 1381786 - DNA, 15 bp, Homo sapiens
ttctggaaaagacat

SEQ ID NO: 1381787 - DNA, 15 bp, Homo sapiens
gttctggaaaagaca

SEQ ID NO: 1381788 - DNA, 15 bp, Homo sapiens
tgttctggaaaagac

SEQ ID NO: 1381789 - DNA, 15 bp, Homo sapiens
ctgttctggaaaaga

SEQ ID NO: 1381790 - DNA, 15 bp, Homo sapiens
gctgttctggaaaag

SEQ ID NO: 1381791 - DNA, 15 bp, Homo sapiens
tgctgttctggaaaa

SEQ ID NO: 1381792 - DNA, 15 bp, Homo sapiens
atgctgttctggaaa

SEQ ID NO: 1381793 - DNA, 15 bp, Homo sapiens
catgctgttctggaa

SEQ ID NO: 1381794 - DNA, 15 bp, Homo sapiens
acatgctgttctgga

SEQ ID NO: 1381795 - DNA, 15 bp, Homo sapiens
aacatgctgttctgg

SEQ ID NO: 1381796 - DNA, 15 bp, Homo sapiens
aaacatgctgttctg

SEQ ID NO: 1381797 - DNA, 15 bp, Homo sapiens
taaacatgctgttct

SEQ ID NO: 1381798 - DNA, 15 bp, Homo sapiens
gtaaacatgctgttc

SEQ ID NO: 1381799 - DNA, 15 bp, Homo sapiens
agtaaacatgctgtt

SEQ ID NO: 1381800 - DNA, 15 bp, Homo sapiens
aagtaaacatgctgt

SEQ ID NO: 1381801 - DNA, 15 bp, Homo sapiens
caagtaaacatgctg

SEQ ID NO: 1381802 - DNA, 15 bp, Homo sapiens
tcaagtaaacatgct

SEQ ID NO: 1381803 - DNA, 15 bp, Homo sapiens
ttcaagtaaacatgc

SEQ ID NO: 1381804 - DNA, 15 bp, Homo sapiens
tttcaagtaaacatg

SEQ ID NO: 1381805 - DNA, 15 bp, Homo sapiens
gtttcaagtaaacat

SEQ ID NO: 1381806 - DNA, 15 bp, Homo sapiens
agtttcaagtaaaca

SEQ ID NO: 1381807 - DNA, 15 bp, Homo sapiens
tagtttcaagtaaac

SEQ ID NO: 1381808 - DNA, 15 bp, Homo sapiens
ctagtttcaagtaaa

SEQ ID NO: 1381809 - DNA, 15 bp, Homo sapiens
actagtttcaagtaa

SEQ ID NO: 1381810 - DNA, 15 bp, Homo sapiens
tactagtttcaagta

SEQ ID NO: 1381811 - DNA, 15 bp, Homo sapiens
atactagtttcaagt

SEQ ID NO: 1381812 - DNA, 15 bp, Homo sapiens
aatactagtttcaag

SEQ ID NO: 1381813 - DNA, 15 bp, Homo sapiens
aaatactagtttcaa

SEQ ID NO: 1381814 - DNA, 15 bp, Homo sapiens
gaaatactagtttca

SEQ ID NO: 1381815 - DNA, 15 bp, Homo sapiens
tgaaatactagtttc

SEQ ID NO: 1381816 - DNA, 15 bp, Homo sapiens
ttgaaatactagttt

SEQ ID NO: 1381817 - DNA, 15 bp, Homo sapiens
tttgaaatactagtt

SEQ ID NO: 1381818 - DNA, 15 bp, Homo sapiens
atttgaaatactagt

SEQ ID NO: 1381819 - DNA, 15 bp, Homo sapiens
tatttgaaatactag

SEQ ID NO: 1381820 - DNA, 15 bp, Homo sapiens
atatttgaaatacta

SEQ ID NO: 1381821 - DNA, 15 bp, Homo sapiens
catatttgaaatact

SEQ ID NO: 1381822 - DNA, 15 bp, Homo sapiens
ccatatttgaaatac

SEQ ID NO: 1381823 - DNA, 15 bp, Homo sapiens
gccatatttgaaata

SEQ ID NO: 1381824 - DNA, 15 bp, Homo sapiens
tgccatatttgaaat

SEQ ID NO: 1381825 - DNA, 15 bp, Homo sapiens
ttgccatatttgaaa

SEQ ID NO: 1381826 - DNA, 15 bp, Homo sapiens
attgccatatttgaa

SEQ ID NO: 1381827 - DNA, 15 bp, Homo sapiens
tattgccatatttga

SEQ ID NO: 1381828 - DNA, 15 bp, Homo sapiens
ttattgccatatttg

SEQ ID NO: 1381829 - DNA, 15 bp, Homo sapiens
cttattgccatattt

SEQ ID NO: 1381830 - DNA, 15 bp, Homo sapiens
tcttattgccatatt

SEQ ID NO: 1381831 - DNA, 15 bp, Homo sapiens
ttcttattgccatat

SEQ ID NO: 1381832 - DNA, 15 bp, Homo sapiens
tttcttattgccata

SEQ ID NO: 1381833 - DNA, 15 bp, Homo sapiens
ttttcttattgccat

SEQ ID NO: 1381834 - DNA, 15 bp, Homo sapiens
gttttcttattgcca

SEQ ID NO: 1381835 - DNA, 15 bp, Homo sapiens
agttttcttattgcc

SEQ ID NO: 1381836 - DNA, 15 bp, Homo sapiens
aagttttcttattgc

SEQ ID NO: 1381837 - DNA, 15 bp, Homo sapiens
aaagttttcttattg

SEQ ID NO: 1381838 - DNA, 15 bp, Homo sapiens
gaaagttttcttatt

SEQ ID NO: 1381839 - DNA, 15 bp, Homo sapiens
tgaaagttttcttat

SEQ ID NO: 1381840 - DNA, 15 bp, Homo sapiens
ttgaaagttttctta

SEQ ID NO: 1381841 - DNA, 15 bp, Homo sapiens
attgaaagttttctt

SEQ ID NO: 1381842 - DNA, 15 bp, Homo sapiens
aattgaaagttttct

SEQ ID NO: 1381843 - DNA, 15 bp, Homo sapiens
taattgaaagttttc

SEQ ID NO: 1381844 - DNA, 15 bp, Homo sapiens
gtaattgaaagtttt

SEQ ID NO: 1381845 - DNA, 15 bp, Homo sapiens
tgtaattgaaagttt

SEQ ID NO: 1381846 - DNA, 15 bp, Homo sapiens
atgtaattgaaagtt

SEQ ID NO: 1381847 - DNA, 15 bp, Homo sapiens
aatgtaattgaaagt

SEQ ID NO: 1381848 - DNA, 15 bp, Homo sapiens
aaatgtaattgaaag

SEQ ID NO: 1381849 - DNA, 15 bp, Homo sapiens
gaaatgtaattgaaa

SEQ ID NO: 1381850 - DNA, 15 bp, Homo sapiens
tgaaatgtaattgaa

SEQ ID NO: 1381851 - DNA, 15 bp, Homo sapiens
atgaaatgtaattga

SEQ ID NO: 1381852 - DNA, 15 bp, Homo sapiens
tatgaaatgtaattg

SEQ ID NO: 1381853 - DNA, 15 bp, Homo sapiens
ttatgaaatgtaatt

SEQ ID NO: 1381854 - DNA, 15 bp, Homo sapiens
tttatgaaatgtaat

SEQ ID NO: 1381855 - DNA, 15 bp, Homo sapiens
ttttatgaaatgtaa

SEQ ID NO: 1381856 - DNA, 15 bp, Homo sapiens
gttttatgaaatgta

SEQ ID NO: 1381857 - DNA, 15 bp, Homo sapiens
tgttttatgaaatgt

SEQ ID NO: 1381858 - DNA, 15 bp, Homo sapiens
ctgttttatgaaatg

SEQ ID NO: 1381859 - DNA, 15 bp, Homo sapiens
tctgttttatgaaat

SEQ ID NO: 1381860 - DNA, 15 bp, Homo sapiens
ttctgttttatgaaa

SEQ ID NO: 1381861 - DNA, 15 bp, Homo sapiens
gttctgttttatgaa

SEQ ID NO: 1381862 - DNA, 15 bp, Homo sapiens
tgttctgttttatga

SEQ ID NO: 1381863 - DNA, 15 bp, Homo sapiens
ttgttctgttttatg

SEQ ID NO: 1381864 - DNA, 15 bp, Homo sapiens
attgttctgttttat

SEQ ID NO: 1381865 - DNA, 15 bp, Homo sapiens
gattgttctgtttta

SEQ ID NO: 1381866 - DNA, 15 bp, Homo sapiens
agattgttctgtttt

SEQ ID NO: 1381867 - DNA, 15 bp, Homo sapiens
tagattgttctgttt

SEQ ID NO: 1381868 - DNA, 15 bp, Homo sapiens
atagattgttctgtt

SEQ ID NO: 1381869 - DNA, 15 bp, Homo sapiens
catagattgttctgt

SEQ ID NO: 1381870 - DNA, 15 bp, Homo sapiens
acatagattgttctg

SEQ ID NO: 1381871 - DNA, 15 bp, Homo sapiens
gacatagattgttct

SEQ ID NO: 1381872 - DNA, 15 bp, Homo sapiens
tgacatagattgttc

SEQ ID NO: 1381873 - DNA, 15 bp, Homo sapiens
atgacatagattgtt

SEQ ID NO: 1381874 - DNA, 15 bp, Homo sapiens
catgacatagattgt

SEQ ID NO: 1381875 - DNA, 15 bp, Homo sapiens
gcatgacatagattg

SEQ ID NO: 1381876 - DNA, 15 bp, Homo sapiens
agcatgacatagatt

SEQ ID NO: 1381877 - DNA, 15 bp, Homo sapiens
cagcatgacatagat

SEQ ID NO: 1381878 - DNA, 15 bp, Homo sapiens
gcagcatgacataga

SEQ ID NO: 1381879 - DNA, 15 bp, Homo sapiens
agcagcatgacatag

SEQ ID NO: 1381880 - DNA, 15 bp, Homo sapiens
aagcagcatgacata

SEQ ID NO: 1381881 - DNA, 15 bp, Homo sapiens
taagcagcatgacat

SEQ ID NO: 1381882 - DNA, 15 bp, Homo sapiens
ataagcagcatgaca

SEQ ID NO: 1381883 - DNA, 15 bp, Homo sapiens
cataagcagcatgac

SEQ ID NO: 1381884 - DNA, 15 bp, Homo sapiens
tcataagcagcatga

SEQ ID NO: 1381885 - DNA, 15 bp, Homo sapiens
ctcataagcagcatg

SEQ ID NO: 1381886 - DNA, 15 bp, Homo sapiens
cctcataagcagcat

SEQ ID NO: 1381887 - DNA, 15 bp, Homo sapiens
tcctcataagcagca

SEQ ID NO: 1381888 - DNA, 15 bp, Homo sapiens
gtcctcataagcagc

SEQ ID NO: 1381889 - DNA, 15 bp, Homo sapiens
agtcctcataagcag

SEQ ID NO: 1381890 - DNA, 15 bp, Homo sapiens
gagtcctcataagca

SEQ ID NO: 1381891 - DNA, 15 bp, Homo sapiens
tgagtcctcataagc

SEQ ID NO: 1381892 - DNA, 15 bp, Homo sapiens
ttgagtcctcataag

SEQ ID NO: 1381893 - DNA, 15 bp, Homo sapiens
attgagtcctcataa

SEQ ID NO: 1381894 - DNA, 15 bp, Homo sapiens
tattgagtcctcata

SEQ ID NO: 1381895 - DNA, 15 bp, Homo sapiens
ttattgagtcctcat

SEQ ID NO: 1381896 - DNA, 15 bp, Homo sapiens
gttattgagtcctca

SEQ ID NO: 1381897 - DNA, 15 bp, Homo sapiens
ggttattgagtcctc

SEQ ID NO: 1381898 - DNA, 15 bp, Homo sapiens
aggttattgagtcct

SEQ ID NO: 1381899 - DNA, 15 bp, Homo sapiens
aaggttattgagtcc

SEQ ID NO: 1381900 - DNA, 15 bp, Homo sapiens
taaggttattgagtc

SEQ ID NO: 1381901 - DNA, 15 bp, Homo sapiens
gtaaggttattgagt

SEQ ID NO: 1381902 - DNA, 15 bp, Homo sapiens
agtaaggttattgag

SEQ ID NO: 1381903 - DNA, 15 bp, Homo sapiens
aagtaaggttattga

SEQ ID NO: 1381904 - DNA, 15 bp, Homo sapiens
taagtaaggttattg

SEQ ID NO: 1381905 - DNA, 15 bp, Homo sapiens
ttaagtaaggttatt

SEQ ID NO: 1381906 - DNA, 15 bp, Homo sapiens
tttaagtaaggttat

SEQ ID NO: 1381907 - DNA, 15 bp, Homo sapiens
ttttaagtaaggtta

SEQ ID NO: 1381908 - DNA, 15 bp, Homo sapiens
cttttaagtaaggtt

SEQ ID NO: 1381909 - DNA, 15 bp, Homo sapiens
tcttttaagtaaggt

SEQ ID NO: 1381910 - DNA, 15 bp, Homo sapiens
atcttttaagtaagg

SEQ ID NO: 1381911 - DNA, 15 bp, Homo sapiens
tatcttttaagtaag

SEQ ID NO: 1381912 - DNA, 15 bp, Homo sapiens
ttatcttttaagtaa

SEQ ID NO: 1381913 - DNA, 15 bp, Homo sapiens
gttatcttttaagta

SEQ ID NO: 1381914 - DNA, 15 bp, Homo sapiens
ggttatcttttaagt

SEQ ID NO: 1381915 - DNA, 15 bp, Homo sapiens
gggttatcttttaag

SEQ ID NO: 1381916 - DNA, 15 bp, Homo sapiens
tgggttatcttttaa

SEQ ID NO: 1381917 - DNA, 15 bp, Homo sapiens
atgggttatctttta

SEQ ID NO: 1381918 - DNA, 15 bp, Homo sapiens
gatgggttatctttt

SEQ ID NO: 1381919 - DNA, 15 bp, Homo sapiens
agatgggttatcttt

SEQ ID NO: 1381920 - DNA, 15 bp, Homo sapiens
tagatgggttatctt

SEQ ID NO: 1381921 - DNA, 15 bp, Homo sapiens
ttagatgggttatct

SEQ ID NO: 1381922 - DNA, 15 bp, Homo sapiens
tttagatgggttatc

SEQ ID NO: 1381923 - DNA, 15 bp, Homo sapiens
gtttagatgggttat

SEQ ID NO: 1381924 - DNA, 15 bp, Homo sapiens
cgtttagatgggtta

SEQ ID NO: 1381925 - DNA, 15 bp, Homo sapiens
ccgtttagatgggtt

SEQ ID NO: 1381926 - DNA, 15 bp, Homo sapiens
cccgtttagatgggt

SEQ ID NO: 1381927 - DNA, 15 bp, Homo sapiens
acccgtttagatggg

SEQ ID NO: 1381928 - DNA, 15 bp, Homo sapiens
aacccgtttagatgg

SEQ ID NO: 1381929 - DNA, 15 bp, Homo sapiens
taacccgtttagatg

SEQ ID NO: 1381930 - DNA, 15 bp, Homo sapiens
ttaacccgtttagat

SEQ ID NO: 1381931 - DNA, 15 bp, Homo sapiens
attaacccgtttaga

SEQ ID NO: 1381932 - DNA, 15 bp, Homo sapiens
aattaacccgtttag

SEQ ID NO: 1381933 - DNA, 15 bp, Homo sapiens
taattaacccgttta

SEQ ID NO: 1381934 - DNA, 15 bp, Homo sapiens
ttaattaacccgttt

SEQ ID NO: 1381935 - DNA, 15 bp, Homo sapiens
gttaattaacccgtt

SEQ ID NO: 1381936 - DNA, 15 bp, Homo sapiens
ggttaattaacccgt

SEQ ID NO: 1381937 - DNA, 15 bp, Homo sapiens
tggttaattaacccg

SEQ ID NO: 1381938 - DNA, 15 bp, Homo sapiens
atggttaattaaccc

SEQ ID NO: 1381939 - DNA, 15 bp, Homo sapiens
aatggttaattaacc

SEQ ID NO: 1381940 - DNA, 15 bp, Homo sapiens
aaatggttaattaac

SEQ ID NO: 1381941 - DNA, 15 bp, Homo sapiens
taaatggttaattaa

SEQ ID NO: 1381942 - DNA, 15 bp, Homo sapiens
ttaaatggttaatta

SEQ ID NO: 1381943 - DNA, 15 bp, Homo sapiens
tttaaatggttaatt

SEQ ID NO: 1381944 - DNA, 15 bp, Homo sapiens
atttaaatggttaat

SEQ ID NO: 1381945 - DNA, 15 bp, Homo sapiens
tatttaaatggttaa

SEQ ID NO: 1381946 - DNA, 15 bp, Homo sapiens
gtatttaaatggtta

SEQ ID NO: 1381947 - DNA, 15 bp, Homo sapiens
ggtatttaaatggtt

SEQ ID NO: 1381948 - DNA, 15 bp, Homo sapiens
tggtatttaaatggt

SEQ ID NO: 1381949 - DNA, 15 bp, Homo sapiens
ttggtatttaaatgg

SEQ ID NO: 1381950 - DNA, 15 bp, Homo sapiens
cttggtatttaaatg

SEQ ID NO: 1381951 - DNA, 15 bp, Homo sapiens
ccttggtatttaaat

SEQ ID NO: 1381952 - DNA, 15 bp, Homo sapiens
gccttggtatttaaa

SEQ ID NO: 1381953 - DNA, 15 bp, Homo sapiens
ggccttggtatttaa

SEQ ID NO: 1381954 - DNA, 15 bp, Homo sapiens
tggccttggtattta

SEQ ID NO: 1381955 - DNA, 15 bp, Homo sapiens
atggccttggtattt

SEQ ID NO: 1381956 - DNA, 15 bp, Homo sapiens
catggccttggtatt

SEQ ID NO: 1381957 - DNA, 15 bp, Homo sapiens
tcatggccttggtat

SEQ ID NO: 1381958 - DNA, 15 bp, Homo sapiens
atcatggccttggta

SEQ ID NO: 1381959 - DNA, 15 bp, Homo sapiens
catcatggccttggt

SEQ ID NO: 1381960 - DNA, 15 bp, Homo sapiens
tcatcatggccttgg

SEQ ID NO: 1381961 - DNA, 15 bp, Homo sapiens
ttcatcatggccttg

SEQ ID NO: 1381962 - DNA, 15 bp, Homo sapiens
attcatcatggcctt

SEQ ID NO: 1381963 - DNA, 15 bp, Homo sapiens
cattcatcatggcct

SEQ ID NO: 1381964 - DNA, 15 bp, Homo sapiens
acattcatcatggcc

SEQ ID NO: 1381965 - DNA, 15 bp, Homo sapiens
aacattcatcatggc

SEQ ID NO: 1381966 - DNA, 15 bp, Homo sapiens
caacattcatcatgg

SEQ ID NO: 1381967 - DNA, 15 bp, Homo sapiens
ccaacattcatcatg

SEQ ID NO: 1381968 - DNA, 15 bp, Homo sapiens
gccaacattcatcat

SEQ ID NO: 1381969 - DNA, 15 bp, Homo sapiens
agccaacattcatca

SEQ ID NO: 1381970 - DNA, 15 bp, Homo sapiens
aagccaacattcatc

SEQ ID NO: 1381971 - DNA, 15 bp, Homo sapiens
aaagccaacattcat

SEQ ID NO: 1381972 - DNA, 15 bp, Homo sapiens
taaagccaacattca

SEQ ID NO: 1381973 - DNA, 15 bp, Homo sapiens
ctaaagccaacattc

SEQ ID NO: 1381974 - DNA, 15 bp, Homo sapiens
tctaaagccaacatt

SEQ ID NO: 1381975 - DNA, 15 bp, Homo sapiens
atctaaagccaacat

SEQ ID NO: 1381976 - DNA, 15 bp, Homo sapiens
gatctaaagccaaca

SEQ ID NO: 1381977 - DNA, 15 bp, Homo sapiens
agatctaaagccaac

SEQ ID NO: 1381978 - DNA, 15 bp, Homo sapiens
aagatctaaagccaa

SEQ ID NO: 1381979 - DNA, 15 bp, Homo sapiens
aaagatctaaagcca

SEQ ID NO: 1381980 - DNA, 15 bp, Homo sapiens
taaagatctaaagcc

SEQ ID NO: 1381981 - DNA, 15 bp, Homo sapiens
ttaaagatctaaagc

SEQ ID NO: 1381982 - DNA, 15 bp, Homo sapiens
tttaaagatctaaag

SEQ ID NO: 1381983 - DNA, 15 bp, Homo sapiens
ctttaaagatctaaa

SEQ ID NO: 1381984 - DNA, 15 bp, Homo sapiens
cctttaaagatctaa

SEQ ID NO: 1381985 - DNA, 15 bp, Homo sapiens
ccctttaaagatcta

SEQ ID NO: 1381986 - DNA, 15 bp, Homo sapiens
gccctttaaagatct

SEQ ID NO: 1381987 - DNA, 15 bp, Homo sapiens
ggccctttaaagatc

SEQ ID NO: 1381988 - DNA, 15 bp, Homo sapiens
aggccctttaaagat

SEQ ID NO: 1381989 - DNA, 15 bp, Homo sapiens
caggccctttaaaga

SEQ ID NO: 1381990 - DNA, 15 bp, Homo sapiens
gcaggccctttaaag

SEQ ID NO: 1381991 - DNA, 15 bp, Homo sapiens
agcaggccctttaaa

SEQ ID NO: 1381992 - DNA, 15 bp, Homo sapiens
aagcaggccctttaa

SEQ ID NO: 1381993 - DNA, 15 bp, Homo sapiens
gaagcaggcccttta

SEQ ID NO: 1381994 - DNA, 15 bp, Homo sapiens
agaagcaggcccttt

SEQ ID NO: 1381995 - DNA, 15 bp, Homo sapiens
cagaagcaggccctt

SEQ ID NO: 1381996 - DNA, 15 bp, Homo sapiens
tcagaagcaggccct

SEQ ID NO: 1381997 - DNA, 15 bp, Homo sapiens
ttcagaagcaggccc

SEQ ID NO: 1381998 - DNA, 15 bp, Homo sapiens
attcagaagcaggcc

SEQ ID NO: 1381999 - DNA, 15 bp, Homo sapiens
aattcagaagcaggc

SEQ ID NO: 1382000 - DNA, 15 bp, Homo sapiens
gaattcagaagcagg

SEQ ID NO: 1382001 - DNA, 15 bp, Homo sapiens
agaattcagaagcag

SEQ ID NO: 1382002 - DNA, 15 bp, Homo sapiens
cagaattcagaagca

SEQ ID NO: 1382003 - DNA, 15 bp, Homo sapiens
acagaattcagaagc

SEQ ID NO: 1382004 - DNA, 15 bp, Homo sapiens
tacagaattcagaag

SEQ ID NO: 1382005 - DNA, 15 bp, Homo sapiens
gtacagaattcagaa

SEQ ID NO: 1382006 - DNA, 15 bp, Homo sapiens
ggtacagaattcaga

SEQ ID NO: 1382007 - DNA, 15 bp, Homo sapiens
aggtacagaattcag

SEQ ID NO: 1382008 - DNA, 15 bp, Homo sapiens
caggtacagaattca

SEQ ID NO: 1382009 - DNA, 15 bp, Homo sapiens
acaggtacagaattc

SEQ ID NO: 1382010 - DNA, 15 bp, Homo sapiens
aacaggtacagaatt

SEQ ID NO: 1382011 - DNA, 15 bp, Homo sapiens
aaacaggtacagaat

SEQ ID NO: 1382012 - DNA, 15 bp, Homo sapiens
aaaacaggtacagaa

SEQ ID NO: 1382013 - DNA, 15 bp, Homo sapiens
caaaacaggtacaga

SEQ ID NO: 1382014 - DNA, 15 bp, Homo sapiens
gcaaaacaggtacag

SEQ ID NO: 1382015 - DNA, 15 bp, Homo sapiens
agcaaaacaggtaca

SEQ ID NO: 1382016 - DNA, 15 bp, Homo sapiens
tagcaaaacaggtac

SEQ ID NO: 1382017 - DNA, 15 bp, Homo sapiens
ctagcaaaacaggta

SEQ ID NO: 1382018 - DNA, 15 bp, Homo sapiens
tctagcaaaacaggt

SEQ ID NO: 1382019 - DNA, 15 bp, Homo sapiens
gtctagcaaaacagg

SEQ ID NO: 1382020 - DNA, 15 bp, Homo sapiens
agtctagcaaaacag

SEQ ID NO: 1382021 - DNA, 15 bp, Homo sapiens
cagtctagcaaaaca

SEQ ID NO: 1382022 - DNA, 15 bp, Homo sapiens
tcagtctagcaaaac

SEQ ID NO: 1382023 - DNA, 15 bp, Homo sapiens
ctcagtctagcaaaa

SEQ ID NO: 1382024 - DNA, 15 bp, Homo sapiens
tctcagtctagcaaa

SEQ ID NO: 1382025 - DNA, 15 bp, Homo sapiens
gtctcagtctagcaa

SEQ ID NO: 1382026 - DNA, 15 bp, Homo sapiens
agtctcagtctagca

SEQ ID NO: 1382027 - DNA, 15 bp, Homo sapiens
gagtctcagtctagc

SEQ ID NO: 1382028 - DNA, 15 bp, Homo sapiens
ggagtctcagtctag

SEQ ID NO: 1382029 - DNA, 15 bp, Homo sapiens
aggagtctcagtcta

SEQ ID NO: 1382030 - DNA, 15 bp, Homo sapiens
caggagtctcagtct

SEQ ID NO: 1382031 - DNA, 15 bp, Homo sapiens
gcaggagtctcagtc

SEQ ID NO: 1382032 - DNA, 15 bp, Homo sapiens
tgcaggagtctcagt

SEQ ID NO: 1382033 - DNA, 15 bp, Homo sapiens
atgcaggagtctcag

SEQ ID NO: 1382034 - DNA, 15 bp, Homo sapiens
aatgcaggagtctca

SEQ ID NO: 1382035 - DNA, 15 bp, Homo sapiens
gaatgcaggagtctc

SEQ ID NO: 1382036 - DNA, 15 bp, Homo sapiens
tgaatgcaggagtct

SEQ ID NO: 1382037 - DNA, 15 bp, Homo sapiens
gtgaatgcaggagtc

SEQ ID NO: 1382038 - DNA, 15 bp, Homo sapiens
tgtgaatgcaggagt

SEQ ID NO: 1382039 - DNA, 15 bp, Homo sapiens
gtgtgaatgcaggag

SEQ ID NO: 1382040 - DNA, 15 bp, Homo sapiens
ggtgtgaatgcagga

SEQ ID NO: 1382041 - DNA, 15 bp, Homo sapiens
gggtgtgaatgcagg

SEQ ID NO: 1382042 - DNA, 15 bp, Homo sapiens
tgggtgtgaatgcag

SEQ ID NO: 1382043 - DNA, 15 bp, Homo sapiens
gtgggtgtgaatgca

SEQ ID NO: 1382044 - DNA, 15 bp, Homo sapiens
agtgggtgtgaatgc

SEQ ID NO: 1382045 - DNA, 15 bp, Homo sapiens
gagtgggtgtgaatg

SEQ ID NO: 1382046 - DNA, 15 bp, Homo sapiens
tgagtgggtgtgaat

SEQ ID NO: 1382047 - DNA, 15 bp, Homo sapiens
ctgagtgggtgtgaa

SEQ ID NO: 1382048 - DNA, 15 bp, Homo sapiens
tctgagtgggtgtga

SEQ ID NO: 1382049 - DNA, 15 bp, Homo sapiens
gtctgagtgggtgtg

SEQ ID NO: 1382050 - DNA, 15 bp, Homo sapiens
agtctgagtgggtgt

SEQ ID NO: 1382051 - DNA, 15 bp, Homo sapiens
cagtctgagtgggtg

SEQ ID NO: 1382052 - DNA, 15 bp, Homo sapiens
acagtctgagtgggt

SEQ ID NO: 1382053 - DNA, 15 bp, Homo sapiens
gacagtctgagtggg

SEQ ID NO: 1382054 - DNA, 15 bp, Homo sapiens
agacagtctgagtgg

SEQ ID NO: 1382055 - DNA, 15 bp, Homo sapiens
gagacagtctgagtg

SEQ ID NO: 1382056 - DNA, 15 bp, Homo sapiens
tgagacagtctgagt

SEQ ID NO: 1382057 - DNA, 15 bp, Homo sapiens
gtgagacagtctgag

SEQ ID NO: 1382058 - DNA, 15 bp, Homo sapiens
ggtgagacagtctga

SEQ ID NO: 1382059 - DNA, 15 bp, Homo sapiens
tggtgagacagtctg

SEQ ID NO: 1382060 - DNA, 15 bp, Homo sapiens
ttggtgagacagtct

SEQ ID NO: 1382061 - DNA, 15 bp, Homo sapiens
tttggtgagacagtc

SEQ ID NO: 1382062 - DNA, 15 bp, Homo sapiens
ctttggtgagacagt

SEQ ID NO: 1382063 - DNA, 15 bp, Homo sapiens
tctttggtgagacag

SEQ ID NO: 1382064 - DNA, 15 bp, Homo sapiens
ttctttggtgagaca

SEQ ID NO: 1382065 - DNA, 15 bp, Homo sapiens
gttctttggtgagac

SEQ ID NO: 1382066 - DNA, 15 bp, Homo sapiens
tgttctttggtgaga

SEQ ID NO: 1382067 - DNA, 15 bp, Homo sapiens
ctgttctttggtgag

SEQ ID NO: 1382068 - DNA, 15 bp, Homo sapiens
tctgttctttggtga

SEQ ID NO: 1382069 - DNA, 15 bp, Homo sapiens
gtctgttctttggtg

SEQ ID NO: 1382070 - DNA, 15 bp, Homo sapiens
agtctgttctttggt

SEQ ID NO: 1382071 - DNA, 15 bp, Homo sapiens
cagtctgttctttgg

SEQ ID NO: 1382072 - DNA, 15 bp, Homo sapiens
acagtctgttctttg

SEQ ID NO: 1382073 - DNA, 15 bp, Homo sapiens
cacagtctgttcttt

SEQ ID NO: 1382074 - DNA, 15 bp, Homo sapiens
gcacagtctgttctt

SEQ ID NO: 1382075 - DNA, 15 bp, Homo sapiens
agcacagtctgttct

SEQ ID NO: 1382076 - DNA, 15 bp, Homo sapiens
gagcacagtctgttc

SEQ ID NO: 1382077 - DNA, 15 bp, Homo sapiens
agagcacagtctgtt

SEQ ID NO: 1382078 - DNA, 15 bp, Homo sapiens
gagagcacagtctgt

SEQ ID NO: 1382079 - DNA, 15 bp, Homo sapiens
ggagagcacagtctg

SEQ ID NO: 1382080 - DNA, 15 bp, Homo sapiens
aggagagcacagtct

SEQ ID NO: 1382081 - DNA, 15 bp, Homo sapiens
aaggagagcacagtc

SEQ ID NO: 1382082 - DNA, 15 bp, Homo sapiens
aaaggagagcacagt

SEQ ID NO: 1382083 - DNA, 15 bp, Homo sapiens
gaaaggagagcacag

SEQ ID NO: 1382084 - DNA, 15 bp, Homo sapiens
ggaaaggagagcaca

SEQ ID NO: 1382085 - DNA, 15 bp, Homo sapiens
tggaaaggagagcac

SEQ ID NO: 1382086 - DNA, 15 bp, Homo sapiens
ctggaaaggagagca

SEQ ID NO: 1382087 - DNA, 15 bp, Homo sapiens
tctggaaaggagagc

SEQ ID NO: 1382088 - DNA, 15 bp, Homo sapiens
gtctggaaaggagag

SEQ ID NO: 1382089 - DNA, 15 bp, Homo sapiens
ggtctggaaaggaga

SEQ ID NO: 1382090 - DNA, 15 bp, Homo sapiens
aggtctggaaaggag

SEQ ID NO: 1382091 - DNA, 15 bp, Homo sapiens
aaggtctggaaagga

SEQ ID NO: 1382092 - DNA, 15 bp, Homo sapiens
aaaggtctggaaagg

SEQ ID NO: 1382093 - DNA, 15 bp, Homo sapiens
aaaaggtctggaaag

SEQ ID NO: 1382094 - DNA, 15 bp, Homo sapiens
gaaaaggtctggaaa

SEQ ID NO: 1382095 - DNA, 15 bp, Homo sapiens
tgaaaaggtctggaa

SEQ ID NO: 1382096 - DNA, 15 bp, Homo sapiens
gtgaaaaggtctgga

SEQ ID NO: 1382097 - DNA, 15 bp, Homo sapiens
agtgaaaaggtctgg

SEQ ID NO: 1382098 - DNA, 15 bp, Homo sapiens
gagtgaaaaggtctg

SEQ ID NO: 1382099 - DNA, 15 bp, Homo sapiens
agagtgaaaaggtct

SEQ ID NO: 1382100 - DNA, 15 bp, Homo sapiens
cagagtgaaaaggtc

SEQ ID NO: 1382101 - DNA, 15 bp, Homo sapiens
gcagagtgaaaaggt

SEQ ID NO: 1382102 - DNA, 15 bp, Homo sapiens
tgcagagtgaaaagg

SEQ ID NO: 1382103 - DNA, 15 bp, Homo sapiens
ctgcagagtgaaaag

SEQ ID NO: 1382104 - DNA, 15 bp, Homo sapiens
gctgcagagtgaaaa

SEQ ID NO: 1382105 - DNA, 15 bp, Homo sapiens
agctgcagagtgaaa

SEQ ID NO: 1382106 - DNA, 15 bp, Homo sapiens
tagctgcagagtgaa

SEQ ID NO: 1382107 - DNA, 15 bp, Homo sapiens
ttagctgcagagtga

SEQ ID NO: 1382108 - DNA, 15 bp, Homo sapiens
tttagctgcagagtg

SEQ ID NO: 1382109 - DNA, 15 bp, Homo sapiens
ctttagctgcagagt

SEQ ID NO: 1382110 - DNA, 15 bp, Homo sapiens
tctttagctgcagag

SEQ ID NO: 1382111 - DNA, 15 bp, Homo sapiens
ctctttagctgcaga

SEQ ID NO: 1382112 - DNA, 15 bp, Homo sapiens
cctctttagctgcag

SEQ ID NO: 1382113 - DNA, 15 bp, Homo sapiens
tcctctttagctgca

SEQ ID NO: 1382114 - DNA, 15 bp, Homo sapiens
ttcctctttagctgc

SEQ ID NO: 1382115 - DNA, 15 bp, Homo sapiens
attcctctttagctg

SEQ ID NO: 1382116 - DNA, 15 bp, Homo sapiens
cattcctctttagct

SEQ ID NO: 1382117 - DNA, 15 bp, Homo sapiens
acattcctctttagc

SEQ ID NO: 1382118 - DNA, 15 bp, Homo sapiens
gacattcctctttag

SEQ ID NO: 1382119 - DNA, 15 bp, Homo sapiens
agacattcctcttta

SEQ ID NO: 1382120 - DNA, 15 bp, Homo sapiens
tagacattcctcttt

SEQ ID NO: 1382121 - DNA, 15 bp, Homo sapiens
ctagacattcctctt

SEQ ID NO: 1382122 - DNA, 15 bp, Homo sapiens
cctagacattcctct

SEQ ID NO: 1382123 - DNA, 15 bp, Homo sapiens
tcctagacattcctc

SEQ ID NO: 1382124 - DNA, 15 bp, Homo sapiens
gtcctagacattcct

SEQ ID NO: 1382125 - DNA, 15 bp, Homo sapiens
agtcctagacattcc

SEQ ID NO: 1382126 - DNA, 15 bp, Homo sapiens
tagtcctagacattc

SEQ ID NO: 1382127 - DNA, 15 bp, Homo sapiens
ttagtcctagacatt

SEQ ID NO: 1382128 - DNA, 15 bp, Homo sapiens
cttagtcctagacat

SEQ ID NO: 1382129 - DNA, 15 bp, Homo sapiens
gcttagtcctagaca

SEQ ID NO: 1382130 - DNA, 15 bp, Homo sapiens
ggcttagtcctagac

SEQ ID NO: 1382131 - DNA, 15 bp, Homo sapiens
gggcttagtcctaga

SEQ ID NO: 1382132 - DNA, 15 bp, Homo sapiens
ggggcttagtcctag

SEQ ID NO: 1382133 - DNA, 15 bp, Homo sapiens
tggggcttagtccta

SEQ ID NO: 1382134 - DNA, 15 bp, Homo sapiens
gtggggcttagtcct

SEQ ID NO: 1382135 - DNA, 15 bp, Homo sapiens
tgtggggcttagtcc

SEQ ID NO: 1382136 - DNA, 15 bp, Homo sapiens
ttgtggggcttagtc

SEQ ID NO: 1382137 - DNA, 15 bp, Homo sapiens
cttgtggggcttagt

SEQ ID NO: 1382138 - DNA, 15 bp, Homo sapiens
gcttgtggggcttag

SEQ ID NO: 1382139 - DNA, 15 bp, Homo sapiens
agcttgtggggctta

SEQ ID NO: 1382140 - DNA, 15 bp, Homo sapiens
tagcttgtggggctt

SEQ ID NO: 1382141 - DNA, 15 bp, Homo sapiens
atagcttgtggggct

SEQ ID NO: 1382142 - DNA, 15 bp, Homo sapiens
tatagcttgtggggc

SEQ ID NO: 1382143 - DNA, 15 bp, Homo sapiens
gtatagcttgtgggg

SEQ ID NO: 1382144 - DNA, 15 bp, Homo sapiens
tgtatagcttgtggg

SEQ ID NO: 1382145 - DNA, 15 bp, Homo sapiens
ttgtatagcttgtgg

SEQ ID NO: 1382146 - DNA, 15 bp, Homo sapiens
tttgtatagcttgtg

SEQ ID NO: 1382147 - DNA, 15 bp, Homo sapiens
gtttgtatagcttgt

SEQ ID NO: 1382148 - DNA, 15 bp, Homo sapiens
agtttgtatagcttg

SEQ ID NO: 1382149 - DNA, 15 bp, Homo sapiens
gagtttgtatagctt

SEQ ID NO: 1382150 - DNA, 15 bp, Homo sapiens
ggagtttgtatagct

SEQ ID NO: 1382151 - DNA, 15 bp, Homo sapiens
aggagtttgtatagc

SEQ ID NO: 1382152 - DNA, 15 bp, Homo sapiens
caggagtttgtatag

SEQ ID NO: 1382153 - DNA, 15 bp, Homo sapiens
tcaggagtttgtata

SEQ ID NO: 1382154 - DNA, 15 bp, Homo sapiens
gtcaggagtttgtat

SEQ ID NO: 1382155 - DNA, 15 bp, Homo sapiens
tgtcaggagtttgta

SEQ ID NO: 1382156 - DNA, 15 bp, Homo sapiens
gtgtcaggagtttgt

SEQ ID NO: 1382157 - DNA, 15 bp, Homo sapiens
tgtgtcaggagtttg

SEQ ID NO: 1382158 - DNA, 15 bp, Homo sapiens
ctgtgtcaggagttt

SEQ ID NO: 1382159 - DNA, 15 bp, Homo sapiens
gctgtgtcaggagtt

SEQ ID NO: 1382160 - DNA, 15 bp, Homo sapiens
cgctgtgtcaggagt

SEQ ID NO: 1382161 - DNA, 15 bp, Homo sapiens
gcgctgtgtcaggag

SEQ ID NO: 1382162 - DNA, 15 bp, Homo sapiens
ggcgctgtgtcagga

SEQ ID NO: 1382163 - DNA, 15 bp, Homo sapiens
tggcgctgtgtcagg

SEQ ID NO: 1382164 - DNA, 15 bp, Homo sapiens
ctggcgctgtgtcag

SEQ ID NO: 1382165 - DNA, 15 bp, Homo sapiens
cctggcgctgtgtca

SEQ ID NO: 1382166 - DNA, 15 bp, Homo sapiens
ccctggcgctgtgtc

SEQ ID NO: 1382167 - DNA, 15 bp, Homo sapiens
cccctggcgctgtgt

SEQ ID NO: 1382168 - DNA, 15 bp, Homo sapiens
gcccctggcgctgtg

SEQ ID NO: 1382169 - DNA, 15 bp, Homo sapiens
tgcccctggcgctgt

SEQ ID NO: 1382170 - DNA, 15 bp, Homo sapiens
gtgcccctggcgctg

SEQ ID NO: 1382171 - DNA, 15 bp, Homo sapiens
tgtgcccctggcgct

SEQ ID NO: 1382172 - DNA, 15 bp, Homo sapiens
atgtgcccctggcgc

SEQ ID NO: 1382173 - DNA, 15 bp, Homo sapiens
aatgtgcccctggcg

SEQ ID NO: 1382174 - DNA, 15 bp, Homo sapiens
gaatgtgcccctggc

SEQ ID NO: 1382175 - DNA, 15 bp, Homo sapiens
tgaatgtgcccctgg

SEQ ID NO: 1382176 - DNA, 15 bp, Homo sapiens
gtgaatgtgcccctg

SEQ ID NO: 1382177 - DNA, 15 bp, Homo sapiens
ggtgaatgtgcccct

SEQ ID NO: 1382178 - DNA, 15 bp, Homo sapiens
aggtgaatgtgcccc

SEQ ID NO: 1382179 - DNA, 15 bp, Homo sapiens
gaggtgaatgtgccc

SEQ ID NO: 1382180 - DNA, 15 bp, Homo sapiens
agaggtgaatgtgcc

SEQ ID NO: 1382181 - DNA, 15 bp, Homo sapiens
cagaggtgaatgtgc

SEQ ID NO: 1382182 - DNA, 15 bp, Homo sapiens
gcagaggtgaatgtg

SEQ ID NO: 1382183 - DNA, 15 bp, Homo sapiens
ggcagaggtgaatgt

SEQ ID NO: 1382184 - DNA, 15 bp, Homo sapiens
gggcagaggtgaatg

SEQ ID NO: 1382185 - DNA, 15 bp, Homo sapiens
tgggcagaggtgaat

SEQ ID NO: 1382186 - DNA, 15 bp, Homo sapiens
gtgggcagaggtgaa

SEQ ID NO: 1382187 - DNA, 15 bp, Homo sapiens
cgtgggcagaggtga

SEQ ID NO: 1382188 - DNA, 15 bp, Homo sapiens
gcgtgggcagaggtg

SEQ ID NO: 1382189 - DNA, 15 bp, Homo sapiens
agcgtgggcagaggt

SEQ ID NO: 1382190 - DNA, 15 bp, Homo sapiens
cagcgtgggcagagg

SEQ ID NO: 1382191 - DNA, 15 bp, Homo sapiens
acagcgtgggcagag

SEQ ID NO: 1382192 - DNA, 15 bp, Homo sapiens
tacagcgtgggcaga

SEQ ID NO: 1382193 - DNA, 15 bp, Homo sapiens
ttacagcgtgggcag

SEQ ID NO: 1382194 - DNA, 15 bp, Homo sapiens
gttacagcgtgggca

SEQ ID NO: 1382195 - DNA, 15 bp, Homo sapiens
ggttacagcgtgggc

SEQ ID NO: 1382196 - DNA, 15 bp, Homo sapiens
cggttacagcgtggg

SEQ ID NO: 1382197 - DNA, 15 bp, Homo sapiens
ccggttacagcgtgg

SEQ ID NO: 1382198 - DNA, 15 bp, Homo sapiens
accggttacagcgtg

SEQ ID NO: 1382199 - DNA, 15 bp, Homo sapiens
aaccggttacagcgt

SEQ ID NO: 1382200 - DNA, 15 bp, Homo sapiens
aaaccggttacagcg

SEQ ID NO: 1382201 - DNA, 15 bp, Homo sapiens
caaaccggttacagc

SEQ ID NO: 1382202 - DNA, 15 bp, Homo sapiens
tcaaaccggttacag

SEQ ID NO: 1382203 - DNA, 15 bp, Homo sapiens
atcaaaccggttaca

SEQ ID NO: 1382204 - DNA, 15 bp, Homo sapiens
catcaaaccggttac

SEQ ID NO: 1382205 - DNA, 15 bp, Homo sapiens
ccatcaaaccggtta

SEQ ID NO: 1382206 - DNA, 15 bp, Homo sapiens
tccatcaaaccggtt

SEQ ID NO: 1382207 - DNA, 15 bp, Homo sapiens
atccatcaaaccggt

SEQ ID NO: 1382208 - DNA, 15 bp, Homo sapiens
catccatcaaaccgg

SEQ ID NO: 1382209 - DNA, 15 bp, Homo sapiens
ccatccatcaaaccg

SEQ ID NO: 1382210 - DNA, 15 bp, Homo sapiens
gccatccatcaaacc

SEQ ID NO: 1382211 - DNA, 15 bp, Homo sapiens
agccatccatcaaac

SEQ ID NO: 1382212 - DNA, 15 bp, Homo sapiens
aagccatccatcaaa

SEQ ID NO: 1382213 - DNA, 15 bp, Homo sapiens
aaagccatccatcaa

SEQ ID NO: 1382214 - DNA, 15 bp, Homo sapiens
caaagccatccatca

SEQ ID NO: 1382215 - DNA, 15 bp, Homo sapiens
ccaaagccatccatc

SEQ ID NO: 1382216 - DNA, 15 bp, Homo sapiens
tccaaagccatccat

SEQ ID NO: 1382217 - DNA, 15 bp, Homo sapiens
atccaaagccatcca

SEQ ID NO: 1382218 - DNA, 15 bp, Homo sapiens
catccaaagccatcc

SEQ ID NO: 1382219 - DNA, 15 bp, Homo sapiens
tcatccaaagccatc

SEQ ID NO: 1382220 - DNA, 15 bp, Homo sapiens
gtcatccaaagccat

SEQ ID NO: 1382221 - DNA, 15 bp, Homo sapiens
tgtcatccaaagcca

SEQ ID NO: 1382222 - DNA, 15 bp, Homo sapiens
atgtcatccaaagcc

SEQ ID NO: 1382223 - DNA, 15 bp, Homo sapiens
aatgtcatccaaagc

SEQ ID NO: 1382224 - DNA, 15 bp, Homo sapiens
gaatgtcatccaaag

SEQ ID NO: 1382225 - DNA, 15 bp, Homo sapiens
tgaatgtcatccaaa

SEQ ID NO: 1382226 - DNA, 15 bp, Homo sapiens
ctgaatgtcatccaa

SEQ ID NO: 1382227 - DNA, 15 bp, Homo sapiens
tctgaatgtcatcca

SEQ ID NO: 1382228 - DNA, 15 bp, Homo sapiens
ttctgaatgtcatcc

SEQ ID NO: 1382229 - DNA, 15 bp, Homo sapiens
attctgaatgtcatc

SEQ ID NO: 1382230 - DNA, 15 bp, Homo sapiens
cattctgaatgtcat

SEQ ID NO: 1382231 - DNA, 15 bp, Homo sapiens
ccattctgaatgtca

SEQ ID NO: 1382232 - DNA, 15 bp, Homo sapiens
cccattctgaatgtc

SEQ ID NO: 1382233 - DNA, 15 bp, Homo sapiens
gcccattctgaatgt

SEQ ID NO: 1382234 - DNA, 15 bp, Homo sapiens
tgcccattctgaatg

SEQ ID NO: 1382235 - DNA, 15 bp, Homo sapiens
gtgcccattctgaat

SEQ ID NO: 1382236 - DNA, 15 bp, Homo sapiens
ggtgcccattctgaa

SEQ ID NO: 1382237 - DNA, 15 bp, Homo sapiens
tggtgcccattctga

SEQ ID NO: 1382238 - DNA, 15 bp, Homo sapiens
ctggtgcccattctg

SEQ ID NO: 1382239 - DNA, 15 bp, Homo sapiens
gctggtgcccattct

SEQ ID NO: 1382240 - DNA, 15 bp, Homo sapiens
agctggtgcccattc

SEQ ID NO: 1382241 - DNA, 15 bp, Homo sapiens
aagctggtgcccatt

SEQ ID NO: 1382242 - DNA, 15 bp, Homo sapiens
aaagctggtgcccat

SEQ ID NO: 1382243 - DNA, 15 bp, Homo sapiens
gaaagctggtgccca

SEQ ID NO: 1382244 - DNA, 15 bp, Homo sapiens
tgaaagctggtgccc

SEQ ID NO: 1382245 - DNA, 15 bp, Homo sapiens
ctgaaagctggtgcc

SEQ ID NO: 1382246 - DNA, 15 bp, Homo sapiens
tctgaaagctggtgc

SEQ ID NO: 1382247 - DNA, 15 bp, Homo sapiens
ttctgaaagctggtg

SEQ ID NO: 1382248 - DNA, 15 bp, Homo sapiens
cttctgaaagctggt

SEQ ID NO: 1382249 - DNA, 15 bp, Homo sapiens
ccttctgaaagctgg

SEQ ID NO: 1382250 - DNA, 15 bp, Homo sapiens
tccttctgaaagctg

SEQ ID NO: 1382251 - DNA, 15 bp, Homo sapiens
ctccttctgaaagct

SEQ ID NO: 1382252 - DNA, 15 bp, Homo sapiens
cctccttctgaaagc

SEQ ID NO: 1382253 - DNA, 15 bp, Homo sapiens
ccctccttctgaaag

SEQ ID NO: 1382254 - DNA, 15 bp, Homo sapiens
gccctccttctgaaa

SEQ ID NO: 1382255 - DNA, 15 bp, Homo sapiens
agccctccttctgaa

SEQ ID NO: 1382256 - DNA, 15 bp, Homo sapiens
cagccctccttctga

SEQ ID NO: 1382257 - DNA, 15 bp, Homo sapiens
tcagccctccttctg

SEQ ID NO: 1382258 - DNA, 15 bp, Homo sapiens
atcagccctccttct

SEQ ID NO: 1382259 - DNA, 15 bp, Homo sapiens
tatcagccctccttc

SEQ ID NO: 1382260 - DNA, 15 bp, Homo sapiens
ttatcagccctcctt

SEQ ID NO: 1382261 - DNA, 15 bp, Homo sapiens
tttatcagccctcct

SEQ ID NO: 1382262 - DNA, 15 bp, Homo sapiens
ctttatcagccctcc

SEQ ID NO: 1382263 - DNA, 15 bp, Homo sapiens
gctttatcagccctc

SEQ ID NO: 1382264 - DNA, 15 bp, Homo sapiens
tgctttatcagccct

SEQ ID NO: 1382265 - DNA, 15 bp, Homo sapiens
ctgctttatcagccc

SEQ ID NO: 1382266 - DNA, 15 bp, Homo sapiens
gctgctttatcagcc

SEQ ID NO: 1382267 - DNA, 15 bp, Homo sapiens
ggctgctttatcagc

SEQ ID NO: 1382268 - DNA, 15 bp, Homo sapiens
aggctgctttatcag

SEQ ID NO: 1382269 - DNA, 15 bp, Homo sapiens
gaggctgctttatca

SEQ ID NO: 1382270 - DNA, 15 bp, Homo sapiens
agaggctgctttatc

SEQ ID NO: 1382271 - DNA, 15 bp, Homo sapiens
aagaggctgctttat

SEQ ID NO: 1382272 - DNA, 15 bp, Homo sapiens
aaagaggctgcttta

SEQ ID NO: 1382273 - DNA, 15 bp, Homo sapiens
taaagaggctgcttt

SEQ ID NO: 1382274 - DNA, 15 bp, Homo sapiens
ctaaagaggctgctt

SEQ ID NO: 1382275 - DNA, 15 bp, Homo sapiens
tctaaagaggctgct

SEQ ID NO: 1382276 - DNA, 15 bp, Homo sapiens
ttctaaagaggctgc

SEQ ID NO: 1382277 - DNA, 15 bp, Homo sapiens
tttctaaagaggctg

SEQ ID NO: 1382278 - DNA, 15 bp, Homo sapiens
gtttctaaagaggct

SEQ ID NO: 1382279 - DNA, 15 bp, Homo sapiens
tgtttctaaagaggc

SEQ ID NO: 1382280 - DNA, 15 bp, Homo sapiens
atgtttctaaagagg

SEQ ID NO: 1382281 - DNA, 15 bp, Homo sapiens
tatgtttctaaagag

SEQ ID NO: 1382282 - DNA, 15 bp, Homo sapiens
ctatgtttctaaaga

SEQ ID NO: 1382283 - DNA, 15 bp, Homo sapiens
tctatgtttctaaag

SEQ ID NO: 1382284 - DNA, 15 bp, Homo sapiens
gtctatgtttctaaa

SEQ ID NO: 1382285 - DNA, 15 bp, Homo sapiens
ggtctatgtttctaa

SEQ ID NO: 1382286 - DNA, 15 bp, Homo sapiens
gggtctatgtttcta

SEQ ID NO: 1382287 - DNA, 15 bp, Homo sapiens
ggggtctatgtttct

SEQ ID NO: 1382288 - DNA, 15 bp, Homo sapiens
tggggtctatgtttc

SEQ ID NO: 1382289 - DNA, 15 bp, Homo sapiens
ttggggtctatgttt

SEQ ID NO: 1382290 - DNA, 15 bp, Homo sapiens
tttggggtctatgtt

SEQ ID NO: 1382291 - DNA, 15 bp, Homo sapiens
ctttggggtctatgt

SEQ ID NO: 1382292 - DNA, 15 bp, Homo sapiens
cctttggggtctatg

SEQ ID NO: 1382293 - DNA, 15 bp, Homo sapiens
gcctttggggtctat

SEQ ID NO: 1382294 - DNA, 15 bp, Homo sapiens
agcctttggggtcta

SEQ ID NO: 1382295 - DNA, 15 bp, Homo sapiens
gagcctttggggtct

SEQ ID NO: 1382296 - DNA, 15 bp, Homo sapiens
ggagcctttggggtc

SEQ ID NO: 1382297 - DNA, 15 bp, Homo sapiens
aggagcctttggggt

SEQ ID NO: 1382298 - DNA, 15 bp, Homo sapiens
taggagcctttgggg

SEQ ID NO: 1382299 - DNA, 15 bp, Homo sapiens
ttaggagcctttggg

SEQ ID NO: 1382300 - DNA, 15 bp, Homo sapiens
attaggagcctttgg

SEQ ID NO: 1382301 - DNA, 15 bp, Homo sapiens
cattaggagcctttg

SEQ ID NO: 1382302 - DNA, 15 bp, Homo sapiens
ccattaggagccttt

SEQ ID NO: 1382303 - DNA, 15 bp, Homo sapiens
cccattaggagcctt

SEQ ID NO: 1382304 - DNA, 15 bp, Homo sapiens
gcccattaggagcct

SEQ ID NO: 1382305 - DNA, 15 bp, Homo sapiens
tgcccattaggagcc

SEQ ID NO: 1382306 - DNA, 15 bp, Homo sapiens
atgcccattaggagc

SEQ ID NO: 1382307 - DNA, 15 bp, Homo sapiens
tatgcccattaggag

SEQ ID NO: 1382308 - DNA, 15 bp, Homo sapiens
gtatgcccattagga

SEQ ID NO: 1382309 - DNA, 15 bp, Homo sapiens
tgtatgcccattagg

SEQ ID NO: 1382310 - DNA, 15 bp, Homo sapiens
gtgtatgcccattag

SEQ ID NO: 1382311 - DNA, 15 bp, Homo sapiens
tgtgtatgcccatta

SEQ ID NO: 1382312 - DNA, 15 bp, Homo sapiens
ctgtgtatgcccatt

SEQ ID NO: 1382313 - DNA, 15 bp, Homo sapiens
cctgtgtatgcccat

SEQ ID NO: 1382314 - DNA, 15 bp, Homo sapiens
acctgtgtatgccca

SEQ ID NO: 1382315 - DNA, 15 bp, Homo sapiens
cacctgtgtatgccc

SEQ ID NO: 1382316 - DNA, 15 bp, Homo sapiens
gcacctgtgtatgcc

SEQ ID NO: 1382317 - DNA, 15 bp, Homo sapiens
ggcacctgtgtatgc

SEQ ID NO: 1382318 - DNA, 15 bp, Homo sapiens
gggcacctgtgtatg

SEQ ID NO: 1382319 - DNA, 15 bp, Homo sapiens
tgggcacctgtgtat

SEQ ID NO: 1382320 - DNA, 15 bp, Homo sapiens
gtgggcacctgtgta

SEQ ID NO: 1382321 - DNA, 15 bp, Homo sapiens
ggtgggcacctgtgt

SEQ ID NO: 1382322 - DNA, 15 bp, Homo sapiens
tgtggtgggcacctg

SEQ ID NO: 1382323 - DNA, 15 bp, Homo sapiens
atgtggtgggcacct

SEQ ID NO: 1382324 - DNA, 15 bp, Homo sapiens
tatgtggtgggcacc

SEQ ID NO: 1382325 - DNA, 15 bp, Homo sapiens
ctatgtggtgggcac

SEQ ID NO: 1382326 - DNA, 15 bp, Homo sapiens
tctatgtggtgggca

SEQ ID NO: 1382327 - DNA, 15 bp, Homo sapiens
ctctatgtggtgggc

SEQ ID NO: 1382328 - DNA, 15 bp, Homo sapiens
actctatgtggtggg

SEQ ID NO: 1382329 - DNA, 15 bp, Homo sapiens
aactctatgtggtgg

SEQ ID NO: 1382330 - DNA, 15 bp, Homo sapiens
taactctatgtggtg

SEQ ID NO: 1382331 - DNA, 15 bp, Homo sapiens
ataactctatgtggt

SEQ ID NO: 1382332 - DNA, 15 bp, Homo sapiens
tataactctatgtgg

SEQ ID NO: 1382333 - DNA, 15 bp, Homo sapiens
ctataactctatgtg

SEQ ID NO: 1382334 - DNA, 15 bp, Homo sapiens
tctataactctatgt

SEQ ID NO: 1382335 - DNA, 15 bp, Homo sapiens
ttctataactctatg

SEQ ID NO: 1382336 - DNA, 15 bp, Homo sapiens
tttctataactctat

SEQ ID NO: 1382337 - DNA, 15 bp, Homo sapiens
ttttctataactcta

SEQ ID NO: 1382338 - DNA, 15 bp, Homo sapiens
attttctataactct

SEQ ID NO: 1382339 - DNA, 15 bp, Homo sapiens
tattttctataactc

SEQ ID NO: 1382340 - DNA, 15 bp, Homo sapiens
ttattttctataact

SEQ ID NO: 1382341 - DNA, 15 bp, Homo sapiens
cttattttctataac

SEQ ID NO: 1382342 - DNA, 15 bp, Homo sapiens
acttattttctataa

SEQ ID NO: 1382343 - DNA, 15 bp, Homo sapiens
aacttattttctata

SEQ ID NO: 1382344 - DNA, 15 bp, Homo sapiens
caacttattttctat

SEQ ID NO: 1382345 - DNA, 15 bp, Homo sapiens
tcaacttattttcta

SEQ ID NO: 1382346 - DNA, 15 bp, Homo sapiens
ttcaacttattttct

SEQ ID NO: 1382347 - DNA, 15 bp, Homo sapiens
tttcaacttattttc

SEQ ID NO: 1382348 - DNA, 15 bp, Homo sapiens
ttttcaacttatttt

SEQ ID NO: 1382349 - DNA, 15 bp, Homo sapiens
cttttcaacttattt

SEQ ID NO: 1382350 - DNA, 15 bp, Homo sapiens
acttttcaacttatt

SEQ ID NO: 1382351 - DNA, 15 bp, Homo sapiens
gacttttcaacttat

SEQ ID NO: 1382352 - DNA, 15 bp, Homo sapiens
agacttttcaactta

SEQ ID NO: 1382353 - DNA, 15 bp, Homo sapiens
cagacttttcaactt

SEQ ID NO: 1382354 - DNA, 15 bp, Homo sapiens
tcagacttttcaact

SEQ ID NO: 1382355 - DNA, 15 bp, Homo sapiens
ctcagacttttcaac

SEQ ID NO: 1382356 - DNA, 15 bp, Homo sapiens
actcagacttttcaa

SEQ ID NO: 1382357 - DNA, 15 bp, Homo sapiens
cactcagacttttca

SEQ ID NO: 1382358 - DNA, 15 bp, Homo sapiens
tcactcagacttttc

SEQ ID NO: 1382359 - DNA, 15 bp, Homo sapiens
ctcactcagactttt

SEQ ID NO: 1382360 - DNA, 15 bp, Homo sapiens
tctcactcagacttt

SEQ ID NO: 1382361 - DNA, 15 bp, Homo sapiens
ttctcactcagactt

SEQ ID NO: 1382362 - DNA, 15 bp, Homo sapiens
gttctcactcagact

SEQ ID NO: 1382363 - DNA, 15 bp, Homo sapiens
agttctcactcagac

SEQ ID NO: 1382364 - DNA, 15 bp, Homo sapiens
cagttctcactcaga

SEQ ID NO: 1382365 - DNA, 15 bp, Homo sapiens
tcagttctcactcag

SEQ ID NO: 1382366 - DNA, 15 bp, Homo sapiens
atcagttctcactca

SEQ ID NO: 1382367 - DNA, 15 bp, Homo sapiens
tatcagttctcactc

SEQ ID NO: 1382368 - DNA, 15 bp, Homo sapiens
gtatcagttctcact

SEQ ID NO: 1382369 - DNA, 15 bp, Homo sapiens
agtatcagttctcac

SEQ ID NO: 1382370 - DNA, 15 bp, Homo sapiens
tagtatcagttctca

SEQ ID NO: 1382371 - DNA, 15 bp, Homo sapiens
ttagtatcagttctc

SEQ ID NO: 1382372 - DNA, 15 bp, Homo sapiens
attagtatcagttct

SEQ ID NO: 1382373 - DNA, 15 bp, Homo sapiens
cattagtatcagttc

SEQ ID NO: 1382374 - DNA, 15 bp, Homo sapiens
tcattagtatcagtt

SEQ ID NO: 1382375 - DNA, 15 bp, Homo sapiens
ttcattagtatcagt

SEQ ID NO: 1382376 - DNA, 15 bp, Homo sapiens
tttcattagtatcag

SEQ ID NO: 1382377 - DNA, 15 bp, Homo sapiens
atttcattagtatca

SEQ ID NO: 1382378 - DNA, 15 bp, Homo sapiens
tatttcattagtatc

SEQ ID NO: 1382379 - DNA, 15 bp, Homo sapiens
atatttcattagtat

SEQ ID NO: 1382380 - DNA, 15 bp, Homo sapiens
catatttcattagta

SEQ ID NO: 1382381 - DNA, 15 bp, Homo sapiens
acatatttcattagt

SEQ ID NO: 1382382 - DNA, 15 bp, Homo sapiens
aacatatttcattag

SEQ ID NO: 1382383 - DNA, 15 bp, Homo sapiens
aaacatatttcatta

SEQ ID NO: 1382384 - DNA, 15 bp, Homo sapiens
taaacatatttcatt

SEQ ID NO: 1382385 - DNA, 15 bp, Homo sapiens
ttaaacatatttcat

SEQ ID NO: 1382386 - DNA, 15 bp, Homo sapiens
tttaaacatatttca

SEQ ID NO: 1382387 - DNA, 15 bp, Homo sapiens
ctttaaacatatttc

SEQ ID NO: 1382388 - DNA, 15 bp, Homo sapiens
gctttaaacatattt

SEQ ID NO: 1382389 - DNA, 15 bp, Homo sapiens
agctttaaacatatt

SEQ ID NO: 1382390 - DNA, 15 bp, Homo sapiens
tagctttaaacatat

SEQ ID NO: 1382391 - DNA, 15 bp, Homo sapiens
ttagctttaaacata

SEQ ID NO: 1382392 - DNA, 15 bp, Homo sapiens
gttagctttaaacat

SEQ ID NO: 1382393 - DNA, 15 bp, Homo sapiens
tgttagctttaaaca

SEQ ID NO: 1382394 - DNA, 15 bp, Homo sapiens
ttgttagctttaaac

SEQ ID NO: 1382395 - DNA, 15 bp, Homo sapiens
tttgttagctttaaa

SEQ ID NO: 1382396 - DNA, 15 bp, Homo sapiens
ttttgttagctttaa

SEQ ID NO: 1382397 - DNA, 15 bp, Homo sapiens
tttttgttagcttta

SEQ ID NO: 1382398 - DNA, 15 bp, Homo sapiens
ttttttgttagcttt

SEQ ID NO: 1382399 - DNA, 15 bp, Homo sapiens
attttttgttagctt

SEQ ID NO: 1382400 - DNA, 15 bp, Homo sapiens
cattttttgttagct

SEQ ID NO: 1382401 - DNA, 15 bp, Homo sapiens
acattttttgttagc

SEQ ID NO: 1382402 - DNA, 15 bp, Homo sapiens
aacattttttgttag

SEQ ID NO: 1382403 - DNA, 15 bp, Homo sapiens
aaacattttttgtta

SEQ ID NO: 1382404 - DNA, 15 bp, Homo sapiens
taaacattttttgtt

SEQ ID NO: 1382405 - DNA, 15 bp, Homo sapiens
ttaaacattttttgt

SEQ ID NO: 1382406 - DNA, 15 bp, Homo sapiens
attaaacattttttg

SEQ ID NO: 1382407 - DNA, 15 bp, Homo sapiens
cattaaacatttttt

SEQ ID NO: 1382408 - DNA, 15 bp, Homo sapiens
acattaaacattttt

SEQ ID NO: 1382409 - DNA, 15 bp, Homo sapiens
aacattaaacatttt

SEQ ID NO: 1382410 - DNA, 15 bp, Homo sapiens
aaacattaaacattt

SEQ ID NO: 1382411 - DNA, 15 bp, Homo sapiens
aaaacattaaacatt

SEQ ID NO: 1382412 - DNA, 15 bp, Homo sapiens
taaaacattaaacat

SEQ ID NO: 1382413 - DNA, 15 bp, Homo sapiens
ttaaaacattaaaca

SEQ ID NO: 1382414 - DNA, 15 bp, Homo sapiens
tttaaaacattaaac

SEQ ID NO: 1382415 - DNA, 15 bp, Homo sapiens
atttaaaacattaaa

SEQ ID NO: 1382416 - DNA, 15 bp, Homo sapiens
aatttaaaacattaa

SEQ ID NO: 1382417 - DNA, 15 bp, Homo sapiens
taatttaaaacatta

SEQ ID NO: 1382418 - DNA, 15 bp, Homo sapiens
ttaatttaaaacatt

SEQ ID NO: 1382419 - DNA, 15 bp, Homo sapiens
attaatttaaaacat

SEQ ID NO: 1382420 - DNA, 15 bp, Homo sapiens
aattaatttaaaaca

SEQ ID NO: 1382421 - DNA, 15 bp, Homo sapiens
aaattaatttaaaac

SEQ ID NO: 1382422 - DNA, 15 bp, Homo sapiens
taaattaatttaaaa

SEQ ID NO: 1382423 - DNA, 15 bp, Homo sapiens
ttaaattaatttaaa

SEQ ID NO: 1382424 - DNA, 15 bp, Homo sapiens
cttaaattaatttaa

SEQ ID NO: 1382425 - DNA, 15 bp, Homo sapiens
acttaaattaattta

SEQ ID NO: 1382426 - DNA, 15 bp, Homo sapiens
tacttaaattaattt

SEQ ID NO: 1382427 - DNA, 15 bp, Homo sapiens
gtacttaaattaatt

SEQ ID NO: 1382428 - DNA, 15 bp, Homo sapiens
agtacttaaattaat

SEQ ID NO: 1382429 - DNA, 15 bp, Homo sapiens
cagtacttaaattaa

SEQ ID NO: 1382430 - DNA, 15 bp, Homo sapiens
ccagtacttaaatta

SEQ ID NO: 1382431 - DNA, 15 bp, Homo sapiens
accagtacttaaatt

SEQ ID NO: 1382432 - DNA, 15 bp, Homo sapiens
caccagtacttaaat

SEQ ID NO: 1382433 - DNA, 15 bp, Homo sapiens
gcaccagtacttaaa

SEQ ID NO: 1382434 - DNA, 15 bp, Homo sapiens
ggcaccagtacttaa

SEQ ID NO: 1382435 - DNA, 15 bp, Homo sapiens
tggcaccagtactta

SEQ ID NO: 1382436 - DNA, 15 bp, Homo sapiens
ttggcaccagtactt

SEQ ID NO: 1382437 - DNA, 15 bp, Homo sapiens
tttggcaccagtact

SEQ ID NO: 1382438 - DNA, 15 bp, Homo sapiens
ttttggcaccagtac

SEQ ID NO: 1382439 - DNA, 15 bp, Homo sapiens
gttttggcaccagta

SEQ ID NO: 1382440 - DNA, 15 bp, Homo sapiens
tgttttggcaccagt

SEQ ID NO: 1382441 - DNA, 15 bp, Homo sapiens
ttgttttggcaccag

SEQ ID NO: 1382442 - DNA, 15 bp, Homo sapiens
attgttttggcacca

SEQ ID NO: 1382443 - DNA, 15 bp, Homo sapiens
cattgttttggcacc

SEQ ID NO: 1382444 - DNA, 15 bp, Homo sapiens
tcattgttttggcac

SEQ ID NO: 1382445 - DNA, 15 bp, Homo sapiens
gtcattgttttggca

SEQ ID NO: 1382446 - DNA, 15 bp, Homo sapiens
tgtcattgttttggc

SEQ ID NO: 1382447 - DNA, 15 bp, Homo sapiens
atgtcattgttttgg

SEQ ID NO: 1382448 - DNA, 15 bp, Homo sapiens
tatgtcattgttttg

SEQ ID NO: 1382449 - DNA, 15 bp, Homo sapiens
atatgtcattgtttt

SEQ ID NO: 1382450 - DNA, 15 bp, Homo sapiens
catatgtcattgttt

SEQ ID NO: 1382451 - DNA, 15 bp, Homo sapiens
tcatatgtcattgtt

SEQ ID NO: 1382452 - DNA, 15 bp, Homo sapiens
atcatatgtcattgt

SEQ ID NO: 1382453 - DNA, 15 bp, Homo sapiens
catcatatgtcattg

SEQ ID NO: 1382454 - DNA, 15 bp, Homo sapiens
gcatcatatgtcatt

SEQ ID NO: 1382455 - DNA, 15 bp, Homo sapiens
cgcatcatatgtcat

SEQ ID NO: 1382456 - DNA, 15 bp, Homo sapiens
acgcatcatatgtca

SEQ ID NO: 1382457 - DNA, 15 bp, Homo sapiens
cacgcatcatatgtc

SEQ ID NO: 1382458 - DNA, 15 bp, Homo sapiens
tcacgcatcatatgt

SEQ ID NO: 1382459 - DNA, 15 bp, Homo sapiens
ttcacgcatcatatg

SEQ ID NO: 1382460 - DNA, 15 bp, Homo sapiens
tttcacgcatcatat

SEQ ID NO: 1382461 - DNA, 15 bp, Homo sapiens
atttcacgcatcata

SEQ ID NO: 1382462 - DNA, 15 bp, Homo sapiens
catttcacgcatcat

SEQ ID NO: 1382463 - DNA, 15 bp, Homo sapiens
acatttcacgcatca

SEQ ID NO: 1382464 - DNA, 15 bp, Homo sapiens
gacatttcacgcatc

SEQ ID NO: 1382465 - DNA, 15 bp, Homo sapiens
ggacatttcacgcat

SEQ ID NO: 1382466 - DNA, 15 bp, Homo sapiens
gggacatttcacgca

SEQ ID NO: 1382467 - DNA, 15 bp, Homo sapiens
agggacatttcacgc

SEQ ID NO: 1382468 - DNA, 15 bp, Homo sapiens
cagggacatttcacg

SEQ ID NO: 1382469 - DNA, 15 bp, Homo sapiens
ccagggacatttcac

SEQ ID NO: 1382470 - DNA, 15 bp, Homo sapiens
accagggacatttca

SEQ ID NO: 1382471 - DNA, 15 bp, Homo sapiens
gaccagggacatttc

SEQ ID NO: 1382472 - DNA, 15 bp, Homo sapiens
tgaccagggacattt

SEQ ID NO: 1382473 - DNA, 15 bp, Homo sapiens
ctgaccagggacatt

SEQ ID NO: 1382474 - DNA, 15 bp, Homo sapiens
cctgaccagggacat

SEQ ID NO: 1382475 - DNA, 15 bp, Homo sapiens
acctgaccagggaca

SEQ ID NO: 1382476 - DNA, 15 bp, Homo sapiens
tacctgaccagggac

SEQ ID NO: 1382477 - DNA, 15 bp, Homo sapiens
ttacctgaccaggga

SEQ ID NO: 1382478 - DNA, 15 bp, Homo sapiens
attacctgaccaggg

SEQ ID NO: 1382479 - DNA, 15 bp, Homo sapiens
aattacctgaccagg

SEQ ID NO: 1382480 - DNA, 15 bp, Homo sapiens
taattacctgaccag

SEQ ID NO: 1382481 - DNA, 15 bp, Homo sapiens
ataattacctgacca

SEQ ID NO: 1382482 - DNA, 15 bp, Homo sapiens
tataattacctgacc

SEQ ID NO: 1382483 - DNA, 15 bp, Homo sapiens
gtataattacctgac

SEQ ID NO: 1382484 - DNA, 15 bp, Homo sapiens
tgtataattacctga

SEQ ID NO: 1382485 - DNA, 15 bp, Homo sapiens
ttgtataattacctg

SEQ ID NO: 1382486 - DNA, 15 bp, Homo sapiens
cttgtataattacct

SEQ ID NO: 1382487 - DNA, 15 bp, Homo sapiens
tcttgtataattacc

SEQ ID NO: 1382488 - DNA, 15 bp, Homo sapiens
ttcttgtataattac

SEQ ID NO: 1382489 - DNA, 15 bp, Homo sapiens
cttcttgtataatta

SEQ ID NO: 1382490 - DNA, 15 bp, Homo sapiens
acttcttgtataatt

SEQ ID NO: 1382491 - DNA, 15 bp, Homo sapiens
gacttcttgtataat

SEQ ID NO: 1382492 - DNA, 15 bp, Homo sapiens
agacttcttgtataa

SEQ ID NO: 1382493 - DNA, 15 bp, Homo sapiens
tagacttcttgtata

SEQ ID NO: 1382494 - DNA, 15 bp, Homo sapiens
atagacttcttgtat

SEQ ID NO: 1382495 - DNA, 15 bp, Homo sapiens
catagacttcttgta

SEQ ID NO: 1382496 - DNA, 15 bp, Homo sapiens
ccatagacttcttgt

SEQ ID NO: 1382497 - DNA, 15 bp, Homo sapiens
tccatagacttcttg

SEQ ID NO: 1382498 - DNA, 15 bp, Homo sapiens
atccatagacttctt

SEQ ID NO: 1382499 - DNA, 15 bp, Homo sapiens
catccatagacttct

SEQ ID NO: 1382500 - DNA, 15 bp, Homo sapiens
tcatccatagacttc

SEQ ID NO: 1382501 - DNA, 15 bp, Homo sapiens
ttcatccatagactt

SEQ ID NO: 1382502 - DNA, 15 bp, Homo sapiens
tttcatccatagact

SEQ ID NO: 1382503 - DNA, 15 bp, Homo sapiens
ctttcatccatagac

SEQ ID NO: 1382504 - DNA, 15 bp, Homo sapiens
tctttcatccataga

SEQ ID NO: 1382505 - DNA, 15 bp, Homo sapiens
gtctttcatccatag

SEQ ID NO: 1382506 - DNA, 15 bp, Homo sapiens
agtctttcatccata

SEQ ID NO: 1382507 - DNA, 15 bp, Homo sapiens
cagtctttcatccat

SEQ ID NO: 1382508 - DNA, 15 bp, Homo sapiens
acagtctttcatcca

SEQ ID NO: 1382509 - DNA, 15 bp, Homo sapiens
gacagtctttcatcc

SEQ ID NO: 1382510 - DNA, 15 bp, Homo sapiens
agacagtctttcatc

SEQ ID NO: 1382511 - DNA, 15 bp, Homo sapiens
tagacagtctttcat

SEQ ID NO: 1382512 - DNA, 15 bp, Homo sapiens
ttagacagtctttca

SEQ ID NO: 1382513 - DNA, 15 bp, Homo sapiens
gttagacagtctttc

SEQ ID NO: 1382514 - DNA, 15 bp, Homo sapiens
ggttagacagtcttt

SEQ ID NO: 1382515 - DNA, 15 bp, Homo sapiens
tggttagacagtctt

SEQ ID NO: 1382516 - DNA, 15 bp, Homo sapiens
ttggttagacagtct

SEQ ID NO: 1382517 - DNA, 15 bp, Homo sapiens
attggttagacagtc

SEQ ID NO: 1382518 - DNA, 15 bp, Homo sapiens
aattggttagacagt

SEQ ID NO: 1382519 - DNA, 15 bp, Homo sapiens
aaattggttagacag

SEQ ID NO: 1382520 - DNA, 15 bp, Homo sapiens
aaaattggttagaca

SEQ ID NO: 1382521 - DNA, 15 bp, Homo sapiens
taaaattggttagac

SEQ ID NO: 1382522 - DNA, 15 bp, Homo sapiens
ataaaattggttaga

SEQ ID NO: 1382523 - DNA, 15 bp, Homo sapiens
gataaaattggttag

SEQ ID NO: 1382524 - DNA, 15 bp, Homo sapiens
tgataaaattggtta

SEQ ID NO: 1382525 - DNA, 15 bp, Homo sapiens
ttgataaaattggtt

SEQ ID NO: 1382526 - DNA, 15 bp, Homo sapiens
tttgataaaattggt

SEQ ID NO: 1382527 - DNA, 15 bp, Homo sapiens
ttttgataaaattgg

SEQ ID NO: 1382528 - DNA, 15 bp, Homo sapiens
tttttgataaaattg

SEQ ID NO: 1382529 - DNA, 15 bp, Homo sapiens
ttttttgataaaatt

SEQ ID NO: 1382530 - DNA, 15 bp, Homo sapiens
gttttttgataaaat

SEQ ID NO: 1382531 - DNA, 15 bp, Homo sapiens
tgttttttgataaaa

SEQ ID NO: 1382532 - DNA, 15 bp, Homo sapiens
ctgttttttgataaa

SEQ ID NO: 1382533 - DNA, 15 bp, Homo sapiens
gctgttttttgataa

SEQ ID NO: 1382534 - DNA, 15 bp, Homo sapiens
tgctgttttttgata

SEQ ID NO: 1382535 - DNA, 15 bp, Homo sapiens
ttgctgttttttgat

SEQ ID NO: 1382536 - DNA, 15 bp, Homo sapiens
tttgctgttttttga

SEQ ID NO: 1382537 - DNA, 15 bp, Homo sapiens
ttttgctgttttttg

SEQ ID NO: 1382538 - DNA, 15 bp, Homo sapiens
cttttgctgtttttt

SEQ ID NO: 1382539 - DNA, 15 bp, Homo sapiens
acttttgctgttttt

SEQ ID NO: 1382540 - DNA, 15 bp, Homo sapiens
aacttttgctgtttt

SEQ ID NO: 1382541 - DNA, 15 bp, Homo sapiens
caacttttgctgttt

SEQ ID NO: 1382542 - DNA, 15 bp, Homo sapiens
tcaacttttgctgtt

SEQ ID NO: 1382543 - DNA, 15 bp, Homo sapiens
ttcaacttttgctgt

SEQ ID NO: 1382544 - DNA, 15 bp, Homo sapiens
cttcaacttttgctg

SEQ ID NO: 1382545 - DNA, 15 bp, Homo sapiens
acttcaacttttgct

SEQ ID NO: 1382546 - DNA, 15 bp, Homo sapiens
tacttcaacttttgc

SEQ ID NO: 1382547 - DNA, 15 bp, Homo sapiens
ttacttcaacttttg

SEQ ID NO: 1382548 - DNA, 15 bp, Homo sapiens
cttacttcaactttt

SEQ ID NO: 1382549 - DNA, 15 bp, Homo sapiens
tcttacttcaacttt

SEQ ID NO: 1382550 - DNA, 15 bp, Homo sapiens
gtcttacttcaactt

SEQ ID NO: 1382551 - DNA, 15 bp, Homo sapiens
agtcttacttcaact

SEQ ID NO: 1382552 - DNA, 15 bp, Homo sapiens
tagtcttacttcaac

SEQ ID NO: 1382553 - DNA, 15 bp, Homo sapiens
ctagtcttacttcaa

SEQ ID NO: 1382554 - DNA, 15 bp, Homo sapiens
gctagtcttacttca

SEQ ID NO: 1382555 - DNA, 15 bp, Homo sapiens
tgctagtcttacttc

SEQ ID NO: 1382556 - DNA, 15 bp, Homo sapiens
gtgctagtcttactt

SEQ ID NO: 1382557 - DNA, 15 bp, Homo sapiens
ggtgctagtcttact

SEQ ID NO: 1382558 - DNA, 15 bp, Homo sapiens
aggtgctagtcttac

SEQ ID NO: 1382559 - DNA, 15 bp, Homo sapiens
taggtgctagtctta

SEQ ID NO: 1382560 - DNA, 15 bp, Homo sapiens
ttaggtgctagtctt

SEQ ID NO: 1382561 - DNA, 15 bp, Homo sapiens
attaggtgctagtct

SEQ ID NO: 1382562 - DNA, 15 bp, Homo sapiens
aattaggtgctagtc

SEQ ID NO: 1382563 - DNA, 15 bp, Homo sapiens
aaattaggtgctagt

SEQ ID NO: 1382564 - DNA, 15 bp, Homo sapiens
aaaattaggtgctag

SEQ ID NO: 1382565 - DNA, 15 bp, Homo sapiens
aaaaattaggtgcta

SEQ ID NO: 1382566 - DNA, 15 bp, Homo sapiens
aaaaaattaggtgct

SEQ ID NO: 1382567 - DNA, 15 bp, Homo sapiens
gaaaaaattaggtgc

SEQ ID NO: 1382568 - DNA, 15 bp, Homo sapiens
ggaaaaaattaggtg

SEQ ID NO: 1382569 - DNA, 15 bp, Homo sapiens
gggaaaaaattaggt

SEQ ID NO: 1382570 - DNA, 15 bp, Homo sapiens
agggaaaaaattagg

SEQ ID NO: 1382571 - DNA, 15 bp, Homo sapiens
gagggaaaaaattag

SEQ ID NO: 1382572 - DNA, 15 bp, Homo sapiens
ggagggaaaaaatta

SEQ ID NO: 1382573 - DNA, 15 bp, Homo sapiens
aggagggaaaaaatt

SEQ ID NO: 1382574 - DNA, 15 bp, Homo sapiens
caggagggaaaaaat

SEQ ID NO: 1382575 - DNA, 15 bp, Homo sapiens
tcaggagggaaaaaa

SEQ ID NO: 1382576 - DNA, 15 bp, Homo sapiens
ttcaggagggaaaaa

SEQ ID NO: 1382577 - DNA, 15 bp, Homo sapiens
gttcaggagggaaaa

SEQ ID NO: 1382578 - DNA, 15 bp, Homo sapiens
agttcaggagggaaa

SEQ ID NO: 1382579 - DNA, 15 bp, Homo sapiens
gagttcaggagggaa

SEQ ID NO: 1382580 - DNA, 15 bp, Homo sapiens
agagttcaggaggga

SEQ ID NO: 1382581 - DNA, 15 bp, Homo sapiens
cagagttcaggaggg

SEQ ID NO: 1382582 - DNA, 15 bp, Homo sapiens
acagagttcaggagg

SEQ ID NO: 1382583 - DNA, 15 bp, Homo sapiens
aacagagttcaggag

SEQ ID NO: 1382584 - DNA, 15 bp, Homo sapiens
taacagagttcagga

SEQ ID NO: 1382585 - DNA, 15 bp, Homo sapiens
gtaacagagttcagg

SEQ ID NO: 1382586 - DNA, 15 bp, Homo sapiens
agtaacagagttcag

SEQ ID NO: 1382587 - DNA, 15 bp, Homo sapiens
tagtaacagagttca

SEQ ID NO: 1382588 - DNA, 15 bp, Homo sapiens
ttagtaacagagttc

SEQ ID NO: 1382589 - DNA, 15 bp, Homo sapiens
tttagtaacagagtt

SEQ ID NO: 1382590 - DNA, 15 bp, Homo sapiens
gtttagtaacagagt

SEQ ID NO: 1382591 - DNA, 15 bp, Homo sapiens
agtttagtaacagag

SEQ ID NO: 1382592 - DNA, 15 bp, Homo sapiens
aagtttagtaacaga

SEQ ID NO: 1382593 - DNA, 15 bp, Homo sapiens
aaagtttagtaacag

SEQ ID NO: 1382594 - DNA, 15 bp, Homo sapiens
caaagtttagtaaca

SEQ ID NO: 1382595 - DNA, 15 bp, Homo sapiens
acaaagtttagtaac

SEQ ID NO: 1382596 - DNA, 15 bp, Homo sapiens
aacaaagtttagtaa

SEQ ID NO: 1382597 - DNA, 15 bp, Homo sapiens
taacaaagtttagta

SEQ ID NO: 1382598 - DNA, 15 bp, Homo sapiens
gtaacaaagtttagt

SEQ ID NO: 1382599 - DNA, 15 bp, Homo sapiens
tgtaacaaagtttag

SEQ ID NO: 1382600 - DNA, 15 bp, Homo sapiens
ttgtaacaaagttta

SEQ ID NO: 1382601 - DNA, 15 bp, Homo sapiens
attgtaacaaagttt

SEQ ID NO: 1382602 - DNA, 15 bp, Homo sapiens
tattgtaacaaagtt

SEQ ID NO: 1382603 - DNA, 15 bp, Homo sapiens
ctattgtaacaaagt

SEQ ID NO: 1382604 - DNA, 15 bp, Homo sapiens
gctattgtaacaaag

SEQ ID NO: 1382605 - DNA, 15 bp, Homo sapiens
tgctattgtaacaaa

SEQ ID NO: 1382606 - DNA, 15 bp, Homo sapiens
atgctattgtaacaa

SEQ ID NO: 1382607 - DNA, 15 bp, Homo sapiens
aatgctattgtaaca

SEQ ID NO: 1382608 - DNA, 15 bp, Homo sapiens
taatgctattgtaac

SEQ ID NO: 1382609 - DNA, 15 bp, Homo sapiens
ataatgctattgtaa

SEQ ID NO: 1382610 - DNA, 15 bp, Homo sapiens
cataatgctattgta

SEQ ID NO: 1382611 - DNA, 15 bp, Homo sapiens
ccataatgctattgt

SEQ ID NO: 1382612 - DNA, 15 bp, Homo sapiens
cccataatgctattg

SEQ ID NO: 1382613 - DNA, 15 bp, Homo sapiens
gcccataatgctatt

SEQ ID NO: 1382614 - DNA, 15 bp, Homo sapiens
ggcccataatgctat

SEQ ID NO: 1382615 - DNA, 15 bp, Homo sapiens
tggcccataatgcta

SEQ ID NO: 1382616 - DNA, 15 bp, Homo sapiens
ctggcccataatgct

SEQ ID NO: 1382617 - DNA, 15 bp, Homo sapiens
tctggcccataatgc

SEQ ID NO: 1382618 - DNA, 15 bp, Homo sapiens
gtctggcccataatg

SEQ ID NO: 1382619 - DNA, 15 bp, Homo sapiens
tgtctggcccataat

SEQ ID NO: 1382620 - DNA, 15 bp, Homo sapiens
gtgtctggcccataa

SEQ ID NO: 1382621 - DNA, 15 bp, Homo sapiens
tgtgtctggcccata

SEQ ID NO: 1382622 - DNA, 15 bp, Homo sapiens
ctgtgtctggcccat

SEQ ID NO: 1382623 - DNA, 15 bp, Homo sapiens
gctgtgtctggccca

SEQ ID NO: 1382624 - DNA, 15 bp, Homo sapiens
cgctgtgtctggccc

SEQ ID NO: 1382625 - DNA, 15 bp, Homo sapiens
ccgctgtgtctggcc

SEQ ID NO: 1382626 - DNA, 15 bp, Homo sapiens
gccgctgtgtctggc

SEQ ID NO: 1382627 - DNA, 15 bp, Homo sapiens
agccgctgtgtctgg

SEQ ID NO: 1382628 - DNA, 15 bp, Homo sapiens
gagccgctgtgtctg

SEQ ID NO: 1382629 - DNA, 15 bp, Homo sapiens
tgagccgctgtgtct

SEQ ID NO: 1382630 - DNA, 15 bp, Homo sapiens
atgagccgctgtgtc

SEQ ID NO: 1382631 - DNA, 15 bp, Homo sapiens
catgagccgctgtgt

SEQ ID NO: 1382632 - DNA, 15 bp, Homo sapiens
gcatgagccgctgtg

SEQ ID NO: 1382633 - DNA, 15 bp, Homo sapiens
ggcatgagccgctgt

SEQ ID NO: 1382634 - DNA, 15 bp, Homo sapiens
aggcatgagccgctg

SEQ ID NO: 1382635 - DNA, 15 bp, Homo sapiens
caggcatgagccgct

SEQ ID NO: 1382636 - DNA, 15 bp, Homo sapiens
acaggcatgagccgc

SEQ ID NO: 1382637 - DNA, 15 bp, Homo sapiens
tacaggcatgagccg

SEQ ID NO: 1382638 - DNA, 15 bp, Homo sapiens
tgttgggattacagg

SEQ ID NO: 1382639 - DNA, 15 bp, Homo sapiens
gtgttgggattacag

SEQ ID NO: 1382640 - DNA, 15 bp, Homo sapiens
ctcccaaagtgttgg

SEQ ID NO: 1382641 - DNA, 15 bp, Homo sapiens
cctcccaaagtgttg

SEQ ID NO: 1382642 - DNA, 15 bp, Homo sapiens
gcctcccaaagtgtt

SEQ ID NO: 1382643 - DNA, 15 bp, Homo sapiens
agcctcccaaagtgt

SEQ ID NO: 1382644 - DNA, 15 bp, Homo sapiens
agtgatctgcctgcc

SEQ ID NO: 1382645 - DNA, 15 bp, Homo sapiens
aagtgatctgcctgc

SEQ ID NO: 1382646 - DNA, 15 bp, Homo sapiens
caagtgatctgcctg

SEQ ID NO: 1382647 - DNA, 15 bp, Homo sapiens
tcaagtgatctgcct

SEQ ID NO: 1382648 - DNA, 15 bp, Homo sapiens
ccctcaagtgatctg

SEQ ID NO: 1382649 - DNA, 15 bp, Homo sapiens
gccctcaagtgatct

SEQ ID NO: 1382650 - DNA, 15 bp, Homo sapiens
tgccctcaagtgatc

SEQ ID NO: 1382651 - DNA, 15 bp, Homo sapiens
ctgccctcaagtgat

SEQ ID NO: 1382652 - DNA, 15 bp, Homo sapiens
cctgccctcaagtga

SEQ ID NO: 1382653 - DNA, 15 bp, Homo sapiens
tcctgccctcaagtg

SEQ ID NO: 1382654 - DNA, 15 bp, Homo sapiens
ctcctgccctcaagt

SEQ ID NO: 1382655 - DNA, 15 bp, Homo sapiens
actcctgccctcaag

SEQ ID NO: 1382656 - DNA, 15 bp, Homo sapiens
aactcctgccctcaa

SEQ ID NO: 1382657 - DNA, 15 bp, Homo sapiens
gaactcctgccctca

SEQ ID NO: 1382658 - DNA, 15 bp, Homo sapiens
tgaactcctgccctc

SEQ ID NO: 1382659 - DNA, 15 bp, Homo sapiens
ttgaactcctgccct

SEQ ID NO: 1382660 - DNA, 15 bp, Homo sapiens
cttgaactcctgccc

SEQ ID NO: 1382661 - DNA, 15 bp, Homo sapiens
tcttgaactcctgcc

SEQ ID NO: 1382662 - DNA, 15 bp, Homo sapiens
gtcttgaactcctgc

SEQ ID NO: 1382663 - DNA, 15 bp, Homo sapiens
gggctggtcttgaac

SEQ ID NO: 1382664 - DNA, 15 bp, Homo sapiens
gcgggctggtcttga

SEQ ID NO: 1382665 - DNA, 15 bp, Homo sapiens
ggcgggctggtcttg

SEQ ID NO: 1382666 - DNA, 15 bp, Homo sapiens
gggcgggctggtctt

SEQ ID NO: 1382667 - DNA, 15 bp, Homo sapiens
tgggcgggctggtct

SEQ ID NO: 1382668 - DNA, 15 bp, Homo sapiens
ttgggcgggctggtc

SEQ ID NO: 1382669 - DNA, 15 bp, Homo sapiens
gttgggcgggctggt

SEQ ID NO: 1382670 - DNA, 15 bp, Homo sapiens
cgttgggcgggctgg

SEQ ID NO: 1382671 - DNA, 15 bp, Homo sapiens
acgttgggcgggctg

SEQ ID NO: 1382672 - DNA, 15 bp, Homo sapiens
tacgttgggcgggct

SEQ ID NO: 1382673 - DNA, 15 bp, Homo sapiens
ctacgttgggcgggc

SEQ ID NO: 1382674 - DNA, 15 bp, Homo sapiens
actacgttgggcggg

SEQ ID NO: 1382675 - DNA, 15 bp, Homo sapiens
cactacgttgggcgg

SEQ ID NO: 1382676 - DNA, 15 bp, Homo sapiens
tcactacgttgggcg

SEQ ID NO: 1382677 - DNA, 15 bp, Homo sapiens
ttcactacgttgggc

SEQ ID NO: 1382678 - DNA, 15 bp, Homo sapiens
tttcactacgttggg

SEQ ID NO: 1382679 - DNA, 15 bp, Homo sapiens
gtttcactacgttgg

SEQ ID NO: 1382680 - DNA, 15 bp, Homo sapiens
ggtttcactacgttg

SEQ ID NO: 1382681 - DNA, 15 bp, Homo sapiens
aggtttcactacgtt

SEQ ID NO: 1382682 - DNA, 15 bp, Homo sapiens
gaggtttcactacgt

SEQ ID NO: 1382683 - DNA, 15 bp, Homo sapiens
tgaggtttcactacg

SEQ ID NO: 1382684 - DNA, 15 bp, Homo sapiens
atgaggtttcactac

SEQ ID NO: 1382685 - DNA, 15 bp, Homo sapiens
gccacgcctggctaa

SEQ ID NO: 1382686 - DNA, 15 bp, Homo sapiens
cgccacgcctggcta

SEQ ID NO: 1382687 - DNA, 15 bp, Homo sapiens
ccgccacgcctggct

SEQ ID NO: 1382688 - DNA, 15 bp, Homo sapiens
accgccacgcctggc

SEQ ID NO: 1382689 - DNA, 15 bp, Homo sapiens
caccgccacgcctgg

SEQ ID NO: 1382690 - DNA, 15 bp, Homo sapiens
gcaccgccacgcctg

SEQ ID NO: 1382691 - DNA, 15 bp, Homo sapiens
ggcaccgccacgcct

SEQ ID NO: 1382692 - DNA, 15 bp, Homo sapiens
gggcaccgccacgcc

SEQ ID NO: 1382693 - DNA, 15 bp, Homo sapiens
tgggcaccgccacgc

SEQ ID NO: 1382694 - DNA, 15 bp, Homo sapiens
gtgggcaccgccacg

SEQ ID NO: 1382695 - DNA, 15 bp, Homo sapiens
ggtgggcaccgccac

SEQ ID NO: 1382696 - DNA, 15 bp, Homo sapiens
aggtgggcaccgcca

SEQ ID NO: 1382697 - DNA, 15 bp, Homo sapiens
caggtgggcaccgcc

SEQ ID NO: 1382698 - DNA, 15 bp, Homo sapiens
acaggtgggcaccgc

SEQ ID NO: 1382699 - DNA, 15 bp, Homo sapiens
tacaggtgggcaccg

SEQ ID NO: 1382700 - DNA, 15 bp, Homo sapiens
ttacaggtgggcacc

SEQ ID NO: 1382701 - DNA, 15 bp, Homo sapiens
attacaggtgggcac

SEQ ID NO: 1382702 - DNA, 15 bp, Homo sapiens
gattacaggtgggca

SEQ ID NO: 1382703 - DNA, 15 bp, Homo sapiens
ggattacaggtgggc

SEQ ID NO: 1382704 - DNA, 15 bp, Homo sapiens
gggattacaggtggg

SEQ ID NO: 1382705 - DNA, 15 bp, Homo sapiens
tgggattacaggtgg

SEQ ID NO: 1382706 - DNA, 15 bp, Homo sapiens
cagttgggattacag

SEQ ID NO: 1382707 - DNA, 15 bp, Homo sapiens
gcagttgggattaca

SEQ ID NO: 1382708 - DNA, 15 bp, Homo sapiens
agcagttgggattac

SEQ ID NO: 1382709 - DNA, 15 bp, Homo sapiens
gagcagttgggatta

SEQ ID NO: 1382710 - DNA, 15 bp, Homo sapiens
cgagcagttgggatt

SEQ ID NO: 1382711 - DNA, 15 bp, Homo sapiens
ccgagcagttgggat

SEQ ID NO: 1382712 - DNA, 15 bp, Homo sapiens
cccgagcagttggga

SEQ ID NO: 1382713 - DNA, 15 bp, Homo sapiens
tcccgagcagttggg

SEQ ID NO: 1382714 - DNA, 15 bp, Homo sapiens
ctcccgagcagttgg

SEQ ID NO: 1382715 - DNA, 15 bp, Homo sapiens
cctcccgagcagttg

SEQ ID NO: 1382716 - DNA, 15 bp, Homo sapiens
gcctcccgagcagtt

SEQ ID NO: 1382717 - DNA, 15 bp, Homo sapiens
agcctcccgagcagt

SEQ ID NO: 1382718 - DNA, 15 bp, Homo sapiens
cagcctcccgagcag

SEQ ID NO: 1382719 - DNA, 15 bp, Homo sapiens
ttcagcctcccgagc

SEQ ID NO: 1382720 - DNA, 15 bp, Homo sapiens
cttcagcctcccgag

SEQ ID NO: 1382721 - DNA, 15 bp, Homo sapiens
gcttcagcctcccga

SEQ ID NO: 1382722 - DNA, 15 bp, Homo sapiens
tgcttcagcctcccg

SEQ ID NO: 1382723 - DNA, 15 bp, Homo sapiens
ttgcttcagcctccc

SEQ ID NO: 1382724 - DNA, 15 bp, Homo sapiens
cttgcttcagcctcc

SEQ ID NO: 1382725 - DNA, 15 bp, Homo sapiens
tcttgcttcagcctc

SEQ ID NO: 1382726 - DNA, 15 bp, Homo sapiens
ctcttgcttcagcct

SEQ ID NO: 1382727 - DNA, 15 bp, Homo sapiens
tctcttgcttcagcc

SEQ ID NO: 1382728 - DNA, 15 bp, Homo sapiens
ttctcttgcttcagc

SEQ ID NO: 1382729 - DNA, 15 bp, Homo sapiens
attctcttgcttcag

SEQ ID NO: 1382730 - DNA, 15 bp, Homo sapiens
gattctcttgcttca

SEQ ID NO: 1382731 - DNA, 15 bp, Homo sapiens
tgattctcttgcttc

SEQ ID NO: 1382732 - DNA, 15 bp, Homo sapiens
gtgattctcttgctt

SEQ ID NO: 1382733 - DNA, 15 bp, Homo sapiens
agtgattctcttgct

SEQ ID NO: 1382734 - DNA, 15 bp, Homo sapiens
cagtgattctcttgc

SEQ ID NO: 1382735 - DNA, 15 bp, Homo sapiens
ccagtgattctcttg

SEQ ID NO: 1382736 - DNA, 15 bp, Homo sapiens
tccagtgattctctt

SEQ ID NO: 1382737 - DNA, 15 bp, Homo sapiens
ttccagtgattctct

SEQ ID NO: 1382738 - DNA, 15 bp, Homo sapiens
gttccagtgattctc

SEQ ID NO: 1382739 - DNA, 15 bp, Homo sapiens
tgggttccagtgatt

SEQ ID NO: 1382740 - DNA, 15 bp, Homo sapiens
ctgggttccagtgat

SEQ ID NO: 1382741 - DNA, 15 bp, Homo sapiens
cctgggttccagtga

SEQ ID NO: 1382742 - DNA, 15 bp, Homo sapiens
tcctgggttccagtg

SEQ ID NO: 1382743 - DNA, 15 bp, Homo sapiens
ctcctgggttccagt

SEQ ID NO: 1382744 - DNA, 15 bp, Homo sapiens
cctcctgggttccag

SEQ ID NO: 1382745 - DNA, 15 bp, Homo sapiens
gcctcctgggttcca

SEQ ID NO: 1382746 - DNA, 15 bp, Homo sapiens
cgcctcctgggttcc

SEQ ID NO: 1382747 - DNA, 15 bp, Homo sapiens
cctccgcctcctggg

SEQ ID NO: 1382748 - DNA, 15 bp, Homo sapiens
catctcggctcactg

SEQ ID NO: 1382749 - DNA, 15 bp, Homo sapiens
acatctcggctcact

SEQ ID NO: 1382750 - DNA, 15 bp, Homo sapiens
cacatctcggctcac

SEQ ID NO: 1382751 - DNA, 15 bp, Homo sapiens
gcacatctcggctca

SEQ ID NO: 1382752 - DNA, 15 bp, Homo sapiens
ggcacatctcggctc

SEQ ID NO: 1382753 - DNA, 15 bp, Homo sapiens
tggcacatctcggct

SEQ ID NO: 1382754 - DNA, 15 bp, Homo sapiens
gtggcacatctcggc

SEQ ID NO: 1382755 - DNA, 15 bp, Homo sapiens
agtggcacatctcgg

SEQ ID NO: 1382756 - DNA, 15 bp, Homo sapiens
cagtggcacatctcg

SEQ ID NO: 1382757 - DNA, 15 bp, Homo sapiens
gcagtggcacatctc

SEQ ID NO: 1382758 - DNA, 15 bp, Homo sapiens
ggcagtggcacatct

SEQ ID NO: 1382759 - DNA, 15 bp, Homo sapiens
gggcagtggcacatc

SEQ ID NO: 1382760 - DNA, 15 bp, Homo sapiens
agggcagtggcacat

SEQ ID NO: 1382761 - DNA, 15 bp, Homo sapiens
gagggcagtggcaca

SEQ ID NO: 1382762 - DNA, 15 bp, Homo sapiens
ggagggcagtggcac

SEQ ID NO: 1382763 - DNA, 15 bp, Homo sapiens
tggagggcagtggca

SEQ ID NO: 1382764 - DNA, 15 bp, Homo sapiens
acccaggctggaggg

SEQ ID NO: 1382765 - DNA, 15 bp, Homo sapiens
cacccaggctggagg

SEQ ID NO: 1382766 - DNA, 15 bp, Homo sapiens
atctcactctgtcac

SEQ ID NO: 1382767 - DNA, 15 bp, Homo sapiens
aatctcactctgtca

SEQ ID NO: 1382768 - DNA, 15 bp, Homo sapiens
gaatctcactctgtc

SEQ ID NO: 1382769 - DNA, 15 bp, Homo sapiens
agaatctcactctgt

SEQ ID NO: 1382770 - DNA, 15 bp, Homo sapiens
cagaatctcactctg

SEQ ID NO: 1382771 - DNA, 15 bp, Homo sapiens
acagaatctcactct

SEQ ID NO: 1382772 - DNA, 15 bp, Homo sapiens
aacagaatctcactc

SEQ ID NO: 1382773 - DNA, 15 bp, Homo sapiens
aaacagaatctcact

SEQ ID NO: 1382774 - DNA, 15 bp, Homo sapiens
taaacagaatctcac

SEQ ID NO: 1382775 - DNA, 15 bp, Homo sapiens
ttaaacagaatctca

SEQ ID NO: 1382776 - DNA, 15 bp, Homo sapiens
tttaaacagaatctc

SEQ ID NO: 1382777 - DNA, 15 bp, Homo sapiens
ttttaaacagaatct

SEQ ID NO: 1382778 - DNA, 15 bp, Homo sapiens
tttttaaacagaatc

SEQ ID NO: 1382779 - DNA, 15 bp, Homo sapiens
ttttttaaacagaat

SEQ ID NO: 1382780 - DNA, 15 bp, Homo sapiens
tttttttaaacagaa

SEQ ID NO: 1382781 - DNA, 15 bp, Homo sapiens
ttttttttaaacaga

SEQ ID NO: 1382782 - DNA, 15 bp, Homo sapiens
tttttttttaaacag

SEQ ID NO: 1382783 - DNA, 15 bp, Homo sapiens
ttttttttttaaaca

SEQ ID NO: 1382784 - DNA, 15 bp, Homo sapiens
gcaattttttttttt

SEQ ID NO: 1382785 - DNA, 15 bp, Homo sapiens
tgcaatttttttttt

SEQ ID NO: 1382786 - DNA, 15 bp, Homo sapiens
atgcaattttttttt

SEQ ID NO: 1382787 - DNA, 15 bp, Homo sapiens
aatgcaatttttttt

SEQ ID NO: 1382788 - DNA, 15 bp, Homo sapiens
taatgcaattttttt

SEQ ID NO: 1382789 - DNA, 15 bp, Homo sapiens
ataatgcaatttttt

SEQ ID NO: 1382790 - DNA, 15 bp, Homo sapiens
cataatgcaattttt

SEQ ID NO: 1382791 - DNA, 15 bp, Homo sapiens
ccataatgcaatttt

SEQ ID NO: 1382792 - DNA, 15 bp, Homo sapiens
tccataatgcaattt

SEQ ID NO: 1382793 - DNA, 15 bp, Homo sapiens
ttccataatgcaatt

SEQ ID NO: 1382794 - DNA, 15 bp, Homo sapiens
tttccataatgcaat

SEQ ID NO: 1382795 - DNA, 15 bp, Homo sapiens
ttttccataatgcaa

SEQ ID NO: 1382796 - DNA, 15 bp, Homo sapiens
attttccataatgca

SEQ ID NO: 1382797 - DNA, 15 bp, Homo sapiens
aattttccataatgc

SEQ ID NO: 1382798 - DNA, 15 bp, Homo sapiens
aaattttccataatg

SEQ ID NO: 1382799 - DNA, 15 bp, Homo sapiens
aaaattttccataat

SEQ ID NO: 1382800 - DNA, 15 bp, Homo sapiens
taaaattttccataa

SEQ ID NO: 1382801 - DNA, 15 bp, Homo sapiens
ctaaaattttccata

SEQ ID NO: 1382802 - DNA, 15 bp, Homo sapiens
actaaaattttccat

SEQ ID NO: 1382803 - DNA, 15 bp, Homo sapiens
aactaaaattttcca

SEQ ID NO: 1382804 - DNA, 15 bp, Homo sapiens
gaactaaaattttcc

SEQ ID NO: 1382805 - DNA, 15 bp, Homo sapiens
ggaactaaaattttc

SEQ ID NO: 1382806 - DNA, 15 bp, Homo sapiens
tggaactaaaatttt

SEQ ID NO: 1382807 - DNA, 15 bp, Homo sapiens
atggaactaaaattt

SEQ ID NO: 1382808 - DNA, 15 bp, Homo sapiens
gatggaactaaaatt

SEQ ID NO: 1382809 - DNA, 15 bp, Homo sapiens
agatggaactaaaat

SEQ ID NO: 1382810 - DNA, 15 bp, Homo sapiens
gagatggaactaaaa

SEQ ID NO: 1382811 - DNA, 15 bp, Homo sapiens
agagatggaactaaa

SEQ ID NO: 1382812 - DNA, 15 bp, Homo sapiens
aagagatggaactaa

SEQ ID NO: 1382813 - DNA, 15 bp, Homo sapiens
gaagagatggaacta

SEQ ID NO: 1382814 - DNA, 15 bp, Homo sapiens
ggaagagatggaact

SEQ ID NO: 1382815 - DNA, 15 bp, Homo sapiens
gggaagagatggaac

SEQ ID NO: 1382816 - DNA, 15 bp, Homo sapiens
ggggaagagatggaa

SEQ ID NO: 1382817 - DNA, 15 bp, Homo sapiens
gggggaagagatgga

SEQ ID NO: 1382818 - DNA, 15 bp, Homo sapiens
tgggggaagagatgg

SEQ ID NO: 1382819 - DNA, 15 bp, Homo sapiens
ttgggggaagagatg

SEQ ID NO: 1382820 - DNA, 15 bp, Homo sapiens
cttgggggaagagat

SEQ ID NO: 1382821 - DNA, 15 bp, Homo sapiens
tcttgggggaagaga

SEQ ID NO: 1382822 - DNA, 15 bp, Homo sapiens
atcttgggggaagag

SEQ ID NO: 1382823 - DNA, 15 bp, Homo sapiens
tatcttgggggaaga

SEQ ID NO: 1382824 - DNA, 15 bp, Homo sapiens
ttatcttgggggaag

SEQ ID NO: 1382825 - DNA, 15 bp, Homo sapiens
tttatcttgggggaa

SEQ ID NO: 1382826 - DNA, 15 bp, Homo sapiens
gtttatcttggggga

SEQ ID NO: 1382827 - DNA, 15 bp, Homo sapiens
ggtttatcttggggg

SEQ ID NO: 1382828 - DNA, 15 bp, Homo sapiens
tggtttatcttgggg

SEQ ID NO: 1382829 - DNA, 15 bp, Homo sapiens
gtggtttatcttggg

SEQ ID NO: 1382830 - DNA, 15 bp, Homo sapiens
agtggtttatcttgg

SEQ ID NO: 1382831 - DNA, 15 bp, Homo sapiens
tagtggtttatcttg

SEQ ID NO: 1382832 - DNA, 15 bp, Homo sapiens
ttagtggtttatctt

SEQ ID NO: 1382833 - DNA, 15 bp, Homo sapiens
attagtggtttatct

SEQ ID NO: 1382834 - DNA, 15 bp, Homo sapiens
cattagtggtttatc

SEQ ID NO: 1382835 - DNA, 15 bp, Homo sapiens
ccattagtggtttat

SEQ ID NO: 1382836 - DNA, 15 bp, Homo sapiens
accattagtggttta

SEQ ID NO: 1382837 - DNA, 15 bp, Homo sapiens
caccattagtggttt

SEQ ID NO: 1382838 - DNA, 15 bp, Homo sapiens
gcaccattagtggtt

SEQ ID NO: 1382839 - DNA, 15 bp, Homo sapiens
agcaccattagtggt

SEQ ID NO: 1382840 - DNA, 15 bp, Homo sapiens
tagcaccattagtgg

SEQ ID NO: 1382841 - DNA, 15 bp, Homo sapiens
ctagcaccattagtg

SEQ ID NO: 1382842 - DNA, 15 bp, Homo sapiens
cctagcaccattagt

SEQ ID NO: 1382843 - DNA, 15 bp, Homo sapiens
acctagcaccattag

SEQ ID NO: 1382844 - DNA, 15 bp, Homo sapiens
tacctagcaccatta

SEQ ID NO: 1382845 - DNA, 15 bp, Homo sapiens
atacctagcaccatt

SEQ ID NO: 1382846 - DNA, 15 bp, Homo sapiens
catacctagcaccat

SEQ ID NO: 1382847 - DNA, 15 bp, Homo sapiens
gcatacctagcacca

SEQ ID NO: 1382848 - DNA, 15 bp, Homo sapiens
ggcatacctagcacc

SEQ ID NO: 1382849 - DNA, 15 bp, Homo sapiens
aggcatacctagcac

SEQ ID NO: 1382850 - DNA, 15 bp, Homo sapiens
aaggcatacctagca

SEQ ID NO: 1382851 - DNA, 15 bp, Homo sapiens
aaaggcatacctagc

SEQ ID NO: 1382852 - DNA, 15 bp, Homo sapiens
gaaaggcatacctag

SEQ ID NO: 1382853 - DNA, 15 bp, Homo sapiens
tgaaaggcataccta

SEQ ID NO: 1382854 - DNA, 15 bp, Homo sapiens
ctgaaaggcatacct

SEQ ID NO: 1382855 - DNA, 15 bp, Homo sapiens
tctgaaaggcatacc

SEQ ID NO: 1382856 - DNA, 15 bp, Homo sapiens
ttctgaaaggcatac

SEQ ID NO: 1382857 - DNA, 15 bp, Homo sapiens
attctgaaaggcata

SEQ ID NO: 1382858 - DNA, 15 bp, Homo sapiens
cattctgaaaggcat

SEQ ID NO: 1382859 - DNA, 15 bp, Homo sapiens
gcattctgaaaggca

SEQ ID NO: 1382860 - DNA, 15 bp, Homo sapiens
tgcattctgaaaggc

SEQ ID NO: 1382861 - DNA, 15 bp, Homo sapiens
ttgcattctgaaagg

SEQ ID NO: 1382862 - DNA, 15 bp, Homo sapiens
cttgcattctgaaag

SEQ ID NO: 1382863 - DNA, 15 bp, Homo sapiens
tcttgcattctgaaa

SEQ ID NO: 1382864 - DNA, 15 bp, Homo sapiens
ttcttgcattctgaa

SEQ ID NO: 1382865 - DNA, 15 bp, Homo sapiens
attcttgcattctga

SEQ ID NO: 1382866 - DNA, 15 bp, Homo sapiens
tattcttgcattctg

SEQ ID NO: 1382867 - DNA, 15 bp, Homo sapiens
ttattcttgcattct

SEQ ID NO: 1382868 - DNA, 15 bp, Homo sapiens
tttattcttgcattc

SEQ ID NO: 1382869 - DNA, 15 bp, Homo sapiens
ttttattcttgcatt

SEQ ID NO: 1382870 - DNA, 15 bp, Homo sapiens
tttttattcttgcat

SEQ ID NO: 1382871 - DNA, 15 bp, Homo sapiens
gtttttattcttgca

SEQ ID NO: 1382872 - DNA, 15 bp, Homo sapiens
tgtttttattcttgc

SEQ ID NO: 1382873 - DNA, 15 bp, Homo sapiens
ctgtttttattcttg

SEQ ID NO: 1382874 - DNA, 15 bp, Homo sapiens
cctgtttttattctt

SEQ ID NO: 1382875 - DNA, 15 bp, Homo sapiens
ccctgtttttattct

SEQ ID NO: 1382876 - DNA, 15 bp, Homo sapiens
accctgtttttattc

SEQ ID NO: 1382877 - DNA, 15 bp, Homo sapiens
aaccctgtttttatt

SEQ ID NO: 1382878 - DNA, 15 bp, Homo sapiens
caaccctgtttttat

SEQ ID NO: 1382879 - DNA, 15 bp, Homo sapiens
acaaccctgttttta

SEQ ID NO: 1382880 - DNA, 15 bp, Homo sapiens
aacaaccctgttttt

SEQ ID NO: 1382881 - DNA, 15 bp, Homo sapiens
aaacaaccctgtttt

SEQ ID NO: 1382882 - DNA, 15 bp, Homo sapiens
caaacaaccctgttt

SEQ ID NO: 1382883 - DNA, 15 bp, Homo sapiens
acaaacaaccctgtt

SEQ ID NO: 1382884 - DNA, 15 bp, Homo sapiens
aacaaacaaccctgt

SEQ ID NO: 1382885 - DNA, 15 bp, Homo sapiens
aaacaaacaaccctg

SEQ ID NO: 1382886 - DNA, 15 bp, Homo sapiens
caaacaaacaaccct

SEQ ID NO: 1382887 - DNA, 15 bp, Homo sapiens
acaaacaaacaaccc

SEQ ID NO: 1382888 - DNA, 15 bp, Homo sapiens
aacaaacaaacaacc

SEQ ID NO: 1382889 - DNA, 15 bp, Homo sapiens
gtaaaaaacaaacaa

SEQ ID NO: 1382890 - DNA, 15 bp, Homo sapiens
agtaaaaaacaaaca

SEQ ID NO: 1382891 - DNA, 15 bp, Homo sapiens
aagtaaaaaacaaac

SEQ ID NO: 1382892 - DNA, 15 bp, Homo sapiens
aaagtaaaaaacaaa

SEQ ID NO: 1382893 - DNA, 15 bp, Homo sapiens
aaaagtaaaaaacaa

SEQ ID NO: 1382894 - DNA, 15 bp, Homo sapiens
aaaaagtaaaaaaca

SEQ ID NO: 1382895 - DNA, 15 bp, Homo sapiens
taaaaagtaaaaaac

SEQ ID NO: 1382896 - DNA, 15 bp, Homo sapiens
ttaaaaagtaaaaaa

SEQ ID NO: 1382897 - DNA, 15 bp, Homo sapiens
gttaaaaagtaaaaa

SEQ ID NO: 1382898 - DNA, 15 bp, Homo sapiens
tgttaaaaagtaaaa

SEQ ID NO: 1382899 - DNA, 15 bp, Homo sapiens
ttgttaaaaagtaaa

SEQ ID NO: 1382900 - DNA, 15 bp, Homo sapiens
tttgttaaaaagtaa

SEQ ID NO: 1382901 - DNA, 15 bp, Homo sapiens
gtttgttaaaaagta

SEQ ID NO: 1382902 - DNA, 15 bp, Homo sapiens
ggtttgttaaaaagt

SEQ ID NO: 1382903 - DNA, 15 bp, Homo sapiens
tggtttgttaaaaag

SEQ ID NO: 1382904 - DNA, 15 bp, Homo sapiens
gtggtttgttaaaaa

SEQ ID NO: 1382905 - DNA, 15 bp, Homo sapiens
tgtggtttgttaaaa

SEQ ID NO: 1382906 - DNA, 15 bp, Homo sapiens
ctgtggtttgttaaa

SEQ ID NO: 1382907 - DNA, 15 bp, Homo sapiens
gctgtggtttgttaa

SEQ ID NO: 1382908 - DNA, 15 bp, Homo sapiens
ggctgtggtttgtta

SEQ ID NO: 1382909 - DNA, 15 bp, Homo sapiens
aggctgtggtttgtt

SEQ ID NO: 1382910 - DNA, 15 bp, Homo sapiens
taggctgtggtttgt

SEQ ID NO: 1382911 - DNA, 15 bp, Homo sapiens
ttaggctgtggtttg

SEQ ID NO: 1382912 - DNA, 15 bp, Homo sapiens
cttaggctgtggttt

SEQ ID NO: 1382913 - DNA, 15 bp, Homo sapiens
ccttaggctgtggtt

SEQ ID NO: 1382914 - DNA, 15 bp, Homo sapiens
cccttaggctgtggt

SEQ ID NO: 1382915 - DNA, 15 bp, Homo sapiens
tcccttaggctgtgg

SEQ ID NO: 1382916 - DNA, 15 bp, Homo sapiens
atcccttaggctgtg

SEQ ID NO: 1382917 - DNA, 15 bp, Homo sapiens
aatcccttaggctgt

SEQ ID NO: 1382918 - DNA, 15 bp, Homo sapiens
aaatcccttaggctg

SEQ ID NO: 1382919 - DNA, 15 bp, Homo sapiens
gaaatcccttaggct

SEQ ID NO: 1382920 - DNA, 15 bp, Homo sapiens
tgaaatcccttaggc

SEQ ID NO: 1382921 - DNA, 15 bp, Homo sapiens
ctgaaatcccttagg

SEQ ID NO: 1382922 - DNA, 15 bp, Homo sapiens
actgaaatcccttag

SEQ ID NO: 1382923 - DNA, 15 bp, Homo sapiens
aactgaaatccctta

SEQ ID NO: 1382924 - DNA, 15 bp, Homo sapiens
aaactgaaatccctt

SEQ ID NO: 1382925 - DNA, 15 bp, Homo sapiens
taaactgaaatccct

SEQ ID NO: 1382926 - DNA, 15 bp, Homo sapiens
ctaaactgaaatccc

SEQ ID NO: 1382927 - DNA, 15 bp, Homo sapiens
cctaaactgaaatcc

SEQ ID NO: 1382928 - DNA, 15 bp, Homo sapiens
acctaaactgaaatc

SEQ ID NO: 1382929 - DNA, 15 bp, Homo sapiens
gacctaaactgaaat

SEQ ID NO: 1382930 - DNA, 15 bp, Homo sapiens
agacctaaactgaaa

SEQ ID NO: 1382931 - DNA, 15 bp, Homo sapiens
gagacctaaactgaa

SEQ ID NO: 1382932 - DNA, 15 bp, Homo sapiens
tgagacctaaactga

SEQ ID NO: 1382933 - DNA, 15 bp, Homo sapiens
ttgagacctaaactg

SEQ ID NO: 1382934 - DNA, 15 bp, Homo sapiens
tttgagacctaaact

SEQ ID NO: 1382935 - DNA, 15 bp, Homo sapiens
gtttgagacctaaac

SEQ ID NO: 1382936 - DNA, 15 bp, Homo sapiens
agtttgagacctaaa

SEQ ID NO: 1382937 - DNA, 15 bp, Homo sapiens
aagtttgagacctaa

SEQ ID NO: 1382938 - DNA, 15 bp, Homo sapiens
gaagtttgagaccta

SEQ ID NO: 1382939 - DNA, 15 bp, Homo sapiens
cgaagtttgagacct

SEQ ID NO: 1382940 - DNA, 15 bp, Homo sapiens
acgaagtttgagacc

SEQ ID NO: 1382941 - DNA, 15 bp, Homo sapiens
gacgaagtttgagac

SEQ ID NO: 1382942 - DNA, 15 bp, Homo sapiens
ggacgaagtttgaga

SEQ ID NO: 1382943 - DNA, 15 bp, Homo sapiens
aggacgaagtttgag

SEQ ID NO: 1382944 - DNA, 15 bp, Homo sapiens
aaggacgaagtttga

SEQ ID NO: 1382945 - DNA, 15 bp, Homo sapiens
taaggacgaagtttg

SEQ ID NO: 1382946 - DNA, 15 bp, Homo sapiens
ataaggacgaagttt

SEQ ID NO: 1382947 - DNA, 15 bp, Homo sapiens
aataaggacgaagtt

SEQ ID NO: 1382948 - DNA, 15 bp, Homo sapiens
taataaggacgaagt

SEQ ID NO: 1382949 - DNA, 15 bp, Homo sapiens
gtaataaggacgaag

SEQ ID NO: 1382950 - DNA, 15 bp, Homo sapiens
cgtaataaggacgaa

SEQ ID NO: 1382951 - DNA, 15 bp, Homo sapiens
acgtaataaggacga

SEQ ID NO: 1382952 - DNA, 15 bp, Homo sapiens
aacgtaataaggacg

SEQ ID NO: 1382953 - DNA, 15 bp, Homo sapiens
gaacgtaataaggac

SEQ ID NO: 1382954 - DNA, 15 bp, Homo sapiens
agaacgtaataagga

SEQ ID NO: 1382955 - DNA, 15 bp, Homo sapiens
tagaacgtaataagg

SEQ ID NO: 1382956 - DNA, 15 bp, Homo sapiens
ctagaacgtaataag

SEQ ID NO: 1382957 - DNA, 15 bp, Homo sapiens
cctagaacgtaataa

SEQ ID NO: 1382958 - DNA, 15 bp, Homo sapiens
tcctagaacgtaata

SEQ ID NO: 1382959 - DNA, 15 bp, Homo sapiens
ttcctagaacgtaat

SEQ ID NO: 1382960 - DNA, 15 bp, Homo sapiens
tttcctagaacgtaa

SEQ ID NO: 1382961 - DNA, 15 bp, Homo sapiens
atttcctagaacgta

SEQ ID NO: 1382962 - DNA, 15 bp, Homo sapiens
catttcctagaacgt

SEQ ID NO: 1382963 - DNA, 15 bp, Homo sapiens
acatttcctagaacg

SEQ ID NO: 1382964 - DNA, 15 bp, Homo sapiens
aacatttcctagaac

SEQ ID NO: 1382965 - DNA, 15 bp, Homo sapiens
gaacatttcctagaa

SEQ ID NO: 1382966 - DNA, 15 bp, Homo sapiens
ggaacatttcctaga

SEQ ID NO: 1382967 - DNA, 15 bp, Homo sapiens
aggaacatttcctag

SEQ ID NO: 1382968 - DNA, 15 bp, Homo sapiens
taggaacatttccta

SEQ ID NO: 1382969 - DNA, 15 bp, Homo sapiens
gtaggaacatttcct

SEQ ID NO: 1382970 - DNA, 15 bp, Homo sapiens
tgtaggaacatttcc

SEQ ID NO: 1382971 - DNA, 15 bp, Homo sapiens
atgtaggaacatttc

SEQ ID NO: 1382972 - DNA, 15 bp, Homo sapiens
aatgtaggaacattt

SEQ ID NO: 1382973 - DNA, 15 bp, Homo sapiens
aaatgtaggaacatt

SEQ ID NO: 1382974 - DNA, 15 bp, Homo sapiens
taaatgtaggaacat

SEQ ID NO: 1382975 - DNA, 15 bp, Homo sapiens
gtaaatgtaggaaca

SEQ ID NO: 1382976 - DNA, 15 bp, Homo sapiens
tgtaaatgtaggaac

SEQ ID NO: 1382977 - DNA, 15 bp, Homo sapiens
atgtaaatgtaggaa

SEQ ID NO: 1382978 - DNA, 15 bp, Homo sapiens
aatgtaaatgtagga

SEQ ID NO: 1382979 - DNA, 15 bp, Homo sapiens
taatgtaaatgtagg

SEQ ID NO: 1382980 - DNA, 15 bp, Homo sapiens
gtaatgtaaatgtag

SEQ ID NO: 1382981 - DNA, 15 bp, Homo sapiens
tgtaatgtaaatgta

SEQ ID NO: 1382982 - DNA, 15 bp, Homo sapiens
ctgtaatgtaaatgt

SEQ ID NO: 1382983 - DNA, 15 bp, Homo sapiens
gctgtaatgtaaatg

SEQ ID NO: 1382984 - DNA, 15 bp, Homo sapiens
tgctgtaatgtaaat

SEQ ID NO: 1382985 - DNA, 15 bp, Homo sapiens
gtgctgtaatgtaaa

SEQ ID NO: 1382986 - DNA, 15 bp, Homo sapiens
tgtgctgtaatgtaa

SEQ ID NO: 1382987 - DNA, 15 bp, Homo sapiens
atgtgctgtaatgta

SEQ ID NO: 1382988 - DNA, 15 bp, Homo sapiens
aatgtgctgtaatgt

SEQ ID NO: 1382989 - DNA, 15 bp, Homo sapiens
caatgtgctgtaatg

SEQ ID NO: 1382990 - DNA, 15 bp, Homo sapiens
acaatgtgctgtaat

SEQ ID NO: 1382991 - DNA, 15 bp, Homo sapiens
aacaatgtgctgtaa

SEQ ID NO: 1382992 - DNA, 15 bp, Homo sapiens
taacaatgtgctgta

SEQ ID NO: 1382993 - DNA, 15 bp, Homo sapiens
ctaacaatgtgctgt

SEQ ID NO: 1382994 - DNA, 15 bp, Homo sapiens
actaacaatgtgctg

SEQ ID NO: 1382995 - DNA, 15 bp, Homo sapiens
tactaacaatgtgct

SEQ ID NO: 1382996 - DNA, 15 bp, Homo sapiens
ctactaacaatgtgc

SEQ ID NO: 1382997 - DNA, 15 bp, Homo sapiens
tctactaacaatgtg

SEQ ID NO: 1382998 - DNA, 15 bp, Homo sapiens
ttctactaacaatgt

SEQ ID NO: 1382999 - DNA, 15 bp, Homo sapiens
attctactaacaatg

SEQ ID NO: 1383000 - DNA, 15 bp, Homo sapiens
tattctactaacaat

SEQ ID NO: 1383001 - DNA, 15 bp, Homo sapiens
ttattctactaacaa

SEQ ID NO: 1383002 - DNA, 15 bp, Homo sapiens
tttattctactaaca

SEQ ID NO: 1383003 - DNA, 15 bp, Homo sapiens
ttttattctactaac

SEQ ID NO: 1383004 - DNA, 15 bp, Homo sapiens
tttttattctactaa

SEQ ID NO: 1383005 - DNA, 15 bp, Homo sapiens
ttttttattctacta

SEQ ID NO: 1383006 - DNA, 15 bp, Homo sapiens
attttttattctact

SEQ ID NO: 1383007 - DNA, 15 bp, Homo sapiens
cattttttattctac

SEQ ID NO: 1383008 - DNA, 15 bp, Homo sapiens
tcattttttattcta

SEQ ID NO: 1383009 - DNA, 15 bp, Homo sapiens
ctcattttttattct

SEQ ID NO: 1383010 - DNA, 15 bp, Homo sapiens
tctcattttttattc

SEQ ID NO: 1383011 - DNA, 15 bp, Homo sapiens
gtctcattttttatt

SEQ ID NO: 1383012 - DNA, 15 bp, Homo sapiens
agtctcattttttat

SEQ ID NO: 1383013 - DNA, 15 bp, Homo sapiens
cagtctcatttttta

SEQ ID NO: 1383014 - DNA, 15 bp, Homo sapiens
tcagtctcatttttt

SEQ ID NO: 1383015 - DNA, 15 bp, Homo sapiens
ctcagtctcattttt

SEQ ID NO: 1383016 - DNA, 15 bp, Homo sapiens
cctcagtctcatttt

SEQ ID NO: 1383017 - DNA, 15 bp, Homo sapiens
tcctcagtctcattt

SEQ ID NO: 1383018 - DNA, 15 bp, Homo sapiens
ttcctcagtctcatt

SEQ ID NO: 1383019 - DNA, 15 bp, Homo sapiens
attcctcagtctcat

SEQ ID NO: 1383020 - DNA, 15 bp, Homo sapiens
tattcctcagtctca

SEQ ID NO: 1383021 - DNA, 15 bp, Homo sapiens
atattcctcagtctc

SEQ ID NO: 1383022 - DNA, 15 bp, Homo sapiens
gatattcctcagtct

SEQ ID NO: 1383023 - DNA, 15 bp, Homo sapiens
tgatattcctcagtc

SEQ ID NO: 1383024 - DNA, 15 bp, Homo sapiens
ttgatattcctcagt

SEQ ID NO: 1383025 - DNA, 15 bp, Homo sapiens
tttgatattcctcag

SEQ ID NO: 1383026 - DNA, 15 bp, Homo sapiens
atttgatattcctca

SEQ ID NO: 1383027 - DNA, 15 bp, Homo sapiens
aatttgatattcctc

SEQ ID NO: 1383028 - DNA, 15 bp, Homo sapiens
aaatttgatattcct

SEQ ID NO: 1383029 - DNA, 15 bp, Homo sapiens
taaatttgatattcc

SEQ ID NO: 1383030 - DNA, 15 bp, Homo sapiens
ttaaatttgatattc

SEQ ID NO: 1383031 - DNA, 15 bp, Homo sapiens
tttaaatttgatatt

SEQ ID NO: 1383032 - DNA, 15 bp, Homo sapiens
ttttaaatttgatat

SEQ ID NO: 1383033 - DNA, 15 bp, Homo sapiens
gttttaaatttgata

SEQ ID NO: 1383034 - DNA, 15 bp, Homo sapiens
agttttaaatttgat

SEQ ID NO: 1383035 - DNA, 15 bp, Homo sapiens
aagttttaaatttga

SEQ ID NO: 1383036 - DNA, 15 bp, Homo sapiens
caagttttaaatttg

SEQ ID NO: 1383037 - DNA, 15 bp, Homo sapiens
acaagttttaaattt

SEQ ID NO: 1383038 - DNA, 15 bp, Homo sapiens
gacaagttttaaatt

SEQ ID NO: 1383039 - DNA, 15 bp, Homo sapiens
agacaagttttaaat

SEQ ID NO: 1383040 - DNA, 15 bp, Homo sapiens
tagacaagttttaaa

SEQ ID NO: 1383041 - DNA, 15 bp, Homo sapiens
atagacaagttttaa

SEQ ID NO: 1383042 - DNA, 15 bp, Homo sapiens
tatagacaagtttta

SEQ ID NO: 1383043 - DNA, 15 bp, Homo sapiens
ttatagacaagtttt

SEQ ID NO: 1383044 - DNA, 15 bp, Homo sapiens
attatagacaagttt

SEQ ID NO: 1383045 - DNA, 15 bp, Homo sapiens
tattatagacaagtt

SEQ ID NO: 1383046 - DNA, 15 bp, Homo sapiens
atattatagacaagt

SEQ ID NO: 1383047 - DNA, 15 bp, Homo sapiens
gatattatagacaag

SEQ ID NO: 1383048 - DNA, 15 bp, Homo sapiens
tgatattatagacaa

SEQ ID NO: 1383049 - DNA, 15 bp, Homo sapiens
ttgatattatagaca

SEQ ID NO: 1383050 - DNA, 15 bp, Homo sapiens
tttgatattatagac

SEQ ID NO: 1383051 - DNA, 15 bp, Homo sapiens
gtttgatattataga

SEQ ID NO: 1383052 - DNA, 15 bp, Homo sapiens
tgtttgatattatag

SEQ ID NO: 1383053 - DNA, 15 bp, Homo sapiens
gtgtttgatattata

SEQ ID NO: 1383054 - DNA, 15 bp, Homo sapiens
agtgtttgatattat

SEQ ID NO: 1383055 - DNA, 15 bp, Homo sapiens
gagtgtttgatatta

SEQ ID NO: 1383056 - DNA, 15 bp, Homo sapiens
tgagtgtttgatatt

SEQ ID NO: 1383057 - DNA, 15 bp, Homo sapiens
ttgagtgtttgatat

SEQ ID NO: 1383058 - DNA, 15 bp, Homo sapiens
gttgagtgtttgata

SEQ ID NO: 1383059 - DNA, 15 bp, Homo sapiens
ggttgagtgtttgat

SEQ ID NO: 1383060 - DNA, 15 bp, Homo sapiens
tggttgagtgtttga

SEQ ID NO: 1383061 - DNA, 15 bp, Homo sapiens
ttggttgagtgtttg

SEQ ID NO: 1383062 - DNA, 15 bp, Homo sapiens
gttggttgagtgttt

SEQ ID NO: 1383063 - DNA, 15 bp, Homo sapiens
tgttggttgagtgtt

SEQ ID NO: 1383064 - DNA, 15 bp, Homo sapiens
ttgttggttgagtgt

SEQ ID NO: 1383065 - DNA, 15 bp, Homo sapiens
gttgttggttgagtg

SEQ ID NO: 1383066 - DNA, 15 bp, Homo sapiens
ggttgttggttgagt

SEQ ID NO: 1383067 - DNA, 15 bp, Homo sapiens
tggttgttggttgag

SEQ ID NO: 1383068 - DNA, 15 bp, Homo sapiens
atggttgttggttga

SEQ ID NO: 1383069 - DNA, 15 bp, Homo sapiens
aatggttgttggttg

SEQ ID NO: 1383070 - DNA, 15 bp, Homo sapiens
aaatggttgttggtt

SEQ ID NO: 1383071 - DNA, 15 bp, Homo sapiens
caaatggttgttggt

SEQ ID NO: 1383072 - DNA, 15 bp, Homo sapiens
gcaaatggttgttgg

SEQ ID NO: 1383073 - DNA, 15 bp, Homo sapiens
agcaaatggttgttg

SEQ ID NO: 1383074 - DNA, 15 bp, Homo sapiens
tagcaaatggttgtt

SEQ ID NO: 1383075 - DNA, 15 bp, Homo sapiens
ttagcaaatggttgt

SEQ ID NO: 1383076 - DNA, 15 bp, Homo sapiens
tttagcaaatggttg

SEQ ID NO: 1383077 - DNA, 15 bp, Homo sapiens
atttagcaaatggtt

SEQ ID NO: 1383078 - DNA, 15 bp, Homo sapiens
tatttagcaaatggt

SEQ ID NO: 1383079 - DNA, 15 bp, Homo sapiens
ttatttagcaaatgg

SEQ ID NO: 1383080 - DNA, 15 bp, Homo sapiens
attatttagcaaatg

SEQ ID NO: 1383081 - DNA, 15 bp, Homo sapiens
aattatttagcaaat

SEQ ID NO: 1383082 - DNA, 15 bp, Homo sapiens
aaattatttagcaaa

SEQ ID NO: 1383083 - DNA, 15 bp, Homo sapiens
gaaattatttagcaa

SEQ ID NO: 1383084 - DNA, 15 bp, Homo sapiens
ggaaattatttagca

SEQ ID NO: 1383085 - DNA, 15 bp, Homo sapiens
tggaaattatttagc

SEQ ID NO: 1383086 - DNA, 15 bp, Homo sapiens
ttggaaattatttag

SEQ ID NO: 1383087 - DNA, 15 bp, Homo sapiens
cttggaaattattta

SEQ ID NO: 1383088 - DNA, 15 bp, Homo sapiens
acttggaaattattt

SEQ ID NO: 1383089 - DNA, 15 bp, Homo sapiens
cacttggaaattatt

SEQ ID NO: 1383090 - DNA, 15 bp, Homo sapiens
gcacttggaaattat

SEQ ID NO: 1383091 - DNA, 15 bp, Homo sapiens
agcacttggaaatta

SEQ ID NO: 1383092 - DNA, 15 bp, Homo sapiens
tagcacttggaaatt

SEQ ID NO: 1383093 - DNA, 15 bp, Homo sapiens
ctagcacttggaaat

SEQ ID NO: 1383094 - DNA, 15 bp, Homo sapiens
tctagcacttggaaa

SEQ ID NO: 1383095 - DNA, 15 bp, Homo sapiens
gtctagcacttggaa

SEQ ID NO: 1383096 - DNA, 15 bp, Homo sapiens
ggtctagcacttgga

SEQ ID NO: 1383097 - DNA, 15 bp, Homo sapiens
aggtctagcacttgg

SEQ ID NO: 1383098 - DNA, 15 bp, Homo sapiens
caggtctagcacttg

SEQ ID NO: 1383099 - DNA, 15 bp, Homo sapiens
acaggtctagcactt

SEQ ID NO: 1383100 - DNA, 15 bp, Homo sapiens
cacaggtctagcact

SEQ ID NO: 1383101 - DNA, 15 bp, Homo sapiens
gcacaggtctagcac

SEQ ID NO: 1383102 - DNA, 15 bp, Homo sapiens
agcacaggtctagca

SEQ ID NO: 1383103 - DNA, 15 bp, Homo sapiens
aagcacaggtctagc

SEQ ID NO: 1383104 - DNA, 15 bp, Homo sapiens
caagcacaggtctag

SEQ ID NO: 1383105 - DNA, 15 bp, Homo sapiens
tcaagcacaggtcta

SEQ ID NO: 1383106 - DNA, 15 bp, Homo sapiens
gtcaagcacaggtct

SEQ ID NO: 1383107 - DNA, 15 bp, Homo sapiens
tgtcaagcacaggtc

SEQ ID NO: 1383108 - DNA, 15 bp, Homo sapiens
gtgtcaagcacaggt

SEQ ID NO: 1383109 - DNA, 15 bp, Homo sapiens
agtgtcaagcacagg

SEQ ID NO: 1383110 - DNA, 15 bp, Homo sapiens
cagtgtcaagcacag

SEQ ID NO: 1383111 - DNA, 15 bp, Homo sapiens
tcagtgtcaagcaca

SEQ ID NO: 1383112 - DNA, 15 bp, Homo sapiens
ctcagtgtcaagcac

SEQ ID NO: 1383113 - DNA, 15 bp, Homo sapiens
cctcagtgtcaagca

SEQ ID NO: 1383114 - DNA, 15 bp, Homo sapiens
tcctcagtgtcaagc

SEQ ID NO: 1383115 - DNA, 15 bp, Homo sapiens
ttcctcagtgtcaag

SEQ ID NO: 1383116 - DNA, 15 bp, Homo sapiens
tttcctcagtgtcaa

SEQ ID NO: 1383117 - DNA, 15 bp, Homo sapiens
gtttcctcagtgtca

SEQ ID NO: 1383118 - DNA, 15 bp, Homo sapiens
tgtttcctcagtgtc

SEQ ID NO: 1383119 - DNA, 15 bp, Homo sapiens
ttgtttcctcagtgt

SEQ ID NO: 1383120 - DNA, 15 bp, Homo sapiens
tttgtttcctcagtg

SEQ ID NO: 1383121 - DNA, 15 bp, Homo sapiens
ctttgtttcctcagt

SEQ ID NO: 1383122 - DNA, 15 bp, Homo sapiens
cctttgtttcctcag

SEQ ID NO: 1383123 - DNA, 15 bp, Homo sapiens
acctttgtttcctca

SEQ ID NO: 1383124 - DNA, 15 bp, Homo sapiens
cacctttgtttcctc

SEQ ID NO: 1383125 - DNA, 15 bp, Homo sapiens
tcacctttgtttcct

SEQ ID NO: 1383126 - DNA, 15 bp, Homo sapiens
ttcacctttgtttcc

SEQ ID NO: 1383127 - DNA, 15 bp, Homo sapiens
attcacctttgtttc

SEQ ID NO: 1383128 - DNA, 15 bp, Homo sapiens
tattcacctttgttt

SEQ ID NO: 1383129 - DNA, 15 bp, Homo sapiens
gtattcacctttgtt

SEQ ID NO: 1383130 - DNA, 15 bp, Homo sapiens
tgtattcacctttgt

SEQ ID NO: 1383131 - DNA, 15 bp, Homo sapiens
ttgtattcacctttg

SEQ ID NO: 1383132 - DNA, 15 bp, Homo sapiens
gttgtattcaccttt

SEQ ID NO: 1383133 - DNA, 15 bp, Homo sapiens
tgttgtattcacctt

SEQ ID NO: 1383134 - DNA, 15 bp, Homo sapiens
atgttgtattcacct

SEQ ID NO: 1383135 - DNA, 15 bp, Homo sapiens
catgttgtattcacc

SEQ ID NO: 1383136 - DNA, 15 bp, Homo sapiens
ccatgttgtattcac

SEQ ID NO: 1383137 - DNA, 15 bp, Homo sapiens
accatgttgtattca

SEQ ID NO: 1383138 - DNA, 15 bp, Homo sapiens
gaccatgttgtattc

SEQ ID NO: 1383139 - DNA, 15 bp, Homo sapiens
ggaccatgttgtatt

SEQ ID NO: 1383140 - DNA, 15 bp, Homo sapiens
gggaccatgttgtat

SEQ ID NO: 1383141 - DNA, 15 bp, Homo sapiens
agggaccatgttgta

SEQ ID NO: 1383142 - DNA, 15 bp, Homo sapiens
cagggaccatgttgt

SEQ ID NO: 1383143 - DNA, 15 bp, Homo sapiens
acagggaccatgttg

SEQ ID NO: 1383144 - DNA, 15 bp, Homo sapiens
gacagggaccatgtt

SEQ ID NO: 1383145 - DNA, 15 bp, Homo sapiens
ggacagggaccatgt

SEQ ID NO: 1383146 - DNA, 15 bp, Homo sapiens
aggacagggaccatg

SEQ ID NO: 1383147 - DNA, 15 bp, Homo sapiens
gaggacagggaccat

SEQ ID NO: 1383148 - DNA, 15 bp, Homo sapiens
ggaggacagggacca

SEQ ID NO: 1383149 - DNA, 15 bp, Homo sapiens
tggaggacagggacc

SEQ ID NO: 1383150 - DNA, 15 bp, Homo sapiens
ctggaggacagggac

SEQ ID NO: 1383151 - DNA, 15 bp, Homo sapiens
tctggaggacaggga

SEQ ID NO: 1383152 - DNA, 15 bp, Homo sapiens
ttctggaggacaggg

SEQ ID NO: 1383153 - DNA, 15 bp, Homo sapiens
cttctggaggacagg

SEQ ID NO: 1383154 - DNA, 15 bp, Homo sapiens
gcttctggaggacag

SEQ ID NO: 1383155 - DNA, 15 bp, Homo sapiens
agcttctggaggaca

SEQ ID NO: 1383156 - DNA, 15 bp, Homo sapiens
aagcttctggaggac

SEQ ID NO: 1383157 - DNA, 15 bp, Homo sapiens
gaagcttctggagga

SEQ ID NO: 1383158 - DNA, 15 bp, Homo sapiens
ggaagcttctggagg

SEQ ID NO: 1383159 - DNA, 15 bp, Homo sapiens
tggaagcttctggag

SEQ ID NO: 1383160 - DNA, 15 bp, Homo sapiens
ttggaagcttctgga

SEQ ID NO: 1383161 - DNA, 15 bp, Homo sapiens
tttggaagcttctgg

SEQ ID NO: 1383162 - DNA, 15 bp, Homo sapiens
ctttggaagcttctg

SEQ ID NO: 1383163 - DNA, 15 bp, Homo sapiens
actttggaagcttct

SEQ ID NO: 1383164 - DNA, 15 bp, Homo sapiens
tactttggaagcttc

SEQ ID NO: 1383165 - DNA, 15 bp, Homo sapiens
ctactttggaagctt

SEQ ID NO: 1383166 - DNA, 15 bp, Homo sapiens
actactttggaagct

SEQ ID NO: 1383167 - DNA, 15 bp, Homo sapiens
cactactttggaagc

SEQ ID NO: 1383168 - DNA, 15 bp, Homo sapiens
gcactactttggaag

SEQ ID NO: 1383169 - DNA, 15 bp, Homo sapiens
agcactactttggaa

SEQ ID NO: 1383170 - DNA, 15 bp, Homo sapiens
cagcactactttgga

SEQ ID NO: 1383171 - DNA, 15 bp, Homo sapiens
ccagcactactttgg

SEQ ID NO: 1383172 - DNA, 15 bp, Homo sapiens
tccagcactactttg

SEQ ID NO: 1383173 - DNA, 15 bp, Homo sapiens
ttccagcactacttt

SEQ ID NO: 1383174 - DNA, 15 bp, Homo sapiens
tttccagcactactt

SEQ ID NO: 1383175 - DNA, 15 bp, Homo sapiens
gtttccagcactact

SEQ ID NO: 1383176 - DNA, 15 bp, Homo sapiens
tgtttccagcactac

SEQ ID NO: 1383177 - DNA, 15 bp, Homo sapiens
ttgtttccagcacta

SEQ ID NO: 1383178 - DNA, 15 bp, Homo sapiens
tttgtttccagcact

SEQ ID NO: 1383179 - DNA, 15 bp, Homo sapiens
ctttgtttccagcac

SEQ ID NO: 1383180 - DNA, 15 bp, Homo sapiens
tctttgtttccagca

SEQ ID NO: 1383181 - DNA, 15 bp, Homo sapiens
ttctttgtttccagc

SEQ ID NO: 1383182 - DNA, 15 bp, Homo sapiens
attctttgtttccag

SEQ ID NO: 1383183 - DNA, 15 bp, Homo sapiens
cattctttgtttcca

SEQ ID NO: 1383184 - DNA, 15 bp, Homo sapiens
acattctttgtttcc

SEQ ID NO: 1383185 - DNA, 15 bp, Homo sapiens
tacattctttgtttc

SEQ ID NO: 1383186 - DNA, 15 bp, Homo sapiens
atacattctttgttt

SEQ ID NO: 1383187 - DNA, 15 bp, Homo sapiens
tatacattctttgtt

SEQ ID NO: 1383188 - DNA, 15 bp, Homo sapiens
gtatacattctttgt

SEQ ID NO: 1383189 - DNA, 15 bp, Homo sapiens
agtatacattctttg

SEQ ID NO: 1383190 - DNA, 15 bp, Homo sapiens
aagtatacattcttt

SEQ ID NO: 1383191 - DNA, 15 bp, Homo sapiens
aaagtatacattctt

SEQ ID NO: 1383192 - DNA, 15 bp, Homo sapiens
taaagtatacattct

SEQ ID NO: 1383193 - DNA, 15 bp, Homo sapiens
ctaaagtatacattc

SEQ ID NO: 1383194 - DNA, 15 bp, Homo sapiens
actaaagtatacatt

SEQ ID NO: 1383195 - DNA, 15 bp, Homo sapiens
tactaaagtatacat

SEQ ID NO: 1383196 - DNA, 15 bp, Homo sapiens
atactaaagtataca

SEQ ID NO: 1383197 - DNA, 15 bp, Homo sapiens
catactaaagtatac

SEQ ID NO: 1383198 - DNA, 15 bp, Homo sapiens
tcatactaaagtata

SEQ ID NO: 1383199 - DNA, 15 bp, Homo sapiens
ttcatactaaagtat

SEQ ID NO: 1383200 - DNA, 15 bp, Homo sapiens
tttcatactaaagta

SEQ ID NO: 1383201 - DNA, 15 bp, Homo sapiens
ttttcatactaaagt

SEQ ID NO: 1383202 - DNA, 15 bp, Homo sapiens
tttttcatactaaag

SEQ ID NO: 1383203 - DNA, 15 bp, Homo sapiens
ttttttcatactaaa

SEQ ID NO: 1383204 - DNA, 15 bp, Homo sapiens
tttttttcatactaa

SEQ ID NO: 1383205 - DNA, 15 bp, Homo sapiens
ctttttttcatacta

SEQ ID NO: 1383206 - DNA, 15 bp, Homo sapiens
tctttttttcatact

SEQ ID NO: 1383207 - DNA, 15 bp, Homo sapiens
gtctttttttcatac

SEQ ID NO: 1383208 - DNA, 15 bp, Homo sapiens
agtctttttttcata

SEQ ID NO: 1383209 - DNA, 15 bp, Homo sapiens
tagtctttttttcat

SEQ ID NO: 1383210 - DNA, 15 bp, Homo sapiens
atagtctttttttca

SEQ ID NO: 1383211 - DNA, 15 bp, Homo sapiens
tatagtctttttttc

SEQ ID NO: 1383212 - DNA, 15 bp, Homo sapiens
ttatagtcttttttt

SEQ ID NO: 1383213 - DNA, 15 bp, Homo sapiens
attatagtctttttt

SEQ ID NO: 1383214 - DNA, 15 bp, Homo sapiens
cattatagtcttttt

SEQ ID NO: 1383215 - DNA, 15 bp, Homo sapiens
ccattatagtctttt

SEQ ID NO: 1383216 - DNA, 15 bp, Homo sapiens
gccattatagtcttt

SEQ ID NO: 1383217 - DNA, 15 bp, Homo sapiens
agccattatagtctt

SEQ ID NO: 1383218 - DNA, 15 bp, Homo sapiens
aagccattatagtct

SEQ ID NO: 1383219 - DNA, 15 bp, Homo sapiens
aaagccattatagtc

SEQ ID NO: 1383220 - DNA, 15 bp, Homo sapiens
caaagccattatagt

SEQ ID NO: 1383221 - DNA, 15 bp, Homo sapiens
ccaaagccattatag

SEQ ID NO: 1383222 - DNA, 15 bp, Homo sapiens
accaaagccattata

SEQ ID NO: 1383223 - DNA, 15 bp, Homo sapiens
taccaaagccattat

SEQ ID NO: 1383224 - DNA, 15 bp, Homo sapiens
ataccaaagccatta

SEQ ID NO: 1383225 - DNA, 15 bp, Homo sapiens
tataccaaagccatt

SEQ ID NO: 1383226 - DNA, 15 bp, Homo sapiens
ctataccaaagccat

SEQ ID NO: 1383227 - DNA, 15 bp, Homo sapiens
actataccaaagcca

SEQ ID NO: 1383228 - DNA, 15 bp, Homo sapiens
cactataccaaagcc

SEQ ID NO: 1383229 - DNA, 15 bp, Homo sapiens
ccactataccaaagc

SEQ ID NO: 1383230 - DNA, 15 bp, Homo sapiens
gccactataccaaag

SEQ ID NO: 1383231 - DNA, 15 bp, Homo sapiens
agccactataccaaa

SEQ ID NO: 1383232 - DNA, 15 bp, Homo sapiens
aagccactataccaa

SEQ ID NO: 1383233 - DNA, 15 bp, Homo sapiens
taagccactatacca

SEQ ID NO: 1383234 - DNA, 15 bp, Homo sapiens
ttaagccactatacc

SEQ ID NO: 1383235 - DNA, 15 bp, Homo sapiens
cttaagccactatac

SEQ ID NO: 1383236 - DNA, 15 bp, Homo sapiens
tcttaagccactata

SEQ ID NO: 1383237 - DNA, 15 bp, Homo sapiens
ctcttaagccactat

SEQ ID NO: 1383238 - DNA, 15 bp, Homo sapiens
tctcttaagccacta

SEQ ID NO: 1383239 - DNA, 15 bp, Homo sapiens
ctctcttaagccact

SEQ ID NO: 1383240 - DNA, 15 bp, Homo sapiens
gctctcttaagccac

SEQ ID NO: 1383241 - DNA, 15 bp, Homo sapiens
agctctcttaagcca

SEQ ID NO: 1383242 - DNA, 15 bp, Homo sapiens
tagctctcttaagcc

SEQ ID NO: 1383243 - DNA, 15 bp, Homo sapiens
gtagctctcttaagc

SEQ ID NO: 1383244 - DNA, 15 bp, Homo sapiens
tgtagctctcttaag

SEQ ID NO: 1383245 - DNA, 15 bp, Homo sapiens
gtgtagctctcttaa

SEQ ID NO: 1383246 - DNA, 15 bp, Homo sapiens
tgtgtagctctctta

SEQ ID NO: 1383247 - DNA, 15 bp, Homo sapiens
atgtgtagctctctt

SEQ ID NO: 1383248 - DNA, 15 bp, Homo sapiens
tatgtgtagctctct

SEQ ID NO: 1383249 - DNA, 15 bp, Homo sapiens
ttatgtgtagctctc

SEQ ID NO: 1383250 - DNA, 15 bp, Homo sapiens
tttatgtgtagctct

SEQ ID NO: 1383251 - DNA, 15 bp, Homo sapiens
ttttatgtgtagctc

SEQ ID NO: 1383252 - DNA, 15 bp, Homo sapiens
attttatgtgtagct

SEQ ID NO: 1383253 - DNA, 15 bp, Homo sapiens
cattttatgtgtagc

SEQ ID NO: 1383254 - DNA, 15 bp, Homo sapiens
acattttatgtgtag

SEQ ID NO: 1383255 - DNA, 15 bp, Homo sapiens
tacattttatgtgta

SEQ ID NO: 1383256 - DNA, 15 bp, Homo sapiens
ttacattttatgtgt

SEQ ID NO: 1383257 - DNA, 15 bp, Homo sapiens
cttacattttatgtg

SEQ ID NO: 1383258 - DNA, 15 bp, Homo sapiens
acttacattttatgt

SEQ ID NO: 1383259 - DNA, 15 bp, Homo sapiens
aacttacattttatg

SEQ ID NO: 1383260 - DNA, 15 bp, Homo sapiens
caacttacattttat

SEQ ID NO: 1383261 - DNA, 15 bp, Homo sapiens
tcaacttacatttta

SEQ ID NO: 1383262 - DNA, 15 bp, Homo sapiens
ctcaacttacatttt

SEQ ID NO: 1383263 - DNA, 15 bp, Homo sapiens
cctcaacttacattt

SEQ ID NO: 1383264 - DNA, 15 bp, Homo sapiens
ccctcaacttacatt

SEQ ID NO: 1383265 - DNA, 15 bp, Homo sapiens
accctcaacttacat

SEQ ID NO: 1383266 - DNA, 15 bp, Homo sapiens
taccctcaacttaca

SEQ ID NO: 1383267 - DNA, 15 bp, Homo sapiens
ttaccctcaacttac

SEQ ID NO: 1383268 - DNA, 15 bp, Homo sapiens
attaccctcaactta

SEQ ID NO: 1383269 - DNA, 15 bp, Homo sapiens
tattaccctcaactt

SEQ ID NO: 1383270 - DNA, 15 bp, Homo sapiens
atattaccctcaact

SEQ ID NO: 1383271 - DNA, 15 bp, Homo sapiens
gatattaccctcaac

SEQ ID NO: 1383272 - DNA, 15 bp, Homo sapiens
tgatattaccctcaa

SEQ ID NO: 1383273 - DNA, 15 bp, Homo sapiens
ctgatattaccctca

SEQ ID NO: 1383274 - DNA, 15 bp, Homo sapiens
cctgatattaccctc

SEQ ID NO: 1383275 - DNA, 15 bp, Homo sapiens
tcctgatattaccct

SEQ ID NO: 1383276 - DNA, 15 bp, Homo sapiens
ttcctgatattaccc

SEQ ID NO: 1383277 - DNA, 15 bp, Homo sapiens
tttcctgatattacc

SEQ ID NO: 1383278 - DNA, 15 bp, Homo sapiens
ttttcctgatattac

SEQ ID NO: 1383279 - DNA, 15 bp, Homo sapiens
tttttcctgatatta

SEQ ID NO: 1383280 - DNA, 15 bp, Homo sapiens
gtttttcctgatatt

SEQ ID NO: 1383281 - DNA, 15 bp, Homo sapiens
tgtttttcctgatat

SEQ ID NO: 1383282 - DNA, 15 bp, Homo sapiens
ttgtttttcctgata

SEQ ID NO: 1383283 - DNA, 15 bp, Homo sapiens
gttgtttttcctgat

SEQ ID NO: 1383284 - DNA, 15 bp, Homo sapiens
agttgtttttcctga

SEQ ID NO: 1383285 - DNA, 15 bp, Homo sapiens
gagttgtttttcctg

SEQ ID NO: 1383286 - DNA, 15 bp, Homo sapiens
tgagttgtttttcct

SEQ ID NO: 1383287 - DNA, 15 bp, Homo sapiens
ctgagttgtttttcc

SEQ ID NO: 1383288 - DNA, 15 bp, Homo sapiens
tctgagttgtttttc

SEQ ID NO: 1383289 - DNA, 15 bp, Homo sapiens
ctctgagttgttttt

SEQ ID NO: 1383290 - DNA, 15 bp, Homo sapiens
tctctgagttgtttt

SEQ ID NO: 1383291 - DNA, 15 bp, Homo sapiens
atctctgagttgttt

SEQ ID NO: 1383292 - DNA, 15 bp, Homo sapiens
catctctgagttgtt

SEQ ID NO: 1383293 - DNA, 15 bp, Homo sapiens
tcatctctgagttgt

SEQ ID NO: 1383294 - DNA, 15 bp, Homo sapiens
ctcatctctgagttg

SEQ ID NO: 1383295 - DNA, 15 bp, Homo sapiens
cctcatctctgagtt

SEQ ID NO: 1383296 - DNA, 15 bp, Homo sapiens
tcctcatctctgagt

SEQ ID NO: 1383297 - DNA, 15 bp, Homo sapiens
atcctcatctctgag

SEQ ID NO: 1383298 - DNA, 15 bp, Homo sapiens
aatcctcatctctga

SEQ ID NO: 1383299 - DNA, 15 bp, Homo sapiens
taatcctcatctctg

SEQ ID NO: 1383300 - DNA, 15 bp, Homo sapiens
gtaatcctcatctct

SEQ ID NO: 1383301 - DNA, 15 bp, Homo sapiens
agtaatcctcatctc

SEQ ID NO: 1383302 - DNA, 15 bp, Homo sapiens
gagtaatcctcatct

SEQ ID NO: 1383303 - DNA, 15 bp, Homo sapiens
tgagtaatcctcatc

SEQ ID NO: 1383304 - DNA, 15 bp, Homo sapiens
ctgagtaatcctcat

SEQ ID NO: 1383305 - DNA, 15 bp, Homo sapiens
cctgagtaatcctca

SEQ ID NO: 1383306 - DNA, 15 bp, Homo sapiens
tcctgagtaatcctc

SEQ ID NO: 1383307 - DNA, 15 bp, Homo sapiens
atcctgagtaatcct

SEQ ID NO: 1383308 - DNA, 15 bp, Homo sapiens
aatcctgagtaatcc

SEQ ID NO: 1383309 - DNA, 15 bp, Homo sapiens
aaatcctgagtaatc

SEQ ID NO: 1383310 - DNA, 15 bp, Homo sapiens
caaatcctgagtaat

SEQ ID NO: 1383311 - DNA, 15 bp, Homo sapiens
tcaaatcctgagtaa

SEQ ID NO: 1383312 - DNA, 15 bp, Homo sapiens
atcaaatcctgagta

SEQ ID NO: 1383313 - DNA, 15 bp, Homo sapiens
aatcaaatcctgagt

SEQ ID NO: 1383314 - DNA, 15 bp, Homo sapiens
taatcaaatcctgag

SEQ ID NO: 1383315 - DNA, 15 bp, Homo sapiens
ctaatcaaatcctga

SEQ ID NO: 1383316 - DNA, 15 bp, Homo sapiens
tctaatcaaatcctg

SEQ ID NO: 1383317 - DNA, 15 bp, Homo sapiens
ttctaatcaaatcct

SEQ ID NO: 1383318 - DNA, 15 bp, Homo sapiens
gttctaatcaaatcc

SEQ ID NO: 1383319 - DNA, 15 bp, Homo sapiens
agttctaatcaaatc

SEQ ID NO: 1383320 - DNA, 15 bp, Homo sapiens
aagttctaatcaaat

SEQ ID NO: 1383321 - DNA, 15 bp, Homo sapiens
aaagttctaatcaaa

SEQ ID NO: 1383322 - DNA, 15 bp, Homo sapiens
aaaagttctaatcaa

SEQ ID NO: 1383323 - DNA, 15 bp, Homo sapiens
gaaaagttctaatca

SEQ ID NO: 1383324 - DNA, 15 bp, Homo sapiens
agaaaagttctaatc

SEQ ID NO: 1383325 - DNA, 15 bp, Homo sapiens
tagaaaagttctaat

SEQ ID NO: 1383326 - DNA, 15 bp, Homo sapiens
ttagaaaagttctaa

SEQ ID NO: 1383327 - DNA, 15 bp, Homo sapiens
cttagaaaagttcta

SEQ ID NO: 1383328 - DNA, 15 bp, Homo sapiens
acttagaaaagttct

SEQ ID NO: 1383329 - DNA, 15 bp, Homo sapiens
cacttagaaaagttc

SEQ ID NO: 1383330 - DNA, 15 bp, Homo sapiens
ccacttagaaaagtt

SEQ ID NO: 1383331 - DNA, 15 bp, Homo sapiens
tccacttagaaaagt

SEQ ID NO: 1383332 - DNA, 15 bp, Homo sapiens
atccacttagaaaag

SEQ ID NO: 1383333 - DNA, 15 bp, Homo sapiens
gatccacttagaaaa

SEQ ID NO: 1383334 - DNA, 15 bp, Homo sapiens
ggatccacttagaaa

SEQ ID NO: 1383335 - DNA, 15 bp, Homo sapiens
aggatccacttagaa

SEQ ID NO: 1383336 - DNA, 15 bp, Homo sapiens
gaggatccacttaga

SEQ ID NO: 1383337 - DNA, 15 bp, Homo sapiens
tgaggatccacttag

SEQ ID NO: 1383338 - DNA, 15 bp, Homo sapiens
ttgaggatccactta

SEQ ID NO: 1383339 - DNA, 15 bp, Homo sapiens
attgaggatccactt

SEQ ID NO: 1383340 - DNA, 15 bp, Homo sapiens
cattgaggatccact

SEQ ID NO: 1383341 - DNA, 15 bp, Homo sapiens
acattgaggatccac

SEQ ID NO: 1383342 - DNA, 15 bp, Homo sapiens
aacattgaggatcca

SEQ ID NO: 1383343 - DNA, 15 bp, Homo sapiens
taacattgaggatcc

SEQ ID NO: 1383344 - DNA, 15 bp, Homo sapiens
ataacattgaggatc

SEQ ID NO: 1383345 - DNA, 15 bp, Homo sapiens
gataacattgaggat

SEQ ID NO: 1383346 - DNA, 15 bp, Homo sapiens
tgataacattgagga

SEQ ID NO: 1383347 - DNA, 15 bp, Homo sapiens
gtgataacattgagg

SEQ ID NO: 1383348 - DNA, 15 bp, Homo sapiens
agtgataacattgag

SEQ ID NO: 1383349 - DNA, 15 bp, Homo sapiens
aagtgataacattga

SEQ ID NO: 1383350 - DNA, 15 bp, Homo sapiens
aaagtgataacattg

SEQ ID NO: 1383351 - DNA, 15 bp, Homo sapiens
aaaagtgataacatt

SEQ ID NO: 1383352 - DNA, 15 bp, Homo sapiens
aaaaagtgataacat

SEQ ID NO: 1383353 - DNA, 15 bp, Homo sapiens
gaaaaagtgataaca

SEQ ID NO: 1383354 - DNA, 15 bp, Homo sapiens
ggaaaaagtgataac

SEQ ID NO: 1383355 - DNA, 15 bp, Homo sapiens
tggaaaaagtgataa

SEQ ID NO: 1383356 - DNA, 15 bp, Homo sapiens
ttggaaaaagtgata

SEQ ID NO: 1383357 - DNA, 15 bp, Homo sapiens
gttggaaaaagtgat

SEQ ID NO: 1383358 - DNA, 15 bp, Homo sapiens
cgttggaaaaagtga

SEQ ID NO: 1383359 - DNA, 15 bp, Homo sapiens
acgttggaaaaagtg

SEQ ID NO: 1383360 - DNA, 15 bp, Homo sapiens
tacgttggaaaaagt

SEQ ID NO: 1383361 - DNA, 15 bp, Homo sapiens
ttacgttggaaaaag

SEQ ID NO: 1383362 - DNA, 15 bp, Homo sapiens
gttacgttggaaaaa

SEQ ID NO: 1383363 - DNA, 15 bp, Homo sapiens
ggttacgttggaaaa

SEQ ID NO: 1383364 - DNA, 15 bp, Homo sapiens
gggttacgttggaaa

SEQ ID NO: 1383365 - DNA, 15 bp, Homo sapiens
tgggttacgttggaa

SEQ ID NO: 1383366 - DNA, 15 bp, Homo sapiens
ttgggttacgttgga

SEQ ID NO: 1383367 - DNA, 15 bp, Homo sapiens
cttgggttacgttgg

SEQ ID NO: 1383368 - DNA, 15 bp, Homo sapiens
tcttgggttacgttg

SEQ ID NO: 1383369 - DNA, 15 bp, Homo sapiens
atcttgggttacgtt

SEQ ID NO: 1383370 - DNA, 15 bp, Homo sapiens
tatcttgggttacgt

SEQ ID NO: 1383371 - DNA, 15 bp, Homo sapiens
atatcttgggttacg

SEQ ID NO: 1383372 - DNA, 15 bp, Homo sapiens
aatatcttgggttac

SEQ ID NO: 1383373 - DNA, 15 bp, Homo sapiens
gaatatcttgggtta

SEQ ID NO: 1383374 - DNA, 15 bp, Homo sapiens
tgaatatcttgggtt

SEQ ID NO: 1383375 - DNA, 15 bp, Homo sapiens
gtgaatatcttgggt

SEQ ID NO: 1383376 - DNA, 15 bp, Homo sapiens
agtgaatatcttggg

SEQ ID NO: 1383377 - DNA, 15 bp, Homo sapiens
aagtgaatatcttgg

SEQ ID NO: 1383378 - DNA, 15 bp, Homo sapiens
aaagtgaatatcttg

SEQ ID NO: 1383379 - DNA, 15 bp, Homo sapiens
caaagtgaatatctt

SEQ ID NO: 1383380 - DNA, 15 bp, Homo sapiens
tcaaagtgaatatct

SEQ ID NO: 1383381 - DNA, 15 bp, Homo sapiens
ttcaaagtgaatatc

SEQ ID NO: 1383382 - DNA, 15 bp, Homo sapiens
cttcaaagtgaatat

SEQ ID NO: 1383383 - DNA, 15 bp, Homo sapiens
tcttcaaagtgaata

SEQ ID NO: 1383384 - DNA, 15 bp, Homo sapiens
ctcttcaaagtgaat

SEQ ID NO: 1383385 - DNA, 15 bp, Homo sapiens
cctcttcaaagtgaa

SEQ ID NO: 1383386 - DNA, 15 bp, Homo sapiens
ccctcttcaaagtga

SEQ ID NO: 1383387 - DNA, 15 bp, Homo sapiens
gccctcttcaaagtg

SEQ ID NO: 1383388 - DNA, 15 bp, Homo sapiens
agccctcttcaaagt

SEQ ID NO: 1383389 - DNA, 15 bp, Homo sapiens
cagccctcttcaaag

SEQ ID NO: 1383390 - DNA, 15 bp, Homo sapiens
acagccctcttcaaa

SEQ ID NO: 1383391 - DNA, 15 bp, Homo sapiens
cacagccctcttcaa

SEQ ID NO: 1383392 - DNA, 15 bp, Homo sapiens
tcacagccctcttca

SEQ ID NO: 1383393 - DNA, 15 bp, Homo sapiens
ctcacagccctcttc

SEQ ID NO: 1383394 - DNA, 15 bp, Homo sapiens
tctcacagccctctt

SEQ ID NO: 1383395 - DNA, 15 bp, Homo sapiens
atctcacagccctct

SEQ ID NO: 1383396 - DNA, 15 bp, Homo sapiens
tatctcacagccctc

SEQ ID NO: 1383397 - DNA, 15 bp, Homo sapiens
atatctcacagccct

SEQ ID NO: 1383398 - DNA, 15 bp, Homo sapiens
gatatctcacagccc

SEQ ID NO: 1383399 - DNA, 15 bp, Homo sapiens
cgatatctcacagcc

SEQ ID NO: 1383400 - DNA, 15 bp, Homo sapiens
ccgatatctcacagc

SEQ ID NO: 1383401 - DNA, 15 bp, Homo sapiens
gccgatatctcacag

SEQ ID NO: 1383402 - DNA, 15 bp, Homo sapiens
tgccgatatctcaca

SEQ ID NO: 1383403 - DNA, 15 bp, Homo sapiens
atgccgatatctcac

SEQ ID NO: 1383404 - DNA, 15 bp, Homo sapiens
aatgccgatatctca

SEQ ID NO: 1383405 - DNA, 15 bp, Homo sapiens
aaatgccgatatctc

SEQ ID NO: 1383406 - DNA, 15 bp, Homo sapiens
caaatgccgatatct

SEQ ID NO: 1383407 - DNA, 15 bp, Homo sapiens
gcaaatgccgatatc

SEQ ID NO: 1383408 - DNA, 15 bp, Homo sapiens
agcaaatgccgatat

SEQ ID NO: 1383409 - DNA, 15 bp, Homo sapiens
tagcaaatgccgata

SEQ ID NO: 1383410 - DNA, 15 bp, Homo sapiens
ttagcaaatgccgat

SEQ ID NO: 1383411 - DNA, 15 bp, Homo sapiens
gttagcaaatgccga

SEQ ID NO: 1383412 - DNA, 15 bp, Homo sapiens
tgttagcaaatgccg

SEQ ID NO: 1383413 - DNA, 15 bp, Homo sapiens
ttgttagcaaatgcc

SEQ ID NO: 1383414 - DNA, 15 bp, Homo sapiens
gttgttagcaaatgc

SEQ ID NO: 1383415 - DNA, 15 bp, Homo sapiens
tgttgttagcaaatg

SEQ ID NO: 1383416 - DNA, 15 bp, Homo sapiens
gtgttgttagcaaat

SEQ ID NO: 1383417 - DNA, 15 bp, Homo sapiens
agtgttgttagcaaa

SEQ ID NO: 1383418 - DNA, 15 bp, Homo sapiens
cagtgttgttagcaa

SEQ ID NO: 1383419 - DNA, 15 bp, Homo sapiens
ccagtgttgttagca

SEQ ID NO: 1383420 - DNA, 15 bp, Homo sapiens
accagtgttgttagc

SEQ ID NO: 1383421 - DNA, 15 bp, Homo sapiens
taccagtgttgttag

SEQ ID NO: 1383422 - DNA, 15 bp, Homo sapiens
ataccagtgttgtta

SEQ ID NO: 1383423 - DNA, 15 bp, Homo sapiens
aataccagtgttgtt

SEQ ID NO: 1383424 - DNA, 15 bp, Homo sapiens
aaataccagtgttgt

SEQ ID NO: 1383425 - DNA, 15 bp, Homo sapiens
taaataccagtgttg

SEQ ID NO: 1383426 - DNA, 15 bp, Homo sapiens
ctaaataccagtgtt

SEQ ID NO: 1383427 - DNA, 15 bp, Homo sapiens
gctaaataccagtgt

SEQ ID NO: 1383428 - DNA, 15 bp, Homo sapiens
tgctaaataccagtg

SEQ ID NO: 1383429 - DNA, 15 bp, Homo sapiens
ttgctaaataccagt

SEQ ID NO: 1383430 - DNA, 15 bp, Homo sapiens
tttgctaaataccag

SEQ ID NO: 1383431 - DNA, 15 bp, Homo sapiens
atttgctaaatacca

SEQ ID NO: 1383432 - DNA, 15 bp, Homo sapiens
tatttgctaaatacc

SEQ ID NO: 1383433 - DNA, 15 bp, Homo sapiens
gtatttgctaaatac

SEQ ID NO: 1383434 - DNA, 15 bp, Homo sapiens
agtatttgctaaata

SEQ ID NO: 1383435 - DNA, 15 bp, Homo sapiens
gagtatttgctaaat

SEQ ID NO: 1383436 - DNA, 15 bp, Homo sapiens
tgagtatttgctaaa

SEQ ID NO: 1383437 - DNA, 15 bp, Homo sapiens
ttgagtatttgctaa

SEQ ID NO: 1383438 - DNA, 15 bp, Homo sapiens
gttgagtatttgcta

SEQ ID NO: 1383439 - DNA, 15 bp, Homo sapiens
agttgagtatttgct

SEQ ID NO: 1383440 - DNA, 15 bp, Homo sapiens
tagttgagtatttgc

SEQ ID NO: 1383441 - DNA, 15 bp, Homo sapiens
ctagttgagtatttg

SEQ ID NO: 1383442 - DNA, 15 bp, Homo sapiens
cctagttgagtattt

SEQ ID NO: 1383443 - DNA, 15 bp, Homo sapiens
acctagttgagtatt

SEQ ID NO: 1383444 - DNA, 15 bp, Homo sapiens
tacctagttgagtat

SEQ ID NO: 1383445 - DNA, 15 bp, Homo sapiens
atacctagttgagta

SEQ ID NO: 1383446 - DNA, 15 bp, Homo sapiens
gatacctagttgagt

SEQ ID NO: 1383447 - DNA, 15 bp, Homo sapiens
tgatacctagttgag

SEQ ID NO: 1383448 - DNA, 15 bp, Homo sapiens
ctgatacctagttga

SEQ ID NO: 1383449 - DNA, 15 bp, Homo sapiens
actgatacctagttg

SEQ ID NO: 1383450 - DNA, 15 bp, Homo sapiens
tactgatacctagtt

SEQ ID NO: 1383451 - DNA, 15 bp, Homo sapiens
ttactgatacctagt

SEQ ID NO: 1383452 - DNA, 15 bp, Homo sapiens
cttactgatacctag

SEQ ID NO: 1383453 - DNA, 15 bp, Homo sapiens
acttactgataccta

SEQ ID NO: 1383454 - DNA, 15 bp, Homo sapiens
cacttactgatacct

SEQ ID NO: 1383455 - DNA, 15 bp, Homo sapiens
acacttactgatacc

SEQ ID NO: 1383456 - DNA, 15 bp, Homo sapiens
aacacttactgatac

SEQ ID NO: 1383457 - DNA, 15 bp, Homo sapiens
aaacacttactgata

SEQ ID NO: 1383458 - DNA, 15 bp, Homo sapiens
taaacacttactgat

SEQ ID NO: 1383459 - DNA, 15 bp, Homo sapiens
ataaacacttactga

SEQ ID NO: 1383460 - DNA, 15 bp, Homo sapiens
aataaacacttactg

SEQ ID NO: 1383461 - DNA, 15 bp, Homo sapiens
caataaacacttact

SEQ ID NO: 1383462 - DNA, 15 bp, Homo sapiens
tcaataaacacttac

SEQ ID NO: 1383463 - DNA, 15 bp, Homo sapiens
gtcaataaacactta

SEQ ID NO: 1383464 - DNA, 15 bp, Homo sapiens
agtcaataaacactt

SEQ ID NO: 1383465 - DNA, 15 bp, Homo sapiens
cagtcaataaacact

SEQ ID NO: 1383466 - DNA, 15 bp, Homo sapiens
tcagtcaataaacac

SEQ ID NO: 1383467 - DNA, 15 bp, Homo sapiens
ttcagtcaataaaca

SEQ ID NO: 1383468 - DNA, 15 bp, Homo sapiens
attcagtcaataaac

SEQ ID NO: 1383469 - DNA, 15 bp, Homo sapiens
tattcagtcaataaa

SEQ ID NO: 1383470 - DNA, 15 bp, Homo sapiens
ctattcagtcaataa

SEQ ID NO: 1383471 - DNA, 15 bp, Homo sapiens
gctattcagtcaata

SEQ ID NO: 1383472 - DNA, 15 bp, Homo sapiens
agctattcagtcaat

SEQ ID NO: 1383473 - DNA, 15 bp, Homo sapiens
tagctattcagtcaa

SEQ ID NO: 1383474 - DNA, 15 bp, Homo sapiens
ttagctattcagtca

SEQ ID NO: 1383475 - DNA, 15 bp, Homo sapiens
tttagctattcagtc

SEQ ID NO: 1383476 - DNA, 15 bp, Homo sapiens
ttttagctattcagt

SEQ ID NO: 1383477 - DNA, 15 bp, Homo sapiens
tttttagctattcag

SEQ ID NO: 1383478 - DNA, 15 bp, Homo sapiens
atttttagctattca

SEQ ID NO: 1383479 - DNA, 15 bp, Homo sapiens
aatttttagctattc

SEQ ID NO: 1383480 - DNA, 15 bp, Homo sapiens
caatttttagctatt

SEQ ID NO: 1383481 - DNA, 15 bp, Homo sapiens
acaatttttagctat

SEQ ID NO: 1383482 - DNA, 15 bp, Homo sapiens
gacaatttttagcta

SEQ ID NO: 1383483 - DNA, 15 bp, Homo sapiens
tgacaatttttagct

SEQ ID NO: 1383484 - DNA, 15 bp, Homo sapiens
ttgacaatttttagc

SEQ ID NO: 1383485 - DNA, 15 bp, Homo sapiens
attgacaatttttag

SEQ ID NO: 1383486 - DNA, 15 bp, Homo sapiens
tattgacaattttta

SEQ ID NO: 1383487 - DNA, 15 bp, Homo sapiens
atattgacaattttt

SEQ ID NO: 1383488 - DNA, 15 bp, Homo sapiens
gatattgacaatttt

SEQ ID NO: 1383489 - DNA, 15 bp, Homo sapiens
ggatattgacaattt

SEQ ID NO: 1383490 - DNA, 15 bp, Homo sapiens
aggatattgacaatt

SEQ ID NO: 1383491 - DNA, 15 bp, Homo sapiens
gaggatattgacaat

SEQ ID NO: 1383492 - DNA, 15 bp, Homo sapiens
ggaggatattgacaa

SEQ ID NO: 1383493 - DNA, 15 bp, Homo sapiens
gggaggatattgaca

SEQ ID NO: 1383494 - DNA, 15 bp, Homo sapiens
ggggaggatattgac

SEQ ID NO: 1383495 - DNA, 15 bp, Homo sapiens
gggggaggatattga

SEQ ID NO: 1383496 - DNA, 15 bp, Homo sapiens
cgggggaggatattg

SEQ ID NO: 1383497 - DNA, 15 bp, Homo sapiens
tcgggggaggatatt

SEQ ID NO: 1383498 - DNA, 15 bp, Homo sapiens
gtcgggggaggatat

SEQ ID NO: 1383499 - DNA, 15 bp, Homo sapiens
ggtcgggggaggata

SEQ ID NO: 1383500 - DNA, 15 bp, Homo sapiens
gggtcgggggaggat

SEQ ID NO: 1383501 - DNA, 15 bp, Homo sapiens
tgggtcgggggagga

SEQ ID NO: 1383502 - DNA, 15 bp, Homo sapiens
ttgggtcgggggagg

SEQ ID NO: 1383503 - DNA, 15 bp, Homo sapiens
cttgggtcgggggag

SEQ ID NO: 1383504 - DNA, 15 bp, Homo sapiens
tcttgggtcggggga

SEQ ID NO: 1383505 - DNA, 15 bp, Homo sapiens
ctcttgggtcggggg

SEQ ID NO: 1383506 - DNA, 15 bp, Homo sapiens
tctcttgggtcgggg

SEQ ID NO: 1383507 - DNA, 15 bp, Homo sapiens
atctcttgggtcggg

SEQ ID NO: 1383508 - DNA, 15 bp, Homo sapiens
gatctcttgggtcgg

SEQ ID NO: 1383509 - DNA, 15 bp, Homo sapiens
tgatctcttgggtcg

SEQ ID NO: 1383510 - DNA, 15 bp, Homo sapiens
ctgatctcttgggtc

SEQ ID NO: 1383511 - DNA, 15 bp, Homo sapiens
tctgatctcttgggt

SEQ ID NO: 1383512 - DNA, 15 bp, Homo sapiens
ttctgatctcttggg

SEQ ID NO: 1383513 - DNA, 15 bp, Homo sapiens
cttctgatctcttgg

SEQ ID NO: 1383514 - DNA, 15 bp, Homo sapiens
ccttctgatctcttg

SEQ ID NO: 1383515 - DNA, 15 bp, Homo sapiens
accttctgatctctt

SEQ ID NO: 1383516 - DNA, 15 bp, Homo sapiens
taccttctgatctct

SEQ ID NO: 1383517 - DNA, 15 bp, Homo sapiens
ataccttctgatctc

SEQ ID NO: 1383518 - DNA, 15 bp, Homo sapiens
aataccttctgatct

SEQ ID NO: 1383519 - DNA, 15 bp, Homo sapiens
caataccttctgatc

SEQ ID NO: 1383520 - DNA, 15 bp, Homo sapiens
ccaataccttctgat

SEQ ID NO: 1383521 - DNA, 15 bp, Homo sapiens
accaataccttctga

SEQ ID NO: 1383522 - DNA, 15 bp, Homo sapiens
caccaataccttctg

SEQ ID NO: 1383523 - DNA, 15 bp, Homo sapiens
acaccaataccttct

SEQ ID NO: 1383524 - DNA, 15 bp, Homo sapiens
aacaccaataccttc

SEQ ID NO: 1383525 - DNA, 15 bp, Homo sapiens
aaacaccaatacctt

SEQ ID NO: 1383526 - DNA, 15 bp, Homo sapiens
gaaacaccaatacct

SEQ ID NO: 1383527 - DNA, 15 bp, Homo sapiens
agaaacaccaatacc

SEQ ID NO: 1383528 - DNA, 15 bp, Homo sapiens
cagaaacaccaatac

SEQ ID NO: 1383529 - DNA, 15 bp, Homo sapiens
acagaaacaccaata

SEQ ID NO: 1383530 - DNA, 15 bp, Homo sapiens
aacagaaacaccaat

SEQ ID NO: 1383531 - DNA, 15 bp, Homo sapiens
caacagaaacaccaa

SEQ ID NO: 1383532 - DNA, 15 bp, Homo sapiens
acaacagaaacacca

SEQ ID NO: 1383533 - DNA, 15 bp, Homo sapiens
gacaacagaaacacc

SEQ ID NO: 1383534 - DNA, 15 bp, Homo sapiens
tgacaacagaaacac

SEQ ID NO: 1383535 - DNA, 15 bp, Homo sapiens
ttgacaacagaaaca

SEQ ID NO: 1383536 - DNA, 15 bp, Homo sapiens
cttgacaacagaaac

SEQ ID NO: 1383537 - DNA, 15 bp, Homo sapiens
tcttgacaacagaaa

SEQ ID NO: 1383538 - DNA, 15 bp, Homo sapiens
ctcttgacaacagaa

SEQ ID NO: 1383539 - DNA, 15 bp, Homo sapiens
tctcttgacaacaga

SEQ ID NO: 1383540 - DNA, 15 bp, Homo sapiens
ttctcttgacaacag

SEQ ID NO: 1383541 - DNA, 15 bp, Homo sapiens
tttctcttgacaaca

SEQ ID NO: 1383542 - DNA, 15 bp, Homo sapiens
ctttctcttgacaac

SEQ ID NO: 1383543 - DNA, 15 bp, Homo sapiens
actttctcttgacaa

SEQ ID NO: 1383544 - DNA, 15 bp, Homo sapiens
gactttctcttgaca

SEQ ID NO: 1383545 - DNA, 15 bp, Homo sapiens
tgactttctcttgac

SEQ ID NO: 1383546 - DNA, 15 bp, Homo sapiens
ctgactttctcttga

SEQ ID NO: 1383547 - DNA, 15 bp, Homo sapiens
actgactttctcttg

SEQ ID NO: 1383548 - DNA, 15 bp, Homo sapiens
cactgactttctctt

SEQ ID NO: 1383549 - DNA, 15 bp, Homo sapiens
acactgactttctct

SEQ ID NO: 1383550 - DNA, 15 bp, Homo sapiens
tacactgactttctc

SEQ ID NO: 1383551 - DNA, 15 bp, Homo sapiens
atacactgactttct

SEQ ID NO: 1383552 - DNA, 15 bp, Homo sapiens
aatacactgactttc

SEQ ID NO: 1383553 - DNA, 15 bp, Homo sapiens
aaatacactgacttt

SEQ ID NO: 1383554 - DNA, 15 bp, Homo sapiens
caaatacactgactt

SEQ ID NO: 1383555 - DNA, 15 bp, Homo sapiens
gcaaatacactgact

SEQ ID NO: 1383556 - DNA, 15 bp, Homo sapiens
agcaaatacactgac

SEQ ID NO: 1383557 - DNA, 15 bp, Homo sapiens
cagcaaatacactga

SEQ ID NO: 1383558 - DNA, 15 bp, Homo sapiens
tcagcaaatacactg

SEQ ID NO: 1383559 - DNA, 15 bp, Homo sapiens
atcagcaaatacact

SEQ ID NO: 1383560 - DNA, 15 bp, Homo sapiens
aatcagcaaatacac

SEQ ID NO: 1383561 - DNA, 15 bp, Homo sapiens
caatcagcaaataca

SEQ ID NO: 1383562 - DNA, 15 bp, Homo sapiens
tcaatcagcaaatac

SEQ ID NO: 1383563 - DNA, 15 bp, Homo sapiens
atcaatcagcaaata

SEQ ID NO: 1383564 - DNA, 15 bp, Homo sapiens
aatcaatcagcaaat

SEQ ID NO: 1383565 - DNA, 15 bp, Homo sapiens
taatcaatcagcaaa

SEQ ID NO: 1383566 - DNA, 15 bp, Homo sapiens
ttaatcaatcagcaa

SEQ ID NO: 1383567 - DNA, 15 bp, Homo sapiens
gttaatcaatcagca

SEQ ID NO: 1383568 - DNA, 15 bp, Homo sapiens
ggttaatcaatcagc

SEQ ID NO: 1383569 - DNA, 15 bp, Homo sapiens
tggttaatcaatcag

SEQ ID NO: 1383570 - DNA, 15 bp, Homo sapiens
gtggttaatcaatca

SEQ ID NO: 1383571 - DNA, 15 bp, Homo sapiens
agtggttaatcaatc

SEQ ID NO: 1383572 - DNA, 15 bp, Homo sapiens
aagtggttaatcaat

SEQ ID NO: 1383573 - DNA, 15 bp, Homo sapiens
aaagtggttaatcaa

SEQ ID NO: 1383574 - DNA, 15 bp, Homo sapiens
aaaagtggttaatca

SEQ ID NO: 1383575 - DNA, 15 bp, Homo sapiens
taaaagtggttaatc

SEQ ID NO: 1383576 - DNA, 15 bp, Homo sapiens
ataaaagtggttaat

SEQ ID NO: 1383577 - DNA, 15 bp, Homo sapiens
aataaaagtggttaa

SEQ ID NO: 1383578 - DNA, 15 bp, Homo sapiens
taataaaagtggtta

SEQ ID NO: 1383579 - DNA, 15 bp, Homo sapiens
ttaataaaagtggtt

SEQ ID NO: 1383580 - DNA, 15 bp, Homo sapiens
gttaataaaagtggt

SEQ ID NO: 1383581 - DNA, 15 bp, Homo sapiens
ggttaataaaagtgg

SEQ ID NO: 1383582 - DNA, 15 bp, Homo sapiens
aggttaataaaagtg

SEQ ID NO: 1383583 - DNA, 15 bp, Homo sapiens
aaggttaataaaagt

SEQ ID NO: 1383584 - DNA, 15 bp, Homo sapiens
aaaggttaataaaag

SEQ ID NO: 1383585 - DNA, 15 bp, Homo sapiens
taaaggttaataaaa

SEQ ID NO: 1383586 - DNA, 15 bp, Homo sapiens
ctaaaggttaataaa

SEQ ID NO: 1383587 - DNA, 15 bp, Homo sapiens
actaaaggttaataa

SEQ ID NO: 1383588 - DNA, 15 bp, Homo sapiens
tactaaaggttaata

SEQ ID NO: 1383589 - DNA, 15 bp, Homo sapiens
gtactaaaggttaat

SEQ ID NO: 1383590 - DNA, 15 bp, Homo sapiens
agtactaaaggttaa

SEQ ID NO: 1383591 - DNA, 15 bp, Homo sapiens
tagtactaaaggtta

SEQ ID NO: 1383592 - DNA, 15 bp, Homo sapiens
ttagtactaaaggtt

SEQ ID NO: 1383593 - DNA, 15 bp, Homo sapiens
attagtactaaaggt

SEQ ID NO: 1383594 - DNA, 15 bp, Homo sapiens
aattagtactaaagg

SEQ ID NO: 1383595 - DNA, 15 bp, Homo sapiens
aaattagtactaaag

SEQ ID NO: 1383596 - DNA, 15 bp, Homo sapiens
gaaattagtactaaa

SEQ ID NO: 1383597 - DNA, 15 bp, Homo sapiens
ggaaattagtactaa

SEQ ID NO: 1383598 - DNA, 15 bp, Homo sapiens
aggaaattagtacta

SEQ ID NO: 1383599 - DNA, 15 bp, Homo sapiens
aaggaaattagtact

SEQ ID NO: 1383600 - DNA, 15 bp, Homo sapiens
aaaggaaattagtac

SEQ ID NO: 1383601 - DNA, 15 bp, Homo sapiens
gaaaggaaattagta

SEQ ID NO: 1383602 - DNA, 15 bp, Homo sapiens
ggaaaggaaattagt

SEQ ID NO: 1383603 - DNA, 15 bp, Homo sapiens
aggaaaggaaattag

SEQ ID NO: 1383604 - DNA, 15 bp, Homo sapiens
gaggaaaggaaatta

SEQ ID NO: 1383605 - DNA, 15 bp, Homo sapiens
ggaggaaaggaaatt

SEQ ID NO: 1383606 - DNA, 15 bp, Homo sapiens
tggaggaaaggaaat

SEQ ID NO: 1383607 - DNA, 15 bp, Homo sapiens
ctggaggaaaggaaa

SEQ ID NO: 1383608 - DNA, 15 bp, Homo sapiens
ttctggaggaaagga

SEQ ID NO: 1383609 - DNA, 15 bp, Homo sapiens
gttctggaggaaagg

SEQ ID NO: 1383610 - DNA, 15 bp, Homo sapiens
agttctggaggaaag

SEQ ID NO: 1383611 - DNA, 15 bp, Homo sapiens
gagttctggaggaaa

SEQ ID NO: 1383612 - DNA, 15 bp, Homo sapiens
ggagttctggaggaa

SEQ ID NO: 1383613 - DNA, 15 bp, Homo sapiens
aggagttctggagga

SEQ ID NO: 1383614 - DNA, 15 bp, Homo sapiens
gaggagttctggagg

SEQ ID NO: 1383615 - DNA, 15 bp, Homo sapiens
ggaggagttctggag

SEQ ID NO: 1383616 - DNA, 15 bp, Homo sapiens
gggaggagttctgga

SEQ ID NO: 1383617 - DNA, 15 bp, Homo sapiens
ggggaggagttctgg

SEQ ID NO: 1383618 - DNA, 15 bp, Homo sapiens
gggggaggagttctg

SEQ ID NO: 1383619 - DNA, 15 bp, Homo sapiens
agggggaggagttct

SEQ ID NO: 1383620 - DNA, 15 bp, Homo sapiens
gagggggaggagttc

SEQ ID NO: 1383621 - DNA, 15 bp, Homo sapiens
ggagggggaggagtt

SEQ ID NO: 1383622 - DNA, 15 bp, Homo sapiens
tggagggggaggagt

SEQ ID NO: 1383623 - DNA, 15 bp, Homo sapiens
agtggagggggagga

SEQ ID NO: 1383624 - DNA, 15 bp, Homo sapiens
tagtggagggggagg

SEQ ID NO: 1383625 - DNA, 15 bp, Homo sapiens
gtagtggagggggag

SEQ ID NO: 1383626 - DNA, 15 bp, Homo sapiens
agtagtggaggggga

SEQ ID NO: 1383627 - DNA, 15 bp, Homo sapiens
gagtagtggaggggg

SEQ ID NO: 1383628 - DNA, 15 bp, Homo sapiens
ggagtagtggagggg

SEQ ID NO: 1383629 - DNA, 15 bp, Homo sapiens
aggagtagtggaggg

SEQ ID NO: 1383630 - DNA, 15 bp, Homo sapiens
aaggagtagtggagg

SEQ ID NO: 1383631 - DNA, 15 bp, Homo sapiens
taaggagtagtggag

SEQ ID NO: 1383632 - DNA, 15 bp, Homo sapiens
ataaggagtagtgga

SEQ ID NO: 1383633 - DNA, 15 bp, Homo sapiens
gataaggagtagtgg

SEQ ID NO: 1383634 - DNA, 15 bp, Homo sapiens
agataaggagtagtg

SEQ ID NO: 1383635 - DNA, 15 bp, Homo sapiens
gagataaggagtagt

SEQ ID NO: 1383636 - DNA, 15 bp, Homo sapiens
tgagataaggagtag

SEQ ID NO: 1383637 - DNA, 15 bp, Homo sapiens
ttgagataaggagta

SEQ ID NO: 1383638 - DNA, 15 bp, Homo sapiens
attgagataaggagt

SEQ ID NO: 1383639 - DNA, 15 bp, Homo sapiens
cattgagataaggag

SEQ ID NO: 1383640 - DNA, 15 bp, Homo sapiens
tcattgagataagga

SEQ ID NO: 1383641 - DNA, 15 bp, Homo sapiens
ctcattgagataagg

SEQ ID NO: 1383642 - DNA, 15 bp, Homo sapiens
actcattgagataag

SEQ ID NO: 1383643 - DNA, 15 bp, Homo sapiens
cactcattgagataa

SEQ ID NO: 1383644 - DNA, 15 bp, Homo sapiens
tcactcattgagata

SEQ ID NO: 1383645 - DNA, 15 bp, Homo sapiens
gtcactcattgagat

SEQ ID NO: 1383646 - DNA, 15 bp, Homo sapiens
tgtcactcattgaga

SEQ ID NO: 1383647 - DNA, 15 bp, Homo sapiens
gtgtcactcattgag

SEQ ID NO: 1383648 - DNA, 15 bp, Homo sapiens
ggtgtcactcattga

SEQ ID NO: 1383649 - DNA, 15 bp, Homo sapiens
tggtgtcactcattg

SEQ ID NO: 1383650 - DNA, 15 bp, Homo sapiens
gtggtgtcactcatt

SEQ ID NO: 1383651 - DNA, 15 bp, Homo sapiens
ggtggtgtcactcat

SEQ ID NO: 1383652 - DNA, 15 bp, Homo sapiens
tggtggtgtcactca

SEQ ID NO: 1383653 - DNA, 15 bp, Homo sapiens
gtggtggtgtcactc

SEQ ID NO: 1383654 - DNA, 15 bp, Homo sapiens
ggtggtggtgtcact

SEQ ID NO: 1383655 - DNA, 15 bp, Homo sapiens
tggtggtggtgtcac

SEQ ID NO: 1383656 - DNA, 15 bp, Homo sapiens
gtggtggtggtgtca

SEQ ID NO: 1383657 - DNA, 15 bp, Homo sapiens
ggtggtggtggtgtc

SEQ ID NO: 1383658 - DNA, 15 bp, Homo sapiens
gggtggtggtggtgt

SEQ ID NO: 1383659 - DNA, 15 bp, Homo sapiens
tgggtggtggtggtg

SEQ ID NO: 1383660 - DNA, 15 bp, Homo sapiens
ttgggtggtggtggt

SEQ ID NO: 1383661 - DNA, 15 bp, Homo sapiens
cttgggtggtggtgg

SEQ ID NO: 1383662 - DNA, 15 bp, Homo sapiens
tcttgggtggtggtg

SEQ ID NO: 1383663 - DNA, 15 bp, Homo sapiens
gtcttgggtggtggt

SEQ ID NO: 1383664 - DNA, 15 bp, Homo sapiens
tgtcttgggtggtgg

SEQ ID NO: 1383665 - DNA, 15 bp, Homo sapiens
ctgtcttgggtggtg

SEQ ID NO: 1383666 - DNA, 15 bp, Homo sapiens
tctgtcttgggtggt

SEQ ID NO: 1383667 - DNA, 15 bp, Homo sapiens
ttctgtcttgggtgg

SEQ ID NO: 1383668 - DNA, 15 bp, Homo sapiens
tttctgtcttgggtg

SEQ ID NO: 1383669 - DNA, 15 bp, Homo sapiens
gtttctgtcttgggt

SEQ ID NO: 1383670 - DNA, 15 bp, Homo sapiens
tgtttctgtcttggg

SEQ ID NO: 1383671 - DNA, 15 bp, Homo sapiens
atgtttctgtcttgg

SEQ ID NO: 1383672 - DNA, 15 bp, Homo sapiens
tatgtttctgtcttg

SEQ ID NO: 1383673 - DNA, 15 bp, Homo sapiens
ctatgtttctgtctt

SEQ ID NO: 1383674 - DNA, 15 bp, Homo sapiens
gctatgtttctgtct

SEQ ID NO: 1383675 - DNA, 15 bp, Homo sapiens
tgctatgtttctgtc

SEQ ID NO: 1383676 - DNA, 15 bp, Homo sapiens
ctgctatgtttctgt

SEQ ID NO: 1383677 - DNA, 15 bp, Homo sapiens
actgctatgtttctg

SEQ ID NO: 1383678 - DNA, 15 bp, Homo sapiens
tactgctatgtttct

SEQ ID NO: 1383679 - DNA, 15 bp, Homo sapiens
ttactgctatgtttc

SEQ ID NO: 1383680 - DNA, 15 bp, Homo sapiens
attactgctatgttt

SEQ ID NO: 1383681 - DNA, 15 bp, Homo sapiens
gattactgctatgtt

SEQ ID NO: 1383682 - DNA, 15 bp, Homo sapiens
ggattactgctatgt

SEQ ID NO: 1383683 - DNA, 15 bp, Homo sapiens
aggattactgctatg

SEQ ID NO: 1383684 - DNA, 15 bp, Homo sapiens
taggattactgctat

SEQ ID NO: 1383685 - DNA, 15 bp, Homo sapiens
ttaggattactgcta

SEQ ID NO: 1383686 - DNA, 15 bp, Homo sapiens
gttaggattactgct

SEQ ID NO: 1383687 - DNA, 15 bp, Homo sapiens
tgttaggattactgc

SEQ ID NO: 1383688 - DNA, 15 bp, Homo sapiens
gtgttaggattactg

SEQ ID NO: 1383689 - DNA, 15 bp, Homo sapiens
ggtgttaggattact

SEQ ID NO: 1383690 - DNA, 15 bp, Homo sapiens
aggtgttaggattac

SEQ ID NO: 1383691 - DNA, 15 bp, Homo sapiens
aaggtgttaggatta

SEQ ID NO: 1383692 - DNA, 15 bp, Homo sapiens
gaaggtgttaggatt

SEQ ID NO: 1383693 - DNA, 15 bp, Homo sapiens
agaaggtgttaggat

SEQ ID NO: 1383694 - DNA, 15 bp, Homo sapiens
gagaaggtgttagga

SEQ ID NO: 1383695 - DNA, 15 bp, Homo sapiens
tgagaaggtgttagg

SEQ ID NO: 1383696 - DNA, 15 bp, Homo sapiens
gtgagaaggtgttag

SEQ ID NO: 1383697 - DNA, 15 bp, Homo sapiens
agtgagaaggtgtta

SEQ ID NO: 1383698 - DNA, 15 bp, Homo sapiens
gagtgagaaggtgtt

SEQ ID NO: 1383699 - DNA, 15 bp, Homo sapiens
agagtgagaaggtgt

SEQ ID NO: 1383700 - DNA, 15 bp, Homo sapiens
gagagtgagaaggtg

SEQ ID NO: 1383701 - DNA, 15 bp, Homo sapiens
tgagagtgagaaggt

SEQ ID NO: 1383702 - DNA, 15 bp, Homo sapiens
atgagagtgagaagg

SEQ ID NO: 1383703 - DNA, 15 bp, Homo sapiens
aatgagagtgagaag

SEQ ID NO: 1383704 - DNA, 15 bp, Homo sapiens
gaatgagagtgagaa

SEQ ID NO: 1383705 - DNA, 15 bp, Homo sapiens
agaatgagagtgaga

SEQ ID NO: 1383706 - DNA, 15 bp, Homo sapiens
gagaatgagagtgag

SEQ ID NO: 1383707 - DNA, 15 bp, Homo sapiens
tgagaatgagagtga

SEQ ID NO: 1383708 - DNA, 15 bp, Homo sapiens
gtgagaatgagagtg

SEQ ID NO: 1383709 - DNA, 15 bp, Homo sapiens
agtgagaatgagagt

SEQ ID NO: 1383710 - DNA, 15 bp, Homo sapiens
gagtgagaatgagag

SEQ ID NO: 1383711 - DNA, 15 bp, Homo sapiens
ggagtgagaatgaga

SEQ ID NO: 1383712 - DNA, 15 bp, Homo sapiens
gggagtgagaatgag

SEQ ID NO: 1383713 - DNA, 15 bp, Homo sapiens
ggggagtgagaatga

SEQ ID NO: 1383714 - DNA, 15 bp, Homo sapiens
tggggagtgagaatg

SEQ ID NO: 1383715 - DNA, 15 bp, Homo sapiens
atggggagtgagaat

SEQ ID NO: 1383716 - DNA, 15 bp, Homo sapiens
gatggggagtgagaa

SEQ ID NO: 1383717 - DNA, 15 bp, Homo sapiens
agatggggagtgaga

SEQ ID NO: 1383718 - DNA, 15 bp, Homo sapiens
aagatggggagtgag

SEQ ID NO: 1383719 - DNA, 15 bp, Homo sapiens
aaagatggggagtga

SEQ ID NO: 1383720 - DNA, 15 bp, Homo sapiens
taaagatggggagtg

SEQ ID NO: 1383721 - DNA, 15 bp, Homo sapiens
ttaaagatggggagt

SEQ ID NO: 1383722 - DNA, 15 bp, Homo sapiens
gttaaagatggggag

SEQ ID NO: 1383723 - DNA, 15 bp, Homo sapiens
ggttaaagatgggga

SEQ ID NO: 1383724 - DNA, 15 bp, Homo sapiens
gggttaaagatgggg

SEQ ID NO: 1383725 - DNA, 15 bp, Homo sapiens
ggggttaaagatggg

SEQ ID NO: 1383726 - DNA, 15 bp, Homo sapiens
tggggttaaagatgg

SEQ ID NO: 1383727 - DNA, 15 bp, Homo sapiens
gtggggttaaagatg

SEQ ID NO: 1383728 - DNA, 15 bp, Homo sapiens
tgtggggttaaagat

SEQ ID NO: 1383729 - DNA, 15 bp, Homo sapiens
gtgtggggttaaaga

SEQ ID NO: 1383730 - DNA, 15 bp, Homo sapiens
ggtgtggggttaaag

SEQ ID NO: 1383731 - DNA, 15 bp, Homo sapiens
tggtgtggggttaaa

SEQ ID NO: 1383732 - DNA, 15 bp, Homo sapiens
ttggtgtggggttaa

SEQ ID NO: 1383733 - DNA, 15 bp, Homo sapiens
cttggtgtggggtta

SEQ ID NO: 1383734 - DNA, 15 bp, Homo sapiens
acttggtgtggggtt

SEQ ID NO: 1383735 - DNA, 15 bp, Homo sapiens
gacttggtgtggggt

SEQ ID NO: 1383736 - DNA, 15 bp, Homo sapiens
agacttggtgtgggg

SEQ ID NO: 1383737 - DNA, 15 bp, Homo sapiens
cagacttggtgtggg

SEQ ID NO: 1383738 - DNA, 15 bp, Homo sapiens
gcagacttggtgtgg

SEQ ID NO: 1383739 - DNA, 15 bp, Homo sapiens
agcagacttggtgtg

SEQ ID NO: 1383740 - DNA, 15 bp, Homo sapiens
gagcagacttggtgt

SEQ ID NO: 1383741 - DNA, 15 bp, Homo sapiens
agagcagacttggtg

SEQ ID NO: 1383742 - DNA, 15 bp, Homo sapiens
aagagcagacttggt

SEQ ID NO: 1383743 - DNA, 15 bp, Homo sapiens
gaagagcagacttgg

SEQ ID NO: 1383744 - DNA, 15 bp, Homo sapiens
tgaagagcagacttg

SEQ ID NO: 1383745 - DNA, 15 bp, Homo sapiens
ttgaagagcagactt

SEQ ID NO: 1383746 - DNA, 15 bp, Homo sapiens
gttgaagagcagact

SEQ ID NO: 1383747 - DNA, 15 bp, Homo sapiens
agttgaagagcagac

SEQ ID NO: 1383748 - DNA, 15 bp, Homo sapiens
aagttgaagagcaga

SEQ ID NO: 1383749 - DNA, 15 bp, Homo sapiens
gaagttgaagagcag

SEQ ID NO: 1383750 - DNA, 15 bp, Homo sapiens
tgaagttgaagagca

SEQ ID NO: 1383751 - DNA, 15 bp, Homo sapiens
atgaagttgaagagc

SEQ ID NO: 1383752 - DNA, 15 bp, Homo sapiens
aatgaagttgaagag

SEQ ID NO: 1383753 - DNA, 15 bp, Homo sapiens
gaatgaagttgaaga

SEQ ID NO: 1383754 - DNA, 15 bp, Homo sapiens
ggaatgaagttgaag

SEQ ID NO: 1383755 - DNA, 15 bp, Homo sapiens
gggaatgaagttgaa

SEQ ID NO: 1383756 - DNA, 15 bp, Homo sapiens
tgggaatgaagttga

SEQ ID NO: 1383757 - DNA, 15 bp, Homo sapiens
gtgggaatgaagttg

SEQ ID NO: 1383758 - DNA, 15 bp, Homo sapiens
ggtgggaatgaagtt

SEQ ID NO: 1383759 - DNA, 15 bp, Homo sapiens
gggtgggaatgaagt

SEQ ID NO: 1383760 - DNA, 15 bp, Homo sapiens
agggtgggaatgaag

SEQ ID NO: 1383761 - DNA, 15 bp, Homo sapiens
aagggtgggaatgaa

SEQ ID NO: 1383762 - DNA, 15 bp, Homo sapiens
taagggtgggaatga

SEQ ID NO: 1383763 - DNA, 15 bp, Homo sapiens
ctaagggtgggaatg

SEQ ID NO: 1383764 - DNA, 15 bp, Homo sapiens
actaagggtgggaat

SEQ ID NO: 1383765 - DNA, 15 bp, Homo sapiens
gactaagggtgggaa

SEQ ID NO: 1383766 - DNA, 15 bp, Homo sapiens
ggactaagggtggga

SEQ ID NO: 1383767 - DNA, 15 bp, Homo sapiens
gggactaagggtggg

SEQ ID NO: 1383768 - DNA, 15 bp, Homo sapiens
tgggactaagggtgg

SEQ ID NO: 1383769 - DNA, 15 bp, Homo sapiens
ctgggactaagggtg

SEQ ID NO: 1383770 - DNA, 15 bp, Homo sapiens
gctgggactaagggt

SEQ ID NO: 1383771 - DNA, 15 bp, Homo sapiens
ggctgggactaaggg

SEQ ID NO: 1383772 - DNA, 15 bp, Homo sapiens
tggctgggactaagg

SEQ ID NO: 1383773 - DNA, 15 bp, Homo sapiens
gtggctgggactaag

SEQ ID NO: 1383774 - DNA, 15 bp, Homo sapiens
ggtggctgggactaa

SEQ ID NO: 1383775 - DNA, 15 bp, Homo sapiens
cggtggctgggacta

SEQ ID NO: 1383776 - DNA, 15 bp, Homo sapiens
ccggtggctgggact

SEQ ID NO: 1383777 - DNA, 15 bp, Homo sapiens
gccggtggctgggac

SEQ ID NO: 1383778 - DNA, 15 bp, Homo sapiens
tgccggtggctggga

SEQ ID NO: 1383779 - DNA, 15 bp, Homo sapiens
atgccggtggctggg

SEQ ID NO: 1383780 - DNA, 15 bp, Homo sapiens
gatgccggtggctgg

SEQ ID NO: 1383781 - DNA, 15 bp, Homo sapiens
agatgccggtggctg

SEQ ID NO: 1383782 - DNA, 15 bp, Homo sapiens
gagatgccggtggct

SEQ ID NO: 1383783 - DNA, 15 bp, Homo sapiens
ggagatgccggtggc

SEQ ID NO: 1383784 - DNA, 15 bp, Homo sapiens
tggagatgccggtgg

SEQ ID NO: 1383785 - DNA, 15 bp, Homo sapiens
ctggagatgccggtg

SEQ ID NO: 1383786 - DNA, 15 bp, Homo sapiens
gctggagatgccggt

SEQ ID NO: 1383787 - DNA, 15 bp, Homo sapiens
ggctggagatgccgg

SEQ ID NO: 1383788 - DNA, 15 bp, Homo sapiens
aggctggagatgccg

SEQ ID NO: 1383789 - DNA, 15 bp, Homo sapiens
aaggctggagatgcc

SEQ ID NO: 1383790 - DNA, 15 bp, Homo sapiens
gaaggctggagatgc

SEQ ID NO: 1383791 - DNA, 15 bp, Homo sapiens
agaaggctggagatg

SEQ ID NO: 1383792 - DNA, 15 bp, Homo sapiens
tagaaggctggagat

SEQ ID NO: 1383793 - DNA, 15 bp, Homo sapiens
ttagaaggctggaga

SEQ ID NO: 1383794 - DNA, 15 bp, Homo sapiens
gttagaaggctggag

SEQ ID NO: 1383795 - DNA, 15 bp, Homo sapiens
ggttagaaggctgga

SEQ ID NO: 1383796 - DNA, 15 bp, Homo sapiens
aggttagaaggctgg

SEQ ID NO: 1383797 - DNA, 15 bp, Homo sapiens
caggttagaaggctg

SEQ ID NO: 1383798 - DNA, 15 bp, Homo sapiens
acaggttagaaggct

SEQ ID NO: 1383799 - DNA, 15 bp, Homo sapiens
cacaggttagaaggc

SEQ ID NO: 1383800 - DNA, 15 bp, Homo sapiens
gcacaggttagaagg

SEQ ID NO: 1383801 - DNA, 15 bp, Homo sapiens
agcacaggttagaag

SEQ ID NO: 1383802 - DNA, 15 bp, Homo sapiens
gagcacaggttagaa

SEQ ID NO: 1383803 - DNA, 15 bp, Homo sapiens
tgagcacaggttaga

SEQ ID NO: 1383804 - DNA, 15 bp, Homo sapiens
atgagcacaggttag

SEQ ID NO: 1383805 - DNA, 15 bp, Homo sapiens
gatgagcacaggtta

SEQ ID NO: 1383806 - DNA, 15 bp, Homo sapiens
agatgagcacaggtt

SEQ ID NO: 1383807 - DNA, 15 bp, Homo sapiens
tagatgagcacaggt

SEQ ID NO: 1383808 - DNA, 15 bp, Homo sapiens
atagatgagcacagg

SEQ ID NO: 1383809 - DNA, 15 bp, Homo sapiens
aatagatgagcacag

SEQ ID NO: 1383810 - DNA, 15 bp, Homo sapiens
caatagatgagcaca

SEQ ID NO: 1383811 - DNA, 15 bp, Homo sapiens
ccaatagatgagcac

SEQ ID NO: 1383812 - DNA, 15 bp, Homo sapiens
cccaatagatgagca

SEQ ID NO: 1383813 - DNA, 15 bp, Homo sapiens
gcccaatagatgagc

SEQ ID NO: 1383814 - DNA, 15 bp, Homo sapiens
ggcccaatagatgag

SEQ ID NO: 1383815 - DNA, 15 bp, Homo sapiens
gggcccaatagatga

SEQ ID NO: 1383816 - DNA, 15 bp, Homo sapiens
agggcccaatagatg

SEQ ID NO: 1383817 - DNA, 15 bp, Homo sapiens
gagggcccaatagat

SEQ ID NO: 1383818 - DNA, 15 bp, Homo sapiens
ggagggcccaataga

SEQ ID NO: 1383819 - DNA, 15 bp, Homo sapiens
gggagggcccaatag

SEQ ID NO: 1383820 - DNA, 15 bp, Homo sapiens
agggagggcccaata

SEQ ID NO: 1383821 - DNA, 15 bp, Homo sapiens
gagggagggcccaat

SEQ ID NO: 1383822 - DNA, 15 bp, Homo sapiens
ggagggagggcccaa

SEQ ID NO: 1383823 - DNA, 15 bp, Homo sapiens
tggagggagggccca

SEQ ID NO: 1383824 - DNA, 15 bp, Homo sapiens
ttggagggagggccc

SEQ ID NO: 1383825 - DNA, 15 bp, Homo sapiens
gttggagggagggcc

SEQ ID NO: 1383826 - DNA, 15 bp, Homo sapiens
tgttggagggagggc

SEQ ID NO: 1383827 - DNA, 15 bp, Homo sapiens
ttgttggagggaggg

SEQ ID NO: 1383828 - DNA, 15 bp, Homo sapiens
attgttggagggagg

SEQ ID NO: 1383829 - DNA, 15 bp, Homo sapiens
gattgttggagggag

SEQ ID NO: 1383830 - DNA, 15 bp, Homo sapiens
agattgttggaggga

SEQ ID NO: 1383831 - DNA, 15 bp, Homo sapiens
tagattgttggaggg

SEQ ID NO: 1383832 - DNA, 15 bp, Homo sapiens
atagattgttggagg

SEQ ID NO: 1383833 - DNA, 15 bp, Homo sapiens
aatagattgttggag

SEQ ID NO: 1383834 - DNA, 15 bp, Homo sapiens
gaatagattgttgga

SEQ ID NO: 1383835 - DNA, 15 bp, Homo sapiens
agaatagattgttgg

SEQ ID NO: 1383836 - DNA, 15 bp, Homo sapiens
tagaatagattgttg

SEQ ID NO: 1383837 - DNA, 15 bp, Homo sapiens
gtagaatagattgtt

SEQ ID NO: 1383838 - DNA, 15 bp, Homo sapiens
agtagaatagattgt

SEQ ID NO: 1383839 - DNA, 15 bp, Homo sapiens
gagtagaatagattg

SEQ ID NO: 1383840 - DNA, 15 bp, Homo sapiens
agagtagaatagatt

SEQ ID NO: 1383841 - DNA, 15 bp, Homo sapiens
tagagtagaatagat

SEQ ID NO: 1383842 - DNA, 15 bp, Homo sapiens
ctagagtagaataga

SEQ ID NO: 1383843 - DNA, 15 bp, Homo sapiens
gctagagtagaatag

SEQ ID NO: 1383844 - DNA, 15 bp, Homo sapiens
tgctagagtagaata

SEQ ID NO: 1383845 - DNA, 15 bp, Homo sapiens
ctgctagagtagaat

SEQ ID NO: 1383846 - DNA, 15 bp, Homo sapiens
gctgctagagtagaa

SEQ ID NO: 1383847 - DNA, 15 bp, Homo sapiens
tgctgctagagtaga

SEQ ID NO: 1383848 - DNA, 15 bp, Homo sapiens
ttgctgctagagtag

SEQ ID NO: 1383849 - DNA, 15 bp, Homo sapiens
cttgctgctagagta

SEQ ID NO: 1383850 - DNA, 15 bp, Homo sapiens
tcttgctgctagagt

SEQ ID NO: 1383851 - DNA, 15 bp, Homo sapiens
atcttgctgctagag

SEQ ID NO: 1383852 - DNA, 15 bp, Homo sapiens
catcttgctgctaga

SEQ ID NO: 1383853 - DNA, 15 bp, Homo sapiens
ccatcttgctgctag

SEQ ID NO: 1383854 - DNA, 15 bp, Homo sapiens
tccatcttgctgcta

SEQ ID NO: 1383855 - DNA, 15 bp, Homo sapiens
atccatcttgctgct

SEQ ID NO: 1383856 - DNA, 15 bp, Homo sapiens
catccatcttgctgc

SEQ ID NO: 1383857 - DNA, 15 bp, Homo sapiens
acatccatcttgctg

SEQ ID NO: 1383858 - DNA, 15 bp, Homo sapiens
aacatccatcttgct

SEQ ID NO: 1383859 - DNA, 15 bp, Homo sapiens
aaacatccatcttgc

SEQ ID NO: 1383860 - DNA, 15 bp, Homo sapiens
aaaacatccatcttg

SEQ ID NO: 1383861 - DNA, 15 bp, Homo sapiens
aaaaacatccatctt

SEQ ID NO: 1383862 - DNA, 15 bp, Homo sapiens
taaaaacatccatct

SEQ ID NO: 1383863 - DNA, 15 bp, Homo sapiens
gtaaaaacatccatc

SEQ ID NO: 1383864 - DNA, 15 bp, Homo sapiens
tgtaaaaacatccat

SEQ ID NO: 1383865 - DNA, 15 bp, Homo sapiens
ttgtaaaaacatcca

SEQ ID NO: 1383866 - DNA, 15 bp, Homo sapiens
attgtaaaaacatcc

SEQ ID NO: 1383867 - DNA, 15 bp, Homo sapiens
aattgtaaaaacatc

SEQ ID NO: 1383868 - DNA, 15 bp, Homo sapiens
gaattgtaaaaacat

SEQ ID NO: 1383869 - DNA, 15 bp, Homo sapiens
tgaattgtaaaaaca

SEQ ID NO: 1383870 - DNA, 15 bp, Homo sapiens
ttgaattgtaaaaac

SEQ ID NO: 1383871 - DNA, 15 bp, Homo sapiens
tttgaattgtaaaaa

SEQ ID NO: 1383872 - DNA, 15 bp, Homo sapiens
atttgaattgtaaaa

SEQ ID NO: 1383873 - DNA, 15 bp, Homo sapiens
gatttgaattgtaaa

SEQ ID NO: 1383874 - DNA, 15 bp, Homo sapiens
agatttgaattgtaa

SEQ ID NO: 1383875 - DNA, 15 bp, Homo sapiens
cagatttgaattgta

SEQ ID NO: 1383876 - DNA, 15 bp, Homo sapiens
ccagatttgaattgt

SEQ ID NO: 1383877 - DNA, 15 bp, Homo sapiens
accagatttgaattg

SEQ ID NO: 1383878 - DNA, 15 bp, Homo sapiens
gaccagatttgaatt

SEQ ID NO: 1383879 - DNA, 15 bp, Homo sapiens
tgaccagatttgaat

SEQ ID NO: 1383880 - DNA, 15 bp, Homo sapiens
atgaccagatttgaa

SEQ ID NO: 1383881 - DNA, 15 bp, Homo sapiens
catgaccagatttga

SEQ ID NO: 1383882 - DNA, 15 bp, Homo sapiens
acatgaccagatttg

SEQ ID NO: 1383883 - DNA, 15 bp, Homo sapiens
cacatgaccagattt

SEQ ID NO: 1383884 - DNA, 15 bp, Homo sapiens
tcacatgaccagatt

SEQ ID NO: 1383885 - DNA, 15 bp, Homo sapiens
gtcacatgaccagat

SEQ ID NO: 1383886 - DNA, 15 bp, Homo sapiens
agtcacatgaccaga

SEQ ID NO: 1383887 - DNA, 15 bp, Homo sapiens
gagtcacatgaccag

SEQ ID NO: 1383888 - DNA, 15 bp, Homo sapiens
ggagtcacatgacca

SEQ ID NO: 1383889 - DNA, 15 bp, Homo sapiens
gggagtcacatgacc

SEQ ID NO: 1383890 - DNA, 15 bp, Homo sapiens
agggagtcacatgac

SEQ ID NO: 1383891 - DNA, 15 bp, Homo sapiens
aagggagtcacatga

SEQ ID NO: 1383892 - DNA, 15 bp, Homo sapiens
caagggagtcacatg

SEQ ID NO: 1383893 - DNA, 15 bp, Homo sapiens
gcaagggagtcacat

SEQ ID NO: 1383894 - DNA, 15 bp, Homo sapiens
agcaagggagtcaca

SEQ ID NO: 1383895 - DNA, 15 bp, Homo sapiens
aagcaagggagtcac

SEQ ID NO: 1383896 - DNA, 15 bp, Homo sapiens
taagcaagggagtca

SEQ ID NO: 1383897 - DNA, 15 bp, Homo sapiens
ttaagcaagggagtc

SEQ ID NO: 1383898 - DNA, 15 bp, Homo sapiens
tttaagcaagggagt

SEQ ID NO: 1383899 - DNA, 15 bp, Homo sapiens
ttttaagcaagggag

SEQ ID NO: 1383900 - DNA, 15 bp, Homo sapiens
gttttaagcaaggga

SEQ ID NO: 1383901 - DNA, 15 bp, Homo sapiens
agttttaagcaaggg

SEQ ID NO: 1383902 - DNA, 15 bp, Homo sapiens
tagttttaagcaagg

SEQ ID NO: 1383903 - DNA, 15 bp, Homo sapiens
atagttttaagcaag

SEQ ID NO: 1383904 - DNA, 15 bp, Homo sapiens
aatagttttaagcaa

SEQ ID NO: 1383905 - DNA, 15 bp, Homo sapiens
taatagttttaagca

SEQ ID NO: 1383906 - DNA, 15 bp, Homo sapiens
gtaatagttttaagc

SEQ ID NO: 1383907 - DNA, 15 bp, Homo sapiens
agtaatagttttaag

SEQ ID NO: 1383908 - DNA, 15 bp, Homo sapiens
tagtaatagttttaa

SEQ ID NO: 1383909 - DNA, 15 bp, Homo sapiens
ttagtaatagtttta

SEQ ID NO: 1383910 - DNA, 15 bp, Homo sapiens
gttagtaatagtttt

SEQ ID NO: 1383911 - DNA, 15 bp, Homo sapiens
agttagtaatagttt

SEQ ID NO: 1383912 - DNA, 15 bp, Homo sapiens
gagttagtaatagtt

SEQ ID NO: 1383913 - DNA, 15 bp, Homo sapiens
ggagttagtaatagt

SEQ ID NO: 1383914 - DNA, 15 bp, Homo sapiens
tggagttagtaatag

SEQ ID NO: 1383915 - DNA, 15 bp, Homo sapiens
gtggagttagtaata

SEQ ID NO: 1383916 - DNA, 15 bp, Homo sapiens
tgtggagttagtaat

SEQ ID NO: 1383917 - DNA, 15 bp, Homo sapiens
gtgtggagttagtaa

SEQ ID NO: 1383918 - DNA, 15 bp, Homo sapiens
agtgtggagttagta

SEQ ID NO: 1383919 - DNA, 15 bp, Homo sapiens
cagtgtggagttagt

SEQ ID NO: 1383920 - DNA, 15 bp, Homo sapiens
acagtgtggagttag

SEQ ID NO: 1383921 - DNA, 15 bp, Homo sapiens
aacagtgtggagtta

SEQ ID NO: 1383922 - DNA, 15 bp, Homo sapiens
aaacagtgtggagtt

SEQ ID NO: 1383923 - DNA, 15 bp, Homo sapiens
aaaacagtgtggagt

SEQ ID NO: 1383924 - DNA, 15 bp, Homo sapiens
tgaaaacagtgtgga

SEQ ID NO: 1383925 - DNA, 15 bp, Homo sapiens
ctgaaaacagtgtgg

SEQ ID NO: 1383926 - DNA, 15 bp, Homo sapiens
tctgaaaacagtgtg

SEQ ID NO: 1383927 - DNA, 15 bp, Homo sapiens
ttctgaaaacagtgt

SEQ ID NO: 1383928 - DNA, 15 bp, Homo sapiens
attctgaaaacagtg

SEQ ID NO: 1383929 - DNA, 15 bp, Homo sapiens
tattctgaaaacagt

SEQ ID NO: 1383930 - DNA, 15 bp, Homo sapiens
gtattctgaaaacag

SEQ ID NO: 1383931 - DNA, 15 bp, Homo sapiens
agtattctgaaaaca

SEQ ID NO: 1383932 - DNA, 15 bp, Homo sapiens
tagtattctgaaaac

SEQ ID NO: 1383933 - DNA, 15 bp, Homo sapiens
gtagtattctgaaaa

SEQ ID NO: 1383934 - DNA, 15 bp, Homo sapiens
ggtagtattctgaaa

SEQ ID NO: 1383935 - DNA, 15 bp, Homo sapiens
tggtagtattctgaa

SEQ ID NO: 1383936 - DNA, 15 bp, Homo sapiens
ttggtagtattctga

SEQ ID NO: 1383937 - DNA, 15 bp, Homo sapiens
tttggtagtattctg

SEQ ID NO: 1383938 - DNA, 15 bp, Homo sapiens
ctttggtagtattct

SEQ ID NO: 1383939 - DNA, 15 bp, Homo sapiens
tctttggtagtattc

SEQ ID NO: 1383940 - DNA, 15 bp, Homo sapiens
atctttggtagtatt

SEQ ID NO: 1383941 - DNA, 15 bp, Homo sapiens
gatctttggtagtat

SEQ ID NO: 1383942 - DNA, 15 bp, Homo sapiens
ggatctttggtagta

SEQ ID NO: 1383943 - DNA, 15 bp, Homo sapiens
aggatctttggtagt

SEQ ID NO: 1383944 - DNA, 15 bp, Homo sapiens
gaggatctttggtag

SEQ ID NO: 1383945 - DNA, 15 bp, Homo sapiens
tgaggatctttggta

SEQ ID NO: 1383946 - DNA, 15 bp, Homo sapiens
ctgaggatctttggt

SEQ ID NO: 1383947 - DNA, 15 bp, Homo sapiens
gctgaggatctttgg

SEQ ID NO: 1383948 - DNA, 15 bp, Homo sapiens
tgctgaggatctttg

SEQ ID NO: 1383949 - DNA, 15 bp, Homo sapiens
atgctgaggatcttt

SEQ ID NO: 1383950 - DNA, 15 bp, Homo sapiens
catgctgaggatctt

SEQ ID NO: 1383951 - DNA, 15 bp, Homo sapiens
ccatgctgaggatct

SEQ ID NO: 1383952 - DNA, 15 bp, Homo sapiens
gccatgctgaggatc

SEQ ID NO: 1383953 - DNA, 15 bp, Homo sapiens
agccatgctgaggat

SEQ ID NO: 1383954 - DNA, 15 bp, Homo sapiens
gagccatgctgagga

SEQ ID NO: 1383955 - DNA, 15 bp, Homo sapiens
ggagccatgctgagg

SEQ ID NO: 1383956 - DNA, 15 bp, Homo sapiens
tggagccatgctgag

SEQ ID NO: 1383957 - DNA, 15 bp, Homo sapiens
ttggagccatgctga

SEQ ID NO: 1383958 - DNA, 15 bp, Homo sapiens
tttggagccatgctg

SEQ ID NO: 1383959 - DNA, 15 bp, Homo sapiens
ctttggagccatgct

SEQ ID NO: 1383960 - DNA, 15 bp, Homo sapiens
actttggagccatgc

SEQ ID NO: 1383961 - DNA, 15 bp, Homo sapiens
gactttggagccatg

SEQ ID NO: 1383962 - DNA, 15 bp, Homo sapiens
agactttggagccat

SEQ ID NO: 1383963 - DNA, 15 bp, Homo sapiens
tagactttggagcca

SEQ ID NO: 1383964 - DNA, 15 bp, Homo sapiens
gtagactttggagcc

SEQ ID NO: 1383965 - DNA, 15 bp, Homo sapiens
tgtagactttggagc

SEQ ID NO: 1383966 - DNA, 15 bp, Homo sapiens
atgtagactttggag

SEQ ID NO: 1383967 - DNA, 15 bp, Homo sapiens
catgtagactttgga

SEQ ID NO: 1383968 - DNA, 15 bp, Homo sapiens
tcatgtagactttgg

SEQ ID NO: 1383969 - DNA, 15 bp, Homo sapiens
gtcatgtagactttg

SEQ ID NO: 1383970 - DNA, 15 bp, Homo sapiens
ggtcatgtagacttt

SEQ ID NO: 1383971 - DNA, 15 bp, Homo sapiens
aggtcatgtagactt

SEQ ID NO: 1383972 - DNA, 15 bp, Homo sapiens
caggtcatgtagact

SEQ ID NO: 1383973 - DNA, 15 bp, Homo sapiens
ccaggtcatgtagac

SEQ ID NO: 1383974 - DNA, 15 bp, Homo sapiens
gccaggtcatgtaga

SEQ ID NO: 1383975 - DNA, 15 bp, Homo sapiens
tgccaggtcatgtag

SEQ ID NO: 1383976 - DNA, 15 bp, Homo sapiens
ctgccaggtcatgta

SEQ ID NO: 1383977 - DNA, 15 bp, Homo sapiens
gctgccaggtcatgt

SEQ ID NO: 1383978 - DNA, 15 bp, Homo sapiens
agctgccaggtcatg

SEQ ID NO: 1383979 - DNA, 15 bp, Homo sapiens
aagctgccaggtcat

SEQ ID NO: 1383980 - DNA, 15 bp, Homo sapiens
gaagctgccaggtca

SEQ ID NO: 1383981 - DNA, 15 bp, Homo sapiens
tgaagctgccaggtc

SEQ ID NO: 1383982 - DNA, 15 bp, Homo sapiens
ctgaagctgccaggt

SEQ ID NO: 1383983 - DNA, 15 bp, Homo sapiens
cctgaagctgccagg

SEQ ID NO: 1383984 - DNA, 15 bp, Homo sapiens
acctgaagctgccag

SEQ ID NO: 1383985 - DNA, 15 bp, Homo sapiens
aacctgaagctgcca

SEQ ID NO: 1383986 - DNA, 15 bp, Homo sapiens
caacctgaagctgcc

SEQ ID NO: 1383987 - DNA, 15 bp, Homo sapiens
acaacctgaagctgc

SEQ ID NO: 1383988 - DNA, 15 bp, Homo sapiens
tacaacctgaagctg

SEQ ID NO: 1383989 - DNA, 15 bp, Homo sapiens
gtacaacctgaagct

SEQ ID NO: 1383990 - DNA, 15 bp, Homo sapiens
tgtacaacctgaagc

SEQ ID NO: 1383991 - DNA, 15 bp, Homo sapiens
ttgtacaacctgaag

SEQ ID NO: 1383992 - DNA, 15 bp, Homo sapiens
gttgtacaacctgaa

SEQ ID NO: 1383993 - DNA, 15 bp, Homo sapiens
agttgtacaacctga

SEQ ID NO: 1383994 - DNA, 15 bp, Homo sapiens
gagttgtacaacctg

SEQ ID NO: 1383995 - DNA, 15 bp, Homo sapiens
agagttgtacaacct

SEQ ID NO: 1383996 - DNA, 15 bp, Homo sapiens
aagagttgtacaacc

SEQ ID NO: 1383997 - DNA, 15 bp, Homo sapiens
gaagagttgtacaac

SEQ ID NO: 1383998 - DNA, 15 bp, Homo sapiens
ggaagagttgtacaa

SEQ ID NO: 1383999 - DNA, 15 bp, Homo sapiens
aggaagagttgtaca

SEQ ID NO: 1384000 - DNA, 15 bp, Homo sapiens
gaggaagagttgtac

SEQ ID NO: 1384001 - DNA, 15 bp, Homo sapiens
tgaggaagagttgta

SEQ ID NO: 1384002 - DNA, 15 bp, Homo sapiens
atgaggaagagttgt

SEQ ID NO: 1384003 - DNA, 15 bp, Homo sapiens
aatgaggaagagttg

SEQ ID NO: 1384004 - DNA, 15 bp, Homo sapiens
taatgaggaagagtt

SEQ ID NO: 1384005 - DNA, 15 bp, Homo sapiens
ataatgaggaagagt

SEQ ID NO: 1384006 - DNA, 15 bp, Homo sapiens
aataatgaggaagag

SEQ ID NO: 1384007 - DNA, 15 bp, Homo sapiens
gaataatgaggaaga

SEQ ID NO: 1384008 - DNA, 15 bp, Homo sapiens
tgaataatgaggaag

SEQ ID NO: 1384009 - DNA, 15 bp, Homo sapiens
ttgaataatgaggaa

SEQ ID NO: 1384010 - DNA, 15 bp, Homo sapiens
cttgaataatgagga

SEQ ID NO: 1384011 - DNA, 15 bp, Homo sapiens
gcttgaataatgagg

SEQ ID NO: 1384012 - DNA, 15 bp, Homo sapiens
tgcttgaataatgag

SEQ ID NO: 1384013 - DNA, 15 bp, Homo sapiens
atgcttgaataatga

SEQ ID NO: 1384014 - DNA, 15 bp, Homo sapiens
catgcttgaataatg

SEQ ID NO: 1384015 - DNA, 15 bp, Homo sapiens
tcatgcttgaataat

SEQ ID NO: 1384016 - DNA, 15 bp, Homo sapiens
ttcatgcttgaataa

SEQ ID NO: 1384017 - DNA, 15 bp, Homo sapiens
tttcatgcttgaata

SEQ ID NO: 1384018 - DNA, 15 bp, Homo sapiens
gtttcatgcttgaat

SEQ ID NO: 1384019 - DNA, 15 bp, Homo sapiens
ggtttcatgcttgaa

SEQ ID NO: 1384020 - DNA, 15 bp, Homo sapiens
tggtttcatgcttga

SEQ ID NO: 1384021 - DNA, 15 bp, Homo sapiens
gtggtttcatgcttg

SEQ ID NO: 1384022 - DNA, 15 bp, Homo sapiens
agtggtttcatgctt

SEQ ID NO: 1384023 - DNA, 15 bp, Homo sapiens
cagtggtttcatgct

SEQ ID NO: 1384024 - DNA, 15 bp, Homo sapiens
ccagtggtttcatgc

SEQ ID NO: 1384025 - DNA, 15 bp, Homo sapiens
accagtggtttcatg

SEQ ID NO: 1384026 - DNA, 15 bp, Homo sapiens
taccagtggtttcat

SEQ ID NO: 1384027 - DNA, 15 bp, Homo sapiens
ataccagtggtttca

SEQ ID NO: 1384028 - DNA, 15 bp, Homo sapiens
aataccagtggtttc

SEQ ID NO: 1384029 - DNA, 15 bp, Homo sapiens
gaataccagtggttt

SEQ ID NO: 1384030 - DNA, 15 bp, Homo sapiens
agaataccagtggtt

SEQ ID NO: 1384031 - DNA, 15 bp, Homo sapiens
gagaataccagtggt

SEQ ID NO: 1384032 - DNA, 15 bp, Homo sapiens
agagaataccagtgg

SEQ ID NO: 1384033 - DNA, 15 bp, Homo sapiens
tagagaataccagtg

SEQ ID NO: 1384034 - DNA, 15 bp, Homo sapiens
ttagagaataccagt

SEQ ID NO: 1384035 - DNA, 15 bp, Homo sapiens
cttagagaataccag

SEQ ID NO: 1384036 - DNA, 15 bp, Homo sapiens
acttagagaatacca

SEQ ID NO: 1384037 - DNA, 15 bp, Homo sapiens
aacttagagaatacc

SEQ ID NO: 1384038 - DNA, 15 bp, Homo sapiens
caacttagagaatac

SEQ ID NO: 1384039 - DNA, 15 bp, Homo sapiens
acaacttagagaata

SEQ ID NO: 1384040 - DNA, 15 bp, Homo sapiens
aacaacttagagaat

SEQ ID NO: 1384041 - DNA, 15 bp, Homo sapiens
gaacaacttagagaa

SEQ ID NO: 1384042 - DNA, 15 bp, Homo sapiens
ggaacaacttagaga

SEQ ID NO: 1384043 - DNA, 15 bp, Homo sapiens
gggaacaacttagag

SEQ ID NO: 1384044 - DNA, 15 bp, Homo sapiens
tgggaacaacttaga

SEQ ID NO: 1384045 - DNA, 15 bp, Homo sapiens
atgggaacaacttag

SEQ ID NO: 1384046 - DNA, 15 bp, Homo sapiens
tatgggaacaactta

SEQ ID NO: 1384047 - DNA, 15 bp, Homo sapiens
ttatgggaacaactt

SEQ ID NO: 1384048 - DNA, 15 bp, Homo sapiens
cttatgggaacaact

SEQ ID NO: 1384049 - DNA, 15 bp, Homo sapiens
gcttatgggaacaac

SEQ ID NO: 1384050 - DNA, 15 bp, Homo sapiens
ggcttatgggaacaa

SEQ ID NO: 1384051 - DNA, 15 bp, Homo sapiens
tggcttatgggaaca

SEQ ID NO: 1384052 - DNA, 15 bp, Homo sapiens
ttggcttatgggaac

SEQ ID NO: 1384053 - DNA, 15 bp, Homo sapiens
tttggcttatgggaa

SEQ ID NO: 1384054 - DNA, 15 bp, Homo sapiens
gtttggcttatggga

SEQ ID NO: 1384055 - DNA, 15 bp, Homo sapiens
agtttggcttatggg

SEQ ID NO: 1384056 - DNA, 15 bp, Homo sapiens
aagtttggcttatgg

SEQ ID NO: 1384057 - DNA, 15 bp, Homo sapiens
gaagtttggcttatg

SEQ ID NO: 1384058 - DNA, 15 bp, Homo sapiens
ggaagtttggcttat

SEQ ID NO: 1384059 - DNA, 15 bp, Homo sapiens
aggaagtttggctta

SEQ ID NO: 1384060 - DNA, 15 bp, Homo sapiens
aaggaagtttggctt

SEQ ID NO: 1384061 - DNA, 15 bp, Homo sapiens
gaaggaagtttggct

SEQ ID NO: 1384062 - DNA, 15 bp, Homo sapiens
agaaggaagtttggc

SEQ ID NO: 1384063 - DNA, 15 bp, Homo sapiens
cagaaggaagtttgg

SEQ ID NO: 1384064 - DNA, 15 bp, Homo sapiens
acagaaggaagtttg

SEQ ID NO: 1384065 - DNA, 15 bp, Homo sapiens
gacagaaggaagttt

SEQ ID NO: 1384066 - DNA, 15 bp, Homo sapiens
ggacagaaggaagtt

SEQ ID NO: 1384067 - DNA, 15 bp, Homo sapiens
gggacagaaggaagt

SEQ ID NO: 1384068 - DNA, 15 bp, Homo sapiens
tgggacagaaggaag

SEQ ID NO: 1384069 - DNA, 15 bp, Homo sapiens
ctgggacagaaggaa

SEQ ID NO: 1384070 - DNA, 15 bp, Homo sapiens
cctgggacagaagga

SEQ ID NO: 1384071 - DNA, 15 bp, Homo sapiens
acctgggacagaagg

SEQ ID NO: 1384072 - DNA, 15 bp, Homo sapiens
gacctgggacagaag

SEQ ID NO: 1384073 - DNA, 15 bp, Homo sapiens
ggacctgggacagaa

SEQ ID NO: 1384074 - DNA, 15 bp, Homo sapiens
aggacctgggacaga

SEQ ID NO: 1384075 - DNA, 15 bp, Homo sapiens
aaggacctgggacag

SEQ ID NO: 1384076 - DNA, 15 bp, Homo sapiens
aaaggacctgggaca

SEQ ID NO: 1384077 - DNA, 15 bp, Homo sapiens
caaaggacctgggac

SEQ ID NO: 1384078 - DNA, 15 bp, Homo sapiens
tcaaaggacctggga

SEQ ID NO: 1384079 - DNA, 15 bp, Homo sapiens
ttcaaaggacctggg

SEQ ID NO: 1384080 - DNA, 15 bp, Homo sapiens
attcaaaggacctgg

SEQ ID NO: 1384081 - DNA, 15 bp, Homo sapiens
tattcaaaggacctg

SEQ ID NO: 1384082 - DNA, 15 bp, Homo sapiens
atattcaaaggacct

SEQ ID NO: 1384083 - DNA, 15 bp, Homo sapiens
gatattcaaaggacc

SEQ ID NO: 1384084 - DNA, 15 bp, Homo sapiens
agatattcaaaggac

SEQ ID NO: 1384085 - DNA, 15 bp, Homo sapiens
aagatattcaaagga

SEQ ID NO: 1384086 - DNA, 15 bp, Homo sapiens
gaagatattcaaagg

SEQ ID NO: 1384087 - DNA, 15 bp, Homo sapiens
agaagatattcaaag

SEQ ID NO: 1384088 - DNA, 15 bp, Homo sapiens
aagaagatattcaaa

SEQ ID NO: 1384089 - DNA, 15 bp, Homo sapiens
aaagaagatattcaa

SEQ ID NO: 1384090 - DNA, 15 bp, Homo sapiens
gaaagaagatattca

SEQ ID NO: 1384091 - DNA, 15 bp, Homo sapiens
ggaaagaagatattc

SEQ ID NO: 1384092 - DNA, 15 bp, Homo sapiens
aggaaagaagatatt

SEQ ID NO: 1384093 - DNA, 15 bp, Homo sapiens
gaggaaagaagatat

SEQ ID NO: 1384094 - DNA, 15 bp, Homo sapiens
agaggaaagaagata

SEQ ID NO: 1384095 - DNA, 15 bp, Homo sapiens
cagaggaaagaagat

SEQ ID NO: 1384096 - DNA, 15 bp, Homo sapiens
gcagaggaaagaaga

SEQ ID NO: 1384097 - DNA, 15 bp, Homo sapiens
ggcagaggaaagaag

SEQ ID NO: 1384098 - DNA, 15 bp, Homo sapiens
aggcagaggaaagaa

SEQ ID NO: 1384099 - DNA, 15 bp, Homo sapiens
caggcagaggaaaga

SEQ ID NO: 1384100 - DNA, 15 bp, Homo sapiens
ccaggcagaggaaag

SEQ ID NO: 1384101 - DNA, 15 bp, Homo sapiens
tccaggcagaggaaa

SEQ ID NO: 1384102 - DNA, 15 bp, Homo sapiens
ttccaggcagaggaa

SEQ ID NO: 1384103 - DNA, 15 bp, Homo sapiens
gttccaggcagagga

SEQ ID NO: 1384104 - DNA, 15 bp, Homo sapiens
ggttccaggcagagg

SEQ ID NO: 1384105 - DNA, 15 bp, Homo sapiens
gggttccaggcagag

SEQ ID NO: 1384106 - DNA, 15 bp, Homo sapiens
agggttccaggcaga

SEQ ID NO: 1384107 - DNA, 15 bp, Homo sapiens
gagggttccaggcag

SEQ ID NO: 1384108 - DNA, 15 bp, Homo sapiens
ggagggttccaggca

SEQ ID NO: 1384109 - DNA, 15 bp, Homo sapiens
aggagggttccaggc

SEQ ID NO: 1384110 - DNA, 15 bp, Homo sapiens
taggagggttccagg

SEQ ID NO: 1384111 - DNA, 15 bp, Homo sapiens
gtaggagggttccag

SEQ ID NO: 1384112 - DNA, 15 bp, Homo sapiens
ggtaggagggttcca

SEQ ID NO: 1384113 - DNA, 15 bp, Homo sapiens
gggtaggagggttcc

SEQ ID NO: 1384114 - DNA, 15 bp, Homo sapiens
tgggtaggagggttc

SEQ ID NO: 1384115 - DNA, 15 bp, Homo sapiens
ttgggtaggagggtt

SEQ ID NO: 1384116 - DNA, 15 bp, Homo sapiens
gttgggtaggagggt

SEQ ID NO: 1384117 - DNA, 15 bp, Homo sapiens
agttgggtaggaggg

SEQ ID NO: 1384118 - DNA, 15 bp, Homo sapiens
aagttgggtaggagg

SEQ ID NO: 1384119 - DNA, 15 bp, Homo sapiens
taagttgggtaggag

SEQ ID NO: 1384120 - DNA, 15 bp, Homo sapiens
ttaagttgggtagga

SEQ ID NO: 1384121 - DNA, 15 bp, Homo sapiens
tttaagttgggtagg

SEQ ID NO: 1384122 - DNA, 15 bp, Homo sapiens
ctttaagttgggtag

SEQ ID NO: 1384123 - DNA, 15 bp, Homo sapiens
gctttaagttgggta

SEQ ID NO: 1384124 - DNA, 15 bp, Homo sapiens
ggctttaagttgggt

SEQ ID NO: 1384125 - DNA, 15 bp, Homo sapiens
gggctttaagttggg

SEQ ID NO: 1384126 - DNA, 15 bp, Homo sapiens
ggggctttaagttgg

SEQ ID NO: 1384127 - DNA, 15 bp, Homo sapiens
tggggctttaagttg

SEQ ID NO: 1384128 - DNA, 15 bp, Homo sapiens
atggggctttaagtt

SEQ ID NO: 1384129 - DNA, 15 bp, Homo sapiens
aatggggctttaagt

SEQ ID NO: 1384130 - DNA, 15 bp, Homo sapiens
aaatggggctttaag

SEQ ID NO: 1384131 - DNA, 15 bp, Homo sapiens
aaaatggggctttaa

SEQ ID NO: 1384132 - DNA, 15 bp, Homo sapiens
aaaaatggggcttta

SEQ ID NO: 1384133 - DNA, 15 bp, Homo sapiens
caaaaatggggcttt

SEQ ID NO: 1384134 - DNA, 15 bp, Homo sapiens
tcaaaaatggggctt

SEQ ID NO: 1384135 - DNA, 15 bp, Homo sapiens
gtcaaaaatggggct

SEQ ID NO: 1384136 - DNA, 15 bp, Homo sapiens
ggtcaaaaatggggc

SEQ ID NO: 1384137 - DNA, 15 bp, Homo sapiens
gggtcaaaaatgggg

SEQ ID NO: 1384138 - DNA, 15 bp, Homo sapiens
ggggtcaaaaatggg

SEQ ID NO: 1384139 - DNA, 15 bp, Homo sapiens
tggggtcaaaaatgg

SEQ ID NO: 1384140 - DNA, 15 bp, Homo sapiens
ctggggtcaaaaatg

SEQ ID NO: 1384141 - DNA, 15 bp, Homo sapiens
cctggggtcaaaaat

SEQ ID NO: 1384142 - DNA, 15 bp, Homo sapiens
tcctggggtcaaaaa

SEQ ID NO: 1384143 - DNA, 15 bp, Homo sapiens
gtcctggggtcaaaa

SEQ ID NO: 1384144 - DNA, 15 bp, Homo sapiens
tgtcctggggtcaaa

SEQ ID NO: 1384145 - DNA, 15 bp, Homo sapiens
ttgtcctggggtcaa

SEQ ID NO: 1384146 - DNA, 15 bp, Homo sapiens
tttgtcctggggtca

SEQ ID NO: 1384147 - DNA, 15 bp, Homo sapiens
atttgtcctggggtc

SEQ ID NO: 1384148 - DNA, 15 bp, Homo sapiens
aatttgtcctggggt

SEQ ID NO: 1384149 - DNA, 15 bp, Homo sapiens
aaatttgtcctgggg

SEQ ID NO: 1384150 - DNA, 15 bp, Homo sapiens
gaaatttgtcctggg

SEQ ID NO: 1384151 - DNA, 15 bp, Homo sapiens
tgaaatttgtcctgg

SEQ ID NO: 1384152 - DNA, 15 bp, Homo sapiens
gtgaaatttgtcctg

SEQ ID NO: 1384153 - DNA, 15 bp, Homo sapiens
agtgaaatttgtcct

SEQ ID NO: 1384154 - DNA, 15 bp, Homo sapiens
aagtgaaatttgtcc

SEQ ID NO: 1384155 - DNA, 15 bp, Homo sapiens
gaagtgaaatttgtc

SEQ ID NO: 1384156 - DNA, 15 bp, Homo sapiens
ggaagtgaaatttgt

SEQ ID NO: 1384157 - DNA, 15 bp, Homo sapiens
aggaagtgaaatttg

SEQ ID NO: 1384158 - DNA, 15 bp, Homo sapiens
caggaagtgaaattt

SEQ ID NO: 1384159 - DNA, 15 bp, Homo sapiens
tcaggaagtgaaatt

SEQ ID NO: 1384160 - DNA, 15 bp, Homo sapiens
ctcaggaagtgaaat

SEQ ID NO: 1384161 - DNA, 15 bp, Homo sapiens
tctcaggaagtgaaa

SEQ ID NO: 1384162 - DNA, 15 bp, Homo sapiens
ttctcaggaagtgaa

SEQ ID NO: 1384163 - DNA, 15 bp, Homo sapiens
cttctcaggaagtga

SEQ ID NO: 1384164 - DNA, 15 bp, Homo sapiens
tcttctcaggaagtg

SEQ ID NO: 1384165 - DNA, 15 bp, Homo sapiens
ctcttctcaggaagt

SEQ ID NO: 1384166 - DNA, 15 bp, Homo sapiens
gctcttctcaggaag

SEQ ID NO: 1384167 - DNA, 15 bp, Homo sapiens
ggctcttctcaggaa

SEQ ID NO: 1384168 - DNA, 15 bp, Homo sapiens
aggctcttctcagga

SEQ ID NO: 1384169 - DNA, 15 bp, Homo sapiens
aaggctcttctcagg

SEQ ID NO: 1384170 - DNA, 15 bp, Homo sapiens
gaaggctcttctcag

SEQ ID NO: 1384171 - DNA, 15 bp, Homo sapiens
agaaggctcttctca

SEQ ID NO: 1384172 - DNA, 15 bp, Homo sapiens
gagaaggctcttctc

SEQ ID NO: 1384173 - DNA, 15 bp, Homo sapiens
agagaaggctcttct

SEQ ID NO: 1384174 - DNA, 15 bp, Homo sapiens
aagagaaggctcttc

SEQ ID NO: 1384175 - DNA, 15 bp, Homo sapiens
caagagaaggctctt

SEQ ID NO: 1384176 - DNA, 15 bp, Homo sapiens
tcaagagaaggctct

SEQ ID NO: 1384177 - DNA, 15 bp, Homo sapiens
gtcaagagaaggctc

SEQ ID NO: 1384178 - DNA, 15 bp, Homo sapiens
agtcaagagaaggct

SEQ ID NO: 1384179 - DNA, 15 bp, Homo sapiens
gagtcaagagaaggc

SEQ ID NO: 1384180 - DNA, 15 bp, Homo sapiens
agagtcaagagaagg

SEQ ID NO: 1384181 - DNA, 15 bp, Homo sapiens
gagagtcaagagaag

SEQ ID NO: 1384182 - DNA, 15 bp, Homo sapiens
ggagagtcaagagaa

SEQ ID NO: 1384183 - DNA, 15 bp, Homo sapiens
tggagagtcaagaga

SEQ ID NO: 1384184 - DNA, 15 bp, Homo sapiens
atggagagtcaagag

SEQ ID NO: 1384185 - DNA, 15 bp, Homo sapiens
tatggagagtcaaga

SEQ ID NO: 1384186 - DNA, 15 bp, Homo sapiens
ctatggagagtcaag

SEQ ID NO: 1384187 - DNA, 15 bp, Homo sapiens
actatggagagtcaa

SEQ ID NO: 1384188 - DNA, 15 bp, Homo sapiens
tactatggagagtca

SEQ ID NO: 1384189 - DNA, 15 bp, Homo sapiens
ctactatggagagtc

SEQ ID NO: 1384190 - DNA, 15 bp, Homo sapiens
tctactatggagagt

SEQ ID NO: 1384191 - DNA, 15 bp, Homo sapiens
atctactatggagag

SEQ ID NO: 1384192 - DNA, 15 bp, Homo sapiens
aatctactatggaga

SEQ ID NO: 1384193 - DNA, 15 bp, Homo sapiens
gaatctactatggag

SEQ ID NO: 1384194 - DNA, 15 bp, Homo sapiens
ggaatctactatgga

SEQ ID NO: 1384195 - DNA, 15 bp, Homo sapiens
aggaatctactatgg

SEQ ID NO: 1384196 - DNA, 15 bp, Homo sapiens
aaggaatctactatg

SEQ ID NO: 1384197 - DNA, 15 bp, Homo sapiens
gaaggaatctactat

SEQ ID NO: 1384198 - DNA, 15 bp, Homo sapiens
ggaaggaatctacta

SEQ ID NO: 1384199 - DNA, 15 bp, Homo sapiens
aggaaggaatctact

SEQ ID NO: 1384200 - DNA, 15 bp, Homo sapiens
taggaaggaatctac

SEQ ID NO: 1384201 - DNA, 15 bp, Homo sapiens
gtaggaaggaatcta

SEQ ID NO: 1384202 - DNA, 15 bp, Homo sapiens
tgtaggaaggaatct

SEQ ID NO: 1384203 - DNA, 15 bp, Homo sapiens
gtgtaggaaggaatc

SEQ ID NO: 1384204 - DNA, 15 bp, Homo sapiens
ggtgtaggaaggaat

SEQ ID NO: 1384205 - DNA, 15 bp, Homo sapiens
gggtgtaggaaggaa

SEQ ID NO: 1384206 - DNA, 15 bp, Homo sapiens
agggtgtaggaagga

SEQ ID NO: 1384207 - DNA, 15 bp, Homo sapiens
tagggtgtaggaagg

SEQ ID NO: 1384208 - DNA, 15 bp, Homo sapiens
ttagggtgtaggaag

SEQ ID NO: 1384209 - DNA, 15 bp, Homo sapiens
attagggtgtaggaa

SEQ ID NO: 1384210 - DNA, 15 bp, Homo sapiens
aattagggtgtagga

SEQ ID NO: 1384211 - DNA, 15 bp, Homo sapiens
gaattagggtgtagg

SEQ ID NO: 1384212 - DNA, 15 bp, Homo sapiens
agaattagggtgtag

SEQ ID NO: 1384213 - DNA, 15 bp, Homo sapiens
gagaattagggtgta

SEQ ID NO: 1384214 - DNA, 15 bp, Homo sapiens
ggagaattagggtgt

SEQ ID NO: 1384215 - DNA, 15 bp, Homo sapiens
gggagaattagggtg

SEQ ID NO: 1384216 - DNA, 15 bp, Homo sapiens
ggggagaattagggt

SEQ ID NO: 1384217 - DNA, 15 bp, Homo sapiens
tggggagaattaggg

SEQ ID NO: 1384218 - DNA, 15 bp, Homo sapiens
gtggggagaattagg

SEQ ID NO: 1384219 - DNA, 15 bp, Homo sapiens
agtggggagaattag

SEQ ID NO: 1384220 - DNA, 15 bp, Homo sapiens
gagtggggagaatta

SEQ ID NO: 1384221 - DNA, 15 bp, Homo sapiens
tgagtggggagaatt

SEQ ID NO: 1384222 - DNA, 15 bp, Homo sapiens
gtgagtggggagaat

SEQ ID NO: 1384223 - DNA, 15 bp, Homo sapiens
ggtgagtggggagaa

SEQ ID NO: 1384224 - DNA, 15 bp, Homo sapiens
aggtgagtggggaga

SEQ ID NO: 1384225 - DNA, 15 bp, Homo sapiens
caggtgagtggggag

SEQ ID NO: 1384226 - DNA, 15 bp, Homo sapiens
gcaggtgagtgggga

SEQ ID NO: 1384227 - DNA, 15 bp, Homo sapiens
ggcaggtgagtgggg

SEQ ID NO: 1384228 - DNA, 15 bp, Homo sapiens
aggcaggtgagtggg

SEQ ID NO: 1384229 - DNA, 15 bp, Homo sapiens
gaggcaggtgagtgg

SEQ ID NO: 1384230 - DNA, 15 bp, Homo sapiens
ggaggcaggtgagtg

SEQ ID NO: 1384231 - DNA, 15 bp, Homo sapiens
gggaggcaggtgagt

SEQ ID NO: 1384232 - DNA, 15 bp, Homo sapiens
tgggaggcaggtgag

SEQ ID NO: 1384233 - DNA, 15 bp, Homo sapiens
ctgggaggcaggtga

SEQ ID NO: 1384234 - DNA, 15 bp, Homo sapiens
gctgggaggcaggtg

SEQ ID NO: 1384235 - DNA, 15 bp, Homo sapiens
ggctgggaggcaggt

SEQ ID NO: 1384236 - DNA, 15 bp, Homo sapiens
gggctgggaggcagg

SEQ ID NO: 1384237 - DNA, 15 bp, Homo sapiens
tgggctgggaggcag

SEQ ID NO: 1384238 - DNA, 15 bp, Homo sapiens
atgggctgggaggca

SEQ ID NO: 1384239 - DNA, 15 bp, Homo sapiens
aatgggctgggaggc

SEQ ID NO: 1384240 - DNA, 15 bp, Homo sapiens
taatgggctgggagg

SEQ ID NO: 1384241 - DNA, 15 bp, Homo sapiens
ctaatgggctgggag

SEQ ID NO: 1384242 - DNA, 15 bp, Homo sapiens
cctaatgggctggga

SEQ ID NO: 1384243 - DNA, 15 bp, Homo sapiens
gcctaatgggctggg

SEQ ID NO: 1384244 - DNA, 15 bp, Homo sapiens
ggcctaatgggctgg

SEQ ID NO: 1384245 - DNA, 15 bp, Homo sapiens
gggcctaatgggctg

SEQ ID NO: 1384246 - DNA, 15 bp, Homo sapiens
agggcctaatgggct

SEQ ID NO: 1384247 - DNA, 15 bp, Homo sapiens
gagggcctaatgggc

SEQ ID NO: 1384248 - DNA, 15 bp, Homo sapiens
tgagggcctaatggg

SEQ ID NO: 1384249 - DNA, 15 bp, Homo sapiens
gtgagggcctaatgg

SEQ ID NO: 1384250 - DNA, 15 bp, Homo sapiens
tgtgagggcctaatg

SEQ ID NO: 1384251 - DNA, 15 bp, Homo sapiens
ctgtgagggcctaat

SEQ ID NO: 1384252 - DNA, 15 bp, Homo sapiens
actgtgagggcctaa

SEQ ID NO: 1384253 - DNA, 15 bp, Homo sapiens
tactgtgagggccta

SEQ ID NO: 1384254 - DNA, 15 bp, Homo sapiens
gtactgtgagggcct

SEQ ID NO: 1384255 - DNA, 15 bp, Homo sapiens
agtactgtgagggcc

SEQ ID NO: 1384256 - DNA, 15 bp, Homo sapiens
aagtactgtgagggc

SEQ ID NO: 1384257 - DNA, 15 bp, Homo sapiens
aaagtactgtgaggg

SEQ ID NO: 1384258 - DNA, 15 bp, Homo sapiens
aaaagtactgtgagg

SEQ ID NO: 1384259 - DNA, 15 bp, Homo sapiens
gaaaagtactgtgag

SEQ ID NO: 1384260 - DNA, 15 bp, Homo sapiens
ggaaaagtactgtga

SEQ ID NO: 1384261 - DNA, 15 bp, Homo sapiens
aggaaaagtactgtg

SEQ ID NO: 1384262 - DNA, 15 bp, Homo sapiens
aaggaaaagtactgt

SEQ ID NO: 1384263 - DNA, 15 bp, Homo sapiens
gaaggaaaagtactg

SEQ ID NO: 1384264 - DNA, 15 bp, Homo sapiens
tgaaggaaaagtact

SEQ ID NO: 1384265 - DNA, 15 bp, Homo sapiens
gtgaaggaaaagtac

SEQ ID NO: 1384266 - DNA, 15 bp, Homo sapiens
agtgaaggaaaagta

SEQ ID NO: 1384267 - DNA, 15 bp, Homo sapiens
cagtgaaggaaaagt

SEQ ID NO: 1384268 - DNA, 15 bp, Homo sapiens
tcagtgaaggaaaag

SEQ ID NO: 1384269 - DNA, 15 bp, Homo sapiens
ttcagtgaaggaaaa

SEQ ID NO: 1384270 - DNA, 15 bp, Homo sapiens
tttcagtgaaggaaa

SEQ ID NO: 1384271 - DNA, 15 bp, Homo sapiens
gtttcagtgaaggaa

SEQ ID NO: 1384272 - DNA, 15 bp, Homo sapiens
tgtttcagtgaagga

SEQ ID NO: 1384273 - DNA, 15 bp, Homo sapiens
atgtttcagtgaagg

SEQ ID NO: 1384274 - DNA, 15 bp, Homo sapiens
tatgtttcagtgaag

SEQ ID NO: 1384275 - DNA, 15 bp, Homo sapiens
ttatgtttcagtgaa

SEQ ID NO: 1384276 - DNA, 15 bp, Homo sapiens
tttatgtttcagtga

SEQ ID NO: 1384277 - DNA, 15 bp, Homo sapiens
gtttatgtttcagtg

SEQ ID NO: 1384278 - DNA, 15 bp, Homo sapiens
ggtttatgtttcagt

SEQ ID NO: 1384279 - DNA, 15 bp, Homo sapiens
gggtttatgtttcag

SEQ ID NO: 1384280 - DNA, 15 bp, Homo sapiens
ggggtttatgtttca

SEQ ID NO: 1384281 - DNA, 15 bp, Homo sapiens
aggggtttatgtttc

SEQ ID NO: 1384282 - DNA, 15 bp, Homo sapiens
caggggtttatgttt

SEQ ID NO: 1384283 - DNA, 15 bp, Homo sapiens
tcaggggtttatgtt

SEQ ID NO: 1384284 - DNA, 15 bp, Homo sapiens
ctcaggggtttatgt

SEQ ID NO: 1384285 - DNA, 15 bp, Homo sapiens
cctcaggggtttatg

SEQ ID NO: 1384286 - DNA, 15 bp, Homo sapiens
ccctcaggggtttat

SEQ ID NO: 1384287 - DNA, 15 bp, Homo sapiens
gccctcaggggttta

SEQ ID NO: 1384288 - DNA, 15 bp, Homo sapiens
cgccctcaggggttt

SEQ ID NO: 1384289 - DNA, 15 bp, Homo sapiens
ccgccctcaggggtt

SEQ ID NO: 1384290 - DNA, 15 bp, Homo sapiens
tccgccctcaggggt

SEQ ID NO: 1384291 - DNA, 15 bp, Homo sapiens
ttccgccctcagggg

SEQ ID NO: 1384292 - DNA, 15 bp, Homo sapiens
tttccgccctcaggg

SEQ ID NO: 1384293 - DNA, 15 bp, Homo sapiens
gtttccgccctcagg

SEQ ID NO: 1384294 - DNA, 15 bp, Homo sapiens
agtttccgccctcag

SEQ ID NO: 1384295 - DNA, 15 bp, Homo sapiens
aagtttccgccctca

SEQ ID NO: 1384296 - DNA, 15 bp, Homo sapiens
aaagtttccgccctc

SEQ ID NO: 1384297 - DNA, 15 bp, Homo sapiens
caaagtttccgccct

SEQ ID NO: 1384298 - DNA, 15 bp, Homo sapiens
acaaagtttccgccc

SEQ ID NO: 1384299 - DNA, 15 bp, Homo sapiens
gacaaagtttccgcc

SEQ ID NO: 1384300 - DNA, 15 bp, Homo sapiens
agacaaagtttccgc

SEQ ID NO: 1384301 - DNA, 15 bp, Homo sapiens
aagacaaagtttccg

SEQ ID NO: 1384302 - DNA, 15 bp, Homo sapiens
aaagacaaagtttcc

SEQ ID NO: 1384303 - DNA, 15 bp, Homo sapiens
taaagacaaagtttc

SEQ ID NO: 1384304 - DNA, 15 bp, Homo sapiens
gtaaagacaaagttt

SEQ ID NO: 1384305 - DNA, 15 bp, Homo sapiens
ggtaaagacaaagtt

SEQ ID NO: 1384306 - DNA, 15 bp, Homo sapiens
tggtaaagacaaagt

SEQ ID NO: 1384307 - DNA, 15 bp, Homo sapiens
ctggtaaagacaaag

SEQ ID NO: 1384308 - DNA, 15 bp, Homo sapiens
gctggtaaagacaaa

SEQ ID NO: 1384309 - DNA, 15 bp, Homo sapiens
tgctggtaaagacaa

SEQ ID NO: 1384310 - DNA, 15 bp, Homo sapiens
atgctggtaaagaca

SEQ ID NO: 1384311 - DNA, 15 bp, Homo sapiens
gatgctggtaaagac

SEQ ID NO: 1384312 - DNA, 15 bp, Homo sapiens
agatgctggtaaaga

SEQ ID NO: 1384313 - DNA, 15 bp, Homo sapiens
tagatgctggtaaag

SEQ ID NO: 1384314 - DNA, 15 bp, Homo sapiens
atagatgctggtaaa

SEQ ID NO: 1384315 - DNA, 15 bp, Homo sapiens
tatagatgctggtaa

SEQ ID NO: 1384316 - DNA, 15 bp, Homo sapiens
ctatagatgctggta

SEQ ID NO: 1384317 - DNA, 15 bp, Homo sapiens
actatagatgctggt

SEQ ID NO: 1384318 - DNA, 15 bp, Homo sapiens
aactatagatgctgg

SEQ ID NO: 1384319 - DNA, 15 bp, Homo sapiens
aaactatagatgctg

SEQ ID NO: 1384320 - DNA, 15 bp, Homo sapiens
caaactatagatgct

SEQ ID NO: 1384321 - DNA, 15 bp, Homo sapiens
acaaactatagatgc

SEQ ID NO: 1384322 - DNA, 15 bp, Homo sapiens
tacaaactatagatg

SEQ ID NO: 1384323 - DNA, 15 bp, Homo sapiens
ttacaaactatagat

SEQ ID NO: 1384324 - DNA, 15 bp, Homo sapiens
attacaaactataga

SEQ ID NO: 1384325 - DNA, 15 bp, Homo sapiens
tattacaaactatag

SEQ ID NO: 1384326 - DNA, 15 bp, Homo sapiens
ttattacaaactata

SEQ ID NO: 1384327 - DNA, 15 bp, Homo sapiens
gttattacaaactat

SEQ ID NO: 1384328 - DNA, 15 bp, Homo sapiens
tgttattacaaacta

SEQ ID NO: 1384329 - DNA, 15 bp, Homo sapiens
atgttattacaaact

SEQ ID NO: 1384330 - DNA, 15 bp, Homo sapiens
tatgttattacaaac

SEQ ID NO: 1384331 - DNA, 15 bp, Homo sapiens
gtatgttattacaaa

SEQ ID NO: 1384332 - DNA, 15 bp, Homo sapiens
ggtatgttattacaa

SEQ ID NO: 1384333 - DNA, 15 bp, Homo sapiens
cggtatgttattaca

SEQ ID NO: 1384334 - DNA, 15 bp, Homo sapiens
tcggtatgttattac

SEQ ID NO: 1384335 - DNA, 15 bp, Homo sapiens
atcggtatgttatta

SEQ ID NO: 1384336 - DNA, 15 bp, Homo sapiens
catcggtatgttatt

SEQ ID NO: 1384337 - DNA, 15 bp, Homo sapiens
acatcggtatgttat

SEQ ID NO: 1384338 - DNA, 15 bp, Homo sapiens
gacatcggtatgtta

SEQ ID NO: 1384339 - DNA, 15 bp, Homo sapiens
agacatcggtatgtt

SEQ ID NO: 1384340 - DNA, 15 bp, Homo sapiens
cagacatcggtatgt

SEQ ID NO: 1384341 - DNA, 15 bp, Homo sapiens
acagacatcggtatg

SEQ ID NO: 1384342 - DNA, 15 bp, Homo sapiens
aacagacatcggtat

SEQ ID NO: 1384343 - DNA, 15 bp, Homo sapiens
gaacagacatcggta

SEQ ID NO: 1384344 - DNA, 15 bp, Homo sapiens
agaacagacatcggt

SEQ ID NO: 1384345 - DNA, 15 bp, Homo sapiens
gagaacagacatcgg

SEQ ID NO: 1384346 - DNA, 15 bp, Homo sapiens
ggagaacagacatcg

SEQ ID NO: 1384347 - DNA, 15 bp, Homo sapiens
cggagaacagacatc

SEQ ID NO: 1384348 - DNA, 15 bp, Homo sapiens
acggagaacagacat

SEQ ID NO: 1384349 - DNA, 15 bp, Homo sapiens
cacggagaacagaca

SEQ ID NO: 1384350 - DNA, 15 bp, Homo sapiens
gcacggagaacagac

SEQ ID NO: 1384351 - DNA, 15 bp, Homo sapiens
agcacggagaacaga

SEQ ID NO: 1384352 - DNA, 15 bp, Homo sapiens
gagcacggagaacag

SEQ ID NO: 1384353 - DNA, 15 bp, Homo sapiens
tgagcacggagaaca

SEQ ID NO: 1384354 - DNA, 15 bp, Homo sapiens
gtgagcacggagaac

SEQ ID NO: 1384355 - DNA, 15 bp, Homo sapiens
ggtgagcacggagaa

SEQ ID NO: 1384356 - DNA, 15 bp, Homo sapiens
tggtgagcacggaga

SEQ ID NO: 1384357 - DNA, 15 bp, Homo sapiens
ttggtgagcacggag

SEQ ID NO: 1384358 - DNA, 15 bp, Homo sapiens
tttggtgagcacgga

SEQ ID NO: 1384359 - DNA, 15 bp, Homo sapiens
gtttggtgagcacgg

SEQ ID NO: 1384360 - DNA, 15 bp, Homo sapiens
agtttggtgagcacg

SEQ ID NO: 1384361 - DNA, 15 bp, Homo sapiens
cagtttggtgagcac

SEQ ID NO: 1384362 - DNA, 15 bp, Homo sapiens
acagtttggtgagca

SEQ ID NO: 1384363 - DNA, 15 bp, Homo sapiens
tacagtttggtgagc

SEQ ID NO: 1384364 - DNA, 15 bp, Homo sapiens
ttacagtttggtgag

SEQ ID NO: 1384365 - DNA, 15 bp, Homo sapiens
cttacagtttggtga

SEQ ID NO: 1384366 - DNA, 15 bp, Homo sapiens
acttacagtttggtg

SEQ ID NO: 1384367 - DNA, 15 bp, Homo sapiens
gacttacagtttggt

SEQ ID NO: 1384368 - DNA, 15 bp, Homo sapiens
agacttacagtttgg

SEQ ID NO: 1384369 - DNA, 15 bp, Homo sapiens
tagacttacagtttg

SEQ ID NO: 1384370 - DNA, 15 bp, Homo sapiens
ttagacttacagttt

SEQ ID NO: 1384371 - DNA, 15 bp, Homo sapiens
attagacttacagtt

SEQ ID NO: 1384372 - DNA, 15 bp, Homo sapiens
cattagacttacagt

SEQ ID NO: 1384373 - DNA, 15 bp, Homo sapiens
tcattagacttacag

SEQ ID NO: 1384374 - DNA, 15 bp, Homo sapiens
ttcattagacttaca

SEQ ID NO: 1384375 - DNA, 15 bp, Homo sapiens
cttcattagacttac

SEQ ID NO: 1384376 - DNA, 15 bp, Homo sapiens
acttcattagactta

SEQ ID NO: 1384377 - DNA, 15 bp, Homo sapiens
gacttcattagactt

SEQ ID NO: 1384378 - DNA, 15 bp, Homo sapiens
tgacttcattagact

SEQ ID NO: 1384379 - DNA, 15 bp, Homo sapiens
ctgacttcattagac

SEQ ID NO: 1384380 - DNA, 15 bp, Homo sapiens
tctgacttcattaga

SEQ ID NO: 1384381 - DNA, 15 bp, Homo sapiens
ctctgacttcattag

SEQ ID NO: 1384382 - DNA, 15 bp, Homo sapiens
tctctgacttcatta

SEQ ID NO: 1384383 - DNA, 15 bp, Homo sapiens
gtctctgacttcatt

SEQ ID NO: 1384384 - DNA, 15 bp, Homo sapiens
agtctctgacttcat

SEQ ID NO: 1384385 - DNA, 15 bp, Homo sapiens
tagtctctgacttca

SEQ ID NO: 1384386 - DNA, 15 bp, Homo sapiens
gtagtctctgacttc

SEQ ID NO: 1384387 - DNA, 15 bp, Homo sapiens
cgtagtctctgactt

SEQ ID NO: 1384388 - DNA, 15 bp, Homo sapiens
acgtagtctctgact

SEQ ID NO: 1384389 - DNA, 15 bp, Homo sapiens
gacgtagtctctgac

SEQ ID NO: 1384390 - DNA, 15 bp, Homo sapiens
agacgtagtctctga

SEQ ID NO: 1384391 - DNA, 15 bp, Homo sapiens
tagacgtagtctctg

SEQ ID NO: 1384392 - DNA, 15 bp, Homo sapiens
ctagacgtagtctct

SEQ ID NO: 1384393 - DNA, 15 bp, Homo sapiens
actagacgtagtctc

SEQ ID NO: 1384394 - DNA, 15 bp, Homo sapiens
gactagacgtagtct

SEQ ID NO: 1384395 - DNA, 15 bp, Homo sapiens
ggactagacgtagtc

SEQ ID NO: 1384396 - DNA, 15 bp, Homo sapiens
tggactagacgtagt

SEQ ID NO: 1384397 - DNA, 15 bp, Homo sapiens
atggactagacgtag

SEQ ID NO: 1384398 - DNA, 15 bp, Homo sapiens
catggactagacgta

SEQ ID NO: 1384399 - DNA, 15 bp, Homo sapiens
tcatggactagacgt

SEQ ID NO: 1384400 - DNA, 15 bp, Homo sapiens
atcatggactagacg

SEQ ID NO: 1384401 - DNA, 15 bp, Homo sapiens
catcatggactagac

SEQ ID NO: 1384402 - DNA, 15 bp, Homo sapiens
acatcatggactaga

SEQ ID NO: 1384403 - DNA, 15 bp, Homo sapiens
cacatcatggactag

SEQ ID NO: 1384404 - DNA, 15 bp, Homo sapiens
gcacatcatggacta

SEQ ID NO: 1384405 - DNA, 15 bp, Homo sapiens
ggcacatcatggact

SEQ ID NO: 1384406 - DNA, 15 bp, Homo sapiens
aggcacatcatggac

SEQ ID NO: 1384407 - DNA, 15 bp, Homo sapiens
caggcacatcatgga

SEQ ID NO: 1384408 - DNA, 15 bp, Homo sapiens
gcaggcacatcatgg

SEQ ID NO: 1384409 - DNA, 15 bp, Homo sapiens
tgcaggcacatcatg

SEQ ID NO: 1384410 - DNA, 15 bp, Homo sapiens
ttgcaggcacatcat

SEQ ID NO: 1384411 - DNA, 15 bp, Homo sapiens
attgcaggcacatca

SEQ ID NO: 1384412 - DNA, 15 bp, Homo sapiens
cattgcaggcacatc

SEQ ID NO: 1384413 - DNA, 15 bp, Homo sapiens
tcattgcaggcacat

SEQ ID NO: 1384414 - DNA, 15 bp, Homo sapiens
ttcattgcaggcaca

SEQ ID NO: 1384415 - DNA, 15 bp, Homo sapiens
attcattgcaggcac

SEQ ID NO: 1384416 - DNA, 15 bp, Homo sapiens
tattcattgcaggca

SEQ ID NO: 1384417 - DNA, 15 bp, Homo sapiens
gtattcattgcaggc

SEQ ID NO: 1384418 - DNA, 15 bp, Homo sapiens
ggtattcattgcagg

SEQ ID NO: 1384419 - DNA, 15 bp, Homo sapiens
aggtattcattgcag

SEQ ID NO: 1384420 - DNA, 15 bp, Homo sapiens
taggtattcattgca

SEQ ID NO: 1384421 - DNA, 15 bp, Homo sapiens
gtaggtattcattgc

SEQ ID NO: 1384422 - DNA, 15 bp, Homo sapiens
agtaggtattcattg

SEQ ID NO: 1384423 - DNA, 15 bp, Homo sapiens
cagtaggtattcatt

SEQ ID NO: 1384424 - DNA, 15 bp, Homo sapiens
tcagtaggtattcat

SEQ ID NO: 1384425 - DNA, 15 bp, Homo sapiens
ttcagtaggtattca

SEQ ID NO: 1384426 - DNA, 15 bp, Homo sapiens
attcagtaggtattc

SEQ ID NO: 1384427 - DNA, 15 bp, Homo sapiens
gattcagtaggtatt

SEQ ID NO: 1384428 - DNA, 15 bp, Homo sapiens
tgattcagtaggtat

SEQ ID NO: 1384429 - DNA, 15 bp, Homo sapiens
ctgattcagtaggta

SEQ ID NO: 1384430 - DNA, 15 bp, Homo sapiens
actgattcagtaggt

SEQ ID NO: 1384431 - DNA, 15 bp, Homo sapiens
gactgattcagtagg

SEQ ID NO: 1384432 - DNA, 15 bp, Homo sapiens
agactgattcagtag

SEQ ID NO: 1384433 - DNA, 15 bp, Homo sapiens
cagactgattcagta

SEQ ID NO: 1384434 - DNA, 15 bp, Homo sapiens
acagactgattcagt

SEQ ID NO: 1384435 - DNA, 15 bp, Homo sapiens
aacagactgattcag

SEQ ID NO: 1384436 - DNA, 15 bp, Homo sapiens
aaacagactgattca

SEQ ID NO: 1384437 - DNA, 15 bp, Homo sapiens
gaaacagactgattc

SEQ ID NO: 1384438 - DNA, 15 bp, Homo sapiens
ggaaacagactgatt

SEQ ID NO: 1384439 - DNA, 15 bp, Homo sapiens
gggaaacagactgat

SEQ ID NO: 1384440 - DNA, 15 bp, Homo sapiens
tgggaaacagactga

SEQ ID NO: 1384441 - DNA, 15 bp, Homo sapiens
ttgggaaacagactg

SEQ ID NO: 1384442 - DNA, 15 bp, Homo sapiens
gttgggaaacagact

SEQ ID NO: 1384443 - DNA, 15 bp, Homo sapiens
tgttgggaaacagac

SEQ ID NO: 1384444 - DNA, 15 bp, Homo sapiens
atgttgggaaacaga

SEQ ID NO: 1384445 - DNA, 15 bp, Homo sapiens
catgttgggaaacag

SEQ ID NO: 1384446 - DNA, 15 bp, Homo sapiens
acatgttgggaaaca

SEQ ID NO: 1384447 - DNA, 15 bp, Homo sapiens
tacatgttgggaaac

SEQ ID NO: 1384448 - DNA, 15 bp, Homo sapiens
ctacatgttgggaaa

SEQ ID NO: 1384449 - DNA, 15 bp, Homo sapiens
tctacatgttgggaa

SEQ ID NO: 1384450 - DNA, 15 bp, Homo sapiens
ttctacatgttggga

SEQ ID NO: 1384451 - DNA, 15 bp, Homo sapiens
tttctacatgttggg

SEQ ID NO: 1384452 - DNA, 15 bp, Homo sapiens
ttttctacatgttgg

SEQ ID NO: 1384453 - DNA, 15 bp, Homo sapiens
attttctacatgttg

SEQ ID NO: 1384454 - DNA, 15 bp, Homo sapiens
tattttctacatgtt

SEQ ID NO: 1384455 - DNA, 15 bp, Homo sapiens
ttattttctacatgt

SEQ ID NO: 1384456 - DNA, 15 bp, Homo sapiens
attattttctacatg

SEQ ID NO: 1384457 - DNA, 15 bp, Homo sapiens
cattattttctacat

SEQ ID NO: 1384458 - DNA, 15 bp, Homo sapiens
gcattattttctaca

SEQ ID NO: 1384459 - DNA, 15 bp, Homo sapiens
agcattattttctac

SEQ ID NO: 1384460 - DNA, 15 bp, Homo sapiens
cagcattattttcta

SEQ ID NO: 1384461 - DNA, 15 bp, Homo sapiens
acagcattattttct

SEQ ID NO: 1384462 - DNA, 15 bp, Homo sapiens
cacagcattattttc

SEQ ID NO: 1384463 - DNA, 15 bp, Homo sapiens
gcacagcattatttt

SEQ ID NO: 1384464 - DNA, 15 bp, Homo sapiens
tgcacagcattattt

SEQ ID NO: 1384465 - DNA, 15 bp, Homo sapiens
ctgcacagcattatt

SEQ ID NO: 1384466 - DNA, 15 bp, Homo sapiens
cctgcacagcattat

SEQ ID NO: 1384467 - DNA, 15 bp, Homo sapiens
tcctgcacagcatta

SEQ ID NO: 1384468 - DNA, 15 bp, Homo sapiens
gtcctgcacagcatt

SEQ ID NO: 1384469 - DNA, 15 bp, Homo sapiens
tgtcctgcacagcat

SEQ ID NO: 1384470 - DNA, 15 bp, Homo sapiens
ttgtcctgcacagca

SEQ ID NO: 1384471 - DNA, 15 bp, Homo sapiens
cttgtcctgcacagc

SEQ ID NO: 1384472 - DNA, 15 bp, Homo sapiens
ccttgtcctgcacag

SEQ ID NO: 1384473 - DNA, 15 bp, Homo sapiens
cccttgtcctgcaca

SEQ ID NO: 1384474 - DNA, 15 bp, Homo sapiens
gcccttgtcctgcac

SEQ ID NO: 1384475 - DNA, 15 bp, Homo sapiens
tgcccttgtcctgca

SEQ ID NO: 1384476 - DNA, 15 bp, Homo sapiens
atgcccttgtcctgc

SEQ ID NO: 1384477 - DNA, 15 bp, Homo sapiens
tatgcccttgtcctg

SEQ ID NO: 1384478 - DNA, 15 bp, Homo sapiens
atatgcccttgtcct

SEQ ID NO: 1384479 - DNA, 15 bp, Homo sapiens
tatatgcccttgtcc

SEQ ID NO: 1384480 - DNA, 15 bp, Homo sapiens
atatatgcccttgtc

SEQ ID NO: 1384481 - DNA, 15 bp, Homo sapiens
aatatatgcccttgt

SEQ ID NO: 1384482 - DNA, 15 bp, Homo sapiens
aaatatatgcccttg

SEQ ID NO: 1384483 - DNA, 15 bp, Homo sapiens
aaaatatatgccctt

SEQ ID NO: 1384484 - DNA, 15 bp, Homo sapiens
aaaaatatatgccct

SEQ ID NO: 1384485 - DNA, 15 bp, Homo sapiens
taaaaatatatgccc

SEQ ID NO: 1384486 - DNA, 15 bp, Homo sapiens
ataaaaatatatgcc

SEQ ID NO: 1384487 - DNA, 15 bp, Homo sapiens
tataaaaatatatgc

SEQ ID NO: 1384488 - DNA, 15 bp, Homo sapiens
ttataaaaatatatg

SEQ ID NO: 1384489 - DNA, 15 bp, Homo sapiens
tttataaaaatatat

SEQ ID NO: 1384490 - DNA, 15 bp, Homo sapiens
tttttataaaaatat

SEQ ID NO: 1384491 - DNA, 15 bp, Homo sapiens
atttttataaaaata

SEQ ID NO: 1384492 - DNA, 15 bp, Homo sapiens
tatttttataaaaat

SEQ ID NO: 1384493 - DNA, 15 bp, Homo sapiens
atatttttataaaaa

SEQ ID NO: 1384494 - DNA, 15 bp, Homo sapiens
ttatatatttttata

SEQ ID NO: 1384495 - DNA, 15 bp, Homo sapiens
attatatatttttat

SEQ ID NO: 1384496 - DNA, 15 bp, Homo sapiens
aattatatattttta

SEQ ID NO: 1384497 - DNA, 15 bp, Homo sapiens
aaattatatattttt

SEQ ID NO: 1384498 - DNA, 15 bp, Homo sapiens
gaaattatatatttt

SEQ ID NO: 1384499 - DNA, 15 bp, Homo sapiens
ggaaattatatattt

SEQ ID NO: 1384500 - DNA, 15 bp, Homo sapiens
tggaaattatatatt

SEQ ID NO: 1384501 - DNA, 15 bp, Homo sapiens
ctggaaattatatat

SEQ ID NO: 1384502 - DNA, 15 bp, Homo sapiens
actggaaattatata

SEQ ID NO: 1384503 - DNA, 15 bp, Homo sapiens
cactggaaattatat

SEQ ID NO: 1384504 - DNA, 15 bp, Homo sapiens
ccactggaaattata

SEQ ID NO: 1384505 - DNA, 15 bp, Homo sapiens
accactggaaattat

SEQ ID NO: 1384506 - DNA, 15 bp, Homo sapiens
gaccactggaaatta

SEQ ID NO: 1384507 - DNA, 15 bp, Homo sapiens
tgaccactggaaatt

SEQ ID NO: 1384508 - DNA, 15 bp, Homo sapiens
ttgaccactggaaat

SEQ ID NO: 1384509 - DNA, 15 bp, Homo sapiens
attgaccactggaaa

SEQ ID NO: 1384510 - DNA, 15 bp, Homo sapiens
aattgaccactggaa

SEQ ID NO: 1384511 - DNA, 15 bp, Homo sapiens
caattgaccactgga

SEQ ID NO: 1384512 - DNA, 15 bp, Homo sapiens
tcaattgaccactgg

SEQ ID NO: 1384513 - DNA, 15 bp, Homo sapiens
atcaattgaccactg

SEQ ID NO: 1384514 - DNA, 15 bp, Homo sapiens
tatcaattgaccact

SEQ ID NO: 1384515 - DNA, 15 bp, Homo sapiens
atatcaattgaccac

SEQ ID NO: 1384516 - DNA, 15 bp, Homo sapiens
catatcaattgacca

SEQ ID NO: 1384517 - DNA, 15 bp, Homo sapiens
acatatcaattgacc

SEQ ID NO: 1384518 - DNA, 15 bp, Homo sapiens
tacatatcaattgac

SEQ ID NO: 1384519 - DNA, 15 bp, Homo sapiens
ctacatatcaattga

SEQ ID NO: 1384520 - DNA, 15 bp, Homo sapiens
actacatatcaattg

SEQ ID NO: 1384521 - DNA, 15 bp, Homo sapiens
tactacatatcaatt

SEQ ID NO: 1384522 - DNA, 15 bp, Homo sapiens
ttactacatatcaat

SEQ ID NO: 1384523 - DNA, 15 bp, Homo sapiens
cttactacatatcaa

SEQ ID NO: 1384524 - DNA, 15 bp, Homo sapiens
ccttactacatatca

SEQ ID NO: 1384525 - DNA, 15 bp, Homo sapiens
tccttactacatatc

SEQ ID NO: 1384526 - DNA, 15 bp, Homo sapiens
ttccttactacatat

SEQ ID NO: 1384527 - DNA, 15 bp, Homo sapiens
tttccttactacata

SEQ ID NO: 1384528 - DNA, 15 bp, Homo sapiens
ttttccttactacat

SEQ ID NO: 1384529 - DNA, 15 bp, Homo sapiens
tttttccttactaca

SEQ ID NO: 1384530 - DNA, 15 bp, Homo sapiens
ttttttccttactac

SEQ ID NO: 1384531 - DNA, 15 bp, Homo sapiens
cttttttccttacta

SEQ ID NO: 1384532 - DNA, 15 bp, Homo sapiens
acttttttccttact

SEQ ID NO: 1384533 - DNA, 15 bp, Homo sapiens
gacttttttccttac

SEQ ID NO: 1384534 - DNA, 15 bp, Homo sapiens
tgacttttttcctta

SEQ ID NO: 1384535 - DNA, 15 bp, Homo sapiens
atgacttttttcctt

SEQ ID NO: 1384536 - DNA, 15 bp, Homo sapiens
tatgacttttttcct

SEQ ID NO: 1384537 - DNA, 15 bp, Homo sapiens
ttatgacttttttcc

SEQ ID NO: 1384538 - DNA, 15 bp, Homo sapiens
cttatgacttttttc

SEQ ID NO: 1384539 - DNA, 15 bp, Homo sapiens
tcttatgactttttt

SEQ ID NO: 1384540 - DNA, 15 bp, Homo sapiens
atcttatgacttttt

SEQ ID NO: 1384541 - DNA, 15 bp, Homo sapiens
catcttatgactttt

SEQ ID NO: 1384542 - DNA, 15 bp, Homo sapiens
tcatcttatgacttt

SEQ ID NO: 1384543 - DNA, 15 bp, Homo sapiens
ttcatcttatgactt

SEQ ID NO: 1384544 - DNA, 15 bp, Homo sapiens
tttcatcttatgact

SEQ ID NO: 1384545 - DNA, 15 bp, Homo sapiens
ctttcatcttatgac

SEQ ID NO: 1384546 - DNA, 15 bp, Homo sapiens
cctttcatcttatga

SEQ ID NO: 1384547 - DNA, 15 bp, Homo sapiens
gcctttcatcttatg

SEQ ID NO: 1384548 - DNA, 15 bp, Homo sapiens
agcctttcatcttat

SEQ ID NO: 1384549 - DNA, 15 bp, Homo sapiens
tagcctttcatctta

SEQ ID NO: 1384550 - DNA, 15 bp, Homo sapiens
ctagcctttcatctt

SEQ ID NO: 1384551 - DNA, 15 bp, Homo sapiens
cctagcctttcatct

SEQ ID NO: 1384552 - DNA, 15 bp, Homo sapiens
ccctagcctttcatc

SEQ ID NO: 1384553 - DNA, 15 bp, Homo sapiens
cccctagcctttcat

SEQ ID NO: 1384554 - DNA, 15 bp, Homo sapiens
gcccctagcctttca

SEQ ID NO: 1384555 - DNA, 15 bp, Homo sapiens
ggcccctagcctttc

SEQ ID NO: 1384556 - DNA, 15 bp, Homo sapiens
aggcccctagccttt

SEQ ID NO: 1384557 - DNA, 15 bp, Homo sapiens
gaggcccctagcctt

SEQ ID NO: 1384558 - DNA, 15 bp, Homo sapiens
agaggcccctagcct

SEQ ID NO: 1384559 - DNA, 15 bp, Homo sapiens
tagaggcccctagcc

SEQ ID NO: 1384560 - DNA, 15 bp, Homo sapiens
ctagaggcccctagc

SEQ ID NO: 1384561 - DNA, 15 bp, Homo sapiens
gctagaggcccctag

SEQ ID NO: 1384562 - DNA, 15 bp, Homo sapiens
agctagaggccccta

SEQ ID NO: 1384563 - DNA, 15 bp, Homo sapiens
aagctagaggcccct

SEQ ID NO: 1384564 - DNA, 15 bp, Homo sapiens
taagctagaggcccc

SEQ ID NO: 1384565 - DNA, 15 bp, Homo sapiens
ctaagctagaggccc

SEQ ID NO: 1384566 - DNA, 15 bp, Homo sapiens
tctaagctagaggcc

SEQ ID NO: 1384567 - DNA, 15 bp, Homo sapiens
ttctaagctagaggc

SEQ ID NO: 1384568 - DNA, 15 bp, Homo sapiens
tttctaagctagagg

SEQ ID NO: 1384569 - DNA, 15 bp, Homo sapiens
ttttctaagctagag

SEQ ID NO: 1384570 - DNA, 15 bp, Homo sapiens
tttttctaagctaga

SEQ ID NO: 1384571 - DNA, 15 bp, Homo sapiens
atttttctaagctag

SEQ ID NO: 1384572 - DNA, 15 bp, Homo sapiens
catttttctaagcta

SEQ ID NO: 1384573 - DNA, 15 bp, Homo sapiens
acatttttctaagct

SEQ ID NO: 1384574 - DNA, 15 bp, Homo sapiens
gacatttttctaagc

SEQ ID NO: 1384575 - DNA, 15 bp, Homo sapiens
ggacatttttctaag

SEQ ID NO: 1384576 - DNA, 15 bp, Homo sapiens
gggacatttttctaa

SEQ ID NO: 1384577 - DNA, 15 bp, Homo sapiens
agggacatttttcta

SEQ ID NO: 1384578 - DNA, 15 bp, Homo sapiens
tagggacatttttct

SEQ ID NO: 1384579 - DNA, 15 bp, Homo sapiens
ttagggacatttttc

SEQ ID NO: 1384580 - DNA, 15 bp, Homo sapiens
tttagggacattttt

SEQ ID NO: 1384581 - DNA, 15 bp, Homo sapiens
atttagggacatttt

SEQ ID NO: 1384582 - DNA, 15 bp, Homo sapiens
tatttagggacattt

SEQ ID NO: 1384583 - DNA, 15 bp, Homo sapiens
ttatttagggacatt

SEQ ID NO: 1384584 - DNA, 15 bp, Homo sapiens
gttatttagggacat

SEQ ID NO: 1384585 - DNA, 15 bp, Homo sapiens
tgttatttagggaca

SEQ ID NO: 1384586 - DNA, 15 bp, Homo sapiens
ctgttatttagggac

SEQ ID NO: 1384587 - DNA, 15 bp, Homo sapiens
tctgttatttaggga

SEQ ID NO: 1384588 - DNA, 15 bp, Homo sapiens
ttctgttatttaggg

SEQ ID NO: 1384589 - DNA, 15 bp, Homo sapiens
tttctgttatttagg

SEQ ID NO: 1384590 - DNA, 15 bp, Homo sapiens
ttttctgttatttag

SEQ ID NO: 1384591 - DNA, 15 bp, Homo sapiens
tttttctgttattta

SEQ ID NO: 1384592 - DNA, 15 bp, Homo sapiens
ttttttctgttattt

SEQ ID NO: 1384593 - DNA, 15 bp, Homo sapiens
tttttttctgttatt

SEQ ID NO: 1384594 - DNA, 15 bp, Homo sapiens
ttttttttctgttat

SEQ ID NO: 1384595 - DNA, 15 bp, Homo sapiens
tttttttttctgtta

SEQ ID NO: 1384596 - DNA, 15 bp, Homo sapiens
ttttttttttctgtt

SEQ ID NO: 1384597 - DNA, 15 bp, Homo sapiens
acatgtttttttttt

SEQ ID NO: 1384598 - DNA, 15 bp, Homo sapiens
tacatgttttttttt

SEQ ID NO: 1384599 - DNA, 15 bp, Homo sapiens
atacatgtttttttt

SEQ ID NO: 1384600 - DNA, 15 bp, Homo sapiens
tatacatgttttttt

SEQ ID NO: 1384601 - DNA, 15 bp, Homo sapiens
atatacatgtttttt

SEQ ID NO: 1384602 - DNA, 15 bp, Homo sapiens
gatatacatgttttt

SEQ ID NO: 1384603 - DNA, 15 bp, Homo sapiens
tgatatacatgtttt

SEQ ID NO: 1384604 - DNA, 15 bp, Homo sapiens
ctgatatacatgttt

SEQ ID NO: 1384605 - DNA, 15 bp, Homo sapiens
gctgatatacatgtt

SEQ ID NO: 1384606 - DNA, 15 bp, Homo sapiens
tgctgatatacatgt

SEQ ID NO: 1384607 - DNA, 15 bp, Homo sapiens
ctgctgatatacatg

SEQ ID NO: 1384608 - DNA, 15 bp, Homo sapiens
cctgctgatatacat

SEQ ID NO: 1384609 - DNA, 15 bp, Homo sapiens
tcctgctgatataca

SEQ ID NO: 1384610 - DNA, 15 bp, Homo sapiens
ctcctgctgatatac

SEQ ID NO: 1384611 - DNA, 15 bp, Homo sapiens
cctcctgctgatata

SEQ ID NO: 1384612 - DNA, 15 bp, Homo sapiens
acctcctgctgatat

SEQ ID NO: 1384613 - DNA, 15 bp, Homo sapiens
tacctcctgctgata

SEQ ID NO: 1384614 - DNA, 15 bp, Homo sapiens
ctacctcctgctgat

SEQ ID NO: 1384615 - DNA, 15 bp, Homo sapiens
tctacctcctgctga

SEQ ID NO: 1384616 - DNA, 15 bp, Homo sapiens
ttctacctcctgctg

SEQ ID NO: 1384617 - DNA, 15 bp, Homo sapiens
tttctacctcctgct

SEQ ID NO: 1384618 - DNA, 15 bp, Homo sapiens
ctttctacctcctgc

SEQ ID NO: 1384619 - DNA, 15 bp, Homo sapiens
tctttctacctcctg

SEQ ID NO: 1384620 - DNA, 15 bp, Homo sapiens
ctctttctacctcct

SEQ ID NO: 1384621 - DNA, 15 bp, Homo sapiens
gctctttctacctcc

SEQ ID NO: 1384622 - DNA, 15 bp, Homo sapiens
tgctctttctacctc

SEQ ID NO: 1384623 - DNA, 15 bp, Homo sapiens
atgctctttctacct

SEQ ID NO: 1384624 - DNA, 15 bp, Homo sapiens
tatgctctttctacc

SEQ ID NO: 1384625 - DNA, 15 bp, Homo sapiens
ttatgctctttctac

SEQ ID NO: 1384626 - DNA, 15 bp, Homo sapiens
tttatgctctttcta

SEQ ID NO: 1384627 - DNA, 15 bp, Homo sapiens
ctttatgctctttct

SEQ ID NO: 1384628 - DNA, 15 bp, Homo sapiens
tctttatgctctttc

SEQ ID NO: 1384629 - DNA, 15 bp, Homo sapiens
ctctttatgctcttt

SEQ ID NO: 1384630 - DNA, 15 bp, Homo sapiens
tctctttatgctctt

SEQ ID NO: 1384631 - DNA, 15 bp, Homo sapiens
ctctctttatgctct

SEQ ID NO: 1384632 - DNA, 15 bp, Homo sapiens
cctctctttatgctc

SEQ ID NO: 1384633 - DNA, 15 bp, Homo sapiens
tcctctctttatgct

SEQ ID NO: 1384634 - DNA, 15 bp, Homo sapiens
atcctctctttatgc

SEQ ID NO: 1384635 - DNA, 15 bp, Homo sapiens
aatcctctctttatg

SEQ ID NO: 1384636 - DNA, 15 bp, Homo sapiens
gaatcctctctttat

SEQ ID NO: 1384637 - DNA, 15 bp, Homo sapiens
tgaatcctctcttta

SEQ ID NO: 1384638 - DNA, 15 bp, Homo sapiens
ctgaatcctctcttt

SEQ ID NO: 1384639 - DNA, 15 bp, Homo sapiens
tctgaatcctctctt

SEQ ID NO: 1384640 - DNA, 15 bp, Homo sapiens
ttctgaatcctctct

SEQ ID NO: 1384641 - DNA, 15 bp, Homo sapiens
cttctgaatcctctc

SEQ ID NO: 1384642 - DNA, 15 bp, Homo sapiens
acttctgaatcctct

SEQ ID NO: 1384643 - DNA, 15 bp, Homo sapiens
cacttctgaatcctc

SEQ ID NO: 1384644 - DNA, 15 bp, Homo sapiens
ccacttctgaatcct

SEQ ID NO: 1384645 - DNA, 15 bp, Homo sapiens
cccacttctgaatcc

SEQ ID NO: 1384646 - DNA, 15 bp, Homo sapiens
gcccacttctgaatc

SEQ ID NO: 1384647 - DNA, 15 bp, Homo sapiens
ggcccacttctgaat

SEQ ID NO: 1384648 - DNA, 15 bp, Homo sapiens
tggcccacttctgaa

SEQ ID NO: 1384649 - DNA, 15 bp, Homo sapiens
ttggcccacttctga

SEQ ID NO: 1384650 - DNA, 15 bp, Homo sapiens
gttggcccacttctg

SEQ ID NO: 1384651 - DNA, 15 bp, Homo sapiens
ggttggcccacttct

SEQ ID NO: 1384652 - DNA, 15 bp, Homo sapiens
gggttggcccacttc

SEQ ID NO: 1384653 - DNA, 15 bp, Homo sapiens
ggggttggcccactt

SEQ ID NO: 1384654 - DNA, 15 bp, Homo sapiens
tggggttggcccact

SEQ ID NO: 1384655 - DNA, 15 bp, Homo sapiens
gtggggttggcccac

SEQ ID NO: 1384656 - DNA, 15 bp, Homo sapiens
agtggggttggccca

SEQ ID NO: 1384657 - DNA, 15 bp, Homo sapiens
aagtggggttggccc

SEQ ID NO: 1384658 - DNA, 15 bp, Homo sapiens
gaagtggggttggcc

SEQ ID NO: 1384659 - DNA, 15 bp, Homo sapiens
ggaagtggggttggc

SEQ ID NO: 1384660 - DNA, 15 bp, Homo sapiens
tggaagtggggttgg

SEQ ID NO: 1384661 - DNA, 15 bp, Homo sapiens
atggaagtggggttg

SEQ ID NO: 1384662 - DNA, 15 bp, Homo sapiens
tatggaagtggggtt

SEQ ID NO: 1384663 - DNA, 15 bp, Homo sapiens
ttatggaagtggggt

SEQ ID NO: 1384664 - DNA, 15 bp, Homo sapiens
gttatggaagtgggg

SEQ ID NO: 1384665 - DNA, 15 bp, Homo sapiens
ggttatggaagtggg

SEQ ID NO: 1384666 - DNA, 15 bp, Homo sapiens
gggttatggaagtgg

SEQ ID NO: 1384667 - DNA, 15 bp, Homo sapiens
tgggttatggaagtg

SEQ ID NO: 1384668 - DNA, 15 bp, Homo sapiens
gtgggttatggaagt

SEQ ID NO: 1384669 - DNA, 15 bp, Homo sapiens
tgtgggttatggaag

SEQ ID NO: 1384670 - DNA, 15 bp, Homo sapiens
ctgtgggttatggaa

SEQ ID NO: 1384671 - DNA, 15 bp, Homo sapiens
cctgtgggttatgga

SEQ ID NO: 1384672 - DNA, 15 bp, Homo sapiens
gcctgtgggttatgg

SEQ ID NO: 1384673 - DNA, 15 bp, Homo sapiens
agcctgtgggttatg

SEQ ID NO: 1384674 - DNA, 15 bp, Homo sapiens
cagcctgtgggttat

SEQ ID NO: 1384675 - DNA, 15 bp, Homo sapiens
acagcctgtgggtta

SEQ ID NO: 1384676 - DNA, 15 bp, Homo sapiens
cacagcctgtgggtt

SEQ ID NO: 1384677 - DNA, 15 bp, Homo sapiens
acacagcctgtgggt

SEQ ID NO: 1384678 - DNA, 15 bp, Homo sapiens
cacacagcctgtggg

SEQ ID NO: 1384679 - DNA, 15 bp, Homo sapiens
tcacacagcctgtgg

SEQ ID NO: 1384680 - DNA, 15 bp, Homo sapiens
gtcacacagcctgtg

SEQ ID NO: 1384681 - DNA, 15 bp, Homo sapiens
agtcacacagcctgt

SEQ ID NO: 1384682 - DNA, 15 bp, Homo sapiens
aagtcacacagcctg

SEQ ID NO: 1384683 - DNA, 15 bp, Homo sapiens
aaagtcacacagcct

SEQ ID NO: 1384684 - DNA, 15 bp, Homo sapiens
taaagtcacacagcc

SEQ ID NO: 1384685 - DNA, 15 bp, Homo sapiens
ctaaagtcacacagc

SEQ ID NO: 1384686 - DNA, 15 bp, Homo sapiens
cctaaagtcacacag

SEQ ID NO: 1384687 - DNA, 15 bp, Homo sapiens
gcctaaagtcacaca

SEQ ID NO: 1384688 - DNA, 15 bp, Homo sapiens
agcctaaagtcacac

SEQ ID NO: 1384689 - DNA, 15 bp, Homo sapiens
gagcctaaagtcaca

SEQ ID NO: 1384690 - DNA, 15 bp, Homo sapiens
agagcctaaagtcac

SEQ ID NO: 1384691 - DNA, 15 bp, Homo sapiens
cagagcctaaagtca

SEQ ID NO: 1384692 - DNA, 15 bp, Homo sapiens
acagagcctaaagtc

SEQ ID NO: 1384693 - DNA, 15 bp, Homo sapiens
gacagagcctaaagt

SEQ ID NO: 1384694 - DNA, 15 bp, Homo sapiens
tgacagagcctaaag

SEQ ID NO: 1384695 - DNA, 15 bp, Homo sapiens
gtgacagagcctaaa

SEQ ID NO: 1384696 - DNA, 15 bp, Homo sapiens
agtgacagagcctaa

SEQ ID NO: 1384697 - DNA, 15 bp, Homo sapiens
aagtgacagagccta

SEQ ID NO: 1384698 - DNA, 15 bp, Homo sapiens
taagtgacagagcct

SEQ ID NO: 1384699 - DNA, 15 bp, Homo sapiens
ttaagtgacagagcc

SEQ ID NO: 1384700 - DNA, 15 bp, Homo sapiens
gttaagtgacagagc

SEQ ID NO: 1384701 - DNA, 15 bp, Homo sapiens
ggttaagtgacagag

SEQ ID NO: 1384702 - DNA, 15 bp, Homo sapiens
aggttaagtgacaga

SEQ ID NO: 1384703 - DNA, 15 bp, Homo sapiens
gaggttaagtgacag

SEQ ID NO: 1384704 - DNA, 15 bp, Homo sapiens
agaggttaagtgaca

SEQ ID NO: 1384705 - DNA, 15 bp, Homo sapiens
gagaggttaagtgac

SEQ ID NO: 1384706 - DNA, 15 bp, Homo sapiens
tgagaggttaagtga

SEQ ID NO: 1384707 - DNA, 15 bp, Homo sapiens
ctgagaggttaagtg

SEQ ID NO: 1384708 - DNA, 15 bp, Homo sapiens
actgagaggttaagt

SEQ ID NO: 1384709 - DNA, 15 bp, Homo sapiens
gactgagaggttaag

SEQ ID NO: 1384710 - DNA, 15 bp, Homo sapiens
tgactgagaggttaa

SEQ ID NO: 1384711 - DNA, 15 bp, Homo sapiens
ctgactgagaggtta

SEQ ID NO: 1384712 - DNA, 15 bp, Homo sapiens
gctgactgagaggtt

SEQ ID NO: 1384713 - DNA, 15 bp, Homo sapiens
agctgactgagaggt

SEQ ID NO: 1384714 - DNA, 15 bp, Homo sapiens
aagctgactgagagg

SEQ ID NO: 1384715 - DNA, 15 bp, Homo sapiens
gaagctgactgagag

SEQ ID NO: 1384716 - DNA, 15 bp, Homo sapiens
ggaagctgactgaga

SEQ ID NO: 1384717 - DNA, 15 bp, Homo sapiens
cggaagctgactgag

SEQ ID NO: 1384718 - DNA, 15 bp, Homo sapiens
gcggaagctgactga

SEQ ID NO: 1384719 - DNA, 15 bp, Homo sapiens
tgcggaagctgactg

SEQ ID NO: 1384720 - DNA, 15 bp, Homo sapiens
atgcggaagctgact

SEQ ID NO: 1384721 - DNA, 15 bp, Homo sapiens
gatgcggaagctgac

SEQ ID NO: 1384722 - DNA, 15 bp, Homo sapiens
agatgcggaagctga

SEQ ID NO: 1384723 - DNA, 15 bp, Homo sapiens
tagatgcggaagctg

SEQ ID NO: 1384724 - DNA, 15 bp, Homo sapiens
atagatgcggaagct

SEQ ID NO: 1384725 - DNA, 15 bp, Homo sapiens
tatagatgcggaagc

SEQ ID NO: 1384726 - DNA, 15 bp, Homo sapiens
ttatagatgcggaag

SEQ ID NO: 1384727 - DNA, 15 bp, Homo sapiens
tttatagatgcggaa

SEQ ID NO: 1384728 - DNA, 15 bp, Homo sapiens
ttttatagatgcgga

SEQ ID NO: 1384729 - DNA, 15 bp, Homo sapiens
gttttatagatgcgg

SEQ ID NO: 1384730 - DNA, 15 bp, Homo sapiens
agttttatagatgcg

SEQ ID NO: 1384731 - DNA, 15 bp, Homo sapiens
tagttttatagatgc

SEQ ID NO: 1384732 - DNA, 15 bp, Homo sapiens
ctagttttatagatg

SEQ ID NO: 1384733 - DNA, 15 bp, Homo sapiens
tctagttttatagat

SEQ ID NO: 1384734 - DNA, 15 bp, Homo sapiens
ttctagttttataga

SEQ ID NO: 1384735 - DNA, 15 bp, Homo sapiens
gttctagttttatag

SEQ ID NO: 1384736 - DNA, 15 bp, Homo sapiens
tgttctagttttata

SEQ ID NO: 1384737 - DNA, 15 bp, Homo sapiens
ttgttctagttttat

SEQ ID NO: 1384738 - DNA, 15 bp, Homo sapiens
tttgttctagtttta

SEQ ID NO: 1384739 - DNA, 15 bp, Homo sapiens
ttttgttctagtttt

SEQ ID NO: 1384740 - DNA, 15 bp, Homo sapiens
tttttgttctagttt

SEQ ID NO: 1384741 - DNA, 15 bp, Homo sapiens
gtttttgttctagtt

SEQ ID NO: 1384742 - DNA, 15 bp, Homo sapiens
tgtttttgttctagt

SEQ ID NO: 1384743 - DNA, 15 bp, Homo sapiens
gtgtttttgttctag

SEQ ID NO: 1384744 - DNA, 15 bp, Homo sapiens
agtgtttttgttcta

SEQ ID NO: 1384745 - DNA, 15 bp, Homo sapiens
aagtgtttttgttct

SEQ ID NO: 1384746 - DNA, 15 bp, Homo sapiens
taagtgtttttgttc

SEQ ID NO: 1384747 - DNA, 15 bp, Homo sapiens
gtaagtgtttttgtt

SEQ ID NO: 1384748 - DNA, 15 bp, Homo sapiens
ggtaagtgtttttgt

SEQ ID NO: 1384749 - DNA, 15 bp, Homo sapiens
aggtaagtgtttttg

SEQ ID NO: 1384750 - DNA, 15 bp, Homo sapiens
caggtaagtgttttt

SEQ ID NO: 1384751 - DNA, 15 bp, Homo sapiens
gcaggtaagtgtttt

SEQ ID NO: 1384752 - DNA, 15 bp, Homo sapiens
ggcaggtaagtgttt

SEQ ID NO: 1384753 - DNA, 15 bp, Homo sapiens
gggcaggtaagtgtt

SEQ ID NO: 1384754 - DNA, 15 bp, Homo sapiens
cgggcaggtaagtgt

SEQ ID NO: 1384755 - DNA, 15 bp, Homo sapiens
gcgggcaggtaagtg

SEQ ID NO: 1384756 - DNA, 15 bp, Homo sapiens
ggcgggcaggtaagt

SEQ ID NO: 1384757 - DNA, 15 bp, Homo sapiens
aggcgggcaggtaag

SEQ ID NO: 1384758 - DNA, 15 bp, Homo sapiens
gaggcgggcaggtaa

SEQ ID NO: 1384759 - DNA, 15 bp, Homo sapiens
tgaggcgggcaggta

SEQ ID NO: 1384760 - DNA, 15 bp, Homo sapiens
ttgaggcgggcaggt

SEQ ID NO: 1384761 - DNA, 15 bp, Homo sapiens
cttgaggcgggcagg

SEQ ID NO: 1384762 - DNA, 15 bp, Homo sapiens
acttgaggcgggcag

SEQ ID NO: 1384763 - DNA, 15 bp, Homo sapiens
cacttgaggcgggca

SEQ ID NO: 1384764 - DNA, 15 bp, Homo sapiens
tcacttgaggcgggc

SEQ ID NO: 1384765 - DNA, 15 bp, Homo sapiens
atcacttgaggcggg

SEQ ID NO: 1384766 - DNA, 15 bp, Homo sapiens
tatcacttgaggcgg

SEQ ID NO: 1384767 - DNA, 15 bp, Homo sapiens
ttatcacttgaggcg

SEQ ID NO: 1384768 - DNA, 15 bp, Homo sapiens
cttatcacttgaggc

SEQ ID NO: 1384769 - DNA, 15 bp, Homo sapiens
acttatcacttgagg

SEQ ID NO: 1384770 - DNA, 15 bp, Homo sapiens
aacttatcacttgag

SEQ ID NO: 1384771 - DNA, 15 bp, Homo sapiens
caacttatcacttga

SEQ ID NO: 1384772 - DNA, 15 bp, Homo sapiens
tcaacttatcacttg

SEQ ID NO: 1384773 - DNA, 15 bp, Homo sapiens
ttcaacttatcactt

SEQ ID NO: 1384774 - DNA, 15 bp, Homo sapiens
cttcaacttatcact

SEQ ID NO: 1384775 - DNA, 15 bp, Homo sapiens
ccttcaacttatcac

SEQ ID NO: 1384776 - DNA, 15 bp, Homo sapiens
tccttcaacttatca

SEQ ID NO: 1384777 - DNA, 15 bp, Homo sapiens
ctccttcaacttatc

SEQ ID NO: 1384778 - DNA, 15 bp, Homo sapiens
tctccttcaacttat

SEQ ID NO: 1384779 - DNA, 15 bp, Homo sapiens
ctctccttcaactta

SEQ ID NO: 1384780 - DNA, 15 bp, Homo sapiens
tctctccttcaactt

SEQ ID NO: 1384781 - DNA, 15 bp, Homo sapiens
gtctctccttcaact

SEQ ID NO: 1384782 - DNA, 15 bp, Homo sapiens
agtctctccttcaac

SEQ ID NO: 1384783 - DNA, 15 bp, Homo sapiens
aagtctctccttcaa

SEQ ID NO: 1384784 - DNA, 15 bp, Homo sapiens
gaagtctctccttca

SEQ ID NO: 1384785 - DNA, 15 bp, Homo sapiens
agaagtctctccttc

SEQ ID NO: 1384786 - DNA, 15 bp, Homo sapiens
tagaagtctctcctt

SEQ ID NO: 1384787 - DNA, 15 bp, Homo sapiens
atagaagtctctcct

SEQ ID NO: 1384788 - DNA, 15 bp, Homo sapiens
catagaagtctctcc

SEQ ID NO: 1384789 - DNA, 15 bp, Homo sapiens
acatagaagtctctc

SEQ ID NO: 1384790 - DNA, 15 bp, Homo sapiens
gacatagaagtctct

SEQ ID NO: 1384791 - DNA, 15 bp, Homo sapiens
tgacatagaagtctc

SEQ ID NO: 1384792 - DNA, 15 bp, Homo sapiens
ttgacatagaagtct

SEQ ID NO: 1384793 - DNA, 15 bp, Homo sapiens
tttgacatagaagtc

SEQ ID NO: 1384794 - DNA, 15 bp, Homo sapiens
ctttgacatagaagt

SEQ ID NO: 1384795 - DNA, 15 bp, Homo sapiens
cctttgacatagaag

SEQ ID NO: 1384796 - DNA, 15 bp, Homo sapiens
tcctttgacatagaa

SEQ ID NO: 1384797 - DNA, 15 bp, Homo sapiens
ttcctttgacataga

SEQ ID NO: 1384798 - DNA, 15 bp, Homo sapiens
tttcctttgacatag

SEQ ID NO: 1384799 - DNA, 15 bp, Homo sapiens
ttttcctttgacata

SEQ ID NO: 1384800 - DNA, 15 bp, Homo sapiens
cttttcctttgacat

SEQ ID NO: 1384801 - DNA, 15 bp, Homo sapiens
tcttttcctttgaca

SEQ ID NO: 1384802 - DNA, 15 bp, Homo sapiens
ctcttttcctttgac

SEQ ID NO: 1384803 - DNA, 15 bp, Homo sapiens
actcttttcctttga

SEQ ID NO: 1384804 - DNA, 15 bp, Homo sapiens
aactcttttcctttg

SEQ ID NO: 1384805 - DNA, 15 bp, Homo sapiens
taactcttttccttt

SEQ ID NO: 1384806 - DNA, 15 bp, Homo sapiens
ataactcttttcctt

SEQ ID NO: 1384807 - DNA, 15 bp, Homo sapiens
tataactcttttcct

SEQ ID NO: 1384808 - DNA, 15 bp, Homo sapiens
gtataactcttttcc

SEQ ID NO: 1384809 - DNA, 15 bp, Homo sapiens
tgtataactcttttc

SEQ ID NO: 1384810 - DNA, 15 bp, Homo sapiens
ttgtataactctttt

SEQ ID NO: 1384811 - DNA, 15 bp, Homo sapiens
tttgtataactcttt

SEQ ID NO: 1384812 - DNA, 15 bp, Homo sapiens
ttttgtataactctt

SEQ ID NO: 1384813 - DNA, 15 bp, Homo sapiens
cttttgtataactct

SEQ ID NO: 1384814 - DNA, 15 bp, Homo sapiens
acttttgtataactc

SEQ ID NO: 1384815 - DNA, 15 bp, Homo sapiens
tacttttgtataact

SEQ ID NO: 1384816 - DNA, 15 bp, Homo sapiens
ttacttttgtataac

SEQ ID NO: 1384817 - DNA, 15 bp, Homo sapiens
gttacttttgtataa

SEQ ID NO: 1384818 - DNA, 15 bp, Homo sapiens
tgttacttttgtata

SEQ ID NO: 1384819 - DNA, 15 bp, Homo sapiens
ctgttacttttgtat

SEQ ID NO: 1384820 - DNA, 15 bp, Homo sapiens
cctgttacttttgta

SEQ ID NO: 1384821 - DNA, 15 bp, Homo sapiens
gcctgttacttttgt

SEQ ID NO: 1384822 - DNA, 15 bp, Homo sapiens
ggcctgttacttttg

SEQ ID NO: 1384823 - DNA, 15 bp, Homo sapiens
tggcctgttactttt

SEQ ID NO: 1384824 - DNA, 15 bp, Homo sapiens
atggcctgttacttt

SEQ ID NO: 1384825 - DNA, 15 bp, Homo sapiens
aatggcctgttactt

SEQ ID NO: 1384826 - DNA, 15 bp, Homo sapiens
taatggcctgttact

SEQ ID NO: 1384827 - DNA, 15 bp, Homo sapiens
ataatggcctgttac

SEQ ID NO: 1384828 - DNA, 15 bp, Homo sapiens
gataatggcctgtta

SEQ ID NO: 1384829 - DNA, 15 bp, Homo sapiens
tgataatggcctgtt

SEQ ID NO: 1384830 - DNA, 15 bp, Homo sapiens
atgataatggcctgt

SEQ ID NO: 1384831 - DNA, 15 bp, Homo sapiens
tatgataatggcctg

SEQ ID NO: 1384832 - DNA, 15 bp, Homo sapiens
atatgataatggcct

SEQ ID NO: 1384833 - DNA, 15 bp, Homo sapiens
tatatgataatggcc

SEQ ID NO: 1384834 - DNA, 15 bp, Homo sapiens
ctatatgataatggc

SEQ ID NO: 1384835 - DNA, 15 bp, Homo sapiens
gctatatgataatgg

SEQ ID NO: 1384836 - DNA, 15 bp, Homo sapiens
ccatgtaacttccca

SEQ ID NO: 1384837 - DNA, 15 bp, Homo sapiens
tccatgtaacttccc

SEQ ID NO: 1384838 - DNA, 15 bp, Homo sapiens
ctccatgtaacttcc

SEQ ID NO: 1384839 - DNA, 15 bp, Homo sapiens
tctccatgtaacttc

SEQ ID NO: 1384840 - DNA, 15 bp, Homo sapiens
atctccatgtaactt

SEQ ID NO: 1384841 - DNA, 15 bp, Homo sapiens
catctccatgtaact

SEQ ID NO: 1384842 - DNA, 15 bp, Homo sapiens
ccatctccatgtaac

SEQ ID NO: 1384843 - DNA, 15 bp, Homo sapiens
cccatctccatgtaa

SEQ ID NO: 1384844 - DNA, 15 bp, Homo sapiens
gcccatctccatgta

SEQ ID NO: 1384845 - DNA, 15 bp, Homo sapiens
agcccatctccatgt

SEQ ID NO: 1384846 - DNA, 15 bp, Homo sapiens
gagcccatctccatg

SEQ ID NO: 1384847 - DNA, 15 bp, Homo sapiens
agagcccatctccat

SEQ ID NO: 1384848 - DNA, 15 bp, Homo sapiens
cagagcccatctcca

SEQ ID NO: 1384849 - DNA, 15 bp, Homo sapiens
tcagagcccatctcc

SEQ ID NO: 1384850 - DNA, 15 bp, Homo sapiens
ttcagagcccatctc

SEQ ID NO: 1384851 - DNA, 15 bp, Homo sapiens
gttcagagcccatct

SEQ ID NO: 1384852 - DNA, 15 bp, Homo sapiens
ggttcagagcccatc

SEQ ID NO: 1384853 - DNA, 15 bp, Homo sapiens
tggttcagagcccat

SEQ ID NO: 1384854 - DNA, 15 bp, Homo sapiens
atggttcagagccca

SEQ ID NO: 1384855 - DNA, 15 bp, Homo sapiens
gatggttcagagccc

SEQ ID NO: 1384856 - DNA, 15 bp, Homo sapiens
tgatggttcagagcc

SEQ ID NO: 1384857 - DNA, 15 bp, Homo sapiens
atgatggttcagagc

SEQ ID NO: 1384858 - DNA, 15 bp, Homo sapiens
catgatggttcagag

SEQ ID NO: 1384859 - DNA, 15 bp, Homo sapiens
ccatgatggttcaga

SEQ ID NO: 1384860 - DNA, 15 bp, Homo sapiens
cccatgatggttcag

SEQ ID NO: 1384861 - DNA, 15 bp, Homo sapiens
ccccatgatggttca

SEQ ID NO: 1384862 - DNA, 15 bp, Homo sapiens
tccccatgatggttc

SEQ ID NO: 1384863 - DNA, 15 bp, Homo sapiens
gtccccatgatggtt

SEQ ID NO: 1384864 - DNA, 15 bp, Homo sapiens
agtccccatgatggt

SEQ ID NO: 1384865 - DNA, 15 bp, Homo sapiens
aagtccccatgatgg

SEQ ID NO: 1384866 - DNA, 15 bp, Homo sapiens
caagtccccatgatg

SEQ ID NO: 1384867 - DNA, 15 bp, Homo sapiens
tcaagtccccatgat

SEQ ID NO: 1384868 - DNA, 15 bp, Homo sapiens
ctcaagtccccatga

SEQ ID NO: 1384869 - DNA, 15 bp, Homo sapiens
gctcaagtccccatg

SEQ ID NO: 1384870 - DNA, 15 bp, Homo sapiens
tgctcaagtccccat

SEQ ID NO: 1384871 - DNA, 15 bp, Homo sapiens
gtgctcaagtcccca

SEQ ID NO: 1384872 - DNA, 15 bp, Homo sapiens
agtgctcaagtcccc

SEQ ID NO: 1384873 - DNA, 15 bp, Homo sapiens
gagtgctcaagtccc

SEQ ID NO: 1384874 - DNA, 15 bp, Homo sapiens
agagtgctcaagtcc

SEQ ID NO: 1384875 - DNA, 15 bp, Homo sapiens
tagagtgctcaagtc

SEQ ID NO: 1384876 - DNA, 15 bp, Homo sapiens
gtagagtgctcaagt

SEQ ID NO: 1384877 - DNA, 15 bp, Homo sapiens
agtagagtgctcaag

SEQ ID NO: 1384878 - DNA, 15 bp, Homo sapiens
gagtagagtgctcaa

SEQ ID NO: 1384879 - DNA, 15 bp, Homo sapiens
agagtagagtgctca

SEQ ID NO: 1384880 - DNA, 15 bp, Homo sapiens
gagagtagagtgctc

SEQ ID NO: 1384881 - DNA, 15 bp, Homo sapiens
tgagagtagagtgct

SEQ ID NO: 1384882 - DNA, 15 bp, Homo sapiens
atgagagtagagtgc

SEQ ID NO: 1384883 - DNA, 15 bp, Homo sapiens
aatgagagtagagtg

SEQ ID NO: 1384884 - DNA, 15 bp, Homo sapiens
aaatgagagtagagt

SEQ ID NO: 1384885 - DNA, 15 bp, Homo sapiens
taaatgagagtagag

SEQ ID NO: 1384886 - DNA, 15 bp, Homo sapiens
ataaatgagagtaga

SEQ ID NO: 1384887 - DNA, 15 bp, Homo sapiens
tataaatgagagtag

SEQ ID NO: 1384888 - DNA, 15 bp, Homo sapiens
atataaatgagagta

SEQ ID NO: 1384889 - DNA, 15 bp, Homo sapiens
aatataaatgagagt

SEQ ID NO: 1384890 - DNA, 15 bp, Homo sapiens
gaatataaatgagag

SEQ ID NO: 1384891 - DNA, 15 bp, Homo sapiens
ggaatataaatgaga

SEQ ID NO: 1384892 - DNA, 15 bp, Homo sapiens
tggaatataaatgag

SEQ ID NO: 1384893 - DNA, 15 bp, Homo sapiens
ctggaatataaatga

SEQ ID NO: 1384894 - DNA, 15 bp, Homo sapiens
tctggaatataaatg

SEQ ID NO: 1384895 - DNA, 15 bp, Homo sapiens
ttctggaatataaat

SEQ ID NO: 1384896 - DNA, 15 bp, Homo sapiens
cttctggaatataaa

SEQ ID NO: 1384897 - DNA, 15 bp, Homo sapiens
tcttctggaatataa

SEQ ID NO: 1384898 - DNA, 15 bp, Homo sapiens
ctcttctggaatata

SEQ ID NO: 1384899 - DNA, 15 bp, Homo sapiens
actcttctggaatat

SEQ ID NO: 1384900 - DNA, 15 bp, Homo sapiens
aactcttctggaata

SEQ ID NO: 1384901 - DNA, 15 bp, Homo sapiens
caactcttctggaat

SEQ ID NO: 1384902 - DNA, 15 bp, Homo sapiens
acaactcttctggaa

SEQ ID NO: 1384903 - DNA, 15 bp, Homo sapiens
cacaactcttctgga

SEQ ID NO: 1384904 - DNA, 15 bp, Homo sapiens
ccacaactcttctgg

SEQ ID NO: 1384905 - DNA, 15 bp, Homo sapiens
tccacaactcttctg

SEQ ID NO: 1384906 - DNA, 15 bp, Homo sapiens
gtccacaactcttct

SEQ ID NO: 1384907 - DNA, 15 bp, Homo sapiens
tgtccacaactcttc

SEQ ID NO: 1384908 - DNA, 15 bp, Homo sapiens
atgtccacaactctt

SEQ ID NO: 1384909 - DNA, 15 bp, Homo sapiens
aatgtccacaactct

SEQ ID NO: 1384910 - DNA, 15 bp, Homo sapiens
gaatgtccacaactc

SEQ ID NO: 1384911 - DNA, 15 bp, Homo sapiens
ggaatgtccacaact

SEQ ID NO: 1384912 - DNA, 15 bp, Homo sapiens
aggaatgtccacaac

SEQ ID NO: 1384913 - DNA, 15 bp, Homo sapiens
caggaatgtccacaa

SEQ ID NO: 1384914 - DNA, 15 bp, Homo sapiens
ccaggaatgtccaca

SEQ ID NO: 1384915 - DNA, 15 bp, Homo sapiens
gccaggaatgtccac

SEQ ID NO: 1384916 - DNA, 15 bp, Homo sapiens
ggccaggaatgtcca

SEQ ID NO: 1384917 - DNA, 15 bp, Homo sapiens
tggccaggaatgtcc

SEQ ID NO: 1384918 - DNA, 15 bp, Homo sapiens
ctggccaggaatgtc

SEQ ID NO: 1384919 - DNA, 15 bp, Homo sapiens
tctggccaggaatgt

SEQ ID NO: 1384920 - DNA, 15 bp, Homo sapiens
atctggccaggaatg

SEQ ID NO: 1384921 - DNA, 15 bp, Homo sapiens
gatctggccaggaat

SEQ ID NO: 1384922 - DNA, 15 bp, Homo sapiens
agatctggccaggaa

SEQ ID NO: 1384923 - DNA, 15 bp, Homo sapiens
cagatctggccagga

SEQ ID NO: 1384924 - DNA, 15 bp, Homo sapiens
acagatctggccagg

SEQ ID NO: 1384925 - DNA, 15 bp, Homo sapiens
cacagatctggccag

SEQ ID NO: 1384926 - DNA, 15 bp, Homo sapiens
acacagatctggcca

SEQ ID NO: 1384927 - DNA, 15 bp, Homo sapiens
tacacagatctggcc

SEQ ID NO: 1384928 - DNA, 15 bp, Homo sapiens
ttacacagatctggc

SEQ ID NO: 1384929 - DNA, 15 bp, Homo sapiens
gttacacagatctgg

SEQ ID NO: 1384930 - DNA, 15 bp, Homo sapiens
tgttacacagatctg

SEQ ID NO: 1384931 - DNA, 15 bp, Homo sapiens
ctgttacacagatct

SEQ ID NO: 1384932 - DNA, 15 bp, Homo sapiens
tctgttacacagatc

SEQ ID NO: 1384933 - DNA, 15 bp, Homo sapiens
ttctgttacacagat

SEQ ID NO: 1384934 - DNA, 15 bp, Homo sapiens
cttctgttacacaga

SEQ ID NO: 1384935 - DNA, 15 bp, Homo sapiens
gcttctgttacacag

SEQ ID NO: 1384936 - DNA, 15 bp, Homo sapiens
ggcttctgttacaca

SEQ ID NO: 1384937 - DNA, 15 bp, Homo sapiens
tggcttctgttacac

SEQ ID NO: 1384938 - DNA, 15 bp, Homo sapiens
ctggcttctgttaca

SEQ ID NO: 1384939 - DNA, 15 bp, Homo sapiens
cctggcttctgttac

SEQ ID NO: 1384940 - DNA, 15 bp, Homo sapiens
tcctggcttctgtta

SEQ ID NO: 1384941 - DNA, 15 bp, Homo sapiens
ttcctggcttctgtt

SEQ ID NO: 1384942 - DNA, 15 bp, Homo sapiens
tttcctggcttctgt

SEQ ID NO: 1384943 - DNA, 15 bp, Homo sapiens
ttttcctggcttctg

SEQ ID NO: 1384944 - DNA, 15 bp, Homo sapiens
cttttcctggcttct

SEQ ID NO: 1384945 - DNA, 15 bp, Homo sapiens
gcttttcctggcttc

SEQ ID NO: 1384946 - DNA, 15 bp, Homo sapiens
tgcttttcctggctt

SEQ ID NO: 1384947 - DNA, 15 bp, Homo sapiens
gtgcttttcctggct

SEQ ID NO: 1384948 - DNA, 15 bp, Homo sapiens
tgtgcttttcctggc

SEQ ID NO: 1384949 - DNA, 15 bp, Homo sapiens
gtgtgcttttcctgg

SEQ ID NO: 1384950 - DNA, 15 bp, Homo sapiens
tgtgtgcttttcctg

SEQ ID NO: 1384951 - DNA, 15 bp, Homo sapiens
gtgtgtgcttttcct

SEQ ID NO: 1384952 - DNA, 15 bp, Homo sapiens
agtgtgtgcttttcc

SEQ ID NO: 1384953 - DNA, 15 bp, Homo sapiens
cagtgtgtgcttttc

SEQ ID NO: 1384954 - DNA, 15 bp, Homo sapiens
tcagtgtgtgctttt

SEQ ID NO: 1384955 - DNA, 15 bp, Homo sapiens
ctcagtgtgtgcttt

SEQ ID NO: 1384956 - DNA, 15 bp, Homo sapiens
cctcagtgtgtgctt

SEQ ID NO: 1384957 - DNA, 15 bp, Homo sapiens
ccctcagtgtgtgct

SEQ ID NO: 1384958 - DNA, 15 bp, Homo sapiens
gccctcagtgtgtgc

SEQ ID NO: 1384959 - DNA, 15 bp, Homo sapiens
tgccctcagtgtgtg

SEQ ID NO: 1384960 - DNA, 15 bp, Homo sapiens
gtgccctcagtgtgt

SEQ ID NO: 1384961 - DNA, 15 bp, Homo sapiens
ggtgccctcagtgtg

SEQ ID NO: 1384962 - DNA, 15 bp, Homo sapiens
gggtgccctcagtgt

SEQ ID NO: 1384963 - DNA, 15 bp, Homo sapiens
ggggtgccctcagtg

SEQ ID NO: 1384964 - DNA, 15 bp, Homo sapiens
gggggtgccctcagt

SEQ ID NO: 1384965 - DNA, 15 bp, Homo sapiens
cgggggtgccctcag

SEQ ID NO: 1384966 - DNA, 15 bp, Homo sapiens
gcgggggtgccctca

SEQ ID NO: 1384967 - DNA, 15 bp, Homo sapiens
agcgggggtgccctc

SEQ ID NO: 1384968 - DNA, 15 bp, Homo sapiens
gagcgggggtgccct

SEQ ID NO: 1384969 - DNA, 15 bp, Homo sapiens
agagcgggggtgccc

SEQ ID NO: 1384970 - DNA, 15 bp, Homo sapiens
cagagcgggggtgcc

SEQ ID NO: 1384971 - DNA, 15 bp, Homo sapiens
ccagagcgggggtgc

SEQ ID NO: 1384972 - DNA, 15 bp, Homo sapiens
tccagagcgggggtg

SEQ ID NO: 1384973 - DNA, 15 bp, Homo sapiens
gtccagagcgggggt

SEQ ID NO: 1384974 - DNA, 15 bp, Homo sapiens
agtccagagcggggg

SEQ ID NO: 1384975 - DNA, 15 bp, Homo sapiens
cagtccagagcgggg

SEQ ID NO: 1384976 - DNA, 15 bp, Homo sapiens
acagtccagagcggg

SEQ ID NO: 1384977 - DNA, 15 bp, Homo sapiens
tacagtccagagcgg

SEQ ID NO: 1384978 - DNA, 15 bp, Homo sapiens
ttacagtccagagcg

SEQ ID NO: 1384979 - DNA, 15 bp, Homo sapiens
attacagtccagagc

SEQ ID NO: 1384980 - DNA, 15 bp, Homo sapiens
cattacagtccagag

SEQ ID NO: 1384981 - DNA, 15 bp, Homo sapiens
tcattacagtccaga

SEQ ID NO: 1384982 - DNA, 15 bp, Homo sapiens
ttcattacagtccag

SEQ ID NO: 1384983 - DNA, 15 bp, Homo sapiens
cttcattacagtcca

SEQ ID NO: 1384984 - DNA, 15 bp, Homo sapiens
ccttcattacagtcc

SEQ ID NO: 1384985 - DNA, 15 bp, Homo sapiens
gccttcattacagtc

SEQ ID NO: 1384986 - DNA, 15 bp, Homo sapiens
tgccttcattacagt

SEQ ID NO: 1384987 - DNA, 15 bp, Homo sapiens
ttgccttcattacag

SEQ ID NO: 1384988 - DNA, 15 bp, Homo sapiens
tttgccttcattaca

SEQ ID NO: 1384989 - DNA, 15 bp, Homo sapiens
ttttgccttcattac

SEQ ID NO: 1384990 - DNA, 15 bp, Homo sapiens
cttttgccttcatta

SEQ ID NO: 1384991 - DNA, 15 bp, Homo sapiens
gcttttgccttcatt

SEQ ID NO: 1384992 - DNA, 15 bp, Homo sapiens
cgcttttgccttcat

SEQ ID NO: 1384993 - DNA, 15 bp, Homo sapiens
acgcttttgccttca

SEQ ID NO: 1384994 - DNA, 15 bp, Homo sapiens
aacgcttttgccttc

SEQ ID NO: 1384995 - DNA, 15 bp, Homo sapiens
taacgcttttgcctt

SEQ ID NO: 1384996 - DNA, 15 bp, Homo sapiens
ctaacgcttttgcct

SEQ ID NO: 1384997 - DNA, 15 bp, Homo sapiens
cctaacgcttttgcc

SEQ ID NO: 1384998 - DNA, 15 bp, Homo sapiens
gcctaacgcttttgc

SEQ ID NO: 1384999 - DNA, 15 bp, Homo sapiens
agcctaacgcttttg

SEQ ID NO: 1385000 - DNA, 15 bp, Homo sapiens
aagcctaacgctttt

SEQ ID NO: 1385001 - DNA, 15 bp, Homo sapiens
caagcctaacgcttt

SEQ ID NO: 1385002 - DNA, 15 bp, Homo sapiens
gcaagcctaacgctt

SEQ ID NO: 1385003 - DNA, 15 bp, Homo sapiens
ggcaagcctaacgct

SEQ ID NO: 1385004 - DNA, 15 bp, Homo sapiens
tggcaagcctaacgc

SEQ ID NO: 1385005 - DNA, 15 bp, Homo sapiens
ttggcaagcctaacg

SEQ ID NO: 1385006 - DNA, 15 bp, Homo sapiens
cttggcaagcctaac

SEQ ID NO: 1385007 - DNA, 15 bp, Homo sapiens
tcttggcaagcctaa

SEQ ID NO: 1385008 - DNA, 15 bp, Homo sapiens
ttcttggcaagccta

SEQ ID NO: 1385009 - DNA, 15 bp, Homo sapiens
tttcttggcaagcct

SEQ ID NO: 1385010 - DNA, 15 bp, Homo sapiens
gtttcttggcaagcc

SEQ ID NO: 1385011 - DNA, 15 bp, Homo sapiens
tgtttcttggcaagc

SEQ ID NO: 1385012 - DNA, 15 bp, Homo sapiens
gtgtttcttggcaag

SEQ ID NO: 1385013 - DNA, 15 bp, Homo sapiens
agtgtttcttggcaa

SEQ ID NO: 1385014 - DNA, 15 bp, Homo sapiens
aagtgtttcttggca

SEQ ID NO: 1385015 - DNA, 15 bp, Homo sapiens
gaagtgtttcttggc

SEQ ID NO: 1385016 - DNA, 15 bp, Homo sapiens
agaagtgtttcttgg

SEQ ID NO: 1385017 - DNA, 15 bp, Homo sapiens
tagaagtgtttcttg

SEQ ID NO: 1385018 - DNA, 15 bp, Homo sapiens
gtagaagtgtttctt

SEQ ID NO: 1385019 - DNA, 15 bp, Homo sapiens
agtagaagtgtttct

SEQ ID NO: 1385020 - DNA, 15 bp, Homo sapiens
aagtagaagtgtttc

SEQ ID NO: 1385021 - DNA, 15 bp, Homo sapiens
gaagtagaagtgttt

SEQ ID NO: 1385022 - DNA, 15 bp, Homo sapiens
ggaagtagaagtgtt

SEQ ID NO: 1385023 - DNA, 15 bp, Homo sapiens
aggaagtagaagtgt

SEQ ID NO: 1385024 - DNA, 15 bp, Homo sapiens
aaggaagtagaagtg

SEQ ID NO: 1385025 - DNA, 15 bp, Homo sapiens
caaggaagtagaagt

SEQ ID NO: 1385026 - DNA, 15 bp, Homo sapiens
acaaggaagtagaag

SEQ ID NO: 1385027 - DNA, 15 bp, Homo sapiens
aacaaggaagtagaa

SEQ ID NO: 1385028 - DNA, 15 bp, Homo sapiens
gaacaaggaagtaga

SEQ ID NO: 1385029 - DNA, 15 bp, Homo sapiens
ggaacaaggaagtag

SEQ ID NO: 1385030 - DNA, 15 bp, Homo sapiens
gggaacaaggaagta

SEQ ID NO: 1385031 - DNA, 15 bp, Homo sapiens
ggggaacaaggaagt

SEQ ID NO: 1385032 - DNA, 15 bp, Homo sapiens
tggggaacaaggaag

SEQ ID NO: 1385033 - DNA, 15 bp, Homo sapiens
atggggaacaaggaa

SEQ ID NO: 1385034 - DNA, 15 bp, Homo sapiens
aatggggaacaagga

SEQ ID NO: 1385035 - DNA, 15 bp, Homo sapiens
aaatggggaacaagg

SEQ ID NO: 1385036 - DNA, 15 bp, Homo sapiens
taaatggggaacaag

SEQ ID NO: 1385037 - DNA, 15 bp, Homo sapiens
ttaaatggggaacaa

SEQ ID NO: 1385038 - DNA, 15 bp, Homo sapiens
tttaaatggggaaca

SEQ ID NO: 1385039 - DNA, 15 bp, Homo sapiens
gtttaaatggggaac

SEQ ID NO: 1385040 - DNA, 15 bp, Homo sapiens
agtttaaatggggaa

SEQ ID NO: 1385041 - DNA, 15 bp, Homo sapiens
aagtttaaatgggga

SEQ ID NO: 1385042 - DNA, 15 bp, Homo sapiens
caagtttaaatgggg

SEQ ID NO: 1385043 - DNA, 15 bp, Homo sapiens
tcaagtttaaatggg

SEQ ID NO: 1385044 - DNA, 15 bp, Homo sapiens
ttcaagtttaaatgg

SEQ ID NO: 1385045 - DNA, 15 bp, Homo sapiens
tttcaagtttaaatg

SEQ ID NO: 1385046 - DNA, 15 bp, Homo sapiens
atttcaagtttaaat

SEQ ID NO: 1385047 - DNA, 15 bp, Homo sapiens
catttcaagtttaaa

SEQ ID NO: 1385048 - DNA, 15 bp, Homo sapiens
tcatttcaagtttaa

SEQ ID NO: 1385049 - DNA, 15 bp, Homo sapiens
gtcatttcaagttta

SEQ ID NO: 1385050 - DNA, 15 bp, Homo sapiens
agtcatttcaagttt

SEQ ID NO: 1385051 - DNA, 15 bp, Homo sapiens
aagtcatttcaagtt

SEQ ID NO: 1385052 - DNA, 15 bp, Homo sapiens
gaagtcatttcaagt

SEQ ID NO: 1385053 - DNA, 15 bp, Homo sapiens
tgaagtcatttcaag

SEQ ID NO: 1385054 - DNA, 15 bp, Homo sapiens
gtgaagtcatttcaa

SEQ ID NO: 1385055 - DNA, 15 bp, Homo sapiens
agtgaagtcatttca

SEQ ID NO: 1385056 - DNA, 15 bp, Homo sapiens
tagtgaagtcatttc

SEQ ID NO: 1385057 - DNA, 15 bp, Homo sapiens
atagtgaagtcattt

SEQ ID NO: 1385058 - DNA, 15 bp, Homo sapiens
gatagtgaagtcatt

SEQ ID NO: 1385059 - DNA, 15 bp, Homo sapiens
ggatagtgaagtcat

SEQ ID NO: 1385060 - DNA, 15 bp, Homo sapiens
aggatagtgaagtca

SEQ ID NO: 1385061 - DNA, 15 bp, Homo sapiens
aaggatagtgaagtc

SEQ ID NO: 1385062 - DNA, 15 bp, Homo sapiens
gaaggatagtgaagt

SEQ ID NO: 1385063 - DNA, 15 bp, Homo sapiens
agaaggatagtgaag

SEQ ID NO: 1385064 - DNA, 15 bp, Homo sapiens
aagaaggatagtgaa

SEQ ID NO: 1385065 - DNA, 15 bp, Homo sapiens
aaagaaggatagtga

SEQ ID NO: 1385066 - DNA, 15 bp, Homo sapiens
gaaagaaggatagtg

SEQ ID NO: 1385067 - DNA, 15 bp, Homo sapiens
ggaaagaaggatagt

SEQ ID NO: 1385068 - DNA, 15 bp, Homo sapiens
gggaaagaaggatag

SEQ ID NO: 1385069 - DNA, 15 bp, Homo sapiens
ggggaaagaaggata

SEQ ID NO: 1385070 - DNA, 15 bp, Homo sapiens
gggggaaagaaggat

SEQ ID NO: 1385071 - DNA, 15 bp, Homo sapiens
agggggaaagaagga

SEQ ID NO: 1385072 - DNA, 15 bp, Homo sapiens
aagggggaaagaagg

SEQ ID NO: 1385073 - DNA, 15 bp, Homo sapiens
aaagggggaaagaag

SEQ ID NO: 1385074 - DNA, 15 bp, Homo sapiens
caaagggggaaagaa

SEQ ID NO: 1385075 - DNA, 15 bp, Homo sapiens
acaaagggggaaaga

SEQ ID NO: 1385076 - DNA, 15 bp, Homo sapiens
tacaaagggggaaag

SEQ ID NO: 1385077 - DNA, 15 bp, Homo sapiens
ttacaaagggggaaa

SEQ ID NO: 1385078 - DNA, 15 bp, Homo sapiens
attacaaagggggaa

SEQ ID NO: 1385079 - DNA, 15 bp, Homo sapiens
aattacaaaggggga

SEQ ID NO: 1385080 - DNA, 15 bp, Homo sapiens
aaattacaaaggggg

SEQ ID NO: 1385081 - DNA, 15 bp, Homo sapiens
taaattacaaagggg

SEQ ID NO: 1385082 - DNA, 15 bp, Homo sapiens
ctaaattacaaaggg

SEQ ID NO: 1385083 - DNA, 15 bp, Homo sapiens
cctaaattacaaagg

SEQ ID NO: 1385084 - DNA, 15 bp, Homo sapiens
tcctaaattacaaag

SEQ ID NO: 1385085 - DNA, 15 bp, Homo sapiens
atcctaaattacaaa

SEQ ID NO: 1385086 - DNA, 15 bp, Homo sapiens
tatcctaaattacaa

SEQ ID NO: 1385087 - DNA, 15 bp, Homo sapiens
atatcctaaattaca

SEQ ID NO: 1385088 - DNA, 15 bp, Homo sapiens
catatcctaaattac

SEQ ID NO: 1385089 - DNA, 15 bp, Homo sapiens
acatatcctaaatta

SEQ ID NO: 1385090 - DNA, 15 bp, Homo sapiens
gacatatcctaaatt

SEQ ID NO: 1385091 - DNA, 15 bp, Homo sapiens
ggacatatcctaaat

SEQ ID NO: 1385092 - DNA, 15 bp, Homo sapiens
tggacatatcctaaa

SEQ ID NO: 1385093 - DNA, 15 bp, Homo sapiens
ttggacatatcctaa

SEQ ID NO: 1385094 - DNA, 15 bp, Homo sapiens
tttggacatatccta

SEQ ID NO: 1385095 - DNA, 15 bp, Homo sapiens
ttttggacatatcct

SEQ ID NO: 1385096 - DNA, 15 bp, Homo sapiens
attttggacatatcc

SEQ ID NO: 1385097 - DNA, 15 bp, Homo sapiens
cattttggacatatc

SEQ ID NO: 1385098 - DNA, 15 bp, Homo sapiens
tcattttggacatat

SEQ ID NO: 1385099 - DNA, 15 bp, Homo sapiens
ctcattttggacata

SEQ ID NO: 1385100 - DNA, 15 bp, Homo sapiens
gctcattttggacat

SEQ ID NO: 1385101 - DNA, 15 bp, Homo sapiens
tgctcattttggaca

SEQ ID NO: 1385102 - DNA, 15 bp, Homo sapiens
ctgctcattttggac

SEQ ID NO: 1385103 - DNA, 15 bp, Homo sapiens
tctgctcattttgga

SEQ ID NO: 1385104 - DNA, 15 bp, Homo sapiens
gtctgctcattttgg

SEQ ID NO: 1385105 - DNA, 15 bp, Homo sapiens
tgtctgctcattttg

SEQ ID NO: 1385106 - DNA, 15 bp, Homo sapiens
ctgtctgctcatttt

SEQ ID NO: 1385107 - DNA, 15 bp, Homo sapiens
actgtctgctcattt

SEQ ID NO: 1385108 - DNA, 15 bp, Homo sapiens
tactgtctgctcatt

SEQ ID NO: 1385109 - DNA, 15 bp, Homo sapiens
ttactgtctgctcat

SEQ ID NO: 1385110 - DNA, 15 bp, Homo sapiens
cttactgtctgctca

SEQ ID NO: 1385111 - DNA, 15 bp, Homo sapiens
tcttactgtctgctc

SEQ ID NO: 1385112 - DNA, 15 bp, Homo sapiens
ttcttactgtctgct

SEQ ID NO: 1385113 - DNA, 15 bp, Homo sapiens
gttcttactgtctgc

SEQ ID NO: 1385114 - DNA, 15 bp, Homo sapiens
tgttcttactgtctg

SEQ ID NO: 1385115 - DNA, 15 bp, Homo sapiens
ttgttcttactgtct

SEQ ID NO: 1385116 - DNA, 15 bp, Homo sapiens
gatggttctgggagg

SEQ ID NO: 1385117 - DNA, 15 bp, Homo sapiens
agatggttctgggag

SEQ ID NO: 1385118 - DNA, 15 bp, Homo sapiens
aagatggttctggga

SEQ ID NO: 1385119 - DNA, 15 bp, Homo sapiens
aaagatggttctggg

SEQ ID NO: 1385120 - DNA, 15 bp, Homo sapiens
taaagatggttctgg

SEQ ID NO: 1385121 - DNA, 15 bp, Homo sapiens
gtaaagatggttctg

SEQ ID NO: 1385122 - DNA, 15 bp, Homo sapiens
tgtaaagatggttct

SEQ ID NO: 1385123 - DNA, 15 bp, Homo sapiens
gtgtaaagatggttc

SEQ ID NO: 1385124 - DNA, 15 bp, Homo sapiens
tgtgtaaagatggtt

SEQ ID NO: 1385125 - DNA, 15 bp, Homo sapiens
ttgtgtaaagatggt

SEQ ID NO: 1385126 - DNA, 15 bp, Homo sapiens
tttgtgtaaagatgg

SEQ ID NO: 1385127 - DNA, 15 bp, Homo sapiens
atttgtgtaaagatg

SEQ ID NO: 1385128 - DNA, 15 bp, Homo sapiens
catttgtgtaaagat

SEQ ID NO: 1385129 - DNA, 15 bp, Homo sapiens
gcatttgtgtaaaga

SEQ ID NO: 1385130 - DNA, 15 bp, Homo sapiens
tgcatttgtgtaaag

SEQ ID NO: 1385131 - DNA, 15 bp, Homo sapiens
ctgcatttgtgtaaa

SEQ ID NO: 1385132 - DNA, 15 bp, Homo sapiens
cctgcatttgtgtaa

SEQ ID NO: 1385133 - DNA, 15 bp, Homo sapiens
acctgcatttgtgta

SEQ ID NO: 1385134 - DNA, 15 bp, Homo sapiens
tacctgcatttgtgt

SEQ ID NO: 1385135 - DNA, 15 bp, Homo sapiens
atacctgcatttgtg

SEQ ID NO: 1385136 - DNA, 15 bp, Homo sapiens
tatacctgcatttgt

SEQ ID NO: 1385137 - DNA, 15 bp, Homo sapiens
ctatacctgcatttg

SEQ ID NO: 1385138 - DNA, 15 bp, Homo sapiens
tctatacctgcattt

SEQ ID NO: 1385139 - DNA, 15 bp, Homo sapiens
atctatacctgcatt

SEQ ID NO: 1385140 - DNA, 15 bp, Homo sapiens
gatctatacctgcat

SEQ ID NO: 1385141 - DNA, 15 bp, Homo sapiens
agatctatacctgca

SEQ ID NO: 1385142 - DNA, 15 bp, Homo sapiens
cagatctatacctgc

SEQ ID NO: 1385143 - DNA, 15 bp, Homo sapiens
gcagatctatacctg

SEQ ID NO: 1385144 - DNA, 15 bp, Homo sapiens
agcagatctatacct

SEQ ID NO: 1385145 - DNA, 15 bp, Homo sapiens
tagcagatctatacc

SEQ ID NO: 1385146 - DNA, 15 bp, Homo sapiens
atagcagatctatac

SEQ ID NO: 1385147 - DNA, 15 bp, Homo sapiens
gatagcagatctata

SEQ ID NO: 1385148 - DNA, 15 bp, Homo sapiens
tgatagcagatctat

SEQ ID NO: 1385149 - DNA, 15 bp, Homo sapiens
ctgatagcagatcta

SEQ ID NO: 1385150 - DNA, 15 bp, Homo sapiens
tctgatagcagatct

SEQ ID NO: 1385151 - DNA, 15 bp, Homo sapiens
ttctgatagcagatc

SEQ ID NO: 1385152 - DNA, 15 bp, Homo sapiens
tttctgatagcagat

SEQ ID NO: 1385153 - DNA, 15 bp, Homo sapiens
gtttctgatagcaga

SEQ ID NO: 1385154 - DNA, 15 bp, Homo sapiens
tgtttctgatagcag

SEQ ID NO: 1385155 - DNA, 15 bp, Homo sapiens
ctgtttctgatagca

SEQ ID NO: 1385156 - DNA, 15 bp, Homo sapiens
tctgtttctgatagc

SEQ ID NO: 1385157 - DNA, 15 bp, Homo sapiens
atctgtttctgatag

SEQ ID NO: 1385158 - DNA, 15 bp, Homo sapiens
aatctgtttctgata

SEQ ID NO: 1385159 - DNA, 15 bp, Homo sapiens
gaatctgtttctgat

SEQ ID NO: 1385160 - DNA, 15 bp, Homo sapiens
tgaatctgtttctga

SEQ ID NO: 1385161 - DNA, 15 bp, Homo sapiens
gtgaatctgtttctg

SEQ ID NO: 1385162 - DNA, 15 bp, Homo sapiens
agtgaatctgtttct

SEQ ID NO: 1385163 - DNA, 15 bp, Homo sapiens
aagtgaatctgtttc

SEQ ID NO: 1385164 - DNA, 15 bp, Homo sapiens
aaagtgaatctgttt

SEQ ID NO: 1385165 - DNA, 15 bp, Homo sapiens
gaaagtgaatctgtt

SEQ ID NO: 1385166 - DNA, 15 bp, Homo sapiens
agaaagtgaatctgt

SEQ ID NO: 1385167 - DNA, 15 bp, Homo sapiens
aagaaagtgaatctg

SEQ ID NO: 1385168 - DNA, 15 bp, Homo sapiens
aaagaaagtgaatct

SEQ ID NO: 1385169 - DNA, 15 bp, Homo sapiens
taaagaaagtgaatc

SEQ ID NO: 1385170 - DNA, 15 bp, Homo sapiens
ataaagaaagtgaat

SEQ ID NO: 1385171 - DNA, 15 bp, Homo sapiens
cataaagaaagtgaa

SEQ ID NO: 1385172 - DNA, 15 bp, Homo sapiens
gcataaagaaagtga

SEQ ID NO: 1385173 - DNA, 15 bp, Homo sapiens
ggcataaagaaagtg

SEQ ID NO: 1385174 - DNA, 15 bp, Homo sapiens
tggcataaagaaagt

SEQ ID NO: 1385175 - DNA, 15 bp, Homo sapiens
gtggcataaagaaag

SEQ ID NO: 1385176 - DNA, 15 bp, Homo sapiens
tgtggcataaagaaa

SEQ ID NO: 1385177 - DNA, 15 bp, Homo sapiens
atgtggcataaagaa

SEQ ID NO: 1385178 - DNA, 15 bp, Homo sapiens
catgtggcataaaga

SEQ ID NO: 1385179 - DNA, 15 bp, Homo sapiens
tcatgtggcataaag

SEQ ID NO: 1385180 - DNA, 15 bp, Homo sapiens
atcatgtggcataaa

SEQ ID NO: 1385181 - DNA, 15 bp, Homo sapiens
tatcatgtggcataa

SEQ ID NO: 1385182 - DNA, 15 bp, Homo sapiens
atatcatgtggcata

SEQ ID NO: 1385183 - DNA, 15 bp, Homo sapiens
aatatcatgtggcat

SEQ ID NO: 1385184 - DNA, 15 bp, Homo sapiens
taatatcatgtggca

SEQ ID NO: 1385185 - DNA, 15 bp, Homo sapiens
ttaatatcatgtggc

SEQ ID NO: 1385186 - DNA, 15 bp, Homo sapiens
attaatatcatgtgg

SEQ ID NO: 1385187 - DNA, 15 bp, Homo sapiens
tattaatatcatgtg

SEQ ID NO: 1385188 - DNA, 15 bp, Homo sapiens
atattaatatcatgt

SEQ ID NO: 1385189 - DNA, 15 bp, Homo sapiens
gatattaatatcatg

SEQ ID NO: 1385190 - DNA, 15 bp, Homo sapiens
ggatattaatatcat

SEQ ID NO: 1385191 - DNA, 15 bp, Homo sapiens
aggatattaatatca

SEQ ID NO: 1385192 - DNA, 15 bp, Homo sapiens
taggatattaatatc

SEQ ID NO: 1385193 - DNA, 15 bp, Homo sapiens
ttaggatattaatat

SEQ ID NO: 1385194 - DNA, 15 bp, Homo sapiens
attaggatattaata

SEQ ID NO: 1385195 - DNA, 15 bp, Homo sapiens
aattaggatattaat

SEQ ID NO: 1385196 - DNA, 15 bp, Homo sapiens
gaattaggatattaa

SEQ ID NO: 1385197 - DNA, 15 bp, Homo sapiens
ggaattaggatatta

SEQ ID NO: 1385198 - DNA, 15 bp, Homo sapiens
tggaattaggatatt

SEQ ID NO: 1385199 - DNA, 15 bp, Homo sapiens
ctggaattaggatat

SEQ ID NO: 1385200 - DNA, 15 bp, Homo sapiens
tctggaattaggata

SEQ ID NO: 1385201 - DNA, 15 bp, Homo sapiens
ttctggaattaggat

SEQ ID NO: 1385202 - DNA, 15 bp, Homo sapiens
tttctggaattagga

SEQ ID NO: 1385203 - DNA, 15 bp, Homo sapiens
atttctggaattagg

SEQ ID NO: 1385204 - DNA, 15 bp, Homo sapiens
catttctggaattag

SEQ ID NO: 1385205 - DNA, 15 bp, Homo sapiens
gcatttctggaatta

SEQ ID NO: 1385206 - DNA, 15 bp, Homo sapiens
tgcatttctggaatt

SEQ ID NO: 1385207 - DNA, 15 bp, Homo sapiens
atgcatttctggaat

SEQ ID NO: 1385208 - DNA, 15 bp, Homo sapiens
gatgcatttctggaa

SEQ ID NO: 1385209 - DNA, 15 bp, Homo sapiens
agatgcatttctgga

SEQ ID NO: 1385210 - DNA, 15 bp, Homo sapiens
tagatgcatttctgg

SEQ ID NO: 1385211 - DNA, 15 bp, Homo sapiens
ttagatgcatttctg

SEQ ID NO: 1385212 - DNA, 15 bp, Homo sapiens
tttagatgcatttct

SEQ ID NO: 1385213 - DNA, 15 bp, Homo sapiens
ctttagatgcatttc

SEQ ID NO: 1385214 - DNA, 15 bp, Homo sapiens
actttagatgcattt

SEQ ID NO: 1385215 - DNA, 15 bp, Homo sapiens
aactttagatgcatt

SEQ ID NO: 1385216 - DNA, 15 bp, Homo sapiens
gaactttagatgcat

SEQ ID NO: 1385217 - DNA, 15 bp, Homo sapiens
tgaactttagatgca

SEQ ID NO: 1385218 - DNA, 15 bp, Homo sapiens
ttgaactttagatgc

SEQ ID NO: 1385219 - DNA, 15 bp, Homo sapiens
cttgaactttagatg

SEQ ID NO: 1385220 - DNA, 15 bp, Homo sapiens
ccttgaactttagat

SEQ ID NO: 1385221 - DNA, 15 bp, Homo sapiens
tccttgaactttaga

SEQ ID NO: 1385222 - DNA, 15 bp, Homo sapiens
gtccttgaactttag

SEQ ID NO: 1385223 - DNA, 15 bp, Homo sapiens
tgtccttgaacttta

SEQ ID NO: 1385224 - DNA, 15 bp, Homo sapiens
atgtccttgaacttt

SEQ ID NO: 1385225 - DNA, 15 bp, Homo sapiens
tatgtccttgaactt

SEQ ID NO: 1385226 - DNA, 15 bp, Homo sapiens
atatgtccttgaact

SEQ ID NO: 1385227 - DNA, 15 bp, Homo sapiens
aatatgtccttgaac

SEQ ID NO: 1385228 - DNA, 15 bp, Homo sapiens
caatatgtccttgaa

SEQ ID NO: 1385229 - DNA, 15 bp, Homo sapiens
acaatatgtccttga

SEQ ID NO: 1385230 - DNA, 15 bp, Homo sapiens
tacaatatgtccttg

SEQ ID NO: 1385231 - DNA, 15 bp, Homo sapiens
ctacaatatgtcctt

SEQ ID NO: 1385232 - DNA, 15 bp, Homo sapiens
gctacaatatgtcct

SEQ ID NO: 1385233 - DNA, 15 bp, Homo sapiens
tgctacaatatgtcc

SEQ ID NO: 1385234 - DNA, 15 bp, Homo sapiens
atgctacaatatgtc

SEQ ID NO: 1385235 - DNA, 15 bp, Homo sapiens
gatgctacaatatgt

SEQ ID NO: 1385236 - DNA, 15 bp, Homo sapiens
agatgctacaatatg

SEQ ID NO: 1385237 - DNA, 15 bp, Homo sapiens
aagatgctacaatat

SEQ ID NO: 1385238 - DNA, 15 bp, Homo sapiens
caagatgctacaata

SEQ ID NO: 1385239 - DNA, 15 bp, Homo sapiens
tcaagatgctacaat

SEQ ID NO: 1385240 - DNA, 15 bp, Homo sapiens
gtcaagatgctacaa

SEQ ID NO: 1385241 - DNA, 15 bp, Homo sapiens
agtcaagatgctaca

SEQ ID NO: 1385242 - DNA, 15 bp, Homo sapiens
aagtcaagatgctac

SEQ ID NO: 1385243 - DNA, 15 bp, Homo sapiens
aaagtcaagatgcta

SEQ ID NO: 1385244 - DNA, 15 bp, Homo sapiens
gaaagtcaagatgct

SEQ ID NO: 1385245 - DNA, 15 bp, Homo sapiens
agaaagtcaagatgc

SEQ ID NO: 1385246 - DNA, 15 bp, Homo sapiens
cagaaagtcaagatg

SEQ ID NO: 1385247 - DNA, 15 bp, Homo sapiens
ccagaaagtcaagat

SEQ ID NO: 1385248 - DNA, 15 bp, Homo sapiens
tccagaaagtcaaga

SEQ ID NO: 1385249 - DNA, 15 bp, Homo sapiens
gtccagaaagtcaag

SEQ ID NO: 1385250 - DNA, 15 bp, Homo sapiens
ggtccagaaagtcaa

SEQ ID NO: 1385251 - DNA, 15 bp, Homo sapiens
tggtccagaaagtca

SEQ ID NO: 1385252 - DNA, 15 bp, Homo sapiens
ttggtccagaaagtc

SEQ ID NO: 1385253 - DNA, 15 bp, Homo sapiens
cttggtccagaaagt

SEQ ID NO: 1385254 - DNA, 15 bp, Homo sapiens
tcttggtccagaaag

SEQ ID NO: 1385255 - DNA, 15 bp, Homo sapiens
ttcttggtccagaaa

SEQ ID NO: 1385256 - DNA, 15 bp, Homo sapiens
gttcttggtccagaa

SEQ ID NO: 1385257 - DNA, 15 bp, Homo sapiens
agttcttggtccaga

SEQ ID NO: 1385258 - DNA, 15 bp, Homo sapiens
tagttcttggtccag

SEQ ID NO: 1385259 - DNA, 15 bp, Homo sapiens
ttagttcttggtcca

SEQ ID NO: 1385260 - DNA, 15 bp, Homo sapiens
attagttcttggtcc

SEQ ID NO: 1385261 - DNA, 15 bp, Homo sapiens
tattagttcttggtc

SEQ ID NO: 1385262 - DNA, 15 bp, Homo sapiens
atattagttcttggt

SEQ ID NO: 1385263 - DNA, 15 bp, Homo sapiens
tatattagttcttgg

SEQ ID NO: 1385264 - DNA, 15 bp, Homo sapiens
atatattagttcttg

SEQ ID NO: 1385265 - DNA, 15 bp, Homo sapiens
catatattagttctt

SEQ ID NO: 1385266 - DNA, 15 bp, Homo sapiens
tcatatattagttct

SEQ ID NO: 1385267 - DNA, 15 bp, Homo sapiens
atcatatattagttc

SEQ ID NO: 1385268 - DNA, 15 bp, Homo sapiens
aatcatatattagtt

SEQ ID NO: 1385269 - DNA, 15 bp, Homo sapiens
gaatcatatattagt

SEQ ID NO: 1385270 - DNA, 15 bp, Homo sapiens
tgaatcatatattag

SEQ ID NO: 1385271 - DNA, 15 bp, Homo sapiens
atgaatcatatatta

SEQ ID NO: 1385272 - DNA, 15 bp, Homo sapiens
tatgaatcatatatt

SEQ ID NO: 1385273 - DNA, 15 bp, Homo sapiens
gtatgaatcatatat

SEQ ID NO: 1385274 - DNA, 15 bp, Homo sapiens
tgtatgaatcatata

SEQ ID NO: 1385275 - DNA, 15 bp, Homo sapiens
ttgtatgaatcatat

SEQ ID NO: 1385276 - DNA, 15 bp, Homo sapiens
tttgtatgaatcata

SEQ ID NO: 1385277 - DNA, 15 bp, Homo sapiens
ttttgtatgaatcat

SEQ ID NO: 1385278 - DNA, 15 bp, Homo sapiens
tttttgtatgaatca

SEQ ID NO: 1385279 - DNA, 15 bp, Homo sapiens
atttttgtatgaatc

SEQ ID NO: 1385280 - DNA, 15 bp, Homo sapiens
tatttttgtatgaat

SEQ ID NO: 1385281 - DNA, 15 bp, Homo sapiens
ttatttttgtatgaa

SEQ ID NO: 1385282 - DNA, 15 bp, Homo sapiens
cttatttttgtatga

SEQ ID NO: 1385283 - DNA, 15 bp, Homo sapiens
tcttatttttgtatg

SEQ ID NO: 1385284 - DNA, 15 bp, Homo sapiens
ttcttatttttgtat

SEQ ID NO: 1385285 - DNA, 15 bp, Homo sapiens
attcttatttttgta

SEQ ID NO: 1385286 - DNA, 15 bp, Homo sapiens
cattcttatttttgt

SEQ ID NO: 1385287 - DNA, 15 bp, Homo sapiens
gcattcttatttttg

SEQ ID NO: 1385288 - DNA, 15 bp, Homo sapiens
agcattcttattttt

SEQ ID NO: 1385289 - DNA, 15 bp, Homo sapiens
tagcattcttatttt

SEQ ID NO: 1385290 - DNA, 15 bp, Homo sapiens
atagcattcttattt

SEQ ID NO: 1385291 - DNA, 15 bp, Homo sapiens
aatagcattcttatt

SEQ ID NO: 1385292 - DNA, 15 bp, Homo sapiens
taatagcattcttat

SEQ ID NO: 1385293 - DNA, 15 bp, Homo sapiens
ttaatagcattctta

SEQ ID NO: 1385294 - DNA, 15 bp, Homo sapiens
tttaatagcattctt

SEQ ID NO: 1385295 - DNA, 15 bp, Homo sapiens
ttttaatagcattct

SEQ ID NO: 1385296 - DNA, 15 bp, Homo sapiens
tttttaatagcattc

SEQ ID NO: 1385297 - DNA, 15 bp, Homo sapiens
gtttttaatagcatt

SEQ ID NO: 1385298 - DNA, 15 bp, Homo sapiens
agtttttaatagcat

SEQ ID NO: 1385299 - DNA, 15 bp, Homo sapiens
cagtttttaatagca

SEQ ID NO: 1385300 - DNA, 15 bp, Homo sapiens
acagtttttaatagc

SEQ ID NO: 1385301 - DNA, 15 bp, Homo sapiens
gacagtttttaatag

SEQ ID NO: 1385302 - DNA, 15 bp, Homo sapiens
agacagtttttaata

SEQ ID NO: 1385303 - DNA, 15 bp, Homo sapiens
tagacagtttttaat

SEQ ID NO: 1385304 - DNA, 15 bp, Homo sapiens
gtagacagtttttaa

SEQ ID NO: 1385305 - DNA, 15 bp, Homo sapiens
tgtagacagttttta

SEQ ID NO: 1385306 - DNA, 15 bp, Homo sapiens
ctgtagacagttttt

SEQ ID NO: 1385307 - DNA, 15 bp, Homo sapiens
actgtagacagtttt

SEQ ID NO: 1385308 - DNA, 15 bp, Homo sapiens
gactgtagacagttt

SEQ ID NO: 1385309 - DNA, 15 bp, Homo sapiens
agactgtagacagtt

SEQ ID NO: 1385310 - DNA, 15 bp, Homo sapiens
tagactgtagacagt

SEQ ID NO: 1385311 - DNA, 15 bp, Homo sapiens
gtagactgtagacag

SEQ ID NO: 1385312 - DNA, 15 bp, Homo sapiens
ggtagactgtagaca

SEQ ID NO: 1385313 - DNA, 15 bp, Homo sapiens
tggtagactgtagac

SEQ ID NO: 1385314 - DNA, 15 bp, Homo sapiens
ctggtagactgtaga

SEQ ID NO: 1385315 - DNA, 15 bp, Homo sapiens
actggtagactgtag

SEQ ID NO: 1385316 - DNA, 15 bp, Homo sapiens
aactggtagactgta

SEQ ID NO: 1385317 - DNA, 15 bp, Homo sapiens
taactggtagactgt

SEQ ID NO: 1385318 - DNA, 15 bp, Homo sapiens
ttaactggtagactg

SEQ ID NO: 1385319 - DNA, 15 bp, Homo sapiens
attaactggtagact

SEQ ID NO: 1385320 - DNA, 15 bp, Homo sapiens
tattaactggtagac

SEQ ID NO: 1385321 - DNA, 15 bp, Homo sapiens
atattaactggtaga

SEQ ID NO: 1385322 - DNA, 15 bp, Homo sapiens
aatattaactggtag

SEQ ID NO: 1385323 - DNA, 15 bp, Homo sapiens
gaatattaactggta

SEQ ID NO: 1385324 - DNA, 15 bp, Homo sapiens
tgaatattaactggt

SEQ ID NO: 1385325 - DNA, 15 bp, Homo sapiens
gtgaatattaactgg

SEQ ID NO: 1385326 - DNA, 15 bp, Homo sapiens
agtgaatattaactg

SEQ ID NO: 1385327 - DNA, 15 bp, Homo sapiens
cagtgaatattaact

SEQ ID NO: 1385328 - DNA, 15 bp, Homo sapiens
gcagtgaatattaac

SEQ ID NO: 1385329 - DNA, 15 bp, Homo sapiens
ggcagtgaatattaa

SEQ ID NO: 1385330 - DNA, 15 bp, Homo sapiens
tggcagtgaatatta

SEQ ID NO: 1385331 - DNA, 15 bp, Homo sapiens
ttggcagtgaatatt

SEQ ID NO: 1385332 - DNA, 15 bp, Homo sapiens
tttggcagtgaatat

SEQ ID NO: 1385333 - DNA, 15 bp, Homo sapiens
atttggcagtgaata

SEQ ID NO: 1385334 - DNA, 15 bp, Homo sapiens
gatttggcagtgaat

SEQ ID NO: 1385335 - DNA, 15 bp, Homo sapiens
tgatttggcagtgaa

SEQ ID NO: 1385336 - DNA, 15 bp, Homo sapiens
atgatttggcagtga

SEQ ID NO: 1385337 - DNA, 15 bp, Homo sapiens
tatgatttggcagtg

SEQ ID NO: 1385338 - DNA, 15 bp, Homo sapiens
ttatgatttggcagt

SEQ ID NO: 1385339 - DNA, 15 bp, Homo sapiens
tttatgatttggcag

SEQ ID NO: 1385340 - DNA, 15 bp, Homo sapiens
atttatgatttggca

SEQ ID NO: 1385341 - DNA, 15 bp, Homo sapiens
aatttatgatttggc

SEQ ID NO: 1385342 - DNA, 15 bp, Homo sapiens
taatttatgatttgg

SEQ ID NO: 1385343 - DNA, 15 bp, Homo sapiens
gtaatttatgatttg

SEQ ID NO: 1385344 - DNA, 15 bp, Homo sapiens
tgtaatttatgattt

SEQ ID NO: 1385345 - DNA, 15 bp, Homo sapiens
atgtaatttatgatt

SEQ ID NO: 1385346 - DNA, 15 bp, Homo sapiens
aatgtaatttatgat

SEQ ID NO: 1385347 - DNA, 15 bp, Homo sapiens
aaatgtaatttatga

SEQ ID NO: 1385348 - DNA, 15 bp, Homo sapiens
aaaatgtaatttatg

SEQ ID NO: 1385349 - DNA, 15 bp, Homo sapiens
aaaaatgtaatttat

SEQ ID NO: 1385350 - DNA, 15 bp, Homo sapiens
aaaaaatgtaattta

SEQ ID NO: 1385351 - DNA, 15 bp, Homo sapiens
aaaaaaatgtaattt

SEQ ID NO: 1385352 - DNA, 15 bp, Homo sapiens
aaaaaaaatgtaatt

SEQ ID NO: 1385353 - DNA, 15 bp, Homo sapiens
taaaaaaaatgtaat

SEQ ID NO: 1385354 - DNA, 15 bp, Homo sapiens
ttaaaaaaaatgtaa

SEQ ID NO: 1385355 - DNA, 15 bp, Homo sapiens
tttaaaaaaaatgta

SEQ ID NO: 1385356 - DNA, 15 bp, Homo sapiens
gtttaaaaaaaatgt

SEQ ID NO: 1385357 - DNA, 15 bp, Homo sapiens
tgtttaaaaaaaatg

SEQ ID NO: 1385358 - DNA, 15 bp, Homo sapiens
gtgtttaaaaaaaat

SEQ ID NO: 1385359 - DNA, 15 bp, Homo sapiens
agtgtttaaaaaaaa

SEQ ID NO: 1385360 - DNA, 15 bp, Homo sapiens
aagtgtttaaaaaaa

SEQ ID NO: 1385361 - DNA, 15 bp, Homo sapiens
caagtgtttaaaaaa

SEQ ID NO: 1385362 - DNA, 15 bp, Homo sapiens
tcaagtgtttaaaaa

SEQ ID NO: 1385363 - DNA, 15 bp, Homo sapiens
atcaagtgtttaaaa

SEQ ID NO: 1385364 - DNA, 15 bp, Homo sapiens
aatcaagtgtttaaa

SEQ ID NO: 1385365 - DNA, 15 bp, Homo sapiens
aaatcaagtgtttaa

SEQ ID NO: 1385366 - DNA, 15 bp, Homo sapiens
gaaatcaagtgttta

SEQ ID NO: 1385367 - DNA, 15 bp, Homo sapiens
agaaatcaagtgttt

SEQ ID NO: 1385368 - DNA, 15 bp, Homo sapiens
aagaaatcaagtgtt

SEQ ID NO: 1385369 - DNA, 15 bp, Homo sapiens
aaagaaatcaagtgt

SEQ ID NO: 1385370 - DNA, 15 bp, Homo sapiens
aaaagaaatcaagtg

SEQ ID NO: 1385371 - DNA, 15 bp, Homo sapiens
taaaagaaatcaagt

SEQ ID NO: 1385372 - DNA, 15 bp, Homo sapiens
ttaaaagaaatcaag

SEQ ID NO: 1385373 - DNA, 15 bp, Homo sapiens
cttaaaagaaatcaa

SEQ ID NO: 1385374 - DNA, 15 bp, Homo sapiens
ccttaaaagaaatca

SEQ ID NO: 1385375 - DNA, 15 bp, Homo sapiens
accttaaaagaaatc

SEQ ID NO: 1385376 - DNA, 15 bp, Homo sapiens
aaccttaaaagaaat

SEQ ID NO: 1385377 - DNA, 15 bp, Homo sapiens
aaaccttaaaagaaa

SEQ ID NO: 1385378 - DNA, 15 bp, Homo sapiens
taaaccttaaaagaa

SEQ ID NO: 1385379 - DNA, 15 bp, Homo sapiens
gtaaaccttaaaaga

SEQ ID NO: 1385380 - DNA, 15 bp, Homo sapiens
ggtaaaccttaaaag

SEQ ID NO: 1385381 - DNA, 15 bp, Homo sapiens
tggtaaaccttaaaa

SEQ ID NO: 1385382 - DNA, 15 bp, Homo sapiens
atggtaaaccttaaa

SEQ ID NO: 1385383 - DNA, 15 bp, Homo sapiens
tatggtaaaccttaa

SEQ ID NO: 1385384 - DNA, 15 bp, Homo sapiens
atatggtaaacctta

SEQ ID NO: 1385385 - DNA, 15 bp, Homo sapiens
aatatggtaaacctt

SEQ ID NO: 1385386 - DNA, 15 bp, Homo sapiens
aggaatatggtaaac

SEQ ID NO: 1385387 - DNA, 15 bp, Homo sapiens
caggaatatggtaaa

SEQ ID NO: 1385388 - DNA, 15 bp, Homo sapiens
tcaggaatatggtaa

SEQ ID NO: 1385389 - DNA, 15 bp, Homo sapiens
atcaggaatatggta

SEQ ID NO: 1385390 - DNA, 15 bp, Homo sapiens
tatcaggaatatggt

SEQ ID NO: 1385391 - DNA, 15 bp, Homo sapiens
gtatcaggaatatgg

SEQ ID NO: 1385392 - DNA, 15 bp, Homo sapiens
agtatcaggaatatg

SEQ ID NO: 1385393 - DNA, 15 bp, Homo sapiens
cagtatcaggaatat

SEQ ID NO: 1385394 - DNA, 15 bp, Homo sapiens
acagtatcaggaata

SEQ ID NO: 1385395 - DNA, 15 bp, Homo sapiens
gacagtatcaggaat

SEQ ID NO: 1385396 - DNA, 15 bp, Homo sapiens
agacagtatcaggaa

SEQ ID NO: 1385397 - DNA, 15 bp, Homo sapiens
cagacagtatcagga

SEQ ID NO: 1385398 - DNA, 15 bp, Homo sapiens
tcagacagtatcagg

SEQ ID NO: 1385399 - DNA, 15 bp, Homo sapiens
ttcagacagtatcag

SEQ ID NO: 1385400 - DNA, 15 bp, Homo sapiens
tttcagacagtatca

SEQ ID NO: 1385401 - DNA, 15 bp, Homo sapiens
ttttcagacagtatc

SEQ ID NO: 1385402 - DNA, 15 bp, Homo sapiens
gttttcagacagtat

SEQ ID NO: 1385403 - DNA, 15 bp, Homo sapiens
tgttttcagacagta

SEQ ID NO: 1385404 - DNA, 15 bp, Homo sapiens
ctgttttcagacagt

SEQ ID NO: 1385405 - DNA, 15 bp, Homo sapiens
cctgttttcagacag

SEQ ID NO: 1385406 - DNA, 15 bp, Homo sapiens
ccctgttttcagaca

SEQ ID NO: 1385407 - DNA, 15 bp, Homo sapiens
tccctgttttcagac

SEQ ID NO: 1385408 - DNA, 15 bp, Homo sapiens
ttccctgttttcaga

SEQ ID NO: 1385409 - DNA, 15 bp, Homo sapiens
attccctgttttcag

SEQ ID NO: 1385410 - DNA, 15 bp, Homo sapiens
aattccctgttttca

SEQ ID NO: 1385411 - DNA, 15 bp, Homo sapiens
taattccctgttttc

SEQ ID NO: 1385412 - DNA, 15 bp, Homo sapiens
ttaattccctgtttt

SEQ ID NO: 1385413 - DNA, 15 bp, Homo sapiens
attaattccctgttt

SEQ ID NO: 1385414 - DNA, 15 bp, Homo sapiens
gattaattccctgtt

SEQ ID NO: 1385415 - DNA, 15 bp, Homo sapiens
ggattaattccctgt

SEQ ID NO: 1385416 - DNA, 15 bp, Homo sapiens
aggattaattccctg

SEQ ID NO: 1385417 - DNA, 15 bp, Homo sapiens
aaggattaattccct

SEQ ID NO: 1385418 - DNA, 15 bp, Homo sapiens
gaaggattaattccc

SEQ ID NO: 1385419 - DNA, 15 bp, Homo sapiens
tgaaggattaattcc

SEQ ID NO: 1385420 - DNA, 15 bp, Homo sapiens
gtgaaggattaattc

SEQ ID NO: 1385421 - DNA, 15 bp, Homo sapiens
tgtgaaggattaatt

SEQ ID NO: 1385422 - DNA, 15 bp, Homo sapiens
atgtgaaggattaat

SEQ ID NO: 1385423 - DNA, 15 bp, Homo sapiens
gatgtgaaggattaa

SEQ ID NO: 1385424 - DNA, 15 bp, Homo sapiens
agatgtgaaggatta

SEQ ID NO: 1385425 - DNA, 15 bp, Homo sapiens
tagatgtgaaggatt

SEQ ID NO: 1385426 - DNA, 15 bp, Homo sapiens
ctagatgtgaaggat

SEQ ID NO: 1385427 - DNA, 15 bp, Homo sapiens
actagatgtgaagga

SEQ ID NO: 1385428 - DNA, 15 bp, Homo sapiens
cactagatgtgaagg

SEQ ID NO: 1385429 - DNA, 15 bp, Homo sapiens
acactagatgtgaag

SEQ ID NO: 1385430 - DNA, 15 bp, Homo sapiens
cacactagatgtgaa

SEQ ID NO: 1385431 - DNA, 15 bp, Homo sapiens
tcacactagatgtga

SEQ ID NO: 1385432 - DNA, 15 bp, Homo sapiens
atcacactagatgtg

SEQ ID NO: 1385433 - DNA, 15 bp, Homo sapiens
tatcacactagatgt

SEQ ID NO: 1385434 - DNA, 15 bp, Homo sapiens
atatcacactagatg

SEQ ID NO: 1385435 - DNA, 15 bp, Homo sapiens
gatatcacactagat

SEQ ID NO: 1385436 - DNA, 15 bp, Homo sapiens
agatatcacactaga

SEQ ID NO: 1385437 - DNA, 15 bp, Homo sapiens
cagatatcacactag

SEQ ID NO: 1385438 - DNA, 15 bp, Homo sapiens
tcagatatcacacta

SEQ ID NO: 1385439 - DNA, 15 bp, Homo sapiens
gtcagatatcacact

SEQ ID NO: 1385440 - DNA, 15 bp, Homo sapiens
tgtcagatatcacac

SEQ ID NO: 1385441 - DNA, 15 bp, Homo sapiens
gtgtcagatatcaca

SEQ ID NO: 1385442 - DNA, 15 bp, Homo sapiens
ggtgtcagatatcac

SEQ ID NO: 1385443 - DNA, 15 bp, Homo sapiens
aggtgtcagatatca

SEQ ID NO: 1385444 - DNA, 15 bp, Homo sapiens
taggtgtcagatatc

SEQ ID NO: 1385445 - DNA, 15 bp, Homo sapiens
gtaggtgtcagatat

SEQ ID NO: 1385446 - DNA, 15 bp, Homo sapiens
agtaggtgtcagata

SEQ ID NO: 1385447 - DNA, 15 bp, Homo sapiens
tagtaggtgtcagat

SEQ ID NO: 1385448 - DNA, 15 bp, Homo sapiens
atagtaggtgtcaga

SEQ ID NO: 1385449 - DNA, 15 bp, Homo sapiens
catagtaggtgtcag

SEQ ID NO: 1385450 - DNA, 15 bp, Homo sapiens
acatagtaggtgtca

SEQ ID NO: 1385451 - DNA, 15 bp, Homo sapiens
cacatagtaggtgtc

SEQ ID NO: 1385452 - DNA, 15 bp, Homo sapiens
acacatagtaggtgt

SEQ ID NO: 1385453 - DNA, 15 bp, Homo sapiens
aacacatagtaggtg

SEQ ID NO: 1385454 - DNA, 15 bp, Homo sapiens
taacacatagtaggt

SEQ ID NO: 1385455 - DNA, 15 bp, Homo sapiens
ataacacatagtagg

SEQ ID NO: 1385456 - DNA, 15 bp, Homo sapiens
tataacacatagtag

SEQ ID NO: 1385457 - DNA, 15 bp, Homo sapiens
atataacacatagta

SEQ ID NO: 1385458 - DNA, 15 bp, Homo sapiens
tatataacacatagt

SEQ ID NO: 1385459 - DNA, 15 bp, Homo sapiens
ttatataacacatag

SEQ ID NO: 1385460 - DNA, 15 bp, Homo sapiens
gttatataacacata

SEQ ID NO: 1385461 - DNA, 15 bp, Homo sapiens
tgttatataacacat

SEQ ID NO: 1385462 - DNA, 15 bp, Homo sapiens
ttgttatataacaca

SEQ ID NO: 1385463 - DNA, 15 bp, Homo sapiens
tttgttatataacac

SEQ ID NO: 1385464 - DNA, 15 bp, Homo sapiens
atttgttatataaca

SEQ ID NO: 1385465 - DNA, 15 bp, Homo sapiens
catttgttatataac

SEQ ID NO: 1385466 - DNA, 15 bp, Homo sapiens
acatttgttatataa

SEQ ID NO: 1385467 - DNA, 15 bp, Homo sapiens
aacatttgttatata

SEQ ID NO: 1385468 - DNA, 15 bp, Homo sapiens
taacatttgttatat

SEQ ID NO: 1385469 - DNA, 15 bp, Homo sapiens
ataacatttgttata

SEQ ID NO: 1385470 - DNA, 15 bp, Homo sapiens
cataacatttgttat

SEQ ID NO: 1385471 - DNA, 15 bp, Homo sapiens
acataacatttgtta

SEQ ID NO: 1385472 - DNA, 15 bp, Homo sapiens
tacataacatttgtt

SEQ ID NO: 1385473 - DNA, 15 bp, Homo sapiens
ttacataacatttgt

SEQ ID NO: 1385474 - DNA, 15 bp, Homo sapiens
tttacataacatttg

SEQ ID NO: 1385475 - DNA, 15 bp, Homo sapiens
atttacataacattt

SEQ ID NO: 1385476 - DNA, 15 bp, Homo sapiens
tatttacataacatt

SEQ ID NO: 1385477 - DNA, 15 bp, Homo sapiens
ttatttacataacat

SEQ ID NO: 1385478 - DNA, 15 bp, Homo sapiens
tttatttacataaca

SEQ ID NO: 1385479 - DNA, 15 bp, Homo sapiens
atttatttacataac

SEQ ID NO: 1385480 - DNA, 15 bp, Homo sapiens
catttatttacataa

SEQ ID NO: 1385481 - DNA, 15 bp, Homo sapiens
gcatttatttacata

SEQ ID NO: 1385482 - DNA, 15 bp, Homo sapiens
tgcatttatttacat

SEQ ID NO: 1385483 - DNA, 15 bp, Homo sapiens
atgcatttatttaca

SEQ ID NO: 1385484 - DNA, 15 bp, Homo sapiens
gatgcatttatttac

SEQ ID NO: 1385485 - DNA, 15 bp, Homo sapiens
tgatgcatttattta

SEQ ID NO: 1385486 - DNA, 15 bp, Homo sapiens
ctgatgcatttattt

SEQ ID NO: 1385487 - DNA, 15 bp, Homo sapiens
actgatgcatttatt

SEQ ID NO: 1385488 - DNA, 15 bp, Homo sapiens
tactgatgcatttat

SEQ ID NO: 1385489 - DNA, 15 bp, Homo sapiens
ttactgatgcattta

SEQ ID NO: 1385490 - DNA, 15 bp, Homo sapiens
tttactgatgcattt

SEQ ID NO: 1385491 - DNA, 15 bp, Homo sapiens
atttactgatgcatt

SEQ ID NO: 1385492 - DNA, 15 bp, Homo sapiens
tatttactgatgcat

SEQ ID NO: 1385493 - DNA, 15 bp, Homo sapiens
ttatttactgatgca

SEQ ID NO: 1385494 - DNA, 15 bp, Homo sapiens
tttatttactgatgc

SEQ ID NO: 1385495 - DNA, 15 bp, Homo sapiens
ttttatttactgatg

SEQ ID NO: 1385496 - DNA, 15 bp, Homo sapiens
gttttatttactgat

SEQ ID NO: 1385497 - DNA, 15 bp, Homo sapiens
tgttttatttactga

SEQ ID NO: 1385498 - DNA, 15 bp, Homo sapiens
gtgttttatttactg

SEQ ID NO: 1385499 - DNA, 15 bp, Homo sapiens
ggtgttttatttact

SEQ ID NO: 1385500 - DNA, 15 bp, Homo sapiens
gggtgttttatttac

SEQ ID NO: 1385501 - DNA, 15 bp, Homo sapiens
tgggtgttttattta

SEQ ID NO: 1385502 - DNA, 15 bp, Homo sapiens
ctctgggtgttttat

SEQ ID NO: 1385503 - DNA, 15 bp, Homo sapiens
tctctgggtgtttta

SEQ ID NO: 1385504 - DNA, 15 bp, Homo sapiens
ttctctgggtgtttt

SEQ ID NO: 1385505 - DNA, 15 bp, Homo sapiens
tttctctgggtgttt

SEQ ID NO: 1385506 - DNA, 15 bp, Homo sapiens
atttctctgggtgtt

SEQ ID NO: 1385507 - DNA, 15 bp, Homo sapiens
aatttctctgggtgt

SEQ ID NO: 1385508 - DNA, 15 bp, Homo sapiens
caatttctctgggtg

SEQ ID NO: 1385509 - DNA, 15 bp, Homo sapiens
acaatttctctgggt

SEQ ID NO: 1385510 - DNA, 15 bp, Homo sapiens
aacaatttctctggg

SEQ ID NO: 1385511 - DNA, 15 bp, Homo sapiens
aaacaatttctctgg

SEQ ID NO: 1385512 - DNA, 15 bp, Homo sapiens
aaaacaatttctctg

SEQ ID NO: 1385513 - DNA, 15 bp, Homo sapiens
taaaacaatttctct

SEQ ID NO: 1385514 - DNA, 15 bp, Homo sapiens
ttaaaacaatttctc

SEQ ID NO: 1385515 - DNA, 15 bp, Homo sapiens
tttaaaacaatttct

SEQ ID NO: 1385516 - DNA, 15 bp, Homo sapiens
ctttaaaacaatttc

SEQ ID NO: 1385517 - DNA, 15 bp, Homo sapiens
tctttaaaacaattt

SEQ ID NO: 1385518 - DNA, 15 bp, Homo sapiens
gtctttaaaacaatt

SEQ ID NO: 1385519 - DNA, 15 bp, Homo sapiens
tgtctttaaaacaat

SEQ ID NO: 1385520 - DNA, 15 bp, Homo sapiens
ttgtctttaaaacaa

SEQ ID NO: 1385521 - DNA, 15 bp, Homo sapiens
tttgtctttaaaaca

SEQ ID NO: 1385522 - DNA, 15 bp, Homo sapiens
ctttgtctttaaaac

SEQ ID NO: 1385523 - DNA, 15 bp, Homo sapiens
tctttgtctttaaaa

SEQ ID NO: 1385524 - DNA, 15 bp, Homo sapiens
ttctttgtctttaaa

SEQ ID NO: 1385525 - DNA, 15 bp, Homo sapiens
tttctttgtctttaa

SEQ ID NO: 1385526 - DNA, 15 bp, Homo sapiens
ttttctttgtcttta

SEQ ID NO: 1385527 - DNA, 15 bp, Homo sapiens
cttttctttgtcttt

SEQ ID NO: 1385528 - DNA, 15 bp, Homo sapiens
ccttttctttgtctt

SEQ ID NO: 1385529 - DNA, 15 bp, Homo sapiens
tccttttctttgtct

SEQ ID NO: 1385530 - DNA, 15 bp, Homo sapiens
ctccttttctttgtc

SEQ ID NO: 1385531 - DNA, 15 bp, Homo sapiens
tctccttttctttgt

SEQ ID NO: 1385532 - DNA, 15 bp, Homo sapiens
atctccttttctttg

SEQ ID NO: 1385533 - DNA, 15 bp, Homo sapiens
aatctccttttcttt

SEQ ID NO: 1385534 - DNA, 15 bp, Homo sapiens
taatctccttttctt

SEQ ID NO: 1385535 - DNA, 15 bp, Homo sapiens
ttaatctccttttct

SEQ ID NO: 1385536 - DNA, 15 bp, Homo sapiens
gttaatctccttttc

SEQ ID NO: 1385537 - DNA, 15 bp, Homo sapiens
agttaatctcctttt

SEQ ID NO: 1385538 - DNA, 15 bp, Homo sapiens
aagttaatctccttt

SEQ ID NO: 1385539 - DNA, 15 bp, Homo sapiens
aaagttaatctcctt

SEQ ID NO: 1385540 - DNA, 15 bp, Homo sapiens
aaaagttaatctcct

SEQ ID NO: 1385541 - DNA, 15 bp, Homo sapiens
aaaaagttaatctcc

SEQ ID NO: 1385542 - DNA, 15 bp, Homo sapiens
aaaaaagttaatctc

SEQ ID NO: 1385543 - DNA, 15 bp, Homo sapiens
aaaaaaagttaatct

SEQ ID NO: 1385544 - DNA, 15 bp, Homo sapiens
taaaaaaagttaatc

SEQ ID NO: 1385545 - DNA, 15 bp, Homo sapiens
ctaaaaaaagttaat

SEQ ID NO: 1385546 - DNA, 15 bp, Homo sapiens
tctaaaaaaagttaa

SEQ ID NO: 1385547 - DNA, 15 bp, Homo sapiens
ctctaaaaaaagtta

SEQ ID NO: 1385548 - DNA, 15 bp, Homo sapiens
tctctaaaaaaagtt

SEQ ID NO: 1385549 - DNA, 15 bp, Homo sapiens
ttctctaaaaaaagt

SEQ ID NO: 1385550 - DNA, 15 bp, Homo sapiens
tttctctaaaaaaag

SEQ ID NO: 1385551 - DNA, 15 bp, Homo sapiens
attttctctaaaaaa

SEQ ID NO: 1385552 - DNA, 15 bp, Homo sapiens
tattttctctaaaaa

SEQ ID NO: 1385553 - DNA, 15 bp, Homo sapiens
atattttctctaaaa

SEQ ID NO: 1385554 - DNA, 15 bp, Homo sapiens
aatattttctctaaa

SEQ ID NO: 1385555 - DNA, 15 bp, Homo sapiens
caatattttctctaa

SEQ ID NO: 1385556 - DNA, 15 bp, Homo sapiens
tcaatattttctcta

SEQ ID NO: 1385557 - DNA, 15 bp, Homo sapiens
ctcaatattttctct

SEQ ID NO: 1385558 - DNA, 15 bp, Homo sapiens
cctcaatattttctc

SEQ ID NO: 1385559 - DNA, 15 bp, Homo sapiens
tcctcaatattttct

SEQ ID NO: 1385560 - DNA, 15 bp, Homo sapiens
ctcctcaatattttc

SEQ ID NO: 1385561 - DNA, 15 bp, Homo sapiens
cctcctcaatatttt

SEQ ID NO: 1385562 - DNA, 15 bp, Homo sapiens
tcctcctcaatattt

SEQ ID NO: 1385563 - DNA, 15 bp, Homo sapiens
ttcctcctcaatatt

SEQ ID NO: 1385564 - DNA, 15 bp, Homo sapiens
attcctcctcaatat

SEQ ID NO: 1385565 - DNA, 15 bp, Homo sapiens
cattcctcctcaata

SEQ ID NO: 1385566 - DNA, 15 bp, Homo sapiens
tcattcctcctcaat

SEQ ID NO: 1385567 - DNA, 15 bp, Homo sapiens
gtcattcctcctcaa

SEQ ID NO: 1385568 - DNA, 15 bp, Homo sapiens
ggtcattcctcctca

SEQ ID NO: 1385569 - DNA, 15 bp, Homo sapiens
aggtcattcctcctc

SEQ ID NO: 1385570 - DNA, 15 bp, Homo sapiens
taggtcattcctcct

SEQ ID NO: 1385571 - DNA, 15 bp, Homo sapiens
ttaggtcattcctcc

SEQ ID NO: 1385572 - DNA, 15 bp, Homo sapiens
gttaggtcattcctc

SEQ ID NO: 1385573 - DNA, 15 bp, Homo sapiens
tgttaggtcattcct

SEQ ID NO: 1385574 - DNA, 15 bp, Homo sapiens
gtgttaggtcattcc

SEQ ID NO: 1385575 - DNA, 15 bp, Homo sapiens
agtgttaggtcattc

SEQ ID NO: 1385576 - DNA, 15 bp, Homo sapiens
aagtgttaggtcatt

SEQ ID NO: 1385577 - DNA, 15 bp, Homo sapiens
taagtgttaggtcat

SEQ ID NO: 1385578 - DNA, 15 bp, Homo sapiens
ataagtgttaggtca

SEQ ID NO: 1385579 - DNA, 15 bp, Homo sapiens
tataagtgttaggtc

SEQ ID NO: 1385580 - DNA, 15 bp, Homo sapiens
atataagtgttaggt

SEQ ID NO: 1385581 - DNA, 15 bp, Homo sapiens
aatataagtgttagg

SEQ ID NO: 1385582 - DNA, 15 bp, Homo sapiens
gaatataagtgttag

SEQ ID NO: 1385583 - DNA, 15 bp, Homo sapiens
agaatataagtgtta

SEQ ID NO: 1385584 - DNA, 15 bp, Homo sapiens
tagaatataagtgtt

SEQ ID NO: 1385585 - DNA, 15 bp, Homo sapiens
ctagaatataagtgt

SEQ ID NO: 1385586 - DNA, 15 bp, Homo sapiens
tctagaatataagtg

SEQ ID NO: 1385587 - DNA, 15 bp, Homo sapiens
atctagaatataagt

SEQ ID NO: 1385588 - DNA, 15 bp, Homo sapiens
tatctagaatataag

SEQ ID NO: 1385589 - DNA, 15 bp, Homo sapiens
ttatctagaatataa

SEQ ID NO: 1385590 - DNA, 15 bp, Homo sapiens
tttatctagaatata

SEQ ID NO: 1385591 - DNA, 15 bp, Homo sapiens
ttttatctagaatat

SEQ ID NO: 1385592 - DNA, 15 bp, Homo sapiens
attttatctagaata

SEQ ID NO: 1385593 - DNA, 15 bp, Homo sapiens
gattttatctagaat

SEQ ID NO: 1385594 - DNA, 15 bp, Homo sapiens
cgattttatctagaa

SEQ ID NO: 1385595 - DNA, 15 bp, Homo sapiens
tcgattttatctaga

SEQ ID NO: 1385596 - DNA, 15 bp, Homo sapiens
ttcgattttatctag

SEQ ID NO: 1385597 - DNA, 15 bp, Homo sapiens
attcgattttatcta

SEQ ID NO: 1385598 - DNA, 15 bp, Homo sapiens
aattcgattttatct

SEQ ID NO: 1385599 - DNA, 15 bp, Homo sapiens
aaattcgattttatc

SEQ ID NO: 1385600 - DNA, 15 bp, Homo sapiens
aaaattcgattttat

SEQ ID NO: 1385601 - DNA, 15 bp, Homo sapiens
taaaattcgatttta

SEQ ID NO: 1385602 - DNA, 15 bp, Homo sapiens
ttaaaattcgatttt

SEQ ID NO: 1385603 - DNA, 15 bp, Homo sapiens
gttaaaattcgattt

SEQ ID NO: 1385604 - DNA, 15 bp, Homo sapiens
agttaaaattcgatt

SEQ ID NO: 1385605 - DNA, 15 bp, Homo sapiens
tagttaaaattcgat

SEQ ID NO: 1385606 - DNA, 15 bp, Homo sapiens
atagttaaaattcga

SEQ ID NO: 1385607 - DNA, 15 bp, Homo sapiens
gatagttaaaattcg

SEQ ID NO: 1385608 - DNA, 15 bp, Homo sapiens
agatagttaaaattc

SEQ ID NO: 1385609 - DNA, 15 bp, Homo sapiens
aagatagttaaaatt

SEQ ID NO: 1385610 - DNA, 15 bp, Homo sapiens
aaagatagttaaaat

SEQ ID NO: 1385611 - DNA, 15 bp, Homo sapiens
aaaagatagttaaaa

SEQ ID NO: 1385612 - DNA, 15 bp, Homo sapiens
aaaaagatagttaaa

SEQ ID NO: 1385613 - DNA, 15 bp, Homo sapiens
taaaaagatagttaa

SEQ ID NO: 1385614 - DNA, 15 bp, Homo sapiens
gtaaaaagatagtta

SEQ ID NO: 1385615 - DNA, 15 bp, Homo sapiens
agtaaaaagatagtt

SEQ ID NO: 1385616 - DNA, 15 bp, Homo sapiens
cagtaaaaagatagt

SEQ ID NO: 1385617 - DNA, 15 bp, Homo sapiens
tcagtaaaaagatag

SEQ ID NO: 1385618 - DNA, 15 bp, Homo sapiens
ttcagtaaaaagata

SEQ ID NO: 1385619 - DNA, 15 bp, Homo sapiens
tttcagtaaaaagat

SEQ ID NO: 1385620 - DNA, 15 bp, Homo sapiens
gtttcagtaaaaaga

SEQ ID NO: 1385621 - DNA, 15 bp, Homo sapiens
ggtttcagtaaaaag

SEQ ID NO: 1385622 - DNA, 15 bp, Homo sapiens
aggtttcagtaaaaa

SEQ ID NO: 1385623 - DNA, 15 bp, Homo sapiens
taggtttcagtaaaa

SEQ ID NO: 1385624 - DNA, 15 bp, Homo sapiens
ttaggtttcagtaaa

SEQ ID NO: 1385625 - DNA, 15 bp, Homo sapiens
tttaggtttcagtaa

SEQ ID NO: 1385626 - DNA, 15 bp, Homo sapiens
gtttaggtttcagta

SEQ ID NO: 1385627 - DNA, 15 bp, Homo sapiens
agtttaggtttcagt

SEQ ID NO: 1385628 - DNA, 15 bp, Homo sapiens
aagtttaggtttcag

SEQ ID NO: 1385629 - DNA, 15 bp, Homo sapiens
gaagtttaggtttca

SEQ ID NO: 1385630 - DNA, 15 bp, Homo sapiens
ggaagtttaggtttc

SEQ ID NO: 1385631 - DNA, 15 bp, Homo sapiens
aggaagtttaggttt

SEQ ID NO: 1385632 - DNA, 15 bp, Homo sapiens
caggaagtttaggtt

SEQ ID NO: 1385633 - DNA, 15 bp, Homo sapiens
ccaggaagtttaggt

SEQ ID NO: 1385634 - DNA, 15 bp, Homo sapiens
tccaggaagtttagg

SEQ ID NO: 1385635 - DNA, 15 bp, Homo sapiens
atccaggaagtttag

SEQ ID NO: 1385636 - DNA, 15 bp, Homo sapiens
aatccaggaagttta

SEQ ID NO: 1385637 - DNA, 15 bp, Homo sapiens
aaatccaggaagttt

SEQ ID NO: 1385638 - DNA, 15 bp, Homo sapiens
aaaatccaggaagtt

SEQ ID NO: 1385639 - DNA, 15 bp, Homo sapiens
gaaaatccaggaagt

SEQ ID NO: 1385640 - DNA, 15 bp, Homo sapiens
tgaaaatccaggaag

SEQ ID NO: 1385641 - DNA, 15 bp, Homo sapiens
gtgaaaatccaggaa

SEQ ID NO: 1385642 - DNA, 15 bp, Homo sapiens
cgtgaaaatccagga

SEQ ID NO: 1385643 - DNA, 15 bp, Homo sapiens
gcgtgaaaatccagg

SEQ ID NO: 1385644 - DNA, 15 bp, Homo sapiens
agcgtgaaaatccag

SEQ ID NO: 1385645 - DNA, 15 bp, Homo sapiens
tagcgtgaaaatcca

SEQ ID NO: 1385646 - DNA, 15 bp, Homo sapiens
ttagcgtgaaaatcc

SEQ ID NO: 1385647 - DNA, 15 bp, Homo sapiens
tttagcgtgaaaatc

SEQ ID NO: 1385648 - DNA, 15 bp, Homo sapiens
ttttagcgtgaaaat

SEQ ID NO: 1385649 - DNA, 15 bp, Homo sapiens
tttttagcgtgaaaa

SEQ ID NO: 1385650 - DNA, 15 bp, Homo sapiens
atttttagcgtgaaa

SEQ ID NO: 1385651 - DNA, 15 bp, Homo sapiens
tatttttagcgtgaa

SEQ ID NO: 1385652 - DNA, 15 bp, Homo sapiens
atatttttagcgtga

SEQ ID NO: 1385653 - DNA, 15 bp, Homo sapiens
aatatttttagcgtg

SEQ ID NO: 1385654 - DNA, 15 bp, Homo sapiens
taatatttttagcgt

SEQ ID NO: 1385655 - DNA, 15 bp, Homo sapiens
ctaatatttttagcg

SEQ ID NO: 1385656 - DNA, 15 bp, Homo sapiens
tctaatatttttagc

SEQ ID NO: 1385657 - DNA, 15 bp, Homo sapiens
atctaatatttttag

SEQ ID NO: 1385658 - DNA, 15 bp, Homo sapiens
aatctaatattttta

SEQ ID NO: 1385659 - DNA, 15 bp, Homo sapiens
gaatctaatattttt

SEQ ID NO: 1385660 - DNA, 15 bp, Homo sapiens
agaatctaatatttt

SEQ ID NO: 1385661 - DNA, 15 bp, Homo sapiens
aagaatctaatattt

SEQ ID NO: 1385662 - DNA, 15 bp, Homo sapiens
taagaatctaatatt

SEQ ID NO: 1385663 - DNA, 15 bp, Homo sapiens
ttaagaatctaatat

SEQ ID NO: 1385664 - DNA, 15 bp, Homo sapiens
tttaagaatctaata

SEQ ID NO: 1385665 - DNA, 15 bp, Homo sapiens
ttttaagaatctaat

SEQ ID NO: 1385666 - DNA, 15 bp, Homo sapiens
tattttaagaatcta

SEQ ID NO: 1385667 - DNA, 15 bp, Homo sapiens
ctattttaagaatct

SEQ ID NO: 1385668 - DNA, 15 bp, Homo sapiens
cctattttaagaatc

SEQ ID NO: 1385669 - DNA, 15 bp, Homo sapiens
tcctattttaagaat

SEQ ID NO: 1385670 - DNA, 15 bp, Homo sapiens
ctcctattttaagaa

SEQ ID NO: 1385671 - DNA, 15 bp, Homo sapiens
actcctattttaaga

SEQ ID NO: 1385672 - DNA, 15 bp, Homo sapiens
aactcctattttaag

SEQ ID NO: 1385673 - DNA, 15 bp, Homo sapiens
gaactcctattttaa

SEQ ID NO: 1385674 - DNA, 15 bp, Homo sapiens
agaactcctatttta

SEQ ID NO: 1385675 - DNA, 15 bp, Homo sapiens
aagaactcctatttt

SEQ ID NO: 1385676 - DNA, 15 bp, Homo sapiens
aaagaactcctattt

SEQ ID NO: 1385677 - DNA, 15 bp, Homo sapiens
aaaagaactcctatt

SEQ ID NO: 1385678 - DNA, 15 bp, Homo sapiens
aaaaagaactcctat

SEQ ID NO: 1385679 - DNA, 15 bp, Homo sapiens
gaaaaagaactccta

SEQ ID NO: 1385680 - DNA, 15 bp, Homo sapiens
agaaaaagaactcct

SEQ ID NO: 1385681 - DNA, 15 bp, Homo sapiens
aagaaaaagaactcc

SEQ ID NO: 1385682 - DNA, 15 bp, Homo sapiens
taagaaaaagaactc

SEQ ID NO: 1385683 - DNA, 15 bp, Homo sapiens
ttaagaaaaagaact

SEQ ID NO: 1385684 - DNA, 15 bp, Homo sapiens
cttaagaaaaagaac

SEQ ID NO: 1385685 - DNA, 15 bp, Homo sapiens
gcttaagaaaaagaa

SEQ ID NO: 1385686 - DNA, 15 bp, Homo sapiens
cgcttaagaaaaaga

SEQ ID NO: 1385687 - DNA, 15 bp, Homo sapiens
tcgcttaagaaaaag

SEQ ID NO: 1385688 - DNA, 15 bp, Homo sapiens
atcgcttaagaaaaa

SEQ ID NO: 1385689 - DNA, 15 bp, Homo sapiens
tatcgcttaagaaaa

SEQ ID NO: 1385690 - DNA, 15 bp, Homo sapiens
ttatcgcttaagaaa

SEQ ID NO: 1385691 - DNA, 15 bp, Homo sapiens
attatcgcttaagaa

SEQ ID NO: 1385692 - DNA, 15 bp, Homo sapiens
gattatcgcttaaga

SEQ ID NO: 1385693 - DNA, 15 bp, Homo sapiens
tgattatcgcttaag

SEQ ID NO: 1385694 - DNA, 15 bp, Homo sapiens
gtgattatcgcttaa

SEQ ID NO: 1385695 - DNA, 15 bp, Homo sapiens
agtgattatcgctta

SEQ ID NO: 1385696 - DNA, 15 bp, Homo sapiens
aagtgattatcgctt

SEQ ID NO: 1385697 - DNA, 15 bp, Homo sapiens
taagtgattatcgct

SEQ ID NO: 1385698 - DNA, 15 bp, Homo sapiens
ataagtgattatcgc

SEQ ID NO: 1385699 - DNA, 15 bp, Homo sapiens
gataagtgattatcg

SEQ ID NO: 1385700 - DNA, 15 bp, Homo sapiens
ggataagtgattatc

SEQ ID NO: 1385701 - DNA, 15 bp, Homo sapiens
aggataagtgattat

SEQ ID NO: 1385702 - DNA, 15 bp, Homo sapiens
gaggataagtgatta

SEQ ID NO: 1385703 - DNA, 15 bp, Homo sapiens
tgaggataagtgatt

SEQ ID NO: 1385704 - DNA, 15 bp, Homo sapiens
ctgaggataagtgat

SEQ ID NO: 1385705 - DNA, 15 bp, Homo sapiens
tctgaggataagtga

SEQ ID NO: 1385706 - DNA, 15 bp, Homo sapiens
atctgaggataagtg

SEQ ID NO: 1385707 - DNA, 15 bp, Homo sapiens
tatctgaggataagt

SEQ ID NO: 1385708 - DNA, 15 bp, Homo sapiens
atatctgaggataag

SEQ ID NO: 1385709 - DNA, 15 bp, Homo sapiens
tatatctgaggataa

SEQ ID NO: 1385710 - DNA, 15 bp, Homo sapiens
gtatatctgaggata

SEQ ID NO: 1385711 - DNA, 15 bp, Homo sapiens
agtatatctgaggat

SEQ ID NO: 1385712 - DNA, 15 bp, Homo sapiens
tagtatatctgagga

SEQ ID NO: 1385713 - DNA, 15 bp, Homo sapiens
atagtatatctgagg

SEQ ID NO: 1385714 - DNA, 15 bp, Homo sapiens
catagtatatctgag

SEQ ID NO: 1385715 - DNA, 15 bp, Homo sapiens
gcatagtatatctga

SEQ ID NO: 1385716 - DNA, 15 bp, Homo sapiens
tgcatagtatatctg

SEQ ID NO: 1385717 - DNA, 15 bp, Homo sapiens
ttgcatagtatatct

SEQ ID NO: 1385718 - DNA, 15 bp, Homo sapiens
tttgcatagtatatc

SEQ ID NO: 1385719 - DNA, 15 bp, Homo sapiens
ttttgcatagtatat

SEQ ID NO: 1385720 - DNA, 15 bp, Homo sapiens
gttttgcatagtata

SEQ ID NO: 1385721 - DNA, 15 bp, Homo sapiens
tgttttgcatagtat

SEQ ID NO: 1385722 - DNA, 15 bp, Homo sapiens
atgttttgcatagta

SEQ ID NO: 1385723 - DNA, 15 bp, Homo sapiens
catgttttgcatagt

SEQ ID NO: 1385724 - DNA, 15 bp, Homo sapiens
acatgttttgcatag

SEQ ID NO: 1385725 - DNA, 15 bp, Homo sapiens
gacatgttttgcata

SEQ ID NO: 1385726 - DNA, 15 bp, Homo sapiens
ggacatgttttgcat

SEQ ID NO: 1385727 - DNA, 15 bp, Homo sapiens
tggacatgttttgca

SEQ ID NO: 1385728 - DNA, 15 bp, Homo sapiens
atggacatgttttgc

SEQ ID NO: 1385729 - DNA, 15 bp, Homo sapiens
aatggacatgttttg

SEQ ID NO: 1385730 - DNA, 15 bp, Homo sapiens
aaatggacatgtttt

SEQ ID NO: 1385731 - DNA, 15 bp, Homo sapiens
gaaatggacatgttt

SEQ ID NO: 1385732 - DNA, 15 bp, Homo sapiens
tgaaatggacatgtt

SEQ ID NO: 1385733 - DNA, 15 bp, Homo sapiens
atgaaatggacatgt

SEQ ID NO: 1385734 - DNA, 15 bp, Homo sapiens
tatgaaatggacatg

SEQ ID NO: 1385735 - DNA, 15 bp, Homo sapiens
gtatgaaatggacat

SEQ ID NO: 1385736 - DNA, 15 bp, Homo sapiens
ggtatgaaatggaca

SEQ ID NO: 1385737 - DNA, 15 bp, Homo sapiens
tggtatgaaatggac

SEQ ID NO: 1385738 - DNA, 15 bp, Homo sapiens
ttggtatgaaatgga

SEQ ID NO: 1385739 - DNA, 15 bp, Homo sapiens
tttggtatgaaatgg

SEQ ID NO: 1385740 - DNA, 15 bp, Homo sapiens
atttggtatgaaatg

SEQ ID NO: 1385741 - DNA, 15 bp, Homo sapiens
tatttggtatgaaat

SEQ ID NO: 1385742 - DNA, 15 bp, Homo sapiens
ctatttggtatgaaa

SEQ ID NO: 1385743 - DNA, 15 bp, Homo sapiens
gctatttggtatgaa

SEQ ID NO: 1385744 - DNA, 15 bp, Homo sapiens
agctatttggtatga

SEQ ID NO: 1385745 - DNA, 15 bp, Homo sapiens
tagctatttggtatg

SEQ ID NO: 1385746 - DNA, 15 bp, Homo sapiens
gtagctatttggtat

SEQ ID NO: 1385747 - DNA, 15 bp, Homo sapiens
ggtagctatttggta

SEQ ID NO: 1385748 - DNA, 15 bp, Homo sapiens
gggtagctatttggt

SEQ ID NO: 1385749 - DNA, 15 bp, Homo sapiens
agggtagctatttgg

SEQ ID NO: 1385750 - DNA, 15 bp, Homo sapiens
aagggtagctatttg

SEQ ID NO: 1385751 - DNA, 15 bp, Homo sapiens
gaagggtagctattt

SEQ ID NO: 1385752 - DNA, 15 bp, Homo sapiens
agaagggtagctatt

SEQ ID NO: 1385753 - DNA, 15 bp, Homo sapiens
tagaagggtagctat

SEQ ID NO: 1385754 - DNA, 15 bp, Homo sapiens
ctagaagggtagcta

SEQ ID NO: 1385755 - DNA, 15 bp, Homo sapiens
tctagaagggtagct

SEQ ID NO: 1385756 - DNA, 15 bp, Homo sapiens
ctctagaagggtagc

SEQ ID NO: 1385757 - DNA, 15 bp, Homo sapiens
actctagaagggtag

SEQ ID NO: 1385758 - DNA, 15 bp, Homo sapiens
tactctagaagggta

SEQ ID NO: 1385759 - DNA, 15 bp, Homo sapiens
atactctagaagggt

SEQ ID NO: 1385760 - DNA, 15 bp, Homo sapiens
aatactctagaaggg

SEQ ID NO: 1385761 - DNA, 15 bp, Homo sapiens
aaatactctagaagg

SEQ ID NO: 1385762 - DNA, 15 bp, Homo sapiens
caaatactctagaag

SEQ ID NO: 1385763 - DNA, 15 bp, Homo sapiens
ccaaatactctagaa

SEQ ID NO: 1385764 - DNA, 15 bp, Homo sapiens
cccaaatactctaga

SEQ ID NO: 1385765 - DNA, 15 bp, Homo sapiens
tcccaaatactctag

SEQ ID NO: 1385766 - DNA, 15 bp, Homo sapiens
ttcccaaatactcta

SEQ ID NO: 1385767 - DNA, 15 bp, Homo sapiens
tttcccaaatactct

SEQ ID NO: 1385768 - DNA, 15 bp, Homo sapiens
gtttcccaaatactc

SEQ ID NO: 1385769 - DNA, 15 bp, Homo sapiens
tgtttcccaaatact

SEQ ID NO: 1385770 - DNA, 15 bp, Homo sapiens
atgtttcccaaatac

SEQ ID NO: 1385771 - DNA, 15 bp, Homo sapiens
aatgtttcccaaata

SEQ ID NO: 1385772 - DNA, 15 bp, Homo sapiens
aaatgtttcccaaat

SEQ ID NO: 1385773 - DNA, 15 bp, Homo sapiens
aaaatgtttcccaaa

SEQ ID NO: 1385774 - DNA, 15 bp, Homo sapiens
caaaatgtttcccaa

SEQ ID NO: 1385775 - DNA, 15 bp, Homo sapiens
tcaaaatgtttccca

SEQ ID NO: 1385776 - DNA, 15 bp, Homo sapiens
atcaaaatgtttccc

SEQ ID NO: 1385777 - DNA, 15 bp, Homo sapiens
tatcaaaatgtttcc

SEQ ID NO: 1385778 - DNA, 15 bp, Homo sapiens
atatcaaaatgtttc

SEQ ID NO: 1385779 - DNA, 15 bp, Homo sapiens
tatatcaaaatgttt

SEQ ID NO: 1385780 - DNA, 15 bp, Homo sapiens
ttatatcaaaatgtt

SEQ ID NO: 1385781 - DNA, 15 bp, Homo sapiens
attatatcaaaatgt

SEQ ID NO: 1385782 - DNA, 15 bp, Homo sapiens
cattatatcaaaatg

SEQ ID NO: 1385783 - DNA, 15 bp, Homo sapiens
tcattatatcaaaat

SEQ ID NO: 1385784 - DNA, 15 bp, Homo sapiens
ttcattatatcaaaa

SEQ ID NO: 1385785 - DNA, 15 bp, Homo sapiens
attcattatatcaaa

SEQ ID NO: 1385786 - DNA, 15 bp, Homo sapiens
tattcattatatcaa

SEQ ID NO: 1385787 - DNA, 15 bp, Homo sapiens
atattcattatatca

SEQ ID NO: 1385788 - DNA, 15 bp, Homo sapiens
catattcattatatc

SEQ ID NO: 1385789 - DNA, 15 bp, Homo sapiens
ccatattcattatat

SEQ ID NO: 1385790 - DNA, 15 bp, Homo sapiens
gccatattcattata

SEQ ID NO: 1385791 - DNA, 15 bp, Homo sapiens
agccatattcattat

SEQ ID NO: 1385792 - DNA, 15 bp, Homo sapiens
gagccatattcatta

SEQ ID NO: 1385793 - DNA, 15 bp, Homo sapiens
agagccatattcatt

SEQ ID NO: 1385794 - DNA, 15 bp, Homo sapiens
aagagccatattcat

SEQ ID NO: 1385795 - DNA, 15 bp, Homo sapiens
caagagccatattca

SEQ ID NO: 1385796 - DNA, 15 bp, Homo sapiens
acaagagccatattc

SEQ ID NO: 1385797 - DNA, 15 bp, Homo sapiens
gacaagagccatatt

SEQ ID NO: 1385798 - DNA, 15 bp, Homo sapiens
tgacaagagccatat

SEQ ID NO: 1385799 - DNA, 15 bp, Homo sapiens
ttgacaagagccata

SEQ ID NO: 1385800 - DNA, 15 bp, Homo sapiens
tttgacaagagccat

SEQ ID NO: 1385801 - DNA, 15 bp, Homo sapiens
gtttgacaagagcca

SEQ ID NO: 1385802 - DNA, 15 bp, Homo sapiens
tgtttgacaagagcc

SEQ ID NO: 1385803 - DNA, 15 bp, Homo sapiens
atgtttgacaagagc

SEQ ID NO: 1385804 - DNA, 15 bp, Homo sapiens
catgtttgacaagag

SEQ ID NO: 1385805 - DNA, 15 bp, Homo sapiens
acatgtttgacaaga

SEQ ID NO: 1385806 - DNA, 15 bp, Homo sapiens
aacatgtttgacaag

SEQ ID NO: 1385807 - DNA, 15 bp, Homo sapiens
taacatgtttgacaa

SEQ ID NO: 1385808 - DNA, 15 bp, Homo sapiens
ataacatgtttgaca

SEQ ID NO: 1385809 - DNA, 15 bp, Homo sapiens
aataacatgtttgac

SEQ ID NO: 1385810 - DNA, 15 bp, Homo sapiens
gaataacatgtttga

SEQ ID NO: 1385811 - DNA, 15 bp, Homo sapiens
agaataacatgtttg

SEQ ID NO: 1385812 - DNA, 15 bp, Homo sapiens
gagaataacatgttt

SEQ ID NO: 1385813 - DNA, 15 bp, Homo sapiens
agagaataacatgtt

SEQ ID NO: 1385814 - DNA, 15 bp, Homo sapiens
tagagaataacatgt

SEQ ID NO: 1385815 - DNA, 15 bp, Homo sapiens
atagagaataacatg

SEQ ID NO: 1385816 - DNA, 15 bp, Homo sapiens
gatagagaataacat

SEQ ID NO: 1385817 - DNA, 15 bp, Homo sapiens
agatagagaataaca

SEQ ID NO: 1385818 - DNA, 15 bp, Homo sapiens
tagatagagaataac

SEQ ID NO: 1385819 - DNA, 15 bp, Homo sapiens
ttagatagagaataa

SEQ ID NO: 1385820 - DNA, 15 bp, Homo sapiens
tttagatagagaata

SEQ ID NO: 1385821 - DNA, 15 bp, Homo sapiens
atttagatagagaat

SEQ ID NO: 1385822 - DNA, 15 bp, Homo sapiens
catttagatagagaa

SEQ ID NO: 1385823 - DNA, 15 bp, Homo sapiens
gcatttagatagaga

SEQ ID NO: 1385824 - DNA, 15 bp, Homo sapiens
tgcatttagatagag

SEQ ID NO: 1385825 - DNA, 15 bp, Homo sapiens
ttgcatttagataga

SEQ ID NO: 1385826 - DNA, 15 bp, Homo sapiens
tttgcatttagatag

SEQ ID NO: 1385827 - DNA, 15 bp, Homo sapiens
atttgcatttagata

SEQ ID NO: 1385828 - DNA, 15 bp, Homo sapiens
aatttgcatttagat

SEQ ID NO: 1385829 - DNA, 15 bp, Homo sapiens
gaatttgcatttaga

SEQ ID NO: 1385830 - DNA, 15 bp, Homo sapiens
tgaatttgcatttag

SEQ ID NO: 1385831 - DNA, 15 bp, Homo sapiens
atgaatttgcattta

SEQ ID NO: 1385832 - DNA, 15 bp, Homo sapiens
aatgaatttgcattt

SEQ ID NO: 1385833 - DNA, 15 bp, Homo sapiens
aaatgaatttgcatt

SEQ ID NO: 1385834 - DNA, 15 bp, Homo sapiens
taaatgaatttgcat

SEQ ID NO: 1385835 - DNA, 15 bp, Homo sapiens
gtaaatgaatttgca

SEQ ID NO: 1385836 - DNA, 15 bp, Homo sapiens
tgtaaatgaatttgc

SEQ ID NO: 1385837 - DNA, 15 bp, Homo sapiens
ttgtaaatgaatttg

SEQ ID NO: 1385838 - DNA, 15 bp, Homo sapiens
tttgtaaatgaattt

SEQ ID NO: 1385839 - DNA, 15 bp, Homo sapiens
atttgtaaatgaatt

SEQ ID NO: 1385840 - DNA, 15 bp, Homo sapiens
catttgtaaatgaat

SEQ ID NO: 1385841 - DNA, 15 bp, Homo sapiens
tcatttgtaaatgaa

SEQ ID NO: 1385842 - DNA, 15 bp, Homo sapiens
gtcatttgtaaatga

SEQ ID NO: 1385843 - DNA, 15 bp, Homo sapiens
tgtcatttgtaaatg

SEQ ID NO: 1385844 - DNA, 15 bp, Homo sapiens
ttgtcatttgtaaat

SEQ ID NO: 1385845 - DNA, 15 bp, Homo sapiens
cttgtcatttgtaaa

SEQ ID NO: 1385846 - DNA, 15 bp, Homo sapiens
gcttgtcatttgtaa

SEQ ID NO: 1385847 - DNA, 15 bp, Homo sapiens
tgcttgtcatttgta

SEQ ID NO: 1385848 - DNA, 15 bp, Homo sapiens
ttgcttgtcatttgt

SEQ ID NO: 1385849 - DNA, 15 bp, Homo sapiens
attgcttgtcatttg

SEQ ID NO: 1385850 - DNA, 15 bp, Homo sapiens
tattgcttgtcattt

SEQ ID NO: 1385851 - DNA, 15 bp, Homo sapiens
ttattgcttgtcatt

SEQ ID NO: 1385852 - DNA, 15 bp, Homo sapiens
tttattgcttgtcat

SEQ ID NO: 1385853 - DNA, 15 bp, Homo sapiens
ctttattgcttgtca

SEQ ID NO: 1385854 - DNA, 15 bp, Homo sapiens
tctttattgcttgtc

SEQ ID NO: 1385855 - DNA, 15 bp, Homo sapiens
ttctttattgcttgt

SEQ ID NO: 1385856 - DNA, 15 bp, Homo sapiens
aattttctttattgc

SEQ ID NO: 1385857 - DNA, 15 bp, Homo sapiens
taattttctttattg

SEQ ID NO: 1385858 - DNA, 15 bp, Homo sapiens
ctaattttctttatt

SEQ ID NO: 1385859 - DNA, 15 bp, Homo sapiens
tctaattttctttat

SEQ ID NO: 1385860 - DNA, 15 bp, Homo sapiens
ttctaattttcttta

SEQ ID NO: 1385861 - DNA, 15 bp, Homo sapiens
attctaattttcttt

SEQ ID NO: 1385862 - DNA, 15 bp, Homo sapiens
gattctaattttctt

SEQ ID NO: 1385863 - DNA, 15 bp, Homo sapiens
tgattctaattttct

SEQ ID NO: 1385864 - DNA, 15 bp, Homo sapiens
atgattctaattttc

SEQ ID NO: 1385865 - DNA, 15 bp, Homo sapiens
aatgattctaatttt

SEQ ID NO: 1385866 - DNA, 15 bp, Homo sapiens
aaatgattctaattt

SEQ ID NO: 1385867 - DNA, 15 bp, Homo sapiens
aaaatgattctaatt

SEQ ID NO: 1385868 - DNA, 15 bp, Homo sapiens
caaaatgattctaat

SEQ ID NO: 1385869 - DNA, 15 bp, Homo sapiens
gcaaaatgattctaa

SEQ ID NO: 1385870 - DNA, 15 bp, Homo sapiens
agcaaaatgattcta

SEQ ID NO: 1385871 - DNA, 15 bp, Homo sapiens
aagcaaaatgattct

SEQ ID NO: 1385872 - DNA, 15 bp, Homo sapiens
caagcaaaatgattc

SEQ ID NO: 1385873 - DNA, 15 bp, Homo sapiens
tcaagcaaaatgatt

SEQ ID NO: 1385874 - DNA, 15 bp, Homo sapiens
ctcaagcaaaatgat

SEQ ID NO: 1385875 - DNA, 15 bp, Homo sapiens
actcaagcaaaatga

SEQ ID NO: 1385876 - DNA, 15 bp, Homo sapiens
aactcaagcaaaatg

SEQ ID NO: 1385877 - DNA, 15 bp, Homo sapiens
aaactcaagcaaaat

SEQ ID NO: 1385878 - DNA, 15 bp, Homo sapiens
aaaactcaagcaaaa

SEQ ID NO: 1385879 - DNA, 15 bp, Homo sapiens
caaaactcaagcaaa

SEQ ID NO: 1385880 - DNA, 15 bp, Homo sapiens
tcaaaactcaagcaa

SEQ ID NO: 1385881 - DNA, 15 bp, Homo sapiens
gtcaaaactcaagca

SEQ ID NO: 1385882 - DNA, 15 bp, Homo sapiens
tgtcaaaactcaagc

SEQ ID NO: 1385883 - DNA, 15 bp, Homo sapiens
gtgtcaaaactcaag

SEQ ID NO: 1385884 - DNA, 15 bp, Homo sapiens
tgtgtcaaaactcaa

SEQ ID NO: 1385885 - DNA, 15 bp, Homo sapiens
ctgtgtcaaaactca

SEQ ID NO: 1385886 - DNA, 15 bp, Homo sapiens
cctgtgtcaaaactc

SEQ ID NO: 1385887 - DNA, 15 bp, Homo sapiens
tcctgtgtcaaaact

SEQ ID NO: 1385888 - DNA, 15 bp, Homo sapiens
ttcctgtgtcaaaac

SEQ ID NO: 1385889 - DNA, 15 bp, Homo sapiens
cttcctgtgtcaaaa

SEQ ID NO: 1385890 - DNA, 15 bp, Homo sapiens
acttcctgtgtcaaa

SEQ ID NO: 1385891 - DNA, 15 bp, Homo sapiens
gacttcctgtgtcaa

SEQ ID NO: 1385892 - DNA, 15 bp, Homo sapiens
tgacttcctgtgtca

SEQ ID NO: 1385893 - DNA, 15 bp, Homo sapiens
atgacttcctgtgtc

SEQ ID NO: 1385894 - DNA, 15 bp, Homo sapiens
gatgacttcctgtgt

SEQ ID NO: 1385895 - DNA, 15 bp, Homo sapiens
tgatgacttcctgtg

SEQ ID NO: 1385896 - DNA, 15 bp, Homo sapiens
ttgatgacttcctgt

SEQ ID NO: 1385897 - DNA, 15 bp, Homo sapiens
cttgatgacttcctg

SEQ ID NO: 1385898 - DNA, 15 bp, Homo sapiens
ccttgatgacttcct

SEQ ID NO: 1385899 - DNA, 15 bp, Homo sapiens
tccttgatgacttcc

SEQ ID NO: 1385900 - DNA, 15 bp, Homo sapiens
gtccttgatgacttc

SEQ ID NO: 1385901 - DNA, 15 bp, Homo sapiens
tgtccttgatgactt

SEQ ID NO: 1385902 - DNA, 15 bp, Homo sapiens
ttgtccttgatgact

SEQ ID NO: 1385903 - DNA, 15 bp, Homo sapiens
gttgtccttgatgac

SEQ ID NO: 1385904 - DNA, 15 bp, Homo sapiens
agttgtccttgatga

SEQ ID NO: 1385905 - DNA, 15 bp, Homo sapiens
gagttgtccttgatg

SEQ ID NO: 1385906 - DNA, 15 bp, Homo sapiens
tgagttgtccttgat

SEQ ID NO: 1385907 - DNA, 15 bp, Homo sapiens
ctgagttgtccttga

SEQ ID NO: 1385908 - DNA, 15 bp, Homo sapiens
cctgagttgtccttg

SEQ ID NO: 1385909 - DNA, 15 bp, Homo sapiens
ccctgagttgtcctt

SEQ ID NO: 1385910 - DNA, 15 bp, Homo sapiens
tccctgagttgtcct

SEQ ID NO: 1385911 - DNA, 15 bp, Homo sapiens
gtccctgagttgtcc

SEQ ID NO: 1385912 - DNA, 15 bp, Homo sapiens
agtccctgagttgtc

SEQ ID NO: 1385913 - DNA, 15 bp, Homo sapiens
aagtccctgagttgt

SEQ ID NO: 1385914 - DNA, 15 bp, Homo sapiens
aaagtccctgagttg

SEQ ID NO: 1385915 - DNA, 15 bp, Homo sapiens
gaaagtccctgagtt

SEQ ID NO: 1385916 - DNA, 15 bp, Homo sapiens
agaaagtccctgagt

SEQ ID NO: 1385917 - DNA, 15 bp, Homo sapiens
gagaaagtccctgag

SEQ ID NO: 1385918 - DNA, 15 bp, Homo sapiens
ggagaaagtccctga

SEQ ID NO: 1385919 - DNA, 15 bp, Homo sapiens
aggagaaagtccctg

SEQ ID NO: 1385920 - DNA, 15 bp, Homo sapiens
gaggagaaagtccct

SEQ ID NO: 1385921 - DNA, 15 bp, Homo sapiens
agaggagaaagtccc

SEQ ID NO: 1385922 - DNA, 15 bp, Homo sapiens
cagaggagaaagtcc

SEQ ID NO: 1385923 - DNA, 15 bp, Homo sapiens
ccagaggagaaagtc

SEQ ID NO: 1385924 - DNA, 15 bp, Homo sapiens
cccagaggagaaagt

SEQ ID NO: 1385925 - DNA, 15 bp, Homo sapiens
ccccagaggagaaag

SEQ ID NO: 1385926 - DNA, 15 bp, Homo sapiens
gccccagaggagaaa

SEQ ID NO: 1385927 - DNA, 15 bp, Homo sapiens
agccccagaggagaa

SEQ ID NO: 1385928 - DNA, 15 bp, Homo sapiens
gagccccagaggaga

SEQ ID NO: 1385929 - DNA, 15 bp, Homo sapiens
ggagccccagaggag

SEQ ID NO: 1385930 - DNA, 15 bp, Homo sapiens
gggagccccagagga

SEQ ID NO: 1385931 - DNA, 15 bp, Homo sapiens
tgggagccccagagg

SEQ ID NO: 1385932 - DNA, 15 bp, Homo sapiens
ttgggagccccagag

SEQ ID NO: 1385933 - DNA, 15 bp, Homo sapiens
cttgggagccccaga

SEQ ID NO: 1385934 - DNA, 15 bp, Homo sapiens
tcttgggagccccag

SEQ ID NO: 1385935 - DNA, 15 bp, Homo sapiens
ttcttgggagcccca

SEQ ID NO: 1385936 - DNA, 15 bp, Homo sapiens
gttcttgggagcccc

SEQ ID NO: 1385937 - DNA, 15 bp, Homo sapiens
tgttcttgggagccc

SEQ ID NO: 1385938 - DNA, 15 bp, Homo sapiens
ttgttcttgggagcc

SEQ ID NO: 1385939 - DNA, 15 bp, Homo sapiens
tttgttcttgggagc

SEQ ID NO: 1385940 - DNA, 15 bp, Homo sapiens
ttttgttcttgggag

SEQ ID NO: 1385941 - DNA, 15 bp, Homo sapiens
cttttgttcttggga

SEQ ID NO: 1385942 - DNA, 15 bp, Homo sapiens
gcttttgttcttggg

SEQ ID NO: 1385943 - DNA, 15 bp, Homo sapiens
agcttttgttcttgg

SEQ ID NO: 1385944 - DNA, 15 bp, Homo sapiens
tagcttttgttcttg

SEQ ID NO: 1385945 - DNA, 15 bp, Homo sapiens
ttagcttttgttctt

SEQ ID NO: 1385946 - DNA, 15 bp, Homo sapiens
tttagcttttgttct

SEQ ID NO: 1385947 - DNA, 15 bp, Homo sapiens
gtttagcttttgttc

SEQ ID NO: 1385948 - DNA, 15 bp, Homo sapiens
agtttagcttttgtt

SEQ ID NO: 1385949 - DNA, 15 bp, Homo sapiens
cagtttagcttttgt

SEQ ID NO: 1385950 - DNA, 15 bp, Homo sapiens
gcagtttagcttttg

SEQ ID NO: 1385951 - DNA, 15 bp, Homo sapiens
tgcagtttagctttt

SEQ ID NO: 1385952 - DNA, 15 bp, Homo sapiens
ctgcagtttagcttt

SEQ ID NO: 1385953 - DNA, 15 bp, Homo sapiens
gctgcagtttagctt

SEQ ID NO: 1385954 - DNA, 15 bp, Homo sapiens
tgctgcagtttagct

SEQ ID NO: 1385955 - DNA, 15 bp, Homo sapiens
gtgctgcagtttagc

SEQ ID NO: 1385956 - DNA, 15 bp, Homo sapiens
agtgctgcagtttag

SEQ ID NO: 1385957 - DNA, 15 bp, Homo sapiens
gagtgctgcagttta

SEQ ID NO: 1385958 - DNA, 15 bp, Homo sapiens
agagtgctgcagttt

SEQ ID NO: 1385959 - DNA, 15 bp, Homo sapiens
gagagtgctgcagtt

SEQ ID NO: 1385960 - DNA, 15 bp, Homo sapiens
agagagtgctgcagt

SEQ ID NO: 1385961 - DNA, 15 bp, Homo sapiens
tagagagtgctgcag

SEQ ID NO: 1385962 - DNA, 15 bp, Homo sapiens
atagagagtgctgca

SEQ ID NO: 1385963 - DNA, 15 bp, Homo sapiens
catagagagtgctgc

SEQ ID NO: 1385964 - DNA, 15 bp, Homo sapiens
acatagagagtgctg

SEQ ID NO: 1385965 - DNA, 15 bp, Homo sapiens
tacatagagagtgct

SEQ ID NO: 1385966 - DNA, 15 bp, Homo sapiens
atacatagagagtgc

SEQ ID NO: 1385967 - DNA, 15 bp, Homo sapiens
gatacatagagagtg

SEQ ID NO: 1385968 - DNA, 15 bp, Homo sapiens
agatacatagagagt

SEQ ID NO: 1385969 - DNA, 15 bp, Homo sapiens
gagatacatagagag

SEQ ID NO: 1385970 - DNA, 15 bp, Homo sapiens
cgagatacatagaga

SEQ ID NO: 1385971 - DNA, 15 bp, Homo sapiens
tcgagatacatagag

SEQ ID NO: 1385972 - DNA, 15 bp, Homo sapiens
ctcgagatacataga

SEQ ID NO: 1385973 - DNA, 15 bp, Homo sapiens
cctcgagatacatag

SEQ ID NO: 1385974 - DNA, 15 bp, Homo sapiens
ccctcgagatacata

SEQ ID NO: 1385975 - DNA, 15 bp, Homo sapiens
tccctcgagatacat

SEQ ID NO: 1385976 - DNA, 15 bp, Homo sapiens
ctccctcgagataca

SEQ ID NO: 1385977 - DNA, 15 bp, Homo sapiens
tctccctcgagatac

SEQ ID NO: 1385978 - DNA, 15 bp, Homo sapiens
atctccctcgagata

SEQ ID NO: 1385979 - DNA, 15 bp, Homo sapiens
aatctccctcgagat

SEQ ID NO: 1385980 - DNA, 15 bp, Homo sapiens
taatctccctcgaga

SEQ ID NO: 1385981 - DNA, 15 bp, Homo sapiens
gtaatctccctcgag

SEQ ID NO: 1385982 - DNA, 15 bp, Homo sapiens
ggtaatctccctcga

SEQ ID NO: 1385983 - DNA, 15 bp, Homo sapiens
aggtaatctccctcg

SEQ ID NO: 1385984 - DNA, 15 bp, Homo sapiens
caggtaatctccctc

SEQ ID NO: 1385985 - DNA, 15 bp, Homo sapiens
gcaggtaatctccct

SEQ ID NO: 1385986 - DNA, 15 bp, Homo sapiens
ggcaggtaatctccc

SEQ ID NO: 1385987 - DNA, 15 bp, Homo sapiens
aggcaggtaatctcc

SEQ ID NO: 1385988 - DNA, 15 bp, Homo sapiens
gaggcaggtaatctc

SEQ ID NO: 1385989 - DNA, 15 bp, Homo sapiens
ggaggcaggtaatct

SEQ ID NO: 1385990 - DNA, 15 bp, Homo sapiens
tggaggcaggtaatc

SEQ ID NO: 1385991 - DNA, 15 bp, Homo sapiens
ctggaggcaggtaat

SEQ ID NO: 1385992 - DNA, 15 bp, Homo sapiens
tctggaggcaggtaa

SEQ ID NO: 1385993 - DNA, 15 bp, Homo sapiens
gtctggaggcaggta

SEQ ID NO: 1385994 - DNA, 15 bp, Homo sapiens
agtctggaggcaggt

SEQ ID NO: 1385995 - DNA, 15 bp, Homo sapiens
cagtctggaggcagg

SEQ ID NO: 1385996 - DNA, 15 bp, Homo sapiens
ccagtctggaggcag

SEQ ID NO: 1385997 - DNA, 15 bp, Homo sapiens
accagtctggaggca

SEQ ID NO: 1385998 - DNA, 15 bp, Homo sapiens
aaccagtctggaggc

SEQ ID NO: 1385999 - DNA, 15 bp, Homo sapiens
aaaccagtctggagg

SEQ ID NO: 1386000 - DNA, 15 bp, Homo sapiens
taaaccagtctggag

SEQ ID NO: 1386001 - DNA, 15 bp, Homo sapiens
ttaaaccagtctgga

SEQ ID NO: 1386002 - DNA, 15 bp, Homo sapiens
cttaaaccagtctgg

SEQ ID NO: 1386003 - DNA, 15 bp, Homo sapiens
acttaaaccagtctg

SEQ ID NO: 1386004 - DNA, 15 bp, Homo sapiens
gacttaaaccagtct

SEQ ID NO: 1386005 - DNA, 15 bp, Homo sapiens
tgacttaaaccagtc

SEQ ID NO: 1386006 - DNA, 15 bp, Homo sapiens
ttgacttaaaccagt

SEQ ID NO: 1386007 - DNA, 15 bp, Homo sapiens
attgacttaaaccag

SEQ ID NO: 1386008 - DNA, 15 bp, Homo sapiens
cattgacttaaacca

SEQ ID NO: 1386009 - DNA, 15 bp, Homo sapiens
ccattgacttaaacc

SEQ ID NO: 1386010 - DNA, 15 bp, Homo sapiens
tccattgacttaaac

SEQ ID NO: 1386011 - DNA, 15 bp, Homo sapiens
atccattgacttaaa

SEQ ID NO: 1386012 - DNA, 15 bp, Homo sapiens
gatccattgacttaa

SEQ ID NO: 1386013 - DNA, 15 bp, Homo sapiens
ggatccattgactta

SEQ ID NO: 1386014 - DNA, 15 bp, Homo sapiens
aggatccattgactt

SEQ ID NO: 1386015 - DNA, 15 bp, Homo sapiens
caggatccattgact

SEQ ID NO: 1386016 - DNA, 15 bp, Homo sapiens
gcaggatccattgac

SEQ ID NO: 1386017 - DNA, 15 bp, Homo sapiens
agcaggatccattga

SEQ ID NO: 1386018 - DNA, 15 bp, Homo sapiens
aagcaggatccattg

SEQ ID NO: 1386019 - DNA, 15 bp, Homo sapiens
aaagcaggatccatt

SEQ ID NO: 1386020 - DNA, 15 bp, Homo sapiens
gaaagcaggatccat

SEQ ID NO: 1386021 - DNA, 15 bp, Homo sapiens
tgaaagcaggatcca

SEQ ID NO: 1386022 - DNA, 15 bp, Homo sapiens
atgaaagcaggatcc

SEQ ID NO: 1386023 - DNA, 15 bp, Homo sapiens
aatgaaagcaggatc

SEQ ID NO: 1386024 - DNA, 15 bp, Homo sapiens
aaatgaaagcaggat

SEQ ID NO: 1386025 - DNA, 15 bp, Homo sapiens
taaatgaaagcagga

SEQ ID NO: 1386026 - DNA, 15 bp, Homo sapiens
ataaatgaaagcagg

SEQ ID NO: 1386027 - DNA, 15 bp, Homo sapiens
tataaatgaaagcag

SEQ ID NO: 1386028 - DNA, 15 bp, Homo sapiens
ttataaatgaaagca

SEQ ID NO: 1386029 - DNA, 15 bp, Homo sapiens
attataaatgaaagc

SEQ ID NO: 1386030 - DNA, 15 bp, Homo sapiens
aattataaatgaaag

SEQ ID NO: 1386031 - DNA, 15 bp, Homo sapiens
aaattataaatgaaa

SEQ ID NO: 1386032 - DNA, 15 bp, Homo sapiens
aaaattataaatgaa

SEQ ID NO: 1386033 - DNA, 15 bp, Homo sapiens
gaaaattataaatga

SEQ ID NO: 1386034 - DNA, 15 bp, Homo sapiens
tgaaaattataaatg

SEQ ID NO: 1386035 - DNA, 15 bp, Homo sapiens
ctgaaaattataaat

SEQ ID NO: 1386036 - DNA, 15 bp, Homo sapiens
tctgaaaattataaa

SEQ ID NO: 1386037 - DNA, 15 bp, Homo sapiens
ctctgaaaattataa

SEQ ID NO: 1386038 - DNA, 15 bp, Homo sapiens
cctctgaaaattata

SEQ ID NO: 1386039 - DNA, 15 bp, Homo sapiens
acctctgaaaattat

SEQ ID NO: 1386040 - DNA, 15 bp, Homo sapiens
tacctctgaaaatta

SEQ ID NO: 1386041 - DNA, 15 bp, Homo sapiens
atacctctgaaaatt

SEQ ID NO: 1386042 - DNA, 15 bp, Homo sapiens
gatacctctgaaaat

SEQ ID NO: 1386043 - DNA, 15 bp, Homo sapiens
ggatacctctgaaaa

SEQ ID NO: 1386044 - DNA, 15 bp, Homo sapiens
tggatacctctgaaa

SEQ ID NO: 1386045 - DNA, 15 bp, Homo sapiens
ctggatacctctgaa

SEQ ID NO: 1386046 - DNA, 15 bp, Homo sapiens
actggatacctctga

SEQ ID NO: 1386047 - DNA, 15 bp, Homo sapiens
tactggatacctctg

SEQ ID NO: 1386048 - DNA, 15 bp, Homo sapiens
ttactggatacctct

SEQ ID NO: 1386049 - DNA, 15 bp, Homo sapiens
gttactggatacctc

SEQ ID NO: 1386050 - DNA, 15 bp, Homo sapiens
agttactggatacct

SEQ ID NO: 1386051 - DNA, 15 bp, Homo sapiens
cagttactggatacc

SEQ ID NO: 1386052 - DNA, 15 bp, Homo sapiens
tcagttactggatac

SEQ ID NO: 1386053 - DNA, 15 bp, Homo sapiens
atcagttactggata

SEQ ID NO: 1386054 - DNA, 15 bp, Homo sapiens
catcagttactggat

SEQ ID NO: 1386055 - DNA, 15 bp, Homo sapiens
gcatcagttactgga

SEQ ID NO: 1386056 - DNA, 15 bp, Homo sapiens
agcatcagttactgg

SEQ ID NO: 1386057 - DNA, 15 bp, Homo sapiens
aagcatcagttactg

SEQ ID NO: 1386058 - DNA, 15 bp, Homo sapiens
gaagcatcagttact

SEQ ID NO: 1386059 - DNA, 15 bp, Homo sapiens
agaagcatcagttac

SEQ ID NO: 1386060 - DNA, 15 bp, Homo sapiens
gagaagcatcagtta

SEQ ID NO: 1386061 - DNA, 15 bp, Homo sapiens
ggagaagcatcagtt

SEQ ID NO: 1386062 - DNA, 15 bp, Homo sapiens
gggagaagcatcagt

SEQ ID NO: 1386063 - DNA, 15 bp, Homo sapiens
ggggagaagcatcag

SEQ ID NO: 1386064 - DNA, 15 bp, Homo sapiens
tggggagaagcatca

SEQ ID NO: 1386065 - DNA, 15 bp, Homo sapiens
ctggggagaagcatc

SEQ ID NO: 1386066 - DNA, 15 bp, Homo sapiens
cctggggagaagcat

SEQ ID NO: 1386067 - DNA, 15 bp, Homo sapiens
ccctggggagaagca

SEQ ID NO: 1386068 - DNA, 15 bp, Homo sapiens
accctggggagaagc

SEQ ID NO: 1386069 - DNA, 15 bp, Homo sapiens
aaccctggggagaag

SEQ ID NO: 1386070 - DNA, 15 bp, Homo sapiens
gaaccctggggagaa

SEQ ID NO: 1386071 - DNA, 15 bp, Homo sapiens
ggaaccctggggaga

SEQ ID NO: 1386072 - DNA, 15 bp, Homo sapiens
tggaaccctggggag

SEQ ID NO: 1386073 - DNA, 15 bp, Homo sapiens
atggaaccctgggga

SEQ ID NO: 1386074 - DNA, 15 bp, Homo sapiens
gatggaaccctgggg

SEQ ID NO: 1386075 - DNA, 15 bp, Homo sapiens
agatggaaccctggg

SEQ ID NO: 1386076 - DNA, 15 bp, Homo sapiens
aagatggaaccctgg

SEQ ID NO: 1386077 - DNA, 15 bp, Homo sapiens
taagatggaaccctg

SEQ ID NO: 1386078 - DNA, 15 bp, Homo sapiens
ttaagatggaaccct

SEQ ID NO: 1386079 - DNA, 15 bp, Homo sapiens
cttaagatggaaccc

SEQ ID NO: 1386080 - DNA, 15 bp, Homo sapiens
gcttaagatggaacc

SEQ ID NO: 1386081 - DNA, 15 bp, Homo sapiens
tgcttaagatggaac

SEQ ID NO: 1386082 - DNA, 15 bp, Homo sapiens
gtgcttaagatggaa

SEQ ID NO: 1386083 - DNA, 15 bp, Homo sapiens
ggtgcttaagatgga

SEQ ID NO: 1386084 - DNA, 15 bp, Homo sapiens
gggtgcttaagatgg

SEQ ID NO: 1386085 - DNA, 15 bp, Homo sapiens
ggggtgcttaagatg

SEQ ID NO: 1386086 - DNA, 15 bp, Homo sapiens
aggggtgcttaagat

SEQ ID NO: 1386087 - DNA, 15 bp, Homo sapiens
aaggggtgcttaaga

SEQ ID NO: 1386088 - DNA, 15 bp, Homo sapiens
gaaggggtgcttaag

SEQ ID NO: 1386089 - DNA, 15 bp, Homo sapiens
ggaaggggtgcttaa

SEQ ID NO: 1386090 - DNA, 15 bp, Homo sapiens
gggaaggggtgctta

SEQ ID NO: 1386091 - DNA, 15 bp, Homo sapiens
agggaaggggtgctt

SEQ ID NO: 1386092 - DNA, 15 bp, Homo sapiens
aagggaaggggtgct

SEQ ID NO: 1386093 - DNA, 15 bp, Homo sapiens
gaagggaaggggtgc

SEQ ID NO: 1386094 - DNA, 15 bp, Homo sapiens
agaagggaaggggtg

SEQ ID NO: 1386095 - DNA, 15 bp, Homo sapiens
gagaagggaaggggt

SEQ ID NO: 1386096 - DNA, 15 bp, Homo sapiens
tgagaagggaagggg

SEQ ID NO: 1386097 - DNA, 15 bp, Homo sapiens
gtgagaagggaaggg

SEQ ID NO: 1386098 - DNA, 15 bp, Homo sapiens
ggtgagaagggaagg

SEQ ID NO: 1386099 - DNA, 15 bp, Homo sapiens
gggtgagaagggaag

SEQ ID NO: 1386100 - DNA, 15 bp, Homo sapiens
agggtgagaagggaa

SEQ ID NO: 1386101 - DNA, 15 bp, Homo sapiens
cagggtgagaaggga

SEQ ID NO: 1386102 - DNA, 15 bp, Homo sapiens
gcagggtgagaaggg

SEQ ID NO: 1386103 - DNA, 15 bp, Homo sapiens
tgcagggtgagaagg

SEQ ID NO: 1386104 - DNA, 15 bp, Homo sapiens
ctgcagggtgagaag

SEQ ID NO: 1386105 - DNA, 15 bp, Homo sapiens
tctgcagggtgagaa

SEQ ID NO: 1386106 - DNA, 15 bp, Homo sapiens
ttctgcagggtgaga

SEQ ID NO: 1386107 - DNA, 15 bp, Homo sapiens
attctgcagggtgag

SEQ ID NO: 1386108 - DNA, 15 bp, Homo sapiens
aattctgcagggtga

SEQ ID NO: 1386109 - DNA, 15 bp, Homo sapiens
aaattctgcagggtg

SEQ ID NO: 1386110 - DNA, 15 bp, Homo sapiens
aaaattctgcagggt

SEQ ID NO: 1386111 - DNA, 15 bp, Homo sapiens
gaaaattctgcaggg

SEQ ID NO: 1386112 - DNA, 15 bp, Homo sapiens
agaaaattctgcagg

SEQ ID NO: 1386113 - DNA, 15 bp, Homo sapiens
aagaaaattctgcag

SEQ ID NO: 1386114 - DNA, 15 bp, Homo sapiens
taagaaaattctgca

SEQ ID NO: 1386115 - DNA, 15 bp, Homo sapiens
ttaagaaaattctgc

SEQ ID NO: 1386116 - DNA, 15 bp, Homo sapiens
tttaagaaaattctg

SEQ ID NO: 1386117 - DNA, 15 bp, Homo sapiens
ttttaagaaaattct

SEQ ID NO: 1386118 - DNA, 15 bp, Homo sapiens
tttttaagaaaattc

SEQ ID NO: 1386119 - DNA, 15 bp, Homo sapiens
atttttaagaaaatt

SEQ ID NO: 1386120 - DNA, 15 bp, Homo sapiens
aatttttaagaaaat

SEQ ID NO: 1386121 - DNA, 15 bp, Homo sapiens
gaatttttaagaaaa

SEQ ID NO: 1386122 - DNA, 15 bp, Homo sapiens
agaatttttaagaaa

SEQ ID NO: 1386123 - DNA, 15 bp, Homo sapiens
aagaatttttaagaa

SEQ ID NO: 1386124 - DNA, 15 bp, Homo sapiens
taagaatttttaaga

SEQ ID NO: 1386125 - DNA, 15 bp, Homo sapiens
ttaagaatttttaag

SEQ ID NO: 1386126 - DNA, 15 bp, Homo sapiens
gttaagaatttttaa

SEQ ID NO: 1386127 - DNA, 15 bp, Homo sapiens
tgttaagaattttta

SEQ ID NO: 1386128 - DNA, 15 bp, Homo sapiens
gtgttaagaattttt

SEQ ID NO: 1386129 - DNA, 15 bp, Homo sapiens
agtgttaagaatttt

SEQ ID NO: 1386130 - DNA, 15 bp, Homo sapiens
gagtgttaagaattt

SEQ ID NO: 1386131 - DNA, 15 bp, Homo sapiens
ggagtgttaagaatt

SEQ ID NO: 1386132 - DNA, 15 bp, Homo sapiens
cggagtgttaagaat

SEQ ID NO: 1386133 - DNA, 15 bp, Homo sapiens
tcggagtgttaagaa

SEQ ID NO: 1386134 - DNA, 15 bp, Homo sapiens
ttcggagtgttaaga

SEQ ID NO: 1386135 - DNA, 15 bp, Homo sapiens
cttcggagtgttaag

SEQ ID NO: 1386136 - DNA, 15 bp, Homo sapiens
acttcggagtgttaa

SEQ ID NO: 1386137 - DNA, 15 bp, Homo sapiens
gacttcggagtgtta

SEQ ID NO: 1386138 - DNA, 15 bp, Homo sapiens
agacttcggagtgtt

SEQ ID NO: 1386139 - DNA, 15 bp, Homo sapiens
cagacttcggagtgt

SEQ ID NO: 1386140 - DNA, 15 bp, Homo sapiens
acagacttcggagtg

SEQ ID NO: 1386141 - DNA, 15 bp, Homo sapiens
tacagacttcggagt

SEQ ID NO: 1386142 - DNA, 15 bp, Homo sapiens
atacagacttcggag

SEQ ID NO: 1386143 - DNA, 15 bp, Homo sapiens
gatacagacttcgga

SEQ ID NO: 1386144 - DNA, 15 bp, Homo sapiens
agatacagacttcgg

SEQ ID NO: 1386145 - DNA, 15 bp, Homo sapiens
tagatacagacttcg

SEQ ID NO: 1386146 - DNA, 15 bp, Homo sapiens
gtagatacagacttc

SEQ ID NO: 1386147 - DNA, 15 bp, Homo sapiens
tgtagatacagactt

SEQ ID NO: 1386148 - DNA, 15 bp, Homo sapiens
ttgtagatacagact

SEQ ID NO: 1386149 - DNA, 15 bp, Homo sapiens
gttgtagatacagac

SEQ ID NO: 1386150 - DNA, 15 bp, Homo sapiens
ggttgtagatacaga

SEQ ID NO: 1386151 - DNA, 15 bp, Homo sapiens
aggttgtagatacag

SEQ ID NO: 1386152 - DNA, 15 bp, Homo sapiens
caggttgtagataca

SEQ ID NO: 1386153 - DNA, 15 bp, Homo sapiens
ccaggttgtagatac

SEQ ID NO: 1386154 - DNA, 15 bp, Homo sapiens
tccaggttgtagata

SEQ ID NO: 1386155 - DNA, 15 bp, Homo sapiens
gtccaggttgtagat

SEQ ID NO: 1386156 - DNA, 15 bp, Homo sapiens
ggtccaggttgtaga

SEQ ID NO: 1386157 - DNA, 15 bp, Homo sapiens
aggtccaggttgtag

SEQ ID NO: 1386158 - DNA, 15 bp, Homo sapiens
aaggtccaggttgta

SEQ ID NO: 1386159 - DNA, 15 bp, Homo sapiens
aaaggtccaggttgt

SEQ ID NO: 1386160 - DNA, 15 bp, Homo sapiens
taaaggtccaggttg

SEQ ID NO: 1386161 - DNA, 15 bp, Homo sapiens
ataaaggtccaggtt

SEQ ID NO: 1386162 - DNA, 15 bp, Homo sapiens
aataaaggtccaggt

SEQ ID NO: 1386163 - DNA, 15 bp, Homo sapiens
gaataaaggtccagg

SEQ ID NO: 1386164 - DNA, 15 bp, Homo sapiens
agaataaaggtccag

SEQ ID NO: 1386165 - DNA, 15 bp, Homo sapiens
cagaataaaggtcca

SEQ ID NO: 1386166 - DNA, 15 bp, Homo sapiens
tcagaataaaggtcc

SEQ ID NO: 1386167 - DNA, 15 bp, Homo sapiens
ctcagaataaaggtc

SEQ ID NO: 1386168 - DNA, 15 bp, Homo sapiens
actcagaataaaggt

SEQ ID NO: 1386169 - DNA, 15 bp, Homo sapiens
gactcagaataaagg

SEQ ID NO: 1386170 - DNA, 15 bp, Homo sapiens
ggactcagaataaag

SEQ ID NO: 1386171 - DNA, 15 bp, Homo sapiens
aggactcagaataaa

SEQ ID NO: 1386172 - DNA, 15 bp, Homo sapiens
taggactcagaataa

SEQ ID NO: 1386173 - DNA, 15 bp, Homo sapiens
ctaggactcagaata

SEQ ID NO: 1386174 - DNA, 15 bp, Homo sapiens
gctaggactcagaat

SEQ ID NO: 1386175 - DNA, 15 bp, Homo sapiens
tgctaggactcagaa

SEQ ID NO: 1386176 - DNA, 15 bp, Homo sapiens
atgctaggactcaga

SEQ ID NO: 1386177 - DNA, 15 bp, Homo sapiens
catgctaggactcag

SEQ ID NO: 1386178 - DNA, 15 bp, Homo sapiens
acatgctaggactca

SEQ ID NO: 1386179 - DNA, 15 bp, Homo sapiens
cacatgctaggactc

SEQ ID NO: 1386180 - DNA, 15 bp, Homo sapiens
acacatgctaggact

SEQ ID NO: 1386181 - DNA, 15 bp, Homo sapiens
gacacatgctaggac

SEQ ID NO: 1386182 - DNA, 15 bp, Homo sapiens
tgacacatgctagga

SEQ ID NO: 1386183 - DNA, 15 bp, Homo sapiens
ttgacacatgctagg

SEQ ID NO: 1386184 - DNA, 15 bp, Homo sapiens
gttgacacatgctag

SEQ ID NO: 1386185 - DNA, 15 bp, Homo sapiens
agttgacacatgcta

SEQ ID NO: 1386186 - DNA, 15 bp, Homo sapiens
cagttgacacatgct

SEQ ID NO: 1386187 - DNA, 15 bp, Homo sapiens
gcagttgacacatgc

SEQ ID NO: 1386188 - DNA, 15 bp, Homo sapiens
ggcagttgacacatg

SEQ ID NO: 1386189 - DNA, 15 bp, Homo sapiens
aggcagttgacacat

SEQ ID NO: 1386190 - DNA, 15 bp, Homo sapiens
taggcagttgacaca

SEQ ID NO: 1386191 - DNA, 15 bp, Homo sapiens
gtaggcagttgacac

SEQ ID NO: 1386192 - DNA, 15 bp, Homo sapiens
tgtaggcagttgaca

SEQ ID NO: 1386193 - DNA, 15 bp, Homo sapiens
ttgtaggcagttgac

SEQ ID NO: 1386194 - DNA, 15 bp, Homo sapiens
gttgtaggcagttga

SEQ ID NO: 1386195 - DNA, 15 bp, Homo sapiens
tgttgtaggcagttg

SEQ ID NO: 1386196 - DNA, 15 bp, Homo sapiens
gtgttgtaggcagtt

SEQ ID NO: 1386197 - DNA, 15 bp, Homo sapiens
agtgttgtaggcagt

SEQ ID NO: 1386198 - DNA, 15 bp, Homo sapiens
aagtgttgtaggcag

SEQ ID NO: 1386199 - DNA, 15 bp, Homo sapiens
aaagtgttgtaggca

SEQ ID NO: 1386200 - DNA, 15 bp, Homo sapiens
gaaagtgttgtaggc

SEQ ID NO: 1386201 - DNA, 15 bp, Homo sapiens
ggaaagtgttgtagg

SEQ ID NO: 1386202 - DNA, 15 bp, Homo sapiens
gggaaagtgttgtag

SEQ ID NO: 1386203 - DNA, 15 bp, Homo sapiens
ggggaaagtgttgta

SEQ ID NO: 1386204 - DNA, 15 bp, Homo sapiens
tggggaaagtgttgt

SEQ ID NO: 1386205 - DNA, 15 bp, Homo sapiens
ttggggaaagtgttg

SEQ ID NO: 1386206 - DNA, 15 bp, Homo sapiens
cttggggaaagtgtt

SEQ ID NO: 1386207 - DNA, 15 bp, Homo sapiens
acttggggaaagtgt

SEQ ID NO: 1386208 - DNA, 15 bp, Homo sapiens
cacttggggaaagtg

SEQ ID NO: 1386209 - DNA, 15 bp, Homo sapiens
acacttggggaaagt

SEQ ID NO: 1386210 - DNA, 15 bp, Homo sapiens
gacacttggggaaag

SEQ ID NO: 1386211 - DNA, 15 bp, Homo sapiens
agacacttggggaaa

SEQ ID NO: 1386212 - DNA, 15 bp, Homo sapiens
aagacacttggggaa

SEQ ID NO: 1386213 - DNA, 15 bp, Homo sapiens
gaagacacttgggga

SEQ ID NO: 1386214 - DNA, 15 bp, Homo sapiens
agaagacacttgggg

SEQ ID NO: 1386215 - DNA, 15 bp, Homo sapiens
aagaagacacttggg

SEQ ID NO: 1386216 - DNA, 15 bp, Homo sapiens
aaagaagacacttgg

SEQ ID NO: 1386217 - DNA, 15 bp, Homo sapiens
caaagaagacacttg

SEQ ID NO: 1386218 - DNA, 15 bp, Homo sapiens
acaaagaagacactt

SEQ ID NO: 1386219 - DNA, 15 bp, Homo sapiens
gacaaagaagacact

SEQ ID NO: 1386220 - DNA, 15 bp, Homo sapiens
tgacaaagaagacac

SEQ ID NO: 1386221 - DNA, 15 bp, Homo sapiens
atgacaaagaagaca

SEQ ID NO: 1386222 - DNA, 15 bp, Homo sapiens
aatgacaaagaagac

SEQ ID NO: 1386223 - DNA, 15 bp, Homo sapiens
aaatgacaaagaaga

SEQ ID NO: 1386224 - DNA, 15 bp, Homo sapiens
aaaatgacaaagaag

SEQ ID NO: 1386225 - DNA, 15 bp, Homo sapiens
gaaaatgacaaagaa

SEQ ID NO: 1386226 - DNA, 15 bp, Homo sapiens
agaaaatgacaaaga

SEQ ID NO: 1386227 - DNA, 15 bp, Homo sapiens
aagaaaatgacaaag

SEQ ID NO: 1386228 - DNA, 15 bp, Homo sapiens
aaagaaaatgacaaa

SEQ ID NO: 1386229 - DNA, 15 bp, Homo sapiens
taaagaaaatgacaa

SEQ ID NO: 1386230 - DNA, 15 bp, Homo sapiens
gtaaagaaaatgaca

SEQ ID NO: 1386231 - DNA, 15 bp, Homo sapiens
ggtaaagaaaatgac

SEQ ID NO: 1386232 - DNA, 15 bp, Homo sapiens
aggtaaagaaaatga

SEQ ID NO: 1386233 - DNA, 15 bp, Homo sapiens
aaggtaaagaaaatg

SEQ ID NO: 1386234 - DNA, 15 bp, Homo sapiens
aaaggtaaagaaaat

SEQ ID NO: 1386235 - DNA, 15 bp, Homo sapiens
gaaaggtaaagaaaa

SEQ ID NO: 1386236 - DNA, 15 bp, Homo sapiens
ggaaaggtaaagaaa

SEQ ID NO: 1386237 - DNA, 15 bp, Homo sapiens
gggaaaggtaaagaa

SEQ ID NO: 1386238 - DNA, 15 bp, Homo sapiens
tgggaaaggtaaaga

SEQ ID NO: 1386239 - DNA, 15 bp, Homo sapiens
ttgggaaaggtaaag

SEQ ID NO: 1386240 - DNA, 15 bp, Homo sapiens
gttgggaaaggtaaa

SEQ ID NO: 1386241 - DNA, 15 bp, Homo sapiens
ggttgggaaaggtaa

SEQ ID NO: 1386242 - DNA, 15 bp, Homo sapiens
tggttgggaaaggta

SEQ ID NO: 1386243 - DNA, 15 bp, Homo sapiens
gtggttgggaaaggt

SEQ ID NO: 1386244 - DNA, 15 bp, Homo sapiens
agtggttgggaaagg

SEQ ID NO: 1386245 - DNA, 15 bp, Homo sapiens
gagtggttgggaaag

SEQ ID NO: 1386246 - DNA, 15 bp, Homo sapiens
ggagtggttgggaaa

SEQ ID NO: 1386247 - DNA, 15 bp, Homo sapiens
gggagtggttgggaa

SEQ ID NO: 1386248 - DNA, 15 bp, Homo sapiens
agggagtggttggga

SEQ ID NO: 1386249 - DNA, 15 bp, Homo sapiens
cagggagtggttggg

SEQ ID NO: 1386250 - DNA, 15 bp, Homo sapiens
gcagggagtggttgg

SEQ ID NO: 1386251 - DNA, 15 bp, Homo sapiens
ggcagggagtggttg

SEQ ID NO: 1386252 - DNA, 15 bp, Homo sapiens
aggcagggagtggtt

SEQ ID NO: 1386253 - DNA, 15 bp, Homo sapiens
aaggcagggagtggt

SEQ ID NO: 1386254 - DNA, 15 bp, Homo sapiens
gaaggcagggagtgg

SEQ ID NO: 1386255 - DNA, 15 bp, Homo sapiens
ggaaggcagggagtg

SEQ ID NO: 1386256 - DNA, 15 bp, Homo sapiens
gggaaggcagggagt

SEQ ID NO: 1386257 - DNA, 15 bp, Homo sapiens
ggggaaggcagggag

SEQ ID NO: 1386258 - DNA, 15 bp, Homo sapiens
tggggaaggcaggga

SEQ ID NO: 1386259 - DNA, 15 bp, Homo sapiens
ttggggaaggcaggg

SEQ ID NO: 1386260 - DNA, 15 bp, Homo sapiens
gttggggaaggcagg

SEQ ID NO: 1386261 - DNA, 15 bp, Homo sapiens
tgttggggaaggcag

SEQ ID NO: 1386262 - DNA, 15 bp, Homo sapiens
ttgttggggaaggca

SEQ ID NO: 1386263 - DNA, 15 bp, Homo sapiens
gttgttggggaaggc

SEQ ID NO: 1386264 - DNA, 15 bp, Homo sapiens
agttgttggggaagg

SEQ ID NO: 1386265 - DNA, 15 bp, Homo sapiens
gagttgttggggaag

SEQ ID NO: 1386266 - DNA, 15 bp, Homo sapiens
ggagttgttggggaa

SEQ ID NO: 1386267 - DNA, 15 bp, Homo sapiens
tggagttgttgggga

SEQ ID NO: 1386268 - DNA, 15 bp, Homo sapiens
atggagttgttgggg

SEQ ID NO: 1386269 - DNA, 15 bp, Homo sapiens
gatggagttgttggg

SEQ ID NO: 1386270 - DNA, 15 bp, Homo sapiens
ggatggagttgttgg

SEQ ID NO: 1386271 - DNA, 15 bp, Homo sapiens
tggatggagttgttg

SEQ ID NO: 1386272 - DNA, 15 bp, Homo sapiens
gtggatggagttgtt

SEQ ID NO: 1386273 - DNA, 15 bp, Homo sapiens
agtggatggagttgt

SEQ ID NO: 1386274 - DNA, 15 bp, Homo sapiens
gagtggatggagttg

SEQ ID NO: 1386275 - DNA, 15 bp, Homo sapiens
tgagtggatggagtt

SEQ ID NO: 1386276 - DNA, 15 bp, Homo sapiens
atgagtggatggagt

SEQ ID NO: 1386277 - DNA, 15 bp, Homo sapiens
gatgagtggatggag

SEQ ID NO: 1386278 - DNA, 15 bp, Homo sapiens
ggatgagtggatgga

SEQ ID NO: 1386279 - DNA, 15 bp, Homo sapiens
tggatgagtggatgg

SEQ ID NO: 1386280 - DNA, 15 bp, Homo sapiens
gtggatgagtggatg

SEQ ID NO: 1386281 - DNA, 15 bp, Homo sapiens
agtggatgagtggat

SEQ ID NO: 1386282 - DNA, 15 bp, Homo sapiens
gagtggatgagtgga

SEQ ID NO: 1386283 - DNA, 15 bp, Homo sapiens
tgagtggatgagtgg

SEQ ID NO: 1386284 - DNA, 15 bp, Homo sapiens
ttgagtggatgagtg

SEQ ID NO: 1386285 - DNA, 15 bp, Homo sapiens
attgagtggatgagt

SEQ ID NO: 1386286 - DNA, 15 bp, Homo sapiens
gattgagtggatgag

SEQ ID NO: 1386287 - DNA, 15 bp, Homo sapiens
ggattgagtggatga

SEQ ID NO: 1386288 - DNA, 15 bp, Homo sapiens
gggattgagtggatg

SEQ ID NO: 1386289 - DNA, 15 bp, Homo sapiens
agggattgagtggat

SEQ ID NO: 1386290 - DNA, 15 bp, Homo sapiens
cagggattgagtgga

SEQ ID NO: 1386291 - DNA, 15 bp, Homo sapiens
gcagggattgagtgg

SEQ ID NO: 1386292 - DNA, 15 bp, Homo sapiens
agcagggattgagtg

SEQ ID NO: 1386293 - DNA, 15 bp, Homo sapiens
gagcagggattgagt

SEQ ID NO: 1386294 - DNA, 15 bp, Homo sapiens
ggagcagggattgag

SEQ ID NO: 1386295 - DNA, 15 bp, Homo sapiens
tggagcagggattga

SEQ ID NO: 1386296 - DNA, 15 bp, Homo sapiens
ttggagcagggattg

SEQ ID NO: 1386297 - DNA, 15 bp, Homo sapiens
tttggagcagggatt

SEQ ID NO: 1386298 - DNA, 15 bp, Homo sapiens
ctttggagcagggat

SEQ ID NO: 1386299 - DNA, 15 bp, Homo sapiens
gctttggagcaggga

SEQ ID NO: 1386300 - DNA, 15 bp, Homo sapiens
tgctttggagcaggg

SEQ ID NO: 1386301 - DNA, 15 bp, Homo sapiens
gtgctttggagcagg

SEQ ID NO: 1386302 - DNA, 15 bp, Homo sapiens
ggtgctttggagcag

SEQ ID NO: 1386303 - DNA, 15 bp, Homo sapiens
aggtgctttggagca

SEQ ID NO: 1386304 - DNA, 15 bp, Homo sapiens
gaggtgctttggagc

SEQ ID NO: 1386305 - DNA, 15 bp, Homo sapiens
agaggtgctttggag

SEQ ID NO: 1386306 - DNA, 15 bp, Homo sapiens
gagaggtgctttgga

SEQ ID NO: 1386307 - DNA, 15 bp, Homo sapiens
tgagaggtgctttgg

SEQ ID NO: 1386308 - DNA, 15 bp, Homo sapiens
atgagaggtgctttg

SEQ ID NO: 1386309 - DNA, 15 bp, Homo sapiens
aatgagaggtgcttt

SEQ ID NO: 1386310 - DNA, 15 bp, Homo sapiens
aaatgagaggtgctt

SEQ ID NO: 1386311 - DNA, 15 bp, Homo sapiens
aaaatgagaggtgct

SEQ ID NO: 1386312 - DNA, 15 bp, Homo sapiens
taaaatgagaggtgc

SEQ ID NO: 1386313 - DNA, 15 bp, Homo sapiens
ataaaatgagaggtg

SEQ ID NO: 1386314 - DNA, 15 bp, Homo sapiens
aataaaatgagaggt

SEQ ID NO: 1386315 - DNA, 15 bp, Homo sapiens
taataaaatgagagg

SEQ ID NO: 1386316 - DNA, 15 bp, Homo sapiens
ataataaaatgagag

SEQ ID NO: 1386317 - DNA, 15 bp, Homo sapiens
aataataaaatgaga

SEQ ID NO: 1386318 - DNA, 15 bp, Homo sapiens
aaataataaaatgag

SEQ ID NO: 1386319 - DNA, 15 bp, Homo sapiens
aaaataataaaatga

SEQ ID NO: 1386320 - DNA, 15 bp, Homo sapiens
taaaataataaaatg

SEQ ID NO: 1386321 - DNA, 15 bp, Homo sapiens
ataaaataataaaat

SEQ ID NO: 1386322 - DNA, 15 bp, Homo sapiens
aataaaataataaaa

SEQ ID NO: 1386323 - DNA, 15 bp, Homo sapiens
ataataaaataataa

SEQ ID NO: 1386324 - DNA, 15 bp, Homo sapiens
tataataaaataata

SEQ ID NO: 1386325 - DNA, 15 bp, Homo sapiens
atataataaaataat

SEQ ID NO: 1386326 - DNA, 15 bp, Homo sapiens
aatataataaaataa

SEQ ID NO: 1386327 - DNA, 15 bp, Homo sapiens
aaatataataaaata

SEQ ID NO: 1386328 - DNA, 15 bp, Homo sapiens
gaaatataataaaat

SEQ ID NO: 1386329 - DNA, 15 bp, Homo sapiens
ggaaatataataaaa

SEQ ID NO: 1386330 - DNA, 15 bp, Homo sapiens
gggaaatataataaa

SEQ ID NO: 1386331 - DNA, 15 bp, Homo sapiens
tgggaaatataataa

SEQ ID NO: 1386332 - DNA, 15 bp, Homo sapiens
atgggaaatataata

SEQ ID NO: 1386333 - DNA, 15 bp, Homo sapiens
tatgggaaatataat

SEQ ID NO: 1386334 - DNA, 15 bp, Homo sapiens
gtatgggaaatataa

SEQ ID NO: 1386335 - DNA, 15 bp, Homo sapiens
agtatgggaaatata

SEQ ID NO: 1386336 - DNA, 15 bp, Homo sapiens
cagtatgggaaatat

SEQ ID NO: 1386337 - DNA, 15 bp, Homo sapiens
ccagtatgggaaata

SEQ ID NO: 1386338 - DNA, 15 bp, Homo sapiens
accagtatgggaaat

SEQ ID NO: 1386339 - DNA, 15 bp, Homo sapiens
aaccagtatgggaaa

SEQ ID NO: 1386340 - DNA, 15 bp, Homo sapiens
taaccagtatgggaa

SEQ ID NO: 1386341 - DNA, 15 bp, Homo sapiens
ttaaccagtatggga

SEQ ID NO: 1386342 - DNA, 15 bp, Homo sapiens
attaaccagtatggg

SEQ ID NO: 1386343 - DNA, 15 bp, Homo sapiens
tattaaccagtatgg

SEQ ID NO: 1386344 - DNA, 15 bp, Homo sapiens
ttattaaccagtatg

SEQ ID NO: 1386345 - DNA, 15 bp, Homo sapiens
attattaaccagtat

SEQ ID NO: 1386346 - DNA, 15 bp, Homo sapiens
cattattaaccagta

SEQ ID NO: 1386347 - DNA, 15 bp, Homo sapiens
gcattattaaccagt

SEQ ID NO: 1386348 - DNA, 15 bp, Homo sapiens
ggcattattaaccag

SEQ ID NO: 1386349 - DNA, 15 bp, Homo sapiens
tggcattattaacca

SEQ ID NO: 1386350 - DNA, 15 bp, Homo sapiens
gtggcattattaacc

SEQ ID NO: 1386351 - DNA, 15 bp, Homo sapiens
ggtggcattattaac

SEQ ID NO: 1386352 - DNA, 15 bp, Homo sapiens
tggtggcattattaa

SEQ ID NO: 1386353 - DNA, 15 bp, Homo sapiens
atggtggcattatta

SEQ ID NO: 1386354 - DNA, 15 bp, Homo sapiens
gatggtggcattatt

SEQ ID NO: 1386355 - DNA, 15 bp, Homo sapiens
ggatggtggcattat

SEQ ID NO: 1386356 - DNA, 15 bp, Homo sapiens
tggatggtggcatta

SEQ ID NO: 1386357 - DNA, 15 bp, Homo sapiens
gtggatggtggcatt

SEQ ID NO: 1386358 - DNA, 15 bp, Homo sapiens
tgtggatggtggcat

SEQ ID NO: 1386359 - DNA, 15 bp, Homo sapiens
gtgtggatggtggca

SEQ ID NO: 1386360 - DNA, 15 bp, Homo sapiens
tgtgtggatggtggc

SEQ ID NO: 1386361 - DNA, 15 bp, Homo sapiens
ctgtgtggatggtgg

SEQ ID NO: 1386362 - DNA, 15 bp, Homo sapiens
actgtgtggatggtg

SEQ ID NO: 1386363 - DNA, 15 bp, Homo sapiens
gactgtgtggatggt

SEQ ID NO: 1386364 - DNA, 15 bp, Homo sapiens
ggactgtgtggatgg

SEQ ID NO: 1386365 - DNA, 15 bp, Homo sapiens
gggactgtgtggatg

SEQ ID NO: 1386366 - DNA, 15 bp, Homo sapiens
ggggactgtgtggat

SEQ ID NO: 1386367 - DNA, 15 bp, Homo sapiens
tggggactgtgtgga

SEQ ID NO: 1386368 - DNA, 15 bp, Homo sapiens
ttggggactgtgtgg

SEQ ID NO: 1386369 - DNA, 15 bp, Homo sapiens
tttggggactgtgtg

SEQ ID NO: 1386370 - DNA, 15 bp, Homo sapiens
ctttggggactgtgt

SEQ ID NO: 1386371 - DNA, 15 bp, Homo sapiens
tctttggggactgtg

SEQ ID NO: 1386372 - DNA, 15 bp, Homo sapiens
ctctttggggactgt

SEQ ID NO: 1386373 - DNA, 15 bp, Homo sapiens
tctctttggggactg

SEQ ID NO: 1386374 - DNA, 15 bp, Homo sapiens
ctctctttggggact

SEQ ID NO: 1386375 - DNA, 15 bp, Homo sapiens
actctctttggggac

SEQ ID NO: 1386376 - DNA, 15 bp, Homo sapiens
aactctctttgggga

SEQ ID NO: 1386377 - DNA, 15 bp, Homo sapiens
aaactctctttgggg

SEQ ID NO: 1386378 - DNA, 15 bp, Homo sapiens
taaactctctttggg

SEQ ID NO: 1386379 - DNA, 15 bp, Homo sapiens
ttaaactctctttgg

SEQ ID NO: 1386380 - DNA, 15 bp, Homo sapiens
tttaaactctctttg

SEQ ID NO: 1386381 - DNA, 15 bp, Homo sapiens
ttttaaactctcttt

SEQ ID NO: 1386382 - DNA, 15 bp, Homo sapiens
tttttaaactctctt

SEQ ID NO: 1386383 - DNA, 15 bp, Homo sapiens
atttttaaactctct

SEQ ID NO: 1386384 - DNA, 15 bp, Homo sapiens
gatttttaaactctc

SEQ ID NO: 1386385 - DNA, 15 bp, Homo sapiens
tgatttttaaactct

SEQ ID NO: 1386386 - DNA, 15 bp, Homo sapiens
atgatttttaaactc

SEQ ID NO: 1386387 - DNA, 15 bp, Homo sapiens
aatgatttttaaact

SEQ ID NO: 1386388 - DNA, 15 bp, Homo sapiens
aaatgatttttaaac

SEQ ID NO: 1386389 - DNA, 15 bp, Homo sapiens
aaaatgatttttaaa

SEQ ID NO: 1386390 - DNA, 15 bp, Homo sapiens
aaaaatgatttttaa

SEQ ID NO: 1386391 - DNA, 15 bp, Homo sapiens
taaaaatgattttta

SEQ ID NO: 1386392 - DNA, 15 bp, Homo sapiens
ttaaaaatgattttt

SEQ ID NO: 1386393 - DNA, 15 bp, Homo sapiens
attaaaaatgatttt

SEQ ID NO: 1386394 - DNA, 15 bp, Homo sapiens
aattaaaaatgattt

SEQ ID NO: 1386395 - DNA, 15 bp, Homo sapiens
gaattaaaaatgatt

SEQ ID NO: 1386396 - DNA, 15 bp, Homo sapiens
ggaattaaaaatgat

SEQ ID NO: 1386397 - DNA, 15 bp, Homo sapiens
aggaattaaaaatga

SEQ ID NO: 1386398 - DNA, 15 bp, Homo sapiens
gaggaattaaaaatg

SEQ ID NO: 1386399 - DNA, 15 bp, Homo sapiens
ggaggaattaaaaat

SEQ ID NO: 1386400 - DNA, 15 bp, Homo sapiens
gggaggaattaaaaa

SEQ ID NO: 1386401 - DNA, 15 bp, Homo sapiens
agggaggaattaaaa

SEQ ID NO: 1386402 - DNA, 15 bp, Homo sapiens
gagggaggaattaaa

SEQ ID NO: 1386403 - DNA, 15 bp, Homo sapiens
ggagggaggaattaa

SEQ ID NO: 1386404 - DNA, 15 bp, Homo sapiens
tggagggaggaatta

SEQ ID NO: 1386405 - DNA, 15 bp, Homo sapiens
atggagggaggaatt

SEQ ID NO: 1386406 - DNA, 15 bp, Homo sapiens
gatggagggaggaat

SEQ ID NO: 1386407 - DNA, 15 bp, Homo sapiens
tgatggagggaggaa

SEQ ID NO: 1386408 - DNA, 15 bp, Homo sapiens
atgatggagggagga

SEQ ID NO: 1386409 - DNA, 15 bp, Homo sapiens
gatgatggagggagg

SEQ ID NO: 1386410 - DNA, 15 bp, Homo sapiens
agatgatggagggag

SEQ ID NO: 1386411 - DNA, 15 bp, Homo sapiens
aagatgatggaggga

SEQ ID NO: 1386412 - DNA, 15 bp, Homo sapiens
gaagatgatggaggg

SEQ ID NO: 1386413 - DNA, 15 bp, Homo sapiens
tgaagatgatggagg

SEQ ID NO: 1386414 - DNA, 15 bp, Homo sapiens
gtgaagatgatggag

SEQ ID NO: 1386415 - DNA, 15 bp, Homo sapiens
agtgaagatgatgga

SEQ ID NO: 1386416 - DNA, 15 bp, Homo sapiens
gagtgaagatgatgg

SEQ ID NO: 1386417 - DNA, 15 bp, Homo sapiens
agagtgaagatgatg

SEQ ID NO: 1386418 - DNA, 15 bp, Homo sapiens
gagagtgaagatgat

SEQ ID NO: 1386419 - DNA, 15 bp, Homo sapiens
agagagtgaagatga

SEQ ID NO: 1386420 - DNA, 15 bp, Homo sapiens
aagagagtgaagatg

SEQ ID NO: 1386421 - DNA, 15 bp, Homo sapiens
aaagagagtgaagat

SEQ ID NO: 1386422 - DNA, 15 bp, Homo sapiens
taaagagagtgaaga

SEQ ID NO: 1386423 - DNA, 15 bp, Homo sapiens
ctaaagagagtgaag

SEQ ID NO: 1386424 - DNA, 15 bp, Homo sapiens
actaaagagagtgaa

SEQ ID NO: 1386425 - DNA, 15 bp, Homo sapiens
gactaaagagagtga

SEQ ID NO: 1386426 - DNA, 15 bp, Homo sapiens
agactaaagagagtg

SEQ ID NO: 1386427 - DNA, 15 bp, Homo sapiens
tagactaaagagagt

SEQ ID NO: 1386428 - DNA, 15 bp, Homo sapiens
ttagactaaagagag

SEQ ID NO: 1386429 - DNA, 15 bp, Homo sapiens
attagactaaagaga

SEQ ID NO: 1386430 - DNA, 15 bp, Homo sapiens
gattagactaaagag

SEQ ID NO: 1386431 - DNA, 15 bp, Homo sapiens
tgattagactaaaga

SEQ ID NO: 1386432 - DNA, 15 bp, Homo sapiens
ctgattagactaaag

SEQ ID NO: 1386433 - DNA, 15 bp, Homo sapiens
actgattagactaaa

SEQ ID NO: 1386434 - DNA, 15 bp, Homo sapiens
gactgattagactaa

SEQ ID NO: 1386435 - DNA, 15 bp, Homo sapiens
tgactgattagacta

SEQ ID NO: 1386436 - DNA, 15 bp, Homo sapiens
atgactgattagact

SEQ ID NO: 1386437 - DNA, 15 bp, Homo sapiens
gatgactgattagac

SEQ ID NO: 1386438 - DNA, 15 bp, Homo sapiens
tgatgactgattaga

SEQ ID NO: 1386439 - DNA, 15 bp, Homo sapiens
ttgatgactgattag

SEQ ID NO: 1386440 - DNA, 15 bp, Homo sapiens
cttgatgactgatta

SEQ ID NO: 1386441 - DNA, 15 bp, Homo sapiens
gcttgatgactgatt

SEQ ID NO: 1386442 - DNA, 15 bp, Homo sapiens
ggcttgatgactgat

SEQ ID NO: 1386443 - DNA, 15 bp, Homo sapiens
gggcttgatgactga

SEQ ID NO: 1386444 - DNA, 15 bp, Homo sapiens
agggcttgatgactg

SEQ ID NO: 1386445 - DNA, 15 bp, Homo sapiens
cagggcttgatgact

SEQ ID NO: 1386446 - DNA, 15 bp, Homo sapiens
tcagggcttgatgac

SEQ ID NO: 1386447 - DNA, 15 bp, Homo sapiens
gtcagggcttgatga

SEQ ID NO: 1386448 - DNA, 15 bp, Homo sapiens
ggtcagggcttgatg

SEQ ID NO: 1386449 - DNA, 15 bp, Homo sapiens
gggtcagggcttgat

SEQ ID NO: 1386450 - DNA, 15 bp, Homo sapiens
agggtcagggcttga

SEQ ID NO: 1386451 - DNA, 15 bp, Homo sapiens
tagggtcagggcttg

SEQ ID NO: 1386452 - DNA, 15 bp, Homo sapiens
atagggtcagggctt

SEQ ID NO: 1386453 - DNA, 15 bp, Homo sapiens
tatagggtcagggct

SEQ ID NO: 1386454 - DNA, 15 bp, Homo sapiens
atatagggtcagggc

SEQ ID NO: 1386455 - DNA, 15 bp, Homo sapiens
gatatagggtcaggg

SEQ ID NO: 1386456 - DNA, 15 bp, Homo sapiens
agatatagggtcagg

SEQ ID NO: 1386457 - DNA, 15 bp, Homo sapiens
aagatatagggtcag

SEQ ID NO: 1386458 - DNA, 15 bp, Homo sapiens
gaagatatagggtca

SEQ ID NO: 1386459 - DNA, 15 bp, Homo sapiens
agaagatatagggtc

SEQ ID NO: 1386460 - DNA, 15 bp, Homo sapiens
tagaagatatagggt

SEQ ID NO: 1386461 - DNA, 15 bp, Homo sapiens
ttagaagatataggg

SEQ ID NO: 1386462 - DNA, 15 bp, Homo sapiens
tttagaagatatagg

SEQ ID NO: 1386463 - DNA, 15 bp, Homo sapiens
atttagaagatatag

SEQ ID NO: 1386464 - DNA, 15 bp, Homo sapiens
tatttagaagatata

SEQ ID NO: 1386465 - DNA, 15 bp, Homo sapiens
gtatttagaagatat

SEQ ID NO: 1386466 - DNA, 15 bp, Homo sapiens
agtatttagaagata

SEQ ID NO: 1386467 - DNA, 15 bp, Homo sapiens
cagtatttagaagat

SEQ ID NO: 1386468 - DNA, 15 bp, Homo sapiens
gcagtatttagaaga

SEQ ID NO: 1386469 - DNA, 15 bp, Homo sapiens
ggcagtatttagaag

SEQ ID NO: 1386470 - DNA, 15 bp, Homo sapiens
aggcagtatttagaa

SEQ ID NO: 1386471 - DNA, 15 bp, Homo sapiens
caggcagtatttaga

SEQ ID NO: 1386472 - DNA, 15 bp, Homo sapiens
acaggcagtatttag

SEQ ID NO: 1386473 - DNA, 15 bp, Homo sapiens
tacaggcagtattta

SEQ ID NO: 1386474 - DNA, 15 bp, Homo sapiens
atacaggcagtattt

SEQ ID NO: 1386475 - DNA, 15 bp, Homo sapiens
aatacaggcagtatt

SEQ ID NO: 1386476 - DNA, 15 bp, Homo sapiens
aaatacaggcagtat

SEQ ID NO: 1386477 - DNA, 15 bp, Homo sapiens
caaatacaggcagta

SEQ ID NO: 1386478 - DNA, 15 bp, Homo sapiens
acaaatacaggcagt

SEQ ID NO: 1386479 - DNA, 15 bp, Homo sapiens
aacaaatacaggcag

SEQ ID NO: 1386480 - DNA, 15 bp, Homo sapiens
gaacaaatacaggca

SEQ ID NO: 1386481 - DNA, 15 bp, Homo sapiens
tgaacaaatacaggc

SEQ ID NO: 1386482 - DNA, 15 bp, Homo sapiens
atgaacaaatacagg

SEQ ID NO: 1386483 - DNA, 15 bp, Homo sapiens
aatgaacaaatacag

SEQ ID NO: 1386484 - DNA, 15 bp, Homo sapiens
gaatgaacaaataca

SEQ ID NO: 1386485 - DNA, 15 bp, Homo sapiens
agaatgaacaaatac

SEQ ID NO: 1386486 - DNA, 15 bp, Homo sapiens
aagaatgaacaaata

SEQ ID NO: 1386487 - DNA, 15 bp, Homo sapiens
aaagaatgaacaaat

SEQ ID NO: 1386488 - DNA, 15 bp, Homo sapiens
aaaagaatgaacaaa

SEQ ID NO: 1386489 - DNA, 15 bp, Homo sapiens
gaaaagaatgaacaa

SEQ ID NO: 1386490 - DNA, 15 bp, Homo sapiens
tgaaaagaatgaaca

SEQ ID NO: 1386491 - DNA, 15 bp, Homo sapiens
gtgaaaagaatgaac

SEQ ID NO: 1386492 - DNA, 15 bp, Homo sapiens
ggtgaaaagaatgaa

SEQ ID NO: 1386493 - DNA, 15 bp, Homo sapiens
gggtgaaaagaatga

SEQ ID NO: 1386494 - DNA, 15 bp, Homo sapiens
ggggtgaaaagaatg

SEQ ID NO: 1386495 - DNA, 15 bp, Homo sapiens
aggggtgaaaagaat

SEQ ID NO: 1386496 - DNA, 15 bp, Homo sapiens
taggggtgaaaagaa

SEQ ID NO: 1386497 - DNA, 15 bp, Homo sapiens
gtaggggtgaaaaga

SEQ ID NO: 1386498 - DNA, 15 bp, Homo sapiens
ggtaggggtgaaaag

SEQ ID NO: 1386499 - DNA, 15 bp, Homo sapiens
gggtaggggtgaaaa

SEQ ID NO: 1386500 - DNA, 15 bp, Homo sapiens
agggtaggggtgaaa

SEQ ID NO: 1386501 - DNA, 15 bp, Homo sapiens
aagggtaggggtgaa

SEQ ID NO: 1386502 - DNA, 15 bp, Homo sapiens
caagggtaggggtga

SEQ ID NO: 1386503 - DNA, 15 bp, Homo sapiens
ccaagggtaggggtg

SEQ ID NO: 1386504 - DNA, 15 bp, Homo sapiens
accaagggtaggggt

SEQ ID NO: 1386505 - DNA, 15 bp, Homo sapiens
aaccaagggtagggg

SEQ ID NO: 1386506 - DNA, 15 bp, Homo sapiens
caaccaagggtaggg

SEQ ID NO: 1386507 - DNA, 15 bp, Homo sapiens
ccaaccaagggtagg

SEQ ID NO: 1386508 - DNA, 15 bp, Homo sapiens
tccaaccaagggtag

SEQ ID NO: 1386509 - DNA, 15 bp, Homo sapiens
ctccaaccaagggta

SEQ ID NO: 1386510 - DNA, 15 bp, Homo sapiens
actccaaccaagggt

SEQ ID NO: 1386511 - DNA, 15 bp, Homo sapiens
tactccaaccaaggg

SEQ ID NO: 1386512 - DNA, 15 bp, Homo sapiens
atactccaaccaagg

SEQ ID NO: 1386513 - DNA, 15 bp, Homo sapiens
catactccaaccaag

SEQ ID NO: 1386514 - DNA, 15 bp, Homo sapiens
ccatactccaaccaa

SEQ ID NO: 1386515 - DNA, 15 bp, Homo sapiens
gccatactccaacca

SEQ ID NO: 1386516 - DNA, 15 bp, Homo sapiens
ggccatactccaacc

SEQ ID NO: 1386517 - DNA, 15 bp, Homo sapiens
tggccatactccaac

SEQ ID NO: 1386518 - DNA, 15 bp, Homo sapiens
atggccatactccaa

SEQ ID NO: 1386519 - DNA, 15 bp, Homo sapiens
aatggccatactcca

SEQ ID NO: 1386520 - DNA, 15 bp, Homo sapiens
taatggccatactcc

SEQ ID NO: 1386521 - DNA, 15 bp, Homo sapiens
gtaatggccatactc

SEQ ID NO: 1386522 - DNA, 15 bp, Homo sapiens
ggtaatggccatact

SEQ ID NO: 1386523 - DNA, 15 bp, Homo sapiens
tggtaatggccatac

SEQ ID NO: 1386524 - DNA, 15 bp, Homo sapiens
atggtaatggccata

SEQ ID NO: 1386525 - DNA, 15 bp, Homo sapiens
gatggtaatggccat

SEQ ID NO: 1386526 - DNA, 15 bp, Homo sapiens
ggatggtaatggcca

SEQ ID NO: 1386527 - DNA, 15 bp, Homo sapiens
tggatggtaatggcc

SEQ ID NO: 1386528 - DNA, 15 bp, Homo sapiens
ttggatggtaatggc

SEQ ID NO: 1386529 - DNA, 15 bp, Homo sapiens
attggatggtaatgg

SEQ ID NO: 1386530 - DNA, 15 bp, Homo sapiens
aattggatggtaatg

SEQ ID NO: 1386531 - DNA, 15 bp, Homo sapiens
gaattggatggtaat

SEQ ID NO: 1386532 - DNA, 15 bp, Homo sapiens
ggaattggatggtaa

SEQ ID NO: 1386533 - DNA, 15 bp, Homo sapiens
gggaattggatggta

SEQ ID NO: 1386534 - DNA, 15 bp, Homo sapiens
agggaattggatggt

SEQ ID NO: 1386535 - DNA, 15 bp, Homo sapiens
cagggaattggatgg

SEQ ID NO: 1386536 - DNA, 15 bp, Homo sapiens
gcagggaattggatg

SEQ ID NO: 1386537 - DNA, 15 bp, Homo sapiens
agcagggaattggat

SEQ ID NO: 1386538 - DNA, 15 bp, Homo sapiens
gagcagggaattgga

SEQ ID NO: 1386539 - DNA, 15 bp, Homo sapiens
tgagcagggaattgg

SEQ ID NO: 1386540 - DNA, 15 bp, Homo sapiens
atgagcagggaattg

SEQ ID NO: 1386541 - DNA, 15 bp, Homo sapiens
tatgagcagggaatt

SEQ ID NO: 1386542 - DNA, 15 bp, Homo sapiens
ctatgagcagggaat

SEQ ID NO: 1386543 - DNA, 15 bp, Homo sapiens
actatgagcagggaa

SEQ ID NO: 1386544 - DNA, 15 bp, Homo sapiens
aactatgagcaggga

SEQ ID NO: 1386545 - DNA, 15 bp, Homo sapiens
aaactatgagcaggg

SEQ ID NO: 1386546 - DNA, 15 bp, Homo sapiens
gaaactatgagcagg

SEQ ID NO: 1386547 - DNA, 15 bp, Homo sapiens
tgaaactatgagcag

SEQ ID NO: 1386548 - DNA, 15 bp, Homo sapiens
atgaaactatgagca

SEQ ID NO: 1386549 - DNA, 15 bp, Homo sapiens
gatgaaactatgagc

SEQ ID NO: 1386550 - DNA, 15 bp, Homo sapiens
agatgaaactatgag

SEQ ID NO: 1386551 - DNA, 15 bp, Homo sapiens
cagatgaaactatga

SEQ ID NO: 1386552 - DNA, 15 bp, Homo sapiens
gcagatgaaactatg

SEQ ID NO: 1386553 - DNA, 15 bp, Homo sapiens
agcagatgaaactat

SEQ ID NO: 1386554 - DNA, 15 bp, Homo sapiens
gagcagatgaaacta

SEQ ID NO: 1386555 - DNA, 15 bp, Homo sapiens
agagcagatgaaact

SEQ ID NO: 1386556 - DNA, 15 bp, Homo sapiens
tagagcagatgaaac

SEQ ID NO: 1386557 - DNA, 15 bp, Homo sapiens
ttagagcagatgaaa

SEQ ID NO: 1386558 - DNA, 15 bp, Homo sapiens
attagagcagatgaa

SEQ ID NO: 1386559 - DNA, 15 bp, Homo sapiens
aattagagcagatga

SEQ ID NO: 1386560 - DNA, 15 bp, Homo sapiens
aaattagagcagatg

SEQ ID NO: 1386561 - DNA, 15 bp, Homo sapiens
taaattagagcagat

SEQ ID NO: 1386562 - DNA, 15 bp, Homo sapiens
ataaattagagcaga

SEQ ID NO: 1386563 - DNA, 15 bp, Homo sapiens
gataaattagagcag

SEQ ID NO: 1386564 - DNA, 15 bp, Homo sapiens
ggataaattagagca

SEQ ID NO: 1386565 - DNA, 15 bp, Homo sapiens
aggataaattagagc

SEQ ID NO: 1386566 - DNA, 15 bp, Homo sapiens
gaggataaattagag

SEQ ID NO: 1386567 - DNA, 15 bp, Homo sapiens
tgaggataaattaga

SEQ ID NO: 1386568 - DNA, 15 bp, Homo sapiens
ttgaggataaattag

SEQ ID NO: 1386569 - DNA, 15 bp, Homo sapiens
gttgaggataaatta

SEQ ID NO: 1386570 - DNA, 15 bp, Homo sapiens
tgttgaggataaatt

SEQ ID NO: 1386571 - DNA, 15 bp, Homo sapiens
atgttgaggataaat

SEQ ID NO: 1386572 - DNA, 15 bp, Homo sapiens
aatgttgaggataaa

SEQ ID NO: 1386573 - DNA, 15 bp, Homo sapiens
taatgttgaggataa

SEQ ID NO: 1386574 - DNA, 15 bp, Homo sapiens
gtaatgttgaggata

SEQ ID NO: 1386575 - DNA, 15 bp, Homo sapiens
ggtaatgttgaggat

SEQ ID NO: 1386576 - DNA, 15 bp, Homo sapiens
aggtaatgttgagga

SEQ ID NO: 1386577 - DNA, 15 bp, Homo sapiens
aaggtaatgttgagg

SEQ ID NO: 1386578 - DNA, 15 bp, Homo sapiens
gaaggtaatgttgag

SEQ ID NO: 1386579 - DNA, 15 bp, Homo sapiens
tgaaggtaatgttga

SEQ ID NO: 1386580 - DNA, 15 bp, Homo sapiens
gtgaaggtaatgttg

SEQ ID NO: 1386581 - DNA, 15 bp, Homo sapiens
tgtgaaggtaatgtt

SEQ ID NO: 1386582 - DNA, 15 bp, Homo sapiens
ctgtgaaggtaatgt

SEQ ID NO: 1386583 - DNA, 15 bp, Homo sapiens
actgtgaaggtaatg

SEQ ID NO: 1386584 - DNA, 15 bp, Homo sapiens
tactgtgaaggtaat

SEQ ID NO: 1386585 - DNA, 15 bp, Homo sapiens
ttactgtgaaggtaa

SEQ ID NO: 1386586 - DNA, 15 bp, Homo sapiens
gttactgtgaaggta

SEQ ID NO: 1386587 - DNA, 15 bp, Homo sapiens
tgttactgtgaaggt

SEQ ID NO: 1386588 - DNA, 15 bp, Homo sapiens
atgttactgtgaagg

SEQ ID NO: 1386589 - DNA, 15 bp, Homo sapiens
aatgttactgtgaag

SEQ ID NO: 1386590 - DNA, 15 bp, Homo sapiens
aaatgttactgtgaa

SEQ ID NO: 1386591 - DNA, 15 bp, Homo sapiens
gaaatgttactgtga

SEQ ID NO: 1386592 - DNA, 15 bp, Homo sapiens
tgaaatgttactgtg

SEQ ID NO: 1386593 - DNA, 15 bp, Homo sapiens
ttgaaatgttactgt

SEQ ID NO: 1386594 - DNA, 15 bp, Homo sapiens
tttgaaatgttactg

SEQ ID NO: 1386595 - DNA, 15 bp, Homo sapiens
atttgaaatgttact

SEQ ID NO: 1386596 - DNA, 15 bp, Homo sapiens
tatttgaaatgttac

SEQ ID NO: 1386597 - DNA, 15 bp, Homo sapiens
atatttgaaatgtta

SEQ ID NO: 1386598 - DNA, 15 bp, Homo sapiens
catatttgaaatgtt

SEQ ID NO: 1386599 - DNA, 15 bp, Homo sapiens
tacatatttgaaatg

SEQ ID NO: 1386600 - DNA, 15 bp, Homo sapiens
ttacatatttgaaat

SEQ ID NO: 1386601 - DNA, 15 bp, Homo sapiens
tttacatatttgaaa

SEQ ID NO: 1386602 - DNA, 15 bp, Homo sapiens
atttacatatttgaa

SEQ ID NO: 1386603 - DNA, 15 bp, Homo sapiens
tatttacatatttga

SEQ ID NO: 1386604 - DNA, 15 bp, Homo sapiens
atatttacatatttg

SEQ ID NO: 1386605 - DNA, 15 bp, Homo sapiens
catatttacatattt

SEQ ID NO: 1386606 - DNA, 15 bp, Homo sapiens
tcatatttacatatt

SEQ ID NO: 1386607 - DNA, 15 bp, Homo sapiens
atcatatttacatat

SEQ ID NO: 1386608 - DNA, 15 bp, Homo sapiens
gatcatatttacata

SEQ ID NO: 1386609 - DNA, 15 bp, Homo sapiens
cgatcatatttacat

SEQ ID NO: 1386610 - DNA, 15 bp, Homo sapiens
tcgatcatatttaca

SEQ ID NO: 1386611 - DNA, 15 bp, Homo sapiens
ctcgatcatatttac

SEQ ID NO: 1386612 - DNA, 15 bp, Homo sapiens
actcgatcatattta

SEQ ID NO: 1386613 - DNA, 15 bp, Homo sapiens
cactcgatcatattt

SEQ ID NO: 1386614 - DNA, 15 bp, Homo sapiens
ccactcgatcatatt

SEQ ID NO: 1386615 - DNA, 15 bp, Homo sapiens
gccactcgatcatat

SEQ ID NO: 1386616 - DNA, 15 bp, Homo sapiens
agccactcgatcata

SEQ ID NO: 1386617 - DNA, 15 bp, Homo sapiens
cagccactcgatcat

SEQ ID NO: 1386618 - DNA, 15 bp, Homo sapiens
tcagccactcgatca

SEQ ID NO: 1386619 - DNA, 15 bp, Homo sapiens
gtcagccactcgatc

SEQ ID NO: 1386620 - DNA, 15 bp, Homo sapiens
agtcagccactcgat

SEQ ID NO: 1386621 - DNA, 15 bp, Homo sapiens
gagtcagccactcga

SEQ ID NO: 1386622 - DNA, 15 bp, Homo sapiens
ggagtcagccactcg

SEQ ID NO: 1386623 - DNA, 15 bp, Homo sapiens
gggagtcagccactc

SEQ ID NO: 1386624 - DNA, 15 bp, Homo sapiens
agggagtcagccact

SEQ ID NO: 1386625 - DNA, 15 bp, Homo sapiens
aagggagtcagccac

SEQ ID NO: 1386626 - DNA, 15 bp, Homo sapiens
caagggagtcagcca

SEQ ID NO: 1386627 - DNA, 15 bp, Homo sapiens
gcaagggagtcagcc

SEQ ID NO: 1386628 - DNA, 15 bp, Homo sapiens
agcaagggagtcagc

SEQ ID NO: 1386629 - DNA, 15 bp, Homo sapiens
aagcaagggagtcag

SEQ ID NO: 1386630 - DNA, 15 bp, Homo sapiens
cttttaagcaaggga

SEQ ID NO: 1386631 - DNA, 15 bp, Homo sapiens
gcttttaagcaaggg

SEQ ID NO: 1386632 - DNA, 15 bp, Homo sapiens
tgcttttaagcaagg

SEQ ID NO: 1386633 - DNA, 15 bp, Homo sapiens
atgcttttaagcaag

SEQ ID NO: 1386634 - DNA, 15 bp, Homo sapiens
catgcttttaagcaa

SEQ ID NO: 1386635 - DNA, 15 bp, Homo sapiens
acatgcttttaagca

SEQ ID NO: 1386636 - DNA, 15 bp, Homo sapiens
cacatgcttttaagc

SEQ ID NO: 1386637 - DNA, 15 bp, Homo sapiens
tcacatgcttttaag

SEQ ID NO: 1386638 - DNA, 15 bp, Homo sapiens
atcacatgcttttaa

SEQ ID NO: 1386639 - DNA, 15 bp, Homo sapiens
catcacatgctttta

SEQ ID NO: 1386640 - DNA, 15 bp, Homo sapiens
tcatcacatgctttt

SEQ ID NO: 1386641 - DNA, 15 bp, Homo sapiens
ttcatcacatgcttt

SEQ ID NO: 1386642 - DNA, 15 bp, Homo sapiens
cttcatcacatgctt

SEQ ID NO: 1386643 - DNA, 15 bp, Homo sapiens
acttcatcacatgct

SEQ ID NO: 1386644 - DNA, 15 bp, Homo sapiens
aacttcatcacatgc

SEQ ID NO: 1386645 - DNA, 15 bp, Homo sapiens
gaacttcatcacatg

SEQ ID NO: 1386646 - DNA, 15 bp, Homo sapiens
tgaacttcatcacat

SEQ ID NO: 1386647 - DNA, 15 bp, Homo sapiens
ttgaacttcatcaca

SEQ ID NO: 1386648 - DNA, 15 bp, Homo sapiens
tttgaacttcatcac

SEQ ID NO: 1386649 - DNA, 15 bp, Homo sapiens
atttgaacttcatca

SEQ ID NO: 1386650 - DNA, 15 bp, Homo sapiens
aatttgaacttcatc

SEQ ID NO: 1386651 - DNA, 15 bp, Homo sapiens
aaatttgaacttcat

SEQ ID NO: 1386652 - DNA, 15 bp, Homo sapiens
aaaatttgaacttca

SEQ ID NO: 1386653 - DNA, 15 bp, Homo sapiens
aaaaatttgaacttc

SEQ ID NO: 1386654 - DNA, 15 bp, Homo sapiens
taaaaatttgaactt

SEQ ID NO: 1386655 - DNA, 15 bp, Homo sapiens
ttaaaaatttgaact

SEQ ID NO: 1386656 - DNA, 15 bp, Homo sapiens
tttaaaaatttgaac

SEQ ID NO: 1386657 - DNA, 15 bp, Homo sapiens
ttttaaaaatttgaa

SEQ ID NO: 1386658 - DNA, 15 bp, Homo sapiens
tttttaaaaatttga

SEQ ID NO: 1386659 - DNA, 15 bp, Homo sapiens
ttttttaaaaatttg

SEQ ID NO: 1386660 - DNA, 15 bp, Homo sapiens
attttttaaaaattt

SEQ ID NO: 1386661 - DNA, 15 bp, Homo sapiens
tattttttaaaaatt

SEQ ID NO: 1386662 - DNA, 15 bp, Homo sapiens
attattttttaaaaa

SEQ ID NO: 1386663 - DNA, 15 bp, Homo sapiens
aattattttttaaaa

SEQ ID NO: 1386664 - DNA, 15 bp, Homo sapiens
aaattattttttaaa

SEQ ID NO: 1386665 - DNA, 15 bp, Homo sapiens
taaattattttttaa

SEQ ID NO: 1386666 - DNA, 15 bp, Homo sapiens
atttaaattattttt

SEQ ID NO: 1386667 - DNA, 15 bp, Homo sapiens
catttaaattatttt

SEQ ID NO: 1386668 - DNA, 15 bp, Homo sapiens
acatttaaattattt

SEQ ID NO: 1386669 - DNA, 15 bp, Homo sapiens
aacatttaaattatt

SEQ ID NO: 1386670 - DNA, 15 bp, Homo sapiens
aaacatttaaattat

SEQ ID NO: 1386671 - DNA, 15 bp, Homo sapiens
taaacatttaaatta

SEQ ID NO: 1386672 - DNA, 15 bp, Homo sapiens
ttaaacatttaaatt

SEQ ID NO: 1386673 - DNA, 15 bp, Homo sapiens
attaaacatttaaat

SEQ ID NO: 1386674 - DNA, 15 bp, Homo sapiens
cattaaacatttaaa

SEQ ID NO: 1386675 - DNA, 15 bp, Homo sapiens
ccattaaacatttaa

SEQ ID NO: 1386676 - DNA, 15 bp, Homo sapiens
cccattaaacattta

SEQ ID NO: 1386677 - DNA, 15 bp, Homo sapiens
tcccattaaacattt

SEQ ID NO: 1386678 - DNA, 15 bp, Homo sapiens
gtcccattaaacatt

SEQ ID NO: 1386679 - DNA, 15 bp, Homo sapiens
tgtcccattaaacat

SEQ ID NO: 1386680 - DNA, 15 bp, Homo sapiens
gtgtcccattaaaca

SEQ ID NO: 1386681 - DNA, 15 bp, Homo sapiens
ggtgtcccattaaac

SEQ ID NO: 1386682 - DNA, 15 bp, Homo sapiens
tggtgtcccattaaa

SEQ ID NO: 1386683 - DNA, 15 bp, Homo sapiens
atggtgtcccattaa

SEQ ID NO: 1386684 - DNA, 15 bp, Homo sapiens
gatggtgtcccatta

SEQ ID NO: 1386685 - DNA, 15 bp, Homo sapiens
tgatggtgtcccatt

SEQ ID NO: 1386686 - DNA, 15 bp, Homo sapiens
gtgatggtgtcccat

SEQ ID NO: 1386687 - DNA, 15 bp, Homo sapiens
ggtgatggtgtccca

SEQ ID NO: 1386688 - DNA, 15 bp, Homo sapiens
aggtgatggtgtccc

SEQ ID NO: 1386689 - DNA, 15 bp, Homo sapiens
aaggtgatggtgtcc

SEQ ID NO: 1386690 - DNA, 15 bp, Homo sapiens
aaaggtgatggtgtc

SEQ ID NO: 1386691 - DNA, 15 bp, Homo sapiens
gaaaggtgatggtgt

SEQ ID NO: 1386692 - DNA, 15 bp, Homo sapiens
tgaaaggtgatggtg

SEQ ID NO: 1386693 - DNA, 15 bp, Homo sapiens
ttgaaaggtgatggt

SEQ ID NO: 1386694 - DNA, 15 bp, Homo sapiens
cttgaaaggtgatgg

SEQ ID NO: 1386695 - DNA, 15 bp, Homo sapiens
tcttgaaaggtgatg

SEQ ID NO: 1386696 - DNA, 15 bp, Homo sapiens
atcttgaaaggtgat

SEQ ID NO: 1386697 - DNA, 15 bp, Homo sapiens
tatcttgaaaggtga

SEQ ID NO: 1386698 - DNA, 15 bp, Homo sapiens
ctatcttgaaaggtg

SEQ ID NO: 1386699 - DNA, 15 bp, Homo sapiens
tctatcttgaaaggt

SEQ ID NO: 1386700 - DNA, 15 bp, Homo sapiens
ctctatcttgaaagg

SEQ ID NO: 1386701 - DNA, 15 bp, Homo sapiens
gctctatcttgaaag

SEQ ID NO: 1386702 - DNA, 15 bp, Homo sapiens
ggctctatcttgaaa

SEQ ID NO: 1386703 - DNA, 15 bp, Homo sapiens
aggctctatcttgaa

SEQ ID NO: 1386704 - DNA, 15 bp, Homo sapiens
caggctctatcttga

SEQ ID NO: 1386705 - DNA, 15 bp, Homo sapiens
ccaggctctatcttg

SEQ ID NO: 1386706 - DNA, 15 bp, Homo sapiens
accaggctctatctt

SEQ ID NO: 1386707 - DNA, 15 bp, Homo sapiens
taccaggctctatct

SEQ ID NO: 1386708 - DNA, 15 bp, Homo sapiens
gtaccaggctctatc

SEQ ID NO: 1386709 - DNA, 15 bp, Homo sapiens
agtaccaggctctat

SEQ ID NO: 1386710 - DNA, 15 bp, Homo sapiens
aagtaccaggctcta

SEQ ID NO: 1386711 - DNA, 15 bp, Homo sapiens
gaagtaccaggctct

SEQ ID NO: 1386712 - DNA, 15 bp, Homo sapiens
agaagtaccaggctc

SEQ ID NO: 1386713 - DNA, 15 bp, Homo sapiens
cagaagtaccaggct

SEQ ID NO: 1386714 - DNA, 15 bp, Homo sapiens
gcagaagtaccaggc

SEQ ID NO: 1386715 - DNA, 15 bp, Homo sapiens
tgcagaagtaccagg

SEQ ID NO: 1386716 - DNA, 15 bp, Homo sapiens
atgcagaagtaccag

SEQ ID NO: 1386717 - DNA, 15 bp, Homo sapiens
catgcagaagtacca

SEQ ID NO: 1386718 - DNA, 15 bp, Homo sapiens
ccatgcagaagtacc

SEQ ID NO: 1386719 - DNA, 15 bp, Homo sapiens
accatgcagaagtac

SEQ ID NO: 1386720 - DNA, 15 bp, Homo sapiens
gaccatgcagaagta

SEQ ID NO: 1386721 - DNA, 15 bp, Homo sapiens
agaccatgcagaagt

SEQ ID NO: 1386722 - DNA, 15 bp, Homo sapiens
aagaccatgcagaag

SEQ ID NO: 1386723 - DNA, 15 bp, Homo sapiens
gaagaccatgcagaa

SEQ ID NO: 1386724 - DNA, 15 bp, Homo sapiens
tgaagaccatgcaga

SEQ ID NO: 1386725 - DNA, 15 bp, Homo sapiens
gtgaagaccatgcag

SEQ ID NO: 1386726 - DNA, 15 bp, Homo sapiens
tgtgaagaccatgca

SEQ ID NO: 1386727 - DNA, 15 bp, Homo sapiens
ttgtgaagaccatgc

SEQ ID NO: 1386728 - DNA, 15 bp, Homo sapiens
cttgtgaagaccatg

SEQ ID NO: 1386729 - DNA, 15 bp, Homo sapiens
ccttgtgaagaccat

SEQ ID NO: 1386730 - DNA, 15 bp, Homo sapiens
gccttgtgaagacca

SEQ ID NO: 1386731 - DNA, 15 bp, Homo sapiens
tgccttgtgaagacc

SEQ ID NO: 1386732 - DNA, 15 bp, Homo sapiens
ctgccttgtgaagac

SEQ ID NO: 1386733 - DNA, 15 bp, Homo sapiens
cctgccttgtgaaga

SEQ ID NO: 1386734 - DNA, 15 bp, Homo sapiens
acctgccttgtgaag

SEQ ID NO: 1386735 - DNA, 15 bp, Homo sapiens
cacctgccttgtgaa

SEQ ID NO: 1386736 - DNA, 15 bp, Homo sapiens
ccacctgccttgtga

SEQ ID NO: 1386737 - DNA, 15 bp, Homo sapiens
cccacctgccttgtg

SEQ ID NO: 1386738 - DNA, 15 bp, Homo sapiens
ccccacctgccttgt

SEQ ID NO: 1386739 - DNA, 15 bp, Homo sapiens
tccccacctgccttg

SEQ ID NO: 1386740 - DNA, 15 bp, Homo sapiens
ttccccacctgcctt

SEQ ID NO: 1386741 - DNA, 15 bp, Homo sapiens
attccccacctgcct

SEQ ID NO: 1386742 - DNA, 15 bp, Homo sapiens
aattccccacctgcc

SEQ ID NO: 1386743 - DNA, 15 bp, Homo sapiens
ttgaattccatttct

SEQ ID NO: 1386744 - DNA, 15 bp, Homo sapiens
tttgaattccatttc

SEQ ID NO: 1386745 - DNA, 15 bp, Homo sapiens
gtttgaattccattt

SEQ ID NO: 1386746 - DNA, 15 bp, Homo sapiens
agtttgaattccatt

SEQ ID NO: 1386747 - DNA, 15 bp, Homo sapiens
gagtttgaattccat

SEQ ID NO: 1386748 - DNA, 15 bp, Homo sapiens
tgagtttgaattcca

SEQ ID NO: 1386749 - DNA, 15 bp, Homo sapiens
ctgagtttgaattcc

SEQ ID NO: 1386750 - DNA, 15 bp, Homo sapiens
actgagtttgaattc

SEQ ID NO: 1386751 - DNA, 15 bp, Homo sapiens
gactgagtttgaatt

SEQ ID NO: 1386752 - DNA, 15 bp, Homo sapiens
tgactgagtttgaat

SEQ ID NO: 1386753 - DNA, 15 bp, Homo sapiens
atgactgagtttgaa

SEQ ID NO: 1386754 - DNA, 15 bp, Homo sapiens
gatgactgagtttga

SEQ ID NO: 1386755 - DNA, 15 bp, Homo sapiens
agatgactgagtttg

SEQ ID NO: 1386756 - DNA, 15 bp, Homo sapiens
gagatgactgagttt

SEQ ID NO: 1386757 - DNA, 15 bp, Homo sapiens
agagatgactgagtt

SEQ ID NO: 1386758 - DNA, 15 bp, Homo sapiens
tagagatgactgagt

SEQ ID NO: 1386759 - DNA, 15 bp, Homo sapiens
atagagatgactgag

SEQ ID NO: 1386760 - DNA, 15 bp, Homo sapiens
gatagagatgactga

SEQ ID NO: 1386761 - DNA, 15 bp, Homo sapiens
agatagagatgactg

SEQ ID NO: 1386762 - DNA, 15 bp, Homo sapiens
gagatagagatgact

SEQ ID NO: 1386763 - DNA, 15 bp, Homo sapiens
ggagatagagatgac

SEQ ID NO: 1386764 - DNA, 15 bp, Homo sapiens
tggagatagagatga

SEQ ID NO: 1386765 - DNA, 15 bp, Homo sapiens
ctggagatagagatg

SEQ ID NO: 1386766 - DNA, 15 bp, Homo sapiens
tctggagatagagat

SEQ ID NO: 1386767 - DNA, 15 bp, Homo sapiens
ctctggagatagaga

SEQ ID NO: 1386768 - DNA, 15 bp, Homo sapiens
actctggagatagag

SEQ ID NO: 1386769 - DNA, 15 bp, Homo sapiens
aactctggagataga

SEQ ID NO: 1386770 - DNA, 15 bp, Homo sapiens
aaactctggagatag

SEQ ID NO: 1386771 - DNA, 15 bp, Homo sapiens
gaaactctggagata

SEQ ID NO: 1386772 - DNA, 15 bp, Homo sapiens
agaaactctggagat

SEQ ID NO: 1386773 - DNA, 15 bp, Homo sapiens
aagaaactctggaga

SEQ ID NO: 1386774 - DNA, 15 bp, Homo sapiens
taagaaactctggag

SEQ ID NO: 1386775 - DNA, 15 bp, Homo sapiens
gtaagaaactctgga

SEQ ID NO: 1386776 - DNA, 15 bp, Homo sapiens
ggtaagaaactctgg

SEQ ID NO: 1386777 - DNA, 15 bp, Homo sapiens
tggtaagaaactctg

SEQ ID NO: 1386778 - DNA, 15 bp, Homo sapiens
gtggtaagaaactct

SEQ ID NO: 1386779 - DNA, 15 bp, Homo sapiens
tgtggtaagaaactc

SEQ ID NO: 1386780 - DNA, 15 bp, Homo sapiens
ttgtggtaagaaact

SEQ ID NO: 1386781 - DNA, 15 bp, Homo sapiens
attgtggtaagaaac

SEQ ID NO: 1386782 - DNA, 15 bp, Homo sapiens
aattgtggtaagaaa

SEQ ID NO: 1386783 - DNA, 15 bp, Homo sapiens
caattgtggtaagaa

SEQ ID NO: 1386784 - DNA, 15 bp, Homo sapiens
gcaattgtggtaaga

SEQ ID NO: 1386785 - DNA, 15 bp, Homo sapiens
tgcaattgtggtaag

SEQ ID NO: 1386786 - DNA, 15 bp, Homo sapiens
gtgcaattgtggtaa

SEQ ID NO: 1386787 - DNA, 15 bp, Homo sapiens
agtgcaattgtggta

SEQ ID NO: 1386788 - DNA, 15 bp, Homo sapiens
tagtgcaattgtggt

SEQ ID NO: 1386789 - DNA, 15 bp, Homo sapiens
ttagtgcaattgtgg

SEQ ID NO: 1386790 - DNA, 15 bp, Homo sapiens
cttagtgcaattgtg

SEQ ID NO: 1386791 - DNA, 15 bp, Homo sapiens
gcttagtgcaattgt

SEQ ID NO: 1386792 - DNA, 15 bp, Homo sapiens
tgcttagtgcaattg

SEQ ID NO: 1386793 - DNA, 15 bp, Homo sapiens
ttgcttagtgcaatt

SEQ ID NO: 1386794 - DNA, 15 bp, Homo sapiens
attgcttagtgcaat

SEQ ID NO: 1386795 - DNA, 15 bp, Homo sapiens
tattgcttagtgcaa

SEQ ID NO: 1386796 - DNA, 15 bp, Homo sapiens
ttattgcttagtgca

SEQ ID NO: 1386797 - DNA, 15 bp, Homo sapiens
tttattgcttagtgc

SEQ ID NO: 1386798 - DNA, 15 bp, Homo sapiens
ttttattgcttagtg

SEQ ID NO: 1386799 - DNA, 15 bp, Homo sapiens
cttttattgcttagt

SEQ ID NO: 1386800 - DNA, 15 bp, Homo sapiens
tcttttattgcttag

SEQ ID NO: 1386801 - DNA, 15 bp, Homo sapiens
gtcttttattgctta

SEQ ID NO: 1386802 - DNA, 15 bp, Homo sapiens
tgtcttttattgctt

SEQ ID NO: 1386803 - DNA, 15 bp, Homo sapiens
atgtcttttattgct

SEQ ID NO: 1386804 - DNA, 15 bp, Homo sapiens
catgtcttttattgc

SEQ ID NO: 1386805 - DNA, 15 bp, Homo sapiens
tcatgtcttttattg

SEQ ID NO: 1386806 - DNA, 15 bp, Homo sapiens
ttcatgtcttttatt

SEQ ID NO: 1386807 - DNA, 15 bp, Homo sapiens
attcatgtcttttat

SEQ ID NO: 1386808 - DNA, 15 bp, Homo sapiens
tattcatgtctttta

SEQ ID NO: 1386809 - DNA, 15 bp, Homo sapiens
ttattcatgtctttt

SEQ ID NO: 1386810 - DNA, 15 bp, Homo sapiens
tttattcatgtcttt

SEQ ID NO: 1386811 - DNA, 15 bp, Homo sapiens
atttattcatgtctt

SEQ ID NO: 1386812 - DNA, 15 bp, Homo sapiens
gatttattcatgtct

SEQ ID NO: 1386813 - DNA, 15 bp, Homo sapiens
tgatttattcatgtc

SEQ ID NO: 1386814 - DNA, 15 bp, Homo sapiens
ttgatttattcatgt

SEQ ID NO: 1386815 - DNA, 15 bp, Homo sapiens
tttgatttattcatg

SEQ ID NO: 1386816 - DNA, 15 bp, Homo sapiens
ctttgatttattcat

SEQ ID NO: 1386817 - DNA, 15 bp, Homo sapiens
cctttgatttattca

SEQ ID NO: 1386818 - DNA, 15 bp, Homo sapiens
tcctttgatttattc

SEQ ID NO: 1386819 - DNA, 15 bp, Homo sapiens
ttcctttgatttatt

SEQ ID NO: 1386820 - DNA, 15 bp, Homo sapiens
cttcctttgatttat

SEQ ID NO: 1386821 - DNA, 15 bp, Homo sapiens
gcttcctttgattta

SEQ ID NO: 1386822 - DNA, 15 bp, Homo sapiens
agcttcctttgattt

SEQ ID NO: 1386823 - DNA, 15 bp, Homo sapiens
aagcttcctttgatt

SEQ ID NO: 1386824 - DNA, 15 bp, Homo sapiens
aaagcttcctttgat

SEQ ID NO: 1386825 - DNA, 15 bp, Homo sapiens
caaagcttcctttga

SEQ ID NO: 1386826 - DNA, 15 bp, Homo sapiens
acaaagcttcctttg

SEQ ID NO: 1386827 - DNA, 15 bp, Homo sapiens
gacaaagcttccttt

SEQ ID NO: 1386828 - DNA, 15 bp, Homo sapiens
ggacaaagcttcctt

SEQ ID NO: 1386829 - DNA, 15 bp, Homo sapiens
aggacaaagcttcct

SEQ ID NO: 1386830 - DNA, 15 bp, Homo sapiens
taggacaaagcttcc

SEQ ID NO: 1386831 - DNA, 15 bp, Homo sapiens
ataggacaaagcttc

SEQ ID NO: 1386832 - DNA, 15 bp, Homo sapiens
aataggacaaagctt

SEQ ID NO: 1386833 - DNA, 15 bp, Homo sapiens
caataggacaaagct

SEQ ID NO: 1386834 - DNA, 15 bp, Homo sapiens
ccaataggacaaagc

SEQ ID NO: 1386835 - DNA, 15 bp, Homo sapiens
gccaataggacaaag

SEQ ID NO: 1386836 - DNA, 15 bp, Homo sapiens
tgccaataggacaaa

SEQ ID NO: 1386837 - DNA, 15 bp, Homo sapiens
ttgccaataggacaa

SEQ ID NO: 1386838 - DNA, 15 bp, Homo sapiens
tttgccaataggaca

SEQ ID NO: 1386839 - DNA, 15 bp, Homo sapiens
ttttgccaataggac

SEQ ID NO: 1386840 - DNA, 15 bp, Homo sapiens
tttttgccaatagga

SEQ ID NO: 1386841 - DNA, 15 bp, Homo sapiens
ctttttgccaatagg

SEQ ID NO: 1386842 - DNA, 15 bp, Homo sapiens
tctttttgccaatag

SEQ ID NO: 1386843 - DNA, 15 bp, Homo sapiens
ttctttttgccaata

SEQ ID NO: 1386844 - DNA, 15 bp, Homo sapiens
tttctttttgccaat

SEQ ID NO: 1386845 - DNA, 15 bp, Homo sapiens
ctttctttttgccaa

SEQ ID NO: 1386846 - DNA, 15 bp, Homo sapiens
cctttctttttgcca

SEQ ID NO: 1386847 - DNA, 15 bp, Homo sapiens
ccctttctttttgcc

SEQ ID NO: 1386848 - DNA, 15 bp, Homo sapiens
gccctttctttttgc

SEQ ID NO: 1386849 - DNA, 15 bp, Homo sapiens
agccctttctttttg

SEQ ID NO: 1386850 - DNA, 15 bp, Homo sapiens
cagccctttcttttt

SEQ ID NO: 1386851 - DNA, 15 bp, Homo sapiens
tcagccctttctttt

SEQ ID NO: 1386852 - DNA, 15 bp, Homo sapiens
ttcagccctttcttt

SEQ ID NO: 1386853 - DNA, 15 bp, Homo sapiens
attcagccctttctt

SEQ ID NO: 1386854 - DNA, 15 bp, Homo sapiens
cattcagccctttct

SEQ ID NO: 1386855 - DNA, 15 bp, Homo sapiens
tcattcagccctttc

SEQ ID NO: 1386856 - DNA, 15 bp, Homo sapiens
gtcattcagcccttt

SEQ ID NO: 1386857 - DNA, 15 bp, Homo sapiens
agtcattcagccctt

SEQ ID NO: 1386858 - DNA, 15 bp, Homo sapiens
gagtcattcagccct

SEQ ID NO: 1386859 - DNA, 15 bp, Homo sapiens
tgagtcattcagccc

SEQ ID NO: 1386860 - DNA, 15 bp, Homo sapiens
ctgagtcattcagcc

SEQ ID NO: 1386861 - DNA, 15 bp, Homo sapiens
actgagtcattcagc

SEQ ID NO: 1386862 - DNA, 15 bp, Homo sapiens
aactgagtcattcag

SEQ ID NO: 1386863 - DNA, 15 bp, Homo sapiens
aaactgagtcattca

SEQ ID NO: 1386864 - DNA, 15 bp, Homo sapiens
gaaactgagtcattc

SEQ ID NO: 1386865 - DNA, 15 bp, Homo sapiens
tgaaactgagtcatt

SEQ ID NO: 1386866 - DNA, 15 bp, Homo sapiens
ctgaaactgagtcat

SEQ ID NO: 1386867 - DNA, 15 bp, Homo sapiens
cctgaaactgagtca

SEQ ID NO: 1386868 - DNA, 15 bp, Homo sapiens
gcctgaaactgagtc

SEQ ID NO: 1386869 - DNA, 15 bp, Homo sapiens
agcctgaaactgagt

SEQ ID NO: 1386870 - DNA, 15 bp, Homo sapiens
cagcctgaaactgag

SEQ ID NO: 1386871 - DNA, 15 bp, Homo sapiens
tcagcctgaaactga

SEQ ID NO: 1386872 - DNA, 15 bp, Homo sapiens
ctcagcctgaaactg

SEQ ID NO: 1386873 - DNA, 15 bp, Homo sapiens
tctcagcctgaaact

SEQ ID NO: 1386874 - DNA, 15 bp, Homo sapiens
ttctcagcctgaaac

SEQ ID NO: 1386875 - DNA, 15 bp, Homo sapiens
gttctcagcctgaaa

SEQ ID NO: 1386876 - DNA, 15 bp, Homo sapiens
tgttctcagcctgaa

SEQ ID NO: 1386877 - DNA, 15 bp, Homo sapiens
gtgttctcagcctga

SEQ ID NO: 1386878 - DNA, 15 bp, Homo sapiens
agtgttctcagcctg

SEQ ID NO: 1386879 - DNA, 15 bp, Homo sapiens
cagtgttctcagcct

SEQ ID NO: 1386880 - DNA, 15 bp, Homo sapiens
tcagtgttctcagcc

SEQ ID NO: 1386881 - DNA, 15 bp, Homo sapiens
ctcagtgttctcagc

SEQ ID NO: 1386882 - DNA, 15 bp, Homo sapiens
actcagtgttctcag

SEQ ID NO: 1386883 - DNA, 15 bp, Homo sapiens
aactcagtgttctca

SEQ ID NO: 1386884 - DNA, 15 bp, Homo sapiens
gaactcagtgttctc

SEQ ID NO: 1386885 - DNA, 15 bp, Homo sapiens
tgaactcagtgttct

SEQ ID NO: 1386886 - DNA, 15 bp, Homo sapiens
ctgaactcagtgttc

SEQ ID NO: 1386887 - DNA, 15 bp, Homo sapiens
actgaactcagtgtt

SEQ ID NO: 1386888 - DNA, 15 bp, Homo sapiens
tactgaactcagtgt

SEQ ID NO: 1386889 - DNA, 15 bp, Homo sapiens
atactgaactcagtg

SEQ ID NO: 1386890 - DNA, 15 bp, Homo sapiens
catactgaactcagt

SEQ ID NO: 1386891 - DNA, 15 bp, Homo sapiens
gcatactgaactcag

SEQ ID NO: 1386892 - DNA, 15 bp, Homo sapiens
agcatactgaactca

SEQ ID NO: 1386893 - DNA, 15 bp, Homo sapiens
cagcatactgaactc

SEQ ID NO: 1386894 - DNA, 15 bp, Homo sapiens
ccagcatactgaact

SEQ ID NO: 1386895 - DNA, 15 bp, Homo sapiens
accagcatactgaac

SEQ ID NO: 1386896 - DNA, 15 bp, Homo sapiens
aaccagcatactgaa

SEQ ID NO: 1386897 - DNA, 15 bp, Homo sapiens
aaaccagcatactga

SEQ ID NO: 1386898 - DNA, 15 bp, Homo sapiens
gaaaccagcatactg

SEQ ID NO: 1386899 - DNA, 15 bp, Homo sapiens
ggaaaccagcatact

SEQ ID NO: 1386900 - DNA, 15 bp, Homo sapiens
aggaaaccagcatac

SEQ ID NO: 1386901 - DNA, 15 bp, Homo sapiens
aaggaaaccagcata

SEQ ID NO: 1386902 - DNA, 15 bp, Homo sapiens
gaaggaaaccagcat

SEQ ID NO: 1386903 - DNA, 15 bp, Homo sapiens
tgaaggaaaccagca

SEQ ID NO: 1386904 - DNA, 15 bp, Homo sapiens
ctgaaggaaaccagc

SEQ ID NO: 1386905 - DNA, 15 bp, Homo sapiens
cctgaaggaaaccag

SEQ ID NO: 1386906 - DNA, 15 bp, Homo sapiens
tcctgaaggaaacca

SEQ ID NO: 1386907 - DNA, 15 bp, Homo sapiens
ttcctgaaggaaacc

SEQ ID NO: 1386908 - DNA, 15 bp, Homo sapiens
attcctgaaggaaac

SEQ ID NO: 1386909 - DNA, 15 bp, Homo sapiens
tattcctgaaggaaa

SEQ ID NO: 1386910 - DNA, 15 bp, Homo sapiens
ctattcctgaaggaa

SEQ ID NO: 1386911 - DNA, 15 bp, Homo sapiens
tctattcctgaagga

SEQ ID NO: 1386912 - DNA, 15 bp, Homo sapiens
ttctattcctgaagg

SEQ ID NO: 1386913 - DNA, 15 bp, Homo sapiens
attctattcctgaag

SEQ ID NO: 1386914 - DNA, 15 bp, Homo sapiens
aattctattcctgaa

SEQ ID NO: 1386915 - DNA, 15 bp, Homo sapiens
aaattctattcctga

SEQ ID NO: 1386916 - DNA, 15 bp, Homo sapiens
aaaattctattcctg

SEQ ID NO: 1386917 - DNA, 15 bp, Homo sapiens
taaaattctattcct

SEQ ID NO: 1386918 - DNA, 15 bp, Homo sapiens
gtaaaattctattcc

SEQ ID NO: 1386919 - DNA, 15 bp, Homo sapiens
tgtaaaattctattc

SEQ ID NO: 1386920 - DNA, 15 bp, Homo sapiens
gtgtaaaattctatt

SEQ ID NO: 1386921 - DNA, 15 bp, Homo sapiens
tgtgtaaaattctat

SEQ ID NO: 1386922 - DNA, 15 bp, Homo sapiens
atgtgtaaaattcta

SEQ ID NO: 1386923 - DNA, 15 bp, Homo sapiens
tatgtgtaaaattct

SEQ ID NO: 1386924 - DNA, 15 bp, Homo sapiens
atatgtgtaaaattc

SEQ ID NO: 1386925 - DNA, 15 bp, Homo sapiens
aatatgtgtaaaatt

SEQ ID NO: 1386926 - DNA, 15 bp, Homo sapiens
taatatgtgtaaaat

SEQ ID NO: 1386927 - DNA, 15 bp, Homo sapiens
ataatatgtgtaaaa

SEQ ID NO: 1386928 - DNA, 15 bp, Homo sapiens
cataatatgtgtaaa

SEQ ID NO: 1386929 - DNA, 15 bp, Homo sapiens
tcataatatgtgtaa

SEQ ID NO: 1386930 - DNA, 15 bp, Homo sapiens
ctcataatatgtgta

SEQ ID NO: 1386931 - DNA, 15 bp, Homo sapiens
actcataatatgtgt

SEQ ID NO: 1386932 - DNA, 15 bp, Homo sapiens
aactcataatatgtg

SEQ ID NO: 1386933 - DNA, 15 bp, Homo sapiens
gaactcataatatgt

SEQ ID NO: 1386934 - DNA, 15 bp, Homo sapiens
tgaactcataatatg

SEQ ID NO: 1386935 - DNA, 15 bp, Homo sapiens
ctgaactcataatat

SEQ ID NO: 1386936 - DNA, 15 bp, Homo sapiens
tctgaactcataata

SEQ ID NO: 1386937 - DNA, 15 bp, Homo sapiens
ctctgaactcataat

SEQ ID NO: 1386938 - DNA, 15 bp, Homo sapiens
tctctgaactcataa

SEQ ID NO: 1386939 - DNA, 15 bp, Homo sapiens
ctctctgaactcata

SEQ ID NO: 1386940 - DNA, 15 bp, Homo sapiens
cctctctgaactcat

SEQ ID NO: 1386941 - DNA, 15 bp, Homo sapiens
gcctctctgaactca

SEQ ID NO: 1386942 - DNA, 15 bp, Homo sapiens
agcctctctgaactc

SEQ ID NO: 1386943 - DNA, 15 bp, Homo sapiens
cagcctctctgaact

SEQ ID NO: 1386944 - DNA, 15 bp, Homo sapiens
acagcctctctgaac

SEQ ID NO: 1386945 - DNA, 15 bp, Homo sapiens
cacagcctctctgaa

SEQ ID NO: 1386946 - DNA, 15 bp, Homo sapiens
ccacagcctctctga

SEQ ID NO: 1386947 - DNA, 15 bp, Homo sapiens
tccacagcctctctg

SEQ ID NO: 1386948 - DNA, 15 bp, Homo sapiens
gtccacagcctctct

SEQ ID NO: 1386949 - DNA, 15 bp, Homo sapiens
tgtccacagcctctc

SEQ ID NO: 1386950 - DNA, 15 bp, Homo sapiens
ttgtccacagcctct

SEQ ID NO: 1386951 - DNA, 15 bp, Homo sapiens
tttgtccacagcctc

SEQ ID NO: 1386952 - DNA, 15 bp, Homo sapiens
atttgtccacagcct

SEQ ID NO: 1386953 - DNA, 15 bp, Homo sapiens
aatttgtccacagcc

SEQ ID NO: 1386954 - DNA, 15 bp, Homo sapiens
aaatttgtccacagc

SEQ ID NO: 1386955 - DNA, 15 bp, Homo sapiens
taaatttgtccacag

SEQ ID NO: 1386956 - DNA, 15 bp, Homo sapiens
ttaaatttgtccaca

SEQ ID NO: 1386957 - DNA, 15 bp, Homo sapiens
attaaatttgtccac

SEQ ID NO: 1386958 - DNA, 15 bp, Homo sapiens
aattaaatttgtcca

SEQ ID NO: 1386959 - DNA, 15 bp, Homo sapiens
taattaaatttgtcc

SEQ ID NO: 1386960 - DNA, 15 bp, Homo sapiens
ataattaaatttgtc

SEQ ID NO: 1386961 - DNA, 15 bp, Homo sapiens
tataattaaatttgt

SEQ ID NO: 1386962 - DNA, 15 bp, Homo sapiens
ctataattaaatttg

SEQ ID NO: 1386963 - DNA, 15 bp, Homo sapiens
actataattaaattt

SEQ ID NO: 1386964 - DNA, 15 bp, Homo sapiens
aactataattaaatt

SEQ ID NO: 1386965 - DNA, 15 bp, Homo sapiens
gaactataattaaat

SEQ ID NO: 1386966 - DNA, 15 bp, Homo sapiens
tgaactataattaaa

SEQ ID NO: 1386967 - DNA, 15 bp, Homo sapiens
gtgaactataattaa

SEQ ID NO: 1386968 - DNA, 15 bp, Homo sapiens
ggtgaactataatta

SEQ ID NO: 1386969 - DNA, 15 bp, Homo sapiens
gggtgaactataatt

SEQ ID NO: 1386970 - DNA, 15 bp, Homo sapiens
tgggtgaactataat

SEQ ID NO: 1386971 - DNA, 15 bp, Homo sapiens
ttgggtgaactataa

SEQ ID NO: 1386972 - DNA, 15 bp, Homo sapiens
attgggtgaactata

SEQ ID NO: 1386973 - DNA, 15 bp, Homo sapiens
tattgggtgaactat

SEQ ID NO: 1386974 - DNA, 15 bp, Homo sapiens
ttattgggtgaacta

SEQ ID NO: 1386975 - DNA, 15 bp, Homo sapiens
gttattgggtgaact

SEQ ID NO: 1386976 - DNA, 15 bp, Homo sapiens
ggttattgggtgaac

SEQ ID NO: 1386977 - DNA, 15 bp, Homo sapiens
tggttattgggtgaa

SEQ ID NO: 1386978 - DNA, 15 bp, Homo sapiens
gtggttattgggtga

SEQ ID NO: 1386979 - DNA, 15 bp, Homo sapiens
ggtggttattgggtg

SEQ ID NO: 1386980 - DNA, 15 bp, Homo sapiens
tggtggttattgggt

SEQ ID NO: 1386981 - DNA, 15 bp, Homo sapiens
gtggtggttattggg

SEQ ID NO: 1386982 - DNA, 15 bp, Homo sapiens
tgtggtggttattgg

SEQ ID NO: 1386983 - DNA, 15 bp, Homo sapiens
ttgtggtggttattg

SEQ ID NO: 1386984 - DNA, 15 bp, Homo sapiens
attgtggtggttatt

SEQ ID NO: 1386985 - DNA, 15 bp, Homo sapiens
aattgtggtggttat

SEQ ID NO: 1386986 - DNA, 15 bp, Homo sapiens
caattgtggtggtta

SEQ ID NO: 1386987 - DNA, 15 bp, Homo sapiens
ccaattgtggtggtt

SEQ ID NO: 1386988 - DNA, 15 bp, Homo sapiens
tccaattgtggtggt

SEQ ID NO: 1386989 - DNA, 15 bp, Homo sapiens
atccaattgtggtgg

SEQ ID NO: 1386990 - DNA, 15 bp, Homo sapiens
tatccaattgtggtg

SEQ ID NO: 1386991 - DNA, 15 bp, Homo sapiens
ctatccaattgtggt

SEQ ID NO: 1386992 - DNA, 15 bp, Homo sapiens
tctatccaattgtgg

SEQ ID NO: 1386993 - DNA, 15 bp, Homo sapiens
ttctatccaattgtg

SEQ ID NO: 1386994 - DNA, 15 bp, Homo sapiens
attctatccaattgt

SEQ ID NO: 1386995 - DNA, 15 bp, Homo sapiens
tattctatccaattg

SEQ ID NO: 1386996 - DNA, 15 bp, Homo sapiens
ctattctatccaatt

SEQ ID NO: 1386997 - DNA, 15 bp, Homo sapiens
cctattctatccaat

SEQ ID NO: 1386998 - DNA, 15 bp, Homo sapiens
acctattctatccaa

SEQ ID NO: 1386999 - DNA, 15 bp, Homo sapiens
gacctattctatcca

SEQ ID NO: 1387000 - DNA, 15 bp, Homo sapiens
ggacctattctatcc

SEQ ID NO: 1387001 - DNA, 15 bp, Homo sapiens
tggacctattctatc

SEQ ID NO: 1387002 - DNA, 15 bp, Homo sapiens
ctggacctattctat

SEQ ID NO: 1387003 - DNA, 15 bp, Homo sapiens
actggacctattcta

SEQ ID NO: 1387004 - DNA, 15 bp, Homo sapiens
cactggacctattct

SEQ ID NO: 1387005 - DNA, 15 bp, Homo sapiens
tcactggacctattc

SEQ ID NO: 1387006 - DNA, 15 bp, Homo sapiens
ttcactggacctatt

SEQ ID NO: 1387007 - DNA, 15 bp, Homo sapiens
gttcactggacctat

SEQ ID NO: 1387008 - DNA, 15 bp, Homo sapiens
ggttcactggaccta

SEQ ID NO: 1387009 - DNA, 15 bp, Homo sapiens
tggttcactggacct

SEQ ID NO: 1387010 - DNA, 15 bp, Homo sapiens
atggttcactggacc

SEQ ID NO: 1387011 - DNA, 15 bp, Homo sapiens
tatggttcactggac

SEQ ID NO: 1387012 - DNA, 15 bp, Homo sapiens
atatggttcactgga

SEQ ID NO: 1387013 - DNA, 15 bp, Homo sapiens
aatatggttcactgg

SEQ ID NO: 1387014 - DNA, 15 bp, Homo sapiens
aaatatggttcactg

SEQ ID NO: 1387015 - DNA, 15 bp, Homo sapiens
aaaatatggttcact

SEQ ID NO: 1387016 - DNA, 15 bp, Homo sapiens
gaaaatatggttcac

SEQ ID NO: 1387017 - DNA, 15 bp, Homo sapiens
agaaaatatggttca

SEQ ID NO: 1387018 - DNA, 15 bp, Homo sapiens
aagaaaatatggttc

SEQ ID NO: 1387019 - DNA, 15 bp, Homo sapiens
caagaaaatatggtt

SEQ ID NO: 1387020 - DNA, 15 bp, Homo sapiens
ccaagaaaatatggt

SEQ ID NO: 1387021 - DNA, 15 bp, Homo sapiens
gccaagaaaatatgg

SEQ ID NO: 1387022 - DNA, 15 bp, Homo sapiens
ggccaagaaaatatg

SEQ ID NO: 1387023 - DNA, 15 bp, Homo sapiens
tggccaagaaaatat

SEQ ID NO: 1387024 - DNA, 15 bp, Homo sapiens
gtggccaagaaaata

SEQ ID NO: 1387025 - DNA, 15 bp, Homo sapiens
tgtggccaagaaaat

SEQ ID NO: 1387026 - DNA, 15 bp, Homo sapiens
ttgtggccaagaaaa

SEQ ID NO: 1387027 - DNA, 15 bp, Homo sapiens
tttgtggccaagaaa

SEQ ID NO: 1387028 - DNA, 15 bp, Homo sapiens
ttttgtggccaagaa

SEQ ID NO: 1387029 - DNA, 15 bp, Homo sapiens
attttgtggccaaga

SEQ ID NO: 1387030 - DNA, 15 bp, Homo sapiens
tattttgtggccaag

SEQ ID NO: 1387031 - DNA, 15 bp, Homo sapiens
gtattttgtggccaa

SEQ ID NO: 1387032 - DNA, 15 bp, Homo sapiens
ggtattttgtggcca

SEQ ID NO: 1387033 - DNA, 15 bp, Homo sapiens
aggtattttgtggcc

SEQ ID NO: 1387034 - DNA, 15 bp, Homo sapiens
gaggtattttgtggc

SEQ ID NO: 1387035 - DNA, 15 bp, Homo sapiens
ggaggtattttgtgg

SEQ ID NO: 1387036 - DNA, 15 bp, Homo sapiens
gggaggtattttgtg

SEQ ID NO: 1387037 - DNA, 15 bp, Homo sapiens
agggaggtattttgt

SEQ ID NO: 1387038 - DNA, 15 bp, Homo sapiens
aagggaggtattttg

SEQ ID NO: 1387039 - DNA, 15 bp, Homo sapiens
taagggaggtatttt

SEQ ID NO: 1387040 - DNA, 15 bp, Homo sapiens
gtaagggaggtattt

SEQ ID NO: 1387041 - DNA, 15 bp, Homo sapiens
ggtaagggaggtatt

SEQ ID NO: 1387042 - DNA, 15 bp, Homo sapiens
tggtaagggaggtat

SEQ ID NO: 1387043 - DNA, 15 bp, Homo sapiens
ttggtaagggaggta

SEQ ID NO: 1387044 - DNA, 15 bp, Homo sapiens
attggtaagggaggt

SEQ ID NO: 1387045 - DNA, 15 bp, Homo sapiens
aattggtaagggagg

SEQ ID NO: 1387046 - DNA, 15 bp, Homo sapiens
aaattggtaagggag

SEQ ID NO: 1387047 - DNA, 15 bp, Homo sapiens
caaattggtaaggga

SEQ ID NO: 1387048 - DNA, 15 bp, Homo sapiens
gcaaattggtaaggg

SEQ ID NO: 1387049 - DNA, 15 bp, Homo sapiens
ggcaaattggtaagg

SEQ ID NO: 1387050 - DNA, 15 bp, Homo sapiens
tggcaaattggtaag

SEQ ID NO: 1387051 - DNA, 15 bp, Homo sapiens
atggcaaattggtaa

SEQ ID NO: 1387052 - DNA, 15 bp, Homo sapiens
catggcaaattggta

SEQ ID NO: 1387053 - DNA, 15 bp, Homo sapiens
tcatggcaaattggt

SEQ ID NO: 1387054 - DNA, 15 bp, Homo sapiens
gtcatggcaaattgg

SEQ ID NO: 1387055 - DNA, 15 bp, Homo sapiens
tgtcatggcaaattg

SEQ ID NO: 1387056 - DNA, 15 bp, Homo sapiens
gtgtcatggcaaatt

SEQ ID NO: 1387057 - DNA, 15 bp, Homo sapiens
agtgtcatggcaaat

SEQ ID NO: 1387058 - DNA, 15 bp, Homo sapiens
aagtgtcatggcaaa

SEQ ID NO: 1387059 - DNA, 15 bp, Homo sapiens
taagtgtcatggcaa

SEQ ID NO: 1387060 - DNA, 15 bp, Homo sapiens
ttaagtgtcatggca

SEQ ID NO: 1387061 - DNA, 15 bp, Homo sapiens
tttaagtgtcatggc

SEQ ID NO: 1387062 - DNA, 15 bp, Homo sapiens
ttttaagtgtcatgg

SEQ ID NO: 1387063 - DNA, 15 bp, Homo sapiens
attttaagtgtcatg

SEQ ID NO: 1387064 - DNA, 15 bp, Homo sapiens
aattttaagtgtcat

SEQ ID NO: 1387065 - DNA, 15 bp, Homo sapiens
aaattttaagtgtca

SEQ ID NO: 1387066 - DNA, 15 bp, Homo sapiens
gaaattttaagtgtc

SEQ ID NO: 1387067 - DNA, 15 bp, Homo sapiens
ggaaattttaagtgt

SEQ ID NO: 1387068 - DNA, 15 bp, Homo sapiens
tggaaattttaagtg

SEQ ID NO: 1387069 - DNA, 15 bp, Homo sapiens
gtggaaattttaagt

SEQ ID NO: 1387070 - DNA, 15 bp, Homo sapiens
tgtggaaattttaag

SEQ ID NO: 1387071 - DNA, 15 bp, Homo sapiens
ttgtggaaattttaa

SEQ ID NO: 1387072 - DNA, 15 bp, Homo sapiens
attgtggaaatttta

SEQ ID NO: 1387073 - DNA, 15 bp, Homo sapiens
aattgtggaaatttt

SEQ ID NO: 1387074 - DNA, 15 bp, Homo sapiens
taattgtggaaattt

SEQ ID NO: 1387075 - DNA, 15 bp, Homo sapiens
ttaattgtggaaatt

SEQ ID NO: 1387076 - DNA, 15 bp, Homo sapiens
attaattgtggaaat

SEQ ID NO: 1387077 - DNA, 15 bp, Homo sapiens
gattaattgtggaaa

SEQ ID NO: 1387078 - DNA, 15 bp, Homo sapiens
tgattaattgtggaa

SEQ ID NO: 1387079 - DNA, 15 bp, Homo sapiens
atgattaattgtgga

SEQ ID NO: 1387080 - DNA, 15 bp, Homo sapiens
aatgattaattgtgg

SEQ ID NO: 1387081 - DNA, 15 bp, Homo sapiens
taatgattaattgtg

SEQ ID NO: 1387082 - DNA, 15 bp, Homo sapiens
ctaatgattaattgt

SEQ ID NO: 1387083 - DNA, 15 bp, Homo sapiens
gctaatgattaattg

SEQ ID NO: 1387084 - DNA, 15 bp, Homo sapiens
agctaatgattaatt

SEQ ID NO: 1387085 - DNA, 15 bp, Homo sapiens
gagctaatgattaat

SEQ ID NO: 1387086 - DNA, 15 bp, Homo sapiens
ggagctaatgattaa

SEQ ID NO: 1387087 - DNA, 15 bp, Homo sapiens
gggagctaatgatta

SEQ ID NO: 1387088 - DNA, 15 bp, Homo sapiens
ggggagctaatgatt

SEQ ID NO: 1387089 - DNA, 15 bp, Homo sapiens
aggggagctaatgat

SEQ ID NO: 1387090 - DNA, 15 bp, Homo sapiens
aaggggagctaatga

SEQ ID NO: 1387091 - DNA, 15 bp, Homo sapiens
aaaggggagctaatg

SEQ ID NO: 1387092 - DNA, 15 bp, Homo sapiens
caaaggggagctaat

SEQ ID NO: 1387093 - DNA, 15 bp, Homo sapiens
ccaaaggggagctaa

SEQ ID NO: 1387094 - DNA, 15 bp, Homo sapiens
cccaaaggggagcta

SEQ ID NO: 1387095 - DNA, 15 bp, Homo sapiens
tcccaaaggggagct

SEQ ID NO: 1387096 - DNA, 15 bp, Homo sapiens
atcccaaaggggagc

SEQ ID NO: 1387097 - DNA, 15 bp, Homo sapiens
catcccaaaggggag

SEQ ID NO: 1387098 - DNA, 15 bp, Homo sapiens
ccatcccaaagggga

SEQ ID NO: 1387099 - DNA, 15 bp, Homo sapiens
tccatcccaaagggg

SEQ ID NO: 1387100 - DNA, 15 bp, Homo sapiens
ctccatcccaaaggg

SEQ ID NO: 1387101 - DNA, 15 bp, Homo sapiens
actccatcccaaagg

SEQ ID NO: 1387102 - DNA, 15 bp, Homo sapiens
tactccatcccaaag

SEQ ID NO: 1387103 - DNA, 15 bp, Homo sapiens
ctactccatcccaaa

SEQ ID NO: 1387104 - DNA, 15 bp, Homo sapiens
actactccatcccaa

SEQ ID NO: 1387105 - DNA, 15 bp, Homo sapiens
tactactccatccca

SEQ ID NO: 1387106 - DNA, 15 bp, Homo sapiens
ctactactccatccc

SEQ ID NO: 1387107 - DNA, 15 bp, Homo sapiens
actactactccatcc

SEQ ID NO: 1387108 - DNA, 15 bp, Homo sapiens
aactactactccatc

SEQ ID NO: 1387109 - DNA, 15 bp, Homo sapiens
aaactactactccat

SEQ ID NO: 1387110 - DNA, 15 bp, Homo sapiens
taaactactactcca

SEQ ID NO: 1387111 - DNA, 15 bp, Homo sapiens
ataaactactactcc

SEQ ID NO: 1387112 - DNA, 15 bp, Homo sapiens
gataaactactactc

SEQ ID NO: 1387113 - DNA, 15 bp, Homo sapiens
ggataaactactact

SEQ ID NO: 1387114 - DNA, 15 bp, Homo sapiens
tggataaactactac

SEQ ID NO: 1387115 - DNA, 15 bp, Homo sapiens
atggataaactacta

SEQ ID NO: 1387116 - DNA, 15 bp, Homo sapiens
aatggataaactact

SEQ ID NO: 1387117 - DNA, 15 bp, Homo sapiens
caatggataaactac

SEQ ID NO: 1387118 - DNA, 15 bp, Homo sapiens
gcaatggataaacta

SEQ ID NO: 1387119 - DNA, 15 bp, Homo sapiens
tgcaatggataaact

SEQ ID NO: 1387120 - DNA, 15 bp, Homo sapiens
atgcaatggataaac

SEQ ID NO: 1387121 - DNA, 15 bp, Homo sapiens
aatgcaatggataaa

SEQ ID NO: 1387122 - DNA, 15 bp, Homo sapiens
taatgcaatggataa

SEQ ID NO: 1387123 - DNA, 15 bp, Homo sapiens
ctaatgcaatggata

SEQ ID NO: 1387124 - DNA, 15 bp, Homo sapiens
tctaatgcaatggat

SEQ ID NO: 1387125 - DNA, 15 bp, Homo sapiens
ctctaatgcaatgga

SEQ ID NO: 1387126 - DNA, 15 bp, Homo sapiens
tctctaatgcaatgg

SEQ ID NO: 1387127 - DNA, 15 bp, Homo sapiens
atctctaatgcaatg

SEQ ID NO: 1387128 - DNA, 15 bp, Homo sapiens
tatctctaatgcaat

SEQ ID NO: 1387129 - DNA, 15 bp, Homo sapiens
ctatctctaatgcaa

SEQ ID NO: 1387130 - DNA, 15 bp, Homo sapiens
cctatctctaatgca

SEQ ID NO: 1387131 - DNA, 15 bp, Homo sapiens
ccctatctctaatgc

SEQ ID NO: 1387132 - DNA, 15 bp, Homo sapiens
gccctatctctaatg

SEQ ID NO: 1387133 - DNA, 15 bp, Homo sapiens
agccctatctctaat

SEQ ID NO: 1387134 - DNA, 15 bp, Homo sapiens
gagccctatctctaa

SEQ ID NO: 1387135 - DNA, 15 bp, Homo sapiens
ggagccctatctcta

SEQ ID NO: 1387136 - DNA, 15 bp, Homo sapiens
tggagccctatctct

SEQ ID NO: 1387137 - DNA, 15 bp, Homo sapiens
atggagccctatctc

SEQ ID NO: 1387138 - DNA, 15 bp, Homo sapiens
catggagccctatct

SEQ ID NO: 1387139 - DNA, 15 bp, Homo sapiens
ccatggagccctatc

SEQ ID NO: 1387140 - DNA, 15 bp, Homo sapiens
cccatggagccctat

SEQ ID NO: 1387141 - DNA, 15 bp, Homo sapiens
ccccatggagcccta

SEQ ID NO: 1387142 - DNA, 15 bp, Homo sapiens
tccccatggagccct

SEQ ID NO: 1387143 - DNA, 15 bp, Homo sapiens
ttccccatggagccc

SEQ ID NO: 1387144 - DNA, 15 bp, Homo sapiens
tttccccatggagcc

SEQ ID NO: 1387145 - DNA, 15 bp, Homo sapiens
atttccccatggagc

SEQ ID NO: 1387146 - DNA, 15 bp, Homo sapiens
catttccccatggag

SEQ ID NO: 1387147 - DNA, 15 bp, Homo sapiens
ccatttccccatgga

SEQ ID NO: 1387148 - DNA, 15 bp, Homo sapiens
tccatttccccatgg

SEQ ID NO: 1387149 - DNA, 15 bp, Homo sapiens
ttccatttccccatg

SEQ ID NO: 1387150 - DNA, 15 bp, Homo sapiens
attccatttccccat

SEQ ID NO: 1387151 - DNA, 15 bp, Homo sapiens
tattccatttcccca

SEQ ID NO: 1387152 - DNA, 15 bp, Homo sapiens
ctattccatttcccc

SEQ ID NO: 1387153 - DNA, 15 bp, Homo sapiens
cctattccatttccc

SEQ ID NO: 1387154 - DNA, 15 bp, Homo sapiens
ccctattccatttcc

SEQ ID NO: 1387155 - DNA, 15 bp, Homo sapiens
accctattccatttc

SEQ ID NO: 1387156 - DNA, 15 bp, Homo sapiens
caccctattccattt

SEQ ID NO: 1387157 - DNA, 15 bp, Homo sapiens
tcaccctattccatt

SEQ ID NO: 1387158 - DNA, 15 bp, Homo sapiens
ctcaccctattccat

SEQ ID NO: 1387159 - DNA, 15 bp, Homo sapiens
cctcaccctattcca

SEQ ID NO: 1387160 - DNA, 15 bp, Homo sapiens
tcctcaccctattcc

SEQ ID NO: 1387161 - DNA, 15 bp, Homo sapiens
ttcctcaccctattc

SEQ ID NO: 1387162 - DNA, 15 bp, Homo sapiens
cttcctcaccctatt

SEQ ID NO: 1387163 - DNA, 15 bp, Homo sapiens
tcttcctcaccctat

SEQ ID NO: 1387164 - DNA, 15 bp, Homo sapiens
ttcttcctcacccta

SEQ ID NO: 1387165 - DNA, 15 bp, Homo sapiens
tttcttcctcaccct

SEQ ID NO: 1387166 - DNA, 15 bp, Homo sapiens
atttcttcctcaccc

SEQ ID NO: 1387167 - DNA, 15 bp, Homo sapiens
tatttcttcctcacc

SEQ ID NO: 1387168 - DNA, 15 bp, Homo sapiens
ttatttcttcctcac

SEQ ID NO: 1387169 - DNA, 15 bp, Homo sapiens
cttatttcttcctca

SEQ ID NO: 1387170 - DNA, 15 bp, Homo sapiens
ccttatttcttcctc

SEQ ID NO: 1387171 - DNA, 15 bp, Homo sapiens
accttatttcttcct

SEQ ID NO: 1387172 - DNA, 15 bp, Homo sapiens
taccttatttcttcc

SEQ ID NO: 1387173 - DNA, 15 bp, Homo sapiens
gtaccttatttcttc

SEQ ID NO: 1387174 - DNA, 15 bp, Homo sapiens
tgtaccttatttctt

SEQ ID NO: 1387175 - DNA, 15 bp, Homo sapiens
ttgtaccttatttct

SEQ ID NO: 1387176 - DNA, 15 bp, Homo sapiens
tttgtaccttatttc

SEQ ID NO: 1387177 - DNA, 15 bp, Homo sapiens
ttttgtaccttattt

SEQ ID NO: 1387178 - DNA, 15 bp, Homo sapiens
tttttgtaccttatt

SEQ ID NO: 1387179 - DNA, 15 bp, Homo sapiens
gtttttgtaccttat

SEQ ID NO: 1387180 - DNA, 15 bp, Homo sapiens
cgtttttgtacctta

SEQ ID NO: 1387181 - DNA, 15 bp, Homo sapiens
acgtttttgtacctt

SEQ ID NO: 1387182 - DNA, 15 bp, Homo sapiens
cacgtttttgtacct

SEQ ID NO: 1387183 - DNA, 15 bp, Homo sapiens
ccacgtttttgtacc

SEQ ID NO: 1387184 - DNA, 15 bp, Homo sapiens
accacgtttttgtac

SEQ ID NO: 1387185 - DNA, 15 bp, Homo sapiens
aaccacgtttttgta

SEQ ID NO: 1387186 - DNA, 15 bp, Homo sapiens
caaccacgtttttgt

SEQ ID NO: 1387187 - DNA, 15 bp, Homo sapiens
ccaaccacgtttttg

SEQ ID NO: 1387188 - DNA, 15 bp, Homo sapiens
tccaaccacgttttt

SEQ ID NO: 1387189 - DNA, 15 bp, Homo sapiens
atccaaccacgtttt

SEQ ID NO: 1387190 - DNA, 15 bp, Homo sapiens
gatccaaccacgttt

SEQ ID NO: 1387191 - DNA, 15 bp, Homo sapiens
ggatccaaccacgtt

SEQ ID NO: 1387192 - DNA, 15 bp, Homo sapiens
aggatccaaccacgt

SEQ ID NO: 1387193 - DNA, 15 bp, Homo sapiens
taggatccaaccacg

SEQ ID NO: 1387194 - DNA, 15 bp, Homo sapiens
ttaggatccaaccac

SEQ ID NO: 1387195 - DNA, 15 bp, Homo sapiens
gttaggatccaacca

SEQ ID NO: 1387196 - DNA, 15 bp, Homo sapiens
tgttaggatccaacc

SEQ ID NO: 1387197 - DNA, 15 bp, Homo sapiens
gtgttaggatccaac

SEQ ID NO: 1387198 - DNA, 15 bp, Homo sapiens
ggtgttaggatccaa

SEQ ID NO: 1387199 - DNA, 15 bp, Homo sapiens
tggtgttaggatcca

SEQ ID NO: 1387200 - DNA, 15 bp, Homo sapiens
atggtgttaggatcc

SEQ ID NO: 1387201 - DNA, 15 bp, Homo sapiens
tatggtgttaggatc

SEQ ID NO: 1387202 - DNA, 15 bp, Homo sapiens
ttatggtgttaggat

SEQ ID NO: 1387203 - DNA, 15 bp, Homo sapiens
cttatggtgttagga

SEQ ID NO: 1387204 - DNA, 15 bp, Homo sapiens
tcttatggtgttagg

SEQ ID NO: 1387205 - DNA, 15 bp, Homo sapiens
ttcttatggtgttag

SEQ ID NO: 1387206 - DNA, 15 bp, Homo sapiens
cttcttatggtgtta

SEQ ID NO: 1387207 - DNA, 15 bp, Homo sapiens
acttcttatggtgtt

SEQ ID NO: 1387208 - DNA, 15 bp, Homo sapiens
aacttcttatggtgt

SEQ ID NO: 1387209 - DNA, 15 bp, Homo sapiens
aaacttcttatggtg

SEQ ID NO: 1387210 - DNA, 15 bp, Homo sapiens
aaaacttcttatggt

SEQ ID NO: 1387211 - DNA, 15 bp, Homo sapiens
caaaacttcttatgg

SEQ ID NO: 1387212 - DNA, 15 bp, Homo sapiens
acaaaacttcttatg

SEQ ID NO: 1387213 - DNA, 15 bp, Homo sapiens
cacaaaacttcttat

SEQ ID NO: 1387214 - DNA, 15 bp, Homo sapiens
gcacaaaacttctta

SEQ ID NO: 1387215 - DNA, 15 bp, Homo sapiens
ggcacaaaacttctt

SEQ ID NO: 1387216 - DNA, 15 bp, Homo sapiens
gggcacaaaacttct

SEQ ID NO: 1387217 - DNA, 15 bp, Homo sapiens
tgggcacaaaacttc

SEQ ID NO: 1387218 - DNA, 15 bp, Homo sapiens
ttgggcacaaaactt

SEQ ID NO: 1387219 - DNA, 15 bp, Homo sapiens
cttgggcacaaaact

SEQ ID NO: 1387220 - DNA, 15 bp, Homo sapiens
tcttgggcacaaaac

SEQ ID NO: 1387221 - DNA, 15 bp, Homo sapiens
atcttgggcacaaaa

SEQ ID NO: 1387222 - DNA, 15 bp, Homo sapiens
catcttgggcacaaa

SEQ ID NO: 1387223 - DNA, 15 bp, Homo sapiens
gcatcttgggcacaa

SEQ ID NO: 1387224 - DNA, 15 bp, Homo sapiens
ggcatcttgggcaca

SEQ ID NO: 1387225 - DNA, 15 bp, Homo sapiens
gggcatcttgggcac

SEQ ID NO: 1387226 - DNA, 15 bp, Homo sapiens
tgggcatcttgggca

SEQ ID NO: 1387227 - DNA, 15 bp, Homo sapiens
ttgggcatcttgggc

SEQ ID NO: 1387228 - DNA, 15 bp, Homo sapiens
gttgggcatcttggg

SEQ ID NO: 1387229 - DNA, 15 bp, Homo sapiens
agttgggcatcttgg

SEQ ID NO: 1387230 - DNA, 15 bp, Homo sapiens
gagttgggcatcttg

SEQ ID NO: 1387231 - DNA, 15 bp, Homo sapiens
agagttgggcatctt

SEQ ID NO: 1387232 - DNA, 15 bp, Homo sapiens
tagagttgggcatct

SEQ ID NO: 1387233 - DNA, 15 bp, Homo sapiens
ctagagttgggcatc

SEQ ID NO: 1387234 - DNA, 15 bp, Homo sapiens
tctagagttgggcat

SEQ ID NO: 1387235 - DNA, 15 bp, Homo sapiens
ttctagagttgggca

SEQ ID NO: 1387236 - DNA, 15 bp, Homo sapiens
tttctagagttgggc

SEQ ID NO: 1387237 - DNA, 15 bp, Homo sapiens
atttctagagttggg

SEQ ID NO: 1387238 - DNA, 15 bp, Homo sapiens
catttctagagttgg

SEQ ID NO: 1387239 - DNA, 15 bp, Homo sapiens
gcatttctagagttg

SEQ ID NO: 1387240 - DNA, 15 bp, Homo sapiens
tgcatttctagagtt

SEQ ID NO: 1387241 - DNA, 15 bp, Homo sapiens
ctgcatttctagagt

SEQ ID NO: 1387242 - DNA, 15 bp, Homo sapiens
gctgcatttctagag

SEQ ID NO: 1387243 - DNA, 15 bp, Homo sapiens
ggctgcatttctaga

SEQ ID NO: 1387244 - DNA, 15 bp, Homo sapiens
gggctgcatttctag

SEQ ID NO: 1387245 - DNA, 15 bp, Homo sapiens
tgggctgcatttcta

SEQ ID NO: 1387246 - DNA, 15 bp, Homo sapiens
atgggctgcatttct

SEQ ID NO: 1387247 - DNA, 15 bp, Homo sapiens
tatgggctgcatttc

SEQ ID NO: 1387248 - DNA, 15 bp, Homo sapiens
ctatgggctgcattt

SEQ ID NO: 1387249 - DNA, 15 bp, Homo sapiens
tctatgggctgcatt

SEQ ID NO: 1387250 - DNA, 15 bp, Homo sapiens
ttctatgggctgcat

SEQ ID NO: 1387251 - DNA, 15 bp, Homo sapiens
tttctatgggctgca

SEQ ID NO: 1387252 - DNA, 15 bp, Homo sapiens
atttctatgggctgc

SEQ ID NO: 1387253 - DNA, 15 bp, Homo sapiens
gatttctatgggctg

SEQ ID NO: 1387254 - DNA, 15 bp, Homo sapiens
tgatttctatgggct

SEQ ID NO: 1387255 - DNA, 15 bp, Homo sapiens
atgatttctatgggc

SEQ ID NO: 1387256 - DNA, 15 bp, Homo sapiens
aatgatttctatggg

SEQ ID NO: 1387257 - DNA, 15 bp, Homo sapiens
taatgatttctatgg

SEQ ID NO: 1387258 - DNA, 15 bp, Homo sapiens
ttaatgatttctatg

SEQ ID NO: 1387259 - DNA, 15 bp, Homo sapiens
gttaatgatttctat

SEQ ID NO: 1387260 - DNA, 15 bp, Homo sapiens
tgttaatgatttcta

SEQ ID NO: 1387261 - DNA, 15 bp, Homo sapiens
ttgttaatgatttct

SEQ ID NO: 1387262 - DNA, 15 bp, Homo sapiens
cttgttaatgatttc

SEQ ID NO: 1387263 - DNA, 15 bp, Homo sapiens
ccttgttaatgattt

SEQ ID NO: 1387264 - DNA, 15 bp, Homo sapiens
tccttgttaatgatt

SEQ ID NO: 1387265 - DNA, 15 bp, Homo sapiens
atccttgttaatgat

SEQ ID NO: 1387266 - DNA, 15 bp, Homo sapiens
gatccttgttaatga

SEQ ID NO: 1387267 - DNA, 15 bp, Homo sapiens
tgatccttgttaatg

SEQ ID NO: 1387268 - DNA, 15 bp, Homo sapiens
ctgatccttgttaat

SEQ ID NO: 1387269 - DNA, 15 bp, Homo sapiens
actgatccttgttaa

SEQ ID NO: 1387270 - DNA, 15 bp, Homo sapiens
cactgatccttgtta

SEQ ID NO: 1387271 - DNA, 15 bp, Homo sapiens
ccactgatccttgtt

SEQ ID NO: 1387272 - DNA, 15 bp, Homo sapiens
tccactgatccttgt

SEQ ID NO: 1387273 - DNA, 15 bp, Homo sapiens
ctccactgatccttg

SEQ ID NO: 1387274 - DNA, 15 bp, Homo sapiens
cctccactgatcctt

SEQ ID NO: 1387275 - DNA, 15 bp, Homo sapiens
tcctccactgatcct

SEQ ID NO: 1387276 - DNA, 15 bp, Homo sapiens
gtcctccactgatcc

SEQ ID NO: 1387277 - DNA, 15 bp, Homo sapiens
agtcctccactgatc

SEQ ID NO: 1387278 - DNA, 15 bp, Homo sapiens
aagtcctccactgat

SEQ ID NO: 1387279 - DNA, 15 bp, Homo sapiens
aaagtcctccactga

SEQ ID NO: 1387280 - DNA, 15 bp, Homo sapiens
gaaagtcctccactg

SEQ ID NO: 1387281 - DNA, 15 bp, Homo sapiens
tgaaagtcctccact

SEQ ID NO: 1387282 - DNA, 15 bp, Homo sapiens
atgaaagtcctccac

SEQ ID NO: 1387283 - DNA, 15 bp, Homo sapiens
aatgaaagtcctcca

SEQ ID NO: 1387284 - DNA, 15 bp, Homo sapiens
aaatgaaagtcctcc

SEQ ID NO: 1387285 - DNA, 15 bp, Homo sapiens
gaaatgaaagtcctc

SEQ ID NO: 1387286 - DNA, 15 bp, Homo sapiens
cgaaatgaaagtcct

SEQ ID NO: 1387287 - DNA, 15 bp, Homo sapiens
gcgaaatgaaagtcc

SEQ ID NO: 1387288 - DNA, 15 bp, Homo sapiens
ggcgaaatgaaagtc

SEQ ID NO: 1387289 - DNA, 15 bp, Homo sapiens
aggcgaaatgaaagt

SEQ ID NO: 1387290 - DNA, 15 bp, Homo sapiens
aaggcgaaatgaaag

SEQ ID NO: 1387291 - DNA, 15 bp, Homo sapiens
gaaggcgaaatgaaa

SEQ ID NO: 1387292 - DNA, 15 bp, Homo sapiens
ggaaggcgaaatgaa

SEQ ID NO: 1387293 - DNA, 15 bp, Homo sapiens
gggaaggcgaaatga

SEQ ID NO: 1387294 - DNA, 15 bp, Homo sapiens
tgggaaggcgaaatg

SEQ ID NO: 1387295 - DNA, 15 bp, Homo sapiens
atgggaaggcgaaat

SEQ ID NO: 1387296 - DNA, 15 bp, Homo sapiens
aatgggaaggcgaaa

SEQ ID NO: 1387297 - DNA, 15 bp, Homo sapiens
aaatgggaaggcgaa

SEQ ID NO: 1387298 - DNA, 15 bp, Homo sapiens
caaatgggaaggcga

SEQ ID NO: 1387299 - DNA, 15 bp, Homo sapiens
tcaaatgggaaggcg

SEQ ID NO: 1387300 - DNA, 15 bp, Homo sapiens
atcaaatgggaaggc

SEQ ID NO: 1387301 - DNA, 15 bp, Homo sapiens
catcaaatgggaagg

SEQ ID NO: 1387302 - DNA, 15 bp, Homo sapiens
gcatcaaatgggaag

SEQ ID NO: 1387303 - DNA, 15 bp, Homo sapiens
agcatcaaatgggaa

SEQ ID NO: 1387304 - DNA, 15 bp, Homo sapiens
aagcatcaaatggga

SEQ ID NO: 1387305 - DNA, 15 bp, Homo sapiens
taagcatcaaatggg

SEQ ID NO: 1387306 - DNA, 15 bp, Homo sapiens
ttaagcatcaaatgg

SEQ ID NO: 1387307 - DNA, 15 bp, Homo sapiens
attaagcatcaaatg

SEQ ID NO: 1387308 - DNA, 15 bp, Homo sapiens
gattaagcatcaaat

SEQ ID NO: 1387309 - DNA, 15 bp, Homo sapiens
agattaagcatcaaa

SEQ ID NO: 1387310 - DNA, 15 bp, Homo sapiens
aagattaagcatcaa

SEQ ID NO: 1387311 - DNA, 15 bp, Homo sapiens
aaagattaagcatca

SEQ ID NO: 1387312 - DNA, 15 bp, Homo sapiens
gaaagattaagcatc

SEQ ID NO: 1387313 - DNA, 15 bp, Homo sapiens
ggaaagattaagcat

SEQ ID NO: 1387314 - DNA, 15 bp, Homo sapiens
tggaaagattaagca

SEQ ID NO: 1387315 - DNA, 15 bp, Homo sapiens
gtggaaagattaagc

SEQ ID NO: 1387316 - DNA, 15 bp, Homo sapiens
ggtggaaagattaag

SEQ ID NO: 1387317 - DNA, 15 bp, Homo sapiens
gggtggaaagattaa

SEQ ID NO: 1387318 - DNA, 15 bp, Homo sapiens
agggtggaaagatta

SEQ ID NO: 1387319 - DNA, 15 bp, Homo sapiens
gagggtggaaagatt

SEQ ID NO: 1387320 - DNA, 15 bp, Homo sapiens
cgagggtggaaagat

SEQ ID NO: 1387321 - DNA, 15 bp, Homo sapiens
tcgagggtggaaaga

SEQ ID NO: 1387322 - DNA, 15 bp, Homo sapiens
gtcgagggtggaaag

SEQ ID NO: 1387323 - DNA, 15 bp, Homo sapiens
agtcgagggtggaaa

SEQ ID NO: 1387324 - DNA, 15 bp, Homo sapiens
aagtcgagggtggaa

SEQ ID NO: 1387325 - DNA, 15 bp, Homo sapiens
aaagtcgagggtgga

SEQ ID NO: 1387326 - DNA, 15 bp, Homo sapiens
taaagtcgagggtgg

SEQ ID NO: 1387327 - DNA, 15 bp, Homo sapiens
gtaaagtcgagggtg

SEQ ID NO: 1387328 - DNA, 15 bp, Homo sapiens
agtaaagtcgagggt

SEQ ID NO: 1387329 - DNA, 15 bp, Homo sapiens
tagtaaagtcgaggg

SEQ ID NO: 1387330 - DNA, 15 bp, Homo sapiens
ctagtaaagtcgagg

SEQ ID NO: 1387331 - DNA, 15 bp, Homo sapiens
tctagtaaagtcgag

SEQ ID NO: 1387332 - DNA, 15 bp, Homo sapiens
atctagtaaagtcga

SEQ ID NO: 1387333 - DNA, 15 bp, Homo sapiens
aatctagtaaagtcg

SEQ ID NO: 1387334 - DNA, 15 bp, Homo sapiens
aaatctagtaaagtc

SEQ ID NO: 1387335 - DNA, 15 bp, Homo sapiens
caaatctagtaaagt

SEQ ID NO: 1387336 - DNA, 15 bp, Homo sapiens
gcaaatctagtaaag

SEQ ID NO: 1387337 - DNA, 15 bp, Homo sapiens
ggcaaatctagtaaa

SEQ ID NO: 1387338 - DNA, 15 bp, Homo sapiens
tggcaaatctagtaa

SEQ ID NO: 1387339 - DNA, 15 bp, Homo sapiens
atggcaaatctagta

SEQ ID NO: 1387340 - DNA, 15 bp, Homo sapiens
catggcaaatctagt

SEQ ID NO: 1387341 - DNA, 15 bp, Homo sapiens
tcatggcaaatctag

SEQ ID NO: 1387342 - DNA, 15 bp, Homo sapiens
ctcatggcaaatcta

SEQ ID NO: 1387343 - DNA, 15 bp, Homo sapiens
gctcatggcaaatct

SEQ ID NO: 1387344 - DNA, 15 bp, Homo sapiens
tgctcatggcaaatc

SEQ ID NO: 1387345 - DNA, 15 bp, Homo sapiens
atgctcatggcaaat

SEQ ID NO: 1387346 - DNA, 15 bp, Homo sapiens
aatgctcatggcaaa

SEQ ID NO: 1387347 - DNA, 15 bp, Homo sapiens
taatgctcatggcaa

SEQ ID NO: 1387348 - DNA, 15 bp, Homo sapiens
gtaatgctcatggca

SEQ ID NO: 1387349 - DNA, 15 bp, Homo sapiens
ggtaatgctcatggc

SEQ ID NO: 1387350 - DNA, 15 bp, Homo sapiens
cggtaatgctcatgg

SEQ ID NO: 1387351 - DNA, 15 bp, Homo sapiens
tcggtaatgctcatg

SEQ ID NO: 1387352 - DNA, 15 bp, Homo sapiens
ttcggtaatgctcat

SEQ ID NO: 1387353 - DNA, 15 bp, Homo sapiens
attcggtaatgctca

SEQ ID NO: 1387354 - DNA, 15 bp, Homo sapiens
tattcggtaatgctc

SEQ ID NO: 1387355 - DNA, 15 bp, Homo sapiens
atattcggtaatgct

SEQ ID NO: 1387356 - DNA, 15 bp, Homo sapiens
aatattcggtaatgc

SEQ ID NO: 1387357 - DNA, 15 bp, Homo sapiens
gaatattcggtaatg

SEQ ID NO: 1387358 - DNA, 15 bp, Homo sapiens
tgaatattcggtaat

SEQ ID NO: 1387359 - DNA, 15 bp, Homo sapiens
atgaatattcggtaa

SEQ ID NO: 1387360 - DNA, 15 bp, Homo sapiens
aatgaatattcggta

SEQ ID NO: 1387361 - DNA, 15 bp, Homo sapiens
aaatgaatattcggt

SEQ ID NO: 1387362 - DNA, 15 bp, Homo sapiens
taaatgaatattcgg

SEQ ID NO: 1387363 - DNA, 15 bp, Homo sapiens
gtaaatgaatattcg

SEQ ID NO: 1387364 - DNA, 15 bp, Homo sapiens
cgtaaatgaatattc

SEQ ID NO: 1387365 - DNA, 15 bp, Homo sapiens
tcgtaaatgaatatt

SEQ ID NO: 1387366 - DNA, 15 bp, Homo sapiens
ctcgtaaatgaatat

SEQ ID NO: 1387367 - DNA, 15 bp, Homo sapiens
actcgtaaatgaata

SEQ ID NO: 1387368 - DNA, 15 bp, Homo sapiens
aactcgtaaatgaat

SEQ ID NO: 1387369 - DNA, 15 bp, Homo sapiens
taactcgtaaatgaa

SEQ ID NO: 1387370 - DNA, 15 bp, Homo sapiens
ttaactcgtaaatga

SEQ ID NO: 1387371 - DNA, 15 bp, Homo sapiens
attaactcgtaaatg

SEQ ID NO: 1387372 - DNA, 15 bp, Homo sapiens
cattaactcgtaaat

SEQ ID NO: 1387373 - DNA, 15 bp, Homo sapiens
ccattaactcgtaaa

SEQ ID NO: 1387374 - DNA, 15 bp, Homo sapiens
cccattaactcgtaa

SEQ ID NO: 1387375 - DNA, 15 bp, Homo sapiens
acccattaactcgta

SEQ ID NO: 1387376 - DNA, 15 bp, Homo sapiens
attattatactttaa

SEQ ID NO: 1387377 - DNA, 15 bp, Homo sapiens
tattattatacttta

SEQ ID NO: 1387378 - DNA, 15 bp, Homo sapiens
ttattattatacttt

SEQ ID NO: 1387379 - DNA, 15 bp, Homo sapiens
tttattattatactt

SEQ ID NO: 1387380 - DNA, 15 bp, Homo sapiens
ctttattattatact

SEQ ID NO: 1387381 - DNA, 15 bp, Homo sapiens
actttattattatac

SEQ ID NO: 1387382 - DNA, 15 bp, Homo sapiens
tactttattattata

SEQ ID NO: 1387383 - DNA, 15 bp, Homo sapiens
ttactttattattat

SEQ ID NO: 1387384 - DNA, 15 bp, Homo sapiens
tttactttattatta

SEQ ID NO: 1387385 - DNA, 15 bp, Homo sapiens
ttttactttattatt

SEQ ID NO: 1387386 - DNA, 15 bp, Homo sapiens
tttttactttattat

SEQ ID NO: 1387387 - DNA, 15 bp, Homo sapiens
ttttttactttatta

SEQ ID NO: 1387388 - DNA, 15 bp, Homo sapiens
tttttttactttatt

SEQ ID NO: 1387389 - DNA, 15 bp, Homo sapiens
gtttttttactttat

SEQ ID NO: 1387390 - DNA, 15 bp, Homo sapiens
agtttttttacttta

SEQ ID NO: 1387391 - DNA, 15 bp, Homo sapiens
tagtttttttacttt

SEQ ID NO: 1387392 - DNA, 15 bp, Homo sapiens
ttagtttttttactt

SEQ ID NO: 1387393 - DNA, 15 bp, Homo sapiens
tttagtttttttact

SEQ ID NO: 1387394 - DNA, 15 bp, Homo sapiens
ttttagtttttttac

SEQ ID NO: 1387395 - DNA, 15 bp, Homo sapiens
tttttagttttttta

SEQ ID NO: 1387396 - DNA, 15 bp, Homo sapiens
ttttttagttttttt

SEQ ID NO: 1387397 - DNA, 15 bp, Homo sapiens
tttttttagtttttt

SEQ ID NO: 1387398 - DNA, 15 bp, Homo sapiens
ctttttttagttttt

SEQ ID NO: 1387399 - DNA, 15 bp, Homo sapiens
actttttttagtttt

SEQ ID NO: 1387400 - DNA, 15 bp, Homo sapiens
tactttttttagttt

SEQ ID NO: 1387401 - DNA, 15 bp, Homo sapiens
atactttttttagtt

SEQ ID NO: 1387402 - DNA, 15 bp, Homo sapiens
aatactttttttagt

SEQ ID NO: 1387403 - DNA, 15 bp, Homo sapiens
taatactttttttag

SEQ ID NO: 1387404 - DNA, 15 bp, Homo sapiens
ttaatacttttttta

SEQ ID NO: 1387405 - DNA, 15 bp, Homo sapiens
gttaatacttttttt

SEQ ID NO: 1387406 - DNA, 15 bp, Homo sapiens
agttaatactttttt

SEQ ID NO: 1387407 - DNA, 15 bp, Homo sapiens
cagttaatacttttt

SEQ ID NO: 1387408 - DNA, 15 bp, Homo sapiens
ccagttaatactttt

SEQ ID NO: 1387409 - DNA, 15 bp, Homo sapiens
cccagttaatacttt

SEQ ID NO: 1387410 - DNA, 15 bp, Homo sapiens
acccagttaatactt

SEQ ID NO: 1387411 - DNA, 15 bp, Homo sapiens
cacccagttaatact

SEQ ID NO: 1387412 - DNA, 15 bp, Homo sapiens
ccacccagttaatac

SEQ ID NO: 1387413 - DNA, 15 bp, Homo sapiens
accacccagttaata

SEQ ID NO: 1387414 - DNA, 15 bp, Homo sapiens
caccacccagttaat

SEQ ID NO: 1387415 - DNA, 15 bp, Homo sapiens
acaccacccagttaa

SEQ ID NO: 1387416 - DNA, 15 bp, Homo sapiens
gacaccacccagtta

SEQ ID NO: 1387417 - DNA, 15 bp, Homo sapiens
agacaccacccagtt

SEQ ID NO: 1387418 - DNA, 15 bp, Homo sapiens
gagacaccacccagt

SEQ ID NO: 1387419 - DNA, 15 bp, Homo sapiens
tgagacaccacccag

SEQ ID NO: 1387420 - DNA, 15 bp, Homo sapiens
atgagacaccaccca

SEQ ID NO: 1387421 - DNA, 15 bp, Homo sapiens
catgagacaccaccc

SEQ ID NO: 1387422 - DNA, 15 bp, Homo sapiens
acatgagacaccacc

SEQ ID NO: 1387423 - DNA, 15 bp, Homo sapiens
tacatgagacaccac

SEQ ID NO: 1387424 - DNA, 15 bp, Homo sapiens
ttacatgagacacca

SEQ ID NO: 1387425 - DNA, 15 bp, Homo sapiens
attacatgagacacc

SEQ ID NO: 1387426 - DNA, 15 bp, Homo sapiens
tattacatgagacac

SEQ ID NO: 1387427 - DNA, 15 bp, Homo sapiens
atattacatgagaca

SEQ ID NO: 1387428 - DNA, 15 bp, Homo sapiens
catattacatgagac

SEQ ID NO: 1387429 - DNA, 15 bp, Homo sapiens
tcatattacatgaga

SEQ ID NO: 1387430 - DNA, 15 bp, Homo sapiens
gtcatattacatgag

SEQ ID NO: 1387431 - DNA, 15 bp, Homo sapiens
agtcatattacatga

SEQ ID NO: 1387432 - DNA, 15 bp, Homo sapiens
gagtcatattacatg

SEQ ID NO: 1387433 - DNA, 15 bp, Homo sapiens
tgagtcatattacat

SEQ ID NO: 1387434 - DNA, 15 bp, Homo sapiens
gtgagtcatattaca

SEQ ID NO: 1387435 - DNA, 15 bp, Homo sapiens
ggtgagtcatattac

SEQ ID NO: 1387436 - DNA, 15 bp, Homo sapiens
aggtgagtcatatta

SEQ ID NO: 1387437 - DNA, 15 bp, Homo sapiens
taggtgagtcatatt

SEQ ID NO: 1387438 - DNA, 15 bp, Homo sapiens
ttaggtgagtcatat

SEQ ID NO: 1387439 - DNA, 15 bp, Homo sapiens
tttaggtgagtcata

SEQ ID NO: 1387440 - DNA, 15 bp, Homo sapiens
ctttaggtgagtcat

SEQ ID NO: 1387441 - DNA, 15 bp, Homo sapiens
gctttaggtgagtca

SEQ ID NO: 1387442 - DNA, 15 bp, Homo sapiens
ggctttaggtgagtc

SEQ ID NO: 1387443 - DNA, 15 bp, Homo sapiens
tggctttaggtgagt

SEQ ID NO: 1387444 - DNA, 15 bp, Homo sapiens
ttggctttaggtgag

SEQ ID NO: 1387445 - DNA, 15 bp, Homo sapiens
tttggctttaggtga

SEQ ID NO: 1387446 - DNA, 15 bp, Homo sapiens
ttttggctttaggtg

SEQ ID NO: 1387447 - DNA, 15 bp, Homo sapiens
tttttggctttaggt

SEQ ID NO: 1387448 - DNA, 15 bp, Homo sapiens
ttttttggctttagg

SEQ ID NO: 1387449 - DNA, 15 bp, Homo sapiens
attttttggctttag

SEQ ID NO: 1387450 - DNA, 15 bp, Homo sapiens
tattttttggcttta

SEQ ID NO: 1387451 - DNA, 15 bp, Homo sapiens
ttattttttggcttt

SEQ ID NO: 1387452 - DNA, 15 bp, Homo sapiens
tttattttttggctt

SEQ ID NO: 1387453 - DNA, 15 bp, Homo sapiens
ttttattttttggct

SEQ ID NO: 1387454 - DNA, 15 bp, Homo sapiens
tttttattttttggc

SEQ ID NO: 1387455 - DNA, 15 bp, Homo sapiens
ttttttattttttgg

SEQ ID NO: 1387456 - DNA, 15 bp, Homo sapiens
tttttttattttttg

SEQ ID NO: 1387457 - DNA, 15 bp, Homo sapiens
taggtttttttattt

SEQ ID NO: 1387458 - DNA, 15 bp, Homo sapiens
gtaggtttttttatt

SEQ ID NO: 1387459 - DNA, 15 bp, Homo sapiens
agtaggtttttttat

SEQ ID NO: 1387460 - DNA, 15 bp, Homo sapiens
aagtaggttttttta

SEQ ID NO: 1387461 - DNA, 15 bp, Homo sapiens
caagtaggttttttt

SEQ ID NO: 1387462 - DNA, 15 bp, Homo sapiens
gcaagtaggtttttt

SEQ ID NO: 1387463 - DNA, 15 bp, Homo sapiens
tgcaagtaggttttt

SEQ ID NO: 1387464 - DNA, 15 bp, Homo sapiens
ttgcaagtaggtttt

SEQ ID NO: 1387465 - DNA, 15 bp, Homo sapiens
attgcaagtaggttt

SEQ ID NO: 1387466 - DNA, 15 bp, Homo sapiens
aattgcaagtaggtt

SEQ ID NO: 1387467 - DNA, 15 bp, Homo sapiens
aaattgcaagtaggt

SEQ ID NO: 1387468 - DNA, 15 bp, Homo sapiens
aaaattgcaagtagg

SEQ ID NO: 1387469 - DNA, 15 bp, Homo sapiens
aaaaattgcaagtag

SEQ ID NO: 1387470 - DNA, 15 bp, Homo sapiens
gaaaaattgcaagta

SEQ ID NO: 1387471 - DNA, 15 bp, Homo sapiens
tgaaaaattgcaagt

SEQ ID NO: 1387472 - DNA, 15 bp, Homo sapiens
ttgaaaaattgcaag

SEQ ID NO: 1387473 - DNA, 15 bp, Homo sapiens
tttgaaaaattgcaa

SEQ ID NO: 1387474 - DNA, 15 bp, Homo sapiens
ttttgaaaaattgca

SEQ ID NO: 1387475 - DNA, 15 bp, Homo sapiens
tttttgaaaaattgc

SEQ ID NO: 1387476 - DNA, 15 bp, Homo sapiens
ttttttgaaaaattg

SEQ ID NO: 1387477 - DNA, 15 bp, Homo sapiens
tttttttgaaaaatt

SEQ ID NO: 1387478 - DNA, 15 bp, Homo sapiens
ttttttttgaaaaat

SEQ ID NO: 1387479 - DNA, 15 bp, Homo sapiens
tttttttttgaaaaa

SEQ ID NO: 1387480 - DNA, 15 bp, Homo sapiens
ttttttttttgaaaa

SEQ ID NO: 1387481 - DNA, 15 bp, Homo sapiens
tttttttttttgaaa

SEQ ID NO: 1387482 - DNA, 15 bp, Homo sapiens
ctttttttttttgaa

SEQ ID NO: 1387483 - DNA, 15 bp, Homo sapiens
atttctttttttttt

SEQ ID NO: 1387484 - DNA, 15 bp, Homo sapiens
tatttcttttttttt

SEQ ID NO: 1387485 - DNA, 15 bp, Homo sapiens
ttatttctttttttt

SEQ ID NO: 1387486 - DNA, 15 bp, Homo sapiens
tttatttcttttttt

SEQ ID NO: 1387487 - DNA, 15 bp, Homo sapiens
atttatttctttttt

SEQ ID NO: 1387488 - DNA, 15 bp, Homo sapiens
tatttatttcttttt

SEQ ID NO: 1387489 - DNA, 15 bp, Homo sapiens
ttatttatttctttt

SEQ ID NO: 1387490 - DNA, 15 bp, Homo sapiens
tttatttatttcttt

SEQ ID NO: 1387491 - DNA, 15 bp, Homo sapiens
gtttatttatttctt

SEQ ID NO: 1387492 - DNA, 15 bp, Homo sapiens
tgtttatttatttct

SEQ ID NO: 1387493 - DNA, 15 bp, Homo sapiens
ttgtttatttatttc

SEQ ID NO: 1387494 - DNA, 15 bp, Homo sapiens
ttttgtttatttatt

SEQ ID NO: 1387495 - DNA, 15 bp, Homo sapiens
attttgtttatttat

SEQ ID NO: 1387496 - DNA, 15 bp, Homo sapiens
cattttgtttattta

SEQ ID NO: 1387497 - DNA, 15 bp, Homo sapiens
acattttgtttattt

SEQ ID NO: 1387498 - DNA, 15 bp, Homo sapiens
tacattttgtttatt

SEQ ID NO: 1387499 - DNA, 15 bp, Homo sapiens
ttacattttgtttat

SEQ ID NO: 1387500 - DNA, 15 bp, Homo sapiens
tttacattttgttta

SEQ ID NO: 1387501 - DNA, 15 bp, Homo sapiens
ttttacattttgttt

SEQ ID NO: 1387502 - DNA, 15 bp, Homo sapiens
attttacattttgtt

SEQ ID NO: 1387503 - DNA, 15 bp, Homo sapiens
tattttacattttgt

SEQ ID NO: 1387504 - DNA, 15 bp, Homo sapiens
atattttacattttg

SEQ ID NO: 1387505 - DNA, 15 bp, Homo sapiens
tatattttacatttt

SEQ ID NO: 1387506 - DNA, 15 bp, Homo sapiens
ttatattttacattt

SEQ ID NO: 1387507 - DNA, 15 bp, Homo sapiens
tttatattttacatt

SEQ ID NO: 1387508 - DNA, 15 bp, Homo sapiens
atttatattttacat

SEQ ID NO: 1387509 - DNA, 15 bp, Homo sapiens
aatttatattttaca

SEQ ID NO: 1387510 - DNA, 15 bp, Homo sapiens
taatttatattttac

SEQ ID NO: 1387511 - DNA, 15 bp, Homo sapiens
gtaatttatatttta

SEQ ID NO: 1387512 - DNA, 15 bp, Homo sapiens
tgtaatttatatttt

SEQ ID NO: 1387513 - DNA, 15 bp, Homo sapiens
atgtaatttatattt

SEQ ID NO: 1387514 - DNA, 15 bp, Homo sapiens
aatgtaatttatatt

SEQ ID NO: 1387515 - DNA, 15 bp, Homo sapiens
aaatgtaatttatat

SEQ ID NO: 1387516 - DNA, 15 bp, Homo sapiens
taaatgtaatttata

SEQ ID NO: 1387517 - DNA, 15 bp, Homo sapiens
ttaaatgtaatttat

SEQ ID NO: 1387518 - DNA, 15 bp, Homo sapiens
gttaaatgtaattta

SEQ ID NO: 1387519 - DNA, 15 bp, Homo sapiens
ggttaaatgtaattt

SEQ ID NO: 1387520 - DNA, 15 bp, Homo sapiens
tggttaaatgtaatt

SEQ ID NO: 1387521 - DNA, 15 bp, Homo sapiens
ttggttaaatgtaat

SEQ ID NO: 1387522 - DNA, 15 bp, Homo sapiens
tttggttaaatgtaa

SEQ ID NO: 1387523 - DNA, 15 bp, Homo sapiens
ctttggttaaatgta

SEQ ID NO: 1387524 - DNA, 15 bp, Homo sapiens
tctttggttaaatgt

SEQ ID NO: 1387525 - DNA, 15 bp, Homo sapiens
gtctttggttaaatg

SEQ ID NO: 1387526 - DNA, 15 bp, Homo sapiens
tgtctttggttaaat

SEQ ID NO: 1387527 - DNA, 15 bp, Homo sapiens
ctgtctttggttaaa

SEQ ID NO: 1387528 - DNA, 15 bp, Homo sapiens
tctgtctttggttaa

SEQ ID NO: 1387529 - DNA, 15 bp, Homo sapiens
atctgtctttggtta

SEQ ID NO: 1387530 - DNA, 15 bp, Homo sapiens
aatctgtctttggtt

SEQ ID NO: 1387531 - DNA, 15 bp, Homo sapiens
taatctgtctttggt

SEQ ID NO: 1387532 - DNA, 15 bp, Homo sapiens
ataatctgtctttgg

SEQ ID NO: 1387533 - DNA, 15 bp, Homo sapiens
tataatctgtctttg

SEQ ID NO: 1387534 - DNA, 15 bp, Homo sapiens
ttataatctgtcttt

SEQ ID NO: 1387535 - DNA, 15 bp, Homo sapiens
cttataatctgtctt

SEQ ID NO: 1387536 - DNA, 15 bp, Homo sapiens
acttataatctgtct

SEQ ID NO: 1387537 - DNA, 15 bp, Homo sapiens
gacttataatctgtc

SEQ ID NO: 1387538 - DNA, 15 bp, Homo sapiens
tgacttataatctgt

SEQ ID NO: 1387539 - DNA, 15 bp, Homo sapiens
ttgacttataatctg

SEQ ID NO: 1387540 - DNA, 15 bp, Homo sapiens
tttgacttataatct

SEQ ID NO: 1387541 - DNA, 15 bp, Homo sapiens
atttgacttataatc

SEQ ID NO: 1387542 - DNA, 15 bp, Homo sapiens
tatttgacttataat

SEQ ID NO: 1387543 - DNA, 15 bp, Homo sapiens
ttatttgacttataa

SEQ ID NO: 1387544 - DNA, 15 bp, Homo sapiens
cttatttgacttata

SEQ ID NO: 1387545 - DNA, 15 bp, Homo sapiens
acttatttgacttat

SEQ ID NO: 1387546 - DNA, 15 bp, Homo sapiens
aacttatttgactta

SEQ ID NO: 1387547 - DNA, 15 bp, Homo sapiens
caacttatttgactt

SEQ ID NO: 1387548 - DNA, 15 bp, Homo sapiens
gcaacttatttgact

SEQ ID NO: 1387549 - DNA, 15 bp, Homo sapiens
tgcaacttatttgac

SEQ ID NO: 1387550 - DNA, 15 bp, Homo sapiens
ctgcaacttatttga

SEQ ID NO: 1387551 - DNA, 15 bp, Homo sapiens
cctgcaacttatttg

SEQ ID NO: 1387552 - DNA, 15 bp, Homo sapiens
tcctgcaacttattt

SEQ ID NO: 1387553 - DNA, 15 bp, Homo sapiens
ttcctgcaacttatt

SEQ ID NO: 1387554 - DNA, 15 bp, Homo sapiens
gttcctgcaacttat

SEQ ID NO: 1387555 - DNA, 15 bp, Homo sapiens
tgttcctgcaactta

SEQ ID NO: 1387556 - DNA, 15 bp, Homo sapiens
ctgttcctgcaactt

SEQ ID NO: 1387557 - DNA, 15 bp, Homo sapiens
tctgttcctgcaact

SEQ ID NO: 1387558 - DNA, 15 bp, Homo sapiens
gtctgttcctgcaac

SEQ ID NO: 1387559 - DNA, 15 bp, Homo sapiens
ggtctgttcctgcaa

SEQ ID NO: 1387560 - DNA, 15 bp, Homo sapiens
aggtctgttcctgca

SEQ ID NO: 1387561 - DNA, 15 bp, Homo sapiens
gaggtctgttcctgc

SEQ ID NO: 1387562 - DNA, 15 bp, Homo sapiens
cgaggtctgttcctg

SEQ ID NO: 1387563 - DNA, 15 bp, Homo sapiens
tcgaggtctgttcct

SEQ ID NO: 1387564 - DNA, 15 bp, Homo sapiens
atcgaggtctgttcc

SEQ ID NO: 1387565 - DNA, 15 bp, Homo sapiens
aatcgaggtctgttc

SEQ ID NO: 1387566 - DNA, 15 bp, Homo sapiens
aaatcgaggtctgtt

SEQ ID NO: 1387567 - DNA, 15 bp, Homo sapiens
gaaatcgaggtctgt

SEQ ID NO: 1387568 - DNA, 15 bp, Homo sapiens
tgaaatcgaggtctg

SEQ ID NO: 1387569 - DNA, 15 bp, Homo sapiens
ttgaaatcgaggtct

SEQ ID NO: 1387570 - DNA, 15 bp, Homo sapiens
gttgaaatcgaggtc

SEQ ID NO: 1387571 - DNA, 15 bp, Homo sapiens
agttgaaatcgaggt

SEQ ID NO: 1387572 - DNA, 15 bp, Homo sapiens
aagttgaaatcgagg

SEQ ID NO: 1387573 - DNA, 15 bp, Homo sapiens
aaagttgaaatcgag

SEQ ID NO: 1387574 - DNA, 15 bp, Homo sapiens
gaaagttgaaatcga

SEQ ID NO: 1387575 - DNA, 15 bp, Homo sapiens
ggaaagttgaaatcg

SEQ ID NO: 1387576 - DNA, 15 bp, Homo sapiens
tggaaagttgaaatc

SEQ ID NO: 1387577 - DNA, 15 bp, Homo sapiens
ttggaaagttgaaat

SEQ ID NO: 1387578 - DNA, 15 bp, Homo sapiens
tttggaaagttgaaa

SEQ ID NO: 1387579 - DNA, 15 bp, Homo sapiens
ctttggaaagttgaa

SEQ ID NO: 1387580 - DNA, 15 bp, Homo sapiens
actttggaaagttga

SEQ ID NO: 1387581 - DNA, 15 bp, Homo sapiens
tactttggaaagttg

SEQ ID NO: 1387582 - DNA, 15 bp, Homo sapiens
ctactttggaaagtt

SEQ ID NO: 1387583 - DNA, 15 bp, Homo sapiens
tctactttggaaagt

SEQ ID NO: 1387584 - DNA, 15 bp, Homo sapiens
ttctactttggaaag

SEQ ID NO: 1387585 - DNA, 15 bp, Homo sapiens
gttctactttggaaa

SEQ ID NO: 1387586 - DNA, 15 bp, Homo sapiens
tgttctactttggaa

SEQ ID NO: 1387587 - DNA, 15 bp, Homo sapiens
tatgttctactttgg

SEQ ID NO: 1387588 - DNA, 15 bp, Homo sapiens
ttatgttctactttg

SEQ ID NO: 1387589 - DNA, 15 bp, Homo sapiens
cttatgttctacttt

SEQ ID NO: 1387590 - DNA, 15 bp, Homo sapiens
tcttatgttctactt

SEQ ID NO: 1387591 - DNA, 15 bp, Homo sapiens
ttcttatgttctact

SEQ ID NO: 1387592 - DNA, 15 bp, Homo sapiens
tttcttatgttctac

SEQ ID NO: 1387593 - DNA, 15 bp, Homo sapiens
ttttcttatgttcta

SEQ ID NO: 1387594 - DNA, 15 bp, Homo sapiens
gttttcttatgttct

SEQ ID NO: 1387595 - DNA, 15 bp, Homo sapiens
agttttcttatgttc

SEQ ID NO: 1387596 - DNA, 15 bp, Homo sapiens
aagttttcttatgtt

SEQ ID NO: 1387597 - DNA, 15 bp, Homo sapiens
aaagttttcttatgt

SEQ ID NO: 1387598 - DNA, 15 bp, Homo sapiens
aaaagttttcttatg

SEQ ID NO: 1387599 - DNA, 15 bp, Homo sapiens
gaaaagttttcttat

SEQ ID NO: 1387600 - DNA, 15 bp, Homo sapiens
tgaaaagttttctta

SEQ ID NO: 1387601 - DNA, 15 bp, Homo sapiens
ctgaaaagttttctt

SEQ ID NO: 1387602 - DNA, 15 bp, Homo sapiens
cctgaaaagttttct

SEQ ID NO: 1387603 - DNA, 15 bp, Homo sapiens
acctgaaaagttttc

SEQ ID NO: 1387604 - DNA, 15 bp, Homo sapiens
cacctgaaaagtttt

SEQ ID NO: 1387605 - DNA, 15 bp, Homo sapiens
tcacctgaaaagttt

SEQ ID NO: 1387606 - DNA, 15 bp, Homo sapiens
ttcacctgaaaagtt

SEQ ID NO: 1387607 - DNA, 15 bp, Homo sapiens
tttcacctgaaaagt

SEQ ID NO: 1387608 - DNA, 15 bp, Homo sapiens
ctttcacctgaaaag

SEQ ID NO: 1387609 - DNA, 15 bp, Homo sapiens
cctttcacctgaaaa

SEQ ID NO: 1387610 - DNA, 15 bp, Homo sapiens
tcctttcacctgaaa

SEQ ID NO: 1387611 - DNA, 15 bp, Homo sapiens
ttcctttcacctgaa

SEQ ID NO: 1387612 - DNA, 15 bp, Homo sapiens
gttcctttcacctga

SEQ ID NO: 1387613 - DNA, 15 bp, Homo sapiens
ggttcctttcacctg

SEQ ID NO: 1387614 - DNA, 15 bp, Homo sapiens
aggttcctttcacct

SEQ ID NO: 1387615 - DNA, 15 bp, Homo sapiens
aaggttcctttcacc

SEQ ID NO: 1387616 - DNA, 15 bp, Homo sapiens
taaggttcctttcac

SEQ ID NO: 1387617 - DNA, 15 bp, Homo sapiens
ctaaggttcctttca

SEQ ID NO: 1387618 - DNA, 15 bp, Homo sapiens
tctaaggttcctttc

SEQ ID NO: 1387619 - DNA, 15 bp, Homo sapiens
gtctaaggttccttt

SEQ ID NO: 1387620 - DNA, 15 bp, Homo sapiens
agtctaaggttcctt

SEQ ID NO: 1387621 - DNA, 15 bp, Homo sapiens
gagtctaaggttcct

SEQ ID NO: 1387622 - DNA, 15 bp, Homo sapiens
tgagtctaaggttcc

SEQ ID NO: 1387623 - DNA, 15 bp, Homo sapiens
atgagtctaaggttc

SEQ ID NO: 1387624 - DNA, 15 bp, Homo sapiens
gatgagtctaaggtt

SEQ ID NO: 1387625 - DNA, 15 bp, Homo sapiens
agatgagtctaaggt

SEQ ID NO: 1387626 - DNA, 15 bp, Homo sapiens
aagatgagtctaagg

SEQ ID NO: 1387627 - DNA, 15 bp, Homo sapiens
aaagatgagtctaag

SEQ ID NO: 1387628 - DNA, 15 bp, Homo sapiens
aaaagatgagtctaa

SEQ ID NO: 1387629 - DNA, 15 bp, Homo sapiens
aaaaagatgagtcta

SEQ ID NO: 1387630 - DNA, 15 bp, Homo sapiens
gaaaaagatgagtct

SEQ ID NO: 1387631 - DNA, 15 bp, Homo sapiens
tgaaaaagatgagtc

SEQ ID NO: 1387632 - DNA, 15 bp, Homo sapiens
ttgaaaaagatgagt

SEQ ID NO: 1387633 - DNA, 15 bp, Homo sapiens
attgaaaaagatgag

SEQ ID NO: 1387634 - DNA, 15 bp, Homo sapiens
gattgaaaaagatga

SEQ ID NO: 1387635 - DNA, 15 bp, Homo sapiens
ggattgaaaaagatg

SEQ ID NO: 1387636 - DNA, 15 bp, Homo sapiens
gggattgaaaaagat

SEQ ID NO: 1387637 - DNA, 15 bp, Homo sapiens
tgggattgaaaaaga

SEQ ID NO: 1387638 - DNA, 15 bp, Homo sapiens
gtgggattgaaaaag

SEQ ID NO: 1387639 - DNA, 15 bp, Homo sapiens
tgtgggattgaaaaa

SEQ ID NO: 1387640 - DNA, 15 bp, Homo sapiens
atgtgggattgaaaa

SEQ ID NO: 1387641 - DNA, 15 bp, Homo sapiens
catgtgggattgaaa

SEQ ID NO: 1387642 - DNA, 15 bp, Homo sapiens
acatgtgggattgaa

SEQ ID NO: 1387643 - DNA, 15 bp, Homo sapiens
aacatgtgggattga

SEQ ID NO: 1387644 - DNA, 15 bp, Homo sapiens
taacatgtgggattg

SEQ ID NO: 1387645 - DNA, 15 bp, Homo sapiens
gtaacatgtgggatt

SEQ ID NO: 1387646 - DNA, 15 bp, Homo sapiens
tgtaacatgtgggat

SEQ ID NO: 1387647 - DNA, 15 bp, Homo sapiens
atgtaacatgtggga

SEQ ID NO: 1387648 - DNA, 15 bp, Homo sapiens
tatgtaacatgtggg

SEQ ID NO: 1387649 - DNA, 15 bp, Homo sapiens
atatgtaacatgtgg

SEQ ID NO: 1387650 - DNA, 15 bp, Homo sapiens
tatatgtaacatgtg

SEQ ID NO: 1387651 - DNA, 15 bp, Homo sapiens
ttatatgtaacatgt

SEQ ID NO: 1387652 - DNA, 15 bp, Homo sapiens
cttatatgtaacatg

SEQ ID NO: 1387653 - DNA, 15 bp, Homo sapiens
ccttatatgtaacat

SEQ ID NO: 1387654 - DNA, 15 bp, Homo sapiens
tccttatatgtaaca

SEQ ID NO: 1387655 - DNA, 15 bp, Homo sapiens
ttccttatatgtaac

SEQ ID NO: 1387656 - DNA, 15 bp, Homo sapiens
attccttatatgtaa

SEQ ID NO: 1387657 - DNA, 15 bp, Homo sapiens
tattccttatatgta

SEQ ID NO: 1387658 - DNA, 15 bp, Homo sapiens
ctattccttatatgt

SEQ ID NO: 1387659 - DNA, 15 bp, Homo sapiens
cctattccttatatg

SEQ ID NO: 1387660 - DNA, 15 bp, Homo sapiens
tcctattccttatat

SEQ ID NO: 1387661 - DNA, 15 bp, Homo sapiens
ctcctattccttata

SEQ ID NO: 1387662 - DNA, 15 bp, Homo sapiens
tctcctattccttat

SEQ ID NO: 1387663 - DNA, 15 bp, Homo sapiens
gtctcctattcctta

SEQ ID NO: 1387664 - DNA, 15 bp, Homo sapiens
ggtctcctattcctt

SEQ ID NO: 1387665 - DNA, 15 bp, Homo sapiens
tggtctcctattcct

SEQ ID NO: 1387666 - DNA, 15 bp, Homo sapiens
gtggtctcctattcc

SEQ ID NO: 1387667 - DNA, 15 bp, Homo sapiens
cgtggtctcctattc

SEQ ID NO: 1387668 - DNA, 15 bp, Homo sapiens
tcgtggtctcctatt

SEQ ID NO: 1387669 - DNA, 15 bp, Homo sapiens
ctcgtggtctcctat

SEQ ID NO: 1387670 - DNA, 15 bp, Homo sapiens
cctcgtggtctccta

SEQ ID NO: 1387671 - DNA, 15 bp, Homo sapiens
gcctcgtggtctcct

SEQ ID NO: 1387672 - DNA, 15 bp, Homo sapiens
tgcctcgtggtctcc

SEQ ID NO: 1387673 - DNA, 15 bp, Homo sapiens
ttgcctcgtggtctc

SEQ ID NO: 1387674 - DNA, 15 bp, Homo sapiens
tttgcctcgtggtct

SEQ ID NO: 1387675 - DNA, 15 bp, Homo sapiens
ttttgcctcgtggtc

SEQ ID NO: 1387676 - DNA, 15 bp, Homo sapiens
gttttgcctcgtggt

SEQ ID NO: 1387677 - DNA, 15 bp, Homo sapiens
cgttttgcctcgtgg

SEQ ID NO: 1387678 - DNA, 15 bp, Homo sapiens
tcgttttgcctcgtg

SEQ ID NO: 1387679 - DNA, 15 bp, Homo sapiens
gtcgttttgcctcgt

SEQ ID NO: 1387680 - DNA, 15 bp, Homo sapiens
ggtcgttttgcctcg

SEQ ID NO: 1387681 - DNA, 15 bp, Homo sapiens
gggtcgttttgcctc

SEQ ID NO: 1387682 - DNA, 15 bp, Homo sapiens
ggggtcgttttgcct

SEQ ID NO: 1387683 - DNA, 15 bp, Homo sapiens
tggggtcgttttgcc

SEQ ID NO: 1387684 - DNA, 15 bp, Homo sapiens
ctggggtcgttttgc

SEQ ID NO: 1387685 - DNA, 15 bp, Homo sapiens
actggggtcgttttg

SEQ ID NO: 1387686 - DNA, 15 bp, Homo sapiens
aactggggtcgtttt

SEQ ID NO: 1387687 - DNA, 15 bp, Homo sapiens
taactggggtcgttt

SEQ ID NO: 1387688 - DNA, 15 bp, Homo sapiens
gtaactggggtcgtt

SEQ ID NO: 1387689 - DNA, 15 bp, Homo sapiens
tgtaactggggtcgt

SEQ ID NO: 1387690 - DNA, 15 bp, Homo sapiens
ctgtaactggggtcg

SEQ ID NO: 1387691 - DNA, 15 bp, Homo sapiens
tctgtaactggggtc

SEQ ID NO: 1387692 - DNA, 15 bp, Homo sapiens
atctgtaactggggt

SEQ ID NO: 1387693 - DNA, 15 bp, Homo sapiens
catctgtaactgggg

SEQ ID NO: 1387694 - DNA, 15 bp, Homo sapiens
tcatctgtaactggg

SEQ ID NO: 1387695 - DNA, 15 bp, Homo sapiens
ctcatctgtaactgg

SEQ ID NO: 1387696 - DNA, 15 bp, Homo sapiens
actcatctgtaactg

SEQ ID NO: 1387697 - DNA, 15 bp, Homo sapiens
aactcatctgtaact

SEQ ID NO: 1387698 - DNA, 15 bp, Homo sapiens
taactcatctgtaac

SEQ ID NO: 1387699 - DNA, 15 bp, Homo sapiens
ttaactcatctgtaa

SEQ ID NO: 1387700 - DNA, 15 bp, Homo sapiens
attaactcatctgta

SEQ ID NO: 1387701 - DNA, 15 bp, Homo sapiens
tattaactcatctgt

SEQ ID NO: 1387702 - DNA, 15 bp, Homo sapiens
ctattaactcatctg

SEQ ID NO: 1387703 - DNA, 15 bp, Homo sapiens
gctattaactcatct

SEQ ID NO: 1387704 - DNA, 15 bp, Homo sapiens
tgctattaactcatc

SEQ ID NO: 1387705 - DNA, 15 bp, Homo sapiens
atgctattaactcat

SEQ ID NO: 1387706 - DNA, 15 bp, Homo sapiens
tatgctattaactca

SEQ ID NO: 1387707 - DNA, 15 bp, Homo sapiens
ctatgctattaactc

SEQ ID NO: 1387708 - DNA, 15 bp, Homo sapiens
gctatgctattaact

SEQ ID NO: 1387709 - DNA, 15 bp, Homo sapiens
agctatgctattaac

SEQ ID NO: 1387710 - DNA, 15 bp, Homo sapiens
tagctatgctattaa

SEQ ID NO: 1387711 - DNA, 15 bp, Homo sapiens
ctagctatgctatta

SEQ ID NO: 1387712 - DNA, 15 bp, Homo sapiens
actagctatgctatt

SEQ ID NO: 1387713 - DNA, 15 bp, Homo sapiens
cactagctatgctat

SEQ ID NO: 1387714 - DNA, 15 bp, Homo sapiens
gcactagctatgcta

SEQ ID NO: 1387715 - DNA, 15 bp, Homo sapiens
agcactagctatgct

SEQ ID NO: 1387716 - DNA, 15 bp, Homo sapiens
gagcactagctatgc

SEQ ID NO: 1387717 - DNA, 15 bp, Homo sapiens
agagcactagctatg

SEQ ID NO: 1387718 - DNA, 15 bp, Homo sapiens
aagagcactagctat

SEQ ID NO: 1387719 - DNA, 15 bp, Homo sapiens
aaagagcactagcta

SEQ ID NO: 1387720 - DNA, 15 bp, Homo sapiens
gaaagagcactagct

SEQ ID NO: 1387721 - DNA, 15 bp, Homo sapiens
ggaaagagcactagc

SEQ ID NO: 1387722 - DNA, 15 bp, Homo sapiens
tggaaagagcactag

SEQ ID NO: 1387723 - DNA, 15 bp, Homo sapiens
atggaaagagcacta

SEQ ID NO: 1387724 - DNA, 15 bp, Homo sapiens
catggaaagagcact

SEQ ID NO: 1387725 - DNA, 15 bp, Homo sapiens
ccatggaaagagcac

SEQ ID NO: 1387726 - DNA, 15 bp, Homo sapiens
gccatggaaagagca

SEQ ID NO: 1387727 - DNA, 15 bp, Homo sapiens
agccatggaaagagc

SEQ ID NO: 1387728 - DNA, 15 bp, Homo sapiens
gagccatggaaagag

SEQ ID NO: 1387729 - DNA, 15 bp, Homo sapiens
tgagccatggaaaga

SEQ ID NO: 1387730 - DNA, 15 bp, Homo sapiens
gtgagccatggaaag

SEQ ID NO: 1387731 - DNA, 15 bp, Homo sapiens
agtgagccatggaaa

SEQ ID NO: 1387732 - DNA, 15 bp, Homo sapiens
gagtgagccatggaa

SEQ ID NO: 1387733 - DNA, 15 bp, Homo sapiens
agagtgagccatgga

SEQ ID NO: 1387734 - DNA, 15 bp, Homo sapiens
aagagtgagccatgg

SEQ ID NO: 1387735 - DNA, 15 bp, Homo sapiens
aaagagtgagccatg

SEQ ID NO: 1387736 - DNA, 15 bp, Homo sapiens
aaaagagtgagccat

SEQ ID NO: 1387737 - DNA, 15 bp, Homo sapiens
gaaaagagtgagcca

SEQ ID NO: 1387738 - DNA, 15 bp, Homo sapiens
agaaaagagtgagcc

SEQ ID NO: 1387739 - DNA, 15 bp, Homo sapiens
aagaaaagagtgagc

SEQ ID NO: 1387740 - DNA, 15 bp, Homo sapiens
aaagaaaagagtgag

SEQ ID NO: 1387741 - DNA, 15 bp, Homo sapiens
caaagaaaagagtga

SEQ ID NO: 1387742 - DNA, 15 bp, Homo sapiens
acaaagaaaagagtg

SEQ ID NO: 1387743 - DNA, 15 bp, Homo sapiens
cacaaagaaaagagt

SEQ ID NO: 1387744 - DNA, 15 bp, Homo sapiens
gcacaaagaaaagag

SEQ ID NO: 1387745 - DNA, 15 bp, Homo sapiens
ggcacaaagaaaaga

SEQ ID NO: 1387746 - DNA, 15 bp, Homo sapiens
aggcacaaagaaaag

SEQ ID NO: 1387747 - DNA, 15 bp, Homo sapiens
aaggcacaaagaaaa

SEQ ID NO: 1387748 - DNA, 15 bp, Homo sapiens
aaaggcacaaagaaa

SEQ ID NO: 1387749 - DNA, 15 bp, Homo sapiens
gaaaggcacaaagaa

SEQ ID NO: 1387750 - DNA, 15 bp, Homo sapiens
agaaaggcacaaaga

SEQ ID NO: 1387751 - DNA, 15 bp, Homo sapiens
gagaaaggcacaaag

SEQ ID NO: 1387752 - DNA, 15 bp, Homo sapiens
ggagaaaggcacaaa

SEQ ID NO: 1387753 - DNA, 15 bp, Homo sapiens
tggagaaaggcacaa

SEQ ID NO: 1387754 - DNA, 15 bp, Homo sapiens
atggagaaaggcaca

SEQ ID NO: 1387755 - DNA, 15 bp, Homo sapiens
tatggagaaaggcac

SEQ ID NO: 1387756 - DNA, 15 bp, Homo sapiens
ttatggagaaaggca

SEQ ID NO: 1387757 - DNA, 15 bp, Homo sapiens
tttatggagaaaggc

SEQ ID NO: 1387758 - DNA, 15 bp, Homo sapiens
ttttatggagaaagg

SEQ ID NO: 1387759 - DNA, 15 bp, Homo sapiens
tttttatggagaaag

SEQ ID NO: 1387760 - DNA, 15 bp, Homo sapiens
ttttttatggagaaa

SEQ ID NO: 1387761 - DNA, 15 bp, Homo sapiens
attttttatggagaa

SEQ ID NO: 1387762 - DNA, 15 bp, Homo sapiens
aattttttatggaga

SEQ ID NO: 1387763 - DNA, 15 bp, Homo sapiens
taattttttatggag

SEQ ID NO: 1387764 - DNA, 15 bp, Homo sapiens
ttaattttttatgga

SEQ ID NO: 1387765 - DNA, 15 bp, Homo sapiens
atttaattttttatg

SEQ ID NO: 1387766 - DNA, 15 bp, Homo sapiens
tatttaattttttat

SEQ ID NO: 1387767 - DNA, 15 bp, Homo sapiens
atatttaatttttta

SEQ ID NO: 1387768 - DNA, 15 bp, Homo sapiens
gatatttaatttttt

SEQ ID NO: 1387769 - DNA, 15 bp, Homo sapiens
tgatatttaattttt

SEQ ID NO: 1387770 - DNA, 15 bp, Homo sapiens
gtgatatttaatttt

SEQ ID NO: 1387771 - DNA, 15 bp, Homo sapiens
tgtgatatttaattt

SEQ ID NO: 1387772 - DNA, 15 bp, Homo sapiens
atgtgatatttaatt

SEQ ID NO: 1387773 - DNA, 15 bp, Homo sapiens
gatgtgatatttaat

SEQ ID NO: 1387774 - DNA, 15 bp, Homo sapiens
agatgtgatatttaa

SEQ ID NO: 1387775 - DNA, 15 bp, Homo sapiens
tagatgtgatattta

SEQ ID NO: 1387776 - DNA, 15 bp, Homo sapiens
atagatgtgatattt

SEQ ID NO: 1387777 - DNA, 15 bp, Homo sapiens
catagatgtgatatt

SEQ ID NO: 1387778 - DNA, 15 bp, Homo sapiens
tcatagatgtgatat

SEQ ID NO: 1387779 - DNA, 15 bp, Homo sapiens
ttcatagatgtgata

SEQ ID NO: 1387780 - DNA, 15 bp, Homo sapiens
attcatagatgtgat

SEQ ID NO: 1387781 - DNA, 15 bp, Homo sapiens
cattcatagatgtga

SEQ ID NO: 1387782 - DNA, 15 bp, Homo sapiens
acattcatagatgtg

SEQ ID NO: 1387783 - DNA, 15 bp, Homo sapiens
gacattcatagatgt

SEQ ID NO: 1387784 - DNA, 15 bp, Homo sapiens
agacattcatagatg

SEQ ID NO: 1387785 - DNA, 15 bp, Homo sapiens
tagacattcatagat

SEQ ID NO: 1387786 - DNA, 15 bp, Homo sapiens
gtagacattcataga

SEQ ID NO: 1387787 - DNA, 15 bp, Homo sapiens
agtagacattcatag

SEQ ID NO: 1387788 - DNA, 15 bp, Homo sapiens
cagtagacattcata

SEQ ID NO: 1387789 - DNA, 15 bp, Homo sapiens
tcagtagacattcat

SEQ ID NO: 1387790 - DNA, 15 bp, Homo sapiens
ttcagtagacattca

SEQ ID NO: 1387791 - DNA, 15 bp, Homo sapiens
attcagtagacattc

SEQ ID NO: 1387792 - DNA, 15 bp, Homo sapiens
tattcagtagacatt

SEQ ID NO: 1387793 - DNA, 15 bp, Homo sapiens
gtattcagtagacat

SEQ ID NO: 1387794 - DNA, 15 bp, Homo sapiens
tgtattcagtagaca

SEQ ID NO: 1387795 - DNA, 15 bp, Homo sapiens
atgtattcagtagac

SEQ ID NO: 1387796 - DNA, 15 bp, Homo sapiens
aatgtattcagtaga

SEQ ID NO: 1387797 - DNA, 15 bp, Homo sapiens
aaatgtattcagtag

SEQ ID NO: 1387798 - DNA, 15 bp, Homo sapiens
taaatgtattcagta

SEQ ID NO: 1387799 - DNA, 15 bp, Homo sapiens
ttaaatgtattcagt

SEQ ID NO: 1387800 - DNA, 15 bp, Homo sapiens
gttaaatgtattcag

SEQ ID NO: 1387801 - DNA, 15 bp, Homo sapiens
agttaaatgtattca

SEQ ID NO: 1387802 - DNA, 15 bp, Homo sapiens
cagttaaatgtattc

SEQ ID NO: 1387803 - DNA, 15 bp, Homo sapiens
acagttaaatgtatt

SEQ ID NO: 1387804 - DNA, 15 bp, Homo sapiens
cacagttaaatgtat

SEQ ID NO: 1387805 - DNA, 15 bp, Homo sapiens
acacagttaaatgta

SEQ ID NO: 1387806 - DNA, 15 bp, Homo sapiens
cacacagttaaatgt

SEQ ID NO: 1387807 - DNA, 15 bp, Homo sapiens
tcacacagttaaatg

SEQ ID NO: 1387808 - DNA, 15 bp, Homo sapiens
ttcacacagttaaat

SEQ ID NO: 1387809 - DNA, 15 bp, Homo sapiens
gttcacacagttaaa

SEQ ID NO: 1387810 - DNA, 15 bp, Homo sapiens
ggttcacacagttaa

SEQ ID NO: 1387811 - DNA, 15 bp, Homo sapiens
aggttcacacagtta

SEQ ID NO: 1387812 - DNA, 15 bp, Homo sapiens
aaggttcacacagtt

SEQ ID NO: 1387813 - DNA, 15 bp, Homo sapiens
aaaggttcacacagt

SEQ ID NO: 1387814 - DNA, 15 bp, Homo sapiens
taaaggttcacacag

SEQ ID NO: 1387815 - DNA, 15 bp, Homo sapiens
gtaaaggttcacaca

SEQ ID NO: 1387816 - DNA, 15 bp, Homo sapiens
tgtaaaggttcacac

SEQ ID NO: 1387817 - DNA, 15 bp, Homo sapiens
gtgtaaaggttcaca

SEQ ID NO: 1387818 - DNA, 15 bp, Homo sapiens
ggtgtaaaggttcac

SEQ ID NO: 1387819 - DNA, 15 bp, Homo sapiens
cggtgtaaaggttca

SEQ ID NO: 1387820 - DNA, 15 bp, Homo sapiens
tcggtgtaaaggttc

SEQ ID NO: 1387821 - DNA, 15 bp, Homo sapiens
atcggtgtaaaggtt

SEQ ID NO: 1387822 - DNA, 15 bp, Homo sapiens
aatcggtgtaaaggt

SEQ ID NO: 1387823 - DNA, 15 bp, Homo sapiens
aaatcggtgtaaagg

SEQ ID NO: 1387824 - DNA, 15 bp, Homo sapiens
aaaatcggtgtaaag

SEQ ID NO: 1387825 - DNA, 15 bp, Homo sapiens
taaaatcggtgtaaa

SEQ ID NO: 1387826 - DNA, 15 bp, Homo sapiens
ataaaatcggtgtaa

SEQ ID NO: 1387827 - DNA, 15 bp, Homo sapiens
gataaaatcggtgta

SEQ ID NO: 1387828 - DNA, 15 bp, Homo sapiens
agataaaatcggtgt

SEQ ID NO: 1387829 - DNA, 15 bp, Homo sapiens
aagataaaatcggtg

SEQ ID NO: 1387830 - DNA, 15 bp, Homo sapiens
aaagataaaatcggt

SEQ ID NO: 1387831 - DNA, 15 bp, Homo sapiens
gaaagataaaatcgg

SEQ ID NO: 1387832 - DNA, 15 bp, Homo sapiens
tgaaagataaaatcg

SEQ ID NO: 1387833 - DNA, 15 bp, Homo sapiens
ttgaaagataaaatc

SEQ ID NO: 1387834 - DNA, 15 bp, Homo sapiens
tttgaaagataaaat

SEQ ID NO: 1387835 - DNA, 15 bp, Homo sapiens
atttgaaagataaaa

SEQ ID NO: 1387836 - DNA, 15 bp, Homo sapiens
gatttgaaagataaa

SEQ ID NO: 1387837 - DNA, 15 bp, Homo sapiens
agatttgaaagataa

SEQ ID NO: 1387838 - DNA, 15 bp, Homo sapiens
tagatttgaaagata

SEQ ID NO: 1387839 - DNA, 15 bp, Homo sapiens
ttagatttgaaagat

SEQ ID NO: 1387840 - DNA, 15 bp, Homo sapiens
attagatttgaaaga

SEQ ID NO: 1387841 - DNA, 15 bp, Homo sapiens
tattagatttgaaag

SEQ ID NO: 1387842 - DNA, 15 bp, Homo sapiens
atattagatttgaaa

SEQ ID NO: 1387843 - DNA, 15 bp, Homo sapiens
tatattagatttgaa

SEQ ID NO: 1387844 - DNA, 15 bp, Homo sapiens
atatattagatttga

SEQ ID NO: 1387845 - DNA, 15 bp, Homo sapiens
tatatattagatttg

SEQ ID NO: 1387846 - DNA, 15 bp, Homo sapiens
atatatattagattt

SEQ ID NO: 1387847 - DNA, 15 bp, Homo sapiens
catatatattagatt

SEQ ID NO: 1387848 - DNA, 15 bp, Homo sapiens
acatatatattagat

SEQ ID NO: 1387849 - DNA, 15 bp, Homo sapiens
tacatatatattaga

SEQ ID NO: 1387850 - DNA, 15 bp, Homo sapiens
ttacatatatattag

SEQ ID NO: 1387851 - DNA, 15 bp, Homo sapiens
attacatatatatta

SEQ ID NO: 1387852 - DNA, 15 bp, Homo sapiens
aattacatatatatt

SEQ ID NO: 1387853 - DNA, 15 bp, Homo sapiens
gaattacatatatat

SEQ ID NO: 1387854 - DNA, 15 bp, Homo sapiens
tgaattacatatata

SEQ ID NO: 1387855 - DNA, 15 bp, Homo sapiens
atgaattacatatat

SEQ ID NO: 1387856 - DNA, 15 bp, Homo sapiens
aatgaattacatata

SEQ ID NO: 1387857 - DNA, 15 bp, Homo sapiens
aaatgaattacatat

SEQ ID NO: 1387858 - DNA, 15 bp, Homo sapiens
aaaatgaattacata

SEQ ID NO: 1387859 - DNA, 15 bp, Homo sapiens
aaaaatgaattacat

SEQ ID NO: 1387860 - DNA, 15 bp, Homo sapiens
taaaaatgaattaca

SEQ ID NO: 1387861 - DNA, 15 bp, Homo sapiens
ttaaaaatgaattac

SEQ ID NO: 1387862 - DNA, 15 bp, Homo sapiens
cttaaaaatgaatta

SEQ ID NO: 1387863 - DNA, 15 bp, Homo sapiens
acttaaaaatgaatt

SEQ ID NO: 1387864 - DNA, 15 bp, Homo sapiens
cacttaaaaatgaat

SEQ ID NO: 1387865 - DNA, 15 bp, Homo sapiens
ccacttaaaaatgaa

SEQ ID NO: 1387866 - DNA, 15 bp, Homo sapiens
accacttaaaaatga

SEQ ID NO: 1387867 - DNA, 15 bp, Homo sapiens
taccacttaaaaatg

SEQ ID NO: 1387868 - DNA, 15 bp, Homo sapiens
ttaccacttaaaaat

SEQ ID NO: 1387869 - DNA, 15 bp, Homo sapiens
attaccacttaaaaa

SEQ ID NO: 1387870 - DNA, 15 bp, Homo sapiens
tattaccacttaaaa

SEQ ID NO: 1387871 - DNA, 15 bp, Homo sapiens
ctattaccacttaaa

SEQ ID NO: 1387872 - DNA, 15 bp, Homo sapiens
gctattaccacttaa

SEQ ID NO: 1387873 - DNA, 15 bp, Homo sapiens
tgctattaccactta

SEQ ID NO: 1387874 - DNA, 15 bp, Homo sapiens
atgctattaccactt

SEQ ID NO: 1387875 - DNA, 15 bp, Homo sapiens
tatgctattaccact

SEQ ID NO: 1387876 - DNA, 15 bp, Homo sapiens
atatgctattaccac

SEQ ID NO: 1387877 - DNA, 15 bp, Homo sapiens
tatatgctattacca

SEQ ID NO: 1387878 - DNA, 15 bp, Homo sapiens
gtatatgctattacc

SEQ ID NO: 1387879 - DNA, 15 bp, Homo sapiens
agtatatgctattac

SEQ ID NO: 1387880 - DNA, 15 bp, Homo sapiens
aagtatatgctatta

SEQ ID NO: 1387881 - DNA, 15 bp, Homo sapiens
taagtatatgctatt

SEQ ID NO: 1387882 - DNA, 15 bp, Homo sapiens
ttaagtatatgctat

SEQ ID NO: 1387883 - DNA, 15 bp, Homo sapiens
attaagtatatgcta

SEQ ID NO: 1387884 - DNA, 15 bp, Homo sapiens
cattaagtatatgct

SEQ ID NO: 1387885 - DNA, 15 bp, Homo sapiens
gcattaagtatatgc

SEQ ID NO: 1387886 - DNA, 15 bp, Homo sapiens
agcattaagtatatg

SEQ ID NO: 1387887 - DNA, 15 bp, Homo sapiens
aagcattaagtatat

SEQ ID NO: 1387888 - DNA, 15 bp, Homo sapiens
gaagcattaagtata

SEQ ID NO: 1387889 - DNA, 15 bp, Homo sapiens
ggaagcattaagtat

SEQ ID NO: 1387890 - DNA, 15 bp, Homo sapiens
gggaagcattaagta

SEQ ID NO: 1387891 - DNA, 15 bp, Homo sapiens
tgggaagcattaagt

SEQ ID NO: 1387892 - DNA, 15 bp, Homo sapiens
atgggaagcattaag

SEQ ID NO: 1387893 - DNA, 15 bp, Homo sapiens
catgggaagcattaa

SEQ ID NO: 1387894 - DNA, 15 bp, Homo sapiens
acatgggaagcatta

SEQ ID NO: 1387895 - DNA, 15 bp, Homo sapiens
aacatgggaagcatt

SEQ ID NO: 1387896 - DNA, 15 bp, Homo sapiens
caacatgggaagcat

SEQ ID NO: 1387897 - DNA, 15 bp, Homo sapiens
gcaacatgggaagca

SEQ ID NO: 1387898 - DNA, 15 bp, Homo sapiens
tgcaacatgggaagc

SEQ ID NO: 1387899 - DNA, 15 bp, Homo sapiens
ctgcaacatgggaag

SEQ ID NO: 1387900 - DNA, 15 bp, Homo sapiens
tctgcaacatgggaa

SEQ ID NO: 1387901 - DNA, 15 bp, Homo sapiens
gtctgcaacatggga

SEQ ID NO: 1387902 - DNA, 15 bp, Homo sapiens
tgtctgcaacatggg

SEQ ID NO: 1387903 - DNA, 15 bp, Homo sapiens
atgtctgcaacatgg

SEQ ID NO: 1387904 - DNA, 15 bp, Homo sapiens
aatgtctgcaacatg

SEQ ID NO: 1387905 - DNA, 15 bp, Homo sapiens
aaatgtctgcaacat

SEQ ID NO: 1387906 - DNA, 15 bp, Homo sapiens
aaaatgtctgcaaca

SEQ ID NO: 1387907 - DNA, 15 bp, Homo sapiens
aaaaatgtctgcaac

SEQ ID NO: 1387908 - DNA, 15 bp, Homo sapiens
gaaaaatgtctgcaa

SEQ ID NO: 1387909 - DNA, 15 bp, Homo sapiens
tgaaaaatgtctgca

SEQ ID NO: 1387910 - DNA, 15 bp, Homo sapiens
gtgaaaaatgtctgc

SEQ ID NO: 1387911 - DNA, 15 bp, Homo sapiens
tgtgaaaaatgtctg

SEQ ID NO: 1387912 - DNA, 15 bp, Homo sapiens
gtgtgaaaaatgtct

SEQ ID NO: 1387913 - DNA, 15 bp, Homo sapiens
tgtgtgaaaaatgtc

SEQ ID NO: 1387914 - DNA, 15 bp, Homo sapiens
atgtgtgaaaaatgt

SEQ ID NO: 1387915 - DNA, 15 bp, Homo sapiens
aatgtgtgaaaaatg

SEQ ID NO: 1387916 - DNA, 15 bp, Homo sapiens
taatgtgtgaaaaat

SEQ ID NO: 1387917 - DNA, 15 bp, Homo sapiens
ttaatgtgtgaaaaa

SEQ ID NO: 1387918 - DNA, 15 bp, Homo sapiens
gttaatgtgtgaaaa

SEQ ID NO: 1387919 - DNA, 15 bp, Homo sapiens
agttaatgtgtgaaa

SEQ ID NO: 1387920 - DNA, 15 bp, Homo sapiens
gagttaatgtgtgaa

SEQ ID NO: 1387921 - DNA, 15 bp, Homo sapiens
tgagttaatgtgtga

SEQ ID NO: 1387922 - DNA, 15 bp, Homo sapiens
gtgagttaatgtgtg

SEQ ID NO: 1387923 - DNA, 15 bp, Homo sapiens
tgtgagttaatgtgt

SEQ ID NO: 1387924 - DNA, 15 bp, Homo sapiens
atgtgagttaatgtg

SEQ ID NO: 1387925 - DNA, 15 bp, Homo sapiens
catgtgagttaatgt

SEQ ID NO: 1387926 - DNA, 15 bp, Homo sapiens
acatgtgagttaatg

SEQ ID NO: 1387927 - DNA, 15 bp, Homo sapiens
tacatgtgagttaat

SEQ ID NO: 1387928 - DNA, 15 bp, Homo sapiens
atacatgtgagttaa

SEQ ID NO: 1387929 - DNA, 15 bp, Homo sapiens
tatacatgtgagtta

SEQ ID NO: 1387930 - DNA, 15 bp, Homo sapiens
atatacatgtgagtt

SEQ ID NO: 1387931 - DNA, 15 bp, Homo sapiens
gatatacatgtgagt

SEQ ID NO: 1387932 - DNA, 15 bp, Homo sapiens
tgatatacatgtgag

SEQ ID NO: 1387933 - DNA, 15 bp, Homo sapiens
atgatatacatgtga

SEQ ID NO: 1387934 - DNA, 15 bp, Homo sapiens
tatgatatacatgtg

SEQ ID NO: 1387935 - DNA, 15 bp, Homo sapiens
atatgatatacatgt

SEQ ID NO: 1387936 - DNA, 15 bp, Homo sapiens
tatatgatatacatg

SEQ ID NO: 1387937 - DNA, 15 bp, Homo sapiens
atatatgatatacat

SEQ ID NO: 1387938 - DNA, 15 bp, Homo sapiens
tatatatgatataca

SEQ ID NO: 1387939 - DNA, 15 bp, Homo sapiens
atatatatgatatac

SEQ ID NO: 1387940 - DNA, 15 bp, Homo sapiens
tatatatatgatata

SEQ ID NO: 1387941 - DNA, 15 bp, Homo sapiens
atatatatatgatat

SEQ ID NO: 1387942 - DNA, 15 bp, Homo sapiens
aatatatatatgata

SEQ ID NO: 1387943 - DNA, 15 bp, Homo sapiens
gaatatatatatgat

SEQ ID NO: 1387944 - DNA, 15 bp, Homo sapiens
tgaatatatatatga

SEQ ID NO: 1387945 - DNA, 15 bp, Homo sapiens
ctgaatatatatatg

SEQ ID NO: 1387946 - DNA, 15 bp, Homo sapiens
cctgaatatatatat

SEQ ID NO: 1387947 - DNA, 15 bp, Homo sapiens
acctgaatatatata

SEQ ID NO: 1387948 - DNA, 15 bp, Homo sapiens
tacctgaatatatat

SEQ ID NO: 1387949 - DNA, 15 bp, Homo sapiens
atacctgaatatata

SEQ ID NO: 1387950 - DNA, 15 bp, Homo sapiens
aatacctgaatatat

SEQ ID NO: 1387951 - DNA, 15 bp, Homo sapiens
taatacctgaatata

SEQ ID NO: 1387952 - DNA, 15 bp, Homo sapiens
ttaatacctgaatat

SEQ ID NO: 1387953 - DNA, 15 bp, Homo sapiens
gttaatacctgaata

SEQ ID NO: 1387954 - DNA, 15 bp, Homo sapiens
tgttaatacctgaat

SEQ ID NO: 1387955 - DNA, 15 bp, Homo sapiens
atgttaatacctgaa

SEQ ID NO: 1387956 - DNA, 15 bp, Homo sapiens
tatgttaatacctga

SEQ ID NO: 1387957 - DNA, 15 bp, Homo sapiens
atatgttaatacctg

SEQ ID NO: 1387958 - DNA, 15 bp, Homo sapiens
tatatgttaatacct

SEQ ID NO: 1387959 - DNA, 15 bp, Homo sapiens
atatatgttaatacc

SEQ ID NO: 1387960 - DNA, 15 bp, Homo sapiens
tatatatgttaatac

SEQ ID NO: 1387961 - DNA, 15 bp, Homo sapiens
atatatatgttaata

SEQ ID NO: 1387962 - DNA, 15 bp, Homo sapiens
catatatatgttaat

SEQ ID NO: 1387963 - DNA, 15 bp, Homo sapiens
acatatatatgttaa

SEQ ID NO: 1387964 - DNA, 15 bp, Homo sapiens
tacatatatatgtta

SEQ ID NO: 1387965 - DNA, 15 bp, Homo sapiens
atacatatatatgtt

SEQ ID NO: 1387966 - DNA, 15 bp, Homo sapiens
taatacatatatatg

SEQ ID NO: 1387967 - DNA, 15 bp, Homo sapiens
ttaatacatatatat

SEQ ID NO: 1387968 - DNA, 15 bp, Homo sapiens
gttaatacatatata

SEQ ID NO: 1387969 - DNA, 15 bp, Homo sapiens
agttaatacatatat

SEQ ID NO: 1387970 - DNA, 15 bp, Homo sapiens
gagttaatacatata

SEQ ID NO: 1387971 - DNA, 15 bp, Homo sapiens
tgagttaatacatat

SEQ ID NO: 1387972 - DNA, 15 bp, Homo sapiens
gtgagttaatacata

SEQ ID NO: 1387973 - DNA, 15 bp, Homo sapiens
tgtgagttaatacat

SEQ ID NO: 1387974 - DNA, 15 bp, Homo sapiens
atgtgagttaataca

SEQ ID NO: 1387975 - DNA, 15 bp, Homo sapiens
tatgtgagttaatac

SEQ ID NO: 1387976 - DNA, 15 bp, Homo sapiens
atatgtgagttaata

SEQ ID NO: 1387977 - DNA, 15 bp, Homo sapiens
tatatgtgagttaat

SEQ ID NO: 1387978 - DNA, 15 bp, Homo sapiens
atatatgtgagttaa

SEQ ID NO: 1387979 - DNA, 15 bp, Homo sapiens
aatatatgtgagtta

SEQ ID NO: 1387980 - DNA, 15 bp, Homo sapiens
gaatatatgtgagtt

SEQ ID NO: 1387981 - DNA, 15 bp, Homo sapiens
tgaatatatgtgagt

SEQ ID NO: 1387982 - DNA, 15 bp, Homo sapiens
gtgaatatatgtgag

SEQ ID NO: 1387983 - DNA, 15 bp, Homo sapiens
cgtgaatatatgtga

SEQ ID NO: 1387984 - DNA, 15 bp, Homo sapiens
acgtgaatatatgtg

SEQ ID NO: 1387985 - DNA, 15 bp, Homo sapiens
aacgtgaatatatgt

SEQ ID NO: 1387986 - DNA, 15 bp, Homo sapiens
taacgtgaatatatg

SEQ ID NO: 1387987 - DNA, 15 bp, Homo sapiens
gtaacgtgaatatat

SEQ ID NO: 1387988 - DNA, 15 bp, Homo sapiens
tgtaacgtgaatata

SEQ ID NO: 1387989 - DNA, 15 bp, Homo sapiens
atgtaacgtgaatat

SEQ ID NO: 1387990 - DNA, 15 bp, Homo sapiens
tatgtaacgtgaata

SEQ ID NO: 1387991 - DNA, 15 bp, Homo sapiens
atatgtaacgtgaat

SEQ ID NO: 1387992 - DNA, 15 bp, Homo sapiens
tatatgtaacgtgaa

SEQ ID NO: 1387993 - DNA, 15 bp, Homo sapiens
ctatatgtaacgtga

SEQ ID NO: 1387994 - DNA, 15 bp, Homo sapiens
actatatgtaacgtg

SEQ ID NO: 1387995 - DNA, 15 bp, Homo sapiens
tactatatgtaacgt

SEQ ID NO: 1387996 - DNA, 15 bp, Homo sapiens
atactatatgtaacg

SEQ ID NO: 1387997 - DNA, 15 bp, Homo sapiens
catactatatgtaac

SEQ ID NO: 1387998 - DNA, 15 bp, Homo sapiens
acatactatatgtaa

SEQ ID NO: 1387999 - DNA, 15 bp, Homo sapiens
tacatactatatgta

SEQ ID NO: 1388000 - DNA, 15 bp, Homo sapiens
gtacatactatatgt

SEQ ID NO: 1388001 - DNA, 15 bp, Homo sapiens
agtacatactatatg

SEQ ID NO: 1388002 - DNA, 15 bp, Homo sapiens
cagtacatactatat

SEQ ID NO: 1388003 - DNA, 15 bp, Homo sapiens
acagtacatactata

SEQ ID NO: 1388004 - DNA, 15 bp, Homo sapiens
aacagtacatactat

SEQ ID NO: 1388005 - DNA, 15 bp, Homo sapiens
caacagtacatacta

SEQ ID NO: 1388006 - DNA, 15 bp, Homo sapiens
gcaacagtacatact

SEQ ID NO: 1388007 - DNA, 15 bp, Homo sapiens
tgcaacagtacatac

SEQ ID NO: 1388008 - DNA, 15 bp, Homo sapiens
atgcaacagtacata

SEQ ID NO: 1388009 - DNA, 15 bp, Homo sapiens
tatgcaacagtacat

SEQ ID NO: 1388010 - DNA, 15 bp, Homo sapiens
gtatgcaacagtaca

SEQ ID NO: 1388011 - DNA, 15 bp, Homo sapiens
cgtatgcaacagtac

SEQ ID NO: 1388012 - DNA, 15 bp, Homo sapiens
gcgtatgcaacagta

SEQ ID NO: 1388013 - DNA, 15 bp, Homo sapiens
tgcgtatgcaacagt

SEQ ID NO: 1388014 - DNA, 15 bp, Homo sapiens
gtgcgtatgcaacag

SEQ ID NO: 1388015 - DNA, 15 bp, Homo sapiens
tgtgcgtatgcaaca

SEQ ID NO: 1388016 - DNA, 15 bp, Homo sapiens
atgtgcgtatgcaac

SEQ ID NO: 1388017 - DNA, 15 bp, Homo sapiens
tatgtgcgtatgcaa

SEQ ID NO: 1388018 - DNA, 15 bp, Homo sapiens
atatgtgcgtatgca

SEQ ID NO: 1388019 - DNA, 15 bp, Homo sapiens
tatatgtgcgtatgc

SEQ ID NO: 1388020 - DNA, 15 bp, Homo sapiens
atatatgtgcgtatg

SEQ ID NO: 1388021 - DNA, 15 bp, Homo sapiens
catatatgtgcgtat

SEQ ID NO: 1388022 - DNA, 15 bp, Homo sapiens
ccatatatgtgcgta

SEQ ID NO: 1388023 - DNA, 15 bp, Homo sapiens
accatatatgtgcgt

SEQ ID NO: 1388024 - DNA, 15 bp, Homo sapiens
taccatatatgtgcg

SEQ ID NO: 1388025 - DNA, 15 bp, Homo sapiens
ataccatatatgtgc

SEQ ID NO: 1388026 - DNA, 15 bp, Homo sapiens
tataccatatatgtg

SEQ ID NO: 1388027 - DNA, 15 bp, Homo sapiens
ttataccatatatgt

SEQ ID NO: 1388028 - DNA, 15 bp, Homo sapiens
tttataccatatatg

SEQ ID NO: 1388029 - DNA, 15 bp, Homo sapiens
ttttataccatatat

SEQ ID NO: 1388030 - DNA, 15 bp, Homo sapiens
attttataccatata

SEQ ID NO: 1388031 - DNA, 15 bp, Homo sapiens
aattttataccatat

SEQ ID NO: 1388032 - DNA, 15 bp, Homo sapiens
taattttataccata

SEQ ID NO: 1388033 - DNA, 15 bp, Homo sapiens
ataattttataccat

SEQ ID NO: 1388034 - DNA, 15 bp, Homo sapiens
aataattttatacca

SEQ ID NO: 1388035 - DNA, 15 bp, Homo sapiens
caataattttatacc

SEQ ID NO: 1388036 - DNA, 15 bp, Homo sapiens
gcaataattttatac

SEQ ID NO: 1388037 - DNA, 15 bp, Homo sapiens
tgcaataattttata

SEQ ID NO: 1388038 - DNA, 15 bp, Homo sapiens
gtgcaataattttat

SEQ ID NO: 1388039 - DNA, 15 bp, Homo sapiens
agtgcaataatttta

SEQ ID NO: 1388040 - DNA, 15 bp, Homo sapiens
cagtgcaataatttt

SEQ ID NO: 1388041 - DNA, 15 bp, Homo sapiens
acagtgcaataattt

SEQ ID NO: 1388042 - DNA, 15 bp, Homo sapiens
tacagtgcaataatt

SEQ ID NO: 1388043 - DNA, 15 bp, Homo sapiens
ttacagtgcaataat

SEQ ID NO: 1388044 - DNA, 15 bp, Homo sapiens
gttacagtgcaataa

SEQ ID NO: 1388045 - DNA, 15 bp, Homo sapiens
tgttacagtgcaata

SEQ ID NO: 1388046 - DNA, 15 bp, Homo sapiens
atgttacagtgcaat

SEQ ID NO: 1388047 - DNA, 15 bp, Homo sapiens
gatgttacagtgcaa

SEQ ID NO: 1388048 - DNA, 15 bp, Homo sapiens
tgatgttacagtgca

SEQ ID NO: 1388049 - DNA, 15 bp, Homo sapiens
gtgatgttacagtgc

SEQ ID NO: 1388050 - DNA, 15 bp, Homo sapiens
tgtgatgttacagtg

SEQ ID NO: 1388051 - DNA, 15 bp, Homo sapiens
ttgtgatgttacagt

SEQ ID NO: 1388052 - DNA, 15 bp, Homo sapiens
tttgtgatgttacag

SEQ ID NO: 1388053 - DNA, 15 bp, Homo sapiens
ctttgtgatgttaca

SEQ ID NO: 1388054 - DNA, 15 bp, Homo sapiens
actttgtgatgttac

SEQ ID NO: 1388055 - DNA, 15 bp, Homo sapiens
tactttgtgatgtta

SEQ ID NO: 1388056 - DNA, 15 bp, Homo sapiens
atactttgtgatgtt

SEQ ID NO: 1388057 - DNA, 15 bp, Homo sapiens
tatactttgtgatgt

SEQ ID NO: 1388058 - DNA, 15 bp, Homo sapiens
atatactttgtgatg

SEQ ID NO: 1388059 - DNA, 15 bp, Homo sapiens
gatatactttgtgat

SEQ ID NO: 1388060 - DNA, 15 bp, Homo sapiens
tgatatactttgtga

SEQ ID NO: 1388061 - DNA, 15 bp, Homo sapiens
gtgatatactttgtg

SEQ ID NO: 1388062 - DNA, 15 bp, Homo sapiens
tgtgatatactttgt

SEQ ID NO: 1388063 - DNA, 15 bp, Homo sapiens
atgtgatatactttg

SEQ ID NO: 1388064 - DNA, 15 bp, Homo sapiens
tatgtgatatacttt

SEQ ID NO: 1388065 - DNA, 15 bp, Homo sapiens
ttatgtgatatactt

SEQ ID NO: 1388066 - DNA, 15 bp, Homo sapiens
cttatgtgatatact

SEQ ID NO: 1388067 - DNA, 15 bp, Homo sapiens
acttatgtgatatac

SEQ ID NO: 1388068 - DNA, 15 bp, Homo sapiens
aacttatgtgatata

SEQ ID NO: 1388069 - DNA, 15 bp, Homo sapiens
taacttatgtgatat

SEQ ID NO: 1388070 - DNA, 15 bp, Homo sapiens
ttaacttatgtgata

SEQ ID NO: 1388071 - DNA, 15 bp, Homo sapiens
gttaacttatgtgat

SEQ ID NO: 1388072 - DNA, 15 bp, Homo sapiens
agttaacttatgtga

SEQ ID NO: 1388073 - DNA, 15 bp, Homo sapiens
gagttaacttatgtg

SEQ ID NO: 1388074 - DNA, 15 bp, Homo sapiens
tgagttaacttatgt

SEQ ID NO: 1388075 - DNA, 15 bp, Homo sapiens
ttgagttaacttatg

SEQ ID NO: 1388076 - DNA, 15 bp, Homo sapiens
gttgagttaacttat

SEQ ID NO: 1388077 - DNA, 15 bp, Homo sapiens
ggttgagttaactta

SEQ ID NO: 1388078 - DNA, 15 bp, Homo sapiens
aggttgagttaactt

SEQ ID NO: 1388079 - DNA, 15 bp, Homo sapiens
aaggttgagttaact

SEQ ID NO: 1388080 - DNA, 15 bp, Homo sapiens
gaaggttgagttaac

SEQ ID NO: 1388081 - DNA, 15 bp, Homo sapiens
tgaaggttgagttaa

SEQ ID NO: 1388082 - DNA, 15 bp, Homo sapiens
gtgaaggttgagtta

SEQ ID NO: 1388083 - DNA, 15 bp, Homo sapiens
tgtgaaggttgagtt

SEQ ID NO: 1388084 - DNA, 15 bp, Homo sapiens
ttgtgaaggttgagt

SEQ ID NO: 1388085 - DNA, 15 bp, Homo sapiens
cttgtgaaggttgag

SEQ ID NO: 1388086 - DNA, 15 bp, Homo sapiens
tcttgtgaaggttga

SEQ ID NO: 1388087 - DNA, 15 bp, Homo sapiens
ttcttgtgaaggttg

SEQ ID NO: 1388088 - DNA, 15 bp, Homo sapiens
gttcttgtgaaggtt

SEQ ID NO: 1388089 - DNA, 15 bp, Homo sapiens
agttcttgtgaaggt

SEQ ID NO: 1388090 - DNA, 15 bp, Homo sapiens
aagttcttgtgaagg

SEQ ID NO: 1388091 - DNA, 15 bp, Homo sapiens
aaagttcttgtgaag

SEQ ID NO: 1388092 - DNA, 15 bp, Homo sapiens
taaagttcttgtgaa

SEQ ID NO: 1388093 - DNA, 15 bp, Homo sapiens
ataaagttcttgtga

SEQ ID NO: 1388094 - DNA, 15 bp, Homo sapiens
cataaagttcttgtg

SEQ ID NO: 1388095 - DNA, 15 bp, Homo sapiens
tcataaagttcttgt

SEQ ID NO: 1388096 - DNA, 15 bp, Homo sapiens
ctcataaagttcttg

SEQ ID NO: 1388097 - DNA, 15 bp, Homo sapiens
cctcataaagttctt

SEQ ID NO: 1388098 - DNA, 15 bp, Homo sapiens
acctcataaagttct

SEQ ID NO: 1388099 - DNA, 15 bp, Homo sapiens
tacctcataaagttc

SEQ ID NO: 1388100 - DNA, 15 bp, Homo sapiens
atacctcataaagtt

SEQ ID NO: 1388101 - DNA, 15 bp, Homo sapiens
tatacctcataaagt

SEQ ID NO: 1388102 - DNA, 15 bp, Homo sapiens
atatacctcataaag

SEQ ID NO: 1388103 - DNA, 15 bp, Homo sapiens
tatatacctcataaa

SEQ ID NO: 1388104 - DNA, 15 bp, Homo sapiens
gtatatacctcataa

SEQ ID NO: 1388105 - DNA, 15 bp, Homo sapiens
agtatatacctcata

SEQ ID NO: 1388106 - DNA, 15 bp, Homo sapiens
cagtatatacctcat

SEQ ID NO: 1388107 - DNA, 15 bp, Homo sapiens
acagtatatacctca

SEQ ID NO: 1388108 - DNA, 15 bp, Homo sapiens
aacagtatatacctc

SEQ ID NO: 1388109 - DNA, 15 bp, Homo sapiens
taacagtatatacct

SEQ ID NO: 1388110 - DNA, 15 bp, Homo sapiens
ataacagtatatacc

SEQ ID NO: 1388111 - DNA, 15 bp, Homo sapiens
aataacagtatatac

SEQ ID NO: 1388112 - DNA, 15 bp, Homo sapiens
taataacagtatata

SEQ ID NO: 1388113 - DNA, 15 bp, Homo sapiens
ataataacagtatat

SEQ ID NO: 1388114 - DNA, 15 bp, Homo sapiens
gataataacagtata

SEQ ID NO: 1388115 - DNA, 15 bp, Homo sapiens
tgataataacagtat

SEQ ID NO: 1388116 - DNA, 15 bp, Homo sapiens
gtgataataacagta

SEQ ID NO: 1388117 - DNA, 15 bp, Homo sapiens
cgtgataataacagt

SEQ ID NO: 1388118 - DNA, 15 bp, Homo sapiens
gcgtgataataacag

SEQ ID NO: 1388119 - DNA, 15 bp, Homo sapiens
agcgtgataataaca

SEQ ID NO: 1388120 - DNA, 15 bp, Homo sapiens
tagcgtgataataac

SEQ ID NO: 1388121 - DNA, 15 bp, Homo sapiens
ttagcgtgataataa

SEQ ID NO: 1388122 - DNA, 15 bp, Homo sapiens
attagcgtgataata

SEQ ID NO: 1388123 - DNA, 15 bp, Homo sapiens
aattagcgtgataat

SEQ ID NO: 1388124 - DNA, 15 bp, Homo sapiens
aaattagcgtgataa

SEQ ID NO: 1388125 - DNA, 15 bp, Homo sapiens
aaaattagcgtgata

SEQ ID NO: 1388126 - DNA, 15 bp, Homo sapiens
taaaattagcgtgat

SEQ ID NO: 1388127 - DNA, 15 bp, Homo sapiens
gtaaaattagcgtga

SEQ ID NO: 1388128 - DNA, 15 bp, Homo sapiens
cgtaaaattagcgtg

SEQ ID NO: 1388129 - DNA, 15 bp, Homo sapiens
ccgtaaaattagcgt

SEQ ID NO: 1388130 - DNA, 15 bp, Homo sapiens
tccgtaaaattagcg

SEQ ID NO: 1388131 - DNA, 15 bp, Homo sapiens
ttccgtaaaattagc

SEQ ID NO: 1388132 - DNA, 15 bp, Homo sapiens
cttccgtaaaattag

SEQ ID NO: 1388133 - DNA, 15 bp, Homo sapiens
tcttccgtaaaatta

SEQ ID NO: 1388134 - DNA, 15 bp, Homo sapiens
ttcttccgtaaaatt

SEQ ID NO: 1388135 - DNA, 15 bp, Homo sapiens
tttcttccgtaaaat

SEQ ID NO: 1388136 - DNA, 15 bp, Homo sapiens
ttttcttccgtaaaa

SEQ ID NO: 1388137 - DNA, 15 bp, Homo sapiens
cttttcttccgtaaa

SEQ ID NO: 1388138 - DNA, 15 bp, Homo sapiens
tcttttcttccgtaa

SEQ ID NO: 1388139 - DNA, 15 bp, Homo sapiens
gtcttttcttccgta

SEQ ID NO: 1388140 - DNA, 15 bp, Homo sapiens
tgtcttttcttccgt

SEQ ID NO: 1388141 - DNA, 15 bp, Homo sapiens
ttgtcttttcttccg

SEQ ID NO: 1388142 - DNA, 15 bp, Homo sapiens
tttgtcttttcttcc

SEQ ID NO: 1388143 - DNA, 15 bp, Homo sapiens
atttgtcttttcttc

SEQ ID NO: 1388144 - DNA, 15 bp, Homo sapiens
catttgtcttttctt

SEQ ID NO: 1388145 - DNA, 15 bp, Homo sapiens
acatttgtcttttct

SEQ ID NO: 1388146 - DNA, 15 bp, Homo sapiens
tacatttgtcttttc

SEQ ID NO: 1388147 - DNA, 15 bp, Homo sapiens
ttacatttgtctttt

SEQ ID NO: 1388148 - DNA, 15 bp, Homo sapiens
tttacatttgtcttt

SEQ ID NO: 1388149 - DNA, 15 bp, Homo sapiens
ttttacatttgtctt

SEQ ID NO: 1388150 - DNA, 15 bp, Homo sapiens
tttttacatttgtct

SEQ ID NO: 1388151 - DNA, 15 bp, Homo sapiens
ttttttacatttgtc

SEQ ID NO: 1388152 - DNA, 15 bp, Homo sapiens
cttttttacatttgt

SEQ ID NO: 1388153 - DNA, 15 bp, Homo sapiens
gcttttttacatttg

SEQ ID NO: 1388154 - DNA, 15 bp, Homo sapiens
tgcttttttacattt

SEQ ID NO: 1388155 - DNA, 15 bp, Homo sapiens
atgcttttttacatt

SEQ ID NO: 1388156 - DNA, 15 bp, Homo sapiens
aatgcttttttacat

SEQ ID NO: 1388157 - DNA, 15 bp, Homo sapiens
taatgcttttttaca

SEQ ID NO: 1388158 - DNA, 15 bp, Homo sapiens
ctaatgcttttttac

SEQ ID NO: 1388159 - DNA, 15 bp, Homo sapiens
tctaatgctttttta

SEQ ID NO: 1388160 - DNA, 15 bp, Homo sapiens
ttctaatgctttttt

SEQ ID NO: 1388161 - DNA, 15 bp, Homo sapiens
tttctaatgcttttt

SEQ ID NO: 1388162 - DNA, 15 bp, Homo sapiens
atttctaatgctttt

SEQ ID NO: 1388163 - DNA, 15 bp, Homo sapiens
aatttctaatgcttt

SEQ ID NO: 1388164 - DNA, 15 bp, Homo sapiens
caatttctaatgctt

SEQ ID NO: 1388165 - DNA, 15 bp, Homo sapiens
gcaatttctaatgct

SEQ ID NO: 1388166 - DNA, 15 bp, Homo sapiens
ggcaatttctaatgc

SEQ ID NO: 1388167 - DNA, 15 bp, Homo sapiens
gggcaatttctaatg

SEQ ID NO: 1388168 - DNA, 15 bp, Homo sapiens
tgggcaatttctaat

SEQ ID NO: 1388169 - DNA, 15 bp, Homo sapiens
ttgggcaatttctaa

SEQ ID NO: 1388170 - DNA, 15 bp, Homo sapiens
cttgggcaatttcta

SEQ ID NO: 1388171 - DNA, 15 bp, Homo sapiens
ccttgggcaatttct

SEQ ID NO: 1388172 - DNA, 15 bp, Homo sapiens
gccttgggcaatttc

SEQ ID NO: 1388173 - DNA, 15 bp, Homo sapiens
ggccttgggcaattt

SEQ ID NO: 1388174 - DNA, 15 bp, Homo sapiens
tggccttgggcaatt

SEQ ID NO: 1388175 - DNA, 15 bp, Homo sapiens
gtggccttgggcaat

SEQ ID NO: 1388176 - DNA, 15 bp, Homo sapiens
agtggccttgggcaa

SEQ ID NO: 1388177 - DNA, 15 bp, Homo sapiens
aagtggccttgggca

SEQ ID NO: 1388178 - DNA, 15 bp, Homo sapiens
taagtggccttgggc

SEQ ID NO: 1388179 - DNA, 15 bp, Homo sapiens
ctaagtggccttggg

SEQ ID NO: 1388180 - DNA, 15 bp, Homo sapiens
tctaagtggccttgg

SEQ ID NO: 1388181 - DNA, 15 bp, Homo sapiens
atctaagtggccttg

SEQ ID NO: 1388182 - DNA, 15 bp, Homo sapiens
tatctaagtggcctt

SEQ ID NO: 1388183 - DNA, 15 bp, Homo sapiens
ttatctaagtggcct

SEQ ID NO: 1388184 - DNA, 15 bp, Homo sapiens
attatctaagtggcc

SEQ ID NO: 1388185 - DNA, 15 bp, Homo sapiens
tattatctaagtggc

SEQ ID NO: 1388186 - DNA, 15 bp, Homo sapiens
ttattatctaagtgg

SEQ ID NO: 1388187 - DNA, 15 bp, Homo sapiens
cttattatctaagtg

SEQ ID NO: 1388188 - DNA, 15 bp, Homo sapiens
ccttattatctaagt

SEQ ID NO: 1388189 - DNA, 15 bp, Homo sapiens
tccttattatctaag

SEQ ID NO: 1388190 - DNA, 15 bp, Homo sapiens
ctccttattatctaa

SEQ ID NO: 1388191 - DNA, 15 bp, Homo sapiens
gctccttattatcta

SEQ ID NO: 1388192 - DNA, 15 bp, Homo sapiens
tgctccttattatct

SEQ ID NO: 1388193 - DNA, 15 bp, Homo sapiens
ttgctccttattatc

SEQ ID NO: 1388194 - DNA, 15 bp, Homo sapiens
tttgctccttattat

SEQ ID NO: 1388195 - DNA, 15 bp, Homo sapiens
ctttgctccttatta

SEQ ID NO: 1388196 - DNA, 15 bp, Homo sapiens
gctttgctccttatt

SEQ ID NO: 1388197 - DNA, 15 bp, Homo sapiens
ggctttgctccttat

SEQ ID NO: 1388198 - DNA, 15 bp, Homo sapiens
aggctttgctcctta

SEQ ID NO: 1388199 - DNA, 15 bp, Homo sapiens
taggctttgctcctt

SEQ ID NO: 1388200 - DNA, 15 bp, Homo sapiens
ctaggctttgctcct

SEQ ID NO: 1388201 - DNA, 15 bp, Homo sapiens
cctaggctttgctcc

SEQ ID NO: 1388202 - DNA, 15 bp, Homo sapiens
acctaggctttgctc

SEQ ID NO: 1388203 - DNA, 15 bp, Homo sapiens
aacctaggctttgct

SEQ ID NO: 1388204 - DNA, 15 bp, Homo sapiens
aaacctaggctttgc

SEQ ID NO: 1388205 - DNA, 15 bp, Homo sapiens
caaacctaggctttg

SEQ ID NO: 1388206 - DNA, 15 bp, Homo sapiens
ccaaacctaggcttt

SEQ ID NO: 1388207 - DNA, 15 bp, Homo sapiens
cccaaacctaggctt

SEQ ID NO: 1388208 - DNA, 15 bp, Homo sapiens
acccaaacctaggct

SEQ ID NO: 1388209 - DNA, 15 bp, Homo sapiens
gacccaaacctaggc

SEQ ID NO: 1388210 - DNA, 15 bp, Homo sapiens
ggacccaaacctagg

SEQ ID NO: 1388211 - DNA, 15 bp, Homo sapiens
tggacccaaacctag

SEQ ID NO: 1388212 - DNA, 15 bp, Homo sapiens
atggacccaaaccta

SEQ ID NO: 1388213 - DNA, 15 bp, Homo sapiens
gatggacccaaacct

SEQ ID NO: 1388214 - DNA, 15 bp, Homo sapiens
agatggacccaaacc

SEQ ID NO: 1388215 - DNA, 15 bp, Homo sapiens
cagatggacccaaac

SEQ ID NO: 1388216 - DNA, 15 bp, Homo sapiens
acagatggacccaaa

SEQ ID NO: 1388217 - DNA, 15 bp, Homo sapiens
aacagatggacccaa

SEQ ID NO: 1388218 - DNA, 15 bp, Homo sapiens
gaacagatggaccca

SEQ ID NO: 1388219 - DNA, 15 bp, Homo sapiens
tgaacagatggaccc

SEQ ID NO: 1388220 - DNA, 15 bp, Homo sapiens
atgaacagatggacc

SEQ ID NO: 1388221 - DNA, 15 bp, Homo sapiens
tatgaacagatggac

SEQ ID NO: 1388222 - DNA, 15 bp, Homo sapiens
atatgaacagatgga

SEQ ID NO: 1388223 - DNA, 15 bp, Homo sapiens
aatatgaacagatgg

SEQ ID NO: 1388224 - DNA, 15 bp, Homo sapiens
gaatatgaacagatg

SEQ ID NO: 1388225 - DNA, 15 bp, Homo sapiens
agaatatgaacagat

SEQ ID NO: 1388226 - DNA, 15 bp, Homo sapiens
aagaatatgaacaga

SEQ ID NO: 1388227 - DNA, 15 bp, Homo sapiens
taagaatatgaacag

SEQ ID NO: 1388228 - DNA, 15 bp, Homo sapiens
gtaagaatatgaaca

SEQ ID NO: 1388229 - DNA, 15 bp, Homo sapiens
ggtaagaatatgaac

SEQ ID NO: 1388230 - DNA, 15 bp, Homo sapiens
tggtaagaatatgaa

SEQ ID NO: 1388231 - DNA, 15 bp, Homo sapiens
atggtaagaatatga

SEQ ID NO: 1388232 - DNA, 15 bp, Homo sapiens
aatggtaagaatatg

SEQ ID NO: 1388233 - DNA, 15 bp, Homo sapiens
taatggtaagaatat

SEQ ID NO: 1388234 - DNA, 15 bp, Homo sapiens
ataatggtaagaata

SEQ ID NO: 1388235 - DNA, 15 bp, Homo sapiens
tataatggtaagaat

SEQ ID NO: 1388236 - DNA, 15 bp, Homo sapiens
atataatggtaagaa

SEQ ID NO: 1388237 - DNA, 15 bp, Homo sapiens
aatataatggtaaga

SEQ ID NO: 1388238 - DNA, 15 bp, Homo sapiens
aaatataatggtaag

SEQ ID NO: 1388239 - DNA, 15 bp, Homo sapiens
aaaatataatggtaa

SEQ ID NO: 1388240 - DNA, 15 bp, Homo sapiens
taaaatataatggta

SEQ ID NO: 1388241 - DNA, 15 bp, Homo sapiens
ataaaatataatggt

SEQ ID NO: 1388242 - DNA, 15 bp, Homo sapiens
aataaaatataatgg

SEQ ID NO: 1388243 - DNA, 15 bp, Homo sapiens
aaataaaatataatg

SEQ ID NO: 1388244 - DNA, 15 bp, Homo sapiens
aaaataaaatataat

SEQ ID NO: 1388245 - DNA, 15 bp, Homo sapiens
gaaaataaaatataa

SEQ ID NO: 1388246 - DNA, 15 bp, Homo sapiens
agaaaataaaatata

SEQ ID NO: 1388247 - DNA, 15 bp, Homo sapiens
aagaaaataaaatat

SEQ ID NO: 1388248 - DNA, 15 bp, Homo sapiens
caagaaaataaaata

SEQ ID NO: 1388249 - DNA, 15 bp, Homo sapiens
acaagaaaataaaat

SEQ ID NO: 1388250 - DNA, 15 bp, Homo sapiens
gacaagaaaataaaa

SEQ ID NO: 1388251 - DNA, 15 bp, Homo sapiens
agacaagaaaataaa

SEQ ID NO: 1388252 - DNA, 15 bp, Homo sapiens
aagacaagaaaataa

SEQ ID NO: 1388253 - DNA, 15 bp, Homo sapiens
aaagacaagaaaata

SEQ ID NO: 1388254 - DNA, 15 bp, Homo sapiens
aaaagacaagaaaat

SEQ ID NO: 1388255 - DNA, 15 bp, Homo sapiens
aaaaagacaagaaaa

SEQ ID NO: 1388256 - DNA, 15 bp, Homo sapiens
gaaaaagacaagaaa

SEQ ID NO: 1388257 - DNA, 15 bp, Homo sapiens
agaaaaagacaagaa

SEQ ID NO: 1388258 - DNA, 15 bp, Homo sapiens
gagaaaaagacaaga

SEQ ID NO: 1388259 - DNA, 15 bp, Homo sapiens
tgagaaaaagacaag

SEQ ID NO: 1388260 - DNA, 15 bp, Homo sapiens
atgagaaaaagacaa

SEQ ID NO: 1388261 - DNA, 15 bp, Homo sapiens
gatgagaaaaagaca

SEQ ID NO: 1388262 - DNA, 15 bp, Homo sapiens
ggatgagaaaaagac

SEQ ID NO: 1388263 - DNA, 15 bp, Homo sapiens
aggatgagaaaaaga

SEQ ID NO: 1388264 - DNA, 15 bp, Homo sapiens
caggatgagaaaaag

SEQ ID NO: 1388265 - DNA, 15 bp, Homo sapiens
gcaggatgagaaaaa

SEQ ID NO: 1388266 - DNA, 15 bp, Homo sapiens
ggcaggatgagaaaa

SEQ ID NO: 1388267 - DNA, 15 bp, Homo sapiens
tggcaggatgagaaa

SEQ ID NO: 1388268 - DNA, 15 bp, Homo sapiens
gtggcaggatgagaa

SEQ ID NO: 1388269 - DNA, 15 bp, Homo sapiens
tgtggcaggatgaga

SEQ ID NO: 1388270 - DNA, 15 bp, Homo sapiens
gtgtggcaggatgag

SEQ ID NO: 1388271 - DNA, 15 bp, Homo sapiens
agtgtggcaggatga

SEQ ID NO: 1388272 - DNA, 15 bp, Homo sapiens
gagtgtggcaggatg

SEQ ID NO: 1388273 - DNA, 15 bp, Homo sapiens
agagtgtggcaggat

SEQ ID NO: 1388274 - DNA, 15 bp, Homo sapiens
aagagtgtggcagga

SEQ ID NO: 1388275 - DNA, 15 bp, Homo sapiens
gaagagtgtggcagg

SEQ ID NO: 1388276 - DNA, 15 bp, Homo sapiens
agaagagtgtggcag

SEQ ID NO: 1388277 - DNA, 15 bp, Homo sapiens
tagaagagtgtggca

SEQ ID NO: 1388278 - DNA, 15 bp, Homo sapiens
atagaagagtgtggc

SEQ ID NO: 1388279 - DNA, 15 bp, Homo sapiens
gatagaagagtgtgg

SEQ ID NO: 1388280 - DNA, 15 bp, Homo sapiens
tgatagaagagtgtg

SEQ ID NO: 1388281 - DNA, 15 bp, Homo sapiens
atgatagaagagtgt

SEQ ID NO: 1388282 - DNA, 15 bp, Homo sapiens
gatgatagaagagtg

SEQ ID NO: 1388283 - DNA, 15 bp, Homo sapiens
ggatgatagaagagt

SEQ ID NO: 1388284 - DNA, 15 bp, Homo sapiens
gggatgatagaagag

SEQ ID NO: 1388285 - DNA, 15 bp, Homo sapiens
agggatgatagaaga

SEQ ID NO: 1388286 - DNA, 15 bp, Homo sapiens
gagggatgatagaag

SEQ ID NO: 1388287 - DNA, 15 bp, Homo sapiens
tgagggatgatagaa

SEQ ID NO: 1388288 - DNA, 15 bp, Homo sapiens
atgagggatgataga

SEQ ID NO: 1388289 - DNA, 15 bp, Homo sapiens
aatgagggatgatag

SEQ ID NO: 1388290 - DNA, 15 bp, Homo sapiens
aaatgagggatgata

SEQ ID NO: 1388291 - DNA, 15 bp, Homo sapiens
aaaatgagggatgat

SEQ ID NO: 1388292 - DNA, 15 bp, Homo sapiens
gaaaatgagggatga

SEQ ID NO: 1388293 - DNA, 15 bp, Homo sapiens
ggaaaatgagggatg

SEQ ID NO: 1388294 - DNA, 15 bp, Homo sapiens
gggaaaatgagggat

SEQ ID NO: 1388295 - DNA, 15 bp, Homo sapiens
agggaaaatgaggga

SEQ ID NO: 1388296 - DNA, 15 bp, Homo sapiens
gagggaaaatgaggg

SEQ ID NO: 1388297 - DNA, 15 bp, Homo sapiens
agagggaaaatgagg

SEQ ID NO: 1388298 - DNA, 15 bp, Homo sapiens
gagagggaaaatgag

SEQ ID NO: 1388299 - DNA, 15 bp, Homo sapiens
agagagggaaaatga

SEQ ID NO: 1388300 - DNA, 15 bp, Homo sapiens
gagagagggaaaatg

SEQ ID NO: 1388301 - DNA, 15 bp, Homo sapiens
agagagagggaaaat

SEQ ID NO: 1388302 - DNA, 15 bp, Homo sapiens
gagagagagggaaaa

SEQ ID NO: 1388303 - DNA, 15 bp, Homo sapiens
agagagagagggaaa

SEQ ID NO: 1388304 - DNA, 15 bp, Homo sapiens
tagagagagagggaa

SEQ ID NO: 1388305 - DNA, 15 bp, Homo sapiens
ttagagagagaggga

SEQ ID NO: 1388306 - DNA, 15 bp, Homo sapiens
tttagagagagaggg

SEQ ID NO: 1388307 - DNA, 15 bp, Homo sapiens
atttagagagagagg

SEQ ID NO: 1388308 - DNA, 15 bp, Homo sapiens
aatttagagagagag

SEQ ID NO: 1388309 - DNA, 15 bp, Homo sapiens
aaatttagagagaga

SEQ ID NO: 1388310 - DNA, 15 bp, Homo sapiens
aaaatttagagagag

SEQ ID NO: 1388311 - DNA, 15 bp, Homo sapiens
caaaatttagagaga

SEQ ID NO: 1388312 - DNA, 15 bp, Homo sapiens
acaaaatttagagag

SEQ ID NO: 1388313 - DNA, 15 bp, Homo sapiens
cacaaaatttagaga

SEQ ID NO: 1388314 - DNA, 15 bp, Homo sapiens
acacaaaatttagag

SEQ ID NO: 1388315 - DNA, 15 bp, Homo sapiens
gacacaaaatttaga

SEQ ID NO: 1388316 - DNA, 15 bp, Homo sapiens
tgacacaaaatttag

SEQ ID NO: 1388317 - DNA, 15 bp, Homo sapiens
atgacacaaaattta

SEQ ID NO: 1388318 - DNA, 15 bp, Homo sapiens
catgacacaaaattt

SEQ ID NO: 1388319 - DNA, 15 bp, Homo sapiens
tcatgacacaaaatt

SEQ ID NO: 1388320 - DNA, 15 bp, Homo sapiens
ttcatgacacaaaat

SEQ ID NO: 1388321 - DNA, 15 bp, Homo sapiens
cttcatgacacaaaa

SEQ ID NO: 1388322 - DNA, 15 bp, Homo sapiens
tcttcatgacacaaa

SEQ ID NO: 1388323 - DNA, 15 bp, Homo sapiens
ttcttcatgacacaa

SEQ ID NO: 1388324 - DNA, 15 bp, Homo sapiens
attcttcatgacaca

SEQ ID NO: 1388325 - DNA, 15 bp, Homo sapiens
aattcttcatgacac

SEQ ID NO: 1388326 - DNA, 15 bp, Homo sapiens
taattcttcatgaca

SEQ ID NO: 1388327 - DNA, 15 bp, Homo sapiens
ttaattcttcatgac

SEQ ID NO: 1388328 - DNA, 15 bp, Homo sapiens
attaattcttcatga

SEQ ID NO: 1388329 - DNA, 15 bp, Homo sapiens
cattaattcttcatg

SEQ ID NO: 1388330 - DNA, 15 bp, Homo sapiens
ccattaattcttcat

SEQ ID NO: 1388331 - DNA, 15 bp, Homo sapiens
tccattaattcttca

SEQ ID NO: 1388332 - DNA, 15 bp, Homo sapiens
ttccattaattcttc

SEQ ID NO: 1388333 - DNA, 15 bp, Homo sapiens
cttccattaattctt

SEQ ID NO: 1388334 - DNA, 15 bp, Homo sapiens
tcttccattaattct

SEQ ID NO: 1388335 - DNA, 15 bp, Homo sapiens
ttcttccattaattc

SEQ ID NO: 1388336 - DNA, 15 bp, Homo sapiens
tttcttccattaatt

SEQ ID NO: 1388337 - DNA, 15 bp, Homo sapiens
atttcttccattaat

SEQ ID NO: 1388338 - DNA, 15 bp, Homo sapiens
tatttcttccattaa

SEQ ID NO: 1388339 - DNA, 15 bp, Homo sapiens
ttatttcttccatta

SEQ ID NO: 1388340 - DNA, 15 bp, Homo sapiens
cttatttcttccatt

SEQ ID NO: 1388341 - DNA, 15 bp, Homo sapiens
gcttatttcttccat

SEQ ID NO: 1388342 - DNA, 15 bp, Homo sapiens
agcttatttcttcca

SEQ ID NO: 1388343 - DNA, 15 bp, Homo sapiens
cagcttatttcttcc

SEQ ID NO: 1388344 - DNA, 15 bp, Homo sapiens
tcagcttatttcttc

SEQ ID NO: 1388345 - DNA, 15 bp, Homo sapiens
ttcagcttatttctt

SEQ ID NO: 1388346 - DNA, 15 bp, Homo sapiens
attcagcttatttct

SEQ ID NO: 1388347 - DNA, 15 bp, Homo sapiens
cattcagcttatttc

SEQ ID NO: 1388348 - DNA, 15 bp, Homo sapiens
acattcagcttattt

SEQ ID NO: 1388349 - DNA, 15 bp, Homo sapiens
aacattcagcttatt

SEQ ID NO: 1388350 - DNA, 15 bp, Homo sapiens
caacattcagcttat

SEQ ID NO: 1388351 - DNA, 15 bp, Homo sapiens
gcaacattcagctta

SEQ ID NO: 1388352 - DNA, 15 bp, Homo sapiens
ggcaacattcagctt

SEQ ID NO: 1388353 - DNA, 15 bp, Homo sapiens
tggcaacattcagct

SEQ ID NO: 1388354 - DNA, 15 bp, Homo sapiens
atggcaacattcagc

SEQ ID NO: 1388355 - DNA, 15 bp, Homo sapiens
gatggcaacattcag

SEQ ID NO: 1388356 - DNA, 15 bp, Homo sapiens
cgatggcaacattca

SEQ ID NO: 1388357 - DNA, 15 bp, Homo sapiens
gcgatggcaacattc

SEQ ID NO: 1388358 - DNA, 15 bp, Homo sapiens
agcgatggcaacatt

SEQ ID NO: 1388359 - DNA, 15 bp, Homo sapiens
aagcgatggcaacat

SEQ ID NO: 1388360 - DNA, 15 bp, Homo sapiens
taagcgatggcaaca

SEQ ID NO: 1388361 - DNA, 15 bp, Homo sapiens
ttaagcgatggcaac

SEQ ID NO: 1388362 - DNA, 15 bp, Homo sapiens
gttaagcgatggcaa

SEQ ID NO: 1388363 - DNA, 15 bp, Homo sapiens
ggttaagcgatggca

SEQ ID NO: 1388364 - DNA, 15 bp, Homo sapiens
tggttaagcgatggc

SEQ ID NO: 1388365 - DNA, 15 bp, Homo sapiens
atggttaagcgatgg

SEQ ID NO: 1388366 - DNA, 15 bp, Homo sapiens
aatggttaagcgatg

SEQ ID NO: 1388367 - DNA, 15 bp, Homo sapiens
taatggttaagcgat

SEQ ID NO: 1388368 - DNA, 15 bp, Homo sapiens
gtaatggttaagcga

SEQ ID NO: 1388369 - DNA, 15 bp, Homo sapiens
agtaatggttaagcg

SEQ ID NO: 1388370 - DNA, 15 bp, Homo sapiens
aagtaatggttaagc

SEQ ID NO: 1388371 - DNA, 15 bp, Homo sapiens
gaagtaatggttaag

SEQ ID NO: 1388372 - DNA, 15 bp, Homo sapiens
agaagtaatggttaa

SEQ ID NO: 1388373 - DNA, 15 bp, Homo sapiens
aagaagtaatggtta

SEQ ID NO: 1388374 - DNA, 15 bp, Homo sapiens
aaagaagtaatggtt

SEQ ID NO: 1388375 - DNA, 15 bp, Homo sapiens
caaagaagtaatggt

SEQ ID NO: 1388376 - DNA, 15 bp, Homo sapiens
tcaaagaagtaatgg

SEQ ID NO: 1388377 - DNA, 15 bp, Homo sapiens
atcaaagaagtaatg

SEQ ID NO: 1388378 - DNA, 15 bp, Homo sapiens
catcaaagaagtaat

SEQ ID NO: 1388379 - DNA, 15 bp, Homo sapiens
ccatcaaagaagtaa

SEQ ID NO: 1388380 - DNA, 15 bp, Homo sapiens
tccatcaaagaagta

SEQ ID NO: 1388381 - DNA, 15 bp, Homo sapiens
ctccatcaaagaagt

SEQ ID NO: 1388382 - DNA, 15 bp, Homo sapiens
actccatcaaagaag

SEQ ID NO: 1388383 - DNA, 15 bp, Homo sapiens
aactccatcaaagaa

SEQ ID NO: 1388384 - DNA, 15 bp, Homo sapiens
aaactccatcaaaga

SEQ ID NO: 1388385 - DNA, 15 bp, Homo sapiens
aaaactccatcaaag

SEQ ID NO: 1388386 - DNA, 15 bp, Homo sapiens
caaaactccatcaaa

SEQ ID NO: 1388387 - DNA, 15 bp, Homo sapiens
ccaaaactccatcaa

SEQ ID NO: 1388388 - DNA, 15 bp, Homo sapiens
accaaaactccatca

SEQ ID NO: 1388389 - DNA, 15 bp, Homo sapiens
taccaaaactccatc

SEQ ID NO: 1388390 - DNA, 15 bp, Homo sapiens
gtaccaaaactccat

SEQ ID NO: 1388391 - DNA, 15 bp, Homo sapiens
agtaccaaaactcca

SEQ ID NO: 1388392 - DNA, 15 bp, Homo sapiens
aagtaccaaaactcc

SEQ ID NO: 1388393 - DNA, 15 bp, Homo sapiens
gaagtaccaaaactc

SEQ ID NO: 1388394 - DNA, 15 bp, Homo sapiens
tgaagtaccaaaact

SEQ ID NO: 1388395 - DNA, 15 bp, Homo sapiens
atgaagtaccaaaac

SEQ ID NO: 1388396 - DNA, 15 bp, Homo sapiens
aatgaagtaccaaaa

SEQ ID NO: 1388397 - DNA, 15 bp, Homo sapiens
aaatgaagtaccaaa

SEQ ID NO: 1388398 - DNA, 15 bp, Homo sapiens
caaatgaagtaccaa

SEQ ID NO: 1388399 - DNA, 15 bp, Homo sapiens
gcaaatgaagtacca

SEQ ID NO: 1388400 - DNA, 15 bp, Homo sapiens
ggcaaatgaagtacc

SEQ ID NO: 1388401 - DNA, 15 bp, Homo sapiens
aggcaaatgaagtac

SEQ ID NO: 1388402 - DNA, 15 bp, Homo sapiens
taggcaaatgaagta

SEQ ID NO: 1388403 - DNA, 15 bp, Homo sapiens
ctaggcaaatgaagt

SEQ ID NO: 1388404 - DNA, 15 bp, Homo sapiens
gctaggcaaatgaag

SEQ ID NO: 1388405 - DNA, 15 bp, Homo sapiens
tgctaggcaaatgaa

SEQ ID NO: 1388406 - DNA, 15 bp, Homo sapiens
ttgctaggcaaatga

SEQ ID NO: 1388407 - DNA, 15 bp, Homo sapiens
tttgctaggcaaatg

SEQ ID NO: 1388408 - DNA, 15 bp, Homo sapiens
ttttgctaggcaaat

SEQ ID NO: 1388409 - DNA, 15 bp, Homo sapiens
tttttgctaggcaaa

SEQ ID NO: 1388410 - DNA, 15 bp, Homo sapiens
atttttgctaggcaa

SEQ ID NO: 1388411 - DNA, 15 bp, Homo sapiens
aatttttgctaggca

SEQ ID NO: 1388412 - DNA, 15 bp, Homo sapiens
taatttttgctaggc

SEQ ID NO: 1388413 - DNA, 15 bp, Homo sapiens
ttaatttttgctagg

SEQ ID NO: 1388414 - DNA, 15 bp, Homo sapiens
tttaatttttgctag

SEQ ID NO: 1388415 - DNA, 15 bp, Homo sapiens
atttaatttttgcta

SEQ ID NO: 1388416 - DNA, 15 bp, Homo sapiens
aatttaatttttgct

SEQ ID NO: 1388417 - DNA, 15 bp, Homo sapiens
gaatttaatttttgc

SEQ ID NO: 1388418 - DNA, 15 bp, Homo sapiens
agaatttaatttttg

SEQ ID NO: 1388419 - DNA, 15 bp, Homo sapiens
cagaatttaattttt

SEQ ID NO: 1388420 - DNA, 15 bp, Homo sapiens
tcagaatttaatttt

SEQ ID NO: 1388421 - DNA, 15 bp, Homo sapiens
ttcagaatttaattt

SEQ ID NO: 1388422 - DNA, 15 bp, Homo sapiens
tttcagaatttaatt

SEQ ID NO: 1388423 - DNA, 15 bp, Homo sapiens
ttttcagaatttaat

SEQ ID NO: 1388424 - DNA, 15 bp, Homo sapiens
tttttcagaatttaa

SEQ ID NO: 1388425 - DNA, 15 bp, Homo sapiens
ttttttcagaattta

SEQ ID NO: 1388426 - DNA, 15 bp, Homo sapiens
tttttttcagaattt

SEQ ID NO: 1388427 - DNA, 15 bp, Homo sapiens
ttttttttcagaatt

SEQ ID NO: 1388428 - DNA, 15 bp, Homo sapiens
attttttttcagaat

SEQ ID NO: 1388429 - DNA, 15 bp, Homo sapiens
ttaattttttttcag

SEQ ID NO: 1388430 - DNA, 15 bp, Homo sapiens
tttaattttttttca

SEQ ID NO: 1388431 - DNA, 15 bp, Homo sapiens
atttaattttttttc

SEQ ID NO: 1388432 - DNA, 15 bp, Homo sapiens
aatttaatttttttt

SEQ ID NO: 1388433 - DNA, 15 bp, Homo sapiens
aaatttaattttttt

SEQ ID NO: 1388434 - DNA, 15 bp, Homo sapiens
aaaatttaatttttt

SEQ ID NO: 1388435 - DNA, 15 bp, Homo sapiens
caaaatttaattttt

SEQ ID NO: 1388436 - DNA, 15 bp, Homo sapiens
tcaaaatttaatttt

SEQ ID NO: 1388437 - DNA, 15 bp, Homo sapiens
tttcaaaatttaatt

SEQ ID NO: 1388438 - DNA, 15 bp, Homo sapiens
ttttcaaaatttaat

SEQ ID NO: 1388439 - DNA, 15 bp, Homo sapiens
tttttcaaaatttaa

SEQ ID NO: 1388440 - DNA, 15 bp, Homo sapiens
ttttttcaaaattta

SEQ ID NO: 1388441 - DNA, 15 bp, Homo sapiens
attttttcaaaattt

SEQ ID NO: 1388442 - DNA, 15 bp, Homo sapiens
aattttttcaaaatt

SEQ ID NO: 1388443 - DNA, 15 bp, Homo sapiens
gaattttttcaaaat

SEQ ID NO: 1388444 - DNA, 15 bp, Homo sapiens
tgaattttttcaaaa

SEQ ID NO: 1388445 - DNA, 15 bp, Homo sapiens
ttgaattttttcaaa

SEQ ID NO: 1388446 - DNA, 15 bp, Homo sapiens
tttgaattttttcaa

SEQ ID NO: 1388447 - DNA, 15 bp, Homo sapiens
ttttgaattttttca

SEQ ID NO: 1388448 - DNA, 15 bp, Homo sapiens
gttttgaattttttc

SEQ ID NO: 1388449 - DNA, 15 bp, Homo sapiens
ggttttgaatttttt

SEQ ID NO: 1388450 - DNA, 15 bp, Homo sapiens
tggttttgaattttt

SEQ ID NO: 1388451 - DNA, 15 bp, Homo sapiens
ttggttttgaatttt

SEQ ID NO: 1388452 - DNA, 15 bp, Homo sapiens
attggttttgaattt

SEQ ID NO: 1388453 - DNA, 15 bp, Homo sapiens
cattggttttgaatt

SEQ ID NO: 1388454 - DNA, 15 bp, Homo sapiens
tcattggttttgaat

SEQ ID NO: 1388455 - DNA, 15 bp, Homo sapiens
ctcattggttttgaa

SEQ ID NO: 1388456 - DNA, 15 bp, Homo sapiens
tctcattggttttga

SEQ ID NO: 1388457 - DNA, 15 bp, Homo sapiens
ctctcattggttttg

SEQ ID NO: 1388458 - DNA, 15 bp, Homo sapiens
tctctcattggtttt

SEQ ID NO: 1388459 - DNA, 15 bp, Homo sapiens
ttctctcattggttt

SEQ ID NO: 1388460 - DNA, 15 bp, Homo sapiens
gttctctcattggtt

SEQ ID NO: 1388461 - DNA, 15 bp, Homo sapiens
cgttctctcattggt

SEQ ID NO: 1388462 - DNA, 15 bp, Homo sapiens
acgttctctcattgg

SEQ ID NO: 1388463 - DNA, 15 bp, Homo sapiens
aacgttctctcattg

SEQ ID NO: 1388464 - DNA, 15 bp, Homo sapiens
caacgttctctcatt

SEQ ID NO: 1388465 - DNA, 15 bp, Homo sapiens
ccaacgttctctcat

SEQ ID NO: 1388466 - DNA, 15 bp, Homo sapiens
accaacgttctctca

SEQ ID NO: 1388467 - DNA, 15 bp, Homo sapiens
aaccaacgttctctc

SEQ ID NO: 1388468 - DNA, 15 bp, Homo sapiens
aaaccaacgttctct

SEQ ID NO: 1388469 - DNA, 15 bp, Homo sapiens
aaaaccaacgttctc

SEQ ID NO: 1388470 - DNA, 15 bp, Homo sapiens
caaaaccaacgttct

SEQ ID NO: 1388471 - DNA, 15 bp, Homo sapiens
tcaaaaccaacgttc

SEQ ID NO: 1388472 - DNA, 15 bp, Homo sapiens
ttcaaaaccaacgtt

SEQ ID NO: 1388473 - DNA, 15 bp, Homo sapiens
cttcaaaaccaacgt

SEQ ID NO: 1388474 - DNA, 15 bp, Homo sapiens
acttcaaaaccaacg

SEQ ID NO: 1388475 - DNA, 15 bp, Homo sapiens
aacttcaaaaccaac

SEQ ID NO: 1388476 - DNA, 15 bp, Homo sapiens
caacttcaaaaccaa

SEQ ID NO: 1388477 - DNA, 15 bp, Homo sapiens
ccaacttcaaaacca

SEQ ID NO: 1388478 - DNA, 15 bp, Homo sapiens
tccaacttcaaaacc

SEQ ID NO: 1388479 - DNA, 15 bp, Homo sapiens
gtccaacttcaaaac

SEQ ID NO: 1388480 - DNA, 15 bp, Homo sapiens
tgtccaacttcaaaa

SEQ ID NO: 1388481 - DNA, 15 bp, Homo sapiens
ctgtccaacttcaaa

SEQ ID NO: 1388482 - DNA, 15 bp, Homo sapiens
cctgtccaacttcaa

SEQ ID NO: 1388483 - DNA, 15 bp, Homo sapiens
gcctgtccaacttca

SEQ ID NO: 1388484 - DNA, 15 bp, Homo sapiens
agcctgtccaacttc

SEQ ID NO: 1388485 - DNA, 15 bp, Homo sapiens
aagcctgtccaactt

SEQ ID NO: 1388486 - DNA, 15 bp, Homo sapiens
caagcctgtccaact

SEQ ID NO: 1388487 - DNA, 15 bp, Homo sapiens
ccaagcctgtccaac

SEQ ID NO: 1388488 - DNA, 15 bp, Homo sapiens
tccaagcctgtccaa

SEQ ID NO: 1388489 - DNA, 15 bp, Homo sapiens
atccaagcctgtcca

SEQ ID NO: 1388490 - DNA, 15 bp, Homo sapiens
aatccaagcctgtcc

SEQ ID NO: 1388491 - DNA, 15 bp, Homo sapiens
caatccaagcctgtc

SEQ ID NO: 1388492 - DNA, 15 bp, Homo sapiens
tcaatccaagcctgt

SEQ ID NO: 1388493 - DNA, 15 bp, Homo sapiens
ttcaatccaagcctg

SEQ ID NO: 1388494 - DNA, 15 bp, Homo sapiens
tttcaatccaagcct

SEQ ID NO: 1388495 - DNA, 15 bp, Homo sapiens
atttcaatccaagcc

SEQ ID NO: 1388496 - DNA, 15 bp, Homo sapiens
aatttcaatccaagc

SEQ ID NO: 1388497 - DNA, 15 bp, Homo sapiens
aaatttcaatccaag

SEQ ID NO: 1388498 - DNA, 15 bp, Homo sapiens
aaaatttcaatccaa

SEQ ID NO: 1388499 - DNA, 15 bp, Homo sapiens
taaaatttcaatcca

SEQ ID NO: 1388500 - DNA, 15 bp, Homo sapiens
ataaaatttcaatcc

SEQ ID NO: 1388501 - DNA, 15 bp, Homo sapiens
gataaaatttcaatc

SEQ ID NO: 1388502 - DNA, 15 bp, Homo sapiens
agataaaatttcaat

SEQ ID NO: 1388503 - DNA, 15 bp, Homo sapiens
aagataaaatttcaa

SEQ ID NO: 1388504 - DNA, 15 bp, Homo sapiens
gaagataaaatttca

SEQ ID NO: 1388505 - DNA, 15 bp, Homo sapiens
tgaagataaaatttc

SEQ ID NO: 1388506 - DNA, 15 bp, Homo sapiens
gtgaagataaaattt

SEQ ID NO: 1388507 - DNA, 15 bp, Homo sapiens
ggtgaagataaaatt

SEQ ID NO: 1388508 - DNA, 15 bp, Homo sapiens
tggtgaagataaaat

SEQ ID NO: 1388509 - DNA, 15 bp, Homo sapiens
ttggtgaagataaaa

SEQ ID NO: 1388510 - DNA, 15 bp, Homo sapiens
attggtgaagataaa

SEQ ID NO: 1388511 - DNA, 15 bp, Homo sapiens
cattggtgaagataa

SEQ ID NO: 1388512 - DNA, 15 bp, Homo sapiens
tcattggtgaagata

SEQ ID NO: 1388513 - DNA, 15 bp, Homo sapiens
ttcattggtgaagat

SEQ ID NO: 1388514 - DNA, 15 bp, Homo sapiens
gttcattggtgaaga

SEQ ID NO: 1388515 - DNA, 15 bp, Homo sapiens
tgttcattggtgaag

SEQ ID NO: 1388516 - DNA, 15 bp, Homo sapiens
ctgttcattggtgaa

SEQ ID NO: 1388517 - DNA, 15 bp, Homo sapiens
actgttcattggtga

SEQ ID NO: 1388518 - DNA, 15 bp, Homo sapiens
aactgttcattggtg

SEQ ID NO: 1388519 - DNA, 15 bp, Homo sapiens
taactgttcattggt

SEQ ID NO: 1388520 - DNA, 15 bp, Homo sapiens
ataactgttcattgg

SEQ ID NO: 1388521 - DNA, 15 bp, Homo sapiens
cataactgttcattg

SEQ ID NO: 1388522 - DNA, 15 bp, Homo sapiens
acataactgttcatt

SEQ ID NO: 1388523 - DNA, 15 bp, Homo sapiens
cacataactgttcat

SEQ ID NO: 1388524 - DNA, 15 bp, Homo sapiens
tcacataactgttca

SEQ ID NO: 1388525 - DNA, 15 bp, Homo sapiens
ttcacataactgttc

SEQ ID NO: 1388526 - DNA, 15 bp, Homo sapiens
gttcacataactgtt

SEQ ID NO: 1388527 - DNA, 15 bp, Homo sapiens
agttcacataactgt

SEQ ID NO: 1388528 - DNA, 15 bp, Homo sapiens
cagttcacataactg

SEQ ID NO: 1388529 - DNA, 15 bp, Homo sapiens
tcagttcacataact

SEQ ID NO: 1388530 - DNA, 15 bp, Homo sapiens
ctcagttcacataac

SEQ ID NO: 1388531 - DNA, 15 bp, Homo sapiens
tctcagttcacataa

SEQ ID NO: 1388532 - DNA, 15 bp, Homo sapiens
ttctcagttcacata

SEQ ID NO: 1388533 - DNA, 15 bp, Homo sapiens
tttctcagttcacat

SEQ ID NO: 1388534 - DNA, 15 bp, Homo sapiens
ttttctcagttcaca

SEQ ID NO: 1388535 - DNA, 15 bp, Homo sapiens
attttctcagttcac

SEQ ID NO: 1388536 - DNA, 15 bp, Homo sapiens
aattttctcagttca

SEQ ID NO: 1388537 - DNA, 15 bp, Homo sapiens
taattttctcagttc

SEQ ID NO: 1388538 - DNA, 15 bp, Homo sapiens
gtaattttctcagtt

SEQ ID NO: 1388539 - DNA, 15 bp, Homo sapiens
agtaattttctcagt

SEQ ID NO: 1388540 - DNA, 15 bp, Homo sapiens
aagtaattttctcag

SEQ ID NO: 1388541 - DNA, 15 bp, Homo sapiens
taagtaattttctca

SEQ ID NO: 1388542 - DNA, 15 bp, Homo sapiens
ctaagtaattttctc

SEQ ID NO: 1388543 - DNA, 15 bp, Homo sapiens
actaagtaattttct

SEQ ID NO: 1388544 - DNA, 15 bp, Homo sapiens
aactaagtaattttc

SEQ ID NO: 1388545 - DNA, 15 bp, Homo sapiens
aaactaagtaatttt

SEQ ID NO: 1388546 - DNA, 15 bp, Homo sapiens
gaaactaagtaattt

SEQ ID NO: 1388547 - DNA, 15 bp, Homo sapiens
ggaaactaagtaatt

SEQ ID NO: 1388548 - DNA, 15 bp, Homo sapiens
aggaaactaagtaat

SEQ ID NO: 1388549 - DNA, 15 bp, Homo sapiens
caggaaactaagtaa

SEQ ID NO: 1388550 - DNA, 15 bp, Homo sapiens
tcaggaaactaagta

SEQ ID NO: 1388551 - DNA, 15 bp, Homo sapiens
ttcaggaaactaagt

SEQ ID NO: 1388552 - DNA, 15 bp, Homo sapiens
tttcaggaaactaag

SEQ ID NO: 1388553 - DNA, 15 bp, Homo sapiens
ttttcaggaaactaa

SEQ ID NO: 1388554 - DNA, 15 bp, Homo sapiens
attttcaggaaacta

SEQ ID NO: 1388555 - DNA, 15 bp, Homo sapiens
aattttcaggaaact

SEQ ID NO: 1388556 - DNA, 15 bp, Homo sapiens
taattttcaggaaac

SEQ ID NO: 1388557 - DNA, 15 bp, Homo sapiens
ctaattttcaggaaa

SEQ ID NO: 1388558 - DNA, 15 bp, Homo sapiens
actaattttcaggaa

SEQ ID NO: 1388559 - DNA, 15 bp, Homo sapiens
aactaattttcagga

SEQ ID NO: 1388560 - DNA, 15 bp, Homo sapiens
aaactaattttcagg

SEQ ID NO: 1388561 - DNA, 15 bp, Homo sapiens
gaaactaattttcag

SEQ ID NO: 1388562 - DNA, 15 bp, Homo sapiens
ggaaactaattttca

SEQ ID NO: 1388563 - DNA, 15 bp, Homo sapiens
aggaaactaattttc

SEQ ID NO: 1388564 - DNA, 15 bp, Homo sapiens
gaggaaactaatttt

SEQ ID NO: 1388565 - DNA, 15 bp, Homo sapiens
agaggaaactaattt

SEQ ID NO: 1388566 - DNA, 15 bp, Homo sapiens
aagaggaaactaatt

SEQ ID NO: 1388567 - DNA, 15 bp, Homo sapiens
aaagaggaaactaat

SEQ ID NO: 1388568 - DNA, 15 bp, Homo sapiens
ccaaagaggaaacta

SEQ ID NO: 1388569 - DNA, 15 bp, Homo sapiens
cccaaagaggaaact

SEQ ID NO: 1388570 - DNA, 15 bp, Homo sapiens
acccaaagaggaaac

SEQ ID NO: 1388571 - DNA, 15 bp, Homo sapiens
tacccaaagaggaaa

SEQ ID NO: 1388572 - DNA, 15 bp, Homo sapiens
ttacccaaagaggaa

SEQ ID NO: 1388573 - DNA, 15 bp, Homo sapiens
tttacccaaagagga

SEQ ID NO: 1388574 - DNA, 15 bp, Homo sapiens
ctttacccaaagagg

SEQ ID NO: 1388575 - DNA, 15 bp, Homo sapiens
tctttacccaaagag

SEQ ID NO: 1388576 - DNA, 15 bp, Homo sapiens
ctctttacccaaaga

SEQ ID NO: 1388577 - DNA, 15 bp, Homo sapiens
actctttacccaaag

SEQ ID NO: 1388578 - DNA, 15 bp, Homo sapiens
aactctttacccaaa

SEQ ID NO: 1388579 - DNA, 15 bp, Homo sapiens
gaactctttacccaa

SEQ ID NO: 1388580 - DNA, 15 bp, Homo sapiens
agaactctttaccca

SEQ ID NO: 1388581 - DNA, 15 bp, Homo sapiens
gagaactctttaccc

SEQ ID NO: 1388582 - DNA, 15 bp, Homo sapiens
tgagaactctttacc

SEQ ID NO: 1388583 - DNA, 15 bp, Homo sapiens
atgagaactctttac

SEQ ID NO: 1388584 - DNA, 15 bp, Homo sapiens
tatgagaactcttta

SEQ ID NO: 1388585 - DNA, 15 bp, Homo sapiens
ttatgagaactcttt

SEQ ID NO: 1388586 - DNA, 15 bp, Homo sapiens
tttatgagaactctt

SEQ ID NO: 1388587 - DNA, 15 bp, Homo sapiens
ctttatgagaactct

SEQ ID NO: 1388588 - DNA, 15 bp, Homo sapiens
cctttatgagaactc

SEQ ID NO: 1388589 - DNA, 15 bp, Homo sapiens
acctttatgagaact

SEQ ID NO: 1388590 - DNA, 15 bp, Homo sapiens
aacctttatgagaac

SEQ ID NO: 1388591 - DNA, 15 bp, Homo sapiens
taacctttatgagaa

SEQ ID NO: 1388592 - DNA, 15 bp, Homo sapiens
gtaacctttatgaga

SEQ ID NO: 1388593 - DNA, 15 bp, Homo sapiens
agtaacctttatgag

SEQ ID NO: 1388594 - DNA, 15 bp, Homo sapiens
cagtaacctttatga

SEQ ID NO: 1388595 - DNA, 15 bp, Homo sapiens
acagtaacctttatg

SEQ ID NO: 1388596 - DNA, 15 bp, Homo sapiens
gacagtaacctttat

SEQ ID NO: 1388597 - DNA, 15 bp, Homo sapiens
tgacagtaaccttta

SEQ ID NO: 1388598 - DNA, 15 bp, Homo sapiens
ctgacagtaaccttt

SEQ ID NO: 1388599 - DNA, 15 bp, Homo sapiens
tctgacagtaacctt

SEQ ID NO: 1388600 - DNA, 15 bp, Homo sapiens
atctgacagtaacct

SEQ ID NO: 1388601 - DNA, 15 bp, Homo sapiens
catctgacagtaacc

SEQ ID NO: 1388602 - DNA, 15 bp, Homo sapiens
gcatctgacagtaac

SEQ ID NO: 1388603 - DNA, 15 bp, Homo sapiens
tgcatctgacagtaa

SEQ ID NO: 1388604 - DNA, 15 bp, Homo sapiens
atgcatctgacagta

SEQ ID NO: 1388605 - DNA, 15 bp, Homo sapiens
tatgcatctgacagt

SEQ ID NO: 1388606 - DNA, 15 bp, Homo sapiens
gtatgcatctgacag

SEQ ID NO: 1388607 - DNA, 15 bp, Homo sapiens
tgtatgcatctgaca

SEQ ID NO: 1388608 - DNA, 15 bp, Homo sapiens
ttgtatgcatctgac

SEQ ID NO: 1388609 - DNA, 15 bp, Homo sapiens
tttgtatgcatctga

SEQ ID NO: 1388610 - DNA, 15 bp, Homo sapiens
atttgtatgcatctg

SEQ ID NO: 1388611 - DNA, 15 bp, Homo sapiens
catttgtatgcatct

SEQ ID NO: 1388612 - DNA, 15 bp, Homo sapiens
gcatttgtatgcatc

SEQ ID NO: 1388613 - DNA, 15 bp, Homo sapiens
tgcatttgtatgcat

SEQ ID NO: 1388614 - DNA, 15 bp, Homo sapiens
atgcatttgtatgca

SEQ ID NO: 1388615 - DNA, 15 bp, Homo sapiens
aatgcatttgtatgc

SEQ ID NO: 1388616 - DNA, 15 bp, Homo sapiens
taatgcatttgtatg

SEQ ID NO: 1388617 - DNA, 15 bp, Homo sapiens
ataatgcatttgtat

SEQ ID NO: 1388618 - DNA, 15 bp, Homo sapiens
cataatgcatttgta

SEQ ID NO: 1388619 - DNA, 15 bp, Homo sapiens
acataatgcatttgt

SEQ ID NO: 1388620 - DNA, 15 bp, Homo sapiens
tacataatgcatttg

SEQ ID NO: 1388621 - DNA, 15 bp, Homo sapiens
gtacataatgcattt

SEQ ID NO: 1388622 - DNA, 15 bp, Homo sapiens
tgtacataatgcatt

SEQ ID NO: 1388623 - DNA, 15 bp, Homo sapiens
atgtacataatgcat

SEQ ID NO: 1388624 - DNA, 15 bp, Homo sapiens
tatgtacataatgca

SEQ ID NO: 1388625 - DNA, 15 bp, Homo sapiens
ctatgtacataatgc

SEQ ID NO: 1388626 - DNA, 15 bp, Homo sapiens
cctatgtacataatg

SEQ ID NO: 1388627 - DNA, 15 bp, Homo sapiens
acctatgtacataat

SEQ ID NO: 1388628 - DNA, 15 bp, Homo sapiens
gacctatgtacataa

SEQ ID NO: 1388629 - DNA, 15 bp, Homo sapiens
agacctatgtacata

SEQ ID NO: 1388630 - DNA, 15 bp, Homo sapiens
tagacctatgtacat

SEQ ID NO: 1388631 - DNA, 15 bp, Homo sapiens
ctagacctatgtaca

SEQ ID NO: 1388632 - DNA, 15 bp, Homo sapiens
tctagacctatgtac

SEQ ID NO: 1388633 - DNA, 15 bp, Homo sapiens
ctctagacctatgta

SEQ ID NO: 1388634 - DNA, 15 bp, Homo sapiens
tctctagacctatgt

SEQ ID NO: 1388635 - DNA, 15 bp, Homo sapiens
ttctctagacctatg

SEQ ID NO: 1388636 - DNA, 15 bp, Homo sapiens
cttctctagacctat

SEQ ID NO: 1388637 - DNA, 15 bp, Homo sapiens
acttctctagaccta

SEQ ID NO: 1388638 - DNA, 15 bp, Homo sapiens
tacttctctagacct

SEQ ID NO: 1388639 - DNA, 15 bp, Homo sapiens
atacttctctagacc

SEQ ID NO: 1388640 - DNA, 15 bp, Homo sapiens
gatacttctctagac

SEQ ID NO: 1388641 - DNA, 15 bp, Homo sapiens
agatacttctctaga

SEQ ID NO: 1388642 - DNA, 15 bp, Homo sapiens
gagatacttctctag

SEQ ID NO: 1388643 - DNA, 15 bp, Homo sapiens
tgagatacttctcta

SEQ ID NO: 1388644 - DNA, 15 bp, Homo sapiens
gtgagatacttctct

SEQ ID NO: 1388645 - DNA, 15 bp, Homo sapiens
tgtgagatacttctc

SEQ ID NO: 1388646 - DNA, 15 bp, Homo sapiens
atgtgagatacttct

SEQ ID NO: 1388647 - DNA, 15 bp, Homo sapiens
aatgtgagatacttc

SEQ ID NO: 1388648 - DNA, 15 bp, Homo sapiens
aaatgtgagatactt

SEQ ID NO: 1388649 - DNA, 15 bp, Homo sapiens
aaaatgtgagatact

SEQ ID NO: 1388650 - DNA, 15 bp, Homo sapiens
gaaaatgtgagatac

SEQ ID NO: 1388651 - DNA, 15 bp, Homo sapiens
tgaaaatgtgagata

SEQ ID NO: 1388652 - DNA, 15 bp, Homo sapiens
atgaaaatgtgagat

SEQ ID NO: 1388653 - DNA, 15 bp, Homo sapiens
catgaaaatgtgaga

SEQ ID NO: 1388654 - DNA, 15 bp, Homo sapiens
acatgaaaatgtgag

SEQ ID NO: 1388655 - DNA, 15 bp, Homo sapiens
gacatgaaaatgtga

SEQ ID NO: 1388656 - DNA, 15 bp, Homo sapiens
agacatgaaaatgtg

SEQ ID NO: 1388657 - DNA, 15 bp, Homo sapiens
tagacatgaaaatgt

SEQ ID NO: 1388658 - DNA, 15 bp, Homo sapiens
atagacatgaaaatg

SEQ ID NO: 1388659 - DNA, 15 bp, Homo sapiens
aatagacatgaaaat

SEQ ID NO: 1388660 - DNA, 15 bp, Homo sapiens
caatagacatgaaaa

SEQ ID NO: 1388661 - DNA, 15 bp, Homo sapiens
acaatagacatgaaa

SEQ ID NO: 1388662 - DNA, 15 bp, Homo sapiens
aacaatagacatgaa

SEQ ID NO: 1388663 - DNA, 15 bp, Homo sapiens
caacaatagacatga

SEQ ID NO: 1388664 - DNA, 15 bp, Homo sapiens
acaacaatagacatg

SEQ ID NO: 1388665 - DNA, 15 bp, Homo sapiens
gacaacaatagacat

SEQ ID NO: 1388666 - DNA, 15 bp, Homo sapiens
tgacaacaatagaca

SEQ ID NO: 1388667 - DNA, 15 bp, Homo sapiens
atgacaacaatagac

SEQ ID NO: 1388668 - DNA, 15 bp, Homo sapiens
gatgacaacaataga

SEQ ID NO: 1388669 - DNA, 15 bp, Homo sapiens
agatgacaacaatag

SEQ ID NO: 1388670 - DNA, 15 bp, Homo sapiens
gagatgacaacaata

SEQ ID NO: 1388671 - DNA, 15 bp, Homo sapiens
tgagatgacaacaat

SEQ ID NO: 1388672 - DNA, 15 bp, Homo sapiens
ttgagatgacaacaa

SEQ ID NO: 1388673 - DNA, 15 bp, Homo sapiens
cttgagatgacaaca

SEQ ID NO: 1388674 - DNA, 15 bp, Homo sapiens
acttgagatgacaac

SEQ ID NO: 1388675 - DNA, 15 bp, Homo sapiens
aacttgagatgacaa

SEQ ID NO: 1388676 - DNA, 15 bp, Homo sapiens
gaacttgagatgaca

SEQ ID NO: 1388677 - DNA, 15 bp, Homo sapiens
agaacttgagatgac

SEQ ID NO: 1388678 - DNA, 15 bp, Homo sapiens
aagaacttgagatga

SEQ ID NO: 1388679 - DNA, 15 bp, Homo sapiens
gaagaacttgagatg

SEQ ID NO: 1388680 - DNA, 15 bp, Homo sapiens
agaagaacttgagat

SEQ ID NO: 1388681 - DNA, 15 bp, Homo sapiens
gagaagaacttgaga

SEQ ID NO: 1388682 - DNA, 15 bp, Homo sapiens
ggagaagaacttgag

SEQ ID NO: 1388683 - DNA, 15 bp, Homo sapiens
tggagaagaacttga

SEQ ID NO: 1388684 - DNA, 15 bp, Homo sapiens
atggagaagaacttg

SEQ ID NO: 1388685 - DNA, 15 bp, Homo sapiens
tatggagaagaactt

SEQ ID NO: 1388686 - DNA, 15 bp, Homo sapiens
ttatggagaagaact

SEQ ID NO: 1388687 - DNA, 15 bp, Homo sapiens
tttatggagaagaac

SEQ ID NO: 1388688 - DNA, 15 bp, Homo sapiens
ctttatggagaagaa

SEQ ID NO: 1388689 - DNA, 15 bp, Homo sapiens
tctttatggagaaga

SEQ ID NO: 1388690 - DNA, 15 bp, Homo sapiens
ctctttatggagaag

SEQ ID NO: 1388691 - DNA, 15 bp, Homo sapiens
gctctttatggagaa

SEQ ID NO: 1388692 - DNA, 15 bp, Homo sapiens
agctctttatggaga

SEQ ID NO: 1388693 - DNA, 15 bp, Homo sapiens
gagctctttatggag

SEQ ID NO: 1388694 - DNA, 15 bp, Homo sapiens
agagctctttatgga

SEQ ID NO: 1388695 - DNA, 15 bp, Homo sapiens
aagagctctttatgg

SEQ ID NO: 1388696 - DNA, 15 bp, Homo sapiens
taagagctctttatg

SEQ ID NO: 1388697 - DNA, 15 bp, Homo sapiens
ataagagctctttat

SEQ ID NO: 1388698 - DNA, 15 bp, Homo sapiens
aataagagctcttta

SEQ ID NO: 1388699 - DNA, 15 bp, Homo sapiens
taataagagctcttt

SEQ ID NO: 1388700 - DNA, 15 bp, Homo sapiens
gtaataagagctctt

SEQ ID NO: 1388701 - DNA, 15 bp, Homo sapiens
tgtaataagagctct

SEQ ID NO: 1388702 - DNA, 15 bp, Homo sapiens
ctgtaataagagctc

SEQ ID NO: 1388703 - DNA, 15 bp, Homo sapiens
actgtaataagagct

SEQ ID NO: 1388704 - DNA, 15 bp, Homo sapiens
aactgtaataagagc

SEQ ID NO: 1388705 - DNA, 15 bp, Homo sapiens
aaactgtaataagag

SEQ ID NO: 1388706 - DNA, 15 bp, Homo sapiens
caaactgtaataaga

SEQ ID NO: 1388707 - DNA, 15 bp, Homo sapiens
tcaaactgtaataag

SEQ ID NO: 1388708 - DNA, 15 bp, Homo sapiens
ttcaaactgtaataa

SEQ ID NO: 1388709 - DNA, 15 bp, Homo sapiens
attcaaactgtaata

SEQ ID NO: 1388710 - DNA, 15 bp, Homo sapiens
gattcaaactgtaat

SEQ ID NO: 1388711 - DNA, 15 bp, Homo sapiens
ggattcaaactgtaa

SEQ ID NO: 1388712 - DNA, 15 bp, Homo sapiens
gggattcaaactgta

SEQ ID NO: 1388713 - DNA, 15 bp, Homo sapiens
agggattcaaactgt

SEQ ID NO: 1388714 - DNA, 15 bp, Homo sapiens
tagggattcaaactg

SEQ ID NO: 1388715 - DNA, 15 bp, Homo sapiens
atagggattcaaact

SEQ ID NO: 1388716 - DNA, 15 bp, Homo sapiens
tatagggattcaaac

SEQ ID NO: 1388717 - DNA, 15 bp, Homo sapiens
ctatagggattcaaa

SEQ ID NO: 1388718 - DNA, 15 bp, Homo sapiens
tctatagggattcaa

SEQ ID NO: 1388719 - DNA, 15 bp, Homo sapiens
ttctatagggattca

SEQ ID NO: 1388720 - DNA, 15 bp, Homo sapiens
tttctatagggattc

SEQ ID NO: 1388721 - DNA, 15 bp, Homo sapiens
gtttctatagggatt

SEQ ID NO: 1388722 - DNA, 15 bp, Homo sapiens
tgtttctatagggat

SEQ ID NO: 1388723 - DNA, 15 bp, Homo sapiens
ttgtttctataggga

SEQ ID NO: 1388724 - DNA, 15 bp, Homo sapiens
cttgtttctataggg

SEQ ID NO: 1388725 - DNA, 15 bp, Homo sapiens
tcttgtttctatagg

SEQ ID NO: 1388726 - DNA, 15 bp, Homo sapiens
ctcttgtttctatag

SEQ ID NO: 1388727 - DNA, 15 bp, Homo sapiens
actcttgtttctata

SEQ ID NO: 1388728 - DNA, 15 bp, Homo sapiens
aactcttgtttctat

SEQ ID NO: 1388729 - DNA, 15 bp, Homo sapiens
taactcttgtttcta

SEQ ID NO: 1388730 - DNA, 15 bp, Homo sapiens
ttaactcttgtttct

SEQ ID NO: 1388731 - DNA, 15 bp, Homo sapiens
tttaactcttgtttc

SEQ ID NO: 1388732 - DNA, 15 bp, Homo sapiens
gtttaactcttgttt

SEQ ID NO: 1388733 - DNA, 15 bp, Homo sapiens
ggtttaactcttgtt

SEQ ID NO: 1388734 - DNA, 15 bp, Homo sapiens
tggtttaactcttgt

SEQ ID NO: 1388735 - DNA, 15 bp, Homo sapiens
gtggtttaactcttg

SEQ ID NO: 1388736 - DNA, 15 bp, Homo sapiens
tgtggtttaactctt

SEQ ID NO: 1388737 - DNA, 15 bp, Homo sapiens
atgtggtttaactct

SEQ ID NO: 1388738 - DNA, 15 bp, Homo sapiens
aatgtggtttaactc

SEQ ID NO: 1388739 - DNA, 15 bp, Homo sapiens
gaatgtggtttaact

SEQ ID NO: 1388740 - DNA, 15 bp, Homo sapiens
tgaatgtggtttaac

SEQ ID NO: 1388741 - DNA, 15 bp, Homo sapiens
gtgaatgtggtttaa

SEQ ID NO: 1388742 - DNA, 15 bp, Homo sapiens
ggtgaatgtggttta

SEQ ID NO: 1388743 - DNA, 15 bp, Homo sapiens
tggtgaatgtggttt

SEQ ID NO: 1388744 - DNA, 15 bp, Homo sapiens
atggtgaatgtggtt

SEQ ID NO: 1388745 - DNA, 15 bp, Homo sapiens
catggtgaatgtggt

SEQ ID NO: 1388746 - DNA, 15 bp, Homo sapiens
ccatggtgaatgtgg

SEQ ID NO: 1388747 - DNA, 15 bp, Homo sapiens
tccatggtgaatgtg

SEQ ID NO: 1388748 - DNA, 15 bp, Homo sapiens
ctccatggtgaatgt

SEQ ID NO: 1388749 - DNA, 15 bp, Homo sapiens
cctccatggtgaatg

SEQ ID NO: 1388750 - DNA, 15 bp, Homo sapiens
tcctccatggtgaat

SEQ ID NO: 1388751 - DNA, 15 bp, Homo sapiens
ttcctccatggtgaa

SEQ ID NO: 1388752 - DNA, 15 bp, Homo sapiens
tttcctccatggtga

SEQ ID NO: 1388753 - DNA, 15 bp, Homo sapiens
ctttcctccatggtg

SEQ ID NO: 1388754 - DNA, 15 bp, Homo sapiens
cctttcctccatggt

SEQ ID NO: 1388755 - DNA, 15 bp, Homo sapiens
ccctttcctccatgg

SEQ ID NO: 1388756 - DNA, 15 bp, Homo sapiens
accctttcctccatg

SEQ ID NO: 1388757 - DNA, 15 bp, Homo sapiens
caccctttcctccat

SEQ ID NO: 1388758 - DNA, 15 bp, Homo sapiens
ccaccctttcctcca

SEQ ID NO: 1388759 - DNA, 15 bp, Homo sapiens
accaccctttcctcc

SEQ ID NO: 1388760 - DNA, 15 bp, Homo sapiens
aaccaccctttcctc

SEQ ID NO: 1388761 - DNA, 15 bp, Homo sapiens
aaaccaccctttcct

SEQ ID NO: 1388762 - DNA, 15 bp, Homo sapiens
gaaaccaccctttcc

SEQ ID NO: 1388763 - DNA, 15 bp, Homo sapiens
tgaaaccaccctttc

SEQ ID NO: 1388764 - DNA, 15 bp, Homo sapiens
ttgaaaccacccttt

SEQ ID NO: 1388765 - DNA, 15 bp, Homo sapiens
gttgaaaccaccctt

SEQ ID NO: 1388766 - DNA, 15 bp, Homo sapiens
tgttgaaaccaccct

SEQ ID NO: 1388767 - DNA, 15 bp, Homo sapiens
atgttgaaaccaccc

SEQ ID NO: 1388768 - DNA, 15 bp, Homo sapiens
tatgttgaaaccacc

SEQ ID NO: 1388769 - DNA, 15 bp, Homo sapiens
ttatgttgaaaccac

SEQ ID NO: 1388770 - DNA, 15 bp, Homo sapiens
tttatgttgaaacca

SEQ ID NO: 1388771 - DNA, 15 bp, Homo sapiens
atttatgttgaaacc

SEQ ID NO: 1388772 - DNA, 15 bp, Homo sapiens
gatttatgttgaaac

SEQ ID NO: 1388773 - DNA, 15 bp, Homo sapiens
agatttatgttgaaa

SEQ ID NO: 1388774 - DNA, 15 bp, Homo sapiens
cagatttatgttgaa

SEQ ID NO: 1388775 - DNA, 15 bp, Homo sapiens
acagatttatgttga

SEQ ID NO: 1388776 - DNA, 15 bp, Homo sapiens
gacagatttatgttg

SEQ ID NO: 1388777 - DNA, 15 bp, Homo sapiens
tgacagatttatgtt

SEQ ID NO: 1388778 - DNA, 15 bp, Homo sapiens
atgacagatttatgt

SEQ ID NO: 1388779 - DNA, 15 bp, Homo sapiens
aatgacagatttatg

SEQ ID NO: 1388780 - DNA, 15 bp, Homo sapiens
aaatgacagatttat

SEQ ID NO: 1388781 - DNA, 15 bp, Homo sapiens
taaatgacagattta

SEQ ID NO: 1388782 - DNA, 15 bp, Homo sapiens
ataaatgacagattt

SEQ ID NO: 1388783 - DNA, 15 bp, Homo sapiens
tataaatgacagatt

SEQ ID NO: 1388784 - DNA, 15 bp, Homo sapiens
gtataaatgacagat

SEQ ID NO: 1388785 - DNA, 15 bp, Homo sapiens
agtataaatgacaga

SEQ ID NO: 1388786 - DNA, 15 bp, Homo sapiens
cagtataaatgacag

SEQ ID NO: 1388787 - DNA, 15 bp, Homo sapiens
tcagtataaatgaca

SEQ ID NO: 1388788 - DNA, 15 bp, Homo sapiens
atcagtataaatgac

SEQ ID NO: 1388789 - DNA, 15 bp, Homo sapiens
gatcagtataaatga

SEQ ID NO: 1388790 - DNA, 15 bp, Homo sapiens
agatcagtataaatg

SEQ ID NO: 1388791 - DNA, 15 bp, Homo sapiens
tagatcagtataaat

SEQ ID NO: 1388792 - DNA, 15 bp, Homo sapiens
ctagatcagtataaa

SEQ ID NO: 1388793 - DNA, 15 bp, Homo sapiens
cctagatcagtataa

SEQ ID NO: 1388794 - DNA, 15 bp, Homo sapiens
tcctagatcagtata

SEQ ID NO: 1388795 - DNA, 15 bp, Homo sapiens
ctcctagatcagtat

SEQ ID NO: 1388796 - DNA, 15 bp, Homo sapiens
cctcctagatcagta

SEQ ID NO: 1388797 - DNA, 15 bp, Homo sapiens
tcctcctagatcagt

SEQ ID NO: 1388798 - DNA, 15 bp, Homo sapiens
ttcctcctagatcag

SEQ ID NO: 1388799 - DNA, 15 bp, Homo sapiens
gttcctcctagatca

SEQ ID NO: 1388800 - DNA, 15 bp, Homo sapiens
tgttcctcctagatc

SEQ ID NO: 1388801 - DNA, 15 bp, Homo sapiens
gtgttcctcctagat

SEQ ID NO: 1388802 - DNA, 15 bp, Homo sapiens
tgtgttcctcctaga

SEQ ID NO: 1388803 - DNA, 15 bp, Homo sapiens
atgtgttcctcctag

SEQ ID NO: 1388804 - DNA, 15 bp, Homo sapiens
catgtgttcctccta

SEQ ID NO: 1388805 - DNA, 15 bp, Homo sapiens
tcatgtgttcctcct

SEQ ID NO: 1388806 - DNA, 15 bp, Homo sapiens
ctcatgtgttcctcc

SEQ ID NO: 1388807 - DNA, 15 bp, Homo sapiens
actcatgtgttcctc

SEQ ID NO: 1388808 - DNA, 15 bp, Homo sapiens
aactcatgtgttcct

SEQ ID NO: 1388809 - DNA, 15 bp, Homo sapiens
taactcatgtgttcc

SEQ ID NO: 1388810 - DNA, 15 bp, Homo sapiens
ataactcatgtgttc

SEQ ID NO: 1388811 - DNA, 15 bp, Homo sapiens
cataactcatgtgtt

SEQ ID NO: 1388812 - DNA, 15 bp, Homo sapiens
tcataactcatgtgt

SEQ ID NO: 1388813 - DNA, 15 bp, Homo sapiens
ctcataactcatgtg

SEQ ID NO: 1388814 - DNA, 15 bp, Homo sapiens
gctcataactcatgt

SEQ ID NO: 1388815 - DNA, 15 bp, Homo sapiens
tgctcataactcatg

SEQ ID NO: 1388816 - DNA, 15 bp, Homo sapiens
ctgctcataactcat

SEQ ID NO: 1388817 - DNA, 15 bp, Homo sapiens
cctgctcataactca

SEQ ID NO: 1388818 - DNA, 15 bp, Homo sapiens
acctgctcataactc

SEQ ID NO: 1388819 - DNA, 15 bp, Homo sapiens
aacctgctcataact

SEQ ID NO: 1388820 - DNA, 15 bp, Homo sapiens
aaacctgctcataac

SEQ ID NO: 1388821 - DNA, 15 bp, Homo sapiens
gaaacctgctcataa

SEQ ID NO: 1388822 - DNA, 15 bp, Homo sapiens
ggaaacctgctcata

SEQ ID NO: 1388823 - DNA, 15 bp, Homo sapiens
aggaaacctgctcat

SEQ ID NO: 1388824 - DNA, 15 bp, Homo sapiens
gaggaaacctgctca

SEQ ID NO: 1388825 - DNA, 15 bp, Homo sapiens
tgaggaaacctgctc

SEQ ID NO: 1388826 - DNA, 15 bp, Homo sapiens
gtgaggaaacctgct

SEQ ID NO: 1388827 - DNA, 15 bp, Homo sapiens
tgtgaggaaacctgc

SEQ ID NO: 1388828 - DNA, 15 bp, Homo sapiens
gtgtgaggaaacctg

SEQ ID NO: 1388829 - DNA, 15 bp, Homo sapiens
ggtgtgaggaaacct

SEQ ID NO: 1388830 - DNA, 15 bp, Homo sapiens
tggtgtgaggaaacc

SEQ ID NO: 1388831 - DNA, 15 bp, Homo sapiens
ctggtgtgaggaaac

SEQ ID NO: 1388832 - DNA, 15 bp, Homo sapiens
gctggtgtgaggaaa

SEQ ID NO: 1388833 - DNA, 15 bp, Homo sapiens
agctggtgtgaggaa

SEQ ID NO: 1388834 - DNA, 15 bp, Homo sapiens
cagctggtgtgagga

SEQ ID NO: 1388835 - DNA, 15 bp, Homo sapiens
acagctggtgtgagg

SEQ ID NO: 1388836 - DNA, 15 bp, Homo sapiens
cacagctggtgtgag

SEQ ID NO: 1388837 - DNA, 15 bp, Homo sapiens
acacagctggtgtga

SEQ ID NO: 1388838 - DNA, 15 bp, Homo sapiens
tacacagctggtgtg

SEQ ID NO: 1388839 - DNA, 15 bp, Homo sapiens
atacacagctggtgt

SEQ ID NO: 1388840 - DNA, 15 bp, Homo sapiens
catacacagctggtg

SEQ ID NO: 1388841 - DNA, 15 bp, Homo sapiens
gcatacacagctggt

SEQ ID NO: 1388842 - DNA, 15 bp, Homo sapiens
cgcatacacagctgg

SEQ ID NO: 1388843 - DNA, 15 bp, Homo sapiens
acgcatacacagctg

SEQ ID NO: 1388844 - DNA, 15 bp, Homo sapiens
cacgcatacacagct

SEQ ID NO: 1388845 - DNA, 15 bp, Homo sapiens
tcacgcatacacagc

SEQ ID NO: 1388846 - DNA, 15 bp, Homo sapiens
atcacgcatacacag

SEQ ID NO: 1388847 - DNA, 15 bp, Homo sapiens
catcacgcatacaca

SEQ ID NO: 1388848 - DNA, 15 bp, Homo sapiens
gcatcacgcatacac

SEQ ID NO: 1388849 - DNA, 15 bp, Homo sapiens
ggcatcacgcataca

SEQ ID NO: 1388850 - DNA, 15 bp, Homo sapiens
gggcatcacgcatac

SEQ ID NO: 1388851 - DNA, 15 bp, Homo sapiens
tgggcatcacgcata

SEQ ID NO: 1388852 - DNA, 15 bp, Homo sapiens
ttgggcatcacgcat

SEQ ID NO: 1388853 - DNA, 15 bp, Homo sapiens
gttgggcatcacgca

SEQ ID NO: 1388854 - DNA, 15 bp, Homo sapiens
tgttgggcatcacgc

SEQ ID NO: 1388855 - DNA, 15 bp, Homo sapiens
gtgttgggcatcacg

SEQ ID NO: 1388856 - DNA, 15 bp, Homo sapiens
tgtgttgggcatcac

SEQ ID NO: 1388857 - DNA, 15 bp, Homo sapiens
ctgtgttgggcatca

SEQ ID NO: 1388858 - DNA, 15 bp, Homo sapiens
actgtgttgggcatc

SEQ ID NO: 1388859 - DNA, 15 bp, Homo sapiens
cactgtgttgggcat

SEQ ID NO: 1388860 - DNA, 15 bp, Homo sapiens
tcactgtgttgggca

SEQ ID NO: 1388861 - DNA, 15 bp, Homo sapiens
ttcactgtgttgggc

SEQ ID NO: 1388862 - DNA, 15 bp, Homo sapiens
cttcactgtgttggg

SEQ ID NO: 1388863 - DNA, 15 bp, Homo sapiens
ccttcactgtgttgg

SEQ ID NO: 1388864 - DNA, 15 bp, Homo sapiens
accttcactgtgttg

SEQ ID NO: 1388865 - DNA, 15 bp, Homo sapiens
aaccttcactgtgtt

SEQ ID NO: 1388866 - DNA, 15 bp, Homo sapiens
aaaccttcactgtgt

SEQ ID NO: 1388867 - DNA, 15 bp, Homo sapiens
taaaccttcactgtg

SEQ ID NO: 1388868 - DNA, 15 bp, Homo sapiens
ttaaaccttcactgt

SEQ ID NO: 1388869 - DNA, 15 bp, Homo sapiens
gttaaaccttcactg

SEQ ID NO: 1388870 - DNA, 15 bp, Homo sapiens
tgttaaaccttcact

SEQ ID NO: 1388871 - DNA, 15 bp, Homo sapiens
ttgttaaaccttcac

SEQ ID NO: 1388872 - DNA, 15 bp, Homo sapiens
attgttaaaccttca

SEQ ID NO: 1388873 - DNA, 15 bp, Homo sapiens
aattgttaaaccttc

SEQ ID NO: 1388874 - DNA, 15 bp, Homo sapiens
taattgttaaacctt

SEQ ID NO: 1388875 - DNA, 15 bp, Homo sapiens
ttaattgttaaacct

SEQ ID NO: 1388876 - DNA, 15 bp, Homo sapiens
cttaattgttaaacc

SEQ ID NO: 1388877 - DNA, 15 bp, Homo sapiens
gcttaattgttaaac

SEQ ID NO: 1388878 - DNA, 15 bp, Homo sapiens
agcttaattgttaaa

SEQ ID NO: 1388879 - DNA, 15 bp, Homo sapiens
cagcttaattgttaa

SEQ ID NO: 1388880 - DNA, 15 bp, Homo sapiens
ccagcttaattgtta

SEQ ID NO: 1388881 - DNA, 15 bp, Homo sapiens
accagcttaattgtt

SEQ ID NO: 1388882 - DNA, 15 bp, Homo sapiens
aaccagcttaattgt

SEQ ID NO: 1388883 - DNA, 15 bp, Homo sapiens
aaaccagcttaattg

SEQ ID NO: 1388884 - DNA, 15 bp, Homo sapiens
aaaaccagcttaatt

SEQ ID NO: 1388885 - DNA, 15 bp, Homo sapiens
taaaaccagcttaat

SEQ ID NO: 1388886 - DNA, 15 bp, Homo sapiens
ttaaaaccagcttaa

SEQ ID NO: 1388887 - DNA, 15 bp, Homo sapiens
tttaaaaccagctta

SEQ ID NO: 1388888 - DNA, 15 bp, Homo sapiens
atttaaaaccagctt

SEQ ID NO: 1388889 - DNA, 15 bp, Homo sapiens
catttaaaaccagct

SEQ ID NO: 1388890 - DNA, 15 bp, Homo sapiens
acatttaaaaccagc

SEQ ID NO: 1388891 - DNA, 15 bp, Homo sapiens
cacatttaaaaccag

SEQ ID NO: 1388892 - DNA, 15 bp, Homo sapiens
acacatttaaaacca

SEQ ID NO: 1388893 - DNA, 15 bp, Homo sapiens
tacacatttaaaacc

SEQ ID NO: 1388894 - DNA, 15 bp, Homo sapiens
ctacacatttaaaac

SEQ ID NO: 1388895 - DNA, 15 bp, Homo sapiens
gctacacatttaaaa

SEQ ID NO: 1388896 - DNA, 15 bp, Homo sapiens
tgctacacatttaaa

SEQ ID NO: 1388897 - DNA, 15 bp, Homo sapiens
atgctacacatttaa

SEQ ID NO: 1388898 - DNA, 15 bp, Homo sapiens
tatgctacacattta

SEQ ID NO: 1388899 - DNA, 15 bp, Homo sapiens
ctatgctacacattt

SEQ ID NO: 1388900 - DNA, 15 bp, Homo sapiens
tctatgctacacatt

SEQ ID NO: 1388901 - DNA, 15 bp, Homo sapiens
ttctatgctacacat

SEQ ID NO: 1388902 - DNA, 15 bp, Homo sapiens
cttctatgctacaca

SEQ ID NO: 1388903 - DNA, 15 bp, Homo sapiens
ccttctatgctacac

SEQ ID NO: 1388904 - DNA, 15 bp, Homo sapiens
tccttctatgctaca

SEQ ID NO: 1388905 - DNA, 15 bp, Homo sapiens
ttccttctatgctac

SEQ ID NO: 1388906 - DNA, 15 bp, Homo sapiens
attccttctatgcta

SEQ ID NO: 1388907 - DNA, 15 bp, Homo sapiens
gattccttctatgct

SEQ ID NO: 1388908 - DNA, 15 bp, Homo sapiens
tgattccttctatgc

SEQ ID NO: 1388909 - DNA, 15 bp, Homo sapiens
ttgattccttctatg

SEQ ID NO: 1388910 - DNA, 15 bp, Homo sapiens
tttgattccttctat

SEQ ID NO: 1388911 - DNA, 15 bp, Homo sapiens
ttttgattccttcta

SEQ ID NO: 1388912 - DNA, 15 bp, Homo sapiens
gttttgattccttct

SEQ ID NO: 1388913 - DNA, 15 bp, Homo sapiens
agttttgattccttc

SEQ ID NO: 1388914 - DNA, 15 bp, Homo sapiens
cagttttgattcctt

SEQ ID NO: 1388915 - DNA, 15 bp, Homo sapiens
tcagttttgattcct

SEQ ID NO: 1388916 - DNA, 15 bp, Homo sapiens
ttcagttttgattcc

SEQ ID NO: 1388917 - DNA, 15 bp, Homo sapiens
gttcagttttgattc

SEQ ID NO: 1388918 - DNA, 15 bp, Homo sapiens
tgttcagttttgatt

SEQ ID NO: 1388919 - DNA, 15 bp, Homo sapiens
atgttcagttttgat

SEQ ID NO: 1388920 - DNA, 15 bp, Homo sapiens
gatgttcagttttga

SEQ ID NO: 1388921 - DNA, 15 bp, Homo sapiens
tgatgttcagttttg

SEQ ID NO: 1388922 - DNA, 15 bp, Homo sapiens
ctgatgttcagtttt

SEQ ID NO: 1388923 - DNA, 15 bp, Homo sapiens
actgatgttcagttt

SEQ ID NO: 1388924 - DNA, 15 bp, Homo sapiens
aactgatgttcagtt

SEQ ID NO: 1388925 - DNA, 15 bp, Homo sapiens
caactgatgttcagt

SEQ ID NO: 1388926 - DNA, 15 bp, Homo sapiens
acaactgatgttcag

SEQ ID NO: 1388927 - DNA, 15 bp, Homo sapiens
cacaactgatgttca

SEQ ID NO: 1388928 - DNA, 15 bp, Homo sapiens
tcacaactgatgttc

SEQ ID NO: 1388929 - DNA, 15 bp, Homo sapiens
atcacaactgatgtt

SEQ ID NO: 1388930 - DNA, 15 bp, Homo sapiens
aatcacaactgatgt

SEQ ID NO: 1388931 - DNA, 15 bp, Homo sapiens
taatcacaactgatg

SEQ ID NO: 1388932 - DNA, 15 bp, Homo sapiens
ataatcacaactgat

SEQ ID NO: 1388933 - DNA, 15 bp, Homo sapiens
aataatcacaactga

SEQ ID NO: 1388934 - DNA, 15 bp, Homo sapiens
gaataatcacaactg

SEQ ID NO: 1388935 - DNA, 15 bp, Homo sapiens
tgaataatcacaact

SEQ ID NO: 1388936 - DNA, 15 bp, Homo sapiens
gtgaataatcacaac

SEQ ID NO: 1388937 - DNA, 15 bp, Homo sapiens
agtgaataatcacaa

SEQ ID NO: 1388938 - DNA, 15 bp, Homo sapiens
aagtgaataatcaca

SEQ ID NO: 1388939 - DNA, 15 bp, Homo sapiens
caagtgaataatcac

SEQ ID NO: 1388940 - DNA, 15 bp, Homo sapiens
acaagtgaataatca

SEQ ID NO: 1388941 - DNA, 15 bp, Homo sapiens
tacaagtgaataatc

SEQ ID NO: 1388942 - DNA, 15 bp, Homo sapiens
gtacaagtgaataat

SEQ ID NO: 1388943 - DNA, 15 bp, Homo sapiens
tgtacaagtgaataa

SEQ ID NO: 1388944 - DNA, 15 bp, Homo sapiens
ctgtacaagtgaata

SEQ ID NO: 1388945 - DNA, 15 bp, Homo sapiens
gctgtacaagtgaat

SEQ ID NO: 1388946 - DNA, 15 bp, Homo sapiens
agctgtacaagtgaa

SEQ ID NO: 1388947 - DNA, 15 bp, Homo sapiens
gagctgtacaagtga

SEQ ID NO: 1388948 - DNA, 15 bp, Homo sapiens
tgagctgtacaagtg

SEQ ID NO: 1388949 - DNA, 15 bp, Homo sapiens
gtgagctgtacaagt

SEQ ID NO: 1388950 - DNA, 15 bp, Homo sapiens
agtgagctgtacaag

SEQ ID NO: 1388951 - DNA, 15 bp, Homo sapiens
tagtgagctgtacaa

SEQ ID NO: 1388952 - DNA, 15 bp, Homo sapiens
ttagtgagctgtaca

SEQ ID NO: 1388953 - DNA, 15 bp, Homo sapiens
tttagtgagctgtac

SEQ ID NO: 1388954 - DNA, 15 bp, Homo sapiens
ctttagtgagctgta

SEQ ID NO: 1388955 - DNA, 15 bp, Homo sapiens
cctttagtgagctgt

SEQ ID NO: 1388956 - DNA, 15 bp, Homo sapiens
acctttagtgagctg

SEQ ID NO: 1388957 - DNA, 15 bp, Homo sapiens
tacctttagtgagct

SEQ ID NO: 1388958 - DNA, 15 bp, Homo sapiens
ttacctttagtgagc

SEQ ID NO: 1388959 - DNA, 15 bp, Homo sapiens
tttacctttagtgag

SEQ ID NO: 1388960 - DNA, 15 bp, Homo sapiens
atttacctttagtga

SEQ ID NO: 1388961 - DNA, 15 bp, Homo sapiens
aatttacctttagtg

SEQ ID NO: 1388962 - DNA, 15 bp, Homo sapiens
taatttacctttagt

SEQ ID NO: 1388963 - DNA, 15 bp, Homo sapiens
ataatttacctttag

SEQ ID NO: 1388964 - DNA, 15 bp, Homo sapiens
gataatttaccttta

SEQ ID NO: 1388965 - DNA, 15 bp, Homo sapiens
tgataatttaccttt

SEQ ID NO: 1388966 - DNA, 15 bp, Homo sapiens
ttgataatttacctt

SEQ ID NO: 1388967 - DNA, 15 bp, Homo sapiens
tttgataatttacct

SEQ ID NO: 1388968 - DNA, 15 bp, Homo sapiens
gtttgataatttacc

SEQ ID NO: 1388969 - DNA, 15 bp, Homo sapiens
tgtttgataatttac

SEQ ID NO: 1388970 - DNA, 15 bp, Homo sapiens
ctgtttgataattta

SEQ ID NO: 1388971 - DNA, 15 bp, Homo sapiens
actgtttgataattt

SEQ ID NO: 1388972 - DNA, 15 bp, Homo sapiens
cactgtttgataatt

SEQ ID NO: 1388973 - DNA, 15 bp, Homo sapiens
tcactgtttgataat

SEQ ID NO: 1388974 - DNA, 15 bp, Homo sapiens
ttcactgtttgataa

SEQ ID NO: 1388975 - DNA, 15 bp, Homo sapiens
gttcactgtttgata

SEQ ID NO: 1388976 - DNA, 15 bp, Homo sapiens
agttcactgtttgat

SEQ ID NO: 1388977 - DNA, 15 bp, Homo sapiens
tagttcactgtttga

SEQ ID NO: 1388978 - DNA, 15 bp, Homo sapiens
ttagttcactgtttg

SEQ ID NO: 1388979 - DNA, 15 bp, Homo sapiens
attagttcactgttt

SEQ ID NO: 1388980 - DNA, 15 bp, Homo sapiens
aattagttcactgtt

SEQ ID NO: 1388981 - DNA, 15 bp, Homo sapiens
taattagttcactgt

SEQ ID NO: 1388982 - DNA, 15 bp, Homo sapiens
ttaattagttcactg

SEQ ID NO: 1388983 - DNA, 15 bp, Homo sapiens
cttaattagttcact

SEQ ID NO: 1388984 - DNA, 15 bp, Homo sapiens
tcttaattagttcac

SEQ ID NO: 1388985 - DNA, 15 bp, Homo sapiens
gtcttaattagttca

SEQ ID NO: 1388986 - DNA, 15 bp, Homo sapiens
ggtcttaattagttc

SEQ ID NO: 1388987 - DNA, 15 bp, Homo sapiens
tggtcttaattagtt

SEQ ID NO: 1388988 - DNA, 15 bp, Homo sapiens
atggtcttaattagt

SEQ ID NO: 1388989 - DNA, 15 bp, Homo sapiens
catggtcttaattag

SEQ ID NO: 1388990 - DNA, 15 bp, Homo sapiens
acatggtcttaatta

SEQ ID NO: 1388991 - DNA, 15 bp, Homo sapiens
tacatggtcttaatt

SEQ ID NO: 1388992 - DNA, 15 bp, Homo sapiens
ttacatggtcttaat

SEQ ID NO: 1388993 - DNA, 15 bp, Homo sapiens
tttacatggtcttaa

SEQ ID NO: 1388994 - DNA, 15 bp, Homo sapiens
ttttacatggtctta

SEQ ID NO: 1388995 - DNA, 15 bp, Homo sapiens
tttttacatggtctt

SEQ ID NO: 1388996 - DNA, 15 bp, Homo sapiens
atttttacatggtct

SEQ ID NO: 1388997 - DNA, 15 bp, Homo sapiens
catttttacatggtc

SEQ ID NO: 1388998 - DNA, 15 bp, Homo sapiens
acatttttacatggt

SEQ ID NO: 1388999 - DNA, 15 bp, Homo sapiens
cacatttttacatgg

SEQ ID NO: 1389000 - DNA, 15 bp, Homo sapiens
acacatttttacatg

SEQ ID NO: 1389001 - DNA, 15 bp, Homo sapiens
aacacatttttacat

SEQ ID NO: 1389002 - DNA, 15 bp, Homo sapiens
aaacacatttttaca

SEQ ID NO: 1389003 - DNA, 15 bp, Homo sapiens
aaaacacatttttac

SEQ ID NO: 1389004 - DNA, 15 bp, Homo sapiens
gaaaacacattttta

SEQ ID NO: 1389005 - DNA, 15 bp, Homo sapiens
ggaaaacacattttt

SEQ ID NO: 1389006 - DNA, 15 bp, Homo sapiens
tggaaaacacatttt

SEQ ID NO: 1389007 - DNA, 15 bp, Homo sapiens
atggaaaacacattt

SEQ ID NO: 1389008 - DNA, 15 bp, Homo sapiens
aatggaaaacacatt

SEQ ID NO: 1389009 - DNA, 15 bp, Homo sapiens
aaatggaaaacacat

SEQ ID NO: 1389010 - DNA, 15 bp, Homo sapiens
gaaatggaaaacaca

SEQ ID NO: 1389011 - DNA, 15 bp, Homo sapiens
agaaatggaaaacac

SEQ ID NO: 1389012 - DNA, 15 bp, Homo sapiens
aagaaatggaaaaca

SEQ ID NO: 1389013 - DNA, 15 bp, Homo sapiens
gaagaaatggaaaac

SEQ ID NO: 1389014 - DNA, 15 bp, Homo sapiens
tgaagaaatggaaaa

SEQ ID NO: 1389015 - DNA, 15 bp, Homo sapiens
ctgaagaaatggaaa

SEQ ID NO: 1389016 - DNA, 15 bp, Homo sapiens
tctgaagaaatggaa

SEQ ID NO: 1389017 - DNA, 15 bp, Homo sapiens
ctctgaagaaatgga

SEQ ID NO: 1389018 - DNA, 15 bp, Homo sapiens
cctctgaagaaatgg

SEQ ID NO: 1389019 - DNA, 15 bp, Homo sapiens
ccctctgaagaaatg

SEQ ID NO: 1389020 - DNA, 15 bp, Homo sapiens
gccctctgaagaaat

SEQ ID NO: 1389021 - DNA, 15 bp, Homo sapiens
agccctctgaagaaa

SEQ ID NO: 1389022 - DNA, 15 bp, Homo sapiens
aagccctctgaagaa

SEQ ID NO: 1389023 - DNA, 15 bp, Homo sapiens
aaagccctctgaaga

SEQ ID NO: 1389024 - DNA, 15 bp, Homo sapiens
aaaagccctctgaag

SEQ ID NO: 1389025 - DNA, 15 bp, Homo sapiens
gaaaagccctctgaa

SEQ ID NO: 1389026 - DNA, 15 bp, Homo sapiens
cgaaaagccctctga

SEQ ID NO: 1389027 - DNA, 15 bp, Homo sapiens
ccgaaaagccctctg

SEQ ID NO: 1389028 - DNA, 15 bp, Homo sapiens
cccgaaaagccctct

SEQ ID NO: 1389029 - DNA, 15 bp, Homo sapiens
acccgaaaagccctc

SEQ ID NO: 1389030 - DNA, 15 bp, Homo sapiens
aacccgaaaagccct

SEQ ID NO: 1389031 - DNA, 15 bp, Homo sapiens
gaacccgaaaagccc

SEQ ID NO: 1389032 - DNA, 15 bp, Homo sapiens
agaacccgaaaagcc

SEQ ID NO: 1389033 - DNA, 15 bp, Homo sapiens
aagaacccgaaaagc

SEQ ID NO: 1389034 - DNA, 15 bp, Homo sapiens
aaagaacccgaaaag

SEQ ID NO: 1389035 - DNA, 15 bp, Homo sapiens
caaagaacccgaaaa

SEQ ID NO: 1389036 - DNA, 15 bp, Homo sapiens
ccaaagaacccgaaa

SEQ ID NO: 1389037 - DNA, 15 bp, Homo sapiens
tccaaagaacccgaa

SEQ ID NO: 1389038 - DNA, 15 bp, Homo sapiens
ttccaaagaacccga

SEQ ID NO: 1389039 - DNA, 15 bp, Homo sapiens
tttccaaagaacccg

SEQ ID NO: 1389040 - DNA, 15 bp, Homo sapiens
ttttccaaagaaccc

SEQ ID NO: 1389041 - DNA, 15 bp, Homo sapiens
tttttccaaagaacc

SEQ ID NO: 1389042 - DNA, 15 bp, Homo sapiens
ttttttccaaagaac

SEQ ID NO: 1389043 - DNA, 15 bp, Homo sapiens
tttttttccaaagaa

SEQ ID NO: 1389044 - DNA, 15 bp, Homo sapiens
atttttttccaaaga

SEQ ID NO: 1389045 - DNA, 15 bp, Homo sapiens
gatttttttccaaag

SEQ ID NO: 1389046 - DNA, 15 bp, Homo sapiens
tgatttttttccaaa

SEQ ID NO: 1389047 - DNA, 15 bp, Homo sapiens
ttgatttttttccaa

SEQ ID NO: 1389048 - DNA, 15 bp, Homo sapiens
tttgatttttttcca

SEQ ID NO: 1389049 - DNA, 15 bp, Homo sapiens
gtttgatttttttcc

SEQ ID NO: 1389050 - DNA, 15 bp, Homo sapiens
tgtttgatttttttc

SEQ ID NO: 1389051 - DNA, 15 bp, Homo sapiens
ctgtttgattttttt

SEQ ID NO: 1389052 - DNA, 15 bp, Homo sapiens
tctgtttgatttttt

SEQ ID NO: 1389053 - DNA, 15 bp, Homo sapiens
ttctgtttgattttt

SEQ ID NO: 1389054 - DNA, 15 bp, Homo sapiens
cttctgtttgatttt

SEQ ID NO: 1389055 - DNA, 15 bp, Homo sapiens
ccttctgtttgattt

SEQ ID NO: 1389056 - DNA, 15 bp, Homo sapiens
cccttctgtttgatt

SEQ ID NO: 1389057 - DNA, 15 bp, Homo sapiens
gcccttctgtttgat

SEQ ID NO: 1389058 - DNA, 15 bp, Homo sapiens
agcccttctgtttga

SEQ ID NO: 1389059 - DNA, 15 bp, Homo sapiens
aagcccttctgtttg

SEQ ID NO: 1389060 - DNA, 15 bp, Homo sapiens
aaagcccttctgttt

SEQ ID NO: 1389061 - DNA, 15 bp, Homo sapiens
taaagcccttctgtt

SEQ ID NO: 1389062 - DNA, 15 bp, Homo sapiens
ataaagcccttctgt

SEQ ID NO: 1389063 - DNA, 15 bp, Homo sapiens
cataaagcccttctg

SEQ ID NO: 1389064 - DNA, 15 bp, Homo sapiens
acataaagcccttct

SEQ ID NO: 1389065 - DNA, 15 bp, Homo sapiens
tacataaagcccttc

SEQ ID NO: 1389066 - DNA, 15 bp, Homo sapiens
atacataaagccctt

SEQ ID NO: 1389067 - DNA, 15 bp, Homo sapiens
gatacataaagccct

SEQ ID NO: 1389068 - DNA, 15 bp, Homo sapiens
tgatacataaagccc

SEQ ID NO: 1389069 - DNA, 15 bp, Homo sapiens
ctgatacataaagcc

SEQ ID NO: 1389070 - DNA, 15 bp, Homo sapiens
actgatacataaagc

SEQ ID NO: 1389071 - DNA, 15 bp, Homo sapiens
tactgatacataaag

SEQ ID NO: 1389072 - DNA, 15 bp, Homo sapiens
atactgatacataaa

SEQ ID NO: 1389073 - DNA, 15 bp, Homo sapiens
catactgatacataa

SEQ ID NO: 1389074 - DNA, 15 bp, Homo sapiens
ccatactgatacata

SEQ ID NO: 1389075 - DNA, 15 bp, Homo sapiens
gccatactgatacat

SEQ ID NO: 1389076 - DNA, 15 bp, Homo sapiens
ggccatactgataca

SEQ ID NO: 1389077 - DNA, 15 bp, Homo sapiens
tggccatactgatac

SEQ ID NO: 1389078 - DNA, 15 bp, Homo sapiens
ttggccatactgata

SEQ ID NO: 1389079 - DNA, 15 bp, Homo sapiens
tttggccatactgat

SEQ ID NO: 1389080 - DNA, 15 bp, Homo sapiens
atttggccatactga

SEQ ID NO: 1389081 - DNA, 15 bp, Homo sapiens
aatttggccatactg

SEQ ID NO: 1389082 - DNA, 15 bp, Homo sapiens
aaatttggccatact

SEQ ID NO: 1389083 - DNA, 15 bp, Homo sapiens
aaaatttggccatac

SEQ ID NO: 1389084 - DNA, 15 bp, Homo sapiens
caaaatttggccata

SEQ ID NO: 1389085 - DNA, 15 bp, Homo sapiens
tcaaaatttggccat

SEQ ID NO: 1389086 - DNA, 15 bp, Homo sapiens
ttcaaaatttggcca

SEQ ID NO: 1389087 - DNA, 15 bp, Homo sapiens
tttcaaaatttggcc

SEQ ID NO: 1389088 - DNA, 15 bp, Homo sapiens
ttttcaaaatttggc

SEQ ID NO: 1389089 - DNA, 15 bp, Homo sapiens
tttttcaaaatttgg

SEQ ID NO: 1389090 - DNA, 15 bp, Homo sapiens
ttttttcaaaatttg

SEQ ID NO: 1389091 - DNA, 15 bp, Homo sapiens
tttttttcaaaattt

SEQ ID NO: 1389092 - DNA, 15 bp, Homo sapiens
ttttttttcaaaatt

SEQ ID NO: 1389093 - DNA, 15 bp, Homo sapiens
attttttttcaaaat

SEQ ID NO: 1389094 - DNA, 15 bp, Homo sapiens
aattttttttcaaaa

SEQ ID NO: 1389095 - DNA, 15 bp, Homo sapiens
gaattttttttcaaa

SEQ ID NO: 1389096 - DNA, 15 bp, Homo sapiens
cagaattttttttca

SEQ ID NO: 1389097 - DNA, 15 bp, Homo sapiens
gcagaattttttttc

SEQ ID NO: 1389098 - DNA, 15 bp, Homo sapiens
agcagaatttttttt

SEQ ID NO: 1389099 - DNA, 15 bp, Homo sapiens
tagcagaattttttt

SEQ ID NO: 1389100 - DNA, 15 bp, Homo sapiens
atagcagaatttttt

SEQ ID NO: 1389101 - DNA, 15 bp, Homo sapiens
aatagcagaattttt

SEQ ID NO: 1389102 - DNA, 15 bp, Homo sapiens
aaatagcagaatttt

SEQ ID NO: 1389103 - DNA, 15 bp, Homo sapiens
gaaatagcagaattt

SEQ ID NO: 1389104 - DNA, 15 bp, Homo sapiens
ggaaatagcagaatt

SEQ ID NO: 1389105 - DNA, 15 bp, Homo sapiens
gggaaatagcagaat

SEQ ID NO: 1389106 - DNA, 15 bp, Homo sapiens
ggggaaatagcagaa

SEQ ID NO: 1389107 - DNA, 15 bp, Homo sapiens
gggggaaatagcaga

SEQ ID NO: 1389108 - DNA, 15 bp, Homo sapiens
tgggggaaatagcag

SEQ ID NO: 1389109 - DNA, 15 bp, Homo sapiens
ttgggggaaatagca

SEQ ID NO: 1389110 - DNA, 15 bp, Homo sapiens
tttgggggaaatagc

SEQ ID NO: 1389111 - DNA, 15 bp, Homo sapiens
atttgggggaaatag

SEQ ID NO: 1389112 - DNA, 15 bp, Homo sapiens
catttgggggaaata

SEQ ID NO: 1389113 - DNA, 15 bp, Homo sapiens
ccatttgggggaaat

SEQ ID NO: 1389114 - DNA, 15 bp, Homo sapiens
tccatttgggggaaa

SEQ ID NO: 1389115 - DNA, 15 bp, Homo sapiens
ttccatttgggggaa

SEQ ID NO: 1389116 - DNA, 15 bp, Homo sapiens
tttccatttggggga

SEQ ID NO: 1389117 - DNA, 15 bp, Homo sapiens
ttttccatttggggg

SEQ ID NO: 1389118 - DNA, 15 bp, Homo sapiens
tttttccatttgggg

SEQ ID NO: 1389119 - DNA, 15 bp, Homo sapiens
ttttttccatttggg

SEQ ID NO: 1389120 - DNA, 15 bp, Homo sapiens
gttttttccatttgg

SEQ ID NO: 1389121 - DNA, 15 bp, Homo sapiens
agttttttccatttg

SEQ ID NO: 1389122 - DNA, 15 bp, Homo sapiens
tagttttttccattt

SEQ ID NO: 1389123 - DNA, 15 bp, Homo sapiens
ttagttttttccatt

SEQ ID NO: 1389124 - DNA, 15 bp, Homo sapiens
gttagttttttccat

SEQ ID NO: 1389125 - DNA, 15 bp, Homo sapiens
tgttagttttttcca

SEQ ID NO: 1389126 - DNA, 15 bp, Homo sapiens
atgttagttttttcc

SEQ ID NO: 1389127 - DNA, 15 bp, Homo sapiens
aatgttagttttttc

SEQ ID NO: 1389128 - DNA, 15 bp, Homo sapiens
aaatgttagtttttt

SEQ ID NO: 1389129 - DNA, 15 bp, Homo sapiens
taaatgttagttttt

SEQ ID NO: 1389130 - DNA, 15 bp, Homo sapiens
gtaaatgttagtttt

SEQ ID NO: 1389131 - DNA, 15 bp, Homo sapiens
agtaaatgttagttt

SEQ ID NO: 1389132 - DNA, 15 bp, Homo sapiens
cagtaaatgttagtt

SEQ ID NO: 1389133 - DNA, 15 bp, Homo sapiens
tcagtaaatgttagt

SEQ ID NO: 1389134 - DNA, 15 bp, Homo sapiens
ctcagtaaatgttag

SEQ ID NO: 1389135 - DNA, 15 bp, Homo sapiens
actcagtaaatgtta

SEQ ID NO: 1389136 - DNA, 15 bp, Homo sapiens
tactcagtaaatgtt

SEQ ID NO: 1389137 - DNA, 15 bp, Homo sapiens
gtactcagtaaatgt

SEQ ID NO: 1389138 - DNA, 15 bp, Homo sapiens
ggtactcagtaaatg

SEQ ID NO: 1389139 - DNA, 15 bp, Homo sapiens
aggtactcagtaaat

SEQ ID NO: 1389140 - DNA, 15 bp, Homo sapiens
taggtactcagtaaa

SEQ ID NO: 1389141 - DNA, 15 bp, Homo sapiens
gtaggtactcagtaa

SEQ ID NO: 1389142 - DNA, 15 bp, Homo sapiens
tgtaggtactcagta

SEQ ID NO: 1389143 - DNA, 15 bp, Homo sapiens
ctgtaggtactcagt

SEQ ID NO: 1389144 - DNA, 15 bp, Homo sapiens
tctgtaggtactcag

SEQ ID NO: 1389145 - DNA, 15 bp, Homo sapiens
ttctgtaggtactca

SEQ ID NO: 1389146 - DNA, 15 bp, Homo sapiens
attctgtaggtactc

SEQ ID NO: 1389147 - DNA, 15 bp, Homo sapiens
tattctgtaggtact

SEQ ID NO: 1389148 - DNA, 15 bp, Homo sapiens
gtattctgtaggtac

SEQ ID NO: 1389149 - DNA, 15 bp, Homo sapiens
ggtattctgtaggta

SEQ ID NO: 1389150 - DNA, 15 bp, Homo sapiens
tggtattctgtaggt

SEQ ID NO: 1389151 - DNA, 15 bp, Homo sapiens
atggtattctgtagg

SEQ ID NO: 1389152 - DNA, 15 bp, Homo sapiens
tatggtattctgtag

SEQ ID NO: 1389153 - DNA, 15 bp, Homo sapiens
atatggtattctgta

SEQ ID NO: 1389154 - DNA, 15 bp, Homo sapiens
tatatggtattctgt

SEQ ID NO: 1389155 - DNA, 15 bp, Homo sapiens
atatatggtattctg

SEQ ID NO: 1389156 - DNA, 15 bp, Homo sapiens
tatatatggtattct

SEQ ID NO: 1389157 - DNA, 15 bp, Homo sapiens
atatatatggtattc

SEQ ID NO: 1389158 - DNA, 15 bp, Homo sapiens
aatatatatggtatt

SEQ ID NO: 1389159 - DNA, 15 bp, Homo sapiens
taatatatatggtat

SEQ ID NO: 1389160 - DNA, 15 bp, Homo sapiens
ataatatatatggta

SEQ ID NO: 1389161 - DNA, 15 bp, Homo sapiens
aataatatatatggt

SEQ ID NO: 1389162 - DNA, 15 bp, Homo sapiens
aaataatatatatgg

SEQ ID NO: 1389163 - DNA, 15 bp, Homo sapiens
gaaataatatatatg

SEQ ID NO: 1389164 - DNA, 15 bp, Homo sapiens
tgaaataatatatat

SEQ ID NO: 1389165 - DNA, 15 bp, Homo sapiens
ttgaaataatatata

SEQ ID NO: 1389166 - DNA, 15 bp, Homo sapiens
tttgaaataatatat

SEQ ID NO: 1389167 - DNA, 15 bp, Homo sapiens
atttgaaataatata

SEQ ID NO: 1389168 - DNA, 15 bp, Homo sapiens
tatttgaaataatat

SEQ ID NO: 1389169 - DNA, 15 bp, Homo sapiens
ttatttgaaataata

SEQ ID NO: 1389170 - DNA, 15 bp, Homo sapiens
attatttgaaataat

SEQ ID NO: 1389171 - DNA, 15 bp, Homo sapiens
aattatttgaaataa

SEQ ID NO: 1389172 - DNA, 15 bp, Homo sapiens
caattatttgaaata

SEQ ID NO: 1389173 - DNA, 15 bp, Homo sapiens
acaattatttgaaat

SEQ ID NO: 1389174 - DNA, 15 bp, Homo sapiens
gacaattatttgaaa

SEQ ID NO: 1389175 - DNA, 15 bp, Homo sapiens
tgacaattatttgaa

SEQ ID NO: 1389176 - DNA, 15 bp, Homo sapiens
gtgacaattatttga

SEQ ID NO: 1389177 - DNA, 15 bp, Homo sapiens
tgtgacaattatttg

SEQ ID NO: 1389178 - DNA, 15 bp, Homo sapiens
atgtgacaattattt

SEQ ID NO: 1389179 - DNA, 15 bp, Homo sapiens
catgtgacaattatt

SEQ ID NO: 1389180 - DNA, 15 bp, Homo sapiens
ccatgtgacaattat

SEQ ID NO: 1389181 - DNA, 15 bp, Homo sapiens
tccatgtgacaatta

SEQ ID NO: 1389182 - DNA, 15 bp, Homo sapiens
ttccatgtgacaatt

SEQ ID NO: 1389183 - DNA, 15 bp, Homo sapiens
tttccatgtgacaat

SEQ ID NO: 1389184 - DNA, 15 bp, Homo sapiens
atttccatgtgacaa

SEQ ID NO: 1389185 - DNA, 15 bp, Homo sapiens
gatttccatgtgaca

SEQ ID NO: 1389186 - DNA, 15 bp, Homo sapiens
ggatttccatgtgac

SEQ ID NO: 1389187 - DNA, 15 bp, Homo sapiens
aggatttccatgtga

SEQ ID NO: 1389188 - DNA, 15 bp, Homo sapiens
caggatttccatgtg

SEQ ID NO: 1389189 - DNA, 15 bp, Homo sapiens
acaggatttccatgt

SEQ ID NO: 1389190 - DNA, 15 bp, Homo sapiens
tacaggatttccatg

SEQ ID NO: 1389191 - DNA, 15 bp, Homo sapiens
atacaggatttccat

SEQ ID NO: 1389192 - DNA, 15 bp, Homo sapiens
catacaggatttcca

SEQ ID NO: 1389193 - DNA, 15 bp, Homo sapiens
tcatacaggatttcc

SEQ ID NO: 1389194 - DNA, 15 bp, Homo sapiens
atcatacaggatttc

SEQ ID NO: 1389195 - DNA, 15 bp, Homo sapiens
tatcatacaggattt

SEQ ID NO: 1389196 - DNA, 15 bp, Homo sapiens
atatcatacaggatt

SEQ ID NO: 1389197 - DNA, 15 bp, Homo sapiens
gatatcatacaggat

SEQ ID NO: 1389198 - DNA, 15 bp, Homo sapiens
agatatcatacagga

SEQ ID NO: 1389199 - DNA, 15 bp, Homo sapiens
cagatatcatacagg

SEQ ID NO: 1389200 - DNA, 15 bp, Homo sapiens
gcagatatcatacag

SEQ ID NO: 1389201 - DNA, 15 bp, Homo sapiens
agcagatatcataca

SEQ ID NO: 1389202 - DNA, 15 bp, Homo sapiens
cagcagatatcatac

SEQ ID NO: 1389203 - DNA, 15 bp, Homo sapiens
acagcagatatcata

SEQ ID NO: 1389204 - DNA, 15 bp, Homo sapiens
aacagcagatatcat

SEQ ID NO: 1389205 - DNA, 15 bp, Homo sapiens
taacagcagatatca

SEQ ID NO: 1389206 - DNA, 15 bp, Homo sapiens
gtaacagcagatatc

SEQ ID NO: 1389207 - DNA, 15 bp, Homo sapiens
agtaacagcagatat

SEQ ID NO: 1389208 - DNA, 15 bp, Homo sapiens
gagtaacagcagata

SEQ ID NO: 1389209 - DNA, 15 bp, Homo sapiens
agagtaacagcagat

SEQ ID NO: 1389210 - DNA, 15 bp, Homo sapiens
tagagtaacagcaga

SEQ ID NO: 1389211 - DNA, 15 bp, Homo sapiens
ttagagtaacagcag

SEQ ID NO: 1389212 - DNA, 15 bp, Homo sapiens
attagagtaacagca

SEQ ID NO: 1389213 - DNA, 15 bp, Homo sapiens
aattagagtaacagc

SEQ ID NO: 1389214 - DNA, 15 bp, Homo sapiens
aaattagagtaacag

SEQ ID NO: 1389215 - DNA, 15 bp, Homo sapiens
aaaattagagtaaca

SEQ ID NO: 1389216 - DNA, 15 bp, Homo sapiens
gaaaattagagtaac

SEQ ID NO: 1389217 - DNA, 15 bp, Homo sapiens
agaaaattagagtaa

SEQ ID NO: 1389218 - DNA, 15 bp, Homo sapiens
aagaaaattagagta

SEQ ID NO: 1389219 - DNA, 15 bp, Homo sapiens
caagaaaattagagt

SEQ ID NO: 1389220 - DNA, 15 bp, Homo sapiens
tcaagaaaattagag

SEQ ID NO: 1389221 - DNA, 15 bp, Homo sapiens
atcaagaaaattaga

SEQ ID NO: 1389222 - DNA, 15 bp, Homo sapiens
catcaagaaaattag

SEQ ID NO: 1389223 - DNA, 15 bp, Homo sapiens
tcatcaagaaaatta

SEQ ID NO: 1389224 - DNA, 15 bp, Homo sapiens
ctcatcaagaaaatt

SEQ ID NO: 1389225 - DNA, 15 bp, Homo sapiens
ttttcctcatcaaga

SEQ ID NO: 1389226 - DNA, 15 bp, Homo sapiens
attttcctcatcaag

SEQ ID NO: 1389227 - DNA, 15 bp, Homo sapiens
cattttcctcatcaa

SEQ ID NO: 1389228 - DNA, 15 bp, Homo sapiens
tcattttcctcatca

SEQ ID NO: 1389229 - DNA, 15 bp, Homo sapiens
ttcattttcctcatc

SEQ ID NO: 1389230 - DNA, 15 bp, Homo sapiens
tttcattttcctcat

SEQ ID NO: 1389231 - DNA, 15 bp, Homo sapiens
gtttcattttcctca

SEQ ID NO: 1389232 - DNA, 15 bp, Homo sapiens
agtttcattttcctc

SEQ ID NO: 1389233 - DNA, 15 bp, Homo sapiens
gagtttcattttcct

SEQ ID NO: 1389234 - DNA, 15 bp, Homo sapiens
tgagtttcattttcc

SEQ ID NO: 1389235 - DNA, 15 bp, Homo sapiens
ctgagtttcattttc

SEQ ID NO: 1389236 - DNA, 15 bp, Homo sapiens
cctgagtttcatttt

SEQ ID NO: 1389237 - DNA, 15 bp, Homo sapiens
ccctgagtttcattt

SEQ ID NO: 1389238 - DNA, 15 bp, Homo sapiens
tccctgagtttcatt

SEQ ID NO: 1389239 - DNA, 15 bp, Homo sapiens
ttccctgagtttcat

SEQ ID NO: 1389240 - DNA, 15 bp, Homo sapiens
tttccctgagtttca

SEQ ID NO: 1389241 - DNA, 15 bp, Homo sapiens
atttccctgagtttc

SEQ ID NO: 1389242 - DNA, 15 bp, Homo sapiens
aatttccctgagttt

SEQ ID NO: 1389243 - DNA, 15 bp, Homo sapiens
taatttccctgagtt

SEQ ID NO: 1389244 - DNA, 15 bp, Homo sapiens
ttaatttccctgagt

SEQ ID NO: 1389245 - DNA, 15 bp, Homo sapiens
gttaatttccctgag

SEQ ID NO: 1389246 - DNA, 15 bp, Homo sapiens
tgttaatttccctga

SEQ ID NO: 1389247 - DNA, 15 bp, Homo sapiens
ttgttaatttccctg

SEQ ID NO: 1389248 - DNA, 15 bp, Homo sapiens
attgttaatttccct

SEQ ID NO: 1389249 - DNA, 15 bp, Homo sapiens
cattgttaatttccc

SEQ ID NO: 1389250 - DNA, 15 bp, Homo sapiens
acattgttaatttcc

SEQ ID NO: 1389251 - DNA, 15 bp, Homo sapiens
tacattgttaatttc

SEQ ID NO: 1389252 - DNA, 15 bp, Homo sapiens
atacattgttaattt

SEQ ID NO: 1389253 - DNA, 15 bp, Homo sapiens
aatacattgttaatt

SEQ ID NO: 1389254 - DNA, 15 bp, Homo sapiens
aaatacattgttaat

SEQ ID NO: 1389255 - DNA, 15 bp, Homo sapiens
caaatacattgttaa

SEQ ID NO: 1389256 - DNA, 15 bp, Homo sapiens
acaaatacattgtta

SEQ ID NO: 1389257 - DNA, 15 bp, Homo sapiens
cacaaatacattgtt

SEQ ID NO: 1389258 - DNA, 15 bp, Homo sapiens
acacaaatacattgt

SEQ ID NO: 1389259 - DNA, 15 bp, Homo sapiens
gacacaaatacattg

SEQ ID NO: 1389260 - DNA, 15 bp, Homo sapiens
tgacacaaatacatt

SEQ ID NO: 1389261 - DNA, 15 bp, Homo sapiens
atgacacaaatacat

SEQ ID NO: 1389262 - DNA, 15 bp, Homo sapiens
tatgacacaaataca

SEQ ID NO: 1389263 - DNA, 15 bp, Homo sapiens
atatgacacaaatac

SEQ ID NO: 1389264 - DNA, 15 bp, Homo sapiens
tatatgacacaaata

SEQ ID NO: 1389265 - DNA, 15 bp, Homo sapiens
ttatatgacacaaat

SEQ ID NO: 1389266 - DNA, 15 bp, Homo sapiens
attatatgacacaaa

SEQ ID NO: 1389267 - DNA, 15 bp, Homo sapiens
aattatatgacacaa

SEQ ID NO: 1389268 - DNA, 15 bp, Homo sapiens
taattatatgacaca

SEQ ID NO: 1389269 - DNA, 15 bp, Homo sapiens
gtaattatatgacac

SEQ ID NO: 1389270 - DNA, 15 bp, Homo sapiens
agtaattatatgaca

SEQ ID NO: 1389271 - DNA, 15 bp, Homo sapiens
tagtaattatatgac

SEQ ID NO: 1389272 - DNA, 15 bp, Homo sapiens
ttagtaattatatga

SEQ ID NO: 1389273 - DNA, 15 bp, Homo sapiens
tttagtaattatatg

SEQ ID NO: 1389274 - DNA, 15 bp, Homo sapiens
atttagtaattatat

SEQ ID NO: 1389275 - DNA, 15 bp, Homo sapiens
tatttagtaattata

SEQ ID NO: 1389276 - DNA, 15 bp, Homo sapiens
ttatttagtaattat

SEQ ID NO: 1389277 - DNA, 15 bp, Homo sapiens
attatttagtaatta

SEQ ID NO: 1389278 - DNA, 15 bp, Homo sapiens
cattatttagtaatt

SEQ ID NO: 1389279 - DNA, 15 bp, Homo sapiens
ccattatttagtaat

SEQ ID NO: 1389280 - DNA, 15 bp, Homo sapiens
tccattatttagtaa

SEQ ID NO: 1389281 - DNA, 15 bp, Homo sapiens
ctccattatttagta

SEQ ID NO: 1389282 - DNA, 15 bp, Homo sapiens
gctccattatttagt

SEQ ID NO: 1389283 - DNA, 15 bp, Homo sapiens
agctccattatttag

SEQ ID NO: 1389284 - DNA, 15 bp, Homo sapiens
cagctccattattta

SEQ ID NO: 1389285 - DNA, 15 bp, Homo sapiens
ccagctccattattt

SEQ ID NO: 1389286 - DNA, 15 bp, Homo sapiens
cccagctccattatt

SEQ ID NO: 1389287 - DNA, 15 bp, Homo sapiens
tcccagctccattat

SEQ ID NO: 1389288 - DNA, 15 bp, Homo sapiens
atcccagctccatta

SEQ ID NO: 1389289 - DNA, 15 bp, Homo sapiens
aatcccagctccatt

SEQ ID NO: 1389290 - DNA, 15 bp, Homo sapiens
caatcccagctccat

SEQ ID NO: 1389291 - DNA, 15 bp, Homo sapiens
gcaatcccagctcca

SEQ ID NO: 1389292 - DNA, 15 bp, Homo sapiens
tgcaatcccagctcc

SEQ ID NO: 1389293 - DNA, 15 bp, Homo sapiens
ttgcaatcccagctc

SEQ ID NO: 1389294 - DNA, 15 bp, Homo sapiens
gttgcaatcccagct

SEQ ID NO: 1389295 - DNA, 15 bp, Homo sapiens
ggttgcaatcccagc

SEQ ID NO: 1389296 - DNA, 15 bp, Homo sapiens
aggttgcaatcccag

SEQ ID NO: 1389297 - DNA, 15 bp, Homo sapiens
caggttgcaatccca

SEQ ID NO: 1389298 - DNA, 15 bp, Homo sapiens
tcaggttgcaatccc

SEQ ID NO: 1389299 - DNA, 15 bp, Homo sapiens
ttcaggttgcaatcc

SEQ ID NO: 1389300 - DNA, 15 bp, Homo sapiens
attcaggttgcaatc

SEQ ID NO: 1389301 - DNA, 15 bp, Homo sapiens
gattcaggttgcaat

SEQ ID NO: 1389302 - DNA, 15 bp, Homo sapiens
agattcaggttgcaa

SEQ ID NO: 1389303 - DNA, 15 bp, Homo sapiens
tagattcaggttgca

SEQ ID NO: 1389304 - DNA, 15 bp, Homo sapiens
ttagattcaggttgc

SEQ ID NO: 1389305 - DNA, 15 bp, Homo sapiens
attagattcaggttg

SEQ ID NO: 1389306 - DNA, 15 bp, Homo sapiens
aattagattcaggtt

SEQ ID NO: 1389307 - DNA, 15 bp, Homo sapiens
aaattagattcaggt

SEQ ID NO: 1389308 - DNA, 15 bp, Homo sapiens
taaattagattcagg

SEQ ID NO: 1389309 - DNA, 15 bp, Homo sapiens
ttaaattagattcag

SEQ ID NO: 1389310 - DNA, 15 bp, Homo sapiens
tttaaattagattca

SEQ ID NO: 1389311 - DNA, 15 bp, Homo sapiens
ttttaaattagattc

SEQ ID NO: 1389312 - DNA, 15 bp, Homo sapiens
cttttaaattagatt

SEQ ID NO: 1389313 - DNA, 15 bp, Homo sapiens
acttttaaattagat

SEQ ID NO: 1389314 - DNA, 15 bp, Homo sapiens
aacttttaaattaga

SEQ ID NO: 1389315 - DNA, 15 bp, Homo sapiens
gaacttttaaattag

SEQ ID NO: 1389316 - DNA, 15 bp, Homo sapiens
agaacttttaaatta

SEQ ID NO: 1389317 - DNA, 15 bp, Homo sapiens
aagaacttttaaatt

SEQ ID NO: 1389318 - DNA, 15 bp, Homo sapiens
aaagaacttttaaat

SEQ ID NO: 1389319 - DNA, 15 bp, Homo sapiens
gaaagaacttttaaa

SEQ ID NO: 1389320 - DNA, 15 bp, Homo sapiens
tgaaagaacttttaa

SEQ ID NO: 1389321 - DNA, 15 bp, Homo sapiens
ttgaaagaactttta

SEQ ID NO: 1389322 - DNA, 15 bp, Homo sapiens
gttgaaagaactttt

SEQ ID NO: 1389323 - DNA, 15 bp, Homo sapiens
agttgaaagaacttt

SEQ ID NO: 1389324 - DNA, 15 bp, Homo sapiens
tagttgaaagaactt

SEQ ID NO: 1389325 - DNA, 15 bp, Homo sapiens
ttagttgaaagaact

SEQ ID NO: 1389326 - DNA, 15 bp, Homo sapiens
tttagttgaaagaac

SEQ ID NO: 1389327 - DNA, 15 bp, Homo sapiens
gtttagttgaaagaa

SEQ ID NO: 1389328 - DNA, 15 bp, Homo sapiens
ggtttagttgaaaga

SEQ ID NO: 1389329 - DNA, 15 bp, Homo sapiens
aggtttagttgaaag

SEQ ID NO: 1389330 - DNA, 15 bp, Homo sapiens
caggtttagttgaaa

SEQ ID NO: 1389331 - DNA, 15 bp, Homo sapiens
tcaggtttagttgaa

SEQ ID NO: 1389332 - DNA, 15 bp, Homo sapiens
ctcaggtttagttga

SEQ ID NO: 1389333 - DNA, 15 bp, Homo sapiens
tctcaggtttagttg

SEQ ID NO: 1389334 - DNA, 15 bp, Homo sapiens
atctcaggtttagtt

SEQ ID NO: 1389335 - DNA, 15 bp, Homo sapiens
catctcaggtttagt

SEQ ID NO: 1389336 - DNA, 15 bp, Homo sapiens
ccatctcaggtttag

SEQ ID NO: 1389337 - DNA, 15 bp, Homo sapiens
accatctcaggttta

SEQ ID NO: 1389338 - DNA, 15 bp, Homo sapiens
gaccatctcaggttt

SEQ ID NO: 1389339 - DNA, 15 bp, Homo sapiens
tgaccatctcaggtt

SEQ ID NO: 1389340 - DNA, 15 bp, Homo sapiens
atgaccatctcaggt

SEQ ID NO: 1389341 - DNA, 15 bp, Homo sapiens
aatgaccatctcagg

SEQ ID NO: 1389342 - DNA, 15 bp, Homo sapiens
aaatgaccatctcag

SEQ ID NO: 1389343 - DNA, 15 bp, Homo sapiens
gaaatgaccatctca

SEQ ID NO: 1389344 - DNA, 15 bp, Homo sapiens
agaaatgaccatctc

SEQ ID NO: 1389345 - DNA, 15 bp, Homo sapiens
cagaaatgaccatct

SEQ ID NO: 1389346 - DNA, 15 bp, Homo sapiens
tcagaaatgaccatc

SEQ ID NO: 1389347 - DNA, 15 bp, Homo sapiens
atcagaaatgaccat

SEQ ID NO: 1389348 - DNA, 15 bp, Homo sapiens
tatcagaaatgacca

SEQ ID NO: 1389349 - DNA, 15 bp, Homo sapiens
ctatcagaaatgacc

SEQ ID NO: 1389350 - DNA, 15 bp, Homo sapiens
gctatcagaaatgac

SEQ ID NO: 1389351 - DNA, 15 bp, Homo sapiens
agctatcagaaatga

SEQ ID NO: 1389352 - DNA, 15 bp, Homo sapiens
cagctatcagaaatg

SEQ ID NO: 1389353 - DNA, 15 bp, Homo sapiens
acagctatcagaaat

SEQ ID NO: 1389354 - DNA, 15 bp, Homo sapiens
cacagctatcagaaa

SEQ ID NO: 1389355 - DNA, 15 bp, Homo sapiens
tcacagctatcagaa

SEQ ID NO: 1389356 - DNA, 15 bp, Homo sapiens
atcacagctatcaga

SEQ ID NO: 1389357 - DNA, 15 bp, Homo sapiens
catcacagctatcag

SEQ ID NO: 1389358 - DNA, 15 bp, Homo sapiens
tcatcacagctatca

SEQ ID NO: 1389359 - DNA, 15 bp, Homo sapiens
gtcatcacagctatc

SEQ ID NO: 1389360 - DNA, 15 bp, Homo sapiens
ggtcatcacagctat

SEQ ID NO: 1389361 - DNA, 15 bp, Homo sapiens
tggtcatcacagcta

SEQ ID NO: 1389362 - DNA, 15 bp, Homo sapiens
atggtcatcacagct

SEQ ID NO: 1389363 - DNA, 15 bp, Homo sapiens
tatggtcatcacagc

SEQ ID NO: 1389364 - DNA, 15 bp, Homo sapiens
ctatggtcatcacag

SEQ ID NO: 1389365 - DNA, 15 bp, Homo sapiens
tctatggtcatcaca

SEQ ID NO: 1389366 - DNA, 15 bp, Homo sapiens
ttctatggtcatcac

SEQ ID NO: 1389367 - DNA, 15 bp, Homo sapiens
cttctatggtcatca

SEQ ID NO: 1389368 - DNA, 15 bp, Homo sapiens
acttctatggtcatc

SEQ ID NO: 1389369 - DNA, 15 bp, Homo sapiens
cacttctatggtcat

SEQ ID NO: 1389370 - DNA, 15 bp, Homo sapiens
tcacttctatggtca

SEQ ID NO: 1389371 - DNA, 15 bp, Homo sapiens
atcacttctatggtc

SEQ ID NO: 1389372 - DNA, 15 bp, Homo sapiens
catcacttctatggt

SEQ ID NO: 1389373 - DNA, 15 bp, Homo sapiens
gcatcacttctatgg

SEQ ID NO: 1389374 - DNA, 15 bp, Homo sapiens
tgcatcacttctatg

SEQ ID NO: 1389375 - DNA, 15 bp, Homo sapiens
ttgcatcacttctat

SEQ ID NO: 1389376 - DNA, 15 bp, Homo sapiens
attgcatcacttcta

SEQ ID NO: 1389377 - DNA, 15 bp, Homo sapiens
cattgcatcacttct

SEQ ID NO: 1389378 - DNA, 15 bp, Homo sapiens
gcattgcatcacttc

SEQ ID NO: 1389379 - DNA, 15 bp, Homo sapiens
tgcattgcatcactt

SEQ ID NO: 1389380 - DNA, 15 bp, Homo sapiens
ttgcattgcatcact

SEQ ID NO: 1389381 - DNA, 15 bp, Homo sapiens
tttgcattgcatcac

SEQ ID NO: 1389382 - DNA, 15 bp, Homo sapiens
ttttgcattgcatca

SEQ ID NO: 1389383 - DNA, 15 bp, Homo sapiens
gttttgcattgcatc

SEQ ID NO: 1389384 - DNA, 15 bp, Homo sapiens
agttttgcattgcat

SEQ ID NO: 1389385 - DNA, 15 bp, Homo sapiens
aagttttgcattgca

SEQ ID NO: 1389386 - DNA, 15 bp, Homo sapiens
taagttttgcattgc

SEQ ID NO: 1389387 - DNA, 15 bp, Homo sapiens
ataagttttgcattg

SEQ ID NO: 1389388 - DNA, 15 bp, Homo sapiens
aataagttttgcatt

SEQ ID NO: 1389389 - DNA, 15 bp, Homo sapiens
aaataagttttgcat

SEQ ID NO: 1389390 - DNA, 15 bp, Homo sapiens
aaaataagttttgca

SEQ ID NO: 1389391 - DNA, 15 bp, Homo sapiens
taaaataagttttgc

SEQ ID NO: 1389392 - DNA, 15 bp, Homo sapiens
ataaaataagttttg

SEQ ID NO: 1389393 - DNA, 15 bp, Homo sapiens
aataaaataagtttt

SEQ ID NO: 1389394 - DNA, 15 bp, Homo sapiens
taataaaataagttt

SEQ ID NO: 1389395 - DNA, 15 bp, Homo sapiens
ataataaaataagtt

SEQ ID NO: 1389396 - DNA, 15 bp, Homo sapiens
aataataaaataagt

SEQ ID NO: 1389397 - DNA, 15 bp, Homo sapiens
aaataataaaataag

SEQ ID NO: 1389398 - DNA, 15 bp, Homo sapiens
taaataataaaataa

SEQ ID NO: 1389399 - DNA, 15 bp, Homo sapiens
ataaataataaaata

SEQ ID NO: 1389400 - DNA, 15 bp, Homo sapiens
cataaataataaaat

SEQ ID NO: 1389401 - DNA, 15 bp, Homo sapiens
tcataaataataaaa

SEQ ID NO: 1389402 - DNA, 15 bp, Homo sapiens
ttcataaataataaa

SEQ ID NO: 1389403 - DNA, 15 bp, Homo sapiens
gttcataaataataa

SEQ ID NO: 1389404 - DNA, 15 bp, Homo sapiens
tgttcataaataata

SEQ ID NO: 1389405 - DNA, 15 bp, Homo sapiens
atgttcataaataat

SEQ ID NO: 1389406 - DNA, 15 bp, Homo sapiens
catgttcataaataa

SEQ ID NO: 1389407 - DNA, 15 bp, Homo sapiens
gcatgttcataaata

SEQ ID NO: 1389408 - DNA, 15 bp, Homo sapiens
ggcatgttcataaat

SEQ ID NO: 1389409 - DNA, 15 bp, Homo sapiens
aggcatgttcataaa

SEQ ID NO: 1389410 - DNA, 15 bp, Homo sapiens
taggcatgttcataa

SEQ ID NO: 1389411 - DNA, 15 bp, Homo sapiens
ttaggcatgttcata

SEQ ID NO: 1389412 - DNA, 15 bp, Homo sapiens
gttaggcatgttcat

SEQ ID NO: 1389413 - DNA, 15 bp, Homo sapiens
tgttaggcatgttca

SEQ ID NO: 1389414 - DNA, 15 bp, Homo sapiens
ttgttaggcatgttc

SEQ ID NO: 1389415 - DNA, 15 bp, Homo sapiens
attgttaggcatgtt

SEQ ID NO: 1389416 - DNA, 15 bp, Homo sapiens
gattgttaggcatgt

SEQ ID NO: 1389417 - DNA, 15 bp, Homo sapiens
agattgttaggcatg

SEQ ID NO: 1389418 - DNA, 15 bp, Homo sapiens
aagattgttaggcat

SEQ ID NO: 1389419 - DNA, 15 bp, Homo sapiens
taagattgttaggca

SEQ ID NO: 1389420 - DNA, 15 bp, Homo sapiens
ataagattgttaggc

SEQ ID NO: 1389421 - DNA, 15 bp, Homo sapiens
tataagattgttagg

SEQ ID NO: 1389422 - DNA, 15 bp, Homo sapiens
atataagattgttag

SEQ ID NO: 1389423 - DNA, 15 bp, Homo sapiens
aatataagattgtta

SEQ ID NO: 1389424 - DNA, 15 bp, Homo sapiens
taatataagattgtt

SEQ ID NO: 1389425 - DNA, 15 bp, Homo sapiens
ttaatataagattgt

SEQ ID NO: 1389426 - DNA, 15 bp, Homo sapiens
tttaatataagattg

SEQ ID NO: 1389427 - DNA, 15 bp, Homo sapiens
ctttaatataagatt

SEQ ID NO: 1389428 - DNA, 15 bp, Homo sapiens
tctttaatataagat

SEQ ID NO: 1389429 - DNA, 15 bp, Homo sapiens
gtctttaatataaga

SEQ ID NO: 1389430 - DNA, 15 bp, Homo sapiens
tgtctttaatataag

SEQ ID NO: 1389431 - DNA, 15 bp, Homo sapiens
gtgtctttaatataa

SEQ ID NO: 1389432 - DNA, 15 bp, Homo sapiens
ggtgtctttaatata

SEQ ID NO: 1389433 - DNA, 15 bp, Homo sapiens
gggtgtctttaatat

SEQ ID NO: 1389434 - DNA, 15 bp, Homo sapiens
tgggtgtctttaata

SEQ ID NO: 1389435 - DNA, 15 bp, Homo sapiens
atgggtgtctttaat

SEQ ID NO: 1389436 - DNA, 15 bp, Homo sapiens
gatgggtgtctttaa

SEQ ID NO: 1389437 - DNA, 15 bp, Homo sapiens
ggatgggtgtcttta

SEQ ID NO: 1389438 - DNA, 15 bp, Homo sapiens
tggatgggtgtcttt

SEQ ID NO: 1389439 - DNA, 15 bp, Homo sapiens
gtggatgggtgtctt

SEQ ID NO: 1389440 - DNA, 15 bp, Homo sapiens
tgtggatgggtgtct

SEQ ID NO: 1389441 - DNA, 15 bp, Homo sapiens
gtgtggatgggtgtc

SEQ ID NO: 1389442 - DNA, 15 bp, Homo sapiens
agtgtggatgggtgt

SEQ ID NO: 1389443 - DNA, 15 bp, Homo sapiens
aagtgtggatgggtg

SEQ ID NO: 1389444 - DNA, 15 bp, Homo sapiens
caagtgtggatgggt

SEQ ID NO: 1389445 - DNA, 15 bp, Homo sapiens
acaagtgtggatggg

SEQ ID NO: 1389446 - DNA, 15 bp, Homo sapiens
gacaagtgtggatgg

SEQ ID NO: 1389447 - DNA, 15 bp, Homo sapiens
agacaagtgtggatg

SEQ ID NO: 1389448 - DNA, 15 bp, Homo sapiens
cagacaagtgtggat

SEQ ID NO: 1389449 - DNA, 15 bp, Homo sapiens
tcagacaagtgtgga

SEQ ID NO: 1389450 - DNA, 15 bp, Homo sapiens
gtcagacaagtgtgg

SEQ ID NO: 1389451 - DNA, 15 bp, Homo sapiens
ggtcagacaagtgtg

SEQ ID NO: 1389452 - DNA, 15 bp, Homo sapiens
aggtcagacaagtgt

SEQ ID NO: 1389453 - DNA, 15 bp, Homo sapiens
caggtcagacaagtg

SEQ ID NO: 1389454 - DNA, 15 bp, Homo sapiens
gcaggtcagacaagt

SEQ ID NO: 1389455 - DNA, 15 bp, Homo sapiens
agcaggtcagacaag

SEQ ID NO: 1389456 - DNA, 15 bp, Homo sapiens
aagcaggtcagacaa

SEQ ID NO: 1389457 - DNA, 15 bp, Homo sapiens
caagcaggtcagaca

SEQ ID NO: 1389458 - DNA, 15 bp, Homo sapiens
acaagcaggtcagac

SEQ ID NO: 1389459 - DNA, 15 bp, Homo sapiens
gacaagcaggtcaga

SEQ ID NO: 1389460 - DNA, 15 bp, Homo sapiens
agacaagcaggtcag

SEQ ID NO: 1389461 - DNA, 15 bp, Homo sapiens
tagacaagcaggtca

SEQ ID NO: 1389462 - DNA, 15 bp, Homo sapiens
ctagacaagcaggtc

SEQ ID NO: 1389463 - DNA, 15 bp, Homo sapiens
actagacaagcaggt

SEQ ID NO: 1389464 - DNA, 15 bp, Homo sapiens
gactagacaagcagg

SEQ ID NO: 1389465 - DNA, 15 bp, Homo sapiens
ggactagacaagcag

SEQ ID NO: 1389466 - DNA, 15 bp, Homo sapiens
aggactagacaagca

SEQ ID NO: 1389467 - DNA, 15 bp, Homo sapiens
gaggactagacaagc

SEQ ID NO: 1389468 - DNA, 15 bp, Homo sapiens
agaggactagacaag

SEQ ID NO: 1389469 - DNA, 15 bp, Homo sapiens
tagaggactagacaa

SEQ ID NO: 1389470 - DNA, 15 bp, Homo sapiens
ctagaggactagaca

SEQ ID NO: 1389471 - DNA, 15 bp, Homo sapiens
tctagaggactagac

SEQ ID NO: 1389472 - DNA, 15 bp, Homo sapiens
gtctagaggactaga

SEQ ID NO: 1389473 - DNA, 15 bp, Homo sapiens
ggtctagaggactag

SEQ ID NO: 1389474 - DNA, 15 bp, Homo sapiens
tggtctagaggacta

SEQ ID NO: 1389475 - DNA, 15 bp, Homo sapiens
ttggtctagaggact

SEQ ID NO: 1389476 - DNA, 15 bp, Homo sapiens
tttggtctagaggac

SEQ ID NO: 1389477 - DNA, 15 bp, Homo sapiens
ctttggtctagagga

SEQ ID NO: 1389478 - DNA, 15 bp, Homo sapiens
actttggtctagagg

SEQ ID NO: 1389479 - DNA, 15 bp, Homo sapiens
aactttggtctagag

SEQ ID NO: 1389480 - DNA, 15 bp, Homo sapiens
gaactttggtctaga

SEQ ID NO: 1389481 - DNA, 15 bp, Homo sapiens
agaactttggtctag

SEQ ID NO: 1389482 - DNA, 15 bp, Homo sapiens
tagaactttggtcta

SEQ ID NO: 1389483 - DNA, 15 bp, Homo sapiens
atagaactttggtct

SEQ ID NO: 1389484 - DNA, 15 bp, Homo sapiens
tatagaactttggtc

SEQ ID NO: 1389485 - DNA, 15 bp, Homo sapiens
ttatagaactttggt

SEQ ID NO: 1389486 - DNA, 15 bp, Homo sapiens
cttatagaactttgg

SEQ ID NO: 1389487 - DNA, 15 bp, Homo sapiens
tcttatagaactttg

SEQ ID NO: 1389488 - DNA, 15 bp, Homo sapiens
ctcttatagaacttt

SEQ ID NO: 1389489 - DNA, 15 bp, Homo sapiens
gctcttatagaactt

SEQ ID NO: 1389490 - DNA, 15 bp, Homo sapiens
tgctcttatagaact

SEQ ID NO: 1389491 - DNA, 15 bp, Homo sapiens
ctgctcttatagaac

SEQ ID NO: 1389492 - DNA, 15 bp, Homo sapiens
tctgctcttatagaa

SEQ ID NO: 1389493 - DNA, 15 bp, Homo sapiens
ctctgctcttataga

SEQ ID NO: 1389494 - DNA, 15 bp, Homo sapiens
cctctgctcttatag

SEQ ID NO: 1389495 - DNA, 15 bp, Homo sapiens
gcctctgctcttata

SEQ ID NO: 1389496 - DNA, 15 bp, Homo sapiens
tgcctctgctcttat

SEQ ID NO: 1389497 - DNA, 15 bp, Homo sapiens
atgcctctgctctta

SEQ ID NO: 1389498 - DNA, 15 bp, Homo sapiens
aatgcctctgctctt

SEQ ID NO: 1389499 - DNA, 15 bp, Homo sapiens
caatgcctctgctct

SEQ ID NO: 1389500 - DNA, 15 bp, Homo sapiens
acaatgcctctgctc

SEQ ID NO: 1389501 - DNA, 15 bp, Homo sapiens
gacaatgcctctgct

SEQ ID NO: 1389502 - DNA, 15 bp, Homo sapiens
agacaatgcctctgc

SEQ ID NO: 1389503 - DNA, 15 bp, Homo sapiens
cagacaatgcctctg

SEQ ID NO: 1389504 - DNA, 15 bp, Homo sapiens
tcagacaatgcctct

SEQ ID NO: 1389505 - DNA, 15 bp, Homo sapiens
atcagacaatgcctc

SEQ ID NO: 1389506 - DNA, 15 bp, Homo sapiens
tatcagacaatgcct

SEQ ID NO: 1389507 - DNA, 15 bp, Homo sapiens
atatcagacaatgcc

SEQ ID NO: 1389508 - DNA, 15 bp, Homo sapiens
catatcagacaatgc

SEQ ID NO: 1389509 - DNA, 15 bp, Homo sapiens
acatatcagacaatg

SEQ ID NO: 1389510 - DNA, 15 bp, Homo sapiens
aacatatcagacaat

SEQ ID NO: 1389511 - DNA, 15 bp, Homo sapiens
aaacatatcagacaa

SEQ ID NO: 1389512 - DNA, 15 bp, Homo sapiens
taaacatatcagaca

SEQ ID NO: 1389513 - DNA, 15 bp, Homo sapiens
ataaacatatcagac

SEQ ID NO: 1389514 - DNA, 15 bp, Homo sapiens
gataaacatatcaga

SEQ ID NO: 1389515 - DNA, 15 bp, Homo sapiens
tgataaacatatcag

SEQ ID NO: 1389516 - DNA, 15 bp, Homo sapiens
ttgataaacatatca

SEQ ID NO: 1389517 - DNA, 15 bp, Homo sapiens
attgataaacatatc

SEQ ID NO: 1389518 - DNA, 15 bp, Homo sapiens
tattgataaacatat

SEQ ID NO: 1389519 - DNA, 15 bp, Homo sapiens
atattgataaacata

SEQ ID NO: 1389520 - DNA, 15 bp, Homo sapiens
catattgataaacat

SEQ ID NO: 1389521 - DNA, 15 bp, Homo sapiens
acatattgataaaca

SEQ ID NO: 1389522 - DNA, 15 bp, Homo sapiens
aacatattgataaac

SEQ ID NO: 1389523 - DNA, 15 bp, Homo sapiens
gaacatattgataaa

SEQ ID NO: 1389524 - DNA, 15 bp, Homo sapiens
ggaacatattgataa

SEQ ID NO: 1389525 - DNA, 15 bp, Homo sapiens
gggaacatattgata

SEQ ID NO: 1389526 - DNA, 15 bp, Homo sapiens
tgggaacatattgat

SEQ ID NO: 1389527 - DNA, 15 bp, Homo sapiens
ttgggaacatattga

SEQ ID NO: 1389528 - DNA, 15 bp, Homo sapiens
gttgggaacatattg

SEQ ID NO: 1389529 - DNA, 15 bp, Homo sapiens
tgttgggaacatatt

SEQ ID NO: 1389530 - DNA, 15 bp, Homo sapiens
gtgttgggaacatat

SEQ ID NO: 1389531 - DNA, 15 bp, Homo sapiens
ggtgttgggaacata

SEQ ID NO: 1389532 - DNA, 15 bp, Homo sapiens
gggtgttgggaacat

SEQ ID NO: 1389533 - DNA, 15 bp, Homo sapiens
tgggtgttgggaaca

SEQ ID NO: 1389534 - DNA, 15 bp, Homo sapiens
ttgggtgttgggaac

SEQ ID NO: 1389535 - DNA, 15 bp, Homo sapiens
gttgggtgttgggaa

SEQ ID NO: 1389536 - DNA, 15 bp, Homo sapiens
agttgggtgttggga

SEQ ID NO: 1389537 - DNA, 15 bp, Homo sapiens
gagttgggtgttggg

SEQ ID NO: 1389538 - DNA, 15 bp, Homo sapiens
cgagttgggtgttgg

SEQ ID NO: 1389539 - DNA, 15 bp, Homo sapiens
ccgagttgggtgttg

SEQ ID NO: 1389540 - DNA, 15 bp, Homo sapiens
accgagttgggtgtt

SEQ ID NO: 1389541 - DNA, 15 bp, Homo sapiens
caccgagttgggtgt

SEQ ID NO: 1389542 - DNA, 15 bp, Homo sapiens
gcaccgagttgggtg

SEQ ID NO: 1389543 - DNA, 15 bp, Homo sapiens
ggcaccgagttgggt

SEQ ID NO: 1389544 - DNA, 15 bp, Homo sapiens
aggcaccgagttggg

SEQ ID NO: 1389545 - DNA, 15 bp, Homo sapiens
caggcaccgagttgg

SEQ ID NO: 1389546 - DNA, 15 bp, Homo sapiens
gcaggcaccgagttg

SEQ ID NO: 1389547 - DNA, 15 bp, Homo sapiens
ggcaggcaccgagtt

SEQ ID NO: 1389548 - DNA, 15 bp, Homo sapiens
tggcaggcaccgagt

SEQ ID NO: 1389549 - DNA, 15 bp, Homo sapiens
gtggcaggcaccgag

SEQ ID NO: 1389550 - DNA, 15 bp, Homo sapiens
ggtggcaggcaccga

SEQ ID NO: 1389551 - DNA, 15 bp, Homo sapiens
aggtggcaggcaccg

SEQ ID NO: 1389552 - DNA, 15 bp, Homo sapiens
taggtggcaggcacc

SEQ ID NO: 1389553 - DNA, 15 bp, Homo sapiens
ctaggtggcaggcac

SEQ ID NO: 1389554 - DNA, 15 bp, Homo sapiens
gctaggtggcaggca

SEQ ID NO: 1389555 - DNA, 15 bp, Homo sapiens
agctaggtggcaggc

SEQ ID NO: 1389556 - DNA, 15 bp, Homo sapiens
tagctaggtggcagg

SEQ ID NO: 1389557 - DNA, 15 bp, Homo sapiens
ttagctaggtggcag

SEQ ID NO: 1389558 - DNA, 15 bp, Homo sapiens
tttagctaggtggca

SEQ ID NO: 1389559 - DNA, 15 bp, Homo sapiens
ttttagctaggtggc

SEQ ID NO: 1389560 - DNA, 15 bp, Homo sapiens
cttttagctaggtgg

SEQ ID NO: 1389561 - DNA, 15 bp, Homo sapiens
acttttagctaggtg

SEQ ID NO: 1389562 - DNA, 15 bp, Homo sapiens
aacttttagctaggt

SEQ ID NO: 1389563 - DNA, 15 bp, Homo sapiens
gaacttttagctagg

SEQ ID NO: 1389564 - DNA, 15 bp, Homo sapiens
tgaacttttagctag

SEQ ID NO: 1389565 - DNA, 15 bp, Homo sapiens
ctgaacttttagcta

SEQ ID NO: 1389566 - DNA, 15 bp, Homo sapiens
actgaacttttagct

SEQ ID NO: 1389567 - DNA, 15 bp, Homo sapiens
tactgaacttttagc

SEQ ID NO: 1389568 - DNA, 15 bp, Homo sapiens
atactgaacttttag

SEQ ID NO: 1389569 - DNA, 15 bp, Homo sapiens
aatactgaactttta

SEQ ID NO: 1389570 - DNA, 15 bp, Homo sapiens
aaatactgaactttt

SEQ ID NO: 1389571 - DNA, 15 bp, Homo sapiens
caaatactgaacttt

SEQ ID NO: 1389572 - DNA, 15 bp, Homo sapiens
acaaatactgaactt

SEQ ID NO: 1389573 - DNA, 15 bp, Homo sapiens
aacaaatactgaact

SEQ ID NO: 1389574 - DNA, 15 bp, Homo sapiens
caacaaatactgaac

SEQ ID NO: 1389575 - DNA, 15 bp, Homo sapiens
ccaacaaatactgaa

SEQ ID NO: 1389576 - DNA, 15 bp, Homo sapiens
tccaacaaatactga

SEQ ID NO: 1389577 - DNA, 15 bp, Homo sapiens
atccaacaaatactg

SEQ ID NO: 1389578 - DNA, 15 bp, Homo sapiens
tatccaacaaatact

SEQ ID NO: 1389579 - DNA, 15 bp, Homo sapiens
ttatccaacaaatac

SEQ ID NO: 1389580 - DNA, 15 bp, Homo sapiens
tttatccaacaaata

SEQ ID NO: 1389581 - DNA, 15 bp, Homo sapiens
ctttatccaacaaat

SEQ ID NO: 1389582 - DNA, 15 bp, Homo sapiens
tctttatccaacaaa

SEQ ID NO: 1389583 - DNA, 15 bp, Homo sapiens
ttctttatccaacaa

SEQ ID NO: 1389584 - DNA, 15 bp, Homo sapiens
cttctttatccaaca

SEQ ID NO: 1389585 - DNA, 15 bp, Homo sapiens
acttctttatccaac

SEQ ID NO: 1389586 - DNA, 15 bp, Homo sapiens
cacttctttatccaa

SEQ ID NO: 1389587 - DNA, 15 bp, Homo sapiens
tcacttctttatcca

SEQ ID NO: 1389588 - DNA, 15 bp, Homo sapiens
ttcacttctttatcc

SEQ ID NO: 1389589 - DNA, 15 bp, Homo sapiens
attcacttctttatc

SEQ ID NO: 1389590 - DNA, 15 bp, Homo sapiens
cattcacttctttat

SEQ ID NO: 1389591 - DNA, 15 bp, Homo sapiens
gcattcacttcttta

SEQ ID NO: 1389592 - DNA, 15 bp, Homo sapiens
agcattcacttcttt

SEQ ID NO: 1389593 - DNA, 15 bp, Homo sapiens
cagcattcacttctt

SEQ ID NO: 1389594 - DNA, 15 bp, Homo sapiens
tcagcattcacttct

SEQ ID NO: 1389595 - DNA, 15 bp, Homo sapiens
ttcagcattcacttc

SEQ ID NO: 1389596 - DNA, 15 bp, Homo sapiens
attcagcattcactt

SEQ ID NO: 1389597 - DNA, 15 bp, Homo sapiens
aattcagcattcact

SEQ ID NO: 1389598 - DNA, 15 bp, Homo sapiens
caattcagcattcac

SEQ ID NO: 1389599 - DNA, 15 bp, Homo sapiens
tcaattcagcattca

SEQ ID NO: 1389600 - DNA, 15 bp, Homo sapiens
atcaattcagcattc

SEQ ID NO: 1389601 - DNA, 15 bp, Homo sapiens
aatcaattcagcatt

SEQ ID NO: 1389602 - DNA, 15 bp, Homo sapiens
taatcaattcagcat

SEQ ID NO: 1389603 - DNA, 15 bp, Homo sapiens
ttaatcaattcagca

SEQ ID NO: 1389604 - DNA, 15 bp, Homo sapiens
tttaatcaattcagc

SEQ ID NO: 1389605 - DNA, 15 bp, Homo sapiens
ttttaatcaattcag

SEQ ID NO: 1389606 - DNA, 15 bp, Homo sapiens
tttttaatcaattca

SEQ ID NO: 1389607 - DNA, 15 bp, Homo sapiens
ctttttaatcaattc

SEQ ID NO: 1389608 - DNA, 15 bp, Homo sapiens
tctttttaatcaatt

SEQ ID NO: 1389609 - DNA, 15 bp, Homo sapiens
ttctttttaatcaat

SEQ ID NO: 1389610 - DNA, 15 bp, Homo sapiens
attctttttaatcaa

SEQ ID NO: 1389611 - DNA, 15 bp, Homo sapiens
tattctttttaatca

SEQ ID NO: 1389612 - DNA, 15 bp, Homo sapiens
gtattctttttaatc

SEQ ID NO: 1389613 - DNA, 15 bp, Homo sapiens
tgtattctttttaat

SEQ ID NO: 1389614 - DNA, 15 bp, Homo sapiens
ctgtattctttttaa

SEQ ID NO: 1389615 - DNA, 15 bp, Homo sapiens
tctgtattcttttta

SEQ ID NO: 1389616 - DNA, 15 bp, Homo sapiens
atctgtattcttttt

SEQ ID NO: 1389617 - DNA, 15 bp, Homo sapiens
aatctgtattctttt

SEQ ID NO: 1389618 - DNA, 15 bp, Homo sapiens
taatctgtattcttt

SEQ ID NO: 1389619 - DNA, 15 bp, Homo sapiens
ctaatctgtattctt

SEQ ID NO: 1389620 - DNA, 15 bp, Homo sapiens
gctaatctgtattct

SEQ ID NO: 1389621 - DNA, 15 bp, Homo sapiens
agctaatctgtattc

SEQ ID NO: 1389622 - DNA, 15 bp, Homo sapiens
gagctaatctgtatt

SEQ ID NO: 1389623 - DNA, 15 bp, Homo sapiens
ggagctaatctgtat

SEQ ID NO: 1389624 - DNA, 15 bp, Homo sapiens
tggagctaatctgta

SEQ ID NO: 1389625 - DNA, 15 bp, Homo sapiens
gtggagctaatctgt

SEQ ID NO: 1389626 - DNA, 15 bp, Homo sapiens
tgtggagctaatctg

SEQ ID NO: 1389627 - DNA, 15 bp, Homo sapiens
ctgtggagctaatct

SEQ ID NO: 1389628 - DNA, 15 bp, Homo sapiens
actgtggagctaatc

SEQ ID NO: 1389629 - DNA, 15 bp, Homo sapiens
gactgtggagctaat

SEQ ID NO: 1389630 - DNA, 15 bp, Homo sapiens
tgactgtggagctaa

SEQ ID NO: 1389631 - DNA, 15 bp, Homo sapiens
atgactgtggagcta

SEQ ID NO: 1389632 - DNA, 15 bp, Homo sapiens
tatgactgtggagct

SEQ ID NO: 1389633 - DNA, 15 bp, Homo sapiens
atatgactgtggagc

SEQ ID NO: 1389634 - DNA, 15 bp, Homo sapiens
aatatgactgtggag

SEQ ID NO: 1389635 - DNA, 15 bp, Homo sapiens
aaatatgactgtgga

SEQ ID NO: 1389636 - DNA, 15 bp, Homo sapiens
aaaatatgactgtgg

SEQ ID NO: 1389637 - DNA, 15 bp, Homo sapiens
gaaaatatgactgtg

SEQ ID NO: 1389638 - DNA, 15 bp, Homo sapiens
tgaaaatatgactgt

SEQ ID NO: 1389639 - DNA, 15 bp, Homo sapiens
gtgaaaatatgactg

SEQ ID NO: 1389640 - DNA, 15 bp, Homo sapiens
tgtgaaaatatgact

SEQ ID NO: 1389641 - DNA, 15 bp, Homo sapiens
ctgtgaaaatatgac

SEQ ID NO: 1389642 - DNA, 15 bp, Homo sapiens
tctgtgaaaatatga

SEQ ID NO: 1389643 - DNA, 15 bp, Homo sapiens
atctgtgaaaatatg

SEQ ID NO: 1389644 - DNA, 15 bp, Homo sapiens
catctgtgaaaatat

SEQ ID NO: 1389645 - DNA, 15 bp, Homo sapiens
ccatctgtgaaaata

SEQ ID NO: 1389646 - DNA, 15 bp, Homo sapiens
accatctgtgaaaat

SEQ ID NO: 1389647 - DNA, 15 bp, Homo sapiens
caccatctgtgaaaa

SEQ ID NO: 1389648 - DNA, 15 bp, Homo sapiens
tcaccatctgtgaaa

SEQ ID NO: 1389649 - DNA, 15 bp, Homo sapiens
ttcaccatctgtgaa

SEQ ID NO: 1389650 - DNA, 15 bp, Homo sapiens
tttcaccatctgtga

SEQ ID NO: 1389651 - DNA, 15 bp, Homo sapiens
gtttcaccatctgtg

SEQ ID NO: 1389652 - DNA, 15 bp, Homo sapiens
agtttcaccatctgt

SEQ ID NO: 1389653 - DNA, 15 bp, Homo sapiens
cagtttcaccatctg

SEQ ID NO: 1389654 - DNA, 15 bp, Homo sapiens
ccagtttcaccatct

SEQ ID NO: 1389655 - DNA, 15 bp, Homo sapiens
cccagtttcaccatc

SEQ ID NO: 1389656 - DNA, 15 bp, Homo sapiens
ccccagtttcaccat

SEQ ID NO: 1389657 - DNA, 15 bp, Homo sapiens
cccccagtttcacca

SEQ ID NO: 1389658 - DNA, 15 bp, Homo sapiens
tcccccagtttcacc

SEQ ID NO: 1389659 - DNA, 15 bp, Homo sapiens
ttcccccagtttcac

SEQ ID NO: 1389660 - DNA, 15 bp, Homo sapiens
attcccccagtttca

SEQ ID NO: 1389661 - DNA, 15 bp, Homo sapiens
tattcccccagtttc

SEQ ID NO: 1389662 - DNA, 15 bp, Homo sapiens
ctattcccccagttt

SEQ ID NO: 1389663 - DNA, 15 bp, Homo sapiens
cctattcccccagtt

SEQ ID NO: 1389664 - DNA, 15 bp, Homo sapiens
ccctattcccccagt

SEQ ID NO: 1389665 - DNA, 15 bp, Homo sapiens
tccctattcccccag

SEQ ID NO: 1389666 - DNA, 15 bp, Homo sapiens
ctccctattccccca

SEQ ID NO: 1389667 - DNA, 15 bp, Homo sapiens
actccctattccccc

SEQ ID NO: 1389668 - DNA, 15 bp, Homo sapiens
cactccctattcccc

SEQ ID NO: 1389669 - DNA, 15 bp, Homo sapiens
acactccctattccc

SEQ ID NO: 1389670 - DNA, 15 bp, Homo sapiens
aacactccctattcc

SEQ ID NO: 1389671 - DNA, 15 bp, Homo sapiens
aaacactccctattc

SEQ ID NO: 1389672 - DNA, 15 bp, Homo sapiens
aaaacactccctatt

SEQ ID NO: 1389673 - DNA, 15 bp, Homo sapiens
caaaacactccctat

SEQ ID NO: 1389674 - DNA, 15 bp, Homo sapiens
acaaaacactcccta

SEQ ID NO: 1389675 - DNA, 15 bp, Homo sapiens
gacaaaacactccct

SEQ ID NO: 1389676 - DNA, 15 bp, Homo sapiens
agacaaaacactccc

SEQ ID NO: 1389677 - DNA, 15 bp, Homo sapiens
cagacaaaacactcc

SEQ ID NO: 1389678 - DNA, 15 bp, Homo sapiens
gcagacaaaacactc

SEQ ID NO: 1389679 - DNA, 15 bp, Homo sapiens
tgcagacaaaacact

SEQ ID NO: 1389680 - DNA, 15 bp, Homo sapiens
ctgcagacaaaacac

SEQ ID NO: 1389681 - DNA, 15 bp, Homo sapiens
actgcagacaaaaca

SEQ ID NO: 1389682 - DNA, 15 bp, Homo sapiens
aactgcagacaaaac

SEQ ID NO: 1389683 - DNA, 15 bp, Homo sapiens
aaactgcagacaaaa

SEQ ID NO: 1389684 - DNA, 15 bp, Homo sapiens
taaactgcagacaaa

SEQ ID NO: 1389685 - DNA, 15 bp, Homo sapiens
gtaaactgcagacaa

SEQ ID NO: 1389686 - DNA, 15 bp, Homo sapiens
ggtaaactgcagaca

SEQ ID NO: 1389687 - DNA, 15 bp, Homo sapiens
tggtaaactgcagac

SEQ ID NO: 1389688 - DNA, 15 bp, Homo sapiens
atggtaaactgcaga

SEQ ID NO: 1389689 - DNA, 15 bp, Homo sapiens
aatggtaaactgcag

SEQ ID NO: 1389690 - DNA, 15 bp, Homo sapiens
caatggtaaactgca

SEQ ID NO: 1389691 - DNA, 15 bp, Homo sapiens
gcaatggtaaactgc

SEQ ID NO: 1389692 - DNA, 15 bp, Homo sapiens
agcaatggtaaactg

SEQ ID NO: 1389693 - DNA, 15 bp, Homo sapiens
gagcaatggtaaact

SEQ ID NO: 1389694 - DNA, 15 bp, Homo sapiens
tgagcaatggtaaac

SEQ ID NO: 1389695 - DNA, 15 bp, Homo sapiens
ctgagcaatggtaaa

SEQ ID NO: 1389696 - DNA, 15 bp, Homo sapiens
actgagcaatggtaa

SEQ ID NO: 1389697 - DNA, 15 bp, Homo sapiens
cactgagcaatggta

SEQ ID NO: 1389698 - DNA, 15 bp, Homo sapiens
tcactgagcaatggt

SEQ ID NO: 1389699 - DNA, 15 bp, Homo sapiens
gtcactgagcaatgg

SEQ ID NO: 1389700 - DNA, 15 bp, Homo sapiens
tgtcactgagcaatg

SEQ ID NO: 1389701 - DNA, 15 bp, Homo sapiens
ctgtcactgagcaat

SEQ ID NO: 1389702 - DNA, 15 bp, Homo sapiens
tctgtcactgagcaa

SEQ ID NO: 1389703 - DNA, 15 bp, Homo sapiens
ttctgtcactgagca

SEQ ID NO: 1389704 - DNA, 15 bp, Homo sapiens
attctgtcactgagc

SEQ ID NO: 1389705 - DNA, 15 bp, Homo sapiens
cattctgtcactgag

SEQ ID NO: 1389706 - DNA, 15 bp, Homo sapiens
tcattctgtcactga

SEQ ID NO: 1389707 - DNA, 15 bp, Homo sapiens
ttcattctgtcactg

SEQ ID NO: 1389708 - DNA, 15 bp, Homo sapiens
cttcattctgtcact

SEQ ID NO: 1389709 - DNA, 15 bp, Homo sapiens
atcttcattctgtca

SEQ ID NO: 1389710 - DNA, 15 bp, Homo sapiens
aatcttcattctgtc

SEQ ID NO: 1389711 - DNA, 15 bp, Homo sapiens
taatcttcattctgt

SEQ ID NO: 1389712 - DNA, 15 bp, Homo sapiens
ctaatcttcattctg

SEQ ID NO: 1389713 - DNA, 15 bp, Homo sapiens
cctaatcttcattct

SEQ ID NO: 1389714 - DNA, 15 bp, Homo sapiens
tcctaatcttcattc

SEQ ID NO: 1389715 - DNA, 15 bp, Homo sapiens
ttcctaatcttcatt

SEQ ID NO: 1389716 - DNA, 15 bp, Homo sapiens
gttcctaatcttcat

SEQ ID NO: 1389717 - DNA, 15 bp, Homo sapiens
ggttcctaatcttca

SEQ ID NO: 1389718 - DNA, 15 bp, Homo sapiens
gggttcctaatcttc

SEQ ID NO: 1389719 - DNA, 15 bp, Homo sapiens
tgggttcctaatctt

SEQ ID NO: 1389720 - DNA, 15 bp, Homo sapiens
ttgggttcctaatct

SEQ ID NO: 1389721 - DNA, 15 bp, Homo sapiens
tttgggttcctaatc

SEQ ID NO: 1389722 - DNA, 15 bp, Homo sapiens
ctttgggttcctaat

SEQ ID NO: 1389723 - DNA, 15 bp, Homo sapiens
gctttgggttcctaa

SEQ ID NO: 1389724 - DNA, 15 bp, Homo sapiens
agctttgggttccta

SEQ ID NO: 1389725 - DNA, 15 bp, Homo sapiens
cagctttgggttcct

SEQ ID NO: 1389726 - DNA, 15 bp, Homo sapiens
acagctttgggttcc

SEQ ID NO: 1389727 - DNA, 15 bp, Homo sapiens
tcacagctttgggtt

SEQ ID NO: 1389728 - DNA, 15 bp, Homo sapiens
ttcacagctttgggt

SEQ ID NO: 1389729 - DNA, 15 bp, Homo sapiens
attcacagctttggg

SEQ ID NO: 1389730 - DNA, 15 bp, Homo sapiens
tattcacagctttgg

SEQ ID NO: 1389731 - DNA, 15 bp, Homo sapiens
ttattcacagctttg

SEQ ID NO: 1389732 - DNA, 15 bp, Homo sapiens
tttattcacagcttt

SEQ ID NO: 1389733 - DNA, 15 bp, Homo sapiens
ttttattcacagctt

SEQ ID NO: 1389734 - DNA, 15 bp, Homo sapiens
cttttattcacagct

SEQ ID NO: 1389735 - DNA, 15 bp, Homo sapiens
gcttttattcacagc

SEQ ID NO: 1389736 - DNA, 15 bp, Homo sapiens
ggcttttattcacag

SEQ ID NO: 1389737 - DNA, 15 bp, Homo sapiens
gggcttttattcaca

SEQ ID NO: 1389738 - DNA, 15 bp, Homo sapiens
tgggcttttattcac

SEQ ID NO: 1389739 - DNA, 15 bp, Homo sapiens
atgggcttttattca

SEQ ID NO: 1389740 - DNA, 15 bp, Homo sapiens
aatgggcttttattc

SEQ ID NO: 1389741 - DNA, 15 bp, Homo sapiens
caatgggcttttatt

SEQ ID NO: 1389742 - DNA, 15 bp, Homo sapiens
gcaatgggcttttat

SEQ ID NO: 1389743 - DNA, 15 bp, Homo sapiens
agcaatgggctttta

SEQ ID NO: 1389744 - DNA, 15 bp, Homo sapiens
cagcaatgggctttt

SEQ ID NO: 1389745 - DNA, 15 bp, Homo sapiens
tcagcaatgggcttt

SEQ ID NO: 1389746 - DNA, 15 bp, Homo sapiens
ctcagcaatgggctt

SEQ ID NO: 1389747 - DNA, 15 bp, Homo sapiens
actcagcaatgggct

SEQ ID NO: 1389748 - DNA, 15 bp, Homo sapiens
aactcagcaatgggc

SEQ ID NO: 1389749 - DNA, 15 bp, Homo sapiens
aaactcagcaatggg

SEQ ID NO: 1389750 - DNA, 15 bp, Homo sapiens
taaactcagcaatgg

SEQ ID NO: 1389751 - DNA, 15 bp, Homo sapiens
ttaaactcagcaatg

SEQ ID NO: 1389752 - DNA, 15 bp, Homo sapiens
gttaaactcagcaat

SEQ ID NO: 1389753 - DNA, 15 bp, Homo sapiens
cgttaaactcagcaa

SEQ ID NO: 1389754 - DNA, 15 bp, Homo sapiens
tcgttaaactcagca

SEQ ID NO: 1389755 - DNA, 15 bp, Homo sapiens
ttcgttaaactcagc

SEQ ID NO: 1389756 - DNA, 15 bp, Homo sapiens
gttcgttaaactcag

SEQ ID NO: 1389757 - DNA, 15 bp, Homo sapiens
ggttcgttaaactca

SEQ ID NO: 1389758 - DNA, 15 bp, Homo sapiens
tggttcgttaaactc

SEQ ID NO: 1389759 - DNA, 15 bp, Homo sapiens
ttggttcgttaaact

SEQ ID NO: 1389760 - DNA, 15 bp, Homo sapiens
cttggttcgttaaac

SEQ ID NO: 1389761 - DNA, 15 bp, Homo sapiens
acttggttcgttaaa

SEQ ID NO: 1389762 - DNA, 15 bp, Homo sapiens
gacttggttcgttaa

SEQ ID NO: 1389763 - DNA, 15 bp, Homo sapiens
tgacttggttcgtta

SEQ ID NO: 1389764 - DNA, 15 bp, Homo sapiens
ttgacttggttcgtt

SEQ ID NO: 1389765 - DNA, 15 bp, Homo sapiens
gttgacttggttcgt

SEQ ID NO: 1389766 - DNA, 15 bp, Homo sapiens
tgttgacttggttcg

SEQ ID NO: 1389767 - DNA, 15 bp, Homo sapiens
ctgttgacttggttc

SEQ ID NO: 1389768 - DNA, 15 bp, Homo sapiens
gctgttgacttggtt

SEQ ID NO: 1389769 - DNA, 15 bp, Homo sapiens
tgctgttgacttggt

SEQ ID NO: 1389770 - DNA, 15 bp, Homo sapiens
ctgctgttgacttgg

SEQ ID NO: 1389771 - DNA, 15 bp, Homo sapiens
cctgctgttgacttg

SEQ ID NO: 1389772 - DNA, 15 bp, Homo sapiens
gcctgctgttgactt

SEQ ID NO: 1389773 - DNA, 15 bp, Homo sapiens
agcctgctgttgact

SEQ ID NO: 1389774 - DNA, 15 bp, Homo sapiens
tagcctgctgttgac

SEQ ID NO: 1389775 - DNA, 15 bp, Homo sapiens
ttagcctgctgttga

SEQ ID NO: 1389776 - DNA, 15 bp, Homo sapiens
tttagcctgctgttg

SEQ ID NO: 1389777 - DNA, 15 bp, Homo sapiens
ctttagcctgctgtt

SEQ ID NO: 1389778 - DNA, 15 bp, Homo sapiens
cctttagcctgctgt

SEQ ID NO: 1389779 - DNA, 15 bp, Homo sapiens
tcctttagcctgctg

SEQ ID NO: 1389780 - DNA, 15 bp, Homo sapiens
gtcctttagcctgct

SEQ ID NO: 1389781 - DNA, 15 bp, Homo sapiens
tgtcctttagcctgc

SEQ ID NO: 1389782 - DNA, 15 bp, Homo sapiens
ctgtcctttagcctg

SEQ ID NO: 1389783 - DNA, 15 bp, Homo sapiens
cctgtcctttagcct

SEQ ID NO: 1389784 - DNA, 15 bp, Homo sapiens
acctgtcctttagcc

SEQ ID NO: 1389785 - DNA, 15 bp, Homo sapiens
tacctgtcctttagc

SEQ ID NO: 1389786 - DNA, 15 bp, Homo sapiens
gtacctgtcctttag

SEQ ID NO: 1389787 - DNA, 15 bp, Homo sapiens
tgtacctgtccttta

SEQ ID NO: 1389788 - DNA, 15 bp, Homo sapiens
atgtacctgtccttt

SEQ ID NO: 1389789 - DNA, 15 bp, Homo sapiens
aatgtacctgtcctt

SEQ ID NO: 1389790 - DNA, 15 bp, Homo sapiens
taatgtacctgtcct

SEQ ID NO: 1389791 - DNA, 15 bp, Homo sapiens
ataatgtacctgtcc

SEQ ID NO: 1389792 - DNA, 15 bp, Homo sapiens
aataatgtacctgtc

SEQ ID NO: 1389793 - DNA, 15 bp, Homo sapiens
aaataatgtacctgt

SEQ ID NO: 1389794 - DNA, 15 bp, Homo sapiens
taaataatgtacctg

SEQ ID NO: 1389795 - DNA, 15 bp, Homo sapiens
ttaaataatgtacct

SEQ ID NO: 1389796 - DNA, 15 bp, Homo sapiens
gttaaataatgtacc

SEQ ID NO: 1389797 - DNA, 15 bp, Homo sapiens
ggttaaataatgtac

SEQ ID NO: 1389798 - DNA, 15 bp, Homo sapiens
aggttaaataatgta

SEQ ID NO: 1389799 - DNA, 15 bp, Homo sapiens
caggttaaataatgt

SEQ ID NO: 1389800 - DNA, 15 bp, Homo sapiens
tcaggttaaataatg

SEQ ID NO: 1389801 - DNA, 15 bp, Homo sapiens
ctcaggttaaataat

SEQ ID NO: 1389802 - DNA, 15 bp, Homo sapiens
gctcaggttaaataa

SEQ ID NO: 1389803 - DNA, 15 bp, Homo sapiens
agctcaggttaaata

SEQ ID NO: 1389804 - DNA, 15 bp, Homo sapiens
cagctcaggttaaat

SEQ ID NO: 1389805 - DNA, 15 bp, Homo sapiens
gcagctcaggttaaa

SEQ ID NO: 1389806 - DNA, 15 bp, Homo sapiens
agcagctcaggttaa

SEQ ID NO: 1389807 - DNA, 15 bp, Homo sapiens
cagcagctcaggtta

SEQ ID NO: 1389808 - DNA, 15 bp, Homo sapiens
acagcagctcaggtt

SEQ ID NO: 1389809 - DNA, 15 bp, Homo sapiens
gacagcagctcaggt

SEQ ID NO: 1389810 - DNA, 15 bp, Homo sapiens
ggacagcagctcagg

SEQ ID NO: 1389811 - DNA, 15 bp, Homo sapiens
aggacagcagctcag

SEQ ID NO: 1389812 - DNA, 15 bp, Homo sapiens
gaggacagcagctca

SEQ ID NO: 1389813 - DNA, 15 bp, Homo sapiens
ggaggacagcagctc

SEQ ID NO: 1389814 - DNA, 15 bp, Homo sapiens
aggaggacagcagct

SEQ ID NO: 1389815 - DNA, 15 bp, Homo sapiens
caggaggacagcagc

SEQ ID NO: 1389816 - DNA, 15 bp, Homo sapiens
tcaggaggacagcag

SEQ ID NO: 1389817 - DNA, 15 bp, Homo sapiens
ttcaggaggacagca

SEQ ID NO: 1389818 - DNA, 15 bp, Homo sapiens
tttcaggaggacagc

SEQ ID NO: 1389819 - DNA, 15 bp, Homo sapiens
gtttcaggaggacag

SEQ ID NO: 1389820 - DNA, 15 bp, Homo sapiens
tgtttcaggaggaca

SEQ ID NO: 1389821 - DNA, 15 bp, Homo sapiens
ctgtttcaggaggac

SEQ ID NO: 1389822 - DNA, 15 bp, Homo sapiens
tctgtttcaggagga

SEQ ID NO: 1389823 - DNA, 15 bp, Homo sapiens
atctgtttcaggagg

SEQ ID NO: 1389824 - DNA, 15 bp, Homo sapiens
catctgtttcaggag

SEQ ID NO: 1389825 - DNA, 15 bp, Homo sapiens
acatctgtttcagga

SEQ ID NO: 1389826 - DNA, 15 bp, Homo sapiens
gacatctgtttcagg

SEQ ID NO: 1389827 - DNA, 15 bp, Homo sapiens
tgacatctgtttcag

SEQ ID NO: 1389828 - DNA, 15 bp, Homo sapiens
ttgacatctgtttca

SEQ ID NO: 1389829 - DNA, 15 bp, Homo sapiens
attgacatctgtttc

SEQ ID NO: 1389830 - DNA, 15 bp, Homo sapiens
cattgacatctgttt

SEQ ID NO: 1389831 - DNA, 15 bp, Homo sapiens
gcattgacatctgtt

SEQ ID NO: 1389832 - DNA, 15 bp, Homo sapiens
cgcattgacatctgt

SEQ ID NO: 1389833 - DNA, 15 bp, Homo sapiens
acgcattgacatctg

SEQ ID NO: 1389834 - DNA, 15 bp, Homo sapiens
gacgcattgacatct

SEQ ID NO: 1389835 - DNA, 15 bp, Homo sapiens
tgacgcattgacatc

SEQ ID NO: 1389836 - DNA, 15 bp, Homo sapiens
atgacgcattgacat

SEQ ID NO: 1389837 - DNA, 15 bp, Homo sapiens
catgacgcattgaca

SEQ ID NO: 1389838 - DNA, 15 bp, Homo sapiens
tcatgacgcattgac

SEQ ID NO: 1389839 - DNA, 15 bp, Homo sapiens
atcatgacgcattga

SEQ ID NO: 1389840 - DNA, 15 bp, Homo sapiens
aatcatgacgcattg

SEQ ID NO: 1389841 - DNA, 15 bp, Homo sapiens
taatcatgacgcatt

SEQ ID NO: 1389842 - DNA, 15 bp, Homo sapiens
ataatcatgacgcat

SEQ ID NO: 1389843 - DNA, 15 bp, Homo sapiens
tataatcatgacgca

SEQ ID NO: 1389844 - DNA, 15 bp, Homo sapiens
atataatcatgacgc

SEQ ID NO: 1389845 - DNA, 15 bp, Homo sapiens
catataatcatgacg

SEQ ID NO: 1389846 - DNA, 15 bp, Homo sapiens
tcatataatcatgac

SEQ ID NO: 1389847 - DNA, 15 bp, Homo sapiens
ctcatataatcatga

SEQ ID NO: 1389848 - DNA, 15 bp, Homo sapiens
gctcatataatcatg

SEQ ID NO: 1389849 - DNA, 15 bp, Homo sapiens
tgctcatataatcat

SEQ ID NO: 1389850 - DNA, 15 bp, Homo sapiens
ctgctcatataatca

SEQ ID NO: 1389851 - DNA, 15 bp, Homo sapiens
gctgctcatataatc

SEQ ID NO: 1389852 - DNA, 15 bp, Homo sapiens
tgctgctcatataat

SEQ ID NO: 1389853 - DNA, 15 bp, Homo sapiens
ctgctgctcatataa

SEQ ID NO: 1389854 - DNA, 15 bp, Homo sapiens
actgctgctcatata

SEQ ID NO: 1389855 - DNA, 15 bp, Homo sapiens
aactgctgctcatat

SEQ ID NO: 1389856 - DNA, 15 bp, Homo sapiens
caactgctgctcata

SEQ ID NO: 1389857 - DNA, 15 bp, Homo sapiens
acaactgctgctcat

SEQ ID NO: 1389858 - DNA, 15 bp, Homo sapiens
aacaactgctgctca

SEQ ID NO: 1389859 - DNA, 15 bp, Homo sapiens
aaacaactgctgctc

SEQ ID NO: 1389860 - DNA, 15 bp, Homo sapiens
aaaacaactgctgct

SEQ ID NO: 1389861 - DNA, 15 bp, Homo sapiens
taaaacaactgctgc

SEQ ID NO: 1389862 - DNA, 15 bp, Homo sapiens
gtaaaacaactgctg

SEQ ID NO: 1389863 - DNA, 15 bp, Homo sapiens
tgtaaaacaactgct

SEQ ID NO: 1389864 - DNA, 15 bp, Homo sapiens
atgtaaaacaactgc

SEQ ID NO: 1389865 - DNA, 15 bp, Homo sapiens
tatgtaaaacaactg

SEQ ID NO: 1389866 - DNA, 15 bp, Homo sapiens
ttatgtaaaacaact

SEQ ID NO: 1389867 - DNA, 15 bp, Homo sapiens
gttatgtaaaacaac

SEQ ID NO: 1389868 - DNA, 15 bp, Homo sapiens
tgttatgtaaaacaa

SEQ ID NO: 1389869 - DNA, 15 bp, Homo sapiens
gtgttatgtaaaaca

SEQ ID NO: 1389870 - DNA, 15 bp, Homo sapiens
tgtgttatgtaaaac

SEQ ID NO: 1389871 - DNA, 15 bp, Homo sapiens
atgtgttatgtaaaa

SEQ ID NO: 1389872 - DNA, 15 bp, Homo sapiens
catgtgttatgtaaa

SEQ ID NO: 1389873 - DNA, 15 bp, Homo sapiens
tcatgtgttatgtaa

SEQ ID NO: 1389874 - DNA, 15 bp, Homo sapiens
gtcatgtgttatgta

SEQ ID NO: 1389875 - DNA, 15 bp, Homo sapiens
tgtcatgtgttatgt

SEQ ID NO: 1389876 - DNA, 15 bp, Homo sapiens
ctgtcatgtgttatg

SEQ ID NO: 1389877 - DNA, 15 bp, Homo sapiens
tctgtcatgtgttat

SEQ ID NO: 1389878 - DNA, 15 bp, Homo sapiens
ctctgtcatgtgtta

SEQ ID NO: 1389879 - DNA, 15 bp, Homo sapiens
cctctgtcatgtgtt

SEQ ID NO: 1389880 - DNA, 15 bp, Homo sapiens
acctctgtcatgtgt

SEQ ID NO: 1389881 - DNA, 15 bp, Homo sapiens
gacctctgtcatgtg

SEQ ID NO: 1389882 - DNA, 15 bp, Homo sapiens
tgacctctgtcatgt

SEQ ID NO: 1389883 - DNA, 15 bp, Homo sapiens
gtgacctctgtcatg

SEQ ID NO: 1389884 - DNA, 15 bp, Homo sapiens
tgtgacctctgtcat

SEQ ID NO: 1389885 - DNA, 15 bp, Homo sapiens
ttgtgacctctgtca

SEQ ID NO: 1389886 - DNA, 15 bp, Homo sapiens
cttgtgacctctgtc

SEQ ID NO: 1389887 - DNA, 15 bp, Homo sapiens
acttgtgacctctgt

SEQ ID NO: 1389888 - DNA, 15 bp, Homo sapiens
cacttgtgacctctg

SEQ ID NO: 1389889 - DNA, 15 bp, Homo sapiens
tcacttgtgacctct

SEQ ID NO: 1389890 - DNA, 15 bp, Homo sapiens
gtcacttgtgacctc

SEQ ID NO: 1389891 - DNA, 15 bp, Homo sapiens
ggtcacttgtgacct

SEQ ID NO: 1389892 - DNA, 15 bp, Homo sapiens
tggtcacttgtgacc

SEQ ID NO: 1389893 - DNA, 15 bp, Homo sapiens
gtggtcacttgtgac

SEQ ID NO: 1389894 - DNA, 15 bp, Homo sapiens
ggtggtcacttgtga

SEQ ID NO: 1389895 - DNA, 15 bp, Homo sapiens
tggtggtcacttgtg

SEQ ID NO: 1389896 - DNA, 15 bp, Homo sapiens
gtggtggtcacttgt

SEQ ID NO: 1389897 - DNA, 15 bp, Homo sapiens
gtgtggtggtcactt

SEQ ID NO: 1389898 - DNA, 15 bp, Homo sapiens
ggtgtggtggtcact

SEQ ID NO: 1389899 - DNA, 15 bp, Homo sapiens
tggtgtggtggtcac

SEQ ID NO: 1389900 - DNA, 15 bp, Homo sapiens
atggtgtggtggtca

SEQ ID NO: 1389901 - DNA, 15 bp, Homo sapiens
aatggtgtggtggtc

SEQ ID NO: 1389902 - DNA, 15 bp, Homo sapiens
caatggtgtggtggt

SEQ ID NO: 1389903 - DNA, 15 bp, Homo sapiens
gcaatggtgtggtgg

SEQ ID NO: 1389904 - DNA, 15 bp, Homo sapiens
ggcaatggtgtggtg

SEQ ID NO: 1389905 - DNA, 15 bp, Homo sapiens
tggcaatggtgtggt

SEQ ID NO: 1389906 - DNA, 15 bp, Homo sapiens
ctggcaatggtgtgg

SEQ ID NO: 1389907 - DNA, 15 bp, Homo sapiens
actggcaatggtgtg

SEQ ID NO: 1389908 - DNA, 15 bp, Homo sapiens
gactggcaatggtgt

SEQ ID NO: 1389909 - DNA, 15 bp, Homo sapiens
tgactggcaatggtg

SEQ ID NO: 1389910 - DNA, 15 bp, Homo sapiens
ctgactggcaatggt

SEQ ID NO: 1389911 - DNA, 15 bp, Homo sapiens
tctgactggcaatgg

SEQ ID NO: 1389912 - DNA, 15 bp, Homo sapiens
ctctgactggcaatg

SEQ ID NO: 1389913 - DNA, 15 bp, Homo sapiens
cctctgactggcaat

SEQ ID NO: 1389914 - DNA, 15 bp, Homo sapiens
tcctctgactggcaa

SEQ ID NO: 1389915 - DNA, 15 bp, Homo sapiens
ctcctctgactggca

SEQ ID NO: 1389916 - DNA, 15 bp, Homo sapiens
actcctctgactggc

SEQ ID NO: 1389917 - DNA, 15 bp, Homo sapiens
gactcctctgactgg

SEQ ID NO: 1389918 - DNA, 15 bp, Homo sapiens
ggactcctctgactg

SEQ ID NO: 1389919 - DNA, 15 bp, Homo sapiens
tggactcctctgact

SEQ ID NO: 1389920 - DNA, 15 bp, Homo sapiens
atggactcctctgac

SEQ ID NO: 1389921 - DNA, 15 bp, Homo sapiens
tatggactcctctga

SEQ ID NO: 1389922 - DNA, 15 bp, Homo sapiens
gtatggactcctctg

SEQ ID NO: 1389923 - DNA, 15 bp, Homo sapiens
tgtatggactcctct

SEQ ID NO: 1389924 - DNA, 15 bp, Homo sapiens
atgtatggactcctc

SEQ ID NO: 1389925 - DNA, 15 bp, Homo sapiens
catgtatggactcct

SEQ ID NO: 1389926 - DNA, 15 bp, Homo sapiens
ccatgtatggactcc

SEQ ID NO: 1389927 - DNA, 15 bp, Homo sapiens
accatgtatggactc

SEQ ID NO: 1389928 - DNA, 15 bp, Homo sapiens
aaccatgtatggact

SEQ ID NO: 1389929 - DNA, 15 bp, Homo sapiens
caaccatgtatggac

SEQ ID NO: 1389930 - DNA, 15 bp, Homo sapiens
gcaaccatgtatgga

SEQ ID NO: 1389931 - DNA, 15 bp, Homo sapiens
ggcaaccatgtatgg

SEQ ID NO: 1389932 - DNA, 15 bp, Homo sapiens
gggcaaccatgtatg

SEQ ID NO: 1389933 - DNA, 15 bp, Homo sapiens
ggggcaaccatgtat

SEQ ID NO: 1389934 - DNA, 15 bp, Homo sapiens
tggggcaaccatgta

SEQ ID NO: 1389935 - DNA, 15 bp, Homo sapiens
ctggggcaaccatgt

SEQ ID NO: 1389936 - DNA, 15 bp, Homo sapiens
gctggggcaaccatg

SEQ ID NO: 1389937 - DNA, 15 bp, Homo sapiens
tgctggggcaaccat

SEQ ID NO: 1389938 - DNA, 15 bp, Homo sapiens
ttgctggggcaacca

SEQ ID NO: 1389939 - DNA, 15 bp, Homo sapiens
gttgctggggcaacc

SEQ ID NO: 1389940 - DNA, 15 bp, Homo sapiens
agttgctggggcaac

SEQ ID NO: 1389941 - DNA, 15 bp, Homo sapiens
cagttgctggggcaa

SEQ ID NO: 1389942 - DNA, 15 bp, Homo sapiens
tcagttgctggggca

SEQ ID NO: 1389943 - DNA, 15 bp, Homo sapiens
ttcagttgctggggc

SEQ ID NO: 1389944 - DNA, 15 bp, Homo sapiens
tttcagttgctgggg

SEQ ID NO: 1389945 - DNA, 15 bp, Homo sapiens
ttttcagttgctggg

SEQ ID NO: 1389946 - DNA, 15 bp, Homo sapiens
cttttcagttgctgg

SEQ ID NO: 1389947 - DNA, 15 bp, Homo sapiens
gcttttcagttgctg

SEQ ID NO: 1389948 - DNA, 15 bp, Homo sapiens
tgcttttcagttgct

SEQ ID NO: 1389949 - DNA, 15 bp, Homo sapiens
ctgcttttcagttgc

SEQ ID NO: 1389950 - DNA, 15 bp, Homo sapiens
cctgcttttcagttg

SEQ ID NO: 1389951 - DNA, 15 bp, Homo sapiens
gcctgcttttcagtt

SEQ ID NO: 1389952 - DNA, 15 bp, Homo sapiens
agcctgcttttcagt

SEQ ID NO: 1389953 - DNA, 15 bp, Homo sapiens
cagcctgcttttcag

SEQ ID NO: 1389954 - DNA, 15 bp, Homo sapiens
gcagcctgcttttca

SEQ ID NO: 1389955 - DNA, 15 bp, Homo sapiens
tgcagcctgcttttc

SEQ ID NO: 1389956 - DNA, 15 bp, Homo sapiens
ttgcagcctgctttt

SEQ ID NO: 1389957 - DNA, 15 bp, Homo sapiens
cttgcagcctgcttt

SEQ ID NO: 1389958 - DNA, 15 bp, Homo sapiens
tcttgcagcctgctt

SEQ ID NO: 1389959 - DNA, 15 bp, Homo sapiens
gtcttgcagcctgct

SEQ ID NO: 1389960 - DNA, 15 bp, Homo sapiens
tgtcttgcagcctgc

SEQ ID NO: 1389961 - DNA, 15 bp, Homo sapiens
ttgtcttgcagcctg

SEQ ID NO: 1389962 - DNA, 15 bp, Homo sapiens
gttgtcttgcagcct

SEQ ID NO: 1389963 - DNA, 15 bp, Homo sapiens
ggttgtcttgcagcc

SEQ ID NO: 1389964 - DNA, 15 bp, Homo sapiens
aggttgtcttgcagc

SEQ ID NO: 1389965 - DNA, 15 bp, Homo sapiens
taggttgtcttgcag

SEQ ID NO: 1389966 - DNA, 15 bp, Homo sapiens
ttaggttgtcttgca

SEQ ID NO: 1389967 - DNA, 15 bp, Homo sapiens
attaggttgtcttgc

SEQ ID NO: 1389968 - DNA, 15 bp, Homo sapiens
tattaggttgtcttg

SEQ ID NO: 1389969 - DNA, 15 bp, Homo sapiens
ctattaggttgtctt

SEQ ID NO: 1389970 - DNA, 15 bp, Homo sapiens
tctattaggttgtct

SEQ ID NO: 1389971 - DNA, 15 bp, Homo sapiens
ttctattaggttgtc

SEQ ID NO: 1389972 - DNA, 15 bp, Homo sapiens
gttctattaggttgt

SEQ ID NO: 1389973 - DNA, 15 bp, Homo sapiens
ggttctattaggttg

SEQ ID NO: 1389974 - DNA, 15 bp, Homo sapiens
gggttctattaggtt

SEQ ID NO: 1389975 - DNA, 15 bp, Homo sapiens
agggttctattaggt

SEQ ID NO: 1389976 - DNA, 15 bp, Homo sapiens
gagggttctattagg

SEQ ID NO: 1389977 - DNA, 15 bp, Homo sapiens
ggagggttctattag

SEQ ID NO: 1389978 - DNA, 15 bp, Homo sapiens
tggagggttctatta

SEQ ID NO: 1389979 - DNA, 15 bp, Homo sapiens
ctggagggttctatt

SEQ ID NO: 1389980 - DNA, 15 bp, Homo sapiens
gctggagggttctat

SEQ ID NO: 1389981 - DNA, 15 bp, Homo sapiens
tgctggagggttcta

SEQ ID NO: 1389982 - DNA, 15 bp, Homo sapiens
ttgctggagggttct

SEQ ID NO: 1389983 - DNA, 15 bp, Homo sapiens
attgctggagggttc

SEQ ID NO: 1389984 - DNA, 15 bp, Homo sapiens
gattgctggagggtt

SEQ ID NO: 1389985 - DNA, 15 bp, Homo sapiens
tgattgctggagggt

SEQ ID NO: 1389986 - DNA, 15 bp, Homo sapiens
gtgattgctggaggg

SEQ ID NO: 1389987 - DNA, 15 bp, Homo sapiens
ggtgattgctggagg

SEQ ID NO: 1389988 - DNA, 15 bp, Homo sapiens
tggtgattgctggag

SEQ ID NO: 1389989 - DNA, 15 bp, Homo sapiens
gtggtgattgctgga

SEQ ID NO: 1389990 - DNA, 15 bp, Homo sapiens
ggtggtgattgctgg

SEQ ID NO: 1389991 - DNA, 15 bp, Homo sapiens
tggtggtgattgctg

SEQ ID NO: 1389992 - DNA, 15 bp, Homo sapiens
gtggtggtgattgct

SEQ ID NO: 1389993 - DNA, 15 bp, Homo sapiens
agtggtggtgattgc

SEQ ID NO: 1389994 - DNA, 15 bp, Homo sapiens
aagtggtggtgattg

SEQ ID NO: 1389995 - DNA, 15 bp, Homo sapiens
gaagtggtggtgatt

SEQ ID NO: 1389996 - DNA, 15 bp, Homo sapiens
ggaagtggtggtgat

SEQ ID NO: 1389997 - DNA, 15 bp, Homo sapiens
tggaagtggtggtga

SEQ ID NO: 1389998 - DNA, 15 bp, Homo sapiens
ttggaagtggtggtg

SEQ ID NO: 1389999 - DNA, 15 bp, Homo sapiens
cttggaagtggtggt

SEQ ID NO: 1390000 - DNA, 15 bp, Homo sapiens
gcttggaagtggtgg

SEQ ID NO: 1390001 - DNA, 15 bp, Homo sapiens
tgcttggaagtggtg

SEQ ID NO: 1390002 - DNA, 15 bp, Homo sapiens
ttgcttggaagtggt

SEQ ID NO: 1390003 - DNA, 15 bp, Homo sapiens
attgcttggaagtgg

SEQ ID NO: 1390004 - DNA, 15 bp, Homo sapiens
tattgcttggaagtg

SEQ ID NO: 1390005 - DNA, 15 bp, Homo sapiens
ctattgcttggaagt

SEQ ID NO: 1390006 - DNA, 15 bp, Homo sapiens
cctattgcttggaag

SEQ ID NO: 1390007 - DNA, 15 bp, Homo sapiens
tcctattgcttggaa

SEQ ID NO: 1390008 - DNA, 15 bp, Homo sapiens
ttcctattgcttgga

SEQ ID NO: 1390009 - DNA, 15 bp, Homo sapiens
gttcctattgcttgg

SEQ ID NO: 1390010 - DNA, 15 bp, Homo sapiens
tgttcctattgcttg

SEQ ID NO: 1390011 - DNA, 15 bp, Homo sapiens
gtgttcctattgctt

SEQ ID NO: 1390012 - DNA, 15 bp, Homo sapiens
agtgttcctattgct

SEQ ID NO: 1390013 - DNA, 15 bp, Homo sapiens
tagtgttcctattgc

SEQ ID NO: 1390014 - DNA, 15 bp, Homo sapiens
gtagtgttcctattg

SEQ ID NO: 1390015 - DNA, 15 bp, Homo sapiens
tgtagtgttcctatt

SEQ ID NO: 1390016 - DNA, 15 bp, Homo sapiens
atgtagtgttcctat

SEQ ID NO: 1390017 - DNA, 15 bp, Homo sapiens
catgtagtgttccta

SEQ ID NO: 1390018 - DNA, 15 bp, Homo sapiens
ccatgtagtgttcct

SEQ ID NO: 1390019 - DNA, 15 bp, Homo sapiens
tccatgtagtgttcc

SEQ ID NO: 1390020 - DNA, 15 bp, Homo sapiens
ttccatgtagtgttc

SEQ ID NO: 1390021 - DNA, 15 bp, Homo sapiens
tttccatgtagtgtt

SEQ ID NO: 1390022 - DNA, 15 bp, Homo sapiens
ctttccatgtagtgt

SEQ ID NO: 1390023 - DNA, 15 bp, Homo sapiens
tctttccatgtagtg

SEQ ID NO: 1390024 - DNA, 15 bp, Homo sapiens
gtctttccatgtagt

SEQ ID NO: 1390025 - DNA, 15 bp, Homo sapiens
tgtctttccatgtag

SEQ ID NO: 1390026 - DNA, 15 bp, Homo sapiens
ttgtctttccatgta

SEQ ID NO: 1390027 - DNA, 15 bp, Homo sapiens
attgtctttccatgt

SEQ ID NO: 1390028 - DNA, 15 bp, Homo sapiens
gattgtctttccatg

SEQ ID NO: 1390029 - DNA, 15 bp, Homo sapiens
ggattgtctttccat

SEQ ID NO: 1390030 - DNA, 15 bp, Homo sapiens
tggattgtctttcca

SEQ ID NO: 1390031 - DNA, 15 bp, Homo sapiens
gtggattgtctttcc

SEQ ID NO: 1390032 - DNA, 15 bp, Homo sapiens
tgtggattgtctttc

SEQ ID NO: 1390033 - DNA, 15 bp, Homo sapiens
gtgtggattgtcttt

SEQ ID NO: 1390034 - DNA, 15 bp, Homo sapiens
tgtgtggattgtctt

SEQ ID NO: 1390035 - DNA, 15 bp, Homo sapiens
ttgtgtggattgtct

SEQ ID NO: 1390036 - DNA, 15 bp, Homo sapiens
cttgtgtggattgtc

SEQ ID NO: 1390037 - DNA, 15 bp, Homo sapiens
tcttgtgtggattgt

SEQ ID NO: 1390038 - DNA, 15 bp, Homo sapiens
ttcttgtgtggattg

SEQ ID NO: 1390039 - DNA, 15 bp, Homo sapiens
tttcttgtgtggatt

SEQ ID NO: 1390040 - DNA, 15 bp, Homo sapiens
ttttcttgtgtggat

SEQ ID NO: 1390041 - DNA, 15 bp, Homo sapiens
gttttcttgtgtgga

SEQ ID NO: 1390042 - DNA, 15 bp, Homo sapiens
tgttttcttgtgtgg

SEQ ID NO: 1390043 - DNA, 15 bp, Homo sapiens
gtgttttcttgtgtg

SEQ ID NO: 1390044 - DNA, 15 bp, Homo sapiens
ggtgttttcttgtgt

SEQ ID NO: 1390045 - DNA, 15 bp, Homo sapiens
aggtgttttcttgtg

SEQ ID NO: 1390046 - DNA, 15 bp, Homo sapiens
aaggtgttttcttgt

SEQ ID NO: 1390047 - DNA, 15 bp, Homo sapiens
gaaggtgttttcttg

SEQ ID NO: 1390048 - DNA, 15 bp, Homo sapiens
tgaaggtgttttctt

SEQ ID NO: 1390049 - DNA, 15 bp, Homo sapiens
atgaaggtgttttct

SEQ ID NO: 1390050 - DNA, 15 bp, Homo sapiens
tatgaaggtgttttc

SEQ ID NO: 1390051 - DNA, 15 bp, Homo sapiens
ttatgaaggtgtttt

SEQ ID NO: 1390052 - DNA, 15 bp, Homo sapiens
cttatgaaggtgttt

SEQ ID NO: 1390053 - DNA, 15 bp, Homo sapiens
tcttatgaaggtgtt

SEQ ID NO: 1390054 - DNA, 15 bp, Homo sapiens
ttcttatgaaggtgt

SEQ ID NO: 1390055 - DNA, 15 bp, Homo sapiens
cttcttatgaaggtg

SEQ ID NO: 1390056 - DNA, 15 bp, Homo sapiens
gcttcttatgaaggt

SEQ ID NO: 1390057 - DNA, 15 bp, Homo sapiens
tgcttcttatgaagg

SEQ ID NO: 1390058 - DNA, 15 bp, Homo sapiens
ttgcttcttatgaag

SEQ ID NO: 1390059 - DNA, 15 bp, Homo sapiens
tttgcttcttatgaa

SEQ ID NO: 1390060 - DNA, 15 bp, Homo sapiens
ttttgcttcttatga

SEQ ID NO: 1390061 - DNA, 15 bp, Homo sapiens
tttttgcttcttatg

SEQ ID NO: 1390062 - DNA, 15 bp, Homo sapiens
atttttgcttcttat

SEQ ID NO: 1390063 - DNA, 15 bp, Homo sapiens
gatttttgcttctta

SEQ ID NO: 1390064 - DNA, 15 bp, Homo sapiens
tgatttttgcttctt

SEQ ID NO: 1390065 - DNA, 15 bp, Homo sapiens
ctgatttttgcttct

SEQ ID NO: 1390066 - DNA, 15 bp, Homo sapiens
cctgatttttgcttc

SEQ ID NO: 1390067 - DNA, 15 bp, Homo sapiens
acctgatttttgctt

SEQ ID NO: 1390068 - DNA, 15 bp, Homo sapiens
cacctgatttttgct

SEQ ID NO: 1390069 - DNA, 15 bp, Homo sapiens
tcacctgatttttgc

SEQ ID NO: 1390070 - DNA, 15 bp, Homo sapiens
ctcacctgatttttg

SEQ ID NO: 1390071 - DNA, 15 bp, Homo sapiens
gctcacctgattttt

SEQ ID NO: 1390072 - DNA, 15 bp, Homo sapiens
tgctcacctgatttt

SEQ ID NO: 1390073 - DNA, 15 bp, Homo sapiens
ctgctcacctgattt

SEQ ID NO: 1390074 - DNA, 15 bp, Homo sapiens
actgctcacctgatt

SEQ ID NO: 1390075 - DNA, 15 bp, Homo sapiens
gactgctcacctgat

SEQ ID NO: 1390076 - DNA, 15 bp, Homo sapiens
tgactgctcacctga

SEQ ID NO: 1390077 - DNA, 15 bp, Homo sapiens
gtgactgctcacctg

SEQ ID NO: 1390078 - DNA, 15 bp, Homo sapiens
tgtgactgctcacct

SEQ ID NO: 1390079 - DNA, 15 bp, Homo sapiens
ctgtgactgctcacc

SEQ ID NO: 1390080 - DNA, 15 bp, Homo sapiens
actgtgactgctcac

SEQ ID NO: 1390081 - DNA, 15 bp, Homo sapiens
tactgtgactgctca

SEQ ID NO: 1390082 - DNA, 15 bp, Homo sapiens
gtactgtgactgctc

SEQ ID NO: 1390083 - DNA, 15 bp, Homo sapiens
ggtactgtgactgct

SEQ ID NO: 1390084 - DNA, 15 bp, Homo sapiens
gggtactgtgactgc

SEQ ID NO: 1390085 - DNA, 15 bp, Homo sapiens
cgggtactgtgactg

SEQ ID NO: 1390086 - DNA, 15 bp, Homo sapiens
ccgggtactgtgact

SEQ ID NO: 1390087 - DNA, 15 bp, Homo sapiens
accgggtactgtgac

SEQ ID NO: 1390088 - DNA, 15 bp, Homo sapiens
aaccgggtactgtga

SEQ ID NO: 1390089 - DNA, 15 bp, Homo sapiens
aaaccgggtactgtg

SEQ ID NO: 1390090 - DNA, 15 bp, Homo sapiens
aaaaccgggtactgt

SEQ ID NO: 1390091 - DNA, 15 bp, Homo sapiens
taaaaccgggtactg

SEQ ID NO: 1390092 - DNA, 15 bp, Homo sapiens
ttaaaaccgggtact

SEQ ID NO: 1390093 - DNA, 15 bp, Homo sapiens
tttaaaaccgggtac

SEQ ID NO: 1390094 - DNA, 15 bp, Homo sapiens
ttttaaaaccgggta

SEQ ID NO: 1390095 - DNA, 15 bp, Homo sapiens
attttaaaaccgggt

SEQ ID NO: 1390096 - DNA, 15 bp, Homo sapiens
gattttaaaaccggg

SEQ ID NO: 1390097 - DNA, 15 bp, Homo sapiens
tgattttaaaaccgg

SEQ ID NO: 1390098 - DNA, 15 bp, Homo sapiens
atgattttaaaaccg

SEQ ID NO: 1390099 - DNA, 15 bp, Homo sapiens
tatgattttaaaacc

SEQ ID NO: 1390100 - DNA, 15 bp, Homo sapiens
ttatgattttaaaac

SEQ ID NO: 1390101 - DNA, 15 bp, Homo sapiens
gttatgattttaaaa

SEQ ID NO: 1390102 - DNA, 15 bp, Homo sapiens
tgttatgattttaaa

SEQ ID NO: 1390103 - DNA, 15 bp, Homo sapiens
ttgttatgattttaa

SEQ ID NO: 1390104 - DNA, 15 bp, Homo sapiens
cttgttatgatttta

SEQ ID NO: 1390105 - DNA, 15 bp, Homo sapiens
ccttgttatgatttt

SEQ ID NO: 1390106 - DNA, 15 bp, Homo sapiens
tccttgttatgattt

SEQ ID NO: 1390107 - DNA, 15 bp, Homo sapiens
ttccttgttatgatt

SEQ ID NO: 1390108 - DNA, 15 bp, Homo sapiens
tttccttgttatgat

SEQ ID NO: 1390109 - DNA, 15 bp, Homo sapiens
ctttccttgttatga

SEQ ID NO: 1390110 - DNA, 15 bp, Homo sapiens
gctttccttgttatg

SEQ ID NO: 1390111 - DNA, 15 bp, Homo sapiens
cgctttccttgttat

SEQ ID NO: 1390112 - DNA, 15 bp, Homo sapiens
gcgctttccttgtta

SEQ ID NO: 1390113 - DNA, 15 bp, Homo sapiens
tgcgctttccttgtt

SEQ ID NO: 1390114 - DNA, 15 bp, Homo sapiens
atgcgctttccttgt

SEQ ID NO: 1390115 - DNA, 15 bp, Homo sapiens
aatgcgctttccttg

SEQ ID NO: 1390116 - DNA, 15 bp, Homo sapiens
caatgcgctttcctt

SEQ ID NO: 1390117 - DNA, 15 bp, Homo sapiens
tcaatgcgctttcct

SEQ ID NO: 1390118 - DNA, 15 bp, Homo sapiens
ttcaatgcgctttcc

SEQ ID NO: 1390119 - DNA, 15 bp, Homo sapiens
tttcaatgcgctttc

SEQ ID NO: 1390120 - DNA, 15 bp, Homo sapiens
ttttcaatgcgcttt

SEQ ID NO: 1390121 - DNA, 15 bp, Homo sapiens
cttttcaatgcgctt

SEQ ID NO: 1390122 - DNA, 15 bp, Homo sapiens
ccttttcaatgcgct

SEQ ID NO: 1390123 - DNA, 15 bp, Homo sapiens
cccttttcaatgcgc

SEQ ID NO: 1390124 - DNA, 15 bp, Homo sapiens
acccttttcaatgcg

SEQ ID NO: 1390125 - DNA, 15 bp, Homo sapiens
tacccttttcaatgc

SEQ ID NO: 1390126 - DNA, 15 bp, Homo sapiens
ctacccttttcaatg

SEQ ID NO: 1390127 - DNA, 15 bp, Homo sapiens
cctacccttttcaat

SEQ ID NO: 1390128 - DNA, 15 bp, Homo sapiens
tcctacccttttcaa

SEQ ID NO: 1390129 - DNA, 15 bp, Homo sapiens
ttcctacccttttca

SEQ ID NO: 1390130 - DNA, 15 bp, Homo sapiens
tttcctacccttttc

SEQ ID NO: 1390131 - DNA, 15 bp, Homo sapiens
ttttcctaccctttt

SEQ ID NO: 1390132 - DNA, 15 bp, Homo sapiens
tttttcctacccttt

SEQ ID NO: 1390133 - DNA, 15 bp, Homo sapiens
gtttttcctaccctt

SEQ ID NO: 1390134 - DNA, 15 bp, Homo sapiens
tgtttttcctaccct

SEQ ID NO: 1390135 - DNA, 15 bp, Homo sapiens
ctgtttttcctaccc

SEQ ID NO: 1390136 - DNA, 15 bp, Homo sapiens
actgtttttcctacc

SEQ ID NO: 1390137 - DNA, 15 bp, Homo sapiens
gactgtttttcctac

SEQ ID NO: 1390138 - DNA, 15 bp, Homo sapiens
agactgtttttccta

SEQ ID NO: 1390139 - DNA, 15 bp, Homo sapiens
aagactgtttttcct

SEQ ID NO: 1390140 - DNA, 15 bp, Homo sapiens
caagactgtttttcc

SEQ ID NO: 1390141 - DNA, 15 bp, Homo sapiens
tcaagactgtttttc

SEQ ID NO: 1390142 - DNA, 15 bp, Homo sapiens
ttcaagactgttttt

SEQ ID NO: 1390143 - DNA, 15 bp, Homo sapiens
attcaagactgtttt

SEQ ID NO: 1390144 - DNA, 15 bp, Homo sapiens
aattcaagactgttt

SEQ ID NO: 1390145 - DNA, 15 bp, Homo sapiens
caattcaagactgtt

SEQ ID NO: 1390146 - DNA, 15 bp, Homo sapiens
gcaattcaagactgt

SEQ ID NO: 1390147 - DNA, 15 bp, Homo sapiens
ggcaattcaagactg

SEQ ID NO: 1390148 - DNA, 15 bp, Homo sapiens
gggcaattcaagact

SEQ ID NO: 1390149 - DNA, 15 bp, Homo sapiens
tgggcaattcaagac

SEQ ID NO: 1390150 - DNA, 15 bp, Homo sapiens
gtgggcaattcaaga

SEQ ID NO: 1390151 - DNA, 15 bp, Homo sapiens
tgtgggcaattcaag

SEQ ID NO: 1390152 - DNA, 15 bp, Homo sapiens
gtgtgggcaattcaa

SEQ ID NO: 1390153 - DNA, 15 bp, Homo sapiens
agtgtgggcaattca

SEQ ID NO: 1390154 - DNA, 15 bp, Homo sapiens
cagtgtgggcaattc

SEQ ID NO: 1390155 - DNA, 15 bp, Homo sapiens
gcagtgtgggcaatt

SEQ ID NO: 1390156 - DNA, 15 bp, Homo sapiens
ggcagtgtgggcaat

SEQ ID NO: 1390157 - DNA, 15 bp, Homo sapiens
tggcagtgtgggcaa

SEQ ID NO: 1390158 - DNA, 15 bp, Homo sapiens
gtggcagtgtgggca

SEQ ID NO: 1390159 - DNA, 15 bp, Homo sapiens
agtggcagtgtgggc

SEQ ID NO: 1390160 - DNA, 15 bp, Homo sapiens
aagtggcagtgtggg

SEQ ID NO: 1390161 - DNA, 15 bp, Homo sapiens
gaagtggcagtgtgg

SEQ ID NO: 1390162 - DNA, 15 bp, Homo sapiens
ggaagtggcagtgtg

SEQ ID NO: 1390163 - DNA, 15 bp, Homo sapiens
tggaagtggcagtgt

SEQ ID NO: 1390164 - DNA, 15 bp, Homo sapiens
atggaagtggcagtg

SEQ ID NO: 1390165 - DNA, 15 bp, Homo sapiens
gatggaagtggcagt

SEQ ID NO: 1390166 - DNA, 15 bp, Homo sapiens
ggatggaagtggcag

SEQ ID NO: 1390167 - DNA, 15 bp, Homo sapiens
gggatggaagtggca

SEQ ID NO: 1390168 - DNA, 15 bp, Homo sapiens
ggggatggaagtggc

SEQ ID NO: 1390169 - DNA, 15 bp, Homo sapiens
aggggatggaagtgg

SEQ ID NO: 1390170 - DNA, 15 bp, Homo sapiens
caggggatggaagtg

SEQ ID NO: 1390171 - DNA, 15 bp, Homo sapiens
ccaggggatggaagt

SEQ ID NO: 1390172 - DNA, 15 bp, Homo sapiens
gccaggggatggaag

SEQ ID NO: 1390173 - DNA, 15 bp, Homo sapiens
tgccaggggatggaa

SEQ ID NO: 1390174 - DNA, 15 bp, Homo sapiens
ctgccaggggatgga

SEQ ID NO: 1390175 - DNA, 15 bp, Homo sapiens
tctgccaggggatgg

SEQ ID NO: 1390176 - DNA, 15 bp, Homo sapiens
ttctgccaggggatg

SEQ ID NO: 1390177 - DNA, 15 bp, Homo sapiens
cttctgccaggggat

SEQ ID NO: 1390178 - DNA, 15 bp, Homo sapiens
gcttctgccagggga

SEQ ID NO: 1390179 - DNA, 15 bp, Homo sapiens
agcttctgccagggg

SEQ ID NO: 1390180 - DNA, 15 bp, Homo sapiens
cagcttctgccaggg

SEQ ID NO: 1390181 - DNA, 15 bp, Homo sapiens
gcagcttctgccagg

SEQ ID NO: 1390182 - DNA, 15 bp, Homo sapiens
tgcagcttctgccag

SEQ ID NO: 1390183 - DNA, 15 bp, Homo sapiens
atgcagcttctgcca

SEQ ID NO: 1390184 - DNA, 15 bp, Homo sapiens
catgcagcttctgcc

SEQ ID NO: 1390185 - DNA, 15 bp, Homo sapiens
ccatgcagcttctgc

SEQ ID NO: 1390186 - DNA, 15 bp, Homo sapiens
gccatgcagcttctg

SEQ ID NO: 1390187 - DNA, 15 bp, Homo sapiens
tgccatgcagcttct

SEQ ID NO: 1390188 - DNA, 15 bp, Homo sapiens
gtgccatgcagcttc

SEQ ID NO: 1390189 - DNA, 15 bp, Homo sapiens
tgtgccatgcagctt

SEQ ID NO: 1390190 - DNA, 15 bp, Homo sapiens
ctgtgccatgcagct

SEQ ID NO: 1390191 - DNA, 15 bp, Homo sapiens
tctgtgccatgcagc

SEQ ID NO: 1390192 - DNA, 15 bp, Homo sapiens
ttctgtgccatgcag

SEQ ID NO: 1390193 - DNA, 15 bp, Homo sapiens
tttctgtgccatgca

SEQ ID NO: 1390194 - DNA, 15 bp, Homo sapiens
ttttctgtgccatgc

SEQ ID NO: 1390195 - DNA, 15 bp, Homo sapiens
tttttctgtgccatg

SEQ ID NO: 1390196 - DNA, 15 bp, Homo sapiens
ctttttctgtgccat

SEQ ID NO: 1390197 - DNA, 15 bp, Homo sapiens
tctttttctgtgcca

SEQ ID NO: 1390198 - DNA, 15 bp, Homo sapiens
ttctttttctgtgcc

SEQ ID NO: 1390199 - DNA, 15 bp, Homo sapiens
attctttttctgtgc

SEQ ID NO: 1390200 - DNA, 15 bp, Homo sapiens
gattctttttctgtg

SEQ ID NO: 1390201 - DNA, 15 bp, Homo sapiens
agattctttttctgt

SEQ ID NO: 1390202 - DNA, 15 bp, Homo sapiens
cagattctttttctg

SEQ ID NO: 1390203 - DNA, 15 bp, Homo sapiens
acagattctttttct

SEQ ID NO: 1390204 - DNA, 15 bp, Homo sapiens
cacagattctttttc

SEQ ID NO: 1390205 - DNA, 15 bp, Homo sapiens
acacagattcttttt

SEQ ID NO: 1390206 - DNA, 15 bp, Homo sapiens
cacacagattctttt

SEQ ID NO: 1390207 - DNA, 15 bp, Homo sapiens
gcacacagattcttt

SEQ ID NO: 1390208 - DNA, 15 bp, Homo sapiens
agcacacagattctt

SEQ ID NO: 1390209 - DNA, 15 bp, Homo sapiens
aagcacacagattct

SEQ ID NO: 1390210 - DNA, 15 bp, Homo sapiens
caagcacacagattc

SEQ ID NO: 1390211 - DNA, 15 bp, Homo sapiens
ccaagcacacagatt

SEQ ID NO: 1390212 - DNA, 15 bp, Homo sapiens
tccaagcacacagat

SEQ ID NO: 1390213 - DNA, 15 bp, Homo sapiens
ctccaagcacacaga

SEQ ID NO: 1390214 - DNA, 15 bp, Homo sapiens
tctccaagcacacag

SEQ ID NO: 1390215 - DNA, 15 bp, Homo sapiens
ttctccaagcacaca

SEQ ID NO: 1390216 - DNA, 15 bp, Homo sapiens
cttctccaagcacac

SEQ ID NO: 1390217 - DNA, 15 bp, Homo sapiens
tcttctccaagcaca

SEQ ID NO: 1390218 - DNA, 15 bp, Homo sapiens
ctcttctccaagcac

SEQ ID NO: 1390219 - DNA, 15 bp, Homo sapiens
gctcttctccaagca

SEQ ID NO: 1390220 - DNA, 15 bp, Homo sapiens
gtgctcttctccaag

SEQ ID NO: 1390221 - DNA, 15 bp, Homo sapiens
tgtgctcttctccaa

SEQ ID NO: 1390222 - DNA, 15 bp, Homo sapiens
ctgtgctcttctcca

SEQ ID NO: 1390223 - DNA, 15 bp, Homo sapiens
actgtgctcttctcc

SEQ ID NO: 1390224 - DNA, 15 bp, Homo sapiens
cactgtgctcttctc

SEQ ID NO: 1390225 - DNA, 15 bp, Homo sapiens
tcactgtgctcttct

SEQ ID NO: 1390226 - DNA, 15 bp, Homo sapiens
atcactgtgctcttc

SEQ ID NO: 1390227 - DNA, 15 bp, Homo sapiens
aatcactgtgctctt

SEQ ID NO: 1390228 - DNA, 15 bp, Homo sapiens
caatcactgtgctct

SEQ ID NO: 1390229 - DNA, 15 bp, Homo sapiens
acaatcactgtgctc

SEQ ID NO: 1390230 - DNA, 15 bp, Homo sapiens
cacaatcactgtgct

SEQ ID NO: 1390231 - DNA, 15 bp, Homo sapiens
ccacaatcactgtgc

SEQ ID NO: 1390232 - DNA, 15 bp, Homo sapiens
cccacaatcactgtg

SEQ ID NO: 1390233 - DNA, 15 bp, Homo sapiens
tcccacaatcactgt

SEQ ID NO: 1390234 - DNA, 15 bp, Homo sapiens
gtcccacaatcactg

SEQ ID NO: 1390235 - DNA, 15 bp, Homo sapiens
agtcccacaatcact

SEQ ID NO: 1390236 - DNA, 15 bp, Homo sapiens
aagtcccacaatcac

SEQ ID NO: 1390237 - DNA, 15 bp, Homo sapiens
aaagtcccacaatca

SEQ ID NO: 1390238 - DNA, 15 bp, Homo sapiens
caaagtcccacaatc

SEQ ID NO: 1390239 - DNA, 15 bp, Homo sapiens
gcaaagtcccacaat

SEQ ID NO: 1390240 - DNA, 15 bp, Homo sapiens
tgcaaagtcccacaa

SEQ ID NO: 1390241 - DNA, 15 bp, Homo sapiens
atgcaaagtcccaca

SEQ ID NO: 1390242 - DNA, 15 bp, Homo sapiens
aatgcaaagtcccac

SEQ ID NO: 1390243 - DNA, 15 bp, Homo sapiens
caatgcaaagtccca

SEQ ID NO: 1390244 - DNA, 15 bp, Homo sapiens
tcaatgcaaagtccc

SEQ ID NO: 1390245 - DNA, 15 bp, Homo sapiens
ttcaatgcaaagtcc

SEQ ID NO: 1390246 - DNA, 15 bp, Homo sapiens
tttcaatgcaaagtc

SEQ ID NO: 1390247 - DNA, 15 bp, Homo sapiens
atttcaatgcaaagt

SEQ ID NO: 1390248 - DNA, 15 bp, Homo sapiens
aatttcaatgcaaag

SEQ ID NO: 1390249 - DNA, 15 bp, Homo sapiens
gaatttcaatgcaaa

SEQ ID NO: 1390250 - DNA, 15 bp, Homo sapiens
tgaatttcaatgcaa

SEQ ID NO: 1390251 - DNA, 15 bp, Homo sapiens
gtgaatttcaatgca

SEQ ID NO: 1390252 - DNA, 15 bp, Homo sapiens
tgtgaatttcaatgc

SEQ ID NO: 1390253 - DNA, 15 bp, Homo sapiens
ctgtgaatttcaatg

SEQ ID NO: 1390254 - DNA, 15 bp, Homo sapiens
gctgtgaatttcaat

SEQ ID NO: 1390255 - DNA, 15 bp, Homo sapiens
agctgtgaatttcaa

SEQ ID NO: 1390256 - DNA, 15 bp, Homo sapiens
cagctgtgaatttca

SEQ ID NO: 1390257 - DNA, 15 bp, Homo sapiens
gcagctgtgaatttc

SEQ ID NO: 1390258 - DNA, 15 bp, Homo sapiens
ggcagctgtgaattt

SEQ ID NO: 1390259 - DNA, 15 bp, Homo sapiens
gggcagctgtgaatt

SEQ ID NO: 1390260 - DNA, 15 bp, Homo sapiens
agggcagctgtgaat

SEQ ID NO: 1390261 - DNA, 15 bp, Homo sapiens
cagggcagctgtgaa

SEQ ID NO: 1390262 - DNA, 15 bp, Homo sapiens
acagggcagctgtga

SEQ ID NO: 1390263 - DNA, 15 bp, Homo sapiens
gacagggcagctgtg

SEQ ID NO: 1390264 - DNA, 15 bp, Homo sapiens
tgacagggcagctgt

SEQ ID NO: 1390265 - DNA, 15 bp, Homo sapiens
gtgacagggcagctg

SEQ ID NO: 1390266 - DNA, 15 bp, Homo sapiens
tgtgacagggcagct

SEQ ID NO: 1390267 - DNA, 15 bp, Homo sapiens
ctgtgacagggcagc

SEQ ID NO: 1390268 - DNA, 15 bp, Homo sapiens
actgtgacagggcag

SEQ ID NO: 1390269 - DNA, 15 bp, Homo sapiens
cactgtgacagggca

SEQ ID NO: 1390270 - DNA, 15 bp, Homo sapiens
ccactgtgacagggc

SEQ ID NO: 1390271 - DNA, 15 bp, Homo sapiens
tccactgtgacaggg

SEQ ID NO: 1390272 - DNA, 15 bp, Homo sapiens
ttccactgtgacagg

SEQ ID NO: 1390273 - DNA, 15 bp, Homo sapiens
tttccactgtgacag

SEQ ID NO: 1390274 - DNA, 15 bp, Homo sapiens
ttttccactgtgaca

SEQ ID NO: 1390275 - DNA, 15 bp, Homo sapiens
gttttccactgtgac

SEQ ID NO: 1390276 - DNA, 15 bp, Homo sapiens
tgttttccactgtga

SEQ ID NO: 1390277 - DNA, 15 bp, Homo sapiens
ttgttttccactgtg

SEQ ID NO: 1390278 - DNA, 15 bp, Homo sapiens
gttgttttccactgt

SEQ ID NO: 1390279 - DNA, 15 bp, Homo sapiens
tgttgttttccactg

SEQ ID NO: 1390280 - DNA, 15 bp, Homo sapiens
atgttgttttccact

SEQ ID NO: 1390281 - DNA, 15 bp, Homo sapiens
catgttgttttccac

SEQ ID NO: 1390282 - DNA, 15 bp, Homo sapiens
ccatgttgttttcca

SEQ ID NO: 1390283 - DNA, 15 bp, Homo sapiens
cccatgttgttttcc

SEQ ID NO: 1390284 - DNA, 15 bp, Homo sapiens
ccccatgttgttttc

SEQ ID NO: 1390285 - DNA, 15 bp, Homo sapiens
cccccatgttgtttt

SEQ ID NO: 1390286 - DNA, 15 bp, Homo sapiens
gcccccatgttgttt

SEQ ID NO: 1390287 - DNA, 15 bp, Homo sapiens
tgcccccatgttgtt

SEQ ID NO: 1390288 - DNA, 15 bp, Homo sapiens
ctgcccccatgttgt

SEQ ID NO: 1390289 - DNA, 15 bp, Homo sapiens
tctgcccccatgttg

SEQ ID NO: 1390290 - DNA, 15 bp, Homo sapiens
ttctgcccccatgtt

SEQ ID NO: 1390291 - DNA, 15 bp, Homo sapiens
gttctgcccccatgt

SEQ ID NO: 1390292 - DNA, 15 bp, Homo sapiens
ggttctgcccccatg

SEQ ID NO: 1390293 - DNA, 15 bp, Homo sapiens
gggttctgcccccat

SEQ ID NO: 1390294 - DNA, 15 bp, Homo sapiens
tgggttctgccccca

SEQ ID NO: 1390295 - DNA, 15 bp, Homo sapiens
ctgggttctgccccc

SEQ ID NO: 1390296 - DNA, 15 bp, Homo sapiens
gctgggttctgcccc

SEQ ID NO: 1390297 - DNA, 15 bp, Homo sapiens
agctgggttctgccc

SEQ ID NO: 1390298 - DNA, 15 bp, Homo sapiens
cagctgggttctgcc

SEQ ID NO: 1390299 - DNA, 15 bp, Homo sapiens
ccagctgggttctgc

SEQ ID NO: 1390300 - DNA, 15 bp, Homo sapiens
gccagctgggttctg

SEQ ID NO: 1390301 - DNA, 15 bp, Homo sapiens
tgccagctgggttct

SEQ ID NO: 1390302 - DNA, 15 bp, Homo sapiens
gtgccagctgggttc

SEQ ID NO: 1390303 - DNA, 15 bp, Homo sapiens
ggtgccagctgggtt

SEQ ID NO: 1390304 - DNA, 15 bp, Homo sapiens
tggtgccagctgggt

SEQ ID NO: 1390305 - DNA, 15 bp, Homo sapiens
atggtgccagctggg

SEQ ID NO: 1390306 - DNA, 15 bp, Homo sapiens
gatggtgccagctgg

SEQ ID NO: 1390307 - DNA, 15 bp, Homo sapiens
tgatggtgccagctg

SEQ ID NO: 1390308 - DNA, 15 bp, Homo sapiens
ctgatggtgccagct

SEQ ID NO: 1390309 - DNA, 15 bp, Homo sapiens
tctgatggtgccagc

SEQ ID NO: 1390310 - DNA, 15 bp, Homo sapiens
gtctgatggtgccag

SEQ ID NO: 1390311 - DNA, 15 bp, Homo sapiens
tgtctgatggtgcca

SEQ ID NO: 1390312 - DNA, 15 bp, Homo sapiens
ctgtctgatggtgcc

SEQ ID NO: 1390313 - DNA, 15 bp, Homo sapiens
tctgtctgatggtgc

SEQ ID NO: 1390314 - DNA, 15 bp, Homo sapiens
ttctgtctgatggtg

SEQ ID NO: 1390315 - DNA, 15 bp, Homo sapiens
attctgtctgatggt

SEQ ID NO: 1390316 - DNA, 15 bp, Homo sapiens
tattctgtctgatgg

SEQ ID NO: 1390317 - DNA, 15 bp, Homo sapiens
atattctgtctgatg

SEQ ID NO: 1390318 - DNA, 15 bp, Homo sapiens
aatattctgtctgat

SEQ ID NO: 1390319 - DNA, 15 bp, Homo sapiens
aaatattctgtctga

SEQ ID NO: 1390320 - DNA, 15 bp, Homo sapiens
taaatattctgtctg

SEQ ID NO: 1390321 - DNA, 15 bp, Homo sapiens
ctaaatattctgtct

SEQ ID NO: 1390322 - DNA, 15 bp, Homo sapiens
tctaaatattctgtc

SEQ ID NO: 1390323 - DNA, 15 bp, Homo sapiens
gtctaaatattctgt

SEQ ID NO: 1390324 - DNA, 15 bp, Homo sapiens
tgtctaaatattctg

SEQ ID NO: 1390325 - DNA, 15 bp, Homo sapiens
ttgtctaaatattct

SEQ ID NO: 1390326 - DNA, 15 bp, Homo sapiens
cttgtctaaatattc

SEQ ID NO: 1390327 - DNA, 15 bp, Homo sapiens
gcttgtctaaatatt

SEQ ID NO: 1390328 - DNA, 15 bp, Homo sapiens
ggcttgtctaaatat

SEQ ID NO: 1390329 - DNA, 15 bp, Homo sapiens
gggcttgtctaaata

SEQ ID NO: 1390330 - DNA, 15 bp, Homo sapiens
agggcttgtctaaat

SEQ ID NO: 1390331 - DNA, 15 bp, Homo sapiens
tagggcttgtctaaa

SEQ ID NO: 1390332 - DNA, 15 bp, Homo sapiens
ctagggcttgtctaa

SEQ ID NO: 1390333 - DNA, 15 bp, Homo sapiens
gctagggcttgtcta

SEQ ID NO: 1390334 - DNA, 15 bp, Homo sapiens
ggctagggcttgtct

SEQ ID NO: 1390335 - DNA, 15 bp, Homo sapiens
tggctagggcttgtc

SEQ ID NO: 1390336 - DNA, 15 bp, Homo sapiens
ctggctagggcttgt

SEQ ID NO: 1390337 - DNA, 15 bp, Homo sapiens
tctggctagggcttg

SEQ ID NO: 1390338 - DNA, 15 bp, Homo sapiens
ctctggctagggctt

SEQ ID NO: 1390339 - DNA, 15 bp, Homo sapiens
tctctggctagggct

SEQ ID NO: 1390340 - DNA, 15 bp, Homo sapiens
ttctctggctagggc

SEQ ID NO: 1390341 - DNA, 15 bp, Homo sapiens
cttctctggctaggg

SEQ ID NO: 1390342 - DNA, 15 bp, Homo sapiens
tcttctctggctagg

SEQ ID NO: 1390343 - DNA, 15 bp, Homo sapiens
ttcttctctggctag

SEQ ID NO: 1390344 - DNA, 15 bp, Homo sapiens
attcttctctggcta

SEQ ID NO: 1390345 - DNA, 15 bp, Homo sapiens
gattcttctctggct

SEQ ID NO: 1390346 - DNA, 15 bp, Homo sapiens
tgattcttctctggc

SEQ ID NO: 1390347 - DNA, 15 bp, Homo sapiens
gtgattcttctctgg

SEQ ID NO: 1390348 - DNA, 15 bp, Homo sapiens
ggtgattcttctctg

SEQ ID NO: 1390349 - DNA, 15 bp, Homo sapiens
gggtgattcttctct

SEQ ID NO: 1390350 - DNA, 15 bp, Homo sapiens
agggtgattcttctc

SEQ ID NO: 1390351 - DNA, 15 bp, Homo sapiens
aagggtgattcttct

SEQ ID NO: 1390352 - DNA, 15 bp, Homo sapiens
gaagggtgattcttc

SEQ ID NO: 1390353 - DNA, 15 bp, Homo sapiens
agaagggtgattctt

SEQ ID NO: 1390354 - DNA, 15 bp, Homo sapiens
gagaagggtgattct

SEQ ID NO: 1390355 - DNA, 15 bp, Homo sapiens
tgagaagggtgattc

SEQ ID NO: 1390356 - DNA, 15 bp, Homo sapiens
ctgagaagggtgatt

SEQ ID NO: 1390357 - DNA, 15 bp, Homo sapiens
actgagaagggtgat

SEQ ID NO: 1390358 - DNA, 15 bp, Homo sapiens
cactgagaagggtga

SEQ ID NO: 1390359 - DNA, 15 bp, Homo sapiens
ccactgagaagggtg

SEQ ID NO: 1390360 - DNA, 15 bp, Homo sapiens
accactgagaagggt

SEQ ID NO: 1390361 - DNA, 15 bp, Homo sapiens
gaccactgagaaggg

SEQ ID NO: 1390362 - DNA, 15 bp, Homo sapiens
tgaccactgagaagg

SEQ ID NO: 1390363 - DNA, 15 bp, Homo sapiens
ctgaccactgagaag

SEQ ID NO: 1390364 - DNA, 15 bp, Homo sapiens
tctgaccactgagaa

SEQ ID NO: 1390365 - DNA, 15 bp, Homo sapiens
ttctgaccactgaga

SEQ ID NO: 1390366 - DNA, 15 bp, Homo sapiens
gttctgaccactgag

SEQ ID NO: 1390367 - DNA, 15 bp, Homo sapiens
ggttctgaccactga

SEQ ID NO: 1390368 - DNA, 15 bp, Homo sapiens
aggttctgaccactg

SEQ ID NO: 1390369 - DNA, 15 bp, Homo sapiens
caggttctgaccact

SEQ ID NO: 1390370 - DNA, 15 bp, Homo sapiens
tcaggttctgaccac

SEQ ID NO: 1390371 - DNA, 15 bp, Homo sapiens
ctcaggttctgacca

SEQ ID NO: 1390372 - DNA, 15 bp, Homo sapiens
actcaggttctgacc

SEQ ID NO: 1390373 - DNA, 15 bp, Homo sapiens
aactcaggttctgac

SEQ ID NO: 1390374 - DNA, 15 bp, Homo sapiens
gaactcaggttctga

SEQ ID NO: 1390375 - DNA, 15 bp, Homo sapiens
ggaactcaggttctg

SEQ ID NO: 1390376 - DNA, 15 bp, Homo sapiens
tggaactcaggttct

SEQ ID NO: 1390377 - DNA, 15 bp, Homo sapiens
ctggaactcaggttc

SEQ ID NO: 1390378 - DNA, 15 bp, Homo sapiens
gctggaactcaggtt

SEQ ID NO: 1390379 - DNA, 15 bp, Homo sapiens
agctggaactcaggt

SEQ ID NO: 1390380 - DNA, 15 bp, Homo sapiens
tagctggaactcagg

SEQ ID NO: 1390381 - DNA, 15 bp, Homo sapiens
ctagctggaactcag

SEQ ID NO: 1390382 - DNA, 15 bp, Homo sapiens
gctagctggaactca

SEQ ID NO: 1390383 - DNA, 15 bp, Homo sapiens
agctagctggaactc

SEQ ID NO: 1390384 - DNA, 15 bp, Homo sapiens
gagctagctggaact

SEQ ID NO: 1390385 - DNA, 15 bp, Homo sapiens
ggagctagctggaac

SEQ ID NO: 1390386 - DNA, 15 bp, Homo sapiens
tggagctagctggaa

SEQ ID NO: 1390387 - DNA, 15 bp, Homo sapiens
atggagctagctgga

SEQ ID NO: 1390388 - DNA, 15 bp, Homo sapiens
gatggagctagctgg

SEQ ID NO: 1390389 - DNA, 15 bp, Homo sapiens
tgatggagctagctg

SEQ ID NO: 1390390 - DNA, 15 bp, Homo sapiens
gtgatggagctagct

SEQ ID NO: 1390391 - DNA, 15 bp, Homo sapiens
agtgatggagctagc

SEQ ID NO: 1390392 - DNA, 15 bp, Homo sapiens
cagtgatggagctag

SEQ ID NO: 1390393 - DNA, 15 bp, Homo sapiens
acagtgatggagcta

SEQ ID NO: 1390394 - DNA, 15 bp, Homo sapiens
cacagtgatggagct

SEQ ID NO: 1390395 - DNA, 15 bp, Homo sapiens
ccacagtgatggagc

SEQ ID NO: 1390396 - DNA, 15 bp, Homo sapiens
cccacagtgatggag

SEQ ID NO: 1390397 - DNA, 15 bp, Homo sapiens
tcccacagtgatgga

SEQ ID NO: 1390398 - DNA, 15 bp, Homo sapiens
ttcccacagtgatgg

SEQ ID NO: 1390399 - DNA, 15 bp, Homo sapiens
tttcccacagtgatg

SEQ ID NO: 1390400 - DNA, 15 bp, Homo sapiens
ttttcccacagtgat

SEQ ID NO: 1390401 - DNA, 15 bp, Homo sapiens
tttttcccacagtga

SEQ ID NO: 1390402 - DNA, 15 bp, Homo sapiens
ctttttcccacagtg

SEQ ID NO: 1390403 - DNA, 15 bp, Homo sapiens
actttttcccacagt

SEQ ID NO: 1390404 - DNA, 15 bp, Homo sapiens
gactttttcccacag

SEQ ID NO: 1390405 - DNA, 15 bp, Homo sapiens
ggactttttcccaca

SEQ ID NO: 1390406 - DNA, 15 bp, Homo sapiens
aggactttttcccac

SEQ ID NO: 1390407 - DNA, 15 bp, Homo sapiens
gaggactttttccca

SEQ ID NO: 1390408 - DNA, 15 bp, Homo sapiens
agaggactttttccc

SEQ ID NO: 1390409 - DNA, 15 bp, Homo sapiens
tagaggactttttcc

SEQ ID NO: 1390410 - DNA, 15 bp, Homo sapiens
ttagaggactttttc

SEQ ID NO: 1390411 - DNA, 15 bp, Homo sapiens
cttagaggacttttt

SEQ ID NO: 1390412 - DNA, 15 bp, Homo sapiens
ccttagaggactttt

SEQ ID NO: 1390413 - DNA, 15 bp, Homo sapiens
accttagaggacttt

SEQ ID NO: 1390414 - DNA, 15 bp, Homo sapiens
gaccttagaggactt

SEQ ID NO: 1390415 - DNA, 15 bp, Homo sapiens
ggaccttagaggact

SEQ ID NO: 1390416 - DNA, 15 bp, Homo sapiens
aggaccttagaggac

SEQ ID NO: 1390417 - DNA, 15 bp, Homo sapiens
taggaccttagagga

SEQ ID NO: 1390418 - DNA, 15 bp, Homo sapiens
ttaggaccttagagg

SEQ ID NO: 1390419 - DNA, 15 bp, Homo sapiens
tttaggaccttagag

SEQ ID NO: 1390420 - DNA, 15 bp, Homo sapiens
atttaggaccttaga

SEQ ID NO: 1390421 - DNA, 15 bp, Homo sapiens
tatttaggaccttag

SEQ ID NO: 1390422 - DNA, 15 bp, Homo sapiens
ttatttaggacctta

SEQ ID NO: 1390423 - DNA, 15 bp, Homo sapiens
tttatttaggacctt

SEQ ID NO: 1390424 - DNA, 15 bp, Homo sapiens
gtttatttaggacct

SEQ ID NO: 1390425 - DNA, 15 bp, Homo sapiens
agtttatttaggacc

SEQ ID NO: 1390426 - DNA, 15 bp, Homo sapiens
aagtttatttaggac

SEQ ID NO: 1390427 - DNA, 15 bp, Homo sapiens
caagtttatttagga

SEQ ID NO: 1390428 - DNA, 15 bp, Homo sapiens
tcaagtttatttagg

SEQ ID NO: 1390429 - DNA, 15 bp, Homo sapiens
ttcaagtttatttag

SEQ ID NO: 1390430 - DNA, 15 bp, Homo sapiens
tttcaagtttattta

SEQ ID NO: 1390431 - DNA, 15 bp, Homo sapiens
ctttcaagtttattt

SEQ ID NO: 1390432 - DNA, 15 bp, Homo sapiens
cctttcaagtttatt

SEQ ID NO: 1390433 - DNA, 15 bp, Homo sapiens
gcctttcaagtttat

SEQ ID NO: 1390434 - DNA, 15 bp, Homo sapiens
tgcctttcaagttta

SEQ ID NO: 1390435 - DNA, 15 bp, Homo sapiens
ctgcctttcaagttt

SEQ ID NO: 1390436 - DNA, 15 bp, Homo sapiens
gctgcctttcaagtt

SEQ ID NO: 1390437 - DNA, 15 bp, Homo sapiens
ggctgcctttcaagt

SEQ ID NO: 1390438 - DNA, 15 bp, Homo sapiens
aggctgcctttcaag

SEQ ID NO: 1390439 - DNA, 15 bp, Homo sapiens
taggctgcctttcaa

SEQ ID NO: 1390440 - DNA, 15 bp, Homo sapiens
ctaggctgcctttca

SEQ ID NO: 1390441 - DNA, 15 bp, Homo sapiens
cctaggctgcctttc

SEQ ID NO: 1390442 - DNA, 15 bp, Homo sapiens
gcctaggctgccttt

SEQ ID NO: 1390443 - DNA, 15 bp, Homo sapiens
ggcctaggctgcctt

SEQ ID NO: 1390444 - DNA, 15 bp, Homo sapiens
tggcctaggctgcct

SEQ ID NO: 1390445 - DNA, 15 bp, Homo sapiens
gtggcctaggctgcc

SEQ ID NO: 1390446 - DNA, 15 bp, Homo sapiens
tgtggcctaggctgc

SEQ ID NO: 1390447 - DNA, 15 bp, Homo sapiens
ttgtggcctaggctg

SEQ ID NO: 1390448 - DNA, 15 bp, Homo sapiens
cttgtggcctaggct

SEQ ID NO: 1390449 - DNA, 15 bp, Homo sapiens
ccttgtggcctaggc

SEQ ID NO: 1390450 - DNA, 15 bp, Homo sapiens
tccttgtggcctagg

SEQ ID NO: 1390451 - DNA, 15 bp, Homo sapiens
gtccttgtggcctag

SEQ ID NO: 1390452 - DNA, 15 bp, Homo sapiens
agtccttgtggccta

SEQ ID NO: 1390453 - DNA, 15 bp, Homo sapiens
cagtccttgtggcct

SEQ ID NO: 1390454 - DNA, 15 bp, Homo sapiens
gcagtccttgtggcc

SEQ ID NO: 1390455 - DNA, 15 bp, Homo sapiens
tgcagtccttgtggc

SEQ ID NO: 1390456 - DNA, 15 bp, Homo sapiens
ttgcagtccttgtgg

SEQ ID NO: 1390457 - DNA, 15 bp, Homo sapiens
attgcagtccttgtg

SEQ ID NO: 1390458 - DNA, 15 bp, Homo sapiens
aattgcagtccttgt

SEQ ID NO: 1390459 - DNA, 15 bp, Homo sapiens
gaattgcagtccttg

SEQ ID NO: 1390460 - DNA, 15 bp, Homo sapiens
ggaattgcagtcctt

SEQ ID NO: 1390461 - DNA, 15 bp, Homo sapiens
aggaattgcagtcct

SEQ ID NO: 1390462 - DNA, 15 bp, Homo sapiens
caggaattgcagtcc

SEQ ID NO: 1390463 - DNA, 15 bp, Homo sapiens
tcaggaattgcagtc

SEQ ID NO: 1390464 - DNA, 15 bp, Homo sapiens
ctcaggaattgcagt

SEQ ID NO: 1390465 - DNA, 15 bp, Homo sapiens
gctcaggaattgcag

SEQ ID NO: 1390466 - DNA, 15 bp, Homo sapiens
tgctcaggaattgca

SEQ ID NO: 1390467 - DNA, 15 bp, Homo sapiens
ttgctcaggaattgc

SEQ ID NO: 1390468 - DNA, 15 bp, Homo sapiens
cttgctcaggaattg

SEQ ID NO: 1390469 - DNA, 15 bp, Homo sapiens
acttgctcaggaatt

SEQ ID NO: 1390470 - DNA, 15 bp, Homo sapiens
gacttgctcaggaat

SEQ ID NO: 1390471 - DNA, 15 bp, Homo sapiens
ggacttgctcaggaa

SEQ ID NO: 1390472 - DNA, 15 bp, Homo sapiens
aggacttgctcagga

SEQ ID NO: 1390473 - DNA, 15 bp, Homo sapiens
caggacttgctcagg

SEQ ID NO: 1390474 - DNA, 15 bp, Homo sapiens
tcaggacttgctcag

SEQ ID NO: 1390475 - DNA, 15 bp, Homo sapiens
atcaggacttgctca

SEQ ID NO: 1390476 - DNA, 15 bp, Homo sapiens
catcaggacttgctc

SEQ ID NO: 1390477 - DNA, 15 bp, Homo sapiens
gcatcaggacttgct

SEQ ID NO: 1390478 - DNA, 15 bp, Homo sapiens
agcatcaggacttgc

SEQ ID NO: 1390479 - DNA, 15 bp, Homo sapiens
cagcatcaggacttg

SEQ ID NO: 1390480 - DNA, 15 bp, Homo sapiens
acagcatcaggactt

SEQ ID NO: 1390481 - DNA, 15 bp, Homo sapiens
cacagcatcaggact

SEQ ID NO: 1390482 - DNA, 15 bp, Homo sapiens
gcacagcatcaggac

SEQ ID NO: 1390483 - DNA, 15 bp, Homo sapiens
agcacagcatcagga

SEQ ID NO: 1390484 - DNA, 15 bp, Homo sapiens
cagcacagcatcagg

SEQ ID NO: 1390485 - DNA, 15 bp, Homo sapiens
ccagcacagcatcag

SEQ ID NO: 1390486 - DNA, 15 bp, Homo sapiens
cccagcacagcatca

SEQ ID NO: 1390487 - DNA, 15 bp, Homo sapiens
gcccagcacagcatc

SEQ ID NO: 1390488 - DNA, 15 bp, Homo sapiens
agcccagcacagcat

SEQ ID NO: 1390489 - DNA, 15 bp, Homo sapiens
aagcccagcacagca

SEQ ID NO: 1390490 - DNA, 15 bp, Homo sapiens
taagcccagcacagc

SEQ ID NO: 1390491 - DNA, 15 bp, Homo sapiens
ataagcccagcacag

SEQ ID NO: 1390492 - DNA, 15 bp, Homo sapiens
tataagcccagcaca

SEQ ID NO: 1390493 - DNA, 15 bp, Homo sapiens
ctataagcccagcac

SEQ ID NO: 1390494 - DNA, 15 bp, Homo sapiens
gctataagcccagca

SEQ ID NO: 1390495 - DNA, 15 bp, Homo sapiens
ggctataagcccagc

SEQ ID NO: 1390496 - DNA, 15 bp, Homo sapiens
aggctataagcccag

SEQ ID NO: 1390497 - DNA, 15 bp, Homo sapiens
caggctataagccca

SEQ ID NO: 1390498 - DNA, 15 bp, Homo sapiens
acaggctataagccc

SEQ ID NO: 1390499 - DNA, 15 bp, Homo sapiens
cacaggctataagcc

SEQ ID NO: 1390500 - DNA, 15 bp, Homo sapiens
ccacaggctataagc

SEQ ID NO: 1390501 - DNA, 15 bp, Homo sapiens
tccacaggctataag

SEQ ID NO: 1390502 - DNA, 15 bp, Homo sapiens
gtccacaggctataa

SEQ ID NO: 1390503 - DNA, 15 bp, Homo sapiens
agtccacaggctata

SEQ ID NO: 1390504 - DNA, 15 bp, Homo sapiens
aagtccacaggctat

SEQ ID NO: 1390505 - DNA, 15 bp, Homo sapiens
caagtccacaggcta

SEQ ID NO: 1390506 - DNA, 15 bp, Homo sapiens
ccaagtccacaggct

SEQ ID NO: 1390507 - DNA, 15 bp, Homo sapiens
accaagtccacaggc

SEQ ID NO: 1390508 - DNA, 15 bp, Homo sapiens
caccaagtccacagg

SEQ ID NO: 1390509 - DNA, 15 bp, Homo sapiens
ccaccaagtccacag

SEQ ID NO: 1390510 - DNA, 15 bp, Homo sapiens
cccaccaagtccaca

SEQ ID NO: 1390511 - DNA, 15 bp, Homo sapiens
acccaccaagtccac

SEQ ID NO: 1390512 - DNA, 15 bp, Homo sapiens
cacccaccaagtcca

SEQ ID NO: 1390513 - DNA, 15 bp, Homo sapiens
gcacccaccaagtcc

SEQ ID NO: 1390514 - DNA, 15 bp, Homo sapiens
tgcacccaccaagtc

SEQ ID NO: 1390515 - DNA, 15 bp, Homo sapiens
gtgcacccaccaagt

SEQ ID NO: 1390516 - DNA, 15 bp, Homo sapiens
tgtgcacccaccaag

SEQ ID NO: 1390517 - DNA, 15 bp, Homo sapiens
ttgtgcacccaccaa

SEQ ID NO: 1390518 - DNA, 15 bp, Homo sapiens
gttgtgcacccacca

SEQ ID NO: 1390519 - DNA, 15 bp, Homo sapiens
ggttgtgcacccacc

SEQ ID NO: 1390520 - DNA, 15 bp, Homo sapiens
gggttgtgcacccac

SEQ ID NO: 1390521 - DNA, 15 bp, Homo sapiens
tgggttgtgcaccca

SEQ ID NO: 1390522 - DNA, 15 bp, Homo sapiens
ctgggttgtgcaccc

SEQ ID NO: 1390523 - DNA, 15 bp, Homo sapiens
cctgggttgtgcacc

SEQ ID NO: 1390524 - DNA, 15 bp, Homo sapiens
ccctgggttgtgcac

SEQ ID NO: 1390525 - DNA, 15 bp, Homo sapiens
tccctgggttgtgca

SEQ ID NO: 1390526 - DNA, 15 bp, Homo sapiens
ctccctgggttgtgc

SEQ ID NO: 1390527 - DNA, 15 bp, Homo sapiens
tctccctgggttgtg

SEQ ID NO: 1390528 - DNA, 15 bp, Homo sapiens
gtctccctgggttgt

SEQ ID NO: 1390529 - DNA, 15 bp, Homo sapiens
tgtctccctgggttg

SEQ ID NO: 1390530 - DNA, 15 bp, Homo sapiens
gtgtctccctgggtt

SEQ ID NO: 1390531 - DNA, 15 bp, Homo sapiens
ggtgtctccctgggt

SEQ ID NO: 1390532 - DNA, 15 bp, Homo sapiens
tggtgtctccctggg

SEQ ID NO: 1390533 - DNA, 15 bp, Homo sapiens
atggtgtctccctgg

SEQ ID NO: 1390534 - DNA, 15 bp, Homo sapiens
gatggtgtctccctg

SEQ ID NO: 1390535 - DNA, 15 bp, Homo sapiens
ggatggtgtctccct

SEQ ID NO: 1390536 - DNA, 15 bp, Homo sapiens
cggatggtgtctccc

SEQ ID NO: 1390537 - DNA, 15 bp, Homo sapiens
ccggatggtgtctcc

SEQ ID NO: 1390538 - DNA, 15 bp, Homo sapiens
cccggatggtgtctc

SEQ ID NO: 1390539 - DNA, 15 bp, Homo sapiens
ccccggatggtgtct

SEQ ID NO: 1390540 - DNA, 15 bp, Homo sapiens
gccccggatggtgtc

SEQ ID NO: 1390541 - DNA, 15 bp, Homo sapiens
tgccccggatggtgt

SEQ ID NO: 1390542 - DNA, 15 bp, Homo sapiens
ttgccccggatggtg

SEQ ID NO: 1390543 - DNA, 15 bp, Homo sapiens
gttgccccggatggt

SEQ ID NO: 1390544 - DNA, 15 bp, Homo sapiens
agttgccccggatgg

SEQ ID NO: 1390545 - DNA, 15 bp, Homo sapiens
tagttgccccggatg

SEQ ID NO: 1390546 - DNA, 15 bp, Homo sapiens
ttagttgccccggat

SEQ ID NO: 1390547 - DNA, 15 bp, Homo sapiens
cttagttgccccgga

SEQ ID NO: 1390548 - DNA, 15 bp, Homo sapiens
ccttagttgccccgg

SEQ ID NO: 1390549 - DNA, 15 bp, Homo sapiens
cccttagttgccccg

SEQ ID NO: 1390550 - DNA, 15 bp, Homo sapiens
tcccttagttgcccc

SEQ ID NO: 1390551 - DNA, 15 bp, Homo sapiens
ctcccttagttgccc

SEQ ID NO: 1390552 - DNA, 15 bp, Homo sapiens
actcccttagttgcc

SEQ ID NO: 1390553 - DNA, 15 bp, Homo sapiens
tactcccttagttgc

SEQ ID NO: 1390554 - DNA, 15 bp, Homo sapiens
gtactcccttagttg

SEQ ID NO: 1390555 - DNA, 15 bp, Homo sapiens
agtactcccttagtt

SEQ ID NO: 1390556 - DNA, 15 bp, Homo sapiens
aagtactcccttagt

SEQ ID NO: 1390557 - DNA, 15 bp, Homo sapiens
caagtactcccttag

SEQ ID NO: 1390558 - DNA, 15 bp, Homo sapiens
acaagtactccctta

SEQ ID NO: 1390559 - DNA, 15 bp, Homo sapiens
cacaagtactccctt

SEQ ID NO: 1390560 - DNA, 15 bp, Homo sapiens
acacaagtactccct

SEQ ID NO: 1390561 - DNA, 15 bp, Homo sapiens
gacacaagtactccc

SEQ ID NO: 1390562 - DNA, 15 bp, Homo sapiens
tgacacaagtactcc

SEQ ID NO: 1390563 - DNA, 15 bp, Homo sapiens
gtgacacaagtactc

SEQ ID NO: 1390564 - DNA, 15 bp, Homo sapiens
ggtgacacaagtact

SEQ ID NO: 1390565 - DNA, 15 bp, Homo sapiens
gggtgacacaagtac

SEQ ID NO: 1390566 - DNA, 15 bp, Homo sapiens
ggggtgacacaagta

SEQ ID NO: 1390567 - DNA, 15 bp, Homo sapiens
aggggtgacacaagt

SEQ ID NO: 1390568 - DNA, 15 bp, Homo sapiens
gaggggtgacacaag

SEQ ID NO: 1390569 - DNA, 15 bp, Homo sapiens
ggaggggtgacacaa

SEQ ID NO: 1390570 - DNA, 15 bp, Homo sapiens
gggaggggtgacaca

SEQ ID NO: 1390571 - DNA, 15 bp, Homo sapiens
ggggaggggtgacac

SEQ ID NO: 1390572 - DNA, 15 bp, Homo sapiens
gggggaggggtgaca

SEQ ID NO: 1390573 - DNA, 15 bp, Homo sapiens
tgggggaggggtgac

SEQ ID NO: 1390574 - DNA, 15 bp, Homo sapiens
ttgggggaggggtga

SEQ ID NO: 1390575 - DNA, 15 bp, Homo sapiens
tttgggggaggggtg

SEQ ID NO: 1390576 - DNA, 15 bp, Homo sapiens
gtttgggggaggggt

SEQ ID NO: 1390577 - DNA, 15 bp, Homo sapiens
ggtttgggggagggg

SEQ ID NO: 1390578 - DNA, 15 bp, Homo sapiens
gggtttgggggaggg

SEQ ID NO: 1390579 - DNA, 15 bp, Homo sapiens
tgggtttgggggagg

SEQ ID NO: 1390580 - DNA, 15 bp, Homo sapiens
ctgggtttgggggag

SEQ ID NO: 1390581 - DNA, 15 bp, Homo sapiens
cctgggtttggggga

SEQ ID NO: 1390582 - DNA, 15 bp, Homo sapiens
gcctgggtttggggg

SEQ ID NO: 1390583 - DNA, 15 bp, Homo sapiens
tgcctgggtttgggg

SEQ ID NO: 1390584 - DNA, 15 bp, Homo sapiens
ctgcctgggtttggg

SEQ ID NO: 1390585 - DNA, 15 bp, Homo sapiens
actgcctgggtttgg

SEQ ID NO: 1390586 - DNA, 15 bp, Homo sapiens
cactgcctgggtttg

SEQ ID NO: 1390587 - DNA, 15 bp, Homo sapiens
gcactgcctgggttt

SEQ ID NO: 1390588 - DNA, 15 bp, Homo sapiens
tgcactgcctgggtt

SEQ ID NO: 1390589 - DNA, 15 bp, Homo sapiens
ctgcactgcctgggt

SEQ ID NO: 1390590 - DNA, 15 bp, Homo sapiens
gctgcactgcctggg

SEQ ID NO: 1390591 - DNA, 15 bp, Homo sapiens
agctgcactgcctgg

SEQ ID NO: 1390592 - DNA, 15 bp, Homo sapiens
aagctgcactgcctg

SEQ ID NO: 1390593 - DNA, 15 bp, Homo sapiens
caagctgcactgcct

SEQ ID NO: 1390594 - DNA, 15 bp, Homo sapiens
gcaagctgcactgcc

SEQ ID NO: 1390595 - DNA, 15 bp, Homo sapiens
tgcaagctgcactgc

SEQ ID NO: 1390596 - DNA, 15 bp, Homo sapiens
ctgcaagctgcactg

SEQ ID NO: 1390597 - DNA, 15 bp, Homo sapiens
gctgcaagctgcact

SEQ ID NO: 1390598 - DNA, 15 bp, Homo sapiens
agctgcaagctgcac

SEQ ID NO: 1390599 - DNA, 15 bp, Homo sapiens
gagctgcaagctgca

SEQ ID NO: 1390600 - DNA, 15 bp, Homo sapiens
ggagctgcaagctgc

SEQ ID NO: 1390601 - DNA, 15 bp, Homo sapiens
tggagctgcaagctg

SEQ ID NO: 1390602 - DNA, 15 bp, Homo sapiens
ctggagctgcaagct

SEQ ID NO: 1390603 - DNA, 15 bp, Homo sapiens
cctggagctgcaagc

SEQ ID NO: 1390604 - DNA, 15 bp, Homo sapiens
tcctggagctgcaag

SEQ ID NO: 1390605 - DNA, 15 bp, Homo sapiens
ctcctggagctgcaa

SEQ ID NO: 1390606 - DNA, 15 bp, Homo sapiens
tctcctggagctgca

SEQ ID NO: 1390607 - DNA, 15 bp, Homo sapiens
ctctcctggagctgc

SEQ ID NO: 1390608 - DNA, 15 bp, Homo sapiens
tctctcctggagctg

SEQ ID NO: 1390609 - DNA, 15 bp, Homo sapiens
gtctctcctggagct

SEQ ID NO: 1390610 - DNA, 15 bp, Homo sapiens
agtctctcctggagc

SEQ ID NO: 1390611 - DNA, 15 bp, Homo sapiens
gagtctctcctggag

SEQ ID NO: 1390612 - DNA, 15 bp, Homo sapiens
ggagtctctcctgga

SEQ ID NO: 1390613 - DNA, 15 bp, Homo sapiens
aggagtctctcctgg

SEQ ID NO: 1390614 - DNA, 15 bp, Homo sapiens
aaggagtctctcctg

SEQ ID NO: 1390615 - DNA, 15 bp, Homo sapiens
aaaggagtctctcct

SEQ ID NO: 1390616 - DNA, 15 bp, Homo sapiens
gaaaggagtctctcc

SEQ ID NO: 1390617 - DNA, 15 bp, Homo sapiens
agaaaggagtctctc

SEQ ID NO: 1390618 - DNA, 15 bp, Homo sapiens
aagaaaggagtctct

SEQ ID NO: 1390619 - DNA, 15 bp, Homo sapiens
gaagaaaggagtctc

SEQ ID NO: 1390620 - DNA, 15 bp, Homo sapiens
agaagaaaggagtct

SEQ ID NO: 1390621 - DNA, 15 bp, Homo sapiens
cagaagaaaggagtc

SEQ ID NO: 1390622 - DNA, 15 bp, Homo sapiens
gcagaagaaaggagt

SEQ ID NO: 1390623 - DNA, 15 bp, Homo sapiens
agcagaagaaaggag

SEQ ID NO: 1390624 - DNA, 15 bp, Homo sapiens
aagcagaagaaagga

SEQ ID NO: 1390625 - DNA, 15 bp, Homo sapiens
caagcagaagaaagg

SEQ ID NO: 1390626 - DNA, 15 bp, Homo sapiens
ctcaagcagaagaaa

SEQ ID NO: 1390627 - DNA, 15 bp, Homo sapiens
cctcaagcagaagaa

SEQ ID NO: 1390628 - DNA, 15 bp, Homo sapiens
tcctcaagcagaaga

SEQ ID NO: 1390629 - DNA, 15 bp, Homo sapiens
ctcctcaagcagaag

SEQ ID NO: 1390630 - DNA, 15 bp, Homo sapiens
tctcctcaagcagaa

SEQ ID NO: 1390631 - DNA, 15 bp, Homo sapiens
ctctcctcaagcaga

SEQ ID NO: 1390632 - DNA, 15 bp, Homo sapiens
cctctcctcaagcag

SEQ ID NO: 1390633 - DNA, 15 bp, Homo sapiens
acctctcctcaagca

SEQ ID NO: 1390634 - DNA, 15 bp, Homo sapiens
tacctctcctcaagc

SEQ ID NO: 1390635 - DNA, 15 bp, Homo sapiens
ttacctctcctcaag

SEQ ID NO: 1390636 - DNA, 15 bp, Homo sapiens
cttacctctcctcaa

SEQ ID NO: 1390637 - DNA, 15 bp, Homo sapiens
ccttacctctcctca

SEQ ID NO: 1390638 - DNA, 15 bp, Homo sapiens
cccttacctctcctc

SEQ ID NO: 1390639 - DNA, 15 bp, Homo sapiens
ccccttacctctcct

SEQ ID NO: 1390640 - DNA, 15 bp, Homo sapiens
tccccttacctctcc

SEQ ID NO: 1390641 - DNA, 15 bp, Homo sapiens
ttccccttacctctc

SEQ ID NO: 1390642 - DNA, 15 bp, Homo sapiens
tttccccttacctct

SEQ ID NO: 1390643 - DNA, 15 bp, Homo sapiens
ctttccccttacctc

SEQ ID NO: 1390644 - DNA, 15 bp, Homo sapiens
actttccccttacct

SEQ ID NO: 1390645 - DNA, 15 bp, Homo sapiens
tactttccccttacc

SEQ ID NO: 1390646 - DNA, 15 bp, Homo sapiens
ttactttccccttac

SEQ ID NO: 1390647 - DNA, 15 bp, Homo sapiens
tttactttcccctta

SEQ ID NO: 1390648 - DNA, 15 bp, Homo sapiens
ctttactttcccctt

SEQ ID NO: 1390649 - DNA, 15 bp, Homo sapiens
tctttactttcccct

SEQ ID NO: 1390650 - DNA, 15 bp, Homo sapiens
ctctttactttcccc

SEQ ID NO: 1390651 - DNA, 15 bp, Homo sapiens
tctctttactttccc

SEQ ID NO: 1390652 - DNA, 15 bp, Homo sapiens
ttctctttactttcc

SEQ ID NO: 1390653 - DNA, 15 bp, Homo sapiens
gttctctttactttc

SEQ ID NO: 1390654 - DNA, 15 bp, Homo sapiens
agttctctttacttt

SEQ ID NO: 1390655 - DNA, 15 bp, Homo sapiens
aagttctctttactt

SEQ ID NO: 1390656 - DNA, 15 bp, Homo sapiens
aaagttctctttact

SEQ ID NO: 1390657 - DNA, 15 bp, Homo sapiens
caaagttctctttac

SEQ ID NO: 1390658 - DNA, 15 bp, Homo sapiens
acaaagttctcttta

SEQ ID NO: 1390659 - DNA, 15 bp, Homo sapiens
gacaaagttctcttt

SEQ ID NO: 1390660 - DNA, 15 bp, Homo sapiens
agacaaagttctctt

SEQ ID NO: 1390661 - DNA, 15 bp, Homo sapiens
aagacaaagttctct

SEQ ID NO: 1390662 - DNA, 15 bp, Homo sapiens
caagacaaagttctc

SEQ ID NO: 1390663 - DNA, 15 bp, Homo sapiens
ccaagacaaagttct

SEQ ID NO: 1390664 - DNA, 15 bp, Homo sapiens
tccaagacaaagttc

SEQ ID NO: 1390665 - DNA, 15 bp, Homo sapiens
ttccaagacaaagtt

SEQ ID NO: 1390666 - DNA, 15 bp, Homo sapiens
gttccaagacaaagt

SEQ ID NO: 1390667 - DNA, 15 bp, Homo sapiens
agttccaagacaaag

SEQ ID NO: 1390668 - DNA, 15 bp, Homo sapiens
aagttccaagacaaa

SEQ ID NO: 1390669 - DNA, 15 bp, Homo sapiens
caagttccaagacaa

SEQ ID NO: 1390670 - DNA, 15 bp, Homo sapiens
ccaagttccaagaca

SEQ ID NO: 1390671 - DNA, 15 bp, Homo sapiens
tccaagttccaagac

SEQ ID NO: 1390672 - DNA, 15 bp, Homo sapiens
atccaagttccaaga

SEQ ID NO: 1390673 - DNA, 15 bp, Homo sapiens
tatccaagttccaag

SEQ ID NO: 1390674 - DNA, 15 bp, Homo sapiens
gtatccaagttccaa

SEQ ID NO: 1390675 - DNA, 15 bp, Homo sapiens
ggtatccaagttcca

SEQ ID NO: 1390676 - DNA, 15 bp, Homo sapiens
tggtatccaagttcc

SEQ ID NO: 1390677 - DNA, 15 bp, Homo sapiens
ctggtatccaagttc

SEQ ID NO: 1390678 - DNA, 15 bp, Homo sapiens
gctggtatccaagtt

SEQ ID NO: 1390679 - DNA, 15 bp, Homo sapiens
ggctggtatccaagt

SEQ ID NO: 1390680 - DNA, 15 bp, Homo sapiens
gggctggtatccaag

SEQ ID NO: 1390681 - DNA, 15 bp, Homo sapiens
tgggctggtatccaa

SEQ ID NO: 1390682 - DNA, 15 bp, Homo sapiens
ttgggctggtatcca

SEQ ID NO: 1390683 - DNA, 15 bp, Homo sapiens
gttgggctggtatcc

SEQ ID NO: 1390684 - DNA, 15 bp, Homo sapiens
ggttgggctggtatc

SEQ ID NO: 1390685 - DNA, 15 bp, Homo sapiens
tggttgggctggtat

SEQ ID NO: 1390686 - DNA, 15 bp, Homo sapiens
gtggttgggctggta

SEQ ID NO: 1390687 - DNA, 15 bp, Homo sapiens
tgtggttgggctggt

SEQ ID NO: 1390688 - DNA, 15 bp, Homo sapiens
ctgtggttgggctgg

SEQ ID NO: 1390689 - DNA, 15 bp, Homo sapiens
actgtggttgggctg

SEQ ID NO: 1390690 - DNA, 15 bp, Homo sapiens
cactgtggttgggct

SEQ ID NO: 1390691 - DNA, 15 bp, Homo sapiens
ccactgtggttgggc

SEQ ID NO: 1390692 - DNA, 15 bp, Homo sapiens
tccactgtggttggg

SEQ ID NO: 1390693 - DNA, 15 bp, Homo sapiens
ttccactgtggttgg

SEQ ID NO: 1390694 - DNA, 15 bp, Homo sapiens
attccactgtggttg

SEQ ID NO: 1390695 - DNA, 15 bp, Homo sapiens
tattccactgtggtt

SEQ ID NO: 1390696 - DNA, 15 bp, Homo sapiens
atattccactgtggt

SEQ ID NO: 1390697 - DNA, 15 bp, Homo sapiens
catattccactgtgg

SEQ ID NO: 1390698 - DNA, 15 bp, Homo sapiens
ccatattccactgtg

SEQ ID NO: 1390699 - DNA, 15 bp, Homo sapiens
gccatattccactgt

SEQ ID NO: 1390700 - DNA, 15 bp, Homo sapiens
tgccatattccactg

SEQ ID NO: 1390701 - DNA, 15 bp, Homo sapiens
gtgccatattccact

SEQ ID NO: 1390702 - DNA, 15 bp, Homo sapiens
ggtgccatattccac

SEQ ID NO: 1390703 - DNA, 15 bp, Homo sapiens
tggtgccatattcca

SEQ ID NO: 1390704 - DNA, 15 bp, Homo sapiens
ctggtgccatattcc

SEQ ID NO: 1390705 - DNA, 15 bp, Homo sapiens
cctggtgccatattc

SEQ ID NO: 1390706 - DNA, 15 bp, Homo sapiens
gcctggtgccatatt

SEQ ID NO: 1390707 - DNA, 15 bp, Homo sapiens
tgcctggtgccatat

SEQ ID NO: 1390708 - DNA, 15 bp, Homo sapiens
ctgcctggtgccata

SEQ ID NO: 1390709 - DNA, 15 bp, Homo sapiens
tctgcctggtgccat

SEQ ID NO: 1390710 - DNA, 15 bp, Homo sapiens
ctctgcctggtgcca

SEQ ID NO: 1390711 - DNA, 15 bp, Homo sapiens
actctgcctggtgcc

SEQ ID NO: 1390712 - DNA, 15 bp, Homo sapiens
gactctgcctggtgc

SEQ ID NO: 1390713 - DNA, 15 bp, Homo sapiens
ggactctgcctggtg

SEQ ID NO: 1390714 - DNA, 15 bp, Homo sapiens
aggactctgcctggt

SEQ ID NO: 1390715 - DNA, 15 bp, Homo sapiens
taggactctgcctgg

SEQ ID NO: 1390716 - DNA, 15 bp, Homo sapiens
ttaggactctgcctg

SEQ ID NO: 1390717 - DNA, 15 bp, Homo sapiens
cttaggactctgcct

SEQ ID NO: 1390718 - DNA, 15 bp, Homo sapiens
ccttaggactctgcc

SEQ ID NO: 1390719 - DNA, 15 bp, Homo sapiens
tccttaggactctgc

SEQ ID NO: 1390720 - DNA, 15 bp, Homo sapiens
gtccttaggactctg

SEQ ID NO: 1390721 - DNA, 15 bp, Homo sapiens
agtccttaggactct

SEQ ID NO: 1390722 - DNA, 15 bp, Homo sapiens
gagtccttaggactc

SEQ ID NO: 1390723 - DNA, 15 bp, Homo sapiens
agagtccttaggact

SEQ ID NO: 1390724 - DNA, 15 bp, Homo sapiens
tagagtccttaggac

SEQ ID NO: 1390725 - DNA, 15 bp, Homo sapiens
atagagtccttagga

SEQ ID NO: 1390726 - DNA, 15 bp, Homo sapiens
aatagagtccttagg

SEQ ID NO: 1390727 - DNA, 15 bp, Homo sapiens
gaatagagtccttag

SEQ ID NO: 1390728 - DNA, 15 bp, Homo sapiens
ggaatagagtcctta

SEQ ID NO: 1390729 - DNA, 15 bp, Homo sapiens
tggaatagagtcctt

SEQ ID NO: 1390730 - DNA, 15 bp, Homo sapiens
ctggaatagagtcct

SEQ ID NO: 1390731 - DNA, 15 bp, Homo sapiens
cctggaatagagtcc

SEQ ID NO: 1390732 - DNA, 15 bp, Homo sapiens
gcctggaatagagtc

SEQ ID NO: 1390733 - DNA, 15 bp, Homo sapiens
ggcctggaatagagt

SEQ ID NO: 1390734 - DNA, 15 bp, Homo sapiens
gggcctggaatagag

SEQ ID NO: 1390735 - DNA, 15 bp, Homo sapiens
agggcctggaataga

SEQ ID NO: 1390736 - DNA, 15 bp, Homo sapiens
aagggcctggaatag

SEQ ID NO: 1390737 - DNA, 15 bp, Homo sapiens
caagggcctggaata

SEQ ID NO: 1390738 - DNA, 15 bp, Homo sapiens
gcaagggcctggaat

SEQ ID NO: 1390739 - DNA, 15 bp, Homo sapiens
agcaagggcctggaa

SEQ ID NO: 1390740 - DNA, 15 bp, Homo sapiens
aagcaagggcctgga

SEQ ID NO: 1390741 - DNA, 15 bp, Homo sapiens
taagcaagggcctgg

SEQ ID NO: 1390742 - DNA, 15 bp, Homo sapiens
ataagcaagggcctg

SEQ ID NO: 1390743 - DNA, 15 bp, Homo sapiens
cataagcaagggcct

SEQ ID NO: 1390744 - DNA, 15 bp, Homo sapiens
ccataagcaagggcc

SEQ ID NO: 1390745 - DNA, 15 bp, Homo sapiens
tccataagcaagggc

SEQ ID NO: 1390746 - DNA, 15 bp, Homo sapiens
atccataagcaaggg

SEQ ID NO: 1390747 - DNA, 15 bp, Homo sapiens
catccataagcaagg

SEQ ID NO: 1390748 - DNA, 15 bp, Homo sapiens
tcatccataagcaag

SEQ ID NO: 1390749 - DNA, 15 bp, Homo sapiens
gtcatccataagcaa

SEQ ID NO: 1390750 - DNA, 15 bp, Homo sapiens
tgtcatccataagca

SEQ ID NO: 1390751 - DNA, 15 bp, Homo sapiens
atgtcatccataagc

SEQ ID NO: 1390752 - DNA, 15 bp, Homo sapiens
aatgtcatccataag

SEQ ID NO: 1390753 - DNA, 15 bp, Homo sapiens
aaatgtcatccataa

SEQ ID NO: 1390754 - DNA, 15 bp, Homo sapiens
gaaatgtcatccata

SEQ ID NO: 1390755 - DNA, 15 bp, Homo sapiens
agaaatgtcatccat

SEQ ID NO: 1390756 - DNA, 15 bp, Homo sapiens
tagaaatgtcatcca

SEQ ID NO: 1390757 - DNA, 15 bp, Homo sapiens
ctagaaatgtcatcc

SEQ ID NO: 1390758 - DNA, 15 bp, Homo sapiens
tctagaaatgtcatc

SEQ ID NO: 1390759 - DNA, 15 bp, Homo sapiens
atctagaaatgtcat

SEQ ID NO: 1390760 - DNA, 15 bp, Homo sapiens
tatctagaaatgtca

SEQ ID NO: 1390761 - DNA, 15 bp, Homo sapiens
gtatctagaaatgtc

SEQ ID NO: 1390762 - DNA, 15 bp, Homo sapiens
tgtatctagaaatgt

SEQ ID NO: 1390763 - DNA, 15 bp, Homo sapiens
gtgtatctagaaatg

SEQ ID NO: 1390764 - DNA, 15 bp, Homo sapiens
agtgtatctagaaat

SEQ ID NO: 1390765 - DNA, 15 bp, Homo sapiens
cagtgtatctagaaa

SEQ ID NO: 1390766 - DNA, 15 bp, Homo sapiens
acagtgtatctagaa

SEQ ID NO: 1390767 - DNA, 15 bp, Homo sapiens
cacagtgtatctaga

SEQ ID NO: 1390768 - DNA, 15 bp, Homo sapiens
ccacagtgtatctag

SEQ ID NO: 1390769 - DNA, 15 bp, Homo sapiens
cccacagtgtatcta

SEQ ID NO: 1390770 - DNA, 15 bp, Homo sapiens
gcccacagtgtatct

SEQ ID NO: 1390771 - DNA, 15 bp, Homo sapiens
ggcccacagtgtatc

SEQ ID NO: 1390772 - DNA, 15 bp, Homo sapiens
tggcccacagtgtat

SEQ ID NO: 1390773 - DNA, 15 bp, Homo sapiens
ctggcccacagtgta

SEQ ID NO: 1390774 - DNA, 15 bp, Homo sapiens
tctggcccacagtgt

SEQ ID NO: 1390775 - DNA, 15 bp, Homo sapiens
ttctggcccacagtg

SEQ ID NO: 1390776 - DNA, 15 bp, Homo sapiens
cttctggcccacagt

SEQ ID NO: 1390777 - DNA, 15 bp, Homo sapiens
ccttctggcccacag

SEQ ID NO: 1390778 - DNA, 15 bp, Homo sapiens
cccttctggcccaca

SEQ ID NO: 1390779 - DNA, 15 bp, Homo sapiens
tcccttctggcccac

SEQ ID NO: 1390780 - DNA, 15 bp, Homo sapiens
ttcccttctggccca

SEQ ID NO: 1390781 - DNA, 15 bp, Homo sapiens
gttcccttctggccc

SEQ ID NO: 1390782 - DNA, 15 bp, Homo sapiens
ggttcccttctggcc

SEQ ID NO: 1390783 - DNA, 15 bp, Homo sapiens
aggttcccttctggc

SEQ ID NO: 1390784 - DNA, 15 bp, Homo sapiens
taggttcccttctgg

SEQ ID NO: 1390785 - DNA, 15 bp, Homo sapiens
gtaggttcccttctg

SEQ ID NO: 1390786 - DNA, 15 bp, Homo sapiens
agtaggttcccttct

SEQ ID NO: 1390787 - DNA, 15 bp, Homo sapiens
cagtaggttcccttc

SEQ ID NO: 1390788 - DNA, 15 bp, Homo sapiens
gcagtaggttccctt

SEQ ID NO: 1390789 - DNA, 15 bp, Homo sapiens
ggcagtaggttccct

SEQ ID NO: 1390790 - DNA, 15 bp, Homo sapiens
aggcagtaggttccc

SEQ ID NO: 1390791 - DNA, 15 bp, Homo sapiens
aaggcagtaggttcc

SEQ ID NO: 1390792 - DNA, 15 bp, Homo sapiens
caaggcagtaggttc

SEQ ID NO: 1390793 - DNA, 15 bp, Homo sapiens
tcaaggcagtaggtt

SEQ ID NO: 1390794 - DNA, 15 bp, Homo sapiens
ttcaaggcagtaggt

SEQ ID NO: 1390795 - DNA, 15 bp, Homo sapiens
cttcaaggcagtagg

SEQ ID NO: 1390796 - DNA, 15 bp, Homo sapiens
ccttcaaggcagtag

SEQ ID NO: 1390797 - DNA, 15 bp, Homo sapiens
cccttcaaggcagta

SEQ ID NO: 1390798 - DNA, 15 bp, Homo sapiens
tcccttcaaggcagt

SEQ ID NO: 1390799 - DNA, 15 bp, Homo sapiens
ttcccttcaaggcag

SEQ ID NO: 1390800 - DNA, 15 bp, Homo sapiens
cttcccttcaaggca

SEQ ID NO: 1390801 - DNA, 15 bp, Homo sapiens
tcttcccttcaaggc

SEQ ID NO: 1390802 - DNA, 15 bp, Homo sapiens
ttcttcccttcaagg

SEQ ID NO: 1390803 - DNA, 15 bp, Homo sapiens
tttcttcccttcaag

SEQ ID NO: 1390804 - DNA, 15 bp, Homo sapiens
gtttcttcccttcaa

SEQ ID NO: 1390805 - DNA, 15 bp, Homo sapiens
agtttcttcccttca

SEQ ID NO: 1390806 - DNA, 15 bp, Homo sapiens
tagtttcttcccttc

SEQ ID NO: 1390807 - DNA, 15 bp, Homo sapiens
ctagtttcttccctt

SEQ ID NO: 1390808 - DNA, 15 bp, Homo sapiens
actagtttcttccct

SEQ ID NO: 1390809 - DNA, 15 bp, Homo sapiens
gactagtttcttccc

SEQ ID NO: 1390810 - DNA, 15 bp, Homo sapiens
ggactagtttcttcc

SEQ ID NO: 1390811 - DNA, 15 bp, Homo sapiens
tggactagtttcttc

SEQ ID NO: 1390812 - DNA, 15 bp, Homo sapiens
ctggactagtttctt

SEQ ID NO: 1390813 - DNA, 15 bp, Homo sapiens
cctggactagtttct

SEQ ID NO: 1390814 - DNA, 15 bp, Homo sapiens
acctggactagtttc

SEQ ID NO: 1390815 - DNA, 15 bp, Homo sapiens
tacctggactagttt

SEQ ID NO: 1390816 - DNA, 15 bp, Homo sapiens
ctacctggactagtt

SEQ ID NO: 1390817 - DNA, 15 bp, Homo sapiens
cctacctggactagt

SEQ ID NO: 1390818 - DNA, 15 bp, Homo sapiens
tcctacctggactag

SEQ ID NO: 1390819 - DNA, 15 bp, Homo sapiens
atcctacctggacta

SEQ ID NO: 1390820 - DNA, 15 bp, Homo sapiens
aatcctacctggact

SEQ ID NO: 1390821 - DNA, 15 bp, Homo sapiens
aaatcctacctggac

SEQ ID NO: 1390822 - DNA, 15 bp, Homo sapiens
taaatcctacctgga

SEQ ID NO: 1390823 - DNA, 15 bp, Homo sapiens
ataaatcctacctgg

SEQ ID NO: 1390824 - DNA, 15 bp, Homo sapiens
gataaatcctacctg

SEQ ID NO: 1390825 - DNA, 15 bp, Homo sapiens
tgataaatcctacct

SEQ ID NO: 1390826 - DNA, 15 bp, Homo sapiens
gtgataaatcctacc

SEQ ID NO: 1390827 - DNA, 15 bp, Homo sapiens
ggtgataaatcctac

SEQ ID NO: 1390828 - DNA, 15 bp, Homo sapiens
aggtgataaatccta

SEQ ID NO: 1390829 - DNA, 15 bp, Homo sapiens
caggtgataaatcct

SEQ ID NO: 1390830 - DNA, 15 bp, Homo sapiens
gcaggtgataaatcc

SEQ ID NO: 1390831 - DNA, 15 bp, Homo sapiens
agcaggtgataaatc

SEQ ID NO: 1390832 - DNA, 15 bp, Homo sapiens
cagcaggtgataaat

SEQ ID NO: 1390833 - DNA, 15 bp, Homo sapiens
tcagcaggtgataaa

SEQ ID NO: 1390834 - DNA, 15 bp, Homo sapiens
gtcagcaggtgataa

SEQ ID NO: 1390835 - DNA, 15 bp, Homo sapiens
agtcagcaggtgata

SEQ ID NO: 1390836 - DNA, 15 bp, Homo sapiens
tagtcagcaggtgat

SEQ ID NO: 1390837 - DNA, 15 bp, Homo sapiens
ttagtcagcaggtga

SEQ ID NO: 1390838 - DNA, 15 bp, Homo sapiens
tttagtcagcaggtg

SEQ ID NO: 1390839 - DNA, 15 bp, Homo sapiens
ctttagtcagcaggt

SEQ ID NO: 1390840 - DNA, 15 bp, Homo sapiens
cctttagtcagcagg

SEQ ID NO: 1390841 - DNA, 15 bp, Homo sapiens
ccctttagtcagcag

SEQ ID NO: 1390842 - DNA, 15 bp, Homo sapiens
accctttagtcagca

SEQ ID NO: 1390843 - DNA, 15 bp, Homo sapiens
gaccctttagtcagc

SEQ ID NO: 1390844 - DNA, 15 bp, Homo sapiens
ggaccctttagtcag

SEQ ID NO: 1390845 - DNA, 15 bp, Homo sapiens
aggaccctttagtca

SEQ ID NO: 1390846 - DNA, 15 bp, Homo sapiens
aaggaccctttagtc

SEQ ID NO: 1390847 - DNA, 15 bp, Homo sapiens
caaggaccctttagt

SEQ ID NO: 1390848 - DNA, 15 bp, Homo sapiens
ccaaggaccctttag

SEQ ID NO: 1390849 - DNA, 15 bp, Homo sapiens
cccaaggacccttta

SEQ ID NO: 1390850 - DNA, 15 bp, Homo sapiens
gcccaaggacccttt

SEQ ID NO: 1390851 - DNA, 15 bp, Homo sapiens
ggcccaaggaccctt

SEQ ID NO: 1390852 - DNA, 15 bp, Homo sapiens
aggcccaaggaccct

SEQ ID NO: 1390853 - DNA, 15 bp, Homo sapiens
aaggcccaaggaccc

SEQ ID NO: 1390854 - DNA, 15 bp, Homo sapiens
taaggcccaaggacc

SEQ ID NO: 1390855 - DNA, 15 bp, Homo sapiens
ttaaggcccaaggac

SEQ ID NO: 1390856 - DNA, 15 bp, Homo sapiens
tttaaggcccaagga

SEQ ID NO: 1390857 - DNA, 15 bp, Homo sapiens
atttaaggcccaagg

SEQ ID NO: 1390858 - DNA, 15 bp, Homo sapiens
tatttaaggcccaag

SEQ ID NO: 1390859 - DNA, 15 bp, Homo sapiens
ttatttaaggcccaa

SEQ ID NO: 1390860 - DNA, 15 bp, Homo sapiens
tttatttaaggccca

SEQ ID NO: 1390861 - DNA, 15 bp, Homo sapiens
gtttatttaaggccc

SEQ ID NO: 1390862 - DNA, 15 bp, Homo sapiens
tgtttatttaaggcc

SEQ ID NO: 1390863 - DNA, 15 bp, Homo sapiens
atgtttatttaaggc

SEQ ID NO: 1390864 - DNA, 15 bp, Homo sapiens
gatgtttatttaagg

SEQ ID NO: 1390865 - DNA, 15 bp, Homo sapiens
tgatgtttatttaag

SEQ ID NO: 1390866 - DNA, 15 bp, Homo sapiens
ctgatgtttatttaa

SEQ ID NO: 1390867 - DNA, 15 bp, Homo sapiens
actgatgtttattta

SEQ ID NO: 1390868 - DNA, 15 bp, Homo sapiens
cactgatgtttattt

SEQ ID NO: 1390869 - DNA, 15 bp, Homo sapiens
ccactgatgtttatt

SEQ ID NO: 1390870 - DNA, 15 bp, Homo sapiens
accactgatgtttat

SEQ ID NO: 1390871 - DNA, 15 bp, Homo sapiens
aaccactgatgttta

SEQ ID NO: 1390872 - DNA, 15 bp, Homo sapiens
caaccactgatgttt

SEQ ID NO: 1390873 - DNA, 15 bp, Homo sapiens
gcaaccactgatgtt

SEQ ID NO: 1390874 - DNA, 15 bp, Homo sapiens
ggcaaccactgatgt

SEQ ID NO: 1390875 - DNA, 15 bp, Homo sapiens
tggcaaccactgatg

SEQ ID NO: 1390876 - DNA, 15 bp, Homo sapiens
gcctggcaaccactg

SEQ ID NO: 1390877 - DNA, 15 bp, Homo sapiens
tgcctggcaaccact

SEQ ID NO: 1390878 - DNA, 15 bp, Homo sapiens
ctgcctggcaaccac

SEQ ID NO: 1390879 - DNA, 15 bp, Homo sapiens
actgcctggcaacca

SEQ ID NO: 1390880 - DNA, 15 bp, Homo sapiens
tactgcctggcaacc

SEQ ID NO: 1390881 - DNA, 15 bp, Homo sapiens
gtactgcctggcaac

SEQ ID NO: 1390882 - DNA, 15 bp, Homo sapiens
agtactgcctggcaa

SEQ ID NO: 1390883 - DNA, 15 bp, Homo sapiens
aagtactgcctggca

SEQ ID NO: 1390884 - DNA, 15 bp, Homo sapiens
taagtactgcctggc

SEQ ID NO: 1390885 - DNA, 15 bp, Homo sapiens
ataagtactgcctgg

SEQ ID NO: 1390886 - DNA, 15 bp, Homo sapiens
gataagtactgcctg

SEQ ID NO: 1390887 - DNA, 15 bp, Homo sapiens
tgataagtactgcct

SEQ ID NO: 1390888 - DNA, 15 bp, Homo sapiens
gtgataagtactgcc

SEQ ID NO: 1390889 - DNA, 15 bp, Homo sapiens
cgtgataagtactgc

SEQ ID NO: 1390890 - DNA, 15 bp, Homo sapiens
ccgtgataagtactg

SEQ ID NO: 1390891 - DNA, 15 bp, Homo sapiens
cccgtgataagtact

SEQ ID NO: 1390892 - DNA, 15 bp, Homo sapiens
ccccgtgataagtac

SEQ ID NO: 1390893 - DNA, 15 bp, Homo sapiens
gccccgtgataagta

SEQ ID NO: 1390894 - DNA, 15 bp, Homo sapiens
agccccgtgataagt

SEQ ID NO: 1390895 - DNA, 15 bp, Homo sapiens
aagccccgtgataag

SEQ ID NO: 1390896 - DNA, 15 bp, Homo sapiens
gaagccccgtgataa

SEQ ID NO: 1390897 - DNA, 15 bp, Homo sapiens
tgaagccccgtgata

SEQ ID NO: 1390898 - DNA, 15 bp, Homo sapiens
ctgaagccccgtgat

SEQ ID NO: 1390899 - DNA, 15 bp, Homo sapiens
actgaagccccgtga

SEQ ID NO: 1390900 - DNA, 15 bp, Homo sapiens
cactgaagccccgtg

SEQ ID NO: 1390901 - DNA, 15 bp, Homo sapiens
tcactgaagccccgt

SEQ ID NO: 1390902 - DNA, 15 bp, Homo sapiens
ctcactgaagccccg

SEQ ID NO: 1390903 - DNA, 15 bp, Homo sapiens
tctcactgaagcccc

SEQ ID NO: 1390904 - DNA, 15 bp, Homo sapiens
gtctcactgaagccc

SEQ ID NO: 1390905 - DNA, 15 bp, Homo sapiens
ggtctcactgaagcc

SEQ ID NO: 1390906 - DNA, 15 bp, Homo sapiens
gggtctcactgaagc

SEQ ID NO: 1390907 - DNA, 15 bp, Homo sapiens
tgggtctcactgaag

SEQ ID NO: 1390908 - DNA, 15 bp, Homo sapiens
ctgggtctcactgaa

SEQ ID NO: 1390909 - DNA, 15 bp, Homo sapiens
cctgggtctcactga

SEQ ID NO: 1390910 - DNA, 15 bp, Homo sapiens
ccctgggtctcactg

SEQ ID NO: 1390911 - DNA, 15 bp, Homo sapiens
accctgggtctcact

SEQ ID NO: 1390912 - DNA, 15 bp, Homo sapiens
gaccctgggtctcac

SEQ ID NO: 1390913 - DNA, 15 bp, Homo sapiens
tgaccctgggtctca

SEQ ID NO: 1390914 - DNA, 15 bp, Homo sapiens
atgaccctgggtctc

SEQ ID NO: 1390915 - DNA, 15 bp, Homo sapiens
catgaccctgggtct

SEQ ID NO: 1390916 - DNA, 15 bp, Homo sapiens
gcatgaccctgggtc

SEQ ID NO: 1390917 - DNA, 15 bp, Homo sapiens
agcatgaccctgggt

SEQ ID NO: 1390918 - DNA, 15 bp, Homo sapiens
cagcatgaccctggg

SEQ ID NO: 1390919 - DNA, 15 bp, Homo sapiens
ccagcatgaccctgg

SEQ ID NO: 1390920 - DNA, 15 bp, Homo sapiens
gccagcatgaccctg

SEQ ID NO: 1390921 - DNA, 15 bp, Homo sapiens
agccagcatgaccct

SEQ ID NO: 1390922 - DNA, 15 bp, Homo sapiens
aagccagcatgaccc

SEQ ID NO: 1390923 - DNA, 15 bp, Homo sapiens
aaagccagcatgacc

SEQ ID NO: 1390924 - DNA, 15 bp, Homo sapiens
taaagccagcatgac

SEQ ID NO: 1390925 - DNA, 15 bp, Homo sapiens
ttaaagccagcatga

SEQ ID NO: 1390926 - DNA, 15 bp, Homo sapiens
cttaaagccagcatg

SEQ ID NO: 1390927 - DNA, 15 bp, Homo sapiens
acttaaagccagcat

SEQ ID NO: 1390928 - DNA, 15 bp, Homo sapiens
cacttaaagccagca

SEQ ID NO: 1390929 - DNA, 15 bp, Homo sapiens
acacttaaagccagc

SEQ ID NO: 1390930 - DNA, 15 bp, Homo sapiens
cacacttaaagccag

SEQ ID NO: 1390931 - DNA, 15 bp, Homo sapiens
tcacacttaaagcca

SEQ ID NO: 1390932 - DNA, 15 bp, Homo sapiens
gtcacacttaaagcc

SEQ ID NO: 1390933 - DNA, 15 bp, Homo sapiens
ggtcacacttaaagc

SEQ ID NO: 1390934 - DNA, 15 bp, Homo sapiens
gggtcacacttaaag

SEQ ID NO: 1390935 - DNA, 15 bp, Homo sapiens
tgggtcacacttaaa

SEQ ID NO: 1390936 - DNA, 15 bp, Homo sapiens
ctgggtcacacttaa

SEQ ID NO: 1390937 - DNA, 15 bp, Homo sapiens
gctgggtcacactta

SEQ ID NO: 1390938 - DNA, 15 bp, Homo sapiens
tgctgggtcacactt

SEQ ID NO: 1390939 - DNA, 15 bp, Homo sapiens
gtgctgggtcacact

SEQ ID NO: 1390940 - DNA, 15 bp, Homo sapiens
tgtgctgggtcacac

SEQ ID NO: 1390941 - DNA, 15 bp, Homo sapiens
atgtgctgggtcaca

SEQ ID NO: 1390942 - DNA, 15 bp, Homo sapiens
aatgtgctgggtcac

SEQ ID NO: 1390943 - DNA, 15 bp, Homo sapiens
gaatgtgctgggtca

SEQ ID NO: 1390944 - DNA, 15 bp, Homo sapiens
ggaatgtgctgggtc

SEQ ID NO: 1390945 - DNA, 15 bp, Homo sapiens
gggaatgtgctgggt

SEQ ID NO: 1390946 - DNA, 15 bp, Homo sapiens
tgggaatgtgctggg

SEQ ID NO: 1390947 - DNA, 15 bp, Homo sapiens
ctgggaatgtgctgg

SEQ ID NO: 1390948 - DNA, 15 bp, Homo sapiens
gctgggaatgtgctg

SEQ ID NO: 1390949 - DNA, 15 bp, Homo sapiens
agctgggaatgtgct

SEQ ID NO: 1390950 - DNA, 15 bp, Homo sapiens
cagctgggaatgtgc

SEQ ID NO: 1390951 - DNA, 15 bp, Homo sapiens
acagctgggaatgtg

SEQ ID NO: 1390952 - DNA, 15 bp, Homo sapiens
cacagctgggaatgt

SEQ ID NO: 1390953 - DNA, 15 bp, Homo sapiens
ccacagctgggaatg

SEQ ID NO: 1390954 - DNA, 15 bp, Homo sapiens
accacagctgggaat

SEQ ID NO: 1390955 - DNA, 15 bp, Homo sapiens
caccacagctgggaa

SEQ ID NO: 1390956 - DNA, 15 bp, Homo sapiens
gcaccacagctggga

SEQ ID NO: 1390957 - DNA, 15 bp, Homo sapiens
ggcaccacagctggg

SEQ ID NO: 1390958 - DNA, 15 bp, Homo sapiens
gggcaccacagctgg

SEQ ID NO: 1390959 - DNA, 15 bp, Homo sapiens
tgggcaccacagctg

SEQ ID NO: 1390960 - DNA, 15 bp, Homo sapiens
atgggcaccacagct

SEQ ID NO: 1390961 - DNA, 15 bp, Homo sapiens
tatgggcaccacagc

SEQ ID NO: 1390962 - DNA, 15 bp, Homo sapiens
ctatgggcaccacag

SEQ ID NO: 1390963 - DNA, 15 bp, Homo sapiens
tctatgggcaccaca

SEQ ID NO: 1390964 - DNA, 15 bp, Homo sapiens
ctctatgggcaccac

SEQ ID NO: 1390965 - DNA, 15 bp, Homo sapiens
tctctatgggcacca

SEQ ID NO: 1390966 - DNA, 15 bp, Homo sapiens
ctctctatgggcacc

SEQ ID NO: 1390967 - DNA, 15 bp, Homo sapiens
tctctctatgggcac

SEQ ID NO: 1390968 - DNA, 15 bp, Homo sapiens
ctctctctatgggca

SEQ ID NO: 1390969 - DNA, 15 bp, Homo sapiens
tctctctctatgggc

SEQ ID NO: 1390970 - DNA, 15 bp, Homo sapiens
gtctctctctatggg

SEQ ID NO: 1390971 - DNA, 15 bp, Homo sapiens
agtctctctctatgg

SEQ ID NO: 1390972 - DNA, 15 bp, Homo sapiens
aagtctctctctatg

SEQ ID NO: 1390973 - DNA, 15 bp, Homo sapiens
gaagtctctctctat

SEQ ID NO: 1390974 - DNA, 15 bp, Homo sapiens
agaagtctctctcta

SEQ ID NO: 1390975 - DNA, 15 bp, Homo sapiens
aagaagtctctctct

SEQ ID NO: 1390976 - DNA, 15 bp, Homo sapiens
gaagaagtctctctc

SEQ ID NO: 1390977 - DNA, 15 bp, Homo sapiens
agaagaagtctctct

SEQ ID NO: 1390978 - DNA, 15 bp, Homo sapiens
cagaagaagtctctc

SEQ ID NO: 1390979 - DNA, 15 bp, Homo sapiens
acagaagaagtctct

SEQ ID NO: 1390980 - DNA, 15 bp, Homo sapiens
aacagaagaagtctc

SEQ ID NO: 1390981 - DNA, 15 bp, Homo sapiens
caacagaagaagtct

SEQ ID NO: 1390982 - DNA, 15 bp, Homo sapiens
tcaacagaagaagtc

SEQ ID NO: 1390983 - DNA, 15 bp, Homo sapiens
ctcaacagaagaagt

SEQ ID NO: 1390984 - DNA, 15 bp, Homo sapiens
cctcaacagaagaag

SEQ ID NO: 1390985 - DNA, 15 bp, Homo sapiens
tcctcaacagaagaa

SEQ ID NO: 1390986 - DNA, 15 bp, Homo sapiens
ttcctcaacagaaga

SEQ ID NO: 1390987 - DNA, 15 bp, Homo sapiens
tttcctcaacagaag

SEQ ID NO: 1390988 - DNA, 15 bp, Homo sapiens
ctttcctcaacagaa

SEQ ID NO: 1390989 - DNA, 15 bp, Homo sapiens
cctttcctcaacaga

SEQ ID NO: 1390990 - DNA, 15 bp, Homo sapiens
tcctttcctcaacag

SEQ ID NO: 1390991 - DNA, 15 bp, Homo sapiens
ctcctttcctcaaca

SEQ ID NO: 1390992 - DNA, 15 bp, Homo sapiens
tctcctttcctcaac

SEQ ID NO: 1390993 - DNA, 15 bp, Homo sapiens
ctctcctttcctcaa

SEQ ID NO: 1390994 - DNA, 15 bp, Homo sapiens
cctctcctttcctca

SEQ ID NO: 1390995 - DNA, 15 bp, Homo sapiens
ccctctcctttcctc

SEQ ID NO: 1390996 - DNA, 15 bp, Homo sapiens
tccctctcctttcct

SEQ ID NO: 1390997 - DNA, 15 bp, Homo sapiens
ttccctctcctttcc

SEQ ID NO: 1390998 - DNA, 15 bp, Homo sapiens
cttccctctcctttc

SEQ ID NO: 1390999 - DNA, 15 bp, Homo sapiens
tcttccctctccttt

SEQ ID NO: 1391000 - DNA, 15 bp, Homo sapiens
gtcttccctctcctt

SEQ ID NO: 1391001 - DNA, 15 bp, Homo sapiens
agtcttccctctcct

SEQ ID NO: 1391002 - DNA, 15 bp, Homo sapiens
tagtcttccctctcc

SEQ ID NO: 1391003 - DNA, 15 bp, Homo sapiens
ttagtcttccctctc

SEQ ID NO: 1391004 - DNA, 15 bp, Homo sapiens
tttagtcttccctct

SEQ ID NO: 1391005 - DNA, 15 bp, Homo sapiens
ctttagtcttccctc

SEQ ID NO: 1391006 - DNA, 15 bp, Homo sapiens
cctttagtcttccct

SEQ ID NO: 1391007 - DNA, 15 bp, Homo sapiens
ccctttagtcttccc

SEQ ID NO: 1391008 - DNA, 15 bp, Homo sapiens
gccctttagtcttcc

SEQ ID NO: 1391009 - DNA, 15 bp, Homo sapiens
tgccctttagtcttc

SEQ ID NO: 1391010 - DNA, 15 bp, Homo sapiens
gtgccctttagtctt

SEQ ID NO: 1391011 - DNA, 15 bp, Homo sapiens
agtgccctttagtct

SEQ ID NO: 1391012 - DNA, 15 bp, Homo sapiens
aagtgccctttagtc

SEQ ID NO: 1391013 - DNA, 15 bp, Homo sapiens
aaagtgccctttagt

SEQ ID NO: 1391014 - DNA, 15 bp, Homo sapiens
caaagtgccctttag

SEQ ID NO: 1391015 - DNA, 15 bp, Homo sapiens
acaaagtgcccttta

SEQ ID NO: 1391016 - DNA, 15 bp, Homo sapiens
gacaaagtgcccttt

SEQ ID NO: 1391017 - DNA, 15 bp, Homo sapiens
agacaaagtgccctt

SEQ ID NO: 1391018 - DNA, 15 bp, Homo sapiens
aagacaaagtgccct

SEQ ID NO: 1391019 - DNA, 15 bp, Homo sapiens
caagacaaagtgccc

SEQ ID NO: 1391020 - DNA, 15 bp, Homo sapiens
gcaagacaaagtgcc

SEQ ID NO: 1391021 - DNA, 15 bp, Homo sapiens
tgcaagacaaagtgc

SEQ ID NO: 1391022 - DNA, 15 bp, Homo sapiens
gctgcaagacaaagt

SEQ ID NO: 1391023 - DNA, 15 bp, Homo sapiens
agctgcaagacaaag

SEQ ID NO: 1391024 - DNA, 15 bp, Homo sapiens
aagctgcaagacaaa

SEQ ID NO: 1391025 - DNA, 15 bp, Homo sapiens
caagctgcaagacaa

SEQ ID NO: 1391026 - DNA, 15 bp, Homo sapiens
ccaagctgcaagaca

SEQ ID NO: 1391027 - DNA, 15 bp, Homo sapiens
cccaagctgcaagac

SEQ ID NO: 1391028 - DNA, 15 bp, Homo sapiens
acccaagctgcaaga

SEQ ID NO: 1391029 - DNA, 15 bp, Homo sapiens
tacccaagctgcaag

SEQ ID NO: 1391030 - DNA, 15 bp, Homo sapiens
gtacccaagctgcaa

SEQ ID NO: 1391031 - DNA, 15 bp, Homo sapiens
ggtacccaagctgca

SEQ ID NO: 1391032 - DNA, 15 bp, Homo sapiens
tggtacccaagctgc

SEQ ID NO: 1391033 - DNA, 15 bp, Homo sapiens
ttggtacccaagctg

SEQ ID NO: 1391034 - DNA, 15 bp, Homo sapiens
gttggtacccaagct

SEQ ID NO: 1391035 - DNA, 15 bp, Homo sapiens
agttggtacccaagc

SEQ ID NO: 1391036 - DNA, 15 bp, Homo sapiens
aagttggtacccaag

SEQ ID NO: 1391037 - DNA, 15 bp, Homo sapiens
caagttggtacccaa

SEQ ID NO: 1391038 - DNA, 15 bp, Homo sapiens
ccaagttggtaccca

SEQ ID NO: 1391039 - DNA, 15 bp, Homo sapiens
gccaagttggtaccc

SEQ ID NO: 1391040 - DNA, 15 bp, Homo sapiens
ggccaagttggtacc

SEQ ID NO: 1391041 - DNA, 15 bp, Homo sapiens
tggccaagttggtac

SEQ ID NO: 1391042 - DNA, 15 bp, Homo sapiens
gtggccaagttggta

SEQ ID NO: 1391043 - DNA, 15 bp, Homo sapiens
tgtggccaagttggt

SEQ ID NO: 1391044 - DNA, 15 bp, Homo sapiens
ctgtggccaagttgg

SEQ ID NO: 1391045 - DNA, 15 bp, Homo sapiens
actgtggccaagttg

SEQ ID NO: 1391046 - DNA, 15 bp, Homo sapiens
tactgtggccaagtt

SEQ ID NO: 1391047 - DNA, 15 bp, Homo sapiens
ctactgtggccaagt

SEQ ID NO: 1391048 - DNA, 15 bp, Homo sapiens
cctactgtggccaag

SEQ ID NO: 1391049 - DNA, 15 bp, Homo sapiens
ccctactgtggccaa

SEQ ID NO: 1391050 - DNA, 15 bp, Homo sapiens
accctactgtggcca

SEQ ID NO: 1391051 - DNA, 15 bp, Homo sapiens
taccctactgtggcc

SEQ ID NO: 1391052 - DNA, 15 bp, Homo sapiens
ctaccctactgtggc

SEQ ID NO: 1391053 - DNA, 15 bp, Homo sapiens
cctaccctactgtgg

SEQ ID NO: 1391054 - DNA, 15 bp, Homo sapiens
ccctaccctactgtg

SEQ ID NO: 1391055 - DNA, 15 bp, Homo sapiens
gccctaccctactgt

SEQ ID NO: 1391056 - DNA, 15 bp, Homo sapiens
tgccctaccctactg

SEQ ID NO: 1391057 - DNA, 15 bp, Homo sapiens
gtgccctaccctact

SEQ ID NO: 1391058 - DNA, 15 bp, Homo sapiens
ggtgccctaccctac

SEQ ID NO: 1391059 - DNA, 15 bp, Homo sapiens
tggtgccctacccta

SEQ ID NO: 1391060 - DNA, 15 bp, Homo sapiens
ttggtgccctaccct

SEQ ID NO: 1391061 - DNA, 15 bp, Homo sapiens
cttggtgccctaccc

SEQ ID NO: 1391062 - DNA, 15 bp, Homo sapiens
gcttggtgccctacc

SEQ ID NO: 1391063 - DNA, 15 bp, Homo sapiens
tgcttggtgccctac

SEQ ID NO: 1391064 - DNA, 15 bp, Homo sapiens
ctgcttggtgcccta

SEQ ID NO: 1391065 - DNA, 15 bp, Homo sapiens
cctgcttggtgccct

SEQ ID NO: 1391066 - DNA, 15 bp, Homo sapiens
gcctgcttggtgccc

SEQ ID NO: 1391067 - DNA, 15 bp, Homo sapiens
agcctgcttggtgcc

SEQ ID NO: 1391068 - DNA, 15 bp, Homo sapiens
aagcctgcttggtgc

SEQ ID NO: 1391069 - DNA, 15 bp, Homo sapiens
gaagcctgcttggtg

SEQ ID NO: 1391070 - DNA, 15 bp, Homo sapiens
agaagcctgcttggt

SEQ ID NO: 1391071 - DNA, 15 bp, Homo sapiens
cagaagcctgcttgg

SEQ ID NO: 1391072 - DNA, 15 bp, Homo sapiens
ccagaagcctgcttg

SEQ ID NO: 1391073 - DNA, 15 bp, Homo sapiens
cccagaagcctgctt

SEQ ID NO: 1391074 - DNA, 15 bp, Homo sapiens
tcccagaagcctgct

SEQ ID NO: 1391075 - DNA, 15 bp, Homo sapiens
atcccagaagcctgc

SEQ ID NO: 1391076 - DNA, 15 bp, Homo sapiens
gatcccagaagcctg

SEQ ID NO: 1391077 - DNA, 15 bp, Homo sapiens
ggatcccagaagcct

SEQ ID NO: 1391078 - DNA, 15 bp, Homo sapiens
gggatcccagaagcc

SEQ ID NO: 1391079 - DNA, 15 bp, Homo sapiens
ggggatcccagaagc

SEQ ID NO: 1391080 - DNA, 15 bp, Homo sapiens
tggggatcccagaag

SEQ ID NO: 1391081 - DNA, 15 bp, Homo sapiens
ttggggatcccagaa

SEQ ID NO: 1391082 - DNA, 15 bp, Homo sapiens
attggggatcccaga

SEQ ID NO: 1391083 - DNA, 15 bp, Homo sapiens
aattggggatcccag

SEQ ID NO: 1391084 - DNA, 15 bp, Homo sapiens
gaattggggatccca

SEQ ID NO: 1391085 - DNA, 15 bp, Homo sapiens
ggaattggggatccc

SEQ ID NO: 1391086 - DNA, 15 bp, Homo sapiens
tggaattggggatcc

SEQ ID NO: 1391087 - DNA, 15 bp, Homo sapiens
atggaattggggatc

SEQ ID NO: 1391088 - DNA, 15 bp, Homo sapiens
tatggaattggggat

SEQ ID NO: 1391089 - DNA, 15 bp, Homo sapiens
atatggaattgggga

SEQ ID NO: 1391090 - DNA, 15 bp, Homo sapiens
gatatggaattgggg

SEQ ID NO: 1391091 - DNA, 15 bp, Homo sapiens
agatatggaattggg

SEQ ID NO: 1391092 - DNA, 15 bp, Homo sapiens
aagatatggaattgg

SEQ ID NO: 1391093 - DNA, 15 bp, Homo sapiens
caagatatggaattg

SEQ ID NO: 1391094 - DNA, 15 bp, Homo sapiens
ccaagatatggaatt

SEQ ID NO: 1391095 - DNA, 15 bp, Homo sapiens
accaagatatggaat

SEQ ID NO: 1391096 - DNA, 15 bp, Homo sapiens
aaccaagatatggaa

SEQ ID NO: 1391097 - DNA, 15 bp, Homo sapiens
gaaccaagatatgga

SEQ ID NO: 1391098 - DNA, 15 bp, Homo sapiens
ggaaccaagatatgg

SEQ ID NO: 1391099 - DNA, 15 bp, Homo sapiens
aggaaccaagatatg

SEQ ID NO: 1391100 - DNA, 15 bp, Homo sapiens
caggaaccaagatat

SEQ ID NO: 1391101 - DNA, 15 bp, Homo sapiens
tcaggaaccaagata

SEQ ID NO: 1391102 - DNA, 15 bp, Homo sapiens
ttcaggaaccaagat

SEQ ID NO: 1391103 - DNA, 15 bp, Homo sapiens
attcaggaaccaaga

SEQ ID NO: 1391104 - DNA, 15 bp, Homo sapiens
cattcaggaaccaag

SEQ ID NO: 1391105 - DNA, 15 bp, Homo sapiens
ccattcaggaaccaa

SEQ ID NO: 1391106 - DNA, 15 bp, Homo sapiens
gccattcaggaacca

SEQ ID NO: 1391107 - DNA, 15 bp, Homo sapiens
tgccattcaggaacc

SEQ ID NO: 1391108 - DNA, 15 bp, Homo sapiens
atgccattcaggaac

SEQ ID NO: 1391109 - DNA, 15 bp, Homo sapiens
aatgccattcaggaa

SEQ ID NO: 1391110 - DNA, 15 bp, Homo sapiens
aaatgccattcagga

SEQ ID NO: 1391111 - DNA, 15 bp, Homo sapiens
gaaatgccattcagg

SEQ ID NO: 1391112 - DNA, 15 bp, Homo sapiens
agaaatgccattcag

SEQ ID NO: 1391113 - DNA, 15 bp, Homo sapiens
cagaaatgccattca

SEQ ID NO: 1391114 - DNA, 15 bp, Homo sapiens
ccagaaatgccattc

SEQ ID NO: 1391115 - DNA, 15 bp, Homo sapiens
tccagaaatgccatt

SEQ ID NO: 1391116 - DNA, 15 bp, Homo sapiens
gtccagaaatgccat

SEQ ID NO: 1391117 - DNA, 15 bp, Homo sapiens
agtccagaaatgcca

SEQ ID NO: 1391118 - DNA, 15 bp, Homo sapiens
gagtccagaaatgcc

SEQ ID NO: 1391119 - DNA, 15 bp, Homo sapiens
tgagtccagaaatgc

SEQ ID NO: 1391120 - DNA, 15 bp, Homo sapiens
atgagtccagaaatg

SEQ ID NO: 1391121 - DNA, 15 bp, Homo sapiens
gatgagtccagaaat

SEQ ID NO: 1391122 - DNA, 15 bp, Homo sapiens
ggatgagtccagaaa

SEQ ID NO: 1391123 - DNA, 15 bp, Homo sapiens
aggatgagtccagaa

SEQ ID NO: 1391124 - DNA, 15 bp, Homo sapiens
caggatgagtccaga

SEQ ID NO: 1391125 - DNA, 15 bp, Homo sapiens
ccaggatgagtccag

SEQ ID NO: 1391126 - DNA, 15 bp, Homo sapiens
cccaggatgagtcca

SEQ ID NO: 1391127 - DNA, 15 bp, Homo sapiens
gcccaggatgagtcc

SEQ ID NO: 1391128 - DNA, 15 bp, Homo sapiens
agcccaggatgagtc

SEQ ID NO: 1391129 - DNA, 15 bp, Homo sapiens
cagcccaggatgagt

SEQ ID NO: 1391130 - DNA, 15 bp, Homo sapiens
ccagcccaggatgag

SEQ ID NO: 1391131 - DNA, 15 bp, Homo sapiens
tccagcccaggatga

SEQ ID NO: 1391132 - DNA, 15 bp, Homo sapiens
ctccagcccaggatg

SEQ ID NO: 1391133 - DNA, 15 bp, Homo sapiens
cctccagcccaggat

SEQ ID NO: 1391134 - DNA, 15 bp, Homo sapiens
ccctccagcccagga

SEQ ID NO: 1391135 - DNA, 15 bp, Homo sapiens
cccctccagcccagg

SEQ ID NO: 1391136 - DNA, 15 bp, Homo sapiens
acccctccagcccag

SEQ ID NO: 1391137 - DNA, 15 bp, Homo sapiens
cacccctccagccca

SEQ ID NO: 1391138 - DNA, 15 bp, Homo sapiens
tcacccctccagccc

SEQ ID NO: 1391139 - DNA, 15 bp, Homo sapiens
atcacccctccagcc

SEQ ID NO: 1391140 - DNA, 15 bp, Homo sapiens
gatcacccctccagc

SEQ ID NO: 1391141 - DNA, 15 bp, Homo sapiens
tgatcacccctccag

SEQ ID NO: 1391142 - DNA, 15 bp, Homo sapiens
gtgatcacccctcca

SEQ ID NO: 1391143 - DNA, 15 bp, Homo sapiens
agtgatcacccctcc

SEQ ID NO: 1391144 - DNA, 15 bp, Homo sapiens
cagtgatcacccctc

SEQ ID NO: 1391145 - DNA, 15 bp, Homo sapiens
gcagtgatcacccct

SEQ ID NO: 1391146 - DNA, 15 bp, Homo sapiens
ggcagtgatcacccc

SEQ ID NO: 1391147 - DNA, 15 bp, Homo sapiens
aggcagtgatcaccc

SEQ ID NO: 1391148 - DNA, 15 bp, Homo sapiens
aaggcagtgatcacc

SEQ ID NO: 1391149 - DNA, 15 bp, Homo sapiens
taaggcagtgatcac

SEQ ID NO: 1391150 - DNA, 15 bp, Homo sapiens
ttaaggcagtgatca

SEQ ID NO: 1391151 - DNA, 15 bp, Homo sapiens
tttaaggcagtgatc

SEQ ID NO: 1391152 - DNA, 15 bp, Homo sapiens
ttttaaggcagtgat

SEQ ID NO: 1391153 - DNA, 15 bp, Homo sapiens
tttttaaggcagtga

SEQ ID NO: 1391154 - DNA, 15 bp, Homo sapiens
ctttttaaggcagtg

SEQ ID NO: 1391155 - DNA, 15 bp, Homo sapiens
tctttttaaggcagt

SEQ ID NO: 1391156 - DNA, 15 bp, Homo sapiens
ctctttttaaggcag

SEQ ID NO: 1391157 - DNA, 15 bp, Homo sapiens
tctctttttaaggca

SEQ ID NO: 1391158 - DNA, 15 bp, Homo sapiens
ttctctttttaaggc

SEQ ID NO: 1391159 - DNA, 15 bp, Homo sapiens
tttctctttttaagg

SEQ ID NO: 1391160 - DNA, 15 bp, Homo sapiens
gtttctctttttaag

SEQ ID NO: 1391161 - DNA, 15 bp, Homo sapiens
agtttctctttttaa

SEQ ID NO: 1391162 - DNA, 15 bp, Homo sapiens
gagtttctcttttta

SEQ ID NO: 1391163 - DNA, 15 bp, Homo sapiens
tgagtttctcttttt

SEQ ID NO: 1391164 - DNA, 15 bp, Homo sapiens
ctgagtttctctttt

SEQ ID NO: 1391165 - DNA, 15 bp, Homo sapiens
cctgagtttctcttt

SEQ ID NO: 1391166 - DNA, 15 bp, Homo sapiens
gcctgagtttctctt

SEQ ID NO: 1391167 - DNA, 15 bp, Homo sapiens
ggcctgagtttctct

SEQ ID NO: 1391168 - DNA, 15 bp, Homo sapiens
aggcctgagtttctc

SEQ ID NO: 1391169 - DNA, 15 bp, Homo sapiens
taggcctgagtttct

SEQ ID NO: 1391170 - DNA, 15 bp, Homo sapiens
ctaggcctgagtttc

SEQ ID NO: 1391171 - DNA, 15 bp, Homo sapiens
gctaggcctgagttt

SEQ ID NO: 1391172 - DNA, 15 bp, Homo sapiens
agctaggcctgagtt

SEQ ID NO: 1391173 - DNA, 15 bp, Homo sapiens
cagctaggcctgagt

SEQ ID NO: 1391174 - DNA, 15 bp, Homo sapiens
ccagctaggcctgag

SEQ ID NO: 1391175 - DNA, 15 bp, Homo sapiens
cccagctaggcctga

SEQ ID NO: 1391176 - DNA, 15 bp, Homo sapiens
acccagctaggcctg

SEQ ID NO: 1391177 - DNA, 15 bp, Homo sapiens
aacccagctaggcct

SEQ ID NO: 1391178 - DNA, 15 bp, Homo sapiens
gaacccagctaggcc

SEQ ID NO: 1391179 - DNA, 15 bp, Homo sapiens
tgaacccagctaggc

SEQ ID NO: 1391180 - DNA, 15 bp, Homo sapiens
gtgaacccagctagg

SEQ ID NO: 1391181 - DNA, 15 bp, Homo sapiens
agtgaacccagctag

SEQ ID NO: 1391182 - DNA, 15 bp, Homo sapiens
tagtgaacccagcta

SEQ ID NO: 1391183 - DNA, 15 bp, Homo sapiens
atagtgaacccagct

SEQ ID NO: 1391184 - DNA, 15 bp, Homo sapiens
gatagtgaacccagc

SEQ ID NO: 1391185 - DNA, 15 bp, Homo sapiens
agatagtgaacccag

SEQ ID NO: 1391186 - DNA, 15 bp, Homo sapiens
cagatagtgaaccca

SEQ ID NO: 1391187 - DNA, 15 bp, Homo sapiens
gcagatagtgaaccc

SEQ ID NO: 1391188 - DNA, 15 bp, Homo sapiens
agcagatagtgaacc

SEQ ID NO: 1391189 - DNA, 15 bp, Homo sapiens
cagcagatagtgaac

SEQ ID NO: 1391190 - DNA, 15 bp, Homo sapiens
gcagcagatagtgaa

SEQ ID NO: 1391191 - DNA, 15 bp, Homo sapiens
ggcagcagatagtga

SEQ ID NO: 1391192 - DNA, 15 bp, Homo sapiens
aggcagcagatagtg

SEQ ID NO: 1391193 - DNA, 15 bp, Homo sapiens
caggcagcagatagt

SEQ ID NO: 1391194 - DNA, 15 bp, Homo sapiens
tcaggcagcagatag

SEQ ID NO: 1391195 - DNA, 15 bp, Homo sapiens
ttcaggcagcagata

SEQ ID NO: 1391196 - DNA, 15 bp, Homo sapiens
cttcaggcagcagat

SEQ ID NO: 1391197 - DNA, 15 bp, Homo sapiens
ccttcaggcagcaga

SEQ ID NO: 1391198 - DNA, 15 bp, Homo sapiens
cccttcaggcagcag

SEQ ID NO: 1391199 - DNA, 15 bp, Homo sapiens
tcccttcaggcagca

SEQ ID NO: 1391200 - DNA, 15 bp, Homo sapiens
gtcccttcaggcagc

SEQ ID NO: 1391201 - DNA, 15 bp, Homo sapiens
agtcccttcaggcag

SEQ ID NO: 1391202 - DNA, 15 bp, Homo sapiens
aagtcccttcaggca

SEQ ID NO: 1391203 - DNA, 15 bp, Homo sapiens
aaagtcccttcaggc

SEQ ID NO: 1391204 - DNA, 15 bp, Homo sapiens
aaaagtcccttcagg

SEQ ID NO: 1391205 - DNA, 15 bp, Homo sapiens
caaaagtcccttcag

SEQ ID NO: 1391206 - DNA, 15 bp, Homo sapiens
acaaaagtcccttca

SEQ ID NO: 1391207 - DNA, 15 bp, Homo sapiens
gacaaaagtcccttc

SEQ ID NO: 1391208 - DNA, 15 bp, Homo sapiens
ggacaaaagtccctt

SEQ ID NO: 1391209 - DNA, 15 bp, Homo sapiens
aggacaaaagtccct

SEQ ID NO: 1391210 - DNA, 15 bp, Homo sapiens
aaggacaaaagtccc

SEQ ID NO: 1391211 - DNA, 15 bp, Homo sapiens
caaggacaaaagtcc

SEQ ID NO: 1391212 - DNA, 15 bp, Homo sapiens
tcaaggacaaaagtc

SEQ ID NO: 1391213 - DNA, 15 bp, Homo sapiens
ctcaaggacaaaagt

SEQ ID NO: 1391214 - DNA, 15 bp, Homo sapiens
actcaaggacaaaag

SEQ ID NO: 1391215 - DNA, 15 bp, Homo sapiens
cactcaaggacaaaa

SEQ ID NO: 1391216 - DNA, 15 bp, Homo sapiens
tcactcaaggacaaa

SEQ ID NO: 1391217 - DNA, 15 bp, Homo sapiens
ttcactcaaggacaa

SEQ ID NO: 1391218 - DNA, 15 bp, Homo sapiens
attcactcaaggaca

SEQ ID NO: 1391219 - DNA, 15 bp, Homo sapiens
tattcactcaaggac

SEQ ID NO: 1391220 - DNA, 15 bp, Homo sapiens
atattcactcaagga

SEQ ID NO: 1391221 - DNA, 15 bp, Homo sapiens
gatattcactcaagg

SEQ ID NO: 1391222 - DNA, 15 bp, Homo sapiens
tgatattcactcaag

SEQ ID NO: 1391223 - DNA, 15 bp, Homo sapiens
ctgatattcactcaa

SEQ ID NO: 1391224 - DNA, 15 bp, Homo sapiens
gctgatattcactca

SEQ ID NO: 1391225 - DNA, 15 bp, Homo sapiens
tgctgatattcactc

SEQ ID NO: 1391226 - DNA, 15 bp, Homo sapiens
ctgctgatattcact

SEQ ID NO: 1391227 - DNA, 15 bp, Homo sapiens
actgctgatattcac

SEQ ID NO: 1391228 - DNA, 15 bp, Homo sapiens
tactgctgatattca

SEQ ID NO: 1391229 - DNA, 15 bp, Homo sapiens
ctactgctgatattc

SEQ ID NO: 1391230 - DNA, 15 bp, Homo sapiens
gctactgctgatatt

SEQ ID NO: 1391231 - DNA, 15 bp, Homo sapiens
ggctactgctgatat

SEQ ID NO: 1391232 - DNA, 15 bp, Homo sapiens
tggctactgctgata

SEQ ID NO: 1391233 - DNA, 15 bp, Homo sapiens
ctggctactgctgat

SEQ ID NO: 1391234 - DNA, 15 bp, Homo sapiens
cctggctactgctga

SEQ ID NO: 1391235 - DNA, 15 bp, Homo sapiens
gcctggctactgctg

SEQ ID NO: 1391236 - DNA, 15 bp, Homo sapiens
tgcctggctactgct

SEQ ID NO: 1391237 - DNA, 15 bp, Homo sapiens
ctgcctggctactgc

SEQ ID NO: 1391238 - DNA, 15 bp, Homo sapiens
actgcctggctactg

SEQ ID NO: 1391239 - DNA, 15 bp, Homo sapiens
cactgcctggctact

SEQ ID NO: 1391240 - DNA, 15 bp, Homo sapiens
ccactgcctggctac

SEQ ID NO: 1391241 - DNA, 15 bp, Homo sapiens
accactgcctggcta

SEQ ID NO: 1391242 - DNA, 15 bp, Homo sapiens
gaccactgcctggct

SEQ ID NO: 1391243 - DNA, 15 bp, Homo sapiens
tgaccactgcctggc

SEQ ID NO: 1391244 - DNA, 15 bp, Homo sapiens
gtgaccactgcctgg

SEQ ID NO: 1391245 - DNA, 15 bp, Homo sapiens
agtgaccactgcctg

SEQ ID NO: 1391246 - DNA, 15 bp, Homo sapiens
cagtgaccactgcct

SEQ ID NO: 1391247 - DNA, 15 bp, Homo sapiens
acagtgaccactgcc

SEQ ID NO: 1391248 - DNA, 15 bp, Homo sapiens
cacagtgaccactgc

SEQ ID NO: 1391249 - DNA, 15 bp, Homo sapiens
gcacagtgaccactg

SEQ ID NO: 1391250 - DNA, 15 bp, Homo sapiens
tgcacagtgaccact

SEQ ID NO: 1391251 - DNA, 15 bp, Homo sapiens
gtgcacagtgaccac

SEQ ID NO: 1391252 - DNA, 15 bp, Homo sapiens
ggtgcacagtgacca

SEQ ID NO: 1391253 - DNA, 15 bp, Homo sapiens
aggtgcacagtgacc

SEQ ID NO: 1391254 - DNA, 15 bp, Homo sapiens
aaggtgcacagtgac

SEQ ID NO: 1391255 - DNA, 15 bp, Homo sapiens
caaggtgcacagtga

SEQ ID NO: 1391256 - DNA, 15 bp, Homo sapiens
ccaaggtgcacagtg

SEQ ID NO: 1391257 - DNA, 15 bp, Homo sapiens
cccaaggtgcacagt

SEQ ID NO: 1391258 - DNA, 15 bp, Homo sapiens
acccaaggtgcacag

SEQ ID NO: 1391259 - DNA, 15 bp, Homo sapiens
tacccaaggtgcaca

SEQ ID NO: 1391260 - DNA, 15 bp, Homo sapiens
ttacccaaggtgcac

SEQ ID NO: 1391261 - DNA, 15 bp, Homo sapiens
cttacccaaggtgca

SEQ ID NO: 1391262 - DNA, 15 bp, Homo sapiens
tcttacccaaggtgc

SEQ ID NO: 1391263 - DNA, 15 bp, Homo sapiens
ttcttacccaaggtg

SEQ ID NO: 1391264 - DNA, 15 bp, Homo sapiens
tttcttacccaaggt

SEQ ID NO: 1391265 - DNA, 15 bp, Homo sapiens
atttcttacccaagg

SEQ ID NO: 1391266 - DNA, 15 bp, Homo sapiens
tatttcttacccaag

SEQ ID NO: 1391267 - DNA, 15 bp, Homo sapiens
ctatttcttacccaa

SEQ ID NO: 1391268 - DNA, 15 bp, Homo sapiens
actatttcttaccca

SEQ ID NO: 1391269 - DNA, 15 bp, Homo sapiens
cactatttcttaccc

SEQ ID NO: 1391270 - DNA, 15 bp, Homo sapiens
gcactatttcttacc

SEQ ID NO: 1391271 - DNA, 15 bp, Homo sapiens
agcactatttcttac

SEQ ID NO: 1391272 - DNA, 15 bp, Homo sapiens
cagcactatttctta

SEQ ID NO: 1391273 - DNA, 15 bp, Homo sapiens
acagcactatttctt

SEQ ID NO: 1391274 - DNA, 15 bp, Homo sapiens
cacagcactatttct

SEQ ID NO: 1391275 - DNA, 15 bp, Homo sapiens
gcacagcactatttc

SEQ ID NO: 1391276 - DNA, 15 bp, Homo sapiens
agcacagcactattt

SEQ ID NO: 1391277 - DNA, 15 bp, Homo sapiens
cagcacagcactatt

SEQ ID NO: 1391278 - DNA, 15 bp, Homo sapiens
ccagcacagcactat

SEQ ID NO: 1391279 - DNA, 15 bp, Homo sapiens
gccagcacagcacta

SEQ ID NO: 1391280 - DNA, 15 bp, Homo sapiens
agccagcacagcact

SEQ ID NO: 1391281 - DNA, 15 bp, Homo sapiens
aagccagcacagcac

SEQ ID NO: 1391282 - DNA, 15 bp, Homo sapiens
aaagccagcacagca

SEQ ID NO: 1391283 - DNA, 15 bp, Homo sapiens
caaagccagcacagc

SEQ ID NO: 1391284 - DNA, 15 bp, Homo sapiens
ccaaagccagcacag

SEQ ID NO: 1391285 - DNA, 15 bp, Homo sapiens
tccaaagccagcaca

SEQ ID NO: 1391286 - DNA, 15 bp, Homo sapiens
atccaaagccagcac

SEQ ID NO: 1391287 - DNA, 15 bp, Homo sapiens
gatccaaagccagca

SEQ ID NO: 1391288 - DNA, 15 bp, Homo sapiens
ggatccaaagccagc

SEQ ID NO: 1391289 - DNA, 15 bp, Homo sapiens
tggatccaaagccag

SEQ ID NO: 1391290 - DNA, 15 bp, Homo sapiens
ctggatccaaagcca

SEQ ID NO: 1391291 - DNA, 15 bp, Homo sapiens
actggatccaaagcc

SEQ ID NO: 1391292 - DNA, 15 bp, Homo sapiens
gactggatccaaagc

SEQ ID NO: 1391293 - DNA, 15 bp, Homo sapiens
ggactggatccaaag

SEQ ID NO: 1391294 - DNA, 15 bp, Homo sapiens
tggactggatccaaa

SEQ ID NO: 1391295 - DNA, 15 bp, Homo sapiens
ctggactggatccaa

SEQ ID NO: 1391296 - DNA, 15 bp, Homo sapiens
actggactggatcca

SEQ ID NO: 1391297 - DNA, 15 bp, Homo sapiens
cactggactggatcc

SEQ ID NO: 1391298 - DNA, 15 bp, Homo sapiens
gcactggactggatc

SEQ ID NO: 1391299 - DNA, 15 bp, Homo sapiens
tgcactggactggat

SEQ ID NO: 1391300 - DNA, 15 bp, Homo sapiens
ctgcactggactgga

SEQ ID NO: 1391301 - DNA, 15 bp, Homo sapiens
actgcactggactgg

SEQ ID NO: 1391302 - DNA, 15 bp, Homo sapiens
gactgcactggactg

SEQ ID NO: 1391303 - DNA, 15 bp, Homo sapiens
ggactgcactggact

SEQ ID NO: 1391304 - DNA, 15 bp, Homo sapiens
gggactgcactggac

SEQ ID NO: 1391305 - DNA, 15 bp, Homo sapiens
tgggactgcactgga

SEQ ID NO: 1391306 - DNA, 15 bp, Homo sapiens
ctgggactgcactgg

SEQ ID NO: 1391307 - DNA, 15 bp, Homo sapiens
actgggactgcactg

SEQ ID NO: 1391308 - DNA, 15 bp, Homo sapiens
cactgggactgcact

SEQ ID NO: 1391309 - DNA, 15 bp, Homo sapiens
ccactgggactgcac

SEQ ID NO: 1391310 - DNA, 15 bp, Homo sapiens
accactgggactgca

SEQ ID NO: 1391311 - DNA, 15 bp, Homo sapiens
caccactgggactgc

SEQ ID NO: 1391312 - DNA, 15 bp, Homo sapiens
ccaccactgggactg

SEQ ID NO: 1391313 - DNA, 15 bp, Homo sapiens
accaccactgggact

SEQ ID NO: 1391314 - DNA, 15 bp, Homo sapiens
caccaccactgggac

SEQ ID NO: 1391315 - DNA, 15 bp, Homo sapiens
ccaccaccactggga

SEQ ID NO: 1391316 - DNA, 15 bp, Homo sapiens
gccaccaccactggg

SEQ ID NO: 1391317 - DNA, 15 bp, Homo sapiens
ggccaccaccactgg

SEQ ID NO: 1391318 - DNA, 15 bp, Homo sapiens
tggccaccaccactg

SEQ ID NO: 1391319 - DNA, 15 bp, Homo sapiens
gtggccaccaccact

SEQ ID NO: 1391320 - DNA, 15 bp, Homo sapiens
tgtggccaccaccac

SEQ ID NO: 1391321 - DNA, 15 bp, Homo sapiens
ctgtggccaccacca

SEQ ID NO: 1391322 - DNA, 15 bp, Homo sapiens
tctgtggccaccacc

SEQ ID NO: 1391323 - DNA, 15 bp, Homo sapiens
ctctgtggccaccac

SEQ ID NO: 1391324 - DNA, 15 bp, Homo sapiens
cctctgtggccacca

SEQ ID NO: 1391325 - DNA, 15 bp, Homo sapiens
acctctgtggccacc

SEQ ID NO: 1391326 - DNA, 15 bp, Homo sapiens
cacctctgtggccac

SEQ ID NO: 1391327 - DNA, 15 bp, Homo sapiens
gcacctctgtggcca

SEQ ID NO: 1391328 - DNA, 15 bp, Homo sapiens
agcacctctgtggcc

SEQ ID NO: 1391329 - DNA, 15 bp, Homo sapiens
aagcacctctgtggc

SEQ ID NO: 1391330 - DNA, 15 bp, Homo sapiens
caagcacctctgtgg

SEQ ID NO: 1391331 - DNA, 15 bp, Homo sapiens
acaagcacctctgtg

SEQ ID NO: 1391332 - DNA, 15 bp, Homo sapiens
cacaagcacctctgt

SEQ ID NO: 1391333 - DNA, 15 bp, Homo sapiens
acacaagcacctctg

SEQ ID NO: 1391334 - DNA, 15 bp, Homo sapiens
gacacaagcacctct

SEQ ID NO: 1391335 - DNA, 15 bp, Homo sapiens
tgacacaagcacctc

SEQ ID NO: 1391336 - DNA, 15 bp, Homo sapiens
gtgacacaagcacct

SEQ ID NO: 1391337 - DNA, 15 bp, Homo sapiens
ggtgacacaagcacc

SEQ ID NO: 1391338 - DNA, 15 bp, Homo sapiens
gggtgacacaagcac

SEQ ID NO: 1391339 - DNA, 15 bp, Homo sapiens
ggggtgacacaagca

SEQ ID NO: 1391340 - DNA, 15 bp, Homo sapiens
aggggtgacacaagc

SEQ ID NO: 1391341 - DNA, 15 bp, Homo sapiens
tggaggggtgacaca

SEQ ID NO: 1391342 - DNA, 15 bp, Homo sapiens
ttggaggggtgacac

SEQ ID NO: 1391343 - DNA, 15 bp, Homo sapiens
gttggaggggtgaca

SEQ ID NO: 1391344 - DNA, 15 bp, Homo sapiens
tgttggaggggtgac

SEQ ID NO: 1391345 - DNA, 15 bp, Homo sapiens
ctgttggaggggtga

SEQ ID NO: 1391346 - DNA, 15 bp, Homo sapiens
gctgttggaggggtg

SEQ ID NO: 1391347 - DNA, 15 bp, Homo sapiens
agctgttggaggggt

SEQ ID NO: 1391348 - DNA, 15 bp, Homo sapiens
gagctgttggagggg

SEQ ID NO: 1391349 - DNA, 15 bp, Homo sapiens
ggagctgttggaggg

SEQ ID NO: 1391350 - DNA, 15 bp, Homo sapiens
tggagctgttggagg

SEQ ID NO: 1391351 - DNA, 15 bp, Homo sapiens
ctggagctgttggag

SEQ ID NO: 1391352 - DNA, 15 bp, Homo sapiens
cctggagctgttgga

SEQ ID NO: 1391353 - DNA, 15 bp, Homo sapiens
gcctggagctgttgg

SEQ ID NO: 1391354 - DNA, 15 bp, Homo sapiens
tgcctggagctgttg

SEQ ID NO: 1391355 - DNA, 15 bp, Homo sapiens
ttgcctggagctgtt

SEQ ID NO: 1391356 - DNA, 15 bp, Homo sapiens
gttgcctggagctgt

SEQ ID NO: 1391357 - DNA, 15 bp, Homo sapiens
agttgcctggagctg

SEQ ID NO: 1391358 - DNA, 15 bp, Homo sapiens
gagttgcctggagct

SEQ ID NO: 1391359 - DNA, 15 bp, Homo sapiens
cgagttgcctggagc

SEQ ID NO: 1391360 - DNA, 15 bp, Homo sapiens
ccgagttgcctggag

SEQ ID NO: 1391361 - DNA, 15 bp, Homo sapiens
gccgagttgcctgga

SEQ ID NO: 1391362 - DNA, 15 bp, Homo sapiens
tgccgagttgcctgg

SEQ ID NO: 1391363 - DNA, 15 bp, Homo sapiens
gtgccgagttgcctg

SEQ ID NO: 1391364 - DNA, 15 bp, Homo sapiens
tgtgccgagttgcct

SEQ ID NO: 1391365 - DNA, 15 bp, Homo sapiens
ttgtgccgagttgcc

SEQ ID NO: 1391366 - DNA, 15 bp, Homo sapiens
tttgtgccgagttgc

SEQ ID NO: 1391367 - DNA, 15 bp, Homo sapiens
ctttgtgccgagttg

SEQ ID NO: 1391368 - DNA, 15 bp, Homo sapiens
tctttgtgccgagtt

SEQ ID NO: 1391369 - DNA, 15 bp, Homo sapiens
ctctttgtgccgagt

SEQ ID NO: 1391370 - DNA, 15 bp, Homo sapiens
tctctttgtgccgag

SEQ ID NO: 1391371 - DNA, 15 bp, Homo sapiens
ctctctttgtgccga

SEQ ID NO: 1391372 - DNA, 15 bp, Homo sapiens
tctctctttgtgccg

SEQ ID NO: 1391373 - DNA, 15 bp, Homo sapiens
gtctctctttgtgcc

SEQ ID NO: 1391374 - DNA, 15 bp, Homo sapiens
tgtctctctttgtgc

SEQ ID NO: 1391375 - DNA, 15 bp, Homo sapiens
gtgtctctctttgtg

SEQ ID NO: 1391376 - DNA, 15 bp, Homo sapiens
agtgtctctctttgt

SEQ ID NO: 1391377 - DNA, 15 bp, Homo sapiens
aagtgtctctctttg

SEQ ID NO: 1391378 - DNA, 15 bp, Homo sapiens
gaagtgtctctcttt

SEQ ID NO: 1391379 - DNA, 15 bp, Homo sapiens
tgaagtgtctctctt

SEQ ID NO: 1391380 - DNA, 15 bp, Homo sapiens
atgaagtgtctctct

SEQ ID NO: 1391381 - DNA, 15 bp, Homo sapiens
aatgaagtgtctctc

SEQ ID NO: 1391382 - DNA, 15 bp, Homo sapiens
aaatgaagtgtctct

SEQ ID NO: 1391383 - DNA, 15 bp, Homo sapiens
gaaatgaagtgtctc

SEQ ID NO: 1391384 - DNA, 15 bp, Homo sapiens
agaaatgaagtgtct

SEQ ID NO: 1391385 - DNA, 15 bp, Homo sapiens
aagaaatgaagtgtc

SEQ ID NO: 1391386 - DNA, 15 bp, Homo sapiens
gaagaaatgaagtgt

SEQ ID NO: 1391387 - DNA, 15 bp, Homo sapiens
tgaagaaatgaagtg

SEQ ID NO: 1391388 - DNA, 15 bp, Homo sapiens
ctgaagaaatgaagt

SEQ ID NO: 1391389 - DNA, 15 bp, Homo sapiens
cctgaagaaatgaag

SEQ ID NO: 1391390 - DNA, 15 bp, Homo sapiens
ccctgaagaaatgaa

SEQ ID NO: 1391391 - DNA, 15 bp, Homo sapiens
tccctgaagaaatga

SEQ ID NO: 1391392 - DNA, 15 bp, Homo sapiens
ttccctgaagaaatg

SEQ ID NO: 1391393 - DNA, 15 bp, Homo sapiens
tttccctgaagaaat

SEQ ID NO: 1391394 - DNA, 15 bp, Homo sapiens
ttttccctgaagaaa

SEQ ID NO: 1391395 - DNA, 15 bp, Homo sapiens
cttttccctgaagaa

SEQ ID NO: 1391396 - DNA, 15 bp, Homo sapiens
acttttccctgaaga

SEQ ID NO: 1391397 - DNA, 15 bp, Homo sapiens
aacttttccctgaag

SEQ ID NO: 1391398 - DNA, 15 bp, Homo sapiens
taacttttccctgaa

SEQ ID NO: 1391399 - DNA, 15 bp, Homo sapiens
ttaacttttccctga

SEQ ID NO: 1391400 - DNA, 15 bp, Homo sapiens
cttaacttttccctg

SEQ ID NO: 1391401 - DNA, 15 bp, Homo sapiens
ccttaacttttccct

SEQ ID NO: 1391402 - DNA, 15 bp, Homo sapiens
tccttaacttttccc

SEQ ID NO: 1391403 - DNA, 15 bp, Homo sapiens
ttccttaacttttcc

SEQ ID NO: 1391404 - DNA, 15 bp, Homo sapiens
cttccttaacttttc

SEQ ID NO: 1391405 - DNA, 15 bp, Homo sapiens
tcttccttaactttt

SEQ ID NO: 1391406 - DNA, 15 bp, Homo sapiens
ctcttccttaacttt

SEQ ID NO: 1391407 - DNA, 15 bp, Homo sapiens
cctcttccttaactt

SEQ ID NO: 1391408 - DNA, 15 bp, Homo sapiens
tcctcttccttaact

SEQ ID NO: 1391409 - DNA, 15 bp, Homo sapiens
ctcctcttccttaac

SEQ ID NO: 1391410 - DNA, 15 bp, Homo sapiens
tctcctcttccttaa

SEQ ID NO: 1391411 - DNA, 15 bp, Homo sapiens
ttctcctcttcctta

SEQ ID NO: 1391412 - DNA, 15 bp, Homo sapiens
cttctcctcttcctt

SEQ ID NO: 1391413 - DNA, 15 bp, Homo sapiens
tcttctcctcttcct

SEQ ID NO: 1391414 - DNA, 15 bp, Homo sapiens
ctcttctcctcttcc

SEQ ID NO: 1391415 - DNA, 15 bp, Homo sapiens
actcttctcctcttc

SEQ ID NO: 1391416 - DNA, 15 bp, Homo sapiens
gactcttctcctctt

SEQ ID NO: 1391417 - DNA, 15 bp, Homo sapiens
agactcttctcctct

SEQ ID NO: 1391418 - DNA, 15 bp, Homo sapiens
gagactcttctcctc

SEQ ID NO: 1391419 - DNA, 15 bp, Homo sapiens
agagactcttctcct

SEQ ID NO: 1391420 - DNA, 15 bp, Homo sapiens
cagagactcttctcc

SEQ ID NO: 1391421 - DNA, 15 bp, Homo sapiens
gcagagactcttctc

SEQ ID NO: 1391422 - DNA, 15 bp, Homo sapiens
ggcagagactcttct

SEQ ID NO: 1391423 - DNA, 15 bp, Homo sapiens
aggcagagactcttc

SEQ ID NO: 1391424 - DNA, 15 bp, Homo sapiens
caggcagagactctt

SEQ ID NO: 1391425 - DNA, 15 bp, Homo sapiens
ccaggcagagactct

SEQ ID NO: 1391426 - DNA, 15 bp, Homo sapiens
accaggcagagactc

SEQ ID NO: 1391427 - DNA, 15 bp, Homo sapiens
taccaggcagagact

SEQ ID NO: 1391428 - DNA, 15 bp, Homo sapiens
ttaccaggcagagac

SEQ ID NO: 1391429 - DNA, 15 bp, Homo sapiens
attaccaggcagaga

SEQ ID NO: 1391430 - DNA, 15 bp, Homo sapiens
gattaccaggcagag

SEQ ID NO: 1391431 - DNA, 15 bp, Homo sapiens
ggattaccaggcaga

SEQ ID NO: 1391432 - DNA, 15 bp, Homo sapiens
tggattaccaggcag

SEQ ID NO: 1391433 - DNA, 15 bp, Homo sapiens
ctggattaccaggca

SEQ ID NO: 1391434 - DNA, 15 bp, Homo sapiens
cctggattaccaggc

SEQ ID NO: 1391435 - DNA, 15 bp, Homo sapiens
ccctggattaccagg

SEQ ID NO: 1391436 - DNA, 15 bp, Homo sapiens
tccctggattaccag

SEQ ID NO: 1391437 - DNA, 15 bp, Homo sapiens
gtccctggattacca

SEQ ID NO: 1391438 - DNA, 15 bp, Homo sapiens
agtccctggattacc

SEQ ID NO: 1391439 - DNA, 15 bp, Homo sapiens
aagtccctggattac

SEQ ID NO: 1391440 - DNA, 15 bp, Homo sapiens
gaagtccctggatta

SEQ ID NO: 1391441 - DNA, 15 bp, Homo sapiens
agaagtccctggatt

SEQ ID NO: 1391442 - DNA, 15 bp, Homo sapiens
tagaagtccctggat

SEQ ID NO: 1391443 - DNA, 15 bp, Homo sapiens
gtagaagtccctgga

SEQ ID NO: 1391444 - DNA, 15 bp, Homo sapiens
agtagaagtccctgg

SEQ ID NO: 1391445 - DNA, 15 bp, Homo sapiens
cagtagaagtccctg

SEQ ID NO: 1391446 - DNA, 15 bp, Homo sapiens
gcagtagaagtccct

SEQ ID NO: 1391447 - DNA, 15 bp, Homo sapiens
tgcagtagaagtccc

SEQ ID NO: 1391448 - DNA, 15 bp, Homo sapiens
atgcagtagaagtcc

SEQ ID NO: 1391449 - DNA, 15 bp, Homo sapiens
gatgcagtagaagtc

SEQ ID NO: 1391450 - DNA, 15 bp, Homo sapiens
agatgcagtagaagt

SEQ ID NO: 1391451 - DNA, 15 bp, Homo sapiens
aagatgcagtagaag

SEQ ID NO: 1391452 - DNA, 15 bp, Homo sapiens
taagatgcagtagaa

SEQ ID NO: 1391453 - DNA, 15 bp, Homo sapiens
gtaagatgcagtaga

SEQ ID NO: 1391454 - DNA, 15 bp, Homo sapiens
ggtaagatgcagtag

SEQ ID NO: 1391455 - DNA, 15 bp, Homo sapiens
tggtaagatgcagta

SEQ ID NO: 1391456 - DNA, 15 bp, Homo sapiens
ttggtaagatgcagt

SEQ ID NO: 1391457 - DNA, 15 bp, Homo sapiens
cttggtaagatgcag

SEQ ID NO: 1391458 - DNA, 15 bp, Homo sapiens
tcttggtaagatgca

SEQ ID NO: 1391459 - DNA, 15 bp, Homo sapiens
gtcttggtaagatgc

SEQ ID NO: 1391460 - DNA, 15 bp, Homo sapiens
tgtcttggtaagatg

SEQ ID NO: 1391461 - DNA, 15 bp, Homo sapiens
ttgtcttggtaagat

SEQ ID NO: 1391462 - DNA, 15 bp, Homo sapiens
attgtcttggtaaga

SEQ ID NO: 1391463 - DNA, 15 bp, Homo sapiens
aattgtcttggtaag

SEQ ID NO: 1391464 - DNA, 15 bp, Homo sapiens
taattgtcttggtaa

SEQ ID NO: 1391465 - DNA, 15 bp, Homo sapiens
ttaattgtcttggta

SEQ ID NO: 1391466 - DNA, 15 bp, Homo sapiens
cttaattgtcttggt

SEQ ID NO: 1391467 - DNA, 15 bp, Homo sapiens
ccttaattgtcttgg

SEQ ID NO: 1391468 - DNA, 15 bp, Homo sapiens
accttaattgtcttg

SEQ ID NO: 1391469 - DNA, 15 bp, Homo sapiens
taccttaattgtctt

SEQ ID NO: 1391470 - DNA, 15 bp, Homo sapiens
ctaccttaattgtct

SEQ ID NO: 1391471 - DNA, 15 bp, Homo sapiens
actaccttaattgtc

SEQ ID NO: 1391472 - DNA, 15 bp, Homo sapiens
tactaccttaattgt

SEQ ID NO: 1391473 - DNA, 15 bp, Homo sapiens
atactaccttaattg

SEQ ID NO: 1391474 - DNA, 15 bp, Homo sapiens
gatactaccttaatt

SEQ ID NO: 1391475 - DNA, 15 bp, Homo sapiens
agatactaccttaat

SEQ ID NO: 1391476 - DNA, 15 bp, Homo sapiens
gagatactaccttaa

SEQ ID NO: 1391477 - DNA, 15 bp, Homo sapiens
agagatactacctta

SEQ ID NO: 1391478 - DNA, 15 bp, Homo sapiens
tagagatactacctt

SEQ ID NO: 1391479 - DNA, 15 bp, Homo sapiens
gtagagatactacct

SEQ ID NO: 1391480 - DNA, 15 bp, Homo sapiens
tgtagagatactacc

SEQ ID NO: 1391481 - DNA, 15 bp, Homo sapiens
ttgtagagatactac

SEQ ID NO: 1391482 - DNA, 15 bp, Homo sapiens
cttgtagagatacta

SEQ ID NO: 1391483 - DNA, 15 bp, Homo sapiens
acttgtagagatact

SEQ ID NO: 1391484 - DNA, 15 bp, Homo sapiens
gacttgtagagatac

SEQ ID NO: 1391485 - DNA, 15 bp, Homo sapiens
agacttgtagagata

SEQ ID NO: 1391486 - DNA, 15 bp, Homo sapiens
cagacttgtagagat

SEQ ID NO: 1391487 - DNA, 15 bp, Homo sapiens
gcagacttgtagaga

SEQ ID NO: 1391488 - DNA, 15 bp, Homo sapiens
tgcagacttgtagag

SEQ ID NO: 1391489 - DNA, 15 bp, Homo sapiens
ttgcagacttgtaga

SEQ ID NO: 1391490 - DNA, 15 bp, Homo sapiens
cttgcagacttgtag

SEQ ID NO: 1391491 - DNA, 15 bp, Homo sapiens
tcttgcagacttgta

SEQ ID NO: 1391492 - DNA, 15 bp, Homo sapiens
ctcttgcagacttgt

SEQ ID NO: 1391493 - DNA, 15 bp, Homo sapiens
gctcttgcagacttg

SEQ ID NO: 1391494 - DNA, 15 bp, Homo sapiens
ggctcttgcagactt

SEQ ID NO: 1391495 - DNA, 15 bp, Homo sapiens
tggctcttgcagact

SEQ ID NO: 1391496 - DNA, 15 bp, Homo sapiens
gtggctcttgcagac

SEQ ID NO: 1391497 - DNA, 15 bp, Homo sapiens
tgtggctcttgcaga

SEQ ID NO: 1391498 - DNA, 15 bp, Homo sapiens
ctgtggctcttgcag

SEQ ID NO: 1391499 - DNA, 15 bp, Homo sapiens
actgtggctcttgca

SEQ ID NO: 1391500 - DNA, 15 bp, Homo sapiens
cactgtggctcttgc

SEQ ID NO: 1391501 - DNA, 15 bp, Homo sapiens
acactgtggctcttg

SEQ ID NO: 1391502 - DNA, 15 bp, Homo sapiens
aacactgtggctctt

SEQ ID NO: 1391503 - DNA, 15 bp, Homo sapiens
taacactgtggctct

SEQ ID NO: 1391504 - DNA, 15 bp, Homo sapiens
gtaacactgtggctc

SEQ ID NO: 1391505 - DNA, 15 bp, Homo sapiens
agtaacactgtggct

SEQ ID NO: 1391506 - DNA, 15 bp, Homo sapiens
cagtaacactgtggc

SEQ ID NO: 1391507 - DNA, 15 bp, Homo sapiens
ccagtaacactgtgg

SEQ ID NO: 1391508 - DNA, 15 bp, Homo sapiens
cccagtaacactgtg

SEQ ID NO: 1391509 - DNA, 15 bp, Homo sapiens
gcccagtaacactgt

SEQ ID NO: 1391510 - DNA, 15 bp, Homo sapiens
agcccagtaacactg

SEQ ID NO: 1391511 - DNA, 15 bp, Homo sapiens
aagcccagtaacact

SEQ ID NO: 1391512 - DNA, 15 bp, Homo sapiens
caagcccagtaacac

SEQ ID NO: 1391513 - DNA, 15 bp, Homo sapiens
tcaagcccagtaaca

SEQ ID NO: 1391514 - DNA, 15 bp, Homo sapiens
ctcaagcccagtaac

SEQ ID NO: 1391515 - DNA, 15 bp, Homo sapiens
cctcaagcccagtaa

SEQ ID NO: 1391516 - DNA, 15 bp, Homo sapiens
acctcaagcccagta

SEQ ID NO: 1391517 - DNA, 15 bp, Homo sapiens
tacctcaagcccagt

SEQ ID NO: 1391518 - DNA, 15 bp, Homo sapiens
atacctcaagcccag

SEQ ID NO: 1391519 - DNA, 15 bp, Homo sapiens
gatacctcaagccca

SEQ ID NO: 1391520 - DNA, 15 bp, Homo sapiens
ggatacctcaagccc

SEQ ID NO: 1391521 - DNA, 15 bp, Homo sapiens
gggatacctcaagcc

SEQ ID NO: 1391522 - DNA, 15 bp, Homo sapiens
tgggatacctcaagc

SEQ ID NO: 1391523 - DNA, 15 bp, Homo sapiens
atgggatacctcaag

SEQ ID NO: 1391524 - DNA, 15 bp, Homo sapiens
tatgggatacctcaa

SEQ ID NO: 1391525 - DNA, 15 bp, Homo sapiens
ttatgggatacctca

SEQ ID NO: 1391526 - DNA, 15 bp, Homo sapiens
attatgggatacctc

SEQ ID NO: 1391527 - DNA, 15 bp, Homo sapiens
cattatgggatacct

SEQ ID NO: 1391528 - DNA, 15 bp, Homo sapiens
gcattatgggatacc

SEQ ID NO: 1391529 - DNA, 15 bp, Homo sapiens
tgcattatgggatac

SEQ ID NO: 1391530 - DNA, 15 bp, Homo sapiens
ctgcattatgggata

SEQ ID NO: 1391531 - DNA, 15 bp, Homo sapiens
tctgcattatgggat

SEQ ID NO: 1391532 - DNA, 15 bp, Homo sapiens
atctgcattatggga

SEQ ID NO: 1391533 - DNA, 15 bp, Homo sapiens
tatctgcattatggg

SEQ ID NO: 1391534 - DNA, 15 bp, Homo sapiens
gtatctgcattatgg

SEQ ID NO: 1391535 - DNA, 15 bp, Homo sapiens
tgtatctgcattatg

SEQ ID NO: 1391536 - DNA, 15 bp, Homo sapiens
ctgtatctgcattat

SEQ ID NO: 1391537 - DNA, 15 bp, Homo sapiens
gctgtatctgcatta

SEQ ID NO: 1391538 - DNA, 15 bp, Homo sapiens
agctgtatctgcatt

SEQ ID NO: 1391539 - DNA, 15 bp, Homo sapiens
cagctgtatctgcat

SEQ ID NO: 1391540 - DNA, 15 bp, Homo sapiens
gcagctgtatctgca

SEQ ID NO: 1391541 - DNA, 15 bp, Homo sapiens
tgcagctgtatctgc

SEQ ID NO: 1391542 - DNA, 15 bp, Homo sapiens
ctgcagctgtatctg

SEQ ID NO: 1391543 - DNA, 15 bp, Homo sapiens
actgcagctgtatct

SEQ ID NO: 1391544 - DNA, 15 bp, Homo sapiens
cactgcagctgtatc

SEQ ID NO: 1391545 - DNA, 15 bp, Homo sapiens
tcactgcagctgtat

SEQ ID NO: 1391546 - DNA, 15 bp, Homo sapiens
gtcactgcagctgta

SEQ ID NO: 1391547 - DNA, 15 bp, Homo sapiens
ggtcactgcagctgt

SEQ ID NO: 1391548 - DNA, 15 bp, Homo sapiens
tggtcactgcagctg

SEQ ID NO: 1391549 - DNA, 15 bp, Homo sapiens
ttggtcactgcagct

SEQ ID NO: 1391550 - DNA, 15 bp, Homo sapiens
tttggtcactgcagc

SEQ ID NO: 1391551 - DNA, 15 bp, Homo sapiens
ctttggtcactgcag

SEQ ID NO: 1391552 - DNA, 15 bp, Homo sapiens
actttggtcactgca

SEQ ID NO: 1391553 - DNA, 15 bp, Homo sapiens
aactttggtcactgc

SEQ ID NO: 1391554 - DNA, 15 bp, Homo sapiens
aaactttggtcactg

SEQ ID NO: 1391555 - DNA, 15 bp, Homo sapiens
aaaactttggtcact

SEQ ID NO: 1391556 - DNA, 15 bp, Homo sapiens
taaaactttggtcac

SEQ ID NO: 1391557 - DNA, 15 bp, Homo sapiens
ctaaaactttggtca

SEQ ID NO: 1391558 - DNA, 15 bp, Homo sapiens
tctaaaactttggtc

SEQ ID NO: 1391559 - DNA, 15 bp, Homo sapiens
atctaaaactttggt

SEQ ID NO: 1391560 - DNA, 15 bp, Homo sapiens
gatctaaaactttgg

SEQ ID NO: 1391561 - DNA, 15 bp, Homo sapiens
tgatctaaaactttg

SEQ ID NO: 1391562 - DNA, 15 bp, Homo sapiens
gtgatctaaaacttt

SEQ ID NO: 1391563 - DNA, 15 bp, Homo sapiens
tgtgatctaaaactt

SEQ ID NO: 1391564 - DNA, 15 bp, Homo sapiens
ttgtgatctaaaact

SEQ ID NO: 1391565 - DNA, 15 bp, Homo sapiens
gttgtgatctaaaac

SEQ ID NO: 1391566 - DNA, 15 bp, Homo sapiens
tgttgtgatctaaaa

SEQ ID NO: 1391567 - DNA, 15 bp, Homo sapiens
gtgttgtgatctaaa

SEQ ID NO: 1391568 - DNA, 15 bp, Homo sapiens
agtgttgtgatctaa

SEQ ID NO: 1391569 - DNA, 15 bp, Homo sapiens
aagtgttgtgatcta

SEQ ID NO: 1391570 - DNA, 15 bp, Homo sapiens
gaagtgttgtgatct

SEQ ID NO: 1391571 - DNA, 15 bp, Homo sapiens
tgaagtgttgtgatc

SEQ ID NO: 1391572 - DNA, 15 bp, Homo sapiens
atgaagtgttgtgat

SEQ ID NO: 1391573 - DNA, 15 bp, Homo sapiens
aatgaagtgttgtga

SEQ ID NO: 1391574 - DNA, 15 bp, Homo sapiens
gaatgaagtgttgtg

SEQ ID NO: 1391575 - DNA, 15 bp, Homo sapiens
ggaatgaagtgttgt

SEQ ID NO: 1391576 - DNA, 15 bp, Homo sapiens
aggaatgaagtgttg

SEQ ID NO: 1391577 - DNA, 15 bp, Homo sapiens
gaggaatgaagtgtt

SEQ ID NO: 1391578 - DNA, 15 bp, Homo sapiens
agaggaatgaagtgt

SEQ ID NO: 1391579 - DNA, 15 bp, Homo sapiens
aagaggaatgaagtg

SEQ ID NO: 1391580 - DNA, 15 bp, Homo sapiens
caagaggaatgaagt

SEQ ID NO: 1391581 - DNA, 15 bp, Homo sapiens
tcaagaggaatgaag

SEQ ID NO: 1391582 - DNA, 15 bp, Homo sapiens
ttcaagaggaatgaa

SEQ ID NO: 1391583 - DNA, 15 bp, Homo sapiens
attcaagaggaatga

SEQ ID NO: 1391584 - DNA, 15 bp, Homo sapiens
tattcaagaggaatg

SEQ ID NO: 1391585 - DNA, 15 bp, Homo sapiens
gtattcaagaggaat

SEQ ID NO: 1391586 - DNA, 15 bp, Homo sapiens
ggtattcaagaggaa

SEQ ID NO: 1391587 - DNA, 15 bp, Homo sapiens
aggtattcaagagga

SEQ ID NO: 1391588 - DNA, 15 bp, Homo sapiens
caggtattcaagagg

SEQ ID NO: 1391589 - DNA, 15 bp, Homo sapiens
ccaggtattcaagag

SEQ ID NO: 1391590 - DNA, 15 bp, Homo sapiens
tccaggtattcaaga

SEQ ID NO: 1391591 - DNA, 15 bp, Homo sapiens
ttccaggtattcaag

SEQ ID NO: 1391592 - DNA, 15 bp, Homo sapiens
tttccaggtattcaa

SEQ ID NO: 1391593 - DNA, 15 bp, Homo sapiens
ctttccaggtattca

SEQ ID NO: 1391594 - DNA, 15 bp, Homo sapiens
gctttccaggtattc

SEQ ID NO: 1391595 - DNA, 15 bp, Homo sapiens
ggctttccaggtatt

SEQ ID NO: 1391596 - DNA, 15 bp, Homo sapiens
aggctttccaggtat

SEQ ID NO: 1391597 - DNA, 15 bp, Homo sapiens
aaggctttccaggta

SEQ ID NO: 1391598 - DNA, 15 bp, Homo sapiens
gaaggctttccaggt

SEQ ID NO: 1391599 - DNA, 15 bp, Homo sapiens
ggaaggctttccagg

SEQ ID NO: 1391600 - DNA, 15 bp, Homo sapiens
gggaaggctttccag

SEQ ID NO: 1391601 - DNA, 15 bp, Homo sapiens
tgggaaggctttcca

SEQ ID NO: 1391602 - DNA, 15 bp, Homo sapiens
ttgggaaggctttcc

SEQ ID NO: 1391603 - DNA, 15 bp, Homo sapiens
cttgggaaggctttc

SEQ ID NO: 1391604 - DNA, 15 bp, Homo sapiens
tcttgggaaggcttt

SEQ ID NO: 1391605 - DNA, 15 bp, Homo sapiens
ttcttgggaaggctt

SEQ ID NO: 1391606 - DNA, 15 bp, Homo sapiens
cttcttgggaaggct

SEQ ID NO: 1391607 - DNA, 15 bp, Homo sapiens
ccttcttgggaaggc

SEQ ID NO: 1391608 - DNA, 15 bp, Homo sapiens
tgtccttcttgggaa

SEQ ID NO: 1391609 - DNA, 15 bp, Homo sapiens
ctgtccttcttggga

SEQ ID NO: 1391610 - DNA, 15 bp, Homo sapiens
tctgtccttcttggg

SEQ ID NO: 1391611 - DNA, 15 bp, Homo sapiens
atctgtccttcttgg

SEQ ID NO: 1391612 - DNA, 15 bp, Homo sapiens
tatctgtccttcttg

SEQ ID NO: 1391613 - DNA, 15 bp, Homo sapiens
gtatctgtccttctt

SEQ ID NO: 1391614 - DNA, 15 bp, Homo sapiens
tgtatctgtccttct

SEQ ID NO: 1391615 - DNA, 15 bp, Homo sapiens
ttgtatctgtccttc

SEQ ID NO: 1391616 - DNA, 15 bp, Homo sapiens
tttgtatctgtcctt

SEQ ID NO: 1391617 - DNA, 15 bp, Homo sapiens
gtttgtatctgtcct

SEQ ID NO: 1391618 - DNA, 15 bp, Homo sapiens
agtttgtatctgtcc

SEQ ID NO: 1391619 - DNA, 15 bp, Homo sapiens
tagtttgtatctgtc

SEQ ID NO: 1391620 - DNA, 15 bp, Homo sapiens
gtagtttgtatctgt

SEQ ID NO: 1391621 - DNA, 15 bp, Homo sapiens
agtagtttgtatctg

SEQ ID NO: 1391622 - DNA, 15 bp, Homo sapiens
gagtagtttgtatct

SEQ ID NO: 1391623 - DNA, 15 bp, Homo sapiens
ggagtagtttgtatc

SEQ ID NO: 1391624 - DNA, 15 bp, Homo sapiens
tggagtagtttgtat

SEQ ID NO: 1391625 - DNA, 15 bp, Homo sapiens
ctggagtagtttgta

SEQ ID NO: 1391626 - DNA, 15 bp, Homo sapiens
tctggagtagtttgt

SEQ ID NO: 1391627 - DNA, 15 bp, Homo sapiens
gtctggagtagtttg

SEQ ID NO: 1391628 - DNA, 15 bp, Homo sapiens
agtctggagtagttt

SEQ ID NO: 1391629 - DNA, 15 bp, Homo sapiens
cagtctggagtagtt

SEQ ID NO: 1391630 - DNA, 15 bp, Homo sapiens
gcagtctggagtagt

SEQ ID NO: 1391631 - DNA, 15 bp, Homo sapiens
tgcagtctggagtag

SEQ ID NO: 1391632 - DNA, 15 bp, Homo sapiens
ttgcagtctggagta

SEQ ID NO: 1391633 - DNA, 15 bp, Homo sapiens
tttgcagtctggagt

SEQ ID NO: 1391634 - DNA, 15 bp, Homo sapiens
ttttgcagtctggag

SEQ ID NO: 1391635 - DNA, 15 bp, Homo sapiens
tttttgcagtctgga

SEQ ID NO: 1391636 - DNA, 15 bp, Homo sapiens
gtttttgcagtctgg

SEQ ID NO: 1391637 - DNA, 15 bp, Homo sapiens
agtttttgcagtctg

SEQ ID NO: 1391638 - DNA, 15 bp, Homo sapiens
tagtttttgcagtct

SEQ ID NO: 1391639 - DNA, 15 bp, Homo sapiens
atagtttttgcagtc

SEQ ID NO: 1391640 - DNA, 15 bp, Homo sapiens
tatagtttttgcagt

SEQ ID NO: 1391641 - DNA, 15 bp, Homo sapiens
ttatagtttttgcag

SEQ ID NO: 1391642 - DNA, 15 bp, Homo sapiens
attatagtttttgca

SEQ ID NO: 1391643 - DNA, 15 bp, Homo sapiens
tattatagtttttgc

SEQ ID NO: 1391644 - DNA, 15 bp, Homo sapiens
ttattatagtttttg

SEQ ID NO: 1391645 - DNA, 15 bp, Homo sapiens
gtatttattatagtt

SEQ ID NO: 1391646 - DNA, 15 bp, Homo sapiens
ggtatttattatagt

SEQ ID NO: 1391647 - DNA, 15 bp, Homo sapiens
aggtatttattatag

SEQ ID NO: 1391648 - DNA, 15 bp, Homo sapiens
taggtatttattata

SEQ ID NO: 1391649 - DNA, 15 bp, Homo sapiens
ttaggtatttattat

SEQ ID NO: 1391650 - DNA, 15 bp, Homo sapiens
gttaggtatttatta

SEQ ID NO: 1391651 - DNA, 15 bp, Homo sapiens
agttaggtatttatt

SEQ ID NO: 1391652 - DNA, 15 bp, Homo sapiens
cagttaggtatttat

SEQ ID NO: 1391653 - DNA, 15 bp, Homo sapiens
acagttaggtattta

SEQ ID NO: 1391654 - DNA, 15 bp, Homo sapiens
aacagttaggtattt

SEQ ID NO: 1391655 - DNA, 15 bp, Homo sapiens
gaacagttaggtatt

SEQ ID NO: 1391656 - DNA, 15 bp, Homo sapiens
tgaacagttaggtat

SEQ ID NO: 1391657 - DNA, 15 bp, Homo sapiens
ttgaacagttaggta

SEQ ID NO: 1391658 - DNA, 15 bp, Homo sapiens
attgaacagttaggt

SEQ ID NO: 1391659 - DNA, 15 bp, Homo sapiens
cattgaacagttagg

SEQ ID NO: 1391660 - DNA, 15 bp, Homo sapiens
gcattgaacagttag

SEQ ID NO: 1391661 - DNA, 15 bp, Homo sapiens
ggcattgaacagtta

SEQ ID NO: 1391662 - DNA, 15 bp, Homo sapiens
gggcattgaacagtt

SEQ ID NO: 1391663 - DNA, 15 bp, Homo sapiens
tgggcattgaacagt

SEQ ID NO: 1391664 - DNA, 15 bp, Homo sapiens
ctgggcattgaacag

SEQ ID NO: 1391665 - DNA, 15 bp, Homo sapiens
tctgggcattgaaca

SEQ ID NO: 1391666 - DNA, 15 bp, Homo sapiens
gtctgggcattgaac

SEQ ID NO: 1391667 - DNA, 15 bp, Homo sapiens
tgtctgggcattgaa

SEQ ID NO: 1391668 - DNA, 15 bp, Homo sapiens
atgtctgggcattga

SEQ ID NO: 1391669 - DNA, 15 bp, Homo sapiens
aatgtctgggcattg

SEQ ID NO: 1391670 - DNA, 15 bp, Homo sapiens
caatgtctgggcatt

SEQ ID NO: 1391671 - DNA, 15 bp, Homo sapiens
gcaatgtctgggcat

SEQ ID NO: 1391672 - DNA, 15 bp, Homo sapiens
agcaatgtctgggca

SEQ ID NO: 1391673 - DNA, 15 bp, Homo sapiens
cagcaatgtctgggc

SEQ ID NO: 1391674 - DNA, 15 bp, Homo sapiens
tcagcaatgtctggg

SEQ ID NO: 1391675 - DNA, 15 bp, Homo sapiens
ttcagcaatgtctgg

SEQ ID NO: 1391676 - DNA, 15 bp, Homo sapiens
gttcagcaatgtctg

SEQ ID NO: 1391677 - DNA, 15 bp, Homo sapiens
tgttcagcaatgtct

SEQ ID NO: 1391678 - DNA, 15 bp, Homo sapiens
atgttcagcaatgtc

SEQ ID NO: 1391679 - DNA, 15 bp, Homo sapiens
gatgttcagcaatgt

SEQ ID NO: 1391680 - DNA, 15 bp, Homo sapiens
ggatgttcagcaatg

SEQ ID NO: 1391681 - DNA, 15 bp, Homo sapiens
tggatgttcagcaat

SEQ ID NO: 1391682 - DNA, 15 bp, Homo sapiens
gtggatgttcagcaa

SEQ ID NO: 1391683 - DNA, 15 bp, Homo sapiens
tgtggatgttcagca

SEQ ID NO: 1391684 - DNA, 15 bp, Homo sapiens
ttgtggatgttcagc

SEQ ID NO: 1391685 - DNA, 15 bp, Homo sapiens
cttgtggatgttcag

SEQ ID NO: 1391686 - DNA, 15 bp, Homo sapiens
gcttgtggatgttca

SEQ ID NO: 1391687 - DNA, 15 bp, Homo sapiens
tgcttgtggatgttc

SEQ ID NO: 1391688 - DNA, 15 bp, Homo sapiens
gtgcttgtggatgtt

SEQ ID NO: 1391689 - DNA, 15 bp, Homo sapiens
ggtgcttgtggatgt

SEQ ID NO: 1391690 - DNA, 15 bp, Homo sapiens
cggtgcttgtggatg

SEQ ID NO: 1391691 - DNA, 15 bp, Homo sapiens
tcggtgcttgtggat

SEQ ID NO: 1391692 - DNA, 15 bp, Homo sapiens
atcggtgcttgtgga

SEQ ID NO: 1391693 - DNA, 15 bp, Homo sapiens
tatcggtgcttgtgg

SEQ ID NO: 1391694 - DNA, 15 bp, Homo sapiens
gtatcggtgcttgtg

SEQ ID NO: 1391695 - DNA, 15 bp, Homo sapiens
ggtatcggtgcttgt

SEQ ID NO: 1391696 - DNA, 15 bp, Homo sapiens
tggtatcggtgcttg

SEQ ID NO: 1391697 - DNA, 15 bp, Homo sapiens
atggtatcggtgctt

SEQ ID NO: 1391698 - DNA, 15 bp, Homo sapiens
gatggtatcggtgct

SEQ ID NO: 1391699 - DNA, 15 bp, Homo sapiens
ggatggtatcggtgc

SEQ ID NO: 1391700 - DNA, 15 bp, Homo sapiens
tggatggtatcggtg

SEQ ID NO: 1391701 - DNA, 15 bp, Homo sapiens
ctggatggtatcggt

SEQ ID NO: 1391702 - DNA, 15 bp, Homo sapiens
cctggatggtatcgg

SEQ ID NO: 1391703 - DNA, 15 bp, Homo sapiens
tcctggatggtatcg

SEQ ID NO: 1391704 - DNA, 15 bp, Homo sapiens
ttcctggatggtatc

SEQ ID NO: 1391705 - DNA, 15 bp, Homo sapiens
tttcctggatggtat

SEQ ID NO: 1391706 - DNA, 15 bp, Homo sapiens
ttttcctggatggta

SEQ ID NO: 1391707 - DNA, 15 bp, Homo sapiens
gttttcctggatggt

SEQ ID NO: 1391708 - DNA, 15 bp, Homo sapiens
tgttttcctggatgg

SEQ ID NO: 1391709 - DNA, 15 bp, Homo sapiens
atgttttcctggatg

SEQ ID NO: 1391710 - DNA, 15 bp, Homo sapiens
catgttttcctggat

SEQ ID NO: 1391711 - DNA, 15 bp, Homo sapiens
tcatgttttcctgga

SEQ ID NO: 1391712 - DNA, 15 bp, Homo sapiens
gtcatgttttcctgg

SEQ ID NO: 1391713 - DNA, 15 bp, Homo sapiens
ggtcatgttttcctg

SEQ ID NO: 1391714 - DNA, 15 bp, Homo sapiens
aggtcatgttttcct

SEQ ID NO: 1391715 - DNA, 15 bp, Homo sapiens
gaggtcatgttttcc

SEQ ID NO: 1391716 - DNA, 15 bp, Homo sapiens
tgaggtcatgttttc

SEQ ID NO: 1391717 - DNA, 15 bp, Homo sapiens
gtgaggtcatgtttt

SEQ ID NO: 1391718 - DNA, 15 bp, Homo sapiens
ggtgaggtcatgttt

SEQ ID NO: 1391719 - DNA, 15 bp, Homo sapiens
tggtgaggtcatgtt

SEQ ID NO: 1391720 - DNA, 15 bp, Homo sapiens
ttggtgaggtcatgt

SEQ ID NO: 1391721 - DNA, 15 bp, Homo sapiens
tttggtgaggtcatg

SEQ ID NO: 1391722 - DNA, 15 bp, Homo sapiens
atttggtgaggtcat

SEQ ID NO: 1391723 - DNA, 15 bp, Homo sapiens
catttggtgaggtca

SEQ ID NO: 1391724 - DNA, 15 bp, Homo sapiens
tcatttggtgaggtc

SEQ ID NO: 1391725 - DNA, 15 bp, Homo sapiens
ttcatttggtgaggt

SEQ ID NO: 1391726 - DNA, 15 bp, Homo sapiens
cttcatttggtgagg

SEQ ID NO: 1391727 - DNA, 15 bp, Homo sapiens
acttcatttggtgag

SEQ ID NO: 1391728 - DNA, 15 bp, Homo sapiens
tacttcatttggtga

SEQ ID NO: 1391729 - DNA, 15 bp, Homo sapiens
ttacttcatttggtg

SEQ ID NO: 1391730 - DNA, 15 bp, Homo sapiens
tttacttcatttggt

SEQ ID NO: 1391731 - DNA, 15 bp, Homo sapiens
atttacttcatttgg

SEQ ID NO: 1391732 - DNA, 15 bp, Homo sapiens
tatttacttcatttg

SEQ ID NO: 1391733 - DNA, 15 bp, Homo sapiens
ttatttacttcattt

SEQ ID NO: 1391734 - DNA, 15 bp, Homo sapiens
cttatttacttcatt

SEQ ID NO: 1391735 - DNA, 15 bp, Homo sapiens
ccttatttacttcat

SEQ ID NO: 1391736 - DNA, 15 bp, Homo sapiens
gccttatttacttca

SEQ ID NO: 1391737 - DNA, 15 bp, Homo sapiens
tgccttatttacttc

SEQ ID NO: 1391738 - DNA, 15 bp, Homo sapiens
gtgccttatttactt

SEQ ID NO: 1391739 - DNA, 15 bp, Homo sapiens
tgtgccttatttact

SEQ ID NO: 1391740 - DNA, 15 bp, Homo sapiens
ttgtgccttatttac

SEQ ID NO: 1391741 - DNA, 15 bp, Homo sapiens
cttgtgccttattta

SEQ ID NO: 1391742 - DNA, 15 bp, Homo sapiens
acttgtgccttattt

SEQ ID NO: 1391743 - DNA, 15 bp, Homo sapiens
cacttgtgccttatt

SEQ ID NO: 1391744 - DNA, 15 bp, Homo sapiens
ccacttgtgccttat

SEQ ID NO: 1391745 - DNA, 15 bp, Homo sapiens
gccacttgtgcctta

SEQ ID NO: 1391746 - DNA, 15 bp, Homo sapiens
ggccacttgtgcctt

SEQ ID NO: 1391747 - DNA, 15 bp, Homo sapiens
tggccacttgtgcct

SEQ ID NO: 1391748 - DNA, 15 bp, Homo sapiens
ttggccacttgtgcc

SEQ ID NO: 1391749 - DNA, 15 bp, Homo sapiens
attggccacttgtgc

SEQ ID NO: 1391750 - DNA, 15 bp, Homo sapiens
tattggccacttgtg

SEQ ID NO: 1391751 - DNA, 15 bp, Homo sapiens
gtattggccacttgt

SEQ ID NO: 1391752 - DNA, 15 bp, Homo sapiens
ggtattggccacttg

SEQ ID NO: 1391753 - DNA, 15 bp, Homo sapiens
cggtattggccactt

SEQ ID NO: 1391754 - DNA, 15 bp, Homo sapiens
ccggtattggccact

SEQ ID NO: 1391755 - DNA, 15 bp, Homo sapiens
tccggtattggccac

SEQ ID NO: 1391756 - DNA, 15 bp, Homo sapiens
ttccggtattggcca

SEQ ID NO: 1391757 - DNA, 15 bp, Homo sapiens
attccggtattggcc

SEQ ID NO: 1391758 - DNA, 15 bp, Homo sapiens
cattccggtattggc

SEQ ID NO: 1391759 - DNA, 15 bp, Homo sapiens
tcattccggtattgg

SEQ ID NO: 1391760 - DNA, 15 bp, Homo sapiens
gtcattccggtattg

SEQ ID NO: 1391761 - DNA, 15 bp, Homo sapiens
tgtcattccggtatt

SEQ ID NO: 1391762 - DNA, 15 bp, Homo sapiens
ctgtcattccggtat

SEQ ID NO: 1391763 - DNA, 15 bp, Homo sapiens
tctgtcattccggta

SEQ ID NO: 1391764 - DNA, 15 bp, Homo sapiens
gtctgtcattccggt

SEQ ID NO: 1391765 - DNA, 15 bp, Homo sapiens
tgtctgtcattccgg

SEQ ID NO: 1391766 - DNA, 15 bp, Homo sapiens
atgtctgtcattccg

SEQ ID NO: 1391767 - DNA, 15 bp, Homo sapiens
tatgtctgtcattcc

SEQ ID NO: 1391768 - DNA, 15 bp, Homo sapiens
atatgtctgtcattc

SEQ ID NO: 1391769 - DNA, 15 bp, Homo sapiens
catatgtctgtcatt

SEQ ID NO: 1391770 - DNA, 15 bp, Homo sapiens
acatatgtctgtcat

SEQ ID NO: 1391771 - DNA, 15 bp, Homo sapiens
cacatatgtctgtca

SEQ ID NO: 1391772 - DNA, 15 bp, Homo sapiens
tcacatatgtctgtc

SEQ ID NO: 1391773 - DNA, 15 bp, Homo sapiens
gtcacatatgtctgt

SEQ ID NO: 1391774 - DNA, 15 bp, Homo sapiens
ggtcacatatgtctg

SEQ ID NO: 1391775 - DNA, 15 bp, Homo sapiens
aggtcacatatgtct

SEQ ID NO: 1391776 - DNA, 15 bp, Homo sapiens
aaggtcacatatgtc

SEQ ID NO: 1391777 - DNA, 15 bp, Homo sapiens
aaaggtcacatatgt

SEQ ID NO: 1391778 - DNA, 15 bp, Homo sapiens
gaaaggtcacatatg

SEQ ID NO: 1391779 - DNA, 15 bp, Homo sapiens
tgaaaggtcacatat

SEQ ID NO: 1391780 - DNA, 15 bp, Homo sapiens
ctgaaaggtcacata

SEQ ID NO: 1391781 - DNA, 15 bp, Homo sapiens
tctgaaaggtcacat

SEQ ID NO: 1391782 - DNA, 15 bp, Homo sapiens
gtctgaaaggtcaca

SEQ ID NO: 1391783 - DNA, 15 bp, Homo sapiens
tgtctgaaaggtcac

SEQ ID NO: 1391784 - DNA, 15 bp, Homo sapiens
ctgtctgaaaggtca

SEQ ID NO: 1391785 - DNA, 15 bp, Homo sapiens
tctgtctgaaaggtc

SEQ ID NO: 1391786 - DNA, 15 bp, Homo sapiens
ttctgtctgaaaggt

SEQ ID NO: 1391787 - DNA, 15 bp, Homo sapiens
tttctgtctgaaagg

SEQ ID NO: 1391788 - DNA, 15 bp, Homo sapiens
ttttctgtctgaaag

SEQ ID NO: 1391789 - DNA, 15 bp, Homo sapiens
attttctgtctgaaa

SEQ ID NO: 1391790 - DNA, 15 bp, Homo sapiens
aattttctgtctgaa

SEQ ID NO: 1391791 - DNA, 15 bp, Homo sapiens
gaattttctgtctga

SEQ ID NO: 1391792 - DNA, 15 bp, Homo sapiens
tgaattttctgtctg

SEQ ID NO: 1391793 - DNA, 15 bp, Homo sapiens
ctgaattttctgtct

SEQ ID NO: 1391794 - DNA, 15 bp, Homo sapiens
gctgaattttctgtc

SEQ ID NO: 1391795 - DNA, 15 bp, Homo sapiens
tgctgaattttctgt

SEQ ID NO: 1391796 - DNA, 15 bp, Homo sapiens
atgctgaattttctg

SEQ ID NO: 1391797 - DNA, 15 bp, Homo sapiens
tatgctgaattttct

SEQ ID NO: 1391798 - DNA, 15 bp, Homo sapiens
ctatgctgaattttc

SEQ ID NO: 1391799 - DNA, 15 bp, Homo sapiens
gctatgctgaatttt

SEQ ID NO: 1391800 - DNA, 15 bp, Homo sapiens
agctatgctgaattt

SEQ ID NO: 1391801 - DNA, 15 bp, Homo sapiens
cagctatgctgaatt

SEQ ID NO: 1391802 - DNA, 15 bp, Homo sapiens
acagctatgctgaat

SEQ ID NO: 1391803 - DNA, 15 bp, Homo sapiens
aacagctatgctgaa

SEQ ID NO: 1391804 - DNA, 15 bp, Homo sapiens
aaacagctatgctga

SEQ ID NO: 1391805 - DNA, 15 bp, Homo sapiens
aaaacagctatgctg

SEQ ID NO: 1391806 - DNA, 15 bp, Homo sapiens
taaaacagctatgct

SEQ ID NO: 1391807 - DNA, 15 bp, Homo sapiens
ttaaaacagctatgc

SEQ ID NO: 1391808 - DNA, 15 bp, Homo sapiens
cttaaaacagctatg

SEQ ID NO: 1391809 - DNA, 15 bp, Homo sapiens
ccttaaaacagctat

SEQ ID NO: 1391810 - DNA, 15 bp, Homo sapiens
tccttaaaacagcta

SEQ ID NO: 1391811 - DNA, 15 bp, Homo sapiens
ttccttaaaacagct

SEQ ID NO: 1391812 - DNA, 15 bp, Homo sapiens
cttccttaaaacagc

SEQ ID NO: 1391813 - DNA, 15 bp, Homo sapiens
gcttccttaaaacag

SEQ ID NO: 1391814 - DNA, 15 bp, Homo sapiens
agcttccttaaaaca

SEQ ID NO: 1391815 - DNA, 15 bp, Homo sapiens
gagcttccttaaaac

SEQ ID NO: 1391816 - DNA, 15 bp, Homo sapiens
tgagcttccttaaaa

SEQ ID NO: 1391817 - DNA, 15 bp, Homo sapiens
ttgagcttccttaaa

SEQ ID NO: 1391818 - DNA, 15 bp, Homo sapiens
attgagcttccttaa

SEQ ID NO: 1391819 - DNA, 15 bp, Homo sapiens
cattgagcttcctta

SEQ ID NO: 1391820 - DNA, 15 bp, Homo sapiens
ccattgagcttcctt

SEQ ID NO: 1391821 - DNA, 15 bp, Homo sapiens
tccattgagcttcct

SEQ ID NO: 1391822 - DNA, 15 bp, Homo sapiens
ttccattgagcttcc

SEQ ID NO: 1391823 - DNA, 15 bp, Homo sapiens
attccattgagcttc

SEQ ID NO: 1391824 - DNA, 15 bp, Homo sapiens
aattccattgagctt

SEQ ID NO: 1391825 - DNA, 15 bp, Homo sapiens
gaattccattgagct

SEQ ID NO: 1391826 - DNA, 15 bp, Homo sapiens
tgaattccattgagc

SEQ ID NO: 1391827 - DNA, 15 bp, Homo sapiens
ttgaattccattgag

SEQ ID NO: 1391828 - DNA, 15 bp, Homo sapiens
cttgaattccattga

SEQ ID NO: 1391829 - DNA, 15 bp, Homo sapiens
tcttgaattccattg

SEQ ID NO: 1391830 - DNA, 15 bp, Homo sapiens
gtcttgaattccatt

SEQ ID NO: 1391831 - DNA, 15 bp, Homo sapiens
tgtcttgaattccat

SEQ ID NO: 1391832 - DNA, 15 bp, Homo sapiens
ttgtcttgaattcca

SEQ ID NO: 1391833 - DNA, 15 bp, Homo sapiens
gttgtcttgaattcc

SEQ ID NO: 1391834 - DNA, 15 bp, Homo sapiens
tgttgtcttgaattc

SEQ ID NO: 1391835 - DNA, 15 bp, Homo sapiens
gtgttgtcttgaatt

SEQ ID NO: 1391836 - DNA, 15 bp, Homo sapiens
tgtgttgtcttgaat

SEQ ID NO: 1391837 - DNA, 15 bp, Homo sapiens
ctgtgttgtcttgaa

SEQ ID NO: 1391838 - DNA, 15 bp, Homo sapiens
tctgtgttgtcttga

SEQ ID NO: 1391839 - DNA, 15 bp, Homo sapiens
ctctgtgttgtcttg

SEQ ID NO: 1391840 - DNA, 15 bp, Homo sapiens
tctctgtgttgtctt

SEQ ID NO: 1391841 - DNA, 15 bp, Homo sapiens
ttctctgtgttgtct

SEQ ID NO: 1391842 - DNA, 15 bp, Homo sapiens
cttctctgtgttgtc

SEQ ID NO: 1391843 - DNA, 15 bp, Homo sapiens
ccttctctgtgttgt

SEQ ID NO: 1391844 - DNA, 15 bp, Homo sapiens
tccttctctgtgttg

SEQ ID NO: 1391845 - DNA, 15 bp, Homo sapiens
ttccttctctgtgtt

SEQ ID NO: 1391846 - DNA, 15 bp, Homo sapiens
attccttctctgtgt

SEQ ID NO: 1391847 - DNA, 15 bp, Homo sapiens
aattccttctctgtg

SEQ ID NO: 1391848 - DNA, 15 bp, Homo sapiens
gaattccttctctgt

SEQ ID NO: 1391849 - DNA, 15 bp, Homo sapiens
tgaattccttctctg

SEQ ID NO: 1391850 - DNA, 15 bp, Homo sapiens
ttgaattccttctct

SEQ ID NO: 1391851 - DNA, 15 bp, Homo sapiens
tttgaattccttctc

SEQ ID NO: 1391852 - DNA, 15 bp, Homo sapiens
ttttgaattccttct

SEQ ID NO: 1391853 - DNA, 15 bp, Homo sapiens
attttgaattccttc

SEQ ID NO: 1391854 - DNA, 15 bp, Homo sapiens
gattttgaattcctt

SEQ ID NO: 1391855 - DNA, 15 bp, Homo sapiens
ggattttgaattcct

SEQ ID NO: 1391856 - DNA, 15 bp, Homo sapiens
aggattttgaattcc

SEQ ID NO: 1391857 - DNA, 15 bp, Homo sapiens
taggattttgaattc

SEQ ID NO: 1391858 - DNA, 15 bp, Homo sapiens
gtaggattttgaatt

SEQ ID NO: 1391859 - DNA, 15 bp, Homo sapiens
ggtaggattttgaat

SEQ ID NO: 1391860 - DNA, 15 bp, Homo sapiens
tggtaggattttgaa

SEQ ID NO: 1391861 - DNA, 15 bp, Homo sapiens
ctggtaggattttga

SEQ ID NO: 1391862 - DNA, 15 bp, Homo sapiens
actggtaggattttg

SEQ ID NO: 1391863 - DNA, 15 bp, Homo sapiens
aactggtaggatttt

SEQ ID NO: 1391864 - DNA, 15 bp, Homo sapiens
taactggtaggattt

SEQ ID NO: 1391865 - DNA, 15 bp, Homo sapiens
ttaactggtaggatt

SEQ ID NO: 1391866 - DNA, 15 bp, Homo sapiens
tttaactggtaggat

SEQ ID NO: 1391867 - DNA, 15 bp, Homo sapiens
atttaactggtagga

SEQ ID NO: 1391868 - DNA, 15 bp, Homo sapiens
aatttaactggtagg

SEQ ID NO: 1391869 - DNA, 15 bp, Homo sapiens
aaatttaactggtag

SEQ ID NO: 1391870 - DNA, 15 bp, Homo sapiens
taaatttaactggta

SEQ ID NO: 1391871 - DNA, 15 bp, Homo sapiens
ttaaatttaactggt

SEQ ID NO: 1391872 - DNA, 15 bp, Homo sapiens
gttaaatttaactgg

SEQ ID NO: 1391873 - DNA, 15 bp, Homo sapiens
tgttaaatttaactg

SEQ ID NO: 1391874 - DNA, 15 bp, Homo sapiens
ttgttaaatttaact

SEQ ID NO: 1391875 - DNA, 15 bp, Homo sapiens
tttgttaaatttaac

SEQ ID NO: 1391876 - DNA, 15 bp, Homo sapiens
ctttgttaaatttaa

SEQ ID NO: 1391877 - DNA, 15 bp, Homo sapiens
tctttgttaaattta

SEQ ID NO: 1391878 - DNA, 15 bp, Homo sapiens
ctctttgttaaattt

SEQ ID NO: 1391879 - DNA, 15 bp, Homo sapiens
tctctttgttaaatt

SEQ ID NO: 1391880 - DNA, 15 bp, Homo sapiens
atctctttgttaaat

SEQ ID NO: 1391881 - DNA, 15 bp, Homo sapiens
aatctctttgttaaa

SEQ ID NO: 1391882 - DNA, 15 bp, Homo sapiens
caatctctttgttaa

SEQ ID NO: 1391883 - DNA, 15 bp, Homo sapiens
tcaatctctttgtta

SEQ ID NO: 1391884 - DNA, 15 bp, Homo sapiens
ttcaatctctttgtt

SEQ ID NO: 1391885 - DNA, 15 bp, Homo sapiens
tttcaatctctttgt

SEQ ID NO: 1391886 - DNA, 15 bp, Homo sapiens
atttcaatctctttg

SEQ ID NO: 1391887 - DNA, 15 bp, Homo sapiens
tatttcaatctcttt

SEQ ID NO: 1391888 - DNA, 15 bp, Homo sapiens
ctatttcaatctctt

SEQ ID NO: 1391889 - DNA, 15 bp, Homo sapiens
actatttcaatctct

SEQ ID NO: 1391890 - DNA, 15 bp, Homo sapiens
aactatttcaatctc

SEQ ID NO: 1391891 - DNA, 15 bp, Homo sapiens
aaactatttcaatct

SEQ ID NO: 1391892 - DNA, 15 bp, Homo sapiens
aaaactatttcaatc

SEQ ID NO: 1391893 - DNA, 15 bp, Homo sapiens
aaaaactatttcaat

SEQ ID NO: 1391894 - DNA, 15 bp, Homo sapiens
taaaaactatttcaa

SEQ ID NO: 1391895 - DNA, 15 bp, Homo sapiens
ttaaaaactatttca

SEQ ID NO: 1391896 - DNA, 15 bp, Homo sapiens
tttaaaaactatttc

SEQ ID NO: 1391897 - DNA, 15 bp, Homo sapiens
ttttaaaaactattt

SEQ ID NO: 1391898 - DNA, 15 bp, Homo sapiens
tttttaaaaactatt

SEQ ID NO: 1391899 - DNA, 15 bp, Homo sapiens
atttttaaaaactat

SEQ ID NO: 1391900 - DNA, 15 bp, Homo sapiens
aatttttaaaaacta

SEQ ID NO: 1391901 - DNA, 15 bp, Homo sapiens
taatttttaaaaact

SEQ ID NO: 1391902 - DNA, 15 bp, Homo sapiens
ttaatttttaaaaac

SEQ ID NO: 1391903 - DNA, 15 bp, Homo sapiens
cttaatttttaaaaa

SEQ ID NO: 1391904 - DNA, 15 bp, Homo sapiens
gcttaatttttaaaa

SEQ ID NO: 1391905 - DNA, 15 bp, Homo sapiens
tgcttaatttttaaa

SEQ ID NO: 1391906 - DNA, 15 bp, Homo sapiens
ttgcttaatttttaa

SEQ ID NO: 1391907 - DNA, 15 bp, Homo sapiens
tttgcttaattttta

SEQ ID NO: 1391908 - DNA, 15 bp, Homo sapiens
ttttgcttaattttt

SEQ ID NO: 1391909 - DNA, 15 bp, Homo sapiens
tttttgcttaatttt

SEQ ID NO: 1391910 - DNA, 15 bp, Homo sapiens
atttttgcttaattt

SEQ ID NO: 1391911 - DNA, 15 bp, Homo sapiens
aatttttgcttaatt

SEQ ID NO: 1391912 - DNA, 15 bp, Homo sapiens
gaatttttgcttaat

SEQ ID NO: 1391913 - DNA, 15 bp, Homo sapiens
agaatttttgcttaa

SEQ ID NO: 1391914 - DNA, 15 bp, Homo sapiens
cagaatttttgctta

SEQ ID NO: 1391915 - DNA, 15 bp, Homo sapiens
ccagaatttttgctt

SEQ ID NO: 1391916 - DNA, 15 bp, Homo sapiens
tccagaatttttgct

SEQ ID NO: 1391917 - DNA, 15 bp, Homo sapiens
ctccagaatttttgc

SEQ ID NO: 1391918 - DNA, 15 bp, Homo sapiens
actccagaatttttg

SEQ ID NO: 1391919 - DNA, 15 bp, Homo sapiens
aactccagaattttt

SEQ ID NO: 1391920 - DNA, 15 bp, Homo sapiens
caactccagaatttt

SEQ ID NO: 1391921 - DNA, 15 bp, Homo sapiens
tcaactccagaattt

SEQ ID NO: 1391922 - DNA, 15 bp, Homo sapiens
ttcaactccagaatt

SEQ ID NO: 1391923 - DNA, 15 bp, Homo sapiens
tttcaactccagaat

SEQ ID NO: 1391924 - DNA, 15 bp, Homo sapiens
ttttcaactccagaa

SEQ ID NO: 1391925 - DNA, 15 bp, Homo sapiens
tttttcaactccaga

SEQ ID NO: 1391926 - DNA, 15 bp, Homo sapiens
atttttcaactccag

SEQ ID NO: 1391927 - DNA, 15 bp, Homo sapiens
aatttttcaactcca

SEQ ID NO: 1391928 - DNA, 15 bp, Homo sapiens
aaatttttcaactcc

SEQ ID NO: 1391929 - DNA, 15 bp, Homo sapiens
taaatttttcaactc

SEQ ID NO: 1391930 - DNA, 15 bp, Homo sapiens
ttaaatttttcaact

SEQ ID NO: 1391931 - DNA, 15 bp, Homo sapiens
gttaaatttttcaac

SEQ ID NO: 1391932 - DNA, 15 bp, Homo sapiens
agttaaatttttcaa

SEQ ID NO: 1391933 - DNA, 15 bp, Homo sapiens
cagttaaatttttca

SEQ ID NO: 1391934 - DNA, 15 bp, Homo sapiens
tcagttaaatttttc

SEQ ID NO: 1391935 - DNA, 15 bp, Homo sapiens
gtcagttaaattttt

SEQ ID NO: 1391936 - DNA, 15 bp, Homo sapiens
tgtcagttaaatttt

SEQ ID NO: 1391937 - DNA, 15 bp, Homo sapiens
atgtcagttaaattt

SEQ ID NO: 1391938 - DNA, 15 bp, Homo sapiens
tatgtcagttaaatt

SEQ ID NO: 1391939 - DNA, 15 bp, Homo sapiens
gtatgtcagttaaat

SEQ ID NO: 1391940 - DNA, 15 bp, Homo sapiens
agtatgtcagttaaa

SEQ ID NO: 1391941 - DNA, 15 bp, Homo sapiens
cagtatgtcagttaa

SEQ ID NO: 1391942 - DNA, 15 bp, Homo sapiens
tcagtatgtcagtta

SEQ ID NO: 1391943 - DNA, 15 bp, Homo sapiens
ttcagtatgtcagtt

SEQ ID NO: 1391944 - DNA, 15 bp, Homo sapiens
cttcagtatgtcagt

SEQ ID NO: 1391945 - DNA, 15 bp, Homo sapiens
tcttcagtatgtcag

SEQ ID NO: 1391946 - DNA, 15 bp, Homo sapiens
ttcttcagtatgtca

SEQ ID NO: 1391947 - DNA, 15 bp, Homo sapiens
attcttcagtatgtc

SEQ ID NO: 1391948 - DNA, 15 bp, Homo sapiens
cattcttcagtatgt

SEQ ID NO: 1391949 - DNA, 15 bp, Homo sapiens
acattcttcagtatg

SEQ ID NO: 1391950 - DNA, 15 bp, Homo sapiens
tacattcttcagtat

SEQ ID NO: 1391951 - DNA, 15 bp, Homo sapiens
atacattcttcagta

SEQ ID NO: 1391952 - DNA, 15 bp, Homo sapiens
gatacattcttcagt

SEQ ID NO: 1391953 - DNA, 15 bp, Homo sapiens
tgatacattcttcag

SEQ ID NO: 1391954 - DNA, 15 bp, Homo sapiens
ctgatacattcttca

SEQ ID NO: 1391955 - DNA, 15 bp, Homo sapiens
tctgatacattcttc

SEQ ID NO: 1391956 - DNA, 15 bp, Homo sapiens
ctctgatacattctt

SEQ ID NO: 1391957 - DNA, 15 bp, Homo sapiens
actctgatacattct

SEQ ID NO: 1391958 - DNA, 15 bp, Homo sapiens
gactctgatacattc

SEQ ID NO: 1391959 - DNA, 15 bp, Homo sapiens
agactctgatacatt

SEQ ID NO: 1391960 - DNA, 15 bp, Homo sapiens
aagactctgatacat

SEQ ID NO: 1391961 - DNA, 15 bp, Homo sapiens
gaagactctgataca

SEQ ID NO: 1391962 - DNA, 15 bp, Homo sapiens
ggaagactctgatac

SEQ ID NO: 1391963 - DNA, 15 bp, Homo sapiens
tggaagactctgata

SEQ ID NO: 1391964 - DNA, 15 bp, Homo sapiens
ttggaagactctgat

SEQ ID NO: 1391965 - DNA, 15 bp, Homo sapiens
gttggaagactctga

SEQ ID NO: 1391966 - DNA, 15 bp, Homo sapiens
tgttggaagactctg

SEQ ID NO: 1391967 - DNA, 15 bp, Homo sapiens
ctgttggaagactct

SEQ ID NO: 1391968 - DNA, 15 bp, Homo sapiens
gctgttggaagactc

SEQ ID NO: 1391969 - DNA, 15 bp, Homo sapiens
agctgttggaagact

SEQ ID NO: 1391970 - DNA, 15 bp, Homo sapiens
cagctgttggaagac

SEQ ID NO: 1391971 - DNA, 15 bp, Homo sapiens
tcagctgttggaaga

SEQ ID NO: 1391972 - DNA, 15 bp, Homo sapiens
ttcagctgttggaag

SEQ ID NO: 1391973 - DNA, 15 bp, Homo sapiens
gttcagctgttggaa

SEQ ID NO: 1391974 - DNA, 15 bp, Homo sapiens
agttcagctgttgga

SEQ ID NO: 1391975 - DNA, 15 bp, Homo sapiens
tagttcagctgttgg

SEQ ID NO: 1391976 - DNA, 15 bp, Homo sapiens
ttagttcagctgttg

SEQ ID NO: 1391977 - DNA, 15 bp, Homo sapiens
attagttcagctgtt

SEQ ID NO: 1391978 - DNA, 15 bp, Homo sapiens
cattagttcagctgt

SEQ ID NO: 1391979 - DNA, 15 bp, Homo sapiens
tcattagttcagctg

SEQ ID NO: 1391980 - DNA, 15 bp, Homo sapiens
ttcattagttcagct

SEQ ID NO: 1391981 - DNA, 15 bp, Homo sapiens
cttcattagttcagc

SEQ ID NO: 1391982 - DNA, 15 bp, Homo sapiens
gcttcattagttcag

SEQ ID NO: 1391983 - DNA, 15 bp, Homo sapiens
tgcttcattagttca

SEQ ID NO: 1391984 - DNA, 15 bp, Homo sapiens
ctgcttcattagttc

SEQ ID NO: 1391985 - DNA, 15 bp, Homo sapiens
tctgcttcattagtt

SEQ ID NO: 1391986 - DNA, 15 bp, Homo sapiens
ttctgcttcattagt

SEQ ID NO: 1391987 - DNA, 15 bp, Homo sapiens
attctgcttcattag

SEQ ID NO: 1391988 - DNA, 15 bp, Homo sapiens
tattctgcttcatta

SEQ ID NO: 1391989 - DNA, 15 bp, Homo sapiens
ttattctgcttcatt

SEQ ID NO: 1391990 - DNA, 15 bp, Homo sapiens
tttattctgcttcat

SEQ ID NO: 1391991 - DNA, 15 bp, Homo sapiens
atttattctgcttca

SEQ ID NO: 1391992 - DNA, 15 bp, Homo sapiens
tatttattctgcttc

SEQ ID NO: 1391993 - DNA, 15 bp, Homo sapiens
ttatttattctgctt

SEQ ID NO: 1391994 - DNA, 15 bp, Homo sapiens
attatttattctgct

SEQ ID NO: 1391995 - DNA, 15 bp, Homo sapiens
aattatttattctgc

SEQ ID NO: 1391996 - DNA, 15 bp, Homo sapiens
taattatttattctg

SEQ ID NO: 1391997 - DNA, 15 bp, Homo sapiens
ctaattatttattct

SEQ ID NO: 1391998 - DNA, 15 bp, Homo sapiens
actaattatttattc

SEQ ID NO: 1391999 - DNA, 15 bp, Homo sapiens
cactaattatttatt

SEQ ID NO: 1392000 - DNA, 15 bp, Homo sapiens
tcactaattatttat

SEQ ID NO: 1392001 - DNA, 15 bp, Homo sapiens
ctcactaattattta

SEQ ID NO: 1392002 - DNA, 15 bp, Homo sapiens
gctcactaattattt

SEQ ID NO: 1392003 - DNA, 15 bp, Homo sapiens
agctcactaattatt

SEQ ID NO: 1392004 - DNA, 15 bp, Homo sapiens
aagctcactaattat

SEQ ID NO: 1392005 - DNA, 15 bp, Homo sapiens
caagctcactaatta

SEQ ID NO: 1392006 - DNA, 15 bp, Homo sapiens
tcaagctcactaatt

SEQ ID NO: 1392007 - DNA, 15 bp, Homo sapiens
ttcaagctcactaat

SEQ ID NO: 1392008 - DNA, 15 bp, Homo sapiens
tttcaagctcactaa

SEQ ID NO: 1392009 - DNA, 15 bp, Homo sapiens
ttttcaagctcacta

SEQ ID NO: 1392010 - DNA, 15 bp, Homo sapiens
gttttcaagctcact

SEQ ID NO: 1392011 - DNA, 15 bp, Homo sapiens
tgttttcaagctcac

SEQ ID NO: 1392012 - DNA, 15 bp, Homo sapiens
ctgttttcaagctca

SEQ ID NO: 1392013 - DNA, 15 bp, Homo sapiens
cctgttttcaagctc

SEQ ID NO: 1392014 - DNA, 15 bp, Homo sapiens
gcctgttttcaagct

SEQ ID NO: 1392015 - DNA, 15 bp, Homo sapiens
agcctgttttcaagc

SEQ ID NO: 1392016 - DNA, 15 bp, Homo sapiens
cagcctgttttcaag

SEQ ID NO: 1392017 - DNA, 15 bp, Homo sapiens
acagcctgttttcaa

SEQ ID NO: 1392018 - DNA, 15 bp, Homo sapiens
aacagcctgttttca

SEQ ID NO: 1392019 - DNA, 15 bp, Homo sapiens
aaacagcctgttttc

SEQ ID NO: 1392020 - DNA, 15 bp, Homo sapiens
aaaacagcctgtttt

SEQ ID NO: 1392021 - DNA, 15 bp, Homo sapiens
taaaacagcctgttt

SEQ ID NO: 1392022 - DNA, 15 bp, Homo sapiens
ttaaaacagcctgtt

SEQ ID NO: 1392023 - DNA, 15 bp, Homo sapiens
tttaaaacagcctgt

SEQ ID NO: 1392024 - DNA, 15 bp, Homo sapiens
ttttaaaacagcctg

SEQ ID NO: 1392025 - DNA, 15 bp, Homo sapiens
gttttaaaacagcct

SEQ ID NO: 1392026 - DNA, 15 bp, Homo sapiens
tgttttaaaacagcc

SEQ ID NO: 1392027 - DNA, 15 bp, Homo sapiens
gtgttttaaaacagc

SEQ ID NO: 1392028 - DNA, 15 bp, Homo sapiens
tgtgttttaaaacag

SEQ ID NO: 1392029 - DNA, 15 bp, Homo sapiens
ctgtgttttaaaaca

SEQ ID NO: 1392030 - DNA, 15 bp, Homo sapiens
actgtgttttaaaac

SEQ ID NO: 1392031 - DNA, 15 bp, Homo sapiens
gactgtgttttaaaa

SEQ ID NO: 1392032 - DNA, 15 bp, Homo sapiens
tgactgtgttttaaa

SEQ ID NO: 1392033 - DNA, 15 bp, Homo sapiens
ctgactgtgttttaa

SEQ ID NO: 1392034 - DNA, 15 bp, Homo sapiens
tctgactgtgtttta

SEQ ID NO: 1392035 - DNA, 15 bp, Homo sapiens
ctctgactgtgtttt

SEQ ID NO: 1392036 - DNA, 15 bp, Homo sapiens
cctctgactgtgttt

SEQ ID NO: 1392037 - DNA, 15 bp, Homo sapiens
tcctctgactgtgtt

SEQ ID NO: 1392038 - DNA, 15 bp, Homo sapiens
ctcctctgactgtgt

SEQ ID NO: 1392039 - DNA, 15 bp, Homo sapiens
tctcctctgactgtg

SEQ ID NO: 1392040 - DNA, 15 bp, Homo sapiens
gtctcctctgactgt

SEQ ID NO: 1392041 - DNA, 15 bp, Homo sapiens
tgtctcctctgactg

SEQ ID NO: 1392042 - DNA, 15 bp, Homo sapiens
ttgtctcctctgact

SEQ ID NO: 1392043 - DNA, 15 bp, Homo sapiens
tttgtctcctctgac

SEQ ID NO: 1392044 - DNA, 15 bp, Homo sapiens
ttttgtctcctctga

SEQ ID NO: 1392045 - DNA, 15 bp, Homo sapiens
cttttgtctcctctg

SEQ ID NO: 1392046 - DNA, 15 bp, Homo sapiens
tcttttgtctcctct

SEQ ID NO: 1392047 - DNA, 15 bp, Homo sapiens
ttcttttgtctcctc

SEQ ID NO: 1392048 - DNA, 15 bp, Homo sapiens
tttcttttgtctcct

SEQ ID NO: 1392049 - DNA, 15 bp, Homo sapiens
ttttcttttgtctcc

SEQ ID NO: 1392050 - DNA, 15 bp, Homo sapiens
tttttcttttgtctc

SEQ ID NO: 1392051 - DNA, 15 bp, Homo sapiens
ttttttcttttgtct

SEQ ID NO: 1392052 - DNA, 15 bp, Homo sapiens
cttttttcttttgtc

SEQ ID NO: 1392053 - DNA, 15 bp, Homo sapiens
tcttttttcttttgt

SEQ ID NO: 1392054 - DNA, 15 bp, Homo sapiens
ttcttttttcttttg

SEQ ID NO: 1392055 - DNA, 15 bp, Homo sapiens
gttcttttttctttt

SEQ ID NO: 1392056 - DNA, 15 bp, Homo sapiens
tgttcttttttcttt

SEQ ID NO: 1392057 - DNA, 15 bp, Homo sapiens
tttgttcttttttct

SEQ ID NO: 1392058 - DNA, 15 bp, Homo sapiens
ttttgttcttttttc

SEQ ID NO: 1392059 - DNA, 15 bp, Homo sapiens
tttttgttctttttt

SEQ ID NO: 1392060 - DNA, 15 bp, Homo sapiens
ttttttgttcttttt

SEQ ID NO: 1392061 - DNA, 15 bp, Homo sapiens
gttttttgttctttt

SEQ ID NO: 1392062 - DNA, 15 bp, Homo sapiens
tgttttttgttcttt

SEQ ID NO: 1392063 - DNA, 15 bp, Homo sapiens
ttgttttttgttctt

SEQ ID NO: 1392064 - DNA, 15 bp, Homo sapiens
attgttttttgttct

SEQ ID NO: 1392065 - DNA, 15 bp, Homo sapiens
cattgttttttgttc

SEQ ID NO: 1392066 - DNA, 15 bp, Homo sapiens
tcattgttttttgtt

SEQ ID NO: 1392067 - DNA, 15 bp, Homo sapiens
ttcattgttttttgt

SEQ ID NO: 1392068 - DNA, 15 bp, Homo sapiens
attcattgttttttg

SEQ ID NO: 1392069 - DNA, 15 bp, Homo sapiens
gattcattgtttttt

SEQ ID NO: 1392070 - DNA, 15 bp, Homo sapiens
tgattcattgttttt

SEQ ID NO: 1392071 - DNA, 15 bp, Homo sapiens
gtgattcattgtttt

SEQ ID NO: 1392072 - DNA, 15 bp, Homo sapiens
tgtgattcattgttt

SEQ ID NO: 1392073 - DNA, 15 bp, Homo sapiens
gtgtgattcattgtt

SEQ ID NO: 1392074 - DNA, 15 bp, Homo sapiens
ggtgtgattcattgt

SEQ ID NO: 1392075 - DNA, 15 bp, Homo sapiens
cggtgtgattcattg

SEQ ID NO: 1392076 - DNA, 15 bp, Homo sapiens
tcggtgtgattcatt

SEQ ID NO: 1392077 - DNA, 15 bp, Homo sapiens
gtcggtgtgattcat

SEQ ID NO: 1392078 - DNA, 15 bp, Homo sapiens
tgtcggtgtgattca

SEQ ID NO: 1392079 - DNA, 15 bp, Homo sapiens
ctgtcggtgtgattc

SEQ ID NO: 1392080 - DNA, 15 bp, Homo sapiens
cctgtcggtgtgatt

SEQ ID NO: 1392081 - DNA, 15 bp, Homo sapiens
tcctgtcggtgtgat

SEQ ID NO: 1392082 - DNA, 15 bp, Homo sapiens
atcctgtcggtgtga

SEQ ID NO: 1392083 - DNA, 15 bp, Homo sapiens
gatcctgtcggtgtg

SEQ ID NO: 1392084 - DNA, 15 bp, Homo sapiens
agatcctgtcggtgt

SEQ ID NO: 1392085 - DNA, 15 bp, Homo sapiens
cagatcctgtcggtg

SEQ ID NO: 1392086 - DNA, 15 bp, Homo sapiens
acagatcctgtcggt

SEQ ID NO: 1392087 - DNA, 15 bp, Homo sapiens
tacagatcctgtcgg

SEQ ID NO: 1392088 - DNA, 15 bp, Homo sapiens
ttacagatcctgtcg

SEQ ID NO: 1392089 - DNA, 15 bp, Homo sapiens
tttacagatcctgtc

SEQ ID NO: 1392090 - DNA, 15 bp, Homo sapiens
ttttacagatcctgt

SEQ ID NO: 1392091 - DNA, 15 bp, Homo sapiens
attttacagatcctg

SEQ ID NO: 1392092 - DNA, 15 bp, Homo sapiens
tattttacagatcct

SEQ ID NO: 1392093 - DNA, 15 bp, Homo sapiens
ctattttacagatcc

SEQ ID NO: 1392094 - DNA, 15 bp, Homo sapiens
gctattttacagatc

SEQ ID NO: 1392095 - DNA, 15 bp, Homo sapiens
ggctattttacagat

SEQ ID NO: 1392096 - DNA, 15 bp, Homo sapiens
gggctattttacaga

SEQ ID NO: 1392097 - DNA, 15 bp, Homo sapiens
ggggctattttacag

SEQ ID NO: 1392098 - DNA, 15 bp, Homo sapiens
tggggctattttaca

SEQ ID NO: 1392099 - DNA, 15 bp, Homo sapiens
ttggggctattttac

SEQ ID NO: 1392100 - DNA, 15 bp, Homo sapiens
tttggggctatttta

SEQ ID NO: 1392101 - DNA, 15 bp, Homo sapiens
ttttggggctatttt

SEQ ID NO: 1392102 - DNA, 15 bp, Homo sapiens
cttttggggctattt

SEQ ID NO: 1392103 - DNA, 15 bp, Homo sapiens
ccttttggggctatt

SEQ ID NO: 1392104 - DNA, 15 bp, Homo sapiens
cccttttggggctat

SEQ ID NO: 1392105 - DNA, 15 bp, Homo sapiens
gcccttttggggcta

SEQ ID NO: 1392106 - DNA, 15 bp, Homo sapiens
tgcccttttggggct

SEQ ID NO: 1392107 - DNA, 15 bp, Homo sapiens
ttgcccttttggggc

SEQ ID NO: 1392108 - DNA, 15 bp, Homo sapiens
tttgcccttttgggg

SEQ ID NO: 1392109 - DNA, 15 bp, Homo sapiens
atttgcccttttggg

SEQ ID NO: 1392110 - DNA, 15 bp, Homo sapiens
gatttgcccttttgg

SEQ ID NO: 1392111 - DNA, 15 bp, Homo sapiens
agatttgcccttttg

SEQ ID NO: 1392112 - DNA, 15 bp, Homo sapiens
tagatttgccctttt

SEQ ID NO: 1392113 - DNA, 15 bp, Homo sapiens
ttagatttgcccttt

SEQ ID NO: 1392114 - DNA, 15 bp, Homo sapiens
cttagatttgccctt

SEQ ID NO: 1392115 - DNA, 15 bp, Homo sapiens
tcttagatttgccct

SEQ ID NO: 1392116 - DNA, 15 bp, Homo sapiens
ctcttagatttgccc

SEQ ID NO: 1392117 - DNA, 15 bp, Homo sapiens
actcttagatttgcc

SEQ ID NO: 1392118 - DNA, 15 bp, Homo sapiens
aactcttagatttgc

SEQ ID NO: 1392119 - DNA, 15 bp, Homo sapiens
taactcttagatttg

SEQ ID NO: 1392120 - DNA, 15 bp, Homo sapiens
ataactcttagattt

SEQ ID NO: 1392121 - DNA, 15 bp, Homo sapiens
aataactcttagatt

SEQ ID NO: 1392122 - DNA, 15 bp, Homo sapiens
caataactcttagat

SEQ ID NO: 1392123 - DNA, 15 bp, Homo sapiens
ccaataactcttaga

SEQ ID NO: 1392124 - DNA, 15 bp, Homo sapiens
gccaataactcttag

SEQ ID NO: 1392125 - DNA, 15 bp, Homo sapiens
ggccaataactctta

SEQ ID NO: 1392126 - DNA, 15 bp, Homo sapiens
aggccaataactctt

SEQ ID NO: 1392127 - DNA, 15 bp, Homo sapiens
aaggccaataactct

SEQ ID NO: 1392128 - DNA, 15 bp, Homo sapiens
taaggccaataactc

SEQ ID NO: 1392129 - DNA, 15 bp, Homo sapiens
ttaaggccaataact

SEQ ID NO: 1392130 - DNA, 15 bp, Homo sapiens
cttaaggccaataac

SEQ ID NO: 1392131 - DNA, 15 bp, Homo sapiens
ccttaaggccaataa

SEQ ID NO: 1392132 - DNA, 15 bp, Homo sapiens
tccttaaggccaata

SEQ ID NO: 1392133 - DNA, 15 bp, Homo sapiens
ctccttaaggccaat

SEQ ID NO: 1392134 - DNA, 15 bp, Homo sapiens
cctccttaaggccaa

SEQ ID NO: 1392135 - DNA, 15 bp, Homo sapiens
tcctccttaaggcca

SEQ ID NO: 1392136 - DNA, 15 bp, Homo sapiens
ctcctccttaaggcc

SEQ ID NO: 1392137 - DNA, 15 bp, Homo sapiens
cctcctccttaaggc

SEQ ID NO: 1392138 - DNA, 15 bp, Homo sapiens
gcctcctccttaagg

SEQ ID NO: 1392139 - DNA, 15 bp, Homo sapiens
tgcctcctccttaag

SEQ ID NO: 1392140 - DNA, 15 bp, Homo sapiens
ctgcctcctccttaa

SEQ ID NO: 1392141 - DNA, 15 bp, Homo sapiens
tctgcctcctcctta

SEQ ID NO: 1392142 - DNA, 15 bp, Homo sapiens
ttctgcctcctcctt

SEQ ID NO: 1392143 - DNA, 15 bp, Homo sapiens
tttctgcctcctcct

SEQ ID NO: 1392144 - DNA, 15 bp, Homo sapiens
ttttctgcctcctcc

SEQ ID NO: 1392145 - DNA, 15 bp, Homo sapiens
tttttctgcctcctc

SEQ ID NO: 1392146 - DNA, 15 bp, Homo sapiens
gtttttctgcctcct

SEQ ID NO: 1392147 - DNA, 15 bp, Homo sapiens
tgtttttctgcctcc

SEQ ID NO: 1392148 - DNA, 15 bp, Homo sapiens
ctgtttttctgcctc

SEQ ID NO: 1392149 - DNA, 15 bp, Homo sapiens
tctgtttttctgcct

SEQ ID NO: 1392150 - DNA, 15 bp, Homo sapiens
atctgtttttctgcc

SEQ ID NO: 1392151 - DNA, 15 bp, Homo sapiens
tatctgtttttctgc

SEQ ID NO: 1392152 - DNA, 15 bp, Homo sapiens
ctatctgtttttctg

SEQ ID NO: 1392153 - DNA, 15 bp, Homo sapiens
tctatctgtttttct

SEQ ID NO: 1392154 - DNA, 15 bp, Homo sapiens
ctctatctgtttttc

SEQ ID NO: 1392155 - DNA, 15 bp, Homo sapiens
actctatctgttttt

SEQ ID NO: 1392156 - DNA, 15 bp, Homo sapiens
tactctatctgtttt

SEQ ID NO: 1392157 - DNA, 15 bp, Homo sapiens
ctactctatctgttt

SEQ ID NO: 1392158 - DNA, 15 bp, Homo sapiens
tctactctatctgtt

SEQ ID NO: 1392159 - DNA, 15 bp, Homo sapiens
ttctactctatctgt

SEQ ID NO: 1392160 - DNA, 15 bp, Homo sapiens
tttctactctatctg

SEQ ID NO: 1392161 - DNA, 15 bp, Homo sapiens
ctttctactctatct

SEQ ID NO: 1392162 - DNA, 15 bp, Homo sapiens
actttctactctatc

SEQ ID NO: 1392163 - DNA, 15 bp, Homo sapiens
cactttctactctat

SEQ ID NO: 1392164 - DNA, 15 bp, Homo sapiens
acactttctactcta

SEQ ID NO: 1392165 - DNA, 15 bp, Homo sapiens
tacactttctactct

SEQ ID NO: 1392166 - DNA, 15 bp, Homo sapiens
atacactttctactc

SEQ ID NO: 1392167 - DNA, 15 bp, Homo sapiens
aatacactttctact

SEQ ID NO: 1392168 - DNA, 15 bp, Homo sapiens
gaatacactttctac

SEQ ID NO: 1392169 - DNA, 15 bp, Homo sapiens
tgaatacactttcta

SEQ ID NO: 1392170 - DNA, 15 bp, Homo sapiens
ttgaatacactttct

SEQ ID NO: 1392171 - DNA, 15 bp, Homo sapiens
tttgaatacactttc

SEQ ID NO: 1392172 - DNA, 15 bp, Homo sapiens
ctttgaatacacttt

SEQ ID NO: 1392173 - DNA, 15 bp, Homo sapiens
cctttgaatacactt

SEQ ID NO: 1392174 - DNA, 15 bp, Homo sapiens
ccctttgaatacact

SEQ ID NO: 1392175 - DNA, 15 bp, Homo sapiens
tccctttgaatacac

SEQ ID NO: 1392176 - DNA, 15 bp, Homo sapiens
atccctttgaataca

SEQ ID NO: 1392177 - DNA, 15 bp, Homo sapiens
tatccctttgaatac

SEQ ID NO: 1392178 - DNA, 15 bp, Homo sapiens
ttatccctttgaata

SEQ ID NO: 1392179 - DNA, 15 bp, Homo sapiens
attatccctttgaat

SEQ ID NO: 1392180 - DNA, 15 bp, Homo sapiens
tattatccctttgaa

SEQ ID NO: 1392181 - DNA, 15 bp, Homo sapiens
ttattatccctttga

SEQ ID NO: 1392182 - DNA, 15 bp, Homo sapiens
gttattatccctttg

SEQ ID NO: 1392183 - DNA, 15 bp, Homo sapiens
tgttattatcccttt

SEQ ID NO: 1392184 - DNA, 15 bp, Homo sapiens
ctgttattatccctt

SEQ ID NO: 1392185 - DNA, 15 bp, Homo sapiens
tctgttattatccct

SEQ ID NO: 1392186 - DNA, 15 bp, Homo sapiens
ctctgttattatccc

SEQ ID NO: 1392187 - DNA, 15 bp, Homo sapiens
tctctgttattatcc

SEQ ID NO: 1392188 - DNA, 15 bp, Homo sapiens
ttctctgttattatc

SEQ ID NO: 1392189 - DNA, 15 bp, Homo sapiens
tttctctgttattat

SEQ ID NO: 1392190 - DNA, 15 bp, Homo sapiens
ttttctctgttatta

SEQ ID NO: 1392191 - DNA, 15 bp, Homo sapiens
attttctctgttatt

SEQ ID NO: 1392192 - DNA, 15 bp, Homo sapiens
gattttctctgttat

SEQ ID NO: 1392193 - DNA, 15 bp, Homo sapiens
ggattttctctgtta

SEQ ID NO: 1392194 - DNA, 15 bp, Homo sapiens
gggattttctctgtt

SEQ ID NO: 1392195 - DNA, 15 bp, Homo sapiens
tgggattttctctgt

SEQ ID NO: 1392196 - DNA, 15 bp, Homo sapiens
ttgggattttctctg

SEQ ID NO: 1392197 - DNA, 15 bp, Homo sapiens
tttgggattttctct

SEQ ID NO: 1392198 - DNA, 15 bp, Homo sapiens
gtttgggattttctc

SEQ ID NO: 1392199 - DNA, 15 bp, Homo sapiens
ggtttgggattttct

SEQ ID NO: 1392200 - DNA, 15 bp, Homo sapiens
aggtttgggattttc

SEQ ID NO: 1392201 - DNA, 15 bp, Homo sapiens
taggtttgggatttt

SEQ ID NO: 1392202 - DNA, 15 bp, Homo sapiens
ctaggtttgggattt

SEQ ID NO: 1392203 - DNA, 15 bp, Homo sapiens
tctaggtttgggatt

SEQ ID NO: 1392204 - DNA, 15 bp, Homo sapiens
ctctaggtttgggat

SEQ ID NO: 1392205 - DNA, 15 bp, Homo sapiens
tctctaggtttggga

SEQ ID NO: 1392206 - DNA, 15 bp, Homo sapiens
ttctctaggtttggg

SEQ ID NO: 1392207 - DNA, 15 bp, Homo sapiens
tttctctaggtttgg

SEQ ID NO: 1392208 - DNA, 15 bp, Homo sapiens
ctttctctaggtttg

SEQ ID NO: 1392209 - DNA, 15 bp, Homo sapiens
tctttctctaggttt

SEQ ID NO: 1392210 - DNA, 15 bp, Homo sapiens
atctttctctaggtt

SEQ ID NO: 1392211 - DNA, 15 bp, Homo sapiens
tatctttctctaggt

SEQ ID NO: 1392212 - DNA, 15 bp, Homo sapiens
atatctttctctagg

SEQ ID NO: 1392213 - DNA, 15 bp, Homo sapiens
gatatctttctctag

SEQ ID NO: 1392214 - DNA, 15 bp, Homo sapiens
tgatatctttctcta

SEQ ID NO: 1392215 - DNA, 15 bp, Homo sapiens
ttgatatctttctct

SEQ ID NO: 1392216 - DNA, 15 bp, Homo sapiens
attgatatctttctc

SEQ ID NO: 1392217 - DNA, 15 bp, Homo sapiens
tattgatatctttct

SEQ ID NO: 1392218 - DNA, 15 bp, Homo sapiens
atattgatatctttc

SEQ ID NO: 1392219 - DNA, 15 bp, Homo sapiens
aatattgatatcttt

SEQ ID NO: 1392220 - DNA, 15 bp, Homo sapiens
gaatattgatatctt

SEQ ID NO: 1392221 - DNA, 15 bp, Homo sapiens
tgaatattgatatct

SEQ ID NO: 1392222 - DNA, 15 bp, Homo sapiens
ttgaatattgatatc

SEQ ID NO: 1392223 - DNA, 15 bp, Homo sapiens
cttgaatattgatat

SEQ ID NO: 1392224 - DNA, 15 bp, Homo sapiens
acttgaatattgata

SEQ ID NO: 1392225 - DNA, 15 bp, Homo sapiens
tacttgaatattgat

SEQ ID NO: 1392226 - DNA, 15 bp, Homo sapiens
gtacttgaatattga

SEQ ID NO: 1392227 - DNA, 15 bp, Homo sapiens
tgtacttgaatattg

SEQ ID NO: 1392228 - DNA, 15 bp, Homo sapiens
ctgtacttgaatatt

SEQ ID NO: 1392229 - DNA, 15 bp, Homo sapiens
cctgtacttgaatat

SEQ ID NO: 1392230 - DNA, 15 bp, Homo sapiens
tcctgtacttgaata

SEQ ID NO: 1392231 - DNA, 15 bp, Homo sapiens
ttcctgtacttgaat

SEQ ID NO: 1392232 - DNA, 15 bp, Homo sapiens
cttcctgtacttgaa

SEQ ID NO: 1392233 - DNA, 15 bp, Homo sapiens
ccttcctgtacttga

SEQ ID NO: 1392234 - DNA, 15 bp, Homo sapiens
accttcctgtacttg

SEQ ID NO: 1392235 - DNA, 15 bp, Homo sapiens
aaccttcctgtactt

SEQ ID NO: 1392236 - DNA, 15 bp, Homo sapiens
taaccttcctgtact

SEQ ID NO: 1392237 - DNA, 15 bp, Homo sapiens
ataaccttcctgtac

SEQ ID NO: 1392238 - DNA, 15 bp, Homo sapiens
tataaccttcctgta

SEQ ID NO: 1392239 - DNA, 15 bp, Homo sapiens
ttataaccttcctgt

SEQ ID NO: 1392240 - DNA, 15 bp, Homo sapiens
tttataaccttcctg

SEQ ID NO: 1392241 - DNA, 15 bp, Homo sapiens
ttttataaccttcct

SEQ ID NO: 1392242 - DNA, 15 bp, Homo sapiens
gttttataaccttcc

SEQ ID NO: 1392243 - DNA, 15 bp, Homo sapiens
tgttttataaccttc

SEQ ID NO: 1392244 - DNA, 15 bp, Homo sapiens
gtgttttataacctt

SEQ ID NO: 1392245 - DNA, 15 bp, Homo sapiens
ggtgttttataacct

SEQ ID NO: 1392246 - DNA, 15 bp, Homo sapiens
tggtgttttataacc

SEQ ID NO: 1392247 - DNA, 15 bp, Homo sapiens
ttggtgttttataac

SEQ ID NO: 1392248 - DNA, 15 bp, Homo sapiens
tttggtgttttataa

SEQ ID NO: 1392249 - DNA, 15 bp, Homo sapiens
gtttggtgttttata

SEQ ID NO: 1392250 - DNA, 15 bp, Homo sapiens
tgtttggtgttttat

SEQ ID NO: 1392251 - DNA, 15 bp, Homo sapiens
ctgtttggtgtttta

SEQ ID NO: 1392252 - DNA, 15 bp, Homo sapiens
tctgtttggtgtttt

SEQ ID NO: 1392253 - DNA, 15 bp, Homo sapiens
atctgtttggtgttt

SEQ ID NO: 1392254 - DNA, 15 bp, Homo sapiens
aatctgtttggtgtt

SEQ ID NO: 1392255 - DNA, 15 bp, Homo sapiens
aaatctgtttggtgt

SEQ ID NO: 1392256 - DNA, 15 bp, Homo sapiens
taaatctgtttggtg

SEQ ID NO: 1392257 - DNA, 15 bp, Homo sapiens
ttaaatctgtttggt

SEQ ID NO: 1392258 - DNA, 15 bp, Homo sapiens
gttaaatctgtttgg

SEQ ID NO: 1392259 - DNA, 15 bp, Homo sapiens
agttaaatctgtttg

SEQ ID NO: 1392260 - DNA, 15 bp, Homo sapiens
gagttaaatctgttt

SEQ ID NO: 1392261 - DNA, 15 bp, Homo sapiens
tgagttaaatctgtt

SEQ ID NO: 1392262 - DNA, 15 bp, Homo sapiens
ttgagttaaatctgt

SEQ ID NO: 1392263 - DNA, 15 bp, Homo sapiens
tttgagttaaatctg

SEQ ID NO: 1392264 - DNA, 15 bp, Homo sapiens
ctttgagttaaatct

SEQ ID NO: 1392265 - DNA, 15 bp, Homo sapiens
tctttgagttaaatc

SEQ ID NO: 1392266 - DNA, 15 bp, Homo sapiens
ttctttgagttaaat

SEQ ID NO: 1392267 - DNA, 15 bp, Homo sapiens
cttctttgagttaaa

SEQ ID NO: 1392268 - DNA, 15 bp, Homo sapiens
tcttctttgagttaa

SEQ ID NO: 1392269 - DNA, 15 bp, Homo sapiens
atcttctttgagtta

SEQ ID NO: 1392270 - DNA, 15 bp, Homo sapiens
aatcttctttgagtt

SEQ ID NO: 1392271 - DNA, 15 bp, Homo sapiens
taatcttctttgagt

SEQ ID NO: 1392272 - DNA, 15 bp, Homo sapiens
gtaatcttctttgag

SEQ ID NO: 1392273 - DNA, 15 bp, Homo sapiens
ggtaatcttctttga

SEQ ID NO: 1392274 - DNA, 15 bp, Homo sapiens
aggtaatcttctttg

SEQ ID NO: 1392275 - DNA, 15 bp, Homo sapiens
gaggtaatcttcttt

SEQ ID NO: 1392276 - DNA, 15 bp, Homo sapiens
tgaggtaatcttctt

SEQ ID NO: 1392277 - DNA, 15 bp, Homo sapiens
ttgaggtaatcttct

SEQ ID NO: 1392278 - DNA, 15 bp, Homo sapiens
tttgaggtaatcttc

SEQ ID NO: 1392279 - DNA, 15 bp, Homo sapiens
ctttgaggtaatctt

SEQ ID NO: 1392280 - DNA, 15 bp, Homo sapiens
gctttgaggtaatct

SEQ ID NO: 1392281 - DNA, 15 bp, Homo sapiens
tgctttgaggtaatc

SEQ ID NO: 1392282 - DNA, 15 bp, Homo sapiens
atgctttgaggtaat

SEQ ID NO: 1392283 - DNA, 15 bp, Homo sapiens
aatgctttgaggtaa

SEQ ID NO: 1392284 - DNA, 15 bp, Homo sapiens
aaatgctttgaggta

SEQ ID NO: 1392285 - DNA, 15 bp, Homo sapiens
taaatgctttgaggt

SEQ ID NO: 1392286 - DNA, 15 bp, Homo sapiens
ttaaatgctttgagg

SEQ ID NO: 1392287 - DNA, 15 bp, Homo sapiens
gttaaatgctttgag

SEQ ID NO: 1392288 - DNA, 15 bp, Homo sapiens
tgttaaatgctttga

SEQ ID NO: 1392289 - DNA, 15 bp, Homo sapiens
ttgttaaatgctttg

SEQ ID NO: 1392290 - DNA, 15 bp, Homo sapiens
attgttaaatgcttt

SEQ ID NO: 1392291 - DNA, 15 bp, Homo sapiens
gattgttaaatgctt

SEQ ID NO: 1392292 - DNA, 15 bp, Homo sapiens
tgattgttaaatgct

SEQ ID NO: 1392293 - DNA, 15 bp, Homo sapiens
ttgattgttaaatgc

SEQ ID NO: 1392294 - DNA, 15 bp, Homo sapiens
tttgattgttaaatg

SEQ ID NO: 1392295 - DNA, 15 bp, Homo sapiens
gtttgattgttaaat

SEQ ID NO: 1392296 - DNA, 15 bp, Homo sapiens
agtttgattgttaaa

SEQ ID NO: 1392297 - DNA, 15 bp, Homo sapiens
aagtttgattgttaa

SEQ ID NO: 1392298 - DNA, 15 bp, Homo sapiens
gaagtttgattgtta

SEQ ID NO: 1392299 - DNA, 15 bp, Homo sapiens
ggaagtttgattgtt

SEQ ID NO: 1392300 - DNA, 15 bp, Homo sapiens
tggaagtttgattgt

SEQ ID NO: 1392301 - DNA, 15 bp, Homo sapiens
ttggaagtttgattg

SEQ ID NO: 1392302 - DNA, 15 bp, Homo sapiens
tttggaagtttgatt

SEQ ID NO: 1392303 - DNA, 15 bp, Homo sapiens
ctttggaagtttgat

SEQ ID NO: 1392304 - DNA, 15 bp, Homo sapiens
cctttggaagtttga

SEQ ID NO: 1392305 - DNA, 15 bp, Homo sapiens
acctttggaagtttg

SEQ ID NO: 1392306 - DNA, 15 bp, Homo sapiens
aacctttggaagttt

SEQ ID NO: 1392307 - DNA, 15 bp, Homo sapiens
taacctttggaagtt

SEQ ID NO: 1392308 - DNA, 15 bp, Homo sapiens
ctaacctttggaagt

SEQ ID NO: 1392309 - DNA, 15 bp, Homo sapiens
cctaacctttggaag

SEQ ID NO: 1392310 - DNA, 15 bp, Homo sapiens
tcctaacctttggaa

SEQ ID NO: 1392311 - DNA, 15 bp, Homo sapiens
ttcctaacctttgga

SEQ ID NO: 1392312 - DNA, 15 bp, Homo sapiens
attcctaacctttgg

SEQ ID NO: 1392313 - DNA, 15 bp, Homo sapiens
tattcctaacctttg

SEQ ID NO: 1392314 - DNA, 15 bp, Homo sapiens
ttattcctaaccttt

SEQ ID NO: 1392315 - DNA, 15 bp, Homo sapiens
tttattcctaacctt

SEQ ID NO: 1392316 - DNA, 15 bp, Homo sapiens
ctttattcctaacct

SEQ ID NO: 1392317 - DNA, 15 bp, Homo sapiens
tctttattcctaacc

SEQ ID NO: 1392318 - DNA, 15 bp, Homo sapiens
ttctttattcctaac

SEQ ID NO: 1392319 - DNA, 15 bp, Homo sapiens
tttctttattcctaa

SEQ ID NO: 1392320 - DNA, 15 bp, Homo sapiens
ctttctttattccta

SEQ ID NO: 1392321 - DNA, 15 bp, Homo sapiens
cctttctttattcct

SEQ ID NO: 1392322 - DNA, 15 bp, Homo sapiens
tcctttctttattcc

SEQ ID NO: 1392323 - DNA, 15 bp, Homo sapiens
atcctttctttattc

SEQ ID NO: 1392324 - DNA, 15 bp, Homo sapiens
tatcctttctttatt

SEQ ID NO: 1392325 - DNA, 15 bp, Homo sapiens
atatcctttctttat

SEQ ID NO: 1392326 - DNA, 15 bp, Homo sapiens
aatatcctttcttta

SEQ ID NO: 1392327 - DNA, 15 bp, Homo sapiens
taatatcctttcttt

SEQ ID NO: 1392328 - DNA, 15 bp, Homo sapiens
ttaatatcctttctt

SEQ ID NO: 1392329 - DNA, 15 bp, Homo sapiens
tttaatatcctttct

SEQ ID NO: 1392330 - DNA, 15 bp, Homo sapiens
ttttaatatcctttc

SEQ ID NO: 1392331 - DNA, 15 bp, Homo sapiens
cttttaatatccttt

SEQ ID NO: 1392332 - DNA, 15 bp, Homo sapiens
gcttttaatatcctt

SEQ ID NO: 1392333 - DNA, 15 bp, Homo sapiens
tgcttttaatatcct

SEQ ID NO: 1392334 - DNA, 15 bp, Homo sapiens
ctgcttttaatatcc

SEQ ID NO: 1392335 - DNA, 15 bp, Homo sapiens
gctgcttttaatatc

SEQ ID NO: 1392336 - DNA, 15 bp, Homo sapiens
tgctgcttttaatat

SEQ ID NO: 1392337 - DNA, 15 bp, Homo sapiens
ttgctgcttttaata

SEQ ID NO: 1392338 - DNA, 15 bp, Homo sapiens
cttgctgcttttaat

SEQ ID NO: 1392339 - DNA, 15 bp, Homo sapiens
tcttgctgcttttaa

SEQ ID NO: 1392340 - DNA, 15 bp, Homo sapiens
ctcttgctgctttta

SEQ ID NO: 1392341 - DNA, 15 bp, Homo sapiens
tctcttgctgctttt

SEQ ID NO: 1392342 - DNA, 15 bp, Homo sapiens
ttctcttgctgcttt

SEQ ID NO: 1392343 - DNA, 15 bp, Homo sapiens
tttctcttgctgctt

SEQ ID NO: 1392344 - DNA, 15 bp, Homo sapiens
ttttctcttgctgct

SEQ ID NO: 1392345 - DNA, 15 bp, Homo sapiens
tttttctcttgctgc

SEQ ID NO: 1392346 - DNA, 15 bp, Homo sapiens
ttttttctcttgctg

SEQ ID NO: 1392347 - DNA, 15 bp, Homo sapiens
tttttttctcttgct

SEQ ID NO: 1392348 - DNA, 15 bp, Homo sapiens
ctttttttctcttgc

SEQ ID NO: 1392349 - DNA, 15 bp, Homo sapiens
actttttttctcttg

SEQ ID NO: 1392350 - DNA, 15 bp, Homo sapiens
tactttttttctctt

SEQ ID NO: 1392351 - DNA, 15 bp, Homo sapiens
ttactttttttctct

SEQ ID NO: 1392352 - DNA, 15 bp, Homo sapiens
tttactttttttctc

SEQ ID NO: 1392353 - DNA, 15 bp, Homo sapiens
atttactttttttct

SEQ ID NO: 1392354 - DNA, 15 bp, Homo sapiens
tatttactttttttc

SEQ ID NO: 1392355 - DNA, 15 bp, Homo sapiens
ttatttacttttttt

SEQ ID NO: 1392356 - DNA, 15 bp, Homo sapiens
gttatttactttttt

SEQ ID NO: 1392357 - DNA, 15 bp, Homo sapiens
tgttatttacttttt

SEQ ID NO: 1392358 - DNA, 15 bp, Homo sapiens
atgttatttactttt

SEQ ID NO: 1392359 - DNA, 15 bp, Homo sapiens
tatgttatttacttt

SEQ ID NO: 1392360 - DNA, 15 bp, Homo sapiens
atatgttatttactt

SEQ ID NO: 1392361 - DNA, 15 bp, Homo sapiens
tatatgttatttact

SEQ ID NO: 1392362 - DNA, 15 bp, Homo sapiens
ttatatgttatttac

SEQ ID NO: 1392363 - DNA, 15 bp, Homo sapiens
tttatatgttattta

SEQ ID NO: 1392364 - DNA, 15 bp, Homo sapiens
ctttatatgttattt

SEQ ID NO: 1392365 - DNA, 15 bp, Homo sapiens
tctttatatgttatt

SEQ ID NO: 1392366 - DNA, 15 bp, Homo sapiens
ttctttatatgttat

SEQ ID NO: 1392367 - DNA, 15 bp, Homo sapiens
cttctttatatgtta

SEQ ID NO: 1392368 - DNA, 15 bp, Homo sapiens
acttctttatatgtt

SEQ ID NO: 1392369 - DNA, 15 bp, Homo sapiens
aacttctttatatgt

SEQ ID NO: 1392370 - DNA, 15 bp, Homo sapiens
gaacttctttatatg

SEQ ID NO: 1392371 - DNA, 15 bp, Homo sapiens
ggaacttctttatat

SEQ ID NO: 1392372 - DNA, 15 bp, Homo sapiens
tggaacttctttata

SEQ ID NO: 1392373 - DNA, 15 bp, Homo sapiens
ctggaacttctttat

SEQ ID NO: 1392374 - DNA, 15 bp, Homo sapiens
actggaacttcttta

SEQ ID NO: 1392375 - DNA, 15 bp, Homo sapiens
tactggaacttcttt

SEQ ID NO: 1392376 - DNA, 15 bp, Homo sapiens
atactggaacttctt

SEQ ID NO: 1392377 - DNA, 15 bp, Homo sapiens
catactggaacttct

SEQ ID NO: 1392378 - DNA, 15 bp, Homo sapiens
acatactggaacttc

SEQ ID NO: 1392379 - DNA, 15 bp, Homo sapiens
gacatactggaactt

SEQ ID NO: 1392380 - DNA, 15 bp, Homo sapiens
agacatactggaact

SEQ ID NO: 1392381 - DNA, 15 bp, Homo sapiens
cagacatactggaac

SEQ ID NO: 1392382 - DNA, 15 bp, Homo sapiens
ccagacatactggaa

SEQ ID NO: 1392383 - DNA, 15 bp, Homo sapiens
gccagacatactgga

SEQ ID NO: 1392384 - DNA, 15 bp, Homo sapiens
tgccagacatactgg

SEQ ID NO: 1392385 - DNA, 15 bp, Homo sapiens
ctgccagacatactg

SEQ ID NO: 1392386 - DNA, 15 bp, Homo sapiens
gctgccagacatact

SEQ ID NO: 1392387 - DNA, 15 bp, Homo sapiens
tgctgccagacatac

SEQ ID NO: 1392388 - DNA, 15 bp, Homo sapiens
ctgctgccagacata

SEQ ID NO: 1392389 - DNA, 15 bp, Homo sapiens
tctgctgccagacat

SEQ ID NO: 1392390 - DNA, 15 bp, Homo sapiens
gtctgctgccagaca

SEQ ID NO: 1392391 - DNA, 15 bp, Homo sapiens
tgtctgctgccagac

SEQ ID NO: 1392392 - DNA, 15 bp, Homo sapiens
atgtctgctgccaga

SEQ ID NO: 1392393 - DNA, 15 bp, Homo sapiens
gatgtctgctgccag

SEQ ID NO: 1392394 - DNA, 15 bp, Homo sapiens
agatgtctgctgcca

SEQ ID NO: 1392395 - DNA, 15 bp, Homo sapiens
gagatgtctgctgcc

SEQ ID NO: 1392396 - DNA, 15 bp, Homo sapiens
tgagatgtctgctgc

SEQ ID NO: 1392397 - DNA, 15 bp, Homo sapiens
ctgagatgtctgctg

SEQ ID NO: 1392398 - DNA, 15 bp, Homo sapiens
actgagatgtctgct

SEQ ID NO: 1392399 - DNA, 15 bp, Homo sapiens
cactgagatgtctgc

SEQ ID NO: 1392400 - DNA, 15 bp, Homo sapiens
ccactgagatgtctg

SEQ ID NO: 1392401 - DNA, 15 bp, Homo sapiens
tccactgagatgtct

SEQ ID NO: 1392402 - DNA, 15 bp, Homo sapiens
ttccactgagatgtc

SEQ ID NO: 1392403 - DNA, 15 bp, Homo sapiens
tttccactgagatgt

SEQ ID NO: 1392404 - DNA, 15 bp, Homo sapiens
gtttccactgagatg

SEQ ID NO: 1392405 - DNA, 15 bp, Homo sapiens
ggtttccactgagat

SEQ ID NO: 1392406 - DNA, 15 bp, Homo sapiens
aggtttccactgaga

SEQ ID NO: 1392407 - DNA, 15 bp, Homo sapiens
aaggtttccactgag

SEQ ID NO: 1392408 - DNA, 15 bp, Homo sapiens
aaaggtttccactga

SEQ ID NO: 1392409 - DNA, 15 bp, Homo sapiens
gaaaggtttccactg

SEQ ID NO: 1392410 - DNA, 15 bp, Homo sapiens
tgaaaggtttccact

SEQ ID NO: 1392411 - DNA, 15 bp, Homo sapiens
ctgaaaggtttccac

SEQ ID NO: 1392412 - DNA, 15 bp, Homo sapiens
cctgaaaggtttcca

SEQ ID NO: 1392413 - DNA, 15 bp, Homo sapiens
gcctgaaaggtttcc

SEQ ID NO: 1392414 - DNA, 15 bp, Homo sapiens
ggcctgaaaggtttc

SEQ ID NO: 1392415 - DNA, 15 bp, Homo sapiens
tggcctgaaaggttt

SEQ ID NO: 1392416 - DNA, 15 bp, Homo sapiens
ctggcctgaaaggtt

SEQ ID NO: 1392417 - DNA, 15 bp, Homo sapiens
cctggcctgaaaggt

SEQ ID NO: 1392418 - DNA, 15 bp, Homo sapiens
tcctggcctgaaagg

SEQ ID NO: 1392419 - DNA, 15 bp, Homo sapiens
ctcctggcctgaaag

SEQ ID NO: 1392420 - DNA, 15 bp, Homo sapiens
tctcctggcctgaaa

SEQ ID NO: 1392421 - DNA, 15 bp, Homo sapiens
ctctcctggcctgaa

SEQ ID NO: 1392422 - DNA, 15 bp, Homo sapiens
cctctcctggcctga

SEQ ID NO: 1392423 - DNA, 15 bp, Homo sapiens
ccctctcctggcctg

SEQ ID NO: 1392424 - DNA, 15 bp, Homo sapiens
accctctcctggcct

SEQ ID NO: 1392425 - DNA, 15 bp, Homo sapiens
caccctctcctggcc

SEQ ID NO: 1392426 - DNA, 15 bp, Homo sapiens
ccaccctctcctggc

SEQ ID NO: 1392427 - DNA, 15 bp, Homo sapiens
gccaccctctcctgg

SEQ ID NO: 1392428 - DNA, 15 bp, Homo sapiens
tgccaccctctcctg

SEQ ID NO: 1392429 - DNA, 15 bp, Homo sapiens
atgccaccctctcct

SEQ ID NO: 1392430 - DNA, 15 bp, Homo sapiens
catgccaccctctcc

SEQ ID NO: 1392431 - DNA, 15 bp, Homo sapiens
tcatgccaccctctc

SEQ ID NO: 1392432 - DNA, 15 bp, Homo sapiens
gtcatgccaccctct

SEQ ID NO: 1392433 - DNA, 15 bp, Homo sapiens
tgtcatgccaccctc

SEQ ID NO: 1392434 - DNA, 15 bp, Homo sapiens
atgtcatgccaccct

SEQ ID NO: 1392435 - DNA, 15 bp, Homo sapiens
tatgtcatgccaccc

SEQ ID NO: 1392436 - DNA, 15 bp, Homo sapiens
atatgtcatgccacc

SEQ ID NO: 1392437 - DNA, 15 bp, Homo sapiens
aatatgtcatgccac

SEQ ID NO: 1392438 - DNA, 15 bp, Homo sapiens
aaatatgtcatgcca

SEQ ID NO: 1392439 - DNA, 15 bp, Homo sapiens
taaatatgtcatgcc

SEQ ID NO: 1392440 - DNA, 15 bp, Homo sapiens
ttaaatatgtcatgc

SEQ ID NO: 1392441 - DNA, 15 bp, Homo sapiens
tttaaatatgtcatg

SEQ ID NO: 1392442 - DNA, 15 bp, Homo sapiens
ctttaaatatgtcat

SEQ ID NO: 1392443 - DNA, 15 bp, Homo sapiens
actttaaatatgtca

SEQ ID NO: 1392444 - DNA, 15 bp, Homo sapiens
tactttaaatatgtc

SEQ ID NO: 1392445 - DNA, 15 bp, Homo sapiens
gtactttaaatatgt

SEQ ID NO: 1392446 - DNA, 15 bp, Homo sapiens
agtactttaaatatg

SEQ ID NO: 1392447 - DNA, 15 bp, Homo sapiens
cagtactttaaatat

SEQ ID NO: 1392448 - DNA, 15 bp, Homo sapiens
tcagtactttaaata

SEQ ID NO: 1392449 - DNA, 15 bp, Homo sapiens
ttcagtactttaaat

SEQ ID NO: 1392450 - DNA, 15 bp, Homo sapiens
tttcagtactttaaa

SEQ ID NO: 1392451 - DNA, 15 bp, Homo sapiens
ctttcagtactttaa

SEQ ID NO: 1392452 - DNA, 15 bp, Homo sapiens
tctttcagtacttta

SEQ ID NO: 1392453 - DNA, 15 bp, Homo sapiens
ttctttcagtacttt

SEQ ID NO: 1392454 - DNA, 15 bp, Homo sapiens
tttctttcagtactt

SEQ ID NO: 1392455 - DNA, 15 bp, Homo sapiens
ttttctttcagtact

SEQ ID NO: 1392456 - DNA, 15 bp, Homo sapiens
tttttctttcagtac

SEQ ID NO: 1392457 - DNA, 15 bp, Homo sapiens
ttttttctttcagta

SEQ ID NO: 1392458 - DNA, 15 bp, Homo sapiens
tttttttctttcagt

SEQ ID NO: 1392459 - DNA, 15 bp, Homo sapiens
ttttttttctttcag

SEQ ID NO: 1392460 - DNA, 15 bp, Homo sapiens
tttttttttctttca

SEQ ID NO: 1392461 - DNA, 15 bp, Homo sapiens
ttttttttttctttc

SEQ ID NO: 1392462 - DNA, 15 bp, Homo sapiens
aagtttttttttttt

SEQ ID NO: 1392463 - DNA, 15 bp, Homo sapiens
aaagttttttttttt

SEQ ID NO: 1392464 - DNA, 15 bp, Homo sapiens
gaaagtttttttttt

SEQ ID NO: 1392465 - DNA, 15 bp, Homo sapiens
ggaaagttttttttt

SEQ ID NO: 1392466 - DNA, 15 bp, Homo sapiens
aggaaagtttttttt

SEQ ID NO: 1392467 - DNA, 15 bp, Homo sapiens
gaggaaagttttttt

SEQ ID NO: 1392468 - DNA, 15 bp, Homo sapiens
tgaggaaagtttttt

SEQ ID NO: 1392469 - DNA, 15 bp, Homo sapiens
atgaggaaagttttt

SEQ ID NO: 1392470 - DNA, 15 bp, Homo sapiens
tatgaggaaagtttt

SEQ ID NO: 1392471 - DNA, 15 bp, Homo sapiens
ttatgaggaaagttt

SEQ ID NO: 1392472 - DNA, 15 bp, Homo sapiens
tttatgaggaaagtt

SEQ ID NO: 1392473 - DNA, 15 bp, Homo sapiens
ttttatgaggaaagt

SEQ ID NO: 1392474 - DNA, 15 bp, Homo sapiens
attttatgaggaaag

SEQ ID NO: 1392475 - DNA, 15 bp, Homo sapiens
tattttatgaggaaa

SEQ ID NO: 1392476 - DNA, 15 bp, Homo sapiens
ctattttatgaggaa

SEQ ID NO: 1392477 - DNA, 15 bp, Homo sapiens
actattttatgagga

SEQ ID NO: 1392478 - DNA, 15 bp, Homo sapiens
tactattttatgagg

SEQ ID NO: 1392479 - DNA, 15 bp, Homo sapiens
atactattttatgag

SEQ ID NO: 1392480 - DNA, 15 bp, Homo sapiens
tatactattttatga

SEQ ID NO: 1392481 - DNA, 15 bp, Homo sapiens
gtatactattttatg

SEQ ID NO: 1392482 - DNA, 15 bp, Homo sapiens
ggtatactattttat

SEQ ID NO: 1392483 - DNA, 15 bp, Homo sapiens
gggtatactatttta

SEQ ID NO: 1392484 - DNA, 15 bp, Homo sapiens
tgggtatactatttt

SEQ ID NO: 1392485 - DNA, 15 bp, Homo sapiens
ctgggtatactattt

SEQ ID NO: 1392486 - DNA, 15 bp, Homo sapiens
gctgggtatactatt

SEQ ID NO: 1392487 - DNA, 15 bp, Homo sapiens
tgctgggtatactat

SEQ ID NO: 1392488 - DNA, 15 bp, Homo sapiens
ttgctgggtatacta

SEQ ID NO: 1392489 - DNA, 15 bp, Homo sapiens
tttgctgggtatact

SEQ ID NO: 1392490 - DNA, 15 bp, Homo sapiens
ttttgctgggtatac

SEQ ID NO: 1392491 - DNA, 15 bp, Homo sapiens
tttttgctgggtata

SEQ ID NO: 1392492 - DNA, 15 bp, Homo sapiens
atttttgctgggtat

SEQ ID NO: 1392493 - DNA, 15 bp, Homo sapiens
tatttttgctgggta

SEQ ID NO: 1392494 - DNA, 15 bp, Homo sapiens
atatttttgctgggt

SEQ ID NO: 1392495 - DNA, 15 bp, Homo sapiens
gatatttttgctggg

SEQ ID NO: 1392496 - DNA, 15 bp, Homo sapiens
agatatttttgctgg

SEQ ID NO: 1392497 - DNA, 15 bp, Homo sapiens
aagatatttttgctg

SEQ ID NO: 1392498 - DNA, 15 bp, Homo sapiens
aaagatatttttgct

SEQ ID NO: 1392499 - DNA, 15 bp, Homo sapiens
aaaagatatttttgc

SEQ ID NO: 1392500 - DNA, 15 bp, Homo sapiens
taaaagatatttttg

SEQ ID NO: 1392501 - DNA, 15 bp, Homo sapiens
ttaaaagatattttt

SEQ ID NO: 1392502 - DNA, 15 bp, Homo sapiens
tttaaaagatatttt

SEQ ID NO: 1392503 - DNA, 15 bp, Homo sapiens
gtttaaaagatattt

SEQ ID NO: 1392504 - DNA, 15 bp, Homo sapiens
tgtttaaaagatatt

SEQ ID NO: 1392505 - DNA, 15 bp, Homo sapiens
atgtttaaaagatat

SEQ ID NO: 1392506 - DNA, 15 bp, Homo sapiens
catgtttaaaagata

SEQ ID NO: 1392507 - DNA, 15 bp, Homo sapiens
tcatgtttaaaagat

SEQ ID NO: 1392508 - DNA, 15 bp, Homo sapiens
ttcatgtttaaaaga

SEQ ID NO: 1392509 - DNA, 15 bp, Homo sapiens
cttcatgtttaaaag

SEQ ID NO: 1392510 - DNA, 15 bp, Homo sapiens
ccttcatgtttaaaa

SEQ ID NO: 1392511 - DNA, 15 bp, Homo sapiens
tccttcatgtttaaa

SEQ ID NO: 1392512 - DNA, 15 bp, Homo sapiens
ctccttcatgtttaa

SEQ ID NO: 1392513 - DNA, 15 bp, Homo sapiens
tctccttcatgttta

SEQ ID NO: 1392514 - DNA, 15 bp, Homo sapiens
ttctccttcatgttt

SEQ ID NO: 1392515 - DNA, 15 bp, Homo sapiens
tttctccttcatgtt

SEQ ID NO: 1392516 - DNA, 15 bp, Homo sapiens
ttttctccttcatgt

SEQ ID NO: 1392517 - DNA, 15 bp, Homo sapiens
attttctccttcatg

SEQ ID NO: 1392518 - DNA, 15 bp, Homo sapiens
aaacattttctcctt

SEQ ID NO: 1392519 - DNA, 15 bp, Homo sapiens
aaaacattttctcct

SEQ ID NO: 1392520 - DNA, 15 bp, Homo sapiens
gaaaacattttctcc

SEQ ID NO: 1392521 - DNA, 15 bp, Homo sapiens
ggaaaacattttctc

SEQ ID NO: 1392522 - DNA, 15 bp, Homo sapiens
gggaaaacattttct

SEQ ID NO: 1392523 - DNA, 15 bp, Homo sapiens
tgggaaaacattttc

SEQ ID NO: 1392524 - DNA, 15 bp, Homo sapiens
ctgggaaaacatttt

SEQ ID NO: 1392525 - DNA, 15 bp, Homo sapiens
tctgggaaaacattt

SEQ ID NO: 1392526 - DNA, 15 bp, Homo sapiens
gtctgggaaaacatt

SEQ ID NO: 1392527 - DNA, 15 bp, Homo sapiens
tgtctgggaaaacat

SEQ ID NO: 1392528 - DNA, 15 bp, Homo sapiens
ttgtctgggaaaaca

SEQ ID NO: 1392529 - DNA, 15 bp, Homo sapiens
tttgtctgggaaaac

SEQ ID NO: 1392530 - DNA, 15 bp, Homo sapiens
ctttgtctgggaaaa

SEQ ID NO: 1392531 - DNA, 15 bp, Homo sapiens
tctttgtctgggaaa

SEQ ID NO: 1392532 - DNA, 15 bp, Homo sapiens
ttctttgtctgggaa

SEQ ID NO: 1392533 - DNA, 15 bp, Homo sapiens
tttctttgtctggga

SEQ ID NO: 1392534 - DNA, 15 bp, Homo sapiens
ttttctttgtctggg

SEQ ID NO: 1392535 - DNA, 15 bp, Homo sapiens
cttttctttgtctgg

SEQ ID NO: 1392536 - DNA, 15 bp, Homo sapiens
gcttttctttgtctg

SEQ ID NO: 1392537 - DNA, 15 bp, Homo sapiens
agcttttctttgtct

SEQ ID NO: 1392538 - DNA, 15 bp, Homo sapiens
cagcttttctttgtc

SEQ ID NO: 1392539 - DNA, 15 bp, Homo sapiens
tcagcttttctttgt

SEQ ID NO: 1392540 - DNA, 15 bp, Homo sapiens
ctcagcttttctttg

SEQ ID NO: 1392541 - DNA, 15 bp, Homo sapiens
cctcagcttttcttt

SEQ ID NO: 1392542 - DNA, 15 bp, Homo sapiens
ccctcagcttttctt

SEQ ID NO: 1392543 - DNA, 15 bp, Homo sapiens
tccctcagcttttct

SEQ ID NO: 1392544 - DNA, 15 bp, Homo sapiens
atccctcagcttttc

SEQ ID NO: 1392545 - DNA, 15 bp, Homo sapiens
aatccctcagctttt

SEQ ID NO: 1392546 - DNA, 15 bp, Homo sapiens
aaatccctcagcttt

SEQ ID NO: 1392547 - DNA, 15 bp, Homo sapiens
gaaatccctcagctt

SEQ ID NO: 1392548 - DNA, 15 bp, Homo sapiens
tgaaatccctcagct

SEQ ID NO: 1392549 - DNA, 15 bp, Homo sapiens
atgaaatccctcagc

SEQ ID NO: 1392550 - DNA, 15 bp, Homo sapiens
gatgaaatccctcag

SEQ ID NO: 1392551 - DNA, 15 bp, Homo sapiens
tgatgaaatccctca

SEQ ID NO: 1392552 - DNA, 15 bp, Homo sapiens
ttgatgaaatccctc

SEQ ID NO: 1392553 - DNA, 15 bp, Homo sapiens
attgatgaaatccct

SEQ ID NO: 1392554 - DNA, 15 bp, Homo sapiens
tattgatgaaatccc

SEQ ID NO: 1392555 - DNA, 15 bp, Homo sapiens
gtattgatgaaatcc

SEQ ID NO: 1392556 - DNA, 15 bp, Homo sapiens
cgtattgatgaaatc

SEQ ID NO: 1392557 - DNA, 15 bp, Homo sapiens
tcgtattgatgaaat

SEQ ID NO: 1392558 - DNA, 15 bp, Homo sapiens
ctcgtattgatgaaa

SEQ ID NO: 1392559 - DNA, 15 bp, Homo sapiens
tctcgtattgatgaa

SEQ ID NO: 1392560 - DNA, 15 bp, Homo sapiens
gtctcgtattgatga

SEQ ID NO: 1392561 - DNA, 15 bp, Homo sapiens
ggtctcgtattgatg

SEQ ID NO: 1392562 - DNA, 15 bp, Homo sapiens
aggtctcgtattgat

SEQ ID NO: 1392563 - DNA, 15 bp, Homo sapiens
caggtctcgtattga

SEQ ID NO: 1392564 - DNA, 15 bp, Homo sapiens
acaggtctcgtattg

SEQ ID NO: 1392565 - DNA, 15 bp, Homo sapiens
gacaggtctcgtatt

SEQ ID NO: 1392566 - DNA, 15 bp, Homo sapiens
ggacaggtctcgtat

SEQ ID NO: 1392567 - DNA, 15 bp, Homo sapiens
aggacaggtctcgta

SEQ ID NO: 1392568 - DNA, 15 bp, Homo sapiens
taggacaggtctcgt

SEQ ID NO: 1392569 - DNA, 15 bp, Homo sapiens
gtaggacaggtctcg

SEQ ID NO: 1392570 - DNA, 15 bp, Homo sapiens
tgtaggacaggtctc

SEQ ID NO: 1392571 - DNA, 15 bp, Homo sapiens
ttgtaggacaggtct

SEQ ID NO: 1392572 - DNA, 15 bp, Homo sapiens
cttgtaggacaggtc

SEQ ID NO: 1392573 - DNA, 15 bp, Homo sapiens
tcttgtaggacaggt

SEQ ID NO: 1392574 - DNA, 15 bp, Homo sapiens
ttcttgtaggacagg

SEQ ID NO: 1392575 - DNA, 15 bp, Homo sapiens
tttcttgtaggacag

SEQ ID NO: 1392576 - DNA, 15 bp, Homo sapiens
atttcttgtaggaca

SEQ ID NO: 1392577 - DNA, 15 bp, Homo sapiens
catttcttgtaggac

SEQ ID NO: 1392578 - DNA, 15 bp, Homo sapiens
gcatttcttgtagga

SEQ ID NO: 1392579 - DNA, 15 bp, Homo sapiens
agcatttcttgtagg

SEQ ID NO: 1392580 - DNA, 15 bp, Homo sapiens
tagcatttcttgtag

SEQ ID NO: 1392581 - DNA, 15 bp, Homo sapiens
ttagcatttcttgta

SEQ ID NO: 1392582 - DNA, 15 bp, Homo sapiens
tttagcatttcttgt

SEQ ID NO: 1392583 - DNA, 15 bp, Homo sapiens
ctttagcatttcttg

SEQ ID NO: 1392584 - DNA, 15 bp, Homo sapiens
cctttagcatttctt

SEQ ID NO: 1392585 - DNA, 15 bp, Homo sapiens
tcctttagcatttct

SEQ ID NO: 1392586 - DNA, 15 bp, Homo sapiens
ctcctttagcatttc

SEQ ID NO: 1392587 - DNA, 15 bp, Homo sapiens
actcctttagcattt

SEQ ID NO: 1392588 - DNA, 15 bp, Homo sapiens
aactcctttagcatt

SEQ ID NO: 1392589 - DNA, 15 bp, Homo sapiens
gaactcctttagcat

SEQ ID NO: 1392590 - DNA, 15 bp, Homo sapiens
agaactcctttagca

SEQ ID NO: 1392591 - DNA, 15 bp, Homo sapiens
aagaactcctttagc

SEQ ID NO: 1392592 - DNA, 15 bp, Homo sapiens
gaagaactcctttag

SEQ ID NO: 1392593 - DNA, 15 bp, Homo sapiens
tgaagaactccttta

SEQ ID NO: 1392594 - DNA, 15 bp, Homo sapiens
ctgaagaactccttt

SEQ ID NO: 1392595 - DNA, 15 bp, Homo sapiens
actgaagaactcctt

SEQ ID NO: 1392596 - DNA, 15 bp, Homo sapiens
gactgaagaactcct

SEQ ID NO: 1392597 - DNA, 15 bp, Homo sapiens
agactgaagaactcc

SEQ ID NO: 1392598 - DNA, 15 bp, Homo sapiens
cagactgaagaactc

SEQ ID NO: 1392599 - DNA, 15 bp, Homo sapiens
tcagactgaagaact

SEQ ID NO: 1392600 - DNA, 15 bp, Homo sapiens
ttcagactgaagaac

SEQ ID NO: 1392601 - DNA, 15 bp, Homo sapiens
tttcagactgaagaa

SEQ ID NO: 1392602 - DNA, 15 bp, Homo sapiens
ctttcagactgaaga

SEQ ID NO: 1392603 - DNA, 15 bp, Homo sapiens
tctttcagactgaag

SEQ ID NO: 1392604 - DNA, 15 bp, Homo sapiens
ttctttcagactgaa

SEQ ID NO: 1392605 - DNA, 15 bp, Homo sapiens
tttctttcagactga

SEQ ID NO: 1392606 - DNA, 15 bp, Homo sapiens
ttttctttcagactg

SEQ ID NO: 1392607 - DNA, 15 bp, Homo sapiens
cttttctttcagact

SEQ ID NO: 1392608 - DNA, 15 bp, Homo sapiens
ccttttctttcagac

SEQ ID NO: 1392609 - DNA, 15 bp, Homo sapiens
tccttttctttcaga

SEQ ID NO: 1392610 - DNA, 15 bp, Homo sapiens
atccttttctttcag

SEQ ID NO: 1392611 - DNA, 15 bp, Homo sapiens
catccttttctttca

SEQ ID NO: 1392612 - DNA, 15 bp, Homo sapiens
acatccttttctttc

SEQ ID NO: 1392613 - DNA, 15 bp, Homo sapiens
aacatccttttcttt

SEQ ID NO: 1392614 - DNA, 15 bp, Homo sapiens
taacatccttttctt

SEQ ID NO: 1392615 - DNA, 15 bp, Homo sapiens
ttaacatccttttct

SEQ ID NO: 1392616 - DNA, 15 bp, Homo sapiens
cttaacatccttttc

SEQ ID NO: 1392617 - DNA, 15 bp, Homo sapiens
gcttaacatcctttt

SEQ ID NO: 1392618 - DNA, 15 bp, Homo sapiens
tgcttaacatccttt

SEQ ID NO: 1392619 - DNA, 15 bp, Homo sapiens
ttgcttaacatcctt

SEQ ID NO: 1392620 - DNA, 15 bp, Homo sapiens
attgcttaacatcct

SEQ ID NO: 1392621 - DNA, 15 bp, Homo sapiens
tattgcttaacatcc

SEQ ID NO: 1392622 - DNA, 15 bp, Homo sapiens
ttattgcttaacatc

SEQ ID NO: 1392623 - DNA, 15 bp, Homo sapiens
tttattgcttaacat

SEQ ID NO: 1392624 - DNA, 15 bp, Homo sapiens
ttttattgcttaaca

SEQ ID NO: 1392625 - DNA, 15 bp, Homo sapiens
tttttattgcttaac

SEQ ID NO: 1392626 - DNA, 15 bp, Homo sapiens
ttttttattgcttaa

SEQ ID NO: 1392627 - DNA, 15 bp, Homo sapiens
attttttattgctta

SEQ ID NO: 1392628 - DNA, 15 bp, Homo sapiens
gattttttattgctt

SEQ ID NO: 1392629 - DNA, 15 bp, Homo sapiens
tgattttttattgct

SEQ ID NO: 1392630 - DNA, 15 bp, Homo sapiens
atgattttttattgc

SEQ ID NO: 1392631 - DNA, 15 bp, Homo sapiens
gatgattttttattg

SEQ ID NO: 1392632 - DNA, 15 bp, Homo sapiens
agatgattttttatt

SEQ ID NO: 1392633 - DNA, 15 bp, Homo sapiens
gagatgattttttat

SEQ ID NO: 1392634 - DNA, 15 bp, Homo sapiens
tgagatgatttttta

SEQ ID NO: 1392635 - DNA, 15 bp, Homo sapiens
ttgagatgatttttt

SEQ ID NO: 1392636 - DNA, 15 bp, Homo sapiens
cttgagatgattttt

SEQ ID NO: 1392637 - DNA, 15 bp, Homo sapiens
ccttgagatgatttt

SEQ ID NO: 1392638 - DNA, 15 bp, Homo sapiens
accttgagatgattt

SEQ ID NO: 1392639 - DNA, 15 bp, Homo sapiens
taccttgagatgatt

SEQ ID NO: 1392640 - DNA, 15 bp, Homo sapiens
gtaccttgagatgat

SEQ ID NO: 1392641 - DNA, 15 bp, Homo sapiens
tgtaccttgagatga

SEQ ID NO: 1392642 - DNA, 15 bp, Homo sapiens
ttgtaccttgagatg

SEQ ID NO: 1392643 - DNA, 15 bp, Homo sapiens
tttgtaccttgagat

SEQ ID NO: 1392644 - DNA, 15 bp, Homo sapiens
ttttgtaccttgaga

SEQ ID NO: 1392645 - DNA, 15 bp, Homo sapiens
attttgtaccttgag

SEQ ID NO: 1392646 - DNA, 15 bp, Homo sapiens
gattttgtaccttga

SEQ ID NO: 1392647 - DNA, 15 bp, Homo sapiens
ggattttgtaccttg

SEQ ID NO: 1392648 - DNA, 15 bp, Homo sapiens
tggattttgtacctt

SEQ ID NO: 1392649 - DNA, 15 bp, Homo sapiens
gtggattttgtacct

SEQ ID NO: 1392650 - DNA, 15 bp, Homo sapiens
agtggattttgtacc

SEQ ID NO: 1392651 - DNA, 15 bp, Homo sapiens
cagtggattttgtac

SEQ ID NO: 1392652 - DNA, 15 bp, Homo sapiens
tcagtggattttgta

SEQ ID NO: 1392653 - DNA, 15 bp, Homo sapiens
ttcagtggattttgt

SEQ ID NO: 1392654 - DNA, 15 bp, Homo sapiens
tttcagtggattttg

SEQ ID NO: 1392655 - DNA, 15 bp, Homo sapiens
ttttcagtggatttt

SEQ ID NO: 1392656 - DNA, 15 bp, Homo sapiens
gttttcagtggattt

SEQ ID NO: 1392657 - DNA, 15 bp, Homo sapiens
tgttttcagtggatt

SEQ ID NO: 1392658 - DNA, 15 bp, Homo sapiens
ctgttttcagtggat

SEQ ID NO: 1392659 - DNA, 15 bp, Homo sapiens
gctgttttcagtgga

SEQ ID NO: 1392660 - DNA, 15 bp, Homo sapiens
tgctgttttcagtgg

SEQ ID NO: 1392661 - DNA, 15 bp, Homo sapiens
ttgctgttttcagtg

SEQ ID NO: 1392662 - DNA, 15 bp, Homo sapiens
cttgctgttttcagt

SEQ ID NO: 1392663 - DNA, 15 bp, Homo sapiens
acttgctgttttcag

SEQ ID NO: 1392664 - DNA, 15 bp, Homo sapiens
tacttgctgttttca

SEQ ID NO: 1392665 - DNA, 15 bp, Homo sapiens
gtacttgctgttttc

SEQ ID NO: 1392666 - DNA, 15 bp, Homo sapiens
tgtacttgctgtttt

SEQ ID NO: 1392667 - DNA, 15 bp, Homo sapiens
gtgtacttgctgttt

SEQ ID NO: 1392668 - DNA, 15 bp, Homo sapiens
tgtgtacttgctgtt

SEQ ID NO: 1392669 - DNA, 15 bp, Homo sapiens
ctgtgtacttgctgt

SEQ ID NO: 1392670 - DNA, 15 bp, Homo sapiens
tctgtgtacttgctg

SEQ ID NO: 1392671 - DNA, 15 bp, Homo sapiens
gtctgtgtacttgct

SEQ ID NO: 1392672 - DNA, 15 bp, Homo sapiens
tgtctgtgtacttgc

SEQ ID NO: 1392673 - DNA, 15 bp, Homo sapiens
ttgtctgtgtacttg

SEQ ID NO: 1392674 - DNA, 15 bp, Homo sapiens
tttgtctgtgtactt

SEQ ID NO: 1392675 - DNA, 15 bp, Homo sapiens
gtttgtctgtgtact

SEQ ID NO: 1392676 - DNA, 15 bp, Homo sapiens
agtttgtctgtgtac

SEQ ID NO: 1392677 - DNA, 15 bp, Homo sapiens
gagtttgtctgtgta

SEQ ID NO: 1392678 - DNA, 15 bp, Homo sapiens
tgagtttgtctgtgt

SEQ ID NO: 1392679 - DNA, 15 bp, Homo sapiens
ctgagtttgtctgtg

SEQ ID NO: 1392680 - DNA, 15 bp, Homo sapiens
tctgagtttgtctgt

SEQ ID NO: 1392681 - DNA, 15 bp, Homo sapiens
ttctgagtttgtctg

SEQ ID NO: 1392682 - DNA, 15 bp, Homo sapiens
attctgagtttgtct

SEQ ID NO: 1392683 - DNA, 15 bp, Homo sapiens
tattctgagtttgtc

SEQ ID NO: 1392684 - DNA, 15 bp, Homo sapiens
atattctgagtttgt

SEQ ID NO: 1392685 - DNA, 15 bp, Homo sapiens
aatattctgagtttg

SEQ ID NO: 1392686 - DNA, 15 bp, Homo sapiens
taatattctgagttt

SEQ ID NO: 1392687 - DNA, 15 bp, Homo sapiens
ctaatattctgagtt

SEQ ID NO: 1392688 - DNA, 15 bp, Homo sapiens
tctaatattctgagt

SEQ ID NO: 1392689 - DNA, 15 bp, Homo sapiens
ttctaatattctgag

SEQ ID NO: 1392690 - DNA, 15 bp, Homo sapiens
gttctaatattctga

SEQ ID NO: 1392691 - DNA, 15 bp, Homo sapiens
tgttctaatattctg

SEQ ID NO: 1392692 - DNA, 15 bp, Homo sapiens
atgttctaatattct

SEQ ID NO: 1392693 - DNA, 15 bp, Homo sapiens
aatgttctaatattc

SEQ ID NO: 1392694 - DNA, 15 bp, Homo sapiens
caatgttctaatatt

SEQ ID NO: 1392695 - DNA, 15 bp, Homo sapiens
acaatgttctaatat

SEQ ID NO: 1392696 - DNA, 15 bp, Homo sapiens
tacaatgttctaata

SEQ ID NO: 1392697 - DNA, 15 bp, Homo sapiens
ttacaatgttctaat

SEQ ID NO: 1392698 - DNA, 15 bp, Homo sapiens
attacaatgttctaa

SEQ ID NO: 1392699 - DNA, 15 bp, Homo sapiens
aattacaatgttcta

SEQ ID NO: 1392700 - DNA, 15 bp, Homo sapiens
caattacaatgttct

SEQ ID NO: 1392701 - DNA, 15 bp, Homo sapiens
acaattacaatgttc

SEQ ID NO: 1392702 - DNA, 15 bp, Homo sapiens
cacaattacaatgtt

SEQ ID NO: 1392703 - DNA, 15 bp, Homo sapiens
ccacaattacaatgt

SEQ ID NO: 1392704 - DNA, 15 bp, Homo sapiens
accacaattacaatg

SEQ ID NO: 1392705 - DNA, 15 bp, Homo sapiens
taccacaattacaat

SEQ ID NO: 1392706 - DNA, 15 bp, Homo sapiens
ataccacaattacaa

SEQ ID NO: 1392707 - DNA, 15 bp, Homo sapiens
tataccacaattaca

SEQ ID NO: 1392708 - DNA, 15 bp, Homo sapiens
atataccacaattac

SEQ ID NO: 1392709 - DNA, 15 bp, Homo sapiens
tatataccacaatta

SEQ ID NO: 1392710 - DNA, 15 bp, Homo sapiens
ttatataccacaatt

SEQ ID NO: 1392711 - DNA, 15 bp, Homo sapiens
tttatataccacaat

SEQ ID NO: 1392712 - DNA, 15 bp, Homo sapiens
ctttatataccacaa

SEQ ID NO: 1392713 - DNA, 15 bp, Homo sapiens
actttatataccaca

SEQ ID NO: 1392714 - DNA, 15 bp, Homo sapiens
tactttatataccac

SEQ ID NO: 1392715 - DNA, 15 bp, Homo sapiens
gtactttatatacca

SEQ ID NO: 1392716 - DNA, 15 bp, Homo sapiens
agtactttatatacc

SEQ ID NO: 1392717 - DNA, 15 bp, Homo sapiens
gagtactttatatac

SEQ ID NO: 1392718 - DNA, 15 bp, Homo sapiens
tgagtactttatata

SEQ ID NO: 1392719 - DNA, 15 bp, Homo sapiens
atgagtactttatat

SEQ ID NO: 1392720 - DNA, 15 bp, Homo sapiens
tatgagtactttata

SEQ ID NO: 1392721 - DNA, 15 bp, Homo sapiens
atatgagtactttat

SEQ ID NO: 1392722 - DNA, 15 bp, Homo sapiens
gatatgagtacttta

SEQ ID NO: 1392723 - DNA, 15 bp, Homo sapiens
agatatgagtacttt

SEQ ID NO: 1392724 - DNA, 15 bp, Homo sapiens
aagatatgagtactt

SEQ ID NO: 1392725 - DNA, 15 bp, Homo sapiens
caagatatgagtact

SEQ ID NO: 1392726 - DNA, 15 bp, Homo sapiens
tcaagatatgagtac

SEQ ID NO: 1392727 - DNA, 15 bp, Homo sapiens
ctcaagatatgagta

SEQ ID NO: 1392728 - DNA, 15 bp, Homo sapiens
actcaagatatgagt

SEQ ID NO: 1392729 - DNA, 15 bp, Homo sapiens
tactcaagatatgag

SEQ ID NO: 1392730 - DNA, 15 bp, Homo sapiens
ctactcaagatatga

SEQ ID NO: 1392731 - DNA, 15 bp, Homo sapiens
tctactcaagatatg

SEQ ID NO: 1392732 - DNA, 15 bp, Homo sapiens
ttctactcaagatat

SEQ ID NO: 1392733 - DNA, 15 bp, Homo sapiens
tttctactcaagata

SEQ ID NO: 1392734 - DNA, 15 bp, Homo sapiens
ctttctactcaagat

SEQ ID NO: 1392735 - DNA, 15 bp, Homo sapiens
tctttctactcaaga

SEQ ID NO: 1392736 - DNA, 15 bp, Homo sapiens
gtctttctactcaag

SEQ ID NO: 1392737 - DNA, 15 bp, Homo sapiens
agtctttctactcaa

SEQ ID NO: 1392738 - DNA, 15 bp, Homo sapiens
tagtctttctactca

SEQ ID NO: 1392739 - DNA, 15 bp, Homo sapiens
ttagtctttctactc

SEQ ID NO: 1392740 - DNA, 15 bp, Homo sapiens
tttagtctttctact

SEQ ID NO: 1392741 - DNA, 15 bp, Homo sapiens
ttttagtctttctac

SEQ ID NO: 1392742 - DNA, 15 bp, Homo sapiens
cttttagtctttcta

SEQ ID NO: 1392743 - DNA, 15 bp, Homo sapiens
tcttttagtctttct

SEQ ID NO: 1392744 - DNA, 15 bp, Homo sapiens
atcttttagtctttc

SEQ ID NO: 1392745 - DNA, 15 bp, Homo sapiens
tatcttttagtcttt

SEQ ID NO: 1392746 - DNA, 15 bp, Homo sapiens
ttatcttttagtctt

SEQ ID NO: 1392747 - DNA, 15 bp, Homo sapiens
tttatcttttagtct

SEQ ID NO: 1392748 - DNA, 15 bp, Homo sapiens
gtttatcttttagtc

SEQ ID NO: 1392749 - DNA, 15 bp, Homo sapiens
ggtttatcttttagt

SEQ ID NO: 1392750 - DNA, 15 bp, Homo sapiens
aggtttatcttttag

SEQ ID NO: 1392751 - DNA, 15 bp, Homo sapiens
taggtttatctttta

SEQ ID NO: 1392752 - DNA, 15 bp, Homo sapiens
ataggtttatctttt

SEQ ID NO: 1392753 - DNA, 15 bp, Homo sapiens
gataggtttatcttt

SEQ ID NO: 1392754 - DNA, 15 bp, Homo sapiens
tgataggtttatctt

SEQ ID NO: 1392755 - DNA, 15 bp, Homo sapiens
ttgataggtttatct

SEQ ID NO: 1392756 - DNA, 15 bp, Homo sapiens
tttgataggtttatc

SEQ ID NO: 1392757 - DNA, 15 bp, Homo sapiens
ttttgataggtttat

SEQ ID NO: 1392758 - DNA, 15 bp, Homo sapiens
tttttgataggttta

SEQ ID NO: 1392759 - DNA, 15 bp, Homo sapiens
atttttgataggttt

SEQ ID NO: 1392760 - DNA, 15 bp, Homo sapiens
tatttttgataggtt

SEQ ID NO: 1392761 - DNA, 15 bp, Homo sapiens
ttatttttgataggt

SEQ ID NO: 1392762 - DNA, 15 bp, Homo sapiens
attatttttgatagg

SEQ ID NO: 1392763 - DNA, 15 bp, Homo sapiens
tattatttttgatag

SEQ ID NO: 1392764 - DNA, 15 bp, Homo sapiens
ttattatttttgata

SEQ ID NO: 1392765 - DNA, 15 bp, Homo sapiens
attattatttttgat

SEQ ID NO: 1392766 - DNA, 15 bp, Homo sapiens
aattattatttttga

SEQ ID NO: 1392767 - DNA, 15 bp, Homo sapiens
taattattatttttg

SEQ ID NO: 1392768 - DNA, 15 bp, Homo sapiens
gtaattattattttt

SEQ ID NO: 1392769 - DNA, 15 bp, Homo sapiens
tgtaattattatttt

SEQ ID NO: 1392770 - DNA, 15 bp, Homo sapiens
ttgtaattattattt

SEQ ID NO: 1392771 - DNA, 15 bp, Homo sapiens
gttgtaattattatt

SEQ ID NO: 1392772 - DNA, 15 bp, Homo sapiens
tgttgtaattattat

SEQ ID NO: 1392773 - DNA, 15 bp, Homo sapiens
atgttgtaattatta

SEQ ID NO: 1392774 - DNA, 15 bp, Homo sapiens
gatgttgtaattatt

SEQ ID NO: 1392775 - DNA, 15 bp, Homo sapiens
agatgttgtaattat

SEQ ID NO: 1392776 - DNA, 15 bp, Homo sapiens
aagatgttgtaatta

SEQ ID NO: 1392777 - DNA, 15 bp, Homo sapiens
aaagatgttgtaatt

SEQ ID NO: 1392778 - DNA, 15 bp, Homo sapiens
aaaagatgttgtaat

SEQ ID NO: 1392779 - DNA, 15 bp, Homo sapiens
gaaaagatgttgtaa

SEQ ID NO: 1392780 - DNA, 15 bp, Homo sapiens
tgaaaagatgttgta

SEQ ID NO: 1392781 - DNA, 15 bp, Homo sapiens
ttgaaaagatgttgt

SEQ ID NO: 1392782 - DNA, 15 bp, Homo sapiens
cttgaaaagatgttg

SEQ ID NO: 1392783 - DNA, 15 bp, Homo sapiens
tcttgaaaagatgtt

SEQ ID NO: 1392784 - DNA, 15 bp, Homo sapiens
gtcttgaaaagatgt

SEQ ID NO: 1392785 - DNA, 15 bp, Homo sapiens
tgtcttgaaaagatg

SEQ ID NO: 1392786 - DNA, 15 bp, Homo sapiens
atgtcttgaaaagat

SEQ ID NO: 1392787 - DNA, 15 bp, Homo sapiens
tatgtcttgaaaaga

SEQ ID NO: 1392788 - DNA, 15 bp, Homo sapiens
ctatgtcttgaaaag

SEQ ID NO: 1392789 - DNA, 15 bp, Homo sapiens
actatgtcttgaaaa

SEQ ID NO: 1392790 - DNA, 15 bp, Homo sapiens
tactatgtcttgaaa

SEQ ID NO: 1392791 - DNA, 15 bp, Homo sapiens
atactatgtcttgaa

SEQ ID NO: 1392792 - DNA, 15 bp, Homo sapiens
tatactatgtcttga

SEQ ID NO: 1392793 - DNA, 15 bp, Homo sapiens
ttatactatgtcttg

SEQ ID NO: 1392794 - DNA, 15 bp, Homo sapiens
attatactatgtctt

SEQ ID NO: 1392795 - DNA, 15 bp, Homo sapiens
tattatactatgtct

SEQ ID NO: 1392796 - DNA, 15 bp, Homo sapiens
ttattatactatgtc

SEQ ID NO: 1392797 - DNA, 15 bp, Homo sapiens
cttattatactatgt

SEQ ID NO: 1392798 - DNA, 15 bp, Homo sapiens
ccttattatactatg

SEQ ID NO: 1392799 - DNA, 15 bp, Homo sapiens
tccttattatactat

SEQ ID NO: 1392800 - DNA, 15 bp, Homo sapiens
ttccttattatacta

SEQ ID NO: 1392801 - DNA, 15 bp, Homo sapiens
attccttattatact

SEQ ID NO: 1392802 - DNA, 15 bp, Homo sapiens
tattccttattatac

SEQ ID NO: 1392803 - DNA, 15 bp, Homo sapiens
ttattccttattata

SEQ ID NO: 1392804 - DNA, 15 bp, Homo sapiens
tttattccttattat

SEQ ID NO: 1392805 - DNA, 15 bp, Homo sapiens
atttattccttatta

SEQ ID NO: 1392806 - DNA, 15 bp, Homo sapiens
tatttattccttatt

SEQ ID NO: 1392807 - DNA, 15 bp, Homo sapiens
ctatttattccttat

SEQ ID NO: 1392808 - DNA, 15 bp, Homo sapiens
tctatttattcctta

SEQ ID NO: 1392809 - DNA, 15 bp, Homo sapiens
ttctatttattcctt

SEQ ID NO: 1392810 - DNA, 15 bp, Homo sapiens
tttctatttattcct

SEQ ID NO: 1392811 - DNA, 15 bp, Homo sapiens
atttctatttattcc

SEQ ID NO: 1392812 - DNA, 15 bp, Homo sapiens
catttctatttattc

SEQ ID NO: 1392813 - DNA, 15 bp, Homo sapiens
tcatttctatttatt

SEQ ID NO: 1392814 - DNA, 15 bp, Homo sapiens
gtcatttctatttat

SEQ ID NO: 1392815 - DNA, 15 bp, Homo sapiens
agtcatttctattta

SEQ ID NO: 1392816 - DNA, 15 bp, Homo sapiens
tagtcatttctattt

SEQ ID NO: 1392817 - DNA, 15 bp, Homo sapiens
ttagtcatttctatt

SEQ ID NO: 1392818 - DNA, 15 bp, Homo sapiens
tttagtcatttctat

SEQ ID NO: 1392819 - DNA, 15 bp, Homo sapiens
ttttagtcatttcta

SEQ ID NO: 1392820 - DNA, 15 bp, Homo sapiens
cttttagtcatttct

SEQ ID NO: 1392821 - DNA, 15 bp, Homo sapiens
acttttagtcatttc

SEQ ID NO: 1392822 - DNA, 15 bp, Homo sapiens
aacttttagtcattt

SEQ ID NO: 1392823 - DNA, 15 bp, Homo sapiens
aaacttttagtcatt

SEQ ID NO: 1392824 - DNA, 15 bp, Homo sapiens
taaacttttagtcat

SEQ ID NO: 1392825 - DNA, 15 bp, Homo sapiens
ttaaacttttagtca

SEQ ID NO: 1392826 - DNA, 15 bp, Homo sapiens
tttaaacttttagtc

SEQ ID NO: 1392827 - DNA, 15 bp, Homo sapiens
ttttaaacttttagt

SEQ ID NO: 1392828 - DNA, 15 bp, Homo sapiens
cttttaaacttttag

SEQ ID NO: 1392829 - DNA, 15 bp, Homo sapiens
acttttaaactttta

SEQ ID NO: 1392830 - DNA, 15 bp, Homo sapiens
cacttttaaactttt

SEQ ID NO: 1392831 - DNA, 15 bp, Homo sapiens
ccacttttaaacttt

SEQ ID NO: 1392832 - DNA, 15 bp, Homo sapiens
cccacttttaaactt

SEQ ID NO: 1392833 - DNA, 15 bp, Homo sapiens
tcccacttttaaact

SEQ ID NO: 1392834 - DNA, 15 bp, Homo sapiens
atcccacttttaaac

SEQ ID NO: 1392835 - DNA, 15 bp, Homo sapiens
catcccacttttaaa

SEQ ID NO: 1392836 - DNA, 15 bp, Homo sapiens
tcatcccacttttaa

SEQ ID NO: 1392837 - DNA, 15 bp, Homo sapiens
ttcatcccactttta

SEQ ID NO: 1392838 - DNA, 15 bp, Homo sapiens
attcatcccactttt

SEQ ID NO: 1392839 - DNA, 15 bp, Homo sapiens
aattcatcccacttt

SEQ ID NO: 1392840 - DNA, 15 bp, Homo sapiens
caattcatcccactt

SEQ ID NO: 1392841 - DNA, 15 bp, Homo sapiens
tcaattcatcccact

SEQ ID NO: 1392842 - DNA, 15 bp, Homo sapiens
ctcaattcatcccac

SEQ ID NO: 1392843 - DNA, 15 bp, Homo sapiens
actcaattcatccca

SEQ ID NO: 1392844 - DNA, 15 bp, Homo sapiens
aactcaattcatccc

SEQ ID NO: 1392845 - DNA, 15 bp, Homo sapiens
taactcaattcatcc

SEQ ID NO: 1392846 - DNA, 15 bp, Homo sapiens
ttaactcaattcatc

SEQ ID NO: 1392847 - DNA, 15 bp, Homo sapiens
tttaactcaattcat

SEQ ID NO: 1392848 - DNA, 15 bp, Homo sapiens
ttttaactcaattca

SEQ ID NO: 1392849 - DNA, 15 bp, Homo sapiens
attttaactcaattc

SEQ ID NO: 1392850 - DNA, 15 bp, Homo sapiens
cattttaactcaatt

SEQ ID NO: 1392851 - DNA, 15 bp, Homo sapiens
acattttaactcaat

SEQ ID NO: 1392852 - DNA, 15 bp, Homo sapiens
gacattttaactcaa

SEQ ID NO: 1392853 - DNA, 15 bp, Homo sapiens
tgacattttaactca

SEQ ID NO: 1392854 - DNA, 15 bp, Homo sapiens
ttgacattttaactc

SEQ ID NO: 1392855 - DNA, 15 bp, Homo sapiens
tttgacattttaact

SEQ ID NO: 1392856 - DNA, 15 bp, Homo sapiens
atttgacattttaac

SEQ ID NO: 1392857 - DNA, 15 bp, Homo sapiens
aatttgacattttaa

SEQ ID NO: 1392858 - DNA, 15 bp, Homo sapiens
aaatttgacatttta

SEQ ID NO: 1392859 - DNA, 15 bp, Homo sapiens
caaatttgacatttt

SEQ ID NO: 1392860 - DNA, 15 bp, Homo sapiens
acaaatttgacattt

SEQ ID NO: 1392861 - DNA, 15 bp, Homo sapiens
tacaaatttgacatt

SEQ ID NO: 1392862 - DNA, 15 bp, Homo sapiens
atacaaatttgacat

SEQ ID NO: 1392863 - DNA, 15 bp, Homo sapiens
aatacaaatttgaca

SEQ ID NO: 1392864 - DNA, 15 bp, Homo sapiens
taatacaaatttgac

SEQ ID NO: 1392865 - DNA, 15 bp, Homo sapiens
ctaatacaaatttga

SEQ ID NO: 1392866 - DNA, 15 bp, Homo sapiens
actaatacaaatttg

SEQ ID NO: 1392867 - DNA, 15 bp, Homo sapiens
aactaatacaaattt

SEQ ID NO: 1392868 - DNA, 15 bp, Homo sapiens
aaactaatacaaatt

SEQ ID NO: 1392869 - DNA, 15 bp, Homo sapiens
aaaactaatacaaat

SEQ ID NO: 1392870 - DNA, 15 bp, Homo sapiens
gaaaactaatacaaa

SEQ ID NO: 1392871 - DNA, 15 bp, Homo sapiens
ggaaaactaatacaa

SEQ ID NO: 1392872 - DNA, 15 bp, Homo sapiens
aggaaaactaataca

SEQ ID NO: 1392873 - DNA, 15 bp, Homo sapiens
gaggaaaactaatac

SEQ ID NO: 1392874 - DNA, 15 bp, Homo sapiens
agaggaaaactaata

SEQ ID NO: 1392875 - DNA, 15 bp, Homo sapiens
aagaggaaaactaat

SEQ ID NO: 1392876 - DNA, 15 bp, Homo sapiens
taagaggaaaactaa

SEQ ID NO: 1392877 - DNA, 15 bp, Homo sapiens
ataagaggaaaacta

SEQ ID NO: 1392878 - DNA, 15 bp, Homo sapiens
aataagaggaaaact

SEQ ID NO: 1392879 - DNA, 15 bp, Homo sapiens
aaataagaggaaaac

SEQ ID NO: 1392880 - DNA, 15 bp, Homo sapiens
caaataagaggaaaa

SEQ ID NO: 1392881 - DNA, 15 bp, Homo sapiens
acaaataagaggaaa

SEQ ID NO: 1392882 - DNA, 15 bp, Homo sapiens
gacaaataagaggaa

SEQ ID NO: 1392883 - DNA, 15 bp, Homo sapiens
agacaaataagagga

SEQ ID NO: 1392884 - DNA, 15 bp, Homo sapiens
cagacaaataagagg

SEQ ID NO: 1392885 - DNA, 15 bp, Homo sapiens
gcagacaaataagag

SEQ ID NO: 1392886 - DNA, 15 bp, Homo sapiens
agcagacaaataaga

SEQ ID NO: 1392887 - DNA, 15 bp, Homo sapiens
aagcagacaaataag

SEQ ID NO: 1392888 - DNA, 15 bp, Homo sapiens
caagcagacaaataa

SEQ ID NO: 1392889 - DNA, 15 bp, Homo sapiens
acaagcagacaaata

SEQ ID NO: 1392890 - DNA, 15 bp, Homo sapiens
aacaagcagacaaat

SEQ ID NO: 1392891 - DNA, 15 bp, Homo sapiens
caacaagcagacaaa

SEQ ID NO: 1392892 - DNA, 15 bp, Homo sapiens
acaacaagcagacaa

SEQ ID NO: 1392893 - DNA, 15 bp, Homo sapiens
aacaacaagcagaca

SEQ ID NO: 1392894 - DNA, 15 bp, Homo sapiens
aaacaacaagcagac

SEQ ID NO: 1392895 - DNA, 15 bp, Homo sapiens
aaaacaacaagcaga

SEQ ID NO: 1392896 - DNA, 15 bp, Homo sapiens
aaaaacaacaagcag

SEQ ID NO: 1392897 - DNA, 15 bp, Homo sapiens
caaaaacaacaagca

SEQ ID NO: 1392898 - DNA, 15 bp, Homo sapiens
acaaaaacaacaagc

SEQ ID NO: 1392899 - DNA, 15 bp, Homo sapiens
aacaaaaacaacaag

SEQ ID NO: 1392900 - DNA, 15 bp, Homo sapiens
caaacaaaaacaaca

SEQ ID NO: 1392901 - DNA, 15 bp, Homo sapiens
acaaacaaaaacaac

SEQ ID NO: 1392902 - DNA, 15 bp, Homo sapiens
aacaaacaaaaacaa

SEQ ID NO: 1392903 - DNA, 15 bp, Homo sapiens
aaacaaacaaaaaca

SEQ ID NO: 1392904 - DNA, 15 bp, Homo sapiens
aaaacaaacaaaaac

SEQ ID NO: 1392905 - DNA, 15 bp, Homo sapiens
ttcaaaaacaaacaa

SEQ ID NO: 1392906 - DNA, 15 bp, Homo sapiens
tttcaaaaacaaaca

SEQ ID NO: 1392907 - DNA, 15 bp, Homo sapiens
atttcaaaaacaaac

SEQ ID NO: 1392908 - DNA, 15 bp, Homo sapiens
gatttcaaaaacaaa

SEQ ID NO: 1392909 - DNA, 15 bp, Homo sapiens
tgatttcaaaaacaa

SEQ ID NO: 1392910 - DNA, 15 bp, Homo sapiens
ctgatttcaaaaaca

SEQ ID NO: 1392911 - DNA, 15 bp, Homo sapiens
actgatttcaaaaac

SEQ ID NO: 1392912 - DNA, 15 bp, Homo sapiens
cactgatttcaaaaa

SEQ ID NO: 1392913 - DNA, 15 bp, Homo sapiens
acactgatttcaaaa

SEQ ID NO: 1392914 - DNA, 15 bp, Homo sapiens
aacactgatttcaaa

SEQ ID NO: 1392915 - DNA, 15 bp, Homo sapiens
taacactgatttcaa

SEQ ID NO: 1392916 - DNA, 15 bp, Homo sapiens
ttaacactgatttca

SEQ ID NO: 1392917 - DNA, 15 bp, Homo sapiens
cttaacactgatttc

SEQ ID NO: 1392918 - DNA, 15 bp, Homo sapiens
acttaacactgattt

SEQ ID NO: 1392919 - DNA, 15 bp, Homo sapiens
aacttaacactgatt

SEQ ID NO: 1392920 - DNA, 15 bp, Homo sapiens
caacttaacactgat

SEQ ID NO: 1392921 - DNA, 15 bp, Homo sapiens
acaacttaacactga

SEQ ID NO: 1392922 - DNA, 15 bp, Homo sapiens
aacaacttaacactg

SEQ ID NO: 1392923 - DNA, 15 bp, Homo sapiens
caacaacttaacact

SEQ ID NO: 1392924 - DNA, 15 bp, Homo sapiens
acaacaacttaacac

SEQ ID NO: 1392925 - DNA, 15 bp, Homo sapiens
gacaacaacttaaca

SEQ ID NO: 1392926 - DNA, 15 bp, Homo sapiens
tgacaacaacttaac

SEQ ID NO: 1392927 - DNA, 15 bp, Homo sapiens
ctgacaacaacttaa

SEQ ID NO: 1392928 - DNA, 15 bp, Homo sapiens
gctgacaacaactta

SEQ ID NO: 1392929 - DNA, 15 bp, Homo sapiens
agctgacaacaactt

SEQ ID NO: 1392930 - DNA, 15 bp, Homo sapiens
aagctgacaacaact

SEQ ID NO: 1392931 - DNA, 15 bp, Homo sapiens
taagctgacaacaac

SEQ ID NO: 1392932 - DNA, 15 bp, Homo sapiens
ttaagctgacaacaa

SEQ ID NO: 1392933 - DNA, 15 bp, Homo sapiens
tttaagctgacaaca

SEQ ID NO: 1392934 - DNA, 15 bp, Homo sapiens
ttttaagctgacaac

SEQ ID NO: 1392935 - DNA, 15 bp, Homo sapiens
attttaagctgacaa

SEQ ID NO: 1392936 - DNA, 15 bp, Homo sapiens
tattttaagctgaca

SEQ ID NO: 1392937 - DNA, 15 bp, Homo sapiens
ttattttaagctgac

SEQ ID NO: 1392938 - DNA, 15 bp, Homo sapiens
attattttaagctga

SEQ ID NO: 1392939 - DNA, 15 bp, Homo sapiens
cattattttaagctg

SEQ ID NO: 1392940 - DNA, 15 bp, Homo sapiens
ccattattttaagct

SEQ ID NO: 1392941 - DNA, 15 bp, Homo sapiens
cccattattttaagc

SEQ ID NO: 1392942 - DNA, 15 bp, Homo sapiens
acccattattttaag

SEQ ID NO: 1392943 - DNA, 15 bp, Homo sapiens
aacccattattttaa

SEQ ID NO: 1392944 - DNA, 15 bp, Homo sapiens
taacccattatttta

SEQ ID NO: 1392945 - DNA, 15 bp, Homo sapiens
ataacccattatttt

SEQ ID NO: 1392946 - DNA, 15 bp, Homo sapiens
tataacccattattt

SEQ ID NO: 1392947 - DNA, 15 bp, Homo sapiens
ttataacccattatt

SEQ ID NO: 1392948 - DNA, 15 bp, Homo sapiens
cttataacccattat

SEQ ID NO: 1392949 - DNA, 15 bp, Homo sapiens
tcttataacccatta

SEQ ID NO: 1392950 - DNA, 15 bp, Homo sapiens
atcttataacccatt

SEQ ID NO: 1392951 - DNA, 15 bp, Homo sapiens
catcttataacccat

SEQ ID NO: 1392952 - DNA, 15 bp, Homo sapiens
acatcttataaccca

SEQ ID NO: 1392953 - DNA, 15 bp, Homo sapiens
aacatcttataaccc

SEQ ID NO: 1392954 - DNA, 15 bp, Homo sapiens
taacatcttataacc

SEQ ID NO: 1392955 - DNA, 15 bp, Homo sapiens
ataacatcttataac

SEQ ID NO: 1392956 - DNA, 15 bp, Homo sapiens
aataacatcttataa

SEQ ID NO: 1392957 - DNA, 15 bp, Homo sapiens
aaataacatcttata

SEQ ID NO: 1392958 - DNA, 15 bp, Homo sapiens
caaataacatcttat

SEQ ID NO: 1392959 - DNA, 15 bp, Homo sapiens
gcaaataacatctta

SEQ ID NO: 1392960 - DNA, 15 bp, Homo sapiens
tgcaaataacatctt

SEQ ID NO: 1392961 - DNA, 15 bp, Homo sapiens
ttgcaaataacatct

SEQ ID NO: 1392962 - DNA, 15 bp, Homo sapiens
cttgcaaataacatc

SEQ ID NO: 1392963 - DNA, 15 bp, Homo sapiens
gcttgcaaataacat

SEQ ID NO: 1392964 - DNA, 15 bp, Homo sapiens
ggcttgcaaataaca

SEQ ID NO: 1392965 - DNA, 15 bp, Homo sapiens
aggcttgcaaataac

SEQ ID NO: 1392966 - DNA, 15 bp, Homo sapiens
gaggcttgcaaataa

SEQ ID NO: 1392967 - DNA, 15 bp, Homo sapiens
tgaggcttgcaaata

SEQ ID NO: 1392968 - DNA, 15 bp, Homo sapiens
atgaggcttgcaaat

SEQ ID NO: 1392969 - DNA, 15 bp, Homo sapiens
catgaggcttgcaaa

SEQ ID NO: 1392970 - DNA, 15 bp, Homo sapiens
ccatgaggcttgcaa

SEQ ID NO: 1392971 - DNA, 15 bp, Homo sapiens
accatgaggcttgca

SEQ ID NO: 1392972 - DNA, 15 bp, Homo sapiens
taccatgaggcttgc

SEQ ID NO: 1392973 - DNA, 15 bp, Homo sapiens
ttaccatgaggcttg

SEQ ID NO: 1392974 - DNA, 15 bp, Homo sapiens
gttaccatgaggctt

SEQ ID NO: 1392975 - DNA, 15 bp, Homo sapiens
ggttaccatgaggct

SEQ ID NO: 1392976 - DNA, 15 bp, Homo sapiens
aggttaccatgaggc

SEQ ID NO: 1392977 - DNA, 15 bp, Homo sapiens
gaggttaccatgagg

SEQ ID NO: 1392978 - DNA, 15 bp, Homo sapiens
tgaggttaccatgag

SEQ ID NO: 1392979 - DNA, 15 bp, Homo sapiens
ttgaggttaccatga

SEQ ID NO: 1392980 - DNA, 15 bp, Homo sapiens
tttgaggttaccatg

SEQ ID NO: 1392981 - DNA, 15 bp, Homo sapiens
atttgaggttaccat

SEQ ID NO: 1392982 - DNA, 15 bp, Homo sapiens
gatttgaggttacca

SEQ ID NO: 1392983 - DNA, 15 bp, Homo sapiens
tgatttgaggttacc

SEQ ID NO: 1392984 - DNA, 15 bp, Homo sapiens
ttgatttgaggttac

SEQ ID NO: 1392985 - DNA, 15 bp, Homo sapiens
tttgatttgaggtta

SEQ ID NO: 1392986 - DNA, 15 bp, Homo sapiens
ttttgatttgaggtt

SEQ ID NO: 1392987 - DNA, 15 bp, Homo sapiens
tttttgatttgaggt

SEQ ID NO: 1392988 - DNA, 15 bp, Homo sapiens
ttttttgatttgagg

SEQ ID NO: 1392989 - DNA, 15 bp, Homo sapiens
gttttttgatttgag

SEQ ID NO: 1392990 - DNA, 15 bp, Homo sapiens
ggttttttgatttga

SEQ ID NO: 1392991 - DNA, 15 bp, Homo sapiens
aggttttttgatttg

SEQ ID NO: 1392992 - DNA, 15 bp, Homo sapiens
taggttttttgattt

SEQ ID NO: 1392993 - DNA, 15 bp, Homo sapiens
gtaggttttttgatt

SEQ ID NO: 1392994 - DNA, 15 bp, Homo sapiens
ggtaggttttttgat

SEQ ID NO: 1392995 - DNA, 15 bp, Homo sapiens
tggtaggttttttga

SEQ ID NO: 1392996 - DNA, 15 bp, Homo sapiens
gtggtaggttttttg

SEQ ID NO: 1392997 - DNA, 15 bp, Homo sapiens
tgtggtaggtttttt

SEQ ID NO: 1392998 - DNA, 15 bp, Homo sapiens
ctgtggtaggttttt

SEQ ID NO: 1392999 - DNA, 15 bp, Homo sapiens
tctgtggtaggtttt

SEQ ID NO: 1393000 - DNA, 15 bp, Homo sapiens
atctgtggtaggttt

SEQ ID NO: 1393001 - DNA, 15 bp, Homo sapiens
tatctgtggtaggtt

SEQ ID NO: 1393002 - DNA, 15 bp, Homo sapiens
gtatctgtggtaggt

SEQ ID NO: 1393003 - DNA, 15 bp, Homo sapiens
tgtatctgtggtagg

SEQ ID NO: 1393004 - DNA, 15 bp, Homo sapiens
gtgtatctgtggtag

SEQ ID NO: 1393005 - DNA, 15 bp, Homo sapiens
tgtgtatctgtggta

SEQ ID NO: 1393006 - DNA, 15 bp, Homo sapiens
ctgtgtatctgtggt

SEQ ID NO: 1393007 - DNA, 15 bp, Homo sapiens
tctgtgtatctgtgg

SEQ ID NO: 1393008 - DNA, 15 bp, Homo sapiens
gtctgtgtatctgtg

SEQ ID NO: 1393009 - DNA, 15 bp, Homo sapiens
tgtctgtgtatctgt

SEQ ID NO: 1393010 - DNA, 15 bp, Homo sapiens
ttgtctgtgtatctg

SEQ ID NO: 1393011 - DNA, 15 bp, Homo sapiens
attgtctgtgtatct

SEQ ID NO: 1393012 - DNA, 15 bp, Homo sapiens
aattgtctgtgtatc

SEQ ID NO: 1393013 - DNA, 15 bp, Homo sapiens
taattgtctgtgtat

SEQ ID NO: 1393014 - DNA, 15 bp, Homo sapiens
ttaattgtctgtgta

SEQ ID NO: 1393015 - DNA, 15 bp, Homo sapiens
tttaattgtctgtgt

SEQ ID NO: 1393016 - DNA, 15 bp, Homo sapiens
ttttaattgtctgtg

SEQ ID NO: 1393017 - DNA, 15 bp, Homo sapiens
cttttaattgtctgt

SEQ ID NO: 1393018 - DNA, 15 bp, Homo sapiens
acttttaattgtctg

SEQ ID NO: 1393019 - DNA, 15 bp, Homo sapiens
cacttttaattgtct

SEQ ID NO: 1393020 - DNA, 15 bp, Homo sapiens
tcacttttaattgtc

SEQ ID NO: 1393021 - DNA, 15 bp, Homo sapiens
ctcacttttaattgt

SEQ ID NO: 1393022 - DNA, 15 bp, Homo sapiens
tctcacttttaattg

SEQ ID NO: 1393023 - DNA, 15 bp, Homo sapiens
ttctcacttttaatt

SEQ ID NO: 1393024 - DNA, 15 bp, Homo sapiens
tttctcacttttaat

SEQ ID NO: 1393025 - DNA, 15 bp, Homo sapiens
atttctcacttttaa

SEQ ID NO: 1393026 - DNA, 15 bp, Homo sapiens
aatttctcactttta

SEQ ID NO: 1393027 - DNA, 15 bp, Homo sapiens
taatttctcactttt

SEQ ID NO: 1393028 - DNA, 15 bp, Homo sapiens
ttaatttctcacttt

SEQ ID NO: 1393029 - DNA, 15 bp, Homo sapiens
tttaatttctcactt

SEQ ID NO: 1393030 - DNA, 15 bp, Homo sapiens
ctttaatttctcact

SEQ ID NO: 1393031 - DNA, 15 bp, Homo sapiens
gctttaatttctcac

SEQ ID NO: 1393032 - DNA, 15 bp, Homo sapiens
tgctttaatttctca

SEQ ID NO: 1393033 - DNA, 15 bp, Homo sapiens
atgctttaatttctc

SEQ ID NO: 1393034 - DNA, 15 bp, Homo sapiens
tatgctttaatttct

SEQ ID NO: 1393035 - DNA, 15 bp, Homo sapiens
gtatgctttaatttc

SEQ ID NO: 1393036 - DNA, 15 bp, Homo sapiens
ggtatgctttaattt

SEQ ID NO: 1393037 - DNA, 15 bp, Homo sapiens
tggtatgctttaatt

SEQ ID NO: 1393038 - DNA, 15 bp, Homo sapiens
gtggtatgctttaat

SEQ ID NO: 1393039 - DNA, 15 bp, Homo sapiens
agtggtatgctttaa

SEQ ID NO: 1393040 - DNA, 15 bp, Homo sapiens
tagtggtatgcttta

SEQ ID NO: 1393041 - DNA, 15 bp, Homo sapiens
ctagtggtatgcttt

SEQ ID NO: 1393042 - DNA, 15 bp, Homo sapiens
tctagtggtatgctt

SEQ ID NO: 1393043 - DNA, 15 bp, Homo sapiens
ttctagtggtatgct

SEQ ID NO: 1393044 - DNA, 15 bp, Homo sapiens
tttctagtggtatgc

SEQ ID NO: 1393045 - DNA, 15 bp, Homo sapiens
ttttctagtggtatg

SEQ ID NO: 1393046 - DNA, 15 bp, Homo sapiens
tttttctagtggtat

SEQ ID NO: 1393047 - DNA, 15 bp, Homo sapiens
ttttttctagtggta

SEQ ID NO: 1393048 - DNA, 15 bp, Homo sapiens
tttttttctagtggt

SEQ ID NO: 1393049 - DNA, 15 bp, Homo sapiens
ttttttttctagtgg

SEQ ID NO: 1393050 - DNA, 15 bp, Homo sapiens
aattttttttctagt

SEQ ID NO: 1393051 - DNA, 15 bp, Homo sapiens
taattttttttctag

SEQ ID NO: 1393052 - DNA, 15 bp, Homo sapiens
gtaattttttttcta

SEQ ID NO: 1393053 - DNA, 15 bp, Homo sapiens
ggtaattttttttct

SEQ ID NO: 1393054 - DNA, 15 bp, Homo sapiens
aggtaattttttttc

SEQ ID NO: 1393055 - DNA, 15 bp, Homo sapiens
aaggtaatttttttt

SEQ ID NO: 1393056 - DNA, 15 bp, Homo sapiens
gaaggtaattttttt

SEQ ID NO: 1393057 - DNA, 15 bp, Homo sapiens
tgaaggtaatttttt

SEQ ID NO: 1393058 - DNA, 15 bp, Homo sapiens
gtgaaggtaattttt

SEQ ID NO: 1393059 - DNA, 15 bp, Homo sapiens
tgtgaaggtaatttt

SEQ ID NO: 1393060 - DNA, 15 bp, Homo sapiens
ttgtgaaggtaattt

SEQ ID NO: 1393061 - DNA, 15 bp, Homo sapiens
tttgtgaaggtaatt

SEQ ID NO: 1393062 - DNA, 15 bp, Homo sapiens
ttttgtgaaggtaat

SEQ ID NO: 1393063 - DNA, 15 bp, Homo sapiens
tttttgtgaaggtaa

SEQ ID NO: 1393064 - DNA, 15 bp, Homo sapiens
atttttgtgaaggta

SEQ ID NO: 1393065 - DNA, 15 bp, Homo sapiens
catttttgtgaaggt

SEQ ID NO: 1393066 - DNA, 15 bp, Homo sapiens
tcatttttgtgaagg

SEQ ID NO: 1393067 - DNA, 15 bp, Homo sapiens
ttcatttttgtgaag

SEQ ID NO: 1393068 - DNA, 15 bp, Homo sapiens
gttcatttttgtgaa

SEQ ID NO: 1393069 - DNA, 15 bp, Homo sapiens
tgttcatttttgtga

SEQ ID NO: 1393070 - DNA, 15 bp, Homo sapiens
gtgttcatttttgtg

SEQ ID NO: 1393071 - DNA, 15 bp, Homo sapiens
cgtgttcatttttgt

SEQ ID NO: 1393072 - DNA, 15 bp, Homo sapiens
ccgtgttcatttttg

SEQ ID NO: 1393073 - DNA, 15 bp, Homo sapiens
cccgtgttcattttt

SEQ ID NO: 1393074 - DNA, 15 bp, Homo sapiens
tcccgtgttcatttt

SEQ ID NO: 1393075 - DNA, 15 bp, Homo sapiens
ttcccgtgttcattt

SEQ ID NO: 1393076 - DNA, 15 bp, Homo sapiens
cttcccgtgttcatt

SEQ ID NO: 1393077 - DNA, 15 bp, Homo sapiens
tcttcccgtgttcat

SEQ ID NO: 1393078 - DNA, 15 bp, Homo sapiens
ttcttcccgtgttca

SEQ ID NO: 1393079 - DNA, 15 bp, Homo sapiens
tttcttcccgtgttc

SEQ ID NO: 1393080 - DNA, 15 bp, Homo sapiens
ttttcttcccgtgtt

SEQ ID NO: 1393081 - DNA, 15 bp, Homo sapiens
cttttcttcccgtgt

SEQ ID NO: 1393082 - DNA, 15 bp, Homo sapiens
tcttttcttcccgtg

SEQ ID NO: 1393083 - DNA, 15 bp, Homo sapiens
ttcttttcttcccgt

SEQ ID NO: 1393084 - DNA, 15 bp, Homo sapiens
cttcttttcttcccg

SEQ ID NO: 1393085 - DNA, 15 bp, Homo sapiens
ccttcttttcttccc

SEQ ID NO: 1393086 - DNA, 15 bp, Homo sapiens
tccttcttttcttcc

SEQ ID NO: 1393087 - DNA, 15 bp, Homo sapiens
ttccttcttttcttc

SEQ ID NO: 1393088 - DNA, 15 bp, Homo sapiens
cttccttcttttctt

SEQ ID NO: 1393089 - DNA, 15 bp, Homo sapiens
tcttccttcttttct

SEQ ID NO: 1393090 - DNA, 15 bp, Homo sapiens
tttcttccttctttt

SEQ ID NO: 1393091 - DNA, 15 bp, Homo sapiens
ctttcttccttcttt

SEQ ID NO: 1393092 - DNA, 15 bp, Homo sapiens
tctttcttccttctt

SEQ ID NO: 1393093 - DNA, 15 bp, Homo sapiens
ctctttcttccttct

SEQ ID NO: 1393094 - DNA, 15 bp, Homo sapiens
tctctttcttccttc

SEQ ID NO: 1393095 - DNA, 15 bp, Homo sapiens
ttctctttcttcctt

SEQ ID NO: 1393096 - DNA, 15 bp, Homo sapiens
cttctctttcttcct

SEQ ID NO: 1393097 - DNA, 15 bp, Homo sapiens
tcttctctttcttcc

SEQ ID NO: 1393098 - DNA, 15 bp, Homo sapiens
gtcttctctttcttc

SEQ ID NO: 1393099 - DNA, 15 bp, Homo sapiens
agtcttctctttctt

SEQ ID NO: 1393100 - DNA, 15 bp, Homo sapiens
cagtcttctctttct

SEQ ID NO: 1393101 - DNA, 15 bp, Homo sapiens
gcagtcttctctttc

SEQ ID NO: 1393102 - DNA, 15 bp, Homo sapiens
tgcagtcttctcttt

SEQ ID NO: 1393103 - DNA, 15 bp, Homo sapiens
ttgcagtcttctctt

SEQ ID NO: 1393104 - DNA, 15 bp, Homo sapiens
tttgcagtcttctct

SEQ ID NO: 1393105 - DNA, 15 bp, Homo sapiens
ttttgcagtcttctc

SEQ ID NO: 1393106 - DNA, 15 bp, Homo sapiens
gttttgcagtcttct

SEQ ID NO: 1393107 - DNA, 15 bp, Homo sapiens
tgttttgcagtcttc

SEQ ID NO: 1393108 - DNA, 15 bp, Homo sapiens
ttgttttgcagtctt

SEQ ID NO: 1393109 - DNA, 15 bp, Homo sapiens
gttgttttgcagtct

SEQ ID NO: 1393110 - DNA, 15 bp, Homo sapiens
ggttgttttgcagtc

SEQ ID NO: 1393111 - DNA, 15 bp, Homo sapiens
tggttgttttgcagt

SEQ ID NO: 1393112 - DNA, 15 bp, Homo sapiens
ctggttgttttgcag

SEQ ID NO: 1393113 - DNA, 15 bp, Homo sapiens
tctggttgttttgca

SEQ ID NO: 1393114 - DNA, 15 bp, Homo sapiens
ttctggttgttttgc

SEQ ID NO: 1393115 - DNA, 15 bp, Homo sapiens
tttctggttgttttg

SEQ ID NO: 1393116 - DNA, 15 bp, Homo sapiens
ctttctggttgtttt

SEQ ID NO: 1393117 - DNA, 15 bp, Homo sapiens
gctttctggttgttt

SEQ ID NO: 1393118 - DNA, 15 bp, Homo sapiens
tgctttctggttgtt

SEQ ID NO: 1393119 - DNA, 15 bp, Homo sapiens
ttgctttctggttgt

SEQ ID NO: 1393120 - DNA, 15 bp, Homo sapiens
cttgctttctggttg

SEQ ID NO: 1393121 - DNA, 15 bp, Homo sapiens
gcttgctttctggtt

SEQ ID NO: 1393122 - DNA, 15 bp, Homo sapiens
tgcttgctttctggt

SEQ ID NO: 1393123 - DNA, 15 bp, Homo sapiens
ttgcttgctttctgg

SEQ ID NO: 1393124 - DNA, 15 bp, Homo sapiens
attgcttgctttctg

SEQ ID NO: 1393125 - DNA, 15 bp, Homo sapiens
tattgcttgctttct

SEQ ID NO: 1393126 - DNA, 15 bp, Homo sapiens
ttattgcttgctttc

SEQ ID NO: 1393127 - DNA, 15 bp, Homo sapiens
tttattgcttgcttt

SEQ ID NO: 1393128 - DNA, 15 bp, Homo sapiens
ttttattgcttgctt

SEQ ID NO: 1393129 - DNA, 15 bp, Homo sapiens
attttattgcttgct

SEQ ID NO: 1393130 - DNA, 15 bp, Homo sapiens
aattttattgcttgc

SEQ ID NO: 1393131 - DNA, 15 bp, Homo sapiens
caattttattgcttg

SEQ ID NO: 1393132 - DNA, 15 bp, Homo sapiens
gcaattttattgctt

SEQ ID NO: 1393133 - DNA, 15 bp, Homo sapiens
tgcaattttattgct

SEQ ID NO: 1393134 - DNA, 15 bp, Homo sapiens
ctgcaattttattgc

SEQ ID NO: 1393135 - DNA, 15 bp, Homo sapiens
cctgcaattttattg

SEQ ID NO: 1393136 - DNA, 15 bp, Homo sapiens
tcctgcaattttatt

SEQ ID NO: 1393137 - DNA, 15 bp, Homo sapiens
ctcctgcaattttat

SEQ ID NO: 1393138 - DNA, 15 bp, Homo sapiens
actcctgcaatttta

SEQ ID NO: 1393139 - DNA, 15 bp, Homo sapiens
tactcctgcaatttt

SEQ ID NO: 1393140 - DNA, 15 bp, Homo sapiens
gtactcctgcaattt

SEQ ID NO: 1393141 - DNA, 15 bp, Homo sapiens
tgtactcctgcaatt

SEQ ID NO: 1393142 - DNA, 15 bp, Homo sapiens
atgtactcctgcaat

SEQ ID NO: 1393143 - DNA, 15 bp, Homo sapiens
gatgtactcctgcaa

SEQ ID NO: 1393144 - DNA, 15 bp, Homo sapiens
agatgtactcctgca

SEQ ID NO: 1393145 - DNA, 15 bp, Homo sapiens
aagatgtactcctgc

SEQ ID NO: 1393146 - DNA, 15 bp, Homo sapiens
aaagatgtactcctg

SEQ ID NO: 1393147 - DNA, 15 bp, Homo sapiens
taaagatgtactcct

SEQ ID NO: 1393148 - DNA, 15 bp, Homo sapiens
gtaaagatgtactcc

SEQ ID NO: 1393149 - DNA, 15 bp, Homo sapiens
tgtaaagatgtactc

SEQ ID NO: 1393150 - DNA, 15 bp, Homo sapiens
atgtaaagatgtact

SEQ ID NO: 1393151 - DNA, 15 bp, Homo sapiens
tatgtaaagatgtac

SEQ ID NO: 1393152 - DNA, 15 bp, Homo sapiens
atatgtaaagatgta

SEQ ID NO: 1393153 - DNA, 15 bp, Homo sapiens
gatatgtaaagatgt

SEQ ID NO: 1393154 - DNA, 15 bp, Homo sapiens
tgatatgtaaagatg

SEQ ID NO: 1393155 - DNA, 15 bp, Homo sapiens
ttgatatgtaaagat

SEQ ID NO: 1393156 - DNA, 15 bp, Homo sapiens
attgatatgtaaaga

SEQ ID NO: 1393157 - DNA, 15 bp, Homo sapiens
tattgatatgtaaag

SEQ ID NO: 1393158 - DNA, 15 bp, Homo sapiens
ttattgatatgtaaa

SEQ ID NO: 1393159 - DNA, 15 bp, Homo sapiens
attattgatatgtaa

SEQ ID NO: 1393160 - DNA, 15 bp, Homo sapiens
tattattgatatgta

SEQ ID NO: 1393161 - DNA, 15 bp, Homo sapiens
ttattattgatatgt

SEQ ID NO: 1393162 - DNA, 15 bp, Homo sapiens
gttattattgatatg

SEQ ID NO: 1393163 - DNA, 15 bp, Homo sapiens
tgttattattgatat

SEQ ID NO: 1393164 - DNA, 15 bp, Homo sapiens
atgttattattgata

SEQ ID NO: 1393165 - DNA, 15 bp, Homo sapiens
aatgttattattgat

SEQ ID NO: 1393166 - DNA, 15 bp, Homo sapiens
caatgttattattga

SEQ ID NO: 1393167 - DNA, 15 bp, Homo sapiens
ccaatgttattattg

SEQ ID NO: 1393168 - DNA, 15 bp, Homo sapiens
tccaatgttattatt

SEQ ID NO: 1393169 - DNA, 15 bp, Homo sapiens
atccaatgttattat

SEQ ID NO: 1393170 - DNA, 15 bp, Homo sapiens
catccaatgttatta

SEQ ID NO: 1393171 - DNA, 15 bp, Homo sapiens
ccatccaatgttatt

SEQ ID NO: 1393172 - DNA, 15 bp, Homo sapiens
tccatccaatgttat

SEQ ID NO: 1393173 - DNA, 15 bp, Homo sapiens
ttccatccaatgtta

SEQ ID NO: 1393174 - DNA, 15 bp, Homo sapiens
tttccatccaatgtt

SEQ ID NO: 1393175 - DNA, 15 bp, Homo sapiens
atttccatccaatgt

SEQ ID NO: 1393176 - DNA, 15 bp, Homo sapiens
tatttccatccaatg

SEQ ID NO: 1393177 - DNA, 15 bp, Homo sapiens
ttatttccatccaat

SEQ ID NO: 1393178 - DNA, 15 bp, Homo sapiens
tttatttccatccaa

SEQ ID NO: 1393179 - DNA, 15 bp, Homo sapiens
atttatttccatcca

SEQ ID NO: 1393180 - DNA, 15 bp, Homo sapiens
catttatttccatcc

SEQ ID NO: 1393181 - DNA, 15 bp, Homo sapiens
tcatttatttccatc

SEQ ID NO: 1393182 - DNA, 15 bp, Homo sapiens
ttcatttatttccat

SEQ ID NO: 1393183 - DNA, 15 bp, Homo sapiens
gttcatttatttcca

SEQ ID NO: 1393184 - DNA, 15 bp, Homo sapiens
tgttcatttatttcc

SEQ ID NO: 1393185 - DNA, 15 bp, Homo sapiens
atgttcatttatttc

SEQ ID NO: 1393186 - DNA, 15 bp, Homo sapiens
gatgttcatttattt

SEQ ID NO: 1393187 - DNA, 15 bp, Homo sapiens
agatgttcatttatt

SEQ ID NO: 1393188 - DNA, 15 bp, Homo sapiens
aagatgttcatttat

SEQ ID NO: 1393189 - DNA, 15 bp, Homo sapiens
gaagatgttcattta

SEQ ID NO: 1393190 - DNA, 15 bp, Homo sapiens
tgaagatgttcattt

SEQ ID NO: 1393191 - DNA, 15 bp, Homo sapiens
ttgaagatgttcatt

SEQ ID NO: 1393192 - DNA, 15 bp, Homo sapiens
attgaagatgttcat

SEQ ID NO: 1393193 - DNA, 15 bp, Homo sapiens
gattgaagatgttca

SEQ ID NO: 1393194 - DNA, 15 bp, Homo sapiens
tgattgaagatgttc

SEQ ID NO: 1393195 - DNA, 15 bp, Homo sapiens
ttgattgaagatgtt

SEQ ID NO: 1393196 - DNA, 15 bp, Homo sapiens
tttgattgaagatgt

SEQ ID NO: 1393197 - DNA, 15 bp, Homo sapiens
ttttgattgaagatg

SEQ ID NO: 1393198 - DNA, 15 bp, Homo sapiens
cttttgattgaagat

SEQ ID NO: 1393199 - DNA, 15 bp, Homo sapiens
tcttttgattgaaga

SEQ ID NO: 1393200 - DNA, 15 bp, Homo sapiens
gtcttttgattgaag

SEQ ID NO: 1393201 - DNA, 15 bp, Homo sapiens
tgtcttttgattgaa

SEQ ID NO: 1393202 - DNA, 15 bp, Homo sapiens
atgtcttttgattga

SEQ ID NO: 1393203 - DNA, 15 bp, Homo sapiens
tatgtcttttgattg

SEQ ID NO: 1393204 - DNA, 15 bp, Homo sapiens
ctatgtcttttgatt

SEQ ID NO: 1393205 - DNA, 15 bp, Homo sapiens
tctatgtcttttgat

SEQ ID NO: 1393206 - DNA, 15 bp, Homo sapiens
ctctatgtcttttga

SEQ ID NO: 1393207 - DNA, 15 bp, Homo sapiens
actctatgtcttttg

SEQ ID NO: 1393208 - DNA, 15 bp, Homo sapiens
cactctatgtctttt

SEQ ID NO: 1393209 - DNA, 15 bp, Homo sapiens
ccactctatgtcttt

SEQ ID NO: 1393210 - DNA, 15 bp, Homo sapiens
gccactctatgtctt

SEQ ID NO: 1393211 - DNA, 15 bp, Homo sapiens
agccactctatgtct

SEQ ID NO: 1393212 - DNA, 15 bp, Homo sapiens
cagccactctatgtc

SEQ ID NO: 1393213 - DNA, 15 bp, Homo sapiens
tcagccactctatgt

SEQ ID NO: 1393214 - DNA, 15 bp, Homo sapiens
ttcagccactctatg

SEQ ID NO: 1393215 - DNA, 15 bp, Homo sapiens
attcagccactctat

SEQ ID NO: 1393216 - DNA, 15 bp, Homo sapiens
cattcagccactcta

SEQ ID NO: 1393217 - DNA, 15 bp, Homo sapiens
ccattcagccactct

SEQ ID NO: 1393218 - DNA, 15 bp, Homo sapiens
tccattcagccactc

SEQ ID NO: 1393219 - DNA, 15 bp, Homo sapiens
atccattcagccact

SEQ ID NO: 1393220 - DNA, 15 bp, Homo sapiens
aatccattcagccac

SEQ ID NO: 1393221 - DNA, 15 bp, Homo sapiens
aaatccattcagcca

SEQ ID NO: 1393222 - DNA, 15 bp, Homo sapiens
taaatccattcagcc

SEQ ID NO: 1393223 - DNA, 15 bp, Homo sapiens
ttaaatccattcagc

SEQ ID NO: 1393224 - DNA, 15 bp, Homo sapiens
tttaaatccattcag

SEQ ID NO: 1393225 - DNA, 15 bp, Homo sapiens
ttttaaatccattca

SEQ ID NO: 1393226 - DNA, 15 bp, Homo sapiens
tttttaaatccattc

SEQ ID NO: 1393227 - DNA, 15 bp, Homo sapiens
ttttttaaatccatt

SEQ ID NO: 1393228 - DNA, 15 bp, Homo sapiens
tttttttaaatccat

SEQ ID NO: 1393229 - DNA, 15 bp, Homo sapiens
ttttttttaaatcca

SEQ ID NO: 1393230 - DNA, 15 bp, Homo sapiens
tctttttttttaaat

SEQ ID NO: 1393231 - DNA, 15 bp, Homo sapiens
gtctttttttttaaa

SEQ ID NO: 1393232 - DNA, 15 bp, Homo sapiens
ggtctttttttttaa

SEQ ID NO: 1393233 - DNA, 15 bp, Homo sapiens
tggtcttttttttta

SEQ ID NO: 1393234 - DNA, 15 bp, Homo sapiens
ttggtcttttttttt

SEQ ID NO: 1393235 - DNA, 15 bp, Homo sapiens
tttggtctttttttt

SEQ ID NO: 1393236 - DNA, 15 bp, Homo sapiens
atttggtcttttttt

SEQ ID NO: 1393237 - DNA, 15 bp, Homo sapiens
catttggtctttttt

SEQ ID NO: 1393238 - DNA, 15 bp, Homo sapiens
ccatttggtcttttt

SEQ ID NO: 1393239 - DNA, 15 bp, Homo sapiens
accatttggtctttt

SEQ ID NO: 1393240 - DNA, 15 bp, Homo sapiens
gaccatttggtcttt

SEQ ID NO: 1393241 - DNA, 15 bp, Homo sapiens
agaccatttggtctt

SEQ ID NO: 1393242 - DNA, 15 bp, Homo sapiens
cagaccatttggtct

SEQ ID NO: 1393243 - DNA, 15 bp, Homo sapiens
acagaccatttggtc

SEQ ID NO: 1393244 - DNA, 15 bp, Homo sapiens
aacagaccatttggt

SEQ ID NO: 1393245 - DNA, 15 bp, Homo sapiens
caacagaccatttgg

SEQ ID NO: 1393246 - DNA, 15 bp, Homo sapiens
gcaacagaccatttg

SEQ ID NO: 1393247 - DNA, 15 bp, Homo sapiens
ggcaacagaccattt

SEQ ID NO: 1393248 - DNA, 15 bp, Homo sapiens
aggcaacagaccatt

SEQ ID NO: 1393249 - DNA, 15 bp, Homo sapiens
taggcaacagaccat

SEQ ID NO: 1393250 - DNA, 15 bp, Homo sapiens
gtaggcaacagacca

SEQ ID NO: 1393251 - DNA, 15 bp, Homo sapiens
tgtaggcaacagacc

SEQ ID NO: 1393252 - DNA, 15 bp, Homo sapiens
ttgtaggcaacagac

SEQ ID NO: 1393253 - DNA, 15 bp, Homo sapiens
cttgtaggcaacaga

SEQ ID NO: 1393254 - DNA, 15 bp, Homo sapiens
ccttgtaggcaacag

SEQ ID NO: 1393255 - DNA, 15 bp, Homo sapiens
tccttgtaggcaaca

SEQ ID NO: 1393256 - DNA, 15 bp, Homo sapiens
ttccttgtaggcaac

SEQ ID NO: 1393257 - DNA, 15 bp, Homo sapiens
gttccttgtaggcaa

SEQ ID NO: 1393258 - DNA, 15 bp, Homo sapiens
tgttccttgtaggca

SEQ ID NO: 1393259 - DNA, 15 bp, Homo sapiens
gtgttccttgtaggc

SEQ ID NO: 1393260 - DNA, 15 bp, Homo sapiens
tgtgttccttgtagg

SEQ ID NO: 1393261 - DNA, 15 bp, Homo sapiens
gtgtgttccttgtag

SEQ ID NO: 1393262 - DNA, 15 bp, Homo sapiens
agtgtgttccttgta

SEQ ID NO: 1393263 - DNA, 15 bp, Homo sapiens
aagtgtgttccttgt

SEQ ID NO: 1393264 - DNA, 15 bp, Homo sapiens
gaagtgtgttccttg

SEQ ID NO: 1393265 - DNA, 15 bp, Homo sapiens
tgaagtgtgttcctt

SEQ ID NO: 1393266 - DNA, 15 bp, Homo sapiens
gtgaagtgtgttcct

SEQ ID NO: 1393267 - DNA, 15 bp, Homo sapiens
ggtgaagtgtgttcc

SEQ ID NO: 1393268 - DNA, 15 bp, Homo sapiens
aggtgaagtgtgttc

SEQ ID NO: 1393269 - DNA, 15 bp, Homo sapiens
taggtgaagtgtgtt

SEQ ID NO: 1393270 - DNA, 15 bp, Homo sapiens
ataggtgaagtgtgt

SEQ ID NO: 1393271 - DNA, 15 bp, Homo sapiens
tataggtgaagtgtg

SEQ ID NO: 1393272 - DNA, 15 bp, Homo sapiens
atataggtgaagtgt

SEQ ID NO: 1393273 - DNA, 15 bp, Homo sapiens
tatataggtgaagtg

SEQ ID NO: 1393274 - DNA, 15 bp, Homo sapiens
atatataggtgaagt

SEQ ID NO: 1393275 - DNA, 15 bp, Homo sapiens
tatatataggtgaag

SEQ ID NO: 1393276 - DNA, 15 bp, Homo sapiens
gtatatataggtgaa

SEQ ID NO: 1393277 - DNA, 15 bp, Homo sapiens
tgtatatataggtga

SEQ ID NO: 1393278 - DNA, 15 bp, Homo sapiens
gtgtatatataggtg

SEQ ID NO: 1393279 - DNA, 15 bp, Homo sapiens
tgtgtatatataggt

SEQ ID NO: 1393280 - DNA, 15 bp, Homo sapiens
atgtgtatatatagg

SEQ ID NO: 1393281 - DNA, 15 bp, Homo sapiens
tatgtgtatatatag

SEQ ID NO: 1393282 - DNA, 15 bp, Homo sapiens
ctatgtgtatatata

SEQ ID NO: 1393283 - DNA, 15 bp, Homo sapiens
cctatgtgtatatat

SEQ ID NO: 1393284 - DNA, 15 bp, Homo sapiens
gcctatgtgtatata

SEQ ID NO: 1393285 - DNA, 15 bp, Homo sapiens
agcctatgtgtatat

SEQ ID NO: 1393286 - DNA, 15 bp, Homo sapiens
tagcctatgtgtata

SEQ ID NO: 1393287 - DNA, 15 bp, Homo sapiens
ttagcctatgtgtat

SEQ ID NO: 1393288 - DNA, 15 bp, Homo sapiens
tttagcctatgtgta

SEQ ID NO: 1393289 - DNA, 15 bp, Homo sapiens
ctttagcctatgtgt

SEQ ID NO: 1393290 - DNA, 15 bp, Homo sapiens
tctttagcctatgtg

SEQ ID NO: 1393291 - DNA, 15 bp, Homo sapiens
gtctttagcctatgt

SEQ ID NO: 1393292 - DNA, 15 bp, Homo sapiens
tgtctttagcctatg

SEQ ID NO: 1393293 - DNA, 15 bp, Homo sapiens
ttgtctttagcctat

SEQ ID NO: 1393294 - DNA, 15 bp, Homo sapiens
tttgtctttagccta

SEQ ID NO: 1393295 - DNA, 15 bp, Homo sapiens
ctttgtctttagcct

SEQ ID NO: 1393296 - DNA, 15 bp, Homo sapiens
cctttgtctttagcc

SEQ ID NO: 1393297 - DNA, 15 bp, Homo sapiens
tcctttgtctttagc

SEQ ID NO: 1393298 - DNA, 15 bp, Homo sapiens
ctcctttgtctttag

SEQ ID NO: 1393299 - DNA, 15 bp, Homo sapiens
actcctttgtcttta

SEQ ID NO: 1393300 - DNA, 15 bp, Homo sapiens
cactcctttgtcttt

SEQ ID NO: 1393301 - DNA, 15 bp, Homo sapiens
ccactcctttgtctt

SEQ ID NO: 1393302 - DNA, 15 bp, Homo sapiens
tccactcctttgtct

SEQ ID NO: 1393303 - DNA, 15 bp, Homo sapiens
ttccactcctttgtc

SEQ ID NO: 1393304 - DNA, 15 bp, Homo sapiens
tttccactcctttgt

SEQ ID NO: 1393305 - DNA, 15 bp, Homo sapiens
ttttccactcctttg

SEQ ID NO: 1393306 - DNA, 15 bp, Homo sapiens
tttttccactccttt

SEQ ID NO: 1393307 - DNA, 15 bp, Homo sapiens
ctttttccactcctt

SEQ ID NO: 1393308 - DNA, 15 bp, Homo sapiens
tctttttccactcct

SEQ ID NO: 1393309 - DNA, 15 bp, Homo sapiens
atctttttccactcc

SEQ ID NO: 1393310 - DNA, 15 bp, Homo sapiens
tatctttttccactc

SEQ ID NO: 1393311 - DNA, 15 bp, Homo sapiens
atatctttttccact

SEQ ID NO: 1393312 - DNA, 15 bp, Homo sapiens
aatatctttttccac

SEQ ID NO: 1393313 - DNA, 15 bp, Homo sapiens
gaatatctttttcca

SEQ ID NO: 1393314 - DNA, 15 bp, Homo sapiens
ggaatatctttttcc

SEQ ID NO: 1393315 - DNA, 15 bp, Homo sapiens
aggaatatctttttc

SEQ ID NO: 1393316 - DNA, 15 bp, Homo sapiens
aaggaatatcttttt

SEQ ID NO: 1393317 - DNA, 15 bp, Homo sapiens
caaggaatatctttt

SEQ ID NO: 1393318 - DNA, 15 bp, Homo sapiens
gcaaggaatatcttt

SEQ ID NO: 1393319 - DNA, 15 bp, Homo sapiens
tgcaaggaatatctt

SEQ ID NO: 1393320 - DNA, 15 bp, Homo sapiens
ttgcaaggaatatct

SEQ ID NO: 1393321 - DNA, 15 bp, Homo sapiens
tttgcaaggaatatc

SEQ ID NO: 1393322 - DNA, 15 bp, Homo sapiens
atttgcaaggaatat

SEQ ID NO: 1393323 - DNA, 15 bp, Homo sapiens
catttgcaaggaata

SEQ ID NO: 1393324 - DNA, 15 bp, Homo sapiens
tcatttgcaaggaat

SEQ ID NO: 1393325 - DNA, 15 bp, Homo sapiens
ttcatttgcaaggaa

SEQ ID NO: 1393326 - DNA, 15 bp, Homo sapiens
tttcatttgcaagga

SEQ ID NO: 1393327 - DNA, 15 bp, Homo sapiens
ttttcatttgcaagg

SEQ ID NO: 1393328 - DNA, 15 bp, Homo sapiens
gttttcatttgcaag

SEQ ID NO: 1393329 - DNA, 15 bp, Homo sapiens
ggttttcatttgcaa

SEQ ID NO: 1393330 - DNA, 15 bp, Homo sapiens
ttggttttcatttgc

SEQ ID NO: 1393331 - DNA, 15 bp, Homo sapiens
tttggttttcatttg

SEQ ID NO: 1393332 - DNA, 15 bp, Homo sapiens
ttttggttttcattt

SEQ ID NO: 1393333 - DNA, 15 bp, Homo sapiens
tttttggttttcatt

SEQ ID NO: 1393334 - DNA, 15 bp, Homo sapiens
ttttttggttttcat

SEQ ID NO: 1393335 - DNA, 15 bp, Homo sapiens
cttttttggttttca

SEQ ID NO: 1393336 - DNA, 15 bp, Homo sapiens
tcttttttggttttc

SEQ ID NO: 1393337 - DNA, 15 bp, Homo sapiens
ctcttttttggtttt

SEQ ID NO: 1393338 - DNA, 15 bp, Homo sapiens
gctcttttttggttt

SEQ ID NO: 1393339 - DNA, 15 bp, Homo sapiens
tgctcttttttggtt

SEQ ID NO: 1393340 - DNA, 15 bp, Homo sapiens
ctgctcttttttggt

SEQ ID NO: 1393341 - DNA, 15 bp, Homo sapiens
tctgctcttttttgg

SEQ ID NO: 1393342 - DNA, 15 bp, Homo sapiens
ttctgctcttttttg

SEQ ID NO: 1393343 - DNA, 15 bp, Homo sapiens
cttctgctctttttt

SEQ ID NO: 1393344 - DNA, 15 bp, Homo sapiens
acttctgctcttttt

SEQ ID NO: 1393345 - DNA, 15 bp, Homo sapiens
tacttctgctctttt

SEQ ID NO: 1393346 - DNA, 15 bp, Homo sapiens
ctacttctgctcttt

SEQ ID NO: 1393347 - DNA, 15 bp, Homo sapiens
gctacttctgctctt

SEQ ID NO: 1393348 - DNA, 15 bp, Homo sapiens
agctacttctgctct

SEQ ID NO: 1393349 - DNA, 15 bp, Homo sapiens
tagctacttctgctc

SEQ ID NO: 1393350 - DNA, 15 bp, Homo sapiens
atagctacttctgct

SEQ ID NO: 1393351 - DNA, 15 bp, Homo sapiens
aatagctacttctgc

SEQ ID NO: 1393352 - DNA, 15 bp, Homo sapiens
gaatagctacttctg

SEQ ID NO: 1393353 - DNA, 15 bp, Homo sapiens
agaatagctacttct

SEQ ID NO: 1393354 - DNA, 15 bp, Homo sapiens
aagaatagctacttc

SEQ ID NO: 1393355 - DNA, 15 bp, Homo sapiens
taagaatagctactt

SEQ ID NO: 1393356 - DNA, 15 bp, Homo sapiens
ataagaatagctact

SEQ ID NO: 1393357 - DNA, 15 bp, Homo sapiens
tataagaatagctac

SEQ ID NO: 1393358 - DNA, 15 bp, Homo sapiens
atataagaatagcta

SEQ ID NO: 1393359 - DNA, 15 bp, Homo sapiens
aatataagaatagct

SEQ ID NO: 1393360 - DNA, 15 bp, Homo sapiens
caatataagaatagc

SEQ ID NO: 1393361 - DNA, 15 bp, Homo sapiens
acaatataagaatag

SEQ ID NO: 1393362 - DNA, 15 bp, Homo sapiens
tacaatataagaata

SEQ ID NO: 1393363 - DNA, 15 bp, Homo sapiens
atacaatataagaat

SEQ ID NO: 1393364 - DNA, 15 bp, Homo sapiens
catacaatataagaa

SEQ ID NO: 1393365 - DNA, 15 bp, Homo sapiens
tcatacaatataaga

SEQ ID NO: 1393366 - DNA, 15 bp, Homo sapiens
ttcatacaatataag

SEQ ID NO: 1393367 - DNA, 15 bp, Homo sapiens
tttcatacaatataa

SEQ ID NO: 1393368 - DNA, 15 bp, Homo sapiens
ctttcatacaatata

SEQ ID NO: 1393369 - DNA, 15 bp, Homo sapiens
tctttcatacaatat

SEQ ID NO: 1393370 - DNA, 15 bp, Homo sapiens
ctctttcatacaata

SEQ ID NO: 1393371 - DNA, 15 bp, Homo sapiens
tctctttcatacaat

SEQ ID NO: 1393372 - DNA, 15 bp, Homo sapiens
atctctttcatacaa

SEQ ID NO: 1393373 - DNA, 15 bp, Homo sapiens
aatctctttcataca

SEQ ID NO: 1393374 - DNA, 15 bp, Homo sapiens
aaatctctttcatac

SEQ ID NO: 1393375 - DNA, 15 bp, Homo sapiens
gaaatctctttcata

SEQ ID NO: 1393376 - DNA, 15 bp, Homo sapiens
tgaaatctctttcat

SEQ ID NO: 1393377 - DNA, 15 bp, Homo sapiens
ttgaaatctctttca

SEQ ID NO: 1393378 - DNA, 15 bp, Homo sapiens
cttgaaatctctttc

SEQ ID NO: 1393379 - DNA, 15 bp, Homo sapiens
tcttgaaatctcttt

SEQ ID NO: 1393380 - DNA, 15 bp, Homo sapiens
gtcttgaaatctctt

SEQ ID NO: 1393381 - DNA, 15 bp, Homo sapiens
tgtcttgaaatctct

SEQ ID NO: 1393382 - DNA, 15 bp, Homo sapiens
ttgtcttgaaatctc

SEQ ID NO: 1393383 - DNA, 15 bp, Homo sapiens
tttgtcttgaaatct

SEQ ID NO: 1393384 - DNA, 15 bp, Homo sapiens
ttttgtcttgaaatc

SEQ ID NO: 1393385 - DNA, 15 bp, Homo sapiens
tttttgtcttgaaat

SEQ ID NO: 1393386 - DNA, 15 bp, Homo sapiens
gtttttgtcttgaaa

SEQ ID NO: 1393387 - DNA, 15 bp, Homo sapiens
agtttttgtcttgaa

SEQ ID NO: 1393388 - DNA, 15 bp, Homo sapiens
tagtttttgtcttga

SEQ ID NO: 1393389 - DNA, 15 bp, Homo sapiens
ctagtttttgtcttg

SEQ ID NO: 1393390 - DNA, 15 bp, Homo sapiens
actagtttttgtctt

SEQ ID NO: 1393391 - DNA, 15 bp, Homo sapiens
cactagtttttgtct

SEQ ID NO: 1393392 - DNA, 15 bp, Homo sapiens
tcactagtttttgtc

SEQ ID NO: 1393393 - DNA, 15 bp, Homo sapiens
atcactagtttttgt

SEQ ID NO: 1393394 - DNA, 15 bp, Homo sapiens
catcactagtttttg

SEQ ID NO: 1393395 - DNA, 15 bp, Homo sapiens
ccatcactagttttt

SEQ ID NO: 1393396 - DNA, 15 bp, Homo sapiens
tccatcactagtttt

SEQ ID NO: 1393397 - DNA, 15 bp, Homo sapiens
gtccatcactagttt

SEQ ID NO: 1393398 - DNA, 15 bp, Homo sapiens
agtccatcactagtt

SEQ ID NO: 1393399 - DNA, 15 bp, Homo sapiens
tagtccatcactagt

SEQ ID NO: 1393400 - DNA, 15 bp, Homo sapiens
ttagtccatcactag

SEQ ID NO: 1393401 - DNA, 15 bp, Homo sapiens
cttagtccatcacta

SEQ ID NO: 1393402 - DNA, 15 bp, Homo sapiens
tcttagtccatcact

SEQ ID NO: 1393403 - DNA, 15 bp, Homo sapiens
ctcttagtccatcac

SEQ ID NO: 1393404 - DNA, 15 bp, Homo sapiens
gctcttagtccatca

SEQ ID NO: 1393405 - DNA, 15 bp, Homo sapiens
agctcttagtccatc

SEQ ID NO: 1393406 - DNA, 15 bp, Homo sapiens
gagctcttagtccat

SEQ ID NO: 1393407 - DNA, 15 bp, Homo sapiens
ggagctcttagtcca

SEQ ID NO: 1393408 - DNA, 15 bp, Homo sapiens
tggagctcttagtcc

SEQ ID NO: 1393409 - DNA, 15 bp, Homo sapiens
ctggagctcttagtc

SEQ ID NO: 1393410 - DNA, 15 bp, Homo sapiens
gctggagctcttagt

SEQ ID NO: 1393411 - DNA, 15 bp, Homo sapiens
agctggagctcttag

SEQ ID NO: 1393412 - DNA, 15 bp, Homo sapiens
cagctggagctctta

SEQ ID NO: 1393413 - DNA, 15 bp, Homo sapiens
ccagctggagctctt

SEQ ID NO: 1393414 - DNA, 15 bp, Homo sapiens
cccagctggagctct

SEQ ID NO: 1393415 - DNA, 15 bp, Homo sapiens
ccccagctggagctc

SEQ ID NO: 1393416 - DNA, 15 bp, Homo sapiens
tccccagctggagct

SEQ ID NO: 1393417 - DNA, 15 bp, Homo sapiens
ttccccagctggagc

SEQ ID NO: 1393418 - DNA, 15 bp, Homo sapiens
cttccccagctggag

SEQ ID NO: 1393419 - DNA, 15 bp, Homo sapiens
acttccccagctgga

SEQ ID NO: 1393420 - DNA, 15 bp, Homo sapiens
cacttccccagctgg

SEQ ID NO: 1393421 - DNA, 15 bp, Homo sapiens
acacttccccagctg

SEQ ID NO: 1393422 - DNA, 15 bp, Homo sapiens
gacacttccccagct

SEQ ID NO: 1393423 - DNA, 15 bp, Homo sapiens
tgacacttccccagc

SEQ ID NO: 1393424 - DNA, 15 bp, Homo sapiens
gtgacacttccccag

SEQ ID NO: 1393425 - DNA, 15 bp, Homo sapiens
agtgacacttcccca

SEQ ID NO: 1393426 - DNA, 15 bp, Homo sapiens
cagtgacacttcccc

SEQ ID NO: 1393427 - DNA, 15 bp, Homo sapiens
gcagtgacacttccc

SEQ ID NO: 1393428 - DNA, 15 bp, Homo sapiens
ggcagtgacacttcc

SEQ ID NO: 1393429 - DNA, 15 bp, Homo sapiens
tggcagtgacacttc

SEQ ID NO: 1393430 - DNA, 15 bp, Homo sapiens
ttggcagtgacactt

SEQ ID NO: 1393431 - DNA, 15 bp, Homo sapiens
cttggcagtgacact

SEQ ID NO: 1393432 - DNA, 15 bp, Homo sapiens
gcttggcagtgacac

SEQ ID NO: 1393433 - DNA, 15 bp, Homo sapiens
ggcttggcagtgaca

SEQ ID NO: 1393434 - DNA, 15 bp, Homo sapiens
aggcttggcagtgac

SEQ ID NO: 1393435 - DNA, 15 bp, Homo sapiens
caggcttggcagtga

SEQ ID NO: 1393436 - DNA, 15 bp, Homo sapiens
gcaggcttggcagtg

SEQ ID NO: 1393437 - DNA, 15 bp, Homo sapiens
tgcaggcttggcagt

SEQ ID NO: 1393438 - DNA, 15 bp, Homo sapiens
ctgcaggcttggcag

SEQ ID NO: 1393439 - DNA, 15 bp, Homo sapiens
gctgcaggcttggca

SEQ ID NO: 1393440 - DNA, 15 bp, Homo sapiens
ggctgcaggcttggc

SEQ ID NO: 1393441 - DNA, 15 bp, Homo sapiens
aggctgcaggcttgg

SEQ ID NO: 1393442 - DNA, 15 bp, Homo sapiens
caggctgcaggcttg

SEQ ID NO: 1393443 - DNA, 15 bp, Homo sapiens
tcaggctgcaggctt

SEQ ID NO: 1393444 - DNA, 15 bp, Homo sapiens
gtcaggctgcaggct

SEQ ID NO: 1393445 - DNA, 15 bp, Homo sapiens
cgtcaggctgcaggc

SEQ ID NO: 1393446 - DNA, 15 bp, Homo sapiens
gcgtcaggctgcagg

SEQ ID NO: 1393447 - DNA, 15 bp, Homo sapiens
ggcgtcaggctgcag

SEQ ID NO: 1393448 - DNA, 15 bp, Homo sapiens
gggcgtcaggctgca

SEQ ID NO: 1393449 - DNA, 15 bp, Homo sapiens
agggcgtcaggctgc

SEQ ID NO: 1393450 - DNA, 15 bp, Homo sapiens
gagggcgtcaggctg

SEQ ID NO: 1393451 - DNA, 15 bp, Homo sapiens
agagggcgtcaggct

SEQ ID NO: 1393452 - DNA, 15 bp, Homo sapiens
gagagggcgtcaggc

SEQ ID NO: 1393453 - DNA, 15 bp, Homo sapiens
tgagagggcgtcagg

SEQ ID NO: 1393454 - DNA, 15 bp, Homo sapiens
ttgagagggcgtcag

SEQ ID NO: 1393455 - DNA, 15 bp, Homo sapiens
attgagagggcgtca

SEQ ID NO: 1393456 - DNA, 15 bp, Homo sapiens
tattgagagggcgtc

SEQ ID NO: 1393457 - DNA, 15 bp, Homo sapiens
ctattgagagggcgt

SEQ ID NO: 1393458 - DNA, 15 bp, Homo sapiens
actattgagagggcg

SEQ ID NO: 1393459 - DNA, 15 bp, Homo sapiens
cactattgagagggc

SEQ ID NO: 1393460 - DNA, 15 bp, Homo sapiens
gcactattgagaggg

SEQ ID NO: 1393461 - DNA, 15 bp, Homo sapiens
ggcactattgagagg

SEQ ID NO: 1393462 - DNA, 15 bp, Homo sapiens
aggcactattgagag

SEQ ID NO: 1393463 - DNA, 15 bp, Homo sapiens
caggcactattgaga

SEQ ID NO: 1393464 - DNA, 15 bp, Homo sapiens
gcaggcactattgag

SEQ ID NO: 1393465 - DNA, 15 bp, Homo sapiens
tgcaggcactattga

SEQ ID NO: 1393466 - DNA, 15 bp, Homo sapiens
atgcaggcactattg

SEQ ID NO: 1393467 - DNA, 15 bp, Homo sapiens
aatgcaggcactatt

SEQ ID NO: 1393468 - DNA, 15 bp, Homo sapiens
caatgcaggcactat

SEQ ID NO: 1393469 - DNA, 15 bp, Homo sapiens
ccaatgcaggcacta

SEQ ID NO: 1393470 - DNA, 15 bp, Homo sapiens
cccaatgcaggcact

SEQ ID NO: 1393471 - DNA, 15 bp, Homo sapiens
acccaatgcaggcac

SEQ ID NO: 1393472 - DNA, 15 bp, Homo sapiens
cacccaatgcaggca

SEQ ID NO: 1393473 - DNA, 15 bp, Homo sapiens
acacccaatgcaggc

SEQ ID NO: 1393474 - DNA, 15 bp, Homo sapiens
gacacccaatgcagg

SEQ ID NO: 1393475 - DNA, 15 bp, Homo sapiens
tgacacccaatgcag

SEQ ID NO: 1393476 - DNA, 15 bp, Homo sapiens
gtgacacccaatgca

SEQ ID NO: 1393477 - DNA, 15 bp, Homo sapiens
tgtgacacccaatgc

SEQ ID NO: 1393478 - DNA, 15 bp, Homo sapiens
ctgtgacacccaatg

SEQ ID NO: 1393479 - DNA, 15 bp, Homo sapiens
gctgtgacacccaat

SEQ ID NO: 1393480 - DNA, 15 bp, Homo sapiens
tgctgtgacacccaa

SEQ ID NO: 1393481 - DNA, 15 bp, Homo sapiens
gtgctgtgacaccca

SEQ ID NO: 1393482 - DNA, 15 bp, Homo sapiens
ggtgctgtgacaccc

SEQ ID NO: 1393483 - DNA, 15 bp, Homo sapiens
aggtgctgtgacacc

SEQ ID NO: 1393484 - DNA, 15 bp, Homo sapiens
caggtgctgtgacac

SEQ ID NO: 1393485 - DNA, 15 bp, Homo sapiens
acaggtgctgtgaca

SEQ ID NO: 1393486 - DNA, 15 bp, Homo sapiens
gacaggtgctgtgac

SEQ ID NO: 1393487 - DNA, 15 bp, Homo sapiens
agacaggtgctgtga

SEQ ID NO: 1393488 - DNA, 15 bp, Homo sapiens
cagacaggtgctgtg

SEQ ID NO: 1393489 - DNA, 15 bp, Homo sapiens
tcagacaggtgctgt

SEQ ID NO: 1393490 - DNA, 15 bp, Homo sapiens
ctcagacaggtgctg

SEQ ID NO: 1393491 - DNA, 15 bp, Homo sapiens
gctcagacaggtgct

SEQ ID NO: 1393492 - DNA, 15 bp, Homo sapiens
tgctcagacaggtgc

SEQ ID NO: 1393493 - DNA, 15 bp, Homo sapiens
gtgctcagacaggtg

SEQ ID NO: 1393494 - DNA, 15 bp, Homo sapiens
agtgctcagacaggt

SEQ ID NO: 1393495 - DNA, 15 bp, Homo sapiens
cagtgctcagacagg

SEQ ID NO: 1393496 - DNA, 15 bp, Homo sapiens
ccagtgctcagacag

SEQ ID NO: 1393497 - DNA, 15 bp, Homo sapiens
cccagtgctcagaca

SEQ ID NO: 1393498 - DNA, 15 bp, Homo sapiens
gcccagtgctcagac

SEQ ID NO: 1393499 - DNA, 15 bp, Homo sapiens
tgcccagtgctcaga

SEQ ID NO: 1393500 - DNA, 15 bp, Homo sapiens
gtgcccagtgctcag

SEQ ID NO: 1393501 - DNA, 15 bp, Homo sapiens
tgtgcccagtgctca

SEQ ID NO: 1393502 - DNA, 15 bp, Homo sapiens
gtgtgcccagtgctc

SEQ ID NO: 1393503 - DNA, 15 bp, Homo sapiens
ggtgtgcccagtgct

SEQ ID NO: 1393504 - DNA, 15 bp, Homo sapiens
gggtgtgcccagtgc

SEQ ID NO: 1393505 - DNA, 15 bp, Homo sapiens
tgggtgtgcccagtg

SEQ ID NO: 1393506 - DNA, 15 bp, Homo sapiens
ttgggtgtgcccagt

SEQ ID NO: 1393507 - DNA, 15 bp, Homo sapiens
cttgggtgtgcccag

SEQ ID NO: 1393508 - DNA, 15 bp, Homo sapiens
ccttgggtgtgccca

SEQ ID NO: 1393509 - DNA, 15 bp, Homo sapiens
cccttgggtgtgccc

SEQ ID NO: 1393510 - DNA, 15 bp, Homo sapiens
gcccttgggtgtgcc

SEQ ID NO: 1393511 - DNA, 15 bp, Homo sapiens
tgcccttgggtgtgc

SEQ ID NO: 1393512 - DNA, 15 bp, Homo sapiens
ctgcccttgggtgtg

SEQ ID NO: 1393513 - DNA, 15 bp, Homo sapiens
cctgcccttgggtgt

SEQ ID NO: 1393514 - DNA, 15 bp, Homo sapiens
gcctgcccttgggtg

SEQ ID NO: 1393515 - DNA, 15 bp, Homo sapiens
agcctgcccttgggt

SEQ ID NO: 1393516 - DNA, 15 bp, Homo sapiens
gagcctgcccttggg

SEQ ID NO: 1393517 - DNA, 15 bp, Homo sapiens
tgagcctgcccttgg

SEQ ID NO: 1393518 - DNA, 15 bp, Homo sapiens
ctgagcctgcccttg

SEQ ID NO: 1393519 - DNA, 15 bp, Homo sapiens
gctgagcctgccctt

SEQ ID NO: 1393520 - DNA, 15 bp, Homo sapiens
agctgagcctgccct

SEQ ID NO: 1393521 - DNA, 15 bp, Homo sapiens
gagctgagcctgccc

SEQ ID NO: 1393522 - DNA, 15 bp, Homo sapiens
ggagctgagcctgcc

SEQ ID NO: 1393523 - DNA, 15 bp, Homo sapiens
gggagctgagcctgc

SEQ ID NO: 1393524 - DNA, 15 bp, Homo sapiens
tgggagctgagcctg

SEQ ID NO: 1393525 - DNA, 15 bp, Homo sapiens
gtgggagctgagcct

SEQ ID NO: 1393526 - DNA, 15 bp, Homo sapiens
ggtgggagctgagcc

SEQ ID NO: 1393527 - DNA, 15 bp, Homo sapiens
gggtgggagctgagc

SEQ ID NO: 1393528 - DNA, 15 bp, Homo sapiens
tgggtgggagctgag

SEQ ID NO: 1393529 - DNA, 15 bp, Homo sapiens
ctgggtgggagctga

SEQ ID NO: 1393530 - DNA, 15 bp, Homo sapiens
gctgggtgggagctg

SEQ ID NO: 1393531 - DNA, 15 bp, Homo sapiens
ggctgggtgggagct

SEQ ID NO: 1393532 - DNA, 15 bp, Homo sapiens
aggctgggtgggagc

SEQ ID NO: 1393533 - DNA, 15 bp, Homo sapiens
ggaaggctgggtggg

SEQ ID NO: 1393534 - DNA, 15 bp, Homo sapiens
gggaaggctgggtgg

SEQ ID NO: 1393535 - DNA, 15 bp, Homo sapiens
tgggaaggctgggtg

SEQ ID NO: 1393536 - DNA, 15 bp, Homo sapiens
atgggaaggctgggt

SEQ ID NO: 1393537 - DNA, 15 bp, Homo sapiens
gatgggaaggctggg

SEQ ID NO: 1393538 - DNA, 15 bp, Homo sapiens
agatgggaaggctgg

SEQ ID NO: 1393539 - DNA, 15 bp, Homo sapiens
aagatgggaaggctg

SEQ ID NO: 1393540 - DNA, 15 bp, Homo sapiens
caagatgggaaggct

SEQ ID NO: 1393541 - DNA, 15 bp, Homo sapiens
ccaagatgggaaggc

SEQ ID NO: 1393542 - DNA, 15 bp, Homo sapiens
gccaagatgggaagg

SEQ ID NO: 1393543 - DNA, 15 bp, Homo sapiens
agccaagatgggaag

SEQ ID NO: 1393544 - DNA, 15 bp, Homo sapiens
cagccaagatgggaa

SEQ ID NO: 1393545 - DNA, 15 bp, Homo sapiens
gcagccaagatggga

SEQ ID NO: 1393546 - DNA, 15 bp, Homo sapiens
agcagccaagatggg

SEQ ID NO: 1393547 - DNA, 15 bp, Homo sapiens
cagcagccaagatgg

SEQ ID NO: 1393548 - DNA, 15 bp, Homo sapiens
gcagcagccaagatg

SEQ ID NO: 1393549 - DNA, 15 bp, Homo sapiens
agcagcagccaagat

SEQ ID NO: 1393550 - DNA, 15 bp, Homo sapiens
aagcagcagccaaga

SEQ ID NO: 1393551 - DNA, 15 bp, Homo sapiens
caagcagcagccaag

SEQ ID NO: 1393552 - DNA, 15 bp, Homo sapiens
ccaagcagcagccaa

SEQ ID NO: 1393553 - DNA, 15 bp, Homo sapiens
tccaagcagcagcca

SEQ ID NO: 1393554 - DNA, 15 bp, Homo sapiens
ctccaagcagcagcc

SEQ ID NO: 1393555 - DNA, 15 bp, Homo sapiens
gctccaagcagcagc

SEQ ID NO: 1393556 - DNA, 15 bp, Homo sapiens
ggctccaagcagcag

SEQ ID NO: 1393557 - DNA, 15 bp, Homo sapiens
aggctccaagcagca

SEQ ID NO: 1393558 - DNA, 15 bp, Homo sapiens
caggctccaagcagc

SEQ ID NO: 1393559 - DNA, 15 bp, Homo sapiens
tacaggctccaagca

SEQ ID NO: 1393560 - DNA, 15 bp, Homo sapiens
gtacaggctccaagc

SEQ ID NO: 1393561 - DNA, 15 bp, Homo sapiens
agtacaggctccaag

SEQ ID NO: 1393562 - DNA, 15 bp, Homo sapiens
cagtacaggctccaa

SEQ ID NO: 1393563 - DNA, 15 bp, Homo sapiens
acagtacaggctcca

SEQ ID NO: 1393564 - DNA, 15 bp, Homo sapiens
gacagtacaggctcc

SEQ ID NO: 1393565 - DNA, 15 bp, Homo sapiens
tgacagtacaggctc

SEQ ID NO: 1393566 - DNA, 15 bp, Homo sapiens
gtgacagtacaggct

SEQ ID NO: 1393567 - DNA, 15 bp, Homo sapiens
agtgacagtacaggc

SEQ ID NO: 1393568 - DNA, 15 bp, Homo sapiens
cagtgacagtacagg

SEQ ID NO: 1393569 - DNA, 15 bp, Homo sapiens
gcagtgacagtacag

SEQ ID NO: 1393570 - DNA, 15 bp, Homo sapiens
agcagtgacagtaca

SEQ ID NO: 1393571 - DNA, 15 bp, Homo sapiens
cagcagtgacagtac

SEQ ID NO: 1393572 - DNA, 15 bp, Homo sapiens
gcagcagtgacagta

SEQ ID NO: 1393573 - DNA, 15 bp, Homo sapiens
ggcagcagtgacagt

SEQ ID NO: 1393574 - DNA, 15 bp, Homo sapiens
gggcagcagtgacag

SEQ ID NO: 1393575 - DNA, 15 bp, Homo sapiens
agggcagcagtgaca

SEQ ID NO: 1393576 - DNA, 15 bp, Homo sapiens
aagggcagcagtgac

SEQ ID NO: 1393577 - DNA, 15 bp, Homo sapiens
aaagggcagcagtga

SEQ ID NO: 1393578 - DNA, 15 bp, Homo sapiens
gaaagggcagcagtg

SEQ ID NO: 1393579 - DNA, 15 bp, Homo sapiens
agaaagggcagcagt

SEQ ID NO: 1393580 - DNA, 15 bp, Homo sapiens
gagaaagggcagcag

SEQ ID NO: 1393581 - DNA, 15 bp, Homo sapiens
agagaaagggcagca

SEQ ID NO: 1393582 - DNA, 15 bp, Homo sapiens
gagagaaagggcagc

SEQ ID NO: 1393583 - DNA, 15 bp, Homo sapiens
tgagagaaagggcag

SEQ ID NO: 1393584 - DNA, 15 bp, Homo sapiens
ctgagagaaagggca

SEQ ID NO: 1393585 - DNA, 15 bp, Homo sapiens
cctgagagaaagggc

SEQ ID NO: 1393586 - DNA, 15 bp, Homo sapiens
gcctgagagaaaggg

SEQ ID NO: 1393587 - DNA, 15 bp, Homo sapiens
ggcctgagagaaagg

SEQ ID NO: 1393588 - DNA, 15 bp, Homo sapiens
tggcctgagagaaag

SEQ ID NO: 1393589 - DNA, 15 bp, Homo sapiens
gtggcctgagagaaa

SEQ ID NO: 1393590 - DNA, 15 bp, Homo sapiens
tgtggcctgagagaa

SEQ ID NO: 1393591 - DNA, 15 bp, Homo sapiens
gtgtggcctgagaga

SEQ ID NO: 1393592 - DNA, 15 bp, Homo sapiens
tgtgtggcctgagag

SEQ ID NO: 1393593 - DNA, 15 bp, Homo sapiens
ctgtgtggcctgaga

SEQ ID NO: 1393594 - DNA, 15 bp, Homo sapiens
gctgtgtggcctgag

SEQ ID NO: 1393595 - DNA, 15 bp, Homo sapiens
ggctgtgtggcctga

SEQ ID NO: 1393596 - DNA, 15 bp, Homo sapiens
gggctgtgtggcctg

SEQ ID NO: 1393597 - DNA, 15 bp, Homo sapiens
tgggctgtgtggcct

SEQ ID NO: 1393598 - DNA, 15 bp, Homo sapiens
ctgggctgtgtggcc

SEQ ID NO: 1393599 - DNA, 15 bp, Homo sapiens
actgggctgtgtggc

SEQ ID NO: 1393600 - DNA, 15 bp, Homo sapiens
tactgggctgtgtgg

SEQ ID NO: 1393601 - DNA, 15 bp, Homo sapiens
ttactgggctgtgtg

SEQ ID NO: 1393602 - DNA, 15 bp, Homo sapiens
tttactgggctgtgt

SEQ ID NO: 1393603 - DNA, 15 bp, Homo sapiens
gtttactgggctgtg

SEQ ID NO: 1393604 - DNA, 15 bp, Homo sapiens
tgtttactgggctgt

SEQ ID NO: 1393605 - DNA, 15 bp, Homo sapiens
gtgtttactgggctg

SEQ ID NO: 1393606 - DNA, 15 bp, Homo sapiens
tgtgtttactgggct

SEQ ID NO: 1393607 - DNA, 15 bp, Homo sapiens
ctgtgtttactgggc

SEQ ID NO: 1393608 - DNA, 15 bp, Homo sapiens
gctgtgtttactggg

SEQ ID NO: 1393609 - DNA, 15 bp, Homo sapiens
ggctgtgtttactgg

SEQ ID NO: 1393610 - DNA, 15 bp, Homo sapiens
tggctgtgtttactg

SEQ ID NO: 1393611 - DNA, 15 bp, Homo sapiens
gtggctgtgtttact

SEQ ID NO: 1393612 - DNA, 15 bp, Homo sapiens
tgtggctgtgtttac

SEQ ID NO: 1393613 - DNA, 15 bp, Homo sapiens
ttgtggctgtgttta

SEQ ID NO: 1393614 - DNA, 15 bp, Homo sapiens
cttgtggctgtgttt

SEQ ID NO: 1393615 - DNA, 15 bp, Homo sapiens
gcttgtggctgtgtt

SEQ ID NO: 1393616 - DNA, 15 bp, Homo sapiens
agcttgtggctgtgt

SEQ ID NO: 1393617 - DNA, 15 bp, Homo sapiens
tagcttgtggctgtg

SEQ ID NO: 1393618 - DNA, 15 bp, Homo sapiens
gtagcttgtggctgt

SEQ ID NO: 1393619 - DNA, 15 bp, Homo sapiens
tgtagcttgtggctg

SEQ ID NO: 1393620 - DNA, 15 bp, Homo sapiens
atgtagcttgtggct

SEQ ID NO: 1393621 - DNA, 15 bp, Homo sapiens
gatgtagcttgtggc

SEQ ID NO: 1393622 - DNA, 15 bp, Homo sapiens
cgatgtagcttgtgg

SEQ ID NO: 1393623 - DNA, 15 bp, Homo sapiens
tcgatgtagcttgtg

SEQ ID NO: 1393624 - DNA, 15 bp, Homo sapiens
gtcgatgtagcttgt

SEQ ID NO: 1393625 - DNA, 15 bp, Homo sapiens
tgtcgatgtagcttg

SEQ ID NO: 1393626 - DNA, 15 bp, Homo sapiens
ctgtcgatgtagctt

SEQ ID NO: 1393627 - DNA, 15 bp, Homo sapiens
actgtcgatgtagct

SEQ ID NO: 1393628 - DNA, 15 bp, Homo sapiens
cactgtcgatgtagc

SEQ ID NO: 1393629 - DNA, 15 bp, Homo sapiens
gcactgtcgatgtag

SEQ ID NO: 1393630 - DNA, 15 bp, Homo sapiens
ggcactgtcgatgta

SEQ ID NO: 1393631 - DNA, 15 bp, Homo sapiens
gggcactgtcgatgt

SEQ ID NO: 1393632 - DNA, 15 bp, Homo sapiens
tgggcactgtcgatg

SEQ ID NO: 1393633 - DNA, 15 bp, Homo sapiens
atgggcactgtcgat

SEQ ID NO: 1393634 - DNA, 15 bp, Homo sapiens
catgggcactgtcga

SEQ ID NO: 1393635 - DNA, 15 bp, Homo sapiens
acatgggcactgtcg

SEQ ID NO: 1393636 - DNA, 15 bp, Homo sapiens
aacatgggcactgtc

SEQ ID NO: 1393637 - DNA, 15 bp, Homo sapiens
gaacatgggcactgt

SEQ ID NO: 1393638 - DNA, 15 bp, Homo sapiens
agaacatgggcactg

SEQ ID NO: 1393639 - DNA, 15 bp, Homo sapiens
cagaacatgggcact

SEQ ID NO: 1393640 - DNA, 15 bp, Homo sapiens
gcagaacatgggcac

SEQ ID NO: 1393641 - DNA, 15 bp, Homo sapiens
agcagaacatgggca

SEQ ID NO: 1393642 - DNA, 15 bp, Homo sapiens
cagcagaacatgggc

SEQ ID NO: 1393643 - DNA, 15 bp, Homo sapiens
gcagcagaacatggg

SEQ ID NO: 1393644 - DNA, 15 bp, Homo sapiens
agcagcagaacatgg

SEQ ID NO: 1393645 - DNA, 15 bp, Homo sapiens
cagcagcagaacatg

SEQ ID NO: 1393646 - DNA, 15 bp, Homo sapiens
tcagcagcagaacat

SEQ ID NO: 1393647 - DNA, 15 bp, Homo sapiens
ctcagcagcagaaca

SEQ ID NO: 1393648 - DNA, 15 bp, Homo sapiens
gctcagcagcagaac

SEQ ID NO: 1393649 - DNA, 15 bp, Homo sapiens
ggctcagcagcagaa

SEQ ID NO: 1393650 - DNA, 15 bp, Homo sapiens
tggctcagcagcaga

SEQ ID NO: 1393651 - DNA, 15 bp, Homo sapiens
gtggctcagcagcag

SEQ ID NO: 1393652 - DNA, 15 bp, Homo sapiens
ggtggctcagcagca

SEQ ID NO: 1393653 - DNA, 15 bp, Homo sapiens
tggtggctcagcagc

SEQ ID NO: 1393654 - DNA, 15 bp, Homo sapiens
atggtggctcagcag

SEQ ID NO: 1393655 - DNA, 15 bp, Homo sapiens
catggtggctcagca

SEQ ID NO: 1393656 - DNA, 15 bp, Homo sapiens
ccatggtggctcagc

SEQ ID NO: 1393657 - DNA, 15 bp, Homo sapiens
tccatggtggctcag

SEQ ID NO: 1393658 - DNA, 15 bp, Homo sapiens
ctccatggtggctca

SEQ ID NO: 1393659 - DNA, 15 bp, Homo sapiens
actccatggtggctc

SEQ ID NO: 1393660 - DNA, 15 bp, Homo sapiens
gactccatggtggct

SEQ ID NO: 1393661 - DNA, 15 bp, Homo sapiens
tgactccatggtggc

SEQ ID NO: 1393662 - DNA, 15 bp, Homo sapiens
gtgactccatggtgg

SEQ ID NO: 1393663 - DNA, 15 bp, Homo sapiens
agtgactccatggtg

SEQ ID NO: 1393664 - DNA, 15 bp, Homo sapiens
gagtgactccatggt

SEQ ID NO: 1393665 - DNA, 15 bp, Homo sapiens
tgagtgactccatgg

SEQ ID NO: 1393666 - DNA, 15 bp, Homo sapiens
ttgagtgactccatg

SEQ ID NO: 1393667 - DNA, 15 bp, Homo sapiens
attgagtgactccat

SEQ ID NO: 1393668 - DNA, 15 bp, Homo sapiens
gattgagtgactcca

SEQ ID NO: 1393669 - DNA, 15 bp, Homo sapiens
ggattgagtgactcc

SEQ ID NO: 1393670 - DNA, 15 bp, Homo sapiens
aggattgagtgactc

SEQ ID NO: 1393671 - DNA, 15 bp, Homo sapiens
aaggattgagtgact

SEQ ID NO: 1393672 - DNA, 15 bp, Homo sapiens
caaggattgagtgac

SEQ ID NO: 1393673 - DNA, 15 bp, Homo sapiens
ccaaggattgagtga

SEQ ID NO: 1393674 - DNA, 15 bp, Homo sapiens
tccaaggattgagtg

SEQ ID NO: 1393675 - DNA, 15 bp, Homo sapiens
ctccaaggattgagt

SEQ ID NO: 1393676 - DNA, 15 bp, Homo sapiens
gctccaaggattgag

SEQ ID NO: 1393677 - DNA, 15 bp, Homo sapiens
ggctccaaggattga

SEQ ID NO: 1393678 - DNA, 15 bp, Homo sapiens
aggctccaaggattg

SEQ ID NO: 1393679 - DNA, 15 bp, Homo sapiens
taggctccaaggatt

SEQ ID NO: 1393680 - DNA, 15 bp, Homo sapiens
ttaggctccaaggat

SEQ ID NO: 1393681 - DNA, 15 bp, Homo sapiens
tttaggctccaagga

SEQ ID NO: 1393682 - DNA, 15 bp, Homo sapiens
atttaggctccaagg

SEQ ID NO: 1393683 - DNA, 15 bp, Homo sapiens
tatttaggctccaag

SEQ ID NO: 1393684 - DNA, 15 bp, Homo sapiens
atatttaggctccaa

SEQ ID NO: 1393685 - DNA, 15 bp, Homo sapiens
tatatttaggctcca

SEQ ID NO: 1393686 - DNA, 15 bp, Homo sapiens
gtatatttaggctcc

SEQ ID NO: 1393687 - DNA, 15 bp, Homo sapiens
tgtatatttaggctc

SEQ ID NO: 1393688 - DNA, 15 bp, Homo sapiens
gtgtatatttaggct

SEQ ID NO: 1393689 - DNA, 15 bp, Homo sapiens
tgtgtatatttaggc

SEQ ID NO: 1393690 - DNA, 15 bp, Homo sapiens
ctgtgtatatttagg

SEQ ID NO: 1393691 - DNA, 15 bp, Homo sapiens
gctgtgtatatttag

SEQ ID NO: 1393692 - DNA, 15 bp, Homo sapiens
ggctgtgtatattta

SEQ ID NO: 1393693 - DNA, 15 bp, Homo sapiens
gggctgtgtatattt

SEQ ID NO: 1393694 - DNA, 15 bp, Homo sapiens
agggctgtgtatatt

SEQ ID NO: 1393695 - DNA, 15 bp, Homo sapiens
cagggctgtgtatat

SEQ ID NO: 1393696 - DNA, 15 bp, Homo sapiens
gcagggctgtgtata

SEQ ID NO: 1393697 - DNA, 15 bp, Homo sapiens
agcagggctgtgtat

SEQ ID NO: 1393698 - DNA, 15 bp, Homo sapiens
gagcagggctgtgta

SEQ ID NO: 1393699 - DNA, 15 bp, Homo sapiens
agagcagggctgtgt

SEQ ID NO: 1393700 - DNA, 15 bp, Homo sapiens
gagagcagggctgtg

SEQ ID NO: 1393701 - DNA, 15 bp, Homo sapiens
tgagagcagggctgt

SEQ ID NO: 1393702 - DNA, 15 bp, Homo sapiens
ctgagagcagggctg

SEQ ID NO: 1393703 - DNA, 15 bp, Homo sapiens
tctgagagcagggct

SEQ ID NO: 1393704 - DNA, 15 bp, Homo sapiens
gtctgagagcagggc

SEQ ID NO: 1393705 - DNA, 15 bp, Homo sapiens
tgtctgagagcaggg

SEQ ID NO: 1393706 - DNA, 15 bp, Homo sapiens
atgtctgagagcagg

SEQ ID NO: 1393707 - DNA, 15 bp, Homo sapiens
tatgtctgagagcag

SEQ ID NO: 1393708 - DNA, 15 bp, Homo sapiens
gtatgtctgagagca

SEQ ID NO: 1393709 - DNA, 15 bp, Homo sapiens
agtatgtctgagagc

SEQ ID NO: 1393710 - DNA, 15 bp, Homo sapiens
aagtatgtctgagag

SEQ ID NO: 1393711 - DNA, 15 bp, Homo sapiens
gaagtatgtctgaga

SEQ ID NO: 1393712 - DNA, 15 bp, Homo sapiens
ggaagtatgtctgag

SEQ ID NO: 1393713 - DNA, 15 bp, Homo sapiens
tggaagtatgtctga

SEQ ID NO: 1393714 - DNA, 15 bp, Homo sapiens
atggaagtatgtctg

SEQ ID NO: 1393715 - DNA, 15 bp, Homo sapiens
aatggaagtatgtct

SEQ ID NO: 1393716 - DNA, 15 bp, Homo sapiens
taatggaagtatgtc

SEQ ID NO: 1393717 - DNA, 15 bp, Homo sapiens
ctaatggaagtatgt

SEQ ID NO: 1393718 - DNA, 15 bp, Homo sapiens
tctaatggaagtatg

SEQ ID NO: 1393719 - DNA, 15 bp, Homo sapiens
atctaatggaagtat

SEQ ID NO: 1393720 - DNA, 15 bp, Homo sapiens
aatctaatggaagta

SEQ ID NO: 1393721 - DNA, 15 bp, Homo sapiens
aaatctaatggaagt

SEQ ID NO: 1393722 - DNA, 15 bp, Homo sapiens
taaatctaatggaag

SEQ ID NO: 1393723 - DNA, 15 bp, Homo sapiens
ttaaatctaatggaa

SEQ ID NO: 1393724 - DNA, 15 bp, Homo sapiens
attaaatctaatgga

SEQ ID NO: 1393725 - DNA, 15 bp, Homo sapiens
tattaaatctaatgg

SEQ ID NO: 1393726 - DNA, 15 bp, Homo sapiens
ctattaaatctaatg

SEQ ID NO: 1393727 - DNA, 15 bp, Homo sapiens
gctattaaatctaat

SEQ ID NO: 1393728 - DNA, 15 bp, Homo sapiens
ggctattaaatctaa

SEQ ID NO: 1393729 - DNA, 15 bp, Homo sapiens
tggctattaaatcta

SEQ ID NO: 1393730 - DNA, 15 bp, Homo sapiens
ctggctattaaatct

SEQ ID NO: 1393731 - DNA, 15 bp, Homo sapiens
gctggctattaaatc

SEQ ID NO: 1393732 - DNA, 15 bp, Homo sapiens
ggctggctattaaat

SEQ ID NO: 1393733 - DNA, 15 bp, Homo sapiens
aggctggctattaaa

SEQ ID NO: 1393734 - DNA, 15 bp, Homo sapiens
aaggctggctattaa

SEQ ID NO: 1393735 - DNA, 15 bp, Homo sapiens
gaaggctggctatta

SEQ ID NO: 1393736 - DNA, 15 bp, Homo sapiens
tgaaggctggctatt

SEQ ID NO: 1393737 - DNA, 15 bp, Homo sapiens
atgaaggctggctat

SEQ ID NO: 1393738 - DNA, 15 bp, Homo sapiens
gatgaaggctggcta

SEQ ID NO: 1393739 - DNA, 15 bp, Homo sapiens
tgatgaaggctggct

SEQ ID NO: 1393740 - DNA, 15 bp, Homo sapiens
ttgatgaaggctggc

SEQ ID NO: 1393741 - DNA, 15 bp, Homo sapiens
attgatgaaggctgg

SEQ ID NO: 1393742 - DNA, 15 bp, Homo sapiens
tattgatgaaggctg

SEQ ID NO: 1393743 - DNA, 15 bp, Homo sapiens
gtattgatgaaggct

SEQ ID NO: 1393744 - DNA, 15 bp, Homo sapiens
agtattgatgaaggc

SEQ ID NO: 1393745 - DNA, 15 bp, Homo sapiens
tagtattgatgaagg

SEQ ID NO: 1393746 - DNA, 15 bp, Homo sapiens
ttagtattgatgaag

SEQ ID NO: 1393747 - DNA, 15 bp, Homo sapiens
attagtattgatgaa

SEQ ID NO: 1393748 - DNA, 15 bp, Homo sapiens
aattagtattgatga

SEQ ID NO: 1393749 - DNA, 15 bp, Homo sapiens
aaattagtattgatg

SEQ ID NO: 1393750 - DNA, 15 bp, Homo sapiens
aaaattagtattgat

SEQ ID NO: 1393751 - DNA, 15 bp, Homo sapiens
gaaaattagtattga

SEQ ID NO: 1393752 - DNA, 15 bp, Homo sapiens
tgaaaattagtattg

SEQ ID NO: 1393753 - DNA, 15 bp, Homo sapiens
ctgaaaattagtatt

SEQ ID NO: 1393754 - DNA, 15 bp, Homo sapiens
gctgaaaattagtat

SEQ ID NO: 1393755 - DNA, 15 bp, Homo sapiens
agctgaaaattagta

SEQ ID NO: 1393756 - DNA, 15 bp, Homo sapiens
tagctgaaaattagt

SEQ ID NO: 1393757 - DNA, 15 bp, Homo sapiens
atagctgaaaattag

SEQ ID NO: 1393758 - DNA, 15 bp, Homo sapiens
catagctgaaaatta

SEQ ID NO: 1393759 - DNA, 15 bp, Homo sapiens
ccatagctgaaaatt

SEQ ID NO: 1393760 - DNA, 15 bp, Homo sapiens
tccatagctgaaaat

SEQ ID NO: 1393761 - DNA, 15 bp, Homo sapiens
ttccatagctgaaaa

SEQ ID NO: 1393762 - DNA, 15 bp, Homo sapiens
attccatagctgaaa

SEQ ID NO: 1393763 - DNA, 15 bp, Homo sapiens
gattccatagctgaa

SEQ ID NO: 1393764 - DNA, 15 bp, Homo sapiens
tgattccatagctga

SEQ ID NO: 1393765 - DNA, 15 bp, Homo sapiens
ttgattccatagctg

SEQ ID NO: 1393766 - DNA, 15 bp, Homo sapiens
tttgattccatagct

SEQ ID NO: 1393767 - DNA, 15 bp, Homo sapiens
gtttgattccatagc

SEQ ID NO: 1393768 - DNA, 15 bp, Homo sapiens
tgtttgattccatag

SEQ ID NO: 1393769 - DNA, 15 bp, Homo sapiens
atgtttgattccata

SEQ ID NO: 1393770 - DNA, 15 bp, Homo sapiens
tatgtttgattccat

SEQ ID NO: 1393771 - DNA, 15 bp, Homo sapiens
atatgtttgattcca

SEQ ID NO: 1393772 - DNA, 15 bp, Homo sapiens
tatatgtttgattcc

SEQ ID NO: 1393773 - DNA, 15 bp, Homo sapiens
atatatgtttgattc

SEQ ID NO: 1393774 - DNA, 15 bp, Homo sapiens
catatatgtttgatt

SEQ ID NO: 1393775 - DNA, 15 bp, Homo sapiens
ccatatatgtttgat

SEQ ID NO: 1393776 - DNA, 15 bp, Homo sapiens
gccatatatgtttga

SEQ ID NO: 1393777 - DNA, 15 bp, Homo sapiens
ggccatatatgtttg

SEQ ID NO: 1393778 - DNA, 15 bp, Homo sapiens
gggccatatatgttt

SEQ ID NO: 1393779 - DNA, 15 bp, Homo sapiens
agggccatatatgtt

SEQ ID NO: 1393780 - DNA, 15 bp, Homo sapiens
tagggccatatatgt

SEQ ID NO: 1393781 - DNA, 15 bp, Homo sapiens
gtagggccatatatg

SEQ ID NO: 1393782 - DNA, 15 bp, Homo sapiens
agtagggccatatat

SEQ ID NO: 1393783 - DNA, 15 bp, Homo sapiens
gagtagggccatata

SEQ ID NO: 1393784 - DNA, 15 bp, Homo sapiens
agagtagggccatat

SEQ ID NO: 1393785 - DNA, 15 bp, Homo sapiens
cagagtagggccata

SEQ ID NO: 1393786 - DNA, 15 bp, Homo sapiens
ccagagtagggccat

SEQ ID NO: 1393787 - DNA, 15 bp, Homo sapiens
cccagagtagggcca

SEQ ID NO: 1393788 - DNA, 15 bp, Homo sapiens
tcccagagtagggcc

SEQ ID NO: 1393789 - DNA, 15 bp, Homo sapiens
gtcccagagtagggc

SEQ ID NO: 1393790 - DNA, 15 bp, Homo sapiens
tgtcccagagtaggg

SEQ ID NO: 1393791 - DNA, 15 bp, Homo sapiens
gtgtcccagagtagg

SEQ ID NO: 1393792 - DNA, 15 bp, Homo sapiens
tgtgtcccagagtag

SEQ ID NO: 1393793 - DNA, 15 bp, Homo sapiens
gtgtgtcccagagta

SEQ ID NO: 1393794 - DNA, 15 bp, Homo sapiens
ggtgtgtcccagagt

SEQ ID NO: 1393795 - DNA, 15 bp, Homo sapiens
aggtgtgtcccagag

SEQ ID NO: 1393796 - DNA, 15 bp, Homo sapiens
gaggtgtgtcccaga

SEQ ID NO: 1393797 - DNA, 15 bp, Homo sapiens
agaggtgtgtcccag

SEQ ID NO: 1393798 - DNA, 15 bp, Homo sapiens
tagaggtgtgtccca

SEQ ID NO: 1393799 - DNA, 15 bp, Homo sapiens
gtagaggtgtgtccc

SEQ ID NO: 1393800 - DNA, 15 bp, Homo sapiens
ggtagaggtgtgtcc

SEQ ID NO: 1393801 - DNA, 15 bp, Homo sapiens
tggtagaggtgtgtc

SEQ ID NO: 1393802 - DNA, 15 bp, Homo sapiens
ctggtagaggtgtgt

SEQ ID NO: 1393803 - DNA, 15 bp, Homo sapiens
tctggtagaggtgtg

SEQ ID NO: 1393804 - DNA, 15 bp, Homo sapiens
atctggtagaggtgt

SEQ ID NO: 1393805 - DNA, 15 bp, Homo sapiens
aatctggtagaggtg

SEQ ID NO: 1393806 - DNA, 15 bp, Homo sapiens
aaatctggtagaggt

SEQ ID NO: 1393807 - DNA, 15 bp, Homo sapiens
taaatctggtagagg

SEQ ID NO: 1393808 - DNA, 15 bp, Homo sapiens
ttaaatctggtagag

SEQ ID NO: 1393809 - DNA, 15 bp, Homo sapiens
attaaatctggtaga

SEQ ID NO: 1393810 - DNA, 15 bp, Homo sapiens
tattaaatctggtag

SEQ ID NO: 1393811 - DNA, 15 bp, Homo sapiens
ctattaaatctggta

SEQ ID NO: 1393812 - DNA, 15 bp, Homo sapiens
tctattaaatctggt

SEQ ID NO: 1393813 - DNA, 15 bp, Homo sapiens
gtctattaaatctgg

SEQ ID NO: 1393814 - DNA, 15 bp, Homo sapiens
tgtctattaaatctg

SEQ ID NO: 1393815 - DNA, 15 bp, Homo sapiens
atgtctattaaatct

SEQ ID NO: 1393816 - DNA, 15 bp, Homo sapiens
aatgtctattaaatc

SEQ ID NO: 1393817 - DNA, 15 bp, Homo sapiens
gaatgtctattaaat

SEQ ID NO: 1393818 - DNA, 15 bp, Homo sapiens
ggaatgtctattaaa

SEQ ID NO: 1393819 - DNA, 15 bp, Homo sapiens
aggaatgtctattaa

SEQ ID NO: 1393820 - DNA, 15 bp, Homo sapiens
gaggaatgtctatta

SEQ ID NO: 1393821 - DNA, 15 bp, Homo sapiens
tgaggaatgtctatt

SEQ ID NO: 1393822 - DNA, 15 bp, Homo sapiens
atgaggaatgtctat

SEQ ID NO: 1393823 - DNA, 15 bp, Homo sapiens
aatgaggaatgtcta

SEQ ID NO: 1393824 - DNA, 15 bp, Homo sapiens
taatgaggaatgtct

SEQ ID NO: 1393825 - DNA, 15 bp, Homo sapiens
ttaatgaggaatgtc

SEQ ID NO: 1393826 - DNA, 15 bp, Homo sapiens
gttaatgaggaatgt

SEQ ID NO: 1393827 - DNA, 15 bp, Homo sapiens
tgttaatgaggaatg

SEQ ID NO: 1393828 - DNA, 15 bp, Homo sapiens
gtgttaatgaggaat

SEQ ID NO: 1393829 - DNA, 15 bp, Homo sapiens
agtgttaatgaggaa

SEQ ID NO: 1393830 - DNA, 15 bp, Homo sapiens
aagtgttaatgagga

SEQ ID NO: 1393831 - DNA, 15 bp, Homo sapiens
aaagtgttaatgagg

SEQ ID NO: 1393832 - DNA, 15 bp, Homo sapiens
gaaagtgttaatgag

SEQ ID NO: 1393833 - DNA, 15 bp, Homo sapiens
tgaaagtgttaatga

SEQ ID NO: 1393834 - DNA, 15 bp, Homo sapiens
ctgaaagtgttaatg

SEQ ID NO: 1393835 - DNA, 15 bp, Homo sapiens
gctgaaagtgttaat

SEQ ID NO: 1393836 - DNA, 15 bp, Homo sapiens
agctgaaagtgttaa

SEQ ID NO: 1393837 - DNA, 15 bp, Homo sapiens
tagctgaaagtgtta

SEQ ID NO: 1393838 - DNA, 15 bp, Homo sapiens
atagctgaaagtgtt

SEQ ID NO: 1393839 - DNA, 15 bp, Homo sapiens
catagctgaaagtgt

SEQ ID NO: 1393840 - DNA, 15 bp, Homo sapiens
ccatagctgaaagtg

SEQ ID NO: 1393841 - DNA, 15 bp, Homo sapiens
tccatagctgaaagt

SEQ ID NO: 1393842 - DNA, 15 bp, Homo sapiens
ttccatagctgaaag

SEQ ID NO: 1393843 - DNA, 15 bp, Homo sapiens
aattccatagctgaa

SEQ ID NO: 1393844 - DNA, 15 bp, Homo sapiens
caattccatagctga

SEQ ID NO: 1393845 - DNA, 15 bp, Homo sapiens
gcaattccatagctg

SEQ ID NO: 1393846 - DNA, 15 bp, Homo sapiens
tgcaattccatagct

SEQ ID NO: 1393847 - DNA, 15 bp, Homo sapiens
ctgcaattccatagc

SEQ ID NO: 1393848 - DNA, 15 bp, Homo sapiens
tctgcaattccatag

SEQ ID NO: 1393849 - DNA, 15 bp, Homo sapiens
gtctgcaattccata

SEQ ID NO: 1393850 - DNA, 15 bp, Homo sapiens
tgtctgcaattccat

SEQ ID NO: 1393851 - DNA, 15 bp, Homo sapiens
ctgtctgcaattcca

SEQ ID NO: 1393852 - DNA, 15 bp, Homo sapiens
actgtctgcaattcc

SEQ ID NO: 1393853 - DNA, 15 bp, Homo sapiens
aactgtctgcaattc

SEQ ID NO: 1393854 - DNA, 15 bp, Homo sapiens
caactgtctgcaatt

SEQ ID NO: 1393855 - DNA, 15 bp, Homo sapiens
tcaactgtctgcaat

SEQ ID NO: 1393856 - DNA, 15 bp, Homo sapiens
atcaactgtctgcaa

SEQ ID NO: 1393857 - DNA, 15 bp, Homo sapiens
catcaactgtctgca

SEQ ID NO: 1393858 - DNA, 15 bp, Homo sapiens
tcatcaactgtctgc

SEQ ID NO: 1393859 - DNA, 15 bp, Homo sapiens
atcatcaactgtctg

SEQ ID NO: 1393860 - DNA, 15 bp, Homo sapiens
catcatcaactgtct

SEQ ID NO: 1393861 - DNA, 15 bp, Homo sapiens
tcatcatcaactgtc

SEQ ID NO: 1393862 - DNA, 15 bp, Homo sapiens
ttcatcatcaactgt

SEQ ID NO: 1393863 - DNA, 15 bp, Homo sapiens
cttcatcatcaactg

SEQ ID NO: 1393864 - DNA, 15 bp, Homo sapiens
gcttcatcatcaact

SEQ ID NO: 1393865 - DNA, 15 bp, Homo sapiens
tgcttcatcatcaac

SEQ ID NO: 1393866 - DNA, 15 bp, Homo sapiens
ttgcttcatcatcaa

SEQ ID NO: 1393867 - DNA, 15 bp, Homo sapiens
attgcttcatcatca

SEQ ID NO: 1393868 - DNA, 15 bp, Homo sapiens
cattgcttcatcatc

SEQ ID NO: 1393869 - DNA, 15 bp, Homo sapiens
tcattgcttcatcat

SEQ ID NO: 1393870 - DNA, 15 bp, Homo sapiens
atcattgcttcatca

SEQ ID NO: 1393871 - DNA, 15 bp, Homo sapiens
tatcattgcttcatc

SEQ ID NO: 1393872 - DNA, 15 bp, Homo sapiens
atatcattgcttcat

SEQ ID NO: 1393873 - DNA, 15 bp, Homo sapiens
gatatcattgcttca

SEQ ID NO: 1393874 - DNA, 15 bp, Homo sapiens
tgatatcattgcttc

SEQ ID NO: 1393875 - DNA, 15 bp, Homo sapiens
atgatatcattgctt

SEQ ID NO: 1393876 - DNA, 15 bp, Homo sapiens
tatgatatcattgct

SEQ ID NO: 1393877 - DNA, 15 bp, Homo sapiens
ttatgatatcattgc

SEQ ID NO: 1393878 - DNA, 15 bp, Homo sapiens
tttatgatatcattg

SEQ ID NO: 1393879 - DNA, 15 bp, Homo sapiens
atttatgatatcatt

SEQ ID NO: 1393880 - DNA, 15 bp, Homo sapiens
catttatgatatcat

SEQ ID NO: 1393881 - DNA, 15 bp, Homo sapiens
tcatttatgatatca

SEQ ID NO: 1393882 - DNA, 15 bp, Homo sapiens
ttcatttatgatatc

SEQ ID NO: 1393883 - DNA, 15 bp, Homo sapiens
attcatttatgatat

SEQ ID NO: 1393884 - DNA, 15 bp, Homo sapiens
tattcatttatgata

SEQ ID NO: 1393885 - DNA, 15 bp, Homo sapiens
atattcatttatgat

SEQ ID NO: 1393886 - DNA, 15 bp, Homo sapiens
gatattcatttatga

SEQ ID NO: 1393887 - DNA, 15 bp, Homo sapiens
tgatattcatttatg

SEQ ID NO: 1393888 - DNA, 15 bp, Homo sapiens
ttgatattcatttat

SEQ ID NO: 1393889 - DNA, 15 bp, Homo sapiens
cttgatattcattta

SEQ ID NO: 1393890 - DNA, 15 bp, Homo sapiens
acttgatattcattt

SEQ ID NO: 1393891 - DNA, 15 bp, Homo sapiens
gacttgatattcatt

SEQ ID NO: 1393892 - DNA, 15 bp, Homo sapiens
tgacttgatattcat

SEQ ID NO: 1393893 - DNA, 15 bp, Homo sapiens
ctgacttgatattca

SEQ ID NO: 1393894 - DNA, 15 bp, Homo sapiens
cctgacttgatattc

SEQ ID NO: 1393895 - DNA, 15 bp, Homo sapiens
ccctgacttgatatt

SEQ ID NO: 1393896 - DNA, 15 bp, Homo sapiens
tccctgacttgatat

SEQ ID NO: 1393897 - DNA, 15 bp, Homo sapiens
ttccctgacttgata

SEQ ID NO: 1393898 - DNA, 15 bp, Homo sapiens
cttccctgacttgat

SEQ ID NO: 1393899 - DNA, 15 bp, Homo sapiens
gcttccctgacttga

SEQ ID NO: 1393900 - DNA, 15 bp, Homo sapiens
tgcttccctgacttg

SEQ ID NO: 1393901 - DNA, 15 bp, Homo sapiens
ctgcttccctgactt

SEQ ID NO: 1393902 - DNA, 15 bp, Homo sapiens
tctgcttccctgact

SEQ ID NO: 1393903 - DNA, 15 bp, Homo sapiens
ttctgcttccctgac

SEQ ID NO: 1393904 - DNA, 15 bp, Homo sapiens
attctgcttccctga

SEQ ID NO: 1393905 - DNA, 15 bp, Homo sapiens
cattctgcttccctg

SEQ ID NO: 1393906 - DNA, 15 bp, Homo sapiens
tcattctgcttccct

SEQ ID NO: 1393907 - DNA, 15 bp, Homo sapiens
atcattctgcttccc

SEQ ID NO: 1393908 - DNA, 15 bp, Homo sapiens
catcattctgcttcc

SEQ ID NO: 1393909 - DNA, 15 bp, Homo sapiens
gcatcattctgcttc

SEQ ID NO: 1393910 - DNA, 15 bp, Homo sapiens
ggcatcattctgctt

SEQ ID NO: 1393911 - DNA, 15 bp, Homo sapiens
gggcatcattctgct

SEQ ID NO: 1393912 - DNA, 15 bp, Homo sapiens
tgggcatcattctgc

SEQ ID NO: 1393913 - DNA, 15 bp, Homo sapiens
ttgggcatcattctg

SEQ ID NO: 1393914 - DNA, 15 bp, Homo sapiens
cttgggcatcattct

SEQ ID NO: 1393915 - DNA, 15 bp, Homo sapiens
ccttgggcatcattc

SEQ ID NO: 1393916 - DNA, 15 bp, Homo sapiens
cccttgggcatcatt

SEQ ID NO: 1393917 - DNA, 15 bp, Homo sapiens
acccttgggcatcat

SEQ ID NO: 1393918 - DNA, 15 bp, Homo sapiens
cacccttgggcatca

SEQ ID NO: 1393919 - DNA, 15 bp, Homo sapiens
ccacccttgggcatc

SEQ ID NO: 1393920 - DNA, 15 bp, Homo sapiens
tccacccttgggcat

SEQ ID NO: 1393921 - DNA, 15 bp, Homo sapiens
atccacccttgggca

SEQ ID NO: 1393922 - DNA, 15 bp, Homo sapiens
catccacccttgggc

SEQ ID NO: 1393923 - DNA, 15 bp, Homo sapiens
acatccacccttggg

SEQ ID NO: 1393924 - DNA, 15 bp, Homo sapiens
aacatccacccttgg

SEQ ID NO: 1393925 - DNA, 15 bp, Homo sapiens
gaacatccacccttg

SEQ ID NO: 1393926 - DNA, 15 bp, Homo sapiens
agaacatccaccctt

SEQ ID NO: 1393927 - DNA, 15 bp, Homo sapiens
tagaacatccaccct

SEQ ID NO: 1393928 - DNA, 15 bp, Homo sapiens
ttagaacatccaccc

SEQ ID NO: 1393929 - DNA, 15 bp, Homo sapiens
tttagaacatccacc

SEQ ID NO: 1393930 - DNA, 15 bp, Homo sapiens
ttttagaacatccac

SEQ ID NO: 1393931 - DNA, 15 bp, Homo sapiens
gttttagaacatcca

SEQ ID NO: 1393932 - DNA, 15 bp, Homo sapiens
cgttttagaacatcc

SEQ ID NO: 1393933 - DNA, 15 bp, Homo sapiens
acgttttagaacatc

SEQ ID NO: 1393934 - DNA, 15 bp, Homo sapiens
cacgttttagaacat

SEQ ID NO: 1393935 - DNA, 15 bp, Homo sapiens
tcacgttttagaaca

SEQ ID NO: 1393936 - DNA, 15 bp, Homo sapiens
gtcacgttttagaac

SEQ ID NO: 1393937 - DNA, 15 bp, Homo sapiens
tgtcacgttttagaa

SEQ ID NO: 1393938 - DNA, 15 bp, Homo sapiens
ttgtcacgttttaga

SEQ ID NO: 1393939 - DNA, 15 bp, Homo sapiens
cttgtcacgttttag

SEQ ID NO: 1393940 - DNA, 15 bp, Homo sapiens
tcttgtcacgtttta

SEQ ID NO: 1393941 - DNA, 15 bp, Homo sapiens
ttcttgtcacgtttt

SEQ ID NO: 1393942 - DNA, 15 bp, Homo sapiens
attcttgtcacgttt

SEQ ID NO: 1393943 - DNA, 15 bp, Homo sapiens
aattcttgtcacgtt

SEQ ID NO: 1393944 - DNA, 15 bp, Homo sapiens
aaattcttgtcacgt

SEQ ID NO: 1393945 - DNA, 15 bp, Homo sapiens
aaaattcttgtcacg

SEQ ID NO: 1393946 - DNA, 15 bp, Homo sapiens
gaaaattcttgtcac

SEQ ID NO: 1393947 - DNA, 15 bp, Homo sapiens
agaaaattcttgtca

SEQ ID NO: 1393948 - DNA, 15 bp, Homo sapiens
gagaaaattcttgtc

SEQ ID NO: 1393949 - DNA, 15 bp, Homo sapiens
agagaaaattcttgt

SEQ ID NO: 1393950 - DNA, 15 bp, Homo sapiens
gagagaaaattcttg

SEQ ID NO: 1393951 - DNA, 15 bp, Homo sapiens
tgagagaaaattctt

SEQ ID NO: 1393952 - DNA, 15 bp, Homo sapiens
ctgagagaaaattct

SEQ ID NO: 1393953 - DNA, 15 bp, Homo sapiens
actgagagaaaattc

SEQ ID NO: 1393954 - DNA, 15 bp, Homo sapiens
cactgagagaaaatt

SEQ ID NO: 1393955 - DNA, 15 bp, Homo sapiens
tcactgagagaaaat

SEQ ID NO: 1393956 - DNA, 15 bp, Homo sapiens
atcactgagagaaaa

SEQ ID NO: 1393957 - DNA, 15 bp, Homo sapiens
catcactgagagaaa

SEQ ID NO: 1393958 - DNA, 15 bp, Homo sapiens
tcatcactgagagaa

SEQ ID NO: 1393959 - DNA, 15 bp, Homo sapiens
gtcatcactgagaga

SEQ ID NO: 1393960 - DNA, 15 bp, Homo sapiens
tgtcatcactgagag

SEQ ID NO: 1393961 - DNA, 15 bp, Homo sapiens
atgtcatcactgaga

SEQ ID NO: 1393962 - DNA, 15 bp, Homo sapiens
catgtcatcactgag

SEQ ID NO: 1393963 - DNA, 15 bp, Homo sapiens
ccatgtcatcactga

SEQ ID NO: 1393964 - DNA, 15 bp, Homo sapiens
gccatgtcatcactg

SEQ ID NO: 1393965 - DNA, 15 bp, Homo sapiens
tgccatgtcatcact

SEQ ID NO: 1393966 - DNA, 15 bp, Homo sapiens
ctgccatgtcatcac

SEQ ID NO: 1393967 - DNA, 15 bp, Homo sapiens
tctgccatgtcatca

SEQ ID NO: 1393968 - DNA, 15 bp, Homo sapiens
ctctgccatgtcatc

SEQ ID NO: 1393969 - DNA, 15 bp, Homo sapiens
tctctgccatgtcat

SEQ ID NO: 1393970 - DNA, 15 bp, Homo sapiens
ttctctgccatgtca

SEQ ID NO: 1393971 - DNA, 15 bp, Homo sapiens
tttctctgccatgtc

SEQ ID NO: 1393972 - DNA, 15 bp, Homo sapiens
atttctctgccatgt

SEQ ID NO: 1393973 - DNA, 15 bp, Homo sapiens
tatttctctgccatg

SEQ ID NO: 1393974 - DNA, 15 bp, Homo sapiens
ttatttctctgccat

SEQ ID NO: 1393975 - DNA, 15 bp, Homo sapiens
cttatttctctgcca

SEQ ID NO: 1393976 - DNA, 15 bp, Homo sapiens
gcttatttctctgcc

SEQ ID NO: 1393977 - DNA, 15 bp, Homo sapiens
agcttatttctctgc

SEQ ID NO: 1393978 - DNA, 15 bp, Homo sapiens
tagcttatttctctg

SEQ ID NO: 1393979 - DNA, 15 bp, Homo sapiens
ctagcttatttctct

SEQ ID NO: 1393980 - DNA, 15 bp, Homo sapiens
cctagcttatttctc

SEQ ID NO: 1393981 - DNA, 15 bp, Homo sapiens
tcctagcttatttct

SEQ ID NO: 1393982 - DNA, 15 bp, Homo sapiens
ttcctagcttatttc

SEQ ID NO: 1393983 - DNA, 15 bp, Homo sapiens
tttcctagcttattt

SEQ ID NO: 1393984 - DNA, 15 bp, Homo sapiens
ttttcctagcttatt

SEQ ID NO: 1393985 - DNA, 15 bp, Homo sapiens
tttttcctagcttat

SEQ ID NO: 1393986 - DNA, 15 bp, Homo sapiens
ttttttcctagctta

SEQ ID NO: 1393987 - DNA, 15 bp, Homo sapiens
attttttcctagctt

SEQ ID NO: 1393988 - DNA, 15 bp, Homo sapiens
cattttttcctagct

SEQ ID NO: 1393989 - DNA, 15 bp, Homo sapiens
tcattttttcctagc

SEQ ID NO: 1393990 - DNA, 15 bp, Homo sapiens
atcattttttcctag

SEQ ID NO: 1393991 - DNA, 15 bp, Homo sapiens
tatcattttttccta

SEQ ID NO: 1393992 - DNA, 15 bp, Homo sapiens
ttatcattttttcct

SEQ ID NO: 1393993 - DNA, 15 bp, Homo sapiens
cttatcattttttcc

SEQ ID NO: 1393994 - DNA, 15 bp, Homo sapiens
tcttatcattttttc

SEQ ID NO: 1393995 - DNA, 15 bp, Homo sapiens
atcttatcatttttt

SEQ ID NO: 1393996 - DNA, 15 bp, Homo sapiens
tatcttatcattttt

SEQ ID NO: 1393997 - DNA, 15 bp, Homo sapiens
ttatcttatcatttt

SEQ ID NO: 1393998 - DNA, 15 bp, Homo sapiens
tttatcttatcattt

SEQ ID NO: 1393999 - DNA, 15 bp, Homo sapiens
ctttatcttatcatt

SEQ ID NO: 1394000 - DNA, 15 bp, Homo sapiens
actttatcttatcat

SEQ ID NO: 1394001 - DNA, 15 bp, Homo sapiens
aactttatcttatca

SEQ ID NO: 1394002 - DNA, 15 bp, Homo sapiens
aaactttatcttatc

SEQ ID NO: 1394003 - DNA, 15 bp, Homo sapiens
gaaactttatcttat

SEQ ID NO: 1394004 - DNA, 15 bp, Homo sapiens
tagtggctttcagtt

SEQ ID NO: 1394005 - DNA, 15 bp, Homo sapiens
ttagtggctttcagt

SEQ ID NO: 1394006 - DNA, 15 bp, Homo sapiens
attagtggctttcag

SEQ ID NO: 1394007 - DNA, 15 bp, Homo sapiens
cattagtggctttca

SEQ ID NO: 1394008 - DNA, 15 bp, Homo sapiens
tcattagtggctttc

SEQ ID NO: 1394009 - DNA, 15 bp, Homo sapiens
gtcattagtggcttt

SEQ ID NO: 1394010 - DNA, 15 bp, Homo sapiens
agtcattagtggctt

SEQ ID NO: 1394011 - DNA, 15 bp, Homo sapiens
tagtcattagtggct

SEQ ID NO: 1394012 - DNA, 15 bp, Homo sapiens
atagtcattagtggc

SEQ ID NO: 1394013 - DNA, 15 bp, Homo sapiens
catagtcattagtgg

SEQ ID NO: 1394014 - DNA, 15 bp, Homo sapiens
gcatagtcattagtg

SEQ ID NO: 1394015 - DNA, 15 bp, Homo sapiens
tgcatagtcattagt

SEQ ID NO: 1394016 - DNA, 15 bp, Homo sapiens
atgcatagtcattag

SEQ ID NO: 1394017 - DNA, 15 bp, Homo sapiens
gatgcatagtcatta

SEQ ID NO: 1394018 - DNA, 15 bp, Homo sapiens
ggatgcatagtcatt

SEQ ID NO: 1394019 - DNA, 15 bp, Homo sapiens
tggatgcatagtcat

SEQ ID NO: 1394020 - DNA, 15 bp, Homo sapiens
atggatgcatagtca

SEQ ID NO: 1394021 - DNA, 15 bp, Homo sapiens
catggatgcatagtc

SEQ ID NO: 1394022 - DNA, 15 bp, Homo sapiens
tcatggatgcatagt

SEQ ID NO: 1394023 - DNA, 15 bp, Homo sapiens
ttcatggatgcatag

SEQ ID NO: 1394024 - DNA, 15 bp, Homo sapiens
cttcatggatgcata

SEQ ID NO: 1394025 - DNA, 15 bp, Homo sapiens
ccttcatggatgcat

SEQ ID NO: 1394026 - DNA, 15 bp, Homo sapiens
tccttcatggatgca

SEQ ID NO: 1394027 - DNA, 15 bp, Homo sapiens
ttccttcatggatgc

SEQ ID NO: 1394028 - DNA, 15 bp, Homo sapiens
attccttcatggatg

SEQ ID NO: 1394029 - DNA, 15 bp, Homo sapiens
gattccttcatggat

SEQ ID NO: 1394030 - DNA, 15 bp, Homo sapiens
tgattccttcatgga

SEQ ID NO: 1394031 - DNA, 15 bp, Homo sapiens
gtgattccttcatgg

SEQ ID NO: 1394032 - DNA, 15 bp, Homo sapiens
ggtgattccttcatg

SEQ ID NO: 1394033 - DNA, 15 bp, Homo sapiens
tggtgattccttcat

SEQ ID NO: 1394034 - DNA, 15 bp, Homo sapiens
ctggtgattccttca

SEQ ID NO: 1394035 - DNA, 15 bp, Homo sapiens
actggtgattccttc

SEQ ID NO: 1394036 - DNA, 15 bp, Homo sapiens
gactggtgattcctt

SEQ ID NO: 1394037 - DNA, 15 bp, Homo sapiens
agactggtgattcct

SEQ ID NO: 1394038 - DNA, 15 bp, Homo sapiens
aagactggtgattcc

SEQ ID NO: 1394039 - DNA, 15 bp, Homo sapiens
gaagactggtgattc

SEQ ID NO: 1394040 - DNA, 15 bp, Homo sapiens
ggaagactggtgatt

SEQ ID NO: 1394041 - DNA, 15 bp, Homo sapiens
aggaagactggtgat

SEQ ID NO: 1394042 - DNA, 15 bp, Homo sapiens
aaggaagactggtga

SEQ ID NO: 1394043 - DNA, 15 bp, Homo sapiens
gaaggaagactggtg

SEQ ID NO: 1394044 - DNA, 15 bp, Homo sapiens
ggaaggaagactggt

SEQ ID NO: 1394045 - DNA, 15 bp, Homo sapiens
aggaaggaagactgg

SEQ ID NO: 1394046 - DNA, 15 bp, Homo sapiens
aaggaaggaagactg

SEQ ID NO: 1394047 - DNA, 15 bp, Homo sapiens
aaaggaaggaagact

SEQ ID NO: 1394048 - DNA, 15 bp, Homo sapiens
caaaggaaggaagac

SEQ ID NO: 1394049 - DNA, 15 bp, Homo sapiens
acaaaggaaggaaga

SEQ ID NO: 1394050 - DNA, 15 bp, Homo sapiens
aacaaaggaaggaag

SEQ ID NO: 1394051 - DNA, 15 bp, Homo sapiens
gaacaaaggaaggaa

SEQ ID NO: 1394052 - DNA, 15 bp, Homo sapiens
agaacaaaggaagga

SEQ ID NO: 1394053 - DNA, 15 bp, Homo sapiens
tagaacaaaggaagg

SEQ ID NO: 1394054 - DNA, 15 bp, Homo sapiens
ttagaacaaaggaag

SEQ ID NO: 1394055 - DNA, 15 bp, Homo sapiens
attagaacaaaggaa

SEQ ID NO: 1394056 - DNA, 15 bp, Homo sapiens
cattagaacaaagga

SEQ ID NO: 1394057 - DNA, 15 bp, Homo sapiens
acattagaacaaagg

SEQ ID NO: 1394058 - DNA, 15 bp, Homo sapiens
cacattagaacaaag

SEQ ID NO: 1394059 - DNA, 15 bp, Homo sapiens
acacattagaacaaa

SEQ ID NO: 1394060 - DNA, 15 bp, Homo sapiens
aacacattagaacaa

SEQ ID NO: 1394061 - DNA, 15 bp, Homo sapiens
taacacattagaaca

SEQ ID NO: 1394062 - DNA, 15 bp, Homo sapiens
ttaacacattagaac

SEQ ID NO: 1394063 - DNA, 15 bp, Homo sapiens
tttaacacattagaa

SEQ ID NO: 1394064 - DNA, 15 bp, Homo sapiens
atttaacacattaga

SEQ ID NO: 1394065 - DNA, 15 bp, Homo sapiens
tatttaacacattag

SEQ ID NO: 1394066 - DNA, 15 bp, Homo sapiens
atatttaacacatta

SEQ ID NO: 1394067 - DNA, 15 bp, Homo sapiens
gatatttaacacatt

SEQ ID NO: 1394068 - DNA, 15 bp, Homo sapiens
tgatatttaacacat

SEQ ID NO: 1394069 - DNA, 15 bp, Homo sapiens
atgatatttaacaca

SEQ ID NO: 1394070 - DNA, 15 bp, Homo sapiens
aatgatatttaacac

SEQ ID NO: 1394071 - DNA, 15 bp, Homo sapiens
aaatgatatttaaca

SEQ ID NO: 1394072 - DNA, 15 bp, Homo sapiens
aaaatgatatttaac

SEQ ID NO: 1394073 - DNA, 15 bp, Homo sapiens
taaaatgatatttaa

SEQ ID NO: 1394074 - DNA, 15 bp, Homo sapiens
ttaaaatgatattta

SEQ ID NO: 1394075 - DNA, 15 bp, Homo sapiens
gttaaaatgatattt

SEQ ID NO: 1394076 - DNA, 15 bp, Homo sapiens
agttaaaatgatatt

SEQ ID NO: 1394077 - DNA, 15 bp, Homo sapiens
aagttaaaatgatat

SEQ ID NO: 1394078 - DNA, 15 bp, Homo sapiens
aaagttaaaatgata

SEQ ID NO: 1394079 - DNA, 15 bp, Homo sapiens
aaaagttaaaatgat

SEQ ID NO: 1394080 - DNA, 15 bp, Homo sapiens
taaaagttaaaatga

SEQ ID NO: 1394081 - DNA, 15 bp, Homo sapiens
ataaaagttaaaatg

SEQ ID NO: 1394082 - DNA, 15 bp, Homo sapiens
tataaaagttaaaat

SEQ ID NO: 1394083 - DNA, 15 bp, Homo sapiens
tatataaaagttaaa

SEQ ID NO: 1394084 - DNA, 15 bp, Homo sapiens
atatataaaagttaa

SEQ ID NO: 1394085 - DNA, 15 bp, Homo sapiens
catatataaaagtta

SEQ ID NO: 1394086 - DNA, 15 bp, Homo sapiens
tcatatataaaagtt

SEQ ID NO: 1394087 - DNA, 15 bp, Homo sapiens
atcatatataaaagt

SEQ ID NO: 1394088 - DNA, 15 bp, Homo sapiens
aatcatatataaaag

SEQ ID NO: 1394089 - DNA, 15 bp, Homo sapiens
taatcatatataaaa

SEQ ID NO: 1394090 - DNA, 15 bp, Homo sapiens
ttaatcatatataaa

SEQ ID NO: 1394091 - DNA, 15 bp, Homo sapiens
cttaatcatatataa

SEQ ID NO: 1394092 - DNA, 15 bp, Homo sapiens
ccttaatcatatata

SEQ ID NO: 1394093 - DNA, 15 bp, Homo sapiens
gccttaatcatatat

SEQ ID NO: 1394094 - DNA, 15 bp, Homo sapiens
agccttaatcatata

SEQ ID NO: 1394095 - DNA, 15 bp, Homo sapiens
aagccttaatcatat

SEQ ID NO: 1394096 - DNA, 15 bp, Homo sapiens
aaagccttaatcata

SEQ ID NO: 1394097 - DNA, 15 bp, Homo sapiens
aaaagccttaatcat

SEQ ID NO: 1394098 - DNA, 15 bp, Homo sapiens
aaaaagccttaatca

SEQ ID NO: 1394099 - DNA, 15 bp, Homo sapiens
aaaaaagccttaatc

SEQ ID NO: 1394100 - DNA, 15 bp, Homo sapiens
taaaaaagccttaat

SEQ ID NO: 1394101 - DNA, 15 bp, Homo sapiens
ataaaaaagccttaa

SEQ ID NO: 1394102 - DNA, 15 bp, Homo sapiens
aataaaaaagcctta

SEQ ID NO: 1394103 - DNA, 15 bp, Homo sapiens
aaataaaaaagcctt

SEQ ID NO: 1394104 - DNA, 15 bp, Homo sapiens
taaataaaaaagcct

SEQ ID NO: 1394105 - DNA, 15 bp, Homo sapiens
ttaaataaaaaagcc

SEQ ID NO: 1394106 - DNA, 15 bp, Homo sapiens
attaaataaaaaagc

SEQ ID NO: 1394107 - DNA, 15 bp, Homo sapiens
cattaaataaaaaag

SEQ ID NO: 1394108 - DNA, 15 bp, Homo sapiens
acattaaataaaaaa

SEQ ID NO: 1394109 - DNA, 15 bp, Homo sapiens
aacattaaataaaaa

SEQ ID NO: 1394110 - DNA, 15 bp, Homo sapiens
gaacattaaataaaa

SEQ ID NO: 1394111 - DNA, 15 bp, Homo sapiens
ggaacattaaataaa

SEQ ID NO: 1394112 - DNA, 15 bp, Homo sapiens
aggaacattaaataa

SEQ ID NO: 1394113 - DNA, 15 bp, Homo sapiens
taggaacattaaata

SEQ ID NO: 1394114 - DNA, 15 bp, Homo sapiens
ttaggaacattaaat

SEQ ID NO: 1394115 - DNA, 15 bp, Homo sapiens
gttaggaacattaaa

SEQ ID NO: 1394116 - DNA, 15 bp, Homo sapiens
agttaggaacattaa

SEQ ID NO: 1394117 - DNA, 15 bp, Homo sapiens
gagttaggaacatta

SEQ ID NO: 1394118 - DNA, 15 bp, Homo sapiens
agagttaggaacatt

SEQ ID NO: 1394119 - DNA, 15 bp, Homo sapiens
gagagttaggaacat

SEQ ID NO: 1394120 - DNA, 15 bp, Homo sapiens
tgagagttaggaaca

SEQ ID NO: 1394121 - DNA, 15 bp, Homo sapiens
ttgagagttaggaac

SEQ ID NO: 1394122 - DNA, 15 bp, Homo sapiens
cttgagagttaggaa

SEQ ID NO: 1394123 - DNA, 15 bp, Homo sapiens
tcttgagagttagga

SEQ ID NO: 1394124 - DNA, 15 bp, Homo sapiens
ttcttgagagttagg

SEQ ID NO: 1394125 - DNA, 15 bp, Homo sapiens
tttcttgagagttag

SEQ ID NO: 1394126 - DNA, 15 bp, Homo sapiens
ttttcttgagagtta

SEQ ID NO: 1394127 - DNA, 15 bp, Homo sapiens
attttcttgagagtt

SEQ ID NO: 1394128 - DNA, 15 bp, Homo sapiens
aattttcttgagagt

SEQ ID NO: 1394129 - DNA, 15 bp, Homo sapiens
taattttcttgagag

SEQ ID NO: 1394130 - DNA, 15 bp, Homo sapiens
ataattttcttgaga

SEQ ID NO: 1394131 - DNA, 15 bp, Homo sapiens
aataattttcttgag

SEQ ID NO: 1394132 - DNA, 15 bp, Homo sapiens
taataattttcttga

SEQ ID NO: 1394133 - DNA, 15 bp, Homo sapiens
ataataattttcttg

SEQ ID NO: 1394134 - DNA, 15 bp, Homo sapiens
aataataattttctt

SEQ ID NO: 1394135 - DNA, 15 bp, Homo sapiens
taataataattttct

SEQ ID NO: 1394136 - DNA, 15 bp, Homo sapiens
ataataataattttc

SEQ ID NO: 1394137 - DNA, 15 bp, Homo sapiens
cataataataatttt

SEQ ID NO: 1394138 - DNA, 15 bp, Homo sapiens
acataataataattt

SEQ ID NO: 1394139 - DNA, 15 bp, Homo sapiens
cacataataataatt

SEQ ID NO: 1394140 - DNA, 15 bp, Homo sapiens
ccacataataataat

SEQ ID NO: 1394141 - DNA, 15 bp, Homo sapiens
tccacataataataa

SEQ ID NO: 1394142 - DNA, 15 bp, Homo sapiens
ttccacataataata

SEQ ID NO: 1394143 - DNA, 15 bp, Homo sapiens
tttccacataataat

SEQ ID NO: 1394144 - DNA, 15 bp, Homo sapiens
ttttccacataataa

SEQ ID NO: 1394145 - DNA, 15 bp, Homo sapiens
gttttccacataata

SEQ ID NO: 1394146 - DNA, 15 bp, Homo sapiens
tgttttccacataat

SEQ ID NO: 1394147 - DNA, 15 bp, Homo sapiens
ttgttttccacataa

SEQ ID NO: 1394148 - DNA, 15 bp, Homo sapiens
attgttttccacata

SEQ ID NO: 1394149 - DNA, 15 bp, Homo sapiens
tattgttttccacat

SEQ ID NO: 1394150 - DNA, 15 bp, Homo sapiens
ttattgttttccaca

SEQ ID NO: 1394151 - DNA, 15 bp, Homo sapiens
attattgttttccac

SEQ ID NO: 1394152 - DNA, 15 bp, Homo sapiens
tattattgttttcca

SEQ ID NO: 1394153 - DNA, 15 bp, Homo sapiens
ctattattgttttcc

SEQ ID NO: 1394154 - DNA, 15 bp, Homo sapiens
gctattattgttttc

SEQ ID NO: 1394155 - DNA, 15 bp, Homo sapiens
agctattattgtttt

SEQ ID NO: 1394156 - DNA, 15 bp, Homo sapiens
tagctattattgttt

SEQ ID NO: 1394157 - DNA, 15 bp, Homo sapiens
ttagctattattgtt

SEQ ID NO: 1394158 - DNA, 15 bp, Homo sapiens
gttagctattattgt

SEQ ID NO: 1394159 - DNA, 15 bp, Homo sapiens
agttagctattattg

SEQ ID NO: 1394160 - DNA, 15 bp, Homo sapiens
tagttagctattatt

SEQ ID NO: 1394161 - DNA, 15 bp, Homo sapiens
gtagttagctattat

SEQ ID NO: 1394162 - DNA, 15 bp, Homo sapiens
agtagttagctatta

SEQ ID NO: 1394163 - DNA, 15 bp, Homo sapiens
aagtagttagctatt

SEQ ID NO: 1394164 - DNA, 15 bp, Homo sapiens
aaagtagttagctat

SEQ ID NO: 1394165 - DNA, 15 bp, Homo sapiens
aaaagtagttagcta

SEQ ID NO: 1394166 - DNA, 15 bp, Homo sapiens
taaaagtagttagct

SEQ ID NO: 1394167 - DNA, 15 bp, Homo sapiens
ctaaaagtagttagc

SEQ ID NO: 1394168 - DNA, 15 bp, Homo sapiens
actaaaagtagttag

SEQ ID NO: 1394169 - DNA, 15 bp, Homo sapiens
cactaaaagtagtta

SEQ ID NO: 1394170 - DNA, 15 bp, Homo sapiens
gcactaaaagtagtt

SEQ ID NO: 1394171 - DNA, 15 bp, Homo sapiens
agcactaaaagtagt

SEQ ID NO: 1394172 - DNA, 15 bp, Homo sapiens
cagcactaaaagtag

SEQ ID NO: 1394173 - DNA, 15 bp, Homo sapiens
acagcactaaaagta

SEQ ID NO: 1394174 - DNA, 15 bp, Homo sapiens
cacagcactaaaagt

SEQ ID NO: 1394175 - DNA, 15 bp, Homo sapiens
gcacagcactaaaag

SEQ ID NO: 1394176 - DNA, 15 bp, Homo sapiens
agcacagcactaaaa

SEQ ID NO: 1394177 - DNA, 15 bp, Homo sapiens
aagcacagcactaaa

SEQ ID NO: 1394178 - DNA, 15 bp, Homo sapiens
taagcacagcactaa

SEQ ID NO: 1394179 - DNA, 15 bp, Homo sapiens
ctaagcacagcacta

SEQ ID NO: 1394180 - DNA, 15 bp, Homo sapiens
tctaagcacagcact

SEQ ID NO: 1394181 - DNA, 15 bp, Homo sapiens
ctctaagcacagcac

SEQ ID NO: 1394182 - DNA, 15 bp, Homo sapiens
tctctaagcacagca

SEQ ID NO: 1394183 - DNA, 15 bp, Homo sapiens
ctctctaagcacagc

SEQ ID NO: 1394184 - DNA, 15 bp, Homo sapiens
cctctctaagcacag

SEQ ID NO: 1394185 - DNA, 15 bp, Homo sapiens
tcctctctaagcaca

SEQ ID NO: 1394186 - DNA, 15 bp, Homo sapiens
ttcctctctaagcac

SEQ ID NO: 1394187 - DNA, 15 bp, Homo sapiens
tttcctctctaagca

SEQ ID NO: 1394188 - DNA, 15 bp, Homo sapiens
ctttcctctctaagc

SEQ ID NO: 1394189 - DNA, 15 bp, Homo sapiens
tctttcctctctaag

SEQ ID NO: 1394190 - DNA, 15 bp, Homo sapiens
ttctttcctctctaa

SEQ ID NO: 1394191 - DNA, 15 bp, Homo sapiens
gttctttcctctcta

SEQ ID NO: 1394192 - DNA, 15 bp, Homo sapiens
agttctttcctctct

SEQ ID NO: 1394193 - DNA, 15 bp, Homo sapiens
aagttctttcctctc

SEQ ID NO: 1394194 - DNA, 15 bp, Homo sapiens
gaagttctttcctct

SEQ ID NO: 1394195 - DNA, 15 bp, Homo sapiens
agaagttctttcctc

SEQ ID NO: 1394196 - DNA, 15 bp, Homo sapiens
gagaagttctttcct

SEQ ID NO: 1394197 - DNA, 15 bp, Homo sapiens
ggagaagttctttcc

SEQ ID NO: 1394198 - DNA, 15 bp, Homo sapiens
gggagaagttctttc

SEQ ID NO: 1394199 - DNA, 15 bp, Homo sapiens
tgggagaagttcttt

SEQ ID NO: 1394200 - DNA, 15 bp, Homo sapiens
ttgggagaagttctt

SEQ ID NO: 1394201 - DNA, 15 bp, Homo sapiens
tttgggagaagttct

SEQ ID NO: 1394202 - DNA, 15 bp, Homo sapiens
ctttgggagaagttc

SEQ ID NO: 1394203 - DNA, 15 bp, Homo sapiens
gctttgggagaagtt

SEQ ID NO: 1394204 - DNA, 15 bp, Homo sapiens
ggctttgggagaagt

SEQ ID NO: 1394205 - DNA, 15 bp, Homo sapiens
tggctttgggagaag

SEQ ID NO: 1394206 - DNA, 15 bp, Homo sapiens
ttggctttgggagaa

SEQ ID NO: 1394207 - DNA, 15 bp, Homo sapiens
cttggctttgggaga

SEQ ID NO: 1394208 - DNA, 15 bp, Homo sapiens
acttggctttgggag

SEQ ID NO: 1394209 - DNA, 15 bp, Homo sapiens
gacttggctttggga

SEQ ID NO: 1394210 - DNA, 15 bp, Homo sapiens
tgacttggctttggg

SEQ ID NO: 1394211 - DNA, 15 bp, Homo sapiens
atgacttggctttgg

SEQ ID NO: 1394212 - DNA, 15 bp, Homo sapiens
tatgacttggctttg

SEQ ID NO: 1394213 - DNA, 15 bp, Homo sapiens
ttatgacttggcttt

SEQ ID NO: 1394214 - DNA, 15 bp, Homo sapiens
attatgacttggctt

SEQ ID NO: 1394215 - DNA, 15 bp, Homo sapiens
tattatgacttggct

SEQ ID NO: 1394216 - DNA, 15 bp, Homo sapiens
ttattatgacttggc

SEQ ID NO: 1394217 - DNA, 15 bp, Homo sapiens
attattatgacttgg

SEQ ID NO: 1394218 - DNA, 15 bp, Homo sapiens
tattattatgacttg

SEQ ID NO: 1394219 - DNA, 15 bp, Homo sapiens
ttattattatgactt

SEQ ID NO: 1394220 - DNA, 15 bp, Homo sapiens
attattattatgact

SEQ ID NO: 1394221 - DNA, 15 bp, Homo sapiens
tattattattatgac

SEQ ID NO: 1394222 - DNA, 15 bp, Homo sapiens
ttattattattatga

SEQ ID NO: 1394223 - DNA, 15 bp, Homo sapiens
attattattattatg

SEQ ID NO: 1394224 - DNA, 15 bp, Homo sapiens
ggttattattattat

SEQ ID NO: 1394225 - DNA, 15 bp, Homo sapiens
gggttattattatta

SEQ ID NO: 1394226 - DNA, 15 bp, Homo sapiens
tgggttattattatt

SEQ ID NO: 1394227 - DNA, 15 bp, Homo sapiens
gtgggttattattat

SEQ ID NO: 1394228 - DNA, 15 bp, Homo sapiens
tgtgggttattatta

SEQ ID NO: 1394229 - DNA, 15 bp, Homo sapiens
atgttgtgggttatt

SEQ ID NO: 1394230 - DNA, 15 bp, Homo sapiens
aatgttgtgggttat

SEQ ID NO: 1394231 - DNA, 15 bp, Homo sapiens
gaatgttgtgggtta

SEQ ID NO: 1394232 - DNA, 15 bp, Homo sapiens
agaatgttgtgggtt

SEQ ID NO: 1394233 - DNA, 15 bp, Homo sapiens
aagaatgttgtgggt

SEQ ID NO: 1394234 - DNA, 15 bp, Homo sapiens
taagaatgttgtggg

SEQ ID NO: 1394235 - DNA, 15 bp, Homo sapiens
ttaagaatgttgtgg

SEQ ID NO: 1394236 - DNA, 15 bp, Homo sapiens
tttaagaatgttgtg

SEQ ID NO: 1394237 - DNA, 15 bp, Homo sapiens
ttttaagaatgttgt

SEQ ID NO: 1394238 - DNA, 15 bp, Homo sapiens
attttaagaatgttg

SEQ ID NO: 1394239 - DNA, 15 bp, Homo sapiens
tattttaagaatgtt

SEQ ID NO: 1394240 - DNA, 15 bp, Homo sapiens
atattttaagaatgt

SEQ ID NO: 1394241 - DNA, 15 bp, Homo sapiens
gatattttaagaatg

SEQ ID NO: 1394242 - DNA, 15 bp, Homo sapiens
agatattttaagaat

SEQ ID NO: 1394243 - DNA, 15 bp, Homo sapiens
aagatattttaagaa

SEQ ID NO: 1394244 - DNA, 15 bp, Homo sapiens
caagatattttaaga

SEQ ID NO: 1394245 - DNA, 15 bp, Homo sapiens
tcaagatattttaag

SEQ ID NO: 1394246 - DNA, 15 bp, Homo sapiens
gtcaagatattttaa

SEQ ID NO: 1394247 - DNA, 15 bp, Homo sapiens
agtcaagatatttta

SEQ ID NO: 1394248 - DNA, 15 bp, Homo sapiens
gagtcaagatatttt

SEQ ID NO: 1394249 - DNA, 15 bp, Homo sapiens
agagtcaagatattt

SEQ ID NO: 1394250 - DNA, 15 bp, Homo sapiens
tagagtcaagatatt

SEQ ID NO: 1394251 - DNA, 15 bp, Homo sapiens
ctagagtcaagatat

SEQ ID NO: 1394252 - DNA, 15 bp, Homo sapiens
tctagagtcaagata

SEQ ID NO: 1394253 - DNA, 15 bp, Homo sapiens
ctctagagtcaagat

SEQ ID NO: 1394254 - DNA, 15 bp, Homo sapiens
tttacgacacttaca

SEQ ID NO: 1394255 - DNA, 15 bp, Homo sapiens
ctttacgacacttac

SEQ ID NO: 1394256 - DNA, 15 bp, Homo sapiens
actttacgacactta

SEQ ID NO: 1394257 - DNA, 15 bp, Homo sapiens
aactttacgacactt

SEQ ID NO: 1394258 - DNA, 15 bp, Homo sapiens
caactttacgacact

SEQ ID NO: 1394259 - DNA, 15 bp, Homo sapiens
ccaactttacgacac

SEQ ID NO: 1394260 - DNA, 15 bp, Homo sapiens
gccaactttacgaca

SEQ ID NO: 1394261 - DNA, 15 bp, Homo sapiens
tgccaactttacgac

SEQ ID NO: 1394262 - DNA, 15 bp, Homo sapiens
ttgccaactttacga

SEQ ID NO: 1394263 - DNA, 15 bp, Homo sapiens
tttgccaactttacg

SEQ ID NO: 1394264 - DNA, 15 bp, Homo sapiens
ttttgccaactttac

SEQ ID NO: 1394265 - DNA, 15 bp, Homo sapiens
attttgccaacttta

SEQ ID NO: 1394266 - DNA, 15 bp, Homo sapiens
tattttgccaacttt

SEQ ID NO: 1394267 - DNA, 15 bp, Homo sapiens
atattttgccaactt

SEQ ID NO: 1394268 - DNA, 15 bp, Homo sapiens
aatattttgccaact

SEQ ID NO: 1394269 - DNA, 15 bp, Homo sapiens
aaatattttgccaac

SEQ ID NO: 1394270 - DNA, 15 bp, Homo sapiens
taaatattttgccaa

SEQ ID NO: 1394271 - DNA, 15 bp, Homo sapiens
ataaatattttgcca

SEQ ID NO: 1394272 - DNA, 15 bp, Homo sapiens
cataaatattttgcc

SEQ ID NO: 1394273 - DNA, 15 bp, Homo sapiens
acataaatattttgc

SEQ ID NO: 1394274 - DNA, 15 bp, Homo sapiens
tacataaatattttg

SEQ ID NO: 1394275 - DNA, 15 bp, Homo sapiens
ctacataaatatttt

SEQ ID NO: 1394276 - DNA, 15 bp, Homo sapiens
actacataaatattt

SEQ ID NO: 1394277 - DNA, 15 bp, Homo sapiens
cactacataaatatt

SEQ ID NO: 1394278 - DNA, 15 bp, Homo sapiens
tcactacataaatat

SEQ ID NO: 1394279 - DNA, 15 bp, Homo sapiens
ctcactacataaata

SEQ ID NO: 1394280 - DNA, 15 bp, Homo sapiens
gctcactacataaat

SEQ ID NO: 1394281 - DNA, 15 bp, Homo sapiens
agctcactacataaa

SEQ ID NO: 1394282 - DNA, 15 bp, Homo sapiens
cagctcactacataa

SEQ ID NO: 1394283 - DNA, 15 bp, Homo sapiens
tcagctcactacata

SEQ ID NO: 1394284 - DNA, 15 bp, Homo sapiens
atcagctcactacat

SEQ ID NO: 1394285 - DNA, 15 bp, Homo sapiens
gatcagctcactaca

SEQ ID NO: 1394286 - DNA, 15 bp, Homo sapiens
ggatcagctcactac

SEQ ID NO: 1394287 - DNA, 15 bp, Homo sapiens
aggatcagctcacta

SEQ ID NO: 1394288 - DNA, 15 bp, Homo sapiens
aaggatcagctcact

SEQ ID NO: 1394289 - DNA, 15 bp, Homo sapiens
gaaggatcagctcac

SEQ ID NO: 1394290 - DNA, 15 bp, Homo sapiens
tgaaggatcagctca

SEQ ID NO: 1394291 - DNA, 15 bp, Homo sapiens
ctgaaggatcagctc

SEQ ID NO: 1394292 - DNA, 15 bp, Homo sapiens
actgaaggatcagct

SEQ ID NO: 1394293 - DNA, 15 bp, Homo sapiens
tactgaaggatcagc

SEQ ID NO: 1394294 - DNA, 15 bp, Homo sapiens
ttactgaaggatcag

SEQ ID NO: 1394295 - DNA, 15 bp, Homo sapiens
tttactgaaggatca

SEQ ID NO: 1394296 - DNA, 15 bp, Homo sapiens
gtttactgaaggatc

SEQ ID NO: 1394297 - DNA, 15 bp, Homo sapiens
agtttactgaaggat

SEQ ID NO: 1394298 - DNA, 15 bp, Homo sapiens
cagtttactgaagga

SEQ ID NO: 1394299 - DNA, 15 bp, Homo sapiens
ccagtttactgaagg

SEQ ID NO: 1394300 - DNA, 15 bp, Homo sapiens
gccagtttactgaag

SEQ ID NO: 1394301 - DNA, 15 bp, Homo sapiens
agccagtttactgaa

SEQ ID NO: 1394302 - DNA, 15 bp, Homo sapiens
aagccagtttactga

SEQ ID NO: 1394303 - DNA, 15 bp, Homo sapiens
aaagccagtttactg

SEQ ID NO: 1394304 - DNA, 15 bp, Homo sapiens
aaaagccagtttact

SEQ ID NO: 1394305 - DNA, 15 bp, Homo sapiens
aaaaagccagtttac

SEQ ID NO: 1394306 - DNA, 15 bp, Homo sapiens
caaaaagccagttta

SEQ ID NO: 1394307 - DNA, 15 bp, Homo sapiens
ccaaaaagccagttt

SEQ ID NO: 1394308 - DNA, 15 bp, Homo sapiens
cccaaaaagccagtt

SEQ ID NO: 1394309 - DNA, 15 bp, Homo sapiens
tcccaaaaagccagt

SEQ ID NO: 1394310 - DNA, 15 bp, Homo sapiens
ttcccaaaaagccag

SEQ ID NO: 1394311 - DNA, 15 bp, Homo sapiens
attcccaaaaagcca

SEQ ID NO: 1394312 - DNA, 15 bp, Homo sapiens
aattcccaaaaagcc

SEQ ID NO: 1394313 - DNA, 15 bp, Homo sapiens
taattcccaaaaagc

SEQ ID NO: 1394314 - DNA, 15 bp, Homo sapiens
ctaattcccaaaaag

SEQ ID NO: 1394315 - DNA, 15 bp, Homo sapiens
gctaattcccaaaaa

SEQ ID NO: 1394316 - DNA, 15 bp, Homo sapiens
ggctaattcccaaaa

SEQ ID NO: 1394317 - DNA, 15 bp, Homo sapiens
tggctaattcccaaa

SEQ ID NO: 1394318 - DNA, 15 bp, Homo sapiens
atggctaattcccaa

SEQ ID NO: 1394319 - DNA, 15 bp, Homo sapiens
aatggctaattccca

SEQ ID NO: 1394320 - DNA, 15 bp, Homo sapiens
caatggctaattccc

SEQ ID NO: 1394321 - DNA, 15 bp, Homo sapiens
tcaatggctaattcc

SEQ ID NO: 1394322 - DNA, 15 bp, Homo sapiens
ctcaatggctaattc

SEQ ID NO: 1394323 - DNA, 15 bp, Homo sapiens
tctcaatggctaatt

SEQ ID NO: 1394324 - DNA, 15 bp, Homo sapiens
ttctcaatggctaat

SEQ ID NO: 1394325 - DNA, 15 bp, Homo sapiens
tttctcaatggctaa

SEQ ID NO: 1394326 - DNA, 15 bp, Homo sapiens
gtttctcaatggcta

SEQ ID NO: 1394327 - DNA, 15 bp, Homo sapiens
agtttctcaatggct

SEQ ID NO: 1394328 - DNA, 15 bp, Homo sapiens
cagtttctcaatggc

SEQ ID NO: 1394329 - DNA, 15 bp, Homo sapiens
tcagtttctcaatgg

SEQ ID NO: 1394330 - DNA, 15 bp, Homo sapiens
atcagtttctcaatg

SEQ ID NO: 1394331 - DNA, 15 bp, Homo sapiens
gatcagtttctcaat

SEQ ID NO: 1394332 - DNA, 15 bp, Homo sapiens
ggatcagtttctcaa

SEQ ID NO: 1394333 - DNA, 15 bp, Homo sapiens
aggatcagtttctca

SEQ ID NO: 1394334 - DNA, 15 bp, Homo sapiens
aaggatcagtttctc

SEQ ID NO: 1394335 - DNA, 15 bp, Homo sapiens
aaaggatcagtttct

SEQ ID NO: 1394336 - DNA, 15 bp, Homo sapiens
taaaggatcagtttc

SEQ ID NO: 1394337 - DNA, 15 bp, Homo sapiens
ctaaaggatcagttt

SEQ ID NO: 1394338 - DNA, 15 bp, Homo sapiens
gctaaaggatcagtt

SEQ ID NO: 1394339 - DNA, 15 bp, Homo sapiens
tgctaaaggatcagt

SEQ ID NO: 1394340 - DNA, 15 bp, Homo sapiens
ttgctaaaggatcag

SEQ ID NO: 1394341 - DNA, 15 bp, Homo sapiens
cttgctaaaggatca

SEQ ID NO: 1394342 - DNA, 15 bp, Homo sapiens
acttgctaaaggatc

SEQ ID NO: 1394343 - DNA, 15 bp, Homo sapiens
aacttgctaaaggat

SEQ ID NO: 1394344 - DNA, 15 bp, Homo sapiens
caacttgctaaagga

SEQ ID NO: 1394345 - DNA, 15 bp, Homo sapiens
ccaacttgctaaagg

SEQ ID NO: 1394346 - DNA, 15 bp, Homo sapiens
gccaacttgctaaag

SEQ ID NO: 1394347 - DNA, 15 bp, Homo sapiens
ggccaacttgctaaa

SEQ ID NO: 1394348 - DNA, 15 bp, Homo sapiens
gggccaacttgctaa

SEQ ID NO: 1394349 - DNA, 15 bp, Homo sapiens
agggccaacttgcta

SEQ ID NO: 1394350 - DNA, 15 bp, Homo sapiens
aagggccaacttgct

SEQ ID NO: 1394351 - DNA, 15 bp, Homo sapiens
caagggccaacttgc

SEQ ID NO: 1394352 - DNA, 15 bp, Homo sapiens
ccaagggccaacttg

SEQ ID NO: 1394353 - DNA, 15 bp, Homo sapiens
gccaagggccaactt

SEQ ID NO: 1394354 - DNA, 15 bp, Homo sapiens
cgccaagggccaact

SEQ ID NO: 1394355 - DNA, 15 bp, Homo sapiens
acgccaagggccaac

SEQ ID NO: 1394356 - DNA, 15 bp, Homo sapiens
tacgccaagggccaa

SEQ ID NO: 1394357 - DNA, 15 bp, Homo sapiens
atacgccaagggcca

SEQ ID NO: 1394358 - DNA, 15 bp, Homo sapiens
gatacgccaagggcc

SEQ ID NO: 1394359 - DNA, 15 bp, Homo sapiens
tgatacgccaagggc

SEQ ID NO: 1394360 - DNA, 15 bp, Homo sapiens
ctgatacgccaaggg

SEQ ID NO: 1394361 - DNA, 15 bp, Homo sapiens
actgatacgccaagg

SEQ ID NO: 1394362 - DNA, 15 bp, Homo sapiens
aactgatacgccaag

SEQ ID NO: 1394363 - DNA, 15 bp, Homo sapiens
aaactgatacgccaa

SEQ ID NO: 1394364 - DNA, 15 bp, Homo sapiens
caaactgatacgcca

SEQ ID NO: 1394365 - DNA, 15 bp, Homo sapiens
gcaaactgatacgcc

SEQ ID NO: 1394366 - DNA, 15 bp, Homo sapiens
agcaaactgatacgc

SEQ ID NO: 1394367 - DNA, 15 bp, Homo sapiens
aagcaaactgatacg

SEQ ID NO: 1394368 - DNA, 15 bp, Homo sapiens
gaagcaaactgatac

SEQ ID NO: 1394369 - DNA, 15 bp, Homo sapiens
agaagcaaactgata

SEQ ID NO: 1394370 - DNA, 15 bp, Homo sapiens
gagaagcaaactgat

SEQ ID NO: 1394371 - DNA, 15 bp, Homo sapiens
ggagaagcaaactga

SEQ ID NO: 1394372 - DNA, 15 bp, Homo sapiens
aggagaagcaaactg

SEQ ID NO: 1394373 - DNA, 15 bp, Homo sapiens
caggagaagcaaact

SEQ ID NO: 1394374 - DNA, 15 bp, Homo sapiens
acaggagaagcaaac

SEQ ID NO: 1394375 - DNA, 15 bp, Homo sapiens
tacaggagaagcaaa

SEQ ID NO: 1394376 - DNA, 15 bp, Homo sapiens
gtacaggagaagcaa

SEQ ID NO: 1394377 - DNA, 15 bp, Homo sapiens
tgtacaggagaagca

SEQ ID NO: 1394378 - DNA, 15 bp, Homo sapiens
gtgtacaggagaagc

SEQ ID NO: 1394379 - DNA, 15 bp, Homo sapiens
tgtgtacaggagaag

SEQ ID NO: 1394380 - DNA, 15 bp, Homo sapiens
gtgtgtacaggagaa

SEQ ID NO: 1394381 - DNA, 15 bp, Homo sapiens
ggtgtgtacaggaga

SEQ ID NO: 1394382 - DNA, 15 bp, Homo sapiens
aggtgtgtacaggag

SEQ ID NO: 1394383 - DNA, 15 bp, Homo sapiens
taggtgtgtacagga

SEQ ID NO: 1394384 - DNA, 15 bp, Homo sapiens
ataggtgtgtacagg

SEQ ID NO: 1394385 - DNA, 15 bp, Homo sapiens
gataggtgtgtacag

SEQ ID NO: 1394386 - DNA, 15 bp, Homo sapiens
agataggtgtgtaca

SEQ ID NO: 1394387 - DNA, 15 bp, Homo sapiens
tagataggtgtgtac

SEQ ID NO: 1394388 - DNA, 15 bp, Homo sapiens
ttagataggtgtgta

SEQ ID NO: 1394389 - DNA, 15 bp, Homo sapiens
attagataggtgtgt

SEQ ID NO: 1394390 - DNA, 15 bp, Homo sapiens
gattagataggtgtg

SEQ ID NO: 1394391 - DNA, 15 bp, Homo sapiens
tgattagataggtgt

SEQ ID NO: 1394392 - DNA, 15 bp, Homo sapiens
ctgattagataggtg

SEQ ID NO: 1394393 - DNA, 15 bp, Homo sapiens
actgattagataggt

SEQ ID NO: 1394394 - DNA, 15 bp, Homo sapiens
gactgattagatagg

SEQ ID NO: 1394395 - DNA, 15 bp, Homo sapiens
agactgattagatag

SEQ ID NO: 1394396 - DNA, 15 bp, Homo sapiens
gagactgattagata

SEQ ID NO: 1394397 - DNA, 15 bp, Homo sapiens
tgagactgattagat

SEQ ID NO: 1394398 - DNA, 15 bp, Homo sapiens
atgagactgattaga

SEQ ID NO: 1394399 - DNA, 15 bp, Homo sapiens
aatgagactgattag

SEQ ID NO: 1394400 - DNA, 15 bp, Homo sapiens
caatgagactgatta

SEQ ID NO: 1394401 - DNA, 15 bp, Homo sapiens
gcaatgagactgatt

SEQ ID NO: 1394402 - DNA, 15 bp, Homo sapiens
ggcaatgagactgat

SEQ ID NO: 1394403 - DNA, 15 bp, Homo sapiens
tggcaatgagactga

SEQ ID NO: 1394404 - DNA, 15 bp, Homo sapiens
atggcaatgagactg

SEQ ID NO: 1394405 - DNA, 15 bp, Homo sapiens
tatggcaatgagact

SEQ ID NO: 1394406 - DNA, 15 bp, Homo sapiens
gtatggcaatgagac

SEQ ID NO: 1394407 - DNA, 15 bp, Homo sapiens
tgtatggcaatgaga

SEQ ID NO: 1394408 - DNA, 15 bp, Homo sapiens
gtgtatggcaatgag

SEQ ID NO: 1394409 - DNA, 15 bp, Homo sapiens
agtgtatggcaatga

SEQ ID NO: 1394410 - DNA, 15 bp, Homo sapiens
cagtgtatggcaatg

SEQ ID NO: 1394411 - DNA, 15 bp, Homo sapiens
gcagtgtatggcaat

SEQ ID NO: 1394412 - DNA, 15 bp, Homo sapiens
tgcagtgtatggcaa

SEQ ID NO: 1394413 - DNA, 15 bp, Homo sapiens
ttgcagtgtatggca

SEQ ID NO: 1394414 - DNA, 15 bp, Homo sapiens
attgcagtgtatggc

SEQ ID NO: 1394415 - DNA, 15 bp, Homo sapiens
cattgcagtgtatgg

SEQ ID NO: 1394416 - DNA, 15 bp, Homo sapiens
tcattgcagtgtatg

SEQ ID NO: 1394417 - DNA, 15 bp, Homo sapiens
gtcattgcagtgtat

SEQ ID NO: 1394418 - DNA, 15 bp, Homo sapiens
agtcattgcagtgta

SEQ ID NO: 1394419 - DNA, 15 bp, Homo sapiens
cagtcattgcagtgt

SEQ ID NO: 1394420 - DNA, 15 bp, Homo sapiens
tcagtcattgcagtg

SEQ ID NO: 1394421 - DNA, 15 bp, Homo sapiens
gtcagtcattgcagt

SEQ ID NO: 1394422 - DNA, 15 bp, Homo sapiens
tgtcagtcattgcag

SEQ ID NO: 1394423 - DNA, 15 bp, Homo sapiens
atgtcagtcattgca

SEQ ID NO: 1394424 - DNA, 15 bp, Homo sapiens
gatgtcagtcattgc

SEQ ID NO: 1394425 - DNA, 15 bp, Homo sapiens
agatgtcagtcattg

SEQ ID NO: 1394426 - DNA, 15 bp, Homo sapiens
gagatgtcagtcatt

SEQ ID NO: 1394427 - DNA, 15 bp, Homo sapiens
tgagatgtcagtcat

SEQ ID NO: 1394428 - DNA, 15 bp, Homo sapiens
gtgagatgtcagtca

SEQ ID NO: 1394429 - DNA, 15 bp, Homo sapiens
agtgagatgtcagtc

SEQ ID NO: 1394430 - DNA, 15 bp, Homo sapiens
gagtgagatgtcagt

SEQ ID NO: 1394431 - DNA, 15 bp, Homo sapiens
tgagtgagatgtcag

SEQ ID NO: 1394432 - DNA, 15 bp, Homo sapiens
ctgagtgagatgtca

SEQ ID NO: 1394433 - DNA, 15 bp, Homo sapiens
gctgagtgagatgtc

SEQ ID NO: 1394434 - DNA, 15 bp, Homo sapiens
agctgagtgagatgt

SEQ ID NO: 1394435 - DNA, 15 bp, Homo sapiens
gagctgagtgagatg

SEQ ID NO: 1394436 - DNA, 15 bp, Homo sapiens
ggagctgagtgagat

SEQ ID NO: 1394437 - DNA, 15 bp, Homo sapiens
gggagctgagtgaga

SEQ ID NO: 1394438 - DNA, 15 bp, Homo sapiens
agggagctgagtgag

SEQ ID NO: 1394439 - DNA, 15 bp, Homo sapiens
aagggagctgagtga

SEQ ID NO: 1394440 - DNA, 15 bp, Homo sapiens
caagggagctgagtg

SEQ ID NO: 1394441 - DNA, 15 bp, Homo sapiens
ccaagggagctgagt

SEQ ID NO: 1394442 - DNA, 15 bp, Homo sapiens
cccaagggagctgag

SEQ ID NO: 1394443 - DNA, 15 bp, Homo sapiens
tcccaagggagctga

SEQ ID NO: 1394444 - DNA, 15 bp, Homo sapiens
gtcccaagggagctg

SEQ ID NO: 1394445 - DNA, 15 bp, Homo sapiens
agtcccaagggagct

SEQ ID NO: 1394446 - DNA, 15 bp, Homo sapiens
gagtcccaagggagc

SEQ ID NO: 1394447 - DNA, 15 bp, Homo sapiens
agagtcccaagggag

SEQ ID NO: 1394448 - DNA, 15 bp, Homo sapiens
tagagtcccaaggga

SEQ ID NO: 1394449 - DNA, 15 bp, Homo sapiens
ttagagtcccaaggg

SEQ ID NO: 1394450 - DNA, 15 bp, Homo sapiens
cttagagtcccaagg

SEQ ID NO: 1394451 - DNA, 15 bp, Homo sapiens
acttagagtcccaag

SEQ ID NO: 1394452 - DNA, 15 bp, Homo sapiens
gacttagagtcccaa

SEQ ID NO: 1394453 - DNA, 15 bp, Homo sapiens
agacttagagtccca

SEQ ID NO: 1394454 - DNA, 15 bp, Homo sapiens
aagacttagagtccc

SEQ ID NO: 1394455 - DNA, 15 bp, Homo sapiens
taagacttagagtcc

SEQ ID NO: 1394456 - DNA, 15 bp, Homo sapiens
ataagacttagagtc

SEQ ID NO: 1394457 - DNA, 15 bp, Homo sapiens
aataagacttagagt

SEQ ID NO: 1394458 - DNA, 15 bp, Homo sapiens
aaataagacttagag

SEQ ID NO: 1394459 - DNA, 15 bp, Homo sapiens
taaataagacttaga

SEQ ID NO: 1394460 - DNA, 15 bp, Homo sapiens
ataaataagacttag

SEQ ID NO: 1394461 - DNA, 15 bp, Homo sapiens
aataaataagactta

SEQ ID NO: 1394462 - DNA, 15 bp, Homo sapiens
aaataaataagactt

SEQ ID NO: 1394463 - DNA, 15 bp, Homo sapiens
caaataaataagact

SEQ ID NO: 1394464 - DNA, 15 bp, Homo sapiens
ccaaataaataagac

SEQ ID NO: 1394465 - DNA, 15 bp, Homo sapiens
accaaataaataaga

SEQ ID NO: 1394466 - DNA, 15 bp, Homo sapiens
taccaaataaataag

SEQ ID NO: 1394467 - DNA, 15 bp, Homo sapiens
ataccaaataaataa

SEQ ID NO: 1394468 - DNA, 15 bp, Homo sapiens
gataccaaataaata

SEQ ID NO: 1394469 - DNA, 15 bp, Homo sapiens
cgataccaaataaat

SEQ ID NO: 1394470 - DNA, 15 bp, Homo sapiens
gcgataccaaataaa

SEQ ID NO: 1394471 - DNA, 15 bp, Homo sapiens
ggcgataccaaataa

SEQ ID NO: 1394472 - DNA, 15 bp, Homo sapiens
tggcgataccaaata

SEQ ID NO: 1394473 - DNA, 15 bp, Homo sapiens
ctggcgataccaaat

SEQ ID NO: 1394474 - DNA, 15 bp, Homo sapiens
tctggcgataccaaa

SEQ ID NO: 1394475 - DNA, 15 bp, Homo sapiens
ttctggcgataccaa

SEQ ID NO: 1394476 - DNA, 15 bp, Homo sapiens
gttctggcgatacca

SEQ ID NO: 1394477 - DNA, 15 bp, Homo sapiens
agttctggcgatacc

SEQ ID NO: 1394478 - DNA, 15 bp, Homo sapiens
aagttctggcgatac

SEQ ID NO: 1394479 - DNA, 15 bp, Homo sapiens
taagttctggcgata

SEQ ID NO: 1394480 - DNA, 15 bp, Homo sapiens
ctaagttctggcgat

SEQ ID NO: 1394481 - DNA, 15 bp, Homo sapiens
gctaagttctggcga

SEQ ID NO: 1394482 - DNA, 15 bp, Homo sapiens
tgctaagttctggcg

SEQ ID NO: 1394483 - DNA, 15 bp, Homo sapiens
gtgctaagttctggc

SEQ ID NO: 1394484 - DNA, 15 bp, Homo sapiens
tgtgctaagttctgg

SEQ ID NO: 1394485 - DNA, 15 bp, Homo sapiens
atgtgctaagttctg

SEQ ID NO: 1394486 - DNA, 15 bp, Homo sapiens
aatgtgctaagttct

SEQ ID NO: 1394487 - DNA, 15 bp, Homo sapiens
caatgtgctaagttc

SEQ ID NO: 1394488 - DNA, 15 bp, Homo sapiens
acaatgtgctaagtt

SEQ ID NO: 1394489 - DNA, 15 bp, Homo sapiens
cacaatgtgctaagt

SEQ ID NO: 1394490 - DNA, 15 bp, Homo sapiens
acacaatgtgctaag

SEQ ID NO: 1394491 - DNA, 15 bp, Homo sapiens
aacacaatgtgctaa

SEQ ID NO: 1394492 - DNA, 15 bp, Homo sapiens
aaacacaatgtgcta

SEQ ID NO: 1394493 - DNA, 15 bp, Homo sapiens
gaaacacaatgtgct

SEQ ID NO: 1394494 - DNA, 15 bp, Homo sapiens
tgaaacacaatgtgc

SEQ ID NO: 1394495 - DNA, 15 bp, Homo sapiens
atgaaacacaatgtg

SEQ ID NO: 1394496 - DNA, 15 bp, Homo sapiens
gatgaaacacaatgt

SEQ ID NO: 1394497 - DNA, 15 bp, Homo sapiens
agatgaaacacaatg

SEQ ID NO: 1394498 - DNA, 15 bp, Homo sapiens
cagatgaaacacaat

SEQ ID NO: 1394499 - DNA, 15 bp, Homo sapiens
tcagatgaaacacaa

SEQ ID NO: 1394500 - DNA, 15 bp, Homo sapiens
atcagatgaaacaca

SEQ ID NO: 1394501 - DNA, 15 bp, Homo sapiens
catcagatgaaacac

SEQ ID NO: 1394502 - DNA, 15 bp, Homo sapiens
tcatcagatgaaaca

SEQ ID NO: 1394503 - DNA, 15 bp, Homo sapiens
ttcatcagatgaaac

SEQ ID NO: 1394504 - DNA, 15 bp, Homo sapiens
cttcatcagatgaaa

SEQ ID NO: 1394505 - DNA, 15 bp, Homo sapiens
tcttcatcagatgaa

SEQ ID NO: 1394506 - DNA, 15 bp, Homo sapiens
gtcttcatcagatga

SEQ ID NO: 1394507 - DNA, 15 bp, Homo sapiens
agtcttcatcagatg

SEQ ID NO: 1394508 - DNA, 15 bp, Homo sapiens
aagtcttcatcagat

SEQ ID NO: 1394509 - DNA, 15 bp, Homo sapiens
taagtcttcatcaga

SEQ ID NO: 1394510 - DNA, 15 bp, Homo sapiens
ctaagtcttcatcag

SEQ ID NO: 1394511 - DNA, 15 bp, Homo sapiens
tctaagtcttcatca

SEQ ID NO: 1394512 - DNA, 15 bp, Homo sapiens
ttctaagtcttcatc

SEQ ID NO: 1394513 - DNA, 15 bp, Homo sapiens
tttctaagtcttcat

SEQ ID NO: 1394514 - DNA, 15 bp, Homo sapiens
atttctaagtcttca

SEQ ID NO: 1394515 - DNA, 15 bp, Homo sapiens
catttctaagtcttc

SEQ ID NO: 1394516 - DNA, 15 bp, Homo sapiens
acatttctaagtctt

SEQ ID NO: 1394517 - DNA, 15 bp, Homo sapiens
aacatttctaagtct

SEQ ID NO: 1394518 - DNA, 15 bp, Homo sapiens
caacatttctaagtc

SEQ ID NO: 1394519 - DNA, 15 bp, Homo sapiens
tcaacatttctaagt

SEQ ID NO: 1394520 - DNA, 15 bp, Homo sapiens
gtcaacatttctaag

SEQ ID NO: 1394521 - DNA, 15 bp, Homo sapiens
agtcaacatttctaa

SEQ ID NO: 1394522 - DNA, 15 bp, Homo sapiens
tagtcaacatttcta

SEQ ID NO: 1394523 - DNA, 15 bp, Homo sapiens
ttagtcaacatttct

SEQ ID NO: 1394524 - DNA, 15 bp, Homo sapiens
attagtcaacatttc

SEQ ID NO: 1394525 - DNA, 15 bp, Homo sapiens
cattagtcaacattt

SEQ ID NO: 1394526 - DNA, 15 bp, Homo sapiens
tcattagtcaacatt

SEQ ID NO: 1394527 - DNA, 15 bp, Homo sapiens
ttcattagtcaacat

SEQ ID NO: 1394528 - DNA, 15 bp, Homo sapiens
attcattagtcaaca

SEQ ID NO: 1394529 - DNA, 15 bp, Homo sapiens
tattcattagtcaac

SEQ ID NO: 1394530 - DNA, 15 bp, Homo sapiens
ttattcattagtcaa

SEQ ID NO: 1394531 - DNA, 15 bp, Homo sapiens
cttattcattagtca

SEQ ID NO: 1394532 - DNA, 15 bp, Homo sapiens
gcttattcattagtc

SEQ ID NO: 1394533 - DNA, 15 bp, Homo sapiens
tgcttattcattagt

SEQ ID NO: 1394534 - DNA, 15 bp, Homo sapiens
ttgcttattcattag

SEQ ID NO: 1394535 - DNA, 15 bp, Homo sapiens
tttgcttattcatta

SEQ ID NO: 1394536 - DNA, 15 bp, Homo sapiens
atttgcttattcatt

SEQ ID NO: 1394537 - DNA, 15 bp, Homo sapiens
aatttgcttattcat

SEQ ID NO: 1394538 - DNA, 15 bp, Homo sapiens
taatttgcttattca

SEQ ID NO: 1394539 - DNA, 15 bp, Homo sapiens
ttaatttgcttattc

SEQ ID NO: 1394540 - DNA, 15 bp, Homo sapiens
attaatttgcttatt

SEQ ID NO: 1394541 - DNA, 15 bp, Homo sapiens
aattaatttgcttat

SEQ ID NO: 1394542 - DNA, 15 bp, Homo sapiens
gaattaatttgctta

SEQ ID NO: 1394543 - DNA, 15 bp, Homo sapiens
tgaattaatttgctt

SEQ ID NO: 1394544 - DNA, 15 bp, Homo sapiens
atgaattaatttgct

SEQ ID NO: 1394545 - DNA, 15 bp, Homo sapiens
tatgaattaatttgc

SEQ ID NO: 1394546 - DNA, 15 bp, Homo sapiens
ttatgaattaatttg

SEQ ID NO: 1394547 - DNA, 15 bp, Homo sapiens
cttatgaattaattt

SEQ ID NO: 1394548 - DNA, 15 bp, Homo sapiens
acttatgaattaatt

SEQ ID NO: 1394549 - DNA, 15 bp, Homo sapiens
cacttatgaattaat

SEQ ID NO: 1394550 - DNA, 15 bp, Homo sapiens
ccacttatgaattaa

SEQ ID NO: 1394551 - DNA, 15 bp, Homo sapiens
gccacttatgaatta

SEQ ID NO: 1394552 - DNA, 15 bp, Homo sapiens
ggccacttatgaatt

SEQ ID NO: 1394553 - DNA, 15 bp, Homo sapiens
aggccacttatgaat

SEQ ID NO: 1394554 - DNA, 15 bp, Homo sapiens
aaggccacttatgaa

SEQ ID NO: 1394555 - DNA, 15 bp, Homo sapiens
aaaggccacttatga

SEQ ID NO: 1394556 - DNA, 15 bp, Homo sapiens
taaaggccacttatg

SEQ ID NO: 1394557 - DNA, 15 bp, Homo sapiens
ataaaggccacttat

SEQ ID NO: 1394558 - DNA, 15 bp, Homo sapiens
cataaaggccactta

SEQ ID NO: 1394559 - DNA, 15 bp, Homo sapiens
gcataaaggccactt

SEQ ID NO: 1394560 - DNA, 15 bp, Homo sapiens
agcataaaggccact

SEQ ID NO: 1394561 - DNA, 15 bp, Homo sapiens
cagcataaaggccac

SEQ ID NO: 1394562 - DNA, 15 bp, Homo sapiens
gcagcataaaggcca

SEQ ID NO: 1394563 - DNA, 15 bp, Homo sapiens
ggcagcataaaggcc

SEQ ID NO: 1394564 - DNA, 15 bp, Homo sapiens
aggcagcataaaggc

SEQ ID NO: 1394565 - DNA, 15 bp, Homo sapiens
aaggcagcataaagg

SEQ ID NO: 1394566 - DNA, 15 bp, Homo sapiens
taaggcagcataaag

SEQ ID NO: 1394567 - DNA, 15 bp, Homo sapiens
ttaaggcagcataaa

SEQ ID NO: 1394568 - DNA, 15 bp, Homo sapiens
gttaaggcagcataa

SEQ ID NO: 1394569 - DNA, 15 bp, Homo sapiens
ggttaaggcagcata

SEQ ID NO: 1394570 - DNA, 15 bp, Homo sapiens
aggttaaggcagcat

SEQ ID NO: 1394571 - DNA, 15 bp, Homo sapiens
caggttaaggcagca

SEQ ID NO: 1394572 - DNA, 15 bp, Homo sapiens
tcaggttaaggcagc

SEQ ID NO: 1394573 - DNA, 15 bp, Homo sapiens
ttcaggttaaggcag

SEQ ID NO: 1394574 - DNA, 15 bp, Homo sapiens
attcaggttaaggca

SEQ ID NO: 1394575 - DNA, 15 bp, Homo sapiens
tattcaggttaaggc

SEQ ID NO: 1394576 - DNA, 15 bp, Homo sapiens
gtattcaggttaagg

SEQ ID NO: 1394577 - DNA, 15 bp, Homo sapiens
agtattcaggttaag

SEQ ID NO: 1394578 - DNA, 15 bp, Homo sapiens
aagtattcaggttaa

SEQ ID NO: 1394579 - DNA, 15 bp, Homo sapiens
aaagtattcaggtta

SEQ ID NO: 1394580 - DNA, 15 bp, Homo sapiens
aaaagtattcaggtt

SEQ ID NO: 1394581 - DNA, 15 bp, Homo sapiens
gaaaagtattcaggt

SEQ ID NO: 1394582 - DNA, 15 bp, Homo sapiens
agaaaagtattcagg

SEQ ID NO: 1394583 - DNA, 15 bp, Homo sapiens
gagaaaagtattcag

SEQ ID NO: 1394584 - DNA, 15 bp, Homo sapiens
ggagaaaagtattca

SEQ ID NO: 1394585 - DNA, 15 bp, Homo sapiens
aggagaaaagtattc

SEQ ID NO: 1394586 - DNA, 15 bp, Homo sapiens
aaggagaaaagtatt

SEQ ID NO: 1394587 - DNA, 15 bp, Homo sapiens
gaaggagaaaagtat

SEQ ID NO: 1394588 - DNA, 15 bp, Homo sapiens
agaaggagaaaagta

SEQ ID NO: 1394589 - DNA, 15 bp, Homo sapiens
gagaaggagaaaagt

SEQ ID NO: 1394590 - DNA, 15 bp, Homo sapiens
agagaaggagaaaag

SEQ ID NO: 1394591 - DNA, 15 bp, Homo sapiens
aagagaaggagaaaa

SEQ ID NO: 1394592 - DNA, 15 bp, Homo sapiens
aaagagaaggagaaa

SEQ ID NO: 1394593 - DNA, 15 bp, Homo sapiens
taaagagaaggagaa

SEQ ID NO: 1394594 - DNA, 15 bp, Homo sapiens
ataaagagaaggaga

SEQ ID NO: 1394595 - DNA, 15 bp, Homo sapiens
tataaagagaaggag

SEQ ID NO: 1394596 - DNA, 15 bp, Homo sapiens
ctataaagagaagga

SEQ ID NO: 1394597 - DNA, 15 bp, Homo sapiens
cctataaagagaagg

SEQ ID NO: 1394598 - DNA, 15 bp, Homo sapiens
tcctataaagagaag

SEQ ID NO: 1394599 - DNA, 15 bp, Homo sapiens
atcctataaagagaa

SEQ ID NO: 1394600 - DNA, 15 bp, Homo sapiens
tatcctataaagaga

SEQ ID NO: 1394601 - DNA, 15 bp, Homo sapiens
ctatcctataaagag

SEQ ID NO: 1394602 - DNA, 15 bp, Homo sapiens
gctatcctataaaga

SEQ ID NO: 1394603 - DNA, 15 bp, Homo sapiens
agctatcctataaag

SEQ ID NO: 1394604 - DNA, 15 bp, Homo sapiens
tagctatcctataaa

SEQ ID NO: 1394605 - DNA, 15 bp, Homo sapiens
gtagctatcctataa

SEQ ID NO: 1394606 - DNA, 15 bp, Homo sapiens
ggtagctatcctata

SEQ ID NO: 1394607 - DNA, 15 bp, Homo sapiens
tggtagctatcctat

SEQ ID NO: 1394608 - DNA, 15 bp, Homo sapiens
ttggtagctatccta

SEQ ID NO: 1394609 - DNA, 15 bp, Homo sapiens
cttggtagctatcct

SEQ ID NO: 1394610 - DNA, 15 bp, Homo sapiens
ccttggtagctatcc

SEQ ID NO: 1394611 - DNA, 15 bp, Homo sapiens
cccttggtagctatc

SEQ ID NO: 1394612 - DNA, 15 bp, Homo sapiens
tcccttggtagctat

SEQ ID NO: 1394613 - DNA, 15 bp, Homo sapiens
ttcccttggtagcta

SEQ ID NO: 1394614 - DNA, 15 bp, Homo sapiens
attcccttggtagct

SEQ ID NO: 1394615 - DNA, 15 bp, Homo sapiens
gattcccttggtagc

SEQ ID NO: 1394616 - DNA, 15 bp, Homo sapiens
agattcccttggtag

SEQ ID NO: 1394617 - DNA, 15 bp, Homo sapiens
cagattcccttggta

SEQ ID NO: 1394618 - DNA, 15 bp, Homo sapiens
tcagattcccttggt

SEQ ID NO: 1394619 - DNA, 15 bp, Homo sapiens
ttcagattcccttgg

SEQ ID NO: 1394620 - DNA, 15 bp, Homo sapiens
attcagattcccttg

SEQ ID NO: 1394621 - DNA, 15 bp, Homo sapiens
aattcagattccctt

SEQ ID NO: 1394622 - DNA, 15 bp, Homo sapiens
aaattcagattccct

SEQ ID NO: 1394623 - DNA, 15 bp, Homo sapiens
taaattcagattccc

SEQ ID NO: 1394624 - DNA, 15 bp, Homo sapiens
ttaaattcagattcc

SEQ ID NO: 1394625 - DNA, 15 bp, Homo sapiens
tttaaattcagattc

SEQ ID NO: 1394626 - DNA, 15 bp, Homo sapiens
atttaaattcagatt

SEQ ID NO: 1394627 - DNA, 15 bp, Homo sapiens
catttaaattcagat

SEQ ID NO: 1394628 - DNA, 15 bp, Homo sapiens
ccatttaaattcaga

SEQ ID NO: 1394629 - DNA, 15 bp, Homo sapiens
cccatttaaattcag

SEQ ID NO: 1394630 - DNA, 15 bp, Homo sapiens
cacacccatttaaat

SEQ ID NO: 1394631 - DNA, 15 bp, Homo sapiens
tcacacccatttaaa

SEQ ID NO: 1394632 - DNA, 15 bp, Homo sapiens
gtcacacccatttaa

SEQ ID NO: 1394633 - DNA, 15 bp, Homo sapiens
tgtcacacccattta

SEQ ID NO: 1394634 - DNA, 15 bp, Homo sapiens
ctgtcacacccattt

SEQ ID NO: 1394635 - DNA, 15 bp, Homo sapiens
gctgtcacacccatt

SEQ ID NO: 1394636 - DNA, 15 bp, Homo sapiens
ggctgtcacacccat

SEQ ID NO: 1394637 - DNA, 15 bp, Homo sapiens
tggctgtcacaccca

SEQ ID NO: 1394638 - DNA, 15 bp, Homo sapiens
ttggctgtcacaccc

SEQ ID NO: 1394639 - DNA, 15 bp, Homo sapiens
cttggctgtcacacc

SEQ ID NO: 1394640 - DNA, 15 bp, Homo sapiens
ccttggctgtcacac

SEQ ID NO: 1394641 - DNA, 15 bp, Homo sapiens
tccttggctgtcaca

SEQ ID NO: 1394642 - DNA, 15 bp, Homo sapiens
ctccttggctgtcac

SEQ ID NO: 1394643 - DNA, 15 bp, Homo sapiens
cctccttggctgtca

SEQ ID NO: 1394644 - DNA, 15 bp, Homo sapiens
tcctccttggctgtc

SEQ ID NO: 1394645 - DNA, 15 bp, Homo sapiens
ttcctccttggctgt

SEQ ID NO: 1394646 - DNA, 15 bp, Homo sapiens
tttcctccttggctg

SEQ ID NO: 1394647 - DNA, 15 bp, Homo sapiens
ttttcctccttggct

SEQ ID NO: 1394648 - DNA, 15 bp, Homo sapiens
tttttcctccttggc

SEQ ID NO: 1394649 - DNA, 15 bp, Homo sapiens
gtttttcctccttgg

SEQ ID NO: 1394650 - DNA, 15 bp, Homo sapiens
agtttttcctccttg

SEQ ID NO: 1394651 - DNA, 15 bp, Homo sapiens
aagtttttcctcctt

SEQ ID NO: 1394652 - DNA, 15 bp, Homo sapiens
aaagtttttcctcct

SEQ ID NO: 1394653 - DNA, 15 bp, Homo sapiens
gaaagtttttcctcc

SEQ ID NO: 1394654 - DNA, 15 bp, Homo sapiens
agaaagtttttcctc

SEQ ID NO: 1394655 - DNA, 15 bp, Homo sapiens
aagaaagtttttcct

SEQ ID NO: 1394656 - DNA, 15 bp, Homo sapiens
aaagaaagtttttcc

SEQ ID NO: 1394657 - DNA, 15 bp, Homo sapiens
gaaagaaagtttttc

SEQ ID NO: 1394658 - DNA, 15 bp, Homo sapiens
tgaaagaaagttttt

SEQ ID NO: 1394659 - DNA, 15 bp, Homo sapiens
gtgaaagaaagtttt

SEQ ID NO: 1394660 - DNA, 15 bp, Homo sapiens
tgtgaaagaaagttt

SEQ ID NO: 1394661 - DNA, 15 bp, Homo sapiens
atgtgaaagaaagtt

SEQ ID NO: 1394662 - DNA, 15 bp, Homo sapiens
aatgtgaaagaaagt

SEQ ID NO: 1394663 - DNA, 15 bp, Homo sapiens
aaatgtgaaagaaag

SEQ ID NO: 1394664 - DNA, 15 bp, Homo sapiens
aaaatgtgaaagaaa

SEQ ID NO: 1394665 - DNA, 15 bp, Homo sapiens
caaaatgtgaaagaa

SEQ ID NO: 1394666 - DNA, 15 bp, Homo sapiens
gcaaaatgtgaaaga

SEQ ID NO: 1394667 - DNA, 15 bp, Homo sapiens
agcaaaatgtgaaag

SEQ ID NO: 1394668 - DNA, 15 bp, Homo sapiens
gagcaaaatgtgaaa

SEQ ID NO: 1394669 - DNA, 15 bp, Homo sapiens
agagcaaaatgtgaa

SEQ ID NO: 1394670 - DNA, 15 bp, Homo sapiens
aagagcaaaatgtga

SEQ ID NO: 1394671 - DNA, 15 bp, Homo sapiens
aaagagcaaaatgtg

SEQ ID NO: 1394672 - DNA, 15 bp, Homo sapiens
taaagagcaaaatgt

SEQ ID NO: 1394673 - DNA, 15 bp, Homo sapiens
ataaagagcaaaatg

SEQ ID NO: 1394674 - DNA, 15 bp, Homo sapiens
tataaagagcaaaat

SEQ ID NO: 1394675 - DNA, 15 bp, Homo sapiens
atataaagagcaaaa

SEQ ID NO: 1394676 - DNA, 15 bp, Homo sapiens
gatataaagagcaaa

SEQ ID NO: 1394677 - DNA, 15 bp, Homo sapiens
ggatataaagagcaa

SEQ ID NO: 1394678 - DNA, 15 bp, Homo sapiens
tggatataaagagca

SEQ ID NO: 1394679 - DNA, 15 bp, Homo sapiens
atggatataaagagc

SEQ ID NO: 1394680 - DNA, 15 bp, Homo sapiens
tatggatataaagag

SEQ ID NO: 1394681 - DNA, 15 bp, Homo sapiens
atatggatataaaga

SEQ ID NO: 1394682 - DNA, 15 bp, Homo sapiens
aatatggatataaag

SEQ ID NO: 1394683 - DNA, 15 bp, Homo sapiens
aaatatggatataaa

SEQ ID NO: 1394684 - DNA, 15 bp, Homo sapiens
caaatatggatataa

SEQ ID NO: 1394685 - DNA, 15 bp, Homo sapiens
acaaatatggatata

SEQ ID NO: 1394686 - DNA, 15 bp, Homo sapiens
tacaaatatggatat

SEQ ID NO: 1394687 - DNA, 15 bp, Homo sapiens
atacaaatatggata

SEQ ID NO: 1394688 - DNA, 15 bp, Homo sapiens
acatacaaatatgga

SEQ ID NO: 1394689 - DNA, 15 bp, Homo sapiens
cacatacaaatatgg

SEQ ID NO: 1394690 - DNA, 15 bp, Homo sapiens
gcacatacaaatatg

SEQ ID NO: 1394691 - DNA, 15 bp, Homo sapiens
tgcacatacaaatat

SEQ ID NO: 1394692 - DNA, 15 bp, Homo sapiens
atgcacatacaaata

SEQ ID NO: 1394693 - DNA, 15 bp, Homo sapiens
catgcacatacaaat

SEQ ID NO: 1394694 - DNA, 15 bp, Homo sapiens
ccatgcacatacaaa

SEQ ID NO: 1394695 - DNA, 15 bp, Homo sapiens
gccatgcacatacaa

SEQ ID NO: 1394696 - DNA, 15 bp, Homo sapiens
ggccatgcacataca

SEQ ID NO: 1394697 - DNA, 15 bp, Homo sapiens
aggccatgcacatac

SEQ ID NO: 1394698 - DNA, 15 bp, Homo sapiens
gaggccatgcacata

SEQ ID NO: 1394699 - DNA, 15 bp, Homo sapiens
tgaggccatgcacat

SEQ ID NO: 1394700 - DNA, 15 bp, Homo sapiens
ttgaggccatgcaca

SEQ ID NO: 1394701 - DNA, 15 bp, Homo sapiens
tttgaggccatgcac

SEQ ID NO: 1394702 - DNA, 15 bp, Homo sapiens
ttttgaggccatgca

SEQ ID NO: 1394703 - DNA, 15 bp, Homo sapiens
tttttgaggccatgc

SEQ ID NO: 1394704 - DNA, 15 bp, Homo sapiens
atttttgaggccatg

SEQ ID NO: 1394705 - DNA, 15 bp, Homo sapiens
tatttttgaggccat

SEQ ID NO: 1394706 - DNA, 15 bp, Homo sapiens
ttatttttgaggcca

SEQ ID NO: 1394707 - DNA, 15 bp, Homo sapiens
attatttttgaggcc

SEQ ID NO: 1394708 - DNA, 15 bp, Homo sapiens
aattatttttgaggc

SEQ ID NO: 1394709 - DNA, 15 bp, Homo sapiens
aaattatttttgagg

SEQ ID NO: 1394710 - DNA, 15 bp, Homo sapiens
caaattatttttgag

SEQ ID NO: 1394711 - DNA, 15 bp, Homo sapiens
acaaattatttttga

SEQ ID NO: 1394712 - DNA, 15 bp, Homo sapiens
aacaaattatttttg

SEQ ID NO: 1394713 - DNA, 15 bp, Homo sapiens
aaacaaattattttt

SEQ ID NO: 1394714 - DNA, 15 bp, Homo sapiens
taaacaaattatttt

SEQ ID NO: 1394715 - DNA, 15 bp, Homo sapiens
ataaacaaattattt

SEQ ID NO: 1394716 - DNA, 15 bp, Homo sapiens
cataaacaaattatt

SEQ ID NO: 1394717 - DNA, 15 bp, Homo sapiens
tcataaacaaattat

SEQ ID NO: 1394718 - DNA, 15 bp, Homo sapiens
ttcataaacaaatta

SEQ ID NO: 1394719 - DNA, 15 bp, Homo sapiens
attcataaacaaatt

SEQ ID NO: 1394720 - DNA, 15 bp, Homo sapiens
aattcataaacaaat

SEQ ID NO: 1394721 - DNA, 15 bp, Homo sapiens
taattcataaacaaa

SEQ ID NO: 1394722 - DNA, 15 bp, Homo sapiens
ataattcataaacaa

SEQ ID NO: 1394723 - DNA, 15 bp, Homo sapiens
cataattcataaaca

SEQ ID NO: 1394724 - DNA, 15 bp, Homo sapiens
ccataattcataaac

SEQ ID NO: 1394725 - DNA, 15 bp, Homo sapiens
cccataattcataaa

SEQ ID NO: 1394726 - DNA, 15 bp, Homo sapiens
gcccataattcataa

SEQ ID NO: 1394727 - DNA, 15 bp, Homo sapiens
agcccataattcata

SEQ ID NO: 1394728 - DNA, 15 bp, Homo sapiens
cagcccataattcat

SEQ ID NO: 1394729 - DNA, 15 bp, Homo sapiens
tcagcccataattca

SEQ ID NO: 1394730 - DNA, 15 bp, Homo sapiens
gtcagcccataattc

SEQ ID NO: 1394731 - DNA, 15 bp, Homo sapiens
ggtcagcccataatt

SEQ ID NO: 1394732 - DNA, 15 bp, Homo sapiens
gggtcagcccataat

SEQ ID NO: 1394733 - DNA, 15 bp, Homo sapiens
ggggtcagcccataa

SEQ ID NO: 1394734 - DNA, 15 bp, Homo sapiens
gggggtcagcccata

SEQ ID NO: 1394735 - DNA, 15 bp, Homo sapiens
tgggggtcagcccat

SEQ ID NO: 1394736 - DNA, 15 bp, Homo sapiens
ttgggggtcagccca

SEQ ID NO: 1394737 - DNA, 15 bp, Homo sapiens
attgggggtcagccc

SEQ ID NO: 1394738 - DNA, 15 bp, Homo sapiens
tattgggggtcagcc

SEQ ID NO: 1394739 - DNA, 15 bp, Homo sapiens
atattgggggtcagc

SEQ ID NO: 1394740 - DNA, 15 bp, Homo sapiens
gatattgggggtcag

SEQ ID NO: 1394741 - DNA, 15 bp, Homo sapiens
tgatattgggggtca

SEQ ID NO: 1394742 - DNA, 15 bp, Homo sapiens
ttgatattgggggtc

SEQ ID NO: 1394743 - DNA, 15 bp, Homo sapiens
tttgatattgggggt

SEQ ID NO: 1394744 - DNA, 15 bp, Homo sapiens
gtttgatattggggg

SEQ ID NO: 1394745 - DNA, 15 bp, Homo sapiens
agtttgatattgggg

SEQ ID NO: 1394746 - DNA, 15 bp, Homo sapiens
aagtttgatattggg

SEQ ID NO: 1394747 - DNA, 15 bp, Homo sapiens
gaagtttgatattgg

SEQ ID NO: 1394748 - DNA, 15 bp, Homo sapiens
tgaagtttgatattg

SEQ ID NO: 1394749 - DNA, 15 bp, Homo sapiens
ttgaagtttgatatt

SEQ ID NO: 1394750 - DNA, 15 bp, Homo sapiens
cttgaagtttgatat

SEQ ID NO: 1394751 - DNA, 15 bp, Homo sapiens
tcttgaagtttgata

SEQ ID NO: 1394752 - DNA, 15 bp, Homo sapiens
ttcttgaagtttgat

SEQ ID NO: 1394753 - DNA, 15 bp, Homo sapiens
tttcttgaagtttga

SEQ ID NO: 1394754 - DNA, 15 bp, Homo sapiens
gtttcttgaagtttg

SEQ ID NO: 1394755 - DNA, 15 bp, Homo sapiens
agtttcttgaagttt

SEQ ID NO: 1394756 - DNA, 15 bp, Homo sapiens
tagtttcttgaagtt

SEQ ID NO: 1394757 - DNA, 15 bp, Homo sapiens
gtagtttcttgaagt

SEQ ID NO: 1394758 - DNA, 15 bp, Homo sapiens
tgtagtttcttgaag

SEQ ID NO: 1394759 - DNA, 15 bp, Homo sapiens
atgtagtttcttgaa

SEQ ID NO: 1394760 - DNA, 15 bp, Homo sapiens
tatgtagtttcttga

SEQ ID NO: 1394761 - DNA, 15 bp, Homo sapiens
ttatgtagtttcttg

SEQ ID NO: 1394762 - DNA, 15 bp, Homo sapiens
tttatgtagtttctt

SEQ ID NO: 1394763 - DNA, 15 bp, Homo sapiens
ttttatgtagtttct

SEQ ID NO: 1394764 - DNA, 15 bp, Homo sapiens
cttttatgtagtttc

SEQ ID NO: 1394765 - DNA, 15 bp, Homo sapiens
ccttttatgtagttt

SEQ ID NO: 1394766 - DNA, 15 bp, Homo sapiens
tccttttatgtagtt

SEQ ID NO: 1394767 - DNA, 15 bp, Homo sapiens
ctccttttatgtagt

SEQ ID NO: 1394768 - DNA, 15 bp, Homo sapiens
gctccttttatgtag

SEQ ID NO: 1394769 - DNA, 15 bp, Homo sapiens
agctccttttatgta

SEQ ID NO: 1394770 - DNA, 15 bp, Homo sapiens
gagctccttttatgt

SEQ ID NO: 1394771 - DNA, 15 bp, Homo sapiens
tgagctccttttatg

SEQ ID NO: 1394772 - DNA, 15 bp, Homo sapiens
ttgagctccttttat

SEQ ID NO: 1394773 - DNA, 15 bp, Homo sapiens
tttgagctcctttta

SEQ ID NO: 1394774 - DNA, 15 bp, Homo sapiens
ttttgagctcctttt

SEQ ID NO: 1394775 - DNA, 15 bp, Homo sapiens
attttgagctccttt

SEQ ID NO: 1394776 - DNA, 15 bp, Homo sapiens
tattttgagctcctt

SEQ ID NO: 1394777 - DNA, 15 bp, Homo sapiens
ttattttgagctcct

SEQ ID NO: 1394778 - DNA, 15 bp, Homo sapiens
tttattttgagctcc

SEQ ID NO: 1394779 - DNA, 15 bp, Homo sapiens
ttttattttgagctc

SEQ ID NO: 1394780 - DNA, 15 bp, Homo sapiens
attttattttgagct

SEQ ID NO: 1394781 - DNA, 15 bp, Homo sapiens
aattttattttgagc

SEQ ID NO: 1394782 - DNA, 15 bp, Homo sapiens
aaattttattttgag

SEQ ID NO: 1394783 - DNA, 15 bp, Homo sapiens
aaaattttattttga

SEQ ID NO: 1394784 - DNA, 15 bp, Homo sapiens
taaaattttattttg

SEQ ID NO: 1394785 - DNA, 15 bp, Homo sapiens
ctagtaaaattttat

SEQ ID NO: 1394786 - DNA, 15 bp, Homo sapiens
cctagtaaaatttta

SEQ ID NO: 1394787 - DNA, 15 bp, Homo sapiens
acctagtaaaatttt

SEQ ID NO: 1394788 - DNA, 15 bp, Homo sapiens
aacctagtaaaattt

SEQ ID NO: 1394789 - DNA, 15 bp, Homo sapiens
caacctagtaaaatt

SEQ ID NO: 1394790 - DNA, 15 bp, Homo sapiens
tcaacctagtaaaat

SEQ ID NO: 1394791 - DNA, 15 bp, Homo sapiens
gtcaacctagtaaaa

SEQ ID NO: 1394792 - DNA, 15 bp, Homo sapiens
agtcaacctagtaaa

SEQ ID NO: 1394793 - DNA, 15 bp, Homo sapiens
tagtcaacctagtaa

SEQ ID NO: 1394794 - DNA, 15 bp, Homo sapiens
ttagtcaacctagta

SEQ ID NO: 1394795 - DNA, 15 bp, Homo sapiens
attagtcaacctagt

SEQ ID NO: 1394796 - DNA, 15 bp, Homo sapiens
cattagtcaacctag

SEQ ID NO: 1394797 - DNA, 15 bp, Homo sapiens
gcattagtcaaccta

SEQ ID NO: 1394798 - DNA, 15 bp, Homo sapiens
agcattagtcaacct

SEQ ID NO: 1394799 - DNA, 15 bp, Homo sapiens
aagcattagtcaacc

SEQ ID NO: 1394800 - DNA, 15 bp, Homo sapiens
caagcattagtcaac

SEQ ID NO: 1394801 - DNA, 15 bp, Homo sapiens
ccaagcattagtcaa

SEQ ID NO: 1394802 - DNA, 15 bp, Homo sapiens
gccaagcattagtca

SEQ ID NO: 1394803 - DNA, 15 bp, Homo sapiens
cgccaagcattagtc

SEQ ID NO: 1394804 - DNA, 15 bp, Homo sapiens
acgccaagcattagt

SEQ ID NO: 1394805 - DNA, 15 bp, Homo sapiens
tacgccaagcattag

SEQ ID NO: 1394806 - DNA, 15 bp, Homo sapiens
ttacgccaagcatta

SEQ ID NO: 1394807 - DNA, 15 bp, Homo sapiens
tttacgccaagcatt

SEQ ID NO: 1394808 - DNA, 15 bp, Homo sapiens
ttttacgccaagcat

SEQ ID NO: 1394809 - DNA, 15 bp, Homo sapiens
attttacgccaagca

SEQ ID NO: 1394810 - DNA, 15 bp, Homo sapiens
aattttacgccaagc

SEQ ID NO: 1394811 - DNA, 15 bp, Homo sapiens
caattttacgccaag

SEQ ID NO: 1394812 - DNA, 15 bp, Homo sapiens
tcaattttacgccaa

SEQ ID NO: 1394813 - DNA, 15 bp, Homo sapiens
atcaattttacgcca

SEQ ID NO: 1394814 - DNA, 15 bp, Homo sapiens
aatcaattttacgcc

SEQ ID NO: 1394815 - DNA, 15 bp, Homo sapiens
caatcaattttacgc

SEQ ID NO: 1394816 - DNA, 15 bp, Homo sapiens
tcaatcaattttacg

SEQ ID NO: 1394817 - DNA, 15 bp, Homo sapiens
ttcaatcaattttac

SEQ ID NO: 1394818 - DNA, 15 bp, Homo sapiens
cttcaatcaatttta

SEQ ID NO: 1394819 - DNA, 15 bp, Homo sapiens
gcttcaatcaatttt

SEQ ID NO: 1394820 - DNA, 15 bp, Homo sapiens
ggcttcaatcaattt

SEQ ID NO: 1394821 - DNA, 15 bp, Homo sapiens
aggcttcaatcaatt

SEQ ID NO: 1394822 - DNA, 15 bp, Homo sapiens
aaggcttcaatcaat

SEQ ID NO: 1394823 - DNA, 15 bp, Homo sapiens
taaggcttcaatcaa

SEQ ID NO: 1394824 - DNA, 15 bp, Homo sapiens
gtaaggcttcaatca

SEQ ID NO: 1394825 - DNA, 15 bp, Homo sapiens
agtaaggcttcaatc

SEQ ID NO: 1394826 - DNA, 15 bp, Homo sapiens
tagtaaggcttcaat

SEQ ID NO: 1394827 - DNA, 15 bp, Homo sapiens
ttagtaaggcttcaa

SEQ ID NO: 1394828 - DNA, 15 bp, Homo sapiens
tttagtaaggcttca

SEQ ID NO: 1394829 - DNA, 15 bp, Homo sapiens
gtttagtaaggcttc

SEQ ID NO: 1394830 - DNA, 15 bp, Homo sapiens
tgtttagtaaggctt

SEQ ID NO: 1394831 - DNA, 15 bp, Homo sapiens
ttgtttagtaaggct

SEQ ID NO: 1394832 - DNA, 15 bp, Homo sapiens
attgtttagtaaggc

SEQ ID NO: 1394833 - DNA, 15 bp, Homo sapiens
aattgtttagtaagg

SEQ ID NO: 1394834 - DNA, 15 bp, Homo sapiens
caattgtttagtaag

SEQ ID NO: 1394835 - DNA, 15 bp, Homo sapiens
tcaattgtttagtaa

SEQ ID NO: 1394836 - DNA, 15 bp, Homo sapiens
ttcaattgtttagta

SEQ ID NO: 1394837 - DNA, 15 bp, Homo sapiens
tttcaattgtttagt

SEQ ID NO: 1394838 - DNA, 15 bp, Homo sapiens
ttttcaattgtttag

SEQ ID NO: 1394839 - DNA, 15 bp, Homo sapiens
attttcaattgttta

SEQ ID NO: 1394840 - DNA, 15 bp, Homo sapiens
tattttcaattgttt

SEQ ID NO: 1394841 - DNA, 15 bp, Homo sapiens
atattttcaattgtt

SEQ ID NO: 1394842 - DNA, 15 bp, Homo sapiens
aatattttcaattgt

SEQ ID NO: 1394843 - DNA, 15 bp, Homo sapiens
aaatattttcaattg

SEQ ID NO: 1394844 - DNA, 15 bp, Homo sapiens
aaaatattttcaatt

SEQ ID NO: 1394845 - DNA, 15 bp, Homo sapiens
caaaatattttcaat

SEQ ID NO: 1394846 - DNA, 15 bp, Homo sapiens
acaaaatattttcaa

SEQ ID NO: 1394847 - DNA, 15 bp, Homo sapiens
aacaaaatattttca

SEQ ID NO: 1394848 - DNA, 15 bp, Homo sapiens
aaacaaaatattttc

SEQ ID NO: 1394849 - DNA, 15 bp, Homo sapiens
taaacaaaatatttt

SEQ ID NO: 1394850 - DNA, 15 bp, Homo sapiens
gtaaacaaaatattt

SEQ ID NO: 1394851 - DNA, 15 bp, Homo sapiens
tgtaaacaaaatatt

SEQ ID NO: 1394852 - DNA, 15 bp, Homo sapiens
ttgtaaacaaaatat

SEQ ID NO: 1394853 - DNA, 15 bp, Homo sapiens
cttgtaaacaaaata

SEQ ID NO: 1394854 - DNA, 15 bp, Homo sapiens
tcttgtaaacaaaat

SEQ ID NO: 1394855 - DNA, 15 bp, Homo sapiens
atcttgtaaacaaaa

SEQ ID NO: 1394856 - DNA, 15 bp, Homo sapiens
tatcttgtaaacaaa

SEQ ID NO: 1394857 - DNA, 15 bp, Homo sapiens
atatcttgtaaacaa

SEQ ID NO: 1394858 - DNA, 15 bp, Homo sapiens
aatatcttgtaaaca

SEQ ID NO: 1394859 - DNA, 15 bp, Homo sapiens
aaatatcttgtaaac

SEQ ID NO: 1394860 - DNA, 15 bp, Homo sapiens
taaatatcttgtaaa

SEQ ID NO: 1394861 - DNA, 15 bp, Homo sapiens
ataaatatcttgtaa

SEQ ID NO: 1394862 - DNA, 15 bp, Homo sapiens
gataaatatcttgta

SEQ ID NO: 1394863 - DNA, 15 bp, Homo sapiens
tgataaatatcttgt

SEQ ID NO: 1394864 - DNA, 15 bp, Homo sapiens
gtgataaatatcttg

SEQ ID NO: 1394865 - DNA, 15 bp, Homo sapiens
tgtgataaatatctt

SEQ ID NO: 1394866 - DNA, 15 bp, Homo sapiens
ttgtgataaatatct

SEQ ID NO: 1394867 - DNA, 15 bp, Homo sapiens
tttgtgataaatatc

SEQ ID NO: 1394868 - DNA, 15 bp, Homo sapiens
gtttgtgataaatat

SEQ ID NO: 1394869 - DNA, 15 bp, Homo sapiens
tgtttgtgataaata

SEQ ID NO: 1394870 - DNA, 15 bp, Homo sapiens
gtgtttgtgataaat

SEQ ID NO: 1394871 - DNA, 15 bp, Homo sapiens
agtgtttgtgataaa

SEQ ID NO: 1394872 - DNA, 15 bp, Homo sapiens
aagtgtttgtgataa

SEQ ID NO: 1394873 - DNA, 15 bp, Homo sapiens
aaagtgtttgtgata

SEQ ID NO: 1394874 - DNA, 15 bp, Homo sapiens
aaaagtgtttgtgat

SEQ ID NO: 1394875 - DNA, 15 bp, Homo sapiens
caaaagtgtttgtga

SEQ ID NO: 1394876 - DNA, 15 bp, Homo sapiens
acaaaagtgtttgtg

SEQ ID NO: 1394877 - DNA, 15 bp, Homo sapiens
aacaaaagtgtttgt

SEQ ID NO: 1394878 - DNA, 15 bp, Homo sapiens
taacaaaagtgtttg

SEQ ID NO: 1394879 - DNA, 15 bp, Homo sapiens
ataacaaaagtgttt

SEQ ID NO: 1394880 - DNA, 15 bp, Homo sapiens
tataacaaaagtgtt

SEQ ID NO: 1394881 - DNA, 15 bp, Homo sapiens
gtataacaaaagtgt

SEQ ID NO: 1394882 - DNA, 15 bp, Homo sapiens
agtataacaaaagtg

SEQ ID NO: 1394883 - DNA, 15 bp, Homo sapiens
aagtataacaaaagt

SEQ ID NO: 1394884 - DNA, 15 bp, Homo sapiens
caagtataacaaaag

SEQ ID NO: 1394885 - DNA, 15 bp, Homo sapiens
ccaagtataacaaaa

SEQ ID NO: 1394886 - DNA, 15 bp, Homo sapiens
tccaagtataacaaa

SEQ ID NO: 1394887 - DNA, 15 bp, Homo sapiens
atccaagtataacaa

SEQ ID NO: 1394888 - DNA, 15 bp, Homo sapiens
aatccaagtataaca

SEQ ID NO: 1394889 - DNA, 15 bp, Homo sapiens
aaatccaagtataac

SEQ ID NO: 1394890 - DNA, 15 bp, Homo sapiens
caaatccaagtataa

SEQ ID NO: 1394891 - DNA, 15 bp, Homo sapiens
gcaaatccaagtata

SEQ ID NO: 1394892 - DNA, 15 bp, Homo sapiens
ggcaaatccaagtat

SEQ ID NO: 1394893 - DNA, 15 bp, Homo sapiens
gggcaaatccaagta

SEQ ID NO: 1394894 - DNA, 15 bp, Homo sapiens
agggcaaatccaagt

SEQ ID NO: 1394895 - DNA, 15 bp, Homo sapiens
cagggcaaatccaag

SEQ ID NO: 1394896 - DNA, 15 bp, Homo sapiens
acagggcaaatccaa

SEQ ID NO: 1394897 - DNA, 15 bp, Homo sapiens
tacagggcaaatcca

SEQ ID NO: 1394898 - DNA, 15 bp, Homo sapiens
ctacagggcaaatcc

SEQ ID NO: 1394899 - DNA, 15 bp, Homo sapiens
tctacagggcaaatc

SEQ ID NO: 1394900 - DNA, 15 bp, Homo sapiens
atctacagggcaaat

SEQ ID NO: 1394901 - DNA, 15 bp, Homo sapiens
aatctacagggcaaa

SEQ ID NO: 1394902 - DNA, 15 bp, Homo sapiens
aaatctacagggcaa

SEQ ID NO: 1394903 - DNA, 15 bp, Homo sapiens
taaatctacagggca

SEQ ID NO: 1394904 - DNA, 15 bp, Homo sapiens
ataaatctacagggc

SEQ ID NO: 1394905 - DNA, 15 bp, Homo sapiens
aataaatctacaggg

SEQ ID NO: 1394906 - DNA, 15 bp, Homo sapiens
taataaatctacagg

SEQ ID NO: 1394907 - DNA, 15 bp, Homo sapiens
ttaataaatctacag

SEQ ID NO: 1394908 - DNA, 15 bp, Homo sapiens
attaataaatctaca

SEQ ID NO: 1394909 - DNA, 15 bp, Homo sapiens
tattaataaatctac

SEQ ID NO: 1394910 - DNA, 15 bp, Homo sapiens
ttattaataaatcta

SEQ ID NO: 1394911 - DNA, 15 bp, Homo sapiens
gttattaataaatct

SEQ ID NO: 1394912 - DNA, 15 bp, Homo sapiens
agttattaataaatc

SEQ ID NO: 1394913 - DNA, 15 bp, Homo sapiens
aagttattaataaat

SEQ ID NO: 1394914 - DNA, 15 bp, Homo sapiens
gaagttattaataaa

SEQ ID NO: 1394915 - DNA, 15 bp, Homo sapiens
agaagttattaataa

SEQ ID NO: 1394916 - DNA, 15 bp, Homo sapiens
tagaagttattaata

SEQ ID NO: 1394917 - DNA, 15 bp, Homo sapiens
atagaagttattaat

SEQ ID NO: 1394918 - DNA, 15 bp, Homo sapiens
aatagaagttattaa

SEQ ID NO: 1394919 - DNA, 15 bp, Homo sapiens
gaatagaagttatta

SEQ ID NO: 1394920 - DNA, 15 bp, Homo sapiens
agaatagaagttatt

SEQ ID NO: 1394921 - DNA, 15 bp, Homo sapiens
gagaatagaagttat

SEQ ID NO: 1394922 - DNA, 15 bp, Homo sapiens
ggagaatagaagtta

SEQ ID NO: 1394923 - DNA, 15 bp, Homo sapiens
tggagaatagaagtt

SEQ ID NO: 1394924 - DNA, 15 bp, Homo sapiens
ttggagaatagaagt

SEQ ID NO: 1394925 - DNA, 15 bp, Homo sapiens
tttggagaatagaag

SEQ ID NO: 1394926 - DNA, 15 bp, Homo sapiens
ctttggagaatagaa

SEQ ID NO: 1394927 - DNA, 15 bp, Homo sapiens
cctttggagaataga

SEQ ID NO: 1394928 - DNA, 15 bp, Homo sapiens
gcctttggagaatag

SEQ ID NO: 1394929 - DNA, 15 bp, Homo sapiens
agcctttggagaata

SEQ ID NO: 1394930 - DNA, 15 bp, Homo sapiens
aagcctttggagaat

SEQ ID NO: 1394931 - DNA, 15 bp, Homo sapiens
aaagcctttggagaa

SEQ ID NO: 1394932 - DNA, 15 bp, Homo sapiens
caaagcctttggaga

SEQ ID NO: 1394933 - DNA, 15 bp, Homo sapiens
tcaaagcctttggag

SEQ ID NO: 1394934 - DNA, 15 bp, Homo sapiens
ttcaaagcctttgga

SEQ ID NO: 1394935 - DNA, 15 bp, Homo sapiens
gttcaaagcctttgg

SEQ ID NO: 1394936 - DNA, 15 bp, Homo sapiens
tgttcaaagcctttg

SEQ ID NO: 1394937 - DNA, 15 bp, Homo sapiens
ctgttcaaagccttt

SEQ ID NO: 1394938 - DNA, 15 bp, Homo sapiens
tctgttcaaagcctt

SEQ ID NO: 1394939 - DNA, 15 bp, Homo sapiens
ttctgttcaaagcct

SEQ ID NO: 1394940 - DNA, 15 bp, Homo sapiens
attctgttcaaagcc

SEQ ID NO: 1394941 - DNA, 15 bp, Homo sapiens
cattctgttcaaagc

SEQ ID NO: 1394942 - DNA, 15 bp, Homo sapiens
acattctgttcaaag

SEQ ID NO: 1394943 - DNA, 15 bp, Homo sapiens
aacattctgttcaaa

SEQ ID NO: 1394944 - DNA, 15 bp, Homo sapiens
gaacattctgttcaa

SEQ ID NO: 1394945 - DNA, 15 bp, Homo sapiens
ggaacattctgttca

SEQ ID NO: 1394946 - DNA, 15 bp, Homo sapiens
gggaacattctgttc

SEQ ID NO: 1394947 - DNA, 15 bp, Homo sapiens
agggaacattctgtt

SEQ ID NO: 1394948 - DNA, 15 bp, Homo sapiens
tagggaacattctgt

SEQ ID NO: 1394949 - DNA, 15 bp, Homo sapiens
atagggaacattctg

SEQ ID NO: 1394950 - DNA, 15 bp, Homo sapiens
tatagggaacattct

SEQ ID NO: 1394951 - DNA, 15 bp, Homo sapiens
atatagggaacattc

SEQ ID NO: 1394952 - DNA, 15 bp, Homo sapiens
tatatagggaacatt

SEQ ID NO: 1394953 - DNA, 15 bp, Homo sapiens
atatatagggaacat

SEQ ID NO: 1394954 - DNA, 15 bp, Homo sapiens
tatatatagggaaca

SEQ ID NO: 1394955 - DNA, 15 bp, Homo sapiens
ctatatatagggaac

SEQ ID NO: 1394956 - DNA, 15 bp, Homo sapiens
actatatatagggaa

SEQ ID NO: 1394957 - DNA, 15 bp, Homo sapiens
tactatatataggga

SEQ ID NO: 1394958 - DNA, 15 bp, Homo sapiens
ttactatatataggg

SEQ ID NO: 1394959 - DNA, 15 bp, Homo sapiens
tttactatatatagg

SEQ ID NO: 1394960 - DNA, 15 bp, Homo sapiens
ctttactatatatag

SEQ ID NO: 1394961 - DNA, 15 bp, Homo sapiens
tctttactatatata

SEQ ID NO: 1394962 - DNA, 15 bp, Homo sapiens
gtctttactatatat

SEQ ID NO: 1394963 - DNA, 15 bp, Homo sapiens
agtctttactatata

SEQ ID NO: 1394964 - DNA, 15 bp, Homo sapiens
cagtctttactatat

SEQ ID NO: 1394965 - DNA, 15 bp, Homo sapiens
gcagtctttactata

SEQ ID NO: 1394966 - DNA, 15 bp, Homo sapiens
tgcagtctttactat

SEQ ID NO: 1394967 - DNA, 15 bp, Homo sapiens
gtgcagtctttacta

SEQ ID NO: 1394968 - DNA, 15 bp, Homo sapiens
tgtgcagtctttact

SEQ ID NO: 1394969 - DNA, 15 bp, Homo sapiens
atgtgcagtctttac

SEQ ID NO: 1394970 - DNA, 15 bp, Homo sapiens
tatgtgcagtcttta

SEQ ID NO: 1394971 - DNA, 15 bp, Homo sapiens
atatgtgcagtcttt

SEQ ID NO: 1394972 - DNA, 15 bp, Homo sapiens
gatatgtgcagtctt

SEQ ID NO: 1394973 - DNA, 15 bp, Homo sapiens
agatatgtgcagtct

SEQ ID NO: 1394974 - DNA, 15 bp, Homo sapiens
tagatatgtgcagtc

SEQ ID NO: 1394975 - DNA, 15 bp, Homo sapiens
gtagatatgtgcagt

SEQ ID NO: 1394976 - DNA, 15 bp, Homo sapiens
agtagatatgtgcag

SEQ ID NO: 1394977 - DNA, 15 bp, Homo sapiens
tagtagatatgtgca

SEQ ID NO: 1394978 - DNA, 15 bp, Homo sapiens
atagtagatatgtgc

SEQ ID NO: 1394979 - DNA, 15 bp, Homo sapiens
aatagtagatatgtg

SEQ ID NO: 1394980 - DNA, 15 bp, Homo sapiens
aaatagtagatatgt

SEQ ID NO: 1394981 - DNA, 15 bp, Homo sapiens
caaatagtagatatg

SEQ ID NO: 1394982 - DNA, 15 bp, Homo sapiens
acaaatagtagatat

SEQ ID NO: 1394983 - DNA, 15 bp, Homo sapiens
aacaaatagtagata

SEQ ID NO: 1394984 - DNA, 15 bp, Homo sapiens
taacaaatagtagat

SEQ ID NO: 1394985 - DNA, 15 bp, Homo sapiens
ataacaaatagtaga

SEQ ID NO: 1394986 - DNA, 15 bp, Homo sapiens
aataacaaatagtag

SEQ ID NO: 1394987 - DNA, 15 bp, Homo sapiens
caataacaaatagta

SEQ ID NO: 1394988 - DNA, 15 bp, Homo sapiens
acaataacaaatagt

SEQ ID NO: 1394989 - DNA, 15 bp, Homo sapiens
gacaataacaaatag

SEQ ID NO: 1394990 - DNA, 15 bp, Homo sapiens
tgacaataacaaata

SEQ ID NO: 1394991 - DNA, 15 bp, Homo sapiens
ttgacaataacaaat

SEQ ID NO: 1394992 - DNA, 15 bp, Homo sapiens
gttgacaataacaaa

SEQ ID NO: 1394993 - DNA, 15 bp, Homo sapiens
tgttgacaataacaa

SEQ ID NO: 1394994 - DNA, 15 bp, Homo sapiens
atgttgacaataaca

SEQ ID NO: 1394995 - DNA, 15 bp, Homo sapiens
catgttgacaataac

SEQ ID NO: 1394996 - DNA, 15 bp, Homo sapiens
acatgttgacaataa

SEQ ID NO: 1394997 - DNA, 15 bp, Homo sapiens
cacatgttgacaata

SEQ ID NO: 1394998 - DNA, 15 bp, Homo sapiens
ccacatgttgacaat

SEQ ID NO: 1394999 - DNA, 15 bp, Homo sapiens
accacatgttgacaa

SEQ ID NO: 1395000 - DNA, 15 bp, Homo sapiens
aaccacatgttgaca

SEQ ID NO: 1395001 - DNA, 15 bp, Homo sapiens
gaaccacatgttgac

SEQ ID NO: 1395002 - DNA, 15 bp, Homo sapiens
tgaaccacatgttga

SEQ ID NO: 1395003 - DNA, 15 bp, Homo sapiens
gtgaaccacatgttg

SEQ ID NO: 1395004 - DNA, 15 bp, Homo sapiens
ggtgaaccacatgtt

SEQ ID NO: 1395005 - DNA, 15 bp, Homo sapiens
gggtgaaccacatgt

SEQ ID NO: 1395006 - DNA, 15 bp, Homo sapiens
agggtgaaccacatg

SEQ ID NO: 1395007 - DNA, 15 bp, Homo sapiens
cagggtgaaccacat

SEQ ID NO: 1395008 - DNA, 15 bp, Homo sapiens
tcagggtgaaccaca

SEQ ID NO: 1395009 - DNA, 15 bp, Homo sapiens
ttcagggtgaaccac

SEQ ID NO: 1395010 - DNA, 15 bp, Homo sapiens
cttcagggtgaacca

SEQ ID NO: 1395011 - DNA, 15 bp, Homo sapiens
gcttcagggtgaacc

SEQ ID NO: 1395012 - DNA, 15 bp, Homo sapiens
ggcttcagggtgaac

SEQ ID NO: 1395013 - DNA, 15 bp, Homo sapiens
tggcttcagggtgaa

SEQ ID NO: 1395014 - DNA, 15 bp, Homo sapiens
ttggcttcagggtga

SEQ ID NO: 1395015 - DNA, 15 bp, Homo sapiens
cttggcttcagggtg

SEQ ID NO: 1395016 - DNA, 15 bp, Homo sapiens
tcttggcttcagggt

SEQ ID NO: 1395017 - DNA, 15 bp, Homo sapiens
gtcttggcttcaggg

SEQ ID NO: 1395018 - DNA, 15 bp, Homo sapiens
agtcttggcttcagg

SEQ ID NO: 1395019 - DNA, 15 bp, Homo sapiens
tagtcttggcttcag

SEQ ID NO: 1395020 - DNA, 15 bp, Homo sapiens
atagtcttggcttca

SEQ ID NO: 1395021 - DNA, 15 bp, Homo sapiens
gatagtcttggcttc

SEQ ID NO: 1395022 - DNA, 15 bp, Homo sapiens
agatagtcttggctt

SEQ ID NO: 1395023 - DNA, 15 bp, Homo sapiens
gagatagtcttggct

SEQ ID NO: 1395024 - DNA, 15 bp, Homo sapiens
tgagatagtcttggc

SEQ ID NO: 1395025 - DNA, 15 bp, Homo sapiens
ttgagatagtcttgg

SEQ ID NO: 1395026 - DNA, 15 bp, Homo sapiens
gttgagatagtcttg

SEQ ID NO: 1395027 - DNA, 15 bp, Homo sapiens
tgttgagatagtctt

SEQ ID NO: 1395028 - DNA, 15 bp, Homo sapiens
ctgttgagatagtct

SEQ ID NO: 1395029 - DNA, 15 bp, Homo sapiens
tctgttgagatagtc

SEQ ID NO: 1395030 - DNA, 15 bp, Homo sapiens
gtctgttgagatagt

SEQ ID NO: 1395031 - DNA, 15 bp, Homo sapiens
ggtctgttgagatag

SEQ ID NO: 1395032 - DNA, 15 bp, Homo sapiens
aggtctgttgagata

SEQ ID NO: 1395033 - DNA, 15 bp, Homo sapiens
aaggtctgttgagat

SEQ ID NO: 1395034 - DNA, 15 bp, Homo sapiens
taaggtctgttgaga

SEQ ID NO: 1395035 - DNA, 15 bp, Homo sapiens
ttaaggtctgttgag

SEQ ID NO: 1395036 - DNA, 15 bp, Homo sapiens
tttaaggtctgttga

SEQ ID NO: 1395037 - DNA, 15 bp, Homo sapiens
atttaaggtctgttg

SEQ ID NO: 1395038 - DNA, 15 bp, Homo sapiens
tatttaaggtctgtt

SEQ ID NO: 1395039 - DNA, 15 bp, Homo sapiens
atatttaaggtctgt

SEQ ID NO: 1395040 - DNA, 15 bp, Homo sapiens
catatttaaggtctg

SEQ ID NO: 1395041 - DNA, 15 bp, Homo sapiens
ccatatttaaggtct

SEQ ID NO: 1395042 - DNA, 15 bp, Homo sapiens
accatatttaaggtc

SEQ ID NO: 1395043 - DNA, 15 bp, Homo sapiens
caccatatttaaggt

SEQ ID NO: 1395044 - DNA, 15 bp, Homo sapiens
gcaccatatttaagg

SEQ ID NO: 1395045 - DNA, 15 bp, Homo sapiens
agcaccatatttaag

SEQ ID NO: 1395046 - DNA, 15 bp, Homo sapiens
aagcaccatatttaa

SEQ ID NO: 1395047 - DNA, 15 bp, Homo sapiens
aaagcaccatattta

SEQ ID NO: 1395048 - DNA, 15 bp, Homo sapiens
caaagcaccatattt

SEQ ID NO: 1395049 - DNA, 15 bp, Homo sapiens
gcaaagcaccatatt

SEQ ID NO: 1395050 - DNA, 15 bp, Homo sapiens
ggcaaagcaccatat

SEQ ID NO: 1395051 - DNA, 15 bp, Homo sapiens
tggcaaagcaccata

SEQ ID NO: 1395052 - DNA, 15 bp, Homo sapiens
ctggcaaagcaccat

SEQ ID NO: 1395053 - DNA, 15 bp, Homo sapiens
cctggcaaagcacca

SEQ ID NO: 1395054 - DNA, 15 bp, Homo sapiens
tcctggcaaagcacc

SEQ ID NO: 1395055 - DNA, 15 bp, Homo sapiens
gtcctggcaaagcac

SEQ ID NO: 1395056 - DNA, 15 bp, Homo sapiens
tgtcctggcaaagca

SEQ ID NO: 1395057 - DNA, 15 bp, Homo sapiens
gtgtcctggcaaagc

SEQ ID NO: 1395058 - DNA, 15 bp, Homo sapiens
tgtgtcctggcaaag

SEQ ID NO: 1395059 - DNA, 15 bp, Homo sapiens
gtgtgtcctggcaaa

SEQ ID NO: 1395060 - DNA, 15 bp, Homo sapiens
ggtgtgtcctggcaa

SEQ ID NO: 1395061 - DNA, 15 bp, Homo sapiens
tggtgtgtcctggca

SEQ ID NO: 1395062 - DNA, 15 bp, Homo sapiens
ttggtgtgtcctggc

SEQ ID NO: 1395063 - DNA, 15 bp, Homo sapiens
cttggtgtgtcctgg

SEQ ID NO: 1395064 - DNA, 15 bp, Homo sapiens
ccttggtgtgtcctg

SEQ ID NO: 1395065 - DNA, 15 bp, Homo sapiens
gccttggtgtgtcct

SEQ ID NO: 1395066 - DNA, 15 bp, Homo sapiens
agccttggtgtgtcc

SEQ ID NO: 1395067 - DNA, 15 bp, Homo sapiens
tagccttggtgtgtc

SEQ ID NO: 1395068 - DNA, 15 bp, Homo sapiens
ctagccttggtgtgt

SEQ ID NO: 1395069 - DNA, 15 bp, Homo sapiens
tctagccttggtgtg

SEQ ID NO: 1395070 - DNA, 15 bp, Homo sapiens
atctagccttggtgt

SEQ ID NO: 1395071 - DNA, 15 bp, Homo sapiens
gatctagccttggtg

SEQ ID NO: 1395072 - DNA, 15 bp, Homo sapiens
tgatctagccttggt

SEQ ID NO: 1395073 - DNA, 15 bp, Homo sapiens
ctgatctagccttgg

SEQ ID NO: 1395074 - DNA, 15 bp, Homo sapiens
gctgatctagccttg

SEQ ID NO: 1395075 - DNA, 15 bp, Homo sapiens
agctgatctagcctt

SEQ ID NO: 1395076 - DNA, 15 bp, Homo sapiens
aagctgatctagcct

SEQ ID NO: 1395077 - DNA, 15 bp, Homo sapiens
gaagctgatctagcc

SEQ ID NO: 1395078 - DNA, 15 bp, Homo sapiens
tgaagctgatctagc

SEQ ID NO: 1395079 - DNA, 15 bp, Homo sapiens
ttgaagctgatctag

SEQ ID NO: 1395080 - DNA, 15 bp, Homo sapiens
tttgaagctgatcta

SEQ ID NO: 1395081 - DNA, 15 bp, Homo sapiens
gtttgaagctgatct

SEQ ID NO: 1395082 - DNA, 15 bp, Homo sapiens
agtttgaagctgatc

SEQ ID NO: 1395083 - DNA, 15 bp, Homo sapiens
aagtttgaagctgat

SEQ ID NO: 1395084 - DNA, 15 bp, Homo sapiens
taagtttgaagctga

SEQ ID NO: 1395085 - DNA, 15 bp, Homo sapiens
ataagtttgaagctg

SEQ ID NO: 1395086 - DNA, 15 bp, Homo sapiens
tataagtttgaagct

SEQ ID NO: 1395087 - DNA, 15 bp, Homo sapiens
ttataagtttgaagc

SEQ ID NO: 1395088 - DNA, 15 bp, Homo sapiens
tttataagtttgaag

SEQ ID NO: 1395089 - DNA, 15 bp, Homo sapiens
ctttataagtttgaa

SEQ ID NO: 1395090 - DNA, 15 bp, Homo sapiens
actttataagtttga

SEQ ID NO: 1395091 - DNA, 15 bp, Homo sapiens
gactttataagtttg

SEQ ID NO: 1395092 - DNA, 15 bp, Homo sapiens
tgactttataagttt

SEQ ID NO: 1395093 - DNA, 15 bp, Homo sapiens
ttgactttataagtt

SEQ ID NO: 1395094 - DNA, 15 bp, Homo sapiens
tttgactttataagt

SEQ ID NO: 1395095 - DNA, 15 bp, Homo sapiens
atttgactttataag

SEQ ID NO: 1395096 - DNA, 15 bp, Homo sapiens
aatttgactttataa

SEQ ID NO: 1395097 - DNA, 15 bp, Homo sapiens
gaatttgactttata

SEQ ID NO: 1395098 - DNA, 15 bp, Homo sapiens
ggaatttgactttat

SEQ ID NO: 1395099 - DNA, 15 bp, Homo sapiens
aggaatttgacttta

SEQ ID NO: 1395100 - DNA, 15 bp, Homo sapiens
caggaatttgacttt

SEQ ID NO: 1395101 - DNA, 15 bp, Homo sapiens
gcaggaatttgactt

SEQ ID NO: 1395102 - DNA, 15 bp, Homo sapiens
agcaggaatttgact

SEQ ID NO: 1395103 - DNA, 15 bp, Homo sapiens
gagcaggaatttgac

SEQ ID NO: 1395104 - DNA, 15 bp, Homo sapiens
agagcaggaatttga

SEQ ID NO: 1395105 - DNA, 15 bp, Homo sapiens
tagagcaggaatttg

SEQ ID NO: 1395106 - DNA, 15 bp, Homo sapiens
gtagagcaggaattt

SEQ ID NO: 1395107 - DNA, 15 bp, Homo sapiens
tgtagagcaggaatt

SEQ ID NO: 1395108 - DNA, 15 bp, Homo sapiens
gtgtagagcaggaat

SEQ ID NO: 1395109 - DNA, 15 bp, Homo sapiens
ggtgtagagcaggaa

SEQ ID NO: 1395110 - DNA, 15 bp, Homo sapiens
gggtgtagagcagga

SEQ ID NO: 1395111 - DNA, 15 bp, Homo sapiens
tgggtgtagagcagg

SEQ ID NO: 1395112 - DNA, 15 bp, Homo sapiens
gtgggtgtagagcag

SEQ ID NO: 1395113 - DNA, 15 bp, Homo sapiens
agtgggtgtagagca

SEQ ID NO: 1395114 - DNA, 15 bp, Homo sapiens
cagtgggtgtagagc

SEQ ID NO: 1395115 - DNA, 15 bp, Homo sapiens
acagtgggtgtagag

SEQ ID NO: 1395116 - DNA, 15 bp, Homo sapiens
aacagtgggtgtaga

SEQ ID NO: 1395117 - DNA, 15 bp, Homo sapiens
caacagtgggtgtag

SEQ ID NO: 1395118 - DNA, 15 bp, Homo sapiens
ccaacagtgggtgta

SEQ ID NO: 1395119 - DNA, 15 bp, Homo sapiens
cccaacagtgggtgt

SEQ ID NO: 1395120 - DNA, 15 bp, Homo sapiens
gcccaacagtgggtg

SEQ ID NO: 1395121 - DNA, 15 bp, Homo sapiens
tgcccaacagtgggt

SEQ ID NO: 1395122 - DNA, 15 bp, Homo sapiens
ctgcccaacagtggg

SEQ ID NO: 1395123 - DNA, 15 bp, Homo sapiens
gctgcccaacagtgg

SEQ ID NO: 1395124 - DNA, 15 bp, Homo sapiens
tgctgcccaacagtg

SEQ ID NO: 1395125 - DNA, 15 bp, Homo sapiens
gtgctgcccaacagt

SEQ ID NO: 1395126 - DNA, 15 bp, Homo sapiens
tgtgctgcccaacag

SEQ ID NO: 1395127 - DNA, 15 bp, Homo sapiens
gtgtgctgcccaaca

SEQ ID NO: 1395128 - DNA, 15 bp, Homo sapiens
agtgtgctgcccaac

SEQ ID NO: 1395129 - DNA, 15 bp, Homo sapiens
aagtgtgctgcccaa

SEQ ID NO: 1395130 - DNA, 15 bp, Homo sapiens
taagtgtgctgccca

SEQ ID NO: 1395131 - DNA, 15 bp, Homo sapiens
ctaagtgtgctgccc

SEQ ID NO: 1395132 - DNA, 15 bp, Homo sapiens
actaagtgtgctgcc

SEQ ID NO: 1395133 - DNA, 15 bp, Homo sapiens
gactaagtgtgctgc

SEQ ID NO: 1395134 - DNA, 15 bp, Homo sapiens
tgactaagtgtgctg

SEQ ID NO: 1395135 - DNA, 15 bp, Homo sapiens
ttgactaagtgtgct

SEQ ID NO: 1395136 - DNA, 15 bp, Homo sapiens
tttgactaagtgtgc

SEQ ID NO: 1395137 - DNA, 15 bp, Homo sapiens
ttttgactaagtgtg

SEQ ID NO: 1395138 - DNA, 15 bp, Homo sapiens
gttttgactaagtgt

SEQ ID NO: 1395139 - DNA, 15 bp, Homo sapiens
agttttgactaagtg

SEQ ID NO: 1395140 - DNA, 15 bp, Homo sapiens
cagttttgactaagt

SEQ ID NO: 1395141 - DNA, 15 bp, Homo sapiens
tcagttttgactaag

SEQ ID NO: 1395142 - DNA, 15 bp, Homo sapiens
ttcagttttgactaa

SEQ ID NO: 1395143 - DNA, 15 bp, Homo sapiens
attcagttttgacta

SEQ ID NO: 1395144 - DNA, 15 bp, Homo sapiens
aattcagttttgact

SEQ ID NO: 1395145 - DNA, 15 bp, Homo sapiens
aaattcagttttgac

SEQ ID NO: 1395146 - DNA, 15 bp, Homo sapiens
caaattcagttttga

SEQ ID NO: 1395147 - DNA, 15 bp, Homo sapiens
acaaattcagttttg

SEQ ID NO: 1395148 - DNA, 15 bp, Homo sapiens
tacaaattcagtttt

SEQ ID NO: 1395149 - DNA, 15 bp, Homo sapiens
ctacaaattcagttt

SEQ ID NO: 1395150 - DNA, 15 bp, Homo sapiens
actacaaattcagtt

SEQ ID NO: 1395151 - DNA, 15 bp, Homo sapiens
gactacaaattcagt

SEQ ID NO: 1395152 - DNA, 15 bp, Homo sapiens
tgactacaaattcag

SEQ ID NO: 1395153 - DNA, 15 bp, Homo sapiens
atgactacaaattca

SEQ ID NO: 1395154 - DNA, 15 bp, Homo sapiens
tatgactacaaattc

SEQ ID NO: 1395155 - DNA, 15 bp, Homo sapiens
gtatgactacaaatt

SEQ ID NO: 1395156 - DNA, 15 bp, Homo sapiens
ggtatgactacaaat

SEQ ID NO: 1395157 - DNA, 15 bp, Homo sapiens
gggtatgactacaaa

SEQ ID NO: 1395158 - DNA, 15 bp, Homo sapiens
ggggtatgactacaa

SEQ ID NO: 1395159 - DNA, 15 bp, Homo sapiens
tggggtatgactaca

SEQ ID NO: 1395160 - DNA, 15 bp, Homo sapiens
ctggggtatgactac

SEQ ID NO: 1395161 - DNA, 15 bp, Homo sapiens
tctggggtatgacta

SEQ ID NO: 1395162 - DNA, 15 bp, Homo sapiens
gtctggggtatgact

SEQ ID NO: 1395163 - DNA, 15 bp, Homo sapiens
agtctggggtatgac

SEQ ID NO: 1395164 - DNA, 15 bp, Homo sapiens
gagtctggggtatga

SEQ ID NO: 1395165 - DNA, 15 bp, Homo sapiens
tgagtctggggtatg

SEQ ID NO: 1395166 - DNA, 15 bp, Homo sapiens
atgagtctggggtat

SEQ ID NO: 1395167 - DNA, 15 bp, Homo sapiens
aatgagtctggggta

SEQ ID NO: 1395168 - DNA, 15 bp, Homo sapiens
gaatgagtctggggt

SEQ ID NO: 1395169 - DNA, 15 bp, Homo sapiens
agaatgagtctgggg

SEQ ID NO: 1395170 - DNA, 15 bp, Homo sapiens
aagaatgagtctggg

SEQ ID NO: 1395171 - DNA, 15 bp, Homo sapiens
gaagaatgagtctgg

SEQ ID NO: 1395172 - DNA, 15 bp, Homo sapiens
ggaagaatgagtctg

SEQ ID NO: 1395173 - DNA, 15 bp, Homo sapiens
aggaagaatgagtct

SEQ ID NO: 1395174 - DNA, 15 bp, Homo sapiens
gaggaagaatgagtc

SEQ ID NO: 1395175 - DNA, 15 bp, Homo sapiens
ggaggaagaatgagt

SEQ ID NO: 1395176 - DNA, 15 bp, Homo sapiens
aggaggaagaatgag

SEQ ID NO: 1395177 - DNA, 15 bp, Homo sapiens
caggaggaagaatga

SEQ ID NO: 1395178 - DNA, 15 bp, Homo sapiens
tcaggaggaagaatg

SEQ ID NO: 1395179 - DNA, 15 bp, Homo sapiens
ctcaggaggaagaat

SEQ ID NO: 1395180 - DNA, 15 bp, Homo sapiens
gctcaggaggaagaa

SEQ ID NO: 1395181 - DNA, 15 bp, Homo sapiens
agctcaggaggaaga

SEQ ID NO: 1395182 - DNA, 15 bp, Homo sapiens
gagctcaggaggaag

SEQ ID NO: 1395183 - DNA, 15 bp, Homo sapiens
agagctcaggaggaa

SEQ ID NO: 1395184 - DNA, 15 bp, Homo sapiens
gagagctcaggagga

SEQ ID NO: 1395185 - DNA, 15 bp, Homo sapiens
ggagagctcaggagg

SEQ ID NO: 1395186 - DNA, 15 bp, Homo sapiens
tggagagctcaggag

SEQ ID NO: 1395187 - DNA, 15 bp, Homo sapiens
gtggagagctcagga

SEQ ID NO: 1395188 - DNA, 15 bp, Homo sapiens
tgtggagagctcagg

SEQ ID NO: 1395189 - DNA, 15 bp, Homo sapiens
atgtggagagctcag

SEQ ID NO: 1395190 - DNA, 15 bp, Homo sapiens
gatgtggagagctca

SEQ ID NO: 1395191 - DNA, 15 bp, Homo sapiens
tgatgtggagagctc

SEQ ID NO: 1395192 - DNA, 15 bp, Homo sapiens
ctgatgtggagagct

SEQ ID NO: 1395193 - DNA, 15 bp, Homo sapiens
actgatgtggagagc

SEQ ID NO: 1395194 - DNA, 15 bp, Homo sapiens
cactgatgtggagag

SEQ ID NO: 1395195 - DNA, 15 bp, Homo sapiens
tcactgatgtggaga

SEQ ID NO: 1395196 - DNA, 15 bp, Homo sapiens
ttcactgatgtggag

SEQ ID NO: 1395197 - DNA, 15 bp, Homo sapiens
attcactgatgtgga

SEQ ID NO: 1395198 - DNA, 15 bp, Homo sapiens
aattcactgatgtgg

SEQ ID NO: 1395199 - DNA, 15 bp, Homo sapiens
caattcactgatgtg

SEQ ID NO: 1395200 - DNA, 15 bp, Homo sapiens
acaattcactgatgt

SEQ ID NO: 1395201 - DNA, 15 bp, Homo sapiens
gacaattcactgatg

SEQ ID NO: 1395202 - DNA, 15 bp, Homo sapiens
ggacaattcactgat

SEQ ID NO: 1395203 - DNA, 15 bp, Homo sapiens
gggacaattcactga

SEQ ID NO: 1395204 - DNA, 15 bp, Homo sapiens
agggacaattcactg

SEQ ID NO: 1395205 - DNA, 15 bp, Homo sapiens
gagggacaattcact

SEQ ID NO: 1395206 - DNA, 15 bp, Homo sapiens
tgagggacaattcac

SEQ ID NO: 1395207 - DNA, 15 bp, Homo sapiens
atgagggacaattca

SEQ ID NO: 1395208 - DNA, 15 bp, Homo sapiens
aatgagggacaattc

SEQ ID NO: 1395209 - DNA, 15 bp, Homo sapiens
gaatgagggacaatt

SEQ ID NO: 1395210 - DNA, 15 bp, Homo sapiens
ggaatgagggacaat

SEQ ID NO: 1395211 - DNA, 15 bp, Homo sapiens
tggaatgagggacaa

SEQ ID NO: 1395212 - DNA, 15 bp, Homo sapiens
atggaatgagggaca

SEQ ID NO: 1395213 - DNA, 15 bp, Homo sapiens
aatggaatgagggac

SEQ ID NO: 1395214 - DNA, 15 bp, Homo sapiens
taatggaatgaggga

SEQ ID NO: 1395215 - DNA, 15 bp, Homo sapiens
ataatggaatgaggg

SEQ ID NO: 1395216 - DNA, 15 bp, Homo sapiens
aataatggaatgagg

SEQ ID NO: 1395217 - DNA, 15 bp, Homo sapiens
gaataatggaatgag

SEQ ID NO: 1395218 - DNA, 15 bp, Homo sapiens
agaataatggaatga

SEQ ID NO: 1395219 - DNA, 15 bp, Homo sapiens
aagaataatggaatg

SEQ ID NO: 1395220 - DNA, 15 bp, Homo sapiens
taagaataatggaat

SEQ ID NO: 1395221 - DNA, 15 bp, Homo sapiens
ctaagaataatggaa

SEQ ID NO: 1395222 - DNA, 15 bp, Homo sapiens
gctaagaataatgga

SEQ ID NO: 1395223 - DNA, 15 bp, Homo sapiens
tgctaagaataatgg

SEQ ID NO: 1395224 - DNA, 15 bp, Homo sapiens
gtgctaagaataatg

SEQ ID NO: 1395225 - DNA, 15 bp, Homo sapiens
agtgctaagaataat

SEQ ID NO: 1395226 - DNA, 15 bp, Homo sapiens
tagtgctaagaataa

SEQ ID NO: 1395227 - DNA, 15 bp, Homo sapiens
gtagtgctaagaata

SEQ ID NO: 1395228 - DNA, 15 bp, Homo sapiens
ggtagtgctaagaat

SEQ ID NO: 1395229 - DNA, 15 bp, Homo sapiens
tggtagtgctaagaa

SEQ ID NO: 1395230 - DNA, 15 bp, Homo sapiens
gtggtagtgctaaga

SEQ ID NO: 1395231 - DNA, 15 bp, Homo sapiens
ggtggtagtgctaag

SEQ ID NO: 1395232 - DNA, 15 bp, Homo sapiens
gggtggtagtgctaa

SEQ ID NO: 1395233 - DNA, 15 bp, Homo sapiens
ggggtggtagtgcta

SEQ ID NO: 1395234 - DNA, 15 bp, Homo sapiens
gggggtggtagtgct

SEQ ID NO: 1395235 - DNA, 15 bp, Homo sapiens
tgggggtggtagtgc

SEQ ID NO: 1395236 - DNA, 15 bp, Homo sapiens
gtgggggtggtagtg

SEQ ID NO: 1395237 - DNA, 15 bp, Homo sapiens
ggtgggggtggtagt

SEQ ID NO: 1395238 - DNA, 15 bp, Homo sapiens
gggtgggggtggtag

SEQ ID NO: 1395239 - DNA, 15 bp, Homo sapiens
agggtgggggtggta

SEQ ID NO: 1395240 - DNA, 15 bp, Homo sapiens
gagggtgggggtggt

SEQ ID NO: 1395241 - DNA, 15 bp, Homo sapiens
tgagggtgggggtgg

SEQ ID NO: 1395242 - DNA, 15 bp, Homo sapiens
ttgagggtgggggtg

SEQ ID NO: 1395243 - DNA, 15 bp, Homo sapiens
attgagggtgggggt

SEQ ID NO: 1395244 - DNA, 15 bp, Homo sapiens
aattgagggtggggg

SEQ ID NO: 1395245 - DNA, 15 bp, Homo sapiens
gaattgagggtgggg

SEQ ID NO: 1395246 - DNA, 15 bp, Homo sapiens
ggaattgagggtggg

SEQ ID NO: 1395247 - DNA, 15 bp, Homo sapiens
aggaattgagggtgg

SEQ ID NO: 1395248 - DNA, 15 bp, Homo sapiens
gaggaattgagggtg

SEQ ID NO: 1395249 - DNA, 15 bp, Homo sapiens
agaggaattgagggt

SEQ ID NO: 1395250 - DNA, 15 bp, Homo sapiens
gagaggaattgaggg

SEQ ID NO: 1395251 - DNA, 15 bp, Homo sapiens
tgagaggaattgagg

SEQ ID NO: 1395252 - DNA, 15 bp, Homo sapiens
ctgagaggaattgag

SEQ ID NO: 1395253 - DNA, 15 bp, Homo sapiens
cctgagaggaattga

SEQ ID NO: 1395254 - DNA, 15 bp, Homo sapiens
acctgagaggaattg

SEQ ID NO: 1395255 - DNA, 15 bp, Homo sapiens
tacctgagaggaatt

SEQ ID NO: 1395256 - DNA, 15 bp, Homo sapiens
ctacctgagaggaat

SEQ ID NO: 1395257 - DNA, 15 bp, Homo sapiens
tctacctgagaggaa

SEQ ID NO: 1395258 - DNA, 15 bp, Homo sapiens
atctacctgagagga

SEQ ID NO: 1395259 - DNA, 15 bp, Homo sapiens
aatctacctgagagg

SEQ ID NO: 1395260 - DNA, 15 bp, Homo sapiens
gaatctacctgagag

SEQ ID NO: 1395261 - DNA, 15 bp, Homo sapiens
tgaatctacctgaga

SEQ ID NO: 1395262 - DNA, 15 bp, Homo sapiens
atgaatctacctgag

SEQ ID NO: 1395263 - DNA, 15 bp, Homo sapiens
tatgaatctacctga

SEQ ID NO: 1395264 - DNA, 15 bp, Homo sapiens
ttatgaatctacctg

SEQ ID NO: 1395265 - DNA, 15 bp, Homo sapiens
tttatgaatctacct

SEQ ID NO: 1395266 - DNA, 15 bp, Homo sapiens
ctttatgaatctacc

SEQ ID NO: 1395267 - DNA, 15 bp, Homo sapiens
tctttatgaatctac

SEQ ID NO: 1395268 - DNA, 15 bp, Homo sapiens
ttctttatgaatcta

SEQ ID NO: 1395269 - DNA, 15 bp, Homo sapiens
attctttatgaatct

SEQ ID NO: 1395270 - DNA, 15 bp, Homo sapiens
tattctttatgaatc

SEQ ID NO: 1395271 - DNA, 15 bp, Homo sapiens
ctattctttatgaat

SEQ ID NO: 1395272 - DNA, 15 bp, Homo sapiens
tctattctttatgaa

SEQ ID NO: 1395273 - DNA, 15 bp, Homo sapiens
gtctattctttatga

SEQ ID NO: 1395274 - DNA, 15 bp, Homo sapiens
tgtctattctttatg

SEQ ID NO: 1395275 - DNA, 15 bp, Homo sapiens
ctgtctattctttat

SEQ ID NO: 1395276 - DNA, 15 bp, Homo sapiens
tctgtctattcttta

SEQ ID NO: 1395277 - DNA, 15 bp, Homo sapiens
ttctgtctattcttt

SEQ ID NO: 1395278 - DNA, 15 bp, Homo sapiens
tttctgtctattctt

SEQ ID NO: 1395279 - DNA, 15 bp, Homo sapiens
ctttctgtctattct

SEQ ID NO: 1395280 - DNA, 15 bp, Homo sapiens
tctttctgtctattc

SEQ ID NO: 1395281 - DNA, 15 bp, Homo sapiens
ttctttctgtctatt

SEQ ID NO: 1395282 - DNA, 15 bp, Homo sapiens
gttctttctgtctat

SEQ ID NO: 1395283 - DNA, 15 bp, Homo sapiens
ggttctttctgtcta

SEQ ID NO: 1395284 - DNA, 15 bp, Homo sapiens
tggttctttctgtct

SEQ ID NO: 1395285 - DNA, 15 bp, Homo sapiens
ttggttctttctgtc

SEQ ID NO: 1395286 - DNA, 15 bp, Homo sapiens
tttggttctttctgt

SEQ ID NO: 1395287 - DNA, 15 bp, Homo sapiens
ctttggttctttctg

SEQ ID NO: 1395288 - DNA, 15 bp, Homo sapiens
cctttggttctttct

SEQ ID NO: 1395289 - DNA, 15 bp, Homo sapiens
ccctttggttctttc

SEQ ID NO: 1395290 - DNA, 15 bp, Homo sapiens
accctttggttcttt

SEQ ID NO: 1395291 - DNA, 15 bp, Homo sapiens
caccctttggttctt

SEQ ID NO: 1395292 - DNA, 15 bp, Homo sapiens
tcaccctttggttct

SEQ ID NO: 1395293 - DNA, 15 bp, Homo sapiens
atcaccctttggttc

SEQ ID NO: 1395294 - DNA, 15 bp, Homo sapiens
tatcaccctttggtt

SEQ ID NO: 1395295 - DNA, 15 bp, Homo sapiens
ttatcaccctttggt

SEQ ID NO: 1395296 - DNA, 15 bp, Homo sapiens
cttatcaccctttgg

SEQ ID NO: 1395297 - DNA, 15 bp, Homo sapiens
gcttatcaccctttg

SEQ ID NO: 1395298 - DNA, 15 bp, Homo sapiens
agcttatcacccttt

SEQ ID NO: 1395299 - DNA, 15 bp, Homo sapiens
tagcttatcaccctt

SEQ ID NO: 1395300 - DNA, 15 bp, Homo sapiens
atagcttatcaccct

SEQ ID NO: 1395301 - DNA, 15 bp, Homo sapiens
gatagcttatcaccc

SEQ ID NO: 1395302 - DNA, 15 bp, Homo sapiens
tgatagcttatcacc

SEQ ID NO: 1395303 - DNA, 15 bp, Homo sapiens
ctgatagcttatcac

SEQ ID NO: 1395304 - DNA, 15 bp, Homo sapiens
gctgatagcttatca

SEQ ID NO: 1395305 - DNA, 15 bp, Homo sapiens
ggctgatagcttatc

SEQ ID NO: 1395306 - DNA, 15 bp, Homo sapiens
aggctgatagcttat

SEQ ID NO: 1395307 - DNA, 15 bp, Homo sapiens
aaggctgatagctta

SEQ ID NO: 1395308 - DNA, 15 bp, Homo sapiens
caaggctgatagctt

SEQ ID NO: 1395309 - DNA, 15 bp, Homo sapiens
acaaggctgatagct

SEQ ID NO: 1395310 - DNA, 15 bp, Homo sapiens
aacaaggctgatagc

SEQ ID NO: 1395311 - DNA, 15 bp, Homo sapiens
taacaaggctgatag

SEQ ID NO: 1395312 - DNA, 15 bp, Homo sapiens
ttaacaaggctgata

SEQ ID NO: 1395313 - DNA, 15 bp, Homo sapiens
attaacaaggctgat

SEQ ID NO: 1395314 - DNA, 15 bp, Homo sapiens
tattaacaaggctga

SEQ ID NO: 1395315 - DNA, 15 bp, Homo sapiens
gtattaacaaggctg

SEQ ID NO: 1395316 - DNA, 15 bp, Homo sapiens
agtattaacaaggct

SEQ ID NO: 1395317 - DNA, 15 bp, Homo sapiens
aagtattaacaaggc

SEQ ID NO: 1395318 - DNA, 15 bp, Homo sapiens
taagtattaacaagg

SEQ ID NO: 1395319 - DNA, 15 bp, Homo sapiens
gtaagtattaacaag

SEQ ID NO: 1395320 - DNA, 15 bp, Homo sapiens
tgtaagtattaacaa

SEQ ID NO: 1395321 - DNA, 15 bp, Homo sapiens
atgtaagtattaaca

SEQ ID NO: 1395322 - DNA, 15 bp, Homo sapiens
catgtaagtattaac

SEQ ID NO: 1395323 - DNA, 15 bp, Homo sapiens
ccatgtaagtattaa

SEQ ID NO: 1395324 - DNA, 15 bp, Homo sapiens
accatgtaagtatta

SEQ ID NO: 1395325 - DNA, 15 bp, Homo sapiens
taccatgtaagtatt

SEQ ID NO: 1395326 - DNA, 15 bp, Homo sapiens
ttaccatgtaagtat

SEQ ID NO: 1395327 - DNA, 15 bp, Homo sapiens
gttaccatgtaagta

SEQ ID NO: 1395328 - DNA, 15 bp, Homo sapiens
agttaccatgtaagt

SEQ ID NO: 1395329 - DNA, 15 bp, Homo sapiens
gagttaccatgtaag

SEQ ID NO: 1395330 - DNA, 15 bp, Homo sapiens
tgagttaccatgtaa

SEQ ID NO: 1395331 - DNA, 15 bp, Homo sapiens
gtgagttaccatgta

SEQ ID NO: 1395332 - DNA, 15 bp, Homo sapiens
tgtgagttaccatgt

SEQ ID NO: 1395333 - DNA, 15 bp, Homo sapiens
gtgtgagttaccatg

SEQ ID NO: 1395334 - DNA, 15 bp, Homo sapiens
tgtgtgagttaccat

SEQ ID NO: 1395335 - DNA, 15 bp, Homo sapiens
atgtgtgagttacca

SEQ ID NO: 1395336 - DNA, 15 bp, Homo sapiens
aatgtgtgagttacc

SEQ ID NO: 1395337 - DNA, 15 bp, Homo sapiens
taatgtgtgagttac

SEQ ID NO: 1395338 - DNA, 15 bp, Homo sapiens
gtaatgtgtgagtta

SEQ ID NO: 1395339 - DNA, 15 bp, Homo sapiens
tgtaatgtgtgagtt

SEQ ID NO: 1395340 - DNA, 15 bp, Homo sapiens
ttgtaatgtgtgagt

SEQ ID NO: 1395341 - DNA, 15 bp, Homo sapiens
cttgtaatgtgtgag

SEQ ID NO: 1395342 - DNA, 15 bp, Homo sapiens
ccttgtaatgtgtga

SEQ ID NO: 1395343 - DNA, 15 bp, Homo sapiens
gccttgtaatgtgtg

SEQ ID NO: 1395344 - DNA, 15 bp, Homo sapiens
agccttgtaatgtgt

SEQ ID NO: 1395345 - DNA, 15 bp, Homo sapiens
aagccttgtaatgtg

SEQ ID NO: 1395346 - DNA, 15 bp, Homo sapiens
gaagccttgtaatgt

SEQ ID NO: 1395347 - DNA, 15 bp, Homo sapiens
ggaagccttgtaatg

SEQ ID NO: 1395348 - DNA, 15 bp, Homo sapiens
aggaagccttgtaat

SEQ ID NO: 1395349 - DNA, 15 bp, Homo sapiens
taggaagccttgtaa

SEQ ID NO: 1395350 - DNA, 15 bp, Homo sapiens
ctaggaagccttgta

SEQ ID NO: 1395351 - DNA, 15 bp, Homo sapiens
actaggaagccttgt

SEQ ID NO: 1395352 - DNA, 15 bp, Homo sapiens
tactaggaagccttg

SEQ ID NO: 1395353 - DNA, 15 bp, Homo sapiens
atactaggaagcctt

SEQ ID NO: 1395354 - DNA, 15 bp, Homo sapiens
catactaggaagcct

SEQ ID NO: 1395355 - DNA, 15 bp, Homo sapiens
ccatactaggaagcc

SEQ ID NO: 1395356 - DNA, 15 bp, Homo sapiens
tccatactaggaagc

SEQ ID NO: 1395357 - DNA, 15 bp, Homo sapiens
ttccatactaggaag

SEQ ID NO: 1395358 - DNA, 15 bp, Homo sapiens
cttccatactaggaa

SEQ ID NO: 1395359 - DNA, 15 bp, Homo sapiens
tcttccatactagga

SEQ ID NO: 1395360 - DNA, 15 bp, Homo sapiens
ctcttccatactagg

SEQ ID NO: 1395361 - DNA, 15 bp, Homo sapiens
cctcttccatactag

SEQ ID NO: 1395362 - DNA, 15 bp, Homo sapiens
tcctcttccatacta

SEQ ID NO: 1395363 - DNA, 15 bp, Homo sapiens
atcctcttccatact

SEQ ID NO: 1395364 - DNA, 15 bp, Homo sapiens
tatcctcttccatac

SEQ ID NO: 1395365 - DNA, 15 bp, Homo sapiens
gtatcctcttccata

SEQ ID NO: 1395366 - DNA, 15 bp, Homo sapiens
tgtatcctcttccat

SEQ ID NO: 1395367 - DNA, 15 bp, Homo sapiens
atgtatcctcttcca

SEQ ID NO: 1395368 - DNA, 15 bp, Homo sapiens
tatgtatcctcttcc

SEQ ID NO: 1395369 - DNA, 15 bp, Homo sapiens
ctatgtatcctcttc

SEQ ID NO: 1395370 - DNA, 15 bp, Homo sapiens
cctatgtatcctctt

SEQ ID NO: 1395371 - DNA, 15 bp, Homo sapiens
ccctatgtatcctct

SEQ ID NO: 1395372 - DNA, 15 bp, Homo sapiens
gccctatgtatcctc

SEQ ID NO: 1395373 - DNA, 15 bp, Homo sapiens
agccctatgtatcct

SEQ ID NO: 1395374 - DNA, 15 bp, Homo sapiens
cagccctatgtatcc

SEQ ID NO: 1395375 - DNA, 15 bp, Homo sapiens
acagccctatgtatc

SEQ ID NO: 1395376 - DNA, 15 bp, Homo sapiens
cacagccctatgtat

SEQ ID NO: 1395377 - DNA, 15 bp, Homo sapiens
ccacagccctatgta

SEQ ID NO: 1395378 - DNA, 15 bp, Homo sapiens
gccacagccctatgt

SEQ ID NO: 1395379 - DNA, 15 bp, Homo sapiens
ggccacagccctatg

SEQ ID NO: 1395380 - DNA, 15 bp, Homo sapiens
gggccacagccctat

SEQ ID NO: 1395381 - DNA, 15 bp, Homo sapiens
tgggccacagcccta

SEQ ID NO: 1395382 - DNA, 15 bp, Homo sapiens
ttgggccacagccct

SEQ ID NO: 1395383 - DNA, 15 bp, Homo sapiens
tttgggccacagccc

SEQ ID NO: 1395384 - DNA, 15 bp, Homo sapiens
ttttgggccacagcc

SEQ ID NO: 1395385 - DNA, 15 bp, Homo sapiens
attttgggccacagc

SEQ ID NO: 1395386 - DNA, 15 bp, Homo sapiens
tattttgggccacag

SEQ ID NO: 1395387 - DNA, 15 bp, Homo sapiens
atattttgggccaca

SEQ ID NO: 1395388 - DNA, 15 bp, Homo sapiens
catattttgggccac

SEQ ID NO: 1395389 - DNA, 15 bp, Homo sapiens
ccatattttgggcca

SEQ ID NO: 1395390 - DNA, 15 bp, Homo sapiens
gccatattttgggcc

SEQ ID NO: 1395391 - DNA, 15 bp, Homo sapiens
tgccatattttgggc

SEQ ID NO: 1395392 - DNA, 15 bp, Homo sapiens
atgccatattttggg

SEQ ID NO: 1395393 - DNA, 15 bp, Homo sapiens
gatgccatattttgg

SEQ ID NO: 1395394 - DNA, 15 bp, Homo sapiens
tgatgccatattttg

SEQ ID NO: 1395395 - DNA, 15 bp, Homo sapiens
atgatgccatatttt

SEQ ID NO: 1395396 - DNA, 15 bp, Homo sapiens
catgatgccatattt

SEQ ID NO: 1395397 - DNA, 15 bp, Homo sapiens
gcatgatgccatatt

SEQ ID NO: 1395398 - DNA, 15 bp, Homo sapiens
agcatgatgccatat

SEQ ID NO: 1395399 - DNA, 15 bp, Homo sapiens
gagcatgatgccata

SEQ ID NO: 1395400 - DNA, 15 bp, Homo sapiens
ggagcatgatgccat

SEQ ID NO: 1395401 - DNA, 15 bp, Homo sapiens
aggagcatgatgcca

SEQ ID NO: 1395402 - DNA, 15 bp, Homo sapiens
aaggagcatgatgcc

SEQ ID NO: 1395403 - DNA, 15 bp, Homo sapiens
gaaggagcatgatgc

SEQ ID NO: 1395404 - DNA, 15 bp, Homo sapiens
ggaaggagcatgatg

SEQ ID NO: 1395405 - DNA, 15 bp, Homo sapiens
tggaaggagcatgat

SEQ ID NO: 1395406 - DNA, 15 bp, Homo sapiens
ttggaaggagcatga

SEQ ID NO: 1395407 - DNA, 15 bp, Homo sapiens
gttggaaggagcatg

SEQ ID NO: 1395408 - DNA, 15 bp, Homo sapiens
agttggaaggagcat

SEQ ID NO: 1395409 - DNA, 15 bp, Homo sapiens
tagttggaaggagca

SEQ ID NO: 1395410 - DNA, 15 bp, Homo sapiens
ctagttggaaggagc

SEQ ID NO: 1395411 - DNA, 15 bp, Homo sapiens
gctagttggaaggag

SEQ ID NO: 1395412 - DNA, 15 bp, Homo sapiens
tgctagttggaagga

SEQ ID NO: 1395413 - DNA, 15 bp, Homo sapiens
gtgctagttggaagg

SEQ ID NO: 1395414 - DNA, 15 bp, Homo sapiens
agtgctagttggaag

SEQ ID NO: 1395415 - DNA, 15 bp, Homo sapiens
cagtgctagttggaa

SEQ ID NO: 1395416 - DNA, 15 bp, Homo sapiens
tcagtgctagttgga

SEQ ID NO: 1395417 - DNA, 15 bp, Homo sapiens
ttcagtgctagttgg

SEQ ID NO: 1395418 - DNA, 15 bp, Homo sapiens
cttcagtgctagttg

SEQ ID NO: 1395419 - DNA, 15 bp, Homo sapiens
tcttcagtgctagtt

SEQ ID NO: 1395420 - DNA, 15 bp, Homo sapiens
gtcttcagtgctagt

SEQ ID NO: 1395421 - DNA, 15 bp, Homo sapiens
tgtcttcagtgctag

SEQ ID NO: 1395422 - DNA, 15 bp, Homo sapiens
ttgtcttcagtgcta

SEQ ID NO: 1395423 - DNA, 15 bp, Homo sapiens
gttgtcttcagtgct

SEQ ID NO: 1395424 - DNA, 15 bp, Homo sapiens
tgttgtcttcagtgc

SEQ ID NO: 1395425 - DNA, 15 bp, Homo sapiens
atgttgtcttcagtg

SEQ ID NO: 1395426 - DNA, 15 bp, Homo sapiens
catgttgtcttcagt

SEQ ID NO: 1395427 - DNA, 15 bp, Homo sapiens
ccatgttgtcttcag

SEQ ID NO: 1395428 - DNA, 15 bp, Homo sapiens
accatgttgtcttca

SEQ ID NO: 1395429 - DNA, 15 bp, Homo sapiens
caccatgttgtcttc

SEQ ID NO: 1395430 - DNA, 15 bp, Homo sapiens
acaccatgttgtctt

SEQ ID NO: 1395431 - DNA, 15 bp, Homo sapiens
tacaccatgttgtct

SEQ ID NO: 1395432 - DNA, 15 bp, Homo sapiens
ctacaccatgttgtc

SEQ ID NO: 1395433 - DNA, 15 bp, Homo sapiens
tctacaccatgttgt

SEQ ID NO: 1395434 - DNA, 15 bp, Homo sapiens
ttctacaccatgttg

SEQ ID NO: 1395435 - DNA, 15 bp, Homo sapiens
cttctacaccatgtt

SEQ ID NO: 1395436 - DNA, 15 bp, Homo sapiens
ccttctacaccatgt

SEQ ID NO: 1395437 - DNA, 15 bp, Homo sapiens
cccttctacaccatg

SEQ ID NO: 1395438 - DNA, 15 bp, Homo sapiens
ccccttctacaccat

SEQ ID NO: 1395439 - DNA, 15 bp, Homo sapiens
gccccttctacacca

SEQ ID NO: 1395440 - DNA, 15 bp, Homo sapiens
ggccccttctacacc

SEQ ID NO: 1395441 - DNA, 15 bp, Homo sapiens
tggccccttctacac

SEQ ID NO: 1395442 - DNA, 15 bp, Homo sapiens
ttggccccttctaca

SEQ ID NO: 1395443 - DNA, 15 bp, Homo sapiens
gttggccccttctac

SEQ ID NO: 1395444 - DNA, 15 bp, Homo sapiens
agttggccccttcta

SEQ ID NO: 1395445 - DNA, 15 bp, Homo sapiens
tagttggccccttct

SEQ ID NO: 1395446 - DNA, 15 bp, Homo sapiens
ttagttggccccttc

SEQ ID NO: 1395447 - DNA, 15 bp, Homo sapiens
attagttggcccctt

SEQ ID NO: 1395448 - DNA, 15 bp, Homo sapiens
cattagttggcccct

SEQ ID NO: 1395449 - DNA, 15 bp, Homo sapiens
gcattagttggcccc

SEQ ID NO: 1395450 - DNA, 15 bp, Homo sapiens
tgcattagttggccc

SEQ ID NO: 1395451 - DNA, 15 bp, Homo sapiens
gtgcattagttggcc

SEQ ID NO: 1395452 - DNA, 15 bp, Homo sapiens
ggtgcattagttggc

SEQ ID NO: 1395453 - DNA, 15 bp, Homo sapiens
gggtgcattagttgg

SEQ ID NO: 1395454 - DNA, 15 bp, Homo sapiens
agggtgcattagttg

SEQ ID NO: 1395455 - DNA, 15 bp, Homo sapiens
cagggtgcattagtt

SEQ ID NO: 1395456 - DNA, 15 bp, Homo sapiens
acagggtgcattagt

SEQ ID NO: 1395457 - DNA, 15 bp, Homo sapiens
gacagggtgcattag

SEQ ID NO: 1395458 - DNA, 15 bp, Homo sapiens
agacagggtgcatta

SEQ ID NO: 1395459 - DNA, 15 bp, Homo sapiens
gagacagggtgcatt

SEQ ID NO: 1395460 - DNA, 15 bp, Homo sapiens
tgagacagggtgcat

SEQ ID NO: 1395461 - DNA, 15 bp, Homo sapiens
ctgagacagggtgca

SEQ ID NO: 1395462 - DNA, 15 bp, Homo sapiens
cctgagacagggtgc

SEQ ID NO: 1395463 - DNA, 15 bp, Homo sapiens
gcctgagacagggtg

SEQ ID NO: 1395464 - DNA, 15 bp, Homo sapiens
agcctgagacagggt

SEQ ID NO: 1395465 - DNA, 15 bp, Homo sapiens
cagcctgagacaggg

SEQ ID NO: 1395466 - DNA, 15 bp, Homo sapiens
acagcctgagacagg

SEQ ID NO: 1395467 - DNA, 15 bp, Homo sapiens
cacagcctgagacag

SEQ ID NO: 1395468 - DNA, 15 bp, Homo sapiens
tcacagcctgagaca

SEQ ID NO: 1395469 - DNA, 15 bp, Homo sapiens
ttcacagcctgagac

SEQ ID NO: 1395470 - DNA, 15 bp, Homo sapiens
gttcacagcctgaga

SEQ ID NO: 1395471 - DNA, 15 bp, Homo sapiens
tgttcacagcctgag

SEQ ID NO: 1395472 - DNA, 15 bp, Homo sapiens
gtgttcacagcctga

SEQ ID NO: 1395473 - DNA, 15 bp, Homo sapiens
ggtgttcacagcctg

SEQ ID NO: 1395474 - DNA, 15 bp, Homo sapiens
gggtgttcacagcct

SEQ ID NO: 1395475 - DNA, 15 bp, Homo sapiens
agggtgttcacagcc

SEQ ID NO: 1395476 - DNA, 15 bp, Homo sapiens
gagggtgttcacagc

SEQ ID NO: 1395477 - DNA, 15 bp, Homo sapiens
agagggtgttcacag

SEQ ID NO: 1395478 - DNA, 15 bp, Homo sapiens
aagagggtgttcaca

SEQ ID NO: 1395479 - DNA, 15 bp, Homo sapiens
aaagagggtgttcac

SEQ ID NO: 1395480 - DNA, 15 bp, Homo sapiens
gaaagagggtgttca

SEQ ID NO: 1395481 - DNA, 15 bp, Homo sapiens
ggaaagagggtgttc

SEQ ID NO: 1395482 - DNA, 15 bp, Homo sapiens
gggaaagagggtgtt

SEQ ID NO: 1395483 - DNA, 15 bp, Homo sapiens
tgggaaagagggtgt

SEQ ID NO: 1395484 - DNA, 15 bp, Homo sapiens
ttgggaaagagggtg

SEQ ID NO: 1395485 - DNA, 15 bp, Homo sapiens
gttgggaaagagggt

SEQ ID NO: 1395486 - DNA, 15 bp, Homo sapiens
agttgggaaagaggg

SEQ ID NO: 1395487 - DNA, 15 bp, Homo sapiens
cagttgggaaagagg

SEQ ID NO: 1395488 - DNA, 15 bp, Homo sapiens
tcagttgggaaagag

SEQ ID NO: 1395489 - DNA, 15 bp, Homo sapiens
ctcagttgggaaaga

SEQ ID NO: 1395490 - DNA, 15 bp, Homo sapiens
tctcagttgggaaag

SEQ ID NO: 1395491 - DNA, 15 bp, Homo sapiens
gtctcagttgggaaa

SEQ ID NO: 1395492 - DNA, 15 bp, Homo sapiens
agtctcagttgggaa

SEQ ID NO: 1395493 - DNA, 15 bp, Homo sapiens
aagtctcagttggga

SEQ ID NO: 1395494 - DNA, 15 bp, Homo sapiens
taagtctcagttggg

SEQ ID NO: 1395495 - DNA, 15 bp, Homo sapiens
gtaagtctcagttgg

SEQ ID NO: 1395496 - DNA, 15 bp, Homo sapiens
agtaagtctcagttg

SEQ ID NO: 1395497 - DNA, 15 bp, Homo sapiens
tagtaagtctcagtt

SEQ ID NO: 1395498 - DNA, 15 bp, Homo sapiens
gtagtaagtctcagt

SEQ ID NO: 1395499 - DNA, 15 bp, Homo sapiens
ggtagtaagtctcag

SEQ ID NO: 1395500 - DNA, 15 bp, Homo sapiens
aggtagtaagtctca

SEQ ID NO: 1395501 - DNA, 15 bp, Homo sapiens
aaggtagtaagtctc

SEQ ID NO: 1395502 - DNA, 15 bp, Homo sapiens
aaaggtagtaagtct

SEQ ID NO: 1395503 - DNA, 15 bp, Homo sapiens
taaaggtagtaagtc

SEQ ID NO: 1395504 - DNA, 15 bp, Homo sapiens
gtaaaggtagtaagt

SEQ ID NO: 1395505 - DNA, 15 bp, Homo sapiens
agtaaaggtagtaag

SEQ ID NO: 1395506 - DNA, 15 bp, Homo sapiens
tagtaaaggtagtaa

SEQ ID NO: 1395507 - DNA, 15 bp, Homo sapiens
gtagtaaaggtagta

SEQ ID NO: 1395508 - DNA, 15 bp, Homo sapiens
agtagtaaaggtagt

SEQ ID NO: 1395509 - DNA, 15 bp, Homo sapiens
aagtagtaaaggtag

SEQ ID NO: 1395510 - DNA, 15 bp, Homo sapiens
caagtagtaaaggta

SEQ ID NO: 1395511 - DNA, 15 bp, Homo sapiens
ccaagtagtaaaggt

SEQ ID NO: 1395512 - DNA, 15 bp, Homo sapiens
tccaagtagtaaagg

SEQ ID NO: 1395513 - DNA, 15 bp, Homo sapiens
gtccaagtagtaaag

SEQ ID NO: 1395514 - DNA, 15 bp, Homo sapiens
tgtccaagtagtaaa

SEQ ID NO: 1395515 - DNA, 15 bp, Homo sapiens
atgtccaagtagtaa

SEQ ID NO: 1395516 - DNA, 15 bp, Homo sapiens
catgtccaagtagta

SEQ ID NO: 1395517 - DNA, 15 bp, Homo sapiens
gcatgtccaagtagt

SEQ ID NO: 1395518 - DNA, 15 bp, Homo sapiens
tgcatgtccaagtag

SEQ ID NO: 1395519 - DNA, 15 bp, Homo sapiens
ttgcatgtccaagta

SEQ ID NO: 1395520 - DNA, 15 bp, Homo sapiens
tttgcatgtccaagt

SEQ ID NO: 1395521 - DNA, 15 bp, Homo sapiens
ttttgcatgtccaag

SEQ ID NO: 1395522 - DNA, 15 bp, Homo sapiens
tttttgcatgtccaa

SEQ ID NO: 1395523 - DNA, 15 bp, Homo sapiens
ttttttgcatgtcca

SEQ ID NO: 1395524 - DNA, 15 bp, Homo sapiens
gttttttgcatgtcc

SEQ ID NO: 1395525 - DNA, 15 bp, Homo sapiens
ggttttttgcatgtc

SEQ ID NO: 1395526 - DNA, 15 bp, Homo sapiens
tggttttttgcatgt

SEQ ID NO: 1395527 - DNA, 15 bp, Homo sapiens
ttggttttttgcatg

SEQ ID NO: 1395528 - DNA, 15 bp, Homo sapiens
tttggttttttgcat

SEQ ID NO: 1395529 - DNA, 15 bp, Homo sapiens
ctttggttttttgca

SEQ ID NO: 1395530 - DNA, 15 bp, Homo sapiens
gctttggttttttgc

SEQ ID NO: 1395531 - DNA, 15 bp, Homo sapiens
ggctttggttttttg

SEQ ID NO: 1395532 - DNA, 15 bp, Homo sapiens
aggctttggtttttt

SEQ ID NO: 1395533 - DNA, 15 bp, Homo sapiens
caggctttggttttt

SEQ ID NO: 1395534 - DNA, 15 bp, Homo sapiens
tcaggctttggtttt

SEQ ID NO: 1395535 - DNA, 15 bp, Homo sapiens
ttcaggctttggttt

SEQ ID NO: 1395536 - DNA, 15 bp, Homo sapiens
gttcaggctttggtt

SEQ ID NO: 1395537 - DNA, 15 bp, Homo sapiens
tgttcaggctttggt

SEQ ID NO: 1395538 - DNA, 15 bp, Homo sapiens
ttgttcaggctttgg

SEQ ID NO: 1395539 - DNA, 15 bp, Homo sapiens
tttgttcaggctttg

SEQ ID NO: 1395540 - DNA, 15 bp, Homo sapiens
ttttgttcaggcttt

SEQ ID NO: 1395541 - DNA, 15 bp, Homo sapiens
cttttgttcaggctt

SEQ ID NO: 1395542 - DNA, 15 bp, Homo sapiens
gcttttgttcaggct

SEQ ID NO: 1395543 - DNA, 15 bp, Homo sapiens
tgcttttgttcaggc

SEQ ID NO: 1395544 - DNA, 15 bp, Homo sapiens
ttgcttttgttcagg

SEQ ID NO: 1395545 - DNA, 15 bp, Homo sapiens
cttgcttttgttcag

SEQ ID NO: 1395546 - DNA, 15 bp, Homo sapiens
acttgcttttgttca

SEQ ID NO: 1395547 - DNA, 15 bp, Homo sapiens
gacttgcttttgttc

SEQ ID NO: 1395548 - DNA, 15 bp, Homo sapiens
ggacttgcttttgtt

SEQ ID NO: 1395549 - DNA, 15 bp, Homo sapiens
tggacttgcttttgt

SEQ ID NO: 1395550 - DNA, 15 bp, Homo sapiens
ttggacttgcttttg

SEQ ID NO: 1395551 - DNA, 15 bp, Homo sapiens
tttggacttgctttt

SEQ ID NO: 1395552 - DNA, 15 bp, Homo sapiens
atttggacttgcttt

SEQ ID NO: 1395553 - DNA, 15 bp, Homo sapiens
catttggacttgctt

SEQ ID NO: 1395554 - DNA, 15 bp, Homo sapiens
tcatttggacttgct

SEQ ID NO: 1395555 - DNA, 15 bp, Homo sapiens
atcatttggacttgc

SEQ ID NO: 1395556 - DNA, 15 bp, Homo sapiens
tatcatttggacttg

SEQ ID NO: 1395557 - DNA, 15 bp, Homo sapiens
ttatcatttggactt

SEQ ID NO: 1395558 - DNA, 15 bp, Homo sapiens
attatcatttggact

SEQ ID NO: 1395559 - DNA, 15 bp, Homo sapiens
aattatcatttggac

SEQ ID NO: 1395560 - DNA, 15 bp, Homo sapiens
aaattatcatttgga

SEQ ID NO: 1395561 - DNA, 15 bp, Homo sapiens
aaaattatcatttgg

SEQ ID NO: 1395562 - DNA, 15 bp, Homo sapiens
aaaaattatcatttg

SEQ ID NO: 1395563 - DNA, 15 bp, Homo sapiens
caaaaattatcattt

SEQ ID NO: 1395564 - DNA, 15 bp, Homo sapiens
acaaaaattatcatt

SEQ ID NO: 1395565 - DNA, 15 bp, Homo sapiens
aacaaaaattatcat

SEQ ID NO: 1395566 - DNA, 15 bp, Homo sapiens
aaacaaaaattatca

SEQ ID NO: 1395567 - DNA, 15 bp, Homo sapiens
aaaacaaaaattatc

SEQ ID NO: 1395568 - DNA, 15 bp, Homo sapiens
taaaacaaaaattat

SEQ ID NO: 1395569 - DNA, 15 bp, Homo sapiens
gtaaaacaaaaatta

SEQ ID NO: 1395570 - DNA, 15 bp, Homo sapiens
tgtaaaacaaaaatt

SEQ ID NO: 1395571 - DNA, 15 bp, Homo sapiens
ttgtaaaacaaaaat

SEQ ID NO: 1395572 - DNA, 15 bp, Homo sapiens
tttgtaaaacaaaaa

SEQ ID NO: 1395573 - DNA, 15 bp, Homo sapiens
ttttgtaaaacaaaa

SEQ ID NO: 1395574 - DNA, 15 bp, Homo sapiens
tttttgtaaaacaaa

SEQ ID NO: 1395575 - DNA, 15 bp, Homo sapiens
atttttgtaaaacaa

SEQ ID NO: 1395576 - DNA, 15 bp, Homo sapiens
aatttttgtaaaaca

SEQ ID NO: 1395577 - DNA, 15 bp, Homo sapiens
taatttttgtaaaac

SEQ ID NO: 1395578 - DNA, 15 bp, Homo sapiens
ataatttttgtaaaa

SEQ ID NO: 1395579 - DNA, 15 bp, Homo sapiens
cataatttttgtaaa

SEQ ID NO: 1395580 - DNA, 15 bp, Homo sapiens
gcataatttttgtaa

SEQ ID NO: 1395581 - DNA, 15 bp, Homo sapiens
ggcataatttttgta

SEQ ID NO: 1395582 - DNA, 15 bp, Homo sapiens
tggcataatttttgt

SEQ ID NO: 1395583 - DNA, 15 bp, Homo sapiens
gtggcataatttttg

SEQ ID NO: 1395584 - DNA, 15 bp, Homo sapiens
tgtggcataattttt

SEQ ID NO: 1395585 - DNA, 15 bp, Homo sapiens
gtgtggcataatttt

SEQ ID NO: 1395586 - DNA, 15 bp, Homo sapiens
atgtgtggcataatt

SEQ ID NO: 1395587 - DNA, 15 bp, Homo sapiens
tatgtgtggcataat

SEQ ID NO: 1395588 - DNA, 15 bp, Homo sapiens
ttatgtgtggcataa

SEQ ID NO: 1395589 - DNA, 15 bp, Homo sapiens
cttatgtgtggcata

SEQ ID NO: 1395590 - DNA, 15 bp, Homo sapiens
gcttatgtgtggcat

SEQ ID NO: 1395591 - DNA, 15 bp, Homo sapiens
tgcttatgtgtggca

SEQ ID NO: 1395592 - DNA, 15 bp, Homo sapiens
ttgcttatgtgtggc

SEQ ID NO: 1395593 - DNA, 15 bp, Homo sapiens
attgcttatgtgtgg

SEQ ID NO: 1395594 - DNA, 15 bp, Homo sapiens
cattgcttatgtgtg

SEQ ID NO: 1395595 - DNA, 15 bp, Homo sapiens
tcattgcttatgtgt

SEQ ID NO: 1395596 - DNA, 15 bp, Homo sapiens
gtcattgcttatgtg

SEQ ID NO: 1395597 - DNA, 15 bp, Homo sapiens
ggtcattgcttatgt

SEQ ID NO: 1395598 - DNA, 15 bp, Homo sapiens
gggtcattgcttatg

SEQ ID NO: 1395599 - DNA, 15 bp, Homo sapiens
tgggtcattgcttat

SEQ ID NO: 1395600 - DNA, 15 bp, Homo sapiens
ttgggtcattgctta

SEQ ID NO: 1395601 - DNA, 15 bp, Homo sapiens
tttgggtcattgctt

SEQ ID NO: 1395602 - DNA, 15 bp, Homo sapiens
ttttgggtcattgct

SEQ ID NO: 1395603 - DNA, 15 bp, Homo sapiens
tttttgggtcattgc

SEQ ID NO: 1395604 - DNA, 15 bp, Homo sapiens
ttttttgggtcattg

SEQ ID NO: 1395605 - DNA, 15 bp, Homo sapiens
gttttttgggtcatt

SEQ ID NO: 1395606 - DNA, 15 bp, Homo sapiens
tgttttttgggtcat

SEQ ID NO: 1395607 - DNA, 15 bp, Homo sapiens
ctgttttttgggtca

SEQ ID NO: 1395608 - DNA, 15 bp, Homo sapiens
tctgttttttgggtc

SEQ ID NO: 1395609 - DNA, 15 bp, Homo sapiens
ctctgttttttgggt

SEQ ID NO: 1395610 - DNA, 15 bp, Homo sapiens
cctctgttttttggg

SEQ ID NO: 1395611 - DNA, 15 bp, Homo sapiens
acctctgttttttgg

SEQ ID NO: 1395612 - DNA, 15 bp, Homo sapiens
cacctctgttttttg

SEQ ID NO: 1395613 - DNA, 15 bp, Homo sapiens
ccacctctgtttttt

SEQ ID NO: 1395614 - DNA, 15 bp, Homo sapiens
gccacctctgttttt

SEQ ID NO: 1395615 - DNA, 15 bp, Homo sapiens
ggccacctctgtttt

SEQ ID NO: 1395616 - DNA, 15 bp, Homo sapiens
gggccacctctgttt

SEQ ID NO: 1395617 - DNA, 15 bp, Homo sapiens
agggccacctctgtt

SEQ ID NO: 1395618 - DNA, 15 bp, Homo sapiens
gagggccacctctgt

SEQ ID NO: 1395619 - DNA, 15 bp, Homo sapiens
agagggccacctctg

SEQ ID NO: 1395620 - DNA, 15 bp, Homo sapiens
tcagagggccacctc

SEQ ID NO: 1395621 - DNA, 15 bp, Homo sapiens
gtcagagggccacct

SEQ ID NO: 1395622 - DNA, 15 bp, Homo sapiens
agtcagagggccacc

SEQ ID NO: 1395623 - DNA, 15 bp, Homo sapiens
cagtcagagggccac

SEQ ID NO: 1395624 - DNA, 15 bp, Homo sapiens
ccagtcagagggcca

SEQ ID NO: 1395625 - DNA, 15 bp, Homo sapiens
gccagtcagagggcc

SEQ ID NO: 1395626 - DNA, 15 bp, Homo sapiens
ggccagtcagagggc

SEQ ID NO: 1395627 - DNA, 15 bp, Homo sapiens
aggccagtcagaggg

SEQ ID NO: 1395628 - DNA, 15 bp, Homo sapiens
taggccagtcagagg

SEQ ID NO: 1395629 - DNA, 15 bp, Homo sapiens
ataggccagtcagag

SEQ ID NO: 1395630 - DNA, 15 bp, Homo sapiens
gataggccagtcaga

SEQ ID NO: 1395631 - DNA, 15 bp, Homo sapiens
agataggccagtcag

SEQ ID NO: 1395632 - DNA, 15 bp, Homo sapiens
gagataggccagtca

SEQ ID NO: 1395633 - DNA, 15 bp, Homo sapiens
tgagataggccagtc

SEQ ID NO: 1395634 - DNA, 15 bp, Homo sapiens
gtgagataggccagt

SEQ ID NO: 1395635 - DNA, 15 bp, Homo sapiens
ggtgagataggccag

SEQ ID NO: 1395636 - DNA, 15 bp, Homo sapiens
tggtgagataggcca

SEQ ID NO: 1395637 - DNA, 15 bp, Homo sapiens
atggtgagataggcc

SEQ ID NO: 1395638 - DNA, 15 bp, Homo sapiens
aatggtgagataggc

SEQ ID NO: 1395639 - DNA, 15 bp, Homo sapiens
caatggtgagatagg

SEQ ID NO: 1395640 - DNA, 15 bp, Homo sapiens
tcaatggtgagatag

SEQ ID NO: 1395641 - DNA, 15 bp, Homo sapiens
ctcaatggtgagata

SEQ ID NO: 1395642 - DNA, 15 bp, Homo sapiens
tctcaatggtgagat

SEQ ID NO: 1395643 - DNA, 15 bp, Homo sapiens
atctcaatggtgaga

SEQ ID NO: 1395644 - DNA, 15 bp, Homo sapiens
aatctcaatggtgag

SEQ ID NO: 1395645 - DNA, 15 bp, Homo sapiens
taatctcaatggtga

SEQ ID NO: 1395646 - DNA, 15 bp, Homo sapiens
ctaatctcaatggtg

SEQ ID NO: 1395647 - DNA, 15 bp, Homo sapiens
actaatctcaatggt

SEQ ID NO: 1395648 - DNA, 15 bp, Homo sapiens
gactaatctcaatgg

SEQ ID NO: 1395649 - DNA, 15 bp, Homo sapiens
tgactaatctcaatg

SEQ ID NO: 1395650 - DNA, 15 bp, Homo sapiens
gtgactaatctcaat

SEQ ID NO: 1395651 - DNA, 15 bp, Homo sapiens
agtgactaatctcaa

SEQ ID NO: 1395652 - DNA, 15 bp, Homo sapiens
gagtgactaatctca

SEQ ID NO: 1395653 - DNA, 15 bp, Homo sapiens
ggagtgactaatctc

SEQ ID NO: 1395654 - DNA, 15 bp, Homo sapiens
aggagtgactaatct

SEQ ID NO: 1395655 - DNA, 15 bp, Homo sapiens
gaggagtgactaatc

SEQ ID NO: 1395656 - DNA, 15 bp, Homo sapiens
agaggagtgactaat

SEQ ID NO: 1395657 - DNA, 15 bp, Homo sapiens
cagaggagtgactaa

SEQ ID NO: 1395658 - DNA, 15 bp, Homo sapiens
gcagaggagtgacta

SEQ ID NO: 1395659 - DNA, 15 bp, Homo sapiens
ggcagaggagtgact

SEQ ID NO: 1395660 - DNA, 15 bp, Homo sapiens
aggcagaggagtgac

SEQ ID NO: 1395661 - DNA, 15 bp, Homo sapiens
caggcagaggagtga

SEQ ID NO: 1395662 - DNA, 15 bp, Homo sapiens
acaggcagaggagtg

SEQ ID NO: 1395663 - DNA, 15 bp, Homo sapiens
cacaggcagaggagt

SEQ ID NO: 1395664 - DNA, 15 bp, Homo sapiens
gcacaggcagaggag

SEQ ID NO: 1395665 - DNA, 15 bp, Homo sapiens
agcacaggcagagga

SEQ ID NO: 1395666 - DNA, 15 bp, Homo sapiens
aagcacaggcagagg

SEQ ID NO: 1395667 - DNA, 15 bp, Homo sapiens
taagcacaggcagag

SEQ ID NO: 1395668 - DNA, 15 bp, Homo sapiens
ctaagcacaggcaga

SEQ ID NO: 1395669 - DNA, 15 bp, Homo sapiens
cctaagcacaggcag

SEQ ID NO: 1395670 - DNA, 15 bp, Homo sapiens
tcctaagcacaggca

SEQ ID NO: 1395671 - DNA, 15 bp, Homo sapiens
gtcctaagcacaggc

SEQ ID NO: 1395672 - DNA, 15 bp, Homo sapiens
tgtcctaagcacagg

SEQ ID NO: 1395673 - DNA, 15 bp, Homo sapiens
gtgtcctaagcacag

SEQ ID NO: 1395674 - DNA, 15 bp, Homo sapiens
agtgtcctaagcaca

SEQ ID NO: 1395675 - DNA, 15 bp, Homo sapiens
tagtgtcctaagcac

SEQ ID NO: 1395676 - DNA, 15 bp, Homo sapiens
ttagtgtcctaagca

SEQ ID NO: 1395677 - DNA, 15 bp, Homo sapiens
tttagtgtcctaagc

SEQ ID NO: 1395678 - DNA, 15 bp, Homo sapiens
gtttagtgtcctaag

SEQ ID NO: 1395679 - DNA, 15 bp, Homo sapiens
agtttagtgtcctaa

SEQ ID NO: 1395680 - DNA, 15 bp, Homo sapiens
aagtttagtgtccta

SEQ ID NO: 1395681 - DNA, 15 bp, Homo sapiens
caagtttagtgtcct

SEQ ID NO: 1395682 - DNA, 15 bp, Homo sapiens
acaagtttagtgtcc

SEQ ID NO: 1395683 - DNA, 15 bp, Homo sapiens
cacaagtttagtgtc

SEQ ID NO: 1395684 - DNA, 15 bp, Homo sapiens
acacaagtttagtgt

SEQ ID NO: 1395685 - DNA, 15 bp, Homo sapiens
tacacacaagtttag

SEQ ID NO: 1395686 - DNA, 15 bp, Homo sapiens
gtacacacaagttta

SEQ ID NO: 1395687 - DNA, 15 bp, Homo sapiens
agtacacacaagttt

SEQ ID NO: 1395688 - DNA, 15 bp, Homo sapiens
tagtacacacaagtt

SEQ ID NO: 1395689 - DNA, 15 bp, Homo sapiens
atagtacacacaagt

SEQ ID NO: 1395690 - DNA, 15 bp, Homo sapiens
tatagtacacacaag

SEQ ID NO: 1395691 - DNA, 15 bp, Homo sapiens
ttatagtacacacaa

SEQ ID NO: 1395692 - DNA, 15 bp, Homo sapiens
tttatagtacacaca

SEQ ID NO: 1395693 - DNA, 15 bp, Homo sapiens
atttatagtacacac

SEQ ID NO: 1395694 - DNA, 15 bp, Homo sapiens
catttatagtacaca

SEQ ID NO: 1395695 - DNA, 15 bp, Homo sapiens
acatttatagtacac

SEQ ID NO: 1395696 - DNA, 15 bp, Homo sapiens
tacatttatagtaca

SEQ ID NO: 1395697 - DNA, 15 bp, Homo sapiens
gtacatttatagtac

SEQ ID NO: 1395698 - DNA, 15 bp, Homo sapiens
tgtacatttatagta

SEQ ID NO: 1395699 - DNA, 15 bp, Homo sapiens
ttgtacatttatagt

SEQ ID NO: 1395700 - DNA, 15 bp, Homo sapiens
attgtacatttatag

SEQ ID NO: 1395701 - DNA, 15 bp, Homo sapiens
gattgtacatttata

SEQ ID NO: 1395702 - DNA, 15 bp, Homo sapiens
tgattgtacatttat

SEQ ID NO: 1395703 - DNA, 15 bp, Homo sapiens
gtgattgtacattta

SEQ ID NO: 1395704 - DNA, 15 bp, Homo sapiens
agtgattgtacattt

SEQ ID NO: 1395705 - DNA, 15 bp, Homo sapiens
aagtgattgtacatt

SEQ ID NO: 1395706 - DNA, 15 bp, Homo sapiens
aaagtgattgtacat

SEQ ID NO: 1395707 - DNA, 15 bp, Homo sapiens
gaaagtgattgtaca

SEQ ID NO: 1395708 - DNA, 15 bp, Homo sapiens
agaaagtgattgtac

SEQ ID NO: 1395709 - DNA, 15 bp, Homo sapiens
aagaaagtgattgta

SEQ ID NO: 1395710 - DNA, 15 bp, Homo sapiens
gaagaaagtgattgt

SEQ ID NO: 1395711 - DNA, 15 bp, Homo sapiens
ggaagaaagtgattg

SEQ ID NO: 1395712 - DNA, 15 bp, Homo sapiens
aggaagaaagtgatt

SEQ ID NO: 1395713 - DNA, 15 bp, Homo sapiens
gaggaagaaagtgat

SEQ ID NO: 1395714 - DNA, 15 bp, Homo sapiens
agaggaagaaagtga

SEQ ID NO: 1395715 - DNA, 15 bp, Homo sapiens
aagaggaagaaagtg

SEQ ID NO: 1395716 - DNA, 15 bp, Homo sapiens
aaagaggaagaaagt

SEQ ID NO: 1395717 - DNA, 15 bp, Homo sapiens
taaagaggaagaaag

SEQ ID NO: 1395718 - DNA, 15 bp, Homo sapiens
ctaaagaggaagaaa

SEQ ID NO: 1395719 - DNA, 15 bp, Homo sapiens
gctaaagaggaagaa

SEQ ID NO: 1395720 - DNA, 15 bp, Homo sapiens
tgctaaagaggaaga

SEQ ID NO: 1395721 - DNA, 15 bp, Homo sapiens
ttgctaaagaggaag

SEQ ID NO: 1395722 - DNA, 15 bp, Homo sapiens
cttgctaaagaggaa

SEQ ID NO: 1395723 - DNA, 15 bp, Homo sapiens
ccttgctaaagagga

SEQ ID NO: 1395724 - DNA, 15 bp, Homo sapiens
accttgctaaagagg

SEQ ID NO: 1395725 - DNA, 15 bp, Homo sapiens
gaccttgctaaagag

SEQ ID NO: 1395726 - DNA, 15 bp, Homo sapiens
tgaccttgctaaaga

SEQ ID NO: 1395727 - DNA, 15 bp, Homo sapiens
ctgaccttgctaaag

SEQ ID NO: 1395728 - DNA, 15 bp, Homo sapiens
gctgaccttgctaaa

SEQ ID NO: 1395729 - DNA, 15 bp, Homo sapiens
tgctgaccttgctaa

SEQ ID NO: 1395730 - DNA, 15 bp, Homo sapiens
ctgctgaccttgcta

SEQ ID NO: 1395731 - DNA, 15 bp, Homo sapiens
tctgctgaccttgct

SEQ ID NO: 1395732 - DNA, 15 bp, Homo sapiens
ttctgctgaccttgc

SEQ ID NO: 1395733 - DNA, 15 bp, Homo sapiens
cttctgctgaccttg

SEQ ID NO: 1395734 - DNA, 15 bp, Homo sapiens
acttctgctgacctt

SEQ ID NO: 1395735 - DNA, 15 bp, Homo sapiens
gacttctgctgacct

SEQ ID NO: 1395736 - DNA, 15 bp, Homo sapiens
tgacttctgctgacc

SEQ ID NO: 1395737 - DNA, 15 bp, Homo sapiens
gtgacttctgctgac

SEQ ID NO: 1395738 - DNA, 15 bp, Homo sapiens
ggtgacttctgctga

SEQ ID NO: 1395739 - DNA, 15 bp, Homo sapiens
aggtgacttctgctg

SEQ ID NO: 1395740 - DNA, 15 bp, Homo sapiens
aaagaggtgacttct

SEQ ID NO: 1395741 - DNA, 15 bp, Homo sapiens
caaagaggtgacttc

SEQ ID NO: 1395742 - DNA, 15 bp, Homo sapiens
ccaaagaggtgactt

SEQ ID NO: 1395743 - DNA, 15 bp, Homo sapiens
tccaaagaggtgact

SEQ ID NO: 1395744 - DNA, 15 bp, Homo sapiens
atccaaagaggtgac

SEQ ID NO: 1395745 - DNA, 15 bp, Homo sapiens
gatccaaagaggtga

SEQ ID NO: 1395746 - DNA, 15 bp, Homo sapiens
ggatccaaagaggtg

SEQ ID NO: 1395747 - DNA, 15 bp, Homo sapiens
aggatccaaagaggt

SEQ ID NO: 1395748 - DNA, 15 bp, Homo sapiens
caggatccaaagagg

SEQ ID NO: 1395749 - DNA, 15 bp, Homo sapiens
ccaggatccaaagag

SEQ ID NO: 1395750 - DNA, 15 bp, Homo sapiens
tccaggatccaaaga

SEQ ID NO: 1395751 - DNA, 15 bp, Homo sapiens
ttccaggatccaaag

SEQ ID NO: 1395752 - DNA, 15 bp, Homo sapiens
cttccaggatccaaa

SEQ ID NO: 1395753 - DNA, 15 bp, Homo sapiens
tcttccaggatccaa

SEQ ID NO: 1395754 - DNA, 15 bp, Homo sapiens
ctcttccaggatcca

SEQ ID NO: 1395755 - DNA, 15 bp, Homo sapiens
actcttccaggatcc

SEQ ID NO: 1395756 - DNA, 15 bp, Homo sapiens
tactcttccaggatc

SEQ ID NO: 1395757 - DNA, 15 bp, Homo sapiens
ctactcttccaggat

SEQ ID NO: 1395758 - DNA, 15 bp, Homo sapiens
cctactcttccagga

SEQ ID NO: 1395759 - DNA, 15 bp, Homo sapiens
ccctactcttccagg

SEQ ID NO: 1395760 - DNA, 15 bp, Homo sapiens
tccctactcttccag

SEQ ID NO: 1395761 - DNA, 15 bp, Homo sapiens
ttccctactcttcca

SEQ ID NO: 1395762 - DNA, 15 bp, Homo sapiens
tttccctactcttcc

SEQ ID NO: 1395763 - DNA, 15 bp, Homo sapiens
atttccctactcttc

SEQ ID NO: 1395764 - DNA, 15 bp, Homo sapiens
tatttccctactctt

SEQ ID NO: 1395765 - DNA, 15 bp, Homo sapiens
gtatttccctactct

SEQ ID NO: 1395766 - DNA, 15 bp, Homo sapiens
cgtatttccctactc

SEQ ID NO: 1395767 - DNA, 15 bp, Homo sapiens
ccgtatttccctact

SEQ ID NO: 1395768 - DNA, 15 bp, Homo sapiens
tccgtatttccctac

SEQ ID NO: 1395769 - DNA, 15 bp, Homo sapiens
ttccgtatttcccta

SEQ ID NO: 1395770 - DNA, 15 bp, Homo sapiens
tttccgtatttccct

SEQ ID NO: 1395771 - DNA, 15 bp, Homo sapiens
gtttccgtatttccc

SEQ ID NO: 1395772 - DNA, 15 bp, Homo sapiens
tgtttccgtatttcc

SEQ ID NO: 1395773 - DNA, 15 bp, Homo sapiens
ttgtttccgtatttc

SEQ ID NO: 1395774 - DNA, 15 bp, Homo sapiens
cttgtttccgtattt

SEQ ID NO: 1395775 - DNA, 15 bp, Homo sapiens
tcttgtttccgtatt

SEQ ID NO: 1395776 - DNA, 15 bp, Homo sapiens
ttcttgtttccgtat

SEQ ID NO: 1395777 - DNA, 15 bp, Homo sapiens
attcttgtttccgta

SEQ ID NO: 1395778 - DNA, 15 bp, Homo sapiens
gattcttgtttccgt

SEQ ID NO: 1395779 - DNA, 15 bp, Homo sapiens
agattcttgtttccg

SEQ ID NO: 1395780 - DNA, 15 bp, Homo sapiens
gagattcttgtttcc

SEQ ID NO: 1395781 - DNA, 15 bp, Homo sapiens
tgagattcttgtttc

SEQ ID NO: 1395782 - DNA, 15 bp, Homo sapiens
gtgagattcttgttt

SEQ ID NO: 1395783 - DNA, 15 bp, Homo sapiens
ggtgagattcttgtt

SEQ ID NO: 1395784 - DNA, 15 bp, Homo sapiens
aggtgagattcttgt

SEQ ID NO: 1395785 - DNA, 15 bp, Homo sapiens
aaggtgagattcttg

SEQ ID NO: 1395786 - DNA, 15 bp, Homo sapiens
aaaggtgagattctt

SEQ ID NO: 1395787 - DNA, 15 bp, Homo sapiens
gaaaggtgagattct

SEQ ID NO: 1395788 - DNA, 15 bp, Homo sapiens
ggaaaggtgagattc

SEQ ID NO: 1395789 - DNA, 15 bp, Homo sapiens
tggaaaggtgagatt

SEQ ID NO: 1395790 - DNA, 15 bp, Homo sapiens
gtggaaaggtgagat

SEQ ID NO: 1395791 - DNA, 15 bp, Homo sapiens
agtggaaaggtgaga

SEQ ID NO: 1395792 - DNA, 15 bp, Homo sapiens
gagtggaaaggtgag

SEQ ID NO: 1395793 - DNA, 15 bp, Homo sapiens
agagtggaaaggtga

SEQ ID NO: 1395794 - DNA, 15 bp, Homo sapiens
gagagtggaaaggtg

SEQ ID NO: 1395795 - DNA, 15 bp, Homo sapiens
ggagagtggaaaggt

SEQ ID NO: 1395796 - DNA, 15 bp, Homo sapiens
tggagagtggaaagg

SEQ ID NO: 1395797 - DNA, 15 bp, Homo sapiens
atggagagtggaaag

SEQ ID NO: 1395798 - DNA, 15 bp, Homo sapiens
catggagagtggaaa

SEQ ID NO: 1395799 - DNA, 15 bp, Homo sapiens
tcatggagagtggaa

SEQ ID NO: 1395800 - DNA, 15 bp, Homo sapiens
atcatggagagtgga

SEQ ID NO: 1395801 - DNA, 15 bp, Homo sapiens
aatcatggagagtgg

SEQ ID NO: 1395802 - DNA, 15 bp, Homo sapiens
aaatcatggagagtg

SEQ ID NO: 1395803 - DNA, 15 bp, Homo sapiens
gaaatcatggagagt

SEQ ID NO: 1395804 - DNA, 15 bp, Homo sapiens
agaaatcatggagag

SEQ ID NO: 1395805 - DNA, 15 bp, Homo sapiens
gagaaatcatggaga

SEQ ID NO: 1395806 - DNA, 15 bp, Homo sapiens
ggagaaatcatggag

SEQ ID NO: 1395807 - DNA, 15 bp, Homo sapiens
tggagaaatcatgga

SEQ ID NO: 1395808 - DNA, 15 bp, Homo sapiens
ctggagaaatcatgg

SEQ ID NO: 1395809 - DNA, 15 bp, Homo sapiens
actggagaaatcatg

SEQ ID NO: 1395810 - DNA, 15 bp, Homo sapiens
gactggagaaatcat

SEQ ID NO: 1395811 - DNA, 15 bp, Homo sapiens
tgactggagaaatca

SEQ ID NO: 1395812 - DNA, 15 bp, Homo sapiens
atgactggagaaatc

SEQ ID NO: 1395813 - DNA, 15 bp, Homo sapiens
gatgactggagaaat

SEQ ID NO: 1395814 - DNA, 15 bp, Homo sapiens
ggatgactggagaaa

SEQ ID NO: 1395815 - DNA, 15 bp, Homo sapiens
tggatgactggagaa

SEQ ID NO: 1395816 - DNA, 15 bp, Homo sapiens
gtggatgactggaga

SEQ ID NO: 1395817 - DNA, 15 bp, Homo sapiens
tgtggatgactggag

SEQ ID NO: 1395818 - DNA, 15 bp, Homo sapiens
atgtggatgactgga

SEQ ID NO: 1395819 - DNA, 15 bp, Homo sapiens
gatgtggatgactgg

SEQ ID NO: 1395820 - DNA, 15 bp, Homo sapiens
tgatgtggatgactg

SEQ ID NO: 1395821 - DNA, 15 bp, Homo sapiens
ttgatgtggatgact

SEQ ID NO: 1395822 - DNA, 15 bp, Homo sapiens
cttgatgtggatgac

SEQ ID NO: 1395823 - DNA, 15 bp, Homo sapiens
acttgatgtggatga

SEQ ID NO: 1395824 - DNA, 15 bp, Homo sapiens
tacttgatgtggatg

SEQ ID NO: 1395825 - DNA, 15 bp, Homo sapiens
gtacttgatgtggat

SEQ ID NO: 1395826 - DNA, 15 bp, Homo sapiens
agtacttgatgtgga

SEQ ID NO: 1395827 - DNA, 15 bp, Homo sapiens
tagtacttgatgtgg

SEQ ID NO: 1395828 - DNA, 15 bp, Homo sapiens
ctagtacttgatgtg

SEQ ID NO: 1395829 - DNA, 15 bp, Homo sapiens
tctagtacttgatgt

SEQ ID NO: 1395830 - DNA, 15 bp, Homo sapiens
ctctagtacttgatg

SEQ ID NO: 1395831 - DNA, 15 bp, Homo sapiens
gctctagtacttgat

SEQ ID NO: 1395832 - DNA, 15 bp, Homo sapiens
tgctctagtacttga

SEQ ID NO: 1395833 - DNA, 15 bp, Homo sapiens
atgctctagtacttg

SEQ ID NO: 1395834 - DNA, 15 bp, Homo sapiens
tatgctctagtactt

SEQ ID NO: 1395835 - DNA, 15 bp, Homo sapiens
ttatgctctagtact

SEQ ID NO: 1395836 - DNA, 15 bp, Homo sapiens
tttatgctctagtac

SEQ ID NO: 1395837 - DNA, 15 bp, Homo sapiens
atttatgctctagta

SEQ ID NO: 1395838 - DNA, 15 bp, Homo sapiens
gatttatgctctagt

SEQ ID NO: 1395839 - DNA, 15 bp, Homo sapiens
agatttatgctctag

SEQ ID NO: 1395840 - DNA, 15 bp, Homo sapiens
tagatttatgctcta

SEQ ID NO: 1395841 - DNA, 15 bp, Homo sapiens
ttagatttatgctct

SEQ ID NO: 1395842 - DNA, 15 bp, Homo sapiens
tttagatttatgctc

SEQ ID NO: 1395843 - DNA, 15 bp, Homo sapiens
gtttagatttatgct

SEQ ID NO: 1395844 - DNA, 15 bp, Homo sapiens
agtttagatttatgc

SEQ ID NO: 1395845 - DNA, 15 bp, Homo sapiens
tagtttagatttatg

SEQ ID NO: 1395846 - DNA, 15 bp, Homo sapiens
atagtttagatttat

SEQ ID NO: 1395847 - DNA, 15 bp, Homo sapiens
tatagtttagattta

SEQ ID NO: 1395848 - DNA, 15 bp, Homo sapiens
atatagtttagattt

SEQ ID NO: 1395849 - DNA, 15 bp, Homo sapiens
gatatagtttagatt

SEQ ID NO: 1395850 - DNA, 15 bp, Homo sapiens
ggatatagtttagat

SEQ ID NO: 1395851 - DNA, 15 bp, Homo sapiens
aggatatagtttaga

SEQ ID NO: 1395852 - DNA, 15 bp, Homo sapiens
aaggatatagtttag

SEQ ID NO: 1395853 - DNA, 15 bp, Homo sapiens
aaaggatatagttta

SEQ ID NO: 1395854 - DNA, 15 bp, Homo sapiens
aaaaggatatagttt

SEQ ID NO: 1395855 - DNA, 15 bp, Homo sapiens
aaaaaggatatagtt

SEQ ID NO: 1395856 - DNA, 15 bp, Homo sapiens
gaaaaaggatatagt

SEQ ID NO: 1395857 - DNA, 15 bp, Homo sapiens
agaaaaaggatatag

SEQ ID NO: 1395858 - DNA, 15 bp, Homo sapiens
aagaaaaaggatata

SEQ ID NO: 1395859 - DNA, 15 bp, Homo sapiens
taagaaaaaggatat

SEQ ID NO: 1395860 - DNA, 15 bp, Homo sapiens
gtaagaaaaaggata

SEQ ID NO: 1395861 - DNA, 15 bp, Homo sapiens
agtaagaaaaaggat

SEQ ID NO: 1395862 - DNA, 15 bp, Homo sapiens
aagtaagaaaaagga

SEQ ID NO: 1395863 - DNA, 15 bp, Homo sapiens
gaagtaagaaaaagg

SEQ ID NO: 1395864 - DNA, 15 bp, Homo sapiens
ggaagtaagaaaaag

SEQ ID NO: 1395865 - DNA, 15 bp, Homo sapiens
aggaagtaagaaaaa

SEQ ID NO: 1395866 - DNA, 15 bp, Homo sapiens
gaggaagtaagaaaa

SEQ ID NO: 1395867 - DNA, 15 bp, Homo sapiens
tgaggaagtaagaaa

SEQ ID NO: 1395868 - DNA, 15 bp, Homo sapiens
atgaggaagtaagaa

SEQ ID NO: 1395869 - DNA, 15 bp, Homo sapiens
gatgaggaagtaaga

SEQ ID NO: 1395870 - DNA, 15 bp, Homo sapiens
tgatgaggaagtaag

SEQ ID NO: 1395871 - DNA, 15 bp, Homo sapiens
atgatgaggaagtaa

SEQ ID NO: 1395872 - DNA, 15 bp, Homo sapiens
gatgatgaggaagta

SEQ ID NO: 1395873 - DNA, 15 bp, Homo sapiens
ggatgatgaggaagt

SEQ ID NO: 1395874 - DNA, 15 bp, Homo sapiens
gggatgatgaggaag

SEQ ID NO: 1395875 - DNA, 15 bp, Homo sapiens
ggggatgatgaggaa

SEQ ID NO: 1395876 - DNA, 15 bp, Homo sapiens
aggggatgatgagga

SEQ ID NO: 1395877 - DNA, 15 bp, Homo sapiens
caggggatgatgagg

SEQ ID NO: 1395878 - DNA, 15 bp, Homo sapiens
acaggggatgatgag

SEQ ID NO: 1395879 - DNA, 15 bp, Homo sapiens
tacaggggatgatga

SEQ ID NO: 1395880 - DNA, 15 bp, Homo sapiens
atacaggggatgatg

SEQ ID NO: 1395881 - DNA, 15 bp, Homo sapiens
aatacaggggatgat

SEQ ID NO: 1395882 - DNA, 15 bp, Homo sapiens
gaatacaggggatga

SEQ ID NO: 1395883 - DNA, 15 bp, Homo sapiens
agaatacaggggatg

SEQ ID NO: 1395884 - DNA, 15 bp, Homo sapiens
tagaatacaggggat

SEQ ID NO: 1395885 - DNA, 15 bp, Homo sapiens
atagaatacagggga

SEQ ID NO: 1395886 - DNA, 15 bp, Homo sapiens
gatagaatacagggg

SEQ ID NO: 1395887 - DNA, 15 bp, Homo sapiens
tgatagaatacaggg

SEQ ID NO: 1395888 - DNA, 15 bp, Homo sapiens
ctgatagaatacagg

SEQ ID NO: 1395889 - DNA, 15 bp, Homo sapiens
gctgatagaatacag

SEQ ID NO: 1395890 - DNA, 15 bp, Homo sapiens
ggctgatagaataca

SEQ ID NO: 1395891 - DNA, 15 bp, Homo sapiens
tggctgatagaatac

SEQ ID NO: 1395892 - DNA, 15 bp, Homo sapiens
gtggctgatagaata

SEQ ID NO: 1395893 - DNA, 15 bp, Homo sapiens
ggtggctgatagaat

SEQ ID NO: 1395894 - DNA, 15 bp, Homo sapiens
tggtggctgatagaa

SEQ ID NO: 1395895 - DNA, 15 bp, Homo sapiens
ttggtggctgataga

SEQ ID NO: 1395896 - DNA, 15 bp, Homo sapiens
tttggtggctgatag

SEQ ID NO: 1395897 - DNA, 15 bp, Homo sapiens
atttggtggctgata

SEQ ID NO: 1395898 - DNA, 15 bp, Homo sapiens
gatttggtggctgat

SEQ ID NO: 1395899 - DNA, 15 bp, Homo sapiens
ggatttggtggctga

SEQ ID NO: 1395900 - DNA, 15 bp, Homo sapiens
aggatttggtggctg

SEQ ID NO: 1395901 - DNA, 15 bp, Homo sapiens
caggatttggtggct

SEQ ID NO: 1395902 - DNA, 15 bp, Homo sapiens
tcaggatttggtggc

SEQ ID NO: 1395903 - DNA, 15 bp, Homo sapiens
ttcaggatttggtgg

SEQ ID NO: 1395904 - DNA, 15 bp, Homo sapiens
cttcaggatttggtg

SEQ ID NO: 1395905 - DNA, 15 bp, Homo sapiens
acttcaggatttggt

SEQ ID NO: 1395906 - DNA, 15 bp, Homo sapiens
aacttcaggatttgg

SEQ ID NO: 1395907 - DNA, 15 bp, Homo sapiens
gaacttcaggatttg

SEQ ID NO: 1395908 - DNA, 15 bp, Homo sapiens
agaacttcaggattt

SEQ ID NO: 1395909 - DNA, 15 bp, Homo sapiens
cagaacttcaggatt

SEQ ID NO: 1395910 - DNA, 15 bp, Homo sapiens
acagaacttcaggat

SEQ ID NO: 1395911 - DNA, 15 bp, Homo sapiens
gacagaacttcagga

SEQ ID NO: 1395912 - DNA, 15 bp, Homo sapiens
agacagaacttcagg

SEQ ID NO: 1395913 - DNA, 15 bp, Homo sapiens
gagacagaacttcag

SEQ ID NO: 1395914 - DNA, 15 bp, Homo sapiens
tgagacagaacttca

SEQ ID NO: 1395915 - DNA, 15 bp, Homo sapiens
atgagacagaacttc

SEQ ID NO: 1395916 - DNA, 15 bp, Homo sapiens
tatgagacagaactt

SEQ ID NO: 1395917 - DNA, 15 bp, Homo sapiens
ctatgagacagaact

SEQ ID NO: 1395918 - DNA, 15 bp, Homo sapiens
tctatgagacagaac

SEQ ID NO: 1395919 - DNA, 15 bp, Homo sapiens
atctatgagacagaa

SEQ ID NO: 1395920 - DNA, 15 bp, Homo sapiens
tatctatgagacaga

SEQ ID NO: 1395921 - DNA, 15 bp, Homo sapiens
atatctatgagacag

SEQ ID NO: 1395922 - DNA, 15 bp, Homo sapiens
aatatctatgagaca

SEQ ID NO: 1395923 - DNA, 15 bp, Homo sapiens
aaatatctatgagac

SEQ ID NO: 1395924 - DNA, 15 bp, Homo sapiens
gaaatatctatgaga

SEQ ID NO: 1395925 - DNA, 15 bp, Homo sapiens
agaaatatctatgag

SEQ ID NO: 1395926 - DNA, 15 bp, Homo sapiens
gagaaatatctatga

SEQ ID NO: 1395927 - DNA, 15 bp, Homo sapiens
ggagaaatatctatg

SEQ ID NO: 1395928 - DNA, 15 bp, Homo sapiens
tggagaaatatctat

SEQ ID NO: 1395929 - DNA, 15 bp, Homo sapiens
atggagaaatatcta

SEQ ID NO: 1395930 - DNA, 15 bp, Homo sapiens
catggagaaatatct

SEQ ID NO: 1395931 - DNA, 15 bp, Homo sapiens
acatggagaaatatc

SEQ ID NO: 1395932 - DNA, 15 bp, Homo sapiens
tacatggagaaatat

SEQ ID NO: 1395933 - DNA, 15 bp, Homo sapiens
atacatggagaaata

SEQ ID NO: 1395934 - DNA, 15 bp, Homo sapiens
gatacatggagaaat

SEQ ID NO: 1395935 - DNA, 15 bp, Homo sapiens
cgatacatggagaaa

SEQ ID NO: 1395936 - DNA, 15 bp, Homo sapiens
acgatacatggagaa

SEQ ID NO: 1395937 - DNA, 15 bp, Homo sapiens
aacgatacatggaga

SEQ ID NO: 1395938 - DNA, 15 bp, Homo sapiens
aaacgatacatggag

SEQ ID NO: 1395939 - DNA, 15 bp, Homo sapiens
gaaacgatacatgga

SEQ ID NO: 1395940 - DNA, 15 bp, Homo sapiens
agaaacgatacatgg

SEQ ID NO: 1395941 - DNA, 15 bp, Homo sapiens
aagaaacgatacatg

SEQ ID NO: 1395942 - DNA, 15 bp, Homo sapiens
gaagaaacgatacat

SEQ ID NO: 1395943 - DNA, 15 bp, Homo sapiens
agaagaaacgataca

SEQ ID NO: 1395944 - DNA, 15 bp, Homo sapiens
aagaagaaacgatac

SEQ ID NO: 1395945 - DNA, 15 bp, Homo sapiens
aaagaagaaacgata

SEQ ID NO: 1395946 - DNA, 15 bp, Homo sapiens
taaagaagaaacgat

SEQ ID NO: 1395947 - DNA, 15 bp, Homo sapiens
ataaagaagaaacga

SEQ ID NO: 1395948 - DNA, 15 bp, Homo sapiens
tataaagaagaaacg

SEQ ID NO: 1395949 - DNA, 15 bp, Homo sapiens
gtataaagaagaaac

SEQ ID NO: 1395950 - DNA, 15 bp, Homo sapiens
tgtataaagaagaaa

SEQ ID NO: 1395951 - DNA, 15 bp, Homo sapiens
atgtataaagaagaa

SEQ ID NO: 1395952 - DNA, 15 bp, Homo sapiens
gatgtataaagaaga

SEQ ID NO: 1395953 - DNA, 15 bp, Homo sapiens
ggatgtataaagaag

SEQ ID NO: 1395954 - DNA, 15 bp, Homo sapiens
aggatgtataaagaa

SEQ ID NO: 1395955 - DNA, 15 bp, Homo sapiens
taggatgtataaaga

SEQ ID NO: 1395956 - DNA, 15 bp, Homo sapiens
gtaggatgtataaag

SEQ ID NO: 1395957 - DNA, 15 bp, Homo sapiens
ggtaggatgtataaa

SEQ ID NO: 1395958 - DNA, 15 bp, Homo sapiens
aggtaggatgtataa

SEQ ID NO: 1395959 - DNA, 15 bp, Homo sapiens
aaggtaggatgtata

SEQ ID NO: 1395960 - DNA, 15 bp, Homo sapiens
caaggtaggatgtat

SEQ ID NO: 1395961 - DNA, 15 bp, Homo sapiens
tcaaggtaggatgta

SEQ ID NO: 1395962 - DNA, 15 bp, Homo sapiens
atcaaggtaggatgt

SEQ ID NO: 1395963 - DNA, 15 bp, Homo sapiens
gatcaaggtaggatg

SEQ ID NO: 1395964 - DNA, 15 bp, Homo sapiens
ggatcaaggtaggat

SEQ ID NO: 1395965 - DNA, 15 bp, Homo sapiens
aggatcaaggtagga

SEQ ID NO: 1395966 - DNA, 15 bp, Homo sapiens
taggatcaaggtagg

SEQ ID NO: 1395967 - DNA, 15 bp, Homo sapiens
ctaggatcaaggtag

SEQ ID NO: 1395968 - DNA, 15 bp, Homo sapiens
tctaggatcaaggta

SEQ ID NO: 1395969 - DNA, 15 bp, Homo sapiens
atctaggatcaaggt

SEQ ID NO: 1395970 - DNA, 15 bp, Homo sapiens
gatctaggatcaagg

SEQ ID NO: 1395971 - DNA, 15 bp, Homo sapiens
ggatctaggatcaag

SEQ ID NO: 1395972 - DNA, 15 bp, Homo sapiens
tggatctaggatcaa

SEQ ID NO: 1395973 - DNA, 15 bp, Homo sapiens
ctggatctaggatca

SEQ ID NO: 1395974 - DNA, 15 bp, Homo sapiens
gctggatctaggatc

SEQ ID NO: 1395975 - DNA, 15 bp, Homo sapiens
ggctggatctaggat

SEQ ID NO: 1395976 - DNA, 15 bp, Homo sapiens
gggctggatctagga

SEQ ID NO: 1395977 - DNA, 15 bp, Homo sapiens
agggctggatctagg

SEQ ID NO: 1395978 - DNA, 15 bp, Homo sapiens
gagggctggatctag

SEQ ID NO: 1395979 - DNA, 15 bp, Homo sapiens
tgagggctggatcta

SEQ ID NO: 1395980 - DNA, 15 bp, Homo sapiens
gtgagggctggatct

SEQ ID NO: 1395981 - DNA, 15 bp, Homo sapiens
agtgagggctggatc

SEQ ID NO: 1395982 - DNA, 15 bp, Homo sapiens
cagtgagggctggat

SEQ ID NO: 1395983 - DNA, 15 bp, Homo sapiens
acagtgagggctgga

SEQ ID NO: 1395984 - DNA, 15 bp, Homo sapiens
gacagtgagggctgg

SEQ ID NO: 1395985 - DNA, 15 bp, Homo sapiens
ggacagtgagggctg

SEQ ID NO: 1395986 - DNA, 15 bp, Homo sapiens
aggacagtgagggct

SEQ ID NO: 1395987 - DNA, 15 bp, Homo sapiens
aaggacagtgagggc

SEQ ID NO: 1395988 - DNA, 15 bp, Homo sapiens
aaaggacagtgaggg

SEQ ID NO: 1395989 - DNA, 15 bp, Homo sapiens
caaaggacagtgagg

SEQ ID NO: 1395990 - DNA, 15 bp, Homo sapiens
gcaaaggacagtgag

SEQ ID NO: 1395991 - DNA, 15 bp, Homo sapiens
ggcaaaggacagtga

SEQ ID NO: 1395992 - DNA, 15 bp, Homo sapiens
tggcaaaggacagtg

SEQ ID NO: 1395993 - DNA, 15 bp, Homo sapiens
ttggcaaaggacagt

SEQ ID NO: 1395994 - DNA, 15 bp, Homo sapiens
gttggcaaaggacag

SEQ ID NO: 1395995 - DNA, 15 bp, Homo sapiens
tgttggcaaaggaca

SEQ ID NO: 1395996 - DNA, 15 bp, Homo sapiens
gtgttggcaaaggac

SEQ ID NO: 1395997 - DNA, 15 bp, Homo sapiens
agtgttggcaaagga

SEQ ID NO: 1395998 - DNA, 15 bp, Homo sapiens
tagtgttggcaaagg

SEQ ID NO: 1395999 - DNA, 15 bp, Homo sapiens
gtagtgttggcaaag

SEQ ID NO: 1396000 - DNA, 15 bp, Homo sapiens
tgtagtgttggcaaa

SEQ ID NO: 1396001 - DNA, 15 bp, Homo sapiens
ctgtagtgttggcaa

SEQ ID NO: 1396002 - DNA, 15 bp, Homo sapiens
actgtagtgttggca

SEQ ID NO: 1396003 - DNA, 15 bp, Homo sapiens
tactgtagtgttggc

SEQ ID NO: 1396004 - DNA, 15 bp, Homo sapiens
ttactgtagtgttgg

SEQ ID NO: 1396005 - DNA, 15 bp, Homo sapiens
gttactgtagtgttg

SEQ ID NO: 1396006 - DNA, 15 bp, Homo sapiens
tgttactgtagtgtt

SEQ ID NO: 1396007 - DNA, 15 bp, Homo sapiens
ttgttactgtagtgt

SEQ ID NO: 1396008 - DNA, 15 bp, Homo sapiens
attgttactgtagtg

SEQ ID NO: 1396009 - DNA, 15 bp, Homo sapiens
gattgttactgtagt

SEQ ID NO: 1396010 - DNA, 15 bp, Homo sapiens
ggattgttactgtag

SEQ ID NO: 1396011 - DNA, 15 bp, Homo sapiens
gggattgttactgta

SEQ ID NO: 1396012 - DNA, 15 bp, Homo sapiens
ggggattgttactgt

SEQ ID NO: 1396013 - DNA, 15 bp, Homo sapiens
gggggattgttactg

SEQ ID NO: 1396014 - DNA, 15 bp, Homo sapiens
ggggggattgttact

SEQ ID NO: 1396015 - DNA, 15 bp, Homo sapiens
tggggggattgttac

SEQ ID NO: 1396016 - DNA, 15 bp, Homo sapiens
atggggggattgtta

SEQ ID NO: 1396017 - DNA, 15 bp, Homo sapiens
aatggggggattgtt

SEQ ID NO: 1396018 - DNA, 15 bp, Homo sapiens
gaatggggggattgt

SEQ ID NO: 1396019 - DNA, 15 bp, Homo sapiens
ggaatggggggattg

SEQ ID NO: 1396020 - DNA, 15 bp, Homo sapiens
aggaatggggggatt

SEQ ID NO: 1396021 - DNA, 15 bp, Homo sapiens
gaggaatggggggat

SEQ ID NO: 1396022 - DNA, 15 bp, Homo sapiens
agaggaatgggggga

SEQ ID NO: 1396023 - DNA, 15 bp, Homo sapiens
gagaggaatgggggg

SEQ ID NO: 1396024 - DNA, 15 bp, Homo sapiens
agagaggaatggggg

SEQ ID NO: 1396025 - DNA, 15 bp, Homo sapiens
gagagaggaatgggg

SEQ ID NO: 1396026 - DNA, 15 bp, Homo sapiens
agagagaggaatggg

SEQ ID NO: 1396027 - DNA, 15 bp, Homo sapiens
cagagagaggaatgg

SEQ ID NO: 1396028 - DNA, 15 bp, Homo sapiens
tcagagagaggaatg

SEQ ID NO: 1396029 - DNA, 15 bp, Homo sapiens
atcagagagaggaat

SEQ ID NO: 1396030 - DNA, 15 bp, Homo sapiens
aatcagagagaggaa

SEQ ID NO: 1396031 - DNA, 15 bp, Homo sapiens
aaatcagagagagga

SEQ ID NO: 1396032 - DNA, 15 bp, Homo sapiens
taaatcagagagagg

SEQ ID NO: 1396033 - DNA, 15 bp, Homo sapiens
ttaaatcagagagag

SEQ ID NO: 1396034 - DNA, 15 bp, Homo sapiens
cttaaatcagagaga

SEQ ID NO: 1396035 - DNA, 15 bp, Homo sapiens
gcttaaatcagagag

SEQ ID NO: 1396036 - DNA, 15 bp, Homo sapiens
ggcttaaatcagaga

SEQ ID NO: 1396037 - DNA, 15 bp, Homo sapiens
aggcttaaatcagag

SEQ ID NO: 1396038 - DNA, 15 bp, Homo sapiens
aaggcttaaatcaga

SEQ ID NO: 1396039 - DNA, 15 bp, Homo sapiens
taaggcttaaatcag

SEQ ID NO: 1396040 - DNA, 15 bp, Homo sapiens
ataaggcttaaatca

SEQ ID NO: 1396041 - DNA, 15 bp, Homo sapiens
gataaggcttaaatc

SEQ ID NO: 1396042 - DNA, 15 bp, Homo sapiens
ggataaggcttaaat

SEQ ID NO: 1396043 - DNA, 15 bp, Homo sapiens
aggataaggcttaaa

SEQ ID NO: 1396044 - DNA, 15 bp, Homo sapiens
caggataaggcttaa

SEQ ID NO: 1396045 - DNA, 15 bp, Homo sapiens
acaggataaggctta

SEQ ID NO: 1396046 - DNA, 15 bp, Homo sapiens
aacaggataaggctt

SEQ ID NO: 1396047 - DNA, 15 bp, Homo sapiens
aaacaggataaggct

SEQ ID NO: 1396048 - DNA, 15 bp, Homo sapiens
gaaacaggataaggc

SEQ ID NO: 1396049 - DNA, 15 bp, Homo sapiens
agaaacaggataagg

SEQ ID NO: 1396050 - DNA, 15 bp, Homo sapiens
aagaaacaggataag

SEQ ID NO: 1396051 - DNA, 15 bp, Homo sapiens
taagaaacaggataa

SEQ ID NO: 1396052 - DNA, 15 bp, Homo sapiens
ttaagaaacaggata

SEQ ID NO: 1396053 - DNA, 15 bp, Homo sapiens
tttaagaaacaggat

SEQ ID NO: 1396054 - DNA, 15 bp, Homo sapiens
gtttaagaaacagga

SEQ ID NO: 1396055 - DNA, 15 bp, Homo sapiens
agtttaagaaacagg

SEQ ID NO: 1396056 - DNA, 15 bp, Homo sapiens
gagtttaagaaacag

SEQ ID NO: 1396057 - DNA, 15 bp, Homo sapiens
agagtttaagaaaca

SEQ ID NO: 1396058 - DNA, 15 bp, Homo sapiens
cagagtttaagaaac

SEQ ID NO: 1396059 - DNA, 15 bp, Homo sapiens
gcagagtttaagaaa

SEQ ID NO: 1396060 - DNA, 15 bp, Homo sapiens
tgcagagtttaagaa

SEQ ID NO: 1396061 - DNA, 15 bp, Homo sapiens
gtgcagagtttaaga

SEQ ID NO: 1396062 - DNA, 15 bp, Homo sapiens
tgtgcagagtttaag

SEQ ID NO: 1396063 - DNA, 15 bp, Homo sapiens
ctgtgcagagtttaa

SEQ ID NO: 1396064 - DNA, 15 bp, Homo sapiens
tctgtgcagagttta

SEQ ID NO: 1396065 - DNA, 15 bp, Homo sapiens
ttctgtgcagagttt

SEQ ID NO: 1396066 - DNA, 15 bp, Homo sapiens
cttctgtgcagagtt

SEQ ID NO: 1396067 - DNA, 15 bp, Homo sapiens
gcttctgtgcagagt

SEQ ID NO: 1396068 - DNA, 15 bp, Homo sapiens
ggcttctgtgcagag

SEQ ID NO: 1396069 - DNA, 15 bp, Homo sapiens
tggcttctgtgcaga

SEQ ID NO: 1396070 - DNA, 15 bp, Homo sapiens
ctggcttctgtgcag

SEQ ID NO: 1396071 - DNA, 15 bp, Homo sapiens
tctggcttctgtgca

SEQ ID NO: 1396072 - DNA, 15 bp, Homo sapiens
ctctggcttctgtgc

SEQ ID NO: 1396073 - DNA, 15 bp, Homo sapiens
actctggcttctgtg

SEQ ID NO: 1396074 - DNA, 15 bp, Homo sapiens
cactctggcttctgt

SEQ ID NO: 1396075 - DNA, 15 bp, Homo sapiens
tcactctggcttctg

SEQ ID NO: 1396076 - DNA, 15 bp, Homo sapiens
atcactctggcttct

SEQ ID NO: 1396077 - DNA, 15 bp, Homo sapiens
gatcactctggcttc

SEQ ID NO: 1396078 - DNA, 15 bp, Homo sapiens
tgatcactctggctt

SEQ ID NO: 1396079 - DNA, 15 bp, Homo sapiens
atgatcactctggct

SEQ ID NO: 1396080 - DNA, 15 bp, Homo sapiens
aatgatcactctggc

SEQ ID NO: 1396081 - DNA, 15 bp, Homo sapiens
aaatgatcactctgg

SEQ ID NO: 1396082 - DNA, 15 bp, Homo sapiens
aaaatgatcactctg

SEQ ID NO: 1396083 - DNA, 15 bp, Homo sapiens
caaaatgatcactct

SEQ ID NO: 1396084 - DNA, 15 bp, Homo sapiens
tcaaaatgatcactc

SEQ ID NO: 1396085 - DNA, 15 bp, Homo sapiens
ttcaaaatgatcact

SEQ ID NO: 1396086 - DNA, 15 bp, Homo sapiens
tttcaaaatgatcac

SEQ ID NO: 1396087 - DNA, 15 bp, Homo sapiens
gtttcaaaatgatca

SEQ ID NO: 1396088 - DNA, 15 bp, Homo sapiens
agtttcaaaatgatc

SEQ ID NO: 1396089 - DNA, 15 bp, Homo sapiens
gagtttcaaaatgat

SEQ ID NO: 1396090 - DNA, 15 bp, Homo sapiens
tgagtttcaaaatga

SEQ ID NO: 1396091 - DNA, 15 bp, Homo sapiens
ttgagtttcaaaatg

SEQ ID NO: 1396092 - DNA, 15 bp, Homo sapiens
attgagtttcaaaat

SEQ ID NO: 1396093 - DNA, 15 bp, Homo sapiens
gattgagtttcaaaa

SEQ ID NO: 1396094 - DNA, 15 bp, Homo sapiens
cgattgagtttcaaa

SEQ ID NO: 1396095 - DNA, 15 bp, Homo sapiens
acgattgagtttcaa

SEQ ID NO: 1396096 - DNA, 15 bp, Homo sapiens
cacgattgagtttca

SEQ ID NO: 1396097 - DNA, 15 bp, Homo sapiens
acacgattgagtttc

SEQ ID NO: 1396098 - DNA, 15 bp, Homo sapiens
gacacgattgagttt

SEQ ID NO: 1396099 - DNA, 15 bp, Homo sapiens
tgacacgattgagtt

SEQ ID NO: 1396100 - DNA, 15 bp, Homo sapiens
gtgacacgattgagt

SEQ ID NO: 1396101 - DNA, 15 bp, Homo sapiens
ggtgacacgattgag

SEQ ID NO: 1396102 - DNA, 15 bp, Homo sapiens
gggtgacacgattga

SEQ ID NO: 1396103 - DNA, 15 bp, Homo sapiens
agggtgacacgattg

SEQ ID NO: 1396104 - DNA, 15 bp, Homo sapiens
gagggtgacacgatt

SEQ ID NO: 1396105 - DNA, 15 bp, Homo sapiens
agagggtgacacgat

SEQ ID NO: 1396106 - DNA, 15 bp, Homo sapiens
cagagggtgacacga

SEQ ID NO: 1396107 - DNA, 15 bp, Homo sapiens
tcagagggtgacacg

SEQ ID NO: 1396108 - DNA, 15 bp, Homo sapiens
gtcagagggtgacac

SEQ ID NO: 1396109 - DNA, 15 bp, Homo sapiens
tgtcagagggtgaca

SEQ ID NO: 1396110 - DNA, 15 bp, Homo sapiens
ctgtcagagggtgac

SEQ ID NO: 1396111 - DNA, 15 bp, Homo sapiens
tctgtcagagggtga

SEQ ID NO: 1396112 - DNA, 15 bp, Homo sapiens
atctgtcagagggtg

SEQ ID NO: 1396113 - DNA, 15 bp, Homo sapiens
aatctgtcagagggt

SEQ ID NO: 1396114 - DNA, 15 bp, Homo sapiens
gaatctgtcagaggg

SEQ ID NO: 1396115 - DNA, 15 bp, Homo sapiens
ggaatctgtcagagg

SEQ ID NO: 1396116 - DNA, 15 bp, Homo sapiens
aggaatctgtcagag

SEQ ID NO: 1396117 - DNA, 15 bp, Homo sapiens
taggaatctgtcaga

SEQ ID NO: 1396118 - DNA, 15 bp, Homo sapiens
ataggaatctgtcag

SEQ ID NO: 1396119 - DNA, 15 bp, Homo sapiens
aataggaatctgtca

SEQ ID NO: 1396120 - DNA, 15 bp, Homo sapiens
gaataggaatctgtc

SEQ ID NO: 1396121 - DNA, 15 bp, Homo sapiens
tgaataggaatctgt

SEQ ID NO: 1396122 - DNA, 15 bp, Homo sapiens
gtgaataggaatctg

SEQ ID NO: 1396123 - DNA, 15 bp, Homo sapiens
agtgaataggaatct

SEQ ID NO: 1396124 - DNA, 15 bp, Homo sapiens
tagtgaataggaatc

SEQ ID NO: 1396125 - DNA, 15 bp, Homo sapiens
gtagtgaataggaat

SEQ ID NO: 1396126 - DNA, 15 bp, Homo sapiens
tgtagtgaataggaa

SEQ ID NO: 1396127 - DNA, 15 bp, Homo sapiens
ctgtagtgaatagga

SEQ ID NO: 1396128 - DNA, 15 bp, Homo sapiens
tctgtagtgaatagg

SEQ ID NO: 1396129 - DNA, 15 bp, Homo sapiens
ttctgtagtgaatag

SEQ ID NO: 1396130 - DNA, 15 bp, Homo sapiens
attctgtagtgaata

SEQ ID NO: 1396131 - DNA, 15 bp, Homo sapiens
tattctgtagtgaat

SEQ ID NO: 1396132 - DNA, 15 bp, Homo sapiens
ttattctgtagtgaa

SEQ ID NO: 1396133 - DNA, 15 bp, Homo sapiens
tttattctgtagtga

SEQ ID NO: 1396134 - DNA, 15 bp, Homo sapiens
ctttattctgtagtg

SEQ ID NO: 1396135 - DNA, 15 bp, Homo sapiens
cctttattctgtagt

SEQ ID NO: 1396136 - DNA, 15 bp, Homo sapiens
gcctttattctgtag

SEQ ID NO: 1396137 - DNA, 15 bp, Homo sapiens
ggcctttattctgta

SEQ ID NO: 1396138 - DNA, 15 bp, Homo sapiens
tggcctttattctgt

SEQ ID NO: 1396139 - DNA, 15 bp, Homo sapiens
ttggcctttattctg

SEQ ID NO: 1396140 - DNA, 15 bp, Homo sapiens
cttggcctttattct

SEQ ID NO: 1396141 - DNA, 15 bp, Homo sapiens
gcttggcctttattc

SEQ ID NO: 1396142 - DNA, 15 bp, Homo sapiens
agcttggcctttatt

SEQ ID NO: 1396143 - DNA, 15 bp, Homo sapiens
gagcttggcctttat

SEQ ID NO: 1396144 - DNA, 15 bp, Homo sapiens
agagcttggccttta

SEQ ID NO: 1396145 - DNA, 15 bp, Homo sapiens
aagagcttggccttt

SEQ ID NO: 1396146 - DNA, 15 bp, Homo sapiens
aaagagcttggcctt

SEQ ID NO: 1396147 - DNA, 15 bp, Homo sapiens
taaagagcttggcct

SEQ ID NO: 1396148 - DNA, 15 bp, Homo sapiens
ctaaagagcttggcc

SEQ ID NO: 1396149 - DNA, 15 bp, Homo sapiens
tctaaagagcttggc

SEQ ID NO: 1396150 - DNA, 15 bp, Homo sapiens
ttctaaagagcttgg

SEQ ID NO: 1396151 - DNA, 15 bp, Homo sapiens
attctaaagagcttg

SEQ ID NO: 1396152 - DNA, 15 bp, Homo sapiens
cattctaaagagctt

SEQ ID NO: 1396153 - DNA, 15 bp, Homo sapiens
tcattctaaagagct

SEQ ID NO: 1396154 - DNA, 15 bp, Homo sapiens
gtcattctaaagagc

SEQ ID NO: 1396155 - DNA, 15 bp, Homo sapiens
agtcattctaaagag

SEQ ID NO: 1396156 - DNA, 15 bp, Homo sapiens
aagtcattctaaaga

SEQ ID NO: 1396157 - DNA, 15 bp, Homo sapiens
taagtcattctaaag

SEQ ID NO: 1396158 - DNA, 15 bp, Homo sapiens
gtaagtcattctaaa

SEQ ID NO: 1396159 - DNA, 15 bp, Homo sapiens
tgtaagtcattctaa

SEQ ID NO: 1396160 - DNA, 15 bp, Homo sapiens
ttgtaagtcattcta

SEQ ID NO: 1396161 - DNA, 15 bp, Homo sapiens
tttgtaagtcattct

SEQ ID NO: 1396162 - DNA, 15 bp, Homo sapiens
ttttgtaagtcattc

SEQ ID NO: 1396163 - DNA, 15 bp, Homo sapiens
gttttgtaagtcatt

SEQ ID NO: 1396164 - DNA, 15 bp, Homo sapiens
ggttttgtaagtcat

SEQ ID NO: 1396165 - DNA, 15 bp, Homo sapiens
gggttttgtaagtca

SEQ ID NO: 1396166 - DNA, 15 bp, Homo sapiens
agggttttgtaagtc

SEQ ID NO: 1396167 - DNA, 15 bp, Homo sapiens
aagggttttgtaagt

SEQ ID NO: 1396168 - DNA, 15 bp, Homo sapiens
gaagggttttgtaag

SEQ ID NO: 1396169 - DNA, 15 bp, Homo sapiens
tgaagggttttgtaa

SEQ ID NO: 1396170 - DNA, 15 bp, Homo sapiens
atgaagggttttgta

SEQ ID NO: 1396171 - DNA, 15 bp, Homo sapiens
catgaagggttttgt

SEQ ID NO: 1396172 - DNA, 15 bp, Homo sapiens
ccatgaagggttttg

SEQ ID NO: 1396173 - DNA, 15 bp, Homo sapiens
gccatgaagggtttt

SEQ ID NO: 1396174 - DNA, 15 bp, Homo sapiens
ggccatgaagggttt

SEQ ID NO: 1396175 - DNA, 15 bp, Homo sapiens
aggccatgaagggtt

SEQ ID NO: 1396176 - DNA, 15 bp, Homo sapiens
taggccatgaagggt

SEQ ID NO: 1396177 - DNA, 15 bp, Homo sapiens
gtaggccatgaaggg

SEQ ID NO: 1396178 - DNA, 15 bp, Homo sapiens
ggtaggccatgaagg

SEQ ID NO: 1396179 - DNA, 15 bp, Homo sapiens
aggtaggccatgaag

SEQ ID NO: 1396180 - DNA, 15 bp, Homo sapiens
taggtaggccatgaa

SEQ ID NO: 1396181 - DNA, 15 bp, Homo sapiens
gtaggtaggccatga

SEQ ID NO: 1396182 - DNA, 15 bp, Homo sapiens
ggtaggtaggccatg

SEQ ID NO: 1396183 - DNA, 15 bp, Homo sapiens
aggtaggtaggccat

SEQ ID NO: 1396184 - DNA, 15 bp, Homo sapiens
aaggtaggtaggcca

SEQ ID NO: 1396185 - DNA, 15 bp, Homo sapiens
aaaggtaggtaggcc

SEQ ID NO: 1396186 - DNA, 15 bp, Homo sapiens
caaaggtaggtaggc

SEQ ID NO: 1396187 - DNA, 15 bp, Homo sapiens
gcaaaggtaggtagg

SEQ ID NO: 1396188 - DNA, 15 bp, Homo sapiens
tgcaaaggtaggtag

SEQ ID NO: 1396189 - DNA, 15 bp, Homo sapiens
ttgcaaaggtaggta

SEQ ID NO: 1396190 - DNA, 15 bp, Homo sapiens
tttgcaaaggtaggt

SEQ ID NO: 1396191 - DNA, 15 bp, Homo sapiens
gtttgcaaaggtagg

SEQ ID NO: 1396192 - DNA, 15 bp, Homo sapiens
agtttgcaaaggtag

SEQ ID NO: 1396193 - DNA, 15 bp, Homo sapiens
gagtttgcaaaggta

SEQ ID NO: 1396194 - DNA, 15 bp, Homo sapiens
tgagtttgcaaaggt

SEQ ID NO: 1396195 - DNA, 15 bp, Homo sapiens
atgagtttgcaaagg

SEQ ID NO: 1396196 - DNA, 15 bp, Homo sapiens
gatgagtttgcaaag

SEQ ID NO: 1396197 - DNA, 15 bp, Homo sapiens
agatgagtttgcaaa

SEQ ID NO: 1396198 - DNA, 15 bp, Homo sapiens
cagatgagtttgcaa

SEQ ID NO: 1396199 - DNA, 15 bp, Homo sapiens
gcagatgagtttgca

SEQ ID NO: 1396200 - DNA, 15 bp, Homo sapiens
ggcagatgagtttgc

SEQ ID NO: 1396201 - DNA, 15 bp, Homo sapiens
aggcagatgagtttg

SEQ ID NO: 1396202 - DNA, 15 bp, Homo sapiens
gaggcagatgagttt

SEQ ID NO: 1396203 - DNA, 15 bp, Homo sapiens
agaggcagatgagtt

SEQ ID NO: 1396204 - DNA, 15 bp, Homo sapiens
aagaggcagatgagt

SEQ ID NO: 1396205 - DNA, 15 bp, Homo sapiens
aaagaggcagatgag

SEQ ID NO: 1396206 - DNA, 15 bp, Homo sapiens
aaaagaggcagatga

SEQ ID NO: 1396207 - DNA, 15 bp, Homo sapiens
aaaaagaggcagatg

SEQ ID NO: 1396208 - DNA, 15 bp, Homo sapiens
gaaaaagaggcagat

SEQ ID NO: 1396209 - DNA, 15 bp, Homo sapiens
ggaaaaagaggcaga

SEQ ID NO: 1396210 - DNA, 15 bp, Homo sapiens
gggaaaaagaggcag

SEQ ID NO: 1396211 - DNA, 15 bp, Homo sapiens
agggaaaaagaggca

SEQ ID NO: 1396212 - DNA, 15 bp, Homo sapiens
cagggaaaaagaggc

SEQ ID NO: 1396213 - DNA, 15 bp, Homo sapiens
acagggaaaaagagg

SEQ ID NO: 1396214 - DNA, 15 bp, Homo sapiens
gacagggaaaaagag

SEQ ID NO: 1396215 - DNA, 15 bp, Homo sapiens
ggacagggaaaaaga

SEQ ID NO: 1396216 - DNA, 15 bp, Homo sapiens
gggacagggaaaaag

SEQ ID NO: 1396217 - DNA, 15 bp, Homo sapiens
tgggacagggaaaaa

SEQ ID NO: 1396218 - DNA, 15 bp, Homo sapiens
atgggacagggaaaa

SEQ ID NO: 1396219 - DNA, 15 bp, Homo sapiens
ctatgggacagggaa

SEQ ID NO: 1396220 - DNA, 15 bp, Homo sapiens
cctatgggacaggga

SEQ ID NO: 1396221 - DNA, 15 bp, Homo sapiens
gcctatgggacaggg

SEQ ID NO: 1396222 - DNA, 15 bp, Homo sapiens
tgcctatgggacagg

SEQ ID NO: 1396223 - DNA, 15 bp, Homo sapiens
atgcctatgggacag

SEQ ID NO: 1396224 - DNA, 15 bp, Homo sapiens
gatgcctatgggaca

SEQ ID NO: 1396225 - DNA, 15 bp, Homo sapiens
agatgcctatgggac

SEQ ID NO: 1396226 - DNA, 15 bp, Homo sapiens
gagatgcctatggga

SEQ ID NO: 1396227 - DNA, 15 bp, Homo sapiens
tgagatgcctatggg

SEQ ID NO: 1396228 - DNA, 15 bp, Homo sapiens
ctgagatgcctatgg

SEQ ID NO: 1396229 - DNA, 15 bp, Homo sapiens
actgagatgcctatg

SEQ ID NO: 1396230 - DNA, 15 bp, Homo sapiens
tactgagatgcctat

SEQ ID NO: 1396231 - DNA, 15 bp, Homo sapiens
ttactgagatgccta

SEQ ID NO: 1396232 - DNA, 15 bp, Homo sapiens
attactgagatgcct

SEQ ID NO: 1396233 - DNA, 15 bp, Homo sapiens
tattactgagatgcc

SEQ ID NO: 1396234 - DNA, 15 bp, Homo sapiens
atattactgagatgc

SEQ ID NO: 1396235 - DNA, 15 bp, Homo sapiens
aatattactgagatg

SEQ ID NO: 1396236 - DNA, 15 bp, Homo sapiens
taatattactgagat

SEQ ID NO: 1396237 - DNA, 15 bp, Homo sapiens
ttaatattactgaga

SEQ ID NO: 1396238 - DNA, 15 bp, Homo sapiens
tttaatattactgag

SEQ ID NO: 1396239 - DNA, 15 bp, Homo sapiens
ttttaatattactga

SEQ ID NO: 1396240 - DNA, 15 bp, Homo sapiens
gttttaatattactg

SEQ ID NO: 1396241 - DNA, 15 bp, Homo sapiens
tgttttaatattact

SEQ ID NO: 1396242 - DNA, 15 bp, Homo sapiens
ctgttttaatattac

SEQ ID NO: 1396243 - DNA, 15 bp, Homo sapiens
actgttttaatatta

SEQ ID NO: 1396244 - DNA, 15 bp, Homo sapiens
aactgttttaatatt

SEQ ID NO: 1396245 - DNA, 15 bp, Homo sapiens
caactgttttaatat

SEQ ID NO: 1396246 - DNA, 15 bp, Homo sapiens
acaactgttttaata

SEQ ID NO: 1396247 - DNA, 15 bp, Homo sapiens
tacaactgttttaat

SEQ ID NO: 1396248 - DNA, 15 bp, Homo sapiens
ctacaactgttttaa

SEQ ID NO: 1396249 - DNA, 15 bp, Homo sapiens
actacaactgtttta

SEQ ID NO: 1396250 - DNA, 15 bp, Homo sapiens
aactacaactgtttt

SEQ ID NO: 1396251 - DNA, 15 bp, Homo sapiens
aaactacaactgttt

SEQ ID NO: 1396252 - DNA, 15 bp, Homo sapiens
gaaactacaactgtt

SEQ ID NO: 1396253 - DNA, 15 bp, Homo sapiens
agaaactacaactgt

SEQ ID NO: 1396254 - DNA, 15 bp, Homo sapiens
cagaaactacaactg

SEQ ID NO: 1396255 - DNA, 15 bp, Homo sapiens
tcagaaactacaact

SEQ ID NO: 1396256 - DNA, 15 bp, Homo sapiens
atcagaaactacaac

SEQ ID NO: 1396257 - DNA, 15 bp, Homo sapiens
tatcagaaactacaa

SEQ ID NO: 1396258 - DNA, 15 bp, Homo sapiens
atatcagaaactaca

SEQ ID NO: 1396259 - DNA, 15 bp, Homo sapiens
aatatcagaaactac

SEQ ID NO: 1396260 - DNA, 15 bp, Homo sapiens
gaatatcagaaacta

SEQ ID NO: 1396261 - DNA, 15 bp, Homo sapiens
tgaatatcagaaact

SEQ ID NO: 1396262 - DNA, 15 bp, Homo sapiens
gtgaatatcagaaac

SEQ ID NO: 1396263 - DNA, 15 bp, Homo sapiens
ggtgaatatcagaaa

SEQ ID NO: 1396264 - DNA, 15 bp, Homo sapiens
tggtgaatatcagaa

SEQ ID NO: 1396265 - DNA, 15 bp, Homo sapiens
atggtgaatatcaga

SEQ ID NO: 1396266 - DNA, 15 bp, Homo sapiens
catggtgaatatcag

SEQ ID NO: 1396267 - DNA, 15 bp, Homo sapiens
gcatggtgaatatca

SEQ ID NO: 1396268 - DNA, 15 bp, Homo sapiens
tgcatggtgaatatc

SEQ ID NO: 1396269 - DNA, 15 bp, Homo sapiens
ttgcatggtgaatat

SEQ ID NO: 1396270 - DNA, 15 bp, Homo sapiens
attgcatggtgaata

SEQ ID NO: 1396271 - DNA, 15 bp, Homo sapiens
aattgcatggtgaat

SEQ ID NO: 1396272 - DNA, 15 bp, Homo sapiens
caattgcatggtgaa

SEQ ID NO: 1396273 - DNA, 15 bp, Homo sapiens
gcaattgcatggtga

SEQ ID NO: 1396274 - DNA, 15 bp, Homo sapiens
tgcaattgcatggtg

SEQ ID NO: 1396275 - DNA, 15 bp, Homo sapiens
ttgcaattgcatggt

SEQ ID NO: 1396276 - DNA, 15 bp, Homo sapiens
cttgcaattgcatgg

SEQ ID NO: 1396277 - DNA, 15 bp, Homo sapiens
acttgcaattgcatg

SEQ ID NO: 1396278 - DNA, 15 bp, Homo sapiens
gacttgcaattgcat

SEQ ID NO: 1396279 - DNA, 15 bp, Homo sapiens
agacttgcaattgca

SEQ ID NO: 1396280 - DNA, 15 bp, Homo sapiens
gagacttgcaattgc

SEQ ID NO: 1396281 - DNA, 15 bp, Homo sapiens
ggagacttgcaattg

SEQ ID NO: 1396282 - DNA, 15 bp, Homo sapiens
tggagacttgcaatt

SEQ ID NO: 1396283 - DNA, 15 bp, Homo sapiens
atggagacttgcaat

SEQ ID NO: 1396284 - DNA, 15 bp, Homo sapiens
gatggagacttgcaa

SEQ ID NO: 1396285 - DNA, 15 bp, Homo sapiens
ggatggagacttgca

SEQ ID NO: 1396286 - DNA, 15 bp, Homo sapiens
gggatggagacttgc

SEQ ID NO: 1396287 - DNA, 15 bp, Homo sapiens
agggatggagacttg

SEQ ID NO: 1396288 - DNA, 15 bp, Homo sapiens
aagggatggagactt

SEQ ID NO: 1396289 - DNA, 15 bp, Homo sapiens
aaagggatggagact

SEQ ID NO: 1396290 - DNA, 15 bp, Homo sapiens
caaagggatggagac

SEQ ID NO: 1396291 - DNA, 15 bp, Homo sapiens
acaaagggatggaga

SEQ ID NO: 1396292 - DNA, 15 bp, Homo sapiens
aacaaagggatggag

SEQ ID NO: 1396293 - DNA, 15 bp, Homo sapiens
gaacaaagggatgga

SEQ ID NO: 1396294 - DNA, 15 bp, Homo sapiens
tgaacaaagggatgg

SEQ ID NO: 1396295 - DNA, 15 bp, Homo sapiens
atgaacaaagggatg

SEQ ID NO: 1396296 - DNA, 15 bp, Homo sapiens
catgaacaaagggat

SEQ ID NO: 1396297 - DNA, 15 bp, Homo sapiens
acatgaacaaaggga

SEQ ID NO: 1396298 - DNA, 15 bp, Homo sapiens
cacatgaacaaaggg

SEQ ID NO: 1396299 - DNA, 15 bp, Homo sapiens
tcacatgaacaaagg

SEQ ID NO: 1396300 - DNA, 15 bp, Homo sapiens
ctcacatgaacaaag

SEQ ID NO: 1396301 - DNA, 15 bp, Homo sapiens
actcacatgaacaaa

SEQ ID NO: 1396302 - DNA, 15 bp, Homo sapiens
gactcacatgaacaa

SEQ ID NO: 1396303 - DNA, 15 bp, Homo sapiens
agactcacatgaaca

SEQ ID NO: 1396304 - DNA, 15 bp, Homo sapiens
aagactcacatgaac

SEQ ID NO: 1396305 - DNA, 15 bp, Homo sapiens
aaagactcacatgaa

SEQ ID NO: 1396306 - DNA, 15 bp, Homo sapiens
gaaagactcacatga

SEQ ID NO: 1396307 - DNA, 15 bp, Homo sapiens
agaaagactcacatg

SEQ ID NO: 1396308 - DNA, 15 bp, Homo sapiens
cagaaagactcacat

SEQ ID NO: 1396309 - DNA, 15 bp, Homo sapiens
acagaaagactcaca

SEQ ID NO: 1396310 - DNA, 15 bp, Homo sapiens
gacagaaagactcac

SEQ ID NO: 1396311 - DNA, 15 bp, Homo sapiens
agacagaaagactca

SEQ ID NO: 1396312 - DNA, 15 bp, Homo sapiens
tagacagaaagactc

SEQ ID NO: 1396313 - DNA, 15 bp, Homo sapiens
ttagacagaaagact

SEQ ID NO: 1396314 - DNA, 15 bp, Homo sapiens
tttagacagaaagac

SEQ ID NO: 1396315 - DNA, 15 bp, Homo sapiens
ttttagacagaaaga

SEQ ID NO: 1396316 - DNA, 15 bp, Homo sapiens
attttagacagaaag

SEQ ID NO: 1396317 - DNA, 15 bp, Homo sapiens
tattttagacagaaa

SEQ ID NO: 1396318 - DNA, 15 bp, Homo sapiens
gtattttagacagaa

SEQ ID NO: 1396319 - DNA, 15 bp, Homo sapiens
ggtattttagacaga

SEQ ID NO: 1396320 - DNA, 15 bp, Homo sapiens
aggtattttagacag

SEQ ID NO: 1396321 - DNA, 15 bp, Homo sapiens
aaggtattttagaca

SEQ ID NO: 1396322 - DNA, 15 bp, Homo sapiens
aaaggtattttagac

SEQ ID NO: 1396323 - DNA, 15 bp, Homo sapiens
caaaggtattttaga

SEQ ID NO: 1396324 - DNA, 15 bp, Homo sapiens
tcaaaggtattttag

SEQ ID NO: 1396325 - DNA, 15 bp, Homo sapiens
gtcaaaggtatttta

SEQ ID NO: 1396326 - DNA, 15 bp, Homo sapiens
agtcaaaggtatttt

SEQ ID NO: 1396327 - DNA, 15 bp, Homo sapiens
gagtcaaaggtattt

SEQ ID NO: 1396328 - DNA, 15 bp, Homo sapiens
agagtcaaaggtatt

SEQ ID NO: 1396329 - DNA, 15 bp, Homo sapiens
aagagtcaaaggtat

SEQ ID NO: 1396330 - DNA, 15 bp, Homo sapiens
aaagagtcaaaggta

SEQ ID NO: 1396331 - DNA, 15 bp, Homo sapiens
caaagagtcaaaggt

SEQ ID NO: 1396332 - DNA, 15 bp, Homo sapiens
acaaagagtcaaagg

SEQ ID NO: 1396333 - DNA, 15 bp, Homo sapiens
gacaaagagtcaaag

SEQ ID NO: 1396334 - DNA, 15 bp, Homo sapiens
agacaaagagtcaaa

SEQ ID NO: 1396335 - DNA, 15 bp, Homo sapiens
gagacaaagagtcaa

SEQ ID NO: 1396336 - DNA, 15 bp, Homo sapiens
tgagacaaagagtca

SEQ ID NO: 1396337 - DNA, 15 bp, Homo sapiens
atgagacaaagagtc

SEQ ID NO: 1396338 - DNA, 15 bp, Homo sapiens
aatgagacaaagagt

SEQ ID NO: 1396339 - DNA, 15 bp, Homo sapiens
aaatgagacaaagag

SEQ ID NO: 1396340 - DNA, 15 bp, Homo sapiens
caaatgagacaaaga

SEQ ID NO: 1396341 - DNA, 15 bp, Homo sapiens
ccaaatgagacaaag

SEQ ID NO: 1396342 - DNA, 15 bp, Homo sapiens
accaaatgagacaaa

SEQ ID NO: 1396343 - DNA, 15 bp, Homo sapiens
aaccaaatgagacaa

SEQ ID NO: 1396344 - DNA, 15 bp, Homo sapiens
taaccaaatgagaca

SEQ ID NO: 1396345 - DNA, 15 bp, Homo sapiens
ttaaccaaatgagac

SEQ ID NO: 1396346 - DNA, 15 bp, Homo sapiens
gttaaccaaatgaga

SEQ ID NO: 1396347 - DNA, 15 bp, Homo sapiens
agttaaccaaatgag

SEQ ID NO: 1396348 - DNA, 15 bp, Homo sapiens
gagttaaccaaatga

SEQ ID NO: 1396349 - DNA, 15 bp, Homo sapiens
agagttaaccaaatg

SEQ ID NO: 1396350 - DNA, 15 bp, Homo sapiens
cagagttaaccaaat

SEQ ID NO: 1396351 - DNA, 15 bp, Homo sapiens
tcagagttaaccaaa

SEQ ID NO: 1396352 - DNA, 15 bp, Homo sapiens
atcagagttaaccaa

SEQ ID NO: 1396353 - DNA, 15 bp, Homo sapiens
aatcagagttaacca

SEQ ID NO: 1396354 - DNA, 15 bp, Homo sapiens
gaatcagagttaacc

SEQ ID NO: 1396355 - DNA, 15 bp, Homo sapiens
tgaatcagagttaac

SEQ ID NO: 1396356 - DNA, 15 bp, Homo sapiens
ttgaatcagagttaa

SEQ ID NO: 1396357 - DNA, 15 bp, Homo sapiens
attgaatcagagtta

SEQ ID NO: 1396358 - DNA, 15 bp, Homo sapiens
gattgaatcagagtt

SEQ ID NO: 1396359 - DNA, 15 bp, Homo sapiens
agattgaatcagagt

SEQ ID NO: 1396360 - DNA, 15 bp, Homo sapiens
aagattgaatcagag

SEQ ID NO: 1396361 - DNA, 15 bp, Homo sapiens
caagattgaatcaga

SEQ ID NO: 1396362 - DNA, 15 bp, Homo sapiens
tcaagattgaatcag

SEQ ID NO: 1396363 - DNA, 15 bp, Homo sapiens
ttcaagattgaatca

SEQ ID NO: 1396364 - DNA, 15 bp, Homo sapiens
cttcaagattgaatc

SEQ ID NO: 1396365 - DNA, 15 bp, Homo sapiens
tcttcaagattgaat

SEQ ID NO: 1396366 - DNA, 15 bp, Homo sapiens
atcttcaagattgaa

SEQ ID NO: 1396367 - DNA, 15 bp, Homo sapiens
aatcttcaagattga

SEQ ID NO: 1396368 - DNA, 15 bp, Homo sapiens
aaatcttcaagattg

SEQ ID NO: 1396369 - DNA, 15 bp, Homo sapiens
aaaatcttcaagatt

SEQ ID NO: 1396370 - DNA, 15 bp, Homo sapiens
caaaatcttcaagat

SEQ ID NO: 1396371 - DNA, 15 bp, Homo sapiens
acaaaatcttcaaga

SEQ ID NO: 1396372 - DNA, 15 bp, Homo sapiens
aacaaaatcttcaag

SEQ ID NO: 1396373 - DNA, 15 bp, Homo sapiens
aaacaaaatcttcaa

SEQ ID NO: 1396374 - DNA, 15 bp, Homo sapiens
taaacaaaatcttca

SEQ ID NO: 1396375 - DNA, 15 bp, Homo sapiens
ttaaacaaaatcttc

SEQ ID NO: 1396376 - DNA, 15 bp, Homo sapiens
cttaaacaaaatctt

SEQ ID NO: 1396377 - DNA, 15 bp, Homo sapiens
ccttaaacaaaatct

SEQ ID NO: 1396378 - DNA, 15 bp, Homo sapiens
accttaaacaaaatc

SEQ ID NO: 1396379 - DNA, 15 bp, Homo sapiens
caccttaaacaaaat

SEQ ID NO: 1396380 - DNA, 15 bp, Homo sapiens
acaccttaaacaaaa

SEQ ID NO: 1396381 - DNA, 15 bp, Homo sapiens
aacaccttaaacaaa

SEQ ID NO: 1396382 - DNA, 15 bp, Homo sapiens
aaacaccttaaacaa

SEQ ID NO: 1396383 - DNA, 15 bp, Homo sapiens
gaaacaccttaaaca

SEQ ID NO: 1396384 - DNA, 15 bp, Homo sapiens
agaaacaccttaaac

SEQ ID NO: 1396385 - DNA, 15 bp, Homo sapiens
gagaaacaccttaaa

SEQ ID NO: 1396386 - DNA, 15 bp, Homo sapiens
ggagaaacaccttaa

SEQ ID NO: 1396387 - DNA, 15 bp, Homo sapiens
aggagaaacacctta

SEQ ID NO: 1396388 - DNA, 15 bp, Homo sapiens
aaggagaaacacctt

SEQ ID NO: 1396389 - DNA, 15 bp, Homo sapiens
gaaggagaaacacct

SEQ ID NO: 1396390 - DNA, 15 bp, Homo sapiens
tgaaggagaaacacc

SEQ ID NO: 1396391 - DNA, 15 bp, Homo sapiens
ctgaaggagaaacac

SEQ ID NO: 1396392 - DNA, 15 bp, Homo sapiens
cctgaaggagaaaca

SEQ ID NO: 1396393 - DNA, 15 bp, Homo sapiens
tcctgaaggagaaac

SEQ ID NO: 1396394 - DNA, 15 bp, Homo sapiens
ttcctgaaggagaaa

SEQ ID NO: 1396395 - DNA, 15 bp, Homo sapiens
gttcctgaaggagaa

SEQ ID NO: 1396396 - DNA, 15 bp, Homo sapiens
ggttcctgaaggaga

SEQ ID NO: 1396397 - DNA, 15 bp, Homo sapiens
aggttcctgaaggag

SEQ ID NO: 1396398 - DNA, 15 bp, Homo sapiens
aaggttcctgaagga

SEQ ID NO: 1396399 - DNA, 15 bp, Homo sapiens
aaaggttcctgaagg

SEQ ID NO: 1396400 - DNA, 15 bp, Homo sapiens
gaaaggttcctgaag

SEQ ID NO: 1396401 - DNA, 15 bp, Homo sapiens
ggaaaggttcctgaa

SEQ ID NO: 1396402 - DNA, 15 bp, Homo sapiens
gggaaaggttcctga

SEQ ID NO: 1396403 - DNA, 15 bp, Homo sapiens
agggaaaggttcctg

SEQ ID NO: 1396404 - DNA, 15 bp, Homo sapiens
tagggaaaggttcct

SEQ ID NO: 1396405 - DNA, 15 bp, Homo sapiens
ttagggaaaggttcc

SEQ ID NO: 1396406 - DNA, 15 bp, Homo sapiens
tttagggaaaggttc

SEQ ID NO: 1396407 - DNA, 15 bp, Homo sapiens
atttagggaaaggtt

SEQ ID NO: 1396408 - DNA, 15 bp, Homo sapiens
aatttagggaaaggt

SEQ ID NO: 1396409 - DNA, 15 bp, Homo sapiens
gaatttagggaaagg

SEQ ID NO: 1396410 - DNA, 15 bp, Homo sapiens
tgaatttagggaaag

SEQ ID NO: 1396411 - DNA, 15 bp, Homo sapiens
ttgaatttagggaaa

SEQ ID NO: 1396412 - DNA, 15 bp, Homo sapiens
gttgaatttagggaa

SEQ ID NO: 1396413 - DNA, 15 bp, Homo sapiens
ggttgaatttaggga

SEQ ID NO: 1396414 - DNA, 15 bp, Homo sapiens
gggttgaatttaggg

SEQ ID NO: 1396415 - DNA, 15 bp, Homo sapiens
agggttgaatttagg

SEQ ID NO: 1396416 - DNA, 15 bp, Homo sapiens
cagggttgaatttag

SEQ ID NO: 1396417 - DNA, 15 bp, Homo sapiens
ccagggttgaattta

SEQ ID NO: 1396418 - DNA, 15 bp, Homo sapiens
gccagggttgaattt

SEQ ID NO: 1396419 - DNA, 15 bp, Homo sapiens
agccagggttgaatt

SEQ ID NO: 1396420 - DNA, 15 bp, Homo sapiens
gagccagggttgaat

SEQ ID NO: 1396421 - DNA, 15 bp, Homo sapiens
agagccagggttgaa

SEQ ID NO: 1396422 - DNA, 15 bp, Homo sapiens
gagagccagggttga

SEQ ID NO: 1396423 - DNA, 15 bp, Homo sapiens
agagagccagggttg

SEQ ID NO: 1396424 - DNA, 15 bp, Homo sapiens
cagagagccagggtt

SEQ ID NO: 1396425 - DNA, 15 bp, Homo sapiens
acagagagccagggt

SEQ ID NO: 1396426 - DNA, 15 bp, Homo sapiens
gacagagagccaggg

SEQ ID NO: 1396427 - DNA, 15 bp, Homo sapiens
ggacagagagccagg

SEQ ID NO: 1396428 - DNA, 15 bp, Homo sapiens
aggacagagagccag

SEQ ID NO: 1396429 - DNA, 15 bp, Homo sapiens
caggacagagagcca

SEQ ID NO: 1396430 - DNA, 15 bp, Homo sapiens
gcaggacagagagcc

SEQ ID NO: 1396431 - DNA, 15 bp, Homo sapiens
agcaggacagagagc

SEQ ID NO: 1396432 - DNA, 15 bp, Homo sapiens
gagcaggacagagag

SEQ ID NO: 1396433 - DNA, 15 bp, Homo sapiens
ggagcaggacagaga

SEQ ID NO: 1396434 - DNA, 15 bp, Homo sapiens
gggagcaggacagag

SEQ ID NO: 1396435 - DNA, 15 bp, Homo sapiens
agggagcaggacaga

SEQ ID NO: 1396436 - DNA, 15 bp, Homo sapiens
gagggagcaggacag

SEQ ID NO: 1396437 - DNA, 15 bp, Homo sapiens
tgagggagcaggaca

SEQ ID NO: 1396438 - DNA, 15 bp, Homo sapiens
ttgagggagcaggac

SEQ ID NO: 1396439 - DNA, 15 bp, Homo sapiens
cttgagggagcagga

SEQ ID NO: 1396440 - DNA, 15 bp, Homo sapiens
gcttgagggagcagg

SEQ ID NO: 1396441 - DNA, 15 bp, Homo sapiens
agcttgagggagcag

SEQ ID NO: 1396442 - DNA, 15 bp, Homo sapiens
cagcttgagggagca

SEQ ID NO: 1396443 - DNA, 15 bp, Homo sapiens
ccagcttgagggagc

SEQ ID NO: 1396444 - DNA, 15 bp, Homo sapiens
cccagcttgagggag

SEQ ID NO: 1396445 - DNA, 15 bp, Homo sapiens
ccccagcttgaggga

SEQ ID NO: 1396446 - DNA, 15 bp, Homo sapiens
accccagcttgaggg

SEQ ID NO: 1396447 - DNA, 15 bp, Homo sapiens
taccccagcttgagg

SEQ ID NO: 1396448 - DNA, 15 bp, Homo sapiens
ataccccagcttgag

SEQ ID NO: 1396449 - DNA, 15 bp, Homo sapiens
gataccccagcttga

SEQ ID NO: 1396450 - DNA, 15 bp, Homo sapiens
ggataccccagcttg

SEQ ID NO: 1396451 - DNA, 15 bp, Homo sapiens
aggataccccagctt

SEQ ID NO: 1396452 - DNA, 15 bp, Homo sapiens
aaggataccccagct

SEQ ID NO: 1396453 - DNA, 15 bp, Homo sapiens
gaaggataccccagc

SEQ ID NO: 1396454 - DNA, 15 bp, Homo sapiens
ggaaggataccccag

SEQ ID NO: 1396455 - DNA, 15 bp, Homo sapiens
gggaaggatacccca

SEQ ID NO: 1396456 - DNA, 15 bp, Homo sapiens
agggaaggatacccc

SEQ ID NO: 1396457 - DNA, 15 bp, Homo sapiens
gagggaaggataccc

SEQ ID NO: 1396458 - DNA, 15 bp, Homo sapiens
agagggaaggatacc

SEQ ID NO: 1396459 - DNA, 15 bp, Homo sapiens
aagagggaaggatac

SEQ ID NO: 1396460 - DNA, 15 bp, Homo sapiens
gaagagggaaggata

SEQ ID NO: 1396461 - DNA, 15 bp, Homo sapiens
agaagagggaaggat

SEQ ID NO: 1396462 - DNA, 15 bp, Homo sapiens
gagaagagggaagga

SEQ ID NO: 1396463 - DNA, 15 bp, Homo sapiens
agagaagagggaagg

SEQ ID NO: 1396464 - DNA, 15 bp, Homo sapiens
tagagaagagggaag

SEQ ID NO: 1396465 - DNA, 15 bp, Homo sapiens
atagagaagagggaa

SEQ ID NO: 1396466 - DNA, 15 bp, Homo sapiens
aatagagaagaggga

SEQ ID NO: 1396467 - DNA, 15 bp, Homo sapiens
gaatagagaagaggg

SEQ ID NO: 1396468 - DNA, 15 bp, Homo sapiens
ggaatagagaagagg

SEQ ID NO: 1396469 - DNA, 15 bp, Homo sapiens
gggaatagagaagag

SEQ ID NO: 1396470 - DNA, 15 bp, Homo sapiens
tgggaatagagaaga

SEQ ID NO: 1396471 - DNA, 15 bp, Homo sapiens
atgggaatagagaag

SEQ ID NO: 1396472 - DNA, 15 bp, Homo sapiens
tatgggaatagagaa

SEQ ID NO: 1396473 - DNA, 15 bp, Homo sapiens
ttatgggaatagaga

SEQ ID NO: 1396474 - DNA, 15 bp, Homo sapiens
gttatgggaatagag

SEQ ID NO: 1396475 - DNA, 15 bp, Homo sapiens
tgttatgggaataga

SEQ ID NO: 1396476 - DNA, 15 bp, Homo sapiens
gtgttatgggaatag

SEQ ID NO: 1396477 - DNA, 15 bp, Homo sapiens
agtgttatgggaata

SEQ ID NO: 1396478 - DNA, 15 bp, Homo sapiens
gagtgttatgggaat

SEQ ID NO: 1396479 - DNA, 15 bp, Homo sapiens
agagtgttatgggaa

SEQ ID NO: 1396480 - DNA, 15 bp, Homo sapiens
cagagtgttatggga

SEQ ID NO: 1396481 - DNA, 15 bp, Homo sapiens
acagagtgttatggg

SEQ ID NO: 1396482 - DNA, 15 bp, Homo sapiens
cacagagtgttatgg

SEQ ID NO: 1396483 - DNA, 15 bp, Homo sapiens
tcacagagtgttatg

SEQ ID NO: 1396484 - DNA, 15 bp, Homo sapiens
ttcacagagtgttat

SEQ ID NO: 1396485 - DNA, 15 bp, Homo sapiens
attcacagagtgtta

SEQ ID NO: 1396486 - DNA, 15 bp, Homo sapiens
aattcacagagtgtt

SEQ ID NO: 1396487 - DNA, 15 bp, Homo sapiens
caattcacagagtgt

SEQ ID NO: 1396488 - DNA, 15 bp, Homo sapiens
gcaattcacagagtg

SEQ ID NO: 1396489 - DNA, 15 bp, Homo sapiens
agcaattcacagagt

SEQ ID NO: 1396490 - DNA, 15 bp, Homo sapiens
gagcaattcacagag

SEQ ID NO: 1396491 - DNA, 15 bp, Homo sapiens
ggagcaattcacaga

SEQ ID NO: 1396492 - DNA, 15 bp, Homo sapiens
tggagcaattcacag

SEQ ID NO: 1396493 - DNA, 15 bp, Homo sapiens
atggagcaattcaca

SEQ ID NO: 1396494 - DNA, 15 bp, Homo sapiens
gatggagcaattcac

SEQ ID NO: 1396495 - DNA, 15 bp, Homo sapiens
tgatggagcaattca

SEQ ID NO: 1396496 - DNA, 15 bp, Homo sapiens
atgatggagcaattc

SEQ ID NO: 1396497 - DNA, 15 bp, Homo sapiens
aatgatggagcaatt

SEQ ID NO: 1396498 - DNA, 15 bp, Homo sapiens
taatgatggagcaat

SEQ ID NO: 1396499 - DNA, 15 bp, Homo sapiens
ttaatgatggagcaa

SEQ ID NO: 1396500 - DNA, 15 bp, Homo sapiens
cttaatgatggagca

SEQ ID NO: 1396501 - DNA, 15 bp, Homo sapiens
acttaatgatggagc

SEQ ID NO: 1396502 - DNA, 15 bp, Homo sapiens
aacttaatgatggag

SEQ ID NO: 1396503 - DNA, 15 bp, Homo sapiens
aaacttaatgatgga

SEQ ID NO: 1396504 - DNA, 15 bp, Homo sapiens
aaaacttaatgatgg

SEQ ID NO: 1396505 - DNA, 15 bp, Homo sapiens
aaaaacttaatgatg

SEQ ID NO: 1396506 - DNA, 15 bp, Homo sapiens
gaaaaacttaatgat

SEQ ID NO: 1396507 - DNA, 15 bp, Homo sapiens
tgaaaaacttaatga

SEQ ID NO: 1396508 - DNA, 15 bp, Homo sapiens
gtgaaaaacttaatg

SEQ ID NO: 1396509 - DNA, 15 bp, Homo sapiens
ggtgaaaaacttaat

SEQ ID NO: 1396510 - DNA, 15 bp, Homo sapiens
gggtgaaaaacttaa

SEQ ID NO: 1396511 - DNA, 15 bp, Homo sapiens
ggggtgaaaaactta

SEQ ID NO: 1396512 - DNA, 15 bp, Homo sapiens
tggggtgaaaaactt

SEQ ID NO: 1396513 - DNA, 15 bp, Homo sapiens
gtggggtgaaaaact

SEQ ID NO: 1396514 - DNA, 15 bp, Homo sapiens
cgtggggtgaaaaac

SEQ ID NO: 1396515 - DNA, 15 bp, Homo sapiens
gcgtggggtgaaaaa

SEQ ID NO: 1396516 - DNA, 15 bp, Homo sapiens
agcgtggggtgaaaa

SEQ ID NO: 1396517 - DNA, 15 bp, Homo sapiens
cagcgtggggtgaaa

SEQ ID NO: 1396518 - DNA, 15 bp, Homo sapiens
tcagcgtggggtgaa

SEQ ID NO: 1396519 - DNA, 15 bp, Homo sapiens
atcagcgtggggtga

SEQ ID NO: 1396520 - DNA, 15 bp, Homo sapiens
tatcagcgtggggtg

SEQ ID NO: 1396521 - DNA, 15 bp, Homo sapiens
atatcagcgtggggt

SEQ ID NO: 1396522 - DNA, 15 bp, Homo sapiens
aatatcagcgtgggg

SEQ ID NO: 1396523 - DNA, 15 bp, Homo sapiens
aaatatcagcgtggg

SEQ ID NO: 1396524 - DNA, 15 bp, Homo sapiens
taaatatcagcgtgg

SEQ ID NO: 1396525 - DNA, 15 bp, Homo sapiens
ataaatatcagcgtg

SEQ ID NO: 1396526 - DNA, 15 bp, Homo sapiens
tataaatatcagcgt

SEQ ID NO: 1396527 - DNA, 15 bp, Homo sapiens
atataaatatcagcg

SEQ ID NO: 1396528 - DNA, 15 bp, Homo sapiens
tatataaatatcagc

SEQ ID NO: 1396529 - DNA, 15 bp, Homo sapiens
gtatataaatatcag

SEQ ID NO: 1396530 - DNA, 15 bp, Homo sapiens
tgtatataaatatca

SEQ ID NO: 1396531 - DNA, 15 bp, Homo sapiens
atgtatataaatatc

SEQ ID NO: 1396532 - DNA, 15 bp, Homo sapiens
catgtatataaatat

SEQ ID NO: 1396533 - DNA, 15 bp, Homo sapiens
acatgtatataaata

SEQ ID NO: 1396534 - DNA, 15 bp, Homo sapiens
gacatgtatataaat

SEQ ID NO: 1396535 - DNA, 15 bp, Homo sapiens
agacatgtatataaa

SEQ ID NO: 1396536 - DNA, 15 bp, Homo sapiens
cagacatgtatataa

SEQ ID NO: 1396537 - DNA, 15 bp, Homo sapiens
acagacatgtatata

SEQ ID NO: 1396538 - DNA, 15 bp, Homo sapiens
aacagacatgtatat

SEQ ID NO: 1396539 - DNA, 15 bp, Homo sapiens
aaacagacatgtata

SEQ ID NO: 1396540 - DNA, 15 bp, Homo sapiens
aaaacagacatgtat

SEQ ID NO: 1396541 - DNA, 15 bp, Homo sapiens
gaaaacagacatgta

SEQ ID NO: 1396542 - DNA, 15 bp, Homo sapiens
ggaaaacagacatgt

SEQ ID NO: 1396543 - DNA, 15 bp, Homo sapiens
aggaaaacagacatg

SEQ ID NO: 1396544 - DNA, 15 bp, Homo sapiens
aaggaaaacagacat

SEQ ID NO: 1396545 - DNA, 15 bp, Homo sapiens
aaaggaaaacagaca

SEQ ID NO: 1396546 - DNA, 15 bp, Homo sapiens
caaaggaaaacagac

SEQ ID NO: 1396547 - DNA, 15 bp, Homo sapiens
ccaaaggaaaacaga

SEQ ID NO: 1396548 - DNA, 15 bp, Homo sapiens
cccaaaggaaaacag

SEQ ID NO: 1396549 - DNA, 15 bp, Homo sapiens
ccccaaaggaaaaca

SEQ ID NO: 1396550 - DNA, 15 bp, Homo sapiens
gccccaaaggaaaac

SEQ ID NO: 1396551 - DNA, 15 bp, Homo sapiens
tgccccaaaggaaaa

SEQ ID NO: 1396552 - DNA, 15 bp, Homo sapiens
ctgccccaaaggaaa

SEQ ID NO: 1396553 - DNA, 15 bp, Homo sapiens
cctgccccaaaggaa

SEQ ID NO: 1396554 - DNA, 15 bp, Homo sapiens
ccctgccccaaagga

SEQ ID NO: 1396555 - DNA, 15 bp, Homo sapiens
cccctgccccaaagg

SEQ ID NO: 1396556 - DNA, 15 bp, Homo sapiens
gcccctgccccaaag

SEQ ID NO: 1396557 - DNA, 15 bp, Homo sapiens
ggcccctgccccaaa

SEQ ID NO: 1396558 - DNA, 15 bp, Homo sapiens
tggcccctgccccaa

SEQ ID NO: 1396559 - DNA, 15 bp, Homo sapiens
atggcccctgcccca

SEQ ID NO: 1396560 - DNA, 15 bp, Homo sapiens
tatggcccctgcccc

SEQ ID NO: 1396561 - DNA, 15 bp, Homo sapiens
atatggcccctgccc

SEQ ID NO: 1396562 - DNA, 15 bp, Homo sapiens
gatatggcccctgcc

SEQ ID NO: 1396563 - DNA, 15 bp, Homo sapiens
ggatatggcccctgc

SEQ ID NO: 1396564 - DNA, 15 bp, Homo sapiens
gggatatggcccctg

SEQ ID NO: 1396565 - DNA, 15 bp, Homo sapiens
ggggatatggcccct

SEQ ID NO: 1396566 - DNA, 15 bp, Homo sapiens
tggggatatggcccc

SEQ ID NO: 1396567 - DNA, 15 bp, Homo sapiens
ttggggatatggccc

SEQ ID NO: 1396568 - DNA, 15 bp, Homo sapiens
attggggatatggcc

SEQ ID NO: 1396569 - DNA, 15 bp, Homo sapiens
tattggggatatggc

SEQ ID NO: 1396570 - DNA, 15 bp, Homo sapiens
ttattggggatatgg

SEQ ID NO: 1396571 - DNA, 15 bp, Homo sapiens
gttattggggatatg

SEQ ID NO: 1396572 - DNA, 15 bp, Homo sapiens
tgttattggggatat

SEQ ID NO: 1396573 - DNA, 15 bp, Homo sapiens
ttgttattggggata

SEQ ID NO: 1396574 - DNA, 15 bp, Homo sapiens
cttgttattggggat

SEQ ID NO: 1396575 - DNA, 15 bp, Homo sapiens
tcttgttattgggga

SEQ ID NO: 1396576 - DNA, 15 bp, Homo sapiens
ctcttgttattgggg

SEQ ID NO: 1396577 - DNA, 15 bp, Homo sapiens
tctcttgttattggg

SEQ ID NO: 1396578 - DNA, 15 bp, Homo sapiens
atctcttgttattgg

SEQ ID NO: 1396579 - DNA, 15 bp, Homo sapiens
aatctcttgttattg

SEQ ID NO: 1396580 - DNA, 15 bp, Homo sapiens
taatctcttgttatt

SEQ ID NO: 1396581 - DNA, 15 bp, Homo sapiens
gtaatctcttgttat

SEQ ID NO: 1396582 - DNA, 15 bp, Homo sapiens
ggtaatctcttgtta

SEQ ID NO: 1396583 - DNA, 15 bp, Homo sapiens
tggtaatctcttgtt

SEQ ID NO: 1396584 - DNA, 15 bp, Homo sapiens
ctggtaatctcttgt

SEQ ID NO: 1396585 - DNA, 15 bp, Homo sapiens
gctggtaatctcttg

SEQ ID NO: 1396586 - DNA, 15 bp, Homo sapiens
tgctggtaatctctt

SEQ ID NO: 1396587 - DNA, 15 bp, Homo sapiens
atgctggtaatctct

SEQ ID NO: 1396588 - DNA, 15 bp, Homo sapiens
aatgctggtaatctc

SEQ ID NO: 1396589 - DNA, 15 bp, Homo sapiens
gaatgctggtaatct

SEQ ID NO: 1396590 - DNA, 15 bp, Homo sapiens
tgaatgctggtaatc

SEQ ID NO: 1396591 - DNA, 15 bp, Homo sapiens
ctgaatgctggtaat

SEQ ID NO: 1396592 - DNA, 15 bp, Homo sapiens
cctgaatgctggtaa

SEQ ID NO: 1396593 - DNA, 15 bp, Homo sapiens
tcctgaatgctggta

SEQ ID NO: 1396594 - DNA, 15 bp, Homo sapiens
ctcctgaatgctggt

SEQ ID NO: 1396595 - DNA, 15 bp, Homo sapiens
tctcctgaatgctgg

SEQ ID NO: 1396596 - DNA, 15 bp, Homo sapiens
ttctcctgaatgctg

SEQ ID NO: 1396597 - DNA, 15 bp, Homo sapiens
cttctcctgaatgct

SEQ ID NO: 1396598 - DNA, 15 bp, Homo sapiens
acttctcctgaatgc

SEQ ID NO: 1396599 - DNA, 15 bp, Homo sapiens
cacttctcctgaatg

SEQ ID NO: 1396600 - DNA, 15 bp, Homo sapiens
acacttctcctgaat

SEQ ID NO: 1396601 - DNA, 15 bp, Homo sapiens
cacacttctcctgaa

SEQ ID NO: 1396602 - DNA, 15 bp, Homo sapiens
acacacttctcctga

SEQ ID NO: 1396603 - DNA, 15 bp, Homo sapiens
cacacacttctcctg

SEQ ID NO: 1396604 - DNA, 15 bp, Homo sapiens
tcacacacttctcct

SEQ ID NO: 1396605 - DNA, 15 bp, Homo sapiens
ttcacacacttctcc

SEQ ID NO: 1396606 - DNA, 15 bp, Homo sapiens
gttcacacacttctc

SEQ ID NO: 1396607 - DNA, 15 bp, Homo sapiens
ggttcacacacttct

SEQ ID NO: 1396608 - DNA, 15 bp, Homo sapiens
aggttcacacacttc

SEQ ID NO: 1396609 - DNA, 15 bp, Homo sapiens
taggttcacacactt

SEQ ID NO: 1396610 - DNA, 15 bp, Homo sapiens
ttaggttcacacact

SEQ ID NO: 1396611 - DNA, 15 bp, Homo sapiens
tttaggttcacacac

SEQ ID NO: 1396612 - DNA, 15 bp, Homo sapiens
gtttaggttcacaca

SEQ ID NO: 1396613 - DNA, 15 bp, Homo sapiens
agtttaggttcacac

SEQ ID NO: 1396614 - DNA, 15 bp, Homo sapiens
cagtttaggttcaca

SEQ ID NO: 1396615 - DNA, 15 bp, Homo sapiens
tcagtttaggttcac

SEQ ID NO: 1396616 - DNA, 15 bp, Homo sapiens
ttcagtttaggttca

SEQ ID NO: 1396617 - DNA, 15 bp, Homo sapiens
gttcagtttaggttc

SEQ ID NO: 1396618 - DNA, 15 bp, Homo sapiens
agttcagtttaggtt

SEQ ID NO: 1396619 - DNA, 15 bp, Homo sapiens
gagttcagtttaggt

SEQ ID NO: 1396620 - DNA, 15 bp, Homo sapiens
agagttcagtttagg

SEQ ID NO: 1396621 - DNA, 15 bp, Homo sapiens
cagagttcagtttag

SEQ ID NO: 1396622 - DNA, 15 bp, Homo sapiens
gcagagttcagttta

SEQ ID NO: 1396623 - DNA, 15 bp, Homo sapiens
agcagagttcagttt

SEQ ID NO: 1396624 - DNA, 15 bp, Homo sapiens
gagcagagttcagtt

SEQ ID NO: 1396625 - DNA, 15 bp, Homo sapiens
agagcagagttcagt

SEQ ID NO: 1396626 - DNA, 15 bp, Homo sapiens
aagagcagagttcag

SEQ ID NO: 1396627 - DNA, 15 bp, Homo sapiens
gaagagcagagttca

SEQ ID NO: 1396628 - DNA, 15 bp, Homo sapiens
ggaagagcagagttc

SEQ ID NO: 1396629 - DNA, 15 bp, Homo sapiens
tggaagagcagagtt

SEQ ID NO: 1396630 - DNA, 15 bp, Homo sapiens
ttggaagagcagagt

SEQ ID NO: 1396631 - DNA, 15 bp, Homo sapiens
tttggaagagcagag

SEQ ID NO: 1396632 - DNA, 15 bp, Homo sapiens
atttggaagagcaga

SEQ ID NO: 1396633 - DNA, 15 bp, Homo sapiens
gatttggaagagcag

SEQ ID NO: 1396634 - DNA, 15 bp, Homo sapiens
tgatttggaagagca

SEQ ID NO: 1396635 - DNA, 15 bp, Homo sapiens
atgatttggaagagc

SEQ ID NO: 1396636 - DNA, 15 bp, Homo sapiens
catgatttggaagag

SEQ ID NO: 1396637 - DNA, 15 bp, Homo sapiens
acatgatttggaaga

SEQ ID NO: 1396638 - DNA, 15 bp, Homo sapiens
tacatgatttggaag

SEQ ID NO: 1396639 - DNA, 15 bp, Homo sapiens
atacatgatttggaa

SEQ ID NO: 1396640 - DNA, 15 bp, Homo sapiens
aatacatgatttgga

SEQ ID NO: 1396641 - DNA, 15 bp, Homo sapiens
gaatacatgatttgg

SEQ ID NO: 1396642 - DNA, 15 bp, Homo sapiens
tgaatacatgatttg

SEQ ID NO: 1396643 - DNA, 15 bp, Homo sapiens
atgaatacatgattt

SEQ ID NO: 1396644 - DNA, 15 bp, Homo sapiens
aatgaatacatgatt

SEQ ID NO: 1396645 - DNA, 15 bp, Homo sapiens
aaatgaatacatgat

SEQ ID NO: 1396646 - DNA, 15 bp, Homo sapiens
gaaatgaatacatga

SEQ ID NO: 1396647 - DNA, 15 bp, Homo sapiens
agaaatgaatacatg

SEQ ID NO: 1396648 - DNA, 15 bp, Homo sapiens
aagaaatgaatacat

SEQ ID NO: 1396649 - DNA, 15 bp, Homo sapiens
aaagaaatgaataca

SEQ ID NO: 1396650 - DNA, 15 bp, Homo sapiens
taaagaaatgaatac

SEQ ID NO: 1396651 - DNA, 15 bp, Homo sapiens
ataaagaaatgaata

SEQ ID NO: 1396652 - DNA, 15 bp, Homo sapiens
aataaagaaatgaat

SEQ ID NO: 1396653 - DNA, 15 bp, Homo sapiens
aaataaagaaatgaa

SEQ ID NO: 1396654 - DNA, 15 bp, Homo sapiens
aaaataaagaaatga

SEQ ID NO: 1396655 - DNA, 15 bp, Homo sapiens
gaaaataaagaaatg

SEQ ID NO: 1396656 - DNA, 15 bp, Homo sapiens
ggaaaataaagaaat

SEQ ID NO: 1396657 - DNA, 15 bp, Homo sapiens
tggaaaataaagaaa

SEQ ID NO: 1396658 - DNA, 15 bp, Homo sapiens
atggaaaataaagaa

SEQ ID NO: 1396659 - DNA, 15 bp, Homo sapiens
aatggaaaataaaga

SEQ ID NO: 1396660 - DNA, 15 bp, Homo sapiens
taatggaaaataaag

SEQ ID NO: 1396661 - DNA, 15 bp, Homo sapiens
ttaatggaaaataaa

SEQ ID NO: 1396662 - DNA, 15 bp, Homo sapiens
attaatggaaaataa

SEQ ID NO: 1396663 - DNA, 15 bp, Homo sapiens
aattaatggaaaata

SEQ ID NO: 1396664 - DNA, 15 bp, Homo sapiens
gaattaatggaaaat

SEQ ID NO: 1396665 - DNA, 15 bp, Homo sapiens
agaattaatggaaaa

SEQ ID NO: 1396666 - DNA, 15 bp, Homo sapiens
tagaattaatggaaa

SEQ ID NO: 1396667 - DNA, 15 bp, Homo sapiens
atagaattaatggaa

SEQ ID NO: 1396668 - DNA, 15 bp, Homo sapiens
tatagaattaatgga

SEQ ID NO: 1396669 - DNA, 15 bp, Homo sapiens
ttatagaattaatgg

SEQ ID NO: 1396670 - DNA, 15 bp, Homo sapiens
attatagaattaatg

SEQ ID NO: 1396671 - DNA, 15 bp, Homo sapiens
gattatagaattaat

SEQ ID NO: 1396672 - DNA, 15 bp, Homo sapiens
tgattatagaattaa

SEQ ID NO: 1396673 - DNA, 15 bp, Homo sapiens
atgattatagaatta

SEQ ID NO: 1396674 - DNA, 15 bp, Homo sapiens
aatgattatagaatt

SEQ ID NO: 1396675 - DNA, 15 bp, Homo sapiens
aaatgattatagaat

SEQ ID NO: 1396676 - DNA, 15 bp, Homo sapiens
taaatgattatagaa

SEQ ID NO: 1396677 - DNA, 15 bp, Homo sapiens
gtaaatgattataga

SEQ ID NO: 1396678 - DNA, 15 bp, Homo sapiens
agtaaatgattatag

SEQ ID NO: 1396679 - DNA, 15 bp, Homo sapiens
tagtaaatgattata

SEQ ID NO: 1396680 - DNA, 15 bp, Homo sapiens
ttagtaaatgattat

SEQ ID NO: 1396681 - DNA, 15 bp, Homo sapiens
attagtaaatgatta

SEQ ID NO: 1396682 - DNA, 15 bp, Homo sapiens
cattagtaaatgatt

SEQ ID NO: 1396683 - DNA, 15 bp, Homo sapiens
tcattagtaaatgat

SEQ ID NO: 1396684 - DNA, 15 bp, Homo sapiens
ttcattagtaaatga

SEQ ID NO: 1396685 - DNA, 15 bp, Homo sapiens
attcattagtaaatg

SEQ ID NO: 1396686 - DNA, 15 bp, Homo sapiens
aattcattagtaaat

SEQ ID NO: 1396687 - DNA, 15 bp, Homo sapiens
gaattcattagtaaa

SEQ ID NO: 1396688 - DNA, 15 bp, Homo sapiens
ggaattcattagtaa

SEQ ID NO: 1396689 - DNA, 15 bp, Homo sapiens
tggaattcattagta

SEQ ID NO: 1396690 - DNA, 15 bp, Homo sapiens
atggaattcattagt

SEQ ID NO: 1396691 - DNA, 15 bp, Homo sapiens
catggaattcattag

SEQ ID NO: 1396692 - DNA, 15 bp, Homo sapiens
ccatggaattcatta

SEQ ID NO: 1396693 - DNA, 15 bp, Homo sapiens
cccatggaattcatt

SEQ ID NO: 1396694 - DNA, 15 bp, Homo sapiens
acccatggaattcat

SEQ ID NO: 1396695 - DNA, 15 bp, Homo sapiens
tacccatggaattca

SEQ ID NO: 1396696 - DNA, 15 bp, Homo sapiens
atacccatggaattc

SEQ ID NO: 1396697 - DNA, 15 bp, Homo sapiens
catacccatggaatt

SEQ ID NO: 1396698 - DNA, 15 bp, Homo sapiens
ccatacccatggaat

SEQ ID NO: 1396699 - DNA, 15 bp, Homo sapiens
gccatacccatggaa

SEQ ID NO: 1396700 - DNA, 15 bp, Homo sapiens
ggccatacccatgga

SEQ ID NO: 1396701 - DNA, 15 bp, Homo sapiens
gggccatacccatgg

SEQ ID NO: 1396702 - DNA, 15 bp, Homo sapiens
tgggccatacccatg

SEQ ID NO: 1396703 - DNA, 15 bp, Homo sapiens
gtgggccatacccat

SEQ ID NO: 1396704 - DNA, 15 bp, Homo sapiens
agtgggccataccca

SEQ ID NO: 1396705 - DNA, 15 bp, Homo sapiens
gagtgggccataccc

SEQ ID NO: 1396706 - DNA, 15 bp, Homo sapiens
ggagtgggccatacc

SEQ ID NO: 1396707 - DNA, 15 bp, Homo sapiens
tggagtgggccatac

SEQ ID NO: 1396708 - DNA, 15 bp, Homo sapiens
gtggagtgggccata

SEQ ID NO: 1396709 - DNA, 15 bp, Homo sapiens
agtggagtgggccat

SEQ ID NO: 1396710 - DNA, 15 bp, Homo sapiens
gagtggagtgggcca

SEQ ID NO: 1396711 - DNA, 15 bp, Homo sapiens
tgagtggagtgggcc

SEQ ID NO: 1396712 - DNA, 15 bp, Homo sapiens
gtgagtggagtgggc

SEQ ID NO: 1396713 - DNA, 15 bp, Homo sapiens
ggtgagtggagtggg

SEQ ID NO: 1396714 - DNA, 15 bp, Homo sapiens
gggtgagtggagtgg

SEQ ID NO: 1396715 - DNA, 15 bp, Homo sapiens
tgggtgagtggagtg

SEQ ID NO: 1396716 - DNA, 15 bp, Homo sapiens
gtgggtgagtggagt

SEQ ID NO: 1396717 - DNA, 15 bp, Homo sapiens
agtgggtgagtggag

SEQ ID NO: 1396718 - DNA, 15 bp, Homo sapiens
aagtgggtgagtgga

SEQ ID NO: 1396719 - DNA, 15 bp, Homo sapiens
aaagtgggtgagtgg

SEQ ID NO: 1396720 - DNA, 15 bp, Homo sapiens
gaaagtgggtgagtg

SEQ ID NO: 1396721 - DNA, 15 bp, Homo sapiens
tgaaagtgggtgagt

SEQ ID NO: 1396722 - DNA, 15 bp, Homo sapiens
atgaaagtgggtgag

SEQ ID NO: 1396723 - DNA, 15 bp, Homo sapiens
aatgaaagtgggtga

SEQ ID NO: 1396724 - DNA, 15 bp, Homo sapiens
aaatgaaagtgggtg

SEQ ID NO: 1396725 - DNA, 15 bp, Homo sapiens
aaaatgaaagtgggt

SEQ ID NO: 1396726 - DNA, 15 bp, Homo sapiens
caaaatgaaagtggg

SEQ ID NO: 1396727 - DNA, 15 bp, Homo sapiens
gcaaaatgaaagtgg

SEQ ID NO: 1396728 - DNA, 15 bp, Homo sapiens
agcaaaatgaaagtg

SEQ ID NO: 1396729 - DNA, 15 bp, Homo sapiens
cagcaaaatgaaagt

SEQ ID NO: 1396730 - DNA, 15 bp, Homo sapiens
ccagcaaaatgaaag

SEQ ID NO: 1396731 - DNA, 15 bp, Homo sapiens
cccagcaaaatgaaa

SEQ ID NO: 1396732 - DNA, 15 bp, Homo sapiens
acccagcaaaatgaa

SEQ ID NO: 1396733 - DNA, 15 bp, Homo sapiens
tacccagcaaaatga

SEQ ID NO: 1396734 - DNA, 15 bp, Homo sapiens
ctacccagcaaaatg

SEQ ID NO: 1396735 - DNA, 15 bp, Homo sapiens
actacccagcaaaat

SEQ ID NO: 1396736 - DNA, 15 bp, Homo sapiens
tactacccagcaaaa

SEQ ID NO: 1396737 - DNA, 15 bp, Homo sapiens
atactacccagcaaa

SEQ ID NO: 1396738 - DNA, 15 bp, Homo sapiens
gatactacccagcaa

SEQ ID NO: 1396739 - DNA, 15 bp, Homo sapiens
ggatactacccagca

SEQ ID NO: 1396740 - DNA, 15 bp, Homo sapiens
aggatactacccagc

SEQ ID NO: 1396741 - DNA, 15 bp, Homo sapiens
caggatactacccag

SEQ ID NO: 1396742 - DNA, 15 bp, Homo sapiens
tcaggatactaccca

SEQ ID NO: 1396743 - DNA, 15 bp, Homo sapiens
atcaggatactaccc

SEQ ID NO: 1396744 - DNA, 15 bp, Homo sapiens
aatcaggatactacc

SEQ ID NO: 1396745 - DNA, 15 bp, Homo sapiens
aaatcaggatactac

SEQ ID NO: 1396746 - DNA, 15 bp, Homo sapiens
gaaatcaggatacta

SEQ ID NO: 1396747 - DNA, 15 bp, Homo sapiens
agaaatcaggatact

SEQ ID NO: 1396748 - DNA, 15 bp, Homo sapiens
gagaaatcaggatac

SEQ ID NO: 1396749 - DNA, 15 bp, Homo sapiens
tgagaaatcaggata

SEQ ID NO: 1396750 - DNA, 15 bp, Homo sapiens
ctgagaaatcaggat

SEQ ID NO: 1396751 - DNA, 15 bp, Homo sapiens
tctgagaaatcagga

SEQ ID NO: 1396752 - DNA, 15 bp, Homo sapiens
atctgagaaatcagg

SEQ ID NO: 1396753 - DNA, 15 bp, Homo sapiens
tatctgagaaatcag

SEQ ID NO: 1396754 - DNA, 15 bp, Homo sapiens
atatctgagaaatca

SEQ ID NO: 1396755 - DNA, 15 bp, Homo sapiens
aatatctgagaaatc

SEQ ID NO: 1396756 - DNA, 15 bp, Homo sapiens
aaatatctgagaaat

SEQ ID NO: 1396757 - DNA, 15 bp, Homo sapiens
aaaatatctgagaaa

SEQ ID NO: 1396758 - DNA, 15 bp, Homo sapiens
aaaaatatctgagaa

SEQ ID NO: 1396759 - DNA, 15 bp, Homo sapiens
caaaaatatctgaga

SEQ ID NO: 1396760 - DNA, 15 bp, Homo sapiens
ccaaaaatatctgag

SEQ ID NO: 1396761 - DNA, 15 bp, Homo sapiens
cccaaaaatatctga

SEQ ID NO: 1396762 - DNA, 15 bp, Homo sapiens
gcccaaaaatatctg

SEQ ID NO: 1396763 - DNA, 15 bp, Homo sapiens
agcccaaaaatatct

SEQ ID NO: 1396764 - DNA, 15 bp, Homo sapiens
cagcccaaaaatatc

SEQ ID NO: 1396765 - DNA, 15 bp, Homo sapiens
acagcccaaaaatat

SEQ ID NO: 1396766 - DNA, 15 bp, Homo sapiens
tacagcccaaaaata

SEQ ID NO: 1396767 - DNA, 15 bp, Homo sapiens
atacagcccaaaaat

SEQ ID NO: 1396768 - DNA, 15 bp, Homo sapiens
catacagcccaaaaa

SEQ ID NO: 1396769 - DNA, 15 bp, Homo sapiens
tcatacagcccaaaa

SEQ ID NO: 1396770 - DNA, 15 bp, Homo sapiens
ttcatacagcccaaa

SEQ ID NO: 1396771 - DNA, 15 bp, Homo sapiens
tttcatacagcccaa

SEQ ID NO: 1396772 - DNA, 15 bp, Homo sapiens
ttttcatacagccca

SEQ ID NO: 1396773 - DNA, 15 bp, Homo sapiens
attttcatacagccc

SEQ ID NO: 1396774 - DNA, 15 bp, Homo sapiens
gattttcatacagcc

SEQ ID NO: 1396775 - DNA, 15 bp, Homo sapiens
tgattttcatacagc

SEQ ID NO: 1396776 - DNA, 15 bp, Homo sapiens
atgattttcatacag

SEQ ID NO: 1396777 - DNA, 15 bp, Homo sapiens
aatgattttcataca

SEQ ID NO: 1396778 - DNA, 15 bp, Homo sapiens
gaatgattttcatac

SEQ ID NO: 1396779 - DNA, 15 bp, Homo sapiens
tgaatgattttcata

SEQ ID NO: 1396780 - DNA, 15 bp, Homo sapiens
gtgaatgattttcat

SEQ ID NO: 1396781 - DNA, 15 bp, Homo sapiens
agtgaatgattttca

SEQ ID NO: 1396782 - DNA, 15 bp, Homo sapiens
aagtgaatgattttc

SEQ ID NO: 1396783 - DNA, 15 bp, Homo sapiens
aaagtgaatgatttt

SEQ ID NO: 1396784 - DNA, 15 bp, Homo sapiens
aaaagtgaatgattt

SEQ ID NO: 1396785 - DNA, 15 bp, Homo sapiens
gaaaagtgaatgatt

SEQ ID NO: 1396786 - DNA, 15 bp, Homo sapiens
ggaaaagtgaatgat

SEQ ID NO: 1396787 - DNA, 15 bp, Homo sapiens
gggaaaagtgaatga

SEQ ID NO: 1396788 - DNA, 15 bp, Homo sapiens
ggggaaaagtgaatg

SEQ ID NO: 1396789 - DNA, 15 bp, Homo sapiens
aggggaaaagtgaat

SEQ ID NO: 1396790 - DNA, 15 bp, Homo sapiens
gaggggaaaagtgaa

SEQ ID NO: 1396791 - DNA, 15 bp, Homo sapiens
agaggggaaaagtga

SEQ ID NO: 1396792 - DNA, 15 bp, Homo sapiens
gagaggggaaaagtg

SEQ ID NO: 1396793 - DNA, 15 bp, Homo sapiens
agagaggggaaaagt

SEQ ID NO: 1396794 - DNA, 15 bp, Homo sapiens
tagagaggggaaaag

SEQ ID NO: 1396795 - DNA, 15 bp, Homo sapiens
atagagaggggaaaa

SEQ ID NO: 1396796 - DNA, 15 bp, Homo sapiens
tatagagaggggaaa

SEQ ID NO: 1396797 - DNA, 15 bp, Homo sapiens
gtatagagaggggaa

SEQ ID NO: 1396798 - DNA, 15 bp, Homo sapiens
tgtatagagagggga

SEQ ID NO: 1396799 - DNA, 15 bp, Homo sapiens
atgtatagagagggg

SEQ ID NO: 1396800 - DNA, 15 bp, Homo sapiens
aatgtatagagaggg

SEQ ID NO: 1396801 - DNA, 15 bp, Homo sapiens
gaatgtatagagagg

SEQ ID NO: 1396802 - DNA, 15 bp, Homo sapiens
ggaatgtatagagag

SEQ ID NO: 1396803 - DNA, 15 bp, Homo sapiens
tggaatgtatagaga

SEQ ID NO: 1396804 - DNA, 15 bp, Homo sapiens
ctggaatgtatagag

SEQ ID NO: 1396805 - DNA, 15 bp, Homo sapiens
tctggaatgtataga

SEQ ID NO: 1396806 - DNA, 15 bp, Homo sapiens
ctctggaatgtatag

SEQ ID NO: 1396807 - DNA, 15 bp, Homo sapiens
gctctggaatgtata

SEQ ID NO: 1396808 - DNA, 15 bp, Homo sapiens
tgctctggaatgtat

SEQ ID NO: 1396809 - DNA, 15 bp, Homo sapiens
atgctctggaatgta

SEQ ID NO: 1396810 - DNA, 15 bp, Homo sapiens
tatgctctggaatgt

SEQ ID NO: 1396811 - DNA, 15 bp, Homo sapiens
atatgctctggaatg

SEQ ID NO: 1396812 - DNA, 15 bp, Homo sapiens
gatatgctctggaat

SEQ ID NO: 1396813 - DNA, 15 bp, Homo sapiens
tgatatgctctggaa

SEQ ID NO: 1396814 - DNA, 15 bp, Homo sapiens
ttgatatgctctgga

SEQ ID NO: 1396815 - DNA, 15 bp, Homo sapiens
tttgatatgctctgg

SEQ ID NO: 1396816 - DNA, 15 bp, Homo sapiens
ttttgatatgctctg

SEQ ID NO: 1396817 - DNA, 15 bp, Homo sapiens
tttttgatatgctct

SEQ ID NO: 1396818 - DNA, 15 bp, Homo sapiens
gtttttgatatgctc

SEQ ID NO: 1396819 - DNA, 15 bp, Homo sapiens
tgtttttgatatgct

SEQ ID NO: 1396820 - DNA, 15 bp, Homo sapiens
atgtttttgatatgc

SEQ ID NO: 1396821 - DNA, 15 bp, Homo sapiens
aatgtttttgatatg

SEQ ID NO: 1396822 - DNA, 15 bp, Homo sapiens
aaatgtttttgatat

SEQ ID NO: 1396823 - DNA, 15 bp, Homo sapiens
caaatgtttttgata

SEQ ID NO: 1396824 - DNA, 15 bp, Homo sapiens
acaaatgtttttgat

SEQ ID NO: 1396825 - DNA, 15 bp, Homo sapiens
aacaaatgtttttga

SEQ ID NO: 1396826 - DNA, 15 bp, Homo sapiens
taacaaatgtttttg

SEQ ID NO: 1396827 - DNA, 15 bp, Homo sapiens
ttaacaaatgttttt

SEQ ID NO: 1396828 - DNA, 15 bp, Homo sapiens
gttaacaaatgtttt

SEQ ID NO: 1396829 - DNA, 15 bp, Homo sapiens
ggttaacaaatgttt

SEQ ID NO: 1396830 - DNA, 15 bp, Homo sapiens
tggttaacaaatgtt

SEQ ID NO: 1396831 - DNA, 15 bp, Homo sapiens
gtggttaacaaatgt

SEQ ID NO: 1396832 - DNA, 15 bp, Homo sapiens
agtggttaacaaatg

SEQ ID NO: 1396833 - DNA, 15 bp, Homo sapiens
aagtggttaacaaat

SEQ ID NO: 1396834 - DNA, 15 bp, Homo sapiens
aaagtggttaacaaa

SEQ ID NO: 1396835 - DNA, 15 bp, Homo sapiens
gaaagtggttaacaa

SEQ ID NO: 1396836 - DNA, 15 bp, Homo sapiens
tgaaagtggttaaca

SEQ ID NO: 1396837 - DNA, 15 bp, Homo sapiens
ttgaaagtggttaac

SEQ ID NO: 1396838 - DNA, 15 bp, Homo sapiens
tttgaaagtggttaa

SEQ ID NO: 1396839 - DNA, 15 bp, Homo sapiens
atttgaaagtggtta

SEQ ID NO: 1396840 - DNA, 15 bp, Homo sapiens
aatttgaaagtggtt

SEQ ID NO: 1396841 - DNA, 15 bp, Homo sapiens
caatttgaaagtggt

SEQ ID NO: 1396842 - DNA, 15 bp, Homo sapiens
acaatttgaaagtgg

SEQ ID NO: 1396843 - DNA, 15 bp, Homo sapiens
cacaatttgaaagtg

SEQ ID NO: 1396844 - DNA, 15 bp, Homo sapiens
tcacaatttgaaagt

SEQ ID NO: 1396845 - DNA, 15 bp, Homo sapiens
atcacaatttgaaag

SEQ ID NO: 1396846 - DNA, 15 bp, Homo sapiens
aatcacaatttgaaa

SEQ ID NO: 1396847 - DNA, 15 bp, Homo sapiens
aaatcacaatttgaa

SEQ ID NO: 1396848 - DNA, 15 bp, Homo sapiens
caaatcacaatttga

SEQ ID NO: 1396849 - DNA, 15 bp, Homo sapiens
acaaatcacaatttg

SEQ ID NO: 1396850 - DNA, 15 bp, Homo sapiens
aacaaatcacaattt

SEQ ID NO: 1396851 - DNA, 15 bp, Homo sapiens
aaacaaatcacaatt

SEQ ID NO: 1396852 - DNA, 15 bp, Homo sapiens
aaaacaaatcacaat

SEQ ID NO: 1396853 - DNA, 15 bp, Homo sapiens
aaaaacaaatcacaa

SEQ ID NO: 1396854 - DNA, 15 bp, Homo sapiens
caaaaacaaatcaca

SEQ ID NO: 1396855 - DNA, 15 bp, Homo sapiens
tcaaaaacaaatcac

SEQ ID NO: 1396856 - DNA, 15 bp, Homo sapiens
ttcaaaaacaaatca

SEQ ID NO: 1396857 - DNA, 15 bp, Homo sapiens
attcaaaaacaaatc

SEQ ID NO: 1396858 - DNA, 15 bp, Homo sapiens
aattcaaaaacaaat

SEQ ID NO: 1396859 - DNA, 15 bp, Homo sapiens
taattcaaaaacaaa

SEQ ID NO: 1396860 - DNA, 15 bp, Homo sapiens
gtaattcaaaaacaa

SEQ ID NO: 1396861 - DNA, 15 bp, Homo sapiens
tgtaattcaaaaaca

SEQ ID NO: 1396862 - DNA, 15 bp, Homo sapiens
gtgtaattcaaaaac

SEQ ID NO: 1396863 - DNA, 15 bp, Homo sapiens
cgtgtaattcaaaaa

SEQ ID NO: 1396864 - DNA, 15 bp, Homo sapiens
acgtgtaattcaaaa

SEQ ID NO: 1396865 - DNA, 15 bp, Homo sapiens
aacgtgtaattcaaa

SEQ ID NO: 1396866 - DNA, 15 bp, Homo sapiens
aaacgtgtaattcaa

SEQ ID NO: 1396867 - DNA, 15 bp, Homo sapiens
caaacgtgtaattca

SEQ ID NO: 1396868 - DNA, 15 bp, Homo sapiens
tcaaacgtgtaattc

SEQ ID NO: 1396869 - DNA, 15 bp, Homo sapiens
ttcaaacgtgtaatt

SEQ ID NO: 1396870 - DNA, 15 bp, Homo sapiens
attcaaacgtgtaat

SEQ ID NO: 1396871 - DNA, 15 bp, Homo sapiens
gattcaaacgtgtaa

SEQ ID NO: 1396872 - DNA, 15 bp, Homo sapiens
tgattcaaacgtgta

SEQ ID NO: 1396873 - DNA, 15 bp, Homo sapiens
atgattcaaacgtgt

SEQ ID NO: 1396874 - DNA, 15 bp, Homo sapiens
aatgattcaaacgtg

SEQ ID NO: 1396875 - DNA, 15 bp, Homo sapiens
aaatgattcaaacgt

SEQ ID NO: 1396876 - DNA, 15 bp, Homo sapiens
aaaatgattcaaacg

SEQ ID NO: 1396877 - DNA, 15 bp, Homo sapiens
aaaaatgattcaaac

SEQ ID NO: 1396878 - DNA, 15 bp, Homo sapiens
taaaaatgattcaaa

SEQ ID NO: 1396879 - DNA, 15 bp, Homo sapiens
ataaaaatgattcaa

SEQ ID NO: 1396880 - DNA, 15 bp, Homo sapiens
tataaaaatgattca

SEQ ID NO: 1396881 - DNA, 15 bp, Homo sapiens
atataaaaatgattc

SEQ ID NO: 1396882 - DNA, 15 bp, Homo sapiens
catataaaaatgatt

SEQ ID NO: 1396883 - DNA, 15 bp, Homo sapiens
gcatataaaaatgat

SEQ ID NO: 1396884 - DNA, 15 bp, Homo sapiens
agcatataaaaatga

SEQ ID NO: 1396885 - DNA, 15 bp, Homo sapiens
aagcatataaaaatg

SEQ ID NO: 1396886 - DNA, 15 bp, Homo sapiens
gaagcatataaaaat

SEQ ID NO: 1396887 - DNA, 15 bp, Homo sapiens
agaagcatataaaaa

SEQ ID NO: 1396888 - DNA, 15 bp, Homo sapiens
aagaagcatataaaa

SEQ ID NO: 1396889 - DNA, 15 bp, Homo sapiens
caagaagcatataaa

SEQ ID NO: 1396890 - DNA, 15 bp, Homo sapiens
acaagaagcatataa

SEQ ID NO: 1396891 - DNA, 15 bp, Homo sapiens
aacaagaagcatata

SEQ ID NO: 1396892 - DNA, 15 bp, Homo sapiens
gaacaagaagcatat

SEQ ID NO: 1396893 - DNA, 15 bp, Homo sapiens
agaacaagaagcata

SEQ ID NO: 1396894 - DNA, 15 bp, Homo sapiens
cagaacaagaagcat

SEQ ID NO: 1396895 - DNA, 15 bp, Homo sapiens
tcagaacaagaagca

SEQ ID NO: 1396896 - DNA, 15 bp, Homo sapiens
atcagaacaagaagc

SEQ ID NO: 1396897 - DNA, 15 bp, Homo sapiens
catcagaacaagaag

SEQ ID NO: 1396898 - DNA, 15 bp, Homo sapiens
tcatcagaacaagaa

SEQ ID NO: 1396899 - DNA, 15 bp, Homo sapiens
gtcatcagaacaaga

SEQ ID NO: 1396900 - DNA, 15 bp, Homo sapiens
tgtcatcagaacaag

SEQ ID NO: 1396901 - DNA, 15 bp, Homo sapiens
gtgtcatcagaacaa

SEQ ID NO: 1396902 - DNA, 15 bp, Homo sapiens
agtgtcatcagaaca

SEQ ID NO: 1396903 - DNA, 15 bp, Homo sapiens
cagtgtcatcagaac

SEQ ID NO: 1396904 - DNA, 15 bp, Homo sapiens
tcagtgtcatcagaa

SEQ ID NO: 1396905 - DNA, 15 bp, Homo sapiens
atcagtgtcatcaga

SEQ ID NO: 1396906 - DNA, 15 bp, Homo sapiens
aatcagtgtcatcag

SEQ ID NO: 1396907 - DNA, 15 bp, Homo sapiens
taatcagtgtcatca

SEQ ID NO: 1396908 - DNA, 15 bp, Homo sapiens
gtaatcagtgtcatc

SEQ ID NO: 1396909 - DNA, 15 bp, Homo sapiens
tgtaatcagtgtcat

SEQ ID NO: 1396910 - DNA, 15 bp, Homo sapiens
gtgtaatcagtgtca

SEQ ID NO: 1396911 - DNA, 15 bp, Homo sapiens
agtgtaatcagtgtc

SEQ ID NO: 1396912 - DNA, 15 bp, Homo sapiens
aagtgtaatcagtgt

SEQ ID NO: 1396913 - DNA, 15 bp, Homo sapiens
gaagtgtaatcagtg

SEQ ID NO: 1396914 - DNA, 15 bp, Homo sapiens
agaagtgtaatcagt

SEQ ID NO: 1396915 - DNA, 15 bp, Homo sapiens
aagaagtgtaatcag

SEQ ID NO: 1396916 - DNA, 15 bp, Homo sapiens
gaagaagtgtaatca

SEQ ID NO: 1396917 - DNA, 15 bp, Homo sapiens
agaagaagtgtaatc

SEQ ID NO: 1396918 - DNA, 15 bp, Homo sapiens
gagaagaagtgtaat

SEQ ID NO: 1396919 - DNA, 15 bp, Homo sapiens
agagaagaagtgtaa

SEQ ID NO: 1396920 - DNA, 15 bp, Homo sapiens
aagagaagaagtgta

SEQ ID NO: 1396921 - DNA, 15 bp, Homo sapiens
aaagagaagaagtgt

SEQ ID NO: 1396922 - DNA, 15 bp, Homo sapiens
aaaagagaagaagtg

SEQ ID NO: 1396923 - DNA, 15 bp, Homo sapiens
taaaagagaagaagt

SEQ ID NO: 1396924 - DNA, 15 bp, Homo sapiens
ataaaagagaagaag

SEQ ID NO: 1396925 - DNA, 15 bp, Homo sapiens
cataaaagagaagaa

SEQ ID NO: 1396926 - DNA, 15 bp, Homo sapiens
ccataaaagagaaga

SEQ ID NO: 1396927 - DNA, 15 bp, Homo sapiens
cccataaaagagaag

SEQ ID NO: 1396928 - DNA, 15 bp, Homo sapiens
acccataaaagagaa

SEQ ID NO: 1396929 - DNA, 15 bp, Homo sapiens
tacccataaaagaga

SEQ ID NO: 1396930 - DNA, 15 bp, Homo sapiens
atacccataaaagag

SEQ ID NO: 1396931 - DNA, 15 bp, Homo sapiens
tatacccataaaaga

SEQ ID NO: 1396932 - DNA, 15 bp, Homo sapiens
ctatacccataaaag

SEQ ID NO: 1396933 - DNA, 15 bp, Homo sapiens
cctatacccataaaa

SEQ ID NO: 1396934 - DNA, 15 bp, Homo sapiens
gcctatacccataaa

SEQ ID NO: 1396935 - DNA, 15 bp, Homo sapiens
agcctatacccataa

SEQ ID NO: 1396936 - DNA, 15 bp, Homo sapiens
cagcctatacccata

SEQ ID NO: 1396937 - DNA, 15 bp, Homo sapiens
tcagcctatacccat

SEQ ID NO: 1396938 - DNA, 15 bp, Homo sapiens
gtcagcctataccca

SEQ ID NO: 1396939 - DNA, 15 bp, Homo sapiens
tgtcagcctataccc

SEQ ID NO: 1396940 - DNA, 15 bp, Homo sapiens
atgtcagcctatacc

SEQ ID NO: 1396941 - DNA, 15 bp, Homo sapiens
tatgtcagcctatac

SEQ ID NO: 1396942 - DNA, 15 bp, Homo sapiens
ttatgtcagcctata

SEQ ID NO: 1396943 - DNA, 15 bp, Homo sapiens
cttatgtcagcctat

SEQ ID NO: 1396944 - DNA, 15 bp, Homo sapiens
acttatgtcagccta

SEQ ID NO: 1396945 - DNA, 15 bp, Homo sapiens
cacttatgtcagcct

SEQ ID NO: 1396946 - DNA, 15 bp, Homo sapiens
tcacttatgtcagcc

SEQ ID NO: 1396947 - DNA, 15 bp, Homo sapiens
atcacttatgtcagc

SEQ ID NO: 1396948 - DNA, 15 bp, Homo sapiens
catcacttatgtcag

SEQ ID NO: 1396949 - DNA, 15 bp, Homo sapiens
gcatcacttatgtca

SEQ ID NO: 1396950 - DNA, 15 bp, Homo sapiens
agcatcacttatgtc

SEQ ID NO: 1396951 - DNA, 15 bp, Homo sapiens
cagcatcacttatgt

SEQ ID NO: 1396952 - DNA, 15 bp, Homo sapiens
acagcatcacttatg

SEQ ID NO: 1396953 - DNA, 15 bp, Homo sapiens
cacagcatcacttat

SEQ ID NO: 1396954 - DNA, 15 bp, Homo sapiens
acacagcatcactta

SEQ ID NO: 1396955 - DNA, 15 bp, Homo sapiens
cacacagcatcactt

SEQ ID NO: 1396956 - DNA, 15 bp, Homo sapiens
tcacacagcatcact

SEQ ID NO: 1396957 - DNA, 15 bp, Homo sapiens
gtcacacagcatcac

SEQ ID NO: 1396958 - DNA, 15 bp, Homo sapiens
tgtcacacagcatca

SEQ ID NO: 1396959 - DNA, 15 bp, Homo sapiens
ctgtcacacagcatc

SEQ ID NO: 1396960 - DNA, 15 bp, Homo sapiens
actgtcacacagcat

SEQ ID NO: 1396961 - DNA, 15 bp, Homo sapiens
gactgtcacacagca

SEQ ID NO: 1396962 - DNA, 15 bp, Homo sapiens
agactgtcacacagc

SEQ ID NO: 1396963 - DNA, 15 bp, Homo sapiens
tagactgtcacacag

SEQ ID NO: 1396964 - DNA, 15 bp, Homo sapiens
ttagactgtcacaca

SEQ ID NO: 1396965 - DNA, 15 bp, Homo sapiens
attagactgtcacac

SEQ ID NO: 1396966 - DNA, 15 bp, Homo sapiens
tattagactgtcaca

SEQ ID NO: 1396967 - DNA, 15 bp, Homo sapiens
gtattagactgtcac

SEQ ID NO: 1396968 - DNA, 15 bp, Homo sapiens
ggtattagactgtca

SEQ ID NO: 1396969 - DNA, 15 bp, Homo sapiens
gggtattagactgtc

SEQ ID NO: 1396970 - DNA, 15 bp, Homo sapiens
agggtattagactgt

SEQ ID NO: 1396971 - DNA, 15 bp, Homo sapiens
cagggtattagactg

SEQ ID NO: 1396972 - DNA, 15 bp, Homo sapiens
ccagggtattagact

SEQ ID NO: 1396973 - DNA, 15 bp, Homo sapiens
tccagggtattagac

SEQ ID NO: 1396974 - DNA, 15 bp, Homo sapiens
ttccagggtattaga

SEQ ID NO: 1396975 - DNA, 15 bp, Homo sapiens
attccagggtattag

SEQ ID NO: 1396976 - DNA, 15 bp, Homo sapiens
aattccagggtatta

SEQ ID NO: 1396977 - DNA, 15 bp, Homo sapiens
caattccagggtatt

SEQ ID NO: 1396978 - DNA, 15 bp, Homo sapiens
acaattccagggtat

SEQ ID NO: 1396979 - DNA, 15 bp, Homo sapiens
cacaattccagggta

SEQ ID NO: 1396980 - DNA, 15 bp, Homo sapiens
tcacaattccagggt

SEQ ID NO: 1396981 - DNA, 15 bp, Homo sapiens
ctcacaattccaggg

SEQ ID NO: 1396982 - DNA, 15 bp, Homo sapiens
tctcacaattccagg

SEQ ID NO: 1396983 - DNA, 15 bp, Homo sapiens
atctcacaattccag

SEQ ID NO: 1396984 - DNA, 15 bp, Homo sapiens
aatctcacaattcca

SEQ ID NO: 1396985 - DNA, 15 bp, Homo sapiens
taatctcacaattcc

SEQ ID NO: 1396986 - DNA, 15 bp, Homo sapiens
ataatctcacaattc

SEQ ID NO: 1396987 - DNA, 15 bp, Homo sapiens
cataatctcacaatt

SEQ ID NO: 1396988 - DNA, 15 bp, Homo sapiens
gcataatctcacaat

SEQ ID NO: 1396989 - DNA, 15 bp, Homo sapiens
agcataatctcacaa

SEQ ID NO: 1396990 - DNA, 15 bp, Homo sapiens
gagcataatctcaca

SEQ ID NO: 1396991 - DNA, 15 bp, Homo sapiens
ggagcataatctcac

SEQ ID NO: 1396992 - DNA, 15 bp, Homo sapiens
gggagcataatctca

SEQ ID NO: 1396993 - DNA, 15 bp, Homo sapiens
agggagcataatctc

SEQ ID NO: 1396994 - DNA, 15 bp, Homo sapiens
gagggagcataatct

SEQ ID NO: 1396995 - DNA, 15 bp, Homo sapiens
ggagggagcataatc

SEQ ID NO: 1396996 - DNA, 15 bp, Homo sapiens
aggagggagcataat

SEQ ID NO: 1396997 - DNA, 15 bp, Homo sapiens
aaggagggagcataa

SEQ ID NO: 1396998 - DNA, 15 bp, Homo sapiens
caaggagggagcata

SEQ ID NO: 1396999 - DNA, 15 bp, Homo sapiens
gcaaggagggagcat

SEQ ID NO: 1397000 - DNA, 15 bp, Homo sapiens
agcaaggagggagca

SEQ ID NO: 1397001 - DNA, 15 bp, Homo sapiens
cagcaaggagggagc

SEQ ID NO: 1397002 - DNA, 15 bp, Homo sapiens
acagcaaggagggag

SEQ ID NO: 1397003 - DNA, 15 bp, Homo sapiens
gacagcaaggaggga

SEQ ID NO: 1397004 - DNA, 15 bp, Homo sapiens
agacagcaaggaggg

SEQ ID NO: 1397005 - DNA, 15 bp, Homo sapiens
aagacagcaaggagg

SEQ ID NO: 1397006 - DNA, 15 bp, Homo sapiens
gaagacagcaaggag

SEQ ID NO: 1397007 - DNA, 15 bp, Homo sapiens
agaagacagcaagga

SEQ ID NO: 1397008 - DNA, 15 bp, Homo sapiens
tagaagacagcaagg

SEQ ID NO: 1397009 - DNA, 15 bp, Homo sapiens
atagaagacagcaag

SEQ ID NO: 1397010 - DNA, 15 bp, Homo sapiens
gatagaagacagcaa

SEQ ID NO: 1397011 - DNA, 15 bp, Homo sapiens
agatagaagacagca

SEQ ID NO: 1397012 - DNA, 15 bp, Homo sapiens
cagatagaagacagc

SEQ ID NO: 1397013 - DNA, 15 bp, Homo sapiens
gcagatagaagacag

SEQ ID NO: 1397014 - DNA, 15 bp, Homo sapiens
tgcagatagaagaca

SEQ ID NO: 1397015 - DNA, 15 bp, Homo sapiens
ctgcagatagaagac

SEQ ID NO: 1397016 - DNA, 15 bp, Homo sapiens
cctgcagatagaaga

SEQ ID NO: 1397017 - DNA, 15 bp, Homo sapiens
tcctgcagatagaag

SEQ ID NO: 1397018 - DNA, 15 bp, Homo sapiens
ttcctgcagatagaa

SEQ ID NO: 1397019 - DNA, 15 bp, Homo sapiens
tttcctgcagataga

SEQ ID NO: 1397020 - DNA, 15 bp, Homo sapiens
atttcctgcagatag

SEQ ID NO: 1397021 - DNA, 15 bp, Homo sapiens
aatttcctgcagata

SEQ ID NO: 1397022 - DNA, 15 bp, Homo sapiens
gaatttcctgcagat

SEQ ID NO: 1397023 - DNA, 15 bp, Homo sapiens
tgaatttcctgcaga

SEQ ID NO: 1397024 - DNA, 15 bp, Homo sapiens
ctgaatttcctgcag

SEQ ID NO: 1397025 - DNA, 15 bp, Homo sapiens
tctgaatttcctgca

SEQ ID NO: 1397026 - DNA, 15 bp, Homo sapiens
atctgaatttcctgc

SEQ ID NO: 1397027 - DNA, 15 bp, Homo sapiens
gatctgaatttcctg

SEQ ID NO: 1397028 - DNA, 15 bp, Homo sapiens
agatctgaatttcct

SEQ ID NO: 1397029 - DNA, 15 bp, Homo sapiens
gagatctgaatttcc

SEQ ID NO: 1397030 - DNA, 15 bp, Homo sapiens
agagatctgaatttc

SEQ ID NO: 1397031 - DNA, 15 bp, Homo sapiens
tagagatctgaattt

SEQ ID NO: 1397032 - DNA, 15 bp, Homo sapiens
atagagatctgaatt

SEQ ID NO: 1397033 - DNA, 15 bp, Homo sapiens
catagagatctgaat

SEQ ID NO: 1397034 - DNA, 15 bp, Homo sapiens
ccatagagatctgaa

SEQ ID NO: 1397035 - DNA, 15 bp, Homo sapiens
gccatagagatctga

SEQ ID NO: 1397036 - DNA, 15 bp, Homo sapiens
tgccatagagatctg

SEQ ID NO: 1397037 - DNA, 15 bp, Homo sapiens
ctgccatagagatct

SEQ ID NO: 1397038 - DNA, 15 bp, Homo sapiens
gctgccatagagatc

SEQ ID NO: 1397039 - DNA, 15 bp, Homo sapiens
ggctgccatagagat

SEQ ID NO: 1397040 - DNA, 15 bp, Homo sapiens
tggctgccatagaga

SEQ ID NO: 1397041 - DNA, 15 bp, Homo sapiens
atggctgccatagag

SEQ ID NO: 1397042 - DNA, 15 bp, Homo sapiens
gatggctgccataga

SEQ ID NO: 1397043 - DNA, 15 bp, Homo sapiens
tgatggctgccatag

SEQ ID NO: 1397044 - DNA, 15 bp, Homo sapiens
ctgatggctgccata

SEQ ID NO: 1397045 - DNA, 15 bp, Homo sapiens
tctgatggctgccat

SEQ ID NO: 1397046 - DNA, 15 bp, Homo sapiens
ctctgatggctgcca

SEQ ID NO: 1397047 - DNA, 15 bp, Homo sapiens
actctgatggctgcc

SEQ ID NO: 1397048 - DNA, 15 bp, Homo sapiens
aactctgatggctgc

SEQ ID NO: 1397049 - DNA, 15 bp, Homo sapiens
taactctgatggctg

SEQ ID NO: 1397050 - DNA, 15 bp, Homo sapiens
ttaactctgatggct

SEQ ID NO: 1397051 - DNA, 15 bp, Homo sapiens
tttaactctgatggc

SEQ ID NO: 1397052 - DNA, 15 bp, Homo sapiens
atttaactctgatgg

SEQ ID NO: 1397053 - DNA, 15 bp, Homo sapiens
tatttaactctgatg

SEQ ID NO: 1397054 - DNA, 15 bp, Homo sapiens
gtatttaactctgat

SEQ ID NO: 1397055 - DNA, 15 bp, Homo sapiens
tgtatttaactctga

SEQ ID NO: 1397056 - DNA, 15 bp, Homo sapiens
atgtatttaactctg

SEQ ID NO: 1397057 - DNA, 15 bp, Homo sapiens
catgtatttaactct

SEQ ID NO: 1397058 - DNA, 15 bp, Homo sapiens
acatgtatttaactc

SEQ ID NO: 1397059 - DNA, 15 bp, Homo sapiens
aacatgtatttaact

SEQ ID NO: 1397060 - DNA, 15 bp, Homo sapiens
caacatgtatttaac

SEQ ID NO: 1397061 - DNA, 15 bp, Homo sapiens
tcaacatgtatttaa

SEQ ID NO: 1397062 - DNA, 15 bp, Homo sapiens
atcaacatgtattta

SEQ ID NO: 1397063 - DNA, 15 bp, Homo sapiens
tatcaacatgtattt

SEQ ID NO: 1397064 - DNA, 15 bp, Homo sapiens
ttatcaacatgtatt

SEQ ID NO: 1397065 - DNA, 15 bp, Homo sapiens
tttatcaacatgtat

SEQ ID NO: 1397066 - DNA, 15 bp, Homo sapiens
atttatcaacatgta

SEQ ID NO: 1397067 - DNA, 15 bp, Homo sapiens
tatttatcaacatgt

SEQ ID NO: 1397068 - DNA, 15 bp, Homo sapiens
ttatttatcaacatg

SEQ ID NO: 1397069 - DNA, 15 bp, Homo sapiens
attatttatcaacat

SEQ ID NO: 1397070 - DNA, 15 bp, Homo sapiens
tattatttatcaaca

SEQ ID NO: 1397071 - DNA, 15 bp, Homo sapiens
atattatttatcaac

SEQ ID NO: 1397072 - DNA, 15 bp, Homo sapiens
tatattatttatcaa

SEQ ID NO: 1397073 - DNA, 15 bp, Homo sapiens
ttatattatttatca

SEQ ID NO: 1397074 - DNA, 15 bp, Homo sapiens
cttatattatttatc

SEQ ID NO: 1397075 - DNA, 15 bp, Homo sapiens
acttatattatttat

SEQ ID NO: 1397076 - DNA, 15 bp, Homo sapiens
cacttatattattta

SEQ ID NO: 1397077 - DNA, 15 bp, Homo sapiens
tcacttatattattt

SEQ ID NO: 1397078 - DNA, 15 bp, Homo sapiens
ttcacttatattatt

SEQ ID NO: 1397079 - DNA, 15 bp, Homo sapiens
cttcacttatattat

SEQ ID NO: 1397080 - DNA, 15 bp, Homo sapiens
acttcacttatatta

SEQ ID NO: 1397081 - DNA, 15 bp, Homo sapiens
tacttcacttatatt

SEQ ID NO: 1397082 - DNA, 15 bp, Homo sapiens
ttacttcacttatat

SEQ ID NO: 1397083 - DNA, 15 bp, Homo sapiens
gttacttcacttata

SEQ ID NO: 1397084 - DNA, 15 bp, Homo sapiens
tgttacttcacttat

SEQ ID NO: 1397085 - DNA, 15 bp, Homo sapiens
ctgttacttcactta

SEQ ID NO: 1397086 - DNA, 15 bp, Homo sapiens
gctgttacttcactt

SEQ ID NO: 1397087 - DNA, 15 bp, Homo sapiens
tgctgttacttcact

SEQ ID NO: 1397088 - DNA, 15 bp, Homo sapiens
ctgctgttacttcac

SEQ ID NO: 1397089 - DNA, 15 bp, Homo sapiens
tctgctgttacttca

SEQ ID NO: 1397090 - DNA, 15 bp, Homo sapiens
aatctgctgttactt

SEQ ID NO: 1397091 - DNA, 15 bp, Homo sapiens
taatctgctgttact

SEQ ID NO: 1397092 - DNA, 15 bp, Homo sapiens
ataatctgctgttac

SEQ ID NO: 1397093 - DNA, 15 bp, Homo sapiens
aataatctgctgtta

SEQ ID NO: 1397094 - DNA, 15 bp, Homo sapiens
taataatctgctgtt

SEQ ID NO: 1397095 - DNA, 15 bp, Homo sapiens
ataataatctgctgt

SEQ ID NO: 1397096 - DNA, 15 bp, Homo sapiens
aataataatctgctg

SEQ ID NO: 1397097 - DNA, 15 bp, Homo sapiens
aaataataatctgct

SEQ ID NO: 1397098 - DNA, 15 bp, Homo sapiens
aaaataataatctgc

SEQ ID NO: 1397099 - DNA, 15 bp, Homo sapiens
taaaataataatctg

SEQ ID NO: 1397100 - DNA, 15 bp, Homo sapiens
gtaaaataataatct

SEQ ID NO: 1397101 - DNA, 15 bp, Homo sapiens
tgtaaaataataatc

SEQ ID NO: 1397102 - DNA, 15 bp, Homo sapiens
ctgtaaaataataat

SEQ ID NO: 1397103 - DNA, 15 bp, Homo sapiens
gctgtaaaataataa

SEQ ID NO: 1397104 - DNA, 15 bp, Homo sapiens
tgctgtaaaataata

SEQ ID NO: 1397105 - DNA, 15 bp, Homo sapiens
ctgctgtaaaataat

SEQ ID NO: 1397106 - DNA, 15 bp, Homo sapiens
cctgctgtaaaataa

SEQ ID NO: 1397107 - DNA, 15 bp, Homo sapiens
acctgctgtaaaata

SEQ ID NO: 1397108 - DNA, 15 bp, Homo sapiens
gacctgctgtaaaat

SEQ ID NO: 1397109 - DNA, 15 bp, Homo sapiens
agacctgctgtaaaa

SEQ ID NO: 1397110 - DNA, 15 bp, Homo sapiens
aagacctgctgtaaa

SEQ ID NO: 1397111 - DNA, 15 bp, Homo sapiens
aaagacctgctgtaa

SEQ ID NO: 1397112 - DNA, 15 bp, Homo sapiens
caaagacctgctgta

SEQ ID NO: 1397113 - DNA, 15 bp, Homo sapiens
tcaaagacctgctgt

SEQ ID NO: 1397114 - DNA, 15 bp, Homo sapiens
ttcaaagacctgctg

SEQ ID NO: 1397115 - DNA, 15 bp, Homo sapiens
cttcaaagacctgct

SEQ ID NO: 1397116 - DNA, 15 bp, Homo sapiens
gcttcaaagacctgc

SEQ ID NO: 1397117 - DNA, 15 bp, Homo sapiens
agcttcaaagacctg

SEQ ID NO: 1397118 - DNA, 15 bp, Homo sapiens
tagcttcaaagacct

SEQ ID NO: 1397119 - DNA, 15 bp, Homo sapiens
gtagcttcaaagacc

SEQ ID NO: 1397120 - DNA, 15 bp, Homo sapiens
agtagcttcaaagac

SEQ ID NO: 1397121 - DNA, 15 bp, Homo sapiens
gagtagcttcaaaga

SEQ ID NO: 1397122 - DNA, 15 bp, Homo sapiens
tgagtagcttcaaag

SEQ ID NO: 1397123 - DNA, 15 bp, Homo sapiens
ctgagtagcttcaaa

SEQ ID NO: 1397124 - DNA, 15 bp, Homo sapiens
tctgagtagcttcaa

SEQ ID NO: 1397125 - DNA, 15 bp, Homo sapiens
gtctgagtagcttca

SEQ ID NO: 1397126 - DNA, 15 bp, Homo sapiens
agtctgagtagcttc

SEQ ID NO: 1397127 - DNA, 15 bp, Homo sapiens
gagtctgagtagctt

SEQ ID NO: 1397128 - DNA, 15 bp, Homo sapiens
tgagtctgagtagct

SEQ ID NO: 1397129 - DNA, 15 bp, Homo sapiens
ctgagtctgagtagc

SEQ ID NO: 1397130 - DNA, 15 bp, Homo sapiens
gctgagtctgagtag

SEQ ID NO: 1397131 - DNA, 15 bp, Homo sapiens
ggctgagtctgagta

SEQ ID NO: 1397132 - DNA, 15 bp, Homo sapiens
aggctgagtctgagt

SEQ ID NO: 1397133 - DNA, 15 bp, Homo sapiens
caggctgagtctgag

SEQ ID NO: 1397134 - DNA, 15 bp, Homo sapiens
acaggctgagtctga

SEQ ID NO: 1397135 - DNA, 15 bp, Homo sapiens
gacaggctgagtctg

SEQ ID NO: 1397136 - DNA, 15 bp, Homo sapiens
agacaggctgagtct

SEQ ID NO: 1397137 - DNA, 15 bp, Homo sapiens
gagacaggctgagtc

SEQ ID NO: 1397138 - DNA, 15 bp, Homo sapiens
agagacaggctgagt

SEQ ID NO: 1397139 - DNA, 15 bp, Homo sapiens
aagagacaggctgag

SEQ ID NO: 1397140 - DNA, 15 bp, Homo sapiens
gaagagacaggctga

SEQ ID NO: 1397141 - DNA, 15 bp, Homo sapiens
ggaagagacaggctg

SEQ ID NO: 1397142 - DNA, 15 bp, Homo sapiens
aggaagagacaggct

SEQ ID NO: 1397143 - DNA, 15 bp, Homo sapiens
caggaagagacaggc

SEQ ID NO: 1397144 - DNA, 15 bp, Homo sapiens
tcaggaagagacagg

SEQ ID NO: 1397145 - DNA, 15 bp, Homo sapiens
atcaggaagagacag

SEQ ID NO: 1397146 - DNA, 15 bp, Homo sapiens
aatcaggaagagaca

SEQ ID NO: 1397147 - DNA, 15 bp, Homo sapiens
gaatcaggaagagac

SEQ ID NO: 1397148 - DNA, 15 bp, Homo sapiens
tgaatcaggaagaga

SEQ ID NO: 1397149 - DNA, 15 bp, Homo sapiens
ctgaatcaggaagag

SEQ ID NO: 1397150 - DNA, 15 bp, Homo sapiens
tctgaatcaggaaga

SEQ ID NO: 1397151 - DNA, 15 bp, Homo sapiens
ttctgaatcaggaag

SEQ ID NO: 1397152 - DNA, 15 bp, Homo sapiens
tttctgaatcaggaa

SEQ ID NO: 1397153 - DNA, 15 bp, Homo sapiens
ttttctgaatcagga

SEQ ID NO: 1397154 - DNA, 15 bp, Homo sapiens
cttttctgaatcagg

SEQ ID NO: 1397155 - DNA, 15 bp, Homo sapiens
gcttttctgaatcag

SEQ ID NO: 1397156 - DNA, 15 bp, Homo sapiens
agcttttctgaatca

SEQ ID NO: 1397157 - DNA, 15 bp, Homo sapiens
aagcttttctgaatc

SEQ ID NO: 1397158 - DNA, 15 bp, Homo sapiens
aaagcttttctgaat

SEQ ID NO: 1397159 - DNA, 15 bp, Homo sapiens
gaaagcttttctgaa

SEQ ID NO: 1397160 - DNA, 15 bp, Homo sapiens
ctgaaagcttttctg

SEQ ID NO: 1397161 - DNA, 15 bp, Homo sapiens
gctgaaagcttttct

SEQ ID NO: 1397162 - DNA, 15 bp, Homo sapiens
ggctgaaagcttttc

SEQ ID NO: 1397163 - DNA, 15 bp, Homo sapiens
gggctgaaagctttt

SEQ ID NO: 1397164 - DNA, 15 bp, Homo sapiens
tgggctgaaagcttt

SEQ ID NO: 1397165 - DNA, 15 bp, Homo sapiens
gtgggctgaaagctt

SEQ ID NO: 1397166 - DNA, 15 bp, Homo sapiens
agtgggctgaaagct

SEQ ID NO: 1397167 - DNA, 15 bp, Homo sapiens
cagtgggctgaaagc

SEQ ID NO: 1397168 - DNA, 15 bp, Homo sapiens
ccagtgggctgaaag

SEQ ID NO: 1397169 - DNA, 15 bp, Homo sapiens
gccagtgggctgaaa

SEQ ID NO: 1397170 - DNA, 15 bp, Homo sapiens
agccagtgggctgaa

SEQ ID NO: 1397171 - DNA, 15 bp, Homo sapiens
aagccagtgggctga

SEQ ID NO: 1397172 - DNA, 15 bp, Homo sapiens
aaagccagtgggctg

SEQ ID NO: 1397173 - DNA, 15 bp, Homo sapiens
taaagccagtgggct

SEQ ID NO: 1397174 - DNA, 15 bp, Homo sapiens
ctaaagccagtgggc

SEQ ID NO: 1397175 - DNA, 15 bp, Homo sapiens
gctaaagccagtggg

SEQ ID NO: 1397176 - DNA, 15 bp, Homo sapiens
agctaaagccagtgg

SEQ ID NO: 1397177 - DNA, 15 bp, Homo sapiens
cagctaaagccagtg

SEQ ID NO: 1397178 - DNA, 15 bp, Homo sapiens
gcagctaaagccagt

SEQ ID NO: 1397179 - DNA, 15 bp, Homo sapiens
agcagctaaagccag

SEQ ID NO: 1397180 - DNA, 15 bp, Homo sapiens
tagcagctaaagcca

SEQ ID NO: 1397181 - DNA, 15 bp, Homo sapiens
ttagcagctaaagcc

SEQ ID NO: 1397182 - DNA, 15 bp, Homo sapiens
gttagcagctaaagc

SEQ ID NO: 1397183 - DNA, 15 bp, Homo sapiens
cgttagcagctaaag

SEQ ID NO: 1397184 - DNA, 15 bp, Homo sapiens
ccgttagcagctaaa

SEQ ID NO: 1397185 - DNA, 15 bp, Homo sapiens
tccgttagcagctaa

SEQ ID NO: 1397186 - DNA, 15 bp, Homo sapiens
gtccgttagcagcta

SEQ ID NO: 1397187 - DNA, 15 bp, Homo sapiens
tgtccgttagcagct

SEQ ID NO: 1397188 - DNA, 15 bp, Homo sapiens
gtgtccgttagcagc

SEQ ID NO: 1397189 - DNA, 15 bp, Homo sapiens
agtgtccgttagcag

SEQ ID NO: 1397190 - DNA, 15 bp, Homo sapiens
cagtgtccgttagca

SEQ ID NO: 1397191 - DNA, 15 bp, Homo sapiens
tcagtgtccgttagc

SEQ ID NO: 1397192 - DNA, 15 bp, Homo sapiens
atcagtgtccgttag

SEQ ID NO: 1397193 - DNA, 15 bp, Homo sapiens
aatcagtgtccgtta

SEQ ID NO: 1397194 - DNA, 15 bp, Homo sapiens
aaatcagtgtccgtt

SEQ ID NO: 1397195 - DNA, 15 bp, Homo sapiens
aaaatcagtgtccgt

SEQ ID NO: 1397196 - DNA, 15 bp, Homo sapiens
aaaaatcagtgtccg

SEQ ID NO: 1397197 - DNA, 15 bp, Homo sapiens
taaaaaatcagtgtc

SEQ ID NO: 1397198 - DNA, 15 bp, Homo sapiens
ttaaaaaatcagtgt

SEQ ID NO: 1397199 - DNA, 15 bp, Homo sapiens
tttaaaaaatcagtg

SEQ ID NO: 1397200 - DNA, 15 bp, Homo sapiens
ttttaaaaaatcagt

SEQ ID NO: 1397201 - DNA, 15 bp, Homo sapiens
attttaaaaaatcag

SEQ ID NO: 1397202 - DNA, 15 bp, Homo sapiens
aattttaaaaaatca

SEQ ID NO: 1397203 - DNA, 15 bp, Homo sapiens
aaattttaaaaaatc

SEQ ID NO: 1397204 - DNA, 15 bp, Homo sapiens
caaattttaaaaaat

SEQ ID NO: 1397205 - DNA, 15 bp, Homo sapiens
tcaaattttaaaaaa

SEQ ID NO: 1397206 - DNA, 15 bp, Homo sapiens
actcaaattttaaaa

SEQ ID NO: 1397207 - DNA, 15 bp, Homo sapiens
aactcaaattttaaa

SEQ ID NO: 1397208 - DNA, 15 bp, Homo sapiens
gaactcaaattttaa

SEQ ID NO: 1397209 - DNA, 15 bp, Homo sapiens
ggaactcaaatttta

SEQ ID NO: 1397210 - DNA, 15 bp, Homo sapiens
aggaactcaaatttt

SEQ ID NO: 1397211 - DNA, 15 bp, Homo sapiens
taggaactcaaattt

SEQ ID NO: 1397212 - DNA, 15 bp, Homo sapiens
ttaggaactcaaatt

SEQ ID NO: 1397213 - DNA, 15 bp, Homo sapiens
tttaggaactcaaat

SEQ ID NO: 1397214 - DNA, 15 bp, Homo sapiens
ctttaggaactcaaa

SEQ ID NO: 1397215 - DNA, 15 bp, Homo sapiens
cctttaggaactcaa

SEQ ID NO: 1397216 - DNA, 15 bp, Homo sapiens
ccctttaggaactca

SEQ ID NO: 1397217 - DNA, 15 bp, Homo sapiens
accctttaggaactc

SEQ ID NO: 1397218 - DNA, 15 bp, Homo sapiens
caccctttaggaact

SEQ ID NO: 1397219 - DNA, 15 bp, Homo sapiens
tcaccctttaggaac

SEQ ID NO: 1397220 - DNA, 15 bp, Homo sapiens
ttcaccctttaggaa

SEQ ID NO: 1397221 - DNA, 15 bp, Homo sapiens
cttcaccctttagga

SEQ ID NO: 1397222 - DNA, 15 bp, Homo sapiens
acttcaccctttagg

SEQ ID NO: 1397223 - DNA, 15 bp, Homo sapiens
aacttcaccctttag

SEQ ID NO: 1397224 - DNA, 15 bp, Homo sapiens
aaacttcacccttta

SEQ ID NO: 1397225 - DNA, 15 bp, Homo sapiens
aaaacttcacccttt

SEQ ID NO: 1397226 - DNA, 15 bp, Homo sapiens
taaaacttcaccctt

SEQ ID NO: 1397227 - DNA, 15 bp, Homo sapiens
ttaaaacttcaccct

SEQ ID NO: 1397228 - DNA, 15 bp, Homo sapiens
tttaaaacttcaccc

SEQ ID NO: 1397229 - DNA, 15 bp, Homo sapiens
ttttaaaacttcacc

SEQ ID NO: 1397230 - DNA, 15 bp, Homo sapiens
cttttaaaacttcac

SEQ ID NO: 1397231 - DNA, 15 bp, Homo sapiens
gcttttaaaacttca

SEQ ID NO: 1397232 - DNA, 15 bp, Homo sapiens
agcttttaaaacttc

SEQ ID NO: 1397233 - DNA, 15 bp, Homo sapiens
aagcttttaaaactt

SEQ ID NO: 1397234 - DNA, 15 bp, Homo sapiens
aaagcttttaaaact

SEQ ID NO: 1397235 - DNA, 15 bp, Homo sapiens
caaagcttttaaaac

SEQ ID NO: 1397236 - DNA, 15 bp, Homo sapiens
tcaaagcttttaaaa

SEQ ID NO: 1397237 - DNA, 15 bp, Homo sapiens
atcaaagcttttaaa

SEQ ID NO: 1397238 - DNA, 15 bp, Homo sapiens
catcaaagcttttaa

SEQ ID NO: 1397239 - DNA, 15 bp, Homo sapiens
acatcaaagctttta

SEQ ID NO: 1397240 - DNA, 15 bp, Homo sapiens
tacatcaaagctttt

SEQ ID NO: 1397241 - DNA, 15 bp, Homo sapiens
ttacatcaaagcttt

SEQ ID NO: 1397242 - DNA, 15 bp, Homo sapiens
tttacatcaaagctt

SEQ ID NO: 1397243 - DNA, 15 bp, Homo sapiens
atttacatcaaagct

SEQ ID NO: 1397244 - DNA, 15 bp, Homo sapiens
gatttacatcaaagc

SEQ ID NO: 1397245 - DNA, 15 bp, Homo sapiens
ggatttacatcaaag

SEQ ID NO: 1397246 - DNA, 15 bp, Homo sapiens
aggatttacatcaaa

SEQ ID NO: 1397247 - DNA, 15 bp, Homo sapiens
taggatttacatcaa

SEQ ID NO: 1397248 - DNA, 15 bp, Homo sapiens
ctaggatttacatca

SEQ ID NO: 1397249 - DNA, 15 bp, Homo sapiens
tctaggatttacatc

SEQ ID NO: 1397250 - DNA, 15 bp, Homo sapiens
ttctaggatttacat

SEQ ID NO: 1397251 - DNA, 15 bp, Homo sapiens
attctaggatttaca

SEQ ID NO: 1397252 - DNA, 15 bp, Homo sapiens
aattctaggatttac

SEQ ID NO: 1397253 - DNA, 15 bp, Homo sapiens
aaattctaggattta

SEQ ID NO: 1397254 - DNA, 15 bp, Homo sapiens
gaaattctaggattt

SEQ ID NO: 1397255 - DNA, 15 bp, Homo sapiens
ggaaattctaggatt

SEQ ID NO: 1397256 - DNA, 15 bp, Homo sapiens
tggaaattctaggat

SEQ ID NO: 1397257 - DNA, 15 bp, Homo sapiens
ttggaaattctagga

SEQ ID NO: 1397258 - DNA, 15 bp, Homo sapiens
tttggaaattctagg

SEQ ID NO: 1397259 - DNA, 15 bp, Homo sapiens
gtttggaaattctag

SEQ ID NO: 1397260 - DNA, 15 bp, Homo sapiens
tgtttggaaattcta

SEQ ID NO: 1397261 - DNA, 15 bp, Homo sapiens
ttgtttggaaattct

SEQ ID NO: 1397262 - DNA, 15 bp, Homo sapiens
tttgtttggaaattc

SEQ ID NO: 1397263 - DNA, 15 bp, Homo sapiens
ttttgtttggaaatt

SEQ ID NO: 1397264 - DNA, 15 bp, Homo sapiens
attttgtttggaaat

SEQ ID NO: 1397265 - DNA, 15 bp, Homo sapiens
gattttgtttggaaa

SEQ ID NO: 1397266 - DNA, 15 bp, Homo sapiens
agattttgtttggaa

SEQ ID NO: 1397267 - DNA, 15 bp, Homo sapiens
gagattttgtttgga

SEQ ID NO: 1397268 - DNA, 15 bp, Homo sapiens
tgagattttgtttgg

SEQ ID NO: 1397269 - DNA, 15 bp, Homo sapiens
ttgagattttgtttg

SEQ ID NO: 1397270 - DNA, 15 bp, Homo sapiens
tttgagattttgttt

SEQ ID NO: 1397271 - DNA, 15 bp, Homo sapiens
ttttgagattttgtt

SEQ ID NO: 1397272 - DNA, 15 bp, Homo sapiens
tttttgagattttgt

SEQ ID NO: 1397273 - DNA, 15 bp, Homo sapiens
ttttttgagattttg

SEQ ID NO: 1397274 - DNA, 15 bp, Homo sapiens
cttttttgagatttt

SEQ ID NO: 1397275 - DNA, 15 bp, Homo sapiens
tcttttttgagattt

SEQ ID NO: 1397276 - DNA, 15 bp, Homo sapiens
ttcttttttgagatt

SEQ ID NO: 1397277 - DNA, 15 bp, Homo sapiens
attcttttttgagat

SEQ ID NO: 1397278 - DNA, 15 bp, Homo sapiens
cattcttttttgaga

SEQ ID NO: 1397279 - DNA, 15 bp, Homo sapiens
tcattcttttttgag

SEQ ID NO: 1397280 - DNA, 15 bp, Homo sapiens
ttcattcttttttga

SEQ ID NO: 1397281 - DNA, 15 bp, Homo sapiens
cttcattcttttttg

SEQ ID NO: 1397282 - DNA, 15 bp, Homo sapiens
tcttcattctttttt

SEQ ID NO: 1397283 - DNA, 15 bp, Homo sapiens
ttcttcattcttttt

SEQ ID NO: 1397284 - DNA, 15 bp, Homo sapiens
tttcttcattctttt

SEQ ID NO: 1397285 - DNA, 15 bp, Homo sapiens
gtttcttcattcttt

SEQ ID NO: 1397286 - DNA, 15 bp, Homo sapiens
tgtttcttcattctt

SEQ ID NO: 1397287 - DNA, 15 bp, Homo sapiens
gtgtttcttcattct

SEQ ID NO: 1397288 - DNA, 15 bp, Homo sapiens
tgtgtttcttcattc

SEQ ID NO: 1397289 - DNA, 15 bp, Homo sapiens
ctgtgtttcttcatt

SEQ ID NO: 1397290 - DNA, 15 bp, Homo sapiens
tctgtgtttcttcat

SEQ ID NO: 1397291 - DNA, 15 bp, Homo sapiens
ctctgtgtttcttca

SEQ ID NO: 1397292 - DNA, 15 bp, Homo sapiens
cctctgtgtttcttc

SEQ ID NO: 1397293 - DNA, 15 bp, Homo sapiens
ccctctgtgtttctt

SEQ ID NO: 1397294 - DNA, 15 bp, Homo sapiens
accctctgtgtttct

SEQ ID NO: 1397295 - DNA, 15 bp, Homo sapiens
caccctctgtgtttc

SEQ ID NO: 1397296 - DNA, 15 bp, Homo sapiens
ccaccctctgtgttt

SEQ ID NO: 1397297 - DNA, 15 bp, Homo sapiens
cccaccctctgtgtt

SEQ ID NO: 1397298 - DNA, 15 bp, Homo sapiens
acccaccctctgtgt

SEQ ID NO: 1397299 - DNA, 15 bp, Homo sapiens
cacccaccctctgtg

SEQ ID NO: 1397300 - DNA, 15 bp, Homo sapiens
ccacccaccctctgt

SEQ ID NO: 1397301 - DNA, 15 bp, Homo sapiens
accacccaccctctg

SEQ ID NO: 1397302 - DNA, 15 bp, Homo sapiens
aaccacccaccctct

SEQ ID NO: 1397303 - DNA, 15 bp, Homo sapiens
caaccacccaccctc

SEQ ID NO: 1397304 - DNA, 15 bp, Homo sapiens
gcaaccacccaccct

SEQ ID NO: 1397305 - DNA, 15 bp, Homo sapiens
ggcaaccacccaccc

SEQ ID NO: 1397306 - DNA, 15 bp, Homo sapiens
tggcaaccacccacc

SEQ ID NO: 1397307 - DNA, 15 bp, Homo sapiens
ctggcaaccacccac

SEQ ID NO: 1397308 - DNA, 15 bp, Homo sapiens
actggcaaccaccca

SEQ ID NO: 1397309 - DNA, 15 bp, Homo sapiens
gactggcaaccaccc

SEQ ID NO: 1397310 - DNA, 15 bp, Homo sapiens
agactggcaaccacc

SEQ ID NO: 1397311 - DNA, 15 bp, Homo sapiens
cagactggcaaccac

SEQ ID NO: 1397312 - DNA, 15 bp, Homo sapiens
acagactggcaacca

SEQ ID NO: 1397313 - DNA, 15 bp, Homo sapiens
cacagactggcaacc

SEQ ID NO: 1397314 - DNA, 15 bp, Homo sapiens
ccacagactggcaac

SEQ ID NO: 1397315 - DNA, 15 bp, Homo sapiens
tccacagactggcaa

SEQ ID NO: 1397316 - DNA, 15 bp, Homo sapiens
ttccacagactggca

SEQ ID NO: 1397317 - DNA, 15 bp, Homo sapiens
cttccacagactggc

SEQ ID NO: 1397318 - DNA, 15 bp, Homo sapiens
acttccacagactgg

SEQ ID NO: 1397319 - DNA, 15 bp, Homo sapiens
gacttccacagactg

SEQ ID NO: 1397320 - DNA, 15 bp, Homo sapiens
tgacttccacagact

SEQ ID NO: 1397321 - DNA, 15 bp, Homo sapiens
ttgacttccacagac

SEQ ID NO: 1397322 - DNA, 15 bp, Homo sapiens
tttgacttccacaga

SEQ ID NO: 1397323 - DNA, 15 bp, Homo sapiens
ttttgacttccacag

SEQ ID NO: 1397324 - DNA, 15 bp, Homo sapiens
tttttgacttccaca

SEQ ID NO: 1397325 - DNA, 15 bp, Homo sapiens
gtttttgacttccac

SEQ ID NO: 1397326 - DNA, 15 bp, Homo sapiens
tgtttttgacttcca

SEQ ID NO: 1397327 - DNA, 15 bp, Homo sapiens
ctgtttttgacttcc

SEQ ID NO: 1397328 - DNA, 15 bp, Homo sapiens
cctgtttttgacttc

SEQ ID NO: 1397329 - DNA, 15 bp, Homo sapiens
ccctgtttttgactt

SEQ ID NO: 1397330 - DNA, 15 bp, Homo sapiens
gccctgtttttgact

SEQ ID NO: 1397331 - DNA, 15 bp, Homo sapiens
tgccctgtttttgac

SEQ ID NO: 1397332 - DNA, 15 bp, Homo sapiens
ctgccctgtttttga

SEQ ID NO: 1397333 - DNA, 15 bp, Homo sapiens
cctgccctgtttttg

SEQ ID NO: 1397334 - DNA, 15 bp, Homo sapiens
gcctgccctgttttt

SEQ ID NO: 1397335 - DNA, 15 bp, Homo sapiens
ggcctgccctgtttt

SEQ ID NO: 1397336 - DNA, 15 bp, Homo sapiens
tggcctgccctgttt

SEQ ID NO: 1397337 - DNA, 15 bp, Homo sapiens
ctggcctgccctgtt

SEQ ID NO: 1397338 - DNA, 15 bp, Homo sapiens
gctggcctgccctgt

SEQ ID NO: 1397339 - DNA, 15 bp, Homo sapiens
agctggcctgccctg

SEQ ID NO: 1397340 - DNA, 15 bp, Homo sapiens
tagctggcctgccct

SEQ ID NO: 1397341 - DNA, 15 bp, Homo sapiens
ttagctggcctgccc

SEQ ID NO: 1397342 - DNA, 15 bp, Homo sapiens
attagctggcctgcc

SEQ ID NO: 1397343 - DNA, 15 bp, Homo sapiens
gattagctggcctgc

SEQ ID NO: 1397344 - DNA, 15 bp, Homo sapiens
ggattagctggcctg

SEQ ID NO: 1397345 - DNA, 15 bp, Homo sapiens
tggattagctggcct

SEQ ID NO: 1397346 - DNA, 15 bp, Homo sapiens
ctggattagctggcc

SEQ ID NO: 1397347 - DNA, 15 bp, Homo sapiens
tctggattagctggc

SEQ ID NO: 1397348 - DNA, 15 bp, Homo sapiens
ctctggattagctgg

SEQ ID NO: 1397349 - DNA, 15 bp, Homo sapiens
cctctggattagctg

SEQ ID NO: 1397350 - DNA, 15 bp, Homo sapiens
gcctctggattagct

SEQ ID NO: 1397351 - DNA, 15 bp, Homo sapiens
tgcctctggattagc

SEQ ID NO: 1397352 - DNA, 15 bp, Homo sapiens
atgcctctggattag

SEQ ID NO: 1397353 - DNA, 15 bp, Homo sapiens
aatgcctctggatta

SEQ ID NO: 1397354 - DNA, 15 bp, Homo sapiens
caatgcctctggatt

SEQ ID NO: 1397355 - DNA, 15 bp, Homo sapiens
ccaatgcctctggat

SEQ ID NO: 1397356 - DNA, 15 bp, Homo sapiens
cccaatgcctctgga

SEQ ID NO: 1397357 - DNA, 15 bp, Homo sapiens
tcccaatgcctctgg

SEQ ID NO: 1397358 - DNA, 15 bp, Homo sapiens
atcccaatgcctctg

SEQ ID NO: 1397359 - DNA, 15 bp, Homo sapiens
aatcccaatgcctct

SEQ ID NO: 1397360 - DNA, 15 bp, Homo sapiens
caatcccaatgcctc

SEQ ID NO: 1397361 - DNA, 15 bp, Homo sapiens
ccaatcccaatgcct

SEQ ID NO: 1397362 - DNA, 15 bp, Homo sapiens
cccaatcccaatgcc

SEQ ID NO: 1397363 - DNA, 15 bp, Homo sapiens
tcccaatcccaatgc

SEQ ID NO: 1397364 - DNA, 15 bp, Homo sapiens
ctcccaatcccaatg

SEQ ID NO: 1397365 - DNA, 15 bp, Homo sapiens
gctcccaatcccaat

SEQ ID NO: 1397366 - DNA, 15 bp, Homo sapiens
agctcccaatcccaa

SEQ ID NO: 1397367 - DNA, 15 bp, Homo sapiens
cagctcccaatccca

SEQ ID NO: 1397368 - DNA, 15 bp, Homo sapiens
ccagctcccaatccc

SEQ ID NO: 1397369 - DNA, 15 bp, Homo sapiens
cccagctcccaatcc

SEQ ID NO: 1397370 - DNA, 15 bp, Homo sapiens
ccccagctcccaatc

SEQ ID NO: 1397371 - DNA, 15 bp, Homo sapiens
tccccagctcccaat

SEQ ID NO: 1397372 - DNA, 15 bp, Homo sapiens
ttccccagctcccaa

SEQ ID NO: 1397373 - DNA, 15 bp, Homo sapiens
gttccccagctccca

SEQ ID NO: 1397374 - DNA, 15 bp, Homo sapiens
tgttccccagctccc

SEQ ID NO: 1397375 - DNA, 15 bp, Homo sapiens
ttgttccccagctcc

SEQ ID NO: 1397376 - DNA, 15 bp, Homo sapiens
attgttccccagctc

SEQ ID NO: 1397377 - DNA, 15 bp, Homo sapiens
cattgttccccagct

SEQ ID NO: 1397378 - DNA, 15 bp, Homo sapiens
tcattgttccccagc

SEQ ID NO: 1397379 - DNA, 15 bp, Homo sapiens
ttcattgttccccag

SEQ ID NO: 1397380 - DNA, 15 bp, Homo sapiens
tttcattgttcccca

SEQ ID NO: 1397381 - DNA, 15 bp, Homo sapiens
ctttcattgttcccc

SEQ ID NO: 1397382 - DNA, 15 bp, Homo sapiens
tctttcattgttccc

SEQ ID NO: 1397383 - DNA, 15 bp, Homo sapiens
atctttcattgttcc

SEQ ID NO: 1397384 - DNA, 15 bp, Homo sapiens
tatctttcattgttc

SEQ ID NO: 1397385 - DNA, 15 bp, Homo sapiens
atatctttcattgtt

SEQ ID NO: 1397386 - DNA, 15 bp, Homo sapiens
catatctttcattgt

SEQ ID NO: 1397387 - DNA, 15 bp, Homo sapiens
ccatatctttcattg

SEQ ID NO: 1397388 - DNA, 15 bp, Homo sapiens
cccatatctttcatt

SEQ ID NO: 1397389 - DNA, 15 bp, Homo sapiens
gcccatatctttcat

SEQ ID NO: 1397390 - DNA, 15 bp, Homo sapiens
agcccatatctttca

SEQ ID NO: 1397391 - DNA, 15 bp, Homo sapiens
gagcccatatctttc

SEQ ID NO: 1397392 - DNA, 15 bp, Homo sapiens
agagcccatatcttt

SEQ ID NO: 1397393 - DNA, 15 bp, Homo sapiens
gagagcccatatctt

SEQ ID NO: 1397394 - DNA, 15 bp, Homo sapiens
ggagagcccatatct

SEQ ID NO: 1397395 - DNA, 15 bp, Homo sapiens
tggagagcccatatc

SEQ ID NO: 1397396 - DNA, 15 bp, Homo sapiens
ctggagagcccatat

SEQ ID NO: 1397397 - DNA, 15 bp, Homo sapiens
cctggagagcccata

SEQ ID NO: 1397398 - DNA, 15 bp, Homo sapiens
gcctggagagcccat

SEQ ID NO: 1397399 - DNA, 15 bp, Homo sapiens
ggcctggagagccca

SEQ ID NO: 1397400 - DNA, 15 bp, Homo sapiens
aggcctggagagccc

SEQ ID NO: 1397401 - DNA, 15 bp, Homo sapiens
gaggcctggagagcc

SEQ ID NO: 1397402 - DNA, 15 bp, Homo sapiens
agaggcctggagagc

SEQ ID NO: 1397403 - DNA, 15 bp, Homo sapiens
cagaggcctggagag

SEQ ID NO: 1397404 - DNA, 15 bp, Homo sapiens
ccagaggcctggaga

SEQ ID NO: 1397405 - DNA, 15 bp, Homo sapiens
gccagaggcctggag

SEQ ID NO: 1397406 - DNA, 15 bp, Homo sapiens
tgccagaggcctgga

SEQ ID NO: 1397407 - DNA, 15 bp, Homo sapiens
ttgccagaggcctgg

SEQ ID NO: 1397408 - DNA, 15 bp, Homo sapiens
attgccagaggcctg

SEQ ID NO: 1397409 - DNA, 15 bp, Homo sapiens
cattgccagaggcct

SEQ ID NO: 1397410 - DNA, 15 bp, Homo sapiens
tcattgccagaggcc

SEQ ID NO: 1397411 - DNA, 15 bp, Homo sapiens
gtcattgccagaggc

SEQ ID NO: 1397412 - DNA, 15 bp, Homo sapiens
ggtcattgccagagg

SEQ ID NO: 1397413 - DNA, 15 bp, Homo sapiens
tggtcattgccagag

SEQ ID NO: 1397414 - DNA, 15 bp, Homo sapiens
atggtcattgccaga

SEQ ID NO: 1397415 - DNA, 15 bp, Homo sapiens
catggtcattgccag

SEQ ID NO: 1397416 - DNA, 15 bp, Homo sapiens
tcatggtcattgcca

SEQ ID NO: 1397417 - DNA, 15 bp, Homo sapiens
ctcatggtcattgcc

SEQ ID NO: 1397418 - DNA, 15 bp, Homo sapiens
gctcatggtcattgc

SEQ ID NO: 1397419 - DNA, 15 bp, Homo sapiens
tgctcatggtcattg

SEQ ID NO: 1397420 - DNA, 15 bp, Homo sapiens
ctgctcatggtcatt

SEQ ID NO: 1397421 - DNA, 15 bp, Homo sapiens
gctgctcatggtcat

SEQ ID NO: 1397422 - DNA, 15 bp, Homo sapiens
ggctgctcatggtca

SEQ ID NO: 1397423 - DNA, 15 bp, Homo sapiens
tggctgctcatggtc

SEQ ID NO: 1397424 - DNA, 15 bp, Homo sapiens
ttggctgctcatggt

SEQ ID NO: 1397425 - DNA, 15 bp, Homo sapiens
cttggctgctcatgg

SEQ ID NO: 1397426 - DNA, 15 bp, Homo sapiens
gctcttggctgctca

SEQ ID NO: 1397427 - DNA, 15 bp, Homo sapiens
tgctcttggctgctc

SEQ ID NO: 1397428 - DNA, 15 bp, Homo sapiens
ttgctcttggctgct

SEQ ID NO: 1397429 - DNA, 15 bp, Homo sapiens
cttgctcttggctgc

SEQ ID NO: 1397430 - DNA, 15 bp, Homo sapiens
acttgctcttggctg

SEQ ID NO: 1397431 - DNA, 15 bp, Homo sapiens
cacttgctcttggct

SEQ ID NO: 1397432 - DNA, 15 bp, Homo sapiens
tcacttgctcttggc

SEQ ID NO: 1397433 - DNA, 15 bp, Homo sapiens
ctcacttgctcttgg

SEQ ID NO: 1397434 - DNA, 15 bp, Homo sapiens
tctcacttgctcttg

SEQ ID NO: 1397435 - DNA, 15 bp, Homo sapiens
ctctcacttgctctt

SEQ ID NO: 1397436 - DNA, 15 bp, Homo sapiens
actctcacttgctct

SEQ ID NO: 1397437 - DNA, 15 bp, Homo sapiens
cactctcacttgctc

SEQ ID NO: 1397438 - DNA, 15 bp, Homo sapiens
ccactctcacttgct

SEQ ID NO: 1397439 - DNA, 15 bp, Homo sapiens
cccactctcacttgc

SEQ ID NO: 1397440 - DNA, 15 bp, Homo sapiens
tcccactctcacttg

SEQ ID NO: 1397441 - DNA, 15 bp, Homo sapiens
ttcccactctcactt

SEQ ID NO: 1397442 - DNA, 15 bp, Homo sapiens
cttcccactctcact

SEQ ID NO: 1397443 - DNA, 15 bp, Homo sapiens
tcttcccactctcac

SEQ ID NO: 1397444 - DNA, 15 bp, Homo sapiens
ttcttcccactctca

SEQ ID NO: 1397445 - DNA, 15 bp, Homo sapiens
cttcttcccactctc

SEQ ID NO: 1397446 - DNA, 15 bp, Homo sapiens
gcttcttcccactct

SEQ ID NO: 1397447 - DNA, 15 bp, Homo sapiens
ggcttcttcccactc

SEQ ID NO: 1397448 - DNA, 15 bp, Homo sapiens
tggcttcttcccact

SEQ ID NO: 1397449 - DNA, 15 bp, Homo sapiens
ctggcttcttcccac

SEQ ID NO: 1397450 - DNA, 15 bp, Homo sapiens
cctggcttcttccca

SEQ ID NO: 1397451 - DNA, 15 bp, Homo sapiens
tcctggcttcttccc

SEQ ID NO: 1397452 - DNA, 15 bp, Homo sapiens
ttcctggcttcttcc

SEQ ID NO: 1397453 - DNA, 15 bp, Homo sapiens
tttcctggcttcttc

SEQ ID NO: 1397454 - DNA, 15 bp, Homo sapiens
ctttcctggcttctt

SEQ ID NO: 1397455 - DNA, 15 bp, Homo sapiens
tctttcctggcttct

SEQ ID NO: 1397456 - DNA, 15 bp, Homo sapiens
gtctttcctggcttc

SEQ ID NO: 1397457 - DNA, 15 bp, Homo sapiens
tgtctttcctggctt

SEQ ID NO: 1397458 - DNA, 15 bp, Homo sapiens
ttgtctttcctggct

SEQ ID NO: 1397459 - DNA, 15 bp, Homo sapiens
cttgtctttcctggc

SEQ ID NO: 1397460 - DNA, 15 bp, Homo sapiens
ccttgtctttcctgg

SEQ ID NO: 1397461 - DNA, 15 bp, Homo sapiens
gccttgtctttcctg

SEQ ID NO: 1397462 - DNA, 15 bp, Homo sapiens
ggccttgtctttcct

SEQ ID NO: 1397463 - DNA, 15 bp, Homo sapiens
cggccttgtctttcc

SEQ ID NO: 1397464 - DNA, 15 bp, Homo sapiens
acggccttgtctttc

SEQ ID NO: 1397465 - DNA, 15 bp, Homo sapiens
cacggccttgtcttt

SEQ ID NO: 1397466 - DNA, 15 bp, Homo sapiens
tcacggccttgtctt

SEQ ID NO: 1397467 - DNA, 15 bp, Homo sapiens
ttcacggccttgtct

SEQ ID NO: 1397468 - DNA, 15 bp, Homo sapiens
tttcacggccttgtc

SEQ ID NO: 1397469 - DNA, 15 bp, Homo sapiens
atttcacggccttgt

SEQ ID NO: 1397470 - DNA, 15 bp, Homo sapiens
catttcacggccttg

SEQ ID NO: 1397471 - DNA, 15 bp, Homo sapiens
tcatttcacggcctt

SEQ ID NO: 1397472 - DNA, 15 bp, Homo sapiens
atcatttcacggcct

SEQ ID NO: 1397473 - DNA, 15 bp, Homo sapiens
catcatttcacggcc

SEQ ID NO: 1397474 - DNA, 15 bp, Homo sapiens
tcatcatttcacggc

SEQ ID NO: 1397475 - DNA, 15 bp, Homo sapiens
atcatcatttcacgg

SEQ ID NO: 1397476 - DNA, 15 bp, Homo sapiens
tatcatcatttcacg

SEQ ID NO: 1397477 - DNA, 15 bp, Homo sapiens
ttatcatcatttcac

SEQ ID NO: 1397478 - DNA, 15 bp, Homo sapiens
tttatcatcatttca

SEQ ID NO: 1397479 - DNA, 15 bp, Homo sapiens
gtttatcatcatttc

SEQ ID NO: 1397480 - DNA, 15 bp, Homo sapiens
tgtttatcatcattt

SEQ ID NO: 1397481 - DNA, 15 bp, Homo sapiens
ttgtttatcatcatt

SEQ ID NO: 1397482 - DNA, 15 bp, Homo sapiens
tttgtttatcatcat

SEQ ID NO: 1397483 - DNA, 15 bp, Homo sapiens
ctttgtttatcatca

SEQ ID NO: 1397484 - DNA, 15 bp, Homo sapiens
cctttgtttatcatc

SEQ ID NO: 1397485 - DNA, 15 bp, Homo sapiens
gcctttgtttatcat

SEQ ID NO: 1397486 - DNA, 15 bp, Homo sapiens
ggcctttgtttatca

SEQ ID NO: 1397487 - DNA, 15 bp, Homo sapiens
aggcctttgtttatc

SEQ ID NO: 1397488 - DNA, 15 bp, Homo sapiens
caggcctttgtttat

SEQ ID NO: 1397489 - DNA, 15 bp, Homo sapiens
acaggcctttgttta

SEQ ID NO: 1397490 - DNA, 15 bp, Homo sapiens
tacaggcctttgttt

SEQ ID NO: 1397491 - DNA, 15 bp, Homo sapiens
atacaggcctttgtt

SEQ ID NO: 1397492 - DNA, 15 bp, Homo sapiens
aatacaggcctttgt

SEQ ID NO: 1397493 - DNA, 15 bp, Homo sapiens
aaatacaggcctttg

SEQ ID NO: 1397494 - DNA, 15 bp, Homo sapiens
taaatacaggccttt

SEQ ID NO: 1397495 - DNA, 15 bp, Homo sapiens
ctaaatacaggcctt

SEQ ID NO: 1397496 - DNA, 15 bp, Homo sapiens
gctaaatacaggcct

SEQ ID NO: 1397497 - DNA, 15 bp, Homo sapiens
agctaaatacaggcc

SEQ ID NO: 1397498 - DNA, 15 bp, Homo sapiens
gagctaaatacaggc

SEQ ID NO: 1397499 - DNA, 15 bp, Homo sapiens
agagctaaatacagg

SEQ ID NO: 1397500 - DNA, 15 bp, Homo sapiens
cagagctaaatacag

SEQ ID NO: 1397501 - DNA, 15 bp, Homo sapiens
tcagagctaaataca

SEQ ID NO: 1397502 - DNA, 15 bp, Homo sapiens
gtcagagctaaatac

SEQ ID NO: 1397503 - DNA, 15 bp, Homo sapiens
agtcagagctaaata

SEQ ID NO: 1397504 - DNA, 15 bp, Homo sapiens
gagtcagagctaaat

SEQ ID NO: 1397505 - DNA, 15 bp, Homo sapiens
agagtcagagctaaa

SEQ ID NO: 1397506 - DNA, 15 bp, Homo sapiens
gagagtcagagctaa

SEQ ID NO: 1397507 - DNA, 15 bp, Homo sapiens
ggagagtcagagcta

SEQ ID NO: 1397508 - DNA, 15 bp, Homo sapiens
aggagagtcagagct

SEQ ID NO: 1397509 - DNA, 15 bp, Homo sapiens
taggagagtcagagc

SEQ ID NO: 1397510 - DNA, 15 bp, Homo sapiens
gtaggagagtcagag

SEQ ID NO: 1397511 - DNA, 15 bp, Homo sapiens
agtaggagagtcaga

SEQ ID NO: 1397512 - DNA, 15 bp, Homo sapiens
tagtaggagagtcag

SEQ ID NO: 1397513 - DNA, 15 bp, Homo sapiens
gtagtaggagagtca

SEQ ID NO: 1397514 - DNA, 15 bp, Homo sapiens
tgtagtaggagagtc

SEQ ID NO: 1397515 - DNA, 15 bp, Homo sapiens
ttgtagtaggagagt

SEQ ID NO: 1397516 - DNA, 15 bp, Homo sapiens
attgtagtaggagag

SEQ ID NO: 1397517 - DNA, 15 bp, Homo sapiens
cattgtagtaggaga

SEQ ID NO: 1397518 - DNA, 15 bp, Homo sapiens
ccattgtagtaggag

SEQ ID NO: 1397519 - DNA, 15 bp, Homo sapiens
cccattgtagtagga

SEQ ID NO: 1397520 - DNA, 15 bp, Homo sapiens
gcccattgtagtagg

SEQ ID NO: 1397521 - DNA, 15 bp, Homo sapiens
agcccattgtagtag

SEQ ID NO: 1397522 - DNA, 15 bp, Homo sapiens
gagcccattgtagta

SEQ ID NO: 1397523 - DNA, 15 bp, Homo sapiens
tgagcccattgtagt

SEQ ID NO: 1397524 - DNA, 15 bp, Homo sapiens
gtgagcccattgtag

SEQ ID NO: 1397525 - DNA, 15 bp, Homo sapiens
agtgagcccattgta

SEQ ID NO: 1397526 - DNA, 15 bp, Homo sapiens
aagtgagcccattgt

SEQ ID NO: 1397527 - DNA, 15 bp, Homo sapiens
gaagtgagcccattg

SEQ ID NO: 1397528 - DNA, 15 bp, Homo sapiens
agaagtgagcccatt

SEQ ID NO: 1397529 - DNA, 15 bp, Homo sapiens
gagaagtgagcccat

SEQ ID NO: 1397530 - DNA, 15 bp, Homo sapiens
tgagaagtgagccca

SEQ ID NO: 1397531 - DNA, 15 bp, Homo sapiens
ttgagaagtgagccc

SEQ ID NO: 1397532 - DNA, 15 bp, Homo sapiens
cttgagaagtgagcc

SEQ ID NO: 1397533 - DNA, 15 bp, Homo sapiens
ccttgagaagtgagc

SEQ ID NO: 1397534 - DNA, 15 bp, Homo sapiens
tccttgagaagtgag

SEQ ID NO: 1397535 - DNA, 15 bp, Homo sapiens
ttccttgagaagtga

SEQ ID NO: 1397536 - DNA, 15 bp, Homo sapiens
tttccttgagaagtg

SEQ ID NO: 1397537 - DNA, 15 bp, Homo sapiens
ctttccttgagaagt

SEQ ID NO: 1397538 - DNA, 15 bp, Homo sapiens
tctttccttgagaag

SEQ ID NO: 1397539 - DNA, 15 bp, Homo sapiens
ctctttccttgagaa

SEQ ID NO: 1397540 - DNA, 15 bp, Homo sapiens
actctttccttgaga

SEQ ID NO: 1397541 - DNA, 15 bp, Homo sapiens
tactctttccttgag

SEQ ID NO: 1397542 - DNA, 15 bp, Homo sapiens
ttactctttccttga

SEQ ID NO: 1397543 - DNA, 15 bp, Homo sapiens
cttactctttccttg

SEQ ID NO: 1397544 - DNA, 15 bp, Homo sapiens
tcttactctttcctt

SEQ ID NO: 1397545 - DNA, 15 bp, Homo sapiens
atcttactctttcct

SEQ ID NO: 1397546 - DNA, 15 bp, Homo sapiens
aatcttactctttcc

SEQ ID NO: 1397547 - DNA, 15 bp, Homo sapiens
aaatcttactctttc

SEQ ID NO: 1397548 - DNA, 15 bp, Homo sapiens
taaatcttactcttt

SEQ ID NO: 1397549 - DNA, 15 bp, Homo sapiens
ataaatcttactctt

SEQ ID NO: 1397550 - DNA, 15 bp, Homo sapiens
tataaatcttactct

SEQ ID NO: 1397551 - DNA, 15 bp, Homo sapiens
gtataaatcttactc

SEQ ID NO: 1397552 - DNA, 15 bp, Homo sapiens
tgtataaatcttact

SEQ ID NO: 1397553 - DNA, 15 bp, Homo sapiens
ttgtataaatcttac

SEQ ID NO: 1397554 - DNA, 15 bp, Homo sapiens
tttgtataaatctta

SEQ ID NO: 1397555 - DNA, 15 bp, Homo sapiens
gtttgtataaatctt

SEQ ID NO: 1397556 - DNA, 15 bp, Homo sapiens
ggtttgtataaatct

SEQ ID NO: 1397557 - DNA, 15 bp, Homo sapiens
tggtttgtataaatc

SEQ ID NO: 1397558 - DNA, 15 bp, Homo sapiens
gtggtttgtataaat

SEQ ID NO: 1397559 - DNA, 15 bp, Homo sapiens
ggtggtttgtataaa

SEQ ID NO: 1397560 - DNA, 15 bp, Homo sapiens
aggtggtttgtataa

SEQ ID NO: 1397561 - DNA, 15 bp, Homo sapiens
gaggtggtttgtata

SEQ ID NO: 1397562 - DNA, 15 bp, Homo sapiens
tgaggtggtttgtat

SEQ ID NO: 1397563 - DNA, 15 bp, Homo sapiens
ttgaggtggtttgta

SEQ ID NO: 1397564 - DNA, 15 bp, Homo sapiens
tttgaggtggtttgt

SEQ ID NO: 1397565 - DNA, 15 bp, Homo sapiens
ttttgaggtggtttg

SEQ ID NO: 1397566 - DNA, 15 bp, Homo sapiens
tttttgaggtggttt

SEQ ID NO: 1397567 - DNA, 15 bp, Homo sapiens
ctttttgaggtggtt

SEQ ID NO: 1397568 - DNA, 15 bp, Homo sapiens
tctttttgaggtggt

SEQ ID NO: 1397569 - DNA, 15 bp, Homo sapiens
ctctttttgaggtgg

SEQ ID NO: 1397570 - DNA, 15 bp, Homo sapiens
tctctttttgaggtg

SEQ ID NO: 1397571 - DNA, 15 bp, Homo sapiens
ttctctttttgaggt

SEQ ID NO: 1397572 - DNA, 15 bp, Homo sapiens
gttctctttttgagg

SEQ ID NO: 1397573 - DNA, 15 bp, Homo sapiens
agttctctttttgag

SEQ ID NO: 1397574 - DNA, 15 bp, Homo sapiens
aagttctctttttga

SEQ ID NO: 1397575 - DNA, 15 bp, Homo sapiens
aaagttctctttttg

SEQ ID NO: 1397576 - DNA, 15 bp, Homo sapiens
taaagttctcttttt

SEQ ID NO: 1397577 - DNA, 15 bp, Homo sapiens
ttaaagttctctttt

SEQ ID NO: 1397578 - DNA, 15 bp, Homo sapiens
tttaaagttctcttt

SEQ ID NO: 1397579 - DNA, 15 bp, Homo sapiens
ttttaaagttctctt

SEQ ID NO: 1397580 - DNA, 15 bp, Homo sapiens
attttaaagttctct

SEQ ID NO: 1397581 - DNA, 15 bp, Homo sapiens
tattttaaagttctc

SEQ ID NO: 1397582 - DNA, 15 bp, Homo sapiens
ttattttaaagttct

SEQ ID NO: 1397583 - DNA, 15 bp, Homo sapiens
attattttaaagttc

SEQ ID NO: 1397584 - DNA, 15 bp, Homo sapiens
tattattttaaagtt

SEQ ID NO: 1397585 - DNA, 15 bp, Homo sapiens
ttattattttaaagt

SEQ ID NO: 1397586 - DNA, 15 bp, Homo sapiens
attattattttaaag

SEQ ID NO: 1397587 - DNA, 15 bp, Homo sapiens
cttattattatttta

SEQ ID NO: 1397588 - DNA, 15 bp, Homo sapiens
tcttattattatttt

SEQ ID NO: 1397589 - DNA, 15 bp, Homo sapiens
ttcttattattattt

SEQ ID NO: 1397590 - DNA, 15 bp, Homo sapiens
cttcttattattatt

SEQ ID NO: 1397591 - DNA, 15 bp, Homo sapiens
tcttcttattattat

SEQ ID NO: 1397592 - DNA, 15 bp, Homo sapiens
ttcttcttattatta

SEQ ID NO: 1397593 - DNA, 15 bp, Homo sapiens
cttcttcttattatt

SEQ ID NO: 1397594 - DNA, 15 bp, Homo sapiens
gcttcttcttattat

SEQ ID NO: 1397595 - DNA, 15 bp, Homo sapiens
agcttcttcttatta

SEQ ID NO: 1397596 - DNA, 15 bp, Homo sapiens
tagcttcttcttatt

SEQ ID NO: 1397597 - DNA, 15 bp, Homo sapiens
ttagcttcttcttat

SEQ ID NO: 1397598 - DNA, 15 bp, Homo sapiens
attagcttcttctta

SEQ ID NO: 1397599 - DNA, 15 bp, Homo sapiens
gattagcttcttctt

SEQ ID NO: 1397600 - DNA, 15 bp, Homo sapiens
tgattagcttcttct

SEQ ID NO: 1397601 - DNA, 15 bp, Homo sapiens
ctgattagcttcttc

SEQ ID NO: 1397602 - DNA, 15 bp, Homo sapiens
actgattagcttctt

SEQ ID NO: 1397603 - DNA, 15 bp, Homo sapiens
aactgattagcttct

SEQ ID NO: 1397604 - DNA, 15 bp, Homo sapiens
taactgattagcttc

SEQ ID NO: 1397605 - DNA, 15 bp, Homo sapiens
ttaactgattagctt

SEQ ID NO: 1397606 - DNA, 15 bp, Homo sapiens
attaactgattagct

SEQ ID NO: 1397607 - DNA, 15 bp, Homo sapiens
aattaactgattagc

SEQ ID NO: 1397608 - DNA, 15 bp, Homo sapiens
aaattaactgattag

SEQ ID NO: 1397609 - DNA, 15 bp, Homo sapiens
aaaattaactgatta

SEQ ID NO: 1397610 - DNA, 15 bp, Homo sapiens
caaaattaactgatt

SEQ ID NO: 1397611 - DNA, 15 bp, Homo sapiens
gcaaaattaactgat

SEQ ID NO: 1397612 - DNA, 15 bp, Homo sapiens
tgcaaaattaactga

SEQ ID NO: 1397613 - DNA, 15 bp, Homo sapiens
gtgcaaaattaactg

SEQ ID NO: 1397614 - DNA, 15 bp, Homo sapiens
tgtgcaaaattaact

SEQ ID NO: 1397615 - DNA, 15 bp, Homo sapiens
ttgtgcaaaattaac

SEQ ID NO: 1397616 - DNA, 15 bp, Homo sapiens
gttgtgcaaaattaa

SEQ ID NO: 1397617 - DNA, 15 bp, Homo sapiens
ggttgtgcaaaatta

SEQ ID NO: 1397618 - DNA, 15 bp, Homo sapiens
tggttgtgcaaaatt

SEQ ID NO: 1397619 - DNA, 15 bp, Homo sapiens
ttggttgtgcaaaat

SEQ ID NO: 1397620 - DNA, 15 bp, Homo sapiens
attggttgtgcaaaa

SEQ ID NO: 1397621 - DNA, 15 bp, Homo sapiens
tattggttgtgcaaa

SEQ ID NO: 1397622 - DNA, 15 bp, Homo sapiens
gtattggttgtgcaa

SEQ ID NO: 1397623 - DNA, 15 bp, Homo sapiens
agtattggttgtgca

SEQ ID NO: 1397624 - DNA, 15 bp, Homo sapiens
aagtattggttgtgc

SEQ ID NO: 1397625 - DNA, 15 bp, Homo sapiens
taagtattggttgtg

SEQ ID NO: 1397626 - DNA, 15 bp, Homo sapiens
ctaagtattggttgt

SEQ ID NO: 1397627 - DNA, 15 bp, Homo sapiens
tctaagtattggttg

SEQ ID NO: 1397628 - DNA, 15 bp, Homo sapiens
atctaagtattggtt

SEQ ID NO: 1397629 - DNA, 15 bp, Homo sapiens
aatctaagtattggt

SEQ ID NO: 1397630 - DNA, 15 bp, Homo sapiens
taatctaagtattgg

SEQ ID NO: 1397631 - DNA, 15 bp, Homo sapiens
ttaatctaagtattg

SEQ ID NO: 1397632 - DNA, 15 bp, Homo sapiens
attaatctaagtatt

SEQ ID NO: 1397633 - DNA, 15 bp, Homo sapiens
tattaatctaagtat

SEQ ID NO: 1397634 - DNA, 15 bp, Homo sapiens
ttattaatctaagta

SEQ ID NO: 1397635 - DNA, 15 bp, Homo sapiens
tttattaatctaagt

SEQ ID NO: 1397636 - DNA, 15 bp, Homo sapiens
atttattaatctaag

SEQ ID NO: 1397637 - DNA, 15 bp, Homo sapiens
tatttattaatctaa

SEQ ID NO: 1397638 - DNA, 15 bp, Homo sapiens
gtatttattaatcta

SEQ ID NO: 1397639 - DNA, 15 bp, Homo sapiens
cgagtatttattaat

SEQ ID NO: 1397640 - DNA, 15 bp, Homo sapiens
ccgagtatttattaa

SEQ ID NO: 1397641 - DNA, 15 bp, Homo sapiens
gccgagtatttatta

SEQ ID NO: 1397642 - DNA, 15 bp, Homo sapiens
ggccgagtatttatt

SEQ ID NO: 1397643 - DNA, 15 bp, Homo sapiens
gggccgagtatttat

SEQ ID NO: 1397644 - DNA, 15 bp, Homo sapiens
agggccgagtattta

SEQ ID NO: 1397645 - DNA, 15 bp, Homo sapiens
tagggccgagtattt

SEQ ID NO: 1397646 - DNA, 15 bp, Homo sapiens
gtagggccgagtatt

SEQ ID NO: 1397647 - DNA, 15 bp, Homo sapiens
tgtagggccgagtat

SEQ ID NO: 1397648 - DNA, 15 bp, Homo sapiens
ttgtagggccgagta

SEQ ID NO: 1397649 - DNA, 15 bp, Homo sapiens
gttgtagggccgagt

SEQ ID NO: 1397650 - DNA, 15 bp, Homo sapiens
ggttgtagggccgag

SEQ ID NO: 1397651 - DNA, 15 bp, Homo sapiens
aggttgtagggccga

SEQ ID NO: 1397652 - DNA, 15 bp, Homo sapiens
gaggttgtagggccg

SEQ ID NO: 1397653 - DNA, 15 bp, Homo sapiens
tgaggttgtagggcc

SEQ ID NO: 1397654 - DNA, 15 bp, Homo sapiens
atgaggttgtagggc

SEQ ID NO: 1397655 - DNA, 15 bp, Homo sapiens
catgaggttgtaggg

SEQ ID NO: 1397656 - DNA, 15 bp, Homo sapiens
ccatgaggttgtagg

SEQ ID NO: 1397657 - DNA, 15 bp, Homo sapiens
tccatgaggttgtag

SEQ ID NO: 1397658 - DNA, 15 bp, Homo sapiens
ttccatgaggttgta

SEQ ID NO: 1397659 - DNA, 15 bp, Homo sapiens
tttccatgaggttgt

SEQ ID NO: 1397660 - DNA, 15 bp, Homo sapiens
atttccatgaggttg

SEQ ID NO: 1397661 - DNA, 15 bp, Homo sapiens
tatttccatgaggtt

SEQ ID NO: 1397662 - DNA, 15 bp, Homo sapiens
atatttccatgaggt

SEQ ID NO: 1397663 - DNA, 15 bp, Homo sapiens
tatatttccatgagg

SEQ ID NO: 1397664 - DNA, 15 bp, Homo sapiens
atatatttccatgag

SEQ ID NO: 1397665 - DNA, 15 bp, Homo sapiens
aatatatttccatga

SEQ ID NO: 1397666 - DNA, 15 bp, Homo sapiens
taatatatttccatg

SEQ ID NO: 1397667 - DNA, 15 bp, Homo sapiens
ttaatatatttccat

SEQ ID NO: 1397668 - DNA, 15 bp, Homo sapiens
cttaatatatttcca

SEQ ID NO: 1397669 - DNA, 15 bp, Homo sapiens
acttaatatatttcc

SEQ ID NO: 1397670 - DNA, 15 bp, Homo sapiens
tacttaatatatttc

SEQ ID NO: 1397671 - DNA, 15 bp, Homo sapiens
gtacttaatatattt

SEQ ID NO: 1397672 - DNA, 15 bp, Homo sapiens
tgtacttaatatatt

SEQ ID NO: 1397673 - DNA, 15 bp, Homo sapiens
atgtacttaatatat

SEQ ID NO: 1397674 - DNA, 15 bp, Homo sapiens
tatgtacttaatata

SEQ ID NO: 1397675 - DNA, 15 bp, Homo sapiens
gtatgtacttaatat

SEQ ID NO: 1397676 - DNA, 15 bp, Homo sapiens
tgtatgtacttaata

SEQ ID NO: 1397677 - DNA, 15 bp, Homo sapiens
gtgtatgtacttaat

SEQ ID NO: 1397678 - DNA, 15 bp, Homo sapiens
tgtgtatgtacttaa

SEQ ID NO: 1397679 - DNA, 15 bp, Homo sapiens
gtgtgtatgtactta

SEQ ID NO: 1397680 - DNA, 15 bp, Homo sapiens
agtgtgtatgtactt

SEQ ID NO: 1397681 - DNA, 15 bp, Homo sapiens
gagtgtgtatgtact

SEQ ID NO: 1397682 - DNA, 15 bp, Homo sapiens
ggagtgtgtatgtac

SEQ ID NO: 1397683 - DNA, 15 bp, Homo sapiens
atggagtgtgtatgt

SEQ ID NO: 1397684 - DNA, 15 bp, Homo sapiens
gatggagtgtgtatg

SEQ ID NO: 1397685 - DNA, 15 bp, Homo sapiens
tgatggagtgtgtat

SEQ ID NO: 1397686 - DNA, 15 bp, Homo sapiens
gtgatggagtgtgta

SEQ ID NO: 1397687 - DNA, 15 bp, Homo sapiens
ggtgatggagtgtgt

SEQ ID NO: 1397688 - DNA, 15 bp, Homo sapiens
aggtgatggagtgtg

SEQ ID NO: 1397689 - DNA, 15 bp, Homo sapiens
gaggtgatggagtgt

SEQ ID NO: 1397690 - DNA, 15 bp, Homo sapiens
agaggtgatggagtg

SEQ ID NO: 1397691 - DNA, 15 bp, Homo sapiens
tagaggtgatggagt

SEQ ID NO: 1397692 - DNA, 15 bp, Homo sapiens
atagaggtgatggag

SEQ ID NO: 1397693 - DNA, 15 bp, Homo sapiens
tatagaggtgatgga

SEQ ID NO: 1397694 - DNA, 15 bp, Homo sapiens
ttatagaggtgatgg

SEQ ID NO: 1397695 - DNA, 15 bp, Homo sapiens
cttatagaggtgatg

SEQ ID NO: 1397696 - DNA, 15 bp, Homo sapiens
ccttatagaggtgat

SEQ ID NO: 1397697 - DNA, 15 bp, Homo sapiens
tccttatagaggtga

SEQ ID NO: 1397698 - DNA, 15 bp, Homo sapiens
ttccttatagaggtg

SEQ ID NO: 1397699 - DNA, 15 bp, Homo sapiens
attccttatagaggt

SEQ ID NO: 1397700 - DNA, 15 bp, Homo sapiens
gattccttatagagg

SEQ ID NO: 1397701 - DNA, 15 bp, Homo sapiens
tgattccttatagag

SEQ ID NO: 1397702 - DNA, 15 bp, Homo sapiens
ttgattccttataga

SEQ ID NO: 1397703 - DNA, 15 bp, Homo sapiens
tttgattccttatag

SEQ ID NO: 1397704 - DNA, 15 bp, Homo sapiens
ttttgattccttata

SEQ ID NO: 1397705 - DNA, 15 bp, Homo sapiens
attttgattccttat

SEQ ID NO: 1397706 - DNA, 15 bp, Homo sapiens
cattttgattcctta

SEQ ID NO: 1397707 - DNA, 15 bp, Homo sapiens
acattttgattcctt

SEQ ID NO: 1397708 - DNA, 15 bp, Homo sapiens
aacattttgattcct

SEQ ID NO: 1397709 - DNA, 15 bp, Homo sapiens
aaacattttgattcc

SEQ ID NO: 1397710 - DNA, 15 bp, Homo sapiens
taaacattttgattc

SEQ ID NO: 1397711 - DNA, 15 bp, Homo sapiens
ctaaacattttgatt

SEQ ID NO: 1397712 - DNA, 15 bp, Homo sapiens
gctaaacattttgat

SEQ ID NO: 1397713 - DNA, 15 bp, Homo sapiens
tgctaaacattttga

SEQ ID NO: 1397714 - DNA, 15 bp, Homo sapiens
ttgctaaacattttg

SEQ ID NO: 1397715 - DNA, 15 bp, Homo sapiens
gttgctaaacatttt

SEQ ID NO: 1397716 - DNA, 15 bp, Homo sapiens
ggttgctaaacattt

SEQ ID NO: 1397717 - DNA, 15 bp, Homo sapiens
tggttgctaaacatt

SEQ ID NO: 1397718 - DNA, 15 bp, Homo sapiens
ctggttgctaaacat

SEQ ID NO: 1397719 - DNA, 15 bp, Homo sapiens
gctggttgctaaaca

SEQ ID NO: 1397720 - DNA, 15 bp, Homo sapiens
ggctggttgctaaac

SEQ ID NO: 1397721 - DNA, 15 bp, Homo sapiens
gggctggttgctaaa

SEQ ID NO: 1397722 - DNA, 15 bp, Homo sapiens
tgggctggttgctaa

SEQ ID NO: 1397723 - DNA, 15 bp, Homo sapiens
ctgggctggttgcta

SEQ ID NO: 1397724 - DNA, 15 bp, Homo sapiens
tctgggctggttgct

SEQ ID NO: 1397725 - DNA, 15 bp, Homo sapiens
ttctgggctggttgc

SEQ ID NO: 1397726 - DNA, 15 bp, Homo sapiens
cttctgggctggttg

SEQ ID NO: 1397727 - DNA, 15 bp, Homo sapiens
ccttctgggctggtt

SEQ ID NO: 1397728 - DNA, 15 bp, Homo sapiens
cccttctgggctggt

SEQ ID NO: 1397729 - DNA, 15 bp, Homo sapiens
tcccttctgggctgg

SEQ ID NO: 1397730 - DNA, 15 bp, Homo sapiens
atcccttctgggctg

SEQ ID NO: 1397731 - DNA, 15 bp, Homo sapiens
gatcccttctgggct

SEQ ID NO: 1397732 - DNA, 15 bp, Homo sapiens
tgatcccttctgggc

SEQ ID NO: 1397733 - DNA, 15 bp, Homo sapiens
ctgatcccttctggg

SEQ ID NO: 1397734 - DNA, 15 bp, Homo sapiens
gctgatcccttctgg

SEQ ID NO: 1397735 - DNA, 15 bp, Homo sapiens
ggctgatcccttctg

SEQ ID NO: 1397736 - DNA, 15 bp, Homo sapiens
tggctgatcccttct

SEQ ID NO: 1397737 - DNA, 15 bp, Homo sapiens
ttggctgatcccttc

SEQ ID NO: 1397738 - DNA, 15 bp, Homo sapiens
attggctgatccctt

SEQ ID NO: 1397739 - DNA, 15 bp, Homo sapiens
gattggctgatccct

SEQ ID NO: 1397740 - DNA, 15 bp, Homo sapiens
tgattggctgatccc

SEQ ID NO: 1397741 - DNA, 15 bp, Homo sapiens
ctgattggctgatcc

SEQ ID NO: 1397742 - DNA, 15 bp, Homo sapiens
tctgattggctgatc

SEQ ID NO: 1397743 - DNA, 15 bp, Homo sapiens
ttctgattggctgat

SEQ ID NO: 1397744 - DNA, 15 bp, Homo sapiens
gttctgattggctga

SEQ ID NO: 1397745 - DNA, 15 bp, Homo sapiens
tgttctgattggctg

SEQ ID NO: 1397746 - DNA, 15 bp, Homo sapiens
ctgttctgattggct

SEQ ID NO: 1397747 - DNA, 15 bp, Homo sapiens
tctgttctgattggc

SEQ ID NO: 1397748 - DNA, 15 bp, Homo sapiens
atctgttctgattgg

SEQ ID NO: 1397749 - DNA, 15 bp, Homo sapiens
tatctgttctgattg

SEQ ID NO: 1397750 - DNA, 15 bp, Homo sapiens
gtatctgttctgatt

SEQ ID NO: 1397751 - DNA, 15 bp, Homo sapiens
agtatctgttctgat

SEQ ID NO: 1397752 - DNA, 15 bp, Homo sapiens
cagtatctgttctga

SEQ ID NO: 1397753 - DNA, 15 bp, Homo sapiens
ccagtatctgttctg

SEQ ID NO: 1397754 - DNA, 15 bp, Homo sapiens
gccagtatctgttct

SEQ ID NO: 1397755 - DNA, 15 bp, Homo sapiens
ggccagtatctgttc

SEQ ID NO: 1397756 - DNA, 15 bp, Homo sapiens
tggccagtatctgtt

SEQ ID NO: 1397757 - DNA, 15 bp, Homo sapiens
atggccagtatctgt

SEQ ID NO: 1397758 - DNA, 15 bp, Homo sapiens
tatggccagtatctg

SEQ ID NO: 1397759 - DNA, 15 bp, Homo sapiens
ttatggccagtatct

SEQ ID NO: 1397760 - DNA, 15 bp, Homo sapiens
tttatggccagtatc

SEQ ID NO: 1397761 - DNA, 15 bp, Homo sapiens
gtttatggccagtat

SEQ ID NO: 1397762 - DNA, 15 bp, Homo sapiens
tgtttatggccagta

SEQ ID NO: 1397763 - DNA, 15 bp, Homo sapiens
gtgtttatggccagt

SEQ ID NO: 1397764 - DNA, 15 bp, Homo sapiens
ggtgtttatggccag

SEQ ID NO: 1397765 - DNA, 15 bp, Homo sapiens
tggtgtttatggcca

SEQ ID NO: 1397766 - DNA, 15 bp, Homo sapiens
ctggtgtttatggcc

SEQ ID NO: 1397767 - DNA, 15 bp, Homo sapiens
actggtgtttatggc

SEQ ID NO: 1397768 - DNA, 15 bp, Homo sapiens
gactggtgtttatgg

SEQ ID NO: 1397769 - DNA, 15 bp, Homo sapiens
tgactggtgtttatg

SEQ ID NO: 1397770 - DNA, 15 bp, Homo sapiens
ctgactggtgtttat

SEQ ID NO: 1397771 - DNA, 15 bp, Homo sapiens
cctgactggtgttta

SEQ ID NO: 1397772 - DNA, 15 bp, Homo sapiens
gcctgactggtgttt

SEQ ID NO: 1397773 - DNA, 15 bp, Homo sapiens
ggcctgactggtgtt

SEQ ID NO: 1397774 - DNA, 15 bp, Homo sapiens
tggcctgactggtgt

SEQ ID NO: 1397775 - DNA, 15 bp, Homo sapiens
atggcctgactggtg

SEQ ID NO: 1397776 - DNA, 15 bp, Homo sapiens
gatggcctgactggt

SEQ ID NO: 1397777 - DNA, 15 bp, Homo sapiens
ggatggcctgactgg

SEQ ID NO: 1397778 - DNA, 15 bp, Homo sapiens
aggatggcctgactg

SEQ ID NO: 1397779 - DNA, 15 bp, Homo sapiens
caggatggcctgact

SEQ ID NO: 1397780 - DNA, 15 bp, Homo sapiens
ccaggatggcctgac

SEQ ID NO: 1397781 - DNA, 15 bp, Homo sapiens
tccaggatggcctga

SEQ ID NO: 1397782 - DNA, 15 bp, Homo sapiens
ctccaggatggcctg

SEQ ID NO: 1397783 - DNA, 15 bp, Homo sapiens
gctccaggatggcct

SEQ ID NO: 1397784 - DNA, 15 bp, Homo sapiens
tgctccaggatggcc

SEQ ID NO: 1397785 - DNA, 15 bp, Homo sapiens
gtgctccaggatggc

SEQ ID NO: 1397786 - DNA, 15 bp, Homo sapiens
tgtgctccaggatgg

SEQ ID NO: 1397787 - DNA, 15 bp, Homo sapiens
ttgtgctccaggatg

SEQ ID NO: 1397788 - DNA, 15 bp, Homo sapiens
tttgtgctccaggat

SEQ ID NO: 1397789 - DNA, 15 bp, Homo sapiens
ctttgtgctccagga

SEQ ID NO: 1397790 - DNA, 15 bp, Homo sapiens
gctttgtgctccagg

SEQ ID NO: 1397791 - DNA, 15 bp, Homo sapiens
agctttgtgctccag

SEQ ID NO: 1397792 - DNA, 15 bp, Homo sapiens
tagctttgtgctcca

SEQ ID NO: 1397793 - DNA, 15 bp, Homo sapiens
ttagctttgtgctcc

SEQ ID NO: 1397794 - DNA, 15 bp, Homo sapiens
tttagctttgtgctc

SEQ ID NO: 1397795 - DNA, 15 bp, Homo sapiens
atttagctttgtgct

SEQ ID NO: 1397796 - DNA, 15 bp, Homo sapiens
tatttagctttgtgc

SEQ ID NO: 1397797 - DNA, 15 bp, Homo sapiens
atatttagctttgtg

SEQ ID NO: 1397798 - DNA, 15 bp, Homo sapiens
tatatttagctttgt

SEQ ID NO: 1397799 - DNA, 15 bp, Homo sapiens
ttatatttagctttg

SEQ ID NO: 1397800 - DNA, 15 bp, Homo sapiens
cttatatttagcttt

SEQ ID NO: 1397801 - DNA, 15 bp, Homo sapiens
gcttatatttagctt

SEQ ID NO: 1397802 - DNA, 15 bp, Homo sapiens
ggcttatatttagct

SEQ ID NO: 1397803 - DNA, 15 bp, Homo sapiens
gggcttatatttagc

SEQ ID NO: 1397804 - DNA, 15 bp, Homo sapiens
agggcttatatttag

SEQ ID NO: 1397805 - DNA, 15 bp, Homo sapiens
cagggcttatattta

SEQ ID NO: 1397806 - DNA, 15 bp, Homo sapiens
tcagggcttatattt

SEQ ID NO: 1397807 - DNA, 15 bp, Homo sapiens
ttcagggcttatatt

SEQ ID NO: 1397808 - DNA, 15 bp, Homo sapiens
attcagggcttatat

SEQ ID NO: 1397809 - DNA, 15 bp, Homo sapiens
tattcagggcttata

SEQ ID NO: 1397810 - DNA, 15 bp, Homo sapiens
ttattcagggcttat

SEQ ID NO: 1397811 - DNA, 15 bp, Homo sapiens
tttattcagggctta

SEQ ID NO: 1397812 - DNA, 15 bp, Homo sapiens
gtttattcagggctt

SEQ ID NO: 1397813 - DNA, 15 bp, Homo sapiens
tgtttattcagggct

SEQ ID NO: 1397814 - DNA, 15 bp, Homo sapiens
gtgtttattcagggc

SEQ ID NO: 1397815 - DNA, 15 bp, Homo sapiens
tgtgtttattcaggg

SEQ ID NO: 1397816 - DNA, 15 bp, Homo sapiens
gtgtgtttattcagg

SEQ ID NO: 1397817 - DNA, 15 bp, Homo sapiens
tgtgtgtttattcag

SEQ ID NO: 1397818 - DNA, 15 bp, Homo sapiens
ttgtgtgtttattca

SEQ ID NO: 1397819 - DNA, 15 bp, Homo sapiens
gttgtgtgtttattc

SEQ ID NO: 1397820 - DNA, 15 bp, Homo sapiens
agttgtgtgtttatt

SEQ ID NO: 1397821 - DNA, 15 bp, Homo sapiens
cagttgtgtgtttat

SEQ ID NO: 1397822 - DNA, 15 bp, Homo sapiens
gcagttgtgtgttta

SEQ ID NO: 1397823 - DNA, 15 bp, Homo sapiens
cgcagttgtgtgttt

SEQ ID NO: 1397824 - DNA, 15 bp, Homo sapiens
gcgcagttgtgtgtt

SEQ ID NO: 1397825 - DNA, 15 bp, Homo sapiens
tgcgcagttgtgtgt

SEQ ID NO: 1397826 - DNA, 15 bp, Homo sapiens
ttgcgcagttgtgtg

SEQ ID NO: 1397827 - DNA, 15 bp, Homo sapiens
tttgcgcagttgtgt

SEQ ID NO: 1397828 - DNA, 15 bp, Homo sapiens
gtttgcgcagttgtg

SEQ ID NO: 1397829 - DNA, 15 bp, Homo sapiens
tgtttgcgcagttgt

SEQ ID NO: 1397830 - DNA, 15 bp, Homo sapiens
ttgtttgcgcagttg

SEQ ID NO: 1397831 - DNA, 15 bp, Homo sapiens
gttgtttgcgcagtt

SEQ ID NO: 1397832 - DNA, 15 bp, Homo sapiens
tgttgtttgcgcagt

SEQ ID NO: 1397833 - DNA, 15 bp, Homo sapiens
ctgttgtttgcgcag

SEQ ID NO: 1397834 - DNA, 15 bp, Homo sapiens
cctgttgtttgcgca

SEQ ID NO: 1397835 - DNA, 15 bp, Homo sapiens
gcctgttgtttgcgc

SEQ ID NO: 1397836 - DNA, 15 bp, Homo sapiens
tgcctgttgtttgcg

SEQ ID NO: 1397837 - DNA, 15 bp, Homo sapiens
atgcctgttgtttgc

SEQ ID NO: 1397838 - DNA, 15 bp, Homo sapiens
tatgcctgttgtttg

SEQ ID NO: 1397839 - DNA, 15 bp, Homo sapiens
atatgcctgttgttt

SEQ ID NO: 1397840 - DNA, 15 bp, Homo sapiens
gatatgcctgttgtt

SEQ ID NO: 1397841 - DNA, 15 bp, Homo sapiens
agatatgcctgttgt

SEQ ID NO: 1397842 - DNA, 15 bp, Homo sapiens
aagatatgcctgttg

SEQ ID NO: 1397843 - DNA, 15 bp, Homo sapiens
gaagatatgcctgtt

SEQ ID NO: 1397844 - DNA, 15 bp, Homo sapiens
ggaagatatgcctgt

SEQ ID NO: 1397845 - DNA, 15 bp, Homo sapiens
gggaagatatgcctg

SEQ ID NO: 1397846 - DNA, 15 bp, Homo sapiens
agggaagatatgcct

SEQ ID NO: 1397847 - DNA, 15 bp, Homo sapiens
gagggaagatatgcc

SEQ ID NO: 1397848 - DNA, 15 bp, Homo sapiens
ggagggaagatatgc

SEQ ID NO: 1397849 - DNA, 15 bp, Homo sapiens
gggagggaagatatg

SEQ ID NO: 1397850 - DNA, 15 bp, Homo sapiens
ggggagggaagatat

SEQ ID NO: 1397851 - DNA, 15 bp, Homo sapiens
gggggagggaagata

SEQ ID NO: 1397852 - DNA, 15 bp, Homo sapiens
cgggggagggaagat

SEQ ID NO: 1397853 - DNA, 15 bp, Homo sapiens
gcgggggagggaaga

SEQ ID NO: 1397854 - DNA, 15 bp, Homo sapiens
tgcgggggagggaag

SEQ ID NO: 1397855 - DNA, 15 bp, Homo sapiens
ttgcgggggagggaa

SEQ ID NO: 1397856 - DNA, 15 bp, Homo sapiens
tttgcgggggaggga

SEQ ID NO: 1397857 - DNA, 15 bp, Homo sapiens
ctttgcgggggaggg

SEQ ID NO: 1397858 - DNA, 15 bp, Homo sapiens
actttgcgggggagg

SEQ ID NO: 1397859 - DNA, 15 bp, Homo sapiens
aactttgcgggggag

SEQ ID NO: 1397860 - DNA, 15 bp, Homo sapiens
gaactttgcggggga

SEQ ID NO: 1397861 - DNA, 15 bp, Homo sapiens
ggaactttgcggggg

SEQ ID NO: 1397862 - DNA, 15 bp, Homo sapiens
tggaactttgcgggg

SEQ ID NO: 1397863 - DNA, 15 bp, Homo sapiens
gtggaactttgcggg

SEQ ID NO: 1397864 - DNA, 15 bp, Homo sapiens
agtggaactttgcgg

SEQ ID NO: 1397865 - DNA, 15 bp, Homo sapiens
aagtggaactttgcg

SEQ ID NO: 1397866 - DNA, 15 bp, Homo sapiens
aaagtggaactttgc

SEQ ID NO: 1397867 - DNA, 15 bp, Homo sapiens
taaagtggaactttg

SEQ ID NO: 1397868 - DNA, 15 bp, Homo sapiens
ctaaagtggaacttt

SEQ ID NO: 1397869 - DNA, 15 bp, Homo sapiens
tctaaagtggaactt

SEQ ID NO: 1397870 - DNA, 15 bp, Homo sapiens
ctctaaagtggaact

SEQ ID NO: 1397871 - DNA, 15 bp, Homo sapiens
actctaaagtggaac

SEQ ID NO: 1397872 - DNA, 15 bp, Homo sapiens
gactctaaagtggaa

SEQ ID NO: 1397873 - DNA, 15 bp, Homo sapiens
tgactctaaagtgga

SEQ ID NO: 1397874 - DNA, 15 bp, Homo sapiens
ttgactctaaagtgg

SEQ ID NO: 1397875 - DNA, 15 bp, Homo sapiens
gttgactctaaagtg

SEQ ID NO: 1397876 - DNA, 15 bp, Homo sapiens
agttgactctaaagt

SEQ ID NO: 1397877 - DNA, 15 bp, Homo sapiens
gagttgactctaaag

SEQ ID NO: 1397878 - DNA, 15 bp, Homo sapiens
agagttgactctaaa

SEQ ID NO: 1397879 - DNA, 15 bp, Homo sapiens
cagagttgactctaa

SEQ ID NO: 1397880 - DNA, 15 bp, Homo sapiens
ccagagttgactcta

SEQ ID NO: 1397881 - DNA, 15 bp, Homo sapiens
accagagttgactct

SEQ ID NO: 1397882 - DNA, 15 bp, Homo sapiens
aaccagagttgactc

SEQ ID NO: 1397883 - DNA, 15 bp, Homo sapiens
gaaccagagttgact

SEQ ID NO: 1397884 - DNA, 15 bp, Homo sapiens
ggaaccagagttgac

SEQ ID NO: 1397885 - DNA, 15 bp, Homo sapiens
aggaaccagagttga

SEQ ID NO: 1397886 - DNA, 15 bp, Homo sapiens
gaggaaccagagttg

SEQ ID NO: 1397887 - DNA, 15 bp, Homo sapiens
agaggaaccagagtt

SEQ ID NO: 1397888 - DNA, 15 bp, Homo sapiens
gagaggaaccagagt

SEQ ID NO: 1397889 - DNA, 15 bp, Homo sapiens
ggagaggaaccagag

SEQ ID NO: 1397890 - DNA, 15 bp, Homo sapiens
gggagaggaaccaga

SEQ ID NO: 1397891 - DNA, 15 bp, Homo sapiens
tgggagaggaaccag

SEQ ID NO: 1397892 - DNA, 15 bp, Homo sapiens
ttgggagaggaacca

SEQ ID NO: 1397893 - DNA, 15 bp, Homo sapiens
cttgggagaggaacc

SEQ ID NO: 1397894 - DNA, 15 bp, Homo sapiens
gcttgggagaggaac

SEQ ID NO: 1397895 - DNA, 15 bp, Homo sapiens
tgcttgggagaggaa

SEQ ID NO: 1397896 - DNA, 15 bp, Homo sapiens
ttgcttgggagagga

SEQ ID NO: 1397897 - DNA, 15 bp, Homo sapiens
gttgcttgggagagg

SEQ ID NO: 1397898 - DNA, 15 bp, Homo sapiens
tgttgcttgggagag

SEQ ID NO: 1397899 - DNA, 15 bp, Homo sapiens
ttgttgcttgggaga

SEQ ID NO: 1397900 - DNA, 15 bp, Homo sapiens
cttgttgcttgggag

SEQ ID NO: 1397901 - DNA, 15 bp, Homo sapiens
tcttgttgcttggga

SEQ ID NO: 1397902 - DNA, 15 bp, Homo sapiens
ctcttgttgcttggg

SEQ ID NO: 1397903 - DNA, 15 bp, Homo sapiens
gctcttgttgcttgg

SEQ ID NO: 1397904 - DNA, 15 bp, Homo sapiens
cgctcttgttgcttg

SEQ ID NO: 1397905 - DNA, 15 bp, Homo sapiens
tcgctcttgttgctt

SEQ ID NO: 1397906 - DNA, 15 bp, Homo sapiens
atcgctcttgttgct

SEQ ID NO: 1397907 - DNA, 15 bp, Homo sapiens
aatcgctcttgttgc

SEQ ID NO: 1397908 - DNA, 15 bp, Homo sapiens
taatcgctcttgttg

SEQ ID NO: 1397909 - DNA, 15 bp, Homo sapiens
ctaatcgctcttgtt

SEQ ID NO: 1397910 - DNA, 15 bp, Homo sapiens
gctaatcgctcttgt

SEQ ID NO: 1397911 - DNA, 15 bp, Homo sapiens
ggctaatcgctcttg

SEQ ID NO: 1397912 - DNA, 15 bp, Homo sapiens
tggctaatcgctctt

SEQ ID NO: 1397913 - DNA, 15 bp, Homo sapiens
atggctaatcgctct

SEQ ID NO: 1397914 - DNA, 15 bp, Homo sapiens
tatggctaatcgctc

SEQ ID NO: 1397915 - DNA, 15 bp, Homo sapiens
ttatggctaatcgct

SEQ ID NO: 1397916 - DNA, 15 bp, Homo sapiens
tttatggctaatcgc

SEQ ID NO: 1397917 - DNA, 15 bp, Homo sapiens
ttttatggctaatcg

SEQ ID NO: 1397918 - DNA, 15 bp, Homo sapiens
tttttatggctaatc

SEQ ID NO: 1397919 - DNA, 15 bp, Homo sapiens
atttttatggctaat

SEQ ID NO: 1397920 - DNA, 15 bp, Homo sapiens
aatttttatggctaa

SEQ ID NO: 1397921 - DNA, 15 bp, Homo sapiens
aaatttttatggcta

SEQ ID NO: 1397922 - DNA, 15 bp, Homo sapiens
caaatttttatggct

SEQ ID NO: 1397923 - DNA, 15 bp, Homo sapiens
tcaaatttttatggc

SEQ ID NO: 1397924 - DNA, 15 bp, Homo sapiens
ttcaaatttttatgg

SEQ ID NO: 1397925 - DNA, 15 bp, Homo sapiens
attcaaatttttatg

SEQ ID NO: 1397926 - DNA, 15 bp, Homo sapiens
cattcaaatttttat

SEQ ID NO: 1397927 - DNA, 15 bp, Homo sapiens
tcattcaaattttta

SEQ ID NO: 1397928 - DNA, 15 bp, Homo sapiens
ttcattcaaattttt

SEQ ID NO: 1397929 - DNA, 15 bp, Homo sapiens
tttcattcaaatttt

SEQ ID NO: 1397930 - DNA, 15 bp, Homo sapiens
ttttcattcaaattt

SEQ ID NO: 1397931 - DNA, 15 bp, Homo sapiens
tttttcattcaaatt

SEQ ID NO: 1397932 - DNA, 15 bp, Homo sapiens
atttttcattcaaat

SEQ ID NO: 1397933 - DNA, 15 bp, Homo sapiens
gatttttcattcaaa

SEQ ID NO: 1397934 - DNA, 15 bp, Homo sapiens
agatttttcattcaa

SEQ ID NO: 1397935 - DNA, 15 bp, Homo sapiens
cagatttttcattca

SEQ ID NO: 1397936 - DNA, 15 bp, Homo sapiens
tcagatttttcattc

SEQ ID NO: 1397937 - DNA, 15 bp, Homo sapiens
ttcagatttttcatt

SEQ ID NO: 1397938 - DNA, 15 bp, Homo sapiens
cttcagatttttcat

SEQ ID NO: 1397939 - DNA, 15 bp, Homo sapiens
acttcagatttttca

SEQ ID NO: 1397940 - DNA, 15 bp, Homo sapiens
aacttcagatttttc

SEQ ID NO: 1397941 - DNA, 15 bp, Homo sapiens
taacttcagattttt

SEQ ID NO: 1397942 - DNA, 15 bp, Homo sapiens
ataacttcagatttt

SEQ ID NO: 1397943 - DNA, 15 bp, Homo sapiens
aataacttcagattt

SEQ ID NO: 1397944 - DNA, 15 bp, Homo sapiens
gaataacttcagatt

SEQ ID NO: 1397945 - DNA, 15 bp, Homo sapiens
agaataacttcagat

SEQ ID NO: 1397946 - DNA, 15 bp, Homo sapiens
aagaataacttcaga

SEQ ID NO: 1397947 - DNA, 15 bp, Homo sapiens
caagaataacttcag

SEQ ID NO: 1397948 - DNA, 15 bp, Homo sapiens
acaagaataacttca

SEQ ID NO: 1397949 - DNA, 15 bp, Homo sapiens
cacaagaataacttc

SEQ ID NO: 1397950 - DNA, 15 bp, Homo sapiens
gcacaagaataactt

SEQ ID NO: 1397951 - DNA, 15 bp, Homo sapiens
tgcacaagaataact

SEQ ID NO: 1397952 - DNA, 15 bp, Homo sapiens
atgcacaagaataac

SEQ ID NO: 1397953 - DNA, 15 bp, Homo sapiens
tatgcacaagaataa

SEQ ID NO: 1397954 - DNA, 15 bp, Homo sapiens
atatgcacaagaata

SEQ ID NO: 1397955 - DNA, 15 bp, Homo sapiens
aatatgcacaagaat

SEQ ID NO: 1397956 - DNA, 15 bp, Homo sapiens
caatatgcacaagaa

SEQ ID NO: 1397957 - DNA, 15 bp, Homo sapiens
ccaatatgcacaaga

SEQ ID NO: 1397958 - DNA, 15 bp, Homo sapiens
gccaatatgcacaag

SEQ ID NO: 1397959 - DNA, 15 bp, Homo sapiens
agccaatatgcacaa

SEQ ID NO: 1397960 - DNA, 15 bp, Homo sapiens
aagccaatatgcaca

SEQ ID NO: 1397961 - DNA, 15 bp, Homo sapiens
aaagccaatatgcac

SEQ ID NO: 1397962 - DNA, 15 bp, Homo sapiens
aaaagccaatatgca

SEQ ID NO: 1397963 - DNA, 15 bp, Homo sapiens
aaaaagccaatatgc

SEQ ID NO: 1397964 - DNA, 15 bp, Homo sapiens
caaaaagccaatatg

SEQ ID NO: 1397965 - DNA, 15 bp, Homo sapiens
gcaaaaagccaatat

SEQ ID NO: 1397966 - DNA, 15 bp, Homo sapiens
ggcaaaaagccaata

SEQ ID NO: 1397967 - DNA, 15 bp, Homo sapiens
aggcaaaaagccaat

SEQ ID NO: 1397968 - DNA, 15 bp, Homo sapiens
caggcaaaaagccaa

SEQ ID NO: 1397969 - DNA, 15 bp, Homo sapiens
tcaggcaaaaagcca

SEQ ID NO: 1397970 - DNA, 15 bp, Homo sapiens
ttcaggcaaaaagcc

SEQ ID NO: 1397971 - DNA, 15 bp, Homo sapiens
cttcaggcaaaaagc

SEQ ID NO: 1397972 - DNA, 15 bp, Homo sapiens
gcttcaggcaaaaag

SEQ ID NO: 1397973 - DNA, 15 bp, Homo sapiens
agcttcaggcaaaaa

SEQ ID NO: 1397974 - DNA, 15 bp, Homo sapiens
tagcttcaggcaaaa

SEQ ID NO: 1397975 - DNA, 15 bp, Homo sapiens
ttagcttcaggcaaa

SEQ ID NO: 1397976 - DNA, 15 bp, Homo sapiens
tttagcttcaggcaa

SEQ ID NO: 1397977 - DNA, 15 bp, Homo sapiens
ttttagcttcaggca

SEQ ID NO: 1397978 - DNA, 15 bp, Homo sapiens
tttttagcttcaggc

SEQ ID NO: 1397979 - DNA, 15 bp, Homo sapiens
ttttttagcttcagg

SEQ ID NO: 1397980 - DNA, 15 bp, Homo sapiens
tttttttagcttcag

SEQ ID NO: 1397981 - DNA, 15 bp, Homo sapiens
ttttttttagcttca

SEQ ID NO: 1397982 - DNA, 15 bp, Homo sapiens
tttttttttagcttc

SEQ ID NO: 1397983 - DNA, 15 bp, Homo sapiens
atttttttttagctt

SEQ ID NO: 1397984 - DNA, 15 bp, Homo sapiens
catttttttttagct

SEQ ID NO: 1397985 - DNA, 15 bp, Homo sapiens
tcatttttttttagc

SEQ ID NO: 1397986 - DNA, 15 bp, Homo sapiens
gtcatttttttttag

SEQ ID NO: 1397987 - DNA, 15 bp, Homo sapiens
agtcattttttttta

SEQ ID NO: 1397988 - DNA, 15 bp, Homo sapiens
aagtcattttttttt

SEQ ID NO: 1397989 - DNA, 15 bp, Homo sapiens
gaagtcatttttttt

SEQ ID NO: 1397990 - DNA, 15 bp, Homo sapiens
tgaagtcattttttt

SEQ ID NO: 1397991 - DNA, 15 bp, Homo sapiens
ctgaagtcatttttt

SEQ ID NO: 1397992 - DNA, 15 bp, Homo sapiens
actgaagtcattttt

SEQ ID NO: 1397993 - DNA, 15 bp, Homo sapiens
aactgaagtcatttt

SEQ ID NO: 1397994 - DNA, 15 bp, Homo sapiens
aaactgaagtcattt

SEQ ID NO: 1397995 - DNA, 15 bp, Homo sapiens
gaaactgaagtcatt

SEQ ID NO: 1397996 - DNA, 15 bp, Homo sapiens
agaaactgaagtcat

SEQ ID NO: 1397997 - DNA, 15 bp, Homo sapiens
aagaaactgaagtca

SEQ ID NO: 1397998 - DNA, 15 bp, Homo sapiens
aaagaaactgaagtc

SEQ ID NO: 1397999 - DNA, 15 bp, Homo sapiens
aaaagaaactgaagt

SEQ ID NO: 1398000 - DNA, 15 bp, Homo sapiens
aaaaagaaactgaag

SEQ ID NO: 1398001 - DNA, 15 bp, Homo sapiens
gaaaaagaaactgaa

SEQ ID NO: 1398002 - DNA, 15 bp, Homo sapiens
aatggaaaaagaaac

SEQ ID NO: 1398003 - DNA, 15 bp, Homo sapiens
aaatggaaaaagaaa

SEQ ID NO: 1398004 - DNA, 15 bp, Homo sapiens
aaaatggaaaaagaa

SEQ ID NO: 1398005 - DNA, 15 bp, Homo sapiens
gaaaatggaaaaaga

SEQ ID NO: 1398006 - DNA, 15 bp, Homo sapiens
tgaaaatggaaaaag

SEQ ID NO: 1398007 - DNA, 15 bp, Homo sapiens
ctgaaaatggaaaaa

SEQ ID NO: 1398008 - DNA, 15 bp, Homo sapiens
gctgaaaatggaaaa

SEQ ID NO: 1398009 - DNA, 15 bp, Homo sapiens
tgctgaaaatggaaa

SEQ ID NO: 1398010 - DNA, 15 bp, Homo sapiens
atgctgaaaatggaa

SEQ ID NO: 1398011 - DNA, 15 bp, Homo sapiens
aatgctgaaaatgga

SEQ ID NO: 1398012 - DNA, 15 bp, Homo sapiens
aaatgctgaaaatgg

SEQ ID NO: 1398013 - DNA, 15 bp, Homo sapiens
aaaatgctgaaaatg

SEQ ID NO: 1398014 - DNA, 15 bp, Homo sapiens
taaaatgctgaaaat

SEQ ID NO: 1398015 - DNA, 15 bp, Homo sapiens
ataaaatgctgaaaa

SEQ ID NO: 1398016 - DNA, 15 bp, Homo sapiens
aataaaatgctgaaa

SEQ ID NO: 1398017 - DNA, 15 bp, Homo sapiens
aaataaaatgctgaa

SEQ ID NO: 1398018 - DNA, 15 bp, Homo sapiens
caaataaaatgctga

SEQ ID NO: 1398019 - DNA, 15 bp, Homo sapiens
acaaataaaatgctg

SEQ ID NO: 1398020 - DNA, 15 bp, Homo sapiens
gacaaataaaatgct

SEQ ID NO: 1398021 - DNA, 15 bp, Homo sapiens
ggacaaataaaatgc

SEQ ID NO: 1398022 - DNA, 15 bp, Homo sapiens
aggacaaataaaatg

SEQ ID NO: 1398023 - DNA, 15 bp, Homo sapiens
gaggacaaataaaat

SEQ ID NO: 1398024 - DNA, 15 bp, Homo sapiens
ggaggacaaataaaa

SEQ ID NO: 1398025 - DNA, 15 bp, Homo sapiens
aggaggacaaataaa

SEQ ID NO: 1398026 - DNA, 15 bp, Homo sapiens
aaggaggacaaataa

SEQ ID NO: 1398027 - DNA, 15 bp, Homo sapiens
caaggaggacaaata

SEQ ID NO: 1398028 - DNA, 15 bp, Homo sapiens
gcaaggaggacaaat

SEQ ID NO: 1398029 - DNA, 15 bp, Homo sapiens
agcaaggaggacaaa

SEQ ID NO: 1398030 - DNA, 15 bp, Homo sapiens
cagcaaggaggacaa

SEQ ID NO: 1398031 - DNA, 15 bp, Homo sapiens
acagcaaggaggaca

SEQ ID NO: 1398032 - DNA, 15 bp, Homo sapiens
aacagcaaggaggac

SEQ ID NO: 1398033 - DNA, 15 bp, Homo sapiens
aaacagcaaggagga

SEQ ID NO: 1398034 - DNA, 15 bp, Homo sapiens
gaaacagcaaggagg

SEQ ID NO: 1398035 - DNA, 15 bp, Homo sapiens
agaaacagcaaggag

SEQ ID NO: 1398036 - DNA, 15 bp, Homo sapiens
tagaaacagcaagga

SEQ ID NO: 1398037 - DNA, 15 bp, Homo sapiens
ctagaaacagcaagg

SEQ ID NO: 1398038 - DNA, 15 bp, Homo sapiens
cctagaaacagcaag

SEQ ID NO: 1398039 - DNA, 15 bp, Homo sapiens
gcctagaaacagcaa

SEQ ID NO: 1398040 - DNA, 15 bp, Homo sapiens
agcctagaaacagca

SEQ ID NO: 1398041 - DNA, 15 bp, Homo sapiens
gagcctagaaacagc

SEQ ID NO: 1398042 - DNA, 15 bp, Homo sapiens
agagcctagaaacag

SEQ ID NO: 1398043 - DNA, 15 bp, Homo sapiens
tagagcctagaaaca

SEQ ID NO: 1398044 - DNA, 15 bp, Homo sapiens
ttagagcctagaaac

SEQ ID NO: 1398045 - DNA, 15 bp, Homo sapiens
tttagagcctagaaa

SEQ ID NO: 1398046 - DNA, 15 bp, Homo sapiens
ctttagagcctagaa

SEQ ID NO: 1398047 - DNA, 15 bp, Homo sapiens
cctttagagcctaga

SEQ ID NO: 1398048 - DNA, 15 bp, Homo sapiens
gcctttagagcctag

SEQ ID NO: 1398049 - DNA, 15 bp, Homo sapiens
ggcctttagagccta

SEQ ID NO: 1398050 - DNA, 15 bp, Homo sapiens
tggcctttagagcct

SEQ ID NO: 1398051 - DNA, 15 bp, Homo sapiens
ctggcctttagagcc

SEQ ID NO: 1398052 - DNA, 15 bp, Homo sapiens
gctggcctttagagc

SEQ ID NO: 1398053 - DNA, 15 bp, Homo sapiens
cgctggcctttagag

SEQ ID NO: 1398054 - DNA, 15 bp, Homo sapiens
tcgctggcctttaga

SEQ ID NO: 1398055 - DNA, 15 bp, Homo sapiens
atcgctggcctttag

SEQ ID NO: 1398056 - DNA, 15 bp, Homo sapiens
aatcgctggccttta

SEQ ID NO: 1398057 - DNA, 15 bp, Homo sapiens
aaatcgctggccttt

SEQ ID NO: 1398058 - DNA, 15 bp, Homo sapiens
aaaatcgctggcctt

SEQ ID NO: 1398059 - DNA, 15 bp, Homo sapiens
gaaaatcgctggcct

SEQ ID NO: 1398060 - DNA, 15 bp, Homo sapiens
ggaaaatcgctggcc

SEQ ID NO: 1398061 - DNA, 15 bp, Homo sapiens
gggaaaatcgctggc

SEQ ID NO: 1398062 - DNA, 15 bp, Homo sapiens
tgggaaaatcgctgg

SEQ ID NO: 1398063 - DNA, 15 bp, Homo sapiens
atgggaaaatcgctg

SEQ ID NO: 1398064 - DNA, 15 bp, Homo sapiens
aatgggaaaatcgct

SEQ ID NO: 1398065 - DNA, 15 bp, Homo sapiens
aaatgggaaaatcgc

SEQ ID NO: 1398066 - DNA, 15 bp, Homo sapiens
gaaatgggaaaatcg

SEQ ID NO: 1398067 - DNA, 15 bp, Homo sapiens
ggaaatgggaaaatc

SEQ ID NO: 1398068 - DNA, 15 bp, Homo sapiens
tggaaatgggaaaat

SEQ ID NO: 1398069 - DNA, 15 bp, Homo sapiens
gtggaaatgggaaaa

SEQ ID NO: 1398070 - DNA, 15 bp, Homo sapiens
agtggaaatgggaaa

SEQ ID NO: 1398071 - DNA, 15 bp, Homo sapiens
cagtggaaatgggaa

SEQ ID NO: 1398072 - DNA, 15 bp, Homo sapiens
gcagtggaaatggga

SEQ ID NO: 1398073 - DNA, 15 bp, Homo sapiens
ggcagtggaaatggg

SEQ ID NO: 1398074 - DNA, 15 bp, Homo sapiens
gggcagtggaaatgg

SEQ ID NO: 1398075 - DNA, 15 bp, Homo sapiens
agggcagtggaaatg

SEQ ID NO: 1398076 - DNA, 15 bp, Homo sapiens
cagggcagtggaaat

SEQ ID NO: 1398077 - DNA, 15 bp, Homo sapiens
gcagggcagtggaaa

SEQ ID NO: 1398078 - DNA, 15 bp, Homo sapiens
tgcagggcagtggaa

SEQ ID NO: 1398079 - DNA, 15 bp, Homo sapiens
ttgcagggcagtgga

SEQ ID NO: 1398080 - DNA, 15 bp, Homo sapiens
attgcagggcagtgg

SEQ ID NO: 1398081 - DNA, 15 bp, Homo sapiens
gattgcagggcagtg

SEQ ID NO: 1398082 - DNA, 15 bp, Homo sapiens
ggattgcagggcagt

SEQ ID NO: 1398083 - DNA, 15 bp, Homo sapiens
tggattgcagggcag

SEQ ID NO: 1398084 - DNA, 15 bp, Homo sapiens
ttggattgcagggca

SEQ ID NO: 1398085 - DNA, 15 bp, Homo sapiens
tttggattgcagggc

SEQ ID NO: 1398086 - DNA, 15 bp, Homo sapiens
ctttggattgcaggg

SEQ ID NO: 1398087 - DNA, 15 bp, Homo sapiens
gctttggattgcagg

SEQ ID NO: 1398088 - DNA, 15 bp, Homo sapiens
agctttggattgcag

SEQ ID NO: 1398089 - DNA, 15 bp, Homo sapiens
gagctttggattgca

SEQ ID NO: 1398090 - DNA, 15 bp, Homo sapiens
ggagctttggattgc

SEQ ID NO: 1398091 - DNA, 15 bp, Homo sapiens
gggagctttggattg

SEQ ID NO: 1398092 - DNA, 15 bp, Homo sapiens
agggagctttggatt

SEQ ID NO: 1398093 - DNA, 15 bp, Homo sapiens
aagggagctttggat

SEQ ID NO: 1398094 - DNA, 15 bp, Homo sapiens
gaagggagctttgga

SEQ ID NO: 1398095 - DNA, 15 bp, Homo sapiens
agaagggagctttgg

SEQ ID NO: 1398096 - DNA, 15 bp, Homo sapiens
gagaagggagctttg

SEQ ID NO: 1398097 - DNA, 15 bp, Homo sapiens
tgagaagggagcttt

SEQ ID NO: 1398098 - DNA, 15 bp, Homo sapiens
ttgagaagggagctt

SEQ ID NO: 1398099 - DNA, 15 bp, Homo sapiens
tttgagaagggagct

SEQ ID NO: 1398100 - DNA, 15 bp, Homo sapiens
ttttgagaagggagc

SEQ ID NO: 1398101 - DNA, 15 bp, Homo sapiens
attttgagaagggag

SEQ ID NO: 1398102 - DNA, 15 bp, Homo sapiens
tattttgagaaggga

SEQ ID NO: 1398103 - DNA, 15 bp, Homo sapiens
ctattttgagaaggg

SEQ ID NO: 1398104 - DNA, 15 bp, Homo sapiens
tctattttgagaagg

SEQ ID NO: 1398105 - DNA, 15 bp, Homo sapiens
gtctattttgagaag

SEQ ID NO: 1398106 - DNA, 15 bp, Homo sapiens
tgtctattttgagaa

SEQ ID NO: 1398107 - DNA, 15 bp, Homo sapiens
atgtctattttgaga

SEQ ID NO: 1398108 - DNA, 15 bp, Homo sapiens
aatgtctattttgag

SEQ ID NO: 1398109 - DNA, 15 bp, Homo sapiens
caatgtctattttga

SEQ ID NO: 1398110 - DNA, 15 bp, Homo sapiens
tcaatgtctattttg

SEQ ID NO: 1398111 - DNA, 15 bp, Homo sapiens
ttcaatgtctatttt

SEQ ID NO: 1398112 - DNA, 15 bp, Homo sapiens
tttcaatgtctattt

SEQ ID NO: 1398113 - DNA, 15 bp, Homo sapiens
ttttcaatgtctatt

SEQ ID NO: 1398114 - DNA, 15 bp, Homo sapiens
tttttcaatgtctat

SEQ ID NO: 1398115 - DNA, 15 bp, Homo sapiens
atttttcaatgtcta

SEQ ID NO: 1398116 - DNA, 15 bp, Homo sapiens
gatttttcaatgtct

SEQ ID NO: 1398117 - DNA, 15 bp, Homo sapiens
tgatttttcaatgtc

SEQ ID NO: 1398118 - DNA, 15 bp, Homo sapiens
atgatttttcaatgt

SEQ ID NO: 1398119 - DNA, 15 bp, Homo sapiens
catgatttttcaatg

SEQ ID NO: 1398120 - DNA, 15 bp, Homo sapiens
tcatgatttttcaat

SEQ ID NO: 1398121 - DNA, 15 bp, Homo sapiens
ctcatgatttttcaa

SEQ ID NO: 1398122 - DNA, 15 bp, Homo sapiens
gctcatgatttttca

SEQ ID NO: 1398123 - DNA, 15 bp, Homo sapiens
agctcatgatttttc

SEQ ID NO: 1398124 - DNA, 15 bp, Homo sapiens
cagctcatgattttt

SEQ ID NO: 1398125 - DNA, 15 bp, Homo sapiens
acagctcatgatttt

SEQ ID NO: 1398126 - DNA, 15 bp, Homo sapiens
aacagctcatgattt

SEQ ID NO: 1398127 - DNA, 15 bp, Homo sapiens
aaacagctcatgatt

SEQ ID NO: 1398128 - DNA, 15 bp, Homo sapiens
gaaacagctcatgat

SEQ ID NO: 1398129 - DNA, 15 bp, Homo sapiens
agaaacagctcatga

SEQ ID NO: 1398130 - DNA, 15 bp, Homo sapiens
aagaaacagctcatg

SEQ ID NO: 1398131 - DNA, 15 bp, Homo sapiens
caagaaacagctcat

SEQ ID NO: 1398132 - DNA, 15 bp, Homo sapiens
ccaagaaacagctca

SEQ ID NO: 1398133 - DNA, 15 bp, Homo sapiens
accaagaaacagctc

SEQ ID NO: 1398134 - DNA, 15 bp, Homo sapiens
gaccaagaaacagct

SEQ ID NO: 1398135 - DNA, 15 bp, Homo sapiens
tgaccaagaaacagc

SEQ ID NO: 1398136 - DNA, 15 bp, Homo sapiens
gtgaccaagaaacag

SEQ ID NO: 1398137 - DNA, 15 bp, Homo sapiens
tgtgaccaagaaaca

SEQ ID NO: 1398138 - DNA, 15 bp, Homo sapiens
ctgtgaccaagaaac

SEQ ID NO: 1398139 - DNA, 15 bp, Homo sapiens
cctgtgaccaagaaa

SEQ ID NO: 1398140 - DNA, 15 bp, Homo sapiens
gcctgtgaccaagaa

SEQ ID NO: 1398141 - DNA, 15 bp, Homo sapiens
ggcctgtgaccaaga

SEQ ID NO: 1398142 - DNA, 15 bp, Homo sapiens
aggcctgtgaccaag

SEQ ID NO: 1398143 - DNA, 15 bp, Homo sapiens
aaggcctgtgaccaa

SEQ ID NO: 1398144 - DNA, 15 bp, Homo sapiens
caaggcctgtgacca

SEQ ID NO: 1398145 - DNA, 15 bp, Homo sapiens
gcaaggcctgtgacc

SEQ ID NO: 1398146 - DNA, 15 bp, Homo sapiens
tgcaaggcctgtgac

SEQ ID NO: 1398147 - DNA, 15 bp, Homo sapiens
ctgcaaggcctgtga

SEQ ID NO: 1398148 - DNA, 15 bp, Homo sapiens
cctgcaaggcctgtg

SEQ ID NO: 1398149 - DNA, 15 bp, Homo sapiens
tcctgcaaggcctgt

SEQ ID NO: 1398150 - DNA, 15 bp, Homo sapiens
ttcctgcaaggcctg

SEQ ID NO: 1398151 - DNA, 15 bp, Homo sapiens
attcctgcaaggcct

SEQ ID NO: 1398152 - DNA, 15 bp, Homo sapiens
aattcctgcaaggcc

SEQ ID NO: 1398153 - DNA, 15 bp, Homo sapiens
gaattcctgcaaggc

SEQ ID NO: 1398154 - DNA, 15 bp, Homo sapiens
ggaattcctgcaagg

SEQ ID NO: 1398155 - DNA, 15 bp, Homo sapiens
aggaattcctgcaag

SEQ ID NO: 1398156 - DNA, 15 bp, Homo sapiens
caggaattcctgcaa

SEQ ID NO: 1398157 - DNA, 15 bp, Homo sapiens
tcaggaattcctgca

SEQ ID NO: 1398158 - DNA, 15 bp, Homo sapiens
ctcaggaattcctgc

SEQ ID NO: 1398159 - DNA, 15 bp, Homo sapiens
gctcaggaattcctg

SEQ ID NO: 1398160 - DNA, 15 bp, Homo sapiens
tgctcaggaattcct

SEQ ID NO: 1398161 - DNA, 15 bp, Homo sapiens
atgctcaggaattcc

SEQ ID NO: 1398162 - DNA, 15 bp, Homo sapiens
aatgctcaggaattc

SEQ ID NO: 1398163 - DNA, 15 bp, Homo sapiens
caatgctcaggaatt

SEQ ID NO: 1398164 - DNA, 15 bp, Homo sapiens
gcaatgctcaggaat

SEQ ID NO: 1398165 - DNA, 15 bp, Homo sapiens
ggcaatgctcaggaa

SEQ ID NO: 1398166 - DNA, 15 bp, Homo sapiens
aggcaatgctcagga

SEQ ID NO: 1398167 - DNA, 15 bp, Homo sapiens
aaggcaatgctcagg

SEQ ID NO: 1398168 - DNA, 15 bp, Homo sapiens
gaaggcaatgctcag

SEQ ID NO: 1398169 - DNA, 15 bp, Homo sapiens
ggaaggcaatgctca

SEQ ID NO: 1398170 - DNA, 15 bp, Homo sapiens
aggaaggcaatgctc

SEQ ID NO: 1398171 - DNA, 15 bp, Homo sapiens
taggaaggcaatgct

SEQ ID NO: 1398172 - DNA, 15 bp, Homo sapiens
gtaggaaggcaatgc

SEQ ID NO: 1398173 - DNA, 15 bp, Homo sapiens
agtaggaaggcaatg

SEQ ID NO: 1398174 - DNA, 15 bp, Homo sapiens
gagtaggaaggcaat

SEQ ID NO: 1398175 - DNA, 15 bp, Homo sapiens
tgagtaggaaggcaa

SEQ ID NO: 1398176 - DNA, 15 bp, Homo sapiens
ttgagtaggaaggca

SEQ ID NO: 1398177 - DNA, 15 bp, Homo sapiens
cttgagtaggaaggc

SEQ ID NO: 1398178 - DNA, 15 bp, Homo sapiens
gcttgagtaggaagg

SEQ ID NO: 1398179 - DNA, 15 bp, Homo sapiens
agcttgagtaggaag

SEQ ID NO: 1398180 - DNA, 15 bp, Homo sapiens
aagcttgagtaggaa

SEQ ID NO: 1398181 - DNA, 15 bp, Homo sapiens
gaagcttgagtagga

SEQ ID NO: 1398182 - DNA, 15 bp, Homo sapiens
agaagcttgagtagg

SEQ ID NO: 1398183 - DNA, 15 bp, Homo sapiens
gagaagcttgagtag

SEQ ID NO: 1398184 - DNA, 15 bp, Homo sapiens
tgagaagcttgagta

SEQ ID NO: 1398185 - DNA, 15 bp, Homo sapiens
atgagaagcttgagt

SEQ ID NO: 1398186 - DNA, 15 bp, Homo sapiens
gatgagaagcttgag

SEQ ID NO: 1398187 - DNA, 15 bp, Homo sapiens
tgatgagaagcttga

SEQ ID NO: 1398188 - DNA, 15 bp, Homo sapiens
atgatgagaagcttg

SEQ ID NO: 1398189 - DNA, 15 bp, Homo sapiens
gatgatgagaagctt

SEQ ID NO: 1398190 - DNA, 15 bp, Homo sapiens
agatgatgagaagct

SEQ ID NO: 1398191 - DNA, 15 bp, Homo sapiens
gagatgatgagaagc

SEQ ID NO: 1398192 - DNA, 15 bp, Homo sapiens
ggagatgatgagaag

SEQ ID NO: 1398193 - DNA, 15 bp, Homo sapiens
gggagatgatgagaa

SEQ ID NO: 1398194 - DNA, 15 bp, Homo sapiens
ggggagatgatgaga

SEQ ID NO: 1398195 - DNA, 15 bp, Homo sapiens
tggggagatgatgag

SEQ ID NO: 1398196 - DNA, 15 bp, Homo sapiens
ttggggagatgatga

SEQ ID NO: 1398197 - DNA, 15 bp, Homo sapiens
cttggggagatgatg

SEQ ID NO: 1398198 - DNA, 15 bp, Homo sapiens
gcttggggagatgat

SEQ ID NO: 1398199 - DNA, 15 bp, Homo sapiens
tgcttggggagatga

SEQ ID NO: 1398200 - DNA, 15 bp, Homo sapiens
gtgcttggggagatg

SEQ ID NO: 1398201 - DNA, 15 bp, Homo sapiens
ggtgcttggggagat

SEQ ID NO: 1398202 - DNA, 15 bp, Homo sapiens
gggtgcttggggaga

SEQ ID NO: 1398203 - DNA, 15 bp, Homo sapiens
tgggtgcttggggag

SEQ ID NO: 1398204 - DNA, 15 bp, Homo sapiens
ctgggtgcttgggga

SEQ ID NO: 1398205 - DNA, 15 bp, Homo sapiens
gctgggtgcttgggg

SEQ ID NO: 1398206 - DNA, 15 bp, Homo sapiens
tgctgggtgcttggg

SEQ ID NO: 1398207 - DNA, 15 bp, Homo sapiens
gtgctgggtgcttgg

SEQ ID NO: 1398208 - DNA, 15 bp, Homo sapiens
agtgctgggtgcttg

SEQ ID NO: 1398209 - DNA, 15 bp, Homo sapiens
aagtgctgggtgctt

SEQ ID NO: 1398210 - DNA, 15 bp, Homo sapiens
gaagtgctgggtgct

SEQ ID NO: 1398211 - DNA, 15 bp, Homo sapiens
ggaagtgctgggtgc

SEQ ID NO: 1398212 - DNA, 15 bp, Homo sapiens
cggaagtgctgggtg

SEQ ID NO: 1398213 - DNA, 15 bp, Homo sapiens
gcggaagtgctgggt

SEQ ID NO: 1398214 - DNA, 15 bp, Homo sapiens
tgcggaagtgctggg

SEQ ID NO: 1398215 - DNA, 15 bp, Homo sapiens
atgcggaagtgctgg

SEQ ID NO: 1398216 - DNA, 15 bp, Homo sapiens
aatgcggaagtgctg

SEQ ID NO: 1398217 - DNA, 15 bp, Homo sapiens
aaatgcggaagtgct

SEQ ID NO: 1398218 - DNA, 15 bp, Homo sapiens
gaaatgcggaagtgc

SEQ ID NO: 1398219 - DNA, 15 bp, Homo sapiens
agaaatgcggaagtg

SEQ ID NO: 1398220 - DNA, 15 bp, Homo sapiens
aagaaatgcggaagt

SEQ ID NO: 1398221 - DNA, 15 bp, Homo sapiens
aaagaaatgcggaag

SEQ ID NO: 1398222 - DNA, 15 bp, Homo sapiens
aaaagaaatgcggaa

SEQ ID NO: 1398223 - DNA, 15 bp, Homo sapiens
gaaaagaaatgcgga

SEQ ID NO: 1398224 - DNA, 15 bp, Homo sapiens
agaaaagaaatgcgg

SEQ ID NO: 1398225 - DNA, 15 bp, Homo sapiens
tagaaaagaaatgcg

SEQ ID NO: 1398226 - DNA, 15 bp, Homo sapiens
gtagaaaagaaatgc

SEQ ID NO: 1398227 - DNA, 15 bp, Homo sapiens
ggtagaaaagaaatg

SEQ ID NO: 1398228 - DNA, 15 bp, Homo sapiens
aggtagaaaagaaat

SEQ ID NO: 1398229 - DNA, 15 bp, Homo sapiens
aaggtagaaaagaaa

SEQ ID NO: 1398230 - DNA, 15 bp, Homo sapiens
gaaggtagaaaagaa

SEQ ID NO: 1398231 - DNA, 15 bp, Homo sapiens
agaaggtagaaaaga

SEQ ID NO: 1398232 - DNA, 15 bp, Homo sapiens
gagaaggtagaaaag

SEQ ID NO: 1398233 - DNA, 15 bp, Homo sapiens
ggagaaggtagaaaa

SEQ ID NO: 1398234 - DNA, 15 bp, Homo sapiens
aggagaaggtagaaa

SEQ ID NO: 1398235 - DNA, 15 bp, Homo sapiens
gaggagaaggtagaa

SEQ ID NO: 1398236 - DNA, 15 bp, Homo sapiens
ggaggagaaggtaga

SEQ ID NO: 1398237 - DNA, 15 bp, Homo sapiens
tggaggagaaggtag

SEQ ID NO: 1398238 - DNA, 15 bp, Homo sapiens
ctggaggagaaggta

SEQ ID NO: 1398239 - DNA, 15 bp, Homo sapiens
tctggaggagaaggt

SEQ ID NO: 1398240 - DNA, 15 bp, Homo sapiens
gtctggaggagaagg

SEQ ID NO: 1398241 - DNA, 15 bp, Homo sapiens
ggtctggaggagaag

SEQ ID NO: 1398242 - DNA, 15 bp, Homo sapiens
aggtctggaggagaa

SEQ ID NO: 1398243 - DNA, 15 bp, Homo sapiens
caggtctggaggaga

SEQ ID NO: 1398244 - DNA, 15 bp, Homo sapiens
ccaggtctggaggag

SEQ ID NO: 1398245 - DNA, 15 bp, Homo sapiens
accaggtctggagga

SEQ ID NO: 1398246 - DNA, 15 bp, Homo sapiens
aaccaggtctggagg

SEQ ID NO: 1398247 - DNA, 15 bp, Homo sapiens
aaaccaggtctggag

SEQ ID NO: 1398248 - DNA, 15 bp, Homo sapiens
gaaaccaggtctgga

SEQ ID NO: 1398249 - DNA, 15 bp, Homo sapiens
tgaaaccaggtctgg

SEQ ID NO: 1398250 - DNA, 15 bp, Homo sapiens
ttgaaaccaggtctg

SEQ ID NO: 1398251 - DNA, 15 bp, Homo sapiens
tttgaaaccaggtct

SEQ ID NO: 1398252 - DNA, 15 bp, Homo sapiens
atttgaaaccaggtc

SEQ ID NO: 1398253 - DNA, 15 bp, Homo sapiens
gatttgaaaccaggt

SEQ ID NO: 1398254 - DNA, 15 bp, Homo sapiens
ggatttgaaaccagg

SEQ ID NO: 1398255 - DNA, 15 bp, Homo sapiens
tggatttgaaaccag

SEQ ID NO: 1398256 - DNA, 15 bp, Homo sapiens
ttggatttgaaacca

SEQ ID NO: 1398257 - DNA, 15 bp, Homo sapiens
attggatttgaaacc

SEQ ID NO: 1398258 - DNA, 15 bp, Homo sapiens
gattggatttgaaac

SEQ ID NO: 1398259 - DNA, 15 bp, Homo sapiens
ggattggatttgaaa

SEQ ID NO: 1398260 - DNA, 15 bp, Homo sapiens
aggattggatttgaa

SEQ ID NO: 1398261 - DNA, 15 bp, Homo sapiens
gaggattggatttga

SEQ ID NO: 1398262 - DNA, 15 bp, Homo sapiens
ggaggattggatttg

SEQ ID NO: 1398263 - DNA, 15 bp, Homo sapiens
tggaggattggattt

SEQ ID NO: 1398264 - DNA, 15 bp, Homo sapiens
atggaggattggatt

SEQ ID NO: 1398265 - DNA, 15 bp, Homo sapiens
gatggaggattggat

SEQ ID NO: 1398266 - DNA, 15 bp, Homo sapiens
ggatggaggattgga

SEQ ID NO: 1398267 - DNA, 15 bp, Homo sapiens
gggatggaggattgg

SEQ ID NO: 1398268 - DNA, 15 bp, Homo sapiens
ggggatggaggattg

SEQ ID NO: 1398269 - DNA, 15 bp, Homo sapiens
tggggatggaggatt

SEQ ID NO: 1398270 - DNA, 15 bp, Homo sapiens
ttggggatggaggat

SEQ ID NO: 1398271 - DNA, 15 bp, Homo sapiens
cttggggatggagga

SEQ ID NO: 1398272 - DNA, 15 bp, Homo sapiens
gcttggggatggagg

SEQ ID NO: 1398273 - DNA, 15 bp, Homo sapiens
agcttggggatggag

SEQ ID NO: 1398274 - DNA, 15 bp, Homo sapiens
aagcttggggatgga

SEQ ID NO: 1398275 - DNA, 15 bp, Homo sapiens
aaagcttggggatgg

SEQ ID NO: 1398276 - DNA, 15 bp, Homo sapiens
taaagcttggggatg

SEQ ID NO: 1398277 - DNA, 15 bp, Homo sapiens
ataaagcttggggat

SEQ ID NO: 1398278 - DNA, 15 bp, Homo sapiens
tataaagcttgggga

SEQ ID NO: 1398279 - DNA, 15 bp, Homo sapiens
gtataaagcttgggg

SEQ ID NO: 1398280 - DNA, 15 bp, Homo sapiens
tgtataaagcttggg

SEQ ID NO: 1398281 - DNA, 15 bp, Homo sapiens
gtgtataaagcttgg

SEQ ID NO: 1398282 - DNA, 15 bp, Homo sapiens
agtgtataaagcttg

SEQ ID NO: 1398283 - DNA, 15 bp, Homo sapiens
aactataagttatat

SEQ ID NO: 1398284 - DNA, 15 bp, Homo sapiens
taactataagttata

SEQ ID NO: 1398285 - DNA, 15 bp, Homo sapiens
ataactataagttat

SEQ ID NO: 1398286 - DNA, 15 bp, Homo sapiens
aataactataagtta

SEQ ID NO: 1398287 - DNA, 15 bp, Homo sapiens
caataactataagtt

SEQ ID NO: 1398288 - DNA, 15 bp, Homo sapiens
tcaataactataagt

SEQ ID NO: 1398289 - DNA, 15 bp, Homo sapiens
ttcaataactataag

SEQ ID NO: 1398290 - DNA, 15 bp, Homo sapiens
tttcaataactataa

SEQ ID NO: 1398291 - DNA, 15 bp, Homo sapiens
ttttcaataactata

SEQ ID NO: 1398292 - DNA, 15 bp, Homo sapiens
tttttcaataactat

SEQ ID NO: 1398293 - DNA, 15 bp, Homo sapiens
ttttttcaataacta

SEQ ID NO: 1398294 - DNA, 15 bp, Homo sapiens
tttttttcaataact

SEQ ID NO: 1398295 - DNA, 15 bp, Homo sapiens
atttttttcaataac

SEQ ID NO: 1398296 - DNA, 15 bp, Homo sapiens
catttttttcaataa

SEQ ID NO: 1398297 - DNA, 15 bp, Homo sapiens
gcatttttttcaata

SEQ ID NO: 1398298 - DNA, 15 bp, Homo sapiens
tgcatttttttcaat

SEQ ID NO: 1398299 - DNA, 15 bp, Homo sapiens
ctgcatttttttcaa

SEQ ID NO: 1398300 - DNA, 15 bp, Homo sapiens
actgcatttttttca

SEQ ID NO: 1398301 - DNA, 15 bp, Homo sapiens
tactgcatttttttc

SEQ ID NO: 1398302 - DNA, 15 bp, Homo sapiens
ctactgcattttttt

SEQ ID NO: 1398303 - DNA, 15 bp, Homo sapiens
tctactgcatttttt

SEQ ID NO: 1398304 - DNA, 15 bp, Homo sapiens
atctactgcattttt

SEQ ID NO: 1398305 - DNA, 15 bp, Homo sapiens
aatctactgcatttt

SEQ ID NO: 1398306 - DNA, 15 bp, Homo sapiens
gaatctactgcattt

SEQ ID NO: 1398307 - DNA, 15 bp, Homo sapiens
tgaatctactgcatt

SEQ ID NO: 1398308 - DNA, 15 bp, Homo sapiens
ttgaatctactgcat

SEQ ID NO: 1398309 - DNA, 15 bp, Homo sapiens
cttgaatctactgca

SEQ ID NO: 1398310 - DNA, 15 bp, Homo sapiens
ccttgaatctactgc

SEQ ID NO: 1398311 - DNA, 15 bp, Homo sapiens
accttgaatctactg

SEQ ID NO: 1398312 - DNA, 15 bp, Homo sapiens
aaccttgaatctact

SEQ ID NO: 1398313 - DNA, 15 bp, Homo sapiens
gaaccttgaatctac

SEQ ID NO: 1398314 - DNA, 15 bp, Homo sapiens
tgaaccttgaatcta

SEQ ID NO: 1398315 - DNA, 15 bp, Homo sapiens
ttgaaccttgaatct

SEQ ID NO: 1398316 - DNA, 15 bp, Homo sapiens
attgaaccttgaatc

SEQ ID NO: 1398317 - DNA, 15 bp, Homo sapiens
tattgaaccttgaat

SEQ ID NO: 1398318 - DNA, 15 bp, Homo sapiens
gtattgaaccttgaa

SEQ ID NO: 1398319 - DNA, 15 bp, Homo sapiens
agtattgaaccttga

SEQ ID NO: 1398320 - DNA, 15 bp, Homo sapiens
tagtattgaaccttg

SEQ ID NO: 1398321 - DNA, 15 bp, Homo sapiens
ctagtattgaacctt

SEQ ID NO: 1398322 - DNA, 15 bp, Homo sapiens
gctagtattgaacct

SEQ ID NO: 1398323 - DNA, 15 bp, Homo sapiens
tgctagtattgaacc

SEQ ID NO: 1398324 - DNA, 15 bp, Homo sapiens
gtgctagtattgaac

SEQ ID NO: 1398325 - DNA, 15 bp, Homo sapiens
tgtgctagtattgaa

SEQ ID NO: 1398326 - DNA, 15 bp, Homo sapiens
atgtgctagtattga

SEQ ID NO: 1398327 - DNA, 15 bp, Homo sapiens
tatgtgctagtattg

SEQ ID NO: 1398328 - DNA, 15 bp, Homo sapiens
ctatgtgctagtatt

SEQ ID NO: 1398329 - DNA, 15 bp, Homo sapiens
tctatgtgctagtat

SEQ ID NO: 1398330 - DNA, 15 bp, Homo sapiens
ctctatgtgctagta

SEQ ID NO: 1398331 - DNA, 15 bp, Homo sapiens
tctctatgtgctagt

SEQ ID NO: 1398332 - DNA, 15 bp, Homo sapiens
ctctctatgtgctag

SEQ ID NO: 1398333 - DNA, 15 bp, Homo sapiens
actctctatgtgcta

SEQ ID NO: 1398334 - DNA, 15 bp, Homo sapiens
cactctctatgtgct

SEQ ID NO: 1398335 - DNA, 15 bp, Homo sapiens
tcactctctatgtgc

SEQ ID NO: 1398336 - DNA, 15 bp, Homo sapiens
ttcactctctatgtg

SEQ ID NO: 1398337 - DNA, 15 bp, Homo sapiens
attcactctctatgt

SEQ ID NO: 1398338 - DNA, 15 bp, Homo sapiens
cattcactctctatg

SEQ ID NO: 1398339 - DNA, 15 bp, Homo sapiens
ccattcactctctat

SEQ ID NO: 1398340 - DNA, 15 bp, Homo sapiens
cccattcactctcta

SEQ ID NO: 1398341 - DNA, 15 bp, Homo sapiens
tcccattcactctct

SEQ ID NO: 1398342 - DNA, 15 bp, Homo sapiens
atcccattcactctc

SEQ ID NO: 1398343 - DNA, 15 bp, Homo sapiens
aatcccattcactct

SEQ ID NO: 1398344 - DNA, 15 bp, Homo sapiens
aaatcccattcactc

SEQ ID NO: 1398345 - DNA, 15 bp, Homo sapiens
caaatcccattcact

SEQ ID NO: 1398346 - DNA, 15 bp, Homo sapiens
acaaatcccattcac

SEQ ID NO: 1398347 - DNA, 15 bp, Homo sapiens
aacaaatcccattca

SEQ ID NO: 1398348 - DNA, 15 bp, Homo sapiens
aaacaaatcccattc

SEQ ID NO: 1398349 - DNA, 15 bp, Homo sapiens
gaaacaaatcccatt

SEQ ID NO: 1398350 - DNA, 15 bp, Homo sapiens
agaaacaaatcccat

SEQ ID NO: 1398351 - DNA, 15 bp, Homo sapiens
cagaaacaaatccca

SEQ ID NO: 1398352 - DNA, 15 bp, Homo sapiens
tcagaaacaaatccc

SEQ ID NO: 1398353 - DNA, 15 bp, Homo sapiens
atcagaaacaaatcc

SEQ ID NO: 1398354 - DNA, 15 bp, Homo sapiens
tatcagaaacaaatc

SEQ ID NO: 1398355 - DNA, 15 bp, Homo sapiens
ttatcagaaacaaat

SEQ ID NO: 1398356 - DNA, 15 bp, Homo sapiens
tttatcagaaacaaa

SEQ ID NO: 1398357 - DNA, 15 bp, Homo sapiens
gtttatcagaaacaa

SEQ ID NO: 1398358 - DNA, 15 bp, Homo sapiens
ggtttatcagaaaca

SEQ ID NO: 1398359 - DNA, 15 bp, Homo sapiens
gggtttatcagaaac

SEQ ID NO: 1398360 - DNA, 15 bp, Homo sapiens
tgggtttatcagaaa

SEQ ID NO: 1398361 - DNA, 15 bp, Homo sapiens
gtgggtttatcagaa

SEQ ID NO: 1398362 - DNA, 15 bp, Homo sapiens
ggtgggtttatcaga

SEQ ID NO: 1398363 - DNA, 15 bp, Homo sapiens
aggtgggtttatcag

SEQ ID NO: 1398364 - DNA, 15 bp, Homo sapiens
aaggtgggtttatca

SEQ ID NO: 1398365 - DNA, 15 bp, Homo sapiens
caaggtgggtttatc

SEQ ID NO: 1398366 - DNA, 15 bp, Homo sapiens
tcaaggtgggtttat

SEQ ID NO: 1398367 - DNA, 15 bp, Homo sapiens
ttcaaggtgggttta

SEQ ID NO: 1398368 - DNA, 15 bp, Homo sapiens
gttcaaggtgggttt

SEQ ID NO: 1398369 - DNA, 15 bp, Homo sapiens
agttcaaggtgggtt

SEQ ID NO: 1398370 - DNA, 15 bp, Homo sapiens
aaagttcaaggtggg

SEQ ID NO: 1398371 - DNA, 15 bp, Homo sapiens
aaaagttcaaggtgg

SEQ ID NO: 1398372 - DNA, 15 bp, Homo sapiens
caaaagttcaaggtg

SEQ ID NO: 1398373 - DNA, 15 bp, Homo sapiens
acaaaagttcaaggt

SEQ ID NO: 1398374 - DNA, 15 bp, Homo sapiens
aacaaaagttcaagg

SEQ ID NO: 1398375 - DNA, 15 bp, Homo sapiens
taacaaaagttcaag

SEQ ID NO: 1398376 - DNA, 15 bp, Homo sapiens
gtaacaaaagttcaa

SEQ ID NO: 1398377 - DNA, 15 bp, Homo sapiens
tgtaacaaaagttca

SEQ ID NO: 1398378 - DNA, 15 bp, Homo sapiens
ttgtaacaaaagttc

SEQ ID NO: 1398379 - DNA, 15 bp, Homo sapiens
attgtaacaaaagtt

SEQ ID NO: 1398380 - DNA, 15 bp, Homo sapiens
tattgtaacaaaagt

SEQ ID NO: 1398381 - DNA, 15 bp, Homo sapiens
ttattgtaacaaaag

SEQ ID NO: 1398382 - DNA, 15 bp, Homo sapiens
gttattgtaacaaaa

SEQ ID NO: 1398383 - DNA, 15 bp, Homo sapiens
agttattgtaacaaa

SEQ ID NO: 1398384 - DNA, 15 bp, Homo sapiens
aagttattgtaacaa

SEQ ID NO: 1398385 - DNA, 15 bp, Homo sapiens
taagttattgtaaca

SEQ ID NO: 1398386 - DNA, 15 bp, Homo sapiens
ttaagttattgtaac

SEQ ID NO: 1398387 - DNA, 15 bp, Homo sapiens
tttaagttattgtaa

SEQ ID NO: 1398388 - DNA, 15 bp, Homo sapiens
ctttaagttattgta

SEQ ID NO: 1398389 - DNA, 15 bp, Homo sapiens
cctttaagttattgt

SEQ ID NO: 1398390 - DNA, 15 bp, Homo sapiens
tcctttaagttattg

SEQ ID NO: 1398391 - DNA, 15 bp, Homo sapiens
ttcctttaagttatt

SEQ ID NO: 1398392 - DNA, 15 bp, Homo sapiens
attcctttaagttat

SEQ ID NO: 1398393 - DNA, 15 bp, Homo sapiens
aattcctttaagtta

SEQ ID NO: 1398394 - DNA, 15 bp, Homo sapiens
gaattcctttaagtt

SEQ ID NO: 1398395 - DNA, 15 bp, Homo sapiens
agaattcctttaagt

SEQ ID NO: 1398396 - DNA, 15 bp, Homo sapiens
aagaattcctttaag

SEQ ID NO: 1398397 - DNA, 15 bp, Homo sapiens
caagaattcctttaa

SEQ ID NO: 1398398 - DNA, 15 bp, Homo sapiens
gcaagaattccttta

SEQ ID NO: 1398399 - DNA, 15 bp, Homo sapiens
tgcaagaattccttt

SEQ ID NO: 1398400 - DNA, 15 bp, Homo sapiens
ttgcaagaattcctt

SEQ ID NO: 1398401 - DNA, 15 bp, Homo sapiens
tttgcaagaattcct

SEQ ID NO: 1398402 - DNA, 15 bp, Homo sapiens
atttgcaagaattcc

SEQ ID NO: 1398403 - DNA, 15 bp, Homo sapiens
tatttgcaagaattc

SEQ ID NO: 1398404 - DNA, 15 bp, Homo sapiens
atatttgcaagaatt

SEQ ID NO: 1398405 - DNA, 15 bp, Homo sapiens
gatatttgcaagaat

SEQ ID NO: 1398406 - DNA, 15 bp, Homo sapiens
agatatttgcaagaa

SEQ ID NO: 1398407 - DNA, 15 bp, Homo sapiens
gagatatttgcaaga

SEQ ID NO: 1398408 - DNA, 15 bp, Homo sapiens
agagatatttgcaag

SEQ ID NO: 1398409 - DNA, 15 bp, Homo sapiens
cagagatatttgcaa

SEQ ID NO: 1398410 - DNA, 15 bp, Homo sapiens
tcagagatatttgca

SEQ ID NO: 1398411 - DNA, 15 bp, Homo sapiens
ctcagagatatttgc

SEQ ID NO: 1398412 - DNA, 15 bp, Homo sapiens
cctcagagatatttg

SEQ ID NO: 1398413 - DNA, 15 bp, Homo sapiens
tcctcagagatattt

SEQ ID NO: 1398414 - DNA, 15 bp, Homo sapiens
gtcctcagagatatt

SEQ ID NO: 1398415 - DNA, 15 bp, Homo sapiens
agtcctcagagatat

SEQ ID NO: 1398416 - DNA, 15 bp, Homo sapiens
gagtcctcagagata

SEQ ID NO: 1398417 - DNA, 15 bp, Homo sapiens
tgagtcctcagagat

SEQ ID NO: 1398418 - DNA, 15 bp, Homo sapiens
ttgagtcctcagaga

SEQ ID NO: 1398419 - DNA, 15 bp, Homo sapiens
gttgagtcctcagag

SEQ ID NO: 1398420 - DNA, 15 bp, Homo sapiens
tgttgagtcctcaga

SEQ ID NO: 1398421 - DNA, 15 bp, Homo sapiens
atgttgagtcctcag

SEQ ID NO: 1398422 - DNA, 15 bp, Homo sapiens
tatgttgagtcctca

SEQ ID NO: 1398423 - DNA, 15 bp, Homo sapiens
ttatgttgagtcctc

SEQ ID NO: 1398424 - DNA, 15 bp, Homo sapiens
attatgttgagtcct

SEQ ID NO: 1398425 - DNA, 15 bp, Homo sapiens
tattatgttgagtcc

SEQ ID NO: 1398426 - DNA, 15 bp, Homo sapiens
ttattatgttgagtc

SEQ ID NO: 1398427 - DNA, 15 bp, Homo sapiens
tttattatgttgagt

SEQ ID NO: 1398428 - DNA, 15 bp, Homo sapiens
atttattatgttgag

SEQ ID NO: 1398429 - DNA, 15 bp, Homo sapiens
tatttattatgttga

SEQ ID NO: 1398430 - DNA, 15 bp, Homo sapiens
atatttattatgttg

SEQ ID NO: 1398431 - DNA, 15 bp, Homo sapiens
aatatttattatgtt

SEQ ID NO: 1398432 - DNA, 15 bp, Homo sapiens
aaatatttattatgt

SEQ ID NO: 1398433 - DNA, 15 bp, Homo sapiens
gaaatatttattatg

SEQ ID NO: 1398434 - DNA, 15 bp, Homo sapiens
tgaaatatttattat

SEQ ID NO: 1398435 - DNA, 15 bp, Homo sapiens
ctgaaatatttatta

SEQ ID NO: 1398436 - DNA, 15 bp, Homo sapiens
tctgaaatatttatt

SEQ ID NO: 1398437 - DNA, 15 bp, Homo sapiens
ctctgaaatatttat

SEQ ID NO: 1398438 - DNA, 15 bp, Homo sapiens
tctctgaaatattta

SEQ ID NO: 1398439 - DNA, 15 bp, Homo sapiens
ttctctgaaatattt

SEQ ID NO: 1398440 - DNA, 15 bp, Homo sapiens
attctctgaaatatt

SEQ ID NO: 1398441 - DNA, 15 bp, Homo sapiens
cattctctgaaatat

SEQ ID NO: 1398442 - DNA, 15 bp, Homo sapiens
acattctctgaaata

SEQ ID NO: 1398443 - DNA, 15 bp, Homo sapiens
aacattctctgaaat

SEQ ID NO: 1398444 - DNA, 15 bp, Homo sapiens
caacattctctgaaa

SEQ ID NO: 1398445 - DNA, 15 bp, Homo sapiens
acaacattctctgaa

SEQ ID NO: 1398446 - DNA, 15 bp, Homo sapiens
aacaacattctctga

SEQ ID NO: 1398447 - DNA, 15 bp, Homo sapiens
aaacaacattctctg

SEQ ID NO: 1398448 - DNA, 15 bp, Homo sapiens
caaacaacattctct

SEQ ID NO: 1398449 - DNA, 15 bp, Homo sapiens
tcaaacaacattctc

SEQ ID NO: 1398450 - DNA, 15 bp, Homo sapiens
ttcaaacaacattct

SEQ ID NO: 1398451 - DNA, 15 bp, Homo sapiens
tttcaaacaacattc

SEQ ID NO: 1398452 - DNA, 15 bp, Homo sapiens
ttttcaaacaacatt

SEQ ID NO: 1398453 - DNA, 15 bp, Homo sapiens
attttcaaacaacat

SEQ ID NO: 1398454 - DNA, 15 bp, Homo sapiens
cattttcaaacaaca

SEQ ID NO: 1398455 - DNA, 15 bp, Homo sapiens
gcattttcaaacaac

SEQ ID NO: 1398456 - DNA, 15 bp, Homo sapiens
agcattttcaaacaa

SEQ ID NO: 1398457 - DNA, 15 bp, Homo sapiens
cagcattttcaaaca

SEQ ID NO: 1398458 - DNA, 15 bp, Homo sapiens
ccagcattttcaaac

SEQ ID NO: 1398459 - DNA, 15 bp, Homo sapiens
gccagcattttcaaa

SEQ ID NO: 1398460 - DNA, 15 bp, Homo sapiens
agccagcattttcaa

SEQ ID NO: 1398461 - DNA, 15 bp, Homo sapiens
gagccagcattttca

SEQ ID NO: 1398462 - DNA, 15 bp, Homo sapiens
agagccagcattttc

SEQ ID NO: 1398463 - DNA, 15 bp, Homo sapiens
cagagccagcatttt

SEQ ID NO: 1398464 - DNA, 15 bp, Homo sapiens
tcagagccagcattt

SEQ ID NO: 1398465 - DNA, 15 bp, Homo sapiens
atcagagccagcatt

SEQ ID NO: 1398466 - DNA, 15 bp, Homo sapiens
aatcagagccagcat

SEQ ID NO: 1398467 - DNA, 15 bp, Homo sapiens
aaatcagagccagca

SEQ ID NO: 1398468 - DNA, 15 bp, Homo sapiens
aaaatcagagccagc

SEQ ID NO: 1398469 - DNA, 15 bp, Homo sapiens
gaaaatcagagccag

SEQ ID NO: 1398470 - DNA, 15 bp, Homo sapiens
agaaaatcagagcca

SEQ ID NO: 1398471 - DNA, 15 bp, Homo sapiens
aagaaaatcagagcc

SEQ ID NO: 1398472 - DNA, 15 bp, Homo sapiens
aaagaaaatcagagc

SEQ ID NO: 1398473 - DNA, 15 bp, Homo sapiens
gaaagaaaatcagag

SEQ ID NO: 1398474 - DNA, 15 bp, Homo sapiens
tgaaagaaaatcaga

SEQ ID NO: 1398475 - DNA, 15 bp, Homo sapiens
atgaaagaaaatcag

SEQ ID NO: 1398476 - DNA, 15 bp, Homo sapiens
aatgaaagaaaatca

SEQ ID NO: 1398477 - DNA, 15 bp, Homo sapiens
aaatgaaagaaaatc

SEQ ID NO: 1398478 - DNA, 15 bp, Homo sapiens
caaatgaaagaaaat

SEQ ID NO: 1398479 - DNA, 15 bp, Homo sapiens
acaaatgaaagaaaa

SEQ ID NO: 1398480 - DNA, 15 bp, Homo sapiens
tacaaatgaaagaaa

SEQ ID NO: 1398481 - DNA, 15 bp, Homo sapiens
ctacaaatgaaagaa

SEQ ID NO: 1398482 - DNA, 15 bp, Homo sapiens
actacaaatgaaaga

SEQ ID NO: 1398483 - DNA, 15 bp, Homo sapiens
tactacaaatgaaag

SEQ ID NO: 1398484 - DNA, 15 bp, Homo sapiens
ctactacaaatgaaa

SEQ ID NO: 1398485 - DNA, 15 bp, Homo sapiens
gctactacaaatgaa

SEQ ID NO: 1398486 - DNA, 15 bp, Homo sapiens
ggctactacaaatga

SEQ ID NO: 1398487 - DNA, 15 bp, Homo sapiens
tggctactacaaatg

SEQ ID NO: 1398488 - DNA, 15 bp, Homo sapiens
gtggctactacaaat

SEQ ID NO: 1398489 - DNA, 15 bp, Homo sapiens
tgtggctactacaaa

SEQ ID NO: 1398490 - DNA, 15 bp, Homo sapiens
ttgtggctactacaa

SEQ ID NO: 1398491 - DNA, 15 bp, Homo sapiens
tttgtggctactaca

SEQ ID NO: 1398492 - DNA, 15 bp, Homo sapiens
atttgtggctactac

SEQ ID NO: 1398493 - DNA, 15 bp, Homo sapiens
tatttgtggctacta

SEQ ID NO: 1398494 - DNA, 15 bp, Homo sapiens
ttatttgtggctact

SEQ ID NO: 1398495 - DNA, 15 bp, Homo sapiens
attatttgtggctac

SEQ ID NO: 1398496 - DNA, 15 bp, Homo sapiens
tattatttgtggcta

SEQ ID NO: 1398497 - DNA, 15 bp, Homo sapiens
gtattatttgtggct

SEQ ID NO: 1398498 - DNA, 15 bp, Homo sapiens
ggtattatttgtggc

SEQ ID NO: 1398499 - DNA, 15 bp, Homo sapiens
tggtattatttgtgg

SEQ ID NO: 1398500 - DNA, 15 bp, Homo sapiens
ctggtattatttgtg

SEQ ID NO: 1398501 - DNA, 15 bp, Homo sapiens
actggtattatttgt

SEQ ID NO: 1398502 - DNA, 15 bp, Homo sapiens
gactggtattatttg

SEQ ID NO: 1398503 - DNA, 15 bp, Homo sapiens
ggactggtattattt

SEQ ID NO: 1398504 - DNA, 15 bp, Homo sapiens
gggactggtattatt

SEQ ID NO: 1398505 - DNA, 15 bp, Homo sapiens
tgggactggtattat

SEQ ID NO: 1398506 - DNA, 15 bp, Homo sapiens
ctgggactggtatta

SEQ ID NO: 1398507 - DNA, 15 bp, Homo sapiens
gctgggactggtatt

SEQ ID NO: 1398508 - DNA, 15 bp, Homo sapiens
cgctgggactggtat

SEQ ID NO: 1398509 - DNA, 15 bp, Homo sapiens
gcgctgggactggta

SEQ ID NO: 1398510 - DNA, 15 bp, Homo sapiens
agcgctgggactggt

SEQ ID NO: 1398511 - DNA, 15 bp, Homo sapiens
cagcgctgggactgg

SEQ ID NO: 1398512 - DNA, 15 bp, Homo sapiens
acagcgctgggactg

SEQ ID NO: 1398513 - DNA, 15 bp, Homo sapiens
cacagcgctgggact

SEQ ID NO: 1398514 - DNA, 15 bp, Homo sapiens
gcacagcgctgggac

SEQ ID NO: 1398515 - DNA, 15 bp, Homo sapiens
agcacagcgctggga

SEQ ID NO: 1398516 - DNA, 15 bp, Homo sapiens
cagcacagcgctggg

SEQ ID NO: 1398517 - DNA, 15 bp, Homo sapiens
gcagcacagcgctgg

SEQ ID NO: 1398518 - DNA, 15 bp, Homo sapiens
tgcagcacagcgctg

SEQ ID NO: 1398519 - DNA, 15 bp, Homo sapiens
ctgcagcacagcgct

SEQ ID NO: 1398520 - DNA, 15 bp, Homo sapiens
actgcagcacagcgc

SEQ ID NO: 1398521 - DNA, 15 bp, Homo sapiens
tactgcagcacagcg

SEQ ID NO: 1398522 - DNA, 15 bp, Homo sapiens
atactgcagcacagc

SEQ ID NO: 1398523 - DNA, 15 bp, Homo sapiens
catactgcagcacag

SEQ ID NO: 1398524 - DNA, 15 bp, Homo sapiens
acatactgcagcaca

SEQ ID NO: 1398525 - DNA, 15 bp, Homo sapiens
tacatactgcagcac

SEQ ID NO: 1398526 - DNA, 15 bp, Homo sapiens
ttacatactgcagca

SEQ ID NO: 1398527 - DNA, 15 bp, Homo sapiens
tttacatactgcagc

SEQ ID NO: 1398528 - DNA, 15 bp, Homo sapiens
ctttacatactgcag

SEQ ID NO: 1398529 - DNA, 15 bp, Homo sapiens
gctttacatactgca

SEQ ID NO: 1398530 - DNA, 15 bp, Homo sapiens
ggctttacatactgc

SEQ ID NO: 1398531 - DNA, 15 bp, Homo sapiens
aggctttacatactg

SEQ ID NO: 1398532 - DNA, 15 bp, Homo sapiens
taggctttacatact

SEQ ID NO: 1398533 - DNA, 15 bp, Homo sapiens
ctaggctttacatac

SEQ ID NO: 1398534 - DNA, 15 bp, Homo sapiens
gctaggctttacata

SEQ ID NO: 1398535 - DNA, 15 bp, Homo sapiens
agctaggctttacat

SEQ ID NO: 1398536 - DNA, 15 bp, Homo sapiens
gagctaggctttaca

SEQ ID NO: 1398537 - DNA, 15 bp, Homo sapiens
agagctaggctttac

SEQ ID NO: 1398538 - DNA, 15 bp, Homo sapiens
gagagctaggcttta

SEQ ID NO: 1398539 - DNA, 15 bp, Homo sapiens
agagagctaggcttt

SEQ ID NO: 1398540 - DNA, 15 bp, Homo sapiens
gagagagctaggctt

SEQ ID NO: 1398541 - DNA, 15 bp, Homo sapiens
tgagagagctaggct

SEQ ID NO: 1398542 - DNA, 15 bp, Homo sapiens
gtgagagagctaggc

SEQ ID NO: 1398543 - DNA, 15 bp, Homo sapiens
tgtgagagagctagg

SEQ ID NO: 1398544 - DNA, 15 bp, Homo sapiens
ttgtgagagagctag

SEQ ID NO: 1398545 - DNA, 15 bp, Homo sapiens
tttgtgagagagcta

SEQ ID NO: 1398546 - DNA, 15 bp, Homo sapiens
ctttgtgagagagct

SEQ ID NO: 1398547 - DNA, 15 bp, Homo sapiens
actttgtgagagagc

SEQ ID NO: 1398548 - DNA, 15 bp, Homo sapiens
cactttgtgagagag

SEQ ID NO: 1398549 - DNA, 15 bp, Homo sapiens
gcactttgtgagaga

SEQ ID NO: 1398550 - DNA, 15 bp, Homo sapiens
agcactttgtgagag

SEQ ID NO: 1398551 - DNA, 15 bp, Homo sapiens
aagcactttgtgaga

SEQ ID NO: 1398552 - DNA, 15 bp, Homo sapiens
caagcactttgtgag

SEQ ID NO: 1398553 - DNA, 15 bp, Homo sapiens
acaagcactttgtga

SEQ ID NO: 1398554 - DNA, 15 bp, Homo sapiens
gacaagcactttgtg

SEQ ID NO: 1398555 - DNA, 15 bp, Homo sapiens
agacaagcactttgt

SEQ ID NO: 1398556 - DNA, 15 bp, Homo sapiens
aagacaagcactttg

SEQ ID NO: 1398557 - DNA, 15 bp, Homo sapiens
aaagacaagcacttt

SEQ ID NO: 1398558 - DNA, 15 bp, Homo sapiens
gaaagacaagcactt

SEQ ID NO: 1398559 - DNA, 15 bp, Homo sapiens
tgaaagacaagcact

SEQ ID NO: 1398560 - DNA, 15 bp, Homo sapiens
ttgaaagacaagcac

SEQ ID NO: 1398561 - DNA, 15 bp, Homo sapiens
cttgaaagacaagca

SEQ ID NO: 1398562 - DNA, 15 bp, Homo sapiens
tcttgaaagacaagc

SEQ ID NO: 1398563 - DNA, 15 bp, Homo sapiens
atcttgaaagacaag

SEQ ID NO: 1398564 - DNA, 15 bp, Homo sapiens
gatcttgaaagacaa

SEQ ID NO: 1398565 - DNA, 15 bp, Homo sapiens
agatcttgaaagaca

SEQ ID NO: 1398566 - DNA, 15 bp, Homo sapiens
aagatcttgaaagac

SEQ ID NO: 1398567 - DNA, 15 bp, Homo sapiens
gaagatcttgaaaga

SEQ ID NO: 1398568 - DNA, 15 bp, Homo sapiens
ggaagatcttgaaag

SEQ ID NO: 1398569 - DNA, 15 bp, Homo sapiens
gggaagatcttgaaa

SEQ ID NO: 1398570 - DNA, 15 bp, Homo sapiens
agggaagatcttgaa

SEQ ID NO: 1398571 - DNA, 15 bp, Homo sapiens
aagggaagatcttga

SEQ ID NO: 1398572 - DNA, 15 bp, Homo sapiens
taagggaagatcttg

SEQ ID NO: 1398573 - DNA, 15 bp, Homo sapiens
ttaagggaagatctt

SEQ ID NO: 1398574 - DNA, 15 bp, Homo sapiens
cttaagggaagatct

SEQ ID NO: 1398575 - DNA, 15 bp, Homo sapiens
acttaagggaagatc

SEQ ID NO: 1398576 - DNA, 15 bp, Homo sapiens
gacttaagggaagat

SEQ ID NO: 1398577 - DNA, 15 bp, Homo sapiens
tgacttaagggaaga

SEQ ID NO: 1398578 - DNA, 15 bp, Homo sapiens
ctgacttaagggaag

SEQ ID NO: 1398579 - DNA, 15 bp, Homo sapiens
tctgacttaagggaa

SEQ ID NO: 1398580 - DNA, 15 bp, Homo sapiens
atctgacttaaggga

SEQ ID NO: 1398581 - DNA, 15 bp, Homo sapiens
gatctgacttaaggg

SEQ ID NO: 1398582 - DNA, 15 bp, Homo sapiens
agatctgacttaagg

SEQ ID NO: 1398583 - DNA, 15 bp, Homo sapiens
aagatctgacttaag

SEQ ID NO: 1398584 - DNA, 15 bp, Homo sapiens
taagatctgacttaa

SEQ ID NO: 1398585 - DNA, 15 bp, Homo sapiens
ttaagatctgactta

SEQ ID NO: 1398586 - DNA, 15 bp, Homo sapiens
tttaagatctgactt

SEQ ID NO: 1398587 - DNA, 15 bp, Homo sapiens
ttttaagatctgact

SEQ ID NO: 1398588 - DNA, 15 bp, Homo sapiens
attttaagatctgac

SEQ ID NO: 1398589 - DNA, 15 bp, Homo sapiens
gattttaagatctga

SEQ ID NO: 1398590 - DNA, 15 bp, Homo sapiens
tgattttaagatctg

SEQ ID NO: 1398591 - DNA, 15 bp, Homo sapiens
ttgattttaagatct

SEQ ID NO: 1398592 - DNA, 15 bp, Homo sapiens
tttgattttaagatc

SEQ ID NO: 1398593 - DNA, 15 bp, Homo sapiens
ctttgattttaagat

SEQ ID NO: 1398594 - DNA, 15 bp, Homo sapiens
gctttgattttaaga

SEQ ID NO: 1398595 - DNA, 15 bp, Homo sapiens
agctttgattttaag

SEQ ID NO: 1398596 - DNA, 15 bp, Homo sapiens
cagctttgattttaa

SEQ ID NO: 1398597 - DNA, 15 bp, Homo sapiens
tcagctttgatttta

SEQ ID NO: 1398598 - DNA, 15 bp, Homo sapiens
gtcagctttgatttt

SEQ ID NO: 1398599 - DNA, 15 bp, Homo sapiens
ggtcagctttgattt

SEQ ID NO: 1398600 - DNA, 15 bp, Homo sapiens
tggtcagctttgatt

SEQ ID NO: 1398601 - DNA, 15 bp, Homo sapiens
ctggtcagctttgat

SEQ ID NO: 1398602 - DNA, 15 bp, Homo sapiens
actggtcagctttga

SEQ ID NO: 1398603 - DNA, 15 bp, Homo sapiens
tactggtcagctttg

SEQ ID NO: 1398604 - DNA, 15 bp, Homo sapiens
ttactggtcagcttt

SEQ ID NO: 1398605 - DNA, 15 bp, Homo sapiens
attactggtcagctt

SEQ ID NO: 1398606 - DNA, 15 bp, Homo sapiens
cattactggtcagct

SEQ ID NO: 1398607 - DNA, 15 bp, Homo sapiens
tcattactggtcagc

SEQ ID NO: 1398608 - DNA, 15 bp, Homo sapiens
gtcattactggtcag

SEQ ID NO: 1398609 - DNA, 15 bp, Homo sapiens
tgtcattactggtca

SEQ ID NO: 1398610 - DNA, 15 bp, Homo sapiens
ttgtcattactggtc

SEQ ID NO: 1398611 - DNA, 15 bp, Homo sapiens
tttgtcattactggt

SEQ ID NO: 1398612 - DNA, 15 bp, Homo sapiens
atttgtcattactgg

SEQ ID NO: 1398613 - DNA, 15 bp, Homo sapiens
catttgtcattactg

SEQ ID NO: 1398614 - DNA, 15 bp, Homo sapiens
gcatttgtcattact

SEQ ID NO: 1398615 - DNA, 15 bp, Homo sapiens
ggcatttgtcattac

SEQ ID NO: 1398616 - DNA, 15 bp, Homo sapiens
aggcatttgtcatta

SEQ ID NO: 1398617 - DNA, 15 bp, Homo sapiens
taggcatttgtcatt

SEQ ID NO: 1398618 - DNA, 15 bp, Homo sapiens
ataggcatttgtcat

SEQ ID NO: 1398619 - DNA, 15 bp, Homo sapiens
tataggcatttgtca

SEQ ID NO: 1398620 - DNA, 15 bp, Homo sapiens
ttataggcatttgtc

SEQ ID NO: 1398621 - DNA, 15 bp, Homo sapiens
tttataggcatttgt

SEQ ID NO: 1398622 - DNA, 15 bp, Homo sapiens
ttttataggcatttg

SEQ ID NO: 1398623 - DNA, 15 bp, Homo sapiens
gttttataggcattt

SEQ ID NO: 1398624 - DNA, 15 bp, Homo sapiens
agttttataggcatt

SEQ ID NO: 1398625 - DNA, 15 bp, Homo sapiens
gagttttataggcat

SEQ ID NO: 1398626 - DNA, 15 bp, Homo sapiens
agagttttataggca

SEQ ID NO: 1398627 - DNA, 15 bp, Homo sapiens
aagagttttataggc

SEQ ID NO: 1398628 - DNA, 15 bp, Homo sapiens
taagagttttatagg

SEQ ID NO: 1398629 - DNA, 15 bp, Homo sapiens
ttaagagttttatag

SEQ ID NO: 1398630 - DNA, 15 bp, Homo sapiens
tttaagagttttata

SEQ ID NO: 1398631 - DNA, 15 bp, Homo sapiens
gtttaagagttttat

SEQ ID NO: 1398632 - DNA, 15 bp, Homo sapiens
ggtttaagagtttta

SEQ ID NO: 1398633 - DNA, 15 bp, Homo sapiens
aggtttaagagtttt

SEQ ID NO: 1398634 - DNA, 15 bp, Homo sapiens
caggtttaagagttt

SEQ ID NO: 1398635 - DNA, 15 bp, Homo sapiens
tcaggtttaagagtt

SEQ ID NO: 1398636 - DNA, 15 bp, Homo sapiens
ttcaggtttaagagt

SEQ ID NO: 1398637 - DNA, 15 bp, Homo sapiens
attcaggtttaagag

SEQ ID NO: 1398638 - DNA, 15 bp, Homo sapiens
tattcaggtttaaga

SEQ ID NO: 1398639 - DNA, 15 bp, Homo sapiens
ctattcaggtttaag

SEQ ID NO: 1398640 - DNA, 15 bp, Homo sapiens
cctattcaggtttaa

SEQ ID NO: 1398641 - DNA, 15 bp, Homo sapiens
gcctattcaggttta

SEQ ID NO: 1398642 - DNA, 15 bp, Homo sapiens
tgcctattcaggttt

SEQ ID NO: 1398643 - DNA, 15 bp, Homo sapiens
atgcctattcaggtt

SEQ ID NO: 1398644 - DNA, 15 bp, Homo sapiens
gatgcctattcaggt

SEQ ID NO: 1398645 - DNA, 15 bp, Homo sapiens
tgatgcctattcagg

SEQ ID NO: 1398646 - DNA, 15 bp, Homo sapiens
ttgatgcctattcag

SEQ ID NO: 1398647 - DNA, 15 bp, Homo sapiens
tttgatgcctattca

SEQ ID NO: 1398648 - DNA, 15 bp, Homo sapiens
ttttgatgcctattc

SEQ ID NO: 1398649 - DNA, 15 bp, Homo sapiens
tttttgatgcctatt

SEQ ID NO: 1398650 - DNA, 15 bp, Homo sapiens
ctttttgatgcctat

SEQ ID NO: 1398651 - DNA, 15 bp, Homo sapiens
actttttgatgccta

SEQ ID NO: 1398652 - DNA, 15 bp, Homo sapiens
cactttttgatgcct

SEQ ID NO: 1398653 - DNA, 15 bp, Homo sapiens
ccactttttgatgcc

SEQ ID NO: 1398654 - DNA, 15 bp, Homo sapiens
cccactttttgatgc

SEQ ID NO: 1398655 - DNA, 15 bp, Homo sapiens
gtcccactttttgat

SEQ ID NO: 1398656 - DNA, 15 bp, Homo sapiens
tgtcccactttttga

SEQ ID NO: 1398657 - DNA, 15 bp, Homo sapiens
atgtcccactttttg

SEQ ID NO: 1398658 - DNA, 15 bp, Homo sapiens
tatgtcccacttttt

SEQ ID NO: 1398659 - DNA, 15 bp, Homo sapiens
atatgtcccactttt

SEQ ID NO: 1398660 - DNA, 15 bp, Homo sapiens
aatatgtcccacttt

SEQ ID NO: 1398661 - DNA, 15 bp, Homo sapiens
aaatatgtcccactt

SEQ ID NO: 1398662 - DNA, 15 bp, Homo sapiens
aaaatatgtcccact

SEQ ID NO: 1398663 - DNA, 15 bp, Homo sapiens
gaaaatatgtcccac

SEQ ID NO: 1398664 - DNA, 15 bp, Homo sapiens
tgaaaatatgtccca

SEQ ID NO: 1398665 - DNA, 15 bp, Homo sapiens
atgaaaatatgtccc

SEQ ID NO: 1398666 - DNA, 15 bp, Homo sapiens
aatgaaaatatgtcc

SEQ ID NO: 1398667 - DNA, 15 bp, Homo sapiens
aaatgaaaatatgtc

SEQ ID NO: 1398668 - DNA, 15 bp, Homo sapiens
gaaatgaaaatatgt

SEQ ID NO: 1398669 - DNA, 15 bp, Homo sapiens
ggaaatgaaaatatg

SEQ ID NO: 1398670 - DNA, 15 bp, Homo sapiens
aggaaatgaaaatat

SEQ ID NO: 1398671 - DNA, 15 bp, Homo sapiens
gaggaaatgaaaata

SEQ ID NO: 1398672 - DNA, 15 bp, Homo sapiens
tgaggaaatgaaaat

SEQ ID NO: 1398673 - DNA, 15 bp, Homo sapiens
atgaggaaatgaaaa

SEQ ID NO: 1398674 - DNA, 15 bp, Homo sapiens
aatgaggaaatgaaa

SEQ ID NO: 1398675 - DNA, 15 bp, Homo sapiens
aaatgaggaaatgaa

SEQ ID NO: 1398676 - DNA, 15 bp, Homo sapiens
aaaatgaggaaatga

SEQ ID NO: 1398677 - DNA, 15 bp, Homo sapiens
caaaatgaggaaatg

SEQ ID NO: 1398678 - DNA, 15 bp, Homo sapiens
tcaaaatgaggaaat

SEQ ID NO: 1398679 - DNA, 15 bp, Homo sapiens
gtcaaaatgaggaaa

SEQ ID NO: 1398680 - DNA, 15 bp, Homo sapiens
tgtcaaaatgaggaa

SEQ ID NO: 1398681 - DNA, 15 bp, Homo sapiens
ttgtcaaaatgagga

SEQ ID NO: 1398682 - DNA, 15 bp, Homo sapiens
attgtcaaaatgagg

SEQ ID NO: 1398683 - DNA, 15 bp, Homo sapiens
aattgtcaaaatgag

SEQ ID NO: 1398684 - DNA, 15 bp, Homo sapiens
aaattgtcaaaatga

SEQ ID NO: 1398685 - DNA, 15 bp, Homo sapiens
taaattgtcaaaatg

SEQ ID NO: 1398686 - DNA, 15 bp, Homo sapiens
ataaattgtcaaaat

SEQ ID NO: 1398687 - DNA, 15 bp, Homo sapiens
gataaattgtcaaaa

SEQ ID NO: 1398688 - DNA, 15 bp, Homo sapiens
tgataaattgtcaaa

SEQ ID NO: 1398689 - DNA, 15 bp, Homo sapiens
gtgataaattgtcaa

SEQ ID NO: 1398690 - DNA, 15 bp, Homo sapiens
agtgataaattgtca

SEQ ID NO: 1398691 - DNA, 15 bp, Homo sapiens
tagtgataaattgtc

SEQ ID NO: 1398692 - DNA, 15 bp, Homo sapiens
gtagtgataaattgt

SEQ ID NO: 1398693 - DNA, 15 bp, Homo sapiens
tgtagtgataaattg

SEQ ID NO: 1398694 - DNA, 15 bp, Homo sapiens
ctgtagtgataaatt

SEQ ID NO: 1398695 - DNA, 15 bp, Homo sapiens
gctgtagtgataaat

SEQ ID NO: 1398696 - DNA, 15 bp, Homo sapiens
ggctgtagtgataaa

SEQ ID NO: 1398697 - DNA, 15 bp, Homo sapiens
gggctgtagtgataa

SEQ ID NO: 1398698 - DNA, 15 bp, Homo sapiens
agggctgtagtgata

SEQ ID NO: 1398699 - DNA, 15 bp, Homo sapiens
cagggctgtagtgat

SEQ ID NO: 1398700 - DNA, 15 bp, Homo sapiens
acagggctgtagtga

SEQ ID NO: 1398701 - DNA, 15 bp, Homo sapiens
cacagggctgtagtg

SEQ ID NO: 1398702 - DNA, 15 bp, Homo sapiens
tcacagggctgtagt

SEQ ID NO: 1398703 - DNA, 15 bp, Homo sapiens
ttcacagggctgtag

SEQ ID NO: 1398704 - DNA, 15 bp, Homo sapiens
attcacagggctgta

SEQ ID NO: 1398705 - DNA, 15 bp, Homo sapiens
cattcacagggctgt

SEQ ID NO: 1398706 - DNA, 15 bp, Homo sapiens
gcattcacagggctg

SEQ ID NO: 1398707 - DNA, 15 bp, Homo sapiens
tgcattcacagggct

SEQ ID NO: 1398708 - DNA, 15 bp, Homo sapiens
atgcattcacagggc

SEQ ID NO: 1398709 - DNA, 15 bp, Homo sapiens
aatgcattcacaggg

SEQ ID NO: 1398710 - DNA, 15 bp, Homo sapiens
taatgcattcacagg

SEQ ID NO: 1398711 - DNA, 15 bp, Homo sapiens
ataatgcattcacag

SEQ ID NO: 1398712 - DNA, 15 bp, Homo sapiens
aataatgcattcaca

SEQ ID NO: 1398713 - DNA, 15 bp, Homo sapiens
aaataatgcattcac

SEQ ID NO: 1398714 - DNA, 15 bp, Homo sapiens
taaataatgcattca

SEQ ID NO: 1398715 - DNA, 15 bp, Homo sapiens
ctaaataatgcattc

SEQ ID NO: 1398716 - DNA, 15 bp, Homo sapiens
cctaaataatgcatt

SEQ ID NO: 1398717 - DNA, 15 bp, Homo sapiens
gcctaaataatgcat

SEQ ID NO: 1398718 - DNA, 15 bp, Homo sapiens
agcctaaataatgca

SEQ ID NO: 1398719 - DNA, 15 bp, Homo sapiens
tagcctaaataatgc

SEQ ID NO: 1398720 - DNA, 15 bp, Homo sapiens
atagcctaaataatg

SEQ ID NO: 1398721 - DNA, 15 bp, Homo sapiens
tatagcctaaataat

SEQ ID NO: 1398722 - DNA, 15 bp, Homo sapiens
ttatagcctaaataa

SEQ ID NO: 1398723 - DNA, 15 bp, Homo sapiens
tttatagcctaaata

SEQ ID NO: 1398724 - DNA, 15 bp, Homo sapiens
gtttatagcctaaat

SEQ ID NO: 1398725 - DNA, 15 bp, Homo sapiens
cgtttatagcctaaa

SEQ ID NO: 1398726 - DNA, 15 bp, Homo sapiens
ccgtttatagcctaa

SEQ ID NO: 1398727 - DNA, 15 bp, Homo sapiens
tccgtttatagccta

SEQ ID NO: 1398728 - DNA, 15 bp, Homo sapiens
ctccgtttatagcct

SEQ ID NO: 1398729 - DNA, 15 bp, Homo sapiens
tctccgtttatagcc

SEQ ID NO: 1398730 - DNA, 15 bp, Homo sapiens
ctctccgtttatagc

SEQ ID NO: 1398731 - DNA, 15 bp, Homo sapiens
cctctccgtttatag

SEQ ID NO: 1398732 - DNA, 15 bp, Homo sapiens
ccctctccgtttata

SEQ ID NO: 1398733 - DNA, 15 bp, Homo sapiens
tccctctccgtttat

SEQ ID NO: 1398734 - DNA, 15 bp, Homo sapiens
ttccctctccgttta

SEQ ID NO: 1398735 - DNA, 15 bp, Homo sapiens
cttccctctccgttt

SEQ ID NO: 1398736 - DNA, 15 bp, Homo sapiens
gcttccctctccgtt

SEQ ID NO: 1398737 - DNA, 15 bp, Homo sapiens
agcttccctctccgt

SEQ ID NO: 1398738 - DNA, 15 bp, Homo sapiens
tagcttccctctccg

SEQ ID NO: 1398739 - DNA, 15 bp, Homo sapiens
gtagcttccctctcc

SEQ ID NO: 1398740 - DNA, 15 bp, Homo sapiens
ggtagcttccctctc

SEQ ID NO: 1398741 - DNA, 15 bp, Homo sapiens
tggtagcttccctct

SEQ ID NO: 1398742 - DNA, 15 bp, Homo sapiens
ttggtagcttccctc

SEQ ID NO: 1398743 - DNA, 15 bp, Homo sapiens
attggtagcttccct

SEQ ID NO: 1398744 - DNA, 15 bp, Homo sapiens
tattggtagcttccc

SEQ ID NO: 1398745 - DNA, 15 bp, Homo sapiens
ttattggtagcttcc

SEQ ID NO: 1398746 - DNA, 15 bp, Homo sapiens
tttattggtagcttc

SEQ ID NO: 1398747 - DNA, 15 bp, Homo sapiens
atttattggtagctt

SEQ ID NO: 1398748 - DNA, 15 bp, Homo sapiens
catttattggtagct

SEQ ID NO: 1398749 - DNA, 15 bp, Homo sapiens
acatttattggtagc

SEQ ID NO: 1398750 - DNA, 15 bp, Homo sapiens
gacatttattggtag

SEQ ID NO: 1398751 - DNA, 15 bp, Homo sapiens
ggacatttattggta

SEQ ID NO: 1398752 - DNA, 15 bp, Homo sapiens
gggacatttattggt

SEQ ID NO: 1398753 - DNA, 15 bp, Homo sapiens
tgggacatttattgg

SEQ ID NO: 1398754 - DNA, 15 bp, Homo sapiens
ctgggacatttattg

SEQ ID NO: 1398755 - DNA, 15 bp, Homo sapiens
tctgggacatttatt

SEQ ID NO: 1398756 - DNA, 15 bp, Homo sapiens
atctgggacatttat

SEQ ID NO: 1398757 - DNA, 15 bp, Homo sapiens
tatctgggacattta

SEQ ID NO: 1398758 - DNA, 15 bp, Homo sapiens
atatctgggacattt

SEQ ID NO: 1398759 - DNA, 15 bp, Homo sapiens
catatctgggacatt

SEQ ID NO: 1398760 - DNA, 15 bp, Homo sapiens
acatatctgggacat

SEQ ID NO: 1398761 - DNA, 15 bp, Homo sapiens
tacatatctgggaca

SEQ ID NO: 1398762 - DNA, 15 bp, Homo sapiens
atacatatctgggac

SEQ ID NO: 1398763 - DNA, 15 bp, Homo sapiens
aatacatatctggga

SEQ ID NO: 1398764 - DNA, 15 bp, Homo sapiens
gaatacatatctggg

SEQ ID NO: 1398765 - DNA, 15 bp, Homo sapiens
tgaatacatatctgg

SEQ ID NO: 1398766 - DNA, 15 bp, Homo sapiens
ctgaatacatatctg

SEQ ID NO: 1398767 - DNA, 15 bp, Homo sapiens
cctgaatacatatct

SEQ ID NO: 1398768 - DNA, 15 bp, Homo sapiens
tcctgaatacatatc

SEQ ID NO: 1398769 - DNA, 15 bp, Homo sapiens
gtcctgaatacatat

SEQ ID NO: 1398770 - DNA, 15 bp, Homo sapiens
agtcctgaatacata

SEQ ID NO: 1398771 - DNA, 15 bp, Homo sapiens
cagtcctgaatacat

SEQ ID NO: 1398772 - DNA, 15 bp, Homo sapiens
ccagtcctgaataca

SEQ ID NO: 1398773 - DNA, 15 bp, Homo sapiens
accagtcctgaatac

SEQ ID NO: 1398774 - DNA, 15 bp, Homo sapiens
taccagtcctgaata

SEQ ID NO: 1398775 - DNA, 15 bp, Homo sapiens
gtaccagtcctgaat

SEQ ID NO: 1398776 - DNA, 15 bp, Homo sapiens
ggtaccagtcctgaa

SEQ ID NO: 1398777 - DNA, 15 bp, Homo sapiens
aggtaccagtcctga

SEQ ID NO: 1398778 - DNA, 15 bp, Homo sapiens
aaggtaccagtcctg

SEQ ID NO: 1398779 - DNA, 15 bp, Homo sapiens
taaggtaccagtcct

SEQ ID NO: 1398780 - DNA, 15 bp, Homo sapiens
ataaggtaccagtcc

SEQ ID NO: 1398781 - DNA, 15 bp, Homo sapiens
aataaggtaccagtc

SEQ ID NO: 1398782 - DNA, 15 bp, Homo sapiens
aaataaggtaccagt

SEQ ID NO: 1398783 - DNA, 15 bp, Homo sapiens
caaataaggtaccag

SEQ ID NO: 1398784 - DNA, 15 bp, Homo sapiens
gcaaataaggtacca

SEQ ID NO: 1398785 - DNA, 15 bp, Homo sapiens
agcaaataaggtacc

SEQ ID NO: 1398786 - DNA, 15 bp, Homo sapiens
gagcaaataaggtac

SEQ ID NO: 1398787 - DNA, 15 bp, Homo sapiens
agagcaaataaggta

SEQ ID NO: 1398788 - DNA, 15 bp, Homo sapiens
gagagcaaataaggt

SEQ ID NO: 1398789 - DNA, 15 bp, Homo sapiens
tgagagcaaataagg

SEQ ID NO: 1398790 - DNA, 15 bp, Homo sapiens
ctgagagcaaataag

SEQ ID NO: 1398791 - DNA, 15 bp, Homo sapiens
gctgagagcaaataa

SEQ ID NO: 1398792 - DNA, 15 bp, Homo sapiens
tgctgagagcaaata

SEQ ID NO: 1398793 - DNA, 15 bp, Homo sapiens
atgctgagagcaaat

SEQ ID NO: 1398794 - DNA, 15 bp, Homo sapiens
tatgctgagagcaaa

SEQ ID NO: 1398795 - DNA, 15 bp, Homo sapiens
attatgctgagagca

SEQ ID NO: 1398796 - DNA, 15 bp, Homo sapiens
tattatgctgagagc

SEQ ID NO: 1398797 - DNA, 15 bp, Homo sapiens
gtattatgctgagag

SEQ ID NO: 1398798 - DNA, 15 bp, Homo sapiens
agtattatgctgaga

SEQ ID NO: 1398799 - DNA, 15 bp, Homo sapiens
tagtattatgctgag

SEQ ID NO: 1398800 - DNA, 15 bp, Homo sapiens
ctagtattatgctga

SEQ ID NO: 1398801 - DNA, 15 bp, Homo sapiens
cctagtattatgctg

SEQ ID NO: 1398802 - DNA, 15 bp, Homo sapiens
acctagtattatgct

SEQ ID NO: 1398803 - DNA, 15 bp, Homo sapiens
gacctagtattatgc

SEQ ID NO: 1398804 - DNA, 15 bp, Homo sapiens
tgacctagtattatg

SEQ ID NO: 1398805 - DNA, 15 bp, Homo sapiens
atgacctagtattat

SEQ ID NO: 1398806 - DNA, 15 bp, Homo sapiens
gatgacctagtatta

SEQ ID NO: 1398807 - DNA, 15 bp, Homo sapiens
tgatgacctagtatt

SEQ ID NO: 1398808 - DNA, 15 bp, Homo sapiens
atgatgacctagtat

SEQ ID NO: 1398809 - DNA, 15 bp, Homo sapiens
aatgatgacctagta

SEQ ID NO: 1398810 - DNA, 15 bp, Homo sapiens
aaatgatgacctagt

SEQ ID NO: 1398811 - DNA, 15 bp, Homo sapiens
caaatgatgacctag

SEQ ID NO: 1398812 - DNA, 15 bp, Homo sapiens
acaaatgatgaccta

SEQ ID NO: 1398813 - DNA, 15 bp, Homo sapiens
aacaaatgatgacct

SEQ ID NO: 1398814 - DNA, 15 bp, Homo sapiens
aaacaaatgatgacc

SEQ ID NO: 1398815 - DNA, 15 bp, Homo sapiens
aaaacaaatgatgac

SEQ ID NO: 1398816 - DNA, 15 bp, Homo sapiens
taaaacaaatgatga

SEQ ID NO: 1398817 - DNA, 15 bp, Homo sapiens
ataaaacaaatgatg

SEQ ID NO: 1398818 - DNA, 15 bp, Homo sapiens
aataaaacaaatgat

SEQ ID NO: 1398819 - DNA, 15 bp, Homo sapiens
caataaaacaaatga

SEQ ID NO: 1398820 - DNA, 15 bp, Homo sapiens
ccaataaaacaaatg

SEQ ID NO: 1398821 - DNA, 15 bp, Homo sapiens
gccaataaaacaaat

SEQ ID NO: 1398822 - DNA, 15 bp, Homo sapiens
ggccaataaaacaaa

SEQ ID NO: 1398823 - DNA, 15 bp, Homo sapiens
gggccaataaaacaa

SEQ ID NO: 1398824 - DNA, 15 bp, Homo sapiens
ggggccaataaaaca

SEQ ID NO: 1398825 - DNA, 15 bp, Homo sapiens
tggggccaataaaac

SEQ ID NO: 1398826 - DNA, 15 bp, Homo sapiens
gtggggccaataaaa

SEQ ID NO: 1398827 - DNA, 15 bp, Homo sapiens
agtggggccaataaa

SEQ ID NO: 1398828 - DNA, 15 bp, Homo sapiens
tagtggggccaataa

SEQ ID NO: 1398829 - DNA, 15 bp, Homo sapiens
atagtggggccaata

SEQ ID NO: 1398830 - DNA, 15 bp, Homo sapiens
gatagtggggccaat

SEQ ID NO: 1398831 - DNA, 15 bp, Homo sapiens
agatagtggggccaa

SEQ ID NO: 1398832 - DNA, 15 bp, Homo sapiens
aagatagtggggcca

SEQ ID NO: 1398833 - DNA, 15 bp, Homo sapiens
caagatagtggggcc

SEQ ID NO: 1398834 - DNA, 15 bp, Homo sapiens
acaagatagtggggc

SEQ ID NO: 1398835 - DNA, 15 bp, Homo sapiens
aacaagatagtgggg

SEQ ID NO: 1398836 - DNA, 15 bp, Homo sapiens
aaacaagatagtggg

SEQ ID NO: 1398837 - DNA, 15 bp, Homo sapiens
aaaacaagatagtgg

SEQ ID NO: 1398838 - DNA, 15 bp, Homo sapiens
aaaaacaagatagtg

SEQ ID NO: 1398839 - DNA, 15 bp, Homo sapiens
aaaaaacaagatagt

SEQ ID NO: 1398840 - DNA, 15 bp, Homo sapiens
taaaaaacaagatag

SEQ ID NO: 1398841 - DNA, 15 bp, Homo sapiens
ttaaaaaacaagata

SEQ ID NO: 1398842 - DNA, 15 bp, Homo sapiens
tttaaaaaacaagat

SEQ ID NO: 1398843 - DNA, 15 bp, Homo sapiens
ctttaaaaaacaaga

SEQ ID NO: 1398844 - DNA, 15 bp, Homo sapiens
actttaaaaaacaag

SEQ ID NO: 1398845 - DNA, 15 bp, Homo sapiens
tactttaaaaaacaa

SEQ ID NO: 1398846 - DNA, 15 bp, Homo sapiens
ttactttaaaaaaca

SEQ ID NO: 1398847 - DNA, 15 bp, Homo sapiens
tttactttaaaaaac

SEQ ID NO: 1398848 - DNA, 15 bp, Homo sapiens
atttactttaaaaaa

SEQ ID NO: 1398849 - DNA, 15 bp, Homo sapiens
aatttactttaaaaa

SEQ ID NO: 1398850 - DNA, 15 bp, Homo sapiens
taatttactttaaaa

SEQ ID NO: 1398851 - DNA, 15 bp, Homo sapiens
ataatttactttaaa

SEQ ID NO: 1398852 - DNA, 15 bp, Homo sapiens
tataatttactttaa

SEQ ID NO: 1398853 - DNA, 15 bp, Homo sapiens
ttataatttacttta

SEQ ID NO: 1398854 - DNA, 15 bp, Homo sapiens
gttataatttacttt

SEQ ID NO: 1398855 - DNA, 15 bp, Homo sapiens
tgttataatttactt

SEQ ID NO: 1398856 - DNA, 15 bp, Homo sapiens
atgttataatttact

SEQ ID NO: 1398857 - DNA, 15 bp, Homo sapiens
tatgttataatttac

SEQ ID NO: 1398858 - DNA, 15 bp, Homo sapiens
gtatgttataattta

SEQ ID NO: 1398859 - DNA, 15 bp, Homo sapiens
tgtatgttataattt

SEQ ID NO: 1398860 - DNA, 15 bp, Homo sapiens
ctgtatgttataatt

SEQ ID NO: 1398861 - DNA, 15 bp, Homo sapiens
tctgtatgttataat

SEQ ID NO: 1398862 - DNA, 15 bp, Homo sapiens
ttctgtatgttataa

SEQ ID NO: 1398863 - DNA, 15 bp, Homo sapiens
gttctgtatgttata

SEQ ID NO: 1398864 - DNA, 15 bp, Homo sapiens
agttctgtatgttat

SEQ ID NO: 1398865 - DNA, 15 bp, Homo sapiens
cagttctgtatgtta

SEQ ID NO: 1398866 - DNA, 15 bp, Homo sapiens
acagttctgtatgtt

SEQ ID NO: 1398867 - DNA, 15 bp, Homo sapiens
cacagttctgtatgt

SEQ ID NO: 1398868 - DNA, 15 bp, Homo sapiens
gcacagttctgtatg

SEQ ID NO: 1398869 - DNA, 15 bp, Homo sapiens
tgcacagttctgtat

SEQ ID NO: 1398870 - DNA, 15 bp, Homo sapiens
atgcacagttctgta

SEQ ID NO: 1398871 - DNA, 15 bp, Homo sapiens
catgcacagttctgt

SEQ ID NO: 1398872 - DNA, 15 bp, Homo sapiens
tcatgcacagttctg

SEQ ID NO: 1398873 - DNA, 15 bp, Homo sapiens
ttcatgcacagttct

SEQ ID NO: 1398874 - DNA, 15 bp, Homo sapiens
tttcatgcacagttc

SEQ ID NO: 1398875 - DNA, 15 bp, Homo sapiens
atttcatgcacagtt

SEQ ID NO: 1398876 - DNA, 15 bp, Homo sapiens
catttcatgcacagt

SEQ ID NO: 1398877 - DNA, 15 bp, Homo sapiens
tcatttcatgcacag

SEQ ID NO: 1398878 - DNA, 15 bp, Homo sapiens
ttcatttcatgcaca

SEQ ID NO: 1398879 - DNA, 15 bp, Homo sapiens
tttcatttcatgcac

SEQ ID NO: 1398880 - DNA, 15 bp, Homo sapiens
ttttcatttcatgca

SEQ ID NO: 1398881 - DNA, 15 bp, Homo sapiens
tttttcatttcatgc

SEQ ID NO: 1398882 - DNA, 15 bp, Homo sapiens
ctttttcatttcatg

SEQ ID NO: 1398883 - DNA, 15 bp, Homo sapiens
actttttcatttcat

SEQ ID NO: 1398884 - DNA, 15 bp, Homo sapiens
tactttttcatttca

SEQ ID NO: 1398885 - DNA, 15 bp, Homo sapiens
gtactttttcatttc

SEQ ID NO: 1398886 - DNA, 15 bp, Homo sapiens
tgtactttttcattt

SEQ ID NO: 1398887 - DNA, 15 bp, Homo sapiens
ctgtactttttcatt

SEQ ID NO: 1398888 - DNA, 15 bp, Homo sapiens
gctgtactttttcat

SEQ ID NO: 1398889 - DNA, 15 bp, Homo sapiens
agctgtactttttca

SEQ ID NO: 1398890 - DNA, 15 bp, Homo sapiens
gagctgtactttttc

SEQ ID NO: 1398891 - DNA, 15 bp, Homo sapiens
tgagctgtacttttt

SEQ ID NO: 1398892 - DNA, 15 bp, Homo sapiens
ttgagctgtactttt

SEQ ID NO: 1398893 - DNA, 15 bp, Homo sapiens
cttgagctgtacttt

SEQ ID NO: 1398894 - DNA, 15 bp, Homo sapiens
acttgagctgtactt

SEQ ID NO: 1398895 - DNA, 15 bp, Homo sapiens
tacttgagctgtact

SEQ ID NO: 1398896 - DNA, 15 bp, Homo sapiens
atacttgagctgtac

SEQ ID NO: 1398897 - DNA, 15 bp, Homo sapiens
catacttgagctgta

SEQ ID NO: 1398898 - DNA, 15 bp, Homo sapiens
tcatacttgagctgt

SEQ ID NO: 1398899 - DNA, 15 bp, Homo sapiens
gtcatacttgagctg

SEQ ID NO: 1398900 - DNA, 15 bp, Homo sapiens
tgtcatacttgagct

SEQ ID NO: 1398901 - DNA, 15 bp, Homo sapiens
ttgtcatacttgagc

SEQ ID NO: 1398902 - DNA, 15 bp, Homo sapiens
tttgtcatacttgag

SEQ ID NO: 1398903 - DNA, 15 bp, Homo sapiens
gtttgtcatacttga

SEQ ID NO: 1398904 - DNA, 15 bp, Homo sapiens
tgtttgtcatacttg

SEQ ID NO: 1398905 - DNA, 15 bp, Homo sapiens
ctgtttgtcatactt

SEQ ID NO: 1398906 - DNA, 15 bp, Homo sapiens
tctgtttgtcatact

SEQ ID NO: 1398907 - DNA, 15 bp, Homo sapiens
atctgtttgtcatac

SEQ ID NO: 1398908 - DNA, 15 bp, Homo sapiens
aatctgtttgtcata

SEQ ID NO: 1398909 - DNA, 15 bp, Homo sapiens
gaatctgtttgtcat

SEQ ID NO: 1398910 - DNA, 15 bp, Homo sapiens
cgaatctgtttgtca

SEQ ID NO: 1398911 - DNA, 15 bp, Homo sapiens
acgaatctgtttgtc

SEQ ID NO: 1398912 - DNA, 15 bp, Homo sapiens
tacgaatctgtttgt

SEQ ID NO: 1398913 - DNA, 15 bp, Homo sapiens
ttacgaatctgtttg

SEQ ID NO: 1398914 - DNA, 15 bp, Homo sapiens
gttacgaatctgttt

SEQ ID NO: 1398915 - DNA, 15 bp, Homo sapiens
ggttacgaatctgtt

SEQ ID NO: 1398916 - DNA, 15 bp, Homo sapiens
tggttacgaatctgt

SEQ ID NO: 1398917 - DNA, 15 bp, Homo sapiens
gtggttacgaatctg

SEQ ID NO: 1398918 - DNA, 15 bp, Homo sapiens
ggtggttacgaatct

SEQ ID NO: 1398919 - DNA, 15 bp, Homo sapiens
cggtggttacgaatc

SEQ ID NO: 1398920 - DNA, 15 bp, Homo sapiens
acggtggttacgaat

SEQ ID NO: 1398921 - DNA, 15 bp, Homo sapiens
cacggtggttacgaa

SEQ ID NO: 1398922 - DNA, 15 bp, Homo sapiens
acacggtggttacga

SEQ ID NO: 1398923 - DNA, 15 bp, Homo sapiens
tacacggtggttacg

SEQ ID NO: 1398924 - DNA, 15 bp, Homo sapiens
ttacacggtggttac

SEQ ID NO: 1398925 - DNA, 15 bp, Homo sapiens
gttacacggtggtta

SEQ ID NO: 1398926 - DNA, 15 bp, Homo sapiens
ggttacacggtggtt

SEQ ID NO: 1398927 - DNA, 15 bp, Homo sapiens
tggttacacggtggt

SEQ ID NO: 1398928 - DNA, 15 bp, Homo sapiens
gtggttacacggtgg

SEQ ID NO: 1398929 - DNA, 15 bp, Homo sapiens
ggtggttacacggtg

SEQ ID NO: 1398930 - DNA, 15 bp, Homo sapiens
aggtggttacacggt

SEQ ID NO: 1398931 - DNA, 15 bp, Homo sapiens
aaggtggttacacgg

SEQ ID NO: 1398932 - DNA, 15 bp, Homo sapiens
taaggtggttacacg

SEQ ID NO: 1398933 - DNA, 15 bp, Homo sapiens
ttaaggtggttacac

SEQ ID NO: 1398934 - DNA, 15 bp, Homo sapiens
cttaaggtggttaca

SEQ ID NO: 1398935 - DNA, 15 bp, Homo sapiens
ccttaaggtggttac

SEQ ID NO: 1398936 - DNA, 15 bp, Homo sapiens
cccttaaggtggtta

SEQ ID NO: 1398937 - DNA, 15 bp, Homo sapiens
acccttaaggtggtt

SEQ ID NO: 1398938 - DNA, 15 bp, Homo sapiens
tacccttaaggtggt

SEQ ID NO: 1398939 - DNA, 15 bp, Homo sapiens
ttacccttaaggtgg

SEQ ID NO: 1398940 - DNA, 15 bp, Homo sapiens
tttacccttaaggtg

SEQ ID NO: 1398941 - DNA, 15 bp, Homo sapiens
ctttacccttaaggt

SEQ ID NO: 1398942 - DNA, 15 bp, Homo sapiens
tctttacccttaagg

SEQ ID NO: 1398943 - DNA, 15 bp, Homo sapiens
ttctttacccttaag

SEQ ID NO: 1398944 - DNA, 15 bp, Homo sapiens
tttctttacccttaa

SEQ ID NO: 1398945 - DNA, 15 bp, Homo sapiens
atttctttaccctta

SEQ ID NO: 1398946 - DNA, 15 bp, Homo sapiens
tatttctttaccctt

SEQ ID NO: 1398947 - DNA, 15 bp, Homo sapiens
gtatttctttaccct

SEQ ID NO: 1398948 - DNA, 15 bp, Homo sapiens
tgtatttctttaccc

SEQ ID NO: 1398949 - DNA, 15 bp, Homo sapiens
ttgtatttctttacc

SEQ ID NO: 1398950 - DNA, 15 bp, Homo sapiens
gttgtatttctttac

SEQ ID NO: 1398951 - DNA, 15 bp, Homo sapiens
tgttgtatttcttta

SEQ ID NO: 1398952 - DNA, 15 bp, Homo sapiens
atgttgtatttcttt

SEQ ID NO: 1398953 - DNA, 15 bp, Homo sapiens
aatgttgtatttctt

SEQ ID NO: 1398954 - DNA, 15 bp, Homo sapiens
aaatgttgtatttct

SEQ ID NO: 1398955 - DNA, 15 bp, Homo sapiens
aaaatgttgtatttc

SEQ ID NO: 1398956 - DNA, 15 bp, Homo sapiens
gaaaatgttgtattt

SEQ ID NO: 1398957 - DNA, 15 bp, Homo sapiens
agaaaatgttgtatt

SEQ ID NO: 1398958 - DNA, 15 bp, Homo sapiens
cagaaaatgttgtat

SEQ ID NO: 1398959 - DNA, 15 bp, Homo sapiens
acagaaaatgttgta

SEQ ID NO: 1398960 - DNA, 15 bp, Homo sapiens
tacagaaaatgttgt

SEQ ID NO: 1398961 - DNA, 15 bp, Homo sapiens
gtacagaaaatgttg

SEQ ID NO: 1398962 - DNA, 15 bp, Homo sapiens
ggtacagaaaatgtt

SEQ ID NO: 1398963 - DNA, 15 bp, Homo sapiens
gggtacagaaaatgt

SEQ ID NO: 1398964 - DNA, 15 bp, Homo sapiens
ggggtacagaaaatg

SEQ ID NO: 1398965 - DNA, 15 bp, Homo sapiens
tggggtacagaaaat

SEQ ID NO: 1398966 - DNA, 15 bp, Homo sapiens
ttggggtacagaaaa

SEQ ID NO: 1398967 - DNA, 15 bp, Homo sapiens
tttggggtacagaaa

SEQ ID NO: 1398968 - DNA, 15 bp, Homo sapiens
ttttggggtacagaa

SEQ ID NO: 1398969 - DNA, 15 bp, Homo sapiens
tttttggggtacaga

SEQ ID NO: 1398970 - DNA, 15 bp, Homo sapiens
gtttttggggtacag

SEQ ID NO: 1398971 - DNA, 15 bp, Homo sapiens
tgtttttggggtaca

SEQ ID NO: 1398972 - DNA, 15 bp, Homo sapiens
ggtgtttttggggta

SEQ ID NO: 1398973 - DNA, 15 bp, Homo sapiens
gggtgtttttggggt

SEQ ID NO: 1398974 - DNA, 15 bp, Homo sapiens
agggtgtttttgggg

SEQ ID NO: 1398975 - DNA, 15 bp, Homo sapiens
tagggtgtttttggg

SEQ ID NO: 1398976 - DNA, 15 bp, Homo sapiens
gtagggtgtttttgg

SEQ ID NO: 1398977 - DNA, 15 bp, Homo sapiens
tgtagggtgtttttg

SEQ ID NO: 1398978 - DNA, 15 bp, Homo sapiens
atgtagggtgttttt

SEQ ID NO: 1398979 - DNA, 15 bp, Homo sapiens
catgtagggtgtttt

SEQ ID NO: 1398980 - DNA, 15 bp, Homo sapiens
gcatgtagggtgttt

SEQ ID NO: 1398981 - DNA, 15 bp, Homo sapiens
ggcatgtagggtgtt

SEQ ID NO: 1398982 - DNA, 15 bp, Homo sapiens
gggcatgtagggtgt

SEQ ID NO: 1398983 - DNA, 15 bp, Homo sapiens
ggggcatgtagggtg

SEQ ID NO: 1398984 - DNA, 15 bp, Homo sapiens
gggggcatgtagggt

SEQ ID NO: 1398985 - DNA, 15 bp, Homo sapiens
agggggcatgtaggg

SEQ ID NO: 1398986 - DNA, 15 bp, Homo sapiens
gagggggcatgtagg

SEQ ID NO: 1398987 - DNA, 15 bp, Homo sapiens
agagggggcatgtag

SEQ ID NO: 1398988 - DNA, 15 bp, Homo sapiens
gagagggggcatgta

SEQ ID NO: 1398989 - DNA, 15 bp, Homo sapiens
tgagagggggcatgt

SEQ ID NO: 1398990 - DNA, 15 bp, Homo sapiens
ttgagagggggcatg

SEQ ID NO: 1398991 - DNA, 15 bp, Homo sapiens
attgagagggggcat

SEQ ID NO: 1398992 - DNA, 15 bp, Homo sapiens
tattgagagggggca

SEQ ID NO: 1398993 - DNA, 15 bp, Homo sapiens
ttattgagagggggc

SEQ ID NO: 1398994 - DNA, 15 bp, Homo sapiens
gttattgagaggggg

SEQ ID NO: 1398995 - DNA, 15 bp, Homo sapiens
agttattgagagggg

SEQ ID NO: 1398996 - DNA, 15 bp, Homo sapiens
tagttattgagaggg

SEQ ID NO: 1398997 - DNA, 15 bp, Homo sapiens
gtagttattgagagg

SEQ ID NO: 1398998 - DNA, 15 bp, Homo sapiens
tgtagttattgagag

SEQ ID NO: 1398999 - DNA, 15 bp, Homo sapiens
ctgtagttattgaga

SEQ ID NO: 1399000 - DNA, 15 bp, Homo sapiens
cctgtagttattgag

SEQ ID NO: 1399001 - DNA, 15 bp, Homo sapiens
gcctgtagttattga

SEQ ID NO: 1399002 - DNA, 15 bp, Homo sapiens
agcctgtagttattg

SEQ ID NO: 1399003 - DNA, 15 bp, Homo sapiens
gagcctgtagttatt

SEQ ID NO: 1399004 - DNA, 15 bp, Homo sapiens
agagcctgtagttat

SEQ ID NO: 1399005 - DNA, 15 bp, Homo sapiens
cagagcctgtagtta

SEQ ID NO: 1399006 - DNA, 15 bp, Homo sapiens
gcagagcctgtagtt

SEQ ID NO: 1399007 - DNA, 15 bp, Homo sapiens
ggcagagcctgtagt

SEQ ID NO: 1399008 - DNA, 15 bp, Homo sapiens
aggcagagcctgtag

SEQ ID NO: 1399009 - DNA, 15 bp, Homo sapiens
gaggcagagcctgta

SEQ ID NO: 1399010 - DNA, 15 bp, Homo sapiens
ggaggcagagcctgt

SEQ ID NO: 1399011 - DNA, 15 bp, Homo sapiens
tggaggcagagcctg

SEQ ID NO: 1399012 - DNA, 15 bp, Homo sapiens
gtggaggcagagcct

SEQ ID NO: 1399013 - DNA, 15 bp, Homo sapiens
ggtggaggcagagcc

SEQ ID NO: 1399014 - DNA, 15 bp, Homo sapiens
tggtggaggcagagc

SEQ ID NO: 1399015 - DNA, 15 bp, Homo sapiens
ttggtggaggcagag

SEQ ID NO: 1399016 - DNA, 15 bp, Homo sapiens
tttggtggaggcaga

SEQ ID NO: 1399017 - DNA, 15 bp, Homo sapiens
ctttggtggaggcag

SEQ ID NO: 1399018 - DNA, 15 bp, Homo sapiens
tctttggtggaggca

SEQ ID NO: 1399019 - DNA, 15 bp, Homo sapiens
gtctttggtggaggc

SEQ ID NO: 1399020 - DNA, 15 bp, Homo sapiens
tgtctttggtggagg

SEQ ID NO: 1399021 - DNA, 15 bp, Homo sapiens
ttgtctttggtggag

SEQ ID NO: 1399022 - DNA, 15 bp, Homo sapiens
gttgtctttggtgga

SEQ ID NO: 1399023 - DNA, 15 bp, Homo sapiens
agttgtctttggtgg

SEQ ID NO: 1399024 - DNA, 15 bp, Homo sapiens
tagttgtctttggtg

SEQ ID NO: 1399025 - DNA, 15 bp, Homo sapiens
atagttgtctttggt

SEQ ID NO: 1399026 - DNA, 15 bp, Homo sapiens
gatagttgtctttgg

SEQ ID NO: 1399027 - DNA, 15 bp, Homo sapiens
ggatagttgtctttg

SEQ ID NO: 1399028 - DNA, 15 bp, Homo sapiens
aggatagttgtcttt

SEQ ID NO: 1399029 - DNA, 15 bp, Homo sapiens
caggatagttgtctt

SEQ ID NO: 1399030 - DNA, 15 bp, Homo sapiens
tcaggatagttgtct

SEQ ID NO: 1399031 - DNA, 15 bp, Homo sapiens
gtcaggatagttgtc

SEQ ID NO: 1399032 - DNA, 15 bp, Homo sapiens
agtcaggatagttgt

SEQ ID NO: 1399033 - DNA, 15 bp, Homo sapiens
cagtcaggatagttg

SEQ ID NO: 1399034 - DNA, 15 bp, Homo sapiens
acagtcaggatagtt

SEQ ID NO: 1399035 - DNA, 15 bp, Homo sapiens
aacagtcaggatagt

SEQ ID NO: 1399036 - DNA, 15 bp, Homo sapiens
aaacagtcaggatag

SEQ ID NO: 1399037 - DNA, 15 bp, Homo sapiens
taaacagtcaggata

SEQ ID NO: 1399038 - DNA, 15 bp, Homo sapiens
ataaacagtcaggat

SEQ ID NO: 1399039 - DNA, 15 bp, Homo sapiens
cataaacagtcagga

SEQ ID NO: 1399040 - DNA, 15 bp, Homo sapiens
ccataaacagtcagg

SEQ ID NO: 1399041 - DNA, 15 bp, Homo sapiens
gccataaacagtcag

SEQ ID NO: 1399042 - DNA, 15 bp, Homo sapiens
tgccataaacagtca

SEQ ID NO: 1399043 - DNA, 15 bp, Homo sapiens
ttgccataaacagtc

SEQ ID NO: 1399044 - DNA, 15 bp, Homo sapiens
attgccataaacagt

SEQ ID NO: 1399045 - DNA, 15 bp, Homo sapiens
aattgccataaacag

SEQ ID NO: 1399046 - DNA, 15 bp, Homo sapiens
taattgccataaaca

SEQ ID NO: 1399047 - DNA, 15 bp, Homo sapiens
gtaattgccataaac

SEQ ID NO: 1399048 - DNA, 15 bp, Homo sapiens
agtaattgccataaa

SEQ ID NO: 1399049 - DNA, 15 bp, Homo sapiens
aagtaattgccataa

SEQ ID NO: 1399050 - DNA, 15 bp, Homo sapiens
aaagtaattgccata

SEQ ID NO: 1399051 - DNA, 15 bp, Homo sapiens
gaaagtaattgccat

SEQ ID NO: 1399052 - DNA, 15 bp, Homo sapiens
agaaagtaattgcca

SEQ ID NO: 1399053 - DNA, 15 bp, Homo sapiens
aagaaagtaattgcc

SEQ ID NO: 1399054 - DNA, 15 bp, Homo sapiens
taagaaagtaattgc

SEQ ID NO: 1399055 - DNA, 15 bp, Homo sapiens
gtaagaaagtaattg

SEQ ID NO: 1399056 - DNA, 15 bp, Homo sapiens
agtaagaaagtaatt

SEQ ID NO: 1399057 - DNA, 15 bp, Homo sapiens
aagtaagaaagtaat

SEQ ID NO: 1399058 - DNA, 15 bp, Homo sapiens
aaagtaagaaagtaa

SEQ ID NO: 1399059 - DNA, 15 bp, Homo sapiens
gaaagtaagaaagta

SEQ ID NO: 1399060 - DNA, 15 bp, Homo sapiens
ggaaagtaagaaagt

SEQ ID NO: 1399061 - DNA, 15 bp, Homo sapiens
aggaaagtaagaaag

SEQ ID NO: 1399062 - DNA, 15 bp, Homo sapiens
aaggaaagtaagaaa

SEQ ID NO: 1399063 - DNA, 15 bp, Homo sapiens
aaaggaaagtaagaa

SEQ ID NO: 1399064 - DNA, 15 bp, Homo sapiens
caaaggaaagtaaga

SEQ ID NO: 1399065 - DNA, 15 bp, Homo sapiens
acaaaggaaagtaag

SEQ ID NO: 1399066 - DNA, 15 bp, Homo sapiens
tacaaaggaaagtaa

SEQ ID NO: 1399067 - DNA, 15 bp, Homo sapiens
gtacaaaggaaagta

SEQ ID NO: 1399068 - DNA, 15 bp, Homo sapiens
agtacaaaggaaagt

SEQ ID NO: 1399069 - DNA, 15 bp, Homo sapiens
aagtacaaaggaaag

SEQ ID NO: 1399070 - DNA, 15 bp, Homo sapiens
aaagtacaaaggaaa

SEQ ID NO: 1399071 - DNA, 15 bp, Homo sapiens
aaaagtacaaaggaa

SEQ ID NO: 1399072 - DNA, 15 bp, Homo sapiens
taaaagtacaaagga

SEQ ID NO: 1399073 - DNA, 15 bp, Homo sapiens
ataaaagtacaaagg

SEQ ID NO: 1399074 - DNA, 15 bp, Homo sapiens
gataaaagtacaaag

SEQ ID NO: 1399075 - DNA, 15 bp, Homo sapiens
tgataaaagtacaaa

SEQ ID NO: 1399076 - DNA, 15 bp, Homo sapiens
gtgataaaagtacaa

SEQ ID NO: 1399077 - DNA, 15 bp, Homo sapiens
ggtgataaaagtaca

SEQ ID NO: 1399078 - DNA, 15 bp, Homo sapiens
aggtgataaaagtac

SEQ ID NO: 1399079 - DNA, 15 bp, Homo sapiens
taggtgataaaagta

SEQ ID NO: 1399080 - DNA, 15 bp, Homo sapiens
ttaggtgataaaagt

SEQ ID NO: 1399081 - DNA, 15 bp, Homo sapiens
cttaggtgataaaag

SEQ ID NO: 1399082 - DNA, 15 bp, Homo sapiens
ccttaggtgataaaa

SEQ ID NO: 1399083 - DNA, 15 bp, Homo sapiens
tccttaggtgataaa

SEQ ID NO: 1399084 - DNA, 15 bp, Homo sapiens
atccttaggtgataa

SEQ ID NO: 1399085 - DNA, 15 bp, Homo sapiens
tatccttaggtgata

SEQ ID NO: 1399086 - DNA, 15 bp, Homo sapiens
atatccttaggtgat

SEQ ID NO: 1399087 - DNA, 15 bp, Homo sapiens
tatatccttaggtga

SEQ ID NO: 1399088 - DNA, 15 bp, Homo sapiens
atatatccttaggtg

SEQ ID NO: 1399089 - DNA, 15 bp, Homo sapiens
gatatatccttaggt

SEQ ID NO: 1399090 - DNA, 15 bp, Homo sapiens
ggatatatccttagg

SEQ ID NO: 1399091 - DNA, 15 bp, Homo sapiens
aggatatatccttag

SEQ ID NO: 1399092 - DNA, 15 bp, Homo sapiens
ttaaggatatatcct

SEQ ID NO: 1399093 - DNA, 15 bp, Homo sapiens
tttaaggatatatcc

SEQ ID NO: 1399094 - DNA, 15 bp, Homo sapiens
gtttaaggatatatc

SEQ ID NO: 1399095 - DNA, 15 bp, Homo sapiens
tgtttaaggatatat

SEQ ID NO: 1399096 - DNA, 15 bp, Homo sapiens
atgtttaaggatata

SEQ ID NO: 1399097 - DNA, 15 bp, Homo sapiens
tatgtttaaggatat

SEQ ID NO: 1399098 - DNA, 15 bp, Homo sapiens
atatgtttaaggata

SEQ ID NO: 1399099 - DNA, 15 bp, Homo sapiens
tatatgtttaaggat

SEQ ID NO: 1399100 - DNA, 15 bp, Homo sapiens
atatatgtttaagga

SEQ ID NO: 1399101 - DNA, 15 bp, Homo sapiens
tatatatgtttaagg

SEQ ID NO: 1399102 - DNA, 15 bp, Homo sapiens
atatatatgtttaag

SEQ ID NO: 1399103 - DNA, 15 bp, Homo sapiens
aatatatatgtttaa

SEQ ID NO: 1399104 - DNA, 15 bp, Homo sapiens
aaatatatatgttta

SEQ ID NO: 1399105 - DNA, 15 bp, Homo sapiens
aaaatatatatgttt

SEQ ID NO: 1399106 - DNA, 15 bp, Homo sapiens
caaaatatatatgtt

SEQ ID NO: 1399107 - DNA, 15 bp, Homo sapiens
acaaaatatatatgt

SEQ ID NO: 1399108 - DNA, 15 bp, Homo sapiens
aacaaaatatatatg

SEQ ID NO: 1399109 - DNA, 15 bp, Homo sapiens
taacaaaatatatat

SEQ ID NO: 1399110 - DNA, 15 bp, Homo sapiens
ttaacaaaatatata

SEQ ID NO: 1399111 - DNA, 15 bp, Homo sapiens
attaacaaaatatat

SEQ ID NO: 1399112 - DNA, 15 bp, Homo sapiens
tattaacaaaatata

SEQ ID NO: 1399113 - DNA, 15 bp, Homo sapiens
ctattaacaaaatat

SEQ ID NO: 1399114 - DNA, 15 bp, Homo sapiens
actattaacaaaata

SEQ ID NO: 1399115 - DNA, 15 bp, Homo sapiens
aactattaacaaaat

SEQ ID NO: 1399116 - DNA, 15 bp, Homo sapiens
aaactattaacaaaa

SEQ ID NO: 1399117 - DNA, 15 bp, Homo sapiens
aaaactattaacaaa

SEQ ID NO: 1399118 - DNA, 15 bp, Homo sapiens
caaaactattaacaa

SEQ ID NO: 1399119 - DNA, 15 bp, Homo sapiens
gcaaaactattaaca

SEQ ID NO: 1399120 - DNA, 15 bp, Homo sapiens
ggcaaaactattaac

SEQ ID NO: 1399121 - DNA, 15 bp, Homo sapiens
aggcaaaactattaa

SEQ ID NO: 1399122 - DNA, 15 bp, Homo sapiens
gaggcaaaactatta

SEQ ID NO: 1399123 - DNA, 15 bp, Homo sapiens
tgaggcaaaactatt

SEQ ID NO: 1399124 - DNA, 15 bp, Homo sapiens
atgaggcaaaactat

SEQ ID NO: 1399125 - DNA, 15 bp, Homo sapiens
aatgaggcaaaacta

SEQ ID NO: 1399126 - DNA, 15 bp, Homo sapiens
aaatgaggcaaaact

SEQ ID NO: 1399127 - DNA, 15 bp, Homo sapiens
aaaatgaggcaaaac

SEQ ID NO: 1399128 - DNA, 15 bp, Homo sapiens
aaaaatgaggcaaaa

SEQ ID NO: 1399129 - DNA, 15 bp, Homo sapiens
taaaaatgaggcaaa

SEQ ID NO: 1399130 - DNA, 15 bp, Homo sapiens
ttaaaaatgaggcaa

SEQ ID NO: 1399131 - DNA, 15 bp, Homo sapiens
cttaaaaatgaggca

SEQ ID NO: 1399132 - DNA, 15 bp, Homo sapiens
gcttaaaaatgaggc

SEQ ID NO: 1399133 - DNA, 15 bp, Homo sapiens
tgcttaaaaatgagg

SEQ ID NO: 1399134 - DNA, 15 bp, Homo sapiens
atgcttaaaaatgag

SEQ ID NO: 1399135 - DNA, 15 bp, Homo sapiens
aatgcttaaaaatga

SEQ ID NO: 1399136 - DNA, 15 bp, Homo sapiens
taatgcttaaaaatg

SEQ ID NO: 1399137 - DNA, 15 bp, Homo sapiens
ataatgcttaaaaat

SEQ ID NO: 1399138 - DNA, 15 bp, Homo sapiens
tataatgcttaaaaa

SEQ ID NO: 1399139 - DNA, 15 bp, Homo sapiens
atataatgcttaaaa

SEQ ID NO: 1399140 - DNA, 15 bp, Homo sapiens
tatataatgcttaaa

SEQ ID NO: 1399141 - DNA, 15 bp, Homo sapiens
ttatataatgcttaa

SEQ ID NO: 1399142 - DNA, 15 bp, Homo sapiens
tttatataatgctta

SEQ ID NO: 1399143 - DNA, 15 bp, Homo sapiens
atttatataatgctt

SEQ ID NO: 1399144 - DNA, 15 bp, Homo sapiens
catttatataatgct

SEQ ID NO: 1399145 - DNA, 15 bp, Homo sapiens
ccatttatataatgc

SEQ ID NO: 1399146 - DNA, 15 bp, Homo sapiens
tccatttatataatg

SEQ ID NO: 1399147 - DNA, 15 bp, Homo sapiens
ttccatttatataat

SEQ ID NO: 1399148 - DNA, 15 bp, Homo sapiens
gattccatttatata

SEQ ID NO: 1399149 - DNA, 15 bp, Homo sapiens
tgattccatttatat

SEQ ID NO: 1399150 - DNA, 15 bp, Homo sapiens
gtgattccatttata

SEQ ID NO: 1399151 - DNA, 15 bp, Homo sapiens
tgtgattccatttat

SEQ ID NO: 1399152 - DNA, 15 bp, Homo sapiens
atgtgattccattta

SEQ ID NO: 1399153 - DNA, 15 bp, Homo sapiens
tatgtgattccattt

SEQ ID NO: 1399154 - DNA, 15 bp, Homo sapiens
ctatgtgattccatt

SEQ ID NO: 1399155 - DNA, 15 bp, Homo sapiens
tctatgtgattccat

SEQ ID NO: 1399156 - DNA, 15 bp, Homo sapiens
ttctatgtgattcca

SEQ ID NO: 1399157 - DNA, 15 bp, Homo sapiens
attctatgtgattcc

SEQ ID NO: 1399158 - DNA, 15 bp, Homo sapiens
tattctatgtgattc

SEQ ID NO: 1399159 - DNA, 15 bp, Homo sapiens
gtattctatgtgatt

SEQ ID NO: 1399160 - DNA, 15 bp, Homo sapiens
agtattctatgtgat

SEQ ID NO: 1399161 - DNA, 15 bp, Homo sapiens
aagtattctatgtga

SEQ ID NO: 1399162 - DNA, 15 bp, Homo sapiens
aaagtattctatgtg

SEQ ID NO: 1399163 - DNA, 15 bp, Homo sapiens
gaaagtattctatgt

SEQ ID NO: 1399164 - DNA, 15 bp, Homo sapiens
ggaaagtattctatg

SEQ ID NO: 1399165 - DNA, 15 bp, Homo sapiens
aggaaagtattctat

SEQ ID NO: 1399166 - DNA, 15 bp, Homo sapiens
aaggaaagtattcta

SEQ ID NO: 1399167 - DNA, 15 bp, Homo sapiens
aaaggaaagtattct

SEQ ID NO: 1399168 - DNA, 15 bp, Homo sapiens
gaaaggaaagtattc

SEQ ID NO: 1399169 - DNA, 15 bp, Homo sapiens
agaaaggaaagtatt

SEQ ID NO: 1399170 - DNA, 15 bp, Homo sapiens
cagaaaggaaagtat

SEQ ID NO: 1399171 - DNA, 15 bp, Homo sapiens
acagaaaggaaagta

SEQ ID NO: 1399172 - DNA, 15 bp, Homo sapiens
gacagaaaggaaagt

SEQ ID NO: 1399173 - DNA, 15 bp, Homo sapiens
agacagaaaggaaag

SEQ ID NO: 1399174 - DNA, 15 bp, Homo sapiens
cagacagaaaggaaa

SEQ ID NO: 1399175 - DNA, 15 bp, Homo sapiens
ccagacagaaaggaa

SEQ ID NO: 1399176 - DNA, 15 bp, Homo sapiens
accagacagaaagga

SEQ ID NO: 1399177 - DNA, 15 bp, Homo sapiens
aaccagacagaaagg

SEQ ID NO: 1399178 - DNA, 15 bp, Homo sapiens
aaaccagacagaaag

SEQ ID NO: 1399179 - DNA, 15 bp, Homo sapiens
aaaaccagacagaaa

SEQ ID NO: 1399180 - DNA, 15 bp, Homo sapiens
gaaaaccagacagaa

SEQ ID NO: 1399181 - DNA, 15 bp, Homo sapiens
agaaaaccagacaga

SEQ ID NO: 1399182 - DNA, 15 bp, Homo sapiens
aagaaaaccagacag

SEQ ID NO: 1399183 - DNA, 15 bp, Homo sapiens
gaagaaaaccagaca

SEQ ID NO: 1399184 - DNA, 15 bp, Homo sapiens
tgaagaaaaccagac

SEQ ID NO: 1399185 - DNA, 15 bp, Homo sapiens
gtgaagaaaaccaga

SEQ ID NO: 1399186 - DNA, 15 bp, Homo sapiens
tgtgaagaaaaccag

SEQ ID NO: 1399187 - DNA, 15 bp, Homo sapiens
atgtgaagaaaacca

SEQ ID NO: 1399188 - DNA, 15 bp, Homo sapiens
tatgtgaagaaaacc

SEQ ID NO: 1399189 - DNA, 15 bp, Homo sapiens
ctatgtgaagaaaac

SEQ ID NO: 1399190 - DNA, 15 bp, Homo sapiens
gctatgtgaagaaaa

SEQ ID NO: 1399191 - DNA, 15 bp, Homo sapiens
cgctatgtgaagaaa

SEQ ID NO: 1399192 - DNA, 15 bp, Homo sapiens
acgctatgtgaagaa

SEQ ID NO: 1399193 - DNA, 15 bp, Homo sapiens
aacgctatgtgaaga

SEQ ID NO: 1399194 - DNA, 15 bp, Homo sapiens
taacgctatgtgaag

SEQ ID NO: 1399195 - DNA, 15 bp, Homo sapiens
ataacgctatgtgaa

SEQ ID NO: 1399196 - DNA, 15 bp, Homo sapiens
cataacgctatgtga

SEQ ID NO: 1399197 - DNA, 15 bp, Homo sapiens
acataacgctatgtg

SEQ ID NO: 1399198 - DNA, 15 bp, Homo sapiens
aacataacgctatgt

SEQ ID NO: 1399199 - DNA, 15 bp, Homo sapiens
aaacataacgctatg

SEQ ID NO: 1399200 - DNA, 15 bp, Homo sapiens
caaacataacgctat

SEQ ID NO: 1399201 - DNA, 15 bp, Homo sapiens
acaaacataacgcta

SEQ ID NO: 1399202 - DNA, 15 bp, Homo sapiens
aacaaacataacgct

SEQ ID NO: 1399203 - DNA, 15 bp, Homo sapiens
taacaaacataacgc

SEQ ID NO: 1399204 - DNA, 15 bp, Homo sapiens
ctaacaaacataacg

SEQ ID NO: 1399205 - DNA, 15 bp, Homo sapiens
tctaacaaacataac

SEQ ID NO: 1399206 - DNA, 15 bp, Homo sapiens
atctaacaaacataa

SEQ ID NO: 1399207 - DNA, 15 bp, Homo sapiens
aatctaacaaacata

SEQ ID NO: 1399208 - DNA, 15 bp, Homo sapiens
aaatctaacaaacat

SEQ ID NO: 1399209 - DNA, 15 bp, Homo sapiens
taaatctaacaaaca

SEQ ID NO: 1399210 - DNA, 15 bp, Homo sapiens
ataaatctaacaaac

SEQ ID NO: 1399211 - DNA, 15 bp, Homo sapiens
aataaatctaacaaa

SEQ ID NO: 1399212 - DNA, 15 bp, Homo sapiens
gaataaatctaacaa

SEQ ID NO: 1399213 - DNA, 15 bp, Homo sapiens
ggaataaatctaaca

SEQ ID NO: 1399214 - DNA, 15 bp, Homo sapiens
tggaataaatctaac

SEQ ID NO: 1399215 - DNA, 15 bp, Homo sapiens
atggaataaatctaa

SEQ ID NO: 1399216 - DNA, 15 bp, Homo sapiens
aatggaataaatcta

SEQ ID NO: 1399217 - DNA, 15 bp, Homo sapiens
aaatggaataaatct

SEQ ID NO: 1399218 - DNA, 15 bp, Homo sapiens
caaatggaataaatc

SEQ ID NO: 1399219 - DNA, 15 bp, Homo sapiens
ccaaatggaataaat

SEQ ID NO: 1399220 - DNA, 15 bp, Homo sapiens
accaaatggaataaa

SEQ ID NO: 1399221 - DNA, 15 bp, Homo sapiens
aaccaaatggaataa

SEQ ID NO: 1399222 - DNA, 15 bp, Homo sapiens
taaccaaatggaata

SEQ ID NO: 1399223 - DNA, 15 bp, Homo sapiens
gtaaccaaatggaat

SEQ ID NO: 1399224 - DNA, 15 bp, Homo sapiens
tgtaaccaaatggaa

SEQ ID NO: 1399225 - DNA, 15 bp, Homo sapiens
ctgtaaccaaatgga

SEQ ID NO: 1399226 - DNA, 15 bp, Homo sapiens
actgtaaccaaatgg

SEQ ID NO: 1399227 - DNA, 15 bp, Homo sapiens
aactgtaaccaaatg

SEQ ID NO: 1399228 - DNA, 15 bp, Homo sapiens
gaactgtaaccaaat

SEQ ID NO: 1399229 - DNA, 15 bp, Homo sapiens
tgaactgtaaccaaa

SEQ ID NO: 1399230 - DNA, 15 bp, Homo sapiens
atgaactgtaaccaa

SEQ ID NO: 1399231 - DNA, 15 bp, Homo sapiens
aatgaactgtaacca

SEQ ID NO: 1399232 - DNA, 15 bp, Homo sapiens
gaatgaactgtaacc

SEQ ID NO: 1399233 - DNA, 15 bp, Homo sapiens
tgaatgaactgtaac

SEQ ID NO: 1399234 - DNA, 15 bp, Homo sapiens
atgaatgaactgtaa

SEQ ID NO: 1399235 - DNA, 15 bp, Homo sapiens
aatgaatgaactgta

SEQ ID NO: 1399236 - DNA, 15 bp, Homo sapiens
aaatgaatgaactgt

SEQ ID NO: 1399237 - DNA, 15 bp, Homo sapiens
aaaatgaatgaactg

SEQ ID NO: 1399238 - DNA, 15 bp, Homo sapiens
gaaaatgaatgaact

SEQ ID NO: 1399239 - DNA, 15 bp, Homo sapiens
tgaaaatgaatgaac

SEQ ID NO: 1399240 - DNA, 15 bp, Homo sapiens
atgaaaatgaatgaa

SEQ ID NO: 1399241 - DNA, 15 bp, Homo sapiens
aatgaaaatgaatga

SEQ ID NO: 1399242 - DNA, 15 bp, Homo sapiens
taatgaaaatgaatg

SEQ ID NO: 1399243 - DNA, 15 bp, Homo sapiens
gtaatgaaaatgaat

SEQ ID NO: 1399244 - DNA, 15 bp, Homo sapiens
agtaatgaaaatgaa

SEQ ID NO: 1399245 - DNA, 15 bp, Homo sapiens
cagtaatgaaaatga

SEQ ID NO: 1399246 - DNA, 15 bp, Homo sapiens
acagtaatgaaaatg

SEQ ID NO: 1399247 - DNA, 15 bp, Homo sapiens
tacagtaatgaaaat

SEQ ID NO: 1399248 - DNA, 15 bp, Homo sapiens
atacagtaatgaaaa

SEQ ID NO: 1399249 - DNA, 15 bp, Homo sapiens
gatacagtaatgaaa

SEQ ID NO: 1399250 - DNA, 15 bp, Homo sapiens
tgatacagtaatgaa

SEQ ID NO: 1399251 - DNA, 15 bp, Homo sapiens
atgatacagtaatga

SEQ ID NO: 1399252 - DNA, 15 bp, Homo sapiens
tatgatacagtaatg

SEQ ID NO: 1399253 - DNA, 15 bp, Homo sapiens
atatgatacagtaat

SEQ ID NO: 1399254 - DNA, 15 bp, Homo sapiens
aatatgatacagtaa

SEQ ID NO: 1399255 - DNA, 15 bp, Homo sapiens
gaatatgatacagta

SEQ ID NO: 1399256 - DNA, 15 bp, Homo sapiens
ggaatatgatacagt

SEQ ID NO: 1399257 - DNA, 15 bp, Homo sapiens
tggaatatgatacag

SEQ ID NO: 1399258 - DNA, 15 bp, Homo sapiens
atggaatatgataca

SEQ ID NO: 1399259 - DNA, 15 bp, Homo sapiens
aatggaatatgatac

SEQ ID NO: 1399260 - DNA, 15 bp, Homo sapiens
caatggaatatgata

SEQ ID NO: 1399261 - DNA, 15 bp, Homo sapiens
acaatggaatatgat

SEQ ID NO: 1399262 - DNA, 15 bp, Homo sapiens
tacaatggaatatga

SEQ ID NO: 1399263 - DNA, 15 bp, Homo sapiens
atacaatggaatatg

SEQ ID NO: 1399264 - DNA, 15 bp, Homo sapiens
tcatacaatggaata

SEQ ID NO: 1399265 - DNA, 15 bp, Homo sapiens
ctcatacaatggaat

SEQ ID NO: 1399266 - DNA, 15 bp, Homo sapiens
actcatacaatggaa

SEQ ID NO: 1399267 - DNA, 15 bp, Homo sapiens
tactcatacaatgga

SEQ ID NO: 1399268 - DNA, 15 bp, Homo sapiens
atactcatacaatgg

SEQ ID NO: 1399269 - DNA, 15 bp, Homo sapiens
catactcatacaatg

SEQ ID NO: 1399270 - DNA, 15 bp, Homo sapiens
acatactcatacaat

SEQ ID NO: 1399271 - DNA, 15 bp, Homo sapiens
gacatactcatacaa

SEQ ID NO: 1399272 - DNA, 15 bp, Homo sapiens
agacatactcataca

SEQ ID NO: 1399273 - DNA, 15 bp, Homo sapiens
cagacatactcatac

SEQ ID NO: 1399274 - DNA, 15 bp, Homo sapiens
acagacatactcata

SEQ ID NO: 1399275 - DNA, 15 bp, Homo sapiens
aacagacatactcat

SEQ ID NO: 1399276 - DNA, 15 bp, Homo sapiens
aaacagacatactca

SEQ ID NO: 1399277 - DNA, 15 bp, Homo sapiens
taaacagacatactc

SEQ ID NO: 1399278 - DNA, 15 bp, Homo sapiens
ataaacagacatact

SEQ ID NO: 1399279 - DNA, 15 bp, Homo sapiens
aataaacagacatac

SEQ ID NO: 1399280 - DNA, 15 bp, Homo sapiens
aaataaacagacata

SEQ ID NO: 1399281 - DNA, 15 bp, Homo sapiens
taaataaacagacat

SEQ ID NO: 1399282 - DNA, 15 bp, Homo sapiens
ataaataaacagaca

SEQ ID NO: 1399283 - DNA, 15 bp, Homo sapiens
aataaataaacagac

SEQ ID NO: 1399284 - DNA, 15 bp, Homo sapiens
gaataaataaacaga

SEQ ID NO: 1399285 - DNA, 15 bp, Homo sapiens
tgaataaataaacag

SEQ ID NO: 1399286 - DNA, 15 bp, Homo sapiens
atgaataaataaaca

SEQ ID NO: 1399287 - DNA, 15 bp, Homo sapiens
aatgaataaataaac

SEQ ID NO: 1399288 - DNA, 15 bp, Homo sapiens
gaatgaataaataaa

SEQ ID NO: 1399289 - DNA, 15 bp, Homo sapiens
agaatgaataaataa

SEQ ID NO: 1399290 - DNA, 15 bp, Homo sapiens
tagaatgaataaata

SEQ ID NO: 1399291 - DNA, 15 bp, Homo sapiens
gtagaatgaataaat

SEQ ID NO: 1399292 - DNA, 15 bp, Homo sapiens
agtagaatgaataaa

SEQ ID NO: 1399293 - DNA, 15 bp, Homo sapiens
cagtagaatgaataa

SEQ ID NO: 1399294 - DNA, 15 bp, Homo sapiens
gcagtagaatgaata

SEQ ID NO: 1399295 - DNA, 15 bp, Homo sapiens
agcagtagaatgaat

SEQ ID NO: 1399296 - DNA, 15 bp, Homo sapiens
cagcagtagaatgaa

SEQ ID NO: 1399297 - DNA, 15 bp, Homo sapiens
tcagcagtagaatga

SEQ ID NO: 1399298 - DNA, 15 bp, Homo sapiens
atcagcagtagaatg

SEQ ID NO: 1399299 - DNA, 15 bp, Homo sapiens
catcagcagtagaat

SEQ ID NO: 1399300 - DNA, 15 bp, Homo sapiens
ccatcagcagtagaa

SEQ ID NO: 1399301 - DNA, 15 bp, Homo sapiens
tccatcagcagtaga

SEQ ID NO: 1399302 - DNA, 15 bp, Homo sapiens
gtccatcagcagtag

SEQ ID NO: 1399303 - DNA, 15 bp, Homo sapiens
tgtccatcagcagta

SEQ ID NO: 1399304 - DNA, 15 bp, Homo sapiens
atgtccatcagcagt

SEQ ID NO: 1399305 - DNA, 15 bp, Homo sapiens
aatgtccatcagcag

SEQ ID NO: 1399306 - DNA, 15 bp, Homo sapiens
aaatgtccatcagca

SEQ ID NO: 1399307 - DNA, 15 bp, Homo sapiens
aaaatgtccatcagc

SEQ ID NO: 1399308 - DNA, 15 bp, Homo sapiens
caaaatgtccatcag

SEQ ID NO: 1399309 - DNA, 15 bp, Homo sapiens
tcaaaatgtccatca

SEQ ID NO: 1399310 - DNA, 15 bp, Homo sapiens
ttcaaaatgtccatc

SEQ ID NO: 1399311 - DNA, 15 bp, Homo sapiens
attcaaaatgtccat

SEQ ID NO: 1399312 - DNA, 15 bp, Homo sapiens
aattcaaaatgtcca

SEQ ID NO: 1399313 - DNA, 15 bp, Homo sapiens
caattcaaaatgtcc

SEQ ID NO: 1399314 - DNA, 15 bp, Homo sapiens
acaattcaaaatgtc

SEQ ID NO: 1399315 - DNA, 15 bp, Homo sapiens
gacaattcaaaatgt

SEQ ID NO: 1399316 - DNA, 15 bp, Homo sapiens
agacaattcaaaatg

SEQ ID NO: 1399317 - DNA, 15 bp, Homo sapiens
tagacaattcaaaat

SEQ ID NO: 1399318 - DNA, 15 bp, Homo sapiens
atagacaattcaaaa

SEQ ID NO: 1399319 - DNA, 15 bp, Homo sapiens
tatagacaattcaaa

SEQ ID NO: 1399320 - DNA, 15 bp, Homo sapiens
ctatagacaattcaa

SEQ ID NO: 1399321 - DNA, 15 bp, Homo sapiens
actatagacaattca

SEQ ID NO: 1399322 - DNA, 15 bp, Homo sapiens
aactatagacaattc

SEQ ID NO: 1399323 - DNA, 15 bp, Homo sapiens
aaactatagacaatt

SEQ ID NO: 1399324 - DNA, 15 bp, Homo sapiens
caaactatagacaat

SEQ ID NO: 1399325 - DNA, 15 bp, Homo sapiens
ccaaactatagacaa

SEQ ID NO: 1399326 - DNA, 15 bp, Homo sapiens
cccaaactatagaca

SEQ ID NO: 1399327 - DNA, 15 bp, Homo sapiens
tcccaaactatagac

SEQ ID NO: 1399328 - DNA, 15 bp, Homo sapiens
gtcccaaactataga

SEQ ID NO: 1399329 - DNA, 15 bp, Homo sapiens
agtcccaaactatag

SEQ ID NO: 1399330 - DNA, 15 bp, Homo sapiens
tagtcccaaactata

SEQ ID NO: 1399331 - DNA, 15 bp, Homo sapiens
gtagtcccaaactat

SEQ ID NO: 1399332 - DNA, 15 bp, Homo sapiens
agtagtcccaaacta

SEQ ID NO: 1399333 - DNA, 15 bp, Homo sapiens
tagtagtcccaaact

SEQ ID NO: 1399334 - DNA, 15 bp, Homo sapiens
gtagtagtcccaaac

SEQ ID NO: 1399335 - DNA, 15 bp, Homo sapiens
tgtagtagtcccaaa

SEQ ID NO: 1399336 - DNA, 15 bp, Homo sapiens
ttgtagtagtcccaa

SEQ ID NO: 1399337 - DNA, 15 bp, Homo sapiens
cttgtagtagtccca

SEQ ID NO: 1399338 - DNA, 15 bp, Homo sapiens
acttgtagtagtccc

SEQ ID NO: 1399339 - DNA, 15 bp, Homo sapiens
tacttgtagtagtcc

SEQ ID NO: 1399340 - DNA, 15 bp, Homo sapiens
ttacttgtagtagtc

SEQ ID NO: 1399341 - DNA, 15 bp, Homo sapiens
attacttgtagtagt

SEQ ID NO: 1399342 - DNA, 15 bp, Homo sapiens
aattacttgtagtag

SEQ ID NO: 1399343 - DNA, 15 bp, Homo sapiens
gaattacttgtagta

SEQ ID NO: 1399344 - DNA, 15 bp, Homo sapiens
agaattacttgtagt

SEQ ID NO: 1399345 - DNA, 15 bp, Homo sapiens
tagaattacttgtag

SEQ ID NO: 1399346 - DNA, 15 bp, Homo sapiens
gtagaattacttgta

SEQ ID NO: 1399347 - DNA, 15 bp, Homo sapiens
ggtagaattacttgt

SEQ ID NO: 1399348 - DNA, 15 bp, Homo sapiens
tggtagaattacttg

SEQ ID NO: 1399349 - DNA, 15 bp, Homo sapiens
atggtagaattactt

SEQ ID NO: 1399350 - DNA, 15 bp, Homo sapiens
catggtagaattact

SEQ ID NO: 1399351 - DNA, 15 bp, Homo sapiens
tcatggtagaattac

SEQ ID NO: 1399352 - DNA, 15 bp, Homo sapiens
ttcatggtagaatta

SEQ ID NO: 1399353 - DNA, 15 bp, Homo sapiens
attcatggtagaatt

SEQ ID NO: 1399354 - DNA, 15 bp, Homo sapiens
tattcatggtagaat

SEQ ID NO: 1399355 - DNA, 15 bp, Homo sapiens
atattcatggtagaa

SEQ ID NO: 1399356 - DNA, 15 bp, Homo sapiens
aatattcatggtaga

SEQ ID NO: 1399357 - DNA, 15 bp, Homo sapiens
gaatattcatggtag

SEQ ID NO: 1399358 - DNA, 15 bp, Homo sapiens
agaatattcatggta

SEQ ID NO: 1399359 - DNA, 15 bp, Homo sapiens
gagaatattcatggt

SEQ ID NO: 1399360 - DNA, 15 bp, Homo sapiens
tgagaatattcatgg

SEQ ID NO: 1399361 - DNA, 15 bp, Homo sapiens
atgagaatattcatg

SEQ ID NO: 1399362 - DNA, 15 bp, Homo sapiens
tatgagaatattcat

SEQ ID NO: 1399363 - DNA, 15 bp, Homo sapiens
atatgagaatattca

SEQ ID NO: 1399364 - DNA, 15 bp, Homo sapiens
tatatgagaatattc

SEQ ID NO: 1399365 - DNA, 15 bp, Homo sapiens
atatatgagaatatt

SEQ ID NO: 1399366 - DNA, 15 bp, Homo sapiens
catatatgagaatat

SEQ ID NO: 1399367 - DNA, 15 bp, Homo sapiens
acatatatgagaata

SEQ ID NO: 1399368 - DNA, 15 bp, Homo sapiens
gacatatatgagaat

SEQ ID NO: 1399369 - DNA, 15 bp, Homo sapiens
agacatatatgagaa

SEQ ID NO: 1399370 - DNA, 15 bp, Homo sapiens
gagacatatatgaga

SEQ ID NO: 1399371 - DNA, 15 bp, Homo sapiens
agagacatatatgag

SEQ ID NO: 1399372 - DNA, 15 bp, Homo sapiens
cagagacatatatga

SEQ ID NO: 1399373 - DNA, 15 bp, Homo sapiens
ccagagacatatatg

SEQ ID NO: 1399374 - DNA, 15 bp, Homo sapiens
accagagacatatat

SEQ ID NO: 1399375 - DNA, 15 bp, Homo sapiens
caccagagacatata

SEQ ID NO: 1399376 - DNA, 15 bp, Homo sapiens
gcaccagagacatat

SEQ ID NO: 1399377 - DNA, 15 bp, Homo sapiens
tgcaccagagacata

SEQ ID NO: 1399378 - DNA, 15 bp, Homo sapiens
gtgcaccagagacat

SEQ ID NO: 1399379 - DNA, 15 bp, Homo sapiens
tgtgcaccagagaca

SEQ ID NO: 1399380 - DNA, 15 bp, Homo sapiens
ttgtgcaccagagac

SEQ ID NO: 1399381 - DNA, 15 bp, Homo sapiens
cttgtgcaccagaga

SEQ ID NO: 1399382 - DNA, 15 bp, Homo sapiens
gcttgtgcaccagag

SEQ ID NO: 1399383 - DNA, 15 bp, Homo sapiens
tgcttgtgcaccaga

SEQ ID NO: 1399384 - DNA, 15 bp, Homo sapiens
gtgcttgtgcaccag

SEQ ID NO: 1399385 - DNA, 15 bp, Homo sapiens
tgtgcttgtgcacca

SEQ ID NO: 1399386 - DNA, 15 bp, Homo sapiens
gtgtgcttgtgcacc

SEQ ID NO: 1399387 - DNA, 15 bp, Homo sapiens
tgtgtgcttgtgcac

SEQ ID NO: 1399388 - DNA, 15 bp, Homo sapiens
gtgtgtgcttgtgca

SEQ ID NO: 1399389 - DNA, 15 bp, Homo sapiens
tgtgtgtgcttgtgc

SEQ ID NO: 1399390 - DNA, 15 bp, Homo sapiens
gtgtgtgtgcttgtg

SEQ ID NO: 1399391 - DNA, 15 bp, Homo sapiens
agtgtgtgtgcttgt

SEQ ID NO: 1399392 - DNA, 15 bp, Homo sapiens
aagtgtgtgtgcttg

SEQ ID NO: 1399393 - DNA, 15 bp, Homo sapiens
gaagtgtgtgtgctt

SEQ ID NO: 1399394 - DNA, 15 bp, Homo sapiens
ggaagtgtgtgtgct

SEQ ID NO: 1399395 - DNA, 15 bp, Homo sapiens
tggaagtgtgtgtgc

SEQ ID NO: 1399396 - DNA, 15 bp, Homo sapiens
atggaagtgtgtgtg

SEQ ID NO: 1399397 - DNA, 15 bp, Homo sapiens
gatggaagtgtgtgt

SEQ ID NO: 1399398 - DNA, 15 bp, Homo sapiens
cgatggaagtgtgtg

SEQ ID NO: 1399399 - DNA, 15 bp, Homo sapiens
ccgatggaagtgtgt

SEQ ID NO: 1399400 - DNA, 15 bp, Homo sapiens
cccgatggaagtgtg

SEQ ID NO: 1399401 - DNA, 15 bp, Homo sapiens
acccgatggaagtgt

SEQ ID NO: 1399402 - DNA, 15 bp, Homo sapiens
tacccgatggaagtg

SEQ ID NO: 1399403 - DNA, 15 bp, Homo sapiens
atacccgatggaagt

SEQ ID NO: 1399404 - DNA, 15 bp, Homo sapiens
tatacccgatggaag

SEQ ID NO: 1399405 - DNA, 15 bp, Homo sapiens
ttatacccgatggaa

SEQ ID NO: 1399406 - DNA, 15 bp, Homo sapiens
tttatacccgatgga

SEQ ID NO: 1399407 - DNA, 15 bp, Homo sapiens
gtttatacccgatgg

SEQ ID NO: 1399408 - DNA, 15 bp, Homo sapiens
ggtttatacccgatg

SEQ ID NO: 1399409 - DNA, 15 bp, Homo sapiens
aggtttatacccgat

SEQ ID NO: 1399410 - DNA, 15 bp, Homo sapiens
caggtttatacccga

SEQ ID NO: 1399411 - DNA, 15 bp, Homo sapiens
ccaggtttatacccg

SEQ ID NO: 1399412 - DNA, 15 bp, Homo sapiens
cccaggtttataccc

SEQ ID NO: 1399413 - DNA, 15 bp, Homo sapiens
tcccaggtttatacc

SEQ ID NO: 1399414 - DNA, 15 bp, Homo sapiens
ttcccaggtttatac

SEQ ID NO: 1399415 - DNA, 15 bp, Homo sapiens
attcccaggtttata

SEQ ID NO: 1399416 - DNA, 15 bp, Homo sapiens
cattcccaggtttat

SEQ ID NO: 1399417 - DNA, 15 bp, Homo sapiens
ccattcccaggttta

SEQ ID NO: 1399418 - DNA, 15 bp, Homo sapiens
tccattcccaggttt

SEQ ID NO: 1399419 - DNA, 15 bp, Homo sapiens
ttccattcccaggtt

SEQ ID NO: 1399420 - DNA, 15 bp, Homo sapiens
attccattcccaggt

SEQ ID NO: 1399421 - DNA, 15 bp, Homo sapiens
tattccattcccagg

SEQ ID NO: 1399422 - DNA, 15 bp, Homo sapiens
atattccattcccag

SEQ ID NO: 1399423 - DNA, 15 bp, Homo sapiens
aatattccattccca

SEQ ID NO: 1399424 - DNA, 15 bp, Homo sapiens
aaatattccattccc

SEQ ID NO: 1399425 - DNA, 15 bp, Homo sapiens
taaatattccattcc

SEQ ID NO: 1399426 - DNA, 15 bp, Homo sapiens
ttaaatattccattc

SEQ ID NO: 1399427 - DNA, 15 bp, Homo sapiens
tttaaatattccatt

SEQ ID NO: 1399428 - DNA, 15 bp, Homo sapiens
atttaaatattccat

SEQ ID NO: 1399429 - DNA, 15 bp, Homo sapiens
gatttaaatattcca

SEQ ID NO: 1399430 - DNA, 15 bp, Homo sapiens
tgatttaaatattcc

SEQ ID NO: 1399431 - DNA, 15 bp, Homo sapiens
atgatttaaatattc

SEQ ID NO: 1399432 - DNA, 15 bp, Homo sapiens
tatgatttaaatatt

SEQ ID NO: 1399433 - DNA, 15 bp, Homo sapiens
ctatgatttaaatat

SEQ ID NO: 1399434 - DNA, 15 bp, Homo sapiens
tctatgatttaaata

SEQ ID NO: 1399435 - DNA, 15 bp, Homo sapiens
ctctatgatttaaat

SEQ ID NO: 1399436 - DNA, 15 bp, Homo sapiens
actctatgatttaaa

SEQ ID NO: 1399437 - DNA, 15 bp, Homo sapiens
tactctatgatttaa

SEQ ID NO: 1399438 - DNA, 15 bp, Homo sapiens
atactctatgattta

SEQ ID NO: 1399439 - DNA, 15 bp, Homo sapiens
gatactctatgattt

SEQ ID NO: 1399440 - DNA, 15 bp, Homo sapiens
ggatactctatgatt

SEQ ID NO: 1399441 - DNA, 15 bp, Homo sapiens
tggatactctatgat

SEQ ID NO: 1399442 - DNA, 15 bp, Homo sapiens
atggatactctatga

SEQ ID NO: 1399443 - DNA, 15 bp, Homo sapiens
tatggatactctatg

SEQ ID NO: 1399444 - DNA, 15 bp, Homo sapiens
atatggatactctat

SEQ ID NO: 1399445 - DNA, 15 bp, Homo sapiens
gatatggatactcta

SEQ ID NO: 1399446 - DNA, 15 bp, Homo sapiens
agatatggatactct

SEQ ID NO: 1399447 - DNA, 15 bp, Homo sapiens
aagatatggatactc

SEQ ID NO: 1399448 - DNA, 15 bp, Homo sapiens
taagatatggatact

SEQ ID NO: 1399449 - DNA, 15 bp, Homo sapiens
ttaagatatggatac

SEQ ID NO: 1399450 - DNA, 15 bp, Homo sapiens
tttaagatatggata

SEQ ID NO: 1399451 - DNA, 15 bp, Homo sapiens
ctttaagatatggat

SEQ ID NO: 1399452 - DNA, 15 bp, Homo sapiens
actttaagatatgga

SEQ ID NO: 1399453 - DNA, 15 bp, Homo sapiens
aactttaagatatgg

SEQ ID NO: 1399454 - DNA, 15 bp, Homo sapiens
taactttaagatatg

SEQ ID NO: 1399455 - DNA, 15 bp, Homo sapiens
ttaactttaagatat

SEQ ID NO: 1399456 - DNA, 15 bp, Homo sapiens
cttaactttaagata

SEQ ID NO: 1399457 - DNA, 15 bp, Homo sapiens
acttaactttaagat

SEQ ID NO: 1399458 - DNA, 15 bp, Homo sapiens
tacttaactttaaga

SEQ ID NO: 1399459 - DNA, 15 bp, Homo sapiens
ctacttaactttaag

SEQ ID NO: 1399460 - DNA, 15 bp, Homo sapiens
tctacttaactttaa

SEQ ID NO: 1399461 - DNA, 15 bp, Homo sapiens
atctacttaacttta

SEQ ID NO: 1399462 - DNA, 15 bp, Homo sapiens
tatctacttaacttt

SEQ ID NO: 1399463 - DNA, 15 bp, Homo sapiens
ttatctacttaactt

SEQ ID NO: 1399464 - DNA, 15 bp, Homo sapiens
attatctacttaact

SEQ ID NO: 1399465 - DNA, 15 bp, Homo sapiens
cattatctacttaac

SEQ ID NO: 1399466 - DNA, 15 bp, Homo sapiens
gcattatctacttaa

SEQ ID NO: 1399467 - DNA, 15 bp, Homo sapiens
ggcattatctactta

SEQ ID NO: 1399468 - DNA, 15 bp, Homo sapiens
tggcattatctactt

SEQ ID NO: 1399469 - DNA, 15 bp, Homo sapiens
ttggcattatctact

SEQ ID NO: 1399470 - DNA, 15 bp, Homo sapiens
cttggcattatctac

SEQ ID NO: 1399471 - DNA, 15 bp, Homo sapiens
acttggcattatcta

SEQ ID NO: 1399472 - DNA, 15 bp, Homo sapiens
tacttggcattatct

SEQ ID NO: 1399473 - DNA, 15 bp, Homo sapiens
ctacttggcattatc

SEQ ID NO: 1399474 - DNA, 15 bp, Homo sapiens
actacttggcattat

SEQ ID NO: 1399475 - DNA, 15 bp, Homo sapiens
aactacttggcatta

SEQ ID NO: 1399476 - DNA, 15 bp, Homo sapiens
aaactacttggcatt

SEQ ID NO: 1399477 - DNA, 15 bp, Homo sapiens
aaaactacttggcat

SEQ ID NO: 1399478 - DNA, 15 bp, Homo sapiens
gaaaactacttggca

SEQ ID NO: 1399479 - DNA, 15 bp, Homo sapiens
ggaaaactacttggc

SEQ ID NO: 1399480 - DNA, 15 bp, Homo sapiens
tggaaaactacttgg

SEQ ID NO: 1399481 - DNA, 15 bp, Homo sapiens
ttggaaaactacttg

SEQ ID NO: 1399482 - DNA, 15 bp, Homo sapiens
tttggaaaactactt

SEQ ID NO: 1399483 - DNA, 15 bp, Homo sapiens
ttttggaaaactact

SEQ ID NO: 1399484 - DNA, 15 bp, Homo sapiens
attttggaaaactac

SEQ ID NO: 1399485 - DNA, 15 bp, Homo sapiens
cattttggaaaacta

SEQ ID NO: 1399486 - DNA, 15 bp, Homo sapiens
acattttggaaaact

SEQ ID NO: 1399487 - DNA, 15 bp, Homo sapiens
tacattttggaaaac

SEQ ID NO: 1399488 - DNA, 15 bp, Homo sapiens
atacattttggaaaa

SEQ ID NO: 1399489 - DNA, 15 bp, Homo sapiens
tatacattttggaaa

SEQ ID NO: 1399490 - DNA, 15 bp, Homo sapiens
atatacattttggaa

SEQ ID NO: 1399491 - DNA, 15 bp, Homo sapiens
catatacattttgga

SEQ ID NO: 1399492 - DNA, 15 bp, Homo sapiens
gcatatacattttgg

SEQ ID NO: 1399493 - DNA, 15 bp, Homo sapiens
tgcatatacattttg

SEQ ID NO: 1399494 - DNA, 15 bp, Homo sapiens
ttgcatatacatttt

SEQ ID NO: 1399495 - DNA, 15 bp, Homo sapiens
tttgcatatacattt

SEQ ID NO: 1399496 - DNA, 15 bp, Homo sapiens
atttgcatatacatt

SEQ ID NO: 1399497 - DNA, 15 bp, Homo sapiens
tatttgcatatacat

SEQ ID NO: 1399498 - DNA, 15 bp, Homo sapiens
atatttgcatataca

SEQ ID NO: 1399499 - DNA, 15 bp, Homo sapiens
tatatttgcatatac

SEQ ID NO: 1399500 - DNA, 15 bp, Homo sapiens
gtatatttgcatata

SEQ ID NO: 1399501 - DNA, 15 bp, Homo sapiens
tgtatatttgcatat

SEQ ID NO: 1399502 - DNA, 15 bp, Homo sapiens
atgtatatttgcata

SEQ ID NO: 1399503 - DNA, 15 bp, Homo sapiens
aatgtatatttgcat

SEQ ID NO: 1399504 - DNA, 15 bp, Homo sapiens
gaatgtatatttgca

SEQ ID NO: 1399505 - DNA, 15 bp, Homo sapiens
agaatgtatatttgc

SEQ ID NO: 1399506 - DNA, 15 bp, Homo sapiens
gagaatgtatatttg

SEQ ID NO: 1399507 - DNA, 15 bp, Homo sapiens
tgagaatgtatattt

SEQ ID NO: 1399508 - DNA, 15 bp, Homo sapiens
gtgagaatgtatatt

SEQ ID NO: 1399509 - DNA, 15 bp, Homo sapiens
ggtgagaatgtatat

SEQ ID NO: 1399510 - DNA, 15 bp, Homo sapiens
tggtgagaatgtata

SEQ ID NO: 1399511 - DNA, 15 bp, Homo sapiens
ttggtgagaatgtat

SEQ ID NO: 1399512 - DNA, 15 bp, Homo sapiens
gttggtgagaatgta

SEQ ID NO: 1399513 - DNA, 15 bp, Homo sapiens
ggttggtgagaatgt

SEQ ID NO: 1399514 - DNA, 15 bp, Homo sapiens
gggttggtgagaatg

SEQ ID NO: 1399515 - DNA, 15 bp, Homo sapiens
agggttggtgagaat

SEQ ID NO: 1399516 - DNA, 15 bp, Homo sapiens
tagggttggtgagaa

SEQ ID NO: 1399517 - DNA, 15 bp, Homo sapiens
atagggttggtgaga

SEQ ID NO: 1399518 - DNA, 15 bp, Homo sapiens
catagggttggtgag

SEQ ID NO: 1399519 - DNA, 15 bp, Homo sapiens
ccatagggttggtga

SEQ ID NO: 1399520 - DNA, 15 bp, Homo sapiens
cccatagggttggtg

SEQ ID NO: 1399521 - DNA, 15 bp, Homo sapiens
acccatagggttggt

SEQ ID NO: 1399522 - DNA, 15 bp, Homo sapiens
tacccatagggttgg

SEQ ID NO: 1399523 - DNA, 15 bp, Homo sapiens
atacccatagggttg

SEQ ID NO: 1399524 - DNA, 15 bp, Homo sapiens
catacccatagggtt

SEQ ID NO: 1399525 - DNA, 15 bp, Homo sapiens
tcatacccatagggt

SEQ ID NO: 1399526 - DNA, 15 bp, Homo sapiens
ctcatacccataggg

SEQ ID NO: 1399527 - DNA, 15 bp, Homo sapiens
tctcatacccatagg

SEQ ID NO: 1399528 - DNA, 15 bp, Homo sapiens
ctctcatacccatag

SEQ ID NO: 1399529 - DNA, 15 bp, Homo sapiens
actctcatacccata

SEQ ID NO: 1399530 - DNA, 15 bp, Homo sapiens
aactctcatacccat

SEQ ID NO: 1399531 - DNA, 15 bp, Homo sapiens
gaactctcataccca

SEQ ID NO: 1399532 - DNA, 15 bp, Homo sapiens
agaactctcataccc

SEQ ID NO: 1399533 - DNA, 15 bp, Homo sapiens
aagaactctcatacc

SEQ ID NO: 1399534 - DNA, 15 bp, Homo sapiens
taagaactctcatac

SEQ ID NO: 1399535 - DNA, 15 bp, Homo sapiens
gtaagaactctcata

SEQ ID NO: 1399536 - DNA, 15 bp, Homo sapiens
agtaagaactctcat

SEQ ID NO: 1399537 - DNA, 15 bp, Homo sapiens
cagtaagaactctca

SEQ ID NO: 1399538 - DNA, 15 bp, Homo sapiens
gcagtaagaactctc

SEQ ID NO: 1399539 - DNA, 15 bp, Homo sapiens
agcagtaagaactct

SEQ ID NO: 1399540 - DNA, 15 bp, Homo sapiens
gagcagtaagaactc

SEQ ID NO: 1399541 - DNA, 15 bp, Homo sapiens
ggagcagtaagaact

SEQ ID NO: 1399542 - DNA, 15 bp, Homo sapiens
tggagcagtaagaac

SEQ ID NO: 1399543 - DNA, 15 bp, Homo sapiens
ttggagcagtaagaa

SEQ ID NO: 1399544 - DNA, 15 bp, Homo sapiens
tttggagcagtaaga

SEQ ID NO: 1399545 - DNA, 15 bp, Homo sapiens
atttggagcagtaag

SEQ ID NO: 1399546 - DNA, 15 bp, Homo sapiens
gatttggagcagtaa

SEQ ID NO: 1399547 - DNA, 15 bp, Homo sapiens
agatttggagcagta

SEQ ID NO: 1399548 - DNA, 15 bp, Homo sapiens
aagatttggagcagt

SEQ ID NO: 1399549 - DNA, 15 bp, Homo sapiens
aaagatttggagcag

SEQ ID NO: 1399550 - DNA, 15 bp, Homo sapiens
caaagatttggagca

SEQ ID NO: 1399551 - DNA, 15 bp, Homo sapiens
gcaaagatttggagc

SEQ ID NO: 1399552 - DNA, 15 bp, Homo sapiens
ggcaaagatttggag

SEQ ID NO: 1399553 - DNA, 15 bp, Homo sapiens
tggcaaagatttgga

SEQ ID NO: 1399554 - DNA, 15 bp, Homo sapiens
ttggcaaagatttgg

SEQ ID NO: 1399555 - DNA, 15 bp, Homo sapiens
gttggcaaagatttg

SEQ ID NO: 1399556 - DNA, 15 bp, Homo sapiens
tgttggcaaagattt

SEQ ID NO: 1399557 - DNA, 15 bp, Homo sapiens
atgttggcaaagatt

SEQ ID NO: 1399558 - DNA, 15 bp, Homo sapiens
aatgttggcaaagat

SEQ ID NO: 1399559 - DNA, 15 bp, Homo sapiens
aaatgttggcaaaga

SEQ ID NO: 1399560 - DNA, 15 bp, Homo sapiens
caaatgttggcaaag

SEQ ID NO: 1399561 - DNA, 15 bp, Homo sapiens
ccaaatgttggcaaa

SEQ ID NO: 1399562 - DNA, 15 bp, Homo sapiens
accaaatgttggcaa

SEQ ID NO: 1399563 - DNA, 15 bp, Homo sapiens
taccaaatgttggca

SEQ ID NO: 1399564 - DNA, 15 bp, Homo sapiens
ttaccaaatgttggc

SEQ ID NO: 1399565 - DNA, 15 bp, Homo sapiens
attaccaaatgttgg

SEQ ID NO: 1399566 - DNA, 15 bp, Homo sapiens
tattaccaaatgttg

SEQ ID NO: 1399567 - DNA, 15 bp, Homo sapiens
atattaccaaatgtt

SEQ ID NO: 1399568 - DNA, 15 bp, Homo sapiens
gatattaccaaatgt

SEQ ID NO: 1399569 - DNA, 15 bp, Homo sapiens
agatattaccaaatg

SEQ ID NO: 1399570 - DNA, 15 bp, Homo sapiens
cagatattaccaaat

SEQ ID NO: 1399571 - DNA, 15 bp, Homo sapiens
acagatattaccaaa

SEQ ID NO: 1399572 - DNA, 15 bp, Homo sapiens
tacagatattaccaa

SEQ ID NO: 1399573 - DNA, 15 bp, Homo sapiens
ttacagatattacca

SEQ ID NO: 1399574 - DNA, 15 bp, Homo sapiens
attacagatattacc

SEQ ID NO: 1399575 - DNA, 15 bp, Homo sapiens
aattacagatattac

SEQ ID NO: 1399576 - DNA, 15 bp, Homo sapiens
aaattacagatatta

SEQ ID NO: 1399577 - DNA, 15 bp, Homo sapiens
aaaattacagatatt

SEQ ID NO: 1399578 - DNA, 15 bp, Homo sapiens
taaaattacagatat

SEQ ID NO: 1399579 - DNA, 15 bp, Homo sapiens
ttaaaattacagata

SEQ ID NO: 1399580 - DNA, 15 bp, Homo sapiens
attaaaattacagat

SEQ ID NO: 1399581 - DNA, 15 bp, Homo sapiens
aattaaaattacaga

SEQ ID NO: 1399582 - DNA, 15 bp, Homo sapiens
aaattaaaattacag

SEQ ID NO: 1399583 - DNA, 15 bp, Homo sapiens
taaattaaaattaca

SEQ ID NO: 1399584 - DNA, 15 bp, Homo sapiens
ctaaattaaaattac

SEQ ID NO: 1399585 - DNA, 15 bp, Homo sapiens
gctaaattaaaatta

SEQ ID NO: 1399586 - DNA, 15 bp, Homo sapiens
agctaaattaaaatt

SEQ ID NO: 1399587 - DNA, 15 bp, Homo sapiens
tagctaaattaaaat

SEQ ID NO: 1399588 - DNA, 15 bp, Homo sapiens
ttagctaaattaaaa

SEQ ID NO: 1399589 - DNA, 15 bp, Homo sapiens
attagctaaattaaa

SEQ ID NO: 1399590 - DNA, 15 bp, Homo sapiens
cattagctaaattaa

SEQ ID NO: 1399591 - DNA, 15 bp, Homo sapiens
acattagctaaatta

SEQ ID NO: 1399592 - DNA, 15 bp, Homo sapiens
tacattagctaaatt

SEQ ID NO: 1399593 - DNA, 15 bp, Homo sapiens
ctacattagctaaat

SEQ ID NO: 1399594 - DNA, 15 bp, Homo sapiens
actacattagctaaa

SEQ ID NO: 1399595 - DNA, 15 bp, Homo sapiens
cactacattagctaa

SEQ ID NO: 1399596 - DNA, 15 bp, Homo sapiens
tcactacattagcta

SEQ ID NO: 1399597 - DNA, 15 bp, Homo sapiens
atcactacattagct

SEQ ID NO: 1399598 - DNA, 15 bp, Homo sapiens
tatcactacattagc

SEQ ID NO: 1399599 - DNA, 15 bp, Homo sapiens
atatcactacattag

SEQ ID NO: 1399600 - DNA, 15 bp, Homo sapiens
aatatcactacatta

SEQ ID NO: 1399601 - DNA, 15 bp, Homo sapiens
aaatatcactacatt

SEQ ID NO: 1399602 - DNA, 15 bp, Homo sapiens
gaaatatcactacat

SEQ ID NO: 1399603 - DNA, 15 bp, Homo sapiens
ggaaatatcactaca

SEQ ID NO: 1399604 - DNA, 15 bp, Homo sapiens
aggaaatatcactac

SEQ ID NO: 1399605 - DNA, 15 bp, Homo sapiens
gaggaaatatcacta

SEQ ID NO: 1399606 - DNA, 15 bp, Homo sapiens
tgaggaaatatcact

SEQ ID NO: 1399607 - DNA, 15 bp, Homo sapiens
atgaggaaatatcac

SEQ ID NO: 1399608 - DNA, 15 bp, Homo sapiens
catgaggaaatatca

SEQ ID NO: 1399609 - DNA, 15 bp, Homo sapiens
tcatgaggaaatatc

SEQ ID NO: 1399610 - DNA, 15 bp, Homo sapiens
atcatgaggaaatat

SEQ ID NO: 1399611 - DNA, 15 bp, Homo sapiens
aatcatgaggaaata

SEQ ID NO: 1399612 - DNA, 15 bp, Homo sapiens
gaatcatgaggaaat

SEQ ID NO: 1399613 - DNA, 15 bp, Homo sapiens
agaatcatgaggaaa

SEQ ID NO: 1399614 - DNA, 15 bp, Homo sapiens
cagaatcatgaggaa

SEQ ID NO: 1399615 - DNA, 15 bp, Homo sapiens
tcagaatcatgagga

SEQ ID NO: 1399616 - DNA, 15 bp, Homo sapiens
atcagaatcatgagg

SEQ ID NO: 1399617 - DNA, 15 bp, Homo sapiens
catcagaatcatgag

SEQ ID NO: 1399618 - DNA, 15 bp, Homo sapiens
tcatcagaatcatga

SEQ ID NO: 1399619 - DNA, 15 bp, Homo sapiens
gtcatcagaatcatg

SEQ ID NO: 1399620 - DNA, 15 bp, Homo sapiens
agtcatcagaatcat

SEQ ID NO: 1399621 - DNA, 15 bp, Homo sapiens
tagtcatcagaatca

SEQ ID NO: 1399622 - DNA, 15 bp, Homo sapiens
ttagtcatcagaatc

SEQ ID NO: 1399623 - DNA, 15 bp, Homo sapiens
attagtcatcagaat

SEQ ID NO: 1399624 - DNA, 15 bp, Homo sapiens
cattagtcatcagaa

SEQ ID NO: 1399625 - DNA, 15 bp, Homo sapiens
acattagtcatcaga

SEQ ID NO: 1399626 - DNA, 15 bp, Homo sapiens
aacattagtcatcag

SEQ ID NO: 1399627 - DNA, 15 bp, Homo sapiens
taacattagtcatca

SEQ ID NO: 1399628 - DNA, 15 bp, Homo sapiens
ataacattagtcatc

SEQ ID NO: 1399629 - DNA, 15 bp, Homo sapiens
gataacattagtcat

SEQ ID NO: 1399630 - DNA, 15 bp, Homo sapiens
tgataacattagtca

SEQ ID NO: 1399631 - DNA, 15 bp, Homo sapiens
ttgataacattagtc

SEQ ID NO: 1399632 - DNA, 15 bp, Homo sapiens
cttgataacattagt

SEQ ID NO: 1399633 - DNA, 15 bp, Homo sapiens
acttgataacattag

SEQ ID NO: 1399634 - DNA, 15 bp, Homo sapiens
cacttgataacatta

SEQ ID NO: 1399635 - DNA, 15 bp, Homo sapiens
gcacttgataacatt

SEQ ID NO: 1399636 - DNA, 15 bp, Homo sapiens
ggcacttgataacat

SEQ ID NO: 1399637 - DNA, 15 bp, Homo sapiens
aggcacttgataaca

SEQ ID NO: 1399638 - DNA, 15 bp, Homo sapiens
aaggcacttgataac

SEQ ID NO: 1399639 - DNA, 15 bp, Homo sapiens
aaaggcacttgataa

SEQ ID NO: 1399640 - DNA, 15 bp, Homo sapiens
aaaaggcacttgata

SEQ ID NO: 1399641 - DNA, 15 bp, Homo sapiens
gaaaaggcacttgat

SEQ ID NO: 1399642 - DNA, 15 bp, Homo sapiens
tgaaaaggcacttga

SEQ ID NO: 1399643 - DNA, 15 bp, Homo sapiens
atgaaaaggcacttg

SEQ ID NO: 1399644 - DNA, 15 bp, Homo sapiens
aatgaaaaggcactt

SEQ ID NO: 1399645 - DNA, 15 bp, Homo sapiens
aaatgaaaaggcact

SEQ ID NO: 1399646 - DNA, 15 bp, Homo sapiens
taaatgaaaaggcac

SEQ ID NO: 1399647 - DNA, 15 bp, Homo sapiens
ataaatgaaaaggca

SEQ ID NO: 1399648 - DNA, 15 bp, Homo sapiens
aataaatgaaaaggc

SEQ ID NO: 1399649 - DNA, 15 bp, Homo sapiens
aaataaatgaaaagg

SEQ ID NO: 1399650 - DNA, 15 bp, Homo sapiens
taaataaatgaaaag

SEQ ID NO: 1399651 - DNA, 15 bp, Homo sapiens
ataaataaatgaaaa

SEQ ID NO: 1399652 - DNA, 15 bp, Homo sapiens
aataaataaatgaaa

SEQ ID NO: 1399653 - DNA, 15 bp, Homo sapiens
caataaataaatgaa

SEQ ID NO: 1399654 - DNA, 15 bp, Homo sapiens
ccaataaataaatga

SEQ ID NO: 1399655 - DNA, 15 bp, Homo sapiens
gccaataaataaatg

SEQ ID NO: 1399656 - DNA, 15 bp, Homo sapiens
ggccaataaataaat

SEQ ID NO: 1399657 - DNA, 15 bp, Homo sapiens
tggccaataaataaa

SEQ ID NO: 1399658 - DNA, 15 bp, Homo sapiens
atggccaataaataa

SEQ ID NO: 1399659 - DNA, 15 bp, Homo sapiens
aatggccaataaata

SEQ ID NO: 1399660 - DNA, 15 bp, Homo sapiens
aaatggccaataaat

SEQ ID NO: 1399661 - DNA, 15 bp, Homo sapiens
caaatggccaataaa

SEQ ID NO: 1399662 - DNA, 15 bp, Homo sapiens
ccaaatggccaataa

SEQ ID NO: 1399663 - DNA, 15 bp, Homo sapiens
cccaaatggccaata

SEQ ID NO: 1399664 - DNA, 15 bp, Homo sapiens
acccaaatggccaat

SEQ ID NO: 1399665 - DNA, 15 bp, Homo sapiens
tacccaaatggccaa

SEQ ID NO: 1399666 - DNA, 15 bp, Homo sapiens
atacccaaatggcca

SEQ ID NO: 1399667 - DNA, 15 bp, Homo sapiens
gatacccaaatggcc

SEQ ID NO: 1399668 - DNA, 15 bp, Homo sapiens
ggatacccaaatggc

SEQ ID NO: 1399669 - DNA, 15 bp, Homo sapiens
tggatacccaaatgg

SEQ ID NO: 1399670 - DNA, 15 bp, Homo sapiens
atggatacccaaatg

SEQ ID NO: 1399671 - DNA, 15 bp, Homo sapiens
aatggatacccaaat

SEQ ID NO: 1399672 - DNA, 15 bp, Homo sapiens
aaatggatacccaaa

SEQ ID NO: 1399673 - DNA, 15 bp, Homo sapiens
aaaatggatacccaa

SEQ ID NO: 1399674 - DNA, 15 bp, Homo sapiens
caaaatggataccca

SEQ ID NO: 1399675 - DNA, 15 bp, Homo sapiens
ccaaaatggataccc

SEQ ID NO: 1399676 - DNA, 15 bp, Homo sapiens
cccaaaatggatacc

SEQ ID NO: 1399677 - DNA, 15 bp, Homo sapiens
gcccaaaatggatac

SEQ ID NO: 1399678 - DNA, 15 bp, Homo sapiens
tgcccaaaatggata

SEQ ID NO: 1399679 - DNA, 15 bp, Homo sapiens
ctgcccaaaatggat

SEQ ID NO: 1399680 - DNA, 15 bp, Homo sapiens
actgcccaaaatgga

SEQ ID NO: 1399681 - DNA, 15 bp, Homo sapiens
cactgcccaaaatgg

SEQ ID NO: 1399682 - DNA, 15 bp, Homo sapiens
acactgcccaaaatg

SEQ ID NO: 1399683 - DNA, 15 bp, Homo sapiens
gacactgcccaaaat

SEQ ID NO: 1399684 - DNA, 15 bp, Homo sapiens
ggacactgcccaaaa

SEQ ID NO: 1399685 - DNA, 15 bp, Homo sapiens
cggacactgcccaaa

SEQ ID NO: 1399686 - DNA, 15 bp, Homo sapiens
acggacactgcccaa

SEQ ID NO: 1399687 - DNA, 15 bp, Homo sapiens
cacggacactgccca

SEQ ID NO: 1399688 - DNA, 15 bp, Homo sapiens
gcacggacactgccc

SEQ ID NO: 1399689 - DNA, 15 bp, Homo sapiens
tgcacggacactgcc

SEQ ID NO: 1399690 - DNA, 15 bp, Homo sapiens
ttgcacggacactgc

SEQ ID NO: 1399691 - DNA, 15 bp, Homo sapiens
cttgcacggacactg

SEQ ID NO: 1399692 - DNA, 15 bp, Homo sapiens
acttgcacggacact

SEQ ID NO: 1399693 - DNA, 15 bp, Homo sapiens
aacttgcacggacac

SEQ ID NO: 1399694 - DNA, 15 bp, Homo sapiens
caacttgcacggaca

SEQ ID NO: 1399695 - DNA, 15 bp, Homo sapiens
acaacttgcacggac

SEQ ID NO: 1399696 - DNA, 15 bp, Homo sapiens
aacaacttgcacgga

SEQ ID NO: 1399697 - DNA, 15 bp, Homo sapiens
aaacaacttgcacgg

SEQ ID NO: 1399698 - DNA, 15 bp, Homo sapiens
caaacaacttgcacg

SEQ ID NO: 1399699 - DNA, 15 bp, Homo sapiens
gcaaacaacttgcac

SEQ ID NO: 1399700 - DNA, 15 bp, Homo sapiens
ggcaaacaacttgca

SEQ ID NO: 1399701 - DNA, 15 bp, Homo sapiens
gggcaaacaacttgc

SEQ ID NO: 1399702 - DNA, 15 bp, Homo sapiens
tgggcaaacaacttg

SEQ ID NO: 1399703 - DNA, 15 bp, Homo sapiens
atgggcaaacaactt

SEQ ID NO: 1399704 - DNA, 15 bp, Homo sapiens
aatgggcaaacaact

SEQ ID NO: 1399705 - DNA, 15 bp, Homo sapiens
aaatgggcaaacaac

SEQ ID NO: 1399706 - DNA, 15 bp, Homo sapiens
aaaatgggcaaacaa

SEQ ID NO: 1399707 - DNA, 15 bp, Homo sapiens
aaaaatgggcaaaca

SEQ ID NO: 1399708 - DNA, 15 bp, Homo sapiens
gaaaaatgggcaaac

SEQ ID NO: 1399709 - DNA, 15 bp, Homo sapiens
agaaaaatgggcaaa

SEQ ID NO: 1399710 - DNA, 15 bp, Homo sapiens
cagaaaaatgggcaa

SEQ ID NO: 1399711 - DNA, 15 bp, Homo sapiens
acagaaaaatgggca

SEQ ID NO: 1399712 - DNA, 15 bp, Homo sapiens
cacagaaaaatgggc

SEQ ID NO: 1399713 - DNA, 15 bp, Homo sapiens
ccacagaaaaatggg

SEQ ID NO: 1399714 - DNA, 15 bp, Homo sapiens
tccacagaaaaatgg

SEQ ID NO: 1399715 - DNA, 15 bp, Homo sapiens
ttccacagaaaaatg

SEQ ID NO: 1399716 - DNA, 15 bp, Homo sapiens
attccacagaaaaat

SEQ ID NO: 1399717 - DNA, 15 bp, Homo sapiens
aattccacagaaaaa

SEQ ID NO: 1399718 - DNA, 15 bp, Homo sapiens
caattccacagaaaa

SEQ ID NO: 1399719 - DNA, 15 bp, Homo sapiens
acaattccacagaaa

SEQ ID NO: 1399720 - DNA, 15 bp, Homo sapiens
aacaattccacagaa

SEQ ID NO: 1399721 - DNA, 15 bp, Homo sapiens
aaacaattccacaga

SEQ ID NO: 1399722 - DNA, 15 bp, Homo sapiens
gaaacaattccacag

SEQ ID NO: 1399723 - DNA, 15 bp, Homo sapiens
agaaacaattccaca

SEQ ID NO: 1399724 - DNA, 15 bp, Homo sapiens
aagaaacaattccac

SEQ ID NO: 1399725 - DNA, 15 bp, Homo sapiens
gaagaaacaattcca

SEQ ID NO: 1399726 - DNA, 15 bp, Homo sapiens
taaagaagaaacaat

SEQ ID NO: 1399727 - DNA, 15 bp, Homo sapiens
gtaaagaagaaacaa

SEQ ID NO: 1399728 - DNA, 15 bp, Homo sapiens
tgtaaagaagaaaca

SEQ ID NO: 1399729 - DNA, 15 bp, Homo sapiens
atgtaaagaagaaac

SEQ ID NO: 1399730 - DNA, 15 bp, Homo sapiens
aatgtaaagaagaaa

SEQ ID NO: 1399731 - DNA, 15 bp, Homo sapiens
gaatgtaaagaagaa

SEQ ID NO: 1399732 - DNA, 15 bp, Homo sapiens
tgaatgtaaagaaga

SEQ ID NO: 1399733 - DNA, 15 bp, Homo sapiens
ttgaatgtaaagaag

SEQ ID NO: 1399734 - DNA, 15 bp, Homo sapiens
attgaatgtaaagaa

SEQ ID NO: 1399735 - DNA, 15 bp, Homo sapiens
tattgaatgtaaaga

SEQ ID NO: 1399736 - DNA, 15 bp, Homo sapiens
atattgaatgtaaag

SEQ ID NO: 1399737 - DNA, 15 bp, Homo sapiens
tatattgaatgtaaa

SEQ ID NO: 1399738 - DNA, 15 bp, Homo sapiens
ctatattgaatgtaa

SEQ ID NO: 1399739 - DNA, 15 bp, Homo sapiens
cctatattgaatgta

SEQ ID NO: 1399740 - DNA, 15 bp, Homo sapiens
tcctatattgaatgt

SEQ ID NO: 1399741 - DNA, 15 bp, Homo sapiens
ttcctatattgaatg

SEQ ID NO: 1399742 - DNA, 15 bp, Homo sapiens
attcctatattgaat

SEQ ID NO: 1399743 - DNA, 15 bp, Homo sapiens
gattcctatattgaa

SEQ ID NO: 1399744 - DNA, 15 bp, Homo sapiens
tgattcctatattga

SEQ ID NO: 1399745 - DNA, 15 bp, Homo sapiens
atgattcctatattg

SEQ ID NO: 1399746 - DNA, 15 bp, Homo sapiens
aatgattcctatatt

SEQ ID NO: 1399747 - DNA, 15 bp, Homo sapiens
aaatgattcctatat

SEQ ID NO: 1399748 - DNA, 15 bp, Homo sapiens
taaatgattcctata

SEQ ID NO: 1399749 - DNA, 15 bp, Homo sapiens
ttaaatgattcctat

SEQ ID NO: 1399750 - DNA, 15 bp, Homo sapiens
tttaaatgattccta

SEQ ID NO: 1399751 - DNA, 15 bp, Homo sapiens
atttaaatgattcct

SEQ ID NO: 1399752 - DNA, 15 bp, Homo sapiens
tatttaaatgattcc

SEQ ID NO: 1399753 - DNA, 15 bp, Homo sapiens
atatttaaatgattc

SEQ ID NO: 1399754 - DNA, 15 bp, Homo sapiens
catatttaaatgatt

SEQ ID NO: 1399755 - DNA, 15 bp, Homo sapiens
tcatatttaaatgat

SEQ ID NO: 1399756 - DNA, 15 bp, Homo sapiens
ttcatatttaaatga

SEQ ID NO: 1399757 - DNA, 15 bp, Homo sapiens
gttcatatttaaatg

SEQ ID NO: 1399758 - DNA, 15 bp, Homo sapiens
ggttcatatttaaat

SEQ ID NO: 1399759 - DNA, 15 bp, Homo sapiens
aggttcatatttaaa

SEQ ID NO: 1399760 - DNA, 15 bp, Homo sapiens
gaggttcatatttaa

SEQ ID NO: 1399761 - DNA, 15 bp, Homo sapiens
agaggttcatattta

SEQ ID NO: 1399762 - DNA, 15 bp, Homo sapiens
cagaggttcatattt

SEQ ID NO: 1399763 - DNA, 15 bp, Homo sapiens
acagaggttcatatt

SEQ ID NO: 1399764 - DNA, 15 bp, Homo sapiens
aacagaggttcatat

SEQ ID NO: 1399765 - DNA, 15 bp, Homo sapiens
caacagaggttcata

SEQ ID NO: 1399766 - DNA, 15 bp, Homo sapiens
ccaacagaggttcat

SEQ ID NO: 1399767 - DNA, 15 bp, Homo sapiens
accaacagaggttca

SEQ ID NO: 1399768 - DNA, 15 bp, Homo sapiens
aaccaacagaggttc

SEQ ID NO: 1399769 - DNA, 15 bp, Homo sapiens
taaccaacagaggtt

SEQ ID NO: 1399770 - DNA, 15 bp, Homo sapiens
ataaccaacagaggt

SEQ ID NO: 1399771 - DNA, 15 bp, Homo sapiens
tataaccaacagagg

SEQ ID NO: 1399772 - DNA, 15 bp, Homo sapiens
atataaccaacagag

SEQ ID NO: 1399773 - DNA, 15 bp, Homo sapiens
catataaccaacaga

SEQ ID NO: 1399774 - DNA, 15 bp, Homo sapiens
acatataaccaacag

SEQ ID NO: 1399775 - DNA, 15 bp, Homo sapiens
cacatataaccaaca

SEQ ID NO: 1399776 - DNA, 15 bp, Homo sapiens
acacatataaccaac

SEQ ID NO: 1399777 - DNA, 15 bp, Homo sapiens
aacacatataaccaa

SEQ ID NO: 1399778 - DNA, 15 bp, Homo sapiens
caacacatataacca

SEQ ID NO: 1399779 - DNA, 15 bp, Homo sapiens
acaacacatataacc

SEQ ID NO: 1399780 - DNA, 15 bp, Homo sapiens
tacaacacatataac

SEQ ID NO: 1399781 - DNA, 15 bp, Homo sapiens
ttacaacacatataa

SEQ ID NO: 1399782 - DNA, 15 bp, Homo sapiens
tttacaacacatata

SEQ ID NO: 1399783 - DNA, 15 bp, Homo sapiens
atttacaacacatat

SEQ ID NO: 1399784 - DNA, 15 bp, Homo sapiens
tatttacaacacata

SEQ ID NO: 1399785 - DNA, 15 bp, Homo sapiens
atatttacaacacat

SEQ ID NO: 1399786 - DNA, 15 bp, Homo sapiens
gatatttacaacaca

SEQ ID NO: 1399787 - DNA, 15 bp, Homo sapiens
agatatttacaacac

SEQ ID NO: 1399788 - DNA, 15 bp, Homo sapiens
aagatatttacaaca

SEQ ID NO: 1399789 - DNA, 15 bp, Homo sapiens
gaagatatttacaac

SEQ ID NO: 1399790 - DNA, 15 bp, Homo sapiens
agaagatatttacaa

SEQ ID NO: 1399791 - DNA, 15 bp, Homo sapiens
gagaagatatttaca

SEQ ID NO: 1399792 - DNA, 15 bp, Homo sapiens
cgagaagatatttac

SEQ ID NO: 1399793 - DNA, 15 bp, Homo sapiens
gcgagaagatattta

SEQ ID NO: 1399794 - DNA, 15 bp, Homo sapiens
tgcgagaagatattt

SEQ ID NO: 1399795 - DNA, 15 bp, Homo sapiens
atgcgagaagatatt

SEQ ID NO: 1399796 - DNA, 15 bp, Homo sapiens
aatgcgagaagatat

SEQ ID NO: 1399797 - DNA, 15 bp, Homo sapiens
taatgcgagaagata

SEQ ID NO: 1399798 - DNA, 15 bp, Homo sapiens
ataatgcgagaagat

SEQ ID NO: 1399799 - DNA, 15 bp, Homo sapiens
cataatgcgagaaga

SEQ ID NO: 1399800 - DNA, 15 bp, Homo sapiens
acataatgcgagaag

SEQ ID NO: 1399801 - DNA, 15 bp, Homo sapiens
cacataatgcgagaa

SEQ ID NO: 1399802 - DNA, 15 bp, Homo sapiens
ccacataatgcgaga

SEQ ID NO: 1399803 - DNA, 15 bp, Homo sapiens
gccacataatgcgag

SEQ ID NO: 1399804 - DNA, 15 bp, Homo sapiens
ggccacataatgcga

SEQ ID NO: 1399805 - DNA, 15 bp, Homo sapiens
aggccacataatgcg

SEQ ID NO: 1399806 - DNA, 15 bp, Homo sapiens
aaggccacataatgc

SEQ ID NO: 1399807 - DNA, 15 bp, Homo sapiens
aaaggccacataatg

SEQ ID NO: 1399808 - DNA, 15 bp, Homo sapiens
aaaaggccacataat

SEQ ID NO: 1399809 - DNA, 15 bp, Homo sapiens
gaaaaggccacataa

SEQ ID NO: 1399810 - DNA, 15 bp, Homo sapiens
tgaaaaggccacata

SEQ ID NO: 1399811 - DNA, 15 bp, Homo sapiens
gtgaaaaggccacat

SEQ ID NO: 1399812 - DNA, 15 bp, Homo sapiens
agtgaaaaggccaca

SEQ ID NO: 1399813 - DNA, 15 bp, Homo sapiens
gagtgaaaaggccac

SEQ ID NO: 1399814 - DNA, 15 bp, Homo sapiens
agagtgaaaaggcca

SEQ ID NO: 1399815 - DNA, 15 bp, Homo sapiens
gagagtgaaaaggcc

SEQ ID NO: 1399816 - DNA, 15 bp, Homo sapiens
agagagtgaaaaggc

SEQ ID NO: 1399817 - DNA, 15 bp, Homo sapiens
cagagagtgaaaagg

SEQ ID NO: 1399818 - DNA, 15 bp, Homo sapiens
tcagagagtgaaaag

SEQ ID NO: 1399819 - DNA, 15 bp, Homo sapiens
ttcagagagtgaaaa

SEQ ID NO: 1399820 - DNA, 15 bp, Homo sapiens
attcagagagtgaaa

SEQ ID NO: 1399821 - DNA, 15 bp, Homo sapiens
cattcagagagtgaa

SEQ ID NO: 1399822 - DNA, 15 bp, Homo sapiens
acattcagagagtga

SEQ ID NO: 1399823 - DNA, 15 bp, Homo sapiens
gacattcagagagtg

SEQ ID NO: 1399824 - DNA, 15 bp, Homo sapiens
agacattcagagagt

SEQ ID NO: 1399825 - DNA, 15 bp, Homo sapiens
aagacattcagagag

SEQ ID NO: 1399826 - DNA, 15 bp, Homo sapiens
aaagacattcagaga

SEQ ID NO: 1399827 - DNA, 15 bp, Homo sapiens
gaaagacattcagag

SEQ ID NO: 1399828 - DNA, 15 bp, Homo sapiens
tgaaagacattcaga

SEQ ID NO: 1399829 - DNA, 15 bp, Homo sapiens
ctgaaagacattcag

SEQ ID NO: 1399830 - DNA, 15 bp, Homo sapiens
actgaaagacattca

SEQ ID NO: 1399831 - DNA, 15 bp, Homo sapiens
cactgaaagacattc

SEQ ID NO: 1399832 - DNA, 15 bp, Homo sapiens
ccactgaaagacatt

SEQ ID NO: 1399833 - DNA, 15 bp, Homo sapiens
tccactgaaagacat

SEQ ID NO: 1399834 - DNA, 15 bp, Homo sapiens
ttccactgaaagaca

SEQ ID NO: 1399835 - DNA, 15 bp, Homo sapiens
cttccactgaaagac

SEQ ID NO: 1399836 - DNA, 15 bp, Homo sapiens
tcttccactgaaaga

SEQ ID NO: 1399837 - DNA, 15 bp, Homo sapiens
ttcttccactgaaag

SEQ ID NO: 1399838 - DNA, 15 bp, Homo sapiens
tttcttccactgaaa

SEQ ID NO: 1399839 - DNA, 15 bp, Homo sapiens
gtttcttccactgaa

SEQ ID NO: 1399840 - DNA, 15 bp, Homo sapiens
agtttcttccactga

SEQ ID NO: 1399841 - DNA, 15 bp, Homo sapiens
aagtttcttccactg

SEQ ID NO: 1399842 - DNA, 15 bp, Homo sapiens
gaagtttcttccact

SEQ ID NO: 1399843 - DNA, 15 bp, Homo sapiens
agaagtttcttccac

SEQ ID NO: 1399844 - DNA, 15 bp, Homo sapiens
tagaagtttcttcca

SEQ ID NO: 1399845 - DNA, 15 bp, Homo sapiens
ttagaagtttcttcc

SEQ ID NO: 1399846 - DNA, 15 bp, Homo sapiens
attagaagtttcttc

SEQ ID NO: 1399847 - DNA, 15 bp, Homo sapiens
aattagaagtttctt

SEQ ID NO: 1399848 - DNA, 15 bp, Homo sapiens
aaattagaagtttct

SEQ ID NO: 1399849 - DNA, 15 bp, Homo sapiens
gaaattagaagtttc

SEQ ID NO: 1399850 - DNA, 15 bp, Homo sapiens
tgaaattagaagttt

SEQ ID NO: 1399851 - DNA, 15 bp, Homo sapiens
ctgaaattagaagtt

SEQ ID NO: 1399852 - DNA, 15 bp, Homo sapiens
actgaaattagaagt

SEQ ID NO: 1399853 - DNA, 15 bp, Homo sapiens
cactgaaattagaag

SEQ ID NO: 1399854 - DNA, 15 bp, Homo sapiens
acactgaaattagaa

SEQ ID NO: 1399855 - DNA, 15 bp, Homo sapiens
tacactgaaattaga

SEQ ID NO: 1399856 - DNA, 15 bp, Homo sapiens
ttacactgaaattag

SEQ ID NO: 1399857 - DNA, 15 bp, Homo sapiens
gttacactgaaatta

SEQ ID NO: 1399858 - DNA, 15 bp, Homo sapiens
ggttacactgaaatt

SEQ ID NO: 1399859 - DNA, 15 bp, Homo sapiens
tggttacactgaaat

SEQ ID NO: 1399860 - DNA, 15 bp, Homo sapiens
ctggttacactgaaa

SEQ ID NO: 1399861 - DNA, 15 bp, Homo sapiens
tctggttacactgaa

SEQ ID NO: 1399862 - DNA, 15 bp, Homo sapiens
atctggttacactga

SEQ ID NO: 1399863 - DNA, 15 bp, Homo sapiens
aatctggttacactg

SEQ ID NO: 1399864 - DNA, 15 bp, Homo sapiens
aaatctggttacact

SEQ ID NO: 1399865 - DNA, 15 bp, Homo sapiens
aaaatctggttacac

SEQ ID NO: 1399866 - DNA, 15 bp, Homo sapiens
caaaatctggttaca

SEQ ID NO: 1399867 - DNA, 15 bp, Homo sapiens
acaaaatctggttac

SEQ ID NO: 1399868 - DNA, 15 bp, Homo sapiens
gacaaaatctggtta

SEQ ID NO: 1399869 - DNA, 15 bp, Homo sapiens
tgacaaaatctggtt

SEQ ID NO: 1399870 - DNA, 15 bp, Homo sapiens
ttgacaaaatctggt

SEQ ID NO: 1399871 - DNA, 15 bp, Homo sapiens
attgacaaaatctgg

SEQ ID NO: 1399872 - DNA, 15 bp, Homo sapiens
gattgacaaaatctg

SEQ ID NO: 1399873 - DNA, 15 bp, Homo sapiens
agattgacaaaatct

SEQ ID NO: 1399874 - DNA, 15 bp, Homo sapiens
aagattgacaaaatc

SEQ ID NO: 1399875 - DNA, 15 bp, Homo sapiens
aaagattgacaaaat

SEQ ID NO: 1399876 - DNA, 15 bp, Homo sapiens
aaaagattgacaaaa

SEQ ID NO: 1399877 - DNA, 15 bp, Homo sapiens
aaaaagattgacaaa

SEQ ID NO: 1399878 - DNA, 15 bp, Homo sapiens
gaaaaagattgacaa

SEQ ID NO: 1399879 - DNA, 15 bp, Homo sapiens
agaaaaagattgaca

SEQ ID NO: 1399880 - DNA, 15 bp, Homo sapiens
aagaaaaagattgac

SEQ ID NO: 1399881 - DNA, 15 bp, Homo sapiens
aaagaaaaagattga

SEQ ID NO: 1399882 - DNA, 15 bp, Homo sapiens
gaaagaaaaagattg

SEQ ID NO: 1399883 - DNA, 15 bp, Homo sapiens
agaaagaaaaagatt

SEQ ID NO: 1399884 - DNA, 15 bp, Homo sapiens
cagaaagaaaaagat

SEQ ID NO: 1399885 - DNA, 15 bp, Homo sapiens
acagaaagaaaaaga

SEQ ID NO: 1399886 - DNA, 15 bp, Homo sapiens
aacagaaagaaaaag

SEQ ID NO: 1399887 - DNA, 15 bp, Homo sapiens
gaacagaaagaaaaa

SEQ ID NO: 1399888 - DNA, 15 bp, Homo sapiens
tgaacagaaagaaaa

SEQ ID NO: 1399889 - DNA, 15 bp, Homo sapiens
ctgaacagaaagaaa

SEQ ID NO: 1399890 - DNA, 15 bp, Homo sapiens
actgaacagaaagaa

SEQ ID NO: 1399891 - DNA, 15 bp, Homo sapiens
cactgaacagaaaga

SEQ ID NO: 1399892 - DNA, 15 bp, Homo sapiens
gcactgaacagaaag

SEQ ID NO: 1399893 - DNA, 15 bp, Homo sapiens
agcactgaacagaaa

SEQ ID NO: 1399894 - DNA, 15 bp, Homo sapiens
aagcactgaacagaa

SEQ ID NO: 1399895 - DNA, 15 bp, Homo sapiens
aaagcactgaacaga

SEQ ID NO: 1399896 - DNA, 15 bp, Homo sapiens
aaaagcactgaacag

SEQ ID NO: 1399897 - DNA, 15 bp, Homo sapiens
caaaagcactgaaca

SEQ ID NO: 1399898 - DNA, 15 bp, Homo sapiens
gcaaaagcactgaac

SEQ ID NO: 1399899 - DNA, 15 bp, Homo sapiens
agcaaaagcactgaa

SEQ ID NO: 1399900 - DNA, 15 bp, Homo sapiens
cagcaaaagcactga

SEQ ID NO: 1399901 - DNA, 15 bp, Homo sapiens
acagcaaaagcactg

SEQ ID NO: 1399902 - DNA, 15 bp, Homo sapiens
gaacagcaaaagcac

SEQ ID NO: 1399903 - DNA, 15 bp, Homo sapiens
cagaacagcaaaagc

SEQ ID NO: 1399904 - DNA, 15 bp, Homo sapiens
acagaacagcaaaag

SEQ ID NO: 1399905 - DNA, 15 bp, Homo sapiens
aacagaacagcaaaa

SEQ ID NO: 1399906 - DNA, 15 bp, Homo sapiens
aaacagaacagcaaa

SEQ ID NO: 1399907 - DNA, 15 bp, Homo sapiens
taaacagaacagcaa

SEQ ID NO: 1399908 - DNA, 15 bp, Homo sapiens
ttaaacagaacagca

SEQ ID NO: 1399909 - DNA, 15 bp, Homo sapiens
cttaaacagaacagc

SEQ ID NO: 1399910 - DNA, 15 bp, Homo sapiens
acttaaacagaacag

SEQ ID NO: 1399911 - DNA, 15 bp, Homo sapiens
gacttaaacagaaca

SEQ ID NO: 1399912 - DNA, 15 bp, Homo sapiens
agacttaaacagaac

SEQ ID NO: 1399913 - DNA, 15 bp, Homo sapiens
aagacttaaacagaa

SEQ ID NO: 1399914 - DNA, 15 bp, Homo sapiens
taagacttaaacaga

SEQ ID NO: 1399915 - DNA, 15 bp, Homo sapiens
ataagacttaaacag

SEQ ID NO: 1399916 - DNA, 15 bp, Homo sapiens
cataagacttaaaca

SEQ ID NO: 1399917 - DNA, 15 bp, Homo sapiens
acataagacttaaac

SEQ ID NO: 1399918 - DNA, 15 bp, Homo sapiens
gacataagacttaaa

SEQ ID NO: 1399919 - DNA, 15 bp, Homo sapiens
ggacataagacttaa

SEQ ID NO: 1399920 - DNA, 15 bp, Homo sapiens
tggacataagactta

SEQ ID NO: 1399921 - DNA, 15 bp, Homo sapiens
gtggacataagactt

SEQ ID NO: 1399922 - DNA, 15 bp, Homo sapiens
ggtggacataagact

SEQ ID NO: 1399923 - DNA, 15 bp, Homo sapiens
gggtggacataagac

SEQ ID NO: 1399924 - DNA, 15 bp, Homo sapiens
agggtggacataaga

SEQ ID NO: 1399925 - DNA, 15 bp, Homo sapiens
tagggtggacataag

SEQ ID NO: 1399926 - DNA, 15 bp, Homo sapiens
ttagggtggacataa

SEQ ID NO: 1399927 - DNA, 15 bp, Homo sapiens
attagggtggacata

SEQ ID NO: 1399928 - DNA, 15 bp, Homo sapiens
tattagggtggacat

SEQ ID NO: 1399929 - DNA, 15 bp, Homo sapiens
atattagggtggaca

SEQ ID NO: 1399930 - DNA, 15 bp, Homo sapiens
gatattagggtggac

SEQ ID NO: 1399931 - DNA, 15 bp, Homo sapiens
tgatattagggtgga

SEQ ID NO: 1399932 - DNA, 15 bp, Homo sapiens
atgatattagggtgg

SEQ ID NO: 1399933 - DNA, 15 bp, Homo sapiens
tatgatattagggtg

SEQ ID NO: 1399934 - DNA, 15 bp, Homo sapiens
ttatgatattagggt

SEQ ID NO: 1399935 - DNA, 15 bp, Homo sapiens
tttatgatattaggg

SEQ ID NO: 1399936 - DNA, 15 bp, Homo sapiens
ctttatgatattagg

SEQ ID NO: 1399937 - DNA, 15 bp, Homo sapiens
actttatgatattag

SEQ ID NO: 1399938 - DNA, 15 bp, Homo sapiens
gactttatgatatta

SEQ ID NO: 1399939 - DNA, 15 bp, Homo sapiens
tgactttatgatatt

SEQ ID NO: 1399940 - DNA, 15 bp, Homo sapiens
atgactttatgatat

SEQ ID NO: 1399941 - DNA, 15 bp, Homo sapiens
aatgactttatgata

SEQ ID NO: 1399942 - DNA, 15 bp, Homo sapiens
gaatgactttatgat

SEQ ID NO: 1399943 - DNA, 15 bp, Homo sapiens
agaatgactttatga

SEQ ID NO: 1399944 - DNA, 15 bp, Homo sapiens
gagaatgactttatg

SEQ ID NO: 1399945 - DNA, 15 bp, Homo sapiens
ggagaatgactttat

SEQ ID NO: 1399946 - DNA, 15 bp, Homo sapiens
aggagaatgacttta

SEQ ID NO: 1399947 - DNA, 15 bp, Homo sapiens
taggagaatgacttt

SEQ ID NO: 1399948 - DNA, 15 bp, Homo sapiens
ttaggagaatgactt

SEQ ID NO: 1399949 - DNA, 15 bp, Homo sapiens
tttaggagaatgact

SEQ ID NO: 1399950 - DNA, 15 bp, Homo sapiens
atttaggagaatgac

SEQ ID NO: 1399951 - DNA, 15 bp, Homo sapiens
catttaggagaatga

SEQ ID NO: 1399952 - DNA, 15 bp, Homo sapiens
acatttaggagaatg

SEQ ID NO: 1399953 - DNA, 15 bp, Homo sapiens
gacatttaggagaat

SEQ ID NO: 1399954 - DNA, 15 bp, Homo sapiens
tgacatttaggagaa

SEQ ID NO: 1399955 - DNA, 15 bp, Homo sapiens
atgacatttaggaga

SEQ ID NO: 1399956 - DNA, 15 bp, Homo sapiens
aatgacatttaggag

SEQ ID NO: 1399957 - DNA, 15 bp, Homo sapiens
gaatgacatttagga

SEQ ID NO: 1399958 - DNA, 15 bp, Homo sapiens
agaatgacatttagg

SEQ ID NO: 1399959 - DNA, 15 bp, Homo sapiens
tagaatgacatttag

SEQ ID NO: 1399960 - DNA, 15 bp, Homo sapiens
ctagaatgacattta

SEQ ID NO: 1399961 - DNA, 15 bp, Homo sapiens
cctagaatgacattt

SEQ ID NO: 1399962 - DNA, 15 bp, Homo sapiens
acctagaatgacatt

SEQ ID NO: 1399963 - DNA, 15 bp, Homo sapiens
cacctagaatgacat

SEQ ID NO: 1399964 - DNA, 15 bp, Homo sapiens
acacctagaatgaca

SEQ ID NO: 1399965 - DNA, 15 bp, Homo sapiens
tacacctagaatgac

SEQ ID NO: 1399966 - DNA, 15 bp, Homo sapiens
gtacacctagaatga

SEQ ID NO: 1399967 - DNA, 15 bp, Homo sapiens
agtacacctagaatg

SEQ ID NO: 1399968 - DNA, 15 bp, Homo sapiens
tagtacacctagaat

SEQ ID NO: 1399969 - DNA, 15 bp, Homo sapiens
atagtacacctagaa

SEQ ID NO: 1399970 - DNA, 15 bp, Homo sapiens
aatagtacacctaga

SEQ ID NO: 1399971 - DNA, 15 bp, Homo sapiens
caatagtacacctag

SEQ ID NO: 1399972 - DNA, 15 bp, Homo sapiens
acaatagtacaccta

SEQ ID NO: 1399973 - DNA, 15 bp, Homo sapiens
aacaatagtacacct

SEQ ID NO: 1399974 - DNA, 15 bp, Homo sapiens
aaacaatagtacacc

SEQ ID NO: 1399975 - DNA, 15 bp, Homo sapiens
aaaacaatagtacac

SEQ ID NO: 1399976 - DNA, 15 bp, Homo sapiens
gaaaacaatagtaca

SEQ ID NO: 1399977 - DNA, 15 bp, Homo sapiens
ggaaaacaatagtac

SEQ ID NO: 1399978 - DNA, 15 bp, Homo sapiens
gggaaaacaatagta

SEQ ID NO: 1399979 - DNA, 15 bp, Homo sapiens
agggaaaacaatagt

SEQ ID NO: 1399980 - DNA, 15 bp, Homo sapiens
aagggaaaacaatag

SEQ ID NO: 1399981 - DNA, 15 bp, Homo sapiens
aaagggaaaacaata

SEQ ID NO: 1399982 - DNA, 15 bp, Homo sapiens
gaaagggaaaacaat

SEQ ID NO: 1399983 - DNA, 15 bp, Homo sapiens
tgaaagggaaaacaa

SEQ ID NO: 1399984 - DNA, 15 bp, Homo sapiens
atgaaagggaaaaca

SEQ ID NO: 1399985 - DNA, 15 bp, Homo sapiens
catgaaagggaaaac

SEQ ID NO: 1399986 - DNA, 15 bp, Homo sapiens
acatgaaagggaaaa

SEQ ID NO: 1399987 - DNA, 15 bp, Homo sapiens
tacatgaaagggaaa

SEQ ID NO: 1399988 - DNA, 15 bp, Homo sapiens
atacatgaaagggaa

SEQ ID NO: 1399989 - DNA, 15 bp, Homo sapiens
tatacatgaaaggga

SEQ ID NO: 1399990 - DNA, 15 bp, Homo sapiens
gtatacatgaaaggg

SEQ ID NO: 1399991 - DNA, 15 bp, Homo sapiens
tgtatacatgaaagg

SEQ ID NO: 1399992 - DNA, 15 bp, Homo sapiens
ctgtatacatgaaag

SEQ ID NO: 1399993 - DNA, 15 bp, Homo sapiens
actgtatacatgaaa

SEQ ID NO: 1399994 - DNA, 15 bp, Homo sapiens
tactgtatacatgaa

SEQ ID NO: 1399995 - DNA, 15 bp, Homo sapiens
ttactgtatacatga

SEQ ID NO: 1399996 - DNA, 15 bp, Homo sapiens
tttactgtatacatg

SEQ ID NO: 1399997 - DNA, 15 bp, Homo sapiens
ttttactgtatacat

SEQ ID NO: 1399998 - DNA, 15 bp, Homo sapiens
attttactgtataca

SEQ ID NO: 1399999 - DNA, 15 bp, Homo sapiens
gattttactgtatac

SEQ ID NO: 1400000 - DNA, 15 bp, Homo sapiens
agattttactgtata

SEQ ID NO: 1400001 - DNA, 15 bp, Homo sapiens
cagattttactgtat

SEQ ID NO: 1400002 - DNA, 15 bp, Homo sapiens
tcagattttactgta

SEQ ID NO: 1400003 - DNA, 15 bp, Homo sapiens
gtcagattttactgt

SEQ ID NO: 1400004 - DNA, 15 bp, Homo sapiens
agtcagattttactg

SEQ ID NO: 1400005 - DNA, 15 bp, Homo sapiens
cagtcagattttact

SEQ ID NO: 1400006 - DNA, 15 bp, Homo sapiens
ccagtcagattttac

SEQ ID NO: 1400007 - DNA, 15 bp, Homo sapiens
tccagtcagatttta

SEQ ID NO: 1400008 - DNA, 15 bp, Homo sapiens
ttccagtcagatttt

SEQ ID NO: 1400009 - DNA, 15 bp, Homo sapiens
attccagtcagattt

SEQ ID NO: 1400010 - DNA, 15 bp, Homo sapiens
aattccagtcagatt

SEQ ID NO: 1400011 - DNA, 15 bp, Homo sapiens
taattccagtcagat

SEQ ID NO: 1400012 - DNA, 15 bp, Homo sapiens
ttaattccagtcaga

SEQ ID NO: 1400013 - DNA, 15 bp, Homo sapiens
attaattccagtcag

SEQ ID NO: 1400014 - DNA, 15 bp, Homo sapiens
aattaattccagtca

SEQ ID NO: 1400015 - DNA, 15 bp, Homo sapiens
aaattaattccagtc

SEQ ID NO: 1400016 - DNA, 15 bp, Homo sapiens
aaaattaattccagt

SEQ ID NO: 1400017 - DNA, 15 bp, Homo sapiens
aaaaattaattccag

SEQ ID NO: 1400018 - DNA, 15 bp, Homo sapiens
taaaaattaattcca

SEQ ID NO: 1400019 - DNA, 15 bp, Homo sapiens
ataaaaattaattcc

SEQ ID NO: 1400020 - DNA, 15 bp, Homo sapiens
tataaaaattaattc

SEQ ID NO: 1400021 - DNA, 15 bp, Homo sapiens
atataaaaattaatt

SEQ ID NO: 1400022 - DNA, 15 bp, Homo sapiens
tatataaaaattaat

SEQ ID NO: 1400023 - DNA, 15 bp, Homo sapiens
atatataaaaattaa

SEQ ID NO: 1400024 - DNA, 15 bp, Homo sapiens
catatataaaaatta

SEQ ID NO: 1400025 - DNA, 15 bp, Homo sapiens
ccatatataaaaatt

SEQ ID NO: 1400026 - DNA, 15 bp, Homo sapiens
tccatatataaaaat

SEQ ID NO: 1400027 - DNA, 15 bp, Homo sapiens
atccatatataaaaa

SEQ ID NO: 1400028 - DNA, 15 bp, Homo sapiens
gatccatatataaaa

SEQ ID NO: 1400029 - DNA, 15 bp, Homo sapiens
tgatccatatataaa

SEQ ID NO: 1400030 - DNA, 15 bp, Homo sapiens
ttgatccatatataa

SEQ ID NO: 1400031 - DNA, 15 bp, Homo sapiens
cttgatccatatata

SEQ ID NO: 1400032 - DNA, 15 bp, Homo sapiens
acttgatccatatat

SEQ ID NO: 1400033 - DNA, 15 bp, Homo sapiens
aacttgatccatata

SEQ ID NO: 1400034 - DNA, 15 bp, Homo sapiens
aaacttgatccatat

SEQ ID NO: 1400035 - DNA, 15 bp, Homo sapiens
gaaacttgatccata

SEQ ID NO: 1400036 - DNA, 15 bp, Homo sapiens
agaaacttgatccat

SEQ ID NO: 1400037 - DNA, 15 bp, Homo sapiens
aagaaacttgatcca

SEQ ID NO: 1400038 - DNA, 15 bp, Homo sapiens
aaagaaacttgatcc

SEQ ID NO: 1400039 - DNA, 15 bp, Homo sapiens
aaaagaaacttgatc

SEQ ID NO: 1400040 - DNA, 15 bp, Homo sapiens
aaaaagaaacttgat

SEQ ID NO: 1400041 - DNA, 15 bp, Homo sapiens
aaaaaagaaacttga

SEQ ID NO: 1400042 - DNA, 15 bp, Homo sapiens
caaaaaagaaacttg

SEQ ID NO: 1400043 - DNA, 15 bp, Homo sapiens
acaaaaaagaaactt

SEQ ID NO: 1400044 - DNA, 15 bp, Homo sapiens
aacaaaaaagaaact

SEQ ID NO: 1400045 - DNA, 15 bp, Homo sapiens
aaacaaaaaagaaac

SEQ ID NO: 1400046 - DNA, 15 bp, Homo sapiens
caaacaaaaaagaaa

SEQ ID NO: 1400047 - DNA, 15 bp, Homo sapiens
acaaacaaaaaagaa

SEQ ID NO: 1400048 - DNA, 15 bp, Homo sapiens
aacaaacaaaaaaga

SEQ ID NO: 1400049 - DNA, 15 bp, Homo sapiens
gaaaaaacaaacaaa

SEQ ID NO: 1400050 - DNA, 15 bp, Homo sapiens
tgaaaaaacaaacaa

SEQ ID NO: 1400051 - DNA, 15 bp, Homo sapiens
atgaaaaaacaaaca

SEQ ID NO: 1400052 - DNA, 15 bp, Homo sapiens
tatgaaaaaacaaac

SEQ ID NO: 1400053 - DNA, 15 bp, Homo sapiens
atatgaaaaaacaaa

SEQ ID NO: 1400054 - DNA, 15 bp, Homo sapiens
catatgaaaaaacaa

SEQ ID NO: 1400055 - DNA, 15 bp, Homo sapiens
ccatatgaaaaaaca

SEQ ID NO: 1400056 - DNA, 15 bp, Homo sapiens
tccatatgaaaaaac

SEQ ID NO: 1400057 - DNA, 15 bp, Homo sapiens
gtccatatgaaaaaa

SEQ ID NO: 1400058 - DNA, 15 bp, Homo sapiens
tgtccatatgaaaaa

SEQ ID NO: 1400059 - DNA, 15 bp, Homo sapiens
gtgtccatatgaaaa

SEQ ID NO: 1400060 - DNA, 15 bp, Homo sapiens
ggtgtccatatgaaa

SEQ ID NO: 1400061 - DNA, 15 bp, Homo sapiens
gggtgtccatatgaa

SEQ ID NO: 1400062 - DNA, 15 bp, Homo sapiens
tgggtgtccatatga

SEQ ID NO: 1400063 - DNA, 15 bp, Homo sapiens
gtgggtgtccatatg

SEQ ID NO: 1400064 - DNA, 15 bp, Homo sapiens
cgtgggtgtccatat

SEQ ID NO: 1400065 - DNA, 15 bp, Homo sapiens
acgtgggtgtccata

SEQ ID NO: 1400066 - DNA, 15 bp, Homo sapiens
cacgtgggtgtccat

SEQ ID NO: 1400067 - DNA, 15 bp, Homo sapiens
gcacgtgggtgtcca

SEQ ID NO: 1400068 - DNA, 15 bp, Homo sapiens
agcacgtgggtgtcc

SEQ ID NO: 1400069 - DNA, 15 bp, Homo sapiens
gagcacgtgggtgtc

SEQ ID NO: 1400070 - DNA, 15 bp, Homo sapiens
ggagcacgtgggtgt

SEQ ID NO: 1400071 - DNA, 15 bp, Homo sapiens
tggagcacgtgggtg

SEQ ID NO: 1400072 - DNA, 15 bp, Homo sapiens
ctggagcacgtgggt

SEQ ID NO: 1400073 - DNA, 15 bp, Homo sapiens
actggagcacgtggg

SEQ ID NO: 1400074 - DNA, 15 bp, Homo sapiens
gactggagcacgtgg

SEQ ID NO: 1400075 - DNA, 15 bp, Homo sapiens
ggactggagcacgtg

SEQ ID NO: 1400076 - DNA, 15 bp, Homo sapiens
tggactggagcacgt

SEQ ID NO: 1400077 - DNA, 15 bp, Homo sapiens
atggactggagcacg

SEQ ID NO: 1400078 - DNA, 15 bp, Homo sapiens
aatggactggagcac

SEQ ID NO: 1400079 - DNA, 15 bp, Homo sapiens
aaatggactggagca

SEQ ID NO: 1400080 - DNA, 15 bp, Homo sapiens
aaaatggactggagc

SEQ ID NO: 1400081 - DNA, 15 bp, Homo sapiens
aaaaatggactggag

SEQ ID NO: 1400082 - DNA, 15 bp, Homo sapiens
caaaaatggactgga

SEQ ID NO: 1400083 - DNA, 15 bp, Homo sapiens
tcaaaaatggactgg

SEQ ID NO: 1400084 - DNA, 15 bp, Homo sapiens
ttcaaaaatggactg

SEQ ID NO: 1400085 - DNA, 15 bp, Homo sapiens
cttcaaaaatggact

SEQ ID NO: 1400086 - DNA, 15 bp, Homo sapiens
tcttcaaaaatggac

SEQ ID NO: 1400087 - DNA, 15 bp, Homo sapiens
ctcttcaaaaatgga

SEQ ID NO: 1400088 - DNA, 15 bp, Homo sapiens
tctcttcaaaaatgg

SEQ ID NO: 1400089 - DNA, 15 bp, Homo sapiens
atctcttcaaaaatg

SEQ ID NO: 1400090 - DNA, 15 bp, Homo sapiens
gatctcttcaaaaat

SEQ ID NO: 1400091 - DNA, 15 bp, Homo sapiens
tgatctcttcaaaaa

SEQ ID NO: 1400092 - DNA, 15 bp, Homo sapiens
gtgatctcttcaaaa

SEQ ID NO: 1400093 - DNA, 15 bp, Homo sapiens
tgtgatctcttcaaa

SEQ ID NO: 1400094 - DNA, 15 bp, Homo sapiens
gtgtgatctcttcaa

SEQ ID NO: 1400095 - DNA, 15 bp, Homo sapiens
agtgtgatctcttca

SEQ ID NO: 1400096 - DNA, 15 bp, Homo sapiens
aagtgtgatctcttc

SEQ ID NO: 1400097 - DNA, 15 bp, Homo sapiens
aaagtgtgatctctt

SEQ ID NO: 1400098 - DNA, 15 bp, Homo sapiens
aaaagtgtgatctct

SEQ ID NO: 1400099 - DNA, 15 bp, Homo sapiens
gaaaagtgtgatctc

SEQ ID NO: 1400100 - DNA, 15 bp, Homo sapiens
ggaaaagtgtgatct

SEQ ID NO: 1400101 - DNA, 15 bp, Homo sapiens
aggaaaagtgtgatc

SEQ ID NO: 1400102 - DNA, 15 bp, Homo sapiens
gaggaaaagtgtgat

SEQ ID NO: 1400103 - DNA, 15 bp, Homo sapiens
tgaggaaaagtgtga

SEQ ID NO: 1400104 - DNA, 15 bp, Homo sapiens
atgaggaaaagtgtg

SEQ ID NO: 1400105 - DNA, 15 bp, Homo sapiens
aatgaggaaaagtgt

SEQ ID NO: 1400106 - DNA, 15 bp, Homo sapiens
caatgaggaaaagtg

SEQ ID NO: 1400107 - DNA, 15 bp, Homo sapiens
tcaatgaggaaaagt

SEQ ID NO: 1400108 - DNA, 15 bp, Homo sapiens
ttcaatgaggaaaag

SEQ ID NO: 1400109 - DNA, 15 bp, Homo sapiens
attcaatgaggaaaa

SEQ ID NO: 1400110 - DNA, 15 bp, Homo sapiens
aattcaatgaggaaa

SEQ ID NO: 1400111 - DNA, 15 bp, Homo sapiens
taattcaatgaggaa

SEQ ID NO: 1400112 - DNA, 15 bp, Homo sapiens
ataattcaatgagga

SEQ ID NO: 1400113 - DNA, 15 bp, Homo sapiens
aataattcaatgagg

SEQ ID NO: 1400114 - DNA, 15 bp, Homo sapiens
aaataattcaatgag

SEQ ID NO: 1400115 - DNA, 15 bp, Homo sapiens
aaaataattcaatga

SEQ ID NO: 1400116 - DNA, 15 bp, Homo sapiens
aaaaataattcaatg

SEQ ID NO: 1400117 - DNA, 15 bp, Homo sapiens
taaaaataattcaat

SEQ ID NO: 1400118 - DNA, 15 bp, Homo sapiens
ctaaaaataattcaa

SEQ ID NO: 1400119 - DNA, 15 bp, Homo sapiens
tctaaaaataattca

SEQ ID NO: 1400120 - DNA, 15 bp, Homo sapiens
ttctaaaaataattc

SEQ ID NO: 1400121 - DNA, 15 bp, Homo sapiens
attctaaaaataatt

SEQ ID NO: 1400122 - DNA, 15 bp, Homo sapiens
gattctaaaaataat

SEQ ID NO: 1400123 - DNA, 15 bp, Homo sapiens
agattctaaaaataa

SEQ ID NO: 1400124 - DNA, 15 bp, Homo sapiens
gagattctaaaaata

SEQ ID NO: 1400125 - DNA, 15 bp, Homo sapiens
tgagattctaaaaat

SEQ ID NO: 1400126 - DNA, 15 bp, Homo sapiens
atgagattctaaaaa

SEQ ID NO: 1400127 - DNA, 15 bp, Homo sapiens
aatgagattctaaaa

SEQ ID NO: 1400128 - DNA, 15 bp, Homo sapiens
aaatgagattctaaa

SEQ ID NO: 1400129 - DNA, 15 bp, Homo sapiens
gaaatgagattctaa

SEQ ID NO: 1400130 - DNA, 15 bp, Homo sapiens
agaaatgagattcta

SEQ ID NO: 1400131 - DNA, 15 bp, Homo sapiens
aagaaatgagattct

SEQ ID NO: 1400132 - DNA, 15 bp, Homo sapiens
gaagaaatgagattc

SEQ ID NO: 1400133 - DNA, 15 bp, Homo sapiens
ggaagaaatgagatt

SEQ ID NO: 1400134 - DNA, 15 bp, Homo sapiens
aggaagaaatgagat

SEQ ID NO: 1400135 - DNA, 15 bp, Homo sapiens
gaggaagaaatgaga

SEQ ID NO: 1400136 - DNA, 15 bp, Homo sapiens
agaggaagaaatgag

SEQ ID NO: 1400137 - DNA, 15 bp, Homo sapiens
cagaggaagaaatga

SEQ ID NO: 1400138 - DNA, 15 bp, Homo sapiens
acagaggaagaaatg

SEQ ID NO: 1400139 - DNA, 15 bp, Homo sapiens
aacagaggaagaaat

SEQ ID NO: 1400140 - DNA, 15 bp, Homo sapiens
aaacagaggaagaaa

SEQ ID NO: 1400141 - DNA, 15 bp, Homo sapiens
aaaacagaggaagaa

SEQ ID NO: 1400142 - DNA, 15 bp, Homo sapiens
taaaacagaggaaga

SEQ ID NO: 1400143 - DNA, 15 bp, Homo sapiens
ataaaacagaggaag

SEQ ID NO: 1400144 - DNA, 15 bp, Homo sapiens
gataaaacagaggaa

SEQ ID NO: 1400145 - DNA, 15 bp, Homo sapiens
tgataaaacagagga

SEQ ID NO: 1400146 - DNA, 15 bp, Homo sapiens
ctgataaaacagagg

SEQ ID NO: 1400147 - DNA, 15 bp, Homo sapiens
tctgataaaacagag

SEQ ID NO: 1400148 - DNA, 15 bp, Homo sapiens
ttctgataaaacaga

SEQ ID NO: 1400149 - DNA, 15 bp, Homo sapiens
cttctgataaaacag

SEQ ID NO: 1400150 - DNA, 15 bp, Homo sapiens
acttctgataaaaca

SEQ ID NO: 1400151 - DNA, 15 bp, Homo sapiens
aacttctgataaaac

SEQ ID NO: 1400152 - DNA, 15 bp, Homo sapiens
taacttctgataaaa

SEQ ID NO: 1400153 - DNA, 15 bp, Homo sapiens
ataacttctgataaa

SEQ ID NO: 1400154 - DNA, 15 bp, Homo sapiens
gataacttctgataa

SEQ ID NO: 1400155 - DNA, 15 bp, Homo sapiens
agataacttctgata

SEQ ID NO: 1400156 - DNA, 15 bp, Homo sapiens
tagataacttctgat

SEQ ID NO: 1400157 - DNA, 15 bp, Homo sapiens
atagataacttctga

SEQ ID NO: 1400158 - DNA, 15 bp, Homo sapiens
aatagataacttctg

SEQ ID NO: 1400159 - DNA, 15 bp, Homo sapiens
gaatagataacttct

SEQ ID NO: 1400160 - DNA, 15 bp, Homo sapiens
agaatagataacttc

SEQ ID NO: 1400161 - DNA, 15 bp, Homo sapiens
cagaatagataactt

SEQ ID NO: 1400162 - DNA, 15 bp, Homo sapiens
acagaatagataact

SEQ ID NO: 1400163 - DNA, 15 bp, Homo sapiens
aacagaatagataac

SEQ ID NO: 1400164 - DNA, 15 bp, Homo sapiens
taacagaatagataa

SEQ ID NO: 1400165 - DNA, 15 bp, Homo sapiens
gtaacagaatagata

SEQ ID NO: 1400166 - DNA, 15 bp, Homo sapiens
agtaacagaatagat

SEQ ID NO: 1400167 - DNA, 15 bp, Homo sapiens
tagtaacagaataga

SEQ ID NO: 1400168 - DNA, 15 bp, Homo sapiens
atagtaacagaatag

SEQ ID NO: 1400169 - DNA, 15 bp, Homo sapiens
aatagtaacagaata

SEQ ID NO: 1400170 - DNA, 15 bp, Homo sapiens
gaatagtaacagaat

SEQ ID NO: 1400171 - DNA, 15 bp, Homo sapiens
agaatagtaacagaa

SEQ ID NO: 1400172 - DNA, 15 bp, Homo sapiens
aagaatagtaacaga

SEQ ID NO: 1400173 - DNA, 15 bp, Homo sapiens
aaagaatagtaacag

SEQ ID NO: 1400174 - DNA, 15 bp, Homo sapiens
aaaagaatagtaaca

SEQ ID NO: 1400175 - DNA, 15 bp, Homo sapiens
aaaaagaatagtaac

SEQ ID NO: 1400176 - DNA, 15 bp, Homo sapiens
taaaaagaatagtaa

SEQ ID NO: 1400177 - DNA, 15 bp, Homo sapiens
ttaaaaagaatagta

SEQ ID NO: 1400178 - DNA, 15 bp, Homo sapiens
tttaaaaagaatagt

SEQ ID NO: 1400179 - DNA, 15 bp, Homo sapiens
ctttaaaaagaatag

SEQ ID NO: 1400180 - DNA, 15 bp, Homo sapiens
actttaaaaagaata

SEQ ID NO: 1400181 - DNA, 15 bp, Homo sapiens
gactttaaaaagaat

SEQ ID NO: 1400182 - DNA, 15 bp, Homo sapiens
tgactttaaaaagaa

SEQ ID NO: 1400183 - DNA, 15 bp, Homo sapiens
ttgactttaaaaaga

SEQ ID NO: 1400184 - DNA, 15 bp, Homo sapiens
tttgactttaaaaag

SEQ ID NO: 1400185 - DNA, 15 bp, Homo sapiens
ttttgactttaaaaa

SEQ ID NO: 1400186 - DNA, 15 bp, Homo sapiens
tttttgactttaaaa

SEQ ID NO: 1400187 - DNA, 15 bp, Homo sapiens
ttttttgactttaaa

SEQ ID NO: 1400188 - DNA, 15 bp, Homo sapiens
attttttgactttaa

SEQ ID NO: 1400189 - DNA, 15 bp, Homo sapiens
tattttttgacttta

SEQ ID NO: 1400190 - DNA, 15 bp, Homo sapiens
ttattttttgacttt

SEQ ID NO: 1400191 - DNA, 15 bp, Homo sapiens
gttattttttgactt

SEQ ID NO: 1400192 - DNA, 15 bp, Homo sapiens
tgttattttttgact

SEQ ID NO: 1400193 - DNA, 15 bp, Homo sapiens
ctgttattttttgac

SEQ ID NO: 1400194 - DNA, 15 bp, Homo sapiens
tctgttattttttga

SEQ ID NO: 1400195 - DNA, 15 bp, Homo sapiens
atctgttattttttg

SEQ ID NO: 1400196 - DNA, 15 bp, Homo sapiens
tatctgttatttttt

SEQ ID NO: 1400197 - DNA, 15 bp, Homo sapiens
ttatctgttattttt

SEQ ID NO: 1400198 - DNA, 15 bp, Homo sapiens
attatctgttatttt

SEQ ID NO: 1400199 - DNA, 15 bp, Homo sapiens
cattatctgttattt

SEQ ID NO: 1400200 - DNA, 15 bp, Homo sapiens
ccattatctgttatt

SEQ ID NO: 1400201 - DNA, 15 bp, Homo sapiens
accattatctgttat

SEQ ID NO: 1400202 - DNA, 15 bp, Homo sapiens
caccattatctgtta

SEQ ID NO: 1400203 - DNA, 15 bp, Homo sapiens
tcaccattatctgtt

SEQ ID NO: 1400204 - DNA, 15 bp, Homo sapiens
ctcaccattatctgt

SEQ ID NO: 1400205 - DNA, 15 bp, Homo sapiens
cctcaccattatctg

SEQ ID NO: 1400206 - DNA, 15 bp, Homo sapiens
acctcaccattatct

SEQ ID NO: 1400207 - DNA, 15 bp, Homo sapiens
aacctcaccattatc

SEQ ID NO: 1400208 - DNA, 15 bp, Homo sapiens
caacctcaccattat

SEQ ID NO: 1400209 - DNA, 15 bp, Homo sapiens
gcaacctcaccatta

SEQ ID NO: 1400210 - DNA, 15 bp, Homo sapiens
tttgcaacctcacca

SEQ ID NO: 1400211 - DNA, 15 bp, Homo sapiens
ctttgcaacctcacc

SEQ ID NO: 1400212 - DNA, 15 bp, Homo sapiens
tctttgcaacctcac

SEQ ID NO: 1400213 - DNA, 15 bp, Homo sapiens
ttctttgcaacctca

SEQ ID NO: 1400214 - DNA, 15 bp, Homo sapiens
tttctttgcaacctc

SEQ ID NO: 1400215 - DNA, 15 bp, Homo sapiens
ttttctttgcaacct

SEQ ID NO: 1400216 - DNA, 15 bp, Homo sapiens
tttttctttgcaacc

SEQ ID NO: 1400217 - DNA, 15 bp, Homo sapiens
ctttttctttgcaac

SEQ ID NO: 1400218 - DNA, 15 bp, Homo sapiens
cctttttctttgcaa

SEQ ID NO: 1400219 - DNA, 15 bp, Homo sapiens
tcctttttctttgca

SEQ ID NO: 1400220 - DNA, 15 bp, Homo sapiens
ttcctttttctttgc

SEQ ID NO: 1400221 - DNA, 15 bp, Homo sapiens
gttcctttttctttg

SEQ ID NO: 1400222 - DNA, 15 bp, Homo sapiens
cgttcctttttcttt

SEQ ID NO: 1400223 - DNA, 15 bp, Homo sapiens
gcgttcctttttctt

SEQ ID NO: 1400224 - DNA, 15 bp, Homo sapiens
ggcgttcctttttct

SEQ ID NO: 1400225 - DNA, 15 bp, Homo sapiens
aggcgttcctttttc

SEQ ID NO: 1400226 - DNA, 15 bp, Homo sapiens
taggcgttccttttt

SEQ ID NO: 1400227 - DNA, 15 bp, Homo sapiens
ataggcgttcctttt

SEQ ID NO: 1400228 - DNA, 15 bp, Homo sapiens
gataggcgttccttt

SEQ ID NO: 1400229 - DNA, 15 bp, Homo sapiens
ggataggcgttcctt

SEQ ID NO: 1400230 - DNA, 15 bp, Homo sapiens
tggataggcgttcct

SEQ ID NO: 1400231 - DNA, 15 bp, Homo sapiens
gtggataggcgttcc

SEQ ID NO: 1400232 - DNA, 15 bp, Homo sapiens
agtggataggcgttc

SEQ ID NO: 1400233 - DNA, 15 bp, Homo sapiens
aagtggataggcgtt

SEQ ID NO: 1400234 - DNA, 15 bp, Homo sapiens
aaagtggataggcgt

SEQ ID NO: 1400235 - DNA, 15 bp, Homo sapiens
aaaagtggataggcg

SEQ ID NO: 1400236 - DNA, 15 bp, Homo sapiens
caaaagtggataggc

SEQ ID NO: 1400237 - DNA, 15 bp, Homo sapiens
ccaaaagtggatagg

SEQ ID NO: 1400238 - DNA, 15 bp, Homo sapiens
accaaaagtggatag

SEQ ID NO: 1400239 - DNA, 15 bp, Homo sapiens
caccaaaagtggata

SEQ ID NO: 1400240 - DNA, 15 bp, Homo sapiens
ccaccaaaagtggat

SEQ ID NO: 1400241 - DNA, 15 bp, Homo sapiens
cccaccaaaagtgga

SEQ ID NO: 1400242 - DNA, 15 bp, Homo sapiens
tcccaccaaaagtgg

SEQ ID NO: 1400243 - DNA, 15 bp, Homo sapiens
ttcccaccaaaagtg

SEQ ID NO: 1400244 - DNA, 15 bp, Homo sapiens
tttcccaccaaaagt

SEQ ID NO: 1400245 - DNA, 15 bp, Homo sapiens
ctttcccaccaaaag

SEQ ID NO: 1400246 - DNA, 15 bp, Homo sapiens
actttcccaccaaaa

SEQ ID NO: 1400247 - DNA, 15 bp, Homo sapiens
tactttcccaccaaa

SEQ ID NO: 1400248 - DNA, 15 bp, Homo sapiens
ttactttcccaccaa

SEQ ID NO: 1400249 - DNA, 15 bp, Homo sapiens
tttactttcccacca

SEQ ID NO: 1400250 - DNA, 15 bp, Homo sapiens
gtttactttcccacc

SEQ ID NO: 1400251 - DNA, 15 bp, Homo sapiens
agtttactttcccac

SEQ ID NO: 1400252 - DNA, 15 bp, Homo sapiens
cagtttactttccca

SEQ ID NO: 1400253 - DNA, 15 bp, Homo sapiens
ccagtttactttccc

SEQ ID NO: 1400254 - DNA, 15 bp, Homo sapiens
accagtttactttcc

SEQ ID NO: 1400255 - DNA, 15 bp, Homo sapiens
aaccagtttactttc

SEQ ID NO: 1400256 - DNA, 15 bp, Homo sapiens
gaaccagtttacttt

SEQ ID NO: 1400257 - DNA, 15 bp, Homo sapiens
tgaaccagtttactt

SEQ ID NO: 1400258 - DNA, 15 bp, Homo sapiens
ctgaaccagtttact

SEQ ID NO: 1400259 - DNA, 15 bp, Homo sapiens
gctgaaccagtttac

SEQ ID NO: 1400260 - DNA, 15 bp, Homo sapiens
ggctgaaccagttta

SEQ ID NO: 1400261 - DNA, 15 bp, Homo sapiens
tggctgaaccagttt

SEQ ID NO: 1400262 - DNA, 15 bp, Homo sapiens
atggctgaaccagtt

SEQ ID NO: 1400263 - DNA, 15 bp, Homo sapiens
aatggctgaaccagt

SEQ ID NO: 1400264 - DNA, 15 bp, Homo sapiens
caatggctgaaccag

SEQ ID NO: 1400265 - DNA, 15 bp, Homo sapiens
acaatggctgaacca

SEQ ID NO: 1400266 - DNA, 15 bp, Homo sapiens
cacaatggctgaacc

SEQ ID NO: 1400267 - DNA, 15 bp, Homo sapiens
acacaatggctgaac

SEQ ID NO: 1400268 - DNA, 15 bp, Homo sapiens
aacacaatggctgaa

SEQ ID NO: 1400269 - DNA, 15 bp, Homo sapiens
gaacacaatggctga

SEQ ID NO: 1400270 - DNA, 15 bp, Homo sapiens
tgaacacaatggctg

SEQ ID NO: 1400271 - DNA, 15 bp, Homo sapiens
ctgaacacaatggct

SEQ ID NO: 1400272 - DNA, 15 bp, Homo sapiens
tctgaacacaatggc

SEQ ID NO: 1400273 - DNA, 15 bp, Homo sapiens
ctctgaacacaatgg

SEQ ID NO: 1400274 - DNA, 15 bp, Homo sapiens
tctctgaacacaatg

SEQ ID NO: 1400275 - DNA, 15 bp, Homo sapiens
ttctctgaacacaat

SEQ ID NO: 1400276 - DNA, 15 bp, Homo sapiens
gttctctgaacacaa

SEQ ID NO: 1400277 - DNA, 15 bp, Homo sapiens
tgttctctgaacaca

SEQ ID NO: 1400278 - DNA, 15 bp, Homo sapiens
gtgttctctgaacac

SEQ ID NO: 1400279 - DNA, 15 bp, Homo sapiens
tgtgttctctgaaca

SEQ ID NO: 1400280 - DNA, 15 bp, Homo sapiens
ttgtgttctctgaac

SEQ ID NO: 1400281 - DNA, 15 bp, Homo sapiens
tttgtgttctctgaa

SEQ ID NO: 1400282 - DNA, 15 bp, Homo sapiens
ctttgtgttctctga

SEQ ID NO: 1400283 - DNA, 15 bp, Homo sapiens
gctttgtgttctctg

SEQ ID NO: 1400284 - DNA, 15 bp, Homo sapiens
tgctttgtgttctct

SEQ ID NO: 1400285 - DNA, 15 bp, Homo sapiens
ctgctttgtgttctc

SEQ ID NO: 1400286 - DNA, 15 bp, Homo sapiens
tctgctttgtgttct

SEQ ID NO: 1400287 - DNA, 15 bp, Homo sapiens
ttctgctttgtgttc

SEQ ID NO: 1400288 - DNA, 15 bp, Homo sapiens
gttctgctttgtgtt

SEQ ID NO: 1400289 - DNA, 15 bp, Homo sapiens
agttctgctttgtgt

SEQ ID NO: 1400290 - DNA, 15 bp, Homo sapiens
tagttctgctttgtg

SEQ ID NO: 1400291 - DNA, 15 bp, Homo sapiens
atagttctgctttgt

SEQ ID NO: 1400292 - DNA, 15 bp, Homo sapiens
gatagttctgctttg

SEQ ID NO: 1400293 - DNA, 15 bp, Homo sapiens
tgatagttctgcttt

SEQ ID NO: 1400294 - DNA, 15 bp, Homo sapiens
atgatagttctgctt

SEQ ID NO: 1400295 - DNA, 15 bp, Homo sapiens
aatgatagttctgct

SEQ ID NO: 1400296 - DNA, 15 bp, Homo sapiens
gaatgatagttctgc

SEQ ID NO: 1400297 - DNA, 15 bp, Homo sapiens
tgaatgatagttctg

SEQ ID NO: 1400298 - DNA, 15 bp, Homo sapiens
atgaatgatagttct

SEQ ID NO: 1400299 - DNA, 15 bp, Homo sapiens
gatgaatgatagttc

SEQ ID NO: 1400300 - DNA, 15 bp, Homo sapiens
ggatgaatgatagtt

SEQ ID NO: 1400301 - DNA, 15 bp, Homo sapiens
gggatgaatgatagt

SEQ ID NO: 1400302 - DNA, 15 bp, Homo sapiens
tgggatgaatgatag

SEQ ID NO: 1400303 - DNA, 15 bp, Homo sapiens
ctgggatgaatgata

SEQ ID NO: 1400304 - DNA, 15 bp, Homo sapiens
gctgggatgaatgat

SEQ ID NO: 1400305 - DNA, 15 bp, Homo sapiens
tgctgggatgaatga

SEQ ID NO: 1400306 - DNA, 15 bp, Homo sapiens
ttgctgggatgaatg

SEQ ID NO: 1400307 - DNA, 15 bp, Homo sapiens
attgctgggatgaat

SEQ ID NO: 1400308 - DNA, 15 bp, Homo sapiens
gattgctgggatgaa

SEQ ID NO: 1400309 - DNA, 15 bp, Homo sapiens
ggattgctgggatga

SEQ ID NO: 1400310 - DNA, 15 bp, Homo sapiens
gggattgctgggatg

SEQ ID NO: 1400311 - DNA, 15 bp, Homo sapiens
tgggattgctgggat

SEQ ID NO: 1400312 - DNA, 15 bp, Homo sapiens
ctgggattgctggga

SEQ ID NO: 1400313 - DNA, 15 bp, Homo sapiens
actgggattgctggg

SEQ ID NO: 1400314 - DNA, 15 bp, Homo sapiens
tactgggattgctgg

SEQ ID NO: 1400315 - DNA, 15 bp, Homo sapiens
atactgggattgctg

SEQ ID NO: 1400316 - DNA, 15 bp, Homo sapiens
aatactgggattgct

SEQ ID NO: 1400317 - DNA, 15 bp, Homo sapiens
caatactgggattgc

SEQ ID NO: 1400318 - DNA, 15 bp, Homo sapiens
ccaatactgggattg

SEQ ID NO: 1400319 - DNA, 15 bp, Homo sapiens
cccaatactgggatt

SEQ ID NO: 1400320 - DNA, 15 bp, Homo sapiens
acccaatactgggat

SEQ ID NO: 1400321 - DNA, 15 bp, Homo sapiens
tacccaatactggga

SEQ ID NO: 1400322 - DNA, 15 bp, Homo sapiens
atacccaatactggg

SEQ ID NO: 1400323 - DNA, 15 bp, Homo sapiens
tatacccaatactgg

SEQ ID NO: 1400324 - DNA, 15 bp, Homo sapiens
atatacccaatactg

SEQ ID NO: 1400325 - DNA, 15 bp, Homo sapiens
tatatacccaatact

SEQ ID NO: 1400326 - DNA, 15 bp, Homo sapiens
gtatatacccaatac

SEQ ID NO: 1400327 - DNA, 15 bp, Homo sapiens
ggtatatacccaata

SEQ ID NO: 1400328 - DNA, 15 bp, Homo sapiens
gggtatatacccaat

SEQ ID NO: 1400329 - DNA, 15 bp, Homo sapiens
agggtatatacccaa

SEQ ID NO: 1400330 - DNA, 15 bp, Homo sapiens
cagggtatataccca

SEQ ID NO: 1400331 - DNA, 15 bp, Homo sapiens
tcagggtatataccc

SEQ ID NO: 1400332 - DNA, 15 bp, Homo sapiens
ttcagggtatatacc

SEQ ID NO: 1400333 - DNA, 15 bp, Homo sapiens
gttcagggtatatac

SEQ ID NO: 1400334 - DNA, 15 bp, Homo sapiens
tgttcagggtatata

SEQ ID NO: 1400335 - DNA, 15 bp, Homo sapiens
ttgttcagggtatat

SEQ ID NO: 1400336 - DNA, 15 bp, Homo sapiens
attgttcagggtata

SEQ ID NO: 1400337 - DNA, 15 bp, Homo sapiens
tattgttcagggtat

SEQ ID NO: 1400338 - DNA, 15 bp, Homo sapiens
gtattgttcagggta

SEQ ID NO: 1400339 - DNA, 15 bp, Homo sapiens
tgtattgttcagggt

SEQ ID NO: 1400340 - DNA, 15 bp, Homo sapiens
ttgtattgttcaggg

SEQ ID NO: 1400341 - DNA, 15 bp, Homo sapiens
tttgtattgttcagg

SEQ ID NO: 1400342 - DNA, 15 bp, Homo sapiens
atttgtattgttcag

SEQ ID NO: 1400343 - DNA, 15 bp, Homo sapiens
aatttgtattgttca

SEQ ID NO: 1400344 - DNA, 15 bp, Homo sapiens
caatttgtattgttc

SEQ ID NO: 1400345 - DNA, 15 bp, Homo sapiens
acaatttgtattgtt

SEQ ID NO: 1400346 - DNA, 15 bp, Homo sapiens
aacaatttgtattgt

SEQ ID NO: 1400347 - DNA, 15 bp, Homo sapiens
gaacaatttgtattg

SEQ ID NO: 1400348 - DNA, 15 bp, Homo sapiens
agaacaatttgtatt

SEQ ID NO: 1400349 - DNA, 15 bp, Homo sapiens
cagaacaatttgtat

SEQ ID NO: 1400350 - DNA, 15 bp, Homo sapiens
gcagaacaatttgta

SEQ ID NO: 1400351 - DNA, 15 bp, Homo sapiens
ggcagaacaatttgt

SEQ ID NO: 1400352 - DNA, 15 bp, Homo sapiens
tggcagaacaatttg

SEQ ID NO: 1400353 - DNA, 15 bp, Homo sapiens
gtggcagaacaattt

SEQ ID NO: 1400354 - DNA, 15 bp, Homo sapiens
tgtggcagaacaatt

SEQ ID NO: 1400355 - DNA, 15 bp, Homo sapiens
ttgtggcagaacaat

SEQ ID NO: 1400356 - DNA, 15 bp, Homo sapiens
tttgtggcagaacaa

SEQ ID NO: 1400357 - DNA, 15 bp, Homo sapiens
ctttgtggcagaaca

SEQ ID NO: 1400358 - DNA, 15 bp, Homo sapiens
tctttgtggcagaac

SEQ ID NO: 1400359 - DNA, 15 bp, Homo sapiens
gtctttgtggcagaa

SEQ ID NO: 1400360 - DNA, 15 bp, Homo sapiens
tgtctttgtggcaga

SEQ ID NO: 1400361 - DNA, 15 bp, Homo sapiens
gtgtctttgtggcag

SEQ ID NO: 1400362 - DNA, 15 bp, Homo sapiens
tgtgtctttgtggca

SEQ ID NO: 1400363 - DNA, 15 bp, Homo sapiens
atgtgtctttgtggc

SEQ ID NO: 1400364 - DNA, 15 bp, Homo sapiens
catgtgtctttgtgg

SEQ ID NO: 1400365 - DNA, 15 bp, Homo sapiens
acatgtgtctttgtg

SEQ ID NO: 1400366 - DNA, 15 bp, Homo sapiens
tacatgtgtctttgt

SEQ ID NO: 1400367 - DNA, 15 bp, Homo sapiens
gtacatgtgtctttg

SEQ ID NO: 1400368 - DNA, 15 bp, Homo sapiens
tgtacatgtgtcttt

SEQ ID NO: 1400369 - DNA, 15 bp, Homo sapiens
atgtacatgtgtctt

SEQ ID NO: 1400370 - DNA, 15 bp, Homo sapiens
catgtacatgtgtct

SEQ ID NO: 1400371 - DNA, 15 bp, Homo sapiens
acatgtacatgtgtc

SEQ ID NO: 1400372 - DNA, 15 bp, Homo sapiens
tacatgtacatgtgt

SEQ ID NO: 1400373 - DNA, 15 bp, Homo sapiens
atacatgtacatgtg

SEQ ID NO: 1400374 - DNA, 15 bp, Homo sapiens
catacatgtacatgt

SEQ ID NO: 1400375 - DNA, 15 bp, Homo sapiens
acatacatgtacatg

SEQ ID NO: 1400376 - DNA, 15 bp, Homo sapiens
aacatacatgtacat

SEQ ID NO: 1400377 - DNA, 15 bp, Homo sapiens
gaacatacatgtaca

SEQ ID NO: 1400378 - DNA, 15 bp, Homo sapiens
tgaacatacatgtac

SEQ ID NO: 1400379 - DNA, 15 bp, Homo sapiens
atgaacatacatgta

SEQ ID NO: 1400380 - DNA, 15 bp, Homo sapiens
catgaacatacatgt

SEQ ID NO: 1400381 - DNA, 15 bp, Homo sapiens
ccatgaacatacatg

SEQ ID NO: 1400382 - DNA, 15 bp, Homo sapiens
gccatgaacatacat

SEQ ID NO: 1400383 - DNA, 15 bp, Homo sapiens
tgccatgaacataca

SEQ ID NO: 1400384 - DNA, 15 bp, Homo sapiens
ctgccatgaacatac

SEQ ID NO: 1400385 - DNA, 15 bp, Homo sapiens
tgctgccatgaacat

SEQ ID NO: 1400386 - DNA, 15 bp, Homo sapiens
ctgctgccatgaaca

SEQ ID NO: 1400387 - DNA, 15 bp, Homo sapiens
actgctgccatgaac

SEQ ID NO: 1400388 - DNA, 15 bp, Homo sapiens
aactgctgccatgaa

SEQ ID NO: 1400389 - DNA, 15 bp, Homo sapiens
gaactgctgccatga

SEQ ID NO: 1400390 - DNA, 15 bp, Homo sapiens
agaactgctgccatg

SEQ ID NO: 1400391 - DNA, 15 bp, Homo sapiens
gagaactgctgccat

SEQ ID NO: 1400392 - DNA, 15 bp, Homo sapiens
tgagaactgctgcca

SEQ ID NO: 1400393 - DNA, 15 bp, Homo sapiens
gtgagaactgctgcc

SEQ ID NO: 1400394 - DNA, 15 bp, Homo sapiens
tgtgagaactgctgc

SEQ ID NO: 1400395 - DNA, 15 bp, Homo sapiens
ttgtgagaactgctg

SEQ ID NO: 1400396 - DNA, 15 bp, Homo sapiens
attgtgagaactgct

SEQ ID NO: 1400397 - DNA, 15 bp, Homo sapiens
tattgtgagaactgc

SEQ ID NO: 1400398 - DNA, 15 bp, Homo sapiens
ctattgtgagaactg

SEQ ID NO: 1400399 - DNA, 15 bp, Homo sapiens
gctattgtgagaact

SEQ ID NO: 1400400 - DNA, 15 bp, Homo sapiens
tgctattgtgagaac

SEQ ID NO: 1400401 - DNA, 15 bp, Homo sapiens
ttgctattgtgagaa

SEQ ID NO: 1400402 - DNA, 15 bp, Homo sapiens
tttgctattgtgaga

SEQ ID NO: 1400403 - DNA, 15 bp, Homo sapiens
atctttgctattgtg

SEQ ID NO: 1400404 - DNA, 15 bp, Homo sapiens
tatctttgctattgt

SEQ ID NO: 1400405 - DNA, 15 bp, Homo sapiens
atatctttgctattg

SEQ ID NO: 1400406 - DNA, 15 bp, Homo sapiens
catatctttgctatt

SEQ ID NO: 1400407 - DNA, 15 bp, Homo sapiens
ccatatctttgctat

SEQ ID NO: 1400408 - DNA, 15 bp, Homo sapiens
tccatatctttgcta

SEQ ID NO: 1400409 - DNA, 15 bp, Homo sapiens
ttccatatctttgct

SEQ ID NO: 1400410 - DNA, 15 bp, Homo sapiens
attccatatctttgc

SEQ ID NO: 1400411 - DNA, 15 bp, Homo sapiens
gattccatatctttg

SEQ ID NO: 1400412 - DNA, 15 bp, Homo sapiens
tgattccatatcttt

SEQ ID NO: 1400413 - DNA, 15 bp, Homo sapiens
ttgattccatatctt

SEQ ID NO: 1400414 - DNA, 15 bp, Homo sapiens
gttgattccatatct

SEQ ID NO: 1400415 - DNA, 15 bp, Homo sapiens
ggttgattccatatc

SEQ ID NO: 1400416 - DNA, 15 bp, Homo sapiens
aggttgattccatat

SEQ ID NO: 1400417 - DNA, 15 bp, Homo sapiens
taggttgattccata

SEQ ID NO: 1400418 - DNA, 15 bp, Homo sapiens
ttaggttgattccat

SEQ ID NO: 1400419 - DNA, 15 bp, Homo sapiens
tttaggttgattcca

SEQ ID NO: 1400420 - DNA, 15 bp, Homo sapiens
atttaggttgattcc

SEQ ID NO: 1400421 - DNA, 15 bp, Homo sapiens
catttaggttgattc

SEQ ID NO: 1400422 - DNA, 15 bp, Homo sapiens
gcatttaggttgatt

SEQ ID NO: 1400423 - DNA, 15 bp, Homo sapiens
ggcatttaggttgat

SEQ ID NO: 1400424 - DNA, 15 bp, Homo sapiens
gggcatttaggttga

SEQ ID NO: 1400425 - DNA, 15 bp, Homo sapiens
tgggcatttaggttg

SEQ ID NO: 1400426 - DNA, 15 bp, Homo sapiens
atgggcatttaggtt

SEQ ID NO: 1400427 - DNA, 15 bp, Homo sapiens
gatgggcatttaggt

SEQ ID NO: 1400428 - DNA, 15 bp, Homo sapiens
tgatgggcatttagg

SEQ ID NO: 1400429 - DNA, 15 bp, Homo sapiens
actgttgatgggcat

SEQ ID NO: 1400430 - DNA, 15 bp, Homo sapiens
cactgttgatgggca

SEQ ID NO: 1400431 - DNA, 15 bp, Homo sapiens
ccactgttgatgggc

SEQ ID NO: 1400432 - DNA, 15 bp, Homo sapiens
tccactgttgatggg

SEQ ID NO: 1400433 - DNA, 15 bp, Homo sapiens
gtccactgttgatgg

SEQ ID NO: 1400434 - DNA, 15 bp, Homo sapiens
tgtccactgttgatg

SEQ ID NO: 1400435 - DNA, 15 bp, Homo sapiens
ctgtccactgttgat

SEQ ID NO: 1400436 - DNA, 15 bp, Homo sapiens
cctgtccactgttga

SEQ ID NO: 1400437 - DNA, 15 bp, Homo sapiens
tcctgtccactgttg

SEQ ID NO: 1400438 - DNA, 15 bp, Homo sapiens
atcctgtccactgtt

SEQ ID NO: 1400439 - DNA, 15 bp, Homo sapiens
tatcctgtccactgt

SEQ ID NO: 1400440 - DNA, 15 bp, Homo sapiens
ttatcctgtccactg

SEQ ID NO: 1400441 - DNA, 15 bp, Homo sapiens
tttatcctgtccact

SEQ ID NO: 1400442 - DNA, 15 bp, Homo sapiens
ctttatcctgtccac

SEQ ID NO: 1400443 - DNA, 15 bp, Homo sapiens
tctttatcctgtcca

SEQ ID NO: 1400444 - DNA, 15 bp, Homo sapiens
ttctttatcctgtcc

SEQ ID NO: 1400445 - DNA, 15 bp, Homo sapiens
tttctttatcctgtc

SEQ ID NO: 1400446 - DNA, 15 bp, Homo sapiens
ttttctttatcctgt

SEQ ID NO: 1400447 - DNA, 15 bp, Homo sapiens
attttctttatcctg

SEQ ID NO: 1400448 - DNA, 15 bp, Homo sapiens
cattttctttatcct

SEQ ID NO: 1400449 - DNA, 15 bp, Homo sapiens
ttattccatggtgta

SEQ ID NO: 1400450 - DNA, 15 bp, Homo sapiens
attattccatggtgt

SEQ ID NO: 1400451 - DNA, 15 bp, Homo sapiens
tattattccatggtg

SEQ ID NO: 1400452 - DNA, 15 bp, Homo sapiens
gtattattccatggt

SEQ ID NO: 1400453 - DNA, 15 bp, Homo sapiens
agtattattccatgg

SEQ ID NO: 1400454 - DNA, 15 bp, Homo sapiens
tagtattattccatg

SEQ ID NO: 1400455 - DNA, 15 bp, Homo sapiens
gtagtattattccat

SEQ ID NO: 1400456 - DNA, 15 bp, Homo sapiens
cgtagtattattcca

SEQ ID NO: 1400457 - DNA, 15 bp, Homo sapiens
gcgtagtattattcc

SEQ ID NO: 1400458 - DNA, 15 bp, Homo sapiens
tgcgtagtattattc

SEQ ID NO: 1400459 - DNA, 15 bp, Homo sapiens
ctgcgtagtattatt

SEQ ID NO: 1400460 - DNA, 15 bp, Homo sapiens
actgcgtagtattat

SEQ ID NO: 1400461 - DNA, 15 bp, Homo sapiens
gactgcgtagtatta

SEQ ID NO: 1400462 - DNA, 15 bp, Homo sapiens
tgactgcgtagtatt

SEQ ID NO: 1400463 - DNA, 15 bp, Homo sapiens
atgactgcgtagtat

SEQ ID NO: 1400464 - DNA, 15 bp, Homo sapiens
catgactgcgtagta

SEQ ID NO: 1400465 - DNA, 15 bp, Homo sapiens
tcatgactgcgtagt

SEQ ID NO: 1400466 - DNA, 15 bp, Homo sapiens
ttcatgactgcgtag

SEQ ID NO: 1400467 - DNA, 15 bp, Homo sapiens
tttcatgactgcgta

SEQ ID NO: 1400468 - DNA, 15 bp, Homo sapiens
ttttcatgactgcgt

SEQ ID NO: 1400469 - DNA, 15 bp, Homo sapiens
tttttcatgactgcg

SEQ ID NO: 1400470 - DNA, 15 bp, Homo sapiens
ctttttcatgactgc

SEQ ID NO: 1400471 - DNA, 15 bp, Homo sapiens
tctttttcatgactg

SEQ ID NO: 1400472 - DNA, 15 bp, Homo sapiens
ttctttttcatgact

SEQ ID NO: 1400473 - DNA, 15 bp, Homo sapiens
attctttttcatgac

SEQ ID NO: 1400474 - DNA, 15 bp, Homo sapiens
cattctttttcatga

SEQ ID NO: 1400475 - DNA, 15 bp, Homo sapiens
tcattctttttcatg

SEQ ID NO: 1400476 - DNA, 15 bp, Homo sapiens
ctcattctttttcat

SEQ ID NO: 1400477 - DNA, 15 bp, Homo sapiens
tctcattctttttca

SEQ ID NO: 1400478 - DNA, 15 bp, Homo sapiens
atctcattctttttc

SEQ ID NO: 1400479 - DNA, 15 bp, Homo sapiens
gatctcattcttttt

SEQ ID NO: 1400480 - DNA, 15 bp, Homo sapiens
tgatctcattctttt

SEQ ID NO: 1400481 - DNA, 15 bp, Homo sapiens
atgatctcattcttt

SEQ ID NO: 1400482 - DNA, 15 bp, Homo sapiens
catgatctcattctt

SEQ ID NO: 1400483 - DNA, 15 bp, Homo sapiens
gctgcaaaggacatg

SEQ ID NO: 1400484 - DNA, 15 bp, Homo sapiens
tgctgcaaaggacat

SEQ ID NO: 1400485 - DNA, 15 bp, Homo sapiens
ttgctgcaaaggaca

SEQ ID NO: 1400486 - DNA, 15 bp, Homo sapiens
gttgctgcaaaggac

SEQ ID NO: 1400487 - DNA, 15 bp, Homo sapiens
ggttgctgcaaagga

SEQ ID NO: 1400488 - DNA, 15 bp, Homo sapiens
tggttgctgcaaagg

SEQ ID NO: 1400489 - DNA, 15 bp, Homo sapiens
atggttgctgcaaag

SEQ ID NO: 1400490 - DNA, 15 bp, Homo sapiens
catggttgctgcaaa

SEQ ID NO: 1400491 - DNA, 15 bp, Homo sapiens
ccatggttgctgcaa

SEQ ID NO: 1400492 - DNA, 15 bp, Homo sapiens
tccatggttgctgca

SEQ ID NO: 1400493 - DNA, 15 bp, Homo sapiens
atccatggttgctgc

SEQ ID NO: 1400494 - DNA, 15 bp, Homo sapiens
catccatggttgctg

SEQ ID NO: 1400495 - DNA, 15 bp, Homo sapiens
ccatccatggttgct

SEQ ID NO: 1400496 - DNA, 15 bp, Homo sapiens
tccatccatggttgc

SEQ ID NO: 1400497 - DNA, 15 bp, Homo sapiens
ctccatccatggttg

SEQ ID NO: 1400498 - DNA, 15 bp, Homo sapiens
gctccatccatggtt

SEQ ID NO: 1400499 - DNA, 15 bp, Homo sapiens
agctccatccatggt

SEQ ID NO: 1400500 - DNA, 15 bp, Homo sapiens
cagctccatccatgg

SEQ ID NO: 1400501 - DNA, 15 bp, Homo sapiens
ctccagctccatcca

SEQ ID NO: 1400502 - DNA, 15 bp, Homo sapiens
cctccagctccatcc

SEQ ID NO: 1400503 - DNA, 15 bp, Homo sapiens
acctccagctccatc

SEQ ID NO: 1400504 - DNA, 15 bp, Homo sapiens
gacctccagctccat

SEQ ID NO: 1400505 - DNA, 15 bp, Homo sapiens
tgacctccagctcca

SEQ ID NO: 1400506 - DNA, 15 bp, Homo sapiens
atgacctccagctcc

SEQ ID NO: 1400507 - DNA, 15 bp, Homo sapiens
gatgacctccagctc

SEQ ID NO: 1400508 - DNA, 15 bp, Homo sapiens
tgatgacctccagct

SEQ ID NO: 1400509 - DNA, 15 bp, Homo sapiens
atgatgacctccagc

SEQ ID NO: 1400510 - DNA, 15 bp, Homo sapiens
catgatgacctccag

SEQ ID NO: 1400511 - DNA, 15 bp, Homo sapiens
gcatgatgacctcca

SEQ ID NO: 1400512 - DNA, 15 bp, Homo sapiens
agcatgatgacctcc

SEQ ID NO: 1400513 - DNA, 15 bp, Homo sapiens
tagcatgatgacctc

SEQ ID NO: 1400514 - DNA, 15 bp, Homo sapiens
ttagcatgatgacct

SEQ ID NO: 1400515 - DNA, 15 bp, Homo sapiens
cttagcatgatgacc

SEQ ID NO: 1400516 - DNA, 15 bp, Homo sapiens
acttagcatgatgac

SEQ ID NO: 1400517 - DNA, 15 bp, Homo sapiens
tacttagcatgatga

SEQ ID NO: 1400518 - DNA, 15 bp, Homo sapiens
ttacttagcatgatg

SEQ ID NO: 1400519 - DNA, 15 bp, Homo sapiens
tttacttagcatgat

SEQ ID NO: 1400520 - DNA, 15 bp, Homo sapiens
gtttacttagcatga

SEQ ID NO: 1400521 - DNA, 15 bp, Homo sapiens
agtttacttagcatg

SEQ ID NO: 1400522 - DNA, 15 bp, Homo sapiens
tagtttacttagcat

SEQ ID NO: 1400523 - DNA, 15 bp, Homo sapiens
ttagtttacttagca

SEQ ID NO: 1400524 - DNA, 15 bp, Homo sapiens
gttagtttacttagc

SEQ ID NO: 1400525 - DNA, 15 bp, Homo sapiens
tgttagtttacttag

SEQ ID NO: 1400526 - DNA, 15 bp, Homo sapiens
gtgttagtttactta

SEQ ID NO: 1400527 - DNA, 15 bp, Homo sapiens
tgtgttagtttactt

SEQ ID NO: 1400528 - DNA, 15 bp, Homo sapiens
ctgtgttagtttact

SEQ ID NO: 1400529 - DNA, 15 bp, Homo sapiens
cctgtgttagtttac

SEQ ID NO: 1400530 - DNA, 15 bp, Homo sapiens
tcctgtgttagttta

SEQ ID NO: 1400531 - DNA, 15 bp, Homo sapiens
tggtatttggttttc

SEQ ID NO: 1400532 - DNA, 15 bp, Homo sapiens
gtggtatttggtttt

SEQ ID NO: 1400533 - DNA, 15 bp, Homo sapiens
tgtggtatttggttt

SEQ ID NO: 1400534 - DNA, 15 bp, Homo sapiens
atgtggtatttggtt

SEQ ID NO: 1400535 - DNA, 15 bp, Homo sapiens
tatgtggtatttggt

SEQ ID NO: 1400536 - DNA, 15 bp, Homo sapiens
atatgtggtatttgg

SEQ ID NO: 1400537 - DNA, 15 bp, Homo sapiens
aatatgtggtatttg

SEQ ID NO: 1400538 - DNA, 15 bp, Homo sapiens
gaatatgtggtattt

SEQ ID NO: 1400539 - DNA, 15 bp, Homo sapiens
agaatatgtggtatt

SEQ ID NO: 1400540 - DNA, 15 bp, Homo sapiens
gagaatatgtggtat

SEQ ID NO: 1400541 - DNA, 15 bp, Homo sapiens
tgagaatatgtggta

SEQ ID NO: 1400542 - DNA, 15 bp, Homo sapiens
gtgagaatatgtggt

SEQ ID NO: 1400543 - DNA, 15 bp, Homo sapiens
agtgagaatatgtgg

SEQ ID NO: 1400544 - DNA, 15 bp, Homo sapiens
aagtgagaatatgtg

SEQ ID NO: 1400545 - DNA, 15 bp, Homo sapiens
taagtgagaatatgt

SEQ ID NO: 1400546 - DNA, 15 bp, Homo sapiens
ttaagtgagaatatg

SEQ ID NO: 1400547 - DNA, 15 bp, Homo sapiens
tttaagtgagaatat

SEQ ID NO: 1400548 - DNA, 15 bp, Homo sapiens
ttttaagtgagaata

SEQ ID NO: 1400549 - DNA, 15 bp, Homo sapiens
cttttaagtgagaat

SEQ ID NO: 1400550 - DNA, 15 bp, Homo sapiens
acttttaagtgagaa

SEQ ID NO: 1400551 - DNA, 15 bp, Homo sapiens
cacttttaagtgaga

SEQ ID NO: 1400552 - DNA, 15 bp, Homo sapiens
ccacttttaagtgag

SEQ ID NO: 1400553 - DNA, 15 bp, Homo sapiens
accacttttaagtga

SEQ ID NO: 1400554 - DNA, 15 bp, Homo sapiens
taccacttttaagtg

SEQ ID NO: 1400555 - DNA, 15 bp, Homo sapiens
ctaccacttttaagt

SEQ ID NO: 1400556 - DNA, 15 bp, Homo sapiens
gctaccacttttaag

SEQ ID NO: 1400557 - DNA, 15 bp, Homo sapiens
agctaccacttttaa

SEQ ID NO: 1400558 - DNA, 15 bp, Homo sapiens
tagctaccactttta

SEQ ID NO: 1400559 - DNA, 15 bp, Homo sapiens
ttagctaccactttt

SEQ ID NO: 1400560 - DNA, 15 bp, Homo sapiens
tttagctaccacttt

SEQ ID NO: 1400561 - DNA, 15 bp, Homo sapiens
gtttagctaccactt

SEQ ID NO: 1400562 - DNA, 15 bp, Homo sapiens
tgtttagctaccact

SEQ ID NO: 1400563 - DNA, 15 bp, Homo sapiens
atgtttagctaccac

SEQ ID NO: 1400564 - DNA, 15 bp, Homo sapiens
aatgtttagctacca

SEQ ID NO: 1400565 - DNA, 15 bp, Homo sapiens
caatgtttagctacc

SEQ ID NO: 1400566 - DNA, 15 bp, Homo sapiens
tcaatgtttagctac

SEQ ID NO: 1400567 - DNA, 15 bp, Homo sapiens
ctcaatgtttagcta

SEQ ID NO: 1400568 - DNA, 15 bp, Homo sapiens
actcaatgtttagct

SEQ ID NO: 1400569 - DNA, 15 bp, Homo sapiens
tactcaatgtttagc

SEQ ID NO: 1400570 - DNA, 15 bp, Homo sapiens
gtactcaatgtttag

SEQ ID NO: 1400571 - DNA, 15 bp, Homo sapiens
tgtactcaatgttta

SEQ ID NO: 1400572 - DNA, 15 bp, Homo sapiens
gtgtactcaatgttt

SEQ ID NO: 1400573 - DNA, 15 bp, Homo sapiens
tgtgtactcaatgtt

SEQ ID NO: 1400574 - DNA, 15 bp, Homo sapiens
atgtgtactcaatgt

SEQ ID NO: 1400575 - DNA, 15 bp, Homo sapiens
catgtgtactcaatg

SEQ ID NO: 1400576 - DNA, 15 bp, Homo sapiens
ccatgtgtactcaat

SEQ ID NO: 1400577 - DNA, 15 bp, Homo sapiens
tccatgtgtactcaa

SEQ ID NO: 1400578 - DNA, 15 bp, Homo sapiens
gtccatgtgtactca

SEQ ID NO: 1400579 - DNA, 15 bp, Homo sapiens
tgtccatgtgtactc

SEQ ID NO: 1400580 - DNA, 15 bp, Homo sapiens
atgtccatgtgtact

SEQ ID NO: 1400581 - DNA, 15 bp, Homo sapiens
tatgtccatgtgtac

SEQ ID NO: 1400582 - DNA, 15 bp, Homo sapiens
ttatgtccatgtgta

SEQ ID NO: 1400583 - DNA, 15 bp, Homo sapiens
attatgtccatgtgt

SEQ ID NO: 1400584 - DNA, 15 bp, Homo sapiens
cattatgtccatgtg

SEQ ID NO: 1400585 - DNA, 15 bp, Homo sapiens
tcattatgtccatgt

SEQ ID NO: 1400586 - DNA, 15 bp, Homo sapiens
ttcattatgtccatg

SEQ ID NO: 1400587 - DNA, 15 bp, Homo sapiens
attcattatgtccat

SEQ ID NO: 1400588 - DNA, 15 bp, Homo sapiens
cattcattatgtcca

SEQ ID NO: 1400589 - DNA, 15 bp, Homo sapiens
tcattcattatgtcc

SEQ ID NO: 1400590 - DNA, 15 bp, Homo sapiens
ttcattcattatgtc

SEQ ID NO: 1400591 - DNA, 15 bp, Homo sapiens
tttcattcattatgt

SEQ ID NO: 1400592 - DNA, 15 bp, Homo sapiens
ttttcattcattatg

SEQ ID NO: 1400593 - DNA, 15 bp, Homo sapiens
tttttcattcattat

SEQ ID NO: 1400594 - DNA, 15 bp, Homo sapiens
ctttttcattcatta

SEQ ID NO: 1400595 - DNA, 15 bp, Homo sapiens
gctttttcattcatt

SEQ ID NO: 1400596 - DNA, 15 bp, Homo sapiens
tgctttttcattcat

SEQ ID NO: 1400597 - DNA, 15 bp, Homo sapiens
gtgctttttcattca

SEQ ID NO: 1400598 - DNA, 15 bp, Homo sapiens
tgtgctttttcattc

SEQ ID NO: 1400599 - DNA, 15 bp, Homo sapiens
gtgtgctttttcatt

SEQ ID NO: 1400600 - DNA, 15 bp, Homo sapiens
tgtgtgctttttcat

SEQ ID NO: 1400601 - DNA, 15 bp, Homo sapiens
gtgtgtgctttttca

SEQ ID NO: 1400602 - DNA, 15 bp, Homo sapiens
ggtgtgtgctttttc

SEQ ID NO: 1400603 - DNA, 15 bp, Homo sapiens
tggtgtgtgcttttt

SEQ ID NO: 1400604 - DNA, 15 bp, Homo sapiens
ttggtgtgtgctttt

SEQ ID NO: 1400605 - DNA, 15 bp, Homo sapiens
tttggtgtgtgcttt

SEQ ID NO: 1400606 - DNA, 15 bp, Homo sapiens
ctttggtgtgtgctt

SEQ ID NO: 1400607 - DNA, 15 bp, Homo sapiens
gctttggtgtgtgct

SEQ ID NO: 1400608 - DNA, 15 bp, Homo sapiens
ggctttggtgtgtgc

SEQ ID NO: 1400609 - DNA, 15 bp, Homo sapiens
aggctttggtgtgtg

SEQ ID NO: 1400610 - DNA, 15 bp, Homo sapiens
caggctttggtgtgt

SEQ ID NO: 1400611 - DNA, 15 bp, Homo sapiens
gcaggctttggtgtg

SEQ ID NO: 1400612 - DNA, 15 bp, Homo sapiens
agcaggctttggtgt

SEQ ID NO: 1400613 - DNA, 15 bp, Homo sapiens
aagcaggctttggtg

SEQ ID NO: 1400614 - DNA, 15 bp, Homo sapiens
caagcaggctttggt

SEQ ID NO: 1400615 - DNA, 15 bp, Homo sapiens
tcaagcaggctttgg

SEQ ID NO: 1400616 - DNA, 15 bp, Homo sapiens
ctcaagcaggctttg

SEQ ID NO: 1400617 - DNA, 15 bp, Homo sapiens
actcaagcaggcttt

SEQ ID NO: 1400618 - DNA, 15 bp, Homo sapiens
cactcaagcaggctt

SEQ ID NO: 1400619 - DNA, 15 bp, Homo sapiens
acactcaagcaggct

SEQ ID NO: 1400620 - DNA, 15 bp, Homo sapiens
cacactcaagcaggc

SEQ ID NO: 1400621 - DNA, 15 bp, Homo sapiens
ccacactcaagcagg

SEQ ID NO: 1400622 - DNA, 15 bp, Homo sapiens
tccacactcaagcag

SEQ ID NO: 1400623 - DNA, 15 bp, Homo sapiens
ctccacactcaagca

SEQ ID NO: 1400624 - DNA, 15 bp, Homo sapiens
cctccacactcaagc

SEQ ID NO: 1400625 - DNA, 15 bp, Homo sapiens
ccctccacactcaag

SEQ ID NO: 1400626 - DNA, 15 bp, Homo sapiens
tccctccacactcaa

SEQ ID NO: 1400627 - DNA, 15 bp, Homo sapiens
ctccctccacactca

SEQ ID NO: 1400628 - DNA, 15 bp, Homo sapiens
cctccctccacactc

SEQ ID NO: 1400629 - DNA, 15 bp, Homo sapiens
tcctccctccacact

SEQ ID NO: 1400630 - DNA, 15 bp, Homo sapiens
ttcctccctccacac

SEQ ID NO: 1400631 - DNA, 15 bp, Homo sapiens
cttcctccctccaca

SEQ ID NO: 1400632 - DNA, 15 bp, Homo sapiens
ccttcctccctccac

SEQ ID NO: 1400633 - DNA, 15 bp, Homo sapiens
tccttcctccctcca

SEQ ID NO: 1400634 - DNA, 15 bp, Homo sapiens
ctccttcctccctcc

SEQ ID NO: 1400635 - DNA, 15 bp, Homo sapiens
ccctccttcctccct

SEQ ID NO: 1400636 - DNA, 15 bp, Homo sapiens
accctccttcctccc

SEQ ID NO: 1400637 - DNA, 15 bp, Homo sapiens
caccctccttcctcc

SEQ ID NO: 1400638 - DNA, 15 bp, Homo sapiens
tcaccctccttcctc

SEQ ID NO: 1400639 - DNA, 15 bp, Homo sapiens
ctcaccctccttcct

SEQ ID NO: 1400640 - DNA, 15 bp, Homo sapiens
tctcaccctccttcc

SEQ ID NO: 1400641 - DNA, 15 bp, Homo sapiens
ttctcaccctccttc

SEQ ID NO: 1400642 - DNA, 15 bp, Homo sapiens
attctcaccctcctt

SEQ ID NO: 1400643 - DNA, 15 bp, Homo sapiens
aattctcaccctcct

SEQ ID NO: 1400644 - DNA, 15 bp, Homo sapiens
aaattctcaccctcc

SEQ ID NO: 1400645 - DNA, 15 bp, Homo sapiens
taaattctcaccctc

SEQ ID NO: 1400646 - DNA, 15 bp, Homo sapiens
ttaaattctcaccct

SEQ ID NO: 1400647 - DNA, 15 bp, Homo sapiens
tttaaattctcaccc

SEQ ID NO: 1400648 - DNA, 15 bp, Homo sapiens
ttttaaattctcacc

SEQ ID NO: 1400649 - DNA, 15 bp, Homo sapiens
gttttaaattctcac

SEQ ID NO: 1400650 - DNA, 15 bp, Homo sapiens
agttttaaattctca

SEQ ID NO: 1400651 - DNA, 15 bp, Homo sapiens
tagttttaaattctc

SEQ ID NO: 1400652 - DNA, 15 bp, Homo sapiens
gtagttttaaattct

SEQ ID NO: 1400653 - DNA, 15 bp, Homo sapiens
tgtagttttaaattc

SEQ ID NO: 1400654 - DNA, 15 bp, Homo sapiens
atgtagttttaaatt

SEQ ID NO: 1400655 - DNA, 15 bp, Homo sapiens
tatgtagttttaaat

SEQ ID NO: 1400656 - DNA, 15 bp, Homo sapiens
ctatgtagttttaaa

SEQ ID NO: 1400657 - DNA, 15 bp, Homo sapiens
cctatgtagttttaa

SEQ ID NO: 1400658 - DNA, 15 bp, Homo sapiens
ccctatgtagtttta

SEQ ID NO: 1400659 - DNA, 15 bp, Homo sapiens
accctatgtagtttt

SEQ ID NO: 1400660 - DNA, 15 bp, Homo sapiens
taccctatgtagttt

SEQ ID NO: 1400661 - DNA, 15 bp, Homo sapiens
gtaccctatgtagtt

SEQ ID NO: 1400662 - DNA, 15 bp, Homo sapiens
agtaccctatgtagt

SEQ ID NO: 1400663 - DNA, 15 bp, Homo sapiens
tagtaccctatgtag

SEQ ID NO: 1400664 - DNA, 15 bp, Homo sapiens
atagtaccctatgta

SEQ ID NO: 1400665 - DNA, 15 bp, Homo sapiens
catagtaccctatgt

SEQ ID NO: 1400666 - DNA, 15 bp, Homo sapiens
gcatagtaccctatg

SEQ ID NO: 1400667 - DNA, 15 bp, Homo sapiens
agcatagtaccctat

SEQ ID NO: 1400668 - DNA, 15 bp, Homo sapiens
aagcatagtacccta

SEQ ID NO: 1400669 - DNA, 15 bp, Homo sapiens
taagcatagtaccct

SEQ ID NO: 1400670 - DNA, 15 bp, Homo sapiens
ataagcatagtaccc

SEQ ID NO: 1400671 - DNA, 15 bp, Homo sapiens
aataagcatagtacc

SEQ ID NO: 1400672 - DNA, 15 bp, Homo sapiens
taataagcatagtac

SEQ ID NO: 1400673 - DNA, 15 bp, Homo sapiens
gtaataagcatagta

SEQ ID NO: 1400674 - DNA, 15 bp, Homo sapiens
ggtaataagcatagt

SEQ ID NO: 1400675 - DNA, 15 bp, Homo sapiens
aggtaataagcatag

SEQ ID NO: 1400676 - DNA, 15 bp, Homo sapiens
caggtaataagcata

SEQ ID NO: 1400677 - DNA, 15 bp, Homo sapiens
ccaggtaataagcat

SEQ ID NO: 1400678 - DNA, 15 bp, Homo sapiens
cccaggtaataagca

SEQ ID NO: 1400679 - DNA, 15 bp, Homo sapiens
acccaggtaataagc

SEQ ID NO: 1400680 - DNA, 15 bp, Homo sapiens
cacccaggtaataag

SEQ ID NO: 1400681 - DNA, 15 bp, Homo sapiens
ccacccaggtaataa

SEQ ID NO: 1400682 - DNA, 15 bp, Homo sapiens
accacccaggtaata

SEQ ID NO: 1400683 - DNA, 15 bp, Homo sapiens
caccacccaggtaat

SEQ ID NO: 1400684 - DNA, 15 bp, Homo sapiens
tcaccacccaggtaa

SEQ ID NO: 1400685 - DNA, 15 bp, Homo sapiens
ttcaccacccaggta

SEQ ID NO: 1400686 - DNA, 15 bp, Homo sapiens
tttcaccacccaggt

SEQ ID NO: 1400687 - DNA, 15 bp, Homo sapiens
atttcaccacccagg

SEQ ID NO: 1400688 - DNA, 15 bp, Homo sapiens
tatttcaccacccag

SEQ ID NO: 1400689 - DNA, 15 bp, Homo sapiens
ttatttcaccaccca

SEQ ID NO: 1400690 - DNA, 15 bp, Homo sapiens
tttatttcaccaccc

SEQ ID NO: 1400691 - DNA, 15 bp, Homo sapiens
gtttatttcaccacc

SEQ ID NO: 1400692 - DNA, 15 bp, Homo sapiens
agtttatttcaccac

SEQ ID NO: 1400693 - DNA, 15 bp, Homo sapiens
cagtttatttcacca

SEQ ID NO: 1400694 - DNA, 15 bp, Homo sapiens
acagtttatttcacc

SEQ ID NO: 1400695 - DNA, 15 bp, Homo sapiens
tacagtttatttcac

SEQ ID NO: 1400696 - DNA, 15 bp, Homo sapiens
gtacagtttatttca

SEQ ID NO: 1400697 - DNA, 15 bp, Homo sapiens
tgtacagtttatttc

SEQ ID NO: 1400698 - DNA, 15 bp, Homo sapiens
gtgtacagtttattt

SEQ ID NO: 1400699 - DNA, 15 bp, Homo sapiens
ggtgtacagtttatt

SEQ ID NO: 1400700 - DNA, 15 bp, Homo sapiens
tggtgtacagtttat

SEQ ID NO: 1400701 - DNA, 15 bp, Homo sapiens
gtggtgtacagttta

SEQ ID NO: 1400702 - DNA, 15 bp, Homo sapiens
cgtggtgtacagttt

SEQ ID NO: 1400703 - DNA, 15 bp, Homo sapiens
gcgtggtgtacagtt

SEQ ID NO: 1400704 - DNA, 15 bp, Homo sapiens
ggcgtggtgtacagt

SEQ ID NO: 1400705 - DNA, 15 bp, Homo sapiens
gggcgtggtgtacag

SEQ ID NO: 1400706 - DNA, 15 bp, Homo sapiens
ggggcgtggtgtaca

SEQ ID NO: 1400707 - DNA, 15 bp, Homo sapiens
aggggcgtggtgtac

SEQ ID NO: 1400708 - DNA, 15 bp, Homo sapiens
caggggcgtggtgta

SEQ ID NO: 1400709 - DNA, 15 bp, Homo sapiens
acaggggcgtggtgt

SEQ ID NO: 1400710 - DNA, 15 bp, Homo sapiens
cacaggggcgtggtg

SEQ ID NO: 1400711 - DNA, 15 bp, Homo sapiens
tcacaggggcgtggt

SEQ ID NO: 1400712 - DNA, 15 bp, Homo sapiens
gtcacaggggcgtgg

SEQ ID NO: 1400713 - DNA, 15 bp, Homo sapiens
tgtcacaggggcgtg

SEQ ID NO: 1400714 - DNA, 15 bp, Homo sapiens
atgtcacaggggcgt

SEQ ID NO: 1400715 - DNA, 15 bp, Homo sapiens
catgtcacaggggcg

SEQ ID NO: 1400716 - DNA, 15 bp, Homo sapiens
gcatgtcacaggggc

SEQ ID NO: 1400717 - DNA, 15 bp, Homo sapiens
tgcatgtcacagggg

SEQ ID NO: 1400718 - DNA, 15 bp, Homo sapiens
ttgcatgtcacaggg

SEQ ID NO: 1400719 - DNA, 15 bp, Homo sapiens
attgcatgtcacagg

SEQ ID NO: 1400720 - DNA, 15 bp, Homo sapiens
aattgcatgtcacag

SEQ ID NO: 1400721 - DNA, 15 bp, Homo sapiens
aaattgcatgtcaca

SEQ ID NO: 1400722 - DNA, 15 bp, Homo sapiens
taaattgcatgtcac

SEQ ID NO: 1400723 - DNA, 15 bp, Homo sapiens
gtaaattgcatgtca

SEQ ID NO: 1400724 - DNA, 15 bp, Homo sapiens
ggtaaattgcatgtc

SEQ ID NO: 1400725 - DNA, 15 bp, Homo sapiens
aggtaaattgcatgt

SEQ ID NO: 1400726 - DNA, 15 bp, Homo sapiens
taggtaaattgcatg

SEQ ID NO: 1400727 - DNA, 15 bp, Homo sapiens
ataggtaaattgcat

SEQ ID NO: 1400728 - DNA, 15 bp, Homo sapiens
cataggtaaattgca

SEQ ID NO: 1400729 - DNA, 15 bp, Homo sapiens
acataggtaaattgc

SEQ ID NO: 1400730 - DNA, 15 bp, Homo sapiens
tacataggtaaattg

SEQ ID NO: 1400731 - DNA, 15 bp, Homo sapiens
ttacataggtaaatt

SEQ ID NO: 1400732 - DNA, 15 bp, Homo sapiens
gttacataggtaaat

SEQ ID NO: 1400733 - DNA, 15 bp, Homo sapiens
tgttacataggtaaa

SEQ ID NO: 1400734 - DNA, 15 bp, Homo sapiens
ttgttacataggtaa

SEQ ID NO: 1400735 - DNA, 15 bp, Homo sapiens
ggtgcaggtttgtta

SEQ ID NO: 1400736 - DNA, 15 bp, Homo sapiens
aggtgcaggtttgtt

SEQ ID NO: 1400737 - DNA, 15 bp, Homo sapiens
taggtgcaggtttgt

SEQ ID NO: 1400738 - DNA, 15 bp, Homo sapiens
ttaggtgcaggtttg

SEQ ID NO: 1400739 - DNA, 15 bp, Homo sapiens
tttaggtgcaggttt

SEQ ID NO: 1400740 - DNA, 15 bp, Homo sapiens
gtttaggtgcaggtt

SEQ ID NO: 1400741 - DNA, 15 bp, Homo sapiens
ggtttaggtgcaggt

SEQ ID NO: 1400742 - DNA, 15 bp, Homo sapiens
aggtttaggtgcagg

SEQ ID NO: 1400743 - DNA, 15 bp, Homo sapiens
taggtttaggtgcag

SEQ ID NO: 1400744 - DNA, 15 bp, Homo sapiens
ttaggtttaggtgca

SEQ ID NO: 1400745 - DNA, 15 bp, Homo sapiens
tttaggtttaggtgc

SEQ ID NO: 1400746 - DNA, 15 bp, Homo sapiens
ttttaggtttaggtg

SEQ ID NO: 1400747 - DNA, 15 bp, Homo sapiens
attttaggtttaggt

SEQ ID NO: 1400748 - DNA, 15 bp, Homo sapiens
tattttaggtttagg

SEQ ID NO: 1400749 - DNA, 15 bp, Homo sapiens
ttattttaggtttag

SEQ ID NO: 1400750 - DNA, 15 bp, Homo sapiens
tttattttaggttta

SEQ ID NO: 1400751 - DNA, 15 bp, Homo sapiens
ttttattttaggttt

SEQ ID NO: 1400752 - DNA, 15 bp, Homo sapiens
gttttattttaggtt

SEQ ID NO: 1400753 - DNA, 15 bp, Homo sapiens
agttttattttaggt

SEQ ID NO: 1400754 - DNA, 15 bp, Homo sapiens
aagttttattttagg

SEQ ID NO: 1400755 - DNA, 15 bp, Homo sapiens
gaagttttattttag

SEQ ID NO: 1400756 - DNA, 15 bp, Homo sapiens
tgaagttttatttta

SEQ ID NO: 1400757 - DNA, 15 bp, Homo sapiens
gtgaagttttatttt

SEQ ID NO: 1400758 - DNA, 15 bp, Homo sapiens
tgtgaagttttattt

SEQ ID NO: 1400759 - DNA, 15 bp, Homo sapiens
ttgtgaagttttatt

SEQ ID NO: 1400760 - DNA, 15 bp, Homo sapiens
gttgtgaagttttat

SEQ ID NO: 1400761 - DNA, 15 bp, Homo sapiens
agttgtgaagtttta

SEQ ID NO: 1400762 - DNA, 15 bp, Homo sapiens
aagttgtgaagtttt

SEQ ID NO: 1400763 - DNA, 15 bp, Homo sapiens
caagttgtgaagttt

SEQ ID NO: 1400764 - DNA, 15 bp, Homo sapiens
gcaagttgtgaagtt

SEQ ID NO: 1400765 - DNA, 15 bp, Homo sapiens
tgcaagttgtgaagt

SEQ ID NO: 1400766 - DNA, 15 bp, Homo sapiens
ttgcaagttgtgaag

SEQ ID NO: 1400767 - DNA, 15 bp, Homo sapiens
attgcaagttgtgaa

SEQ ID NO: 1400768 - DNA, 15 bp, Homo sapiens
gattgcaagttgtga

SEQ ID NO: 1400769 - DNA, 15 bp, Homo sapiens
agattgcaagttgtg

SEQ ID NO: 1400770 - DNA, 15 bp, Homo sapiens
aagattgcaagttgt

SEQ ID NO: 1400771 - DNA, 15 bp, Homo sapiens
caagattgcaagttg

SEQ ID NO: 1400772 - DNA, 15 bp, Homo sapiens
tcaagattgcaagtt

SEQ ID NO: 1400773 - DNA, 15 bp, Homo sapiens
gtcaagattgcaagt

SEQ ID NO: 1400774 - DNA, 15 bp, Homo sapiens
agtcaagattgcaag

SEQ ID NO: 1400775 - DNA, 15 bp, Homo sapiens
tagtcaagattgcaa

SEQ ID NO: 1400776 - DNA, 15 bp, Homo sapiens
ttagtcaagattgca

SEQ ID NO: 1400777 - DNA, 15 bp, Homo sapiens
attagtcaagattgc

SEQ ID NO: 1400778 - DNA, 15 bp, Homo sapiens
gattagtcaagattg

SEQ ID NO: 1400779 - DNA, 15 bp, Homo sapiens
tgattagtcaagatt

SEQ ID NO: 1400780 - DNA, 15 bp, Homo sapiens
ttgattagtcaagat

SEQ ID NO: 1400781 - DNA, 15 bp, Homo sapiens
tttgattagtcaaga

SEQ ID NO: 1400782 - DNA, 15 bp, Homo sapiens
ctttgattagtcaag

SEQ ID NO: 1400783 - DNA, 15 bp, Homo sapiens
tctttgattagtcaa

SEQ ID NO: 1400784 - DNA, 15 bp, Homo sapiens
gtctttgattagtca

SEQ ID NO: 1400785 - DNA, 15 bp, Homo sapiens
tgtctttgattagtc

SEQ ID NO: 1400786 - DNA, 15 bp, Homo sapiens
gtgtctttgattagt

SEQ ID NO: 1400787 - DNA, 15 bp, Homo sapiens
agtgtctttgattag

SEQ ID NO: 1400788 - DNA, 15 bp, Homo sapiens
cagtgtctttgatta

SEQ ID NO: 1400789 - DNA, 15 bp, Homo sapiens
tcagtgtctttgatt

SEQ ID NO: 1400790 - DNA, 15 bp, Homo sapiens
ttcagtgtctttgat

SEQ ID NO: 1400791 - DNA, 15 bp, Homo sapiens
tttcagtgtctttga

SEQ ID NO: 1400792 - DNA, 15 bp, Homo sapiens
gtttcagtgtctttg

SEQ ID NO: 1400793 - DNA, 15 bp, Homo sapiens
tgtttcagtgtcttt

SEQ ID NO: 1400794 - DNA, 15 bp, Homo sapiens
atgtttcagtgtctt

SEQ ID NO: 1400795 - DNA, 15 bp, Homo sapiens
aatgtttcagtgtct

SEQ ID NO: 1400796 - DNA, 15 bp, Homo sapiens
aaatgtttcagtgtc

SEQ ID NO: 1400797 - DNA, 15 bp, Homo sapiens
aaaatgtttcagtgt

SEQ ID NO: 1400798 - DNA, 15 bp, Homo sapiens
taaaatgtttcagtg

SEQ ID NO: 1400799 - DNA, 15 bp, Homo sapiens
ttaaaatgtttcagt

SEQ ID NO: 1400800 - DNA, 15 bp, Homo sapiens
gttaaaatgtttcag

SEQ ID NO: 1400801 - DNA, 15 bp, Homo sapiens
agttaaaatgtttca

SEQ ID NO: 1400802 - DNA, 15 bp, Homo sapiens
gagttaaaatgtttc

SEQ ID NO: 1400803 - DNA, 15 bp, Homo sapiens
ggagttaaaatgttt

SEQ ID NO: 1400804 - DNA, 15 bp, Homo sapiens
tggagttaaaatgtt

SEQ ID NO: 1400805 - DNA, 15 bp, Homo sapiens
gtggagttaaaatgt

SEQ ID NO: 1400806 - DNA, 15 bp, Homo sapiens
agtggagttaaaatg

SEQ ID NO: 1400807 - DNA, 15 bp, Homo sapiens
aagtggagttaaaat

SEQ ID NO: 1400808 - DNA, 15 bp, Homo sapiens
aaagtggagttaaaa

SEQ ID NO: 1400809 - DNA, 15 bp, Homo sapiens
aaaagtggagttaaa

SEQ ID NO: 1400810 - DNA, 15 bp, Homo sapiens
aaaaagtggagttaa

SEQ ID NO: 1400811 - DNA, 15 bp, Homo sapiens
aaaaaagtggagtta

SEQ ID NO: 1400812 - DNA, 15 bp, Homo sapiens
taaaaaagtggagtt

SEQ ID NO: 1400813 - DNA, 15 bp, Homo sapiens
ataaaaaagtggagt

SEQ ID NO: 1400814 - DNA, 15 bp, Homo sapiens
aataaaaaagtggag

SEQ ID NO: 1400815 - DNA, 15 bp, Homo sapiens
gaataaaaaagtgga

SEQ ID NO: 1400816 - DNA, 15 bp, Homo sapiens
agaataaaaaagtgg

SEQ ID NO: 1400817 - DNA, 15 bp, Homo sapiens
aagaataaaaaagtg

SEQ ID NO: 1400818 - DNA, 15 bp, Homo sapiens
aaagaataaaaaagt

SEQ ID NO: 1400819 - DNA, 15 bp, Homo sapiens
aaaagaataaaaaag

SEQ ID NO: 1400820 - DNA, 15 bp, Homo sapiens
gaaaagaataaaaaa

SEQ ID NO: 1400821 - DNA, 15 bp, Homo sapiens
ggaaaagaataaaaa

SEQ ID NO: 1400822 - DNA, 15 bp, Homo sapiens
gggaaaagaataaaa

SEQ ID NO: 1400823 - DNA, 15 bp, Homo sapiens
tgggaaaagaataaa

SEQ ID NO: 1400824 - DNA, 15 bp, Homo sapiens
ttgggaaaagaataa

SEQ ID NO: 1400825 - DNA, 15 bp, Homo sapiens
gttgggaaaagaata

SEQ ID NO: 1400826 - DNA, 15 bp, Homo sapiens
agttgggaaaagaat

SEQ ID NO: 1400827 - DNA, 15 bp, Homo sapiens
aagttgggaaaagaa

SEQ ID NO: 1400828 - DNA, 15 bp, Homo sapiens
taagttgggaaaaga

SEQ ID NO: 1400829 - DNA, 15 bp, Homo sapiens
ataagttgggaaaag

SEQ ID NO: 1400830 - DNA, 15 bp, Homo sapiens
tataagttgggaaaa

SEQ ID NO: 1400831 - DNA, 15 bp, Homo sapiens
atataagttgggaaa

SEQ ID NO: 1400832 - DNA, 15 bp, Homo sapiens
tatataagttgggaa

SEQ ID NO: 1400833 - DNA, 15 bp, Homo sapiens
atatataagttggga

SEQ ID NO: 1400834 - DNA, 15 bp, Homo sapiens
aatatataagttggg

SEQ ID NO: 1400835 - DNA, 15 bp, Homo sapiens
taatatataagttgg

SEQ ID NO: 1400836 - DNA, 15 bp, Homo sapiens
ataatatataagttg

SEQ ID NO: 1400837 - DNA, 15 bp, Homo sapiens
gataatatataagtt

SEQ ID NO: 1400838 - DNA, 15 bp, Homo sapiens
tgataatatataagt

SEQ ID NO: 1400839 - DNA, 15 bp, Homo sapiens
atgataatatataag

SEQ ID NO: 1400840 - DNA, 15 bp, Homo sapiens
aatgataatatataa

SEQ ID NO: 1400841 - DNA, 15 bp, Homo sapiens
aaatgataatatata

SEQ ID NO: 1400842 - DNA, 15 bp, Homo sapiens
aaaatgataatatat

SEQ ID NO: 1400843 - DNA, 15 bp, Homo sapiens
aaaaatgataatata

SEQ ID NO: 1400844 - DNA, 15 bp, Homo sapiens
taaaaatgataatat

SEQ ID NO: 1400845 - DNA, 15 bp, Homo sapiens
ataaaaatgataata

SEQ ID NO: 1400846 - DNA, 15 bp, Homo sapiens
cataaaaatgataat

SEQ ID NO: 1400847 - DNA, 15 bp, Homo sapiens
acataaaaatgataa

SEQ ID NO: 1400848 - DNA, 15 bp, Homo sapiens
aacataaaaatgata

SEQ ID NO: 1400849 - DNA, 15 bp, Homo sapiens
taacataaaaatgat

SEQ ID NO: 1400850 - DNA, 15 bp, Homo sapiens
ataacataaaaatga

SEQ ID NO: 1400851 - DNA, 15 bp, Homo sapiens
cataacataaaaatg

SEQ ID NO: 1400852 - DNA, 15 bp, Homo sapiens
acataacataaaaat

SEQ ID NO: 1400853 - DNA, 15 bp, Homo sapiens
tacataacataaaaa

SEQ ID NO: 1400854 - DNA, 15 bp, Homo sapiens
atacataacataaaa

SEQ ID NO: 1400855 - DNA, 15 bp, Homo sapiens
tatacataacataaa

SEQ ID NO: 1400856 - DNA, 15 bp, Homo sapiens
gtatacataacataa

SEQ ID NO: 1400857 - DNA, 15 bp, Homo sapiens
agtatacataacata

SEQ ID NO: 1400858 - DNA, 15 bp, Homo sapiens
aagtatacataacat

SEQ ID NO: 1400859 - DNA, 15 bp, Homo sapiens
caagtatacataaca

SEQ ID NO: 1400860 - DNA, 15 bp, Homo sapiens
tcaagtatacataac

SEQ ID NO: 1400861 - DNA, 15 bp, Homo sapiens
ttcaagtatacataa

SEQ ID NO: 1400862 - DNA, 15 bp, Homo sapiens
cttcaagtatacata

SEQ ID NO: 1400863 - DNA, 15 bp, Homo sapiens
gcttcaagtatacat

SEQ ID NO: 1400864 - DNA, 15 bp, Homo sapiens
agcttcaagtataca

SEQ ID NO: 1400865 - DNA, 15 bp, Homo sapiens
gagcttcaagtatac

SEQ ID NO: 1400866 - DNA, 15 bp, Homo sapiens
tgagcttcaagtata

SEQ ID NO: 1400867 - DNA, 15 bp, Homo sapiens
atgagcttcaagtat

SEQ ID NO: 1400868 - DNA, 15 bp, Homo sapiens
catgagcttcaagta

SEQ ID NO: 1400869 - DNA, 15 bp, Homo sapiens
acatgagcttcaagt

SEQ ID NO: 1400870 - DNA, 15 bp, Homo sapiens
tacatgagcttcaag

SEQ ID NO: 1400871 - DNA, 15 bp, Homo sapiens
ctacatgagcttcaa

SEQ ID NO: 1400872 - DNA, 15 bp, Homo sapiens
tctacatgagcttca

SEQ ID NO: 1400873 - DNA, 15 bp, Homo sapiens
gtctacatgagcttc

SEQ ID NO: 1400874 - DNA, 15 bp, Homo sapiens
tgtctacatgagctt

SEQ ID NO: 1400875 - DNA, 15 bp, Homo sapiens
atgtctacatgagct

SEQ ID NO: 1400876 - DNA, 15 bp, Homo sapiens
aatgtctacatgagc

SEQ ID NO: 1400877 - DNA, 15 bp, Homo sapiens
taatgtctacatgag

SEQ ID NO: 1400878 - DNA, 15 bp, Homo sapiens
gtaatgtctacatga

SEQ ID NO: 1400879 - DNA, 15 bp, Homo sapiens
agtaatgtctacatg

SEQ ID NO: 1400880 - DNA, 15 bp, Homo sapiens
tagtaatgtctacat

SEQ ID NO: 1400881 - DNA, 15 bp, Homo sapiens
atagtaatgtctaca

SEQ ID NO: 1400882 - DNA, 15 bp, Homo sapiens
aatagtaatgtctac

SEQ ID NO: 1400883 - DNA, 15 bp, Homo sapiens
caatagtaatgtcta

SEQ ID NO: 1400884 - DNA, 15 bp, Homo sapiens
acaatagtaatgtct

SEQ ID NO: 1400885 - DNA, 15 bp, Homo sapiens
aacaatagtaatgtc

SEQ ID NO: 1400886 - DNA, 15 bp, Homo sapiens
caacaatagtaatgt

SEQ ID NO: 1400887 - DNA, 15 bp, Homo sapiens
acaacaatagtaatg

SEQ ID NO: 1400888 - DNA, 15 bp, Homo sapiens
aacaacaatagtaat

SEQ ID NO: 1400889 - DNA, 15 bp, Homo sapiens
caacaacaatagtaa

SEQ ID NO: 1400890 - DNA, 15 bp, Homo sapiens
acaacaacaatagta

SEQ ID NO: 1400891 - DNA, 15 bp, Homo sapiens
tacaacaacaatagt

SEQ ID NO: 1400892 - DNA, 15 bp, Homo sapiens
atacaacaacaatag

SEQ ID NO: 1400893 - DNA, 15 bp, Homo sapiens
tatacaacaacaata

SEQ ID NO: 1400894 - DNA, 15 bp, Homo sapiens
atatacaacaacaat

SEQ ID NO: 1400895 - DNA, 15 bp, Homo sapiens
tatatacaacaacaa

SEQ ID NO: 1400896 - DNA, 15 bp, Homo sapiens
ctatatacaacaaca

SEQ ID NO: 1400897 - DNA, 15 bp, Homo sapiens
actatatacaacaac

SEQ ID NO: 1400898 - DNA, 15 bp, Homo sapiens
gactatatacaacaa

SEQ ID NO: 1400899 - DNA, 15 bp, Homo sapiens
tgactatatacaaca

SEQ ID NO: 1400900 - DNA, 15 bp, Homo sapiens
ttgactatatacaac

SEQ ID NO: 1400901 - DNA, 15 bp, Homo sapiens
attgactatatacaa

SEQ ID NO: 1400902 - DNA, 15 bp, Homo sapiens
cattgactatataca

SEQ ID NO: 1400903 - DNA, 15 bp, Homo sapiens
acattgactatatac

SEQ ID NO: 1400904 - DNA, 15 bp, Homo sapiens
aacattgactatata

SEQ ID NO: 1400905 - DNA, 15 bp, Homo sapiens
taacattgactatat

SEQ ID NO: 1400906 - DNA, 15 bp, Homo sapiens
ttaacattgactata

SEQ ID NO: 1400907 - DNA, 15 bp, Homo sapiens
attaacattgactat

SEQ ID NO: 1400908 - DNA, 15 bp, Homo sapiens
aattaacattgacta

SEQ ID NO: 1400909 - DNA, 15 bp, Homo sapiens
aaattaacattgact

SEQ ID NO: 1400910 - DNA, 15 bp, Homo sapiens
taaattaacattgac

SEQ ID NO: 1400911 - DNA, 15 bp, Homo sapiens
gtaaattaacattga

SEQ ID NO: 1400912 - DNA, 15 bp, Homo sapiens
tgtaaattaacattg

SEQ ID NO: 1400913 - DNA, 15 bp, Homo sapiens
atgtaaattaacatt

SEQ ID NO: 1400914 - DNA, 15 bp, Homo sapiens
catgtaaattaacat

SEQ ID NO: 1400915 - DNA, 15 bp, Homo sapiens
ccatgtaaattaaca

SEQ ID NO: 1400916 - DNA, 15 bp, Homo sapiens
tccatgtaaattaac

SEQ ID NO: 1400917 - DNA, 15 bp, Homo sapiens
atccatgtaaattaa

SEQ ID NO: 1400918 - DNA, 15 bp, Homo sapiens
gatccatgtaaatta

SEQ ID NO: 1400919 - DNA, 15 bp, Homo sapiens
ggatccatgtaaatt

SEQ ID NO: 1400920 - DNA, 15 bp, Homo sapiens
tggatccatgtaaat

SEQ ID NO: 1400921 - DNA, 15 bp, Homo sapiens
gtggatccatgtaaa

SEQ ID NO: 1400922 - DNA, 15 bp, Homo sapiens
tgtggatccatgtaa

SEQ ID NO: 1400923 - DNA, 15 bp, Homo sapiens
atgtggatccatgta

SEQ ID NO: 1400924 - DNA, 15 bp, Homo sapiens
aatgtggatccatgt

SEQ ID NO: 1400925 - DNA, 15 bp, Homo sapiens
aaatgtggatccatg

SEQ ID NO: 1400926 - DNA, 15 bp, Homo sapiens
aaaatgtggatccat

SEQ ID NO: 1400927 - DNA, 15 bp, Homo sapiens
aaaaatgtggatcca

SEQ ID NO: 1400928 - DNA, 15 bp, Homo sapiens
gaaaaatgtggatcc

SEQ ID NO: 1400929 - DNA, 15 bp, Homo sapiens
ggaaaaatgtggatc

SEQ ID NO: 1400930 - DNA, 15 bp, Homo sapiens
tggaaaaatgtggat

SEQ ID NO: 1400931 - DNA, 15 bp, Homo sapiens
atggaaaaatgtgga

SEQ ID NO: 1400932 - DNA, 15 bp, Homo sapiens
aatggaaaaatgtgg

SEQ ID NO: 1400933 - DNA, 15 bp, Homo sapiens
aaatggaaaaatgtg

SEQ ID NO: 1400934 - DNA, 15 bp, Homo sapiens
aaaatggaaaaatgt

SEQ ID NO: 1400935 - DNA, 15 bp, Homo sapiens
aaaaatggaaaaatg

SEQ ID NO: 1400936 - DNA, 15 bp, Homo sapiens
taaaaatggaaaaat

SEQ ID NO: 1400937 - DNA, 15 bp, Homo sapiens
ataaaaatggaaaaa

SEQ ID NO: 1400938 - DNA, 15 bp, Homo sapiens
aataaaaatggaaaa

SEQ ID NO: 1400939 - DNA, 15 bp, Homo sapiens
taataaaaatggaaa

SEQ ID NO: 1400940 - DNA, 15 bp, Homo sapiens
ataataaaaatggaa

SEQ ID NO: 1400941 - DNA, 15 bp, Homo sapiens
aataataaaaatgga

SEQ ID NO: 1400942 - DNA, 15 bp, Homo sapiens
gaataataaaaatgg

SEQ ID NO: 1400943 - DNA, 15 bp, Homo sapiens
cgaataataaaaatg

SEQ ID NO: 1400944 - DNA, 15 bp, Homo sapiens
acgaataataaaaat

SEQ ID NO: 1400945 - DNA, 15 bp, Homo sapiens
tacgaataataaaaa

SEQ ID NO: 1400946 - DNA, 15 bp, Homo sapiens
atacgaataataaaa

SEQ ID NO: 1400947 - DNA, 15 bp, Homo sapiens
aatacgaataataaa

SEQ ID NO: 1400948 - DNA, 15 bp, Homo sapiens
gaatacgaataataa

SEQ ID NO: 1400949 - DNA, 15 bp, Homo sapiens
ggaatacgaataata

SEQ ID NO: 1400950 - DNA, 15 bp, Homo sapiens
aggaatacgaataat

SEQ ID NO: 1400951 - DNA, 15 bp, Homo sapiens
aaggaatacgaataa

SEQ ID NO: 1400952 - DNA, 15 bp, Homo sapiens
aaaggaatacgaata

SEQ ID NO: 1400953 - DNA, 15 bp, Homo sapiens
taaaggaatacgaat

SEQ ID NO: 1400954 - DNA, 15 bp, Homo sapiens
ataaaggaatacgaa

SEQ ID NO: 1400955 - DNA, 15 bp, Homo sapiens
gataaaggaatacga

SEQ ID NO: 1400956 - DNA, 15 bp, Homo sapiens
agataaaggaatacg

SEQ ID NO: 1400957 - DNA, 15 bp, Homo sapiens
gagataaaggaatac

SEQ ID NO: 1400958 - DNA, 15 bp, Homo sapiens
agagataaaggaata

SEQ ID NO: 1400959 - DNA, 15 bp, Homo sapiens
cagagataaaggaat

SEQ ID NO: 1400960 - DNA, 15 bp, Homo sapiens
acagagataaaggaa

SEQ ID NO: 1400961 - DNA, 15 bp, Homo sapiens
aacagagataaagga

SEQ ID NO: 1400962 - DNA, 15 bp, Homo sapiens
gaacagagataaagg

SEQ ID NO: 1400963 - DNA, 15 bp, Homo sapiens
agaacagagataaag

SEQ ID NO: 1400964 - DNA, 15 bp, Homo sapiens
aagaacagagataaa

SEQ ID NO: 1400965 - DNA, 15 bp, Homo sapiens
gaagaacagagataa

SEQ ID NO: 1400966 - DNA, 15 bp, Homo sapiens
agaagaacagagata

SEQ ID NO: 1400967 - DNA, 15 bp, Homo sapiens
tagaagaacagagat

SEQ ID NO: 1400968 - DNA, 15 bp, Homo sapiens
atagaagaacagaga

SEQ ID NO: 1400969 - DNA, 15 bp, Homo sapiens
gatagaagaacagag

SEQ ID NO: 1400970 - DNA, 15 bp, Homo sapiens
agatagaagaacaga

SEQ ID NO: 1400971 - DNA, 15 bp, Homo sapiens
tagatagaagaacag

SEQ ID NO: 1400972 - DNA, 15 bp, Homo sapiens
ctagatagaagaaca

SEQ ID NO: 1400973 - DNA, 15 bp, Homo sapiens
cctagatagaagaac

SEQ ID NO: 1400974 - DNA, 15 bp, Homo sapiens
tcctagatagaagaa

SEQ ID NO: 1400975 - DNA, 15 bp, Homo sapiens
atcctagatagaaga

SEQ ID NO: 1400976 - DNA, 15 bp, Homo sapiens
gatcctagatagaag

SEQ ID NO: 1400977 - DNA, 15 bp, Homo sapiens
tgatcctagatagaa

SEQ ID NO: 1400978 - DNA, 15 bp, Homo sapiens
atgatcctagataga

SEQ ID NO: 1400979 - DNA, 15 bp, Homo sapiens
gatgatcctagatag

SEQ ID NO: 1400980 - DNA, 15 bp, Homo sapiens
agatgatcctagata

SEQ ID NO: 1400981 - DNA, 15 bp, Homo sapiens
aagatgatcctagat

SEQ ID NO: 1400982 - DNA, 15 bp, Homo sapiens
aaagatgatcctaga

SEQ ID NO: 1400983 - DNA, 15 bp, Homo sapiens
taaagatgatcctag

SEQ ID NO: 1400984 - DNA, 15 bp, Homo sapiens
gtaaagatgatccta

SEQ ID NO: 1400985 - DNA, 15 bp, Homo sapiens
agtaaagatgatcct

SEQ ID NO: 1400986 - DNA, 15 bp, Homo sapiens
tagtaaagatgatcc

SEQ ID NO: 1400987 - DNA, 15 bp, Homo sapiens
ctagtaaagatgatc

SEQ ID NO: 1400988 - DNA, 15 bp, Homo sapiens
actagtaaagatgat

SEQ ID NO: 1400989 - DNA, 15 bp, Homo sapiens
tactagtaaagatga

SEQ ID NO: 1400990 - DNA, 15 bp, Homo sapiens
atactagtaaagatg

SEQ ID NO: 1400991 - DNA, 15 bp, Homo sapiens
aatactagtaaagat

SEQ ID NO: 1400992 - DNA, 15 bp, Homo sapiens
aaatactagtaaaga

SEQ ID NO: 1400993 - DNA, 15 bp, Homo sapiens
taaatactagtaaag

SEQ ID NO: 1400994 - DNA, 15 bp, Homo sapiens
ataaatactagtaaa

SEQ ID NO: 1400995 - DNA, 15 bp, Homo sapiens
aataaatactagtaa

SEQ ID NO: 1400996 - DNA, 15 bp, Homo sapiens
aaataaatactagta

SEQ ID NO: 1400997 - DNA, 15 bp, Homo sapiens
aaaataaatactagt

SEQ ID NO: 1400998 - DNA, 15 bp, Homo sapiens
taaaataaatactag

SEQ ID NO: 1400999 - DNA, 15 bp, Homo sapiens
ctaaaataaatacta

SEQ ID NO: 1401000 - DNA, 15 bp, Homo sapiens
actaaaataaatact

SEQ ID NO: 1401001 - DNA, 15 bp, Homo sapiens
cactaaaataaatac

SEQ ID NO: 1401002 - DNA, 15 bp, Homo sapiens
gcactaaaataaata

SEQ ID NO: 1401003 - DNA, 15 bp, Homo sapiens
tgcactaaaataaat

SEQ ID NO: 1401004 - DNA, 15 bp, Homo sapiens
ttgcactaaaataaa

SEQ ID NO: 1401005 - DNA, 15 bp, Homo sapiens
attgcactaaaataa

SEQ ID NO: 1401006 - DNA, 15 bp, Homo sapiens
cattgcactaaaata

SEQ ID NO: 1401007 - DNA, 15 bp, Homo sapiens
tcattgcactaaaat

SEQ ID NO: 1401008 - DNA, 15 bp, Homo sapiens
gtcattgcactaaaa

SEQ ID NO: 1401009 - DNA, 15 bp, Homo sapiens
tgtcattgcactaaa

SEQ ID NO: 1401010 - DNA, 15 bp, Homo sapiens
atgtcattgcactaa

SEQ ID NO: 1401011 - DNA, 15 bp, Homo sapiens
gatgtcattgcacta

SEQ ID NO: 1401012 - DNA, 15 bp, Homo sapiens
ggatgtcattgcact

SEQ ID NO: 1401013 - DNA, 15 bp, Homo sapiens
gggatgtcattgcac

SEQ ID NO: 1401014 - DNA, 15 bp, Homo sapiens
agggatgtcattgca

SEQ ID NO: 1401015 - DNA, 15 bp, Homo sapiens
tagggatgtcattgc

SEQ ID NO: 1401016 - DNA, 15 bp, Homo sapiens
ttagggatgtcattg

SEQ ID NO: 1401017 - DNA, 15 bp, Homo sapiens
tttagggatgtcatt

SEQ ID NO: 1401018 - DNA, 15 bp, Homo sapiens
ttttagggatgtcat

SEQ ID NO: 1401019 - DNA, 15 bp, Homo sapiens
tttttagggatgtca

SEQ ID NO: 1401020 - DNA, 15 bp, Homo sapiens
ttttttagggatgtc

SEQ ID NO: 1401021 - DNA, 15 bp, Homo sapiens
attttttagggatgt

SEQ ID NO: 1401022 - DNA, 15 bp, Homo sapiens
cattttttagggatg

SEQ ID NO: 1401023 - DNA, 15 bp, Homo sapiens
acattttttagggat

SEQ ID NO: 1401024 - DNA, 15 bp, Homo sapiens
aacattttttaggga

SEQ ID NO: 1401025 - DNA, 15 bp, Homo sapiens
gaacattttttaggg

SEQ ID NO: 1401026 - DNA, 15 bp, Homo sapiens
agaacattttttagg

SEQ ID NO: 1401027 - DNA, 15 bp, Homo sapiens
gagaacattttttag

SEQ ID NO: 1401028 - DNA, 15 bp, Homo sapiens
tgagaacatttttta

SEQ ID NO: 1401029 - DNA, 15 bp, Homo sapiens
atgagaacatttttt

SEQ ID NO: 1401030 - DNA, 15 bp, Homo sapiens
aatgagaacattttt

SEQ ID NO: 1401031 - DNA, 15 bp, Homo sapiens
aaatgagaacatttt

SEQ ID NO: 1401032 - DNA, 15 bp, Homo sapiens
aaaatgagaacattt

SEQ ID NO: 1401033 - DNA, 15 bp, Homo sapiens
aaaaatgagaacatt

SEQ ID NO: 1401034 - DNA, 15 bp, Homo sapiens
gaaaaatgagaacat

SEQ ID NO: 1401035 - DNA, 15 bp, Homo sapiens
tgaaaaatgagaaca

SEQ ID NO: 1401036 - DNA, 15 bp, Homo sapiens
atgaaaaatgagaac

SEQ ID NO: 1401037 - DNA, 15 bp, Homo sapiens
aatgaaaaatgagaa

SEQ ID NO: 1401038 - DNA, 15 bp, Homo sapiens
aaatgaaaaatgaga

SEQ ID NO: 1401039 - DNA, 15 bp, Homo sapiens
caaatgaaaaatgag

SEQ ID NO: 1401040 - DNA, 15 bp, Homo sapiens
acaaatgaaaaatga

SEQ ID NO: 1401041 - DNA, 15 bp, Homo sapiens
gacaaatgaaaaatg

SEQ ID NO: 1401042 - DNA, 15 bp, Homo sapiens
agacaaatgaaaaat

SEQ ID NO: 1401043 - DNA, 15 bp, Homo sapiens
cagacaaatgaaaaa

SEQ ID NO: 1401044 - DNA, 15 bp, Homo sapiens
tcagacaaatgaaaa

SEQ ID NO: 1401045 - DNA, 15 bp, Homo sapiens
ttcagacaaatgaaa

SEQ ID NO: 1401046 - DNA, 15 bp, Homo sapiens
tttcagacaaatgaa

SEQ ID NO: 1401047 - DNA, 15 bp, Homo sapiens
ctttcagacaaatga

SEQ ID NO: 1401048 - DNA, 15 bp, Homo sapiens
gctttcagacaaatg

SEQ ID NO: 1401049 - DNA, 15 bp, Homo sapiens
tgctttcagacaaat

SEQ ID NO: 1401050 - DNA, 15 bp, Homo sapiens
atgctttcagacaaa

SEQ ID NO: 1401051 - DNA, 15 bp, Homo sapiens
aatgctttcagacaa

SEQ ID NO: 1401052 - DNA, 15 bp, Homo sapiens
aaatgctttcagaca

SEQ ID NO: 1401053 - DNA, 15 bp, Homo sapiens
aaaatgctttcagac

SEQ ID NO: 1401054 - DNA, 15 bp, Homo sapiens
aaaaatgctttcaga

SEQ ID NO: 1401055 - DNA, 15 bp, Homo sapiens
gaaaaatgctttcag

SEQ ID NO: 1401056 - DNA, 15 bp, Homo sapiens
tgaaaaatgctttca

SEQ ID NO: 1401057 - DNA, 15 bp, Homo sapiens
atgaaaaatgctttc

SEQ ID NO: 1401058 - DNA, 15 bp, Homo sapiens
aatgaaaaatgcttt

SEQ ID NO: 1401059 - DNA, 15 bp, Homo sapiens
aaatgaaaaatgctt

SEQ ID NO: 1401060 - DNA, 15 bp, Homo sapiens
aaaatgaaaaatgct

SEQ ID NO: 1401061 - DNA, 15 bp, Homo sapiens
taaaatgaaaaatgc

SEQ ID NO: 1401062 - DNA, 15 bp, Homo sapiens
ataaaatgaaaaatg

SEQ ID NO: 1401063 - DNA, 15 bp, Homo sapiens
aataaaatgaaaaat

SEQ ID NO: 1401064 - DNA, 15 bp, Homo sapiens
aaataaaatgaaaaa

SEQ ID NO: 1401065 - DNA, 15 bp, Homo sapiens
aaaataaaatgaaaa

SEQ ID NO: 1401066 - DNA, 15 bp, Homo sapiens
gaaaaataaaatgaa

SEQ ID NO: 1401067 - DNA, 15 bp, Homo sapiens
agaaaaataaaatga

SEQ ID NO: 1401068 - DNA, 15 bp, Homo sapiens
aagaaaaataaaatg

SEQ ID NO: 1401069 - DNA, 15 bp, Homo sapiens
gaagaaaaataaaat

SEQ ID NO: 1401070 - DNA, 15 bp, Homo sapiens
agaagaaaaataaaa

SEQ ID NO: 1401071 - DNA, 15 bp, Homo sapiens
cagaagaaaaataaa

SEQ ID NO: 1401072 - DNA, 15 bp, Homo sapiens
ccagaagaaaaataa

SEQ ID NO: 1401073 - DNA, 15 bp, Homo sapiens
tccagaagaaaaata

SEQ ID NO: 1401074 - DNA, 15 bp, Homo sapiens
ttccagaagaaaaat

SEQ ID NO: 1401075 - DNA, 15 bp, Homo sapiens
cttccagaagaaaaa

SEQ ID NO: 1401076 - DNA, 15 bp, Homo sapiens
ccttccagaagaaaa

SEQ ID NO: 1401077 - DNA, 15 bp, Homo sapiens
tccttccagaagaaa

SEQ ID NO: 1401078 - DNA, 15 bp, Homo sapiens
gtccttccagaagaa

SEQ ID NO: 1401079 - DNA, 15 bp, Homo sapiens
tgtccttccagaaga

SEQ ID NO: 1401080 - DNA, 15 bp, Homo sapiens
gtgtccttccagaag

SEQ ID NO: 1401081 - DNA, 15 bp, Homo sapiens
tgtgtccttccagaa

SEQ ID NO: 1401082 - DNA, 15 bp, Homo sapiens
atgtgtccttccaga

SEQ ID NO: 1401083 - DNA, 15 bp, Homo sapiens
aatgtgtccttccag

SEQ ID NO: 1401084 - DNA, 15 bp, Homo sapiens
gaatgtgtccttcca

SEQ ID NO: 1401085 - DNA, 15 bp, Homo sapiens
tgaatgtgtccttcc

SEQ ID NO: 1401086 - DNA, 15 bp, Homo sapiens
gtgaatgtgtccttc

SEQ ID NO: 1401087 - DNA, 15 bp, Homo sapiens
agtgaatgtgtcctt

SEQ ID NO: 1401088 - DNA, 15 bp, Homo sapiens
cagtgaatgtgtcct

SEQ ID NO: 1401089 - DNA, 15 bp, Homo sapiens
tcagtgaatgtgtcc

SEQ ID NO: 1401090 - DNA, 15 bp, Homo sapiens
ctcagtgaatgtgtc

SEQ ID NO: 1401091 - DNA, 15 bp, Homo sapiens
actcagtgaatgtgt

SEQ ID NO: 1401092 - DNA, 15 bp, Homo sapiens
tactcagtgaatgtg

SEQ ID NO: 1401093 - DNA, 15 bp, Homo sapiens
atactcagtgaatgt

SEQ ID NO: 1401094 - DNA, 15 bp, Homo sapiens
tatactcagtgaatg

SEQ ID NO: 1401095 - DNA, 15 bp, Homo sapiens
ttatactcagtgaat

SEQ ID NO: 1401096 - DNA, 15 bp, Homo sapiens
tttatactcagtgaa

SEQ ID NO: 1401097 - DNA, 15 bp, Homo sapiens
ttttatactcagtga

SEQ ID NO: 1401098 - DNA, 15 bp, Homo sapiens
attttatactcagtg

SEQ ID NO: 1401099 - DNA, 15 bp, Homo sapiens
aattttatactcagt

SEQ ID NO: 1401100 - DNA, 15 bp, Homo sapiens
gaattttatactcag

SEQ ID NO: 1401101 - DNA, 15 bp, Homo sapiens
agaattttatactca

SEQ ID NO: 1401102 - DNA, 15 bp, Homo sapiens
tagaattttatactc

SEQ ID NO: 1401103 - DNA, 15 bp, Homo sapiens
ttagaattttatact

SEQ ID NO: 1401104 - DNA, 15 bp, Homo sapiens
cttagaattttatac

SEQ ID NO: 1401105 - DNA, 15 bp, Homo sapiens
acttagaattttata

SEQ ID NO: 1401106 - DNA, 15 bp, Homo sapiens
aacttagaattttat

SEQ ID NO: 1401107 - DNA, 15 bp, Homo sapiens
caacttagaatttta

SEQ ID NO: 1401108 - DNA, 15 bp, Homo sapiens
ccaacttagaatttt

SEQ ID NO: 1401109 - DNA, 15 bp, Homo sapiens
gccaacttagaattt

SEQ ID NO: 1401110 - DNA, 15 bp, Homo sapiens
agccaacttagaatt

SEQ ID NO: 1401111 - DNA, 15 bp, Homo sapiens
tagccaacttagaat

SEQ ID NO: 1401112 - DNA, 15 bp, Homo sapiens
atagccaacttagaa

SEQ ID NO: 1401113 - DNA, 15 bp, Homo sapiens
aatagccaacttaga

SEQ ID NO: 1401114 - DNA, 15 bp, Homo sapiens
aaatagccaacttag

SEQ ID NO: 1401115 - DNA, 15 bp, Homo sapiens
aaaatagccaactta

SEQ ID NO: 1401116 - DNA, 15 bp, Homo sapiens
aaaaatagccaactt

SEQ ID NO: 1401117 - DNA, 15 bp, Homo sapiens
aaaaaatagccaact

SEQ ID NO: 1401118 - DNA, 15 bp, Homo sapiens
ggaaaaaaaatagcc

SEQ ID NO: 1401119 - DNA, 15 bp, Homo sapiens
tggaaaaaaaatagc

SEQ ID NO: 1401120 - DNA, 15 bp, Homo sapiens
atggaaaaaaaatag

SEQ ID NO: 1401121 - DNA, 15 bp, Homo sapiens
aatggaaaaaaaata

SEQ ID NO: 1401122 - DNA, 15 bp, Homo sapiens
caatggaaaaaaaat

SEQ ID NO: 1401123 - DNA, 15 bp, Homo sapiens
acaatggaaaaaaaa

SEQ ID NO: 1401124 - DNA, 15 bp, Homo sapiens
gacaatggaaaaaaa

SEQ ID NO: 1401125 - DNA, 15 bp, Homo sapiens
agacaatggaaaaaa

SEQ ID NO: 1401126 - DNA, 15 bp, Homo sapiens
aagacaatggaaaaa

SEQ ID NO: 1401127 - DNA, 15 bp, Homo sapiens
gaagacaatggaaaa

SEQ ID NO: 1401128 - DNA, 15 bp, Homo sapiens
agaagacaatggaaa

SEQ ID NO: 1401129 - DNA, 15 bp, Homo sapiens
cagaagacaatggaa

SEQ ID NO: 1401130 - DNA, 15 bp, Homo sapiens
ccagaagacaatgga

SEQ ID NO: 1401131 - DNA, 15 bp, Homo sapiens
accagaagacaatgg

SEQ ID NO: 1401132 - DNA, 15 bp, Homo sapiens
caccagaagacaatg

SEQ ID NO: 1401133 - DNA, 15 bp, Homo sapiens
tcaccagaagacaat

SEQ ID NO: 1401134 - DNA, 15 bp, Homo sapiens
ctcaccagaagacaa

SEQ ID NO: 1401135 - DNA, 15 bp, Homo sapiens
gctcaccagaagaca

SEQ ID NO: 1401136 - DNA, 15 bp, Homo sapiens
tgctcaccagaagac

SEQ ID NO: 1401137 - DNA, 15 bp, Homo sapiens
atgctcaccagaaga

SEQ ID NO: 1401138 - DNA, 15 bp, Homo sapiens
aatgctcaccagaag

SEQ ID NO: 1401139 - DNA, 15 bp, Homo sapiens
caatgctcaccagaa

SEQ ID NO: 1401140 - DNA, 15 bp, Homo sapiens
acaatgctcaccaga

SEQ ID NO: 1401141 - DNA, 15 bp, Homo sapiens
aacaatgctcaccag

SEQ ID NO: 1401142 - DNA, 15 bp, Homo sapiens
taacaatgctcacca

SEQ ID NO: 1401143 - DNA, 15 bp, Homo sapiens
gtaacaatgctcacc

SEQ ID NO: 1401144 - DNA, 15 bp, Homo sapiens
agtaacaatgctcac

SEQ ID NO: 1401145 - DNA, 15 bp, Homo sapiens
tagtaacaatgctca

SEQ ID NO: 1401146 - DNA, 15 bp, Homo sapiens
atagtaacaatgctc

SEQ ID NO: 1401147 - DNA, 15 bp, Homo sapiens
aatagtaacaatgct

SEQ ID NO: 1401148 - DNA, 15 bp, Homo sapiens
gaatagtaacaatgc

SEQ ID NO: 1401149 - DNA, 15 bp, Homo sapiens
tgaatagtaacaatg

SEQ ID NO: 1401150 - DNA, 15 bp, Homo sapiens
ctgaatagtaacaat

SEQ ID NO: 1401151 - DNA, 15 bp, Homo sapiens
tctgaatagtaacaa

SEQ ID NO: 1401152 - DNA, 15 bp, Homo sapiens
ttctgaatagtaaca

SEQ ID NO: 1401153 - DNA, 15 bp, Homo sapiens
tttctgaatagtaac

SEQ ID NO: 1401154 - DNA, 15 bp, Homo sapiens
atttctgaatagtaa

SEQ ID NO: 1401155 - DNA, 15 bp, Homo sapiens
gatttctgaatagta

SEQ ID NO: 1401156 - DNA, 15 bp, Homo sapiens
tgatttctgaatagt

SEQ ID NO: 1401157 - DNA, 15 bp, Homo sapiens
ctgatttctgaatag

SEQ ID NO: 1401158 - DNA, 15 bp, Homo sapiens
gctgatttctgaata

SEQ ID NO: 1401159 - DNA, 15 bp, Homo sapiens
ggctgatttctgaat

SEQ ID NO: 1401160 - DNA, 15 bp, Homo sapiens
gggctgatttctgaa

SEQ ID NO: 1401161 - DNA, 15 bp, Homo sapiens
agggctgatttctga

SEQ ID NO: 1401162 - DNA, 15 bp, Homo sapiens
gagggctgatttctg

SEQ ID NO: 1401163 - DNA, 15 bp, Homo sapiens
tgagggctgatttct

SEQ ID NO: 1401164 - DNA, 15 bp, Homo sapiens
ctgagggctgatttc

SEQ ID NO: 1401165 - DNA, 15 bp, Homo sapiens
actgagggctgattt

SEQ ID NO: 1401166 - DNA, 15 bp, Homo sapiens
gactgagggctgatt

SEQ ID NO: 1401167 - DNA, 15 bp, Homo sapiens
agactgagggctgat

SEQ ID NO: 1401168 - DNA, 15 bp, Homo sapiens
tagactgagggctga

SEQ ID NO: 1401169 - DNA, 15 bp, Homo sapiens
ttagactgagggctg

SEQ ID NO: 1401170 - DNA, 15 bp, Homo sapiens
attagactgagggct

SEQ ID NO: 1401171 - DNA, 15 bp, Homo sapiens
aattagactgagggc

SEQ ID NO: 1401172 - DNA, 15 bp, Homo sapiens
caattagactgaggg

SEQ ID NO: 1401173 - DNA, 15 bp, Homo sapiens
gcaattagactgagg

SEQ ID NO: 1401174 - DNA, 15 bp, Homo sapiens
agcaattagactgag

SEQ ID NO: 1401175 - DNA, 15 bp, Homo sapiens
cagcaattagactga

SEQ ID NO: 1401176 - DNA, 15 bp, Homo sapiens
gcagcaattagactg

SEQ ID NO: 1401177 - DNA, 15 bp, Homo sapiens
agcagcaattagact

SEQ ID NO: 1401178 - DNA, 15 bp, Homo sapiens
aagcagcaattagac

SEQ ID NO: 1401179 - DNA, 15 bp, Homo sapiens
gaagcagcaattaga

SEQ ID NO: 1401180 - DNA, 15 bp, Homo sapiens
agaagcagcaattag

SEQ ID NO: 1401181 - DNA, 15 bp, Homo sapiens
aagaagcagcaatta

SEQ ID NO: 1401182 - DNA, 15 bp, Homo sapiens
aaagaagcagcaatt

SEQ ID NO: 1401183 - DNA, 15 bp, Homo sapiens
caaagaagcagcaat

SEQ ID NO: 1401184 - DNA, 15 bp, Homo sapiens
tcaaagaagcagcaa

SEQ ID NO: 1401185 - DNA, 15 bp, Homo sapiens
ttcaaagaagcagca

SEQ ID NO: 1401186 - DNA, 15 bp, Homo sapiens
tttcaaagaagcagc

SEQ ID NO: 1401187 - DNA, 15 bp, Homo sapiens
ctttcaaagaagcag

SEQ ID NO: 1401188 - DNA, 15 bp, Homo sapiens
actttcaaagaagca

SEQ ID NO: 1401189 - DNA, 15 bp, Homo sapiens
tactttcaaagaagc

SEQ ID NO: 1401190 - DNA, 15 bp, Homo sapiens
ttactttcaaagaag

SEQ ID NO: 1401191 - DNA, 15 bp, Homo sapiens
attactttcaaagaa

SEQ ID NO: 1401192 - DNA, 15 bp, Homo sapiens
gattactttcaaaga

SEQ ID NO: 1401193 - DNA, 15 bp, Homo sapiens
agattactttcaaag

SEQ ID NO: 1401194 - DNA, 15 bp, Homo sapiens
aagattactttcaaa

SEQ ID NO: 1401195 - DNA, 15 bp, Homo sapiens
caagattactttcaa

SEQ ID NO: 1401196 - DNA, 15 bp, Homo sapiens
ccaagattactttca

SEQ ID NO: 1401197 - DNA, 15 bp, Homo sapiens
gccaagattactttc

SEQ ID NO: 1401198 - DNA, 15 bp, Homo sapiens
ggccaagattacttt

SEQ ID NO: 1401199 - DNA, 15 bp, Homo sapiens
aggccaagattactt

SEQ ID NO: 1401200 - DNA, 15 bp, Homo sapiens
taggccaagattact

SEQ ID NO: 1401201 - DNA, 15 bp, Homo sapiens
ataggccaagattac

SEQ ID NO: 1401202 - DNA, 15 bp, Homo sapiens
aataggccaagatta

SEQ ID NO: 1401203 - DNA, 15 bp, Homo sapiens
aaataggccaagatt

SEQ ID NO: 1401204 - DNA, 15 bp, Homo sapiens
aaaataggccaagat

SEQ ID NO: 1401205 - DNA, 15 bp, Homo sapiens
taaaataggccaaga

SEQ ID NO: 1401206 - DNA, 15 bp, Homo sapiens
ttaaaataggccaag

SEQ ID NO: 1401207 - DNA, 15 bp, Homo sapiens
tttaaaataggccaa

SEQ ID NO: 1401208 - DNA, 15 bp, Homo sapiens
ctttaaaataggcca

SEQ ID NO: 1401209 - DNA, 15 bp, Homo sapiens
tctttaaaataggcc

SEQ ID NO: 1401210 - DNA, 15 bp, Homo sapiens
atctttaaaataggc

SEQ ID NO: 1401211 - DNA, 15 bp, Homo sapiens
aatctttaaaatagg

SEQ ID NO: 1401212 - DNA, 15 bp, Homo sapiens
taatctttaaaatag

SEQ ID NO: 1401213 - DNA, 15 bp, Homo sapiens
ataatctttaaaata

SEQ ID NO: 1401214 - DNA, 15 bp, Homo sapiens
aataatctttaaaat

SEQ ID NO: 1401215 - DNA, 15 bp, Homo sapiens
aaataatctttaaaa

SEQ ID NO: 1401216 - DNA, 15 bp, Homo sapiens
aaaataatctttaaa

SEQ ID NO: 1401217 - DNA, 15 bp, Homo sapiens
taaaataatctttaa

SEQ ID NO: 1401218 - DNA, 15 bp, Homo sapiens
ataaaataatcttta

SEQ ID NO: 1401219 - DNA, 15 bp, Homo sapiens
aataaaataatcttt

SEQ ID NO: 1401220 - DNA, 15 bp, Homo sapiens
caataaaataatctt

SEQ ID NO: 1401221 - DNA, 15 bp, Homo sapiens
ccaataaaataatct

SEQ ID NO: 1401222 - DNA, 15 bp, Homo sapiens
accaataaaataatc

SEQ ID NO: 1401223 - DNA, 15 bp, Homo sapiens
aaccaataaaataat

SEQ ID NO: 1401224 - DNA, 15 bp, Homo sapiens
aaaccaataaaataa

SEQ ID NO: 1401225 - DNA, 15 bp, Homo sapiens
aaaaccaataaaata

SEQ ID NO: 1401226 - DNA, 15 bp, Homo sapiens
aaaaaccaataaaat

SEQ ID NO: 1401227 - DNA, 15 bp, Homo sapiens
gaaaaaccaataaaa

SEQ ID NO: 1401228 - DNA, 15 bp, Homo sapiens
agaaaaaccaataaa

SEQ ID NO: 1401229 - DNA, 15 bp, Homo sapiens
tagaaaaaccaataa

SEQ ID NO: 1401230 - DNA, 15 bp, Homo sapiens
gtagaaaaaccaata

SEQ ID NO: 1401231 - DNA, 15 bp, Homo sapiens
tgtagaaaaaccaat

SEQ ID NO: 1401232 - DNA, 15 bp, Homo sapiens
ctgtagaaaaaccaa

SEQ ID NO: 1401233 - DNA, 15 bp, Homo sapiens
actgtagaaaaacca

SEQ ID NO: 1401234 - DNA, 15 bp, Homo sapiens
aactgtagaaaaacc

SEQ ID NO: 1401235 - DNA, 15 bp, Homo sapiens
aaactgtagaaaaac

SEQ ID NO: 1401236 - DNA, 15 bp, Homo sapiens
taaactgtagaaaaa

SEQ ID NO: 1401237 - DNA, 15 bp, Homo sapiens
ttaaactgtagaaaa

SEQ ID NO: 1401238 - DNA, 15 bp, Homo sapiens
gttaaactgtagaaa

SEQ ID NO: 1401239 - DNA, 15 bp, Homo sapiens
agttaaactgtagaa

SEQ ID NO: 1401240 - DNA, 15 bp, Homo sapiens
tagttaaactgtaga

SEQ ID NO: 1401241 - DNA, 15 bp, Homo sapiens
atagttaaactgtag

SEQ ID NO: 1401242 - DNA, 15 bp, Homo sapiens
aatagttaaactgta

SEQ ID NO: 1401243 - DNA, 15 bp, Homo sapiens
taatagttaaactgt

SEQ ID NO: 1401244 - DNA, 15 bp, Homo sapiens
ataatagttaaactg

SEQ ID NO: 1401245 - DNA, 15 bp, Homo sapiens
cataatagttaaact

SEQ ID NO: 1401246 - DNA, 15 bp, Homo sapiens
acataatagttaaac

SEQ ID NO: 1401247 - DNA, 15 bp, Homo sapiens
cacataatagttaaa

SEQ ID NO: 1401248 - DNA, 15 bp, Homo sapiens
gcacataatagttaa

SEQ ID NO: 1401249 - DNA, 15 bp, Homo sapiens
ggcacataatagtta

SEQ ID NO: 1401250 - DNA, 15 bp, Homo sapiens
tggcacataatagtt

SEQ ID NO: 1401251 - DNA, 15 bp, Homo sapiens
ttggcacataatagt

SEQ ID NO: 1401252 - DNA, 15 bp, Homo sapiens
attggcacataatag

SEQ ID NO: 1401253 - DNA, 15 bp, Homo sapiens
tattggcacataata

SEQ ID NO: 1401254 - DNA, 15 bp, Homo sapiens
gtattggcacataat

SEQ ID NO: 1401255 - DNA, 15 bp, Homo sapiens
tgtattggcacataa

SEQ ID NO: 1401256 - DNA, 15 bp, Homo sapiens
atgtattggcacata

SEQ ID NO: 1401257 - DNA, 15 bp, Homo sapiens
catgtattggcacat

SEQ ID NO: 1401258 - DNA, 15 bp, Homo sapiens
gcatgtattggcaca

SEQ ID NO: 1401259 - DNA, 15 bp, Homo sapiens
tgcatgtattggcac

SEQ ID NO: 1401260 - DNA, 15 bp, Homo sapiens
ttgcatgtattggca

SEQ ID NO: 1401261 - DNA, 15 bp, Homo sapiens
attgcatgtattggc

SEQ ID NO: 1401262 - DNA, 15 bp, Homo sapiens
aattgcatgtattgg

SEQ ID NO: 1401263 - DNA, 15 bp, Homo sapiens
taattgcatgtattg

SEQ ID NO: 1401264 - DNA, 15 bp, Homo sapiens
ataattgcatgtatt

SEQ ID NO: 1401265 - DNA, 15 bp, Homo sapiens
aataattgcatgtat

SEQ ID NO: 1401266 - DNA, 15 bp, Homo sapiens
aaataattgcatgta

SEQ ID NO: 1401267 - DNA, 15 bp, Homo sapiens
aaaataattgcatgt

SEQ ID NO: 1401268 - DNA, 15 bp, Homo sapiens
aaaaataattgcatg

SEQ ID NO: 1401269 - DNA, 15 bp, Homo sapiens
taaaaataattgcat

SEQ ID NO: 1401270 - DNA, 15 bp, Homo sapiens
ataaaaataattgca

SEQ ID NO: 1401271 - DNA, 15 bp, Homo sapiens
aataaaaataattgc

SEQ ID NO: 1401272 - DNA, 15 bp, Homo sapiens
aaataaaaataattg

SEQ ID NO: 1401273 - DNA, 15 bp, Homo sapiens
taaataaaaataatt

SEQ ID NO: 1401274 - DNA, 15 bp, Homo sapiens
ctaaataaaaataat

SEQ ID NO: 1401275 - DNA, 15 bp, Homo sapiens
gctaaataaaaataa

SEQ ID NO: 1401276 - DNA, 15 bp, Homo sapiens
ggctaaataaaaata

SEQ ID NO: 1401277 - DNA, 15 bp, Homo sapiens
aggctaaataaaaat

SEQ ID NO: 1401278 - DNA, 15 bp, Homo sapiens
taggctaaataaaaa

SEQ ID NO: 1401279 - DNA, 15 bp, Homo sapiens
gtaggctaaataaaa

SEQ ID NO: 1401280 - DNA, 15 bp, Homo sapiens
agtaggctaaataaa

SEQ ID NO: 1401281 - DNA, 15 bp, Homo sapiens
aagtaggctaaataa

SEQ ID NO: 1401282 - DNA, 15 bp, Homo sapiens
taagtaggctaaata

SEQ ID NO: 1401283 - DNA, 15 bp, Homo sapiens
ctaagtaggctaaat

SEQ ID NO: 1401284 - DNA, 15 bp, Homo sapiens
gctaagtaggctaaa

SEQ ID NO: 1401285 - DNA, 15 bp, Homo sapiens
tgctaagtaggctaa

SEQ ID NO: 1401286 - DNA, 15 bp, Homo sapiens
atgctaagtaggcta

SEQ ID NO: 1401287 - DNA, 15 bp, Homo sapiens
aatgctaagtaggct

SEQ ID NO: 1401288 - DNA, 15 bp, Homo sapiens
taatgctaagtaggc

SEQ ID NO: 1401289 - DNA, 15 bp, Homo sapiens
ctaatgctaagtagg

SEQ ID NO: 1401290 - DNA, 15 bp, Homo sapiens
gctaatgctaagtag

SEQ ID NO: 1401291 - DNA, 15 bp, Homo sapiens
tgctaatgctaagta

SEQ ID NO: 1401292 - DNA, 15 bp, Homo sapiens
atgctaatgctaagt

SEQ ID NO: 1401293 - DNA, 15 bp, Homo sapiens
aatgctaatgctaag

SEQ ID NO: 1401294 - DNA, 15 bp, Homo sapiens
aaatgctaatgctaa

SEQ ID NO: 1401295 - DNA, 15 bp, Homo sapiens
gaaatgctaatgcta

SEQ ID NO: 1401296 - DNA, 15 bp, Homo sapiens
ggaaatgctaatgct

SEQ ID NO: 1401297 - DNA, 15 bp, Homo sapiens
tggaaatgctaatgc

SEQ ID NO: 1401298 - DNA, 15 bp, Homo sapiens
ctggaaatgctaatg

SEQ ID NO: 1401299 - DNA, 15 bp, Homo sapiens
cctggaaatgctaat

SEQ ID NO: 1401300 - DNA, 15 bp, Homo sapiens
ccctggaaatgctaa

SEQ ID NO: 1401301 - DNA, 15 bp, Homo sapiens
gccctggaaatgcta

SEQ ID NO: 1401302 - DNA, 15 bp, Homo sapiens
agccctggaaatgct

SEQ ID NO: 1401303 - DNA, 15 bp, Homo sapiens
aagccctggaaatgc

SEQ ID NO: 1401304 - DNA, 15 bp, Homo sapiens
gaagccctggaaatg

SEQ ID NO: 1401305 - DNA, 15 bp, Homo sapiens
agaagccctggaaat

SEQ ID NO: 1401306 - DNA, 15 bp, Homo sapiens
aagaagccctggaaa

SEQ ID NO: 1401307 - DNA, 15 bp, Homo sapiens
aaagaagccctggaa

SEQ ID NO: 1401308 - DNA, 15 bp, Homo sapiens
gaaagaagccctgga

SEQ ID NO: 1401309 - DNA, 15 bp, Homo sapiens
ggaaagaagccctgg

SEQ ID NO: 1401310 - DNA, 15 bp, Homo sapiens
gggaaagaagccctg

SEQ ID NO: 1401311 - DNA, 15 bp, Homo sapiens
agggaaagaagccct

SEQ ID NO: 1401312 - DNA, 15 bp, Homo sapiens
cagggaaagaagccc

SEQ ID NO: 1401313 - DNA, 15 bp, Homo sapiens
gcagggaaagaagcc

SEQ ID NO: 1401314 - DNA, 15 bp, Homo sapiens
agcagggaaagaagc

SEQ ID NO: 1401315 - DNA, 15 bp, Homo sapiens
gagcagggaaagaag

SEQ ID NO: 1401316 - DNA, 15 bp, Homo sapiens
ggagcagggaaagaa

SEQ ID NO: 1401317 - DNA, 15 bp, Homo sapiens
aggagcagggaaaga

SEQ ID NO: 1401318 - DNA, 15 bp, Homo sapiens
aaggagcagggaaag

SEQ ID NO: 1401319 - DNA, 15 bp, Homo sapiens
aatattaaggagcag

SEQ ID NO: 1401320 - DNA, 15 bp, Homo sapiens
gaatattaaggagca

SEQ ID NO: 1401321 - DNA, 15 bp, Homo sapiens
agaatattaaggagc

SEQ ID NO: 1401322 - DNA, 15 bp, Homo sapiens
aagaatattaaggag

SEQ ID NO: 1401323 - DNA, 15 bp, Homo sapiens
aaagaatattaagga

SEQ ID NO: 1401324 - DNA, 15 bp, Homo sapiens
caaagaatattaagg

SEQ ID NO: 1401325 - DNA, 15 bp, Homo sapiens
acaaagaatattaag

SEQ ID NO: 1401326 - DNA, 15 bp, Homo sapiens
gacaaagaatattaa

SEQ ID NO: 1401327 - DNA, 15 bp, Homo sapiens
tgacaaagaatatta

SEQ ID NO: 1401328 - DNA, 15 bp, Homo sapiens
ttgacaaagaatatt

SEQ ID NO: 1401329 - DNA, 15 bp, Homo sapiens
attgacaaagaatat

SEQ ID NO: 1401330 - DNA, 15 bp, Homo sapiens
aattgacaaagaata

SEQ ID NO: 1401331 - DNA, 15 bp, Homo sapiens
aaattgacaaagaat

SEQ ID NO: 1401332 - DNA, 15 bp, Homo sapiens
aaaattgacaaagaa

SEQ ID NO: 1401333 - DNA, 15 bp, Homo sapiens
taaaattgacaaaga

SEQ ID NO: 1401334 - DNA, 15 bp, Homo sapiens
ctaaaattgacaaag

SEQ ID NO: 1401335 - DNA, 15 bp, Homo sapiens
tctaaaattgacaaa

SEQ ID NO: 1401336 - DNA, 15 bp, Homo sapiens
ttctaaaattgacaa

SEQ ID NO: 1401337 - DNA, 15 bp, Homo sapiens
tttctaaaattgaca

SEQ ID NO: 1401338 - DNA, 15 bp, Homo sapiens
ttttctaaaattgac

SEQ ID NO: 1401339 - DNA, 15 bp, Homo sapiens
attttctaaaattga

SEQ ID NO: 1401340 - DNA, 15 bp, Homo sapiens
aattttctaaaattg

SEQ ID NO: 1401341 - DNA, 15 bp, Homo sapiens
gaattttctaaaatt

SEQ ID NO: 1401342 - DNA, 15 bp, Homo sapiens
agaattttctaaaat

SEQ ID NO: 1401343 - DNA, 15 bp, Homo sapiens
cagaattttctaaaa

SEQ ID NO: 1401344 - DNA, 15 bp, Homo sapiens
acagaattttctaaa

SEQ ID NO: 1401345 - DNA, 15 bp, Homo sapiens
gacagaattttctaa

SEQ ID NO: 1401346 - DNA, 15 bp, Homo sapiens
tgacagaattttcta

SEQ ID NO: 1401347 - DNA, 15 bp, Homo sapiens
atgacagaattttct

SEQ ID NO: 1401348 - DNA, 15 bp, Homo sapiens
aatgacagaattttc

SEQ ID NO: 1401349 - DNA, 15 bp, Homo sapiens
taatgacagaatttt

SEQ ID NO: 1401350 - DNA, 15 bp, Homo sapiens
ataatgacagaattt

SEQ ID NO: 1401351 - DNA, 15 bp, Homo sapiens
gataatgacagaatt

SEQ ID NO: 1401352 - DNA, 15 bp, Homo sapiens
agataatgacagaat

SEQ ID NO: 1401353 - DNA, 15 bp, Homo sapiens
gagataatgacagaa

SEQ ID NO: 1401354 - DNA, 15 bp, Homo sapiens
tgagataatgacaga

SEQ ID NO: 1401355 - DNA, 15 bp, Homo sapiens
atgagataatgacag

SEQ ID NO: 1401356 - DNA, 15 bp, Homo sapiens
gatgagataatgaca

SEQ ID NO: 1401357 - DNA, 15 bp, Homo sapiens
tgatgagataatgac

SEQ ID NO: 1401358 - DNA, 15 bp, Homo sapiens
ttgatgagataatga

SEQ ID NO: 1401359 - DNA, 15 bp, Homo sapiens
gttgatgagataatg

SEQ ID NO: 1401360 - DNA, 15 bp, Homo sapiens
tgttgatgagataat

SEQ ID NO: 1401361 - DNA, 15 bp, Homo sapiens
atgttgatgagataa

SEQ ID NO: 1401362 - DNA, 15 bp, Homo sapiens
aatgttgatgagata

SEQ ID NO: 1401363 - DNA, 15 bp, Homo sapiens
caatgttgatgagat

SEQ ID NO: 1401364 - DNA, 15 bp, Homo sapiens
acaatgttgatgaga

SEQ ID NO: 1401365 - DNA, 15 bp, Homo sapiens
gacaatgttgatgag

SEQ ID NO: 1401366 - DNA, 15 bp, Homo sapiens
agacaatgttgatga

SEQ ID NO: 1401367 - DNA, 15 bp, Homo sapiens
cagacaatgttgatg

SEQ ID NO: 1401368 - DNA, 15 bp, Homo sapiens
acagacaatgttgat

SEQ ID NO: 1401369 - DNA, 15 bp, Homo sapiens
tacagacaatgttga

SEQ ID NO: 1401370 - DNA, 15 bp, Homo sapiens
ctacagacaatgttg

SEQ ID NO: 1401371 - DNA, 15 bp, Homo sapiens
actacagacaatgtt

SEQ ID NO: 1401372 - DNA, 15 bp, Homo sapiens
gactacagacaatgt

SEQ ID NO: 1401373 - DNA, 15 bp, Homo sapiens
tgactacagacaatg

SEQ ID NO: 1401374 - DNA, 15 bp, Homo sapiens
atgactacagacaat

SEQ ID NO: 1401375 - DNA, 15 bp, Homo sapiens
aatgactacagacaa

SEQ ID NO: 1401376 - DNA, 15 bp, Homo sapiens
gaatgactacagaca

SEQ ID NO: 1401377 - DNA, 15 bp, Homo sapiens
agaatgactacagac

SEQ ID NO: 1401378 - DNA, 15 bp, Homo sapiens
gagaatgactacaga

SEQ ID NO: 1401379 - DNA, 15 bp, Homo sapiens
agagaatgactacag

SEQ ID NO: 1401380 - DNA, 15 bp, Homo sapiens
cagagaatgactaca

SEQ ID NO: 1401381 - DNA, 15 bp, Homo sapiens
gcagagaatgactac

SEQ ID NO: 1401382 - DNA, 15 bp, Homo sapiens
ggcagagaatgacta

SEQ ID NO: 1401383 - DNA, 15 bp, Homo sapiens
aggcagagaatgact

SEQ ID NO: 1401384 - DNA, 15 bp, Homo sapiens
gaggcagagaatgac

SEQ ID NO: 1401385 - DNA, 15 bp, Homo sapiens
agaggcagagaatga

SEQ ID NO: 1401386 - DNA, 15 bp, Homo sapiens
aagaggcagagaatg

SEQ ID NO: 1401387 - DNA, 15 bp, Homo sapiens
gaagaggcagagaat

SEQ ID NO: 1401388 - DNA, 15 bp, Homo sapiens
tgaagaggcagagaa

SEQ ID NO: 1401389 - DNA, 15 bp, Homo sapiens
gtgaagaggcagaga

SEQ ID NO: 1401390 - DNA, 15 bp, Homo sapiens
ggtgaagaggcagag

SEQ ID NO: 1401391 - DNA, 15 bp, Homo sapiens
aggtgaagaggcaga

SEQ ID NO: 1401392 - DNA, 15 bp, Homo sapiens
gaggtgaagaggcag

SEQ ID NO: 1401393 - DNA, 15 bp, Homo sapiens
agaggtgaagaggca

SEQ ID NO: 1401394 - DNA, 15 bp, Homo sapiens
cagaggtgaagaggc

SEQ ID NO: 1401395 - DNA, 15 bp, Homo sapiens
ccagaggtgaagagg

SEQ ID NO: 1401396 - DNA, 15 bp, Homo sapiens
cccagaggtgaagag

SEQ ID NO: 1401397 - DNA, 15 bp, Homo sapiens
tcccagaggtgaaga

SEQ ID NO: 1401398 - DNA, 15 bp, Homo sapiens
gtcccagaggtgaag

SEQ ID NO: 1401399 - DNA, 15 bp, Homo sapiens
agtcccagaggtgaa

SEQ ID NO: 1401400 - DNA, 15 bp, Homo sapiens
gagtcccagaggtga

SEQ ID NO: 1401401 - DNA, 15 bp, Homo sapiens
ggagtcccagaggtg

SEQ ID NO: 1401402 - DNA, 15 bp, Homo sapiens
tggagtcccagaggt

SEQ ID NO: 1401403 - DNA, 15 bp, Homo sapiens
ctggagtcccagagg

SEQ ID NO: 1401404 - DNA, 15 bp, Homo sapiens
actggagtcccagag

SEQ ID NO: 1401405 - DNA, 15 bp, Homo sapiens
aactggagtcccaga

SEQ ID NO: 1401406 - DNA, 15 bp, Homo sapiens
caactggagtcccag

SEQ ID NO: 1401407 - DNA, 15 bp, Homo sapiens
ccaactggagtccca

SEQ ID NO: 1401408 - DNA, 15 bp, Homo sapiens
gccaactggagtccc

SEQ ID NO: 1401409 - DNA, 15 bp, Homo sapiens
ggccaactggagtcc

SEQ ID NO: 1401410 - DNA, 15 bp, Homo sapiens
tggccaactggagtc

SEQ ID NO: 1401411 - DNA, 15 bp, Homo sapiens
gtggccaactggagt

SEQ ID NO: 1401412 - DNA, 15 bp, Homo sapiens
tgtggccaactggag

SEQ ID NO: 1401413 - DNA, 15 bp, Homo sapiens
atgtggccaactgga

SEQ ID NO: 1401414 - DNA, 15 bp, Homo sapiens
tatgtggccaactgg

SEQ ID NO: 1401415 - DNA, 15 bp, Homo sapiens
gtatgtggccaactg

SEQ ID NO: 1401416 - DNA, 15 bp, Homo sapiens
cgtatgtggccaact

SEQ ID NO: 1401417 - DNA, 15 bp, Homo sapiens
tcgtatgtggccaac

SEQ ID NO: 1401418 - DNA, 15 bp, Homo sapiens
ctcgtatgtggccaa

SEQ ID NO: 1401419 - DNA, 15 bp, Homo sapiens
cctcgtatgtggcca

SEQ ID NO: 1401420 - DNA, 15 bp, Homo sapiens
acctcgtatgtggcc

SEQ ID NO: 1401421 - DNA, 15 bp, Homo sapiens
aacctcgtatgtggc

SEQ ID NO: 1401422 - DNA, 15 bp, Homo sapiens
aaacctcgtatgtgg

SEQ ID NO: 1401423 - DNA, 15 bp, Homo sapiens
aaaacctcgtatgtg

SEQ ID NO: 1401424 - DNA, 15 bp, Homo sapiens
gaaaacctcgtatgt

SEQ ID NO: 1401425 - DNA, 15 bp, Homo sapiens
agaaaacctcgtatg

SEQ ID NO: 1401426 - DNA, 15 bp, Homo sapiens
gagaaaacctcgtat

SEQ ID NO: 1401427 - DNA, 15 bp, Homo sapiens
tgagaaaacctcgta

SEQ ID NO: 1401428 - DNA, 15 bp, Homo sapiens
atgagaaaacctcgt

SEQ ID NO: 1401429 - DNA, 15 bp, Homo sapiens
aatgagaaaacctcg

SEQ ID NO: 1401430 - DNA, 15 bp, Homo sapiens
caatgagaaaacctc

SEQ ID NO: 1401431 - DNA, 15 bp, Homo sapiens
acaatgagaaaacct

SEQ ID NO: 1401432 - DNA, 15 bp, Homo sapiens
tacaatgagaaaacc

SEQ ID NO: 1401433 - DNA, 15 bp, Homo sapiens
atacaatgagaaaac

SEQ ID NO: 1401434 - DNA, 15 bp, Homo sapiens
gatacaatgagaaaa

SEQ ID NO: 1401435 - DNA, 15 bp, Homo sapiens
ggatacaatgagaaa

SEQ ID NO: 1401436 - DNA, 15 bp, Homo sapiens
gggatacaatgagaa

SEQ ID NO: 1401437 - DNA, 15 bp, Homo sapiens
ggggatacaatgaga

SEQ ID NO: 1401438 - DNA, 15 bp, Homo sapiens
aggggatacaatgag

SEQ ID NO: 1401439 - DNA, 15 bp, Homo sapiens
taggggatacaatga

SEQ ID NO: 1401440 - DNA, 15 bp, Homo sapiens
gtaggggatacaatg

SEQ ID NO: 1401441 - DNA, 15 bp, Homo sapiens
tgtaggggatacaat

SEQ ID NO: 1401442 - DNA, 15 bp, Homo sapiens
atgtaggggatacaa

SEQ ID NO: 1401443 - DNA, 15 bp, Homo sapiens
catgtaggggataca

SEQ ID NO: 1401444 - DNA, 15 bp, Homo sapiens
acatgtaggggatac

SEQ ID NO: 1401445 - DNA, 15 bp, Homo sapiens
gacatgtaggggata

SEQ ID NO: 1401446 - DNA, 15 bp, Homo sapiens
agacatgtaggggat

SEQ ID NO: 1401447 - DNA, 15 bp, Homo sapiens
aagacatgtagggga

SEQ ID NO: 1401448 - DNA, 15 bp, Homo sapiens
taagacatgtagggg

SEQ ID NO: 1401449 - DNA, 15 bp, Homo sapiens
ataagacatgtaggg

SEQ ID NO: 1401450 - DNA, 15 bp, Homo sapiens
cataagacatgtagg

SEQ ID NO: 1401451 - DNA, 15 bp, Homo sapiens
gcataagacatgtag

SEQ ID NO: 1401452 - DNA, 15 bp, Homo sapiens
agcataagacatgta

SEQ ID NO: 1401453 - DNA, 15 bp, Homo sapiens
gagcataagacatgt

SEQ ID NO: 1401454 - DNA, 15 bp, Homo sapiens
ggagcataagacatg

SEQ ID NO: 1401455 - DNA, 15 bp, Homo sapiens
gggagcataagacat

SEQ ID NO: 1401456 - DNA, 15 bp, Homo sapiens
agggagcataagaca

SEQ ID NO: 1401457 - DNA, 15 bp, Homo sapiens
aagggagcataagac

SEQ ID NO: 1401458 - DNA, 15 bp, Homo sapiens
aaagggagcataaga

SEQ ID NO: 1401459 - DNA, 15 bp, Homo sapiens
aaaagggagcataag

SEQ ID NO: 1401460 - DNA, 15 bp, Homo sapiens
caaaagggagcataa

SEQ ID NO: 1401461 - DNA, 15 bp, Homo sapiens
acaaaagggagcata

SEQ ID NO: 1401462 - DNA, 15 bp, Homo sapiens
aacaaaagggagcat

SEQ ID NO: 1401463 - DNA, 15 bp, Homo sapiens
aaacaaaagggagca

SEQ ID NO: 1401464 - DNA, 15 bp, Homo sapiens
aaaacaaaagggagc

SEQ ID NO: 1401465 - DNA, 15 bp, Homo sapiens
aaaaacaaaagggag

SEQ ID NO: 1401466 - DNA, 15 bp, Homo sapiens
gaaaaacaaaaggga

SEQ ID NO: 1401467 - DNA, 15 bp, Homo sapiens
agaaaaacaaaaggg

SEQ ID NO: 1401468 - DNA, 15 bp, Homo sapiens
gagaaaaacaaaagg

SEQ ID NO: 1401469 - DNA, 15 bp, Homo sapiens
ggagaaaaacaaaag

SEQ ID NO: 1401470 - DNA, 15 bp, Homo sapiens
gggagaaaaacaaaa

SEQ ID NO: 1401471 - DNA, 15 bp, Homo sapiens
agggagaaaaacaaa

SEQ ID NO: 1401472 - DNA, 15 bp, Homo sapiens
gagggagaaaaacaa

SEQ ID NO: 1401473 - DNA, 15 bp, Homo sapiens
ggagggagaaaaaca

SEQ ID NO: 1401474 - DNA, 15 bp, Homo sapiens
aggagggagaaaaac

SEQ ID NO: 1401475 - DNA, 15 bp, Homo sapiens
aaggagggagaaaaa

SEQ ID NO: 1401476 - DNA, 15 bp, Homo sapiens
aaaggagggagaaaa

SEQ ID NO: 1401477 - DNA, 15 bp, Homo sapiens
aaaaggagggagaaa

SEQ ID NO: 1401478 - DNA, 15 bp, Homo sapiens
caaaaggagggagaa

SEQ ID NO: 1401479 - DNA, 15 bp, Homo sapiens
acaaaaggagggaga

SEQ ID NO: 1401480 - DNA, 15 bp, Homo sapiens
gacaaaaggagggag

SEQ ID NO: 1401481 - DNA, 15 bp, Homo sapiens
agacaaaaggaggga

SEQ ID NO: 1401482 - DNA, 15 bp, Homo sapiens
gagacaaaaggaggg

SEQ ID NO: 1401483 - DNA, 15 bp, Homo sapiens
agagacaaaaggagg

SEQ ID NO: 1401484 - DNA, 15 bp, Homo sapiens
gagagacaaaaggag

SEQ ID NO: 1401485 - DNA, 15 bp, Homo sapiens
agagagacaaaagga

SEQ ID NO: 1401486 - DNA, 15 bp, Homo sapiens
aagagagacaaaagg

SEQ ID NO: 1401487 - DNA, 15 bp, Homo sapiens
aaagagagacaaaag

SEQ ID NO: 1401488 - DNA, 15 bp, Homo sapiens
taaagagagacaaaa

SEQ ID NO: 1401489 - DNA, 15 bp, Homo sapiens
gtaaagagagacaaa

SEQ ID NO: 1401490 - DNA, 15 bp, Homo sapiens
agtaaagagagacaa

SEQ ID NO: 1401491 - DNA, 15 bp, Homo sapiens
aagtaaagagagaca

SEQ ID NO: 1401492 - DNA, 15 bp, Homo sapiens
gaagtaaagagagac

SEQ ID NO: 1401493 - DNA, 15 bp, Homo sapiens
agaagtaaagagaga

SEQ ID NO: 1401494 - DNA, 15 bp, Homo sapiens
aagaagtaaagagag

SEQ ID NO: 1401495 - DNA, 15 bp, Homo sapiens
aaagaagtaaagaga

SEQ ID NO: 1401496 - DNA, 15 bp, Homo sapiens
gaaagaagtaaagag

SEQ ID NO: 1401497 - DNA, 15 bp, Homo sapiens
agaaagaagtaaaga

SEQ ID NO: 1401498 - DNA, 15 bp, Homo sapiens
cagaaagaagtaaag

SEQ ID NO: 1401499 - DNA, 15 bp, Homo sapiens
ccagaaagaagtaaa

SEQ ID NO: 1401500 - DNA, 15 bp, Homo sapiens
tccagaaagaagtaa

SEQ ID NO: 1401501 - DNA, 15 bp, Homo sapiens
atccagaaagaagta

SEQ ID NO: 1401502 - DNA, 15 bp, Homo sapiens
tatccagaaagaagt

SEQ ID NO: 1401503 - DNA, 15 bp, Homo sapiens
gtatccagaaagaag

SEQ ID NO: 1401504 - DNA, 15 bp, Homo sapiens
tgtatccagaaagaa

SEQ ID NO: 1401505 - DNA, 15 bp, Homo sapiens
atgtatccagaaaga

SEQ ID NO: 1401506 - DNA, 15 bp, Homo sapiens
aatgtatccagaaag

SEQ ID NO: 1401507 - DNA, 15 bp, Homo sapiens
gaatgtatccagaaa

SEQ ID NO: 1401508 - DNA, 15 bp, Homo sapiens
ggaatgtatccagaa

SEQ ID NO: 1401509 - DNA, 15 bp, Homo sapiens
aggaatgtatccaga

SEQ ID NO: 1401510 - DNA, 15 bp, Homo sapiens
taggaatgtatccag

SEQ ID NO: 1401511 - DNA, 15 bp, Homo sapiens
ataggaatgtatcca

SEQ ID NO: 1401512 - DNA, 15 bp, Homo sapiens
gataggaatgtatcc

SEQ ID NO: 1401513 - DNA, 15 bp, Homo sapiens
agataggaatgtatc

SEQ ID NO: 1401514 - DNA, 15 bp, Homo sapiens
aagataggaatgtat

SEQ ID NO: 1401515 - DNA, 15 bp, Homo sapiens
gaagataggaatgta

SEQ ID NO: 1401516 - DNA, 15 bp, Homo sapiens
agaagataggaatgt

SEQ ID NO: 1401517 - DNA, 15 bp, Homo sapiens
tagaagataggaatg

SEQ ID NO: 1401518 - DNA, 15 bp, Homo sapiens
ttagaagataggaat

SEQ ID NO: 1401519 - DNA, 15 bp, Homo sapiens
attagaagataggaa

SEQ ID NO: 1401520 - DNA, 15 bp, Homo sapiens
aattagaagatagga

SEQ ID NO: 1401521 - DNA, 15 bp, Homo sapiens
gaattagaagatagg

SEQ ID NO: 1401522 - DNA, 15 bp, Homo sapiens
tgaattagaagatag

SEQ ID NO: 1401523 - DNA, 15 bp, Homo sapiens
ctgaattagaagata

SEQ ID NO: 1401524 - DNA, 15 bp, Homo sapiens
gctgaattagaagat

SEQ ID NO: 1401525 - DNA, 15 bp, Homo sapiens
tgctgaattagaaga

SEQ ID NO: 1401526 - DNA, 15 bp, Homo sapiens
ttgctgaattagaag

SEQ ID NO: 1401527 - DNA, 15 bp, Homo sapiens
attgctgaattagaa

SEQ ID NO: 1401528 - DNA, 15 bp, Homo sapiens
aattgctgaattaga

SEQ ID NO: 1401529 - DNA, 15 bp, Homo sapiens
gaattgctgaattag

SEQ ID NO: 1401530 - DNA, 15 bp, Homo sapiens
agaattgctgaatta

SEQ ID NO: 1401531 - DNA, 15 bp, Homo sapiens
aagaattgctgaatt

SEQ ID NO: 1401532 - DNA, 15 bp, Homo sapiens
aaagaattgctgaat

SEQ ID NO: 1401533 - DNA, 15 bp, Homo sapiens
gaaagaattgctgaa

SEQ ID NO: 1401534 - DNA, 15 bp, Homo sapiens
ggaaagaattgctga

SEQ ID NO: 1401535 - DNA, 15 bp, Homo sapiens
aggaaagaattgctg

SEQ ID NO: 1401536 - DNA, 15 bp, Homo sapiens
gaggaaagaattgct

SEQ ID NO: 1401537 - DNA, 15 bp, Homo sapiens
agaggaaagaattgc

SEQ ID NO: 1401538 - DNA, 15 bp, Homo sapiens
cagaggaaagaattg

SEQ ID NO: 1401539 - DNA, 15 bp, Homo sapiens
gcagaggaaagaatt

SEQ ID NO: 1401540 - DNA, 15 bp, Homo sapiens
agcagaggaaagaat

SEQ ID NO: 1401541 - DNA, 15 bp, Homo sapiens
gagcagaggaaagaa

SEQ ID NO: 1401542 - DNA, 15 bp, Homo sapiens
agagcagaggaaaga

SEQ ID NO: 1401543 - DNA, 15 bp, Homo sapiens
cagagcagaggaaag

SEQ ID NO: 1401544 - DNA, 15 bp, Homo sapiens
gcagagcagaggaaa

SEQ ID NO: 1401545 - DNA, 15 bp, Homo sapiens
tgcagagcagaggaa

SEQ ID NO: 1401546 - DNA, 15 bp, Homo sapiens
ctgcagagcagagga

SEQ ID NO: 1401547 - DNA, 15 bp, Homo sapiens
tctgcagagcagagg

SEQ ID NO: 1401548 - DNA, 15 bp, Homo sapiens
atctgcagagcagag

SEQ ID NO: 1401549 - DNA, 15 bp, Homo sapiens
gatctgcagagcaga

SEQ ID NO: 1401550 - DNA, 15 bp, Homo sapiens
tgatctgcagagcag

SEQ ID NO: 1401551 - DNA, 15 bp, Homo sapiens
ttgatctgcagagca

SEQ ID NO: 1401552 - DNA, 15 bp, Homo sapiens
gttgatctgcagagc

SEQ ID NO: 1401553 - DNA, 15 bp, Homo sapiens
agttgatctgcagag

SEQ ID NO: 1401554 - DNA, 15 bp, Homo sapiens
cagttgatctgcaga

SEQ ID NO: 1401555 - DNA, 15 bp, Homo sapiens
acagttgatctgcag

SEQ ID NO: 1401556 - DNA, 15 bp, Homo sapiens
aacagttgatctgca

SEQ ID NO: 1401557 - DNA, 15 bp, Homo sapiens
taacagttgatctgc

SEQ ID NO: 1401558 - DNA, 15 bp, Homo sapiens
ttaacagttgatctg

SEQ ID NO: 1401559 - DNA, 15 bp, Homo sapiens
tttaacagttgatct

SEQ ID NO: 1401560 - DNA, 15 bp, Homo sapiens
gtttaacagttgatc

SEQ ID NO: 1401561 - DNA, 15 bp, Homo sapiens
ggtttaacagttgat

SEQ ID NO: 1401562 - DNA, 15 bp, Homo sapiens
gggtttaacagttga

SEQ ID NO: 1401563 - DNA, 15 bp, Homo sapiens
tgggtttaacagttg

SEQ ID NO: 1401564 - DNA, 15 bp, Homo sapiens
atgggtttaacagtt

SEQ ID NO: 1401565 - DNA, 15 bp, Homo sapiens
gatgggtttaacagt

SEQ ID NO: 1401566 - DNA, 15 bp, Homo sapiens
ggatgggtttaacag

SEQ ID NO: 1401567 - DNA, 15 bp, Homo sapiens
tggatgggtttaaca

SEQ ID NO: 1401568 - DNA, 15 bp, Homo sapiens
atggatgggtttaac

SEQ ID NO: 1401569 - DNA, 15 bp, Homo sapiens
aatggatgggtttaa

SEQ ID NO: 1401570 - DNA, 15 bp, Homo sapiens
caatggatgggttta

SEQ ID NO: 1401571 - DNA, 15 bp, Homo sapiens
tcaatggatgggttt

SEQ ID NO: 1401572 - DNA, 15 bp, Homo sapiens
ctcaatggatgggtt

SEQ ID NO: 1401573 - DNA, 15 bp, Homo sapiens
actcaatggatgggt

SEQ ID NO: 1401574 - DNA, 15 bp, Homo sapiens
gactcaatggatggg

SEQ ID NO: 1401575 - DNA, 15 bp, Homo sapiens
ggactcaatggatgg

SEQ ID NO: 1401576 - DNA, 15 bp, Homo sapiens
aggactcaatggatg

SEQ ID NO: 1401577 - DNA, 15 bp, Homo sapiens
aaggactcaatggat

SEQ ID NO: 1401578 - DNA, 15 bp, Homo sapiens
taaggactcaatgga

SEQ ID NO: 1401579 - DNA, 15 bp, Homo sapiens
ttaaggactcaatgg

SEQ ID NO: 1401580 - DNA, 15 bp, Homo sapiens
attaaggactcaatg

SEQ ID NO: 1401581 - DNA, 15 bp, Homo sapiens
aattaaggactcaat

SEQ ID NO: 1401582 - DNA, 15 bp, Homo sapiens
aaattaaggactcaa

SEQ ID NO: 1401583 - DNA, 15 bp, Homo sapiens
gaaattaaggactca

SEQ ID NO: 1401584 - DNA, 15 bp, Homo sapiens
agaaattaaggactc

SEQ ID NO: 1401585 - DNA, 15 bp, Homo sapiens
gagaaattaaggact

SEQ ID NO: 1401586 - DNA, 15 bp, Homo sapiens
agagaaattaaggac

SEQ ID NO: 1401587 - DNA, 15 bp, Homo sapiens
aagagaaattaagga

SEQ ID NO: 1401588 - DNA, 15 bp, Homo sapiens
taagagaaattaagg

SEQ ID NO: 1401589 - DNA, 15 bp, Homo sapiens
gtaagagaaattaag

SEQ ID NO: 1401590 - DNA, 15 bp, Homo sapiens
agtaagagaaattaa

SEQ ID NO: 1401591 - DNA, 15 bp, Homo sapiens
cagtaagagaaatta

SEQ ID NO: 1401592 - DNA, 15 bp, Homo sapiens
acagtaagagaaatt

SEQ ID NO: 1401593 - DNA, 15 bp, Homo sapiens
tacagtaagagaaat

SEQ ID NO: 1401594 - DNA, 15 bp, Homo sapiens
atacagtaagagaaa

SEQ ID NO: 1401595 - DNA, 15 bp, Homo sapiens
aatacagtaagagaa

SEQ ID NO: 1401596 - DNA, 15 bp, Homo sapiens
aaatacagtaagaga

SEQ ID NO: 1401597 - DNA, 15 bp, Homo sapiens
aaaatacagtaagag

SEQ ID NO: 1401598 - DNA, 15 bp, Homo sapiens
gaaaatacagtaaga

SEQ ID NO: 1401599 - DNA, 15 bp, Homo sapiens
tgaaaatacagtaag

SEQ ID NO: 1401600 - DNA, 15 bp, Homo sapiens
ttgaaaatacagtaa

SEQ ID NO: 1401601 - DNA, 15 bp, Homo sapiens
attgaaaatacagta

SEQ ID NO: 1401602 - DNA, 15 bp, Homo sapiens
aattgaaaatacagt

SEQ ID NO: 1401603 - DNA, 15 bp, Homo sapiens
gaattgaaaatacag

SEQ ID NO: 1401604 - DNA, 15 bp, Homo sapiens
agaattgaaaataca

SEQ ID NO: 1401605 - DNA, 15 bp, Homo sapiens
tagaattgaaaatac

SEQ ID NO: 1401606 - DNA, 15 bp, Homo sapiens
ctagaattgaaaata

SEQ ID NO: 1401607 - DNA, 15 bp, Homo sapiens
tctagaattgaaaat

SEQ ID NO: 1401608 - DNA, 15 bp, Homo sapiens
ttctagaattgaaaa

SEQ ID NO: 1401609 - DNA, 15 bp, Homo sapiens
attctagaattgaaa

SEQ ID NO: 1401610 - DNA, 15 bp, Homo sapiens
tattctagaattgaa

SEQ ID NO: 1401611 - DNA, 15 bp, Homo sapiens
atattctagaattga

SEQ ID NO: 1401612 - DNA, 15 bp, Homo sapiens
gatattctagaattg

SEQ ID NO: 1401613 - DNA, 15 bp, Homo sapiens
ggatattctagaatt

SEQ ID NO: 1401614 - DNA, 15 bp, Homo sapiens
tggatattctagaat

SEQ ID NO: 1401615 - DNA, 15 bp, Homo sapiens
ttggatattctagaa

SEQ ID NO: 1401616 - DNA, 15 bp, Homo sapiens
gttggatattctaga

SEQ ID NO: 1401617 - DNA, 15 bp, Homo sapiens
agttggatattctag

SEQ ID NO: 1401618 - DNA, 15 bp, Homo sapiens
cagttggatattcta

SEQ ID NO: 1401619 - DNA, 15 bp, Homo sapiens
tcagttggatattct

SEQ ID NO: 1401620 - DNA, 15 bp, Homo sapiens
ctcagttggatattc

SEQ ID NO: 1401621 - DNA, 15 bp, Homo sapiens
actcagttggatatt

SEQ ID NO: 1401622 - DNA, 15 bp, Homo sapiens
gactcagttggatat

SEQ ID NO: 1401623 - DNA, 15 bp, Homo sapiens
agactcagttggata

SEQ ID NO: 1401624 - DNA, 15 bp, Homo sapiens
aagactcagttggat

SEQ ID NO: 1401625 - DNA, 15 bp, Homo sapiens
caagactcagttgga

SEQ ID NO: 1401626 - DNA, 15 bp, Homo sapiens
acaagactcagttgg

SEQ ID NO: 1401627 - DNA, 15 bp, Homo sapiens
aacaagactcagttg

SEQ ID NO: 1401628 - DNA, 15 bp, Homo sapiens
aaacaagactcagtt

SEQ ID NO: 1401629 - DNA, 15 bp, Homo sapiens
aaaacaagactcagt

SEQ ID NO: 1401630 - DNA, 15 bp, Homo sapiens
taaaacaagactcag

SEQ ID NO: 1401631 - DNA, 15 bp, Homo sapiens
ataaaacaagactca

SEQ ID NO: 1401632 - DNA, 15 bp, Homo sapiens
gataaaacaagactc

SEQ ID NO: 1401633 - DNA, 15 bp, Homo sapiens
tgataaaacaagact

SEQ ID NO: 1401634 - DNA, 15 bp, Homo sapiens
atgataaaacaagac

SEQ ID NO: 1401635 - DNA, 15 bp, Homo sapiens
aatgataaaacaaga

SEQ ID NO: 1401636 - DNA, 15 bp, Homo sapiens
aaatgataaaacaag

SEQ ID NO: 1401637 - DNA, 15 bp, Homo sapiens
gaaatgataaaacaa

SEQ ID NO: 1401638 - DNA, 15 bp, Homo sapiens
agaaatgataaaaca

SEQ ID NO: 1401639 - DNA, 15 bp, Homo sapiens
tagaaatgataaaac

SEQ ID NO: 1401640 - DNA, 15 bp, Homo sapiens
ctagaaatgataaaa

SEQ ID NO: 1401641 - DNA, 15 bp, Homo sapiens
actagaaatgataaa

SEQ ID NO: 1401642 - DNA, 15 bp, Homo sapiens
aactagaaatgataa

SEQ ID NO: 1401643 - DNA, 15 bp, Homo sapiens
gaactagaaatgata

SEQ ID NO: 1401644 - DNA, 15 bp, Homo sapiens
agaactagaaatgat

SEQ ID NO: 1401645 - DNA, 15 bp, Homo sapiens
gagaactagaaatga

SEQ ID NO: 1401646 - DNA, 15 bp, Homo sapiens
agagaactagaaatg

SEQ ID NO: 1401647 - DNA, 15 bp, Homo sapiens
cagagaactagaaat

SEQ ID NO: 1401648 - DNA, 15 bp, Homo sapiens
gcagagaactagaaa

SEQ ID NO: 1401649 - DNA, 15 bp, Homo sapiens
tgcagagaactagaa

SEQ ID NO: 1401650 - DNA, 15 bp, Homo sapiens
ttgcagagaactaga

SEQ ID NO: 1401651 - DNA, 15 bp, Homo sapiens
attgcagagaactag

SEQ ID NO: 1401652 - DNA, 15 bp, Homo sapiens
tattgcagagaacta

SEQ ID NO: 1401653 - DNA, 15 bp, Homo sapiens
atattgcagagaact

SEQ ID NO: 1401654 - DNA, 15 bp, Homo sapiens
aatattgcagagaac

SEQ ID NO: 1401655 - DNA, 15 bp, Homo sapiens
aaatattgcagagaa

SEQ ID NO: 1401656 - DNA, 15 bp, Homo sapiens
aaaatattgcagaga

SEQ ID NO: 1401657 - DNA, 15 bp, Homo sapiens
taaaatattgcagag

SEQ ID NO: 1401658 - DNA, 15 bp, Homo sapiens
ttaaaatattgcaga

SEQ ID NO: 1401659 - DNA, 15 bp, Homo sapiens
attaaaatattgcag

SEQ ID NO: 1401660 - DNA, 15 bp, Homo sapiens
aattaaaatattgca

SEQ ID NO: 1401661 - DNA, 15 bp, Homo sapiens
taattaaaatattgc

SEQ ID NO: 1401662 - DNA, 15 bp, Homo sapiens
caataattaaaatat

SEQ ID NO: 1401663 - DNA, 15 bp, Homo sapiens
acaataattaaaata

SEQ ID NO: 1401664 - DNA, 15 bp, Homo sapiens
gacaataattaaaat

SEQ ID NO: 1401665 - DNA, 15 bp, Homo sapiens
agacaataattaaaa

SEQ ID NO: 1401666 - DNA, 15 bp, Homo sapiens
aagacaataattaaa

SEQ ID NO: 1401667 - DNA, 15 bp, Homo sapiens
aaagacaataattaa

SEQ ID NO: 1401668 - DNA, 15 bp, Homo sapiens
aaaagacaataatta

SEQ ID NO: 1401669 - DNA, 15 bp, Homo sapiens
taaaagacaataatt

SEQ ID NO: 1401670 - DNA, 15 bp, Homo sapiens
ttaaaagacaataat

SEQ ID NO: 1401671 - DNA, 15 bp, Homo sapiens
tttaaaagacaataa

SEQ ID NO: 1401672 - DNA, 15 bp, Homo sapiens
atttaaaagacaata

SEQ ID NO: 1401673 - DNA, 15 bp, Homo sapiens
gatttaaaagacaat

SEQ ID NO: 1401674 - DNA, 15 bp, Homo sapiens
agatttaaaagacaa

SEQ ID NO: 1401675 - DNA, 15 bp, Homo sapiens
aagatttaaaagaca

SEQ ID NO: 1401676 - DNA, 15 bp, Homo sapiens
aaagatttaaaagac

SEQ ID NO: 1401677 - DNA, 15 bp, Homo sapiens
gaaagatttaaaaga

SEQ ID NO: 1401678 - DNA, 15 bp, Homo sapiens
tgaaagatttaaaag

SEQ ID NO: 1401679 - DNA, 15 bp, Homo sapiens
ttgaaagatttaaaa

SEQ ID NO: 1401680 - DNA, 15 bp, Homo sapiens
gttgaaagatttaaa

SEQ ID NO: 1401681 - DNA, 15 bp, Homo sapiens
tgttgaaagatttaa

SEQ ID NO: 1401682 - DNA, 15 bp, Homo sapiens
atgttgaaagattta

SEQ ID NO: 1401683 - DNA, 15 bp, Homo sapiens
tatgttgaaagattt

SEQ ID NO: 1401684 - DNA, 15 bp, Homo sapiens
ttatgttgaaagatt

SEQ ID NO: 1401685 - DNA, 15 bp, Homo sapiens
tttatgttgaaagat

SEQ ID NO: 1401686 - DNA, 15 bp, Homo sapiens
ttttatgttgaaaga

SEQ ID NO: 1401687 - DNA, 15 bp, Homo sapiens
tttttatgttgaaag

SEQ ID NO: 1401688 - DNA, 15 bp, Homo sapiens
ctttttatgttgaaa

SEQ ID NO: 1401689 - DNA, 15 bp, Homo sapiens
actttttatgttgaa

SEQ ID NO: 1401690 - DNA, 15 bp, Homo sapiens
tactttttatgttga

SEQ ID NO: 1401691 - DNA, 15 bp, Homo sapiens
ttactttttatgttg

SEQ ID NO: 1401692 - DNA, 15 bp, Homo sapiens
tttactttttatgtt

SEQ ID NO: 1401693 - DNA, 15 bp, Homo sapiens
ttttactttttatgt

SEQ ID NO: 1401694 - DNA, 15 bp, Homo sapiens
attttactttttatg

SEQ ID NO: 1401695 - DNA, 15 bp, Homo sapiens
aattttactttttat

SEQ ID NO: 1401696 - DNA, 15 bp, Homo sapiens
taattttacttttta

SEQ ID NO: 1401697 - DNA, 15 bp, Homo sapiens
ataattttacttttt

SEQ ID NO: 1401698 - DNA, 15 bp, Homo sapiens
tataattttactttt

SEQ ID NO: 1401699 - DNA, 15 bp, Homo sapiens
ctataattttacttt

SEQ ID NO: 1401700 - DNA, 15 bp, Homo sapiens
atgactataatttta

SEQ ID NO: 1401701 - DNA, 15 bp, Homo sapiens
aatgactataatttt

SEQ ID NO: 1401702 - DNA, 15 bp, Homo sapiens
taatgactataattt

SEQ ID NO: 1401703 - DNA, 15 bp, Homo sapiens
ataatgactataatt

SEQ ID NO: 1401704 - DNA, 15 bp, Homo sapiens
tataatgactataat

SEQ ID NO: 1401705 - DNA, 15 bp, Homo sapiens
ttataatgactataa

SEQ ID NO: 1401706 - DNA, 15 bp, Homo sapiens
tttataatgactata

SEQ ID NO: 1401707 - DNA, 15 bp, Homo sapiens
ctttataatgactat

SEQ ID NO: 1401708 - DNA, 15 bp, Homo sapiens
actttataatgacta

SEQ ID NO: 1401709 - DNA, 15 bp, Homo sapiens
gactttataatgact

SEQ ID NO: 1401710 - DNA, 15 bp, Homo sapiens
agactttataatgac

SEQ ID NO: 1401711 - DNA, 15 bp, Homo sapiens
tagactttataatga

SEQ ID NO: 1401712 - DNA, 15 bp, Homo sapiens
atagactttataatg

SEQ ID NO: 1401713 - DNA, 15 bp, Homo sapiens
aatagactttataat

SEQ ID NO: 1401714 - DNA, 15 bp, Homo sapiens
aaatagactttataa

SEQ ID NO: 1401715 - DNA, 15 bp, Homo sapiens
aaaatagactttata

SEQ ID NO: 1401716 - DNA, 15 bp, Homo sapiens
caaaatagactttat

SEQ ID NO: 1401717 - DNA, 15 bp, Homo sapiens
tcaaaatagacttta

SEQ ID NO: 1401718 - DNA, 15 bp, Homo sapiens
atcaaaatagacttt

SEQ ID NO: 1401719 - DNA, 15 bp, Homo sapiens
tatcaaaatagactt

SEQ ID NO: 1401720 - DNA, 15 bp, Homo sapiens
atatcaaaatagact

SEQ ID NO: 1401721 - DNA, 15 bp, Homo sapiens
gatatcaaaatagac

SEQ ID NO: 1401722 - DNA, 15 bp, Homo sapiens
agatatcaaaataga

SEQ ID NO: 1401723 - DNA, 15 bp, Homo sapiens
aagatatcaaaatag

SEQ ID NO: 1401724 - DNA, 15 bp, Homo sapiens
gaagatatcaaaata

SEQ ID NO: 1401725 - DNA, 15 bp, Homo sapiens
tgaagatatcaaaat

SEQ ID NO: 1401726 - DNA, 15 bp, Homo sapiens
gtgaagatatcaaaa

SEQ ID NO: 1401727 - DNA, 15 bp, Homo sapiens
agtgaagatatcaaa

SEQ ID NO: 1401728 - DNA, 15 bp, Homo sapiens
tagtgaagatatcaa

SEQ ID NO: 1401729 - DNA, 15 bp, Homo sapiens
atagtgaagatatca

SEQ ID NO: 1401730 - DNA, 15 bp, Homo sapiens
aatagtgaagatatc

SEQ ID NO: 1401731 - DNA, 15 bp, Homo sapiens
aaatagtgaagatat

SEQ ID NO: 1401732 - DNA, 15 bp, Homo sapiens
caaatagtgaagata

SEQ ID NO: 1401733 - DNA, 15 bp, Homo sapiens
tcaaatagtgaagat

SEQ ID NO: 1401734 - DNA, 15 bp, Homo sapiens
ttcaaatagtgaaga

SEQ ID NO: 1401735 - DNA, 15 bp, Homo sapiens
cttcaaatagtgaag

SEQ ID NO: 1401736 - DNA, 15 bp, Homo sapiens
gcttcaaatagtgaa

SEQ ID NO: 1401737 - DNA, 15 bp, Homo sapiens
ggcttcaaatagtga

SEQ ID NO: 1401738 - DNA, 15 bp, Homo sapiens
gggcttcaaatagtg

SEQ ID NO: 1401739 - DNA, 15 bp, Homo sapiens
tgggcttcaaatagt

SEQ ID NO: 1401740 - DNA, 15 bp, Homo sapiens
atgggcttcaaatag

SEQ ID NO: 1401741 - DNA, 15 bp, Homo sapiens
tatgggcttcaaata

SEQ ID NO: 1401742 - DNA, 15 bp, Homo sapiens
atatgggcttcaaat

SEQ ID NO: 1401743 - DNA, 15 bp, Homo sapiens
tatatgggcttcaaa

SEQ ID NO: 1401744 - DNA, 15 bp, Homo sapiens
atatatgggcttcaa

SEQ ID NO: 1401745 - DNA, 15 bp, Homo sapiens
tatatatgggcttca

SEQ ID NO: 1401746 - DNA, 15 bp, Homo sapiens
gtatatatgggcttc

SEQ ID NO: 1401747 - DNA, 15 bp, Homo sapiens
ggtatatatgggctt

SEQ ID NO: 1401748 - DNA, 15 bp, Homo sapiens
aggtatatatgggct

SEQ ID NO: 1401749 - DNA, 15 bp, Homo sapiens
caggtatatatgggc

SEQ ID NO: 1401750 - DNA, 15 bp, Homo sapiens
acaggtatatatggg

SEQ ID NO: 1401751 - DNA, 15 bp, Homo sapiens
aacaggtatatatgg

SEQ ID NO: 1401752 - DNA, 15 bp, Homo sapiens
gaacaggtatatatg

SEQ ID NO: 1401753 - DNA, 15 bp, Homo sapiens
agaacaggtatatat

SEQ ID NO: 1401754 - DNA, 15 bp, Homo sapiens
cagaacaggtatata

SEQ ID NO: 1401755 - DNA, 15 bp, Homo sapiens
acagaacaggtatat

SEQ ID NO: 1401756 - DNA, 15 bp, Homo sapiens
aacagaacaggtata

SEQ ID NO: 1401757 - DNA, 15 bp, Homo sapiens
aaacagaacaggtat

SEQ ID NO: 1401758 - DNA, 15 bp, Homo sapiens
aaaacagaacaggta

SEQ ID NO: 1401759 - DNA, 15 bp, Homo sapiens
aaaaacagaacaggt

SEQ ID NO: 1401760 - DNA, 15 bp, Homo sapiens
caaaaacagaacagg

SEQ ID NO: 1401761 - DNA, 15 bp, Homo sapiens
acaaaaacagaacag

SEQ ID NO: 1401762 - DNA, 15 bp, Homo sapiens
aacaaaaacagaaca

SEQ ID NO: 1401763 - DNA, 15 bp, Homo sapiens
aaacaaaaacagaac

SEQ ID NO: 1401764 - DNA, 15 bp, Homo sapiens
aaaacaaaaacagaa

SEQ ID NO: 1401765 - DNA, 15 bp, Homo sapiens
gaaaacaaaaacaga

SEQ ID NO: 1401766 - DNA, 15 bp, Homo sapiens
agaaaacaaaaacag

SEQ ID NO: 1401767 - DNA, 15 bp, Homo sapiens
gagaaaacaaaaaca

SEQ ID NO: 1401768 - DNA, 15 bp, Homo sapiens
agagaaaacaaaaac

SEQ ID NO: 1401769 - DNA, 15 bp, Homo sapiens
aagagaaaacaaaaa

SEQ ID NO: 1401770 - DNA, 15 bp, Homo sapiens
caagagaaaacaaaa

SEQ ID NO: 1401771 - DNA, 15 bp, Homo sapiens
acaagagaaaacaaa

SEQ ID NO: 1401772 - DNA, 15 bp, Homo sapiens
aacaagagaaaacaa

SEQ ID NO: 1401773 - DNA, 15 bp, Homo sapiens
aaacaagagaaaaca

SEQ ID NO: 1401774 - DNA, 15 bp, Homo sapiens
caaacaagagaaaac

SEQ ID NO: 1401775 - DNA, 15 bp, Homo sapiens
gcaaacaagagaaaa

SEQ ID NO: 1401776 - DNA, 15 bp, Homo sapiens
agcaaacaagagaaa

SEQ ID NO: 1401777 - DNA, 15 bp, Homo sapiens
aagcaaacaagagaa

SEQ ID NO: 1401778 - DNA, 15 bp, Homo sapiens
aaagcaaacaagaga

SEQ ID NO: 1401779 - DNA, 15 bp, Homo sapiens
gaaagcaaacaagag

SEQ ID NO: 1401780 - DNA, 15 bp, Homo sapiens
tgaaagcaaacaaga

SEQ ID NO: 1401781 - DNA, 15 bp, Homo sapiens
atgaaagcaaacaag

SEQ ID NO: 1401782 - DNA, 15 bp, Homo sapiens
catgaaagcaaacaa

SEQ ID NO: 1401783 - DNA, 15 bp, Homo sapiens
acatgaaagcaaaca

SEQ ID NO: 1401784 - DNA, 15 bp, Homo sapiens
aacatgaaagcaaac

SEQ ID NO: 1401785 - DNA, 15 bp, Homo sapiens
caacatgaaagcaaa

SEQ ID NO: 1401786 - DNA, 15 bp, Homo sapiens
acaacatgaaagcaa

SEQ ID NO: 1401787 - DNA, 15 bp, Homo sapiens
gacaacatgaaagca

SEQ ID NO: 1401788 - DNA, 15 bp, Homo sapiens
agacaacatgaaagc

SEQ ID NO: 1401789 - DNA, 15 bp, Homo sapiens
aagacaacatgaaag

SEQ ID NO: 1401790 - DNA, 15 bp, Homo sapiens
taagacaacatgaaa

SEQ ID NO: 1401791 - DNA, 15 bp, Homo sapiens
ataagacaacatgaa

SEQ ID NO: 1401792 - DNA, 15 bp, Homo sapiens
tataagacaacatga

SEQ ID NO: 1401793 - DNA, 15 bp, Homo sapiens
ttataagacaacatg

SEQ ID NO: 1401794 - DNA, 15 bp, Homo sapiens
attataagacaacat

SEQ ID NO: 1401795 - DNA, 15 bp, Homo sapiens
tattataagacaaca

SEQ ID NO: 1401796 - DNA, 15 bp, Homo sapiens
atattataagacaac

SEQ ID NO: 1401797 - DNA, 15 bp, Homo sapiens
gatattataagacaa

SEQ ID NO: 1401798 - DNA, 15 bp, Homo sapiens
agatattataagaca

SEQ ID NO: 1401799 - DNA, 15 bp, Homo sapiens
cagatattataagac

SEQ ID NO: 1401800 - DNA, 15 bp, Homo sapiens
ccagatattataaga

SEQ ID NO: 1401801 - DNA, 15 bp, Homo sapiens
gccagatattataag

SEQ ID NO: 1401802 - DNA, 15 bp, Homo sapiens
agccagatattataa

SEQ ID NO: 1401803 - DNA, 15 bp, Homo sapiens
tagccagatattata

SEQ ID NO: 1401804 - DNA, 15 bp, Homo sapiens
atagccagatattat

SEQ ID NO: 1401805 - DNA, 15 bp, Homo sapiens
catagccagatatta

SEQ ID NO: 1401806 - DNA, 15 bp, Homo sapiens
acatagccagatatt

SEQ ID NO: 1401807 - DNA, 15 bp, Homo sapiens
aacatagccagatat

SEQ ID NO: 1401808 - DNA, 15 bp, Homo sapiens
aaacatagccagata

SEQ ID NO: 1401809 - DNA, 15 bp, Homo sapiens
aaaacatagccagat

SEQ ID NO: 1401810 - DNA, 15 bp, Homo sapiens
taaaacatagccaga

SEQ ID NO: 1401811 - DNA, 15 bp, Homo sapiens
ataaaacatagccag

SEQ ID NO: 1401812 - DNA, 15 bp, Homo sapiens
aataaaacatagcca

SEQ ID NO: 1401813 - DNA, 15 bp, Homo sapiens
taataaaacatagcc

SEQ ID NO: 1401814 - DNA, 15 bp, Homo sapiens
ctaataaaacatagc

SEQ ID NO: 1401815 - DNA, 15 bp, Homo sapiens
cctaataaaacatag

SEQ ID NO: 1401816 - DNA, 15 bp, Homo sapiens
acctaataaaacata

SEQ ID NO: 1401817 - DNA, 15 bp, Homo sapiens
aacctaataaaacat

SEQ ID NO: 1401818 - DNA, 15 bp, Homo sapiens
aaacctaataaaaca

SEQ ID NO: 1401819 - DNA, 15 bp, Homo sapiens
gaaacctaataaaac

SEQ ID NO: 1401820 - DNA, 15 bp, Homo sapiens
agaaacctaataaaa

SEQ ID NO: 1401821 - DNA, 15 bp, Homo sapiens
cagaaacctaataaa

SEQ ID NO: 1401822 - DNA, 15 bp, Homo sapiens
tcagaaacctaataa

SEQ ID NO: 1401823 - DNA, 15 bp, Homo sapiens
atcagaaacctaata

SEQ ID NO: 1401824 - DNA, 15 bp, Homo sapiens
tatcagaaacctaat

SEQ ID NO: 1401825 - DNA, 15 bp, Homo sapiens
atatcagaaacctaa

SEQ ID NO: 1401826 - DNA, 15 bp, Homo sapiens
aatatcagaaaccta

SEQ ID NO: 1401827 - DNA, 15 bp, Homo sapiens
taatatcagaaacct

SEQ ID NO: 1401828 - DNA, 15 bp, Homo sapiens
ataatatcagaaacc

SEQ ID NO: 1401829 - DNA, 15 bp, Homo sapiens
tataatatcagaaac

SEQ ID NO: 1401830 - DNA, 15 bp, Homo sapiens
atataatatcagaaa

SEQ ID NO: 1401831 - DNA, 15 bp, Homo sapiens
aatataatatcagaa

SEQ ID NO: 1401832 - DNA, 15 bp, Homo sapiens
aaatataatatcaga

SEQ ID NO: 1401833 - DNA, 15 bp, Homo sapiens
caaatataatatcag

SEQ ID NO: 1401834 - DNA, 15 bp, Homo sapiens
gcaaatataatatca

SEQ ID NO: 1401835 - DNA, 15 bp, Homo sapiens
tgcaaatataatatc

SEQ ID NO: 1401836 - DNA, 15 bp, Homo sapiens
ttgcaaatataatat

SEQ ID NO: 1401837 - DNA, 15 bp, Homo sapiens
tttgcaaatataata

SEQ ID NO: 1401838 - DNA, 15 bp, Homo sapiens
ttttgcaaatataat

SEQ ID NO: 1401839 - DNA, 15 bp, Homo sapiens
attttgcaaatataa

SEQ ID NO: 1401840 - DNA, 15 bp, Homo sapiens
aattttgcaaatata

SEQ ID NO: 1401841 - DNA, 15 bp, Homo sapiens
aaattttgcaaatat

SEQ ID NO: 1401842 - DNA, 15 bp, Homo sapiens
aaaattttgcaaata

SEQ ID NO: 1401843 - DNA, 15 bp, Homo sapiens
aaaaattttgcaaat

SEQ ID NO: 1401844 - DNA, 15 bp, Homo sapiens
taaaaattttgcaaa

SEQ ID NO: 1401845 - DNA, 15 bp, Homo sapiens
ataaaaattttgcaa

SEQ ID NO: 1401846 - DNA, 15 bp, Homo sapiens
tataaaaattttgca

SEQ ID NO: 1401847 - DNA, 15 bp, Homo sapiens
ttataaaaattttgc

SEQ ID NO: 1401848 - DNA, 15 bp, Homo sapiens
tttataaaaattttg

SEQ ID NO: 1401849 - DNA, 15 bp, Homo sapiens
ttttataaaaatttt

SEQ ID NO: 1401850 - DNA, 15 bp, Homo sapiens
tttttataaaaattt

SEQ ID NO: 1401851 - DNA, 15 bp, Homo sapiens
ttttttataaaaatt

SEQ ID NO: 1401852 - DNA, 15 bp, Homo sapiens
attttttataaaaat

SEQ ID NO: 1401853 - DNA, 15 bp, Homo sapiens
tattttttataaaaa

SEQ ID NO: 1401854 - DNA, 15 bp, Homo sapiens
ttattttttataaaa

SEQ ID NO: 1401855 - DNA, 15 bp, Homo sapiens
gttattttttataaa

SEQ ID NO: 1401856 - DNA, 15 bp, Homo sapiens
agttattttttataa

SEQ ID NO: 1401857 - DNA, 15 bp, Homo sapiens
aagttattttttata

SEQ ID NO: 1401858 - DNA, 15 bp, Homo sapiens
gaagttattttttat

SEQ ID NO: 1401859 - DNA, 15 bp, Homo sapiens
tgaagttatttttta

SEQ ID NO: 1401860 - DNA, 15 bp, Homo sapiens
ttgaagttatttttt

SEQ ID NO: 1401861 - DNA, 15 bp, Homo sapiens
attgaagttattttt

SEQ ID NO: 1401862 - DNA, 15 bp, Homo sapiens
tattgaagttatttt

SEQ ID NO: 1401863 - DNA, 15 bp, Homo sapiens
gtattgaagttattt

SEQ ID NO: 1401864 - DNA, 15 bp, Homo sapiens
agtattgaagttatt

SEQ ID NO: 1401865 - DNA, 15 bp, Homo sapiens
tagtattgaagttat

SEQ ID NO: 1401866 - DNA, 15 bp, Homo sapiens
ctagtattgaagtta

SEQ ID NO: 1401867 - DNA, 15 bp, Homo sapiens
cctagtattgaagtt

SEQ ID NO: 1401868 - DNA, 15 bp, Homo sapiens
tcctagtattgaagt

SEQ ID NO: 1401869 - DNA, 15 bp, Homo sapiens
atcctagtattgaag

SEQ ID NO: 1401870 - DNA, 15 bp, Homo sapiens
tatcctagtattgaa

SEQ ID NO: 1401871 - DNA, 15 bp, Homo sapiens
ttatcctagtattga

SEQ ID NO: 1401872 - DNA, 15 bp, Homo sapiens
attatcctagtattg

SEQ ID NO: 1401873 - DNA, 15 bp, Homo sapiens
cattatcctagtatt

SEQ ID NO: 1401874 - DNA, 15 bp, Homo sapiens
acattatcctagtat

SEQ ID NO: 1401875 - DNA, 15 bp, Homo sapiens
aacattatcctagta

SEQ ID NO: 1401876 - DNA, 15 bp, Homo sapiens
taacattatcctagt

SEQ ID NO: 1401877 - DNA, 15 bp, Homo sapiens
gtaacattatcctag

SEQ ID NO: 1401878 - DNA, 15 bp, Homo sapiens
tgtaacattatccta

SEQ ID NO: 1401879 - DNA, 15 bp, Homo sapiens
ttgtaacattatcct

SEQ ID NO: 1401880 - DNA, 15 bp, Homo sapiens
attgtaacattatcc

SEQ ID NO: 1401881 - DNA, 15 bp, Homo sapiens
cattgtaacattatc

SEQ ID NO: 1401882 - DNA, 15 bp, Homo sapiens
acattgtaacattat

SEQ ID NO: 1401883 - DNA, 15 bp, Homo sapiens
gacattgtaacatta

SEQ ID NO: 1401884 - DNA, 15 bp, Homo sapiens
tgacattgtaacatt

SEQ ID NO: 1401885 - DNA, 15 bp, Homo sapiens
atgacattgtaacat

SEQ ID NO: 1401886 - DNA, 15 bp, Homo sapiens
gatgacattgtaaca

SEQ ID NO: 1401887 - DNA, 15 bp, Homo sapiens
agatgacattgtaac

SEQ ID NO: 1401888 - DNA, 15 bp, Homo sapiens
aagatgacattgtaa

SEQ ID NO: 1401889 - DNA, 15 bp, Homo sapiens
aaagatgacattgta

SEQ ID NO: 1401890 - DNA, 15 bp, Homo sapiens
aaaagatgacattgt

SEQ ID NO: 1401891 - DNA, 15 bp, Homo sapiens
gaaaagatgacattg

SEQ ID NO: 1401892 - DNA, 15 bp, Homo sapiens
ggaaaagatgacatt

SEQ ID NO: 1401893 - DNA, 15 bp, Homo sapiens
tggaaaagatgacat

SEQ ID NO: 1401894 - DNA, 15 bp, Homo sapiens
ttggaaaagatgaca

SEQ ID NO: 1401895 - DNA, 15 bp, Homo sapiens
tttggaaaagatgac

SEQ ID NO: 1401896 - DNA, 15 bp, Homo sapiens
ttttggaaaagatga

SEQ ID NO: 1401897 - DNA, 15 bp, Homo sapiens
tttttggaaaagatg

SEQ ID NO: 1401898 - DNA, 15 bp, Homo sapiens
atttttggaaaagat

SEQ ID NO: 1401899 - DNA, 15 bp, Homo sapiens
aatttttggaaaaga

SEQ ID NO: 1401900 - DNA, 15 bp, Homo sapiens
taatttttggaaaag

SEQ ID NO: 1401901 - DNA, 15 bp, Homo sapiens
ataatttttggaaaa

SEQ ID NO: 1401902 - DNA, 15 bp, Homo sapiens
aataatttttggaaa

SEQ ID NO: 1401903 - DNA, 15 bp, Homo sapiens
aaataatttttggaa

SEQ ID NO: 1401904 - DNA, 15 bp, Homo sapiens
gaaataatttttgga

SEQ ID NO: 1401905 - DNA, 15 bp, Homo sapiens
ggaaataatttttgg

SEQ ID NO: 1401906 - DNA, 15 bp, Homo sapiens
tggaaataatttttg

SEQ ID NO: 1401907 - DNA, 15 bp, Homo sapiens
gtggaaataattttt

SEQ ID NO: 1401908 - DNA, 15 bp, Homo sapiens
agtggaaataatttt

SEQ ID NO: 1401909 - DNA, 15 bp, Homo sapiens
aagtggaaataattt

SEQ ID NO: 1401910 - DNA, 15 bp, Homo sapiens
taagtggaaataatt

SEQ ID NO: 1401911 - DNA, 15 bp, Homo sapiens
gtaagtggaaataat

SEQ ID NO: 1401912 - DNA, 15 bp, Homo sapiens
agtaagtggaaataa

SEQ ID NO: 1401913 - DNA, 15 bp, Homo sapiens
aagtaagtggaaata

SEQ ID NO: 1401914 - DNA, 15 bp, Homo sapiens
gaagtaagtggaaat

SEQ ID NO: 1401915 - DNA, 15 bp, Homo sapiens
agaagtaagtggaaa

SEQ ID NO: 1401916 - DNA, 15 bp, Homo sapiens
cagaagtaagtggaa

SEQ ID NO: 1401917 - DNA, 15 bp, Homo sapiens
gcagaagtaagtgga

SEQ ID NO: 1401918 - DNA, 15 bp, Homo sapiens
ggcagaagtaagtgg

SEQ ID NO: 1401919 - DNA, 15 bp, Homo sapiens
tggcagaagtaagtg

SEQ ID NO: 1401920 - DNA, 15 bp, Homo sapiens
ctggcagaagtaagt

SEQ ID NO: 1401921 - DNA, 15 bp, Homo sapiens
cctggcagaagtaag

SEQ ID NO: 1401922 - DNA, 15 bp, Homo sapiens
acctggcagaagtaa

SEQ ID NO: 1401923 - DNA, 15 bp, Homo sapiens
tacctggcagaagta

SEQ ID NO: 1401924 - DNA, 15 bp, Homo sapiens
gtacctggcagaagt

SEQ ID NO: 1401925 - DNA, 15 bp, Homo sapiens
tgtacctggcagaag

SEQ ID NO: 1401926 - DNA, 15 bp, Homo sapiens
ttgtacctggcagaa

SEQ ID NO: 1401927 - DNA, 15 bp, Homo sapiens
cttgtacctggcaga

SEQ ID NO: 1401928 - DNA, 15 bp, Homo sapiens
gcttgtacctggcag

SEQ ID NO: 1401929 - DNA, 15 bp, Homo sapiens
ggcttgtacctggca

SEQ ID NO: 1401930 - DNA, 15 bp, Homo sapiens
tggcttgtacctggc

SEQ ID NO: 1401931 - DNA, 15 bp, Homo sapiens
atggcttgtacctgg

SEQ ID NO: 1401932 - DNA, 15 bp, Homo sapiens
aatggcttgtacctg

SEQ ID NO: 1401933 - DNA, 15 bp, Homo sapiens
gaatggcttgtacct

SEQ ID NO: 1401934 - DNA, 15 bp, Homo sapiens
tgaatggcttgtacc

SEQ ID NO: 1401935 - DNA, 15 bp, Homo sapiens
ctgaatggcttgtac

SEQ ID NO: 1401936 - DNA, 15 bp, Homo sapiens
cctgaatggcttgta

SEQ ID NO: 1401937 - DNA, 15 bp, Homo sapiens
tcctgaatggcttgt

SEQ ID NO: 1401938 - DNA, 15 bp, Homo sapiens
atcctgaatggcttg

SEQ ID NO: 1401939 - DNA, 15 bp, Homo sapiens
gatcctgaatggctt

SEQ ID NO: 1401940 - DNA, 15 bp, Homo sapiens
tgatcctgaatggct

SEQ ID NO: 1401941 - DNA, 15 bp, Homo sapiens
gtgatcctgaatggc

SEQ ID NO: 1401942 - DNA, 15 bp, Homo sapiens
ggtgatcctgaatgg

SEQ ID NO: 1401943 - DNA, 15 bp, Homo sapiens
aggtgatcctgaatg

SEQ ID NO: 1401944 - DNA, 15 bp, Homo sapiens
gaggtgatcctgaat

SEQ ID NO: 1401945 - DNA, 15 bp, Homo sapiens
tgaggtgatcctgaa

SEQ ID NO: 1401946 - DNA, 15 bp, Homo sapiens
atgaggtgatcctga

SEQ ID NO: 1401947 - DNA, 15 bp, Homo sapiens
aatgaggtgatcctg

SEQ ID NO: 1401948 - DNA, 15 bp, Homo sapiens
gaatgaggtgatcct

SEQ ID NO: 1401949 - DNA, 15 bp, Homo sapiens
agaatgaggtgatcc

SEQ ID NO: 1401950 - DNA, 15 bp, Homo sapiens
cagaatgaggtgatc

SEQ ID NO: 1401951 - DNA, 15 bp, Homo sapiens
tcagaatgaggtgat

SEQ ID NO: 1401952 - DNA, 15 bp, Homo sapiens
gtcagaatgaggtga

SEQ ID NO: 1401953 - DNA, 15 bp, Homo sapiens
agtcagaatgaggtg

SEQ ID NO: 1401954 - DNA, 15 bp, Homo sapiens
aagtcagaatgaggt

SEQ ID NO: 1401955 - DNA, 15 bp, Homo sapiens
gaagtcagaatgagg

SEQ ID NO: 1401956 - DNA, 15 bp, Homo sapiens
tgaagtcagaatgag

SEQ ID NO: 1401957 - DNA, 15 bp, Homo sapiens
atgaagtcagaatga

SEQ ID NO: 1401958 - DNA, 15 bp, Homo sapiens
tatgaagtcagaatg

SEQ ID NO: 1401959 - DNA, 15 bp, Homo sapiens
ttatgaagtcagaat

SEQ ID NO: 1401960 - DNA, 15 bp, Homo sapiens
tttatgaagtcagaa

SEQ ID NO: 1401961 - DNA, 15 bp, Homo sapiens
gtttatgaagtcaga

SEQ ID NO: 1401962 - DNA, 15 bp, Homo sapiens
agtttatgaagtcag

SEQ ID NO: 1401963 - DNA, 15 bp, Homo sapiens
cagtttatgaagtca

SEQ ID NO: 1401964 - DNA, 15 bp, Homo sapiens
acagtttatgaagtc

SEQ ID NO: 1401965 - DNA, 15 bp, Homo sapiens
cacagtttatgaagt

SEQ ID NO: 1401966 - DNA, 15 bp, Homo sapiens
tcacagtttatgaag

SEQ ID NO: 1401967 - DNA, 15 bp, Homo sapiens
atcacagtttatgaa

SEQ ID NO: 1401968 - DNA, 15 bp, Homo sapiens
tatcacagtttatga

SEQ ID NO: 1401969 - DNA, 15 bp, Homo sapiens
atatcacagtttatg

SEQ ID NO: 1401970 - DNA, 15 bp, Homo sapiens
aatatcacagtttat

SEQ ID NO: 1401971 - DNA, 15 bp, Homo sapiens
gaatatcacagttta

SEQ ID NO: 1401972 - DNA, 15 bp, Homo sapiens
tgaatatcacagttt

SEQ ID NO: 1401973 - DNA, 15 bp, Homo sapiens
ttgaatatcacagtt

SEQ ID NO: 1401974 - DNA, 15 bp, Homo sapiens
tttgaatatcacagt

SEQ ID NO: 1401975 - DNA, 15 bp, Homo sapiens
atttgaatatcacag

SEQ ID NO: 1401976 - DNA, 15 bp, Homo sapiens
gatttgaatatcaca

SEQ ID NO: 1401977 - DNA, 15 bp, Homo sapiens
agatttgaatatcac

SEQ ID NO: 1401978 - DNA, 15 bp, Homo sapiens
cagatttgaatatca

SEQ ID NO: 1401979 - DNA, 15 bp, Homo sapiens
tcagatttgaatatc

SEQ ID NO: 1401980 - DNA, 15 bp, Homo sapiens
ttcagatttgaatat

SEQ ID NO: 1401981 - DNA, 15 bp, Homo sapiens
gttcagatttgaata

SEQ ID NO: 1401982 - DNA, 15 bp, Homo sapiens
agttcagatttgaat

SEQ ID NO: 1401983 - DNA, 15 bp, Homo sapiens
cagttcagatttgaa

SEQ ID NO: 1401984 - DNA, 15 bp, Homo sapiens
tcagttcagatttga

SEQ ID NO: 1401985 - DNA, 15 bp, Homo sapiens
ttcagttcagatttg

SEQ ID NO: 1401986 - DNA, 15 bp, Homo sapiens
cttcagttcagattt

SEQ ID NO: 1401987 - DNA, 15 bp, Homo sapiens
acttcagttcagatt

SEQ ID NO: 1401988 - DNA, 15 bp, Homo sapiens
gacttcagttcagat

SEQ ID NO: 1401989 - DNA, 15 bp, Homo sapiens
ggacttcagttcaga

SEQ ID NO: 1401990 - DNA, 15 bp, Homo sapiens
gggacttcagttcag

SEQ ID NO: 1401991 - DNA, 15 bp, Homo sapiens
agggacttcagttca

SEQ ID NO: 1401992 - DNA, 15 bp, Homo sapiens
tagggacttcagttc

SEQ ID NO: 1401993 - DNA, 15 bp, Homo sapiens
atagggacttcagtt

SEQ ID NO: 1401994 - DNA, 15 bp, Homo sapiens
catagggacttcagt

SEQ ID NO: 1401995 - DNA, 15 bp, Homo sapiens
tcatagggacttcag

SEQ ID NO: 1401996 - DNA, 15 bp, Homo sapiens
ctcatagggacttca

SEQ ID NO: 1401997 - DNA, 15 bp, Homo sapiens
cctcatagggacttc

SEQ ID NO: 1401998 - DNA, 15 bp, Homo sapiens
tcctcatagggactt

SEQ ID NO: 1401999 - DNA, 15 bp, Homo sapiens
gtcctcatagggact

SEQ ID NO: 1402000 - DNA, 15 bp, Homo sapiens
ggtcctcatagggac

SEQ ID NO: 1402001 - DNA, 15 bp, Homo sapiens
aggtcctcataggga

SEQ ID NO: 1402002 - DNA, 15 bp, Homo sapiens
taggtcctcataggg

SEQ ID NO: 1402003 - DNA, 15 bp, Homo sapiens
ataggtcctcatagg

SEQ ID NO: 1402004 - DNA, 15 bp, Homo sapiens
gataggtcctcatag

SEQ ID NO: 1402005 - DNA, 15 bp, Homo sapiens
agataggtcctcata

SEQ ID NO: 1402006 - DNA, 15 bp, Homo sapiens
tagataggtcctcat

SEQ ID NO: 1402007 - DNA, 15 bp, Homo sapiens
atagataggtcctca

SEQ ID NO: 1402008 - DNA, 15 bp, Homo sapiens
aatagataggtcctc

SEQ ID NO: 1402009 - DNA, 15 bp, Homo sapiens
aaatagataggtcct

SEQ ID NO: 1402010 - DNA, 15 bp, Homo sapiens
gaaatagataggtcc

SEQ ID NO: 1402011 - DNA, 15 bp, Homo sapiens
tgaaatagataggtc

SEQ ID NO: 1402012 - DNA, 15 bp, Homo sapiens
ctgaaatagataggt

SEQ ID NO: 1402013 - DNA, 15 bp, Homo sapiens
cctgaaatagatagg

SEQ ID NO: 1402014 - DNA, 15 bp, Homo sapiens
gcctgaaatagatag

SEQ ID NO: 1402015 - DNA, 15 bp, Homo sapiens
agcctgaaatagata

SEQ ID NO: 1402016 - DNA, 15 bp, Homo sapiens
cagcctgaaatagat

SEQ ID NO: 1402017 - DNA, 15 bp, Homo sapiens
tcagcctgaaataga

SEQ ID NO: 1402018 - DNA, 15 bp, Homo sapiens
gtcagcctgaaatag

SEQ ID NO: 1402019 - DNA, 15 bp, Homo sapiens
agtcagcctgaaata

SEQ ID NO: 1402020 - DNA, 15 bp, Homo sapiens
tagtcagcctgaaat

SEQ ID NO: 1402021 - DNA, 15 bp, Homo sapiens
atagtcagcctgaaa

SEQ ID NO: 1402022 - DNA, 15 bp, Homo sapiens
aatagtcagcctgaa

SEQ ID NO: 1402023 - DNA, 15 bp, Homo sapiens
gaatagtcagcctga

SEQ ID NO: 1402024 - DNA, 15 bp, Homo sapiens
agaatagtcagcctg

SEQ ID NO: 1402025 - DNA, 15 bp, Homo sapiens
gagaatagtcagcct

SEQ ID NO: 1402026 - DNA, 15 bp, Homo sapiens
ggagaatagtcagcc

SEQ ID NO: 1402027 - DNA, 15 bp, Homo sapiens
gggagaatagtcagc

SEQ ID NO: 1402028 - DNA, 15 bp, Homo sapiens
tgggagaatagtcag

SEQ ID NO: 1402029 - DNA, 15 bp, Homo sapiens
ctgggagaatagtca

SEQ ID NO: 1402030 - DNA, 15 bp, Homo sapiens
cctgggagaatagtc

SEQ ID NO: 1402031 - DNA, 15 bp, Homo sapiens
tcctgggagaatagt

SEQ ID NO: 1402032 - DNA, 15 bp, Homo sapiens
atcctgggagaatag

SEQ ID NO: 1402033 - DNA, 15 bp, Homo sapiens
catcctgggagaata

SEQ ID NO: 1402034 - DNA, 15 bp, Homo sapiens
gcatcctgggagaat

SEQ ID NO: 1402035 - DNA, 15 bp, Homo sapiens
tgcatcctgggagaa

SEQ ID NO: 1402036 - DNA, 15 bp, Homo sapiens
ctgcatcctgggaga

SEQ ID NO: 1402037 - DNA, 15 bp, Homo sapiens
gctgcatcctgggag

SEQ ID NO: 1402038 - DNA, 15 bp, Homo sapiens
ggctgcatcctggga

SEQ ID NO: 1402039 - DNA, 15 bp, Homo sapiens
gggctgcatcctggg

SEQ ID NO: 1402040 - DNA, 15 bp, Homo sapiens
agggctgcatcctgg

SEQ ID NO: 1402041 - DNA, 15 bp, Homo sapiens
aagggctgcatcctg

SEQ ID NO: 1402042 - DNA, 15 bp, Homo sapiens
gaagggctgcatcct

SEQ ID NO: 1402043 - DNA, 15 bp, Homo sapiens
tgaagggctgcatcc

SEQ ID NO: 1402044 - DNA, 15 bp, Homo sapiens
ctgaagggctgcatc

SEQ ID NO: 1402045 - DNA, 15 bp, Homo sapiens
tctgaagggctgcat

SEQ ID NO: 1402046 - DNA, 15 bp, Homo sapiens
ttctgaagggctgca

SEQ ID NO: 1402047 - DNA, 15 bp, Homo sapiens
attctgaagggctgc

SEQ ID NO: 1402048 - DNA, 15 bp, Homo sapiens
gattctgaagggctg

SEQ ID NO: 1402049 - DNA, 15 bp, Homo sapiens
ggattctgaagggct

SEQ ID NO: 1402050 - DNA, 15 bp, Homo sapiens
gggattctgaagggc

SEQ ID NO: 1402051 - DNA, 15 bp, Homo sapiens
tgggattctgaaggg

SEQ ID NO: 1402052 - DNA, 15 bp, Homo sapiens
ttgggattctgaagg

SEQ ID NO: 1402053 - DNA, 15 bp, Homo sapiens
gttgggattctgaag

SEQ ID NO: 1402054 - DNA, 15 bp, Homo sapiens
ggttgggattctgaa

SEQ ID NO: 1402055 - DNA, 15 bp, Homo sapiens
gggttgggattctga

SEQ ID NO: 1402056 - DNA, 15 bp, Homo sapiens
tgggttgggattctg

SEQ ID NO: 1402057 - DNA, 15 bp, Homo sapiens
ttgggttgggattct

SEQ ID NO: 1402058 - DNA, 15 bp, Homo sapiens
tttgggttgggattc

SEQ ID NO: 1402059 - DNA, 15 bp, Homo sapiens
ctttgggttgggatt

SEQ ID NO: 1402060 - DNA, 15 bp, Homo sapiens
actttgggttgggat

SEQ ID NO: 1402061 - DNA, 15 bp, Homo sapiens
cactttgggttggga

SEQ ID NO: 1402062 - DNA, 15 bp, Homo sapiens
tcactttgggttggg

SEQ ID NO: 1402063 - DNA, 15 bp, Homo sapiens
ttcactttgggttgg

SEQ ID NO: 1402064 - DNA, 15 bp, Homo sapiens
attcactttgggttg

SEQ ID NO: 1402065 - DNA, 15 bp, Homo sapiens
tattcactttgggtt

SEQ ID NO: 1402066 - DNA, 15 bp, Homo sapiens
ctattcactttgggt

SEQ ID NO: 1402067 - DNA, 15 bp, Homo sapiens
cctattcactttggg

SEQ ID NO: 1402068 - DNA, 15 bp, Homo sapiens
ccctattcactttgg

SEQ ID NO: 1402069 - DNA, 15 bp, Homo sapiens
cccctattcactttg

SEQ ID NO: 1402070 - DNA, 15 bp, Homo sapiens
tcccctattcacttt

SEQ ID NO: 1402071 - DNA, 15 bp, Homo sapiens
ttcccctattcactt

SEQ ID NO: 1402072 - DNA, 15 bp, Homo sapiens
attcccctattcact

SEQ ID NO: 1402073 - DNA, 15 bp, Homo sapiens
aattcccctattcac

SEQ ID NO: 1402074 - DNA, 15 bp, Homo sapiens
taattcccctattca

SEQ ID NO: 1402075 - DNA, 15 bp, Homo sapiens
ataattcccctattc

SEQ ID NO: 1402076 - DNA, 15 bp, Homo sapiens
gataattcccctatt

SEQ ID NO: 1402077 - DNA, 15 bp, Homo sapiens
tgataattcccctat

SEQ ID NO: 1402078 - DNA, 15 bp, Homo sapiens
ttgataattccccta

SEQ ID NO: 1402079 - DNA, 15 bp, Homo sapiens
cttgataattcccct

SEQ ID NO: 1402080 - DNA, 15 bp, Homo sapiens
tcttgataattcccc

SEQ ID NO: 1402081 - DNA, 15 bp, Homo sapiens
gtcttgataattccc

SEQ ID NO: 1402082 - DNA, 15 bp, Homo sapiens
ggtcttgataattcc

SEQ ID NO: 1402083 - DNA, 15 bp, Homo sapiens
gggtcttgataattc

SEQ ID NO: 1402084 - DNA, 15 bp, Homo sapiens
ggggtcttgataatt

SEQ ID NO: 1402085 - DNA, 15 bp, Homo sapiens
tggggtcttgataat

SEQ ID NO: 1402086 - DNA, 15 bp, Homo sapiens
ctggggtcttgataa

SEQ ID NO: 1402087 - DNA, 15 bp, Homo sapiens
gctggggtcttgata

SEQ ID NO: 1402088 - DNA, 15 bp, Homo sapiens
agctggggtcttgat

SEQ ID NO: 1402089 - DNA, 15 bp, Homo sapiens
aagctggggtcttga

SEQ ID NO: 1402090 - DNA, 15 bp, Homo sapiens
caagctggggtcttg

SEQ ID NO: 1402091 - DNA, 15 bp, Homo sapiens
tcaagctggggtctt

SEQ ID NO: 1402092 - DNA, 15 bp, Homo sapiens
atcaagctggggtct

SEQ ID NO: 1402093 - DNA, 15 bp, Homo sapiens
tatcaagctggggtc

SEQ ID NO: 1402094 - DNA, 15 bp, Homo sapiens
ctatcaagctggggt

SEQ ID NO: 1402095 - DNA, 15 bp, Homo sapiens
cctatcaagctgggg

SEQ ID NO: 1402096 - DNA, 15 bp, Homo sapiens
gcctatcaagctggg

SEQ ID NO: 1402097 - DNA, 15 bp, Homo sapiens
ggcctatcaagctgg

SEQ ID NO: 1402098 - DNA, 15 bp, Homo sapiens
gggcctatcaagctg

SEQ ID NO: 1402099 - DNA, 15 bp, Homo sapiens
tgggcctatcaagct

SEQ ID NO: 1402100 - DNA, 15 bp, Homo sapiens
gtgggcctatcaagc

SEQ ID NO: 1402101 - DNA, 15 bp, Homo sapiens
tgtgggcctatcaag

SEQ ID NO: 1402102 - DNA, 15 bp, Homo sapiens
ttgtgggcctatcaa

SEQ ID NO: 1402103 - DNA, 15 bp, Homo sapiens
attgtgggcctatca

SEQ ID NO: 1402104 - DNA, 15 bp, Homo sapiens
gattgtgggcctatc

SEQ ID NO: 1402105 - DNA, 15 bp, Homo sapiens
tgattgtgggcctat

SEQ ID NO: 1402106 - DNA, 15 bp, Homo sapiens
atgattgtgggccta

SEQ ID NO: 1402107 - DNA, 15 bp, Homo sapiens
tatgattgtgggcct

SEQ ID NO: 1402108 - DNA, 15 bp, Homo sapiens
ttatgattgtgggcc

SEQ ID NO: 1402109 - DNA, 15 bp, Homo sapiens
attatgattgtgggc

SEQ ID NO: 1402110 - DNA, 15 bp, Homo sapiens
aattatgattgtggg

SEQ ID NO: 1402111 - DNA, 15 bp, Homo sapiens
gaattatgattgtgg

SEQ ID NO: 1402112 - DNA, 15 bp, Homo sapiens
ggaattatgattgtg

SEQ ID NO: 1402113 - DNA, 15 bp, Homo sapiens
aggaattatgattgt

SEQ ID NO: 1402114 - DNA, 15 bp, Homo sapiens
caggaattatgattg

SEQ ID NO: 1402115 - DNA, 15 bp, Homo sapiens
gcaggaattatgatt

SEQ ID NO: 1402116 - DNA, 15 bp, Homo sapiens
agcaggaattatgat

SEQ ID NO: 1402117 - DNA, 15 bp, Homo sapiens
gagcaggaattatga

SEQ ID NO: 1402118 - DNA, 15 bp, Homo sapiens
tgagcaggaattatg

SEQ ID NO: 1402119 - DNA, 15 bp, Homo sapiens
atgagcaggaattat

SEQ ID NO: 1402120 - DNA, 15 bp, Homo sapiens
tatgagcaggaatta

SEQ ID NO: 1402121 - DNA, 15 bp, Homo sapiens
ctatgagcaggaatt

SEQ ID NO: 1402122 - DNA, 15 bp, Homo sapiens
gctatgagcaggaat

SEQ ID NO: 1402123 - DNA, 15 bp, Homo sapiens
agctatgagcaggaa

SEQ ID NO: 1402124 - DNA, 15 bp, Homo sapiens
gagctatgagcagga

SEQ ID NO: 1402125 - DNA, 15 bp, Homo sapiens
agagctatgagcagg

SEQ ID NO: 1402126 - DNA, 15 bp, Homo sapiens
cagagctatgagcag

SEQ ID NO: 1402127 - DNA, 15 bp, Homo sapiens
gcagagctatgagca

SEQ ID NO: 1402128 - DNA, 15 bp, Homo sapiens
tgcagagctatgagc

SEQ ID NO: 1402129 - DNA, 15 bp, Homo sapiens
ttgcagagctatgag

SEQ ID NO: 1402130 - DNA, 15 bp, Homo sapiens
cttgcagagctatga

SEQ ID NO: 1402131 - DNA, 15 bp, Homo sapiens
ccttgcagagctatg

SEQ ID NO: 1402132 - DNA, 15 bp, Homo sapiens
gccttgcagagctat

SEQ ID NO: 1402133 - DNA, 15 bp, Homo sapiens
agccttgcagagcta

SEQ ID NO: 1402134 - DNA, 15 bp, Homo sapiens
cagccttgcagagct

SEQ ID NO: 1402135 - DNA, 15 bp, Homo sapiens
acagccttgcagagc

SEQ ID NO: 1402136 - DNA, 15 bp, Homo sapiens
gacagccttgcagag

SEQ ID NO: 1402137 - DNA, 15 bp, Homo sapiens
tgacagccttgcaga

SEQ ID NO: 1402138 - DNA, 15 bp, Homo sapiens
ttgacagccttgcag

SEQ ID NO: 1402139 - DNA, 15 bp, Homo sapiens
tttgacagccttgca

SEQ ID NO: 1402140 - DNA, 15 bp, Homo sapiens
ttttgacagccttgc

SEQ ID NO: 1402141 - DNA, 15 bp, Homo sapiens
tttttgacagccttg

SEQ ID NO: 1402142 - DNA, 15 bp, Homo sapiens
atttttgacagcctt

SEQ ID NO: 1402143 - DNA, 15 bp, Homo sapiens
catttttgacagcct

SEQ ID NO: 1402144 - DNA, 15 bp, Homo sapiens
gcatttttgacagcc

SEQ ID NO: 1402145 - DNA, 15 bp, Homo sapiens
ggcatttttgacagc

SEQ ID NO: 1402146 - DNA, 15 bp, Homo sapiens
tggcatttttgacag

SEQ ID NO: 1402147 - DNA, 15 bp, Homo sapiens
ctggcatttttgaca

SEQ ID NO: 1402148 - DNA, 15 bp, Homo sapiens
actggcatttttgac

SEQ ID NO: 1402149 - DNA, 15 bp, Homo sapiens
aactggcatttttga

SEQ ID NO: 1402150 - DNA, 15 bp, Homo sapiens
taactggcatttttg

SEQ ID NO: 1402151 - DNA, 15 bp, Homo sapiens
ctaactggcattttt

SEQ ID NO: 1402152 - DNA, 15 bp, Homo sapiens
gctaactggcatttt

SEQ ID NO: 1402153 - DNA, 15 bp, Homo sapiens
ggctaactggcattt

SEQ ID NO: 1402154 - DNA, 15 bp, Homo sapiens
aggctaactggcatt

SEQ ID NO: 1402155 - DNA, 15 bp, Homo sapiens
gaggctaactggcat

SEQ ID NO: 1402156 - DNA, 15 bp, Homo sapiens
ggaggctaactggca

SEQ ID NO: 1402157 - DNA, 15 bp, Homo sapiens
aggaggctaactggc

SEQ ID NO: 1402158 - DNA, 15 bp, Homo sapiens
caggaggctaactgg

SEQ ID NO: 1402159 - DNA, 15 bp, Homo sapiens
ccaggaggctaactg

SEQ ID NO: 1402160 - DNA, 15 bp, Homo sapiens
cccaggaggctaact

SEQ ID NO: 1402161 - DNA, 15 bp, Homo sapiens
gcccaggaggctaac

SEQ ID NO: 1402162 - DNA, 15 bp, Homo sapiens
agcccaggaggctaa

SEQ ID NO: 1402163 - DNA, 15 bp, Homo sapiens
gagcccaggaggcta

SEQ ID NO: 1402164 - DNA, 15 bp, Homo sapiens
agagcccaggaggct

SEQ ID NO: 1402165 - DNA, 15 bp, Homo sapiens
gagagcccaggaggc

SEQ ID NO: 1402166 - DNA, 15 bp, Homo sapiens
tgagagcccaggagg

SEQ ID NO: 1402167 - DNA, 15 bp, Homo sapiens
gtgagagcccaggag

SEQ ID NO: 1402168 - DNA, 15 bp, Homo sapiens
ggtgagagcccagga

SEQ ID NO: 1402169 - DNA, 15 bp, Homo sapiens
gggtgagagcccagg

SEQ ID NO: 1402170 - DNA, 15 bp, Homo sapiens
ggggtgagagcccag

SEQ ID NO: 1402171 - DNA, 15 bp, Homo sapiens
aggggtgagagccca

SEQ ID NO: 1402172 - DNA, 15 bp, Homo sapiens
gaggggtgagagccc

SEQ ID NO: 1402173 - DNA, 15 bp, Homo sapiens
agaggggtgagagcc

SEQ ID NO: 1402174 - DNA, 15 bp, Homo sapiens
aagaggggtgagagc

SEQ ID NO: 1402175 - DNA, 15 bp, Homo sapiens
gaagaggggtgagag

SEQ ID NO: 1402176 - DNA, 15 bp, Homo sapiens
ggaagaggggtgaga

SEQ ID NO: 1402177 - DNA, 15 bp, Homo sapiens
tggaagaggggtgag

SEQ ID NO: 1402178 - DNA, 15 bp, Homo sapiens
gtggaagaggggtga

SEQ ID NO: 1402179 - DNA, 15 bp, Homo sapiens
tgtggaagaggggtg

SEQ ID NO: 1402180 - DNA, 15 bp, Homo sapiens
ttgtggaagaggggt

SEQ ID NO: 1402181 - DNA, 15 bp, Homo sapiens
attgtggaagagggg

SEQ ID NO: 1402182 - DNA, 15 bp, Homo sapiens
gattgtggaagaggg

SEQ ID NO: 1402183 - DNA, 15 bp, Homo sapiens
tgattgtggaagagg

SEQ ID NO: 1402184 - DNA, 15 bp, Homo sapiens
ctgattgtggaagag

SEQ ID NO: 1402185 - DNA, 15 bp, Homo sapiens
gctgattgtggaaga

SEQ ID NO: 1402186 - DNA, 15 bp, Homo sapiens
tgctgattgtggaag

SEQ ID NO: 1402187 - DNA, 15 bp, Homo sapiens
ttgctgattgtggaa

SEQ ID NO: 1402188 - DNA, 15 bp, Homo sapiens
tttgctgattgtgga

SEQ ID NO: 1402189 - DNA, 15 bp, Homo sapiens
atttgctgattgtgg

SEQ ID NO: 1402190 - DNA, 15 bp, Homo sapiens
catttgctgattgtg

SEQ ID NO: 1402191 - DNA, 15 bp, Homo sapiens
gcatttgctgattgt

SEQ ID NO: 1402192 - DNA, 15 bp, Homo sapiens
agcatttgctgattg

SEQ ID NO: 1402193 - DNA, 15 bp, Homo sapiens
gagcatttgctgatt

SEQ ID NO: 1402194 - DNA, 15 bp, Homo sapiens
ggagcatttgctgat

SEQ ID NO: 1402195 - DNA, 15 bp, Homo sapiens
gggagcatttgctga

SEQ ID NO: 1402196 - DNA, 15 bp, Homo sapiens
tgggagcatttgctg

SEQ ID NO: 1402197 - DNA, 15 bp, Homo sapiens
ctgggagcatttgct

SEQ ID NO: 1402198 - DNA, 15 bp, Homo sapiens
cctgggagcatttgc

SEQ ID NO: 1402199 - DNA, 15 bp, Homo sapiens
ccctgggagcatttg

SEQ ID NO: 1402200 - DNA, 15 bp, Homo sapiens
tccctgggagcattt

SEQ ID NO: 1402201 - DNA, 15 bp, Homo sapiens
ttccctgggagcatt

SEQ ID NO: 1402202 - DNA, 15 bp, Homo sapiens
tttccctgggagcat

SEQ ID NO: 1402203 - DNA, 15 bp, Homo sapiens
ttttccctgggagca

SEQ ID NO: 1402204 - DNA, 15 bp, Homo sapiens
tttttccctgggagc

SEQ ID NO: 1402205 - DNA, 15 bp, Homo sapiens
ttttttccctgggag

SEQ ID NO: 1402206 - DNA, 15 bp, Homo sapiens
cttttttccctggga

SEQ ID NO: 1402207 - DNA, 15 bp, Homo sapiens
ccttttttccctggg

SEQ ID NO: 1402208 - DNA, 15 bp, Homo sapiens
gccttttttccctgg

SEQ ID NO: 1402209 - DNA, 15 bp, Homo sapiens
tgccttttttccctg

SEQ ID NO: 1402210 - DNA, 15 bp, Homo sapiens
gtgccttttttccct

SEQ ID NO: 1402211 - DNA, 15 bp, Homo sapiens
ggtgccttttttccc

SEQ ID NO: 1402212 - DNA, 15 bp, Homo sapiens
tggtgccttttttcc

SEQ ID NO: 1402213 - DNA, 15 bp, Homo sapiens
ttggtgccttttttc

SEQ ID NO: 1402214 - DNA, 15 bp, Homo sapiens
tttggtgcctttttt

SEQ ID NO: 1402215 - DNA, 15 bp, Homo sapiens
gtttggtgccttttt

SEQ ID NO: 1402216 - DNA, 15 bp, Homo sapiens
tgtttggtgcctttt

SEQ ID NO: 1402217 - DNA, 15 bp, Homo sapiens
atgtttggtgccttt

SEQ ID NO: 1402218 - DNA, 15 bp, Homo sapiens
aatgtttggtgcctt

SEQ ID NO: 1402219 - DNA, 15 bp, Homo sapiens
aaatgtttggtgcct

SEQ ID NO: 1402220 - DNA, 15 bp, Homo sapiens
caaatgtttggtgcc

SEQ ID NO: 1402221 - DNA, 15 bp, Homo sapiens
ccaaatgtttggtgc

SEQ ID NO: 1402222 - DNA, 15 bp, Homo sapiens
gccaaatgtttggtg

SEQ ID NO: 1402223 - DNA, 15 bp, Homo sapiens
agccaaatgtttggt

SEQ ID NO: 1402224 - DNA, 15 bp, Homo sapiens
gagccaaatgtttgg

SEQ ID NO: 1402225 - DNA, 15 bp, Homo sapiens
tgagccaaatgtttg

SEQ ID NO: 1402226 - DNA, 15 bp, Homo sapiens
gtgagccaaatgttt

SEQ ID NO: 1402227 - DNA, 15 bp, Homo sapiens
agtgagccaaatgtt

SEQ ID NO: 1402228 - DNA, 15 bp, Homo sapiens
aagtgagccaaatgt

SEQ ID NO: 1402229 - DNA, 15 bp, Homo sapiens
aaagtgagccaaatg

SEQ ID NO: 1402230 - DNA, 15 bp, Homo sapiens
gaaagtgagccaaat

SEQ ID NO: 1402231 - DNA, 15 bp, Homo sapiens
ggaaagtgagccaaa

SEQ ID NO: 1402232 - DNA, 15 bp, Homo sapiens
aggaaagtgagccaa

SEQ ID NO: 1402233 - DNA, 15 bp, Homo sapiens
caggaaagtgagcca

SEQ ID NO: 1402234 - DNA, 15 bp, Homo sapiens
ccaggaaagtgagcc

SEQ ID NO: 1402235 - DNA, 15 bp, Homo sapiens
gccaggaaagtgagc

SEQ ID NO: 1402236 - DNA, 15 bp, Homo sapiens
ggccaggaaagtgag

SEQ ID NO: 1402237 - DNA, 15 bp, Homo sapiens
gggccaggaaagtga

SEQ ID NO: 1402238 - DNA, 15 bp, Homo sapiens
tgggccaggaaagtg

SEQ ID NO: 1402239 - DNA, 15 bp, Homo sapiens
ctgggccaggaaagt

SEQ ID NO: 1402240 - DNA, 15 bp, Homo sapiens
actgggccaggaaag

SEQ ID NO: 1402241 - DNA, 15 bp, Homo sapiens
cactgggccaggaaa

SEQ ID NO: 1402242 - DNA, 15 bp, Homo sapiens
tcactgggccaggaa

SEQ ID NO: 1402243 - DNA, 15 bp, Homo sapiens
atcactgggccagga

SEQ ID NO: 1402244 - DNA, 15 bp, Homo sapiens
aatcactgggccagg

SEQ ID NO: 1402245 - DNA, 15 bp, Homo sapiens
gaatcactgggccag

SEQ ID NO: 1402246 - DNA, 15 bp, Homo sapiens
agaatcactgggcca

SEQ ID NO: 1402247 - DNA, 15 bp, Homo sapiens
aagaatcactgggcc

SEQ ID NO: 1402248 - DNA, 15 bp, Homo sapiens
aaagaatcactgggc

SEQ ID NO: 1402249 - DNA, 15 bp, Homo sapiens
taaagaatcactggg

SEQ ID NO: 1402250 - DNA, 15 bp, Homo sapiens
gtaaagaatcactgg

SEQ ID NO: 1402251 - DNA, 15 bp, Homo sapiens
agtaaagaatcactg

SEQ ID NO: 1402252 - DNA, 15 bp, Homo sapiens
aagtaaagaatcact

SEQ ID NO: 1402253 - DNA, 15 bp, Homo sapiens
aaagtaaagaatcac

SEQ ID NO: 1402254 - DNA, 15 bp, Homo sapiens
gaaagtaaagaatca

SEQ ID NO: 1402255 - DNA, 15 bp, Homo sapiens
agaaagtaaagaatc

SEQ ID NO: 1402256 - DNA, 15 bp, Homo sapiens
tagaaagtaaagaat

SEQ ID NO: 1402257 - DNA, 15 bp, Homo sapiens
ctagaaagtaaagaa

SEQ ID NO: 1402258 - DNA, 15 bp, Homo sapiens
tctagaaagtaaaga

SEQ ID NO: 1402259 - DNA, 15 bp, Homo sapiens
ttctagaaagtaaag

SEQ ID NO: 1402260 - DNA, 15 bp, Homo sapiens
tttctagaaagtaaa

SEQ ID NO: 1402261 - DNA, 15 bp, Homo sapiens
ctttctagaaagtaa

SEQ ID NO: 1402262 - DNA, 15 bp, Homo sapiens
gctttctagaaagta

SEQ ID NO: 1402263 - DNA, 15 bp, Homo sapiens
agctttctagaaagt

SEQ ID NO: 1402264 - DNA, 15 bp, Homo sapiens
tagctttctagaaag

SEQ ID NO: 1402265 - DNA, 15 bp, Homo sapiens
ctagctttctagaaa

SEQ ID NO: 1402266 - DNA, 15 bp, Homo sapiens
gctagctttctagaa

SEQ ID NO: 1402267 - DNA, 15 bp, Homo sapiens
ggctagctttctaga

SEQ ID NO: 1402268 - DNA, 15 bp, Homo sapiens
aggctagctttctag

SEQ ID NO: 1402269 - DNA, 15 bp, Homo sapiens
gaggctagctttcta

SEQ ID NO: 1402270 - DNA, 15 bp, Homo sapiens
agaggctagctttct

SEQ ID NO: 1402271 - DNA, 15 bp, Homo sapiens
cagaggctagctttc

SEQ ID NO: 1402272 - DNA, 15 bp, Homo sapiens
gcagaggctagcttt

SEQ ID NO: 1402273 - DNA, 15 bp, Homo sapiens
agcagaggctagctt

SEQ ID NO: 1402274 - DNA, 15 bp, Homo sapiens
aagcagaggctagct

SEQ ID NO: 1402275 - DNA, 15 bp, Homo sapiens
aaagcagaggctagc

SEQ ID NO: 1402276 - DNA, 15 bp, Homo sapiens
aaaagcagaggctag

SEQ ID NO: 1402277 - DNA, 15 bp, Homo sapiens
taaaagcagaggcta

SEQ ID NO: 1402278 - DNA, 15 bp, Homo sapiens
ttaaaagcagaggct

SEQ ID NO: 1402279 - DNA, 15 bp, Homo sapiens
attaaaagcagaggc

SEQ ID NO: 1402280 - DNA, 15 bp, Homo sapiens
gattaaaagcagagg

SEQ ID NO: 1402281 - DNA, 15 bp, Homo sapiens
agattaaaagcagag

SEQ ID NO: 1402282 - DNA, 15 bp, Homo sapiens
cagattaaaagcaga

SEQ ID NO: 1402283 - DNA, 15 bp, Homo sapiens
tcagattaaaagcag

SEQ ID NO: 1402284 - DNA, 15 bp, Homo sapiens
ttcagattaaaagca

SEQ ID NO: 1402285 - DNA, 15 bp, Homo sapiens
tttcagattaaaagc

SEQ ID NO: 1402286 - DNA, 15 bp, Homo sapiens
atttcagattaaaag

SEQ ID NO: 1402287 - DNA, 15 bp, Homo sapiens
tatttcagattaaaa

SEQ ID NO: 1402288 - DNA, 15 bp, Homo sapiens
atatttcagattaaa

SEQ ID NO: 1402289 - DNA, 15 bp, Homo sapiens
tatatttcagattaa

SEQ ID NO: 1402290 - DNA, 15 bp, Homo sapiens
gtatatttcagatta

SEQ ID NO: 1402291 - DNA, 15 bp, Homo sapiens
tgtatatttcagatt

SEQ ID NO: 1402292 - DNA, 15 bp, Homo sapiens
gtgtatatttcagat

SEQ ID NO: 1402293 - DNA, 15 bp, Homo sapiens
tgtgtatatttcaga

SEQ ID NO: 1402294 - DNA, 15 bp, Homo sapiens
gtgtgtatatttcag

SEQ ID NO: 1402295 - DNA, 15 bp, Homo sapiens
agtgtgtatatttca

SEQ ID NO: 1402296 - DNA, 15 bp, Homo sapiens
cagtgtgtatatttc

SEQ ID NO: 1402297 - DNA, 15 bp, Homo sapiens
tcagtgtgtatattt

SEQ ID NO: 1402298 - DNA, 15 bp, Homo sapiens
ttcagtgtgtatatt

SEQ ID NO: 1402299 - DNA, 15 bp, Homo sapiens
tttcagtgtgtatat

SEQ ID NO: 1402300 - DNA, 15 bp, Homo sapiens
ttttcagtgtgtata

SEQ ID NO: 1402301 - DNA, 15 bp, Homo sapiens
attttcagtgtgtat

SEQ ID NO: 1402302 - DNA, 15 bp, Homo sapiens
tattttcagtgtgta

SEQ ID NO: 1402303 - DNA, 15 bp, Homo sapiens
gtattttcagtgtgt

SEQ ID NO: 1402304 - DNA, 15 bp, Homo sapiens
tgtattttcagtgtg

SEQ ID NO: 1402305 - DNA, 15 bp, Homo sapiens
gtgtattttcagtgt

SEQ ID NO: 1402306 - DNA, 15 bp, Homo sapiens
tgtgtattttcagtg

SEQ ID NO: 1402307 - DNA, 15 bp, Homo sapiens
ttgtgtattttcagt

SEQ ID NO: 1402308 - DNA, 15 bp, Homo sapiens
attgtgtattttcag

SEQ ID NO: 1402309 - DNA, 15 bp, Homo sapiens
aattgtgtattttca

SEQ ID NO: 1402310 - DNA, 15 bp, Homo sapiens
taattgtgtattttc

SEQ ID NO: 1402311 - DNA, 15 bp, Homo sapiens
ataattgtgtatttt

SEQ ID NO: 1402312 - DNA, 15 bp, Homo sapiens
gataattgtgtattt

SEQ ID NO: 1402313 - DNA, 15 bp, Homo sapiens
agataattgtgtatt

SEQ ID NO: 1402314 - DNA, 15 bp, Homo sapiens
gagataattgtgtat

SEQ ID NO: 1402315 - DNA, 15 bp, Homo sapiens
ggagataattgtgta

SEQ ID NO: 1402316 - DNA, 15 bp, Homo sapiens
tggagataattgtgt

SEQ ID NO: 1402317 - DNA, 15 bp, Homo sapiens
atggagataattgtg

SEQ ID NO: 1402318 - DNA, 15 bp, Homo sapiens
catggagataattgt

SEQ ID NO: 1402319 - DNA, 15 bp, Homo sapiens
acatggagataattg

SEQ ID NO: 1402320 - DNA, 15 bp, Homo sapiens
gacatggagataatt

SEQ ID NO: 1402321 - DNA, 15 bp, Homo sapiens
tgacatggagataat

SEQ ID NO: 1402322 - DNA, 15 bp, Homo sapiens
ttgacatggagataa

SEQ ID NO: 1402323 - DNA, 15 bp, Homo sapiens
tttgacatggagata

SEQ ID NO: 1402324 - DNA, 15 bp, Homo sapiens
ttttgacatggagat

SEQ ID NO: 1402325 - DNA, 15 bp, Homo sapiens
cttttgacatggaga

SEQ ID NO: 1402326 - DNA, 15 bp, Homo sapiens
ccttttgacatggag

SEQ ID NO: 1402327 - DNA, 15 bp, Homo sapiens
accttttgacatgga

SEQ ID NO: 1402328 - DNA, 15 bp, Homo sapiens
gaccttttgacatgg

SEQ ID NO: 1402329 - DNA, 15 bp, Homo sapiens
tgaccttttgacatg

SEQ ID NO: 1402330 - DNA, 15 bp, Homo sapiens
atgaccttttgacat

SEQ ID NO: 1402331 - DNA, 15 bp, Homo sapiens
aatgaccttttgaca

SEQ ID NO: 1402332 - DNA, 15 bp, Homo sapiens
taatgaccttttgac

SEQ ID NO: 1402333 - DNA, 15 bp, Homo sapiens
ttaatgaccttttga

SEQ ID NO: 1402334 - DNA, 15 bp, Homo sapiens
tttaatgaccttttg

SEQ ID NO: 1402335 - DNA, 15 bp, Homo sapiens
gtttaatgacctttt

SEQ ID NO: 1402336 - DNA, 15 bp, Homo sapiens
ggtttaatgaccttt

SEQ ID NO: 1402337 - DNA, 15 bp, Homo sapiens
tggtttaatgacctt

SEQ ID NO: 1402338 - DNA, 15 bp, Homo sapiens
atggtttaatgacct

SEQ ID NO: 1402339 - DNA, 15 bp, Homo sapiens
gatggtttaatgacc

SEQ ID NO: 1402340 - DNA, 15 bp, Homo sapiens
agatggtttaatgac

SEQ ID NO: 1402341 - DNA, 15 bp, Homo sapiens
aagatggtttaatga

SEQ ID NO: 1402342 - DNA, 15 bp, Homo sapiens
gaagatggtttaatg

SEQ ID NO: 1402343 - DNA, 15 bp, Homo sapiens
tgaagatggtttaat

SEQ ID NO: 1402344 - DNA, 15 bp, Homo sapiens
atgaagatggtttaa

SEQ ID NO: 1402345 - DNA, 15 bp, Homo sapiens
catgaagatggttta

SEQ ID NO: 1402346 - DNA, 15 bp, Homo sapiens
gcatgaagatggttt

SEQ ID NO: 1402347 - DNA, 15 bp, Homo sapiens
tgcatgaagatggtt

SEQ ID NO: 1402348 - DNA, 15 bp, Homo sapiens
ttgcatgaagatggt

SEQ ID NO: 1402349 - DNA, 15 bp, Homo sapiens
tttgcatgaagatgg

SEQ ID NO: 1402350 - DNA, 15 bp, Homo sapiens
ttttgcatgaagatg

SEQ ID NO: 1402351 - DNA, 15 bp, Homo sapiens
attttgcatgaagat

SEQ ID NO: 1402352 - DNA, 15 bp, Homo sapiens
cattttgcatgaaga

SEQ ID NO: 1402353 - DNA, 15 bp, Homo sapiens
tcattttgcatgaag

SEQ ID NO: 1402354 - DNA, 15 bp, Homo sapiens
ctcattttgcatgaa

SEQ ID NO: 1402355 - DNA, 15 bp, Homo sapiens
cctcattttgcatga

SEQ ID NO: 1402356 - DNA, 15 bp, Homo sapiens
tcctcattttgcatg

SEQ ID NO: 1402357 - DNA, 15 bp, Homo sapiens
ttcctcattttgcat

SEQ ID NO: 1402358 - DNA, 15 bp, Homo sapiens
attcctcattttgca

SEQ ID NO: 1402359 - DNA, 15 bp, Homo sapiens
tattcctcattttgc

SEQ ID NO: 1402360 - DNA, 15 bp, Homo sapiens
atattcctcattttg

SEQ ID NO: 1402361 - DNA, 15 bp, Homo sapiens
aatattcctcatttt

SEQ ID NO: 1402362 - DNA, 15 bp, Homo sapiens
gaatattcctcattt

SEQ ID NO: 1402363 - DNA, 15 bp, Homo sapiens
tgaatattcctcatt

SEQ ID NO: 1402364 - DNA, 15 bp, Homo sapiens
ttgaatattcctcat

SEQ ID NO: 1402365 - DNA, 15 bp, Homo sapiens
cttgaatattcctca

SEQ ID NO: 1402366 - DNA, 15 bp, Homo sapiens
tcttgaatattcctc

SEQ ID NO: 1402367 - DNA, 15 bp, Homo sapiens
atcttgaatattcct

SEQ ID NO: 1402368 - DNA, 15 bp, Homo sapiens
tatcttgaatattcc

SEQ ID NO: 1402369 - DNA, 15 bp, Homo sapiens
ttatcttgaatattc

SEQ ID NO: 1402370 - DNA, 15 bp, Homo sapiens
attatcttgaatatt

SEQ ID NO: 1402371 - DNA, 15 bp, Homo sapiens
aattatcttgaatat

SEQ ID NO: 1402372 - DNA, 15 bp, Homo sapiens
gaattatcttgaata

SEQ ID NO: 1402373 - DNA, 15 bp, Homo sapiens
agaattatcttgaat

SEQ ID NO: 1402374 - DNA, 15 bp, Homo sapiens
cagaattatcttgaa

SEQ ID NO: 1402375 - DNA, 15 bp, Homo sapiens
ccagaattatcttga

SEQ ID NO: 1402376 - DNA, 15 bp, Homo sapiens
gccagaattatcttg

SEQ ID NO: 1402377 - DNA, 15 bp, Homo sapiens
tgccagaattatctt

SEQ ID NO: 1402378 - DNA, 15 bp, Homo sapiens
ttgccagaattatct

SEQ ID NO: 1402379 - DNA, 15 bp, Homo sapiens
tttgccagaattatc

SEQ ID NO: 1402380 - DNA, 15 bp, Homo sapiens
ttttgccagaattat

SEQ ID NO: 1402381 - DNA, 15 bp, Homo sapiens
tttttgccagaatta

SEQ ID NO: 1402382 - DNA, 15 bp, Homo sapiens
gtttttgccagaatt

SEQ ID NO: 1402383 - DNA, 15 bp, Homo sapiens
tgtttttgccagaat

SEQ ID NO: 1402384 - DNA, 15 bp, Homo sapiens
atgtttttgccagaa

SEQ ID NO: 1402385 - DNA, 15 bp, Homo sapiens
tatgtttttgccaga

SEQ ID NO: 1402386 - DNA, 15 bp, Homo sapiens
ttatgtttttgccag

SEQ ID NO: 1402387 - DNA, 15 bp, Homo sapiens
tttatgtttttgcca

SEQ ID NO: 1402388 - DNA, 15 bp, Homo sapiens
gtttatgtttttgcc

SEQ ID NO: 1402389 - DNA, 15 bp, Homo sapiens
tgtttatgtttttgc

SEQ ID NO: 1402390 - DNA, 15 bp, Homo sapiens
ttgtttatgtttttg

SEQ ID NO: 1402391 - DNA, 15 bp, Homo sapiens
attgtttatgttttt

SEQ ID NO: 1402392 - DNA, 15 bp, Homo sapiens
aattgtttatgtttt

SEQ ID NO: 1402393 - DNA, 15 bp, Homo sapiens
aaattgtttatgttt

SEQ ID NO: 1402394 - DNA, 15 bp, Homo sapiens
aaaattgtttatgtt

SEQ ID NO: 1402395 - DNA, 15 bp, Homo sapiens
gaaaattgtttatgt

SEQ ID NO: 1402396 - DNA, 15 bp, Homo sapiens
tgaaaattgtttatg

SEQ ID NO: 1402397 - DNA, 15 bp, Homo sapiens
ttgaaaattgtttat

SEQ ID NO: 1402398 - DNA, 15 bp, Homo sapiens
gttgaaaattgttta

SEQ ID NO: 1402399 - DNA, 15 bp, Homo sapiens
cgttgaaaattgttt

SEQ ID NO: 1402400 - DNA, 15 bp, Homo sapiens
acgttgaaaattgtt

SEQ ID NO: 1402401 - DNA, 15 bp, Homo sapiens
gacgttgaaaattgt

SEQ ID NO: 1402402 - DNA, 15 bp, Homo sapiens
tgacgttgaaaattg

SEQ ID NO: 1402403 - DNA, 15 bp, Homo sapiens
ttgacgttgaaaatt

SEQ ID NO: 1402404 - DNA, 15 bp, Homo sapiens
gttgacgttgaaaat

SEQ ID NO: 1402405 - DNA, 15 bp, Homo sapiens
agttgacgttgaaaa

SEQ ID NO: 1402406 - DNA, 15 bp, Homo sapiens
gagttgacgttgaaa

SEQ ID NO: 1402407 - DNA, 15 bp, Homo sapiens
ggagttgacgttgaa

SEQ ID NO: 1402408 - DNA, 15 bp, Homo sapiens
gggagttgacgttga

SEQ ID NO: 1402409 - DNA, 15 bp, Homo sapiens
ggggagttgacgttg

SEQ ID NO: 1402410 - DNA, 15 bp, Homo sapiens
aggggagttgacgtt

SEQ ID NO: 1402411 - DNA, 15 bp, Homo sapiens
aaggggagttgacgt

SEQ ID NO: 1402412 - DNA, 15 bp, Homo sapiens
gaaggggagttgacg

SEQ ID NO: 1402413 - DNA, 15 bp, Homo sapiens
ggaaggggagttgac

SEQ ID NO: 1402414 - DNA, 15 bp, Homo sapiens
aggaaggggagttga

SEQ ID NO: 1402415 - DNA, 15 bp, Homo sapiens
caggaaggggagttg

SEQ ID NO: 1402416 - DNA, 15 bp, Homo sapiens
acaggaaggggagtt

SEQ ID NO: 1402417 - DNA, 15 bp, Homo sapiens
aacaggaaggggagt

SEQ ID NO: 1402418 - DNA, 15 bp, Homo sapiens
taacaggaaggggag

SEQ ID NO: 1402419 - DNA, 15 bp, Homo sapiens
ataacaggaagggga

SEQ ID NO: 1402420 - DNA, 15 bp, Homo sapiens
gataacaggaagggg

SEQ ID NO: 1402421 - DNA, 15 bp, Homo sapiens
ggataacaggaaggg

SEQ ID NO: 1402422 - DNA, 15 bp, Homo sapiens
aggataacaggaagg

SEQ ID NO: 1402423 - DNA, 15 bp, Homo sapiens
aaggataacaggaag

SEQ ID NO: 1402424 - DNA, 15 bp, Homo sapiens
gaaggataacaggaa

SEQ ID NO: 1402425 - DNA, 15 bp, Homo sapiens
ggaaggataacagga

SEQ ID NO: 1402426 - DNA, 15 bp, Homo sapiens
gggaaggataacagg

SEQ ID NO: 1402427 - DNA, 15 bp, Homo sapiens
tgggaaggataacag

SEQ ID NO: 1402428 - DNA, 15 bp, Homo sapiens
ttgggaaggataaca

SEQ ID NO: 1402429 - DNA, 15 bp, Homo sapiens
cttgggaaggataac

SEQ ID NO: 1402430 - DNA, 15 bp, Homo sapiens
gcttgggaaggataa

SEQ ID NO: 1402431 - DNA, 15 bp, Homo sapiens
agcttgggaaggata

SEQ ID NO: 1402432 - DNA, 15 bp, Homo sapiens
gagcttgggaaggat

SEQ ID NO: 1402433 - DNA, 15 bp, Homo sapiens
tgagcttgggaagga

SEQ ID NO: 1402434 - DNA, 15 bp, Homo sapiens
gtgagcttgggaagg

SEQ ID NO: 1402435 - DNA, 15 bp, Homo sapiens
ggtgagcttgggaag

SEQ ID NO: 1402436 - DNA, 15 bp, Homo sapiens
tggtgagcttgggaa

SEQ ID NO: 1402437 - DNA, 15 bp, Homo sapiens
ttggtgagcttggga

SEQ ID NO: 1402438 - DNA, 15 bp, Homo sapiens
tttggtgagcttggg

SEQ ID NO: 1402439 - DNA, 15 bp, Homo sapiens
ttttggtgagcttgg

SEQ ID NO: 1402440 - DNA, 15 bp, Homo sapiens
tttttggtgagcttg

SEQ ID NO: 1402441 - DNA, 15 bp, Homo sapiens
atttttggtgagctt

SEQ ID NO: 1402442 - DNA, 15 bp, Homo sapiens
tatttttggtgagct

SEQ ID NO: 1402443 - DNA, 15 bp, Homo sapiens
ttatttttggtgagc

SEQ ID NO: 1402444 - DNA, 15 bp, Homo sapiens
attatttttggtgag

SEQ ID NO: 1402445 - DNA, 15 bp, Homo sapiens
cattatttttggtga

SEQ ID NO: 1402446 - DNA, 15 bp, Homo sapiens
ccattatttttggtg

SEQ ID NO: 1402447 - DNA, 15 bp, Homo sapiens
accattatttttggt

SEQ ID NO: 1402448 - DNA, 15 bp, Homo sapiens
gaccattatttttgg

SEQ ID NO: 1402449 - DNA, 15 bp, Homo sapiens
agaccattatttttg

SEQ ID NO: 1402450 - DNA, 15 bp, Homo sapiens
gagaccattattttt

SEQ ID NO: 1402451 - DNA, 15 bp, Homo sapiens
ggagaccattatttt

SEQ ID NO: 1402452 - DNA, 15 bp, Homo sapiens
gggagaccattattt

SEQ ID NO: 1402453 - DNA, 15 bp, Homo sapiens
agggagaccattatt

SEQ ID NO: 1402454 - DNA, 15 bp, Homo sapiens
gagggagaccattat

SEQ ID NO: 1402455 - DNA, 15 bp, Homo sapiens
tgagggagaccatta

SEQ ID NO: 1402456 - DNA, 15 bp, Homo sapiens
gtgagggagaccatt

SEQ ID NO: 1402457 - DNA, 15 bp, Homo sapiens
tgtgagggagaccat

SEQ ID NO: 1402458 - DNA, 15 bp, Homo sapiens
ctgtgagggagacca

SEQ ID NO: 1402459 - DNA, 15 bp, Homo sapiens
actgtgagggagacc

SEQ ID NO: 1402460 - DNA, 15 bp, Homo sapiens
aactgtgagggagac

SEQ ID NO: 1402461 - DNA, 15 bp, Homo sapiens
taactgtgagggaga

SEQ ID NO: 1402462 - DNA, 15 bp, Homo sapiens
gtaactgtgagggag

SEQ ID NO: 1402463 - DNA, 15 bp, Homo sapiens
ggtaactgtgaggga

SEQ ID NO: 1402464 - DNA, 15 bp, Homo sapiens
tggtaactgtgaggg

SEQ ID NO: 1402465 - DNA, 15 bp, Homo sapiens
ttggtaactgtgagg

SEQ ID NO: 1402466 - DNA, 15 bp, Homo sapiens
cttggtaactgtgag

SEQ ID NO: 1402467 - DNA, 15 bp, Homo sapiens
tcttggtaactgtga

SEQ ID NO: 1402468 - DNA, 15 bp, Homo sapiens
ttcttggtaactgtg

SEQ ID NO: 1402469 - DNA, 15 bp, Homo sapiens
tttcttggtaactgt

SEQ ID NO: 1402470 - DNA, 15 bp, Homo sapiens
atttcttggtaactg

SEQ ID NO: 1402471 - DNA, 15 bp, Homo sapiens
catttcttggtaact

SEQ ID NO: 1402472 - DNA, 15 bp, Homo sapiens
ccatttcttggtaac

SEQ ID NO: 1402473 - DNA, 15 bp, Homo sapiens
cccatttcttggtaa

SEQ ID NO: 1402474 - DNA, 15 bp, Homo sapiens
gcccatttcttggta

SEQ ID NO: 1402475 - DNA, 15 bp, Homo sapiens
tgcccatttcttggt

SEQ ID NO: 1402476 - DNA, 15 bp, Homo sapiens
atgcccatttcttgg

SEQ ID NO: 1402477 - DNA, 15 bp, Homo sapiens
catgcccatttcttg

SEQ ID NO: 1402478 - DNA, 15 bp, Homo sapiens
ccatgcccatttctt

SEQ ID NO: 1402479 - DNA, 15 bp, Homo sapiens
accatgcccatttct

SEQ ID NO: 1402480 - DNA, 15 bp, Homo sapiens
aaccatgcccatttc

SEQ ID NO: 1402481 - DNA, 15 bp, Homo sapiens
caaccatgcccattt

SEQ ID NO: 1402482 - DNA, 15 bp, Homo sapiens
acaaccatgcccatt

SEQ ID NO: 1402483 - DNA, 15 bp, Homo sapiens
tacaaccatgcccat

SEQ ID NO: 1402484 - DNA, 15 bp, Homo sapiens
atacaaccatgccca

SEQ ID NO: 1402485 - DNA, 15 bp, Homo sapiens
aatacaaccatgccc

SEQ ID NO: 1402486 - DNA, 15 bp, Homo sapiens
caatacaaccatgcc

SEQ ID NO: 1402487 - DNA, 15 bp, Homo sapiens
tcaatacaaccatgc

SEQ ID NO: 1402488 - DNA, 15 bp, Homo sapiens
ctcaatacaaccatg

SEQ ID NO: 1402489 - DNA, 15 bp, Homo sapiens
tctcaatacaaccat

SEQ ID NO: 1402490 - DNA, 15 bp, Homo sapiens
atctcaatacaacca

SEQ ID NO: 1402491 - DNA, 15 bp, Homo sapiens
tatctcaatacaacc

SEQ ID NO: 1402492 - DNA, 15 bp, Homo sapiens
gtatctcaatacaac

SEQ ID NO: 1402493 - DNA, 15 bp, Homo sapiens
tgtatctcaatacaa

SEQ ID NO: 1402494 - DNA, 15 bp, Homo sapiens
atgtatctcaataca

SEQ ID NO: 1402495 - DNA, 15 bp, Homo sapiens
gatgtatctcaatac

SEQ ID NO: 1402496 - DNA, 15 bp, Homo sapiens
tgatgtatctcaata

SEQ ID NO: 1402497 - DNA, 15 bp, Homo sapiens
ctgatgtatctcaat

SEQ ID NO: 1402498 - DNA, 15 bp, Homo sapiens
cctgatgtatctcaa

SEQ ID NO: 1402499 - DNA, 15 bp, Homo sapiens
gcctgatgtatctca

SEQ ID NO: 1402500 - DNA, 15 bp, Homo sapiens
cgcctgatgtatctc

SEQ ID NO: 1402501 - DNA, 15 bp, Homo sapiens
gcgcctgatgtatct

SEQ ID NO: 1402502 - DNA, 15 bp, Homo sapiens
agcgcctgatgtatc

SEQ ID NO: 1402503 - DNA, 15 bp, Homo sapiens
tagcgcctgatgtat

SEQ ID NO: 1402504 - DNA, 15 bp, Homo sapiens
gtagcgcctgatgta

SEQ ID NO: 1402505 - DNA, 15 bp, Homo sapiens
agtagcgcctgatgt

SEQ ID NO: 1402506 - DNA, 15 bp, Homo sapiens
cagtagcgcctgatg

SEQ ID NO: 1402507 - DNA, 15 bp, Homo sapiens
tcagtagcgcctgat

SEQ ID NO: 1402508 - DNA, 15 bp, Homo sapiens
atcagtagcgcctga

SEQ ID NO: 1402509 - DNA, 15 bp, Homo sapiens
tatcagtagcgcctg

SEQ ID NO: 1402510 - DNA, 15 bp, Homo sapiens
ttatcagtagcgcct

SEQ ID NO: 1402511 - DNA, 15 bp, Homo sapiens
attatcagtagcgcc

SEQ ID NO: 1402512 - DNA, 15 bp, Homo sapiens
tattatcagtagcgc

SEQ ID NO: 1402513 - DNA, 15 bp, Homo sapiens
ttattatcagtagcg

SEQ ID NO: 1402514 - DNA, 15 bp, Homo sapiens
gttattatcagtagc

SEQ ID NO: 1402515 - DNA, 15 bp, Homo sapiens
agttattatcagtag

SEQ ID NO: 1402516 - DNA, 15 bp, Homo sapiens
cagttattatcagta

SEQ ID NO: 1402517 - DNA, 15 bp, Homo sapiens
acagttattatcagt

SEQ ID NO: 1402518 - DNA, 15 bp, Homo sapiens
gacagttattatcag

SEQ ID NO: 1402519 - DNA, 15 bp, Homo sapiens
ggacagttattatca

SEQ ID NO: 1402520 - DNA, 15 bp, Homo sapiens
aggacagttattatc

SEQ ID NO: 1402521 - DNA, 15 bp, Homo sapiens
taggacagttattat

SEQ ID NO: 1402522 - DNA, 15 bp, Homo sapiens
ttaggacagttatta

SEQ ID NO: 1402523 - DNA, 15 bp, Homo sapiens
cttaggacagttatt

SEQ ID NO: 1402524 - DNA, 15 bp, Homo sapiens
tcttaggacagttat

SEQ ID NO: 1402525 - DNA, 15 bp, Homo sapiens
gtcttaggacagtta

SEQ ID NO: 1402526 - DNA, 15 bp, Homo sapiens
tgtcttaggacagtt

SEQ ID NO: 1402527 - DNA, 15 bp, Homo sapiens
ttgtcttaggacagt

SEQ ID NO: 1402528 - DNA, 15 bp, Homo sapiens
attgtcttaggacag

SEQ ID NO: 1402529 - DNA, 15 bp, Homo sapiens
tattgtcttaggaca

SEQ ID NO: 1402530 - DNA, 15 bp, Homo sapiens
ctattgtcttaggac

SEQ ID NO: 1402531 - DNA, 15 bp, Homo sapiens
cctattgtcttagga

SEQ ID NO: 1402532 - DNA, 15 bp, Homo sapiens
tcctattgtcttagg

SEQ ID NO: 1402533 - DNA, 15 bp, Homo sapiens
ctcctattgtcttag

SEQ ID NO: 1402534 - DNA, 15 bp, Homo sapiens
cctcctattgtctta

SEQ ID NO: 1402535 - DNA, 15 bp, Homo sapiens
gcctcctattgtctt

SEQ ID NO: 1402536 - DNA, 15 bp, Homo sapiens
cgcctcctattgtct

SEQ ID NO: 1402537 - DNA, 15 bp, Homo sapiens
tcgcctcctattgtc

SEQ ID NO: 1402538 - DNA, 15 bp, Homo sapiens
ttcgcctcctattgt

SEQ ID NO: 1402539 - DNA, 15 bp, Homo sapiens
tttcgcctcctattg

SEQ ID NO: 1402540 - DNA, 15 bp, Homo sapiens
ctttcgcctcctatt

SEQ ID NO: 1402541 - DNA, 15 bp, Homo sapiens
cctttcgcctcctat

SEQ ID NO: 1402542 - DNA, 15 bp, Homo sapiens
tcctttcgcctccta

SEQ ID NO: 1402543 - DNA, 15 bp, Homo sapiens
atcctttcgcctcct

SEQ ID NO: 1402544 - DNA, 15 bp, Homo sapiens
tatcctttcgcctcc

SEQ ID NO: 1402545 - DNA, 15 bp, Homo sapiens
atatcctttcgcctc

SEQ ID NO: 1402546 - DNA, 15 bp, Homo sapiens
aatatcctttcgcct

SEQ ID NO: 1402547 - DNA, 15 bp, Homo sapiens
taatatcctttcgcc

SEQ ID NO: 1402548 - DNA, 15 bp, Homo sapiens
ctaatatcctttcgc

SEQ ID NO: 1402549 - DNA, 15 bp, Homo sapiens
actaatatcctttcg

SEQ ID NO: 1402550 - DNA, 15 bp, Homo sapiens
gactaatatcctttc

SEQ ID NO: 1402551 - DNA, 15 bp, Homo sapiens
tgactaatatccttt

SEQ ID NO: 1402552 - DNA, 15 bp, Homo sapiens
ttgactaatatcctt

SEQ ID NO: 1402553 - DNA, 15 bp, Homo sapiens
attgactaatatcct

SEQ ID NO: 1402554 - DNA, 15 bp, Homo sapiens
gattgactaatatcc

SEQ ID NO: 1402555 - DNA, 15 bp, Homo sapiens
agattgactaatatc

SEQ ID NO: 1402556 - DNA, 15 bp, Homo sapiens
cagattgactaatat

SEQ ID NO: 1402557 - DNA, 15 bp, Homo sapiens
acagattgactaata

SEQ ID NO: 1402558 - DNA, 15 bp, Homo sapiens
gacagattgactaat

SEQ ID NO: 1402559 - DNA, 15 bp, Homo sapiens
agacagattgactaa

SEQ ID NO: 1402560 - DNA, 15 bp, Homo sapiens
cagacagattgacta

SEQ ID NO: 1402561 - DNA, 15 bp, Homo sapiens
gcagacagattgact

SEQ ID NO: 1402562 - DNA, 15 bp, Homo sapiens
tgcagacagattgac

SEQ ID NO: 1402563 - DNA, 15 bp, Homo sapiens
ttgcagacagattga

SEQ ID NO: 1402564 - DNA, 15 bp, Homo sapiens
gttgcagacagattg

SEQ ID NO: 1402565 - DNA, 15 bp, Homo sapiens
agttgcagacagatt

SEQ ID NO: 1402566 - DNA, 15 bp, Homo sapiens
aagttgcagacagat

SEQ ID NO: 1402567 - DNA, 15 bp, Homo sapiens
caagttgcagacaga

SEQ ID NO: 1402568 - DNA, 15 bp, Homo sapiens
ccaagttgcagacag

SEQ ID NO: 1402569 - DNA, 15 bp, Homo sapiens
accaagttgcagaca

SEQ ID NO: 1402570 - DNA, 15 bp, Homo sapiens
taccaagttgcagac

SEQ ID NO: 1402571 - DNA, 15 bp, Homo sapiens
ctaccaagttgcaga

SEQ ID NO: 1402572 - DNA, 15 bp, Homo sapiens
tctaccaagttgcag

SEQ ID NO: 1402573 - DNA, 15 bp, Homo sapiens
ttctaccaagttgca

SEQ ID NO: 1402574 - DNA, 15 bp, Homo sapiens
tttctaccaagttgc

SEQ ID NO: 1402575 - DNA, 15 bp, Homo sapiens
ctttctaccaagttg

SEQ ID NO: 1402576 - DNA, 15 bp, Homo sapiens
gctttctaccaagtt

SEQ ID NO: 1402577 - DNA, 15 bp, Homo sapiens
tgctttctaccaagt

SEQ ID NO: 1402578 - DNA, 15 bp, Homo sapiens
atgctttctaccaag

SEQ ID NO: 1402579 - DNA, 15 bp, Homo sapiens
aatgctttctaccaa

SEQ ID NO: 1402580 - DNA, 15 bp, Homo sapiens
aaatgctttctacca

SEQ ID NO: 1402581 - DNA, 15 bp, Homo sapiens
aaaatgctttctacc

SEQ ID NO: 1402582 - DNA, 15 bp, Homo sapiens
taaaatgctttctac

SEQ ID NO: 1402583 - DNA, 15 bp, Homo sapiens
ataaaatgctttcta

SEQ ID NO: 1402584 - DNA, 15 bp, Homo sapiens
aataaaatgctttct

SEQ ID NO: 1402585 - DNA, 15 bp, Homo sapiens
aaataaaatgctttc

SEQ ID NO: 1402586 - DNA, 15 bp, Homo sapiens
aaaataaaatgcttt

SEQ ID NO: 1402587 - DNA, 15 bp, Homo sapiens
aaaaataaaatgctt

SEQ ID NO: 1402588 - DNA, 15 bp, Homo sapiens
taaaaataaaatgct

SEQ ID NO: 1402589 - DNA, 15 bp, Homo sapiens
gtaaaaataaaatgc

SEQ ID NO: 1402590 - DNA, 15 bp, Homo sapiens
tgtaaaaataaaatg

SEQ ID NO: 1402591 - DNA, 15 bp, Homo sapiens
atgtaaaaataaaat

SEQ ID NO: 1402592 - DNA, 15 bp, Homo sapiens
aatgtaaaaataaaa

SEQ ID NO: 1402593 - DNA, 15 bp, Homo sapiens
aaatgtaaaaataaa

SEQ ID NO: 1402594 - DNA, 15 bp, Homo sapiens
aaaatgtaaaaataa

SEQ ID NO: 1402595 - DNA, 15 bp, Homo sapiens
aaaaatgtaaaaata

SEQ ID NO: 1402596 - DNA, 15 bp, Homo sapiens
taaaaatgtaaaaat

SEQ ID NO: 1402597 - DNA, 15 bp, Homo sapiens
gtaaaaatgtaaaaa

SEQ ID NO: 1402598 - DNA, 15 bp, Homo sapiens
ggtaaaaatgtaaaa

SEQ ID NO: 1402599 - DNA, 15 bp, Homo sapiens
gggtaaaaatgtaaa

SEQ ID NO: 1402600 - DNA, 15 bp, Homo sapiens
agggtaaaaatgtaa

SEQ ID NO: 1402601 - DNA, 15 bp, Homo sapiens
gagggtaaaaatgta

SEQ ID NO: 1402602 - DNA, 15 bp, Homo sapiens
agagggtaaaaatgt

SEQ ID NO: 1402603 - DNA, 15 bp, Homo sapiens
gagagggtaaaaatg

SEQ ID NO: 1402604 - DNA, 15 bp, Homo sapiens
agagagggtaaaaat

SEQ ID NO: 1402605 - DNA, 15 bp, Homo sapiens
gagagagggtaaaaa

SEQ ID NO: 1402606 - DNA, 15 bp, Homo sapiens
tgagagagggtaaaa

SEQ ID NO: 1402607 - DNA, 15 bp, Homo sapiens
gtgagagagggtaaa

SEQ ID NO: 1402608 - DNA, 15 bp, Homo sapiens
tgtgagagagggtaa

SEQ ID NO: 1402609 - DNA, 15 bp, Homo sapiens
atgtgagagagggta

SEQ ID NO: 1402610 - DNA, 15 bp, Homo sapiens
tatgtgagagagggt

SEQ ID NO: 1402611 - DNA, 15 bp, Homo sapiens
ctatgtgagagaggg

SEQ ID NO: 1402612 - DNA, 15 bp, Homo sapiens
actatgtgagagagg

SEQ ID NO: 1402613 - DNA, 15 bp, Homo sapiens
aactatgtgagagag

SEQ ID NO: 1402614 - DNA, 15 bp, Homo sapiens
aaactatgtgagaga

SEQ ID NO: 1402615 - DNA, 15 bp, Homo sapiens
aaaactatgtgagag

SEQ ID NO: 1402616 - DNA, 15 bp, Homo sapiens
aaaaactatgtgaga

SEQ ID NO: 1402617 - DNA, 15 bp, Homo sapiens
gaaaaactatgtgag

SEQ ID NO: 1402618 - DNA, 15 bp, Homo sapiens
agaaaaactatgtga

SEQ ID NO: 1402619 - DNA, 15 bp, Homo sapiens
aagaaaaactatgtg

SEQ ID NO: 1402620 - DNA, 15 bp, Homo sapiens
aaagaaaaactatgt

SEQ ID NO: 1402621 - DNA, 15 bp, Homo sapiens
taaagaaaaactatg

SEQ ID NO: 1402622 - DNA, 15 bp, Homo sapiens
ctaaagaaaaactat

SEQ ID NO: 1402623 - DNA, 15 bp, Homo sapiens
gctaaagaaaaacta

SEQ ID NO: 1402624 - DNA, 15 bp, Homo sapiens
ggctaaagaaaaact

SEQ ID NO: 1402625 - DNA, 15 bp, Homo sapiens
aggctaaagaaaaac

SEQ ID NO: 1402626 - DNA, 15 bp, Homo sapiens
aaggctaaagaaaaa

SEQ ID NO: 1402627 - DNA, 15 bp, Homo sapiens
aaaggctaaagaaaa

SEQ ID NO: 1402628 - DNA, 15 bp, Homo sapiens
taaaggctaaagaaa

SEQ ID NO: 1402629 - DNA, 15 bp, Homo sapiens
ttaaaggctaaagaa

SEQ ID NO: 1402630 - DNA, 15 bp, Homo sapiens
tttaaaggctaaaga

SEQ ID NO: 1402631 - DNA, 15 bp, Homo sapiens
gtttaaaggctaaag

SEQ ID NO: 1402632 - DNA, 15 bp, Homo sapiens
ggtttaaaggctaaa

SEQ ID NO: 1402633 - DNA, 15 bp, Homo sapiens
gggtttaaaggctaa

SEQ ID NO: 1402634 - DNA, 15 bp, Homo sapiens
tgggtttaaaggcta

SEQ ID NO: 1402635 - DNA, 15 bp, Homo sapiens
ctgggtttaaaggct

SEQ ID NO: 1402636 - DNA, 15 bp, Homo sapiens
actgggtttaaaggc

SEQ ID NO: 1402637 - DNA, 15 bp, Homo sapiens
cactgggtttaaagg

SEQ ID NO: 1402638 - DNA, 15 bp, Homo sapiens
gcactgggtttaaag

SEQ ID NO: 1402639 - DNA, 15 bp, Homo sapiens
ggcactgggtttaaa

SEQ ID NO: 1402640 - DNA, 15 bp, Homo sapiens
gggcactgggtttaa

SEQ ID NO: 1402641 - DNA, 15 bp, Homo sapiens
tgggcactgggttta

SEQ ID NO: 1402642 - DNA, 15 bp, Homo sapiens
ttgggcactgggttt

SEQ ID NO: 1402643 - DNA, 15 bp, Homo sapiens
gttgggcactgggtt

SEQ ID NO: 1402644 - DNA, 15 bp, Homo sapiens
ggttgggcactgggt

SEQ ID NO: 1402645 - DNA, 15 bp, Homo sapiens
aggttgggcactggg

SEQ ID NO: 1402646 - DNA, 15 bp, Homo sapiens
gaggttgggcactgg

SEQ ID NO: 1402647 - DNA, 15 bp, Homo sapiens
agaggttgggcactg

SEQ ID NO: 1402648 - DNA, 15 bp, Homo sapiens
aagaggttgggcact

SEQ ID NO: 1402649 - DNA, 15 bp, Homo sapiens
caagaggttgggcac

SEQ ID NO: 1402650 - DNA, 15 bp, Homo sapiens
acaagaggttgggca

SEQ ID NO: 1402651 - DNA, 15 bp, Homo sapiens
gacaagaggttgggc

SEQ ID NO: 1402652 - DNA, 15 bp, Homo sapiens
tgacaagaggttggg

SEQ ID NO: 1402653 - DNA, 15 bp, Homo sapiens
ttgacaagaggttgg

SEQ ID NO: 1402654 - DNA, 15 bp, Homo sapiens
gttgacaagaggttg

SEQ ID NO: 1402655 - DNA, 15 bp, Homo sapiens
tgttgacaagaggtt

SEQ ID NO: 1402656 - DNA, 15 bp, Homo sapiens
atgttgacaagaggt

SEQ ID NO: 1402657 - DNA, 15 bp, Homo sapiens
aatgttgacaagagg

SEQ ID NO: 1402658 - DNA, 15 bp, Homo sapiens
taatgttgacaagag

SEQ ID NO: 1402659 - DNA, 15 bp, Homo sapiens
ataatgttgacaaga

SEQ ID NO: 1402660 - DNA, 15 bp, Homo sapiens
cataatgttgacaag

SEQ ID NO: 1402661 - DNA, 15 bp, Homo sapiens
tcataatgttgacaa

SEQ ID NO: 1402662 - DNA, 15 bp, Homo sapiens
gtcataatgttgaca

SEQ ID NO: 1402663 - DNA, 15 bp, Homo sapiens
ggtcataatgttgac

SEQ ID NO: 1402664 - DNA, 15 bp, Homo sapiens
cggtcataatgttga

SEQ ID NO: 1402665 - DNA, 15 bp, Homo sapiens
tcggtcataatgttg

SEQ ID NO: 1402666 - DNA, 15 bp, Homo sapiens
ttcggtcataatgtt

SEQ ID NO: 1402667 - DNA, 15 bp, Homo sapiens
cttcggtcataatgt

SEQ ID NO: 1402668 - DNA, 15 bp, Homo sapiens
gcttcggtcataatg

SEQ ID NO: 1402669 - DNA, 15 bp, Homo sapiens
agcttcggtcataat

SEQ ID NO: 1402670 - DNA, 15 bp, Homo sapiens
cagcttcggtcataa

SEQ ID NO: 1402671 - DNA, 15 bp, Homo sapiens
acagcttcggtcata

SEQ ID NO: 1402672 - DNA, 15 bp, Homo sapiens
aacagcttcggtcat

SEQ ID NO: 1402673 - DNA, 15 bp, Homo sapiens
aaacagcttcggtca

SEQ ID NO: 1402674 - DNA, 15 bp, Homo sapiens
taaacagcttcggtc

SEQ ID NO: 1402675 - DNA, 15 bp, Homo sapiens
ttaaacagcttcggt

SEQ ID NO: 1402676 - DNA, 15 bp, Homo sapiens
cttaaacagcttcgg

SEQ ID NO: 1402677 - DNA, 15 bp, Homo sapiens
gcttaaacagcttcg

SEQ ID NO: 1402678 - DNA, 15 bp, Homo sapiens
agcttaaacagcttc

SEQ ID NO: 1402679 - DNA, 15 bp, Homo sapiens
cagcttaaacagctt

SEQ ID NO: 1402680 - DNA, 15 bp, Homo sapiens
tcagcttaaacagct

SEQ ID NO: 1402681 - DNA, 15 bp, Homo sapiens
atcagcttaaacagc

SEQ ID NO: 1402682 - DNA, 15 bp, Homo sapiens
tatcagcttaaacag

SEQ ID NO: 1402683 - DNA, 15 bp, Homo sapiens
ttatcagcttaaaca

SEQ ID NO: 1402684 - DNA, 15 bp, Homo sapiens
tttatcagcttaaac

SEQ ID NO: 1402685 - DNA, 15 bp, Homo sapiens
gtttatcagcttaaa

SEQ ID NO: 1402686 - DNA, 15 bp, Homo sapiens
agtttatcagcttaa

SEQ ID NO: 1402687 - DNA, 15 bp, Homo sapiens
cagtttatcagctta

SEQ ID NO: 1402688 - DNA, 15 bp, Homo sapiens
acagtttatcagctt

SEQ ID NO: 1402689 - DNA, 15 bp, Homo sapiens
gacagtttatcagct

SEQ ID NO: 1402690 - DNA, 15 bp, Homo sapiens
tgacagtttatcagc

SEQ ID NO: 1402691 - DNA, 15 bp, Homo sapiens
atgacagtttatcag

SEQ ID NO: 1402692 - DNA, 15 bp, Homo sapiens
catgacagtttatca

SEQ ID NO: 1402693 - DNA, 15 bp, Homo sapiens
gcatgacagtttatc

SEQ ID NO: 1402694 - DNA, 15 bp, Homo sapiens
agcatgacagtttat

SEQ ID NO: 1402695 - DNA, 15 bp, Homo sapiens
gagcatgacagttta

SEQ ID NO: 1402696 - DNA, 15 bp, Homo sapiens
agagcatgacagttt

SEQ ID NO: 1402697 - DNA, 15 bp, Homo sapiens
gagagcatgacagtt

SEQ ID NO: 1402698 - DNA, 15 bp, Homo sapiens
ggagagcatgacagt

SEQ ID NO: 1402699 - DNA, 15 bp, Homo sapiens
aggagagcatgacag

SEQ ID NO: 1402700 - DNA, 15 bp, Homo sapiens
caggagagcatgaca

SEQ ID NO: 1402701 - DNA, 15 bp, Homo sapiens
ccaggagagcatgac

SEQ ID NO: 1402702 - DNA, 15 bp, Homo sapiens
tccaggagagcatga

SEQ ID NO: 1402703 - DNA, 15 bp, Homo sapiens
ctccaggagagcatg

SEQ ID NO: 1402704 - DNA, 15 bp, Homo sapiens
gctccaggagagcat

SEQ ID NO: 1402705 - DNA, 15 bp, Homo sapiens
ggctccaggagagca

SEQ ID NO: 1402706 - DNA, 15 bp, Homo sapiens
tggctccaggagagc

SEQ ID NO: 1402707 - DNA, 15 bp, Homo sapiens
gtggctccaggagag

SEQ ID NO: 1402708 - DNA, 15 bp, Homo sapiens
agtggctccaggaga

SEQ ID NO: 1402709 - DNA, 15 bp, Homo sapiens
cagtggctccaggag

SEQ ID NO: 1402710 - DNA, 15 bp, Homo sapiens
ccagtggctccagga

SEQ ID NO: 1402711 - DNA, 15 bp, Homo sapiens
gccagtggctccagg

SEQ ID NO: 1402712 - DNA, 15 bp, Homo sapiens
agccagtggctccag

SEQ ID NO: 1402713 - DNA, 15 bp, Homo sapiens
cagccagtggctcca

SEQ ID NO: 1402714 - DNA, 15 bp, Homo sapiens
tcagccagtggctcc

SEQ ID NO: 1402715 - DNA, 15 bp, Homo sapiens
gtcagccagtggctc

SEQ ID NO: 1402716 - DNA, 15 bp, Homo sapiens
agtcagccagtggct

SEQ ID NO: 1402717 - DNA, 15 bp, Homo sapiens
tagtcagccagtggc

SEQ ID NO: 1402718 - DNA, 15 bp, Homo sapiens
ttagtcagccagtgg

SEQ ID NO: 1402719 - DNA, 15 bp, Homo sapiens
attagtcagccagtg

SEQ ID NO: 1402720 - DNA, 15 bp, Homo sapiens
cattagtcagccagt

SEQ ID NO: 1402721 - DNA, 15 bp, Homo sapiens
ccattagtcagccag

SEQ ID NO: 1402722 - DNA, 15 bp, Homo sapiens
cccattagtcagcca

SEQ ID NO: 1402723 - DNA, 15 bp, Homo sapiens
gcccattagtcagcc

SEQ ID NO: 1402724 - DNA, 15 bp, Homo sapiens
agcccattagtcagc

SEQ ID NO: 1402725 - DNA, 15 bp, Homo sapiens
gagcccattagtcag

SEQ ID NO: 1402726 - DNA, 15 bp, Homo sapiens
agagcccattagtca

SEQ ID NO: 1402727 - DNA, 15 bp, Homo sapiens
cagagcccattagtc

SEQ ID NO: 1402728 - DNA, 15 bp, Homo sapiens
ccagagcccattagt

SEQ ID NO: 1402729 - DNA, 15 bp, Homo sapiens
cccagagcccattag

SEQ ID NO: 1402730 - DNA, 15 bp, Homo sapiens
tcccagagcccatta

SEQ ID NO: 1402731 - DNA, 15 bp, Homo sapiens
ctcccagagcccatt

SEQ ID NO: 1402732 - DNA, 15 bp, Homo sapiens
gctcccagagcccat

SEQ ID NO: 1402733 - DNA, 15 bp, Homo sapiens
agctcccagagccca

SEQ ID NO: 1402734 - DNA, 15 bp, Homo sapiens
tagctcccagagccc

SEQ ID NO: 1402735 - DNA, 15 bp, Homo sapiens
gtagctcccagagcc

SEQ ID NO: 1402736 - DNA, 15 bp, Homo sapiens
tgtagctcccagagc

SEQ ID NO: 1402737 - DNA, 15 bp, Homo sapiens
ttgtagctcccagag

SEQ ID NO: 1402738 - DNA, 15 bp, Homo sapiens
cttgtagctcccaga

SEQ ID NO: 1402739 - DNA, 15 bp, Homo sapiens
tcttgtagctcccag

SEQ ID NO: 1402740 - DNA, 15 bp, Homo sapiens
ctcttgtagctccca

SEQ ID NO: 1402741 - DNA, 15 bp, Homo sapiens
cctcttgtagctccc

SEQ ID NO: 1402742 - DNA, 15 bp, Homo sapiens
ccctcttgtagctcc

SEQ ID NO: 1402743 - DNA, 15 bp, Homo sapiens
gccctcttgtagctc

SEQ ID NO: 1402744 - DNA, 15 bp, Homo sapiens
agccctcttgtagct

SEQ ID NO: 1402745 - DNA, 15 bp, Homo sapiens
gagccctcttgtagc

SEQ ID NO: 1402746 - DNA, 15 bp, Homo sapiens
tgagccctcttgtag

SEQ ID NO: 1402747 - DNA, 15 bp, Homo sapiens
ttgagccctcttgta

SEQ ID NO: 1402748 - DNA, 15 bp, Homo sapiens
cttgagccctcttgt

SEQ ID NO: 1402749 - DNA, 15 bp, Homo sapiens
ccttgagccctcttg

SEQ ID NO: 1402750 - DNA, 15 bp, Homo sapiens
cccttgagccctctt

SEQ ID NO: 1402751 - DNA, 15 bp, Homo sapiens
acccttgagccctct

SEQ ID NO: 1402752 - DNA, 15 bp, Homo sapiens
gacccttgagccctc

SEQ ID NO: 1402753 - DNA, 15 bp, Homo sapiens
ggacccttgagccct

SEQ ID NO: 1402754 - DNA, 15 bp, Homo sapiens
gggacccttgagccc

SEQ ID NO: 1402755 - DNA, 15 bp, Homo sapiens
agggacccttgagcc

SEQ ID NO: 1402756 - DNA, 15 bp, Homo sapiens
cagggacccttgagc

SEQ ID NO: 1402757 - DNA, 15 bp, Homo sapiens
gcagggacccttgag

SEQ ID NO: 1402758 - DNA, 15 bp, Homo sapiens
ggcagggacccttga

SEQ ID NO: 1402759 - DNA, 15 bp, Homo sapiens
aggcagggacccttg

SEQ ID NO: 1402760 - DNA, 15 bp, Homo sapiens
gaggcagggaccctt

SEQ ID NO: 1402761 - DNA, 15 bp, Homo sapiens
ggaggcagggaccct

SEQ ID NO: 1402762 - DNA, 15 bp, Homo sapiens
gggaggcagggaccc

SEQ ID NO: 1402763 - DNA, 15 bp, Homo sapiens
agggaggcagggacc

SEQ ID NO: 1402764 - DNA, 15 bp, Homo sapiens
aagggaggcagggac

SEQ ID NO: 1402765 - DNA, 15 bp, Homo sapiens
caagggaggcaggga

SEQ ID NO: 1402766 - DNA, 15 bp, Homo sapiens
ccaagggaggcaggg

SEQ ID NO: 1402767 - DNA, 15 bp, Homo sapiens
gccaagggaggcagg

SEQ ID NO: 1402768 - DNA, 15 bp, Homo sapiens
agccaagggaggcag

SEQ ID NO: 1402769 - DNA, 15 bp, Homo sapiens
tagccaagggaggca

SEQ ID NO: 1402770 - DNA, 15 bp, Homo sapiens
gtagccaagggaggc

SEQ ID NO: 1402771 - DNA, 15 bp, Homo sapiens
tgtagccaagggagg

SEQ ID NO: 1402772 - DNA, 15 bp, Homo sapiens
ttgtagccaagggag

SEQ ID NO: 1402773 - DNA, 15 bp, Homo sapiens
cttgtagccaaggga

SEQ ID NO: 1402774 - DNA, 15 bp, Homo sapiens
ccttgtagccaaggg

SEQ ID NO: 1402775 - DNA, 15 bp, Homo sapiens
gccttgtagccaagg

SEQ ID NO: 1402776 - DNA, 15 bp, Homo sapiens
agccttgtagccaag

SEQ ID NO: 1402777 - DNA, 15 bp, Homo sapiens
cagccttgtagccaa

SEQ ID NO: 1402778 - DNA, 15 bp, Homo sapiens
acagccttgtagcca

SEQ ID NO: 1402779 - DNA, 15 bp, Homo sapiens
gacagccttgtagcc

SEQ ID NO: 1402780 - DNA, 15 bp, Homo sapiens
tgacagccttgtagc

SEQ ID NO: 1402781 - DNA, 15 bp, Homo sapiens
gtgacagccttgtag

SEQ ID NO: 1402782 - DNA, 15 bp, Homo sapiens
agtgacagccttgta

SEQ ID NO: 1402783 - DNA, 15 bp, Homo sapiens
tagtgacagccttgt

SEQ ID NO: 1402784 - DNA, 15 bp, Homo sapiens
ctagtgacagccttg

SEQ ID NO: 1402785 - DNA, 15 bp, Homo sapiens
gctagtgacagcctt

SEQ ID NO: 1402786 - DNA, 15 bp, Homo sapiens
tgctagtgacagcct

SEQ ID NO: 1402787 - DNA, 15 bp, Homo sapiens
atgctagtgacagcc

SEQ ID NO: 1402788 - DNA, 15 bp, Homo sapiens
gatgctagtgacagc

SEQ ID NO: 1402789 - DNA, 15 bp, Homo sapiens
tgatgctagtgacag

SEQ ID NO: 1402790 - DNA, 15 bp, Homo sapiens
atgatgctagtgaca

SEQ ID NO: 1402791 - DNA, 15 bp, Homo sapiens
tatgatgctagtgac

SEQ ID NO: 1402792 - DNA, 15 bp, Homo sapiens
ttatgatgctagtga

SEQ ID NO: 1402793 - DNA, 15 bp, Homo sapiens
tttatgatgctagtg

SEQ ID NO: 1402794 - DNA, 15 bp, Homo sapiens
ttttatgatgctagt

SEQ ID NO: 1402795 - DNA, 15 bp, Homo sapiens
tttttatgatgctag

SEQ ID NO: 1402796 - DNA, 15 bp, Homo sapiens
ttttttatgatgcta

SEQ ID NO: 1402797 - DNA, 15 bp, Homo sapiens
gttttttatgatgct

SEQ ID NO: 1402798 - DNA, 15 bp, Homo sapiens
tgttttttatgatgc

SEQ ID NO: 1402799 - DNA, 15 bp, Homo sapiens
ctgttttttatgatg

SEQ ID NO: 1402800 - DNA, 15 bp, Homo sapiens
gctgttttttatgat

SEQ ID NO: 1402801 - DNA, 15 bp, Homo sapiens
tgctgttttttatga

SEQ ID NO: 1402802 - DNA, 15 bp, Homo sapiens
ctgctgttttttatg

SEQ ID NO: 1402803 - DNA, 15 bp, Homo sapiens
gctgctgttttttat

SEQ ID NO: 1402804 - DNA, 15 bp, Homo sapiens
agctgctgtttttta

SEQ ID NO: 1402805 - DNA, 15 bp, Homo sapiens
cagctgctgtttttt

SEQ ID NO: 1402806 - DNA, 15 bp, Homo sapiens
tcagctgctgttttt

SEQ ID NO: 1402807 - DNA, 15 bp, Homo sapiens
ctcagctgctgtttt

SEQ ID NO: 1402808 - DNA, 15 bp, Homo sapiens
actcagctgctgttt

SEQ ID NO: 1402809 - DNA, 15 bp, Homo sapiens
tactcagctgctgtt

SEQ ID NO: 1402810 - DNA, 15 bp, Homo sapiens
atactcagctgctgt

SEQ ID NO: 1402811 - DNA, 15 bp, Homo sapiens
aatactcagctgctg

SEQ ID NO: 1402812 - DNA, 15 bp, Homo sapiens
taatactcagctgct

SEQ ID NO: 1402813 - DNA, 15 bp, Homo sapiens
ttaatactcagctgc

SEQ ID NO: 1402814 - DNA, 15 bp, Homo sapiens
attaatactcagctg

SEQ ID NO: 1402815 - DNA, 15 bp, Homo sapiens
aattaatactcagct

SEQ ID NO: 1402816 - DNA, 15 bp, Homo sapiens
gaattaatactcagc

SEQ ID NO: 1402817 - DNA, 15 bp, Homo sapiens
tgaattaatactcag

SEQ ID NO: 1402818 - DNA, 15 bp, Homo sapiens
gtgaattaatactca

SEQ ID NO: 1402819 - DNA, 15 bp, Homo sapiens
agtgaattaatactc

SEQ ID NO: 1402820 - DNA, 15 bp, Homo sapiens
cagtgaattaatact

SEQ ID NO: 1402821 - DNA, 15 bp, Homo sapiens
acagtgaattaatac

SEQ ID NO: 1402822 - DNA, 15 bp, Homo sapiens
cacagtgaattaata

SEQ ID NO: 1402823 - DNA, 15 bp, Homo sapiens
ccacagtgaattaat

SEQ ID NO: 1402824 - DNA, 15 bp, Homo sapiens
accacagtgaattaa

SEQ ID NO: 1402825 - DNA, 15 bp, Homo sapiens
aaccacagtgaatta

SEQ ID NO: 1402826 - DNA, 15 bp, Homo sapiens
caaccacagtgaatt

SEQ ID NO: 1402827 - DNA, 15 bp, Homo sapiens
acaaccacagtgaat

SEQ ID NO: 1402828 - DNA, 15 bp, Homo sapiens
aacaaccacagtgaa

SEQ ID NO: 1402829 - DNA, 15 bp, Homo sapiens
caacaaccacagtga

SEQ ID NO: 1402830 - DNA, 15 bp, Homo sapiens
gcaacaaccacagtg

SEQ ID NO: 1402831 - DNA, 15 bp, Homo sapiens
agcaacaaccacagt

SEQ ID NO: 1402832 - DNA, 15 bp, Homo sapiens
aagcaacaaccacag

SEQ ID NO: 1402833 - DNA, 15 bp, Homo sapiens
caagcaacaaccaca

SEQ ID NO: 1402834 - DNA, 15 bp, Homo sapiens
acaagcaacaaccac

SEQ ID NO: 1402835 - DNA, 15 bp, Homo sapiens
cacaagcaacaacca

SEQ ID NO: 1402836 - DNA, 15 bp, Homo sapiens
tcacaagcaacaacc

SEQ ID NO: 1402837 - DNA, 15 bp, Homo sapiens
ttcacaagcaacaac

SEQ ID NO: 1402838 - DNA, 15 bp, Homo sapiens
attcacaagcaacaa

SEQ ID NO: 1402839 - DNA, 15 bp, Homo sapiens
tattcacaagcaaca

SEQ ID NO: 1402840 - DNA, 15 bp, Homo sapiens
gtattcacaagcaac

SEQ ID NO: 1402841 - DNA, 15 bp, Homo sapiens
ggtattcacaagcaa

SEQ ID NO: 1402842 - DNA, 15 bp, Homo sapiens
aggtattcacaagca

SEQ ID NO: 1402843 - DNA, 15 bp, Homo sapiens
gaggtattcacaagc

SEQ ID NO: 1402844 - DNA, 15 bp, Homo sapiens
tgaggtattcacaag

SEQ ID NO: 1402845 - DNA, 15 bp, Homo sapiens
ttgaggtattcacaa

SEQ ID NO: 1402846 - DNA, 15 bp, Homo sapiens
attgaggtattcaca

SEQ ID NO: 1402847 - DNA, 15 bp, Homo sapiens
cattgaggtattcac

SEQ ID NO: 1402848 - DNA, 15 bp, Homo sapiens
gcattgaggtattca

SEQ ID NO: 1402849 - DNA, 15 bp, Homo sapiens
ggcattgaggtattc

SEQ ID NO: 1402850 - DNA, 15 bp, Homo sapiens
gggcattgaggtatt

SEQ ID NO: 1402851 - DNA, 15 bp, Homo sapiens
tgggcattgaggtat

SEQ ID NO: 1402852 - DNA, 15 bp, Homo sapiens
atgggcattgaggta

SEQ ID NO: 1402853 - DNA, 15 bp, Homo sapiens
gatgggcattgaggt

SEQ ID NO: 1402854 - DNA, 15 bp, Homo sapiens
agatgggcattgagg

SEQ ID NO: 1402855 - DNA, 15 bp, Homo sapiens
gagatgggcattgag

SEQ ID NO: 1402856 - DNA, 15 bp, Homo sapiens
ggagatgggcattga

SEQ ID NO: 1402857 - DNA, 15 bp, Homo sapiens
aggagatgggcattg

SEQ ID NO: 1402858 - DNA, 15 bp, Homo sapiens
aaggagatgggcatt

SEQ ID NO: 1402859 - DNA, 15 bp, Homo sapiens
gaaggagatgggcat

SEQ ID NO: 1402860 - DNA, 15 bp, Homo sapiens
tgaaggagatgggca

SEQ ID NO: 1402861 - DNA, 15 bp, Homo sapiens
ctgaaggagatgggc

SEQ ID NO: 1402862 - DNA, 15 bp, Homo sapiens
cctgaaggagatggg

SEQ ID NO: 1402863 - DNA, 15 bp, Homo sapiens
tcctgaaggagatgg

SEQ ID NO: 1402864 - DNA, 15 bp, Homo sapiens
ctcctgaaggagatg

SEQ ID NO: 1402865 - DNA, 15 bp, Homo sapiens
actcctgaaggagat

SEQ ID NO: 1402866 - DNA, 15 bp, Homo sapiens
aactcctgaaggaga

SEQ ID NO: 1402867 - DNA, 15 bp, Homo sapiens
aaactcctgaaggag

SEQ ID NO: 1402868 - DNA, 15 bp, Homo sapiens
taaactcctgaagga

SEQ ID NO: 1402869 - DNA, 15 bp, Homo sapiens
ttaaactcctgaagg

SEQ ID NO: 1402870 - DNA, 15 bp, Homo sapiens
tttaaactcctgaag

SEQ ID NO: 1402871 - DNA, 15 bp, Homo sapiens
ttttaaactcctgaa

SEQ ID NO: 1402872 - DNA, 15 bp, Homo sapiens
gttttaaactcctga

SEQ ID NO: 1402873 - DNA, 15 bp, Homo sapiens
ggttttaaactcctg

SEQ ID NO: 1402874 - DNA, 15 bp, Homo sapiens
aggttttaaactcct

SEQ ID NO: 1402875 - DNA, 15 bp, Homo sapiens
gaggttttaaactcc

SEQ ID NO: 1402876 - DNA, 15 bp, Homo sapiens
agaggttttaaactc

SEQ ID NO: 1402877 - DNA, 15 bp, Homo sapiens
aagaggttttaaact

SEQ ID NO: 1402878 - DNA, 15 bp, Homo sapiens
aaagaggttttaaac

SEQ ID NO: 1402879 - DNA, 15 bp, Homo sapiens
aaaagaggttttaaa

SEQ ID NO: 1402880 - DNA, 15 bp, Homo sapiens
taaaagaggttttaa

SEQ ID NO: 1402881 - DNA, 15 bp, Homo sapiens
gtaaaagaggtttta

SEQ ID NO: 1402882 - DNA, 15 bp, Homo sapiens
agtaaaagaggtttt

SEQ ID NO: 1402883 - DNA, 15 bp, Homo sapiens
gagtaaaagaggttt

SEQ ID NO: 1402884 - DNA, 15 bp, Homo sapiens
tgagtaaaagaggtt

SEQ ID NO: 1402885 - DNA, 15 bp, Homo sapiens
gtgagtaaaagaggt

SEQ ID NO: 1402886 - DNA, 15 bp, Homo sapiens
ggtgagtaaaagagg

SEQ ID NO: 1402887 - DNA, 15 bp, Homo sapiens
tggtgagtaaaagag

SEQ ID NO: 1402888 - DNA, 15 bp, Homo sapiens
ctggtgagtaaaaga

SEQ ID NO: 1402889 - DNA, 15 bp, Homo sapiens
cctggtgagtaaaag

SEQ ID NO: 1402890 - DNA, 15 bp, Homo sapiens
tcctggtgagtaaaa

SEQ ID NO: 1402891 - DNA, 15 bp, Homo sapiens
ttcctggtgagtaaa

SEQ ID NO: 1402892 - DNA, 15 bp, Homo sapiens
attcctggtgagtaa

SEQ ID NO: 1402893 - DNA, 15 bp, Homo sapiens
aattcctggtgagta

SEQ ID NO: 1402894 - DNA, 15 bp, Homo sapiens
gaattcctggtgagt

SEQ ID NO: 1402895 - DNA, 15 bp, Homo sapiens
ggaattcctggtgag

SEQ ID NO: 1402896 - DNA, 15 bp, Homo sapiens
gggaattcctggtga

SEQ ID NO: 1402897 - DNA, 15 bp, Homo sapiens
tgggaattcctggtg

SEQ ID NO: 1402898 - DNA, 15 bp, Homo sapiens
ttgggaattcctggt

SEQ ID NO: 1402899 - DNA, 15 bp, Homo sapiens
tttgggaattcctgg

SEQ ID NO: 1402900 - DNA, 15 bp, Homo sapiens
ttttgggaattcctg

SEQ ID NO: 1402901 - DNA, 15 bp, Homo sapiens
gttttgggaattcct

SEQ ID NO: 1402902 - DNA, 15 bp, Homo sapiens
tgttttgggaattcc

SEQ ID NO: 1402903 - DNA, 15 bp, Homo sapiens
atgttttgggaattc

SEQ ID NO: 1402904 - DNA, 15 bp, Homo sapiens
catgttttgggaatt

SEQ ID NO: 1402905 - DNA, 15 bp, Homo sapiens
gcatgttttgggaat

SEQ ID NO: 1402906 - DNA, 15 bp, Homo sapiens
ggcatgttttgggaa

SEQ ID NO: 1402907 - DNA, 15 bp, Homo sapiens
gggcatgttttggga

SEQ ID NO: 1402908 - DNA, 15 bp, Homo sapiens
ggggcatgttttggg

SEQ ID NO: 1402909 - DNA, 15 bp, Homo sapiens
aggggcatgttttgg

SEQ ID NO: 1402910 - DNA, 15 bp, Homo sapiens
taggggcatgttttg

SEQ ID NO: 1402911 - DNA, 15 bp, Homo sapiens
ataggggcatgtttt

SEQ ID NO: 1402912 - DNA, 15 bp, Homo sapiens
cataggggcatgttt

SEQ ID NO: 1402913 - DNA, 15 bp, Homo sapiens
tcataggggcatgtt

SEQ ID NO: 1402914 - DNA, 15 bp, Homo sapiens
atcataggggcatgt

SEQ ID NO: 1402915 - DNA, 15 bp, Homo sapiens
aatcataggggcatg

SEQ ID NO: 1402916 - DNA, 15 bp, Homo sapiens
aaatcataggggcat

SEQ ID NO: 1402917 - DNA, 15 bp, Homo sapiens
caaatcataggggca

SEQ ID NO: 1402918 - DNA, 15 bp, Homo sapiens
tcaaatcataggggc

SEQ ID NO: 1402919 - DNA, 15 bp, Homo sapiens
ctcaaatcatagggg

SEQ ID NO: 1402920 - DNA, 15 bp, Homo sapiens
cctcaaatcataggg

SEQ ID NO: 1402921 - DNA, 15 bp, Homo sapiens
acctcaaatcatagg

SEQ ID NO: 1402922 - DNA, 15 bp, Homo sapiens
aacctcaaatcatag

SEQ ID NO: 1402923 - DNA, 15 bp, Homo sapiens
taacctcaaatcata

SEQ ID NO: 1402924 - DNA, 15 bp, Homo sapiens
ctaacctcaaatcat

SEQ ID NO: 1402925 - DNA, 15 bp, Homo sapiens
tctaacctcaaatca

SEQ ID NO: 1402926 - DNA, 15 bp, Homo sapiens
atctaacctcaaatc

SEQ ID NO: 1402927 - DNA, 15 bp, Homo sapiens
aatctaacctcaaat

SEQ ID NO: 1402928 - DNA, 15 bp, Homo sapiens
taatctaacctcaaa

SEQ ID NO: 1402929 - DNA, 15 bp, Homo sapiens
ttaatctaacctcaa

SEQ ID NO: 1402930 - DNA, 15 bp, Homo sapiens
tttaatctaacctca

SEQ ID NO: 1402931 - DNA, 15 bp, Homo sapiens
ttttaatctaacctc

SEQ ID NO: 1402932 - DNA, 15 bp, Homo sapiens
tttttaatctaacct

SEQ ID NO: 1402933 - DNA, 15 bp, Homo sapiens
atttttaatctaacc

SEQ ID NO: 1402934 - DNA, 15 bp, Homo sapiens
catttttaatctaac

SEQ ID NO: 1402935 - DNA, 15 bp, Homo sapiens
acatttttaatctaa

SEQ ID NO: 1402936 - DNA, 15 bp, Homo sapiens
tacatttttaatcta

SEQ ID NO: 1402937 - DNA, 15 bp, Homo sapiens
ctacatttttaatct

SEQ ID NO: 1402938 - DNA, 15 bp, Homo sapiens
actacatttttaatc

SEQ ID NO: 1402939 - DNA, 15 bp, Homo sapiens
aactacatttttaat

SEQ ID NO: 1402940 - DNA, 15 bp, Homo sapiens
aaactacatttttaa

SEQ ID NO: 1402941 - DNA, 15 bp, Homo sapiens
caaactacattttta

SEQ ID NO: 1402942 - DNA, 15 bp, Homo sapiens
ccaaactacattttt

SEQ ID NO: 1402943 - DNA, 15 bp, Homo sapiens
accaaactacatttt

SEQ ID NO: 1402944 - DNA, 15 bp, Homo sapiens
caccaaactacattt

SEQ ID NO: 1402945 - DNA, 15 bp, Homo sapiens
gcaccaaactacatt

SEQ ID NO: 1402946 - DNA, 15 bp, Homo sapiens
tgcaccaaactacat

SEQ ID NO: 1402947 - DNA, 15 bp, Homo sapiens
ttgcaccaaactaca

SEQ ID NO: 1402948 - DNA, 15 bp, Homo sapiens
tttgcaccaaactac

SEQ ID NO: 1402949 - DNA, 15 bp, Homo sapiens
tttttgcaccaaact

SEQ ID NO: 1402950 - DNA, 15 bp, Homo sapiens
ttttttgcaccaaac

SEQ ID NO: 1402951 - DNA, 15 bp, Homo sapiens
tttttttgcaccaaa

SEQ ID NO: 1402952 - DNA, 15 bp, Homo sapiens
ctttttttgcaccaa

SEQ ID NO: 1402953 - DNA, 15 bp, Homo sapiens
cctttttttgcacca

SEQ ID NO: 1402954 - DNA, 15 bp, Homo sapiens
tcctttttttgcacc

SEQ ID NO: 1402955 - DNA, 15 bp, Homo sapiens
ttcctttttttgcac

SEQ ID NO: 1402956 - DNA, 15 bp, Homo sapiens
cttcctttttttgca

SEQ ID NO: 1402957 - DNA, 15 bp, Homo sapiens
gcttcctttttttgc

SEQ ID NO: 1402958 - DNA, 15 bp, Homo sapiens
agcttcctttttttg

SEQ ID NO: 1402959 - DNA, 15 bp, Homo sapiens
tagcttccttttttt

SEQ ID NO: 1402960 - DNA, 15 bp, Homo sapiens
atagcttcctttttt

SEQ ID NO: 1402961 - DNA, 15 bp, Homo sapiens
tatagcttccttttt

SEQ ID NO: 1402962 - DNA, 15 bp, Homo sapiens
gtatagcttcctttt

SEQ ID NO: 1402963 - DNA, 15 bp, Homo sapiens
ggtatagcttccttt

SEQ ID NO: 1402964 - DNA, 15 bp, Homo sapiens
gggtatagcttcctt

SEQ ID NO: 1402965 - DNA, 15 bp, Homo sapiens
tgggtatagcttcct

SEQ ID NO: 1402966 - DNA, 15 bp, Homo sapiens
atgggtatagcttcc

SEQ ID NO: 1402967 - DNA, 15 bp, Homo sapiens
aatgggtatagcttc

SEQ ID NO: 1402968 - DNA, 15 bp, Homo sapiens
aaatgggtatagctt

SEQ ID NO: 1402969 - DNA, 15 bp, Homo sapiens
aaaatgggtatagct

SEQ ID NO: 1402970 - DNA, 15 bp, Homo sapiens
aaaaatgggtatagc

SEQ ID NO: 1402971 - DNA, 15 bp, Homo sapiens
aaaaaatgggtatag

SEQ ID NO: 1402972 - DNA, 15 bp, Homo sapiens
caaaaaatgggtata

SEQ ID NO: 1402973 - DNA, 15 bp, Homo sapiens
ccaaaaaatgggtat

SEQ ID NO: 1402974 - DNA, 15 bp, Homo sapiens
accaaaaaatgggta

SEQ ID NO: 1402975 - DNA, 15 bp, Homo sapiens
taccaaaaaatgggt

SEQ ID NO: 1402976 - DNA, 15 bp, Homo sapiens
ataccaaaaaatggg

SEQ ID NO: 1402977 - DNA, 15 bp, Homo sapiens
tataccaaaaaatgg

SEQ ID NO: 1402978 - DNA, 15 bp, Homo sapiens
atataccaaaaaatg

SEQ ID NO: 1402979 - DNA, 15 bp, Homo sapiens
catataccaaaaaat

SEQ ID NO: 1402980 - DNA, 15 bp, Homo sapiens
ccatataccaaaaaa

SEQ ID NO: 1402981 - DNA, 15 bp, Homo sapiens
gccatataccaaaaa

SEQ ID NO: 1402982 - DNA, 15 bp, Homo sapiens
tgccatataccaaaa

SEQ ID NO: 1402983 - DNA, 15 bp, Homo sapiens
atgccatataccaaa

SEQ ID NO: 1402984 - DNA, 15 bp, Homo sapiens
tatgccatataccaa

SEQ ID NO: 1402985 - DNA, 15 bp, Homo sapiens
ttatgccatatacca

SEQ ID NO: 1402986 - DNA, 15 bp, Homo sapiens
attatgccatatacc

SEQ ID NO: 1402987 - DNA, 15 bp, Homo sapiens
tattatgccatatac

SEQ ID NO: 1402988 - DNA, 15 bp, Homo sapiens
gtattatgccatata

SEQ ID NO: 1402989 - DNA, 15 bp, Homo sapiens
agtattatgccatat

SEQ ID NO: 1402990 - DNA, 15 bp, Homo sapiens
tagtattatgccata

SEQ ID NO: 1402991 - DNA, 15 bp, Homo sapiens
atagtattatgccat

SEQ ID NO: 1402992 - DNA, 15 bp, Homo sapiens
tatagtattatgcca

SEQ ID NO: 1402993 - DNA, 15 bp, Homo sapiens
atatagtattatgcc

SEQ ID NO: 1402994 - DNA, 15 bp, Homo sapiens
tatatagtattatgc

SEQ ID NO: 1402995 - DNA, 15 bp, Homo sapiens
atatatagtattatg

SEQ ID NO: 1402996 - DNA, 15 bp, Homo sapiens
gatatatagtattat

SEQ ID NO: 1402997 - DNA, 15 bp, Homo sapiens
agatatatagtatta

SEQ ID NO: 1402998 - DNA, 15 bp, Homo sapiens
cagatatatagtatt

SEQ ID NO: 1402999 - DNA, 15 bp, Homo sapiens
acagatatatagtat

SEQ ID NO: 1403000 - DNA, 15 bp, Homo sapiens
aacagatatatagta

SEQ ID NO: 1403001 - DNA, 15 bp, Homo sapiens
gaacagatatatagt

SEQ ID NO: 1403002 - DNA, 15 bp, Homo sapiens
agaacagatatatag

SEQ ID NO: 1403003 - DNA, 15 bp, Homo sapiens
cagaacagatatata

SEQ ID NO: 1403004 - DNA, 15 bp, Homo sapiens
tcagaacagatatat

SEQ ID NO: 1403005 - DNA, 15 bp, Homo sapiens
atcagaacagatata

SEQ ID NO: 1403006 - DNA, 15 bp, Homo sapiens
catcagaacagatat

SEQ ID NO: 1403007 - DNA, 15 bp, Homo sapiens
tcatcagaacagata

SEQ ID NO: 1403008 - DNA, 15 bp, Homo sapiens
atcatcagaacagat

SEQ ID NO: 1403009 - DNA, 15 bp, Homo sapiens
catcatcagaacaga

SEQ ID NO: 1403010 - DNA, 15 bp, Homo sapiens
acatcatcagaacag

SEQ ID NO: 1403011 - DNA, 15 bp, Homo sapiens
tacatcatcagaaca

SEQ ID NO: 1403012 - DNA, 15 bp, Homo sapiens
ctacatcatcagaac

SEQ ID NO: 1403013 - DNA, 15 bp, Homo sapiens
tctacatcatcagaa

SEQ ID NO: 1403014 - DNA, 15 bp, Homo sapiens
ttctacatcatcaga

SEQ ID NO: 1403015 - DNA, 15 bp, Homo sapiens
tttctacatcatcag

SEQ ID NO: 1403016 - DNA, 15 bp, Homo sapiens
ttttctacatcatca

SEQ ID NO: 1403017 - DNA, 15 bp, Homo sapiens
tttttctacatcatc

SEQ ID NO: 1403018 - DNA, 15 bp, Homo sapiens
atttttctacatcat

SEQ ID NO: 1403019 - DNA, 15 bp, Homo sapiens
ggatttttctacatc

SEQ ID NO: 1403020 - DNA, 15 bp, Homo sapiens
tggatttttctacat

SEQ ID NO: 1403021 - DNA, 15 bp, Homo sapiens
ttggatttttctaca

SEQ ID NO: 1403022 - DNA, 15 bp, Homo sapiens
tttggatttttctac

SEQ ID NO: 1403023 - DNA, 15 bp, Homo sapiens
atttggatttttcta

SEQ ID NO: 1403024 - DNA, 15 bp, Homo sapiens
aatttggatttttct

SEQ ID NO: 1403025 - DNA, 15 bp, Homo sapiens
gaatttggatttttc

SEQ ID NO: 1403026 - DNA, 15 bp, Homo sapiens
tgaatttggattttt

SEQ ID NO: 1403027 - DNA, 15 bp, Homo sapiens
ctgaatttggatttt

SEQ ID NO: 1403028 - DNA, 15 bp, Homo sapiens
actgaatttggattt

SEQ ID NO: 1403029 - DNA, 15 bp, Homo sapiens
aactgaatttggatt

SEQ ID NO: 1403030 - DNA, 15 bp, Homo sapiens
aaactgaatttggat

SEQ ID NO: 1403031 - DNA, 15 bp, Homo sapiens
gaaactgaatttgga

SEQ ID NO: 1403032 - DNA, 15 bp, Homo sapiens
agaaactgaatttgg

SEQ ID NO: 1403033 - DNA, 15 bp, Homo sapiens
gagaaactgaatttg

SEQ ID NO: 1403034 - DNA, 15 bp, Homo sapiens
ggagaaactgaattt

SEQ ID NO: 1403035 - DNA, 15 bp, Homo sapiens
aggagaaactgaatt

SEQ ID NO: 1403036 - DNA, 15 bp, Homo sapiens
taggagaaactgaat

SEQ ID NO: 1403037 - DNA, 15 bp, Homo sapiens
gtaggagaaactgaa

SEQ ID NO: 1403038 - DNA, 15 bp, Homo sapiens
agtaggagaaactga

SEQ ID NO: 1403039 - DNA, 15 bp, Homo sapiens
tagtaggagaaactg

SEQ ID NO: 1403040 - DNA, 15 bp, Homo sapiens
atagtaggagaaact

SEQ ID NO: 1403041 - DNA, 15 bp, Homo sapiens
tatagtaggagaaac

SEQ ID NO: 1403042 - DNA, 15 bp, Homo sapiens
gtatagtaggagaaa

SEQ ID NO: 1403043 - DNA, 15 bp, Homo sapiens
agtatagtaggagaa

SEQ ID NO: 1403044 - DNA, 15 bp, Homo sapiens
gagtatagtaggaga

SEQ ID NO: 1403045 - DNA, 15 bp, Homo sapiens
agagtatagtaggag

SEQ ID NO: 1403046 - DNA, 15 bp, Homo sapiens
gagagtatagtagga

SEQ ID NO: 1403047 - DNA, 15 bp, Homo sapiens
tgagagtatagtagg

SEQ ID NO: 1403048 - DNA, 15 bp, Homo sapiens
gtgagagtatagtag

SEQ ID NO: 1403049 - DNA, 15 bp, Homo sapiens
tgtgagagtatagta

SEQ ID NO: 1403050 - DNA, 15 bp, Homo sapiens
ttgtgagagtatagt

SEQ ID NO: 1403051 - DNA, 15 bp, Homo sapiens
gttgtgagagtatag

SEQ ID NO: 1403052 - DNA, 15 bp, Homo sapiens
tgttgtgagagtata

SEQ ID NO: 1403053 - DNA, 15 bp, Homo sapiens
gtgttgtgagagtat

SEQ ID NO: 1403054 - DNA, 15 bp, Homo sapiens
tgtgttgtgagagta

SEQ ID NO: 1403055 - DNA, 15 bp, Homo sapiens
gtgtgttgtgagagt

SEQ ID NO: 1403056 - DNA, 15 bp, Homo sapiens
agtgtgttgtgagag

SEQ ID NO: 1403057 - DNA, 15 bp, Homo sapiens
cagtgtgttgtgaga

SEQ ID NO: 1403058 - DNA, 15 bp, Homo sapiens
gcagtgtgttgtgag

SEQ ID NO: 1403059 - DNA, 15 bp, Homo sapiens
agcagtgtgttgtga

SEQ ID NO: 1403060 - DNA, 15 bp, Homo sapiens
tagcagtgtgttgtg

SEQ ID NO: 1403061 - DNA, 15 bp, Homo sapiens
ttagcagtgtgttgt

SEQ ID NO: 1403062 - DNA, 15 bp, Homo sapiens
gttagcagtgtgttg

SEQ ID NO: 1403063 - DNA, 15 bp, Homo sapiens
agttagcagtgtgtt

SEQ ID NO: 1403064 - DNA, 15 bp, Homo sapiens
gagttagcagtgtgt

SEQ ID NO: 1403065 - DNA, 15 bp, Homo sapiens
agagttagcagtgtg

SEQ ID NO: 1403066 - DNA, 15 bp, Homo sapiens
cagagttagcagtgt

SEQ ID NO: 1403067 - DNA, 15 bp, Homo sapiens
ccagagttagcagtg

SEQ ID NO: 1403068 - DNA, 15 bp, Homo sapiens
cccagagttagcagt

SEQ ID NO: 1403069 - DNA, 15 bp, Homo sapiens
acccagagttagcag

SEQ ID NO: 1403070 - DNA, 15 bp, Homo sapiens
cacccagagttagca

SEQ ID NO: 1403071 - DNA, 15 bp, Homo sapiens
acacccagagttagc

SEQ ID NO: 1403072 - DNA, 15 bp, Homo sapiens
cacacccagagttag

SEQ ID NO: 1403073 - DNA, 15 bp, Homo sapiens
acacacccagagtta

SEQ ID NO: 1403074 - DNA, 15 bp, Homo sapiens
cacacacccagagtt

SEQ ID NO: 1403075 - DNA, 15 bp, Homo sapiens
acacacacccagagt

SEQ ID NO: 1403076 - DNA, 15 bp, Homo sapiens
cacacacacccagag

SEQ ID NO: 1403077 - DNA, 15 bp, Homo sapiens
ccacacacacccaga

SEQ ID NO: 1403078 - DNA, 15 bp, Homo sapiens
cccacacacacccag

SEQ ID NO: 1403079 - DNA, 15 bp, Homo sapiens
ccccacacacaccca

SEQ ID NO: 1403080 - DNA, 15 bp, Homo sapiens
gccccacacacaccc

SEQ ID NO: 1403081 - DNA, 15 bp, Homo sapiens
agccccacacacacc

SEQ ID NO: 1403082 - DNA, 15 bp, Homo sapiens
aagccccacacacac

SEQ ID NO: 1403083 - DNA, 15 bp, Homo sapiens
aaagccccacacaca

SEQ ID NO: 1403084 - DNA, 15 bp, Homo sapiens
aaaagccccacacac

SEQ ID NO: 1403085 - DNA, 15 bp, Homo sapiens
gaaaagccccacaca

SEQ ID NO: 1403086 - DNA, 15 bp, Homo sapiens
ggaaaagccccacac

SEQ ID NO: 1403087 - DNA, 15 bp, Homo sapiens
gggaaaagccccaca

SEQ ID NO: 1403088 - DNA, 15 bp, Homo sapiens
ggggaaaagccccac

SEQ ID NO: 1403089 - DNA, 15 bp, Homo sapiens
tggggaaaagcccca

SEQ ID NO: 1403090 - DNA, 15 bp, Homo sapiens
gtggggaaaagcccc

SEQ ID NO: 1403091 - DNA, 15 bp, Homo sapiens
tgtggggaaaagccc

SEQ ID NO: 1403092 - DNA, 15 bp, Homo sapiens
gtgtggggaaaagcc

SEQ ID NO: 1403093 - DNA, 15 bp, Homo sapiens
tgtgtggggaaaagc

SEQ ID NO: 1403094 - DNA, 15 bp, Homo sapiens
atgtgtggggaaaag

SEQ ID NO: 1403095 - DNA, 15 bp, Homo sapiens
tatgtgtggggaaaa

SEQ ID NO: 1403096 - DNA, 15 bp, Homo sapiens
ttatgtgtggggaaa

SEQ ID NO: 1403097 - DNA, 15 bp, Homo sapiens
attatgtgtggggaa

SEQ ID NO: 1403098 - DNA, 15 bp, Homo sapiens
cattatgtgtgggga

SEQ ID NO: 1403099 - DNA, 15 bp, Homo sapiens
tcattatgtgtgggg

SEQ ID NO: 1403100 - DNA, 15 bp, Homo sapiens
ttcattatgtgtggg

SEQ ID NO: 1403101 - DNA, 15 bp, Homo sapiens
cttcattatgtgtgg

SEQ ID NO: 1403102 - DNA, 15 bp, Homo sapiens
ccttcattatgtgtg

SEQ ID NO: 1403103 - DNA, 15 bp, Homo sapiens
accttcattatgtgt

SEQ ID NO: 1403104 - DNA, 15 bp, Homo sapiens
caccttcattatgtg

SEQ ID NO: 1403105 - DNA, 15 bp, Homo sapiens
tcaccttcattatgt

SEQ ID NO: 1403106 - DNA, 15 bp, Homo sapiens
ctcaccttcattatg

SEQ ID NO: 1403107 - DNA, 15 bp, Homo sapiens
gctcaccttcattat

SEQ ID NO: 1403108 - DNA, 15 bp, Homo sapiens
agctcaccttcatta

SEQ ID NO: 1403109 - DNA, 15 bp, Homo sapiens
gagctcaccttcatt

SEQ ID NO: 1403110 - DNA, 15 bp, Homo sapiens
tgagctcaccttcat

SEQ ID NO: 1403111 - DNA, 15 bp, Homo sapiens
ctgagctcaccttca

SEQ ID NO: 1403112 - DNA, 15 bp, Homo sapiens
tctgagctcaccttc

SEQ ID NO: 1403113 - DNA, 15 bp, Homo sapiens
ttctgagctcacctt

SEQ ID NO: 1403114 - DNA, 15 bp, Homo sapiens
attctgagctcacct

SEQ ID NO: 1403115 - DNA, 15 bp, Homo sapiens
tattctgagctcacc

SEQ ID NO: 1403116 - DNA, 15 bp, Homo sapiens
ttattctgagctcac

SEQ ID NO: 1403117 - DNA, 15 bp, Homo sapiens
attattctgagctca

SEQ ID NO: 1403118 - DNA, 15 bp, Homo sapiens
tattattctgagctc

SEQ ID NO: 1403119 - DNA, 15 bp, Homo sapiens
ttattattctgagct

SEQ ID NO: 1403120 - DNA, 15 bp, Homo sapiens
tttattattctgagc

SEQ ID NO: 1403121 - DNA, 15 bp, Homo sapiens
ttttattattctgag

SEQ ID NO: 1403122 - DNA, 15 bp, Homo sapiens
attttattattctga

SEQ ID NO: 1403123 - DNA, 15 bp, Homo sapiens
tattttattattctg

SEQ ID NO: 1403124 - DNA, 15 bp, Homo sapiens
ttattttattattct

SEQ ID NO: 1403125 - DNA, 15 bp, Homo sapiens
attattttattattc

SEQ ID NO: 1403126 - DNA, 15 bp, Homo sapiens
aattattttattatt

SEQ ID NO: 1403127 - DNA, 15 bp, Homo sapiens
aaattattttattat

SEQ ID NO: 1403128 - DNA, 15 bp, Homo sapiens
aaaattattttatta

SEQ ID NO: 1403129 - DNA, 15 bp, Homo sapiens
gaaaattattttatt

SEQ ID NO: 1403130 - DNA, 15 bp, Homo sapiens
ggaaaattattttat

SEQ ID NO: 1403131 - DNA, 15 bp, Homo sapiens
gggaaaattatttta

SEQ ID NO: 1403132 - DNA, 15 bp, Homo sapiens
tgggaaaattatttt

SEQ ID NO: 1403133 - DNA, 15 bp, Homo sapiens
ctgggaaaattattt

SEQ ID NO: 1403134 - DNA, 15 bp, Homo sapiens
tctgggaaaattatt

SEQ ID NO: 1403135 - DNA, 15 bp, Homo sapiens
ctctgggaaaattat

SEQ ID NO: 1403136 - DNA, 15 bp, Homo sapiens
actctgggaaaatta

SEQ ID NO: 1403137 - DNA, 15 bp, Homo sapiens
aactctgggaaaatt

SEQ ID NO: 1403138 - DNA, 15 bp, Homo sapiens
taactctgggaaaat

SEQ ID NO: 1403139 - DNA, 15 bp, Homo sapiens
gtaactctgggaaaa

SEQ ID NO: 1403140 - DNA, 15 bp, Homo sapiens
tgtaactctgggaaa

SEQ ID NO: 1403141 - DNA, 15 bp, Homo sapiens
gtgtaactctgggaa

SEQ ID NO: 1403142 - DNA, 15 bp, Homo sapiens
tgtgtaactctggga

SEQ ID NO: 1403143 - DNA, 15 bp, Homo sapiens
atgtgtaactctggg

SEQ ID NO: 1403144 - DNA, 15 bp, Homo sapiens
aatgtgtaactctgg

SEQ ID NO: 1403145 - DNA, 15 bp, Homo sapiens
gaatgtgtaactctg

SEQ ID NO: 1403146 - DNA, 15 bp, Homo sapiens
tgaatgtgtaactct

SEQ ID NO: 1403147 - DNA, 15 bp, Homo sapiens
gtgaatgtgtaactc

SEQ ID NO: 1403148 - DNA, 15 bp, Homo sapiens
agtgaatgtgtaact

SEQ ID NO: 1403149 - DNA, 15 bp, Homo sapiens
tagtgaatgtgtaac

SEQ ID NO: 1403150 - DNA, 15 bp, Homo sapiens
ttagtgaatgtgtaa

SEQ ID NO: 1403151 - DNA, 15 bp, Homo sapiens
gttagtgaatgtgta

SEQ ID NO: 1403152 - DNA, 15 bp, Homo sapiens
agttagtgaatgtgt

SEQ ID NO: 1403153 - DNA, 15 bp, Homo sapiens
tagttagtgaatgtg

SEQ ID NO: 1403154 - DNA, 15 bp, Homo sapiens
ttagttagtgaatgt

SEQ ID NO: 1403155 - DNA, 15 bp, Homo sapiens
attagttagtgaatg

SEQ ID NO: 1403156 - DNA, 15 bp, Homo sapiens
aattagttagtgaat

SEQ ID NO: 1403157 - DNA, 15 bp, Homo sapiens
taattagttagtgaa

SEQ ID NO: 1403158 - DNA, 15 bp, Homo sapiens
ataattagttagtga

SEQ ID NO: 1403159 - DNA, 15 bp, Homo sapiens
cataattagttagtg

SEQ ID NO: 1403160 - DNA, 15 bp, Homo sapiens
acataattagttagt

SEQ ID NO: 1403161 - DNA, 15 bp, Homo sapiens
gacataattagttag

SEQ ID NO: 1403162 - DNA, 15 bp, Homo sapiens
agacataattagtta

SEQ ID NO: 1403163 - DNA, 15 bp, Homo sapiens
cagacataattagtt

SEQ ID NO: 1403164 - DNA, 15 bp, Homo sapiens
tcagacataattagt

SEQ ID NO: 1403165 - DNA, 15 bp, Homo sapiens
ttcagacataattag

SEQ ID NO: 1403166 - DNA, 15 bp, Homo sapiens
attcagacataatta

SEQ ID NO: 1403167 - DNA, 15 bp, Homo sapiens
aattcagacataatt

SEQ ID NO: 1403168 - DNA, 15 bp, Homo sapiens
taattcagacataat

SEQ ID NO: 1403169 - DNA, 15 bp, Homo sapiens
ttaattcagacataa

SEQ ID NO: 1403170 - DNA, 15 bp, Homo sapiens
tttaattcagacata

SEQ ID NO: 1403171 - DNA, 15 bp, Homo sapiens
ttttaattcagacat

SEQ ID NO: 1403172 - DNA, 15 bp, Homo sapiens
attttaattcagaca

SEQ ID NO: 1403173 - DNA, 15 bp, Homo sapiens
gattttaattcagac

SEQ ID NO: 1403174 - DNA, 15 bp, Homo sapiens
agattttaattcaga

SEQ ID NO: 1403175 - DNA, 15 bp, Homo sapiens
tagattttaattcag

SEQ ID NO: 1403176 - DNA, 15 bp, Homo sapiens
ttagattttaattca

SEQ ID NO: 1403177 - DNA, 15 bp, Homo sapiens
cttagattttaattc

SEQ ID NO: 1403178 - DNA, 15 bp, Homo sapiens
acttagattttaatt

SEQ ID NO: 1403179 - DNA, 15 bp, Homo sapiens
tacttagattttaat

SEQ ID NO: 1403180 - DNA, 15 bp, Homo sapiens
atacttagattttaa

SEQ ID NO: 1403181 - DNA, 15 bp, Homo sapiens
aatacttagatttta

SEQ ID NO: 1403182 - DNA, 15 bp, Homo sapiens
aaatacttagatttt

SEQ ID NO: 1403183 - DNA, 15 bp, Homo sapiens
aaaatacttagattt

SEQ ID NO: 1403184 - DNA, 15 bp, Homo sapiens
aaaaatacttagatt

SEQ ID NO: 1403185 - DNA, 15 bp, Homo sapiens
taaaaatacttagat

SEQ ID NO: 1403186 - DNA, 15 bp, Homo sapiens
gtaaaaatacttaga

SEQ ID NO: 1403187 - DNA, 15 bp, Homo sapiens
agtaaaaatacttag

SEQ ID NO: 1403188 - DNA, 15 bp, Homo sapiens
aagtaaaaatactta

SEQ ID NO: 1403189 - DNA, 15 bp, Homo sapiens
gaagtaaaaatactt

SEQ ID NO: 1403190 - DNA, 15 bp, Homo sapiens
tgaagtaaaaatact

SEQ ID NO: 1403191 - DNA, 15 bp, Homo sapiens
atgaagtaaaaatac

SEQ ID NO: 1403192 - DNA, 15 bp, Homo sapiens
gatgaagtaaaaata

SEQ ID NO: 1403193 - DNA, 15 bp, Homo sapiens
tgatgaagtaaaaat

SEQ ID NO: 1403194 - DNA, 15 bp, Homo sapiens
atgatgaagtaaaaa

SEQ ID NO: 1403195 - DNA, 15 bp, Homo sapiens
catgatgaagtaaaa

SEQ ID NO: 1403196 - DNA, 15 bp, Homo sapiens
gcatgatgaagtaaa

SEQ ID NO: 1403197 - DNA, 15 bp, Homo sapiens
agcatgatgaagtaa

SEQ ID NO: 1403198 - DNA, 15 bp, Homo sapiens
aagcatgatgaagta

SEQ ID NO: 1403199 - DNA, 15 bp, Homo sapiens
caagcatgatgaagt

SEQ ID NO: 1403200 - DNA, 15 bp, Homo sapiens
gcaagcatgatgaag

SEQ ID NO: 1403201 - DNA, 15 bp, Homo sapiens
agcaagcatgatgaa

SEQ ID NO: 1403202 - DNA, 15 bp, Homo sapiens
gagcaagcatgatga

SEQ ID NO: 1403203 - DNA, 15 bp, Homo sapiens
agagcaagcatgatg

SEQ ID NO: 1403204 - DNA, 15 bp, Homo sapiens
aagagcaagcatgat

SEQ ID NO: 1403205 - DNA, 15 bp, Homo sapiens
taagagcaagcatga

SEQ ID NO: 1403206 - DNA, 15 bp, Homo sapiens
ttaagagcaagcatg

SEQ ID NO: 1403207 - DNA, 15 bp, Homo sapiens
tttaagagcaagcat

SEQ ID NO: 1403208 - DNA, 15 bp, Homo sapiens
ttttaagagcaagca

SEQ ID NO: 1403209 - DNA, 15 bp, Homo sapiens
cttttaagagcaagc

SEQ ID NO: 1403210 - DNA, 15 bp, Homo sapiens
tcttttaagagcaag

SEQ ID NO: 1403211 - DNA, 15 bp, Homo sapiens
ctcttttaagagcaa

SEQ ID NO: 1403212 - DNA, 15 bp, Homo sapiens
actcttttaagagca

SEQ ID NO: 1403213 - DNA, 15 bp, Homo sapiens
tactcttttaagagc

SEQ ID NO: 1403214 - DNA, 15 bp, Homo sapiens
ttactcttttaagag

SEQ ID NO: 1403215 - DNA, 15 bp, Homo sapiens
tttactcttttaaga

SEQ ID NO: 1403216 - DNA, 15 bp, Homo sapiens
ttttactcttttaag

SEQ ID NO: 1403217 - DNA, 15 bp, Homo sapiens
gttttactcttttaa

SEQ ID NO: 1403218 - DNA, 15 bp, Homo sapiens
tgttttactctttta

SEQ ID NO: 1403219 - DNA, 15 bp, Homo sapiens
atgttttactctttt

SEQ ID NO: 1403220 - DNA, 15 bp, Homo sapiens
aatgttttactcttt

SEQ ID NO: 1403221 - DNA, 15 bp, Homo sapiens
taatgttttactctt

SEQ ID NO: 1403222 - DNA, 15 bp, Homo sapiens
ctaatgttttactct

SEQ ID NO: 1403223 - DNA, 15 bp, Homo sapiens
tctaatgttttactc

SEQ ID NO: 1403224 - DNA, 15 bp, Homo sapiens
ctctaatgttttact

SEQ ID NO: 1403225 - DNA, 15 bp, Homo sapiens
gctctaatgttttac

SEQ ID NO: 1403226 - DNA, 15 bp, Homo sapiens
tgctctaatgtttta

SEQ ID NO: 1403227 - DNA, 15 bp, Homo sapiens
atgctctaatgtttt

SEQ ID NO: 1403228 - DNA, 15 bp, Homo sapiens
gatgctctaatgttt

SEQ ID NO: 1403229 - DNA, 15 bp, Homo sapiens
ggatgctctaatgtt

SEQ ID NO: 1403230 - DNA, 15 bp, Homo sapiens
gggatgctctaatgt

SEQ ID NO: 1403231 - DNA, 15 bp, Homo sapiens
ggggatgctctaatg

SEQ ID NO: 1403232 - DNA, 15 bp, Homo sapiens
aggggatgctctaat

SEQ ID NO: 1403233 - DNA, 15 bp, Homo sapiens
aaggggatgctctaa

SEQ ID NO: 1403234 - DNA, 15 bp, Homo sapiens
caaggggatgctcta

SEQ ID NO: 1403235 - DNA, 15 bp, Homo sapiens
tcaaggggatgctct

SEQ ID NO: 1403236 - DNA, 15 bp, Homo sapiens
ctcaaggggatgctc

SEQ ID NO: 1403237 - DNA, 15 bp, Homo sapiens
tctcaaggggatgct

SEQ ID NO: 1403238 - DNA, 15 bp, Homo sapiens
ctctcaaggggatgc

SEQ ID NO: 1403239 - DNA, 15 bp, Homo sapiens
tctctcaaggggatg

SEQ ID NO: 1403240 - DNA, 15 bp, Homo sapiens
ttctctcaaggggat

SEQ ID NO: 1403241 - DNA, 15 bp, Homo sapiens
attctctcaagggga

SEQ ID NO: 1403242 - DNA, 15 bp, Homo sapiens
tattctctcaagggg

SEQ ID NO: 1403243 - DNA, 15 bp, Homo sapiens
ttattctctcaaggg

SEQ ID NO: 1403244 - DNA, 15 bp, Homo sapiens
tttattctctcaagg

SEQ ID NO: 1403245 - DNA, 15 bp, Homo sapiens
ctttattctctcaag

SEQ ID NO: 1403246 - DNA, 15 bp, Homo sapiens
tctttattctctcaa

SEQ ID NO: 1403247 - DNA, 15 bp, Homo sapiens
gtctttattctctca

SEQ ID NO: 1403248 - DNA, 15 bp, Homo sapiens
tgtctttattctctc

SEQ ID NO: 1403249 - DNA, 15 bp, Homo sapiens
ttgtctttattctct

SEQ ID NO: 1403250 - DNA, 15 bp, Homo sapiens
cttgtctttattctc

SEQ ID NO: 1403251 - DNA, 15 bp, Homo sapiens
tcttgtctttattct

SEQ ID NO: 1403252 - DNA, 15 bp, Homo sapiens
ctcttgtctttattc

SEQ ID NO: 1403253 - DNA, 15 bp, Homo sapiens
actcttgtctttatt

SEQ ID NO: 1403254 - DNA, 15 bp, Homo sapiens
aactcttgtctttat

SEQ ID NO: 1403255 - DNA, 15 bp, Homo sapiens
gaactcttgtcttta

SEQ ID NO: 1403256 - DNA, 15 bp, Homo sapiens
agaactcttgtcttt

SEQ ID NO: 1403257 - DNA, 15 bp, Homo sapiens
cagaactcttgtctt

SEQ ID NO: 1403258 - DNA, 15 bp, Homo sapiens
tcagaactcttgtct

SEQ ID NO: 1403259 - DNA, 15 bp, Homo sapiens
ttcagaactcttgtc

SEQ ID NO: 1403260 - DNA, 15 bp, Homo sapiens
tttcagaactcttgt

SEQ ID NO: 1403261 - DNA, 15 bp, Homo sapiens
ttttcagaactcttg

SEQ ID NO: 1403262 - DNA, 15 bp, Homo sapiens
tttttcagaactctt

SEQ ID NO: 1403263 - DNA, 15 bp, Homo sapiens
atttttcagaactct

SEQ ID NO: 1403264 - DNA, 15 bp, Homo sapiens
gatttttcagaactc

SEQ ID NO: 1403265 - DNA, 15 bp, Homo sapiens
ggatttttcagaact

SEQ ID NO: 1403266 - DNA, 15 bp, Homo sapiens
tggatttttcagaac

SEQ ID NO: 1403267 - DNA, 15 bp, Homo sapiens
ttggatttttcagaa

SEQ ID NO: 1403268 - DNA, 15 bp, Homo sapiens
tttggatttttcaga

SEQ ID NO: 1403269 - DNA, 15 bp, Homo sapiens
atttggatttttcag

SEQ ID NO: 1403270 - DNA, 15 bp, Homo sapiens
aatttggatttttca

SEQ ID NO: 1403271 - DNA, 15 bp, Homo sapiens
agaatttggattttt

SEQ ID NO: 1403272 - DNA, 15 bp, Homo sapiens
tagaatttggatttt

SEQ ID NO: 1403273 - DNA, 15 bp, Homo sapiens
atagaatttggattt

SEQ ID NO: 1403274 - DNA, 15 bp, Homo sapiens
catagaatttggatt

SEQ ID NO: 1403275 - DNA, 15 bp, Homo sapiens
tcatagaatttggat

SEQ ID NO: 1403276 - DNA, 15 bp, Homo sapiens
ttcatagaatttgga

SEQ ID NO: 1403277 - DNA, 15 bp, Homo sapiens
attcatagaatttgg

SEQ ID NO: 1403278 - DNA, 15 bp, Homo sapiens
aattcatagaatttg

SEQ ID NO: 1403279 - DNA, 15 bp, Homo sapiens
taattcatagaattt

SEQ ID NO: 1403280 - DNA, 15 bp, Homo sapiens
ataattcatagaatt

SEQ ID NO: 1403281 - DNA, 15 bp, Homo sapiens
aataattcatagaat

SEQ ID NO: 1403282 - DNA, 15 bp, Homo sapiens
aaataattcatagaa

SEQ ID NO: 1403283 - DNA, 15 bp, Homo sapiens
taaataattcataga

SEQ ID NO: 1403284 - DNA, 15 bp, Homo sapiens
ataaataattcatag

SEQ ID NO: 1403285 - DNA, 15 bp, Homo sapiens
gataaataattcata

SEQ ID NO: 1403286 - DNA, 15 bp, Homo sapiens
ggataaataattcat

SEQ ID NO: 1403287 - DNA, 15 bp, Homo sapiens
aggataaataattca

SEQ ID NO: 1403288 - DNA, 15 bp, Homo sapiens
aaggataaataattc

SEQ ID NO: 1403289 - DNA, 15 bp, Homo sapiens
gaaggataaataatt

SEQ ID NO: 1403290 - DNA, 15 bp, Homo sapiens
agaaggataaataat

SEQ ID NO: 1403291 - DNA, 15 bp, Homo sapiens
cagaaggataaataa

SEQ ID NO: 1403292 - DNA, 15 bp, Homo sapiens
tcagaaggataaata

SEQ ID NO: 1403293 - DNA, 15 bp, Homo sapiens
atcagaaggataaat

SEQ ID NO: 1403294 - DNA, 15 bp, Homo sapiens
tatcagaaggataaa

SEQ ID NO: 1403295 - DNA, 15 bp, Homo sapiens
ctatcagaaggataa

SEQ ID NO: 1403296 - DNA, 15 bp, Homo sapiens
tctatcagaaggata

SEQ ID NO: 1403297 - DNA, 15 bp, Homo sapiens
atctatcagaaggat

SEQ ID NO: 1403298 - DNA, 15 bp, Homo sapiens
tatctatcagaagga

SEQ ID NO: 1403299 - DNA, 15 bp, Homo sapiens
atatctatcagaagg

SEQ ID NO: 1403300 - DNA, 15 bp, Homo sapiens
aatatctatcagaag

SEQ ID NO: 1403301 - DNA, 15 bp, Homo sapiens
aaatatctatcagaa

SEQ ID NO: 1403302 - DNA, 15 bp, Homo sapiens
aaaatatctatcaga

SEQ ID NO: 1403303 - DNA, 15 bp, Homo sapiens
caaaatatctatcag

SEQ ID NO: 1403304 - DNA, 15 bp, Homo sapiens
ccaaaatatctatca

SEQ ID NO: 1403305 - DNA, 15 bp, Homo sapiens
accaaaatatctatc

SEQ ID NO: 1403306 - DNA, 15 bp, Homo sapiens
caccaaaatatctat

SEQ ID NO: 1403307 - DNA, 15 bp, Homo sapiens
tcaccaaaatatcta

SEQ ID NO: 1403308 - DNA, 15 bp, Homo sapiens
ttcaccaaaatatct

SEQ ID NO: 1403309 - DNA, 15 bp, Homo sapiens
gttcaccaaaatatc

SEQ ID NO: 1403310 - DNA, 15 bp, Homo sapiens
tgttcaccaaaatat

SEQ ID NO: 1403311 - DNA, 15 bp, Homo sapiens
ctgttcaccaaaata

SEQ ID NO: 1403312 - DNA, 15 bp, Homo sapiens
cctgttcaccaaaat

SEQ ID NO: 1403313 - DNA, 15 bp, Homo sapiens
acctgttcaccaaaa

SEQ ID NO: 1403314 - DNA, 15 bp, Homo sapiens
cacctgttcaccaaa

SEQ ID NO: 1403315 - DNA, 15 bp, Homo sapiens
tcacctgttcaccaa

SEQ ID NO: 1403316 - DNA, 15 bp, Homo sapiens
ctcacctgttcacca

SEQ ID NO: 1403317 - DNA, 15 bp, Homo sapiens
tctcacctgttcacc

SEQ ID NO: 1403318 - DNA, 15 bp, Homo sapiens
ttctcacctgttcac

SEQ ID NO: 1403319 - DNA, 15 bp, Homo sapiens
attctcacctgttca

SEQ ID NO: 1403320 - DNA, 15 bp, Homo sapiens
gattctcacctgttc

SEQ ID NO: 1403321 - DNA, 15 bp, Homo sapiens
agattctcacctgtt

SEQ ID NO: 1403322 - DNA, 15 bp, Homo sapiens
tagattctcacctgt

SEQ ID NO: 1403323 - DNA, 15 bp, Homo sapiens
gtagattctcacctg

SEQ ID NO: 1403324 - DNA, 15 bp, Homo sapiens
tgtagattctcacct

SEQ ID NO: 1403325 - DNA, 15 bp, Homo sapiens
gtgtagattctcacc

SEQ ID NO: 1403326 - DNA, 15 bp, Homo sapiens
ggtgtagattctcac

SEQ ID NO: 1403327 - DNA, 15 bp, Homo sapiens
tggtgtagattctca

SEQ ID NO: 1403328 - DNA, 15 bp, Homo sapiens
atggtgtagattctc

SEQ ID NO: 1403329 - DNA, 15 bp, Homo sapiens
aatggtgtagattct

SEQ ID NO: 1403330 - DNA, 15 bp, Homo sapiens
gaatggtgtagattc

SEQ ID NO: 1403331 - DNA, 15 bp, Homo sapiens
ggaatggtgtagatt

SEQ ID NO: 1403332 - DNA, 15 bp, Homo sapiens
tggaatggtgtagat

SEQ ID NO: 1403333 - DNA, 15 bp, Homo sapiens
atggaatggtgtaga

SEQ ID NO: 1403334 - DNA, 15 bp, Homo sapiens
gatggaatggtgtag

SEQ ID NO: 1403335 - DNA, 15 bp, Homo sapiens
ggatggaatggtgta

SEQ ID NO: 1403336 - DNA, 15 bp, Homo sapiens
aggatggaatggtgt

SEQ ID NO: 1403337 - DNA, 15 bp, Homo sapiens
taggatggaatggtg

SEQ ID NO: 1403338 - DNA, 15 bp, Homo sapiens
ataggatggaatggt

SEQ ID NO: 1403339 - DNA, 15 bp, Homo sapiens
aataggatggaatgg

SEQ ID NO: 1403340 - DNA, 15 bp, Homo sapiens
gaataggatggaatg

SEQ ID NO: 1403341 - DNA, 15 bp, Homo sapiens
ggaataggatggaat

SEQ ID NO: 1403342 - DNA, 15 bp, Homo sapiens
tggaataggatggaa

SEQ ID NO: 1403343 - DNA, 15 bp, Homo sapiens
ttggaataggatgga

SEQ ID NO: 1403344 - DNA, 15 bp, Homo sapiens
cttggaataggatgg

SEQ ID NO: 1403345 - DNA, 15 bp, Homo sapiens
tcttggaataggatg

SEQ ID NO: 1403346 - DNA, 15 bp, Homo sapiens
ctcttggaataggat

SEQ ID NO: 1403347 - DNA, 15 bp, Homo sapiens
cctcttggaatagga

SEQ ID NO: 1403348 - DNA, 15 bp, Homo sapiens
gcctcttggaatagg

SEQ ID NO: 1403349 - DNA, 15 bp, Homo sapiens
tgcctcttggaatag

SEQ ID NO: 1403350 - DNA, 15 bp, Homo sapiens
gtgcctcttggaata

SEQ ID NO: 1403351 - DNA, 15 bp, Homo sapiens
agtgcctcttggaat

SEQ ID NO: 1403352 - DNA, 15 bp, Homo sapiens
aagtgcctcttggaa

SEQ ID NO: 1403353 - DNA, 15 bp, Homo sapiens
taagtgcctcttgga

SEQ ID NO: 1403354 - DNA, 15 bp, Homo sapiens
ctaagtgcctcttgg

SEQ ID NO: 1403355 - DNA, 15 bp, Homo sapiens
cctaagtgcctcttg

SEQ ID NO: 1403356 - DNA, 15 bp, Homo sapiens
tcctaagtgcctctt

SEQ ID NO: 1403357 - DNA, 15 bp, Homo sapiens
atcctaagtgcctct

SEQ ID NO: 1403358 - DNA, 15 bp, Homo sapiens
gatcctaagtgcctc

SEQ ID NO: 1403359 - DNA, 15 bp, Homo sapiens
tgatcctaagtgcct

SEQ ID NO: 1403360 - DNA, 15 bp, Homo sapiens
ttgatcctaagtgcc

SEQ ID NO: 1403361 - DNA, 15 bp, Homo sapiens
cttgatcctaagtgc

SEQ ID NO: 1403362 - DNA, 15 bp, Homo sapiens
acttgatcctaagtg

SEQ ID NO: 1403363 - DNA, 15 bp, Homo sapiens
tacttgatcctaagt

SEQ ID NO: 1403364 - DNA, 15 bp, Homo sapiens
ttacttgatcctaag

SEQ ID NO: 1403365 - DNA, 15 bp, Homo sapiens
cttacttgatcctaa

SEQ ID NO: 1403366 - DNA, 15 bp, Homo sapiens
tcttacttgatccta

SEQ ID NO: 1403367 - DNA, 15 bp, Homo sapiens
ttcttacttgatcct

SEQ ID NO: 1403368 - DNA, 15 bp, Homo sapiens
tttcttacttgatcc

SEQ ID NO: 1403369 - DNA, 15 bp, Homo sapiens
gtttcttacttgatc

SEQ ID NO: 1403370 - DNA, 15 bp, Homo sapiens
tgtttcttacttgat

SEQ ID NO: 1403371 - DNA, 15 bp, Homo sapiens
ttgtttcttacttga

SEQ ID NO: 1403372 - DNA, 15 bp, Homo sapiens
attgtttcttacttg

SEQ ID NO: 1403373 - DNA, 15 bp, Homo sapiens
cattgtttcttactt

SEQ ID NO: 1403374 - DNA, 15 bp, Homo sapiens
tcattgtttcttact

SEQ ID NO: 1403375 - DNA, 15 bp, Homo sapiens
ctcattgtttcttac

SEQ ID NO: 1403376 - DNA, 15 bp, Homo sapiens
gctcattgtttctta

SEQ ID NO: 1403377 - DNA, 15 bp, Homo sapiens
tgctcattgtttctt

SEQ ID NO: 1403378 - DNA, 15 bp, Homo sapiens
ttgctcattgtttct

SEQ ID NO: 1403379 - DNA, 15 bp, Homo sapiens
cttgctcattgtttc

SEQ ID NO: 1403380 - DNA, 15 bp, Homo sapiens
ccttgctcattgttt

SEQ ID NO: 1403381 - DNA, 15 bp, Homo sapiens
tccttgctcattgtt

SEQ ID NO: 1403382 - DNA, 15 bp, Homo sapiens
ttccttgctcattgt

SEQ ID NO: 1403383 - DNA, 15 bp, Homo sapiens
attccttgctcattg

SEQ ID NO: 1403384 - DNA, 15 bp, Homo sapiens
tattccttgctcatt

SEQ ID NO: 1403385 - DNA, 15 bp, Homo sapiens
ctattccttgctcat

SEQ ID NO: 1403386 - DNA, 15 bp, Homo sapiens
tctattccttgctca

SEQ ID NO: 1403387 - DNA, 15 bp, Homo sapiens
ttctattccttgctc

SEQ ID NO: 1403388 - DNA, 15 bp, Homo sapiens
attctattccttgct

SEQ ID NO: 1403389 - DNA, 15 bp, Homo sapiens
aattctattccttgc

SEQ ID NO: 1403390 - DNA, 15 bp, Homo sapiens
taattctattccttg

SEQ ID NO: 1403391 - DNA, 15 bp, Homo sapiens
ataattctattcctt

SEQ ID NO: 1403392 - DNA, 15 bp, Homo sapiens
gataattctattcct

SEQ ID NO: 1403393 - DNA, 15 bp, Homo sapiens
agataattctattcc

SEQ ID NO: 1403394 - DNA, 15 bp, Homo sapiens
cagataattctattc

SEQ ID NO: 1403395 - DNA, 15 bp, Homo sapiens
acagataattctatt

SEQ ID NO: 1403396 - DNA, 15 bp, Homo sapiens
cacagataattctat

SEQ ID NO: 1403397 - DNA, 15 bp, Homo sapiens
tcacagataattcta

SEQ ID NO: 1403398 - DNA, 15 bp, Homo sapiens
atcacagataattct

SEQ ID NO: 1403399 - DNA, 15 bp, Homo sapiens
gatcacagataattc

SEQ ID NO: 1403400 - DNA, 15 bp, Homo sapiens
ggatcacagataatt

SEQ ID NO: 1403401 - DNA, 15 bp, Homo sapiens
tggatcacagataat

SEQ ID NO: 1403402 - DNA, 15 bp, Homo sapiens
atggatcacagataa

SEQ ID NO: 1403403 - DNA, 15 bp, Homo sapiens
tatggatcacagata

SEQ ID NO: 1403404 - DNA, 15 bp, Homo sapiens
ctatggatcacagat

SEQ ID NO: 1403405 - DNA, 15 bp, Homo sapiens
cctatggatcacaga

SEQ ID NO: 1403406 - DNA, 15 bp, Homo sapiens
acctatggatcacag

SEQ ID NO: 1403407 - DNA, 15 bp, Homo sapiens
tacctatggatcaca

SEQ ID NO: 1403408 - DNA, 15 bp, Homo sapiens
ttacctatggatcac

SEQ ID NO: 1403409 - DNA, 15 bp, Homo sapiens
cttacctatggatca

SEQ ID NO: 1403410 - DNA, 15 bp, Homo sapiens
tcttacctatggatc

SEQ ID NO: 1403411 - DNA, 15 bp, Homo sapiens
atcttacctatggat

SEQ ID NO: 1403412 - DNA, 15 bp, Homo sapiens
aatcttacctatgga

SEQ ID NO: 1403413 - DNA, 15 bp, Homo sapiens
taatcttacctatgg

SEQ ID NO: 1403414 - DNA, 15 bp, Homo sapiens
ctaatcttacctatg

SEQ ID NO: 1403415 - DNA, 15 bp, Homo sapiens
cctaatcttacctat

SEQ ID NO: 1403416 - DNA, 15 bp, Homo sapiens
tcctaatcttaccta

SEQ ID NO: 1403417 - DNA, 15 bp, Homo sapiens
gtcctaatcttacct

SEQ ID NO: 1403418 - DNA, 15 bp, Homo sapiens
agtcctaatcttacc

SEQ ID NO: 1403419 - DNA, 15 bp, Homo sapiens
cagtcctaatcttac

SEQ ID NO: 1403420 - DNA, 15 bp, Homo sapiens
acagtcctaatctta

SEQ ID NO: 1403421 - DNA, 15 bp, Homo sapiens
tacagtcctaatctt

SEQ ID NO: 1403422 - DNA, 15 bp, Homo sapiens
atacagtcctaatct

SEQ ID NO: 1403423 - DNA, 15 bp, Homo sapiens
tatacagtcctaatc

SEQ ID NO: 1403424 - DNA, 15 bp, Homo sapiens
atatacagtcctaat

SEQ ID NO: 1403425 - DNA, 15 bp, Homo sapiens
aatatacagtcctaa

SEQ ID NO: 1403426 - DNA, 15 bp, Homo sapiens
gaatatacagtccta

SEQ ID NO: 1403427 - DNA, 15 bp, Homo sapiens
tgaatatacagtcct

SEQ ID NO: 1403428 - DNA, 15 bp, Homo sapiens
ctgaatatacagtcc

SEQ ID NO: 1403429 - DNA, 15 bp, Homo sapiens
gctgaatatacagtc

SEQ ID NO: 1403430 - DNA, 15 bp, Homo sapiens
tgctgaatatacagt

SEQ ID NO: 1403431 - DNA, 15 bp, Homo sapiens
gtgctgaatatacag

SEQ ID NO: 1403432 - DNA, 15 bp, Homo sapiens
ggtgctgaatataca

SEQ ID NO: 1403433 - DNA, 15 bp, Homo sapiens
tggtgctgaatatac

SEQ ID NO: 1403434 - DNA, 15 bp, Homo sapiens
ctggtgctgaatata

SEQ ID NO: 1403435 - DNA, 15 bp, Homo sapiens
actggtgctgaatat

SEQ ID NO: 1403436 - DNA, 15 bp, Homo sapiens
aactggtgctgaata

SEQ ID NO: 1403437 - DNA, 15 bp, Homo sapiens
aaactggtgctgaat

SEQ ID NO: 1403438 - DNA, 15 bp, Homo sapiens
taaactggtgctgaa

SEQ ID NO: 1403439 - DNA, 15 bp, Homo sapiens
ataaactggtgctga

SEQ ID NO: 1403440 - DNA, 15 bp, Homo sapiens
cataaactggtgctg

SEQ ID NO: 1403441 - DNA, 15 bp, Homo sapiens
acataaactggtgct

SEQ ID NO: 1403442 - DNA, 15 bp, Homo sapiens
tacataaactggtgc

SEQ ID NO: 1403443 - DNA, 15 bp, Homo sapiens
ctacataaactggtg

SEQ ID NO: 1403444 - DNA, 15 bp, Homo sapiens
tctacataaactggt

SEQ ID NO: 1403445 - DNA, 15 bp, Homo sapiens
ctctacataaactgg

SEQ ID NO: 1403446 - DNA, 15 bp, Homo sapiens
actctacataaactg

SEQ ID NO: 1403447 - DNA, 15 bp, Homo sapiens
cactctacataaact

SEQ ID NO: 1403448 - DNA, 15 bp, Homo sapiens
ccactctacataaac

SEQ ID NO: 1403449 - DNA, 15 bp, Homo sapiens
tccactctacataaa

SEQ ID NO: 1403450 - DNA, 15 bp, Homo sapiens
atccactctacataa

SEQ ID NO: 1403451 - DNA, 15 bp, Homo sapiens
tatccactctacata

SEQ ID NO: 1403452 - DNA, 15 bp, Homo sapiens
atatccactctacat

SEQ ID NO: 1403453 - DNA, 15 bp, Homo sapiens
aatatccactctaca

SEQ ID NO: 1403454 - DNA, 15 bp, Homo sapiens
taatatccactctac

SEQ ID NO: 1403455 - DNA, 15 bp, Homo sapiens
ttaatatccactcta

SEQ ID NO: 1403456 - DNA, 15 bp, Homo sapiens
tttaatatccactct

SEQ ID NO: 1403457 - DNA, 15 bp, Homo sapiens
gtttaatatccactc

SEQ ID NO: 1403458 - DNA, 15 bp, Homo sapiens
tgtttaatatccact

SEQ ID NO: 1403459 - DNA, 15 bp, Homo sapiens
ctgtttaatatccac

SEQ ID NO: 1403460 - DNA, 15 bp, Homo sapiens
tctgtttaatatcca

SEQ ID NO: 1403461 - DNA, 15 bp, Homo sapiens
atctgtttaatatcc

SEQ ID NO: 1403462 - DNA, 15 bp, Homo sapiens
tatctgtttaatatc

SEQ ID NO: 1403463 - DNA, 15 bp, Homo sapiens
ctatctgtttaatat

SEQ ID NO: 1403464 - DNA, 15 bp, Homo sapiens
tctatctgtttaata

SEQ ID NO: 1403465 - DNA, 15 bp, Homo sapiens
ttctatctgtttaat

SEQ ID NO: 1403466 - DNA, 15 bp, Homo sapiens
cttctatctgtttaa

SEQ ID NO: 1403467 - DNA, 15 bp, Homo sapiens
gcttctatctgttta

SEQ ID NO: 1403468 - DNA, 15 bp, Homo sapiens
agcttctatctgttt

SEQ ID NO: 1403469 - DNA, 15 bp, Homo sapiens
aagcttctatctgtt

SEQ ID NO: 1403470 - DNA, 15 bp, Homo sapiens
taagcttctatctgt

SEQ ID NO: 1403471 - DNA, 15 bp, Homo sapiens
gtaagcttctatctg

SEQ ID NO: 1403472 - DNA, 15 bp, Homo sapiens
ggtaagcttctatct

SEQ ID NO: 1403473 - DNA, 15 bp, Homo sapiens
gggtaagcttctatc

SEQ ID NO: 1403474 - DNA, 15 bp, Homo sapiens
agggtaagcttctat

SEQ ID NO: 1403475 - DNA, 15 bp, Homo sapiens
cagggtaagcttcta

SEQ ID NO: 1403476 - DNA, 15 bp, Homo sapiens
tcagggtaagcttct

SEQ ID NO: 1403477 - DNA, 15 bp, Homo sapiens
ttcagggtaagcttc

SEQ ID NO: 1403478 - DNA, 15 bp, Homo sapiens
tttcagggtaagctt

SEQ ID NO: 1403479 - DNA, 15 bp, Homo sapiens
ctttcagggtaagct

SEQ ID NO: 1403480 - DNA, 15 bp, Homo sapiens
cctttcagggtaagc

SEQ ID NO: 1403481 - DNA, 15 bp, Homo sapiens
ccctttcagggtaag

SEQ ID NO: 1403482 - DNA, 15 bp, Homo sapiens
cccctttcagggtaa

SEQ ID NO: 1403483 - DNA, 15 bp, Homo sapiens
gcccctttcagggta

SEQ ID NO: 1403484 - DNA, 15 bp, Homo sapiens
agcccctttcagggt

SEQ ID NO: 1403485 - DNA, 15 bp, Homo sapiens
tagcccctttcaggg

SEQ ID NO: 1403486 - DNA, 15 bp, Homo sapiens
ttagcccctttcagg

SEQ ID NO: 1403487 - DNA, 15 bp, Homo sapiens
tttagcccctttcag

SEQ ID NO: 1403488 - DNA, 15 bp, Homo sapiens
ttttagcccctttca

SEQ ID NO: 1403489 - DNA, 15 bp, Homo sapiens
tttttagcccctttc

SEQ ID NO: 1403490 - DNA, 15 bp, Homo sapiens
ttttttagccccttt

SEQ ID NO: 1403491 - DNA, 15 bp, Homo sapiens
tttttttagcccctt

SEQ ID NO: 1403492 - DNA, 15 bp, Homo sapiens
ttttttttagcccct

SEQ ID NO: 1403493 - DNA, 15 bp, Homo sapiens
tttttttttagcccc

SEQ ID NO: 1403494 - DNA, 15 bp, Homo sapiens
ctttttttttagccc

SEQ ID NO: 1403495 - DNA, 15 bp, Homo sapiens
actttttttttagcc

SEQ ID NO: 1403496 - DNA, 15 bp, Homo sapiens
cactttttttttagc

SEQ ID NO: 1403497 - DNA, 15 bp, Homo sapiens
ccactttttttttag

SEQ ID NO: 1403498 - DNA, 15 bp, Homo sapiens
cccacttttttttta

SEQ ID NO: 1403499 - DNA, 15 bp, Homo sapiens
ccccacttttttttt

SEQ ID NO: 1403500 - DNA, 15 bp, Homo sapiens
cccccactttttttt

SEQ ID NO: 1403501 - DNA, 15 bp, Homo sapiens
gcccccacttttttt

SEQ ID NO: 1403502 - DNA, 15 bp, Homo sapiens
cgcccccactttttt

SEQ ID NO: 1403503 - DNA, 15 bp, Homo sapiens
acgcccccacttttt

SEQ ID NO: 1403504 - DNA, 15 bp, Homo sapiens
cacgcccccactttt

SEQ ID NO: 1403505 - DNA, 15 bp, Homo sapiens
ccacgcccccacttt

SEQ ID NO: 1403506 - DNA, 15 bp, Homo sapiens
tccacgcccccactt

SEQ ID NO: 1403507 - DNA, 15 bp, Homo sapiens
ctccacgcccccact

SEQ ID NO: 1403508 - DNA, 15 bp, Homo sapiens
cctccacgcccccac

SEQ ID NO: 1403509 - DNA, 15 bp, Homo sapiens
tcctccacgccccca

SEQ ID NO: 1403510 - DNA, 15 bp, Homo sapiens
ctcctccacgccccc

SEQ ID NO: 1403511 - DNA, 15 bp, Homo sapiens
cctcctccacgcccc

SEQ ID NO: 1403512 - DNA, 15 bp, Homo sapiens
ccctcctccacgccc

SEQ ID NO: 1403513 - DNA, 15 bp, Homo sapiens
cccctcctccacgcc

SEQ ID NO: 1403514 - DNA, 15 bp, Homo sapiens
tcccctcctccacgc

SEQ ID NO: 1403515 - DNA, 15 bp, Homo sapiens
ttcccctcctccacg

SEQ ID NO: 1403516 - DNA, 15 bp, Homo sapiens
attcccctcctccac

SEQ ID NO: 1403517 - DNA, 15 bp, Homo sapiens
tattcccctcctcca

SEQ ID NO: 1403518 - DNA, 15 bp, Homo sapiens
atattcccctcctcc

SEQ ID NO: 1403519 - DNA, 15 bp, Homo sapiens
catattcccctcctc

SEQ ID NO: 1403520 - DNA, 15 bp, Homo sapiens
gcatattcccctcct

SEQ ID NO: 1403521 - DNA, 15 bp, Homo sapiens
ggcatattcccctcc

SEQ ID NO: 1403522 - DNA, 15 bp, Homo sapiens
gggcatattcccctc

SEQ ID NO: 1403523 - DNA, 15 bp, Homo sapiens
agggcatattcccct

SEQ ID NO: 1403524 - DNA, 15 bp, Homo sapiens
cagggcatattcccc

SEQ ID NO: 1403525 - DNA, 15 bp, Homo sapiens
tcagggcatattccc

SEQ ID NO: 1403526 - DNA, 15 bp, Homo sapiens
ttcagggcatattcc

SEQ ID NO: 1403527 - DNA, 15 bp, Homo sapiens
tttcagggcatattc

SEQ ID NO: 1403528 - DNA, 15 bp, Homo sapiens
atttcagggcatatt

SEQ ID NO: 1403529 - DNA, 15 bp, Homo sapiens
aatttcagggcatat

SEQ ID NO: 1403530 - DNA, 15 bp, Homo sapiens
aaatttcagggcata

SEQ ID NO: 1403531 - DNA, 15 bp, Homo sapiens
caaatttcagggcat

SEQ ID NO: 1403532 - DNA, 15 bp, Homo sapiens
ccaaatttcagggca

SEQ ID NO: 1403533 - DNA, 15 bp, Homo sapiens
gccaaatttcagggc

SEQ ID NO: 1403534 - DNA, 15 bp, Homo sapiens
tgccaaatttcaggg

SEQ ID NO: 1403535 - DNA, 15 bp, Homo sapiens
atgccaaatttcagg

SEQ ID NO: 1403536 - DNA, 15 bp, Homo sapiens
aatgccaaatttcag

SEQ ID NO: 1403537 - DNA, 15 bp, Homo sapiens
aaatgccaaatttca

SEQ ID NO: 1403538 - DNA, 15 bp, Homo sapiens
caaatgccaaatttc

SEQ ID NO: 1403539 - DNA, 15 bp, Homo sapiens
tcaaatgccaaattt

SEQ ID NO: 1403540 - DNA, 15 bp, Homo sapiens
gtcaaatgccaaatt

SEQ ID NO: 1403541 - DNA, 15 bp, Homo sapiens
tgtcaaatgccaaat

SEQ ID NO: 1403542 - DNA, 15 bp, Homo sapiens
atgtcaaatgccaaa

SEQ ID NO: 1403543 - DNA, 15 bp, Homo sapiens
gatgtcaaatgccaa

SEQ ID NO: 1403544 - DNA, 15 bp, Homo sapiens
ggatgtcaaatgcca

SEQ ID NO: 1403545 - DNA, 15 bp, Homo sapiens
gggatgtcaaatgcc

SEQ ID NO: 1403546 - DNA, 15 bp, Homo sapiens
tgggatgtcaaatgc

SEQ ID NO: 1403547 - DNA, 15 bp, Homo sapiens
atgggatgtcaaatg

SEQ ID NO: 1403548 - DNA, 15 bp, Homo sapiens
tatgggatgtcaaat

SEQ ID NO: 1403549 - DNA, 15 bp, Homo sapiens
ttatgggatgtcaaa

SEQ ID NO: 1403550 - DNA, 15 bp, Homo sapiens
attatgggatgtcaa

SEQ ID NO: 1403551 - DNA, 15 bp, Homo sapiens
aattatgggatgtca

SEQ ID NO: 1403552 - DNA, 15 bp, Homo sapiens
taattatgggatgtc

SEQ ID NO: 1403553 - DNA, 15 bp, Homo sapiens
ctaattatgggatgt

SEQ ID NO: 1403554 - DNA, 15 bp, Homo sapiens
gctaattatgggatg

SEQ ID NO: 1403555 - DNA, 15 bp, Homo sapiens
tgctaattatgggat

SEQ ID NO: 1403556 - DNA, 15 bp, Homo sapiens
atgctaattatggga

SEQ ID NO: 1403557 - DNA, 15 bp, Homo sapiens
gatgctaattatggg

SEQ ID NO: 1403558 - DNA, 15 bp, Homo sapiens
agatgctaattatgg

SEQ ID NO: 1403559 - DNA, 15 bp, Homo sapiens
aagatgctaattatg

SEQ ID NO: 1403560 - DNA, 15 bp, Homo sapiens
taagatgctaattat

SEQ ID NO: 1403561 - DNA, 15 bp, Homo sapiens
ttaagatgctaatta

SEQ ID NO: 1403562 - DNA, 15 bp, Homo sapiens
tttaagatgctaatt

SEQ ID NO: 1403563 - DNA, 15 bp, Homo sapiens
atttaagatgctaat

SEQ ID NO: 1403564 - DNA, 15 bp, Homo sapiens
aatttaagatgctaa

SEQ ID NO: 1403565 - DNA, 15 bp, Homo sapiens
aaatttaagatgcta

SEQ ID NO: 1403566 - DNA, 15 bp, Homo sapiens
caaatttaagatgct

SEQ ID NO: 1403567 - DNA, 15 bp, Homo sapiens
tcaaatttaagatgc

SEQ ID NO: 1403568 - DNA, 15 bp, Homo sapiens
ctcaaatttaagatg

SEQ ID NO: 1403569 - DNA, 15 bp, Homo sapiens
tctcaaatttaagat

SEQ ID NO: 1403570 - DNA, 15 bp, Homo sapiens
atctcaaatttaaga

SEQ ID NO: 1403571 - DNA, 15 bp, Homo sapiens
tatctcaaatttaag

SEQ ID NO: 1403572 - DNA, 15 bp, Homo sapiens
atatctcaaatttaa

SEQ ID NO: 1403573 - DNA, 15 bp, Homo sapiens
aatatctcaaattta

SEQ ID NO: 1403574 - DNA, 15 bp, Homo sapiens
aaatatctcaaattt

SEQ ID NO: 1403575 - DNA, 15 bp, Homo sapiens
gaaatatctcaaatt

SEQ ID NO: 1403576 - DNA, 15 bp, Homo sapiens
agaaatatctcaaat

SEQ ID NO: 1403577 - DNA, 15 bp, Homo sapiens
aagaaatatctcaaa

SEQ ID NO: 1403578 - DNA, 15 bp, Homo sapiens
taagaaatatctcaa

SEQ ID NO: 1403579 - DNA, 15 bp, Homo sapiens
ctaagaaatatctca

SEQ ID NO: 1403580 - DNA, 15 bp, Homo sapiens
tctaagaaatatctc

SEQ ID NO: 1403581 - DNA, 15 bp, Homo sapiens
gtctaagaaatatct

SEQ ID NO: 1403582 - DNA, 15 bp, Homo sapiens
tgtctaagaaatatc

SEQ ID NO: 1403583 - DNA, 15 bp, Homo sapiens
atgtctaagaaatat

SEQ ID NO: 1403584 - DNA, 15 bp, Homo sapiens
aatgtctaagaaata

SEQ ID NO: 1403585 - DNA, 15 bp, Homo sapiens
aaatgtctaagaaat

SEQ ID NO: 1403586 - DNA, 15 bp, Homo sapiens
caaatgtctaagaaa

SEQ ID NO: 1403587 - DNA, 15 bp, Homo sapiens
gcaaatgtctaagaa

SEQ ID NO: 1403588 - DNA, 15 bp, Homo sapiens
agcaaatgtctaaga

SEQ ID NO: 1403589 - DNA, 15 bp, Homo sapiens
cagcaaatgtctaag

SEQ ID NO: 1403590 - DNA, 15 bp, Homo sapiens
tcagcaaatgtctaa

SEQ ID NO: 1403591 - DNA, 15 bp, Homo sapiens
ttcagcaaatgtcta

SEQ ID NO: 1403592 - DNA, 15 bp, Homo sapiens
tttcagcaaatgtct

SEQ ID NO: 1403593 - DNA, 15 bp, Homo sapiens
gtttcagcaaatgtc

SEQ ID NO: 1403594 - DNA, 15 bp, Homo sapiens
agtttcagcaaatgt

SEQ ID NO: 1403595 - DNA, 15 bp, Homo sapiens
cagtttcagcaaatg

SEQ ID NO: 1403596 - DNA, 15 bp, Homo sapiens
gcagtttcagcaaat

SEQ ID NO: 1403597 - DNA, 15 bp, Homo sapiens
ggcagtttcagcaaa

SEQ ID NO: 1403598 - DNA, 15 bp, Homo sapiens
aggcagtttcagcaa

SEQ ID NO: 1403599 - DNA, 15 bp, Homo sapiens
caggcagtttcagca

SEQ ID NO: 1403600 - DNA, 15 bp, Homo sapiens
acaggcagtttcagc

SEQ ID NO: 1403601 - DNA, 15 bp, Homo sapiens
tacaggcagtttcag

SEQ ID NO: 1403602 - DNA, 15 bp, Homo sapiens
ctacaggcagtttca

SEQ ID NO: 1403603 - DNA, 15 bp, Homo sapiens
tctacaggcagtttc

SEQ ID NO: 1403604 - DNA, 15 bp, Homo sapiens
gtctacaggcagttt

SEQ ID NO: 1403605 - DNA, 15 bp, Homo sapiens
ggtctacaggcagtt

SEQ ID NO: 1403606 - DNA, 15 bp, Homo sapiens
tggtctacaggcagt

SEQ ID NO: 1403607 - DNA, 15 bp, Homo sapiens
atggtctacaggcag

SEQ ID NO: 1403608 - DNA, 15 bp, Homo sapiens
tatggtctacaggca

SEQ ID NO: 1403609 - DNA, 15 bp, Homo sapiens
ctatggtctacaggc

SEQ ID NO: 1403610 - DNA, 15 bp, Homo sapiens
tctatggtctacagg

SEQ ID NO: 1403611 - DNA, 15 bp, Homo sapiens
atctatggtctacag

SEQ ID NO: 1403612 - DNA, 15 bp, Homo sapiens
aatctatggtctaca

SEQ ID NO: 1403613 - DNA, 15 bp, Homo sapiens
gaatctatggtctac

SEQ ID NO: 1403614 - DNA, 15 bp, Homo sapiens
tgaatctatggtcta

SEQ ID NO: 1403615 - DNA, 15 bp, Homo sapiens
ctgaatctatggtct

SEQ ID NO: 1403616 - DNA, 15 bp, Homo sapiens
tctgaatctatggtc

SEQ ID NO: 1403617 - DNA, 15 bp, Homo sapiens
ttctgaatctatggt

SEQ ID NO: 1403618 - DNA, 15 bp, Homo sapiens
tttctgaatctatgg

SEQ ID NO: 1403619 - DNA, 15 bp, Homo sapiens
gtttctgaatctatg

SEQ ID NO: 1403620 - DNA, 15 bp, Homo sapiens
tgtttctgaatctat

SEQ ID NO: 1403621 - DNA, 15 bp, Homo sapiens
gtgtttctgaatcta

SEQ ID NO: 1403622 - DNA, 15 bp, Homo sapiens
agtgtttctgaatct

SEQ ID NO: 1403623 - DNA, 15 bp, Homo sapiens
aagtgtttctgaatc

SEQ ID NO: 1403624 - DNA, 15 bp, Homo sapiens
aaagtgtttctgaat

SEQ ID NO: 1403625 - DNA, 15 bp, Homo sapiens
caaagtgtttctgaa

SEQ ID NO: 1403626 - DNA, 15 bp, Homo sapiens
acaaagtgtttctga

SEQ ID NO: 1403627 - DNA, 15 bp, Homo sapiens
cacaaagtgtttctg

SEQ ID NO: 1403628 - DNA, 15 bp, Homo sapiens
tcacaaagtgtttct

SEQ ID NO: 1403629 - DNA, 15 bp, Homo sapiens
gtcacaaagtgtttc

SEQ ID NO: 1403630 - DNA, 15 bp, Homo sapiens
agtcacaaagtgttt

SEQ ID NO: 1403631 - DNA, 15 bp, Homo sapiens
cagtcacaaagtgtt

SEQ ID NO: 1403632 - DNA, 15 bp, Homo sapiens
tcagtcacaaagtgt

SEQ ID NO: 1403633 - DNA, 15 bp, Homo sapiens
gtcagtcacaaagtg

SEQ ID NO: 1403634 - DNA, 15 bp, Homo sapiens
tgtcagtcacaaagt

SEQ ID NO: 1403635 - DNA, 15 bp, Homo sapiens
ttgtcagtcacaaag

SEQ ID NO: 1403636 - DNA, 15 bp, Homo sapiens
tttgtcagtcacaaa

SEQ ID NO: 1403637 - DNA, 15 bp, Homo sapiens
ctttgtcagtcacaa

SEQ ID NO: 1403638 - DNA, 15 bp, Homo sapiens
actttgtcagtcaca

SEQ ID NO: 1403639 - DNA, 15 bp, Homo sapiens
aactttgtcagtcac

SEQ ID NO: 1403640 - DNA, 15 bp, Homo sapiens
aaactttgtcagtca

SEQ ID NO: 1403641 - DNA, 15 bp, Homo sapiens
taaactttgtcagtc

SEQ ID NO: 1403642 - DNA, 15 bp, Homo sapiens
ctaaactttgtcagt

SEQ ID NO: 1403643 - DNA, 15 bp, Homo sapiens
actaaactttgtcag

SEQ ID NO: 1403644 - DNA, 15 bp, Homo sapiens
gactaaactttgtca

SEQ ID NO: 1403645 - DNA, 15 bp, Homo sapiens
tgactaaactttgtc

SEQ ID NO: 1403646 - DNA, 15 bp, Homo sapiens
gtgactaaactttgt

SEQ ID NO: 1403647 - DNA, 15 bp, Homo sapiens
agtgactaaactttg

SEQ ID NO: 1403648 - DNA, 15 bp, Homo sapiens
gagtgactaaacttt

SEQ ID NO: 1403649 - DNA, 15 bp, Homo sapiens
ggagtgactaaactt

SEQ ID NO: 1403650 - DNA, 15 bp, Homo sapiens
aggagtgactaaact

SEQ ID NO: 1403651 - DNA, 15 bp, Homo sapiens
aaggagtgactaaac

SEQ ID NO: 1403652 - DNA, 15 bp, Homo sapiens
taaggagtgactaaa

SEQ ID NO: 1403653 - DNA, 15 bp, Homo sapiens
gtaaggagtgactaa

SEQ ID NO: 1403654 - DNA, 15 bp, Homo sapiens
ggtaaggagtgacta

SEQ ID NO: 1403655 - DNA, 15 bp, Homo sapiens
tggtaaggagtgact

SEQ ID NO: 1403656 - DNA, 15 bp, Homo sapiens
ttggtaaggagtgac

SEQ ID NO: 1403657 - DNA, 15 bp, Homo sapiens
tttggtaaggagtga

SEQ ID NO: 1403658 - DNA, 15 bp, Homo sapiens
ctttggtaaggagtg

SEQ ID NO: 1403659 - DNA, 15 bp, Homo sapiens
actttggtaaggagt

SEQ ID NO: 1403660 - DNA, 15 bp, Homo sapiens
aactttggtaaggag

SEQ ID NO: 1403661 - DNA, 15 bp, Homo sapiens
caactttggtaagga

SEQ ID NO: 1403662 - DNA, 15 bp, Homo sapiens
tcaactttggtaagg

SEQ ID NO: 1403663 - DNA, 15 bp, Homo sapiens
ttcaactttggtaag

SEQ ID NO: 1403664 - DNA, 15 bp, Homo sapiens
attcaactttggtaa

SEQ ID NO: 1403665 - DNA, 15 bp, Homo sapiens
gattcaactttggta

SEQ ID NO: 1403666 - DNA, 15 bp, Homo sapiens
agattcaactttggt

SEQ ID NO: 1403667 - DNA, 15 bp, Homo sapiens
cagattcaactttgg

SEQ ID NO: 1403668 - DNA, 15 bp, Homo sapiens
ccagattcaactttg

SEQ ID NO: 1403669 - DNA, 15 bp, Homo sapiens
cccagattcaacttt

SEQ ID NO: 1403670 - DNA, 15 bp, Homo sapiens
tcccagattcaactt

SEQ ID NO: 1403671 - DNA, 15 bp, Homo sapiens
gtcccagattcaact

SEQ ID NO: 1403672 - DNA, 15 bp, Homo sapiens
tgtcccagattcaac

SEQ ID NO: 1403673 - DNA, 15 bp, Homo sapiens
ctgtcccagattcaa

SEQ ID NO: 1403674 - DNA, 15 bp, Homo sapiens
gctgtcccagattca

SEQ ID NO: 1403675 - DNA, 15 bp, Homo sapiens
agctgtcccagattc

SEQ ID NO: 1403676 - DNA, 15 bp, Homo sapiens
cagctgtcccagatt

SEQ ID NO: 1403677 - DNA, 15 bp, Homo sapiens
tcagctgtcccagat

SEQ ID NO: 1403678 - DNA, 15 bp, Homo sapiens
ttcagctgtcccaga

SEQ ID NO: 1403679 - DNA, 15 bp, Homo sapiens
cttcagctgtcccag

SEQ ID NO: 1403680 - DNA, 15 bp, Homo sapiens
tcttcagctgtccca

SEQ ID NO: 1403681 - DNA, 15 bp, Homo sapiens
ctcttcagctgtccc

SEQ ID NO: 1403682 - DNA, 15 bp, Homo sapiens
cctcttcagctgtcc

SEQ ID NO: 1403683 - DNA, 15 bp, Homo sapiens
ccctcttcagctgtc

SEQ ID NO: 1403684 - DNA, 15 bp, Homo sapiens
gccctcttcagctgt

SEQ ID NO: 1403685 - DNA, 15 bp, Homo sapiens
tgccctcttcagctg

SEQ ID NO: 1403686 - DNA, 15 bp, Homo sapiens
gtgccctcttcagct

SEQ ID NO: 1403687 - DNA, 15 bp, Homo sapiens
ggtgccctcttcagc

SEQ ID NO: 1403688 - DNA, 15 bp, Homo sapiens
aggtgccctcttcag

SEQ ID NO: 1403689 - DNA, 15 bp, Homo sapiens
aaggtgccctcttca

SEQ ID NO: 1403690 - DNA, 15 bp, Homo sapiens
aaaggtgccctcttc

SEQ ID NO: 1403691 - DNA, 15 bp, Homo sapiens
caaaggtgccctctt

SEQ ID NO: 1403692 - DNA, 15 bp, Homo sapiens
acaaaggtgccctct

SEQ ID NO: 1403693 - DNA, 15 bp, Homo sapiens
cacaaaggtgccctc

SEQ ID NO: 1403694 - DNA, 15 bp, Homo sapiens
acacaaaggtgccct

SEQ ID NO: 1403695 - DNA, 15 bp, Homo sapiens
tacacaaaggtgccc

SEQ ID NO: 1403696 - DNA, 15 bp, Homo sapiens
atacacaaaggtgcc

SEQ ID NO: 1403697 - DNA, 15 bp, Homo sapiens
tatacacaaaggtgc

SEQ ID NO: 1403698 - DNA, 15 bp, Homo sapiens
ttatacacaaaggtg

SEQ ID NO: 1403699 - DNA, 15 bp, Homo sapiens
cttatacacaaaggt

SEQ ID NO: 1403700 - DNA, 15 bp, Homo sapiens
acttatacacaaagg

SEQ ID NO: 1403701 - DNA, 15 bp, Homo sapiens
tacttatacacaaag

SEQ ID NO: 1403702 - DNA, 15 bp, Homo sapiens
ttacttatacacaaa

SEQ ID NO: 1403703 - DNA, 15 bp, Homo sapiens
tttacttatacacaa

SEQ ID NO: 1403704 - DNA, 15 bp, Homo sapiens
ttttacttatacaca

SEQ ID NO: 1403705 - DNA, 15 bp, Homo sapiens
cttttacttatacac

SEQ ID NO: 1403706 - DNA, 15 bp, Homo sapiens
tcttttacttataca

SEQ ID NO: 1403707 - DNA, 15 bp, Homo sapiens
ttcttttacttatac

SEQ ID NO: 1403708 - DNA, 15 bp, Homo sapiens
tttcttttacttata

SEQ ID NO: 1403709 - DNA, 15 bp, Homo sapiens
ctttcttttacttat

SEQ ID NO: 1403710 - DNA, 15 bp, Homo sapiens
tctttcttttactta

SEQ ID NO: 1403711 - DNA, 15 bp, Homo sapiens
ttctttcttttactt

SEQ ID NO: 1403712 - DNA, 15 bp, Homo sapiens
attctttcttttact

SEQ ID NO: 1403713 - DNA, 15 bp, Homo sapiens
cattctttcttttac

SEQ ID NO: 1403714 - DNA, 15 bp, Homo sapiens
acattctttctttta

SEQ ID NO: 1403715 - DNA, 15 bp, Homo sapiens
cacattctttctttt

SEQ ID NO: 1403716 - DNA, 15 bp, Homo sapiens
gcacattctttcttt

SEQ ID NO: 1403717 - DNA, 15 bp, Homo sapiens
ggcacattctttctt

SEQ ID NO: 1403718 - DNA, 15 bp, Homo sapiens
tggcacattctttct

SEQ ID NO: 1403719 - DNA, 15 bp, Homo sapiens
ctggcacattctttc

SEQ ID NO: 1403720 - DNA, 15 bp, Homo sapiens
tctggcacattcttt

SEQ ID NO: 1403721 - DNA, 15 bp, Homo sapiens
ttctggcacattctt

SEQ ID NO: 1403722 - DNA, 15 bp, Homo sapiens
tttctggcacattct

SEQ ID NO: 1403723 - DNA, 15 bp, Homo sapiens
ctttctggcacattc

SEQ ID NO: 1403724 - DNA, 15 bp, Homo sapiens
tctttctggcacatt

SEQ ID NO: 1403725 - DNA, 15 bp, Homo sapiens
ttctttctggcacat

SEQ ID NO: 1403726 - DNA, 15 bp, Homo sapiens
cttctttctggcaca

SEQ ID NO: 1403727 - DNA, 15 bp, Homo sapiens
gcttctttctggcac

SEQ ID NO: 1403728 - DNA, 15 bp, Homo sapiens
agcttctttctggca

SEQ ID NO: 1403729 - DNA, 15 bp, Homo sapiens
cagcttctttctggc

SEQ ID NO: 1403730 - DNA, 15 bp, Homo sapiens
tcagcttctttctgg

SEQ ID NO: 1403731 - DNA, 15 bp, Homo sapiens
atcagcttctttctg

SEQ ID NO: 1403732 - DNA, 15 bp, Homo sapiens
tatcagcttctttct

SEQ ID NO: 1403733 - DNA, 15 bp, Homo sapiens
gtatcagcttctttc

SEQ ID NO: 1403734 - DNA, 15 bp, Homo sapiens
agtatcagcttcttt

SEQ ID NO: 1403735 - DNA, 15 bp, Homo sapiens
cagtatcagcttctt

SEQ ID NO: 1403736 - DNA, 15 bp, Homo sapiens
tcagtatcagcttct

SEQ ID NO: 1403737 - DNA, 15 bp, Homo sapiens
ctcagtatcagcttc

SEQ ID NO: 1403738 - DNA, 15 bp, Homo sapiens
gctcagtatcagctt

SEQ ID NO: 1403739 - DNA, 15 bp, Homo sapiens
tgctcagtatcagct

SEQ ID NO: 1403740 - DNA, 15 bp, Homo sapiens
atgctcagtatcagc

SEQ ID NO: 1403741 - DNA, 15 bp, Homo sapiens
gatgctcagtatcag

SEQ ID NO: 1403742 - DNA, 15 bp, Homo sapiens
tgatgctcagtatca

SEQ ID NO: 1403743 - DNA, 15 bp, Homo sapiens
ttgatgctcagtatc

SEQ ID NO: 1403744 - DNA, 15 bp, Homo sapiens
cttgatgctcagtat

SEQ ID NO: 1403745 - DNA, 15 bp, Homo sapiens
tcttgatgctcagta

SEQ ID NO: 1403746 - DNA, 15 bp, Homo sapiens
ttcttgatgctcagt

SEQ ID NO: 1403747 - DNA, 15 bp, Homo sapiens
cttcttgatgctcag

SEQ ID NO: 1403748 - DNA, 15 bp, Homo sapiens
tcttcttgatgctca

SEQ ID NO: 1403749 - DNA, 15 bp, Homo sapiens
ttcttcttgatgctc

SEQ ID NO: 1403750 - DNA, 15 bp, Homo sapiens
tttcttcttgatgct

SEQ ID NO: 1403751 - DNA, 15 bp, Homo sapiens
ttttcttcttgatgc

SEQ ID NO: 1403752 - DNA, 15 bp, Homo sapiens
cttttcttcttgatg

SEQ ID NO: 1403753 - DNA, 15 bp, Homo sapiens
gcttttcttcttgat

SEQ ID NO: 1403754 - DNA, 15 bp, Homo sapiens
cgcttttcttcttga

SEQ ID NO: 1403755 - DNA, 15 bp, Homo sapiens
ccgcttttcttcttg

SEQ ID NO: 1403756 - DNA, 15 bp, Homo sapiens
cccgcttttcttctt

SEQ ID NO: 1403757 - DNA, 15 bp, Homo sapiens
ccccgcttttcttct

SEQ ID NO: 1403758 - DNA, 15 bp, Homo sapiens
cccccgcttttcttc

SEQ ID NO: 1403759 - DNA, 15 bp, Homo sapiens
tcccccgcttttctt

SEQ ID NO: 1403760 - DNA, 15 bp, Homo sapiens
ttcccccgcttttct

SEQ ID NO: 1403761 - DNA, 15 bp, Homo sapiens
cttcccccgcttttc

SEQ ID NO: 1403762 - DNA, 15 bp, Homo sapiens
ccttcccccgctttt

SEQ ID NO: 1403763 - DNA, 15 bp, Homo sapiens
tccttcccccgcttt

SEQ ID NO: 1403764 - DNA, 15 bp, Homo sapiens
ttccttcccccgctt

SEQ ID NO: 1403765 - DNA, 15 bp, Homo sapiens
gttccttcccccgct

SEQ ID NO: 1403766 - DNA, 15 bp, Homo sapiens
ggttccttcccccgc

SEQ ID NO: 1403767 - DNA, 15 bp, Homo sapiens
aggttccttcccccg

SEQ ID NO: 1403768 - DNA, 15 bp, Homo sapiens
taggttccttccccc

SEQ ID NO: 1403769 - DNA, 15 bp, Homo sapiens
ctaggttccttcccc

SEQ ID NO: 1403770 - DNA, 15 bp, Homo sapiens
actaggttccttccc

SEQ ID NO: 1403771 - DNA, 15 bp, Homo sapiens
cactaggttccttcc

SEQ ID NO: 1403772 - DNA, 15 bp, Homo sapiens
gcactaggttccttc

SEQ ID NO: 1403773 - DNA, 15 bp, Homo sapiens
agcactaggttcctt

SEQ ID NO: 1403774 - DNA, 15 bp, Homo sapiens
aagcactaggttcct

SEQ ID NO: 1403775 - DNA, 15 bp, Homo sapiens
aaagcactaggttcc

SEQ ID NO: 1403776 - DNA, 15 bp, Homo sapiens
aaaagcactaggttc

SEQ ID NO: 1403777 - DNA, 15 bp, Homo sapiens
gaaaagcactaggtt

SEQ ID NO: 1403778 - DNA, 15 bp, Homo sapiens
tgaaaagcactaggt

SEQ ID NO: 1403779 - DNA, 15 bp, Homo sapiens
ttgaaaagcactagg

SEQ ID NO: 1403780 - DNA, 15 bp, Homo sapiens
attgaaaagcactag

SEQ ID NO: 1403781 - DNA, 15 bp, Homo sapiens
aattgaaaagcacta

SEQ ID NO: 1403782 - DNA, 15 bp, Homo sapiens
caattgaaaagcact

SEQ ID NO: 1403783 - DNA, 15 bp, Homo sapiens
gcaattgaaaagcac

SEQ ID NO: 1403784 - DNA, 15 bp, Homo sapiens
ggcaattgaaaagca

SEQ ID NO: 1403785 - DNA, 15 bp, Homo sapiens
tggcaattgaaaagc

SEQ ID NO: 1403786 - DNA, 15 bp, Homo sapiens
ttggcaattgaaaag

SEQ ID NO: 1403787 - DNA, 15 bp, Homo sapiens
cttggcaattgaaaa

SEQ ID NO: 1403788 - DNA, 15 bp, Homo sapiens
tcttggcaattgaaa

SEQ ID NO: 1403789 - DNA, 15 bp, Homo sapiens
gtcttggcaattgaa

SEQ ID NO: 1403790 - DNA, 15 bp, Homo sapiens
tgtcttggcaattga

SEQ ID NO: 1403791 - DNA, 15 bp, Homo sapiens
ctgtcttggcaattg

SEQ ID NO: 1403792 - DNA, 15 bp, Homo sapiens
tctgtcttggcaatt

SEQ ID NO: 1403793 - DNA, 15 bp, Homo sapiens
ctctgtcttggcaat

SEQ ID NO: 1403794 - DNA, 15 bp, Homo sapiens
cctctgtcttggcaa

SEQ ID NO: 1403795 - DNA, 15 bp, Homo sapiens
ccctctgtcttggca

SEQ ID NO: 1403796 - DNA, 15 bp, Homo sapiens
gccctctgtcttggc

SEQ ID NO: 1403797 - DNA, 15 bp, Homo sapiens
ggccctctgtcttgg

SEQ ID NO: 1403798 - DNA, 15 bp, Homo sapiens
tggccctctgtcttg

SEQ ID NO: 1403799 - DNA, 15 bp, Homo sapiens
atggccctctgtctt

SEQ ID NO: 1403800 - DNA, 15 bp, Homo sapiens
catggccctctgtct

SEQ ID NO: 1403801 - DNA, 15 bp, Homo sapiens
ccatggccctctgtc

SEQ ID NO: 1403802 - DNA, 15 bp, Homo sapiens
accatggccctctgt

SEQ ID NO: 1403803 - DNA, 15 bp, Homo sapiens
caccatggccctctg

SEQ ID NO: 1403804 - DNA, 15 bp, Homo sapiens
tcaccatggccctct

SEQ ID NO: 1403805 - DNA, 15 bp, Homo sapiens
ttcaccatggccctc

SEQ ID NO: 1403806 - DNA, 15 bp, Homo sapiens
cttcaccatggccct

SEQ ID NO: 1403807 - DNA, 15 bp, Homo sapiens
tcttcaccatggccc

SEQ ID NO: 1403808 - DNA, 15 bp, Homo sapiens
atcttcaccatggcc

SEQ ID NO: 1403809 - DNA, 15 bp, Homo sapiens
aatcttcaccatggc

SEQ ID NO: 1403810 - DNA, 15 bp, Homo sapiens
gaatcttcaccatgg

SEQ ID NO: 1403811 - DNA, 15 bp, Homo sapiens
tgaatcttcaccatg

SEQ ID NO: 1403812 - DNA, 15 bp, Homo sapiens
ttgaatcttcaccat

SEQ ID NO: 1403813 - DNA, 15 bp, Homo sapiens
cttgaatcttcacca

SEQ ID NO: 1403814 - DNA, 15 bp, Homo sapiens
ccttgaatcttcacc

SEQ ID NO: 1403815 - DNA, 15 bp, Homo sapiens
accttgaatcttcac

SEQ ID NO: 1403816 - DNA, 15 bp, Homo sapiens
gaccttgaatcttca

SEQ ID NO: 1403817 - DNA, 15 bp, Homo sapiens
tgaccttgaatcttc

SEQ ID NO: 1403818 - DNA, 15 bp, Homo sapiens
ctgaccttgaatctt

SEQ ID NO: 1403819 - DNA, 15 bp, Homo sapiens
tctgaccttgaatct

SEQ ID NO: 1403820 - DNA, 15 bp, Homo sapiens
atctgaccttgaatc

SEQ ID NO: 1403821 - DNA, 15 bp, Homo sapiens
aatctgaccttgaat

SEQ ID NO: 1403822 - DNA, 15 bp, Homo sapiens
taatctgaccttgaa

SEQ ID NO: 1403823 - DNA, 15 bp, Homo sapiens
ctaatctgaccttga

SEQ ID NO: 1403824 - DNA, 15 bp, Homo sapiens
tctaatctgaccttg

SEQ ID NO: 1403825 - DNA, 15 bp, Homo sapiens
atctaatctgacctt

SEQ ID NO: 1403826 - DNA, 15 bp, Homo sapiens
tatctaatctgacct

SEQ ID NO: 1403827 - DNA, 15 bp, Homo sapiens
atatctaatctgacc

SEQ ID NO: 1403828 - DNA, 15 bp, Homo sapiens
gatatctaatctgac

SEQ ID NO: 1403829 - DNA, 15 bp, Homo sapiens
tgatatctaatctga

SEQ ID NO: 1403830 - DNA, 15 bp, Homo sapiens
ctgatatctaatctg

SEQ ID NO: 1403831 - DNA, 15 bp, Homo sapiens
gctgatatctaatct

SEQ ID NO: 1403832 - DNA, 15 bp, Homo sapiens
ggctgatatctaatc

SEQ ID NO: 1403833 - DNA, 15 bp, Homo sapiens
aggctgatatctaat

SEQ ID NO: 1403834 - DNA, 15 bp, Homo sapiens
gaggctgatatctaa

SEQ ID NO: 1403835 - DNA, 15 bp, Homo sapiens
tgaggctgatatcta

SEQ ID NO: 1403836 - DNA, 15 bp, Homo sapiens
gtgaggctgatatct

SEQ ID NO: 1403837 - DNA, 15 bp, Homo sapiens
agtgaggctgatatc

SEQ ID NO: 1403838 - DNA, 15 bp, Homo sapiens
aagtgaggctgatat

SEQ ID NO: 1403839 - DNA, 15 bp, Homo sapiens
aaagtgaggctgata

SEQ ID NO: 1403840 - DNA, 15 bp, Homo sapiens
taaagtgaggctgat

SEQ ID NO: 1403841 - DNA, 15 bp, Homo sapiens
ctaaagtgaggctga

SEQ ID NO: 1403842 - DNA, 15 bp, Homo sapiens
cctaaagtgaggctg

SEQ ID NO: 1403843 - DNA, 15 bp, Homo sapiens
tcctaaagtgaggct

SEQ ID NO: 1403844 - DNA, 15 bp, Homo sapiens
gtcctaaagtgaggc

SEQ ID NO: 1403845 - DNA, 15 bp, Homo sapiens
agtcctaaagtgagg

SEQ ID NO: 1403846 - DNA, 15 bp, Homo sapiens
tagtcctaaagtgag

SEQ ID NO: 1403847 - DNA, 15 bp, Homo sapiens
ttagtcctaaagtga

SEQ ID NO: 1403848 - DNA, 15 bp, Homo sapiens
attagtcctaaagtg

SEQ ID NO: 1403849 - DNA, 15 bp, Homo sapiens
aattagtcctaaagt

SEQ ID NO: 1403850 - DNA, 15 bp, Homo sapiens
caattagtcctaaag

SEQ ID NO: 1403851 - DNA, 15 bp, Homo sapiens
ccaattagtcctaaa

SEQ ID NO: 1403852 - DNA, 15 bp, Homo sapiens
tccaattagtcctaa

SEQ ID NO: 1403853 - DNA, 15 bp, Homo sapiens
atccaattagtccta

SEQ ID NO: 1403854 - DNA, 15 bp, Homo sapiens
tatccaattagtcct

SEQ ID NO: 1403855 - DNA, 15 bp, Homo sapiens
gtatccaattagtcc

SEQ ID NO: 1403856 - DNA, 15 bp, Homo sapiens
tgtatccaattagtc

SEQ ID NO: 1403857 - DNA, 15 bp, Homo sapiens
atgtatccaattagt

SEQ ID NO: 1403858 - DNA, 15 bp, Homo sapiens
gatgtatccaattag

SEQ ID NO: 1403859 - DNA, 15 bp, Homo sapiens
tgatgtatccaatta

SEQ ID NO: 1403860 - DNA, 15 bp, Homo sapiens
ctgatgtatccaatt

SEQ ID NO: 1403861 - DNA, 15 bp, Homo sapiens
tctgatgtatccaat

SEQ ID NO: 1403862 - DNA, 15 bp, Homo sapiens
ttctgatgtatccaa

SEQ ID NO: 1403863 - DNA, 15 bp, Homo sapiens
attctgatgtatcca

SEQ ID NO: 1403864 - DNA, 15 bp, Homo sapiens
gattctgatgtatcc

SEQ ID NO: 1403865 - DNA, 15 bp, Homo sapiens
ggattctgatgtatc

SEQ ID NO: 1403866 - DNA, 15 bp, Homo sapiens
aggattctgatgtat

SEQ ID NO: 1403867 - DNA, 15 bp, Homo sapiens
taggattctgatgta

SEQ ID NO: 1403868 - DNA, 15 bp, Homo sapiens
ctaggattctgatgt

SEQ ID NO: 1403869 - DNA, 15 bp, Homo sapiens
cctaggattctgatg

SEQ ID NO: 1403870 - DNA, 15 bp, Homo sapiens
ccctaggattctgat

SEQ ID NO: 1403871 - DNA, 15 bp, Homo sapiens
tccctaggattctga

SEQ ID NO: 1403872 - DNA, 15 bp, Homo sapiens
atccctaggattctg

SEQ ID NO: 1403873 - DNA, 15 bp, Homo sapiens
aatccctaggattct

SEQ ID NO: 1403874 - DNA, 15 bp, Homo sapiens
gaatccctaggattc

SEQ ID NO: 1403875 - DNA, 15 bp, Homo sapiens
ggaatccctaggatt

SEQ ID NO: 1403876 - DNA, 15 bp, Homo sapiens
tggaatccctaggat

SEQ ID NO: 1403877 - DNA, 15 bp, Homo sapiens
atggaatccctagga

SEQ ID NO: 1403878 - DNA, 15 bp, Homo sapiens
catggaatccctagg

SEQ ID NO: 1403879 - DNA, 15 bp, Homo sapiens
ccatggaatccctag

SEQ ID NO: 1403880 - DNA, 15 bp, Homo sapiens
accatggaatcccta

SEQ ID NO: 1403881 - DNA, 15 bp, Homo sapiens
aaccatggaatccct

SEQ ID NO: 1403882 - DNA, 15 bp, Homo sapiens
aaaccatggaatccc

SEQ ID NO: 1403883 - DNA, 15 bp, Homo sapiens
taaaccatggaatcc

SEQ ID NO: 1403884 - DNA, 15 bp, Homo sapiens
ttaaaccatggaatc

SEQ ID NO: 1403885 - DNA, 15 bp, Homo sapiens
cttaaaccatggaat

SEQ ID NO: 1403886 - DNA, 15 bp, Homo sapiens
gcttaaaccatggaa

SEQ ID NO: 1403887 - DNA, 15 bp, Homo sapiens
agcttaaaccatgga

SEQ ID NO: 1403888 - DNA, 15 bp, Homo sapiens
gagcttaaaccatgg

SEQ ID NO: 1403889 - DNA, 15 bp, Homo sapiens
agagcttaaaccatg

SEQ ID NO: 1403890 - DNA, 15 bp, Homo sapiens
gagagcttaaaccat

SEQ ID NO: 1403891 - DNA, 15 bp, Homo sapiens
agagagcttaaacca

SEQ ID NO: 1403892 - DNA, 15 bp, Homo sapiens
cagagagcttaaacc

SEQ ID NO: 1403893 - DNA, 15 bp, Homo sapiens
tccagagagcttaaa

SEQ ID NO: 1403894 - DNA, 15 bp, Homo sapiens
atccagagagcttaa

SEQ ID NO: 1403895 - DNA, 15 bp, Homo sapiens
tatccagagagctta

SEQ ID NO: 1403896 - DNA, 15 bp, Homo sapiens
atatccagagagctt

SEQ ID NO: 1403897 - DNA, 15 bp, Homo sapiens
aatatccagagagct

SEQ ID NO: 1403898 - DNA, 15 bp, Homo sapiens
caatatccagagagc

SEQ ID NO: 1403899 - DNA, 15 bp, Homo sapiens
acaatatccagagag

SEQ ID NO: 1403900 - DNA, 15 bp, Homo sapiens
gacaatatccagaga

SEQ ID NO: 1403901 - DNA, 15 bp, Homo sapiens
agacaatatccagag

SEQ ID NO: 1403902 - DNA, 15 bp, Homo sapiens
tagacaatatccaga

SEQ ID NO: 1403903 - DNA, 15 bp, Homo sapiens
ttagacaatatccag

SEQ ID NO: 1403904 - DNA, 15 bp, Homo sapiens
attagacaatatcca

SEQ ID NO: 1403905 - DNA, 15 bp, Homo sapiens
gattagacaatatcc

SEQ ID NO: 1403906 - DNA, 15 bp, Homo sapiens
ggattagacaatatc

SEQ ID NO: 1403907 - DNA, 15 bp, Homo sapiens
gggattagacaatat

SEQ ID NO: 1403908 - DNA, 15 bp, Homo sapiens
tgggattagacaata

SEQ ID NO: 1403909 - DNA, 15 bp, Homo sapiens
ttgggattagacaat

SEQ ID NO: 1403910 - DNA, 15 bp, Homo sapiens
tttgggattagacaa

SEQ ID NO: 1403911 - DNA, 15 bp, Homo sapiens
ctttgggattagaca

SEQ ID NO: 1403912 - DNA, 15 bp, Homo sapiens
gctttgggattagac

SEQ ID NO: 1403913 - DNA, 15 bp, Homo sapiens
cgctttgggattaga

SEQ ID NO: 1403914 - DNA, 15 bp, Homo sapiens
gcgctttgggattag

SEQ ID NO: 1403915 - DNA, 15 bp, Homo sapiens
ggcgctttgggatta

SEQ ID NO: 1403916 - DNA, 15 bp, Homo sapiens
cggcgctttgggatt

SEQ ID NO: 1403917 - DNA, 15 bp, Homo sapiens
tcggcgctttgggat

SEQ ID NO: 1403918 - DNA, 15 bp, Homo sapiens
ctcggcgctttggga

SEQ ID NO: 1403919 - DNA, 15 bp, Homo sapiens
tctcggcgctttggg

SEQ ID NO: 1403920 - DNA, 15 bp, Homo sapiens
ttctcggcgctttgg

SEQ ID NO: 1403921 - DNA, 15 bp, Homo sapiens
cttctcggcgctttg

SEQ ID NO: 1403922 - DNA, 15 bp, Homo sapiens
tcttctcggcgcttt

SEQ ID NO: 1403923 - DNA, 15 bp, Homo sapiens
atcttctcggcgctt

SEQ ID NO: 1403924 - DNA, 15 bp, Homo sapiens
aatcttctcggcgct

SEQ ID NO: 1403925 - DNA, 15 bp, Homo sapiens
gaatcttctcggcgc

SEQ ID NO: 1403926 - DNA, 15 bp, Homo sapiens
agaatcttctcggcg

SEQ ID NO: 1403927 - DNA, 15 bp, Homo sapiens
tagaatcttctcggc

SEQ ID NO: 1403928 - DNA, 15 bp, Homo sapiens
atagaatcttctcgg

SEQ ID NO: 1403929 - DNA, 15 bp, Homo sapiens
gatagaatcttctcg

SEQ ID NO: 1403930 - DNA, 15 bp, Homo sapiens
agatagaatcttctc

SEQ ID NO: 1403931 - DNA, 15 bp, Homo sapiens
gagatagaatcttct

SEQ ID NO: 1403932 - DNA, 15 bp, Homo sapiens
ggagatagaatcttc

SEQ ID NO: 1403933 - DNA, 15 bp, Homo sapiens
aggagatagaatctt

SEQ ID NO: 1403934 - DNA, 15 bp, Homo sapiens
aaggagatagaatct

SEQ ID NO: 1403935 - DNA, 15 bp, Homo sapiens
taaggagatagaatc

SEQ ID NO: 1403936 - DNA, 15 bp, Homo sapiens
ctaaggagatagaat

SEQ ID NO: 1403937 - DNA, 15 bp, Homo sapiens
actaaggagatagaa

SEQ ID NO: 1403938 - DNA, 15 bp, Homo sapiens
gactaaggagataga

SEQ ID NO: 1403939 - DNA, 15 bp, Homo sapiens
tgactaaggagatag

SEQ ID NO: 1403940 - DNA, 15 bp, Homo sapiens
ttgactaaggagata

SEQ ID NO: 1403941 - DNA, 15 bp, Homo sapiens
attgactaaggagat

SEQ ID NO: 1403942 - DNA, 15 bp, Homo sapiens
aattgactaaggaga

SEQ ID NO: 1403943 - DNA, 15 bp, Homo sapiens
aaattgactaaggag

SEQ ID NO: 1403944 - DNA, 15 bp, Homo sapiens
gaaattgactaagga

SEQ ID NO: 1403945 - DNA, 15 bp, Homo sapiens
ggaaattgactaagg

SEQ ID NO: 1403946 - DNA, 15 bp, Homo sapiens
aggaaattgactaag

SEQ ID NO: 1403947 - DNA, 15 bp, Homo sapiens
taggaaattgactaa

SEQ ID NO: 1403948 - DNA, 15 bp, Homo sapiens
ctaggaaattgacta

SEQ ID NO: 1403949 - DNA, 15 bp, Homo sapiens
cctaggaaattgact

SEQ ID NO: 1403950 - DNA, 15 bp, Homo sapiens
acctaggaaattgac

SEQ ID NO: 1403951 - DNA, 15 bp, Homo sapiens
gacctaggaaattga

SEQ ID NO: 1403952 - DNA, 15 bp, Homo sapiens
agacctaggaaattg

SEQ ID NO: 1403953 - DNA, 15 bp, Homo sapiens
aagacctaggaaatt

SEQ ID NO: 1403954 - DNA, 15 bp, Homo sapiens
aaagacctaggaaat

SEQ ID NO: 1403955 - DNA, 15 bp, Homo sapiens
gaaagacctaggaaa

SEQ ID NO: 1403956 - DNA, 15 bp, Homo sapiens
tgaaagacctaggaa

SEQ ID NO: 1403957 - DNA, 15 bp, Homo sapiens
ttgaaagacctagga

SEQ ID NO: 1403958 - DNA, 15 bp, Homo sapiens
cttgaaagacctagg

SEQ ID NO: 1403959 - DNA, 15 bp, Homo sapiens
acttgaaagacctag

SEQ ID NO: 1403960 - DNA, 15 bp, Homo sapiens
aacttgaaagaccta

SEQ ID NO: 1403961 - DNA, 15 bp, Homo sapiens
aaacttgaaagacct

SEQ ID NO: 1403962 - DNA, 15 bp, Homo sapiens
gaaacttgaaagacc

SEQ ID NO: 1403963 - DNA, 15 bp, Homo sapiens
agaaacttgaaagac

SEQ ID NO: 1403964 - DNA, 15 bp, Homo sapiens
aagaaacttgaaaga

SEQ ID NO: 1403965 - DNA, 15 bp, Homo sapiens
gaagaaacttgaaag

SEQ ID NO: 1403966 - DNA, 15 bp, Homo sapiens
agaagaaacttgaaa

SEQ ID NO: 1403967 - DNA, 15 bp, Homo sapiens
gagaagaaacttgaa

SEQ ID NO: 1403968 - DNA, 15 bp, Homo sapiens
agagaagaaacttga

SEQ ID NO: 1403969 - DNA, 15 bp, Homo sapiens
tagagaagaaacttg

SEQ ID NO: 1403970 - DNA, 15 bp, Homo sapiens
gtagagaagaaactt

SEQ ID NO: 1403971 - DNA, 15 bp, Homo sapiens
agtagagaagaaact

SEQ ID NO: 1403972 - DNA, 15 bp, Homo sapiens
gagtagagaagaaac

SEQ ID NO: 1403973 - DNA, 15 bp, Homo sapiens
ggagtagagaagaaa

SEQ ID NO: 1403974 - DNA, 15 bp, Homo sapiens
tggagtagagaagaa

SEQ ID NO: 1403975 - DNA, 15 bp, Homo sapiens
ttggagtagagaaga

SEQ ID NO: 1403976 - DNA, 15 bp, Homo sapiens
tttggagtagagaag

SEQ ID NO: 1403977 - DNA, 15 bp, Homo sapiens
atttggagtagagaa

SEQ ID NO: 1403978 - DNA, 15 bp, Homo sapiens
gatttggagtagaga

SEQ ID NO: 1403979 - DNA, 15 bp, Homo sapiens
tgatttggagtagag

SEQ ID NO: 1403980 - DNA, 15 bp, Homo sapiens
ttgatttggagtaga

SEQ ID NO: 1403981 - DNA, 15 bp, Homo sapiens
cttgatttggagtag

SEQ ID NO: 1403982 - DNA, 15 bp, Homo sapiens
gcttgatttggagta

SEQ ID NO: 1403983 - DNA, 15 bp, Homo sapiens
tgcttgatttggagt

SEQ ID NO: 1403984 - DNA, 15 bp, Homo sapiens
ctgcttgatttggag

SEQ ID NO: 1403985 - DNA, 15 bp, Homo sapiens
tctgcttgatttgga

SEQ ID NO: 1403986 - DNA, 15 bp, Homo sapiens
ttctgcttgatttgg

SEQ ID NO: 1403987 - DNA, 15 bp, Homo sapiens
cttctgcttgatttg

SEQ ID NO: 1403988 - DNA, 15 bp, Homo sapiens
acttctgcttgattt

SEQ ID NO: 1403989 - DNA, 15 bp, Homo sapiens
cacttctgcttgatt

SEQ ID NO: 1403990 - DNA, 15 bp, Homo sapiens
gcacttctgcttgat

SEQ ID NO: 1403991 - DNA, 15 bp, Homo sapiens
ggcacttctgcttga

SEQ ID NO: 1403992 - DNA, 15 bp, Homo sapiens
tggcacttctgcttg

SEQ ID NO: 1403993 - DNA, 15 bp, Homo sapiens
atggcacttctgctt

SEQ ID NO: 1403994 - DNA, 15 bp, Homo sapiens
tatggcacttctgct

SEQ ID NO: 1403995 - DNA, 15 bp, Homo sapiens
ttatggcacttctgc

SEQ ID NO: 1403996 - DNA, 15 bp, Homo sapiens
attatggcacttctg

SEQ ID NO: 1403997 - DNA, 15 bp, Homo sapiens
tattatggcacttct

SEQ ID NO: 1403998 - DNA, 15 bp, Homo sapiens
ctattatggcacttc

SEQ ID NO: 1403999 - DNA, 15 bp, Homo sapiens
tctattatggcactt

SEQ ID NO: 1404000 - DNA, 15 bp, Homo sapiens
atctattatggcact

SEQ ID NO: 1404001 - DNA, 15 bp, Homo sapiens
tatctattatggcac

SEQ ID NO: 1404002 - DNA, 15 bp, Homo sapiens
atatctattatggca

SEQ ID NO: 1404003 - DNA, 15 bp, Homo sapiens
catatctattatggc

SEQ ID NO: 1404004 - DNA, 15 bp, Homo sapiens
tcatatctattatgg

SEQ ID NO: 1404005 - DNA, 15 bp, Homo sapiens
ctcatatctattatg

SEQ ID NO: 1404006 - DNA, 15 bp, Homo sapiens
atctcatatctatta

SEQ ID NO: 1404007 - DNA, 15 bp, Homo sapiens
gatctcatatctatt

SEQ ID NO: 1404008 - DNA, 15 bp, Homo sapiens
agatctcatatctat

SEQ ID NO: 1404009 - DNA, 15 bp, Homo sapiens
cagatctcatatcta

SEQ ID NO: 1404010 - DNA, 15 bp, Homo sapiens
acagatctcatatct

SEQ ID NO: 1404011 - DNA, 15 bp, Homo sapiens
cacagatctcatatc

SEQ ID NO: 1404012 - DNA, 15 bp, Homo sapiens
ccacagatctcatat

SEQ ID NO: 1404013 - DNA, 15 bp, Homo sapiens
cccacagatctcata

SEQ ID NO: 1404014 - DNA, 15 bp, Homo sapiens
gcccacagatctcat

SEQ ID NO: 1404015 - DNA, 15 bp, Homo sapiens
tgcccacagatctca

SEQ ID NO: 1404016 - DNA, 15 bp, Homo sapiens
ttgcccacagatctc

SEQ ID NO: 1404017 - DNA, 15 bp, Homo sapiens
tttgcccacagatct

SEQ ID NO: 1404018 - DNA, 15 bp, Homo sapiens
atttgcccacagatc

SEQ ID NO: 1404019 - DNA, 15 bp, Homo sapiens
tatttgcccacagat

SEQ ID NO: 1404020 - DNA, 15 bp, Homo sapiens
gtatttgcccacaga

SEQ ID NO: 1404021 - DNA, 15 bp, Homo sapiens
tgtatttgcccacag

SEQ ID NO: 1404022 - DNA, 15 bp, Homo sapiens
ctgtatttgcccaca

SEQ ID NO: 1404023 - DNA, 15 bp, Homo sapiens
cctgtatttgcccac

SEQ ID NO: 1404024 - DNA, 15 bp, Homo sapiens
tcctgtatttgccca

SEQ ID NO: 1404025 - DNA, 15 bp, Homo sapiens
ttcctgtatttgccc

SEQ ID NO: 1404026 - DNA, 15 bp, Homo sapiens
tttcctgtatttgcc

SEQ ID NO: 1404027 - DNA, 15 bp, Homo sapiens
ctttcctgtatttgc

SEQ ID NO: 1404028 - DNA, 15 bp, Homo sapiens
cctttcctgtatttg

SEQ ID NO: 1404029 - DNA, 15 bp, Homo sapiens
tcctttcctgtattt

SEQ ID NO: 1404030 - DNA, 15 bp, Homo sapiens
ttcctttcctgtatt

SEQ ID NO: 1404031 - DNA, 15 bp, Homo sapiens
tttcctttcctgtat

SEQ ID NO: 1404032 - DNA, 15 bp, Homo sapiens
ttttcctttcctgta

SEQ ID NO: 1404033 - DNA, 15 bp, Homo sapiens
attttcctttcctgt

SEQ ID NO: 1404034 - DNA, 15 bp, Homo sapiens
gattttcctttcctg

SEQ ID NO: 1404035 - DNA, 15 bp, Homo sapiens
agattttcctttcct

SEQ ID NO: 1404036 - DNA, 15 bp, Homo sapiens
gagattttcctttcc

SEQ ID NO: 1404037 - DNA, 15 bp, Homo sapiens
agagattttcctttc

SEQ ID NO: 1404038 - DNA, 15 bp, Homo sapiens
gagagattttccttt

SEQ ID NO: 1404039 - DNA, 15 bp, Homo sapiens
agagagattttcctt

SEQ ID NO: 1404040 - DNA, 15 bp, Homo sapiens
cagagagattttcct

SEQ ID NO: 1404041 - DNA, 15 bp, Homo sapiens
acagagagattttcc

SEQ ID NO: 1404042 - DNA, 15 bp, Homo sapiens
tacagagagattttc

SEQ ID NO: 1404043 - DNA, 15 bp, Homo sapiens
ctacagagagatttt

SEQ ID NO: 1404044 - DNA, 15 bp, Homo sapiens
actacagagagattt

SEQ ID NO: 1404045 - DNA, 15 bp, Homo sapiens
cactacagagagatt

SEQ ID NO: 1404046 - DNA, 15 bp, Homo sapiens
ccactacagagagat

SEQ ID NO: 1404047 - DNA, 15 bp, Homo sapiens
cccactacagagaga

SEQ ID NO: 1404048 - DNA, 15 bp, Homo sapiens
tcccactacagagag

SEQ ID NO: 1404049 - DNA, 15 bp, Homo sapiens
gtcccactacagaga

SEQ ID NO: 1404050 - DNA, 15 bp, Homo sapiens
ggtcccactacagag

SEQ ID NO: 1404051 - DNA, 15 bp, Homo sapiens
aggtcccactacaga

SEQ ID NO: 1404052 - DNA, 15 bp, Homo sapiens
aaggtcccactacag

SEQ ID NO: 1404053 - DNA, 15 bp, Homo sapiens
aaaggtcccactaca

SEQ ID NO: 1404054 - DNA, 15 bp, Homo sapiens
caaaggtcccactac

SEQ ID NO: 1404055 - DNA, 15 bp, Homo sapiens
acaaaggtcccacta

SEQ ID NO: 1404056 - DNA, 15 bp, Homo sapiens
gacaaaggtcccact

SEQ ID NO: 1404057 - DNA, 15 bp, Homo sapiens
agacaaaggtcccac

SEQ ID NO: 1404058 - DNA, 15 bp, Homo sapiens
gagacaaaggtccca

SEQ ID NO: 1404059 - DNA, 15 bp, Homo sapiens
tgagacaaaggtccc

SEQ ID NO: 1404060 - DNA, 15 bp, Homo sapiens
ttgagacaaaggtcc

SEQ ID NO: 1404061 - DNA, 15 bp, Homo sapiens
attgagacaaaggtc

SEQ ID NO: 1404062 - DNA, 15 bp, Homo sapiens
tattgagacaaaggt

SEQ ID NO: 1404063 - DNA, 15 bp, Homo sapiens
gtattgagacaaagg

SEQ ID NO: 1404064 - DNA, 15 bp, Homo sapiens
agtattgagacaaag

SEQ ID NO: 1404065 - DNA, 15 bp, Homo sapiens
cagtattgagacaaa

SEQ ID NO: 1404066 - DNA, 15 bp, Homo sapiens
tcagtattgagacaa

SEQ ID NO: 1404067 - DNA, 15 bp, Homo sapiens
ttcagtattgagaca

SEQ ID NO: 1404068 - DNA, 15 bp, Homo sapiens
tttcagtattgagac

SEQ ID NO: 1404069 - DNA, 15 bp, Homo sapiens
ctttcagtattgaga

SEQ ID NO: 1404070 - DNA, 15 bp, Homo sapiens
tctttcagtattgag

SEQ ID NO: 1404071 - DNA, 15 bp, Homo sapiens
ttctttcagtattga

SEQ ID NO: 1404072 - DNA, 15 bp, Homo sapiens
tttctttcagtattg

SEQ ID NO: 1404073 - DNA, 15 bp, Homo sapiens
gtttctttcagtatt

SEQ ID NO: 1404074 - DNA, 15 bp, Homo sapiens
tgtttctttcagtat

SEQ ID NO: 1404075 - DNA, 15 bp, Homo sapiens
ctgtttctttcagta

SEQ ID NO: 1404076 - DNA, 15 bp, Homo sapiens
actgtttctttcagt

SEQ ID NO: 1404077 - DNA, 15 bp, Homo sapiens
gactgtttctttcag

SEQ ID NO: 1404078 - DNA, 15 bp, Homo sapiens
tgactgtttctttca

SEQ ID NO: 1404079 - DNA, 15 bp, Homo sapiens
atgactgtttctttc

SEQ ID NO: 1404080 - DNA, 15 bp, Homo sapiens
catgactgtttcttt

SEQ ID NO: 1404081 - DNA, 15 bp, Homo sapiens
gcatgactgtttctt

SEQ ID NO: 1404082 - DNA, 15 bp, Homo sapiens
tgcatgactgtttct

SEQ ID NO: 1404083 - DNA, 15 bp, Homo sapiens
atgcatgactgtttc

SEQ ID NO: 1404084 - DNA, 15 bp, Homo sapiens
tatgcatgactgttt

SEQ ID NO: 1404085 - DNA, 15 bp, Homo sapiens
ctatgcatgactgtt

SEQ ID NO: 1404086 - DNA, 15 bp, Homo sapiens
gctatgcatgactgt

SEQ ID NO: 1404087 - DNA, 15 bp, Homo sapiens
tgctatgcatgactg

SEQ ID NO: 1404088 - DNA, 15 bp, Homo sapiens
ctgctatgcatgact

SEQ ID NO: 1404089 - DNA, 15 bp, Homo sapiens
actgctatgcatgac

SEQ ID NO: 1404090 - DNA, 15 bp, Homo sapiens
cactgctatgcatga

SEQ ID NO: 1404091 - DNA, 15 bp, Homo sapiens
acactgctatgcatg

SEQ ID NO: 1404092 - DNA, 15 bp, Homo sapiens
cacactgctatgcat

SEQ ID NO: 1404093 - DNA, 15 bp, Homo sapiens
tcacactgctatgca

SEQ ID NO: 1404094 - DNA, 15 bp, Homo sapiens
ttcacactgctatgc

SEQ ID NO: 1404095 - DNA, 15 bp, Homo sapiens
attcacactgctatg

SEQ ID NO: 1404096 - DNA, 15 bp, Homo sapiens
aattcacactgctat

SEQ ID NO: 1404097 - DNA, 15 bp, Homo sapiens
gaattcacactgcta

SEQ ID NO: 1404098 - DNA, 15 bp, Homo sapiens
agaattcacactgct

SEQ ID NO: 1404099 - DNA, 15 bp, Homo sapiens
cagaattcacactgc

SEQ ID NO: 1404100 - DNA, 15 bp, Homo sapiens
acagaattcacactg

SEQ ID NO: 1404101 - DNA, 15 bp, Homo sapiens
aacagaattcacact

SEQ ID NO: 1404102 - DNA, 15 bp, Homo sapiens
aaacagaattcacac

SEQ ID NO: 1404103 - DNA, 15 bp, Homo sapiens
aaaacagaattcaca

SEQ ID NO: 1404104 - DNA, 15 bp, Homo sapiens
gaaaacagaattcac

SEQ ID NO: 1404105 - DNA, 15 bp, Homo sapiens
ggaaaacagaattca

SEQ ID NO: 1404106 - DNA, 15 bp, Homo sapiens
aggaaaacagaattc

SEQ ID NO: 1404107 - DNA, 15 bp, Homo sapiens
aaggaaaacagaatt

SEQ ID NO: 1404108 - DNA, 15 bp, Homo sapiens
aaaggaaaacagaat

SEQ ID NO: 1404109 - DNA, 15 bp, Homo sapiens
aaaaggaaaacagaa

SEQ ID NO: 1404110 - DNA, 15 bp, Homo sapiens
gaaaaggaaaacaga

SEQ ID NO: 1404111 - DNA, 15 bp, Homo sapiens
tgaaaaggaaaacag

SEQ ID NO: 1404112 - DNA, 15 bp, Homo sapiens
gtgaaaaggaaaaca

SEQ ID NO: 1404113 - DNA, 15 bp, Homo sapiens
agtgaaaaggaaaac

SEQ ID NO: 1404114 - DNA, 15 bp, Homo sapiens
tagtgaaaaggaaaa

SEQ ID NO: 1404115 - DNA, 15 bp, Homo sapiens
gtagtgaaaaggaaa

SEQ ID NO: 1404116 - DNA, 15 bp, Homo sapiens
agtagtgaaaaggaa

SEQ ID NO: 1404117 - DNA, 15 bp, Homo sapiens
tagtagtgaaaagga

SEQ ID NO: 1404118 - DNA, 15 bp, Homo sapiens
ttagtagtgaaaagg

SEQ ID NO: 1404119 - DNA, 15 bp, Homo sapiens
tttagtagtgaaaag

SEQ ID NO: 1404120 - DNA, 15 bp, Homo sapiens
atttagtagtgaaaa

SEQ ID NO: 1404121 - DNA, 15 bp, Homo sapiens
tatttagtagtgaaa

SEQ ID NO: 1404122 - DNA, 15 bp, Homo sapiens
gtatttagtagtgaa

SEQ ID NO: 1404123 - DNA, 15 bp, Homo sapiens
agtatttagtagtga

SEQ ID NO: 1404124 - DNA, 15 bp, Homo sapiens
aagtatttagtagtg

SEQ ID NO: 1404125 - DNA, 15 bp, Homo sapiens
caagtatttagtagt

SEQ ID NO: 1404126 - DNA, 15 bp, Homo sapiens
ccaagtatttagtag

SEQ ID NO: 1404127 - DNA, 15 bp, Homo sapiens
tccaagtatttagta

SEQ ID NO: 1404128 - DNA, 15 bp, Homo sapiens
ttccaagtatttagt

SEQ ID NO: 1404129 - DNA, 15 bp, Homo sapiens
gttccaagtatttag

SEQ ID NO: 1404130 - DNA, 15 bp, Homo sapiens
cgttccaagtattta

SEQ ID NO: 1404131 - DNA, 15 bp, Homo sapiens
ccgttccaagtattt

SEQ ID NO: 1404132 - DNA, 15 bp, Homo sapiens
accgttccaagtatt

SEQ ID NO: 1404133 - DNA, 15 bp, Homo sapiens
gaccgttccaagtat

SEQ ID NO: 1404134 - DNA, 15 bp, Homo sapiens
ggaccgttccaagta

SEQ ID NO: 1404135 - DNA, 15 bp, Homo sapiens
tggaccgttccaagt

SEQ ID NO: 1404136 - DNA, 15 bp, Homo sapiens
gtggaccgttccaag

SEQ ID NO: 1404137 - DNA, 15 bp, Homo sapiens
agtggaccgttccaa

SEQ ID NO: 1404138 - DNA, 15 bp, Homo sapiens
aagtggaccgttcca

SEQ ID NO: 1404139 - DNA, 15 bp, Homo sapiens
caagtggaccgttcc

SEQ ID NO: 1404140 - DNA, 15 bp, Homo sapiens
gcaagtggaccgttc

SEQ ID NO: 1404141 - DNA, 15 bp, Homo sapiens
ggcaagtggaccgtt

SEQ ID NO: 1404142 - DNA, 15 bp, Homo sapiens
tggcaagtggaccgt

SEQ ID NO: 1404143 - DNA, 15 bp, Homo sapiens
ttggcaagtggaccg

SEQ ID NO: 1404144 - DNA, 15 bp, Homo sapiens
tttggcaagtggacc

SEQ ID NO: 1404145 - DNA, 15 bp, Homo sapiens
ttttggcaagtggac

SEQ ID NO: 1404146 - DNA, 15 bp, Homo sapiens
attttggcaagtgga

SEQ ID NO: 1404147 - DNA, 15 bp, Homo sapiens
gattttggcaagtgg

SEQ ID NO: 1404148 - DNA, 15 bp, Homo sapiens
tgattttggcaagtg

SEQ ID NO: 1404149 - DNA, 15 bp, Homo sapiens
ttgattttggcaagt

SEQ ID NO: 1404150 - DNA, 15 bp, Homo sapiens
cttgattttggcaag

SEQ ID NO: 1404151 - DNA, 15 bp, Homo sapiens
gcttgattttggcaa

SEQ ID NO: 1404152 - DNA, 15 bp, Homo sapiens
tgcttgattttggca

SEQ ID NO: 1404153 - DNA, 15 bp, Homo sapiens
ctgcttgattttggc

SEQ ID NO: 1404154 - DNA, 15 bp, Homo sapiens
tctgcttgattttgg

SEQ ID NO: 1404155 - DNA, 15 bp, Homo sapiens
atctgcttgattttg

SEQ ID NO: 1404156 - DNA, 15 bp, Homo sapiens
tatctgcttgatttt

SEQ ID NO: 1404157 - DNA, 15 bp, Homo sapiens
gtatctgcttgattt

SEQ ID NO: 1404158 - DNA, 15 bp, Homo sapiens
agtatctgcttgatt

SEQ ID NO: 1404159 - DNA, 15 bp, Homo sapiens
tagtatctgcttgat

SEQ ID NO: 1404160 - DNA, 15 bp, Homo sapiens
ctagtatctgcttga

SEQ ID NO: 1404161 - DNA, 15 bp, Homo sapiens
tctagtatctgcttg

SEQ ID NO: 1404162 - DNA, 15 bp, Homo sapiens
ttctagtatctgctt

SEQ ID NO: 1404163 - DNA, 15 bp, Homo sapiens
cttctagtatctgct

SEQ ID NO: 1404164 - DNA, 15 bp, Homo sapiens
acttctagtatctgc

SEQ ID NO: 1404165 - DNA, 15 bp, Homo sapiens
aacttctagtatctg

SEQ ID NO: 1404166 - DNA, 15 bp, Homo sapiens
gaacttctagtatct

SEQ ID NO: 1404167 - DNA, 15 bp, Homo sapiens
tgaacttctagtatc

SEQ ID NO: 1404168 - DNA, 15 bp, Homo sapiens
ttgaacttctagtat

SEQ ID NO: 1404169 - DNA, 15 bp, Homo sapiens
tttgaacttctagta

SEQ ID NO: 1404170 - DNA, 15 bp, Homo sapiens
gtttgaacttctagt

SEQ ID NO: 1404171 - DNA, 15 bp, Homo sapiens
agtttgaacttctag

SEQ ID NO: 1404172 - DNA, 15 bp, Homo sapiens
tagtttgaacttcta

SEQ ID NO: 1404173 - DNA, 15 bp, Homo sapiens
ttagtttgaacttct

SEQ ID NO: 1404174 - DNA, 15 bp, Homo sapiens
tttagtttgaacttc

SEQ ID NO: 1404175 - DNA, 15 bp, Homo sapiens
gtttagtttgaactt

SEQ ID NO: 1404176 - DNA, 15 bp, Homo sapiens
tgtttagtttgaact

SEQ ID NO: 1404177 - DNA, 15 bp, Homo sapiens
ttgtttagtttgaac

SEQ ID NO: 1404178 - DNA, 15 bp, Homo sapiens
cttgtttagtttgaa

SEQ ID NO: 1404179 - DNA, 15 bp, Homo sapiens
acttgtttagtttga

SEQ ID NO: 1404180 - DNA, 15 bp, Homo sapiens
gacttgtttagtttg

SEQ ID NO: 1404181 - DNA, 15 bp, Homo sapiens
agacttgtttagttt

SEQ ID NO: 1404182 - DNA, 15 bp, Homo sapiens
tagacttgtttagtt

SEQ ID NO: 1404183 - DNA, 15 bp, Homo sapiens
ttagacttgtttagt

SEQ ID NO: 1404184 - DNA, 15 bp, Homo sapiens
cttagacttgtttag

SEQ ID NO: 1404185 - DNA, 15 bp, Homo sapiens
ccttagacttgttta

SEQ ID NO: 1404186 - DNA, 15 bp, Homo sapiens
accttagacttgttt

SEQ ID NO: 1404187 - DNA, 15 bp, Homo sapiens
taccttagacttgtt

SEQ ID NO: 1404188 - DNA, 15 bp, Homo sapiens
ttaccttagacttgt

SEQ ID NO: 1404189 - DNA, 15 bp, Homo sapiens
tttaccttagacttg

SEQ ID NO: 1404190 - DNA, 15 bp, Homo sapiens
atttaccttagactt

SEQ ID NO: 1404191 - DNA, 15 bp, Homo sapiens
catttaccttagact

SEQ ID NO: 1404192 - DNA, 15 bp, Homo sapiens
acatttaccttagac

SEQ ID NO: 1404193 - DNA, 15 bp, Homo sapiens
aacatttaccttaga

SEQ ID NO: 1404194 - DNA, 15 bp, Homo sapiens
caacatttaccttag

SEQ ID NO: 1404195 - DNA, 15 bp, Homo sapiens
acaacatttacctta

SEQ ID NO: 1404196 - DNA, 15 bp, Homo sapiens
tacaacatttacctt

SEQ ID NO: 1404197 - DNA, 15 bp, Homo sapiens
ctacaacatttacct

SEQ ID NO: 1404198 - DNA, 15 bp, Homo sapiens
cctacaacatttacc

SEQ ID NO: 1404199 - DNA, 15 bp, Homo sapiens
tcctacaacatttac

SEQ ID NO: 1404200 - DNA, 15 bp, Homo sapiens
atcctacaacattta

SEQ ID NO: 1404201 - DNA, 15 bp, Homo sapiens
gatcctacaacattt

SEQ ID NO: 1404202 - DNA, 15 bp, Homo sapiens
ggatcctacaacatt

SEQ ID NO: 1404203 - DNA, 15 bp, Homo sapiens
tggatcctacaacat

SEQ ID NO: 1404204 - DNA, 15 bp, Homo sapiens
gtggatcctacaaca

SEQ ID NO: 1404205 - DNA, 15 bp, Homo sapiens
agtggatcctacaac

SEQ ID NO: 1404206 - DNA, 15 bp, Homo sapiens
aagtggatcctacaa

SEQ ID NO: 1404207 - DNA, 15 bp, Homo sapiens
aaagtggatcctaca

SEQ ID NO: 1404208 - DNA, 15 bp, Homo sapiens
aaaagtggatcctac

SEQ ID NO: 1404209 - DNA, 15 bp, Homo sapiens
aaaaagtggatccta

SEQ ID NO: 1404210 - DNA, 15 bp, Homo sapiens
taaaaagtggatcct

SEQ ID NO: 1404211 - DNA, 15 bp, Homo sapiens
ttaaaaagtggatcc

SEQ ID NO: 1404212 - DNA, 15 bp, Homo sapiens
tttaaaaagtggatc

SEQ ID NO: 1404213 - DNA, 15 bp, Homo sapiens
ttttaaaaagtggat

SEQ ID NO: 1404214 - DNA, 15 bp, Homo sapiens
tttttaaaaagtgga

SEQ ID NO: 1404215 - DNA, 15 bp, Homo sapiens
ttttttaaaaagtgg

SEQ ID NO: 1404216 - DNA, 15 bp, Homo sapiens
cttttttaaaaagtg

SEQ ID NO: 1404217 - DNA, 15 bp, Homo sapiens
acttttttaaaaagt

SEQ ID NO: 1404218 - DNA, 15 bp, Homo sapiens
cacttttttaaaaag

SEQ ID NO: 1404219 - DNA, 15 bp, Homo sapiens
tcacttttttaaaaa

SEQ ID NO: 1404220 - DNA, 15 bp, Homo sapiens
gtcacttttttaaaa

SEQ ID NO: 1404221 - DNA, 15 bp, Homo sapiens
tgtcacttttttaaa

SEQ ID NO: 1404222 - DNA, 15 bp, Homo sapiens
ctgtcacttttttaa

SEQ ID NO: 1404223 - DNA, 15 bp, Homo sapiens
actgtcactttttta

SEQ ID NO: 1404224 - DNA, 15 bp, Homo sapiens
tactgtcactttttt

SEQ ID NO: 1404225 - DNA, 15 bp, Homo sapiens
ttactgtcacttttt

SEQ ID NO: 1404226 - DNA, 15 bp, Homo sapiens
tttactgtcactttt

SEQ ID NO: 1404227 - DNA, 15 bp, Homo sapiens
ctttactgtcacttt

SEQ ID NO: 1404228 - DNA, 15 bp, Homo sapiens
tctttactgtcactt

SEQ ID NO: 1404229 - DNA, 15 bp, Homo sapiens
ctctttactgtcact

SEQ ID NO: 1404230 - DNA, 15 bp, Homo sapiens
gctctttactgtcac

SEQ ID NO: 1404231 - DNA, 15 bp, Homo sapiens
tgctctttactgtca

SEQ ID NO: 1404232 - DNA, 15 bp, Homo sapiens
atgctctttactgtc

SEQ ID NO: 1404233 - DNA, 15 bp, Homo sapiens
catgctctttactgt

SEQ ID NO: 1404234 - DNA, 15 bp, Homo sapiens
tcatgctctttactg

SEQ ID NO: 1404235 - DNA, 15 bp, Homo sapiens
ttcatgctctttact

SEQ ID NO: 1404236 - DNA, 15 bp, Homo sapiens
cttcatgctctttac

SEQ ID NO: 1404237 - DNA, 15 bp, Homo sapiens
acttcatgctcttta

SEQ ID NO: 1404238 - DNA, 15 bp, Homo sapiens
gacttcatgctcttt

SEQ ID NO: 1404239 - DNA, 15 bp, Homo sapiens
agacttcatgctctt

SEQ ID NO: 1404240 - DNA, 15 bp, Homo sapiens
gagacttcatgctct

SEQ ID NO: 1404241 - DNA, 15 bp, Homo sapiens
tgagacttcatgctc

SEQ ID NO: 1404242 - DNA, 15 bp, Homo sapiens
ttgagacttcatgct

SEQ ID NO: 1404243 - DNA, 15 bp, Homo sapiens
tttgagacttcatgc

SEQ ID NO: 1404244 - DNA, 15 bp, Homo sapiens
ttttgagacttcatg

SEQ ID NO: 1404245 - DNA, 15 bp, Homo sapiens
cttttgagacttcat

SEQ ID NO: 1404246 - DNA, 15 bp, Homo sapiens
ccttttgagacttca

SEQ ID NO: 1404247 - DNA, 15 bp, Homo sapiens
tccttttgagacttc

SEQ ID NO: 1404248 - DNA, 15 bp, Homo sapiens
ctccttttgagactt

SEQ ID NO: 1404249 - DNA, 15 bp, Homo sapiens
actccttttgagact

SEQ ID NO: 1404250 - DNA, 15 bp, Homo sapiens
cactccttttgagac

SEQ ID NO: 1404251 - DNA, 15 bp, Homo sapiens
ccactccttttgaga

SEQ ID NO: 1404252 - DNA, 15 bp, Homo sapiens
cccactccttttgag

SEQ ID NO: 1404253 - DNA, 15 bp, Homo sapiens
tcccactccttttga

SEQ ID NO: 1404254 - DNA, 15 bp, Homo sapiens
ttcccactccttttg

SEQ ID NO: 1404255 - DNA, 15 bp, Homo sapiens
cttcccactcctttt

SEQ ID NO: 1404256 - DNA, 15 bp, Homo sapiens
tcttcccactccttt

SEQ ID NO: 1404257 - DNA, 15 bp, Homo sapiens
ttcttcccactcctt

SEQ ID NO: 1404258 - DNA, 15 bp, Homo sapiens
tttcttcccactcct

SEQ ID NO: 1404259 - DNA, 15 bp, Homo sapiens
atttcttcccactcc

SEQ ID NO: 1404260 - DNA, 15 bp, Homo sapiens
catttcttcccactc

SEQ ID NO: 1404261 - DNA, 15 bp, Homo sapiens
tcatttcttcccact

SEQ ID NO: 1404262 - DNA, 15 bp, Homo sapiens
ttcatttcttcccac

SEQ ID NO: 1404263 - DNA, 15 bp, Homo sapiens
cttcatttcttccca

SEQ ID NO: 1404264 - DNA, 15 bp, Homo sapiens
acttcatttcttccc

SEQ ID NO: 1404265 - DNA, 15 bp, Homo sapiens
gacttcatttcttcc

SEQ ID NO: 1404266 - DNA, 15 bp, Homo sapiens
agacttcatttcttc

SEQ ID NO: 1404267 - DNA, 15 bp, Homo sapiens
gagacttcatttctt

SEQ ID NO: 1404268 - DNA, 15 bp, Homo sapiens
tgagacttcatttct

SEQ ID NO: 1404269 - DNA, 15 bp, Homo sapiens
ttgagacttcatttc

SEQ ID NO: 1404270 - DNA, 15 bp, Homo sapiens
attgagacttcattt

SEQ ID NO: 1404271 - DNA, 15 bp, Homo sapiens
aattgagacttcatt

SEQ ID NO: 1404272 - DNA, 15 bp, Homo sapiens
aaattgagacttcat

SEQ ID NO: 1404273 - DNA, 15 bp, Homo sapiens
taaattgagacttca

SEQ ID NO: 1404274 - DNA, 15 bp, Homo sapiens
gtaaattgagacttc

SEQ ID NO: 1404275 - DNA, 15 bp, Homo sapiens
agtaaattgagactt

SEQ ID NO: 1404276 - DNA, 15 bp, Homo sapiens
aagtaaattgagact

SEQ ID NO: 1404277 - DNA, 15 bp, Homo sapiens
aaagtaaattgagac

SEQ ID NO: 1404278 - DNA, 15 bp, Homo sapiens
gaaagtaaattgaga

SEQ ID NO: 1404279 - DNA, 15 bp, Homo sapiens
agaaagtaaattgag

SEQ ID NO: 1404280 - DNA, 15 bp, Homo sapiens
gagaaagtaaattga

SEQ ID NO: 1404281 - DNA, 15 bp, Homo sapiens
cgagaaagtaaattg

SEQ ID NO: 1404282 - DNA, 15 bp, Homo sapiens
tcgagaaagtaaatt

SEQ ID NO: 1404283 - DNA, 15 bp, Homo sapiens
gtcgagaaagtaaat

SEQ ID NO: 1404284 - DNA, 15 bp, Homo sapiens
agtcgagaaagtaaa

SEQ ID NO: 1404285 - DNA, 15 bp, Homo sapiens
gagtcgagaaagtaa

SEQ ID NO: 1404286 - DNA, 15 bp, Homo sapiens
tgagtcgagaaagta

SEQ ID NO: 1404287 - DNA, 15 bp, Homo sapiens
gtgagtcgagaaagt

SEQ ID NO: 1404288 - DNA, 15 bp, Homo sapiens
ggtgagtcgagaaag

SEQ ID NO: 1404289 - DNA, 15 bp, Homo sapiens
aggtgagtcgagaaa

SEQ ID NO: 1404290 - DNA, 15 bp, Homo sapiens
caggtgagtcgagaa

SEQ ID NO: 1404291 - DNA, 15 bp, Homo sapiens
acaggtgagtcgaga

SEQ ID NO: 1404292 - DNA, 15 bp, Homo sapiens
aacaggtgagtcgag

SEQ ID NO: 1404293 - DNA, 15 bp, Homo sapiens
aaacaggtgagtcga

SEQ ID NO: 1404294 - DNA, 15 bp, Homo sapiens
taaacaggtgagtcg

SEQ ID NO: 1404295 - DNA, 15 bp, Homo sapiens
ataaacaggtgagtc

SEQ ID NO: 1404296 - DNA, 15 bp, Homo sapiens
gataaacaggtgagt

SEQ ID NO: 1404297 - DNA, 15 bp, Homo sapiens
tgataaacaggtgag

SEQ ID NO: 1404298 - DNA, 15 bp, Homo sapiens
gtgataaacaggtga

SEQ ID NO: 1404299 - DNA, 15 bp, Homo sapiens
agtgataaacaggtg

SEQ ID NO: 1404300 - DNA, 15 bp, Homo sapiens
tagtgataaacaggt

SEQ ID NO: 1404301 - DNA, 15 bp, Homo sapiens
ttagtgataaacagg

SEQ ID NO: 1404302 - DNA, 15 bp, Homo sapiens
attagtgataaacag

SEQ ID NO: 1404303 - DNA, 15 bp, Homo sapiens
cattagtgataaaca

SEQ ID NO: 1404304 - DNA, 15 bp, Homo sapiens
acattagtgataaac

SEQ ID NO: 1404305 - DNA, 15 bp, Homo sapiens
aacattagtgataaa

SEQ ID NO: 1404306 - DNA, 15 bp, Homo sapiens
gaacattagtgataa

SEQ ID NO: 1404307 - DNA, 15 bp, Homo sapiens
tgaacattagtgata

SEQ ID NO: 1404308 - DNA, 15 bp, Homo sapiens
ttgaacattagtgat

SEQ ID NO: 1404309 - DNA, 15 bp, Homo sapiens
tttgaacattagtga

SEQ ID NO: 1404310 - DNA, 15 bp, Homo sapiens
ttttgaacattagtg

SEQ ID NO: 1404311 - DNA, 15 bp, Homo sapiens
tttttgaacattagt

SEQ ID NO: 1404312 - DNA, 15 bp, Homo sapiens
ttttttgaacattag

SEQ ID NO: 1404313 - DNA, 15 bp, Homo sapiens
attttttgaacatta

SEQ ID NO: 1404314 - DNA, 15 bp, Homo sapiens
aattttttgaacatt

SEQ ID NO: 1404315 - DNA, 15 bp, Homo sapiens
gaattttttgaacat

SEQ ID NO: 1404316 - DNA, 15 bp, Homo sapiens
tgaattttttgaaca

SEQ ID NO: 1404317 - DNA, 15 bp, Homo sapiens
ttgaattttttgaac

SEQ ID NO: 1404318 - DNA, 15 bp, Homo sapiens
tttgaattttttgaa

SEQ ID NO: 1404319 - DNA, 15 bp, Homo sapiens
ttttgaattttttga

SEQ ID NO: 1404320 - DNA, 15 bp, Homo sapiens
cttttgaattttttg

SEQ ID NO: 1404321 - DNA, 15 bp, Homo sapiens
acttttgaatttttt

SEQ ID NO: 1404322 - DNA, 15 bp, Homo sapiens
aacttttgaattttt

SEQ ID NO: 1404323 - DNA, 15 bp, Homo sapiens
gaacttttgaatttt

SEQ ID NO: 1404324 - DNA, 15 bp, Homo sapiens
tgaacttttgaattt

SEQ ID NO: 1404325 - DNA, 15 bp, Homo sapiens
ttgaacttttgaatt

SEQ ID NO: 1404326 - DNA, 15 bp, Homo sapiens
tttgaacttttgaat

SEQ ID NO: 1404327 - DNA, 15 bp, Homo sapiens
ttttgaacttttgaa

SEQ ID NO: 1404328 - DNA, 15 bp, Homo sapiens
attttgaacttttga

SEQ ID NO: 1404329 - DNA, 15 bp, Homo sapiens
tattttgaacttttg

SEQ ID NO: 1404330 - DNA, 15 bp, Homo sapiens
atattttgaactttt

SEQ ID NO: 1404331 - DNA, 15 bp, Homo sapiens
tatattttgaacttt

SEQ ID NO: 1404332 - DNA, 15 bp, Homo sapiens
atatattttgaactt

SEQ ID NO: 1404333 - DNA, 15 bp, Homo sapiens
aatatattttgaact

SEQ ID NO: 1404334 - DNA, 15 bp, Homo sapiens
aaatatattttgaac

SEQ ID NO: 1404335 - DNA, 15 bp, Homo sapiens
caaatatattttgaa

SEQ ID NO: 1404336 - DNA, 15 bp, Homo sapiens
acaaatatattttga

SEQ ID NO: 1404337 - DNA, 15 bp, Homo sapiens
cacaaatatattttg

SEQ ID NO: 1404338 - DNA, 15 bp, Homo sapiens
tcacaaatatatttt

SEQ ID NO: 1404339 - DNA, 15 bp, Homo sapiens
ttcacaaatatattt

SEQ ID NO: 1404340 - DNA, 15 bp, Homo sapiens
attcacaaatatatt

SEQ ID NO: 1404341 - DNA, 15 bp, Homo sapiens
gattcacaaatatat

SEQ ID NO: 1404342 - DNA, 15 bp, Homo sapiens
ggattcacaaatata

SEQ ID NO: 1404343 - DNA, 15 bp, Homo sapiens
tggattcacaaatat

SEQ ID NO: 1404344 - DNA, 15 bp, Homo sapiens
ttggattcacaaata

SEQ ID NO: 1404345 - DNA, 15 bp, Homo sapiens
cttggattcacaaat

SEQ ID NO: 1404346 - DNA, 15 bp, Homo sapiens
ccttggattcacaaa

SEQ ID NO: 1404347 - DNA, 15 bp, Homo sapiens
gccttggattcacaa

SEQ ID NO: 1404348 - DNA, 15 bp, Homo sapiens
agccttggattcaca

SEQ ID NO: 1404349 - DNA, 15 bp, Homo sapiens
tagccttggattcac

SEQ ID NO: 1404350 - DNA, 15 bp, Homo sapiens
gtagccttggattca

SEQ ID NO: 1404351 - DNA, 15 bp, Homo sapiens
ggtagccttggattc

SEQ ID NO: 1404352 - DNA, 15 bp, Homo sapiens
tggtagccttggatt

SEQ ID NO: 1404353 - DNA, 15 bp, Homo sapiens
ctggtagccttggat

SEQ ID NO: 1404354 - DNA, 15 bp, Homo sapiens
gctggtagccttgga

SEQ ID NO: 1404355 - DNA, 15 bp, Homo sapiens
agctggtagccttgg

SEQ ID NO: 1404356 - DNA, 15 bp, Homo sapiens
cagctggtagccttg

SEQ ID NO: 1404357 - DNA, 15 bp, Homo sapiens
ccagctggtagcctt

SEQ ID NO: 1404358 - DNA, 15 bp, Homo sapiens
cccagctggtagcct

SEQ ID NO: 1404359 - DNA, 15 bp, Homo sapiens
ccccagctggtagcc

SEQ ID NO: 1404360 - DNA, 15 bp, Homo sapiens
tccccagctggtagc

SEQ ID NO: 1404361 - DNA, 15 bp, Homo sapiens
ttccccagctggtag

SEQ ID NO: 1404362 - DNA, 15 bp, Homo sapiens
gttccccagctggta

SEQ ID NO: 1404363 - DNA, 15 bp, Homo sapiens
agttccccagctggt

SEQ ID NO: 1404364 - DNA, 15 bp, Homo sapiens
tagttccccagctgg

SEQ ID NO: 1404365 - DNA, 15 bp, Homo sapiens
atagttccccagctg

SEQ ID NO: 1404366 - DNA, 15 bp, Homo sapiens
tatagttccccagct

SEQ ID NO: 1404367 - DNA, 15 bp, Homo sapiens
gtatagttccccagc

SEQ ID NO: 1404368 - DNA, 15 bp, Homo sapiens
tgtatagttccccag

SEQ ID NO: 1404369 - DNA, 15 bp, Homo sapiens
atgtatagttcccca

SEQ ID NO: 1404370 - DNA, 15 bp, Homo sapiens
aatgtatagttcccc

SEQ ID NO: 1404371 - DNA, 15 bp, Homo sapiens
gaatgtatagttccc

SEQ ID NO: 1404372 - DNA, 15 bp, Homo sapiens
agaatgtatagttcc

SEQ ID NO: 1404373 - DNA, 15 bp, Homo sapiens
aagaatgtatagttc

SEQ ID NO: 1404374 - DNA, 15 bp, Homo sapiens
aaagaatgtatagtt

SEQ ID NO: 1404375 - DNA, 15 bp, Homo sapiens
caaagaatgtatagt

SEQ ID NO: 1404376 - DNA, 15 bp, Homo sapiens
tcaaagaatgtatag

SEQ ID NO: 1404377 - DNA, 15 bp, Homo sapiens
ttcaaagaatgtata

SEQ ID NO: 1404378 - DNA, 15 bp, Homo sapiens
gttcaaagaatgtat

SEQ ID NO: 1404379 - DNA, 15 bp, Homo sapiens
tgttcaaagaatgta

SEQ ID NO: 1404380 - DNA, 15 bp, Homo sapiens
atgttcaaagaatgt

SEQ ID NO: 1404381 - DNA, 15 bp, Homo sapiens
aatgttcaaagaatg

SEQ ID NO: 1404382 - DNA, 15 bp, Homo sapiens
aaatgttcaaagaat

SEQ ID NO: 1404383 - DNA, 15 bp, Homo sapiens
caaatgttcaaagaa

SEQ ID NO: 1404384 - DNA, 15 bp, Homo sapiens
tcaaatgttcaaaga

SEQ ID NO: 1404385 - DNA, 15 bp, Homo sapiens
ctcaaatgttcaaag

SEQ ID NO: 1404386 - DNA, 15 bp, Homo sapiens
gctcaaatgttcaaa

SEQ ID NO: 1404387 - DNA, 15 bp, Homo sapiens
agctcaaatgttcaa

SEQ ID NO: 1404388 - DNA, 15 bp, Homo sapiens
tagctcaaatgttca

SEQ ID NO: 1404389 - DNA, 15 bp, Homo sapiens
atagctcaaatgttc

SEQ ID NO: 1404390 - DNA, 15 bp, Homo sapiens
catagctcaaatgtt

SEQ ID NO: 1404391 - DNA, 15 bp, Homo sapiens
acatagctcaaatgt

SEQ ID NO: 1404392 - DNA, 15 bp, Homo sapiens
gacatagctcaaatg

SEQ ID NO: 1404393 - DNA, 15 bp, Homo sapiens
ggacatagctcaaat

SEQ ID NO: 1404394 - DNA, 15 bp, Homo sapiens
gggacatagctcaaa

SEQ ID NO: 1404395 - DNA, 15 bp, Homo sapiens
tgggacatagctcaa

SEQ ID NO: 1404396 - DNA, 15 bp, Homo sapiens
atgggacatagctca

SEQ ID NO: 1404397 - DNA, 15 bp, Homo sapiens
aatgggacatagctc

SEQ ID NO: 1404398 - DNA, 15 bp, Homo sapiens
gaatgggacatagct

SEQ ID NO: 1404399 - DNA, 15 bp, Homo sapiens
agaatgggacatagc

SEQ ID NO: 1404400 - DNA, 15 bp, Homo sapiens
gagaatgggacatag

SEQ ID NO: 1404401 - DNA, 15 bp, Homo sapiens
tgagaatgggacata

SEQ ID NO: 1404402 - DNA, 15 bp, Homo sapiens
ttgagaatgggacat

SEQ ID NO: 1404403 - DNA, 15 bp, Homo sapiens
cttgagaatgggaca

SEQ ID NO: 1404404 - DNA, 15 bp, Homo sapiens
gcttgagaatgggac

SEQ ID NO: 1404405 - DNA, 15 bp, Homo sapiens
tgcttgagaatggga

SEQ ID NO: 1404406 - DNA, 15 bp, Homo sapiens
atgcttgagaatggg

SEQ ID NO: 1404407 - DNA, 15 bp, Homo sapiens
tatgcttgagaatgg

SEQ ID NO: 1404408 - DNA, 15 bp, Homo sapiens
ctatgcttgagaatg

SEQ ID NO: 1404409 - DNA, 15 bp, Homo sapiens
tctatgcttgagaat

SEQ ID NO: 1404410 - DNA, 15 bp, Homo sapiens
ttctatgcttgagaa

SEQ ID NO: 1404411 - DNA, 15 bp, Homo sapiens
attctatgcttgaga

SEQ ID NO: 1404412 - DNA, 15 bp, Homo sapiens
cattctatgcttgag

SEQ ID NO: 1404413 - DNA, 15 bp, Homo sapiens
gcattctatgcttga

SEQ ID NO: 1404414 - DNA, 15 bp, Homo sapiens
tgcattctatgcttg

SEQ ID NO: 1404415 - DNA, 15 bp, Homo sapiens
ttgcattctatgctt

SEQ ID NO: 1404416 - DNA, 15 bp, Homo sapiens
tttgcattctatgct

SEQ ID NO: 1404417 - DNA, 15 bp, Homo sapiens
ctttgcattctatgc

SEQ ID NO: 1404418 - DNA, 15 bp, Homo sapiens
actttgcattctatg

SEQ ID NO: 1404419 - DNA, 15 bp, Homo sapiens
gactttgcattctat

SEQ ID NO: 1404420 - DNA, 15 bp, Homo sapiens
agactttgcattcta

SEQ ID NO: 1404421 - DNA, 15 bp, Homo sapiens
cagactttgcattct

SEQ ID NO: 1404422 - DNA, 15 bp, Homo sapiens
ccagactttgcattc

SEQ ID NO: 1404423 - DNA, 15 bp, Homo sapiens
accagactttgcatt

SEQ ID NO: 1404424 - DNA, 15 bp, Homo sapiens
taccagactttgcat

SEQ ID NO: 1404425 - DNA, 15 bp, Homo sapiens
gtaccagactttgca

SEQ ID NO: 1404426 - DNA, 15 bp, Homo sapiens
tgtaccagactttgc

SEQ ID NO: 1404427 - DNA, 15 bp, Homo sapiens
atgtaccagactttg

SEQ ID NO: 1404428 - DNA, 15 bp, Homo sapiens
aatgtaccagacttt

SEQ ID NO: 1404429 - DNA, 15 bp, Homo sapiens
taatgtaccagactt

SEQ ID NO: 1404430 - DNA, 15 bp, Homo sapiens
ataatgtaccagact

SEQ ID NO: 1404431 - DNA, 15 bp, Homo sapiens
tataatgtaccagac

SEQ ID NO: 1404432 - DNA, 15 bp, Homo sapiens
atataatgtaccaga

SEQ ID NO: 1404433 - DNA, 15 bp, Homo sapiens
tatataatgtaccag

SEQ ID NO: 1404434 - DNA, 15 bp, Homo sapiens
atatataatgtacca

SEQ ID NO: 1404435 - DNA, 15 bp, Homo sapiens
catatataatgtacc

SEQ ID NO: 1404436 - DNA, 15 bp, Homo sapiens
gcatatataatgtac

SEQ ID NO: 1404437 - DNA, 15 bp, Homo sapiens
agcatatataatgta

SEQ ID NO: 1404438 - DNA, 15 bp, Homo sapiens
aagcatatataatgt

SEQ ID NO: 1404439 - DNA, 15 bp, Homo sapiens
taagcatatataatg

SEQ ID NO: 1404440 - DNA, 15 bp, Homo sapiens
ttaagcatatataat

SEQ ID NO: 1404441 - DNA, 15 bp, Homo sapiens
attaagcatatataa

SEQ ID NO: 1404442 - DNA, 15 bp, Homo sapiens
tattaagcatatata

SEQ ID NO: 1404443 - DNA, 15 bp, Homo sapiens
ttattaagcatatat

SEQ ID NO: 1404444 - DNA, 15 bp, Homo sapiens
tttattaagcatata

SEQ ID NO: 1404445 - DNA, 15 bp, Homo sapiens
atttattaagcatat

SEQ ID NO: 1404446 - DNA, 15 bp, Homo sapiens
tatttattaagcata

SEQ ID NO: 1404447 - DNA, 15 bp, Homo sapiens
atatttattaagcat

SEQ ID NO: 1404448 - DNA, 15 bp, Homo sapiens
catatttattaagca

SEQ ID NO: 1404449 - DNA, 15 bp, Homo sapiens
acatatttattaagc

SEQ ID NO: 1404450 - DNA, 15 bp, Homo sapiens
cacatatttattaag

SEQ ID NO: 1404451 - DNA, 15 bp, Homo sapiens
gcacatatttattaa

SEQ ID NO: 1404452 - DNA, 15 bp, Homo sapiens
tgcacatatttatta

SEQ ID NO: 1404453 - DNA, 15 bp, Homo sapiens
gtgcacatatttatt

SEQ ID NO: 1404454 - DNA, 15 bp, Homo sapiens
tgtgcacatatttat

SEQ ID NO: 1404455 - DNA, 15 bp, Homo sapiens
ttgtgcacatattta

SEQ ID NO: 1404456 - DNA, 15 bp, Homo sapiens
attgtgcacatattt

SEQ ID NO: 1404457 - DNA, 15 bp, Homo sapiens
tattgtgcacatatt

SEQ ID NO: 1404458 - DNA, 15 bp, Homo sapiens
atattgtgcacatat

SEQ ID NO: 1404459 - DNA, 15 bp, Homo sapiens
aatattgtgcacata

SEQ ID NO: 1404460 - DNA, 15 bp, Homo sapiens
gaatattgtgcacat

SEQ ID NO: 1404461 - DNA, 15 bp, Homo sapiens
tgaatattgtgcaca

SEQ ID NO: 1404462 - DNA, 15 bp, Homo sapiens
atgaatattgtgcac

SEQ ID NO: 1404463 - DNA, 15 bp, Homo sapiens
aatgaatattgtgca

SEQ ID NO: 1404464 - DNA, 15 bp, Homo sapiens
caatgaatattgtgc

SEQ ID NO: 1404465 - DNA, 15 bp, Homo sapiens
acaatgaatattgtg

SEQ ID NO: 1404466 - DNA, 15 bp, Homo sapiens
aacaatgaatattgt

SEQ ID NO: 1404467 - DNA, 15 bp, Homo sapiens
aaacaatgaatattg

SEQ ID NO: 1404468 - DNA, 15 bp, Homo sapiens
caaacaatgaatatt

SEQ ID NO: 1404469 - DNA, 15 bp, Homo sapiens
ccaaacaatgaatat

SEQ ID NO: 1404470 - DNA, 15 bp, Homo sapiens
cccaaacaatgaata

SEQ ID NO: 1404471 - DNA, 15 bp, Homo sapiens
tcccaaacaatgaat

SEQ ID NO: 1404472 - DNA, 15 bp, Homo sapiens
ttcccaaacaatgaa

SEQ ID NO: 1404473 - DNA, 15 bp, Homo sapiens
gttcccaaacaatga

SEQ ID NO: 1404474 - DNA, 15 bp, Homo sapiens
tgttcccaaacaatg

SEQ ID NO: 1404475 - DNA, 15 bp, Homo sapiens
gtgttcccaaacaat

SEQ ID NO: 1404476 - DNA, 15 bp, Homo sapiens
agtgttcccaaacaa

SEQ ID NO: 1404477 - DNA, 15 bp, Homo sapiens
tagtgttcccaaaca

SEQ ID NO: 1404478 - DNA, 15 bp, Homo sapiens
ctagtgttcccaaac

SEQ ID NO: 1404479 - DNA, 15 bp, Homo sapiens
tctagtgttcccaaa

SEQ ID NO: 1404480 - DNA, 15 bp, Homo sapiens
ttctagtgttcccaa

SEQ ID NO: 1404481 - DNA, 15 bp, Homo sapiens
tttctagtgttccca

SEQ ID NO: 1404482 - DNA, 15 bp, Homo sapiens
ttttctagtgttccc

SEQ ID NO: 1404483 - DNA, 15 bp, Homo sapiens
tttttctagtgttcc

SEQ ID NO: 1404484 - DNA, 15 bp, Homo sapiens
ctttttctagtgttc

SEQ ID NO: 1404485 - DNA, 15 bp, Homo sapiens
actttttctagtgtt

SEQ ID NO: 1404486 - DNA, 15 bp, Homo sapiens
aactttttctagtgt

SEQ ID NO: 1404487 - DNA, 15 bp, Homo sapiens
gaactttttctagtg

SEQ ID NO: 1404488 - DNA, 15 bp, Homo sapiens
ggaactttttctagt

SEQ ID NO: 1404489 - DNA, 15 bp, Homo sapiens
tggaactttttctag

SEQ ID NO: 1404490 - DNA, 15 bp, Homo sapiens
atggaactttttcta

SEQ ID NO: 1404491 - DNA, 15 bp, Homo sapiens
aatggaactttttct

SEQ ID NO: 1404492 - DNA, 15 bp, Homo sapiens
caatggaactttttc

SEQ ID NO: 1404493 - DNA, 15 bp, Homo sapiens
tcaatggaacttttt

SEQ ID NO: 1404494 - DNA, 15 bp, Homo sapiens
gtcaatggaactttt

SEQ ID NO: 1404495 - DNA, 15 bp, Homo sapiens
agtcaatggaacttt

SEQ ID NO: 1404496 - DNA, 15 bp, Homo sapiens
aagtcaatggaactt

SEQ ID NO: 1404497 - DNA, 15 bp, Homo sapiens
aaagtcaatggaact

SEQ ID NO: 1404498 - DNA, 15 bp, Homo sapiens
caaagtcaatggaac

SEQ ID NO: 1404499 - DNA, 15 bp, Homo sapiens
ccaaagtcaatggaa

SEQ ID NO: 1404500 - DNA, 15 bp, Homo sapiens
tccaaagtcaatgga

SEQ ID NO: 1404501 - DNA, 15 bp, Homo sapiens
ttccaaagtcaatgg

SEQ ID NO: 1404502 - DNA, 15 bp, Homo sapiens
gttccaaagtcaatg

SEQ ID NO: 1404503 - DNA, 15 bp, Homo sapiens
agttccaaagtcaat

SEQ ID NO: 1404504 - DNA, 15 bp, Homo sapiens
tagttccaaagtcaa

SEQ ID NO: 1404505 - DNA, 15 bp, Homo sapiens
ttagttccaaagtca

SEQ ID NO: 1404506 - DNA, 15 bp, Homo sapiens
attagttccaaagtc

SEQ ID NO: 1404507 - DNA, 15 bp, Homo sapiens
tattagttccaaagt

SEQ ID NO: 1404508 - DNA, 15 bp, Homo sapiens
ttattagttccaaag

SEQ ID NO: 1404509 - DNA, 15 bp, Homo sapiens
attattagttccaaa

SEQ ID NO: 1404510 - DNA, 15 bp, Homo sapiens
tattattagttccaa

SEQ ID NO: 1404511 - DNA, 15 bp, Homo sapiens
atattattagttcca

SEQ ID NO: 1404512 - DNA, 15 bp, Homo sapiens
aatattattagttcc

SEQ ID NO: 1404513 - DNA, 15 bp, Homo sapiens
aaatattattagttc

SEQ ID NO: 1404514 - DNA, 15 bp, Homo sapiens
taaatattattagtt

SEQ ID NO: 1404515 - DNA, 15 bp, Homo sapiens
ataaatattattagt

SEQ ID NO: 1404516 - DNA, 15 bp, Homo sapiens
cataaatattattag

SEQ ID NO: 1404517 - DNA, 15 bp, Homo sapiens
acataaatattatta

SEQ ID NO: 1404518 - DNA, 15 bp, Homo sapiens
aacataaatattatt

SEQ ID NO: 1404519 - DNA, 15 bp, Homo sapiens
aaacataaatattat

SEQ ID NO: 1404520 - DNA, 15 bp, Homo sapiens
gaaacataaatatta

SEQ ID NO: 1404521 - DNA, 15 bp, Homo sapiens
tgaaacataaatatt

SEQ ID NO: 1404522 - DNA, 15 bp, Homo sapiens
gtgaaacataaatat

SEQ ID NO: 1404523 - DNA, 15 bp, Homo sapiens
tgtgaaacataaata

SEQ ID NO: 1404524 - DNA, 15 bp, Homo sapiens
atgtgaaacataaat

SEQ ID NO: 1404525 - DNA, 15 bp, Homo sapiens
catgtgaaacataaa

SEQ ID NO: 1404526 - DNA, 15 bp, Homo sapiens
tcatgtgaaacataa

SEQ ID NO: 1404527 - DNA, 15 bp, Homo sapiens
ctcatgtgaaacata

SEQ ID NO: 1404528 - DNA, 15 bp, Homo sapiens
gctcatgtgaaacat

SEQ ID NO: 1404529 - DNA, 15 bp, Homo sapiens
tgctcatgtgaaaca

SEQ ID NO: 1404530 - DNA, 15 bp, Homo sapiens
ttgctcatgtgaaac

SEQ ID NO: 1404531 - DNA, 15 bp, Homo sapiens
attgctcatgtgaaa

SEQ ID NO: 1404532 - DNA, 15 bp, Homo sapiens
cattgctcatgtgaa

SEQ ID NO: 1404533 - DNA, 15 bp, Homo sapiens
acattgctcatgtga

SEQ ID NO: 1404534 - DNA, 15 bp, Homo sapiens
aacattgctcatgtg

SEQ ID NO: 1404535 - DNA, 15 bp, Homo sapiens
aaacattgctcatgt

SEQ ID NO: 1404536 - DNA, 15 bp, Homo sapiens
aaaacattgctcatg

SEQ ID NO: 1404537 - DNA, 15 bp, Homo sapiens
aaaaacattgctcat

SEQ ID NO: 1404538 - DNA, 15 bp, Homo sapiens
aaaaaacattgctca

SEQ ID NO: 1404539 - DNA, 15 bp, Homo sapiens
aaaaaaacattgctc

SEQ ID NO: 1404540 - DNA, 15 bp, Homo sapiens
aaaaaaaacattgct

SEQ ID NO: 1404541 - DNA, 15 bp, Homo sapiens
aaaaaaaaacattgc

SEQ ID NO: 1404542 - DNA, 15 bp, Homo sapiens
gaaaaaaaaacattg

SEQ ID NO: 1404543 - DNA, 15 bp, Homo sapiens
ggaaaaaaaaacatt

SEQ ID NO: 1404544 - DNA, 15 bp, Homo sapiens
tggaaaaaaaaacat

SEQ ID NO: 1404545 - DNA, 15 bp, Homo sapiens
atggaaaaaaaaaca

SEQ ID NO: 1404546 - DNA, 15 bp, Homo sapiens
aatggaaaaaaaaac

SEQ ID NO: 1404547 - DNA, 15 bp, Homo sapiens
aaatggaaaaaaaaa

SEQ ID NO: 1404548 - DNA, 15 bp, Homo sapiens
aaaatggaaaaaaaa

SEQ ID NO: 1404549 - DNA, 15 bp, Homo sapiens
aaaaatggaaaaaaa

SEQ ID NO: 1404550 - DNA, 15 bp, Homo sapiens
caaaaatggaaaaaa

SEQ ID NO: 1404551 - DNA, 15 bp, Homo sapiens
ccaaaaatggaaaaa

SEQ ID NO: 1404552 - DNA, 15 bp, Homo sapiens
accaaaaatggaaaa

SEQ ID NO: 1404553 - DNA, 15 bp, Homo sapiens
aaccaaaaatggaaa

SEQ ID NO: 1404554 - DNA, 15 bp, Homo sapiens
aaaccaaaaatggaa

SEQ ID NO: 1404555 - DNA, 15 bp, Homo sapiens
aaaaccaaaaatgga

SEQ ID NO: 1404556 - DNA, 15 bp, Homo sapiens
aaaaaccaaaaatgg

SEQ ID NO: 1404557 - DNA, 15 bp, Homo sapiens
caaaaaccaaaaatg

SEQ ID NO: 1404558 - DNA, 15 bp, Homo sapiens
acaaaaaccaaaaat

SEQ ID NO: 1404559 - DNA, 15 bp, Homo sapiens
aacaaaaaccaaaaa

SEQ ID NO: 1404560 - DNA, 15 bp, Homo sapiens
caaacaaaaaccaaa

SEQ ID NO: 1404561 - DNA, 15 bp, Homo sapiens
acaaacaaaaaccaa

SEQ ID NO: 1404562 - DNA, 15 bp, Homo sapiens
caaacaaacaaaaac

SEQ ID NO: 1404563 - DNA, 15 bp, Homo sapiens
agtaaacaaacaaac

SEQ ID NO: 1404564 - DNA, 15 bp, Homo sapiens
aagtaaacaaacaaa

SEQ ID NO: 1404565 - DNA, 15 bp, Homo sapiens
gaagtaaacaaacaa

SEQ ID NO: 1404566 - DNA, 15 bp, Homo sapiens
tgaagtaaacaaaca

SEQ ID NO: 1404567 - DNA, 15 bp, Homo sapiens
atgaagtaaacaaac

SEQ ID NO: 1404568 - DNA, 15 bp, Homo sapiens
catgaagtaaacaaa

SEQ ID NO: 1404569 - DNA, 15 bp, Homo sapiens
ccatgaagtaaacaa

SEQ ID NO: 1404570 - DNA, 15 bp, Homo sapiens
tccatgaagtaaaca

SEQ ID NO: 1404571 - DNA, 15 bp, Homo sapiens
gtccatgaagtaaac

SEQ ID NO: 1404572 - DNA, 15 bp, Homo sapiens
tgtccatgaagtaaa

SEQ ID NO: 1404573 - DNA, 15 bp, Homo sapiens
atgtccatgaagtaa

SEQ ID NO: 1404574 - DNA, 15 bp, Homo sapiens
aatgtccatgaagta

SEQ ID NO: 1404575 - DNA, 15 bp, Homo sapiens
caatgtccatgaagt

SEQ ID NO: 1404576 - DNA, 15 bp, Homo sapiens
acaatgtccatgaag

SEQ ID NO: 1404577 - DNA, 15 bp, Homo sapiens
tacaatgtccatgaa

SEQ ID NO: 1404578 - DNA, 15 bp, Homo sapiens
ctacaatgtccatga

SEQ ID NO: 1404579 - DNA, 15 bp, Homo sapiens
tctacaatgtccatg

SEQ ID NO: 1404580 - DNA, 15 bp, Homo sapiens
gtctacaatgtccat

SEQ ID NO: 1404581 - DNA, 15 bp, Homo sapiens
agtctacaatgtcca

SEQ ID NO: 1404582 - DNA, 15 bp, Homo sapiens
tagtctacaatgtcc

SEQ ID NO: 1404583 - DNA, 15 bp, Homo sapiens
ctagtctacaatgtc

SEQ ID NO: 1404584 - DNA, 15 bp, Homo sapiens
cctagtctacaatgt

SEQ ID NO: 1404585 - DNA, 15 bp, Homo sapiens
tcctagtctacaatg

SEQ ID NO: 1404586 - DNA, 15 bp, Homo sapiens
gtcctagtctacaat

SEQ ID NO: 1404587 - DNA, 15 bp, Homo sapiens
ggtcctagtctacaa

SEQ ID NO: 1404588 - DNA, 15 bp, Homo sapiens
aggtcctagtctaca

SEQ ID NO: 1404589 - DNA, 15 bp, Homo sapiens
caggtcctagtctac

SEQ ID NO: 1404590 - DNA, 15 bp, Homo sapiens
ccaggtcctagtcta

SEQ ID NO: 1404591 - DNA, 15 bp, Homo sapiens
accaggtcctagtct

SEQ ID NO: 1404592 - DNA, 15 bp, Homo sapiens
aaccaggtcctagtc

SEQ ID NO: 1404593 - DNA, 15 bp, Homo sapiens
taaccaggtcctagt

SEQ ID NO: 1404594 - DNA, 15 bp, Homo sapiens
gtaaccaggtcctag

SEQ ID NO: 1404595 - DNA, 15 bp, Homo sapiens
agtaaccaggtccta

SEQ ID NO: 1404596 - DNA, 15 bp, Homo sapiens
tagtaaccaggtcct

SEQ ID NO: 1404597 - DNA, 15 bp, Homo sapiens
ttagtaaccaggtcc

SEQ ID NO: 1404598 - DNA, 15 bp, Homo sapiens
cttagtaaccaggtc

SEQ ID NO: 1404599 - DNA, 15 bp, Homo sapiens
ccttagtaaccaggt

SEQ ID NO: 1404600 - DNA, 15 bp, Homo sapiens
tccttagtaaccagg

SEQ ID NO: 1404601 - DNA, 15 bp, Homo sapiens
ctccttagtaaccag

SEQ ID NO: 1404602 - DNA, 15 bp, Homo sapiens
actccttagtaacca

SEQ ID NO: 1404603 - DNA, 15 bp, Homo sapiens
aactccttagtaacc

SEQ ID NO: 1404604 - DNA, 15 bp, Homo sapiens
aaactccttagtaac

SEQ ID NO: 1404605 - DNA, 15 bp, Homo sapiens
aaaactccttagtaa

SEQ ID NO: 1404606 - DNA, 15 bp, Homo sapiens
aaaaactccttagta

SEQ ID NO: 1404607 - DNA, 15 bp, Homo sapiens
taaaaactccttagt

SEQ ID NO: 1404608 - DNA, 15 bp, Homo sapiens
gtaaaaactccttag

SEQ ID NO: 1404609 - DNA, 15 bp, Homo sapiens
tgtaaaaactcctta

SEQ ID NO: 1404610 - DNA, 15 bp, Homo sapiens
ctgtaaaaactcctt

SEQ ID NO: 1404611 - DNA, 15 bp, Homo sapiens
actgtaaaaactcct

SEQ ID NO: 1404612 - DNA, 15 bp, Homo sapiens
tactgtaaaaactcc

SEQ ID NO: 1404613 - DNA, 15 bp, Homo sapiens
gtactgtaaaaactc

SEQ ID NO: 1404614 - DNA, 15 bp, Homo sapiens
tgtactgtaaaaact

SEQ ID NO: 1404615 - DNA, 15 bp, Homo sapiens
atgtactgtaaaaac

SEQ ID NO: 1404616 - DNA, 15 bp, Homo sapiens
catgtactgtaaaaa

SEQ ID NO: 1404617 - DNA, 15 bp, Homo sapiens
acatgtactgtaaaa

SEQ ID NO: 1404618 - DNA, 15 bp, Homo sapiens
cacatgtactgtaaa

SEQ ID NO: 1404619 - DNA, 15 bp, Homo sapiens
acacatgtactgtaa

SEQ ID NO: 1404620 - DNA, 15 bp, Homo sapiens
cacacatgtactgta

SEQ ID NO: 1404621 - DNA, 15 bp, Homo sapiens
ccacacatgtactgt

SEQ ID NO: 1404622 - DNA, 15 bp, Homo sapiens
gccacacatgtactg

SEQ ID NO: 1404623 - DNA, 15 bp, Homo sapiens
ggccacacatgtact

SEQ ID NO: 1404624 - DNA, 15 bp, Homo sapiens
gggccacacatgtac

SEQ ID NO: 1404625 - DNA, 15 bp, Homo sapiens
tgggccacacatgta

SEQ ID NO: 1404626 - DNA, 15 bp, Homo sapiens
gtgggccacacatgt

SEQ ID NO: 1404627 - DNA, 15 bp, Homo sapiens
ggtgggccacacatg

SEQ ID NO: 1404628 - DNA, 15 bp, Homo sapiens
aggtgggccacacat

SEQ ID NO: 1404629 - DNA, 15 bp, Homo sapiens
gaggtgggccacaca

SEQ ID NO: 1404630 - DNA, 15 bp, Homo sapiens
agaggtgggccacac

SEQ ID NO: 1404631 - DNA, 15 bp, Homo sapiens
tagaggtgggccaca

SEQ ID NO: 1404632 - DNA, 15 bp, Homo sapiens
atagaggtgggccac

SEQ ID NO: 1404633 - DNA, 15 bp, Homo sapiens
catagaggtgggcca

SEQ ID NO: 1404634 - DNA, 15 bp, Homo sapiens
tcatagaggtgggcc

SEQ ID NO: 1404635 - DNA, 15 bp, Homo sapiens
atcatagaggtgggc

SEQ ID NO: 1404636 - DNA, 15 bp, Homo sapiens
catcatagaggtggg

SEQ ID NO: 1404637 - DNA, 15 bp, Homo sapiens
ccatcatagaggtgg

SEQ ID NO: 1404638 - DNA, 15 bp, Homo sapiens
accatcatagaggtg

SEQ ID NO: 1404639 - DNA, 15 bp, Homo sapiens
taccatcatagaggt

SEQ ID NO: 1404640 - DNA, 15 bp, Homo sapiens
gtaccatcatagagg

SEQ ID NO: 1404641 - DNA, 15 bp, Homo sapiens
tgtaccatcatagag

SEQ ID NO: 1404642 - DNA, 15 bp, Homo sapiens
ctgtaccatcataga

SEQ ID NO: 1404643 - DNA, 15 bp, Homo sapiens
actgtaccatcatag

SEQ ID NO: 1404644 - DNA, 15 bp, Homo sapiens
gactgtaccatcata

SEQ ID NO: 1404645 - DNA, 15 bp, Homo sapiens
agactgtaccatcat

SEQ ID NO: 1404646 - DNA, 15 bp, Homo sapiens
aagactgtaccatca

SEQ ID NO: 1404647 - DNA, 15 bp, Homo sapiens
aaagactgtaccatc

SEQ ID NO: 1404648 - DNA, 15 bp, Homo sapiens
taaagactgtaccat

SEQ ID NO: 1404649 - DNA, 15 bp, Homo sapiens
gtaaagactgtacca

SEQ ID NO: 1404650 - DNA, 15 bp, Homo sapiens
agtaaagactgtacc

SEQ ID NO: 1404651 - DNA, 15 bp, Homo sapiens
cagtaaagactgtac

SEQ ID NO: 1404652 - DNA, 15 bp, Homo sapiens
tcagtaaagactgta

SEQ ID NO: 1404653 - DNA, 15 bp, Homo sapiens
ttcagtaaagactgt

SEQ ID NO: 1404654 - DNA, 15 bp, Homo sapiens
tttcagtaaagactg

SEQ ID NO: 1404655 - DNA, 15 bp, Homo sapiens
ctttcagtaaagact

SEQ ID NO: 1404656 - DNA, 15 bp, Homo sapiens
cctttcagtaaagac

SEQ ID NO: 1404657 - DNA, 15 bp, Homo sapiens
gcctttcagtaaaga

SEQ ID NO: 1404658 - DNA, 15 bp, Homo sapiens
agcctttcagtaaag

SEQ ID NO: 1404659 - DNA, 15 bp, Homo sapiens
aagcctttcagtaaa

SEQ ID NO: 1404660 - DNA, 15 bp, Homo sapiens
aaagcctttcagtaa

SEQ ID NO: 1404661 - DNA, 15 bp, Homo sapiens
aaaagcctttcagta

SEQ ID NO: 1404662 - DNA, 15 bp, Homo sapiens
aaaaagcctttcagt

SEQ ID NO: 1404663 - DNA, 15 bp, Homo sapiens
taaaaagcctttcag

SEQ ID NO: 1404664 - DNA, 15 bp, Homo sapiens
ctaaaaagcctttca

SEQ ID NO: 1404665 - DNA, 15 bp, Homo sapiens
gctaaaaagcctttc

SEQ ID NO: 1404666 - DNA, 15 bp, Homo sapiens
ggctaaaaagccttt

SEQ ID NO: 1404667 - DNA, 15 bp, Homo sapiens
tggctaaaaagcctt

SEQ ID NO: 1404668 - DNA, 15 bp, Homo sapiens
gtggctaaaaagcct

SEQ ID NO: 1404669 - DNA, 15 bp, Homo sapiens
tgtggctaaaaagcc

SEQ ID NO: 1404670 - DNA, 15 bp, Homo sapiens
atgtggctaaaaagc

SEQ ID NO: 1404671 - DNA, 15 bp, Homo sapiens
aatgtggctaaaaag

SEQ ID NO: 1404672 - DNA, 15 bp, Homo sapiens
gaatgtggctaaaaa

SEQ ID NO: 1404673 - DNA, 15 bp, Homo sapiens
agaatgtggctaaaa

SEQ ID NO: 1404674 - DNA, 15 bp, Homo sapiens
gagaatgtggctaaa

SEQ ID NO: 1404675 - DNA, 15 bp, Homo sapiens
tgagaatgtggctaa

SEQ ID NO: 1404676 - DNA, 15 bp, Homo sapiens
ttgagaatgtggcta

SEQ ID NO: 1404677 - DNA, 15 bp, Homo sapiens
attgagaatgtggct

SEQ ID NO: 1404678 - DNA, 15 bp, Homo sapiens
aattgagaatgtggc

SEQ ID NO: 1404679 - DNA, 15 bp, Homo sapiens
gaattgagaatgtgg

SEQ ID NO: 1404680 - DNA, 15 bp, Homo sapiens
tgaattgagaatgtg

SEQ ID NO: 1404681 - DNA, 15 bp, Homo sapiens
atgaattgagaatgt

SEQ ID NO: 1404682 - DNA, 15 bp, Homo sapiens
aatgaattgagaatg

SEQ ID NO: 1404683 - DNA, 15 bp, Homo sapiens
aaatgaattgagaat

SEQ ID NO: 1404684 - DNA, 15 bp, Homo sapiens
gaaatgaattgagaa

SEQ ID NO: 1404685 - DNA, 15 bp, Homo sapiens
tgaaatgaattgaga

SEQ ID NO: 1404686 - DNA, 15 bp, Homo sapiens
atgaaatgaattgag

SEQ ID NO: 1404687 - DNA, 15 bp, Homo sapiens
gatgaaatgaattga

SEQ ID NO: 1404688 - DNA, 15 bp, Homo sapiens
tgatgaaatgaattg

SEQ ID NO: 1404689 - DNA, 15 bp, Homo sapiens
gtgatgaaatgaatt

SEQ ID NO: 1404690 - DNA, 15 bp, Homo sapiens
ggtgatgaaatgaat

SEQ ID NO: 1404691 - DNA, 15 bp, Homo sapiens
gggtgatgaaatgaa

SEQ ID NO: 1404692 - DNA, 15 bp, Homo sapiens
tgggtgatgaaatga

SEQ ID NO: 1404693 - DNA, 15 bp, Homo sapiens
atgggtgatgaaatg

SEQ ID NO: 1404694 - DNA, 15 bp, Homo sapiens
gatgggtgatgaaat

SEQ ID NO: 1404695 - DNA, 15 bp, Homo sapiens
agatgggtgatgaaa

SEQ ID NO: 1404696 - DNA, 15 bp, Homo sapiens
cagatgggtgatgaa

SEQ ID NO: 1404697 - DNA, 15 bp, Homo sapiens
acagatgggtgatga

SEQ ID NO: 1404698 - DNA, 15 bp, Homo sapiens
cacagatgggtgatg

SEQ ID NO: 1404699 - DNA, 15 bp, Homo sapiens
acacagatgggtgat

SEQ ID NO: 1404700 - DNA, 15 bp, Homo sapiens
aacacagatgggtga

SEQ ID NO: 1404701 - DNA, 15 bp, Homo sapiens
aaacacagatgggtg

SEQ ID NO: 1404702 - DNA, 15 bp, Homo sapiens
aaaacacagatgggt

SEQ ID NO: 1404703 - DNA, 15 bp, Homo sapiens
aaaaacacagatggg

SEQ ID NO: 1404704 - DNA, 15 bp, Homo sapiens
aaaaaacacagatgg

SEQ ID NO: 1404705 - DNA, 15 bp, Homo sapiens
aaaaaaacacagatg

SEQ ID NO: 1404706 - DNA, 15 bp, Homo sapiens
gaaaaaaacacagat

SEQ ID NO: 1404707 - DNA, 15 bp, Homo sapiens
agaaaaaaacacaga

SEQ ID NO: 1404708 - DNA, 15 bp, Homo sapiens
cagaaaaaaacacag

SEQ ID NO: 1404709 - DNA, 15 bp, Homo sapiens
acagaaaaaaacaca

SEQ ID NO: 1404710 - DNA, 15 bp, Homo sapiens
aacagaaaaaaacac

SEQ ID NO: 1404711 - DNA, 15 bp, Homo sapiens
aaacagaaaaaaaca

SEQ ID NO: 1404712 - DNA, 15 bp, Homo sapiens
gaaacagaaaaaaac

SEQ ID NO: 1404713 - DNA, 15 bp, Homo sapiens
cgaaacagaaaaaaa

SEQ ID NO: 1404714 - DNA, 15 bp, Homo sapiens
gcgaaacagaaaaaa

SEQ ID NO: 1404715 - DNA, 15 bp, Homo sapiens
agcgaaacagaaaaa

SEQ ID NO: 1404716 - DNA, 15 bp, Homo sapiens
tagcgaaacagaaaa

SEQ ID NO: 1404717 - DNA, 15 bp, Homo sapiens
atagcgaaacagaaa

SEQ ID NO: 1404718 - DNA, 15 bp, Homo sapiens
tatagcgaaacagaa

SEQ ID NO: 1404719 - DNA, 15 bp, Homo sapiens
gtatagcgaaacaga

SEQ ID NO: 1404720 - DNA, 15 bp, Homo sapiens
tgtatagcgaaacag

SEQ ID NO: 1404721 - DNA, 15 bp, Homo sapiens
atgtatagcgaaaca

SEQ ID NO: 1404722 - DNA, 15 bp, Homo sapiens
aatgtatagcgaaac

SEQ ID NO: 1404723 - DNA, 15 bp, Homo sapiens
gaatgtatagcgaaa

SEQ ID NO: 1404724 - DNA, 15 bp, Homo sapiens
agaatgtatagcgaa

SEQ ID NO: 1404725 - DNA, 15 bp, Homo sapiens
tagaatgtatagcga

SEQ ID NO: 1404726 - DNA, 15 bp, Homo sapiens
atagaatgtatagcg

SEQ ID NO: 1404727 - DNA, 15 bp, Homo sapiens
tatagaatgtatagc

SEQ ID NO: 1404728 - DNA, 15 bp, Homo sapiens
atatagaatgtatag

SEQ ID NO: 1404729 - DNA, 15 bp, Homo sapiens
aatatagaatgtata

SEQ ID NO: 1404730 - DNA, 15 bp, Homo sapiens
caatatagaatgtat

SEQ ID NO: 1404731 - DNA, 15 bp, Homo sapiens
acaatatagaatgta

SEQ ID NO: 1404732 - DNA, 15 bp, Homo sapiens
aacaatatagaatgt

SEQ ID NO: 1404733 - DNA, 15 bp, Homo sapiens
aaacaatatagaatg

SEQ ID NO: 1404734 - DNA, 15 bp, Homo sapiens
taaacaatatagaat

SEQ ID NO: 1404735 - DNA, 15 bp, Homo sapiens
ataaacaatatagaa

SEQ ID NO: 1404736 - DNA, 15 bp, Homo sapiens
cataaacaatataga

SEQ ID NO: 1404737 - DNA, 15 bp, Homo sapiens
acataaacaatatag

SEQ ID NO: 1404738 - DNA, 15 bp, Homo sapiens
aacataaacaatata

SEQ ID NO: 1404739 - DNA, 15 bp, Homo sapiens
aaacataaacaatat

SEQ ID NO: 1404740 - DNA, 15 bp, Homo sapiens
aaaacataaacaata

SEQ ID NO: 1404741 - DNA, 15 bp, Homo sapiens
aaaaacataaacaat

SEQ ID NO: 1404742 - DNA, 15 bp, Homo sapiens
caaaaacataaacaa

SEQ ID NO: 1404743 - DNA, 15 bp, Homo sapiens
acaaaaacataaaca

SEQ ID NO: 1404744 - DNA, 15 bp, Homo sapiens
gacaaaaacataaac

SEQ ID NO: 1404745 - DNA, 15 bp, Homo sapiens
tgacaaaaacataaa

SEQ ID NO: 1404746 - DNA, 15 bp, Homo sapiens
gtgacaaaaacataa

SEQ ID NO: 1404747 - DNA, 15 bp, Homo sapiens
ggtgacaaaaacata

SEQ ID NO: 1404748 - DNA, 15 bp, Homo sapiens
aggtgacaaaaacat

SEQ ID NO: 1404749 - DNA, 15 bp, Homo sapiens
taggtgacaaaaaca

SEQ ID NO: 1404750 - DNA, 15 bp, Homo sapiens
ataggtgacaaaaac

SEQ ID NO: 1404751 - DNA, 15 bp, Homo sapiens
tataggtgacaaaaa

SEQ ID NO: 1404752 - DNA, 15 bp, Homo sapiens
atataggtgacaaaa

SEQ ID NO: 1404753 - DNA, 15 bp, Homo sapiens
tatataggtgacaaa

SEQ ID NO: 1404754 - DNA, 15 bp, Homo sapiens
atatataggtgacaa

SEQ ID NO: 1404755 - DNA, 15 bp, Homo sapiens
tatatataggtgaca

SEQ ID NO: 1404756 - DNA, 15 bp, Homo sapiens
ttatatataggtgac

SEQ ID NO: 1404757 - DNA, 15 bp, Homo sapiens
gttatatataggtga

SEQ ID NO: 1404758 - DNA, 15 bp, Homo sapiens
tgttatatataggtg

SEQ ID NO: 1404759 - DNA, 15 bp, Homo sapiens
atgttatatataggt

SEQ ID NO: 1404760 - DNA, 15 bp, Homo sapiens
catgttatatatagg

SEQ ID NO: 1404761 - DNA, 15 bp, Homo sapiens
gcatgttatatatag

SEQ ID NO: 1404762 - DNA, 15 bp, Homo sapiens
agcatgttatatata

SEQ ID NO: 1404763 - DNA, 15 bp, Homo sapiens
tagcatgttatatat

SEQ ID NO: 1404764 - DNA, 15 bp, Homo sapiens
gtagcatgttatata

SEQ ID NO: 1404765 - DNA, 15 bp, Homo sapiens
tgtagcatgttatat

SEQ ID NO: 1404766 - DNA, 15 bp, Homo sapiens
atgtagcatgttata

SEQ ID NO: 1404767 - DNA, 15 bp, Homo sapiens
catgtagcatgttat

SEQ ID NO: 1404768 - DNA, 15 bp, Homo sapiens
ccatgtagcatgtta

SEQ ID NO: 1404769 - DNA, 15 bp, Homo sapiens
accatgtagcatgtt

SEQ ID NO: 1404770 - DNA, 15 bp, Homo sapiens
taccatgtagcatgt

SEQ ID NO: 1404771 - DNA, 15 bp, Homo sapiens
ataccatgtagcatg

SEQ ID NO: 1404772 - DNA, 15 bp, Homo sapiens
tataccatgtagcat

SEQ ID NO: 1404773 - DNA, 15 bp, Homo sapiens
atataccatgtagca

SEQ ID NO: 1404774 - DNA, 15 bp, Homo sapiens
aatataccatgtagc

SEQ ID NO: 1404775 - DNA, 15 bp, Homo sapiens
caatataccatgtag

SEQ ID NO: 1404776 - DNA, 15 bp, Homo sapiens
ccaatataccatgta

SEQ ID NO: 1404777 - DNA, 15 bp, Homo sapiens
tccaatataccatgt

SEQ ID NO: 1404778 - DNA, 15 bp, Homo sapiens
ctccaatataccatg

SEQ ID NO: 1404779 - DNA, 15 bp, Homo sapiens
gctccaatataccat

SEQ ID NO: 1404780 - DNA, 15 bp, Homo sapiens
ggctccaatatacca

SEQ ID NO: 1404781 - DNA, 15 bp, Homo sapiens
tggctccaatatacc

SEQ ID NO: 1404782 - DNA, 15 bp, Homo sapiens
ttggctccaatatac

SEQ ID NO: 1404783 - DNA, 15 bp, Homo sapiens
gttggctccaatata

SEQ ID NO: 1404784 - DNA, 15 bp, Homo sapiens
tgttggctccaatat

SEQ ID NO: 1404785 - DNA, 15 bp, Homo sapiens
ttgttggctccaata

SEQ ID NO: 1404786 - DNA, 15 bp, Homo sapiens
tttgttggctccaat

SEQ ID NO: 1404787 - DNA, 15 bp, Homo sapiens
atttgttggctccaa

SEQ ID NO: 1404788 - DNA, 15 bp, Homo sapiens
tatttgttggctcca

SEQ ID NO: 1404789 - DNA, 15 bp, Homo sapiens
atatttgttggctcc

SEQ ID NO: 1404790 - DNA, 15 bp, Homo sapiens
gatatttgttggctc

SEQ ID NO: 1404791 - DNA, 15 bp, Homo sapiens
cgatatttgttggct

SEQ ID NO: 1404792 - DNA, 15 bp, Homo sapiens
gcgatatttgttggc

SEQ ID NO: 1404793 - DNA, 15 bp, Homo sapiens
tgcgatatttgttgg

SEQ ID NO: 1404794 - DNA, 15 bp, Homo sapiens
gtgcgatatttgttg

SEQ ID NO: 1404795 - DNA, 15 bp, Homo sapiens
cgtgcgatatttgtt

SEQ ID NO: 1404796 - DNA, 15 bp, Homo sapiens
ccgtgcgatatttgt

SEQ ID NO: 1404797 - DNA, 15 bp, Homo sapiens
tccgtgcgatatttg

SEQ ID NO: 1404798 - DNA, 15 bp, Homo sapiens
atccgtgcgatattt

SEQ ID NO: 1404799 - DNA, 15 bp, Homo sapiens
aatccgtgcgatatt

SEQ ID NO: 1404800 - DNA, 15 bp, Homo sapiens
aaatccgtgcgatat

SEQ ID NO: 1404801 - DNA, 15 bp, Homo sapiens
aaaatccgtgcgata

SEQ ID NO: 1404802 - DNA, 15 bp, Homo sapiens
taaaatccgtgcgat

SEQ ID NO: 1404803 - DNA, 15 bp, Homo sapiens
ataaaatccgtgcga

SEQ ID NO: 1404804 - DNA, 15 bp, Homo sapiens
gataaaatccgtgcg

SEQ ID NO: 1404805 - DNA, 15 bp, Homo sapiens
tgataaaatccgtgc

SEQ ID NO: 1404806 - DNA, 15 bp, Homo sapiens
ttgataaaatccgtg

SEQ ID NO: 1404807 - DNA, 15 bp, Homo sapiens
tttgataaaatccgt

SEQ ID NO: 1404808 - DNA, 15 bp, Homo sapiens
atttgataaaatccg

SEQ ID NO: 1404809 - DNA, 15 bp, Homo sapiens
aatttgataaaatcc

SEQ ID NO: 1404810 - DNA, 15 bp, Homo sapiens
aaatttgataaaatc

SEQ ID NO: 1404811 - DNA, 15 bp, Homo sapiens
gaaatttgataaaat

SEQ ID NO: 1404812 - DNA, 15 bp, Homo sapiens
agaaatttgataaaa

SEQ ID NO: 1404813 - DNA, 15 bp, Homo sapiens
tagaaatttgataaa

SEQ ID NO: 1404814 - DNA, 15 bp, Homo sapiens
ttagaaatttgataa

SEQ ID NO: 1404815 - DNA, 15 bp, Homo sapiens
gttagaaatttgata

SEQ ID NO: 1404816 - DNA, 15 bp, Homo sapiens
ggttagaaatttgat

SEQ ID NO: 1404817 - DNA, 15 bp, Homo sapiens
gggttagaaatttga

SEQ ID NO: 1404818 - DNA, 15 bp, Homo sapiens
ggggttagaaatttg

SEQ ID NO: 1404819 - DNA, 15 bp, Homo sapiens
tggggttagaaattt

SEQ ID NO: 1404820 - DNA, 15 bp, Homo sapiens
atggggttagaaatt

SEQ ID NO: 1404821 - DNA, 15 bp, Homo sapiens
aatggggttagaaat

SEQ ID NO: 1404822 - DNA, 15 bp, Homo sapiens
aaatggggttagaaa

SEQ ID NO: 1404823 - DNA, 15 bp, Homo sapiens
gaaatggggttagaa

SEQ ID NO: 1404824 - DNA, 15 bp, Homo sapiens
tgaaatggggttaga

SEQ ID NO: 1404825 - DNA, 15 bp, Homo sapiens
ttgaaatggggttag

SEQ ID NO: 1404826 - DNA, 15 bp, Homo sapiens
cttgaaatggggtta

SEQ ID NO: 1404827 - DNA, 15 bp, Homo sapiens
tcttgaaatggggtt

SEQ ID NO: 1404828 - DNA, 15 bp, Homo sapiens
ttcttgaaatggggt

SEQ ID NO: 1404829 - DNA, 15 bp, Homo sapiens
attcttgaaatgggg

SEQ ID NO: 1404830 - DNA, 15 bp, Homo sapiens
tattcttgaaatggg

SEQ ID NO: 1404831 - DNA, 15 bp, Homo sapiens
ttattcttgaaatgg

SEQ ID NO: 1404832 - DNA, 15 bp, Homo sapiens
cttattcttgaaatg

SEQ ID NO: 1404833 - DNA, 15 bp, Homo sapiens
tcttattcttgaaat

SEQ ID NO: 1404834 - DNA, 15 bp, Homo sapiens
gtcttattcttgaaa

SEQ ID NO: 1404835 - DNA, 15 bp, Homo sapiens
tgtcttattcttgaa

SEQ ID NO: 1404836 - DNA, 15 bp, Homo sapiens
ttgtcttattcttga

SEQ ID NO: 1404837 - DNA, 15 bp, Homo sapiens
attgtcttattcttg

SEQ ID NO: 1404838 - DNA, 15 bp, Homo sapiens
aattgtcttattctt

SEQ ID NO: 1404839 - DNA, 15 bp, Homo sapiens
gaattgtcttattct

SEQ ID NO: 1404840 - DNA, 15 bp, Homo sapiens
ggaattgtcttattc

SEQ ID NO: 1404841 - DNA, 15 bp, Homo sapiens
gggaattgtcttatt

SEQ ID NO: 1404842 - DNA, 15 bp, Homo sapiens
agggaattgtcttat

SEQ ID NO: 1404843 - DNA, 15 bp, Homo sapiens
gagggaattgtctta

SEQ ID NO: 1404844 - DNA, 15 bp, Homo sapiens
agagggaattgtctt

SEQ ID NO: 1404845 - DNA, 15 bp, Homo sapiens
aagagggaattgtct

SEQ ID NO: 1404846 - DNA, 15 bp, Homo sapiens
aaagagggaattgtc

SEQ ID NO: 1404847 - DNA, 15 bp, Homo sapiens
taaagagggaattgt

SEQ ID NO: 1404848 - DNA, 15 bp, Homo sapiens
ataaagagggaattg

SEQ ID NO: 1404849 - DNA, 15 bp, Homo sapiens
tataaagagggaatt

SEQ ID NO: 1404850 - DNA, 15 bp, Homo sapiens
ttataaagagggaat

SEQ ID NO: 1404851 - DNA, 15 bp, Homo sapiens
tttataaagagggaa

SEQ ID NO: 1404852 - DNA, 15 bp, Homo sapiens
ttttataaagaggga

SEQ ID NO: 1404853 - DNA, 15 bp, Homo sapiens
tttttataaagaggg

SEQ ID NO: 1404854 - DNA, 15 bp, Homo sapiens
ctttttataaagagg

SEQ ID NO: 1404855 - DNA, 15 bp, Homo sapiens
cctttttataaagag

SEQ ID NO: 1404856 - DNA, 15 bp, Homo sapiens
gcctttttataaaga

SEQ ID NO: 1404857 - DNA, 15 bp, Homo sapiens
tgcctttttataaag

SEQ ID NO: 1404858 - DNA, 15 bp, Homo sapiens
ttgcctttttataaa

SEQ ID NO: 1404859 - DNA, 15 bp, Homo sapiens
tttgcctttttataa

SEQ ID NO: 1404860 - DNA, 15 bp, Homo sapiens
atttgcctttttata

SEQ ID NO: 1404861 - DNA, 15 bp, Homo sapiens
catttgcctttttat

SEQ ID NO: 1404862 - DNA, 15 bp, Homo sapiens
tcatttgccttttta

SEQ ID NO: 1404863 - DNA, 15 bp, Homo sapiens
ttcatttgccttttt

SEQ ID NO: 1404864 - DNA, 15 bp, Homo sapiens
cttcatttgcctttt

SEQ ID NO: 1404865 - DNA, 15 bp, Homo sapiens
tcttcatttgccttt

SEQ ID NO: 1404866 - DNA, 15 bp, Homo sapiens
ttcttcatttgcctt

SEQ ID NO: 1404867 - DNA, 15 bp, Homo sapiens
gttcttcatttgcct

SEQ ID NO: 1404868 - DNA, 15 bp, Homo sapiens
tgttcttcatttgcc

SEQ ID NO: 1404869 - DNA, 15 bp, Homo sapiens
gtgttcttcatttgc

SEQ ID NO: 1404870 - DNA, 15 bp, Homo sapiens
tgtgttcttcatttg

SEQ ID NO: 1404871 - DNA, 15 bp, Homo sapiens
gtgtgttcttcattt

SEQ ID NO: 1404872 - DNA, 15 bp, Homo sapiens
ggtgtgttcttcatt

SEQ ID NO: 1404873 - DNA, 15 bp, Homo sapiens
aggtgtgttcttcat

SEQ ID NO: 1404874 - DNA, 15 bp, Homo sapiens
aaggtgtgttcttca

SEQ ID NO: 1404875 - DNA, 15 bp, Homo sapiens
aaaggtgtgttcttc

SEQ ID NO: 1404876 - DNA, 15 bp, Homo sapiens
gaaaggtgtgttctt

SEQ ID NO: 1404877 - DNA, 15 bp, Homo sapiens
ggaaaggtgtgttct

SEQ ID NO: 1404878 - DNA, 15 bp, Homo sapiens
gggaaaggtgtgttc

SEQ ID NO: 1404879 - DNA, 15 bp, Homo sapiens
agggaaaggtgtgtt

SEQ ID NO: 1404880 - DNA, 15 bp, Homo sapiens
aagggaaaggtgtgt

SEQ ID NO: 1404881 - DNA, 15 bp, Homo sapiens
caagggaaaggtgtg

SEQ ID NO: 1404882 - DNA, 15 bp, Homo sapiens
tcaagggaaaggtgt

SEQ ID NO: 1404883 - DNA, 15 bp, Homo sapiens
ttcaagggaaaggtg

SEQ ID NO: 1404884 - DNA, 15 bp, Homo sapiens
cttcaagggaaaggt

SEQ ID NO: 1404885 - DNA, 15 bp, Homo sapiens
acttcaagggaaagg

SEQ ID NO: 1404886 - DNA, 15 bp, Homo sapiens
cacttcaagggaaag

SEQ ID NO: 1404887 - DNA, 15 bp, Homo sapiens
tcacttcaagggaaa

SEQ ID NO: 1404888 - DNA, 15 bp, Homo sapiens
atcacttcaagggaa

SEQ ID NO: 1404889 - DNA, 15 bp, Homo sapiens
gatcacttcaaggga

SEQ ID NO: 1404890 - DNA, 15 bp, Homo sapiens
agatcacttcaaggg

SEQ ID NO: 1404891 - DNA, 15 bp, Homo sapiens
cagatcacttcaagg

SEQ ID NO: 1404892 - DNA, 15 bp, Homo sapiens
tcagatcacttcaag

SEQ ID NO: 1404893 - DNA, 15 bp, Homo sapiens
ctcagatcacttcaa

SEQ ID NO: 1404894 - DNA, 15 bp, Homo sapiens
tctcagatcacttca

SEQ ID NO: 1404895 - DNA, 15 bp, Homo sapiens
ttctcagatcacttc

SEQ ID NO: 1404896 - DNA, 15 bp, Homo sapiens
tttctcagatcactt

SEQ ID NO: 1404897 - DNA, 15 bp, Homo sapiens
atttctcagatcact

SEQ ID NO: 1404898 - DNA, 15 bp, Homo sapiens
catttctcagatcac

SEQ ID NO: 1404899 - DNA, 15 bp, Homo sapiens
ccatttctcagatca

SEQ ID NO: 1404900 - DNA, 15 bp, Homo sapiens
tccatttctcagatc

SEQ ID NO: 1404901 - DNA, 15 bp, Homo sapiens
atccatttctcagat

SEQ ID NO: 1404902 - DNA, 15 bp, Homo sapiens
tatccatttctcaga

SEQ ID NO: 1404903 - DNA, 15 bp, Homo sapiens
ctatccatttctcag

SEQ ID NO: 1404904 - DNA, 15 bp, Homo sapiens
gctatccatttctca

SEQ ID NO: 1404905 - DNA, 15 bp, Homo sapiens
agctatccatttctc

SEQ ID NO: 1404906 - DNA, 15 bp, Homo sapiens
gagctatccatttct

SEQ ID NO: 1404907 - DNA, 15 bp, Homo sapiens
ggagctatccatttc

SEQ ID NO: 1404908 - DNA, 15 bp, Homo sapiens
gggagctatccattt

SEQ ID NO: 1404909 - DNA, 15 bp, Homo sapiens
agggagctatccatt

SEQ ID NO: 1404910 - DNA, 15 bp, Homo sapiens
aagggagctatccat

SEQ ID NO: 1404911 - DNA, 15 bp, Homo sapiens
gaagggagctatcca

SEQ ID NO: 1404912 - DNA, 15 bp, Homo sapiens
ggaagggagctatcc

SEQ ID NO: 1404913 - DNA, 15 bp, Homo sapiens
aggaagggagctatc

SEQ ID NO: 1404914 - DNA, 15 bp, Homo sapiens
taggaagggagctat

SEQ ID NO: 1404915 - DNA, 15 bp, Homo sapiens
gtaggaagggagcta

SEQ ID NO: 1404916 - DNA, 15 bp, Homo sapiens
ggtaggaagggagct

SEQ ID NO: 1404917 - DNA, 15 bp, Homo sapiens
tggtaggaagggagc

SEQ ID NO: 1404918 - DNA, 15 bp, Homo sapiens
atggtaggaagggag

SEQ ID NO: 1404919 - DNA, 15 bp, Homo sapiens
gatggtaggaaggga

SEQ ID NO: 1404920 - DNA, 15 bp, Homo sapiens
tgatggtaggaaggg

SEQ ID NO: 1404921 - DNA, 15 bp, Homo sapiens
gtgatggtaggaagg

SEQ ID NO: 1404922 - DNA, 15 bp, Homo sapiens
tgtgatggtaggaag

SEQ ID NO: 1404923 - DNA, 15 bp, Homo sapiens
ttgtgatggtaggaa

SEQ ID NO: 1404924 - DNA, 15 bp, Homo sapiens
cttgtgatggtagga

SEQ ID NO: 1404925 - DNA, 15 bp, Homo sapiens
ccttgtgatggtagg

SEQ ID NO: 1404926 - DNA, 15 bp, Homo sapiens
tccttgtgatggtag

SEQ ID NO: 1404927 - DNA, 15 bp, Homo sapiens
ttccttgtgatggta

SEQ ID NO: 1404928 - DNA, 15 bp, Homo sapiens
tttccttgtgatggt

SEQ ID NO: 1404929 - DNA, 15 bp, Homo sapiens
ttttccttgtgatgg

SEQ ID NO: 1404930 - DNA, 15 bp, Homo sapiens
cttttccttgtgatg

SEQ ID NO: 1404931 - DNA, 15 bp, Homo sapiens
ccttttccttgtgat

SEQ ID NO: 1404932 - DNA, 15 bp, Homo sapiens
tccttttccttgtga

SEQ ID NO: 1404933 - DNA, 15 bp, Homo sapiens
ctccttttccttgtg

SEQ ID NO: 1404934 - DNA, 15 bp, Homo sapiens
cctccttttccttgt

SEQ ID NO: 1404935 - DNA, 15 bp, Homo sapiens
gcctccttttccttg

SEQ ID NO: 1404936 - DNA, 15 bp, Homo sapiens
agcctccttttcctt

SEQ ID NO: 1404937 - DNA, 15 bp, Homo sapiens
cagcctccttttcct

SEQ ID NO: 1404938 - DNA, 15 bp, Homo sapiens
tcagcctccttttcc

SEQ ID NO: 1404939 - DNA, 15 bp, Homo sapiens
gtcagcctccttttc

SEQ ID NO: 1404940 - DNA, 15 bp, Homo sapiens
tgtcagcctcctttt

SEQ ID NO: 1404941 - DNA, 15 bp, Homo sapiens
ctgtcagcctccttt

SEQ ID NO: 1404942 - DNA, 15 bp, Homo sapiens
actgtcagcctcctt

SEQ ID NO: 1404943 - DNA, 15 bp, Homo sapiens
cactgtcagcctcct

SEQ ID NO: 1404944 - DNA, 15 bp, Homo sapiens
tcactgtcagcctcc

SEQ ID NO: 1404945 - DNA, 15 bp, Homo sapiens
ctcactgtcagcctc

SEQ ID NO: 1404946 - DNA, 15 bp, Homo sapiens
cctcactgtcagcct

SEQ ID NO: 1404947 - DNA, 15 bp, Homo sapiens
acctcactgtcagcc

SEQ ID NO: 1404948 - DNA, 15 bp, Homo sapiens
aacctcactgtcagc

SEQ ID NO: 1404949 - DNA, 15 bp, Homo sapiens
taacctcactgtcag

SEQ ID NO: 1404950 - DNA, 15 bp, Homo sapiens
ataacctcactgtca

SEQ ID NO: 1404951 - DNA, 15 bp, Homo sapiens
aataacctcactgtc

SEQ ID NO: 1404952 - DNA, 15 bp, Homo sapiens
gaataacctcactgt

SEQ ID NO: 1404953 - DNA, 15 bp, Homo sapiens
tgaataacctcactg

SEQ ID NO: 1404954 - DNA, 15 bp, Homo sapiens
ctgaataacctcact

SEQ ID NO: 1404955 - DNA, 15 bp, Homo sapiens
gctgaataacctcac

SEQ ID NO: 1404956 - DNA, 15 bp, Homo sapiens
ggctgaataacctca

SEQ ID NO: 1404957 - DNA, 15 bp, Homo sapiens
tggctgaataacctc

SEQ ID NO: 1404958 - DNA, 15 bp, Homo sapiens
ttggctgaataacct

SEQ ID NO: 1404959 - DNA, 15 bp, Homo sapiens
tttggctgaataacc

SEQ ID NO: 1404960 - DNA, 15 bp, Homo sapiens
ttttggctgaataac

SEQ ID NO: 1404961 - DNA, 15 bp, Homo sapiens
tttttggctgaataa

SEQ ID NO: 1404962 - DNA, 15 bp, Homo sapiens
gtttttggctgaata

SEQ ID NO: 1404963 - DNA, 15 bp, Homo sapiens
tgtttttggctgaat

SEQ ID NO: 1404964 - DNA, 15 bp, Homo sapiens
gtgtttttggctgaa

SEQ ID NO: 1404965 - DNA, 15 bp, Homo sapiens
agtgtttttggctga

SEQ ID NO: 1404966 - DNA, 15 bp, Homo sapiens
aagtgtttttggctg

SEQ ID NO: 1404967 - DNA, 15 bp, Homo sapiens
aaagtgtttttggct

SEQ ID NO: 1404968 - DNA, 15 bp, Homo sapiens
gaaagtgtttttggc

SEQ ID NO: 1404969 - DNA, 15 bp, Homo sapiens
agaaagtgtttttgg

SEQ ID NO: 1404970 - DNA, 15 bp, Homo sapiens
aagaaagtgtttttg

SEQ ID NO: 1404971 - DNA, 15 bp, Homo sapiens
taagaaagtgttttt

SEQ ID NO: 1404972 - DNA, 15 bp, Homo sapiens
gtaagaaagtgtttt

SEQ ID NO: 1404973 - DNA, 15 bp, Homo sapiens
agtaagaaagtgttt

SEQ ID NO: 1404974 - DNA, 15 bp, Homo sapiens
cagtaagaaagtgtt

SEQ ID NO: 1404975 - DNA, 15 bp, Homo sapiens
gcagtaagaaagtgt

SEQ ID NO: 1404976 - DNA, 15 bp, Homo sapiens
ggcagtaagaaagtg

SEQ ID NO: 1404977 - DNA, 15 bp, Homo sapiens
aggcagtaagaaagt

SEQ ID NO: 1404978 - DNA, 15 bp, Homo sapiens
gaggcagtaagaaag

SEQ ID NO: 1404979 - DNA, 15 bp, Homo sapiens
ggaggcagtaagaaa

SEQ ID NO: 1404980 - DNA, 15 bp, Homo sapiens
aggaggcagtaagaa

SEQ ID NO: 1404981 - DNA, 15 bp, Homo sapiens
gaggaggcagtaaga

SEQ ID NO: 1404982 - DNA, 15 bp, Homo sapiens
ggaggaggcagtaag

SEQ ID NO: 1404983 - DNA, 15 bp, Homo sapiens
gggaggaggcagtaa

SEQ ID NO: 1404984 - DNA, 15 bp, Homo sapiens
agggaggaggcagta

SEQ ID NO: 1404985 - DNA, 15 bp, Homo sapiens
aagggaggaggcagt

SEQ ID NO: 1404986 - DNA, 15 bp, Homo sapiens
gaagggaggaggcag

SEQ ID NO: 1404987 - DNA, 15 bp, Homo sapiens
ggaagggaggaggca

SEQ ID NO: 1404988 - DNA, 15 bp, Homo sapiens
gggaagggaggaggc

SEQ ID NO: 1404989 - DNA, 15 bp, Homo sapiens
ggggaagggaggagg

SEQ ID NO: 1404990 - DNA, 15 bp, Homo sapiens
tggggaagggaggag

SEQ ID NO: 1404991 - DNA, 15 bp, Homo sapiens
gtggggaagggagga

SEQ ID NO: 1404992 - DNA, 15 bp, Homo sapiens
tgtggggaagggagg

SEQ ID NO: 1404993 - DNA, 15 bp, Homo sapiens
atgtggggaagggag

SEQ ID NO: 1404994 - DNA, 15 bp, Homo sapiens
gatgtggggaaggga

SEQ ID NO: 1404995 - DNA, 15 bp, Homo sapiens
agatgtggggaaggg

SEQ ID NO: 1404996 - DNA, 15 bp, Homo sapiens
aagatgtggggaagg

SEQ ID NO: 1404997 - DNA, 15 bp, Homo sapiens
aaagatgtggggaag

SEQ ID NO: 1404998 - DNA, 15 bp, Homo sapiens
aaaagatgtggggaa

SEQ ID NO: 1404999 - DNA, 15 bp, Homo sapiens
taaaagatgtgggga

SEQ ID NO: 1405000 - DNA, 15 bp, Homo sapiens
ataaaagatgtgggg

SEQ ID NO: 1405001 - DNA, 15 bp, Homo sapiens
aataaaagatgtggg

SEQ ID NO: 1405002 - DNA, 15 bp, Homo sapiens
aaataaaagatgtgg

SEQ ID NO: 1405003 - DNA, 15 bp, Homo sapiens
aaaataaaagatgtg

SEQ ID NO: 1405004 - DNA, 15 bp, Homo sapiens
aaaaataaaagatgt

SEQ ID NO: 1405005 - DNA, 15 bp, Homo sapiens
taaaaataaaagatg

SEQ ID NO: 1405006 - DNA, 15 bp, Homo sapiens
ttaaaaataaaagat

SEQ ID NO: 1405007 - DNA, 15 bp, Homo sapiens
cttaaaaataaaaga

SEQ ID NO: 1405008 - DNA, 15 bp, Homo sapiens
tcttaaaaataaaag

SEQ ID NO: 1405009 - DNA, 15 bp, Homo sapiens
atcttaaaaataaaa

SEQ ID NO: 1405010 - DNA, 15 bp, Homo sapiens
catcttaaaaataaa

SEQ ID NO: 1405011 - DNA, 15 bp, Homo sapiens
tcatcttaaaaataa

SEQ ID NO: 1405012 - DNA, 15 bp, Homo sapiens
ttcatcttaaaaata

SEQ ID NO: 1405013 - DNA, 15 bp, Homo sapiens
cttcatcttaaaaat

SEQ ID NO: 1405014 - DNA, 15 bp, Homo sapiens
ccttcatcttaaaaa

SEQ ID NO: 1405015 - DNA, 15 bp, Homo sapiens
gccttcatcttaaaa

SEQ ID NO: 1405016 - DNA, 15 bp, Homo sapiens
tgccttcatcttaaa

SEQ ID NO: 1405017 - DNA, 15 bp, Homo sapiens
atgccttcatcttaa

SEQ ID NO: 1405018 - DNA, 15 bp, Homo sapiens
catgccttcatctta

SEQ ID NO: 1405019 - DNA, 15 bp, Homo sapiens
acatgccttcatctt

SEQ ID NO: 1405020 - DNA, 15 bp, Homo sapiens
gacatgccttcatct

SEQ ID NO: 1405021 - DNA, 15 bp, Homo sapiens
tgacatgccttcatc

SEQ ID NO: 1405022 - DNA, 15 bp, Homo sapiens
gtgacatgccttcat

SEQ ID NO: 1405023 - DNA, 15 bp, Homo sapiens
agtgacatgccttca

SEQ ID NO: 1405024 - DNA, 15 bp, Homo sapiens
gagtgacatgccttc

SEQ ID NO: 1405025 - DNA, 15 bp, Homo sapiens
agagtgacatgcctt

SEQ ID NO: 1405026 - DNA, 15 bp, Homo sapiens
aagagtgacatgcct

SEQ ID NO: 1405027 - DNA, 15 bp, Homo sapiens
gaagagtgacatgcc

SEQ ID NO: 1405028 - DNA, 15 bp, Homo sapiens
cgaagagtgacatgc

SEQ ID NO: 1405029 - DNA, 15 bp, Homo sapiens
gcgaagagtgacatg

SEQ ID NO: 1405030 - DNA, 15 bp, Homo sapiens
agcgaagagtgacat

SEQ ID NO: 1405031 - DNA, 15 bp, Homo sapiens
aagcgaagagtgaca

SEQ ID NO: 1405032 - DNA, 15 bp, Homo sapiens
gaagcgaagagtgac

SEQ ID NO: 1405033 - DNA, 15 bp, Homo sapiens
tgaagcgaagagtga

SEQ ID NO: 1405034 - DNA, 15 bp, Homo sapiens
gtgaagcgaagagtg

SEQ ID NO: 1405035 - DNA, 15 bp, Homo sapiens
tgtgaagcgaagagt

SEQ ID NO: 1405036 - DNA, 15 bp, Homo sapiens
gtgtgaagcgaagag

SEQ ID NO: 1405037 - DNA, 15 bp, Homo sapiens
tgtgtgaagcgaaga

SEQ ID NO: 1405038 - DNA, 15 bp, Homo sapiens
ttgtgtgaagcgaag

SEQ ID NO: 1405039 - DNA, 15 bp, Homo sapiens
cttgtgtgaagcgaa

SEQ ID NO: 1405040 - DNA, 15 bp, Homo sapiens
gcttgtgtgaagcga

SEQ ID NO: 1405041 - DNA, 15 bp, Homo sapiens
ggcttgtgtgaagcg

SEQ ID NO: 1405042 - DNA, 15 bp, Homo sapiens
aggcttgtgtgaagc

SEQ ID NO: 1405043 - DNA, 15 bp, Homo sapiens
taggcttgtgtgaag

SEQ ID NO: 1405044 - DNA, 15 bp, Homo sapiens
ctaggcttgtgtgaa

SEQ ID NO: 1405045 - DNA, 15 bp, Homo sapiens
actaggcttgtgtga

SEQ ID NO: 1405046 - DNA, 15 bp, Homo sapiens
cactaggcttgtgtg

SEQ ID NO: 1405047 - DNA, 15 bp, Homo sapiens
tcactaggcttgtgt

SEQ ID NO: 1405048 - DNA, 15 bp, Homo sapiens
ctcactaggcttgtg

SEQ ID NO: 1405049 - DNA, 15 bp, Homo sapiens
cctcactaggcttgt

SEQ ID NO: 1405050 - DNA, 15 bp, Homo sapiens
gcctcactaggcttg

SEQ ID NO: 1405051 - DNA, 15 bp, Homo sapiens
tgcctcactaggctt

SEQ ID NO: 1405052 - DNA, 15 bp, Homo sapiens
atgcctcactaggct

SEQ ID NO: 1405053 - DNA, 15 bp, Homo sapiens
catgcctcactaggc

SEQ ID NO: 1405054 - DNA, 15 bp, Homo sapiens
acatgcctcactagg

SEQ ID NO: 1405055 - DNA, 15 bp, Homo sapiens
gacatgcctcactag

SEQ ID NO: 1405056 - DNA, 15 bp, Homo sapiens
agacatgcctcacta

SEQ ID NO: 1405057 - DNA, 15 bp, Homo sapiens
cagacatgcctcact

SEQ ID NO: 1405058 - DNA, 15 bp, Homo sapiens
tcagacatgcctcac

SEQ ID NO: 1405059 - DNA, 15 bp, Homo sapiens
ttcagacatgcctca

SEQ ID NO: 1405060 - DNA, 15 bp, Homo sapiens
tttcagacatgcctc

SEQ ID NO: 1405061 - DNA, 15 bp, Homo sapiens
ttttcagacatgcct

SEQ ID NO: 1405062 - DNA, 15 bp, Homo sapiens
tttttcagacatgcc

SEQ ID NO: 1405063 - DNA, 15 bp, Homo sapiens
ttttttcagacatgc

SEQ ID NO: 1405064 - DNA, 15 bp, Homo sapiens
tttttttcagacatg

SEQ ID NO: 1405065 - DNA, 15 bp, Homo sapiens
ctttttttcagacat

SEQ ID NO: 1405066 - DNA, 15 bp, Homo sapiens
gctttttttcagaca

SEQ ID NO: 1405067 - DNA, 15 bp, Homo sapiens
ggctttttttcagac

SEQ ID NO: 1405068 - DNA, 15 bp, Homo sapiens
gggctttttttcaga

SEQ ID NO: 1405069 - DNA, 15 bp, Homo sapiens
tgggctttttttcag

SEQ ID NO: 1405070 - DNA, 15 bp, Homo sapiens
ttgggctttttttca

SEQ ID NO: 1405071 - DNA, 15 bp, Homo sapiens
gttgggctttttttc

SEQ ID NO: 1405072 - DNA, 15 bp, Homo sapiens
tgttgggcttttttt

SEQ ID NO: 1405073 - DNA, 15 bp, Homo sapiens
ctgttgggctttttt

SEQ ID NO: 1405074 - DNA, 15 bp, Homo sapiens
cctgttgggcttttt

SEQ ID NO: 1405075 - DNA, 15 bp, Homo sapiens
acctgttgggctttt

SEQ ID NO: 1405076 - DNA, 15 bp, Homo sapiens
tacctgttgggcttt

SEQ ID NO: 1405077 - DNA, 15 bp, Homo sapiens
ttacctgttgggctt

SEQ ID NO: 1405078 - DNA, 15 bp, Homo sapiens
attacctgttgggct

SEQ ID NO: 1405079 - DNA, 15 bp, Homo sapiens
aattacctgttgggc

SEQ ID NO: 1405080 - DNA, 15 bp, Homo sapiens
gaattacctgttggg

SEQ ID NO: 1405081 - DNA, 15 bp, Homo sapiens
agaattacctgttgg

SEQ ID NO: 1405082 - DNA, 15 bp, Homo sapiens
gagaattacctgttg

SEQ ID NO: 1405083 - DNA, 15 bp, Homo sapiens
tgagaattacctgtt

SEQ ID NO: 1405084 - DNA, 15 bp, Homo sapiens
ttgagaattacctgt

SEQ ID NO: 1405085 - DNA, 15 bp, Homo sapiens
tttgagaattacctg

SEQ ID NO: 1405086 - DNA, 15 bp, Homo sapiens
ttttgagaattacct

SEQ ID NO: 1405087 - DNA, 15 bp, Homo sapiens
gttttgagaattacc

SEQ ID NO: 1405088 - DNA, 15 bp, Homo sapiens
agttttgagaattac

SEQ ID NO: 1405089 - DNA, 15 bp, Homo sapiens
aagttttgagaatta

SEQ ID NO: 1405090 - DNA, 15 bp, Homo sapiens
gaagttttgagaatt

SEQ ID NO: 1405091 - DNA, 15 bp, Homo sapiens
agaagttttgagaat

SEQ ID NO: 1405092 - DNA, 15 bp, Homo sapiens
cagaagttttgagaa

SEQ ID NO: 1405093 - DNA, 15 bp, Homo sapiens
acagaagttttgaga

SEQ ID NO: 1405094 - DNA, 15 bp, Homo sapiens
gacagaagttttgag

SEQ ID NO: 1405095 - DNA, 15 bp, Homo sapiens
ggacagaagttttga

SEQ ID NO: 1405096 - DNA, 15 bp, Homo sapiens
tggacagaagttttg

SEQ ID NO: 1405097 - DNA, 15 bp, Homo sapiens
atggacagaagtttt

SEQ ID NO: 1405098 - DNA, 15 bp, Homo sapiens
gatggacagaagttt

SEQ ID NO: 1405099 - DNA, 15 bp, Homo sapiens
tgatggacagaagtt

SEQ ID NO: 1405100 - DNA, 15 bp, Homo sapiens
atgatggacagaagt

SEQ ID NO: 1405101 - DNA, 15 bp, Homo sapiens
catgatggacagaag

SEQ ID NO: 1405102 - DNA, 15 bp, Homo sapiens
tcatgatggacagaa

SEQ ID NO: 1405103 - DNA, 15 bp, Homo sapiens
gtcatgatggacaga

SEQ ID NO: 1405104 - DNA, 15 bp, Homo sapiens
tgtcatgatggacag

SEQ ID NO: 1405105 - DNA, 15 bp, Homo sapiens
ttgtcatgatggaca

SEQ ID NO: 1405106 - DNA, 15 bp, Homo sapiens
attgtcatgatggac

SEQ ID NO: 1405107 - DNA, 15 bp, Homo sapiens
tattgtcatgatgga

SEQ ID NO: 1405108 - DNA, 15 bp, Homo sapiens
ttattgtcatgatgg

SEQ ID NO: 1405109 - DNA, 15 bp, Homo sapiens
tttattgtcatgatg

SEQ ID NO: 1405110 - DNA, 15 bp, Homo sapiens
ttttattgtcatgat

SEQ ID NO: 1405111 - DNA, 15 bp, Homo sapiens
tttttattgtcatga

SEQ ID NO: 1405112 - DNA, 15 bp, Homo sapiens
atttttattgtcatg

SEQ ID NO: 1405113 - DNA, 15 bp, Homo sapiens
tatttttattgtcat

SEQ ID NO: 1405114 - DNA, 15 bp, Homo sapiens
ttatttttattgtca

SEQ ID NO: 1405115 - DNA, 15 bp, Homo sapiens
gttatttttattgtc

SEQ ID NO: 1405116 - DNA, 15 bp, Homo sapiens
agttatttttattgt

SEQ ID NO: 1405117 - DNA, 15 bp, Homo sapiens
cagttatttttattg

SEQ ID NO: 1405118 - DNA, 15 bp, Homo sapiens
acagttatttttatt

SEQ ID NO: 1405119 - DNA, 15 bp, Homo sapiens
aacagttatttttat

SEQ ID NO: 1405120 - DNA, 15 bp, Homo sapiens
gaacagttattttta

SEQ ID NO: 1405121 - DNA, 15 bp, Homo sapiens
agaacagttattttt

SEQ ID NO: 1405122 - DNA, 15 bp, Homo sapiens
cagaacagttatttt

SEQ ID NO: 1405123 - DNA, 15 bp, Homo sapiens
tcagaacagttattt

SEQ ID NO: 1405124 - DNA, 15 bp, Homo sapiens
ttcagaacagttatt

SEQ ID NO: 1405125 - DNA, 15 bp, Homo sapiens
tttcagaacagttat

SEQ ID NO: 1405126 - DNA, 15 bp, Homo sapiens
ctttcagaacagtta

SEQ ID NO: 1405127 - DNA, 15 bp, Homo sapiens
tctttcagaacagtt

SEQ ID NO: 1405128 - DNA, 15 bp, Homo sapiens
atctttcagaacagt

SEQ ID NO: 1405129 - DNA, 15 bp, Homo sapiens
aatctttcagaacag

SEQ ID NO: 1405130 - DNA, 15 bp, Homo sapiens
gaatctttcagaaca

SEQ ID NO: 1405131 - DNA, 15 bp, Homo sapiens
agaatctttcagaac

SEQ ID NO: 1405132 - DNA, 15 bp, Homo sapiens
cagaatctttcagaa

SEQ ID NO: 1405133 - DNA, 15 bp, Homo sapiens
ccagaatctttcaga

SEQ ID NO: 1405134 - DNA, 15 bp, Homo sapiens
tccagaatctttcag

SEQ ID NO: 1405135 - DNA, 15 bp, Homo sapiens
ttccagaatctttca

SEQ ID NO: 1405136 - DNA, 15 bp, Homo sapiens
cttccagaatctttc

SEQ ID NO: 1405137 - DNA, 15 bp, Homo sapiens
tcttccagaatcttt

SEQ ID NO: 1405138 - DNA, 15 bp, Homo sapiens
ctcttccagaatctt

SEQ ID NO: 1405139 - DNA, 15 bp, Homo sapiens
tctcttccagaatct

SEQ ID NO: 1405140 - DNA, 15 bp, Homo sapiens
ctctcttccagaatc

SEQ ID NO: 1405141 - DNA, 15 bp, Homo sapiens
cctctcttccagaat

SEQ ID NO: 1405142 - DNA, 15 bp, Homo sapiens
gcctctcttccagaa

SEQ ID NO: 1405143 - DNA, 15 bp, Homo sapiens
agcctctcttccaga

SEQ ID NO: 1405144 - DNA, 15 bp, Homo sapiens
tagcctctcttccag

SEQ ID NO: 1405145 - DNA, 15 bp, Homo sapiens
ttagcctctcttcca

SEQ ID NO: 1405146 - DNA, 15 bp, Homo sapiens
cttagcctctcttcc

SEQ ID NO: 1405147 - DNA, 15 bp, Homo sapiens
ccttagcctctcttc

SEQ ID NO: 1405148 - DNA, 15 bp, Homo sapiens
tccttagcctctctt

SEQ ID NO: 1405149 - DNA, 15 bp, Homo sapiens
ttccttagcctctct

SEQ ID NO: 1405150 - DNA, 15 bp, Homo sapiens
tttccttagcctctc

SEQ ID NO: 1405151 - DNA, 15 bp, Homo sapiens
ttttccttagcctct

SEQ ID NO: 1405152 - DNA, 15 bp, Homo sapiens
tttttccttagcctc

SEQ ID NO: 1405153 - DNA, 15 bp, Homo sapiens
ttttttccttagcct

SEQ ID NO: 1405154 - DNA, 15 bp, Homo sapiens
aatttttttttcctt

SEQ ID NO: 1405155 - DNA, 15 bp, Homo sapiens
aaatttttttttcct

SEQ ID NO: 1405156 - DNA, 15 bp, Homo sapiens
taaatttttttttcc

SEQ ID NO: 1405157 - DNA, 15 bp, Homo sapiens
ctaaatttttttttc

SEQ ID NO: 1405158 - DNA, 15 bp, Homo sapiens
actaaattttttttt

SEQ ID NO: 1405159 - DNA, 15 bp, Homo sapiens
gactaaatttttttt

SEQ ID NO: 1405160 - DNA, 15 bp, Homo sapiens
tgactaaattttttt

SEQ ID NO: 1405161 - DNA, 15 bp, Homo sapiens
ctgactaaatttttt

SEQ ID NO: 1405162 - DNA, 15 bp, Homo sapiens
actgactaaattttt

SEQ ID NO: 1405163 - DNA, 15 bp, Homo sapiens
aactgactaaatttt

SEQ ID NO: 1405164 - DNA, 15 bp, Homo sapiens
gaactgactaaattt

SEQ ID NO: 1405165 - DNA, 15 bp, Homo sapiens
ggaactgactaaatt

SEQ ID NO: 1405166 - DNA, 15 bp, Homo sapiens
gggaactgactaaat

SEQ ID NO: 1405167 - DNA, 15 bp, Homo sapiens
ggggaactgactaaa

SEQ ID NO: 1405168 - DNA, 15 bp, Homo sapiens
tggggaactgactaa

SEQ ID NO: 1405169 - DNA, 15 bp, Homo sapiens
ttggggaactgacta

SEQ ID NO: 1405170 - DNA, 15 bp, Homo sapiens
tttggggaactgact

SEQ ID NO: 1405171 - DNA, 15 bp, Homo sapiens
ttttggggaactgac

SEQ ID NO: 1405172 - DNA, 15 bp, Homo sapiens
tttttggggaactga

SEQ ID NO: 1405173 - DNA, 15 bp, Homo sapiens
atttttggggaactg

SEQ ID NO: 1405174 - DNA, 15 bp, Homo sapiens
aatttttggggaact

SEQ ID NO: 1405175 - DNA, 15 bp, Homo sapiens
caatttttggggaac

SEQ ID NO: 1405176 - DNA, 15 bp, Homo sapiens
ccaatttttggggaa

SEQ ID NO: 1405177 - DNA, 15 bp, Homo sapiens
tccaatttttgggga

SEQ ID NO: 1405178 - DNA, 15 bp, Homo sapiens
ctccaatttttgggg

SEQ ID NO: 1405179 - DNA, 15 bp, Homo sapiens
tctccaatttttggg

SEQ ID NO: 1405180 - DNA, 15 bp, Homo sapiens
ctctccaatttttgg

SEQ ID NO: 1405181 - DNA, 15 bp, Homo sapiens
tctctccaatttttg

SEQ ID NO: 1405182 - DNA, 15 bp, Homo sapiens
ttctctccaattttt

SEQ ID NO: 1405183 - DNA, 15 bp, Homo sapiens
cttctctccaatttt

SEQ ID NO: 1405184 - DNA, 15 bp, Homo sapiens
tcttctctccaattt

SEQ ID NO: 1405185 - DNA, 15 bp, Homo sapiens
cagcacattttcagc

SEQ ID NO: 1405186 - DNA, 15 bp, Homo sapiens
acagcacattttcag

SEQ ID NO: 1405187 - DNA, 15 bp, Homo sapiens
gacagcacattttca

SEQ ID NO: 1405188 - DNA, 15 bp, Homo sapiens
agacagcacattttc

SEQ ID NO: 1405189 - DNA, 15 bp, Homo sapiens
aagacagcacatttt

SEQ ID NO: 1405190 - DNA, 15 bp, Homo sapiens
aaagacagcacattt

SEQ ID NO: 1405191 - DNA, 15 bp, Homo sapiens
taaagacagcacatt

SEQ ID NO: 1405192 - DNA, 15 bp, Homo sapiens
ttaaagacagcacat

SEQ ID NO: 1405193 - DNA, 15 bp, Homo sapiens
attaaagacagcaca

SEQ ID NO: 1405194 - DNA, 15 bp, Homo sapiens
cattaaagacagcac

SEQ ID NO: 1405195 - DNA, 15 bp, Homo sapiens
acattaaagacagca

SEQ ID NO: 1405196 - DNA, 15 bp, Homo sapiens
aacattaaagacagc

SEQ ID NO: 1405197 - DNA, 15 bp, Homo sapiens
gaacattaaagacag

SEQ ID NO: 1405198 - DNA, 15 bp, Homo sapiens
ggaacattaaagaca

SEQ ID NO: 1405199 - DNA, 15 bp, Homo sapiens
aggaacattaaagac

SEQ ID NO: 1405200 - DNA, 15 bp, Homo sapiens
aaggaacattaaaga

SEQ ID NO: 1405201 - DNA, 15 bp, Homo sapiens
taaggaacattaaag

SEQ ID NO: 1405202 - DNA, 15 bp, Homo sapiens
ctaaggaacattaaa

SEQ ID NO: 1405203 - DNA, 15 bp, Homo sapiens
cctaaggaacattaa

SEQ ID NO: 1405204 - DNA, 15 bp, Homo sapiens
gcctaaggaacatta

SEQ ID NO: 1405205 - DNA, 15 bp, Homo sapiens
agcctaaggaacatt

SEQ ID NO: 1405206 - DNA, 15 bp, Homo sapiens
aagcctaaggaacat

SEQ ID NO: 1405207 - DNA, 15 bp, Homo sapiens
gaagcctaaggaaca

SEQ ID NO: 1405208 - DNA, 15 bp, Homo sapiens
ggaagcctaaggaac

SEQ ID NO: 1405209 - DNA, 15 bp, Homo sapiens
gggaagcctaaggaa

SEQ ID NO: 1405210 - DNA, 15 bp, Homo sapiens
agggaagcctaagga

SEQ ID NO: 1405211 - DNA, 15 bp, Homo sapiens
aagggaagcctaagg

SEQ ID NO: 1405212 - DNA, 15 bp, Homo sapiens
gaagggaagcctaag

SEQ ID NO: 1405213 - DNA, 15 bp, Homo sapiens
cgaagggaagcctaa

SEQ ID NO: 1405214 - DNA, 15 bp, Homo sapiens
tcgaagggaagccta

SEQ ID NO: 1405215 - DNA, 15 bp, Homo sapiens
ctcgaagggaagcct

SEQ ID NO: 1405216 - DNA, 15 bp, Homo sapiens
actcgaagggaagcc

SEQ ID NO: 1405217 - DNA, 15 bp, Homo sapiens
cactcgaagggaagc

SEQ ID NO: 1405218 - DNA, 15 bp, Homo sapiens
tcactcgaagggaag

SEQ ID NO: 1405219 - DNA, 15 bp, Homo sapiens
atcactcgaagggaa

SEQ ID NO: 1405220 - DNA, 15 bp, Homo sapiens
gatcactcgaaggga

SEQ ID NO: 1405221 - DNA, 15 bp, Homo sapiens
ggatcactcgaaggg

SEQ ID NO: 1405222 - DNA, 15 bp, Homo sapiens
tggatcactcgaagg

SEQ ID NO: 1405223 - DNA, 15 bp, Homo sapiens
ttggatcactcgaag

SEQ ID NO: 1405224 - DNA, 15 bp, Homo sapiens
cttggatcactcgaa

SEQ ID NO: 1405225 - DNA, 15 bp, Homo sapiens
ccttggatcactcga

SEQ ID NO: 1405226 - DNA, 15 bp, Homo sapiens
cccttggatcactcg

SEQ ID NO: 1405227 - DNA, 15 bp, Homo sapiens
acccttggatcactc

SEQ ID NO: 1405228 - DNA, 15 bp, Homo sapiens
cacccttggatcact

SEQ ID NO: 1405229 - DNA, 15 bp, Homo sapiens
tcacccttggatcac

SEQ ID NO: 1405230 - DNA, 15 bp, Homo sapiens
ttcacccttggatca

SEQ ID NO: 1405231 - DNA, 15 bp, Homo sapiens
tttcacccttggatc

SEQ ID NO: 1405232 - DNA, 15 bp, Homo sapiens
atttcacccttggat

SEQ ID NO: 1405233 - DNA, 15 bp, Homo sapiens
tatttcacccttgga

SEQ ID NO: 1405234 - DNA, 15 bp, Homo sapiens
atatttcacccttgg

SEQ ID NO: 1405235 - DNA, 15 bp, Homo sapiens
tatatttcacccttg

SEQ ID NO: 1405236 - DNA, 15 bp, Homo sapiens
atatatttcaccctt

SEQ ID NO: 1405237 - DNA, 15 bp, Homo sapiens
catatatttcaccct

SEQ ID NO: 1405238 - DNA, 15 bp, Homo sapiens
acatatatttcaccc

SEQ ID NO: 1405239 - DNA, 15 bp, Homo sapiens
cacatatatttcacc

SEQ ID NO: 1405240 - DNA, 15 bp, Homo sapiens
tcacatatatttcac

SEQ ID NO: 1405241 - DNA, 15 bp, Homo sapiens
ctcacatatatttca

SEQ ID NO: 1405242 - DNA, 15 bp, Homo sapiens
actcacatatatttc

SEQ ID NO: 1405243 - DNA, 15 bp, Homo sapiens
cactcacatatattt

SEQ ID NO: 1405244 - DNA, 15 bp, Homo sapiens
tcactcacatatatt

SEQ ID NO: 1405245 - DNA, 15 bp, Homo sapiens
ttcactcacatatat

SEQ ID NO: 1405246 - DNA, 15 bp, Homo sapiens
tttcactcacatata

SEQ ID NO: 1405247 - DNA, 15 bp, Homo sapiens
atttcactcacatat

SEQ ID NO: 1405248 - DNA, 15 bp, Homo sapiens
aatttcactcacata

SEQ ID NO: 1405249 - DNA, 15 bp, Homo sapiens
taatttcactcacat

SEQ ID NO: 1405250 - DNA, 15 bp, Homo sapiens
ataatttcactcaca

SEQ ID NO: 1405251 - DNA, 15 bp, Homo sapiens
gataatttcactcac

SEQ ID NO: 1405252 - DNA, 15 bp, Homo sapiens
tgataatttcactca

SEQ ID NO: 1405253 - DNA, 15 bp, Homo sapiens
ctgataatttcactc

SEQ ID NO: 1405254 - DNA, 15 bp, Homo sapiens
tctgataatttcact

SEQ ID NO: 1405255 - DNA, 15 bp, Homo sapiens
atctgataatttcac

SEQ ID NO: 1405256 - DNA, 15 bp, Homo sapiens
catctgataatttca

SEQ ID NO: 1405257 - DNA, 15 bp, Homo sapiens
ccatctgataatttc

SEQ ID NO: 1405258 - DNA, 15 bp, Homo sapiens
cccatctgataattt

SEQ ID NO: 1405259 - DNA, 15 bp, Homo sapiens
acccatctgataatt

SEQ ID NO: 1405260 - DNA, 15 bp, Homo sapiens
aacccatctgataat

SEQ ID NO: 1405261 - DNA, 15 bp, Homo sapiens
taacccatctgataa

SEQ ID NO: 1405262 - DNA, 15 bp, Homo sapiens
gtaacccatctgata

SEQ ID NO: 1405263 - DNA, 15 bp, Homo sapiens
agtaacccatctgat

SEQ ID NO: 1405264 - DNA, 15 bp, Homo sapiens
aagtaacccatctga

SEQ ID NO: 1405265 - DNA, 15 bp, Homo sapiens
aaagtaacccatctg

SEQ ID NO: 1405266 - DNA, 15 bp, Homo sapiens
taaagtaacccatct

SEQ ID NO: 1405267 - DNA, 15 bp, Homo sapiens
ataaagtaacccatc

SEQ ID NO: 1405268 - DNA, 15 bp, Homo sapiens
aataaagtaacccat

SEQ ID NO: 1405269 - DNA, 15 bp, Homo sapiens
aaataaagtaaccca

SEQ ID NO: 1405270 - DNA, 15 bp, Homo sapiens
aaaataaagtaaccc

SEQ ID NO: 1405271 - DNA, 15 bp, Homo sapiens
aaaaataaagtaacc

SEQ ID NO: 1405272 - DNA, 15 bp, Homo sapiens
taaaaataaagtaac

SEQ ID NO: 1405273 - DNA, 15 bp, Homo sapiens
gtaaaaataaagtaa

SEQ ID NO: 1405274 - DNA, 15 bp, Homo sapiens
agtaaaaataaagta

SEQ ID NO: 1405275 - DNA, 15 bp, Homo sapiens
aagtaaaaataaagt

SEQ ID NO: 1405276 - DNA, 15 bp, Homo sapiens
taagtaaaaataaag

SEQ ID NO: 1405277 - DNA, 15 bp, Homo sapiens
ttaagtaaaaataaa

SEQ ID NO: 1405278 - DNA, 15 bp, Homo sapiens
attaagtaaaaataa

SEQ ID NO: 1405279 - DNA, 15 bp, Homo sapiens
aattaagtaaaaata

SEQ ID NO: 1405280 - DNA, 15 bp, Homo sapiens
gaattaagtaaaaat

SEQ ID NO: 1405281 - DNA, 15 bp, Homo sapiens
agaattaagtaaaaa

SEQ ID NO: 1405282 - DNA, 15 bp, Homo sapiens
cagaattaagtaaaa

SEQ ID NO: 1405283 - DNA, 15 bp, Homo sapiens
tcagaattaagtaaa

SEQ ID NO: 1405284 - DNA, 15 bp, Homo sapiens
ttcagaattaagtaa

SEQ ID NO: 1405285 - DNA, 15 bp, Homo sapiens
attcagaattaagta

SEQ ID NO: 1405286 - DNA, 15 bp, Homo sapiens
aattcagaattaagt

SEQ ID NO: 1405287 - DNA, 15 bp, Homo sapiens
aaattcagaattaag

SEQ ID NO: 1405288 - DNA, 15 bp, Homo sapiens
aaaattcagaattaa

SEQ ID NO: 1405289 - DNA, 15 bp, Homo sapiens
gaaaattcagaatta

SEQ ID NO: 1405290 - DNA, 15 bp, Homo sapiens
tgaaaattcagaatt

SEQ ID NO: 1405291 - DNA, 15 bp, Homo sapiens
atgaaaattcagaat

SEQ ID NO: 1405292 - DNA, 15 bp, Homo sapiens
aatgaaaattcagaa

SEQ ID NO: 1405293 - DNA, 15 bp, Homo sapiens
taatgaaaattcaga

SEQ ID NO: 1405294 - DNA, 15 bp, Homo sapiens
ttaatgaaaattcag

SEQ ID NO: 1405295 - DNA, 15 bp, Homo sapiens
tttaatgaaaattca

SEQ ID NO: 1405296 - DNA, 15 bp, Homo sapiens
ttttaatgaaaattc

SEQ ID NO: 1405297 - DNA, 15 bp, Homo sapiens
tttttaatgaaaatt

SEQ ID NO: 1405298 - DNA, 15 bp, Homo sapiens
atttttaatgaaaat

SEQ ID NO: 1405299 - DNA, 15 bp, Homo sapiens
aatttttaatgaaaa

SEQ ID NO: 1405300 - DNA, 15 bp, Homo sapiens
gaatttttaatgaaa

SEQ ID NO: 1405301 - DNA, 15 bp, Homo sapiens
ggaatttttaatgaa

SEQ ID NO: 1405302 - DNA, 15 bp, Homo sapiens
gggaatttttaatga

SEQ ID NO: 1405303 - DNA, 15 bp, Homo sapiens
tgggaatttttaatg

SEQ ID NO: 1405304 - DNA, 15 bp, Homo sapiens
ttgggaatttttaat

SEQ ID NO: 1405305 - DNA, 15 bp, Homo sapiens
tttgggaatttttaa

SEQ ID NO: 1405306 - DNA, 15 bp, Homo sapiens
atttgggaattttta

SEQ ID NO: 1405307 - DNA, 15 bp, Homo sapiens
tatttgggaattttt

SEQ ID NO: 1405308 - DNA, 15 bp, Homo sapiens
ttatttgggaatttt

SEQ ID NO: 1405309 - DNA, 15 bp, Homo sapiens
attatttgggaattt

SEQ ID NO: 1405310 - DNA, 15 bp, Homo sapiens
cattatttgggaatt

SEQ ID NO: 1405311 - DNA, 15 bp, Homo sapiens
acattatttgggaat

SEQ ID NO: 1405312 - DNA, 15 bp, Homo sapiens
aacattatttgggaa

SEQ ID NO: 1405313 - DNA, 15 bp, Homo sapiens
aaacattatttggga

SEQ ID NO: 1405314 - DNA, 15 bp, Homo sapiens
taaacattatttggg

SEQ ID NO: 1405315 - DNA, 15 bp, Homo sapiens
ttaaacattatttgg

SEQ ID NO: 1405316 - DNA, 15 bp, Homo sapiens
cttaaacattatttg

SEQ ID NO: 1405317 - DNA, 15 bp, Homo sapiens
tcttaaacattattt

SEQ ID NO: 1405318 - DNA, 15 bp, Homo sapiens
atcttaaacattatt

SEQ ID NO: 1405319 - DNA, 15 bp, Homo sapiens
tatcttaaacattat

SEQ ID NO: 1405320 - DNA, 15 bp, Homo sapiens
ttatcttaaacatta

SEQ ID NO: 1405321 - DNA, 15 bp, Homo sapiens
gttatcttaaacatt

SEQ ID NO: 1405322 - DNA, 15 bp, Homo sapiens
tgttatcttaaacat

SEQ ID NO: 1405323 - DNA, 15 bp, Homo sapiens
ttgttatcttaaaca

SEQ ID NO: 1405324 - DNA, 15 bp, Homo sapiens
attgttatcttaaac

SEQ ID NO: 1405325 - DNA, 15 bp, Homo sapiens
cattgttatcttaaa

SEQ ID NO: 1405326 - DNA, 15 bp, Homo sapiens
acattgttatcttaa

SEQ ID NO: 1405327 - DNA, 15 bp, Homo sapiens
tacattgttatctta

SEQ ID NO: 1405328 - DNA, 15 bp, Homo sapiens
ctacattgttatctt

SEQ ID NO: 1405329 - DNA, 15 bp, Homo sapiens
tctacattgttatct

SEQ ID NO: 1405330 - DNA, 15 bp, Homo sapiens
ttctacattgttatc

SEQ ID NO: 1405331 - DNA, 15 bp, Homo sapiens
tttctacattgttat

SEQ ID NO: 1405332 - DNA, 15 bp, Homo sapiens
atttctacattgtta

SEQ ID NO: 1405333 - DNA, 15 bp, Homo sapiens
aatttctacattgtt

SEQ ID NO: 1405334 - DNA, 15 bp, Homo sapiens
aaatttctacattgt

SEQ ID NO: 1405335 - DNA, 15 bp, Homo sapiens
aaaatttctacattg

SEQ ID NO: 1405336 - DNA, 15 bp, Homo sapiens
aaaaatttctacatt

SEQ ID NO: 1405337 - DNA, 15 bp, Homo sapiens
taaaaatttctacat

SEQ ID NO: 1405338 - DNA, 15 bp, Homo sapiens
ttaaaaatttctaca

SEQ ID NO: 1405339 - DNA, 15 bp, Homo sapiens
tttaaaaatttctac

SEQ ID NO: 1405340 - DNA, 15 bp, Homo sapiens
atttaaaaatttcta

SEQ ID NO: 1405341 - DNA, 15 bp, Homo sapiens
tatttaaaaatttct

SEQ ID NO: 1405342 - DNA, 15 bp, Homo sapiens
ttatttaaaaatttc

SEQ ID NO: 1405343 - DNA, 15 bp, Homo sapiens
attatttaaaaattt

SEQ ID NO: 1405344 - DNA, 15 bp, Homo sapiens
cattatttaaaaatt

SEQ ID NO: 1405345 - DNA, 15 bp, Homo sapiens
tcattatttaaaaat

SEQ ID NO: 1405346 - DNA, 15 bp, Homo sapiens
gtcattatttaaaaa

SEQ ID NO: 1405347 - DNA, 15 bp, Homo sapiens
tgtcattatttaaaa

SEQ ID NO: 1405348 - DNA, 15 bp, Homo sapiens
gtgtcattatttaaa

SEQ ID NO: 1405349 - DNA, 15 bp, Homo sapiens
ggtgtcattatttaa

SEQ ID NO: 1405350 - DNA, 15 bp, Homo sapiens
tggtgtcattattta

SEQ ID NO: 1405351 - DNA, 15 bp, Homo sapiens
ttggtgtcattattt

SEQ ID NO: 1405352 - DNA, 15 bp, Homo sapiens
tttggtgtcattatt

SEQ ID NO: 1405353 - DNA, 15 bp, Homo sapiens
ttttggtgtcattat

SEQ ID NO: 1405354 - DNA, 15 bp, Homo sapiens
tttttggtgtcatta

SEQ ID NO: 1405355 - DNA, 15 bp, Homo sapiens
ctttttggtgtcatt

SEQ ID NO: 1405356 - DNA, 15 bp, Homo sapiens
tctttttggtgtcat

SEQ ID NO: 1405357 - DNA, 15 bp, Homo sapiens
ctctttttggtgtca

SEQ ID NO: 1405358 - DNA, 15 bp, Homo sapiens
tctctttttggtgtc

SEQ ID NO: 1405359 - DNA, 15 bp, Homo sapiens
atctctttttggtgt

SEQ ID NO: 1405360 - DNA, 15 bp, Homo sapiens
aatctctttttggtg

SEQ ID NO: 1405361 - DNA, 15 bp, Homo sapiens
taatctctttttggt

SEQ ID NO: 1405362 - DNA, 15 bp, Homo sapiens
ttaatctctttttgg

SEQ ID NO: 1405363 - DNA, 15 bp, Homo sapiens
gttaatctctttttg

SEQ ID NO: 1405364 - DNA, 15 bp, Homo sapiens
agttaatctcttttt

SEQ ID NO: 1405365 - DNA, 15 bp, Homo sapiens
cagttaatctctttt

SEQ ID NO: 1405366 - DNA, 15 bp, Homo sapiens
gcagttaatctcttt

SEQ ID NO: 1405367 - DNA, 15 bp, Homo sapiens
agcagttaatctctt

SEQ ID NO: 1405368 - DNA, 15 bp, Homo sapiens
cagcagttaatctct

SEQ ID NO: 1405369 - DNA, 15 bp, Homo sapiens
gcagcagttaatctc

SEQ ID NO: 1405370 - DNA, 15 bp, Homo sapiens
ggcagcagttaatct

SEQ ID NO: 1405371 - DNA, 15 bp, Homo sapiens
aggcagcagttaatc

SEQ ID NO: 1405372 - DNA, 15 bp, Homo sapiens
aaggcagcagttaat

SEQ ID NO: 1405373 - DNA, 15 bp, Homo sapiens
gaaggcagcagttaa

SEQ ID NO: 1405374 - DNA, 15 bp, Homo sapiens
agaaggcagcagtta

SEQ ID NO: 1405375 - DNA, 15 bp, Homo sapiens
tagaaggcagcagtt

SEQ ID NO: 1405376 - DNA, 15 bp, Homo sapiens
ctagaaggcagcagt

SEQ ID NO: 1405377 - DNA, 15 bp, Homo sapiens
tctagaaggcagcag

SEQ ID NO: 1405378 - DNA, 15 bp, Homo sapiens
ttctagaaggcagca

SEQ ID NO: 1405379 - DNA, 15 bp, Homo sapiens
attctagaaggcagc

SEQ ID NO: 1405380 - DNA, 15 bp, Homo sapiens
gattctagaaggcag

SEQ ID NO: 1405381 - DNA, 15 bp, Homo sapiens
ggattctagaaggca

SEQ ID NO: 1405382 - DNA, 15 bp, Homo sapiens
gggattctagaaggc

SEQ ID NO: 1405383 - DNA, 15 bp, Homo sapiens
tgggattctagaagg

SEQ ID NO: 1405384 - DNA, 15 bp, Homo sapiens
ttgggattctagaag

SEQ ID NO: 1405385 - DNA, 15 bp, Homo sapiens
gttgggattctagaa

SEQ ID NO: 1405386 - DNA, 15 bp, Homo sapiens
tgttgggattctaga

SEQ ID NO: 1405387 - DNA, 15 bp, Homo sapiens
atgttgggattctag

SEQ ID NO: 1405388 - DNA, 15 bp, Homo sapiens
tatgttgggattcta

SEQ ID NO: 1405389 - DNA, 15 bp, Homo sapiens
ctatgttgggattct

SEQ ID NO: 1405390 - DNA, 15 bp, Homo sapiens
gctatgttgggattc

SEQ ID NO: 1405391 - DNA, 15 bp, Homo sapiens
tgctatgttgggatt

SEQ ID NO: 1405392 - DNA, 15 bp, Homo sapiens
ttgctatgttgggat

SEQ ID NO: 1405393 - DNA, 15 bp, Homo sapiens
gttgctatgttggga

SEQ ID NO: 1405394 - DNA, 15 bp, Homo sapiens
tgttgctatgttggg

SEQ ID NO: 1405395 - DNA, 15 bp, Homo sapiens
ctgttgctatgttgg

SEQ ID NO: 1405396 - DNA, 15 bp, Homo sapiens
gctgttgctatgttg

SEQ ID NO: 1405397 - DNA, 15 bp, Homo sapiens
ggctgttgctatgtt

SEQ ID NO: 1405398 - DNA, 15 bp, Homo sapiens
gggctgttgctatgt

SEQ ID NO: 1405399 - DNA, 15 bp, Homo sapiens
ggggctgttgctatg

SEQ ID NO: 1405400 - DNA, 15 bp, Homo sapiens
aggggctgttgctat

SEQ ID NO: 1405401 - DNA, 15 bp, Homo sapiens
aaggggctgttgcta

SEQ ID NO: 1405402 - DNA, 15 bp, Homo sapiens
gaaggggctgttgct

SEQ ID NO: 1405403 - DNA, 15 bp, Homo sapiens
tgaaggggctgttgc

SEQ ID NO: 1405404 - DNA, 15 bp, Homo sapiens
ttgaaggggctgttg

SEQ ID NO: 1405405 - DNA, 15 bp, Homo sapiens
cttgaaggggctgtt

SEQ ID NO: 1405406 - DNA, 15 bp, Homo sapiens
tcttgaaggggctgt

SEQ ID NO: 1405407 - DNA, 15 bp, Homo sapiens
ttcttgaaggggctg

SEQ ID NO: 1405408 - DNA, 15 bp, Homo sapiens
tttcttgaaggggct

SEQ ID NO: 1405409 - DNA, 15 bp, Homo sapiens
atttcttgaaggggc

SEQ ID NO: 1405410 - DNA, 15 bp, Homo sapiens
aatttcttgaagggg

SEQ ID NO: 1405411 - DNA, 15 bp, Homo sapiens
aaatttcttgaaggg

SEQ ID NO: 1405412 - DNA, 15 bp, Homo sapiens
taaatttcttgaagg

SEQ ID NO: 1405413 - DNA, 15 bp, Homo sapiens
ctaaatttcttgaag

SEQ ID NO: 1405414 - DNA, 15 bp, Homo sapiens
tctaaatttcttgaa

SEQ ID NO: 1405415 - DNA, 15 bp, Homo sapiens
atctaaatttcttga

SEQ ID NO: 1405416 - DNA, 15 bp, Homo sapiens
tatctaaatttcttg

SEQ ID NO: 1405417 - DNA, 15 bp, Homo sapiens
atatctaaatttctt

SEQ ID NO: 1405418 - DNA, 15 bp, Homo sapiens
tatatctaaatttct

SEQ ID NO: 1405419 - DNA, 15 bp, Homo sapiens
atatatctaaatttc

SEQ ID NO: 1405420 - DNA, 15 bp, Homo sapiens
tatatatctaaattt

SEQ ID NO: 1405421 - DNA, 15 bp, Homo sapiens
atatatatctaaatt

SEQ ID NO: 1405422 - DNA, 15 bp, Homo sapiens
tatatatatctaaat

SEQ ID NO: 1405423 - DNA, 15 bp, Homo sapiens
gtatatatatctaaa

SEQ ID NO: 1405424 - DNA, 15 bp, Homo sapiens
tgtatatatatctaa

SEQ ID NO: 1405425 - DNA, 15 bp, Homo sapiens
ttgtatatatatcta

SEQ ID NO: 1405426 - DNA, 15 bp, Homo sapiens
attgtatatatatct

SEQ ID NO: 1405427 - DNA, 15 bp, Homo sapiens
aattgtatatatatc

SEQ ID NO: 1405428 - DNA, 15 bp, Homo sapiens
taattgtatatatat

SEQ ID NO: 1405429 - DNA, 15 bp, Homo sapiens
ttaattgtatatata

SEQ ID NO: 1405430 - DNA, 15 bp, Homo sapiens
attaattgtatatat

SEQ ID NO: 1405431 - DNA, 15 bp, Homo sapiens
cattaattgtatata

SEQ ID NO: 1405432 - DNA, 15 bp, Homo sapiens
gcattaattgtatat

SEQ ID NO: 1405433 - DNA, 15 bp, Homo sapiens
agcattaattgtata

SEQ ID NO: 1405434 - DNA, 15 bp, Homo sapiens
gagcattaattgtat

SEQ ID NO: 1405435 - DNA, 15 bp, Homo sapiens
tgagcattaattgta

SEQ ID NO: 1405436 - DNA, 15 bp, Homo sapiens
atgagcattaattgt

SEQ ID NO: 1405437 - DNA, 15 bp, Homo sapiens
aatgagcattaattg

SEQ ID NO: 1405438 - DNA, 15 bp, Homo sapiens
taatgagcattaatt

SEQ ID NO: 1405439 - DNA, 15 bp, Homo sapiens
ataatgagcattaat

SEQ ID NO: 1405440 - DNA, 15 bp, Homo sapiens
aataatgagcattaa

SEQ ID NO: 1405441 - DNA, 15 bp, Homo sapiens
taataatgagcatta

SEQ ID NO: 1405442 - DNA, 15 bp, Homo sapiens
ttaataatgagcatt

SEQ ID NO: 1405443 - DNA, 15 bp, Homo sapiens
tttaataatgagcat

SEQ ID NO: 1405444 - DNA, 15 bp, Homo sapiens
ttttaataatgagca

SEQ ID NO: 1405445 - DNA, 15 bp, Homo sapiens
cttttaataatgagc

SEQ ID NO: 1405446 - DNA, 15 bp, Homo sapiens
tcttttaataatgag

SEQ ID NO: 1405447 - DNA, 15 bp, Homo sapiens
ctcttttaataatga

SEQ ID NO: 1405448 - DNA, 15 bp, Homo sapiens
tctcttttaataatg

SEQ ID NO: 1405449 - DNA, 15 bp, Homo sapiens
tttctcttttaataa

SEQ ID NO: 1405450 - DNA, 15 bp, Homo sapiens
ctttctcttttaata

SEQ ID NO: 1405451 - DNA, 15 bp, Homo sapiens
tctttctcttttaat

SEQ ID NO: 1405452 - DNA, 15 bp, Homo sapiens
atctttctcttttaa

SEQ ID NO: 1405453 - DNA, 15 bp, Homo sapiens
gatctttctctttta

SEQ ID NO: 1405454 - DNA, 15 bp, Homo sapiens
agatctttctctttt

SEQ ID NO: 1405455 - DNA, 15 bp, Homo sapiens
cagatctttctcttt

SEQ ID NO: 1405456 - DNA, 15 bp, Homo sapiens
ccagatctttctctt

SEQ ID NO: 1405457 - DNA, 15 bp, Homo sapiens
cccagatctttctct

SEQ ID NO: 1405458 - DNA, 15 bp, Homo sapiens
tcccagatctttctc

SEQ ID NO: 1405459 - DNA, 15 bp, Homo sapiens
gtcccagatctttct

SEQ ID NO: 1405460 - DNA, 15 bp, Homo sapiens
agtcccagatctttc

SEQ ID NO: 1405461 - DNA, 15 bp, Homo sapiens
tagtcccagatcttt

SEQ ID NO: 1405462 - DNA, 15 bp, Homo sapiens
ttagtcccagatctt

SEQ ID NO: 1405463 - DNA, 15 bp, Homo sapiens
attagtcccagatct

SEQ ID NO: 1405464 - DNA, 15 bp, Homo sapiens
tattagtcccagatc

SEQ ID NO: 1405465 - DNA, 15 bp, Homo sapiens
ttattagtcccagat

SEQ ID NO: 1405466 - DNA, 15 bp, Homo sapiens
attattagtcccaga

SEQ ID NO: 1405467 - DNA, 15 bp, Homo sapiens
cattattagtcccag

SEQ ID NO: 1405468 - DNA, 15 bp, Homo sapiens
acattattagtccca

SEQ ID NO: 1405469 - DNA, 15 bp, Homo sapiens
aacattattagtccc

SEQ ID NO: 1405470 - DNA, 15 bp, Homo sapiens
aaacattattagtcc

SEQ ID NO: 1405471 - DNA, 15 bp, Homo sapiens
aaaacattattagtc

SEQ ID NO: 1405472 - DNA, 15 bp, Homo sapiens
taaaacattattagt

SEQ ID NO: 1405473 - DNA, 15 bp, Homo sapiens
ttaaaacattattag

SEQ ID NO: 1405474 - DNA, 15 bp, Homo sapiens
tttaaaacattatta

SEQ ID NO: 1405475 - DNA, 15 bp, Homo sapiens
atttaaaacattatt

SEQ ID NO: 1405476 - DNA, 15 bp, Homo sapiens
catttaaaacattat

SEQ ID NO: 1405477 - DNA, 15 bp, Homo sapiens
gcatttaaaacatta

SEQ ID NO: 1405478 - DNA, 15 bp, Homo sapiens
agcatttaaaacatt

SEQ ID NO: 1405479 - DNA, 15 bp, Homo sapiens
aagcatttaaaacat

SEQ ID NO: 1405480 - DNA, 15 bp, Homo sapiens
aaagcatttaaaaca

SEQ ID NO: 1405481 - DNA, 15 bp, Homo sapiens
caaagcatttaaaac

SEQ ID NO: 1405482 - DNA, 15 bp, Homo sapiens
gcaaagcatttaaaa

SEQ ID NO: 1405483 - DNA, 15 bp, Homo sapiens
tgcaaagcatttaaa

SEQ ID NO: 1405484 - DNA, 15 bp, Homo sapiens
gtgcaaagcatttaa

SEQ ID NO: 1405485 - DNA, 15 bp, Homo sapiens
tgtgcaaagcattta

SEQ ID NO: 1405486 - DNA, 15 bp, Homo sapiens
atgtgcaaagcattt

SEQ ID NO: 1405487 - DNA, 15 bp, Homo sapiens
catgtgcaaagcatt

SEQ ID NO: 1405488 - DNA, 15 bp, Homo sapiens
acatgtgcaaagcat

SEQ ID NO: 1405489 - DNA, 15 bp, Homo sapiens
aacatgtgcaaagca

SEQ ID NO: 1405490 - DNA, 15 bp, Homo sapiens
taacatgtgcaaagc

SEQ ID NO: 1405491 - DNA, 15 bp, Homo sapiens
ttaacatgtgcaaag

SEQ ID NO: 1405492 - DNA, 15 bp, Homo sapiens
gttaacatgtgcaaa

SEQ ID NO: 1405493 - DNA, 15 bp, Homo sapiens
agttaacatgtgcaa

SEQ ID NO: 1405494 - DNA, 15 bp, Homo sapiens
tagttaacatgtgca

SEQ ID NO: 1405495 - DNA, 15 bp, Homo sapiens
ttagttaacatgtgc

SEQ ID NO: 1405496 - DNA, 15 bp, Homo sapiens
attagttaacatgtg

SEQ ID NO: 1405497 - DNA, 15 bp, Homo sapiens
aattagttaacatgt

SEQ ID NO: 1405498 - DNA, 15 bp, Homo sapiens
aaattagttaacatg

SEQ ID NO: 1405499 - DNA, 15 bp, Homo sapiens
gaaattagttaacat

SEQ ID NO: 1405500 - DNA, 15 bp, Homo sapiens
tgaaattagttaaca

SEQ ID NO: 1405501 - DNA, 15 bp, Homo sapiens
atgaaattagttaac

SEQ ID NO: 1405502 - DNA, 15 bp, Homo sapiens
aatgaaattagttaa

SEQ ID NO: 1405503 - DNA, 15 bp, Homo sapiens
taatgaaattagtta

SEQ ID NO: 1405504 - DNA, 15 bp, Homo sapiens
ataatgaaattagtt

SEQ ID NO: 1405505 - DNA, 15 bp, Homo sapiens
aataatgaaattagt

SEQ ID NO: 1405506 - DNA, 15 bp, Homo sapiens
aaataatgaaattag

SEQ ID NO: 1405507 - DNA, 15 bp, Homo sapiens
ttaaataatgaaatt

SEQ ID NO: 1405508 - DNA, 15 bp, Homo sapiens
gttaaataatgaaat

SEQ ID NO: 1405509 - DNA, 15 bp, Homo sapiens
tgttaaataatgaaa

SEQ ID NO: 1405510 - DNA, 15 bp, Homo sapiens
ttgttaaataatgaa

SEQ ID NO: 1405511 - DNA, 15 bp, Homo sapiens
gttgttaaataatga

SEQ ID NO: 1405512 - DNA, 15 bp, Homo sapiens
agttgttaaataatg

SEQ ID NO: 1405513 - DNA, 15 bp, Homo sapiens
gagttgttaaataat

SEQ ID NO: 1405514 - DNA, 15 bp, Homo sapiens
agagttgttaaataa

SEQ ID NO: 1405515 - DNA, 15 bp, Homo sapiens
cagagttgttaaata

SEQ ID NO: 1405516 - DNA, 15 bp, Homo sapiens
acagagttgttaaat

SEQ ID NO: 1405517 - DNA, 15 bp, Homo sapiens
aacagagttgttaaa

SEQ ID NO: 1405518 - DNA, 15 bp, Homo sapiens
caacagagttgttaa

SEQ ID NO: 1405519 - DNA, 15 bp, Homo sapiens
ccaacagagttgtta

SEQ ID NO: 1405520 - DNA, 15 bp, Homo sapiens
cccaacagagttgtt

SEQ ID NO: 1405521 - DNA, 15 bp, Homo sapiens
gcccaacagagttgt

SEQ ID NO: 1405522 - DNA, 15 bp, Homo sapiens
cgcccaacagagttg

SEQ ID NO: 1405523 - DNA, 15 bp, Homo sapiens
tcgcccaacagagtt

SEQ ID NO: 1405524 - DNA, 15 bp, Homo sapiens
ctcgcccaacagagt

SEQ ID NO: 1405525 - DNA, 15 bp, Homo sapiens
cctcgcccaacagag

SEQ ID NO: 1405526 - DNA, 15 bp, Homo sapiens
acctcgcccaacaga

SEQ ID NO: 1405527 - DNA, 15 bp, Homo sapiens
tacctcgcccaacag

SEQ ID NO: 1405528 - DNA, 15 bp, Homo sapiens
atacctcgcccaaca

SEQ ID NO: 1405529 - DNA, 15 bp, Homo sapiens
aatacctcgcccaac

SEQ ID NO: 1405530 - DNA, 15 bp, Homo sapiens
taatacctcgcccaa

SEQ ID NO: 1405531 - DNA, 15 bp, Homo sapiens
ataatacctcgccca

SEQ ID NO: 1405532 - DNA, 15 bp, Homo sapiens
aataatacctcgccc

SEQ ID NO: 1405533 - DNA, 15 bp, Homo sapiens
taataatacctcgcc

SEQ ID NO: 1405534 - DNA, 15 bp, Homo sapiens
ataataatacctcgc

SEQ ID NO: 1405535 - DNA, 15 bp, Homo sapiens
aataataatacctcg

SEQ ID NO: 1405536 - DNA, 15 bp, Homo sapiens
taataataatacctc

SEQ ID NO: 1405537 - DNA, 15 bp, Homo sapiens
gataataataatacc

SEQ ID NO: 1405538 - DNA, 15 bp, Homo sapiens
agataataataatac

SEQ ID NO: 1405539 - DNA, 15 bp, Homo sapiens
gagataataataata

SEQ ID NO: 1405540 - DNA, 15 bp, Homo sapiens
tgagataataataat

SEQ ID NO: 1405541 - DNA, 15 bp, Homo sapiens
atgagataataataa

SEQ ID NO: 1405542 - DNA, 15 bp, Homo sapiens
gatgagataataata

SEQ ID NO: 1405543 - DNA, 15 bp, Homo sapiens
ggatgagataataat

SEQ ID NO: 1405544 - DNA, 15 bp, Homo sapiens
aggatgagataataa

SEQ ID NO: 1405545 - DNA, 15 bp, Homo sapiens
taggatgagataata

SEQ ID NO: 1405546 - DNA, 15 bp, Homo sapiens
gtaggatgagataat

SEQ ID NO: 1405547 - DNA, 15 bp, Homo sapiens
tgtaggatgagataa

SEQ ID NO: 1405548 - DNA, 15 bp, Homo sapiens
ctgtaggatgagata

SEQ ID NO: 1405549 - DNA, 15 bp, Homo sapiens
tctgtaggatgagat

SEQ ID NO: 1405550 - DNA, 15 bp, Homo sapiens
atctgtaggatgaga

SEQ ID NO: 1405551 - DNA, 15 bp, Homo sapiens
catctgtaggatgag

SEQ ID NO: 1405552 - DNA, 15 bp, Homo sapiens
tcatctgtaggatga

SEQ ID NO: 1405553 - DNA, 15 bp, Homo sapiens
ctcatctgtaggatg

SEQ ID NO: 1405554 - DNA, 15 bp, Homo sapiens
tctcatctgtaggat

SEQ ID NO: 1405555 - DNA, 15 bp, Homo sapiens
ttctcatctgtagga

SEQ ID NO: 1405556 - DNA, 15 bp, Homo sapiens
attctcatctgtagg

SEQ ID NO: 1405557 - DNA, 15 bp, Homo sapiens
cattctcatctgtag

SEQ ID NO: 1405558 - DNA, 15 bp, Homo sapiens
acattctcatctgta

SEQ ID NO: 1405559 - DNA, 15 bp, Homo sapiens
aacattctcatctgt

SEQ ID NO: 1405560 - DNA, 15 bp, Homo sapiens
caacattctcatctg

SEQ ID NO: 1405561 - DNA, 15 bp, Homo sapiens
tcaacattctcatct

SEQ ID NO: 1405562 - DNA, 15 bp, Homo sapiens
ttcaacattctcatc

SEQ ID NO: 1405563 - DNA, 15 bp, Homo sapiens
cttcaacattctcat

SEQ ID NO: 1405564 - DNA, 15 bp, Homo sapiens
gcttcaacattctca

SEQ ID NO: 1405565 - DNA, 15 bp, Homo sapiens
agcttcaacattctc

SEQ ID NO: 1405566 - DNA, 15 bp, Homo sapiens
gagcttcaacattct

SEQ ID NO: 1405567 - DNA, 15 bp, Homo sapiens
tgagcttcaacattc

SEQ ID NO: 1405568 - DNA, 15 bp, Homo sapiens
ctgagcttcaacatt

SEQ ID NO: 1405569 - DNA, 15 bp, Homo sapiens
tctgagcttcaacat

SEQ ID NO: 1405570 - DNA, 15 bp, Homo sapiens
ctctgagcttcaaca

SEQ ID NO: 1405571 - DNA, 15 bp, Homo sapiens
tctctgagcttcaac

SEQ ID NO: 1405572 - DNA, 15 bp, Homo sapiens
atctctgagcttcaa

SEQ ID NO: 1405573 - DNA, 15 bp, Homo sapiens
catctctgagcttca

SEQ ID NO: 1405574 - DNA, 15 bp, Homo sapiens
acatctctgagcttc

SEQ ID NO: 1405575 - DNA, 15 bp, Homo sapiens
aacatctctgagctt

SEQ ID NO: 1405576 - DNA, 15 bp, Homo sapiens
taacatctctgagct

SEQ ID NO: 1405577 - DNA, 15 bp, Homo sapiens
ttaacatctctgagc

SEQ ID NO: 1405578 - DNA, 15 bp, Homo sapiens
tttaacatctctgag

SEQ ID NO: 1405579 - DNA, 15 bp, Homo sapiens
atttaacatctctga

SEQ ID NO: 1405580 - DNA, 15 bp, Homo sapiens
tatttaacatctctg

SEQ ID NO: 1405581 - DNA, 15 bp, Homo sapiens
attatttaacatctc

SEQ ID NO: 1405582 - DNA, 15 bp, Homo sapiens
aattatttaacatct

SEQ ID NO: 1405583 - DNA, 15 bp, Homo sapiens
aaattatttaacatc

SEQ ID NO: 1405584 - DNA, 15 bp, Homo sapiens
gaaattatttaacat

SEQ ID NO: 1405585 - DNA, 15 bp, Homo sapiens
ggggaaattatttaa

SEQ ID NO: 1405586 - DNA, 15 bp, Homo sapiens
tggggaaattattta

SEQ ID NO: 1405587 - DNA, 15 bp, Homo sapiens
ttggggaaattattt

SEQ ID NO: 1405588 - DNA, 15 bp, Homo sapiens
cttggggaaattatt

SEQ ID NO: 1405589 - DNA, 15 bp, Homo sapiens
ccttggggaaattat

SEQ ID NO: 1405590 - DNA, 15 bp, Homo sapiens
gccttggggaaatta

SEQ ID NO: 1405591 - DNA, 15 bp, Homo sapiens
agccttggggaaatt

SEQ ID NO: 1405592 - DNA, 15 bp, Homo sapiens
tagccttggggaaat

SEQ ID NO: 1405593 - DNA, 15 bp, Homo sapiens
atagccttggggaaa

SEQ ID NO: 1405594 - DNA, 15 bp, Homo sapiens
catagccttggggaa

SEQ ID NO: 1405595 - DNA, 15 bp, Homo sapiens
gcatagccttgggga

SEQ ID NO: 1405596 - DNA, 15 bp, Homo sapiens
tgcatagccttgggg

SEQ ID NO: 1405597 - DNA, 15 bp, Homo sapiens
gtgcatagccttggg

SEQ ID NO: 1405598 - DNA, 15 bp, Homo sapiens
tgtgcatagccttgg

SEQ ID NO: 1405599 - DNA, 15 bp, Homo sapiens
atgtgcatagccttg

SEQ ID NO: 1405600 - DNA, 15 bp, Homo sapiens
tatgtgcatagcctt

SEQ ID NO: 1405601 - DNA, 15 bp, Homo sapiens
gtatgtgcatagcct

SEQ ID NO: 1405602 - DNA, 15 bp, Homo sapiens
agtatgtgcatagcc

SEQ ID NO: 1405603 - DNA, 15 bp, Homo sapiens
tagtatgtgcatagc

SEQ ID NO: 1405604 - DNA, 15 bp, Homo sapiens
ttagtatgtgcatag

SEQ ID NO: 1405605 - DNA, 15 bp, Homo sapiens
cttagtatgtgcata

SEQ ID NO: 1405606 - DNA, 15 bp, Homo sapiens
tcttagtatgtgcat

SEQ ID NO: 1405607 - DNA, 15 bp, Homo sapiens
atcttagtatgtgca

SEQ ID NO: 1405608 - DNA, 15 bp, Homo sapiens
catcttagtatgtgc

SEQ ID NO: 1405609 - DNA, 15 bp, Homo sapiens
ccatcttagtatgtg

SEQ ID NO: 1405610 - DNA, 15 bp, Homo sapiens
accatcttagtatgt

SEQ ID NO: 1405611 - DNA, 15 bp, Homo sapiens
caccatcttagtatg

SEQ ID NO: 1405612 - DNA, 15 bp, Homo sapiens
tcaccatcttagtat

SEQ ID NO: 1405613 - DNA, 15 bp, Homo sapiens
ttcaccatcttagta

SEQ ID NO: 1405614 - DNA, 15 bp, Homo sapiens
cttcaccatcttagt

SEQ ID NO: 1405615 - DNA, 15 bp, Homo sapiens
tcttcaccatcttag

SEQ ID NO: 1405616 - DNA, 15 bp, Homo sapiens
ctcttcaccatctta

SEQ ID NO: 1405617 - DNA, 15 bp, Homo sapiens
gctcttcaccatctt

SEQ ID NO: 1405618 - DNA, 15 bp, Homo sapiens
agctcttcaccatct

SEQ ID NO: 1405619 - DNA, 15 bp, Homo sapiens
tagctcttcaccatc

SEQ ID NO: 1405620 - DNA, 15 bp, Homo sapiens
ttagctcttcaccat

SEQ ID NO: 1405621 - DNA, 15 bp, Homo sapiens
cttagctcttcacca

SEQ ID NO: 1405622 - DNA, 15 bp, Homo sapiens
tcttagctcttcacc

SEQ ID NO: 1405623 - DNA, 15 bp, Homo sapiens
ttcttagctcttcac

SEQ ID NO: 1405624 - DNA, 15 bp, Homo sapiens
tttcttagctcttca

SEQ ID NO: 1405625 - DNA, 15 bp, Homo sapiens
ttttcttagctcttc

SEQ ID NO: 1405626 - DNA, 15 bp, Homo sapiens
gttttcttagctctt

SEQ ID NO: 1405627 - DNA, 15 bp, Homo sapiens
tgttttcttagctct

SEQ ID NO: 1405628 - DNA, 15 bp, Homo sapiens
ctgttttcttagctc

SEQ ID NO: 1405629 - DNA, 15 bp, Homo sapiens
actgttttcttagct

SEQ ID NO: 1405630 - DNA, 15 bp, Homo sapiens
gactgttttcttagc

SEQ ID NO: 1405631 - DNA, 15 bp, Homo sapiens
agactgttttcttag

SEQ ID NO: 1405632 - DNA, 15 bp, Homo sapiens
cagactgttttctta

SEQ ID NO: 1405633 - DNA, 15 bp, Homo sapiens
acagactgttttctt

SEQ ID NO: 1405634 - DNA, 15 bp, Homo sapiens
tacagactgttttct

SEQ ID NO: 1405635 - DNA, 15 bp, Homo sapiens
ctacagactgttttc

SEQ ID NO: 1405636 - DNA, 15 bp, Homo sapiens
actacagactgtttt

SEQ ID NO: 1405637 - DNA, 15 bp, Homo sapiens
aactacagactgttt

SEQ ID NO: 1405638 - DNA, 15 bp, Homo sapiens
aaactacagactgtt

SEQ ID NO: 1405639 - DNA, 15 bp, Homo sapiens
aaaactacagactgt

SEQ ID NO: 1405640 - DNA, 15 bp, Homo sapiens
gaaaactacagactg

SEQ ID NO: 1405641 - DNA, 15 bp, Homo sapiens
ggaaaactacagact

SEQ ID NO: 1405642 - DNA, 15 bp, Homo sapiens
aggaaaactacagac

SEQ ID NO: 1405643 - DNA, 15 bp, Homo sapiens
caggaaaactacaga

SEQ ID NO: 1405644 - DNA, 15 bp, Homo sapiens
gcaggaaaactacag

SEQ ID NO: 1405645 - DNA, 15 bp, Homo sapiens
agcaggaaaactaca

SEQ ID NO: 1405646 - DNA, 15 bp, Homo sapiens
tagcaggaaaactac

SEQ ID NO: 1405647 - DNA, 15 bp, Homo sapiens
atagcaggaaaacta

SEQ ID NO: 1405648 - DNA, 15 bp, Homo sapiens
catagcaggaaaact

SEQ ID NO: 1405649 - DNA, 15 bp, Homo sapiens
ccatagcaggaaaac

SEQ ID NO: 1405650 - DNA, 15 bp, Homo sapiens
accatagcaggaaaa

SEQ ID NO: 1405651 - DNA, 15 bp, Homo sapiens
caccatagcaggaaa

SEQ ID NO: 1405652 - DNA, 15 bp, Homo sapiens
tcaccatagcaggaa

SEQ ID NO: 1405653 - DNA, 15 bp, Homo sapiens
gtcaccatagcagga

SEQ ID NO: 1405654 - DNA, 15 bp, Homo sapiens
ggtcaccatagcagg

SEQ ID NO: 1405655 - DNA, 15 bp, Homo sapiens
tggtcaccatagcag

SEQ ID NO: 1405656 - DNA, 15 bp, Homo sapiens
atggtcaccatagca

SEQ ID NO: 1405657 - DNA, 15 bp, Homo sapiens
aatggtcaccatagc

SEQ ID NO: 1405658 - DNA, 15 bp, Homo sapiens
aaatggtcaccatag

SEQ ID NO: 1405659 - DNA, 15 bp, Homo sapiens
gaaatggtcaccata

SEQ ID NO: 1405660 - DNA, 15 bp, Homo sapiens
ggaaatggtcaccat

SEQ ID NO: 1405661 - DNA, 15 bp, Homo sapiens
tggaaatggtcacca

SEQ ID NO: 1405662 - DNA, 15 bp, Homo sapiens
atggaaatggtcacc

SEQ ID NO: 1405663 - DNA, 15 bp, Homo sapiens
catggaaatggtcac

SEQ ID NO: 1405664 - DNA, 15 bp, Homo sapiens
tcatggaaatggtca

SEQ ID NO: 1405665 - DNA, 15 bp, Homo sapiens
gtcatggaaatggtc

SEQ ID NO: 1405666 - DNA, 15 bp, Homo sapiens
agtcatggaaatggt

SEQ ID NO: 1405667 - DNA, 15 bp, Homo sapiens
aagtcatggaaatgg

SEQ ID NO: 1405668 - DNA, 15 bp, Homo sapiens
aaagtcatggaaatg

SEQ ID NO: 1405669 - DNA, 15 bp, Homo sapiens
caaagtcatggaaat

SEQ ID NO: 1405670 - DNA, 15 bp, Homo sapiens
ccaaagtcatggaaa

SEQ ID NO: 1405671 - DNA, 15 bp, Homo sapiens
gccaaagtcatggaa

SEQ ID NO: 1405672 - DNA, 15 bp, Homo sapiens
tgccaaagtcatgga

SEQ ID NO: 1405673 - DNA, 15 bp, Homo sapiens
atgccaaagtcatgg

SEQ ID NO: 1405674 - DNA, 15 bp, Homo sapiens
gatgccaaagtcatg

SEQ ID NO: 1405675 - DNA, 15 bp, Homo sapiens
agatgccaaagtcat

SEQ ID NO: 1405676 - DNA, 15 bp, Homo sapiens
aagatgccaaagtca

SEQ ID NO: 1405677 - DNA, 15 bp, Homo sapiens
aaagatgccaaagtc

SEQ ID NO: 1405678 - DNA, 15 bp, Homo sapiens
aaaagatgccaaagt

SEQ ID NO: 1405679 - DNA, 15 bp, Homo sapiens
taaaagatgccaaag

SEQ ID NO: 1405680 - DNA, 15 bp, Homo sapiens
ctaaaagatgccaaa

SEQ ID NO: 1405681 - DNA, 15 bp, Homo sapiens
tctaaaagatgccaa

SEQ ID NO: 1405682 - DNA, 15 bp, Homo sapiens
atctaaaagatgcca

SEQ ID NO: 1405683 - DNA, 15 bp, Homo sapiens
tatctaaaagatgcc

SEQ ID NO: 1405684 - DNA, 15 bp, Homo sapiens
ttatctaaaagatgc

SEQ ID NO: 1405685 - DNA, 15 bp, Homo sapiens
gttatctaaaagatg

SEQ ID NO: 1405686 - DNA, 15 bp, Homo sapiens
tgttatctaaaagat

SEQ ID NO: 1405687 - DNA, 15 bp, Homo sapiens
gtgttatctaaaaga

SEQ ID NO: 1405688 - DNA, 15 bp, Homo sapiens
tgtgttatctaaaag

SEQ ID NO: 1405689 - DNA, 15 bp, Homo sapiens
ctgtgttatctaaaa

SEQ ID NO: 1405690 - DNA, 15 bp, Homo sapiens
cctgtgttatctaaa

SEQ ID NO: 1405691 - DNA, 15 bp, Homo sapiens
ccctgtgttatctaa

SEQ ID NO: 1405692 - DNA, 15 bp, Homo sapiens
cccctgtgttatcta

SEQ ID NO: 1405693 - DNA, 15 bp, Homo sapiens
ccccctgtgttatct

SEQ ID NO: 1405694 - DNA, 15 bp, Homo sapiens
tccccctgtgttatc

SEQ ID NO: 1405695 - DNA, 15 bp, Homo sapiens
atccccctgtgttat

SEQ ID NO: 1405696 - DNA, 15 bp, Homo sapiens
aatccccctgtgtta

SEQ ID NO: 1405697 - DNA, 15 bp, Homo sapiens
gaatccccctgtgtt

SEQ ID NO: 1405698 - DNA, 15 bp, Homo sapiens
agaatccccctgtgt

SEQ ID NO: 1405699 - DNA, 15 bp, Homo sapiens
cagaatccccctgtg

SEQ ID NO: 1405700 - DNA, 15 bp, Homo sapiens
tcagaatccccctgt

SEQ ID NO: 1405701 - DNA, 15 bp, Homo sapiens
ctcagaatccccctg

SEQ ID NO: 1405702 - DNA, 15 bp, Homo sapiens
cctcagaatccccct

SEQ ID NO: 1405703 - DNA, 15 bp, Homo sapiens
gcctcagaatccccc

SEQ ID NO: 1405704 - DNA, 15 bp, Homo sapiens
agcctcagaatcccc

SEQ ID NO: 1405705 - DNA, 15 bp, Homo sapiens
aagcctcagaatccc

SEQ ID NO: 1405706 - DNA, 15 bp, Homo sapiens
caagcctcagaatcc

SEQ ID NO: 1405707 - DNA, 15 bp, Homo sapiens
ccaagcctcagaatc

SEQ ID NO: 1405708 - DNA, 15 bp, Homo sapiens
tccaagcctcagaat

SEQ ID NO: 1405709 - DNA, 15 bp, Homo sapiens
ttccaagcctcagaa

SEQ ID NO: 1405710 - DNA, 15 bp, Homo sapiens
tttccaagcctcaga

SEQ ID NO: 1405711 - DNA, 15 bp, Homo sapiens
ttttccaagcctcag

SEQ ID NO: 1405712 - DNA, 15 bp, Homo sapiens
cttttccaagcctca

SEQ ID NO: 1405713 - DNA, 15 bp, Homo sapiens
tcttttccaagcctc

SEQ ID NO: 1405714 - DNA, 15 bp, Homo sapiens
atcttttccaagcct

SEQ ID NO: 1405715 - DNA, 15 bp, Homo sapiens
aatcttttccaagcc

SEQ ID NO: 1405716 - DNA, 15 bp, Homo sapiens
taatcttttccaagc

SEQ ID NO: 1405717 - DNA, 15 bp, Homo sapiens
gtaatcttttccaag

SEQ ID NO: 1405718 - DNA, 15 bp, Homo sapiens
tgtaatcttttccaa

SEQ ID NO: 1405719 - DNA, 15 bp, Homo sapiens
ctgtaatcttttcca

SEQ ID NO: 1405720 - DNA, 15 bp, Homo sapiens
cctgtaatcttttcc

SEQ ID NO: 1405721 - DNA, 15 bp, Homo sapiens
tcctgtaatcttttc

SEQ ID NO: 1405722 - DNA, 15 bp, Homo sapiens
ctcctgtaatctttt

SEQ ID NO: 1405723 - DNA, 15 bp, Homo sapiens
actcctgtaatcttt

SEQ ID NO: 1405724 - DNA, 15 bp, Homo sapiens
cactcctgtaatctt

SEQ ID NO: 1405725 - DNA, 15 bp, Homo sapiens
tcactcctgtaatct

SEQ ID NO: 1405726 - DNA, 15 bp, Homo sapiens
ttcactcctgtaatc

SEQ ID NO: 1405727 - DNA, 15 bp, Homo sapiens
cttcactcctgtaat

SEQ ID NO: 1405728 - DNA, 15 bp, Homo sapiens
tcttcactcctgtaa

SEQ ID NO: 1405729 - DNA, 15 bp, Homo sapiens
ttcttcactcctgta

SEQ ID NO: 1405730 - DNA, 15 bp, Homo sapiens
tttcttcactcctgt

SEQ ID NO: 1405731 - DNA, 15 bp, Homo sapiens
ttttcttcactcctg

SEQ ID NO: 1405732 - DNA, 15 bp, Homo sapiens
tttttcttcactcct

SEQ ID NO: 1405733 - DNA, 15 bp, Homo sapiens
ctttttcttcactcc

SEQ ID NO: 1405734 - DNA, 15 bp, Homo sapiens
gctttttcttcactc

SEQ ID NO: 1405735 - DNA, 15 bp, Homo sapiens
tgctttttcttcact

SEQ ID NO: 1405736 - DNA, 15 bp, Homo sapiens
atgctttttcttcac

SEQ ID NO: 1405737 - DNA, 15 bp, Homo sapiens
aatgctttttcttca

SEQ ID NO: 1405738 - DNA, 15 bp, Homo sapiens
caatgctttttcttc

SEQ ID NO: 1405739 - DNA, 15 bp, Homo sapiens
tcaatgctttttctt

SEQ ID NO: 1405740 - DNA, 15 bp, Homo sapiens
ttcaatgctttttct

SEQ ID NO: 1405741 - DNA, 15 bp, Homo sapiens
gttcaatgctttttc

SEQ ID NO: 1405742 - DNA, 15 bp, Homo sapiens
agttcaatgcttttt

SEQ ID NO: 1405743 - DNA, 15 bp, Homo sapiens
cagttcaatgctttt

SEQ ID NO: 1405744 - DNA, 15 bp, Homo sapiens
ccagttcaatgcttt

SEQ ID NO: 1405745 - DNA, 15 bp, Homo sapiens
tccagttcaatgctt

SEQ ID NO: 1405746 - DNA, 15 bp, Homo sapiens
ttccagttcaatgct

SEQ ID NO: 1405747 - DNA, 15 bp, Homo sapiens
cttccagttcaatgc

SEQ ID NO: 1405748 - DNA, 15 bp, Homo sapiens
acttccagttcaatg

SEQ ID NO: 1405749 - DNA, 15 bp, Homo sapiens
gacttccagttcaat

SEQ ID NO: 1405750 - DNA, 15 bp, Homo sapiens
tgacttccagttcaa

SEQ ID NO: 1405751 - DNA, 15 bp, Homo sapiens
ttgacttccagttca

SEQ ID NO: 1405752 - DNA, 15 bp, Homo sapiens
tttgacttccagttc

SEQ ID NO: 1405753 - DNA, 15 bp, Homo sapiens
ctttgacttccagtt

SEQ ID NO: 1405754 - DNA, 15 bp, Homo sapiens
tctttgacttccagt

SEQ ID NO: 1405755 - DNA, 15 bp, Homo sapiens
gtctttgacttccag

SEQ ID NO: 1405756 - DNA, 15 bp, Homo sapiens
agtctttgacttcca

SEQ ID NO: 1405757 - DNA, 15 bp, Homo sapiens
aagtctttgacttcc

SEQ ID NO: 1405758 - DNA, 15 bp, Homo sapiens
gaagtctttgacttc

SEQ ID NO: 1405759 - DNA, 15 bp, Homo sapiens
tgaagtctttgactt

SEQ ID NO: 1405760 - DNA, 15 bp, Homo sapiens
atgaagtctttgact

SEQ ID NO: 1405761 - DNA, 15 bp, Homo sapiens
aatgaagtctttgac

SEQ ID NO: 1405762 - DNA, 15 bp, Homo sapiens
caatgaagtctttga

SEQ ID NO: 1405763 - DNA, 15 bp, Homo sapiens
ccaatgaagtctttg

SEQ ID NO: 1405764 - DNA, 15 bp, Homo sapiens
tccaatgaagtcttt

SEQ ID NO: 1405765 - DNA, 15 bp, Homo sapiens
ctccaatgaagtctt

SEQ ID NO: 1405766 - DNA, 15 bp, Homo sapiens
tctccaatgaagtct

SEQ ID NO: 1405767 - DNA, 15 bp, Homo sapiens
atctccaatgaagtc

SEQ ID NO: 1405768 - DNA, 15 bp, Homo sapiens
tatctccaatgaagt

SEQ ID NO: 1405769 - DNA, 15 bp, Homo sapiens
gtatctccaatgaag

SEQ ID NO: 1405770 - DNA, 15 bp, Homo sapiens
cgtatctccaatgaa

SEQ ID NO: 1405771 - DNA, 15 bp, Homo sapiens
ccgtatctccaatga

SEQ ID NO: 1405772 - DNA, 15 bp, Homo sapiens
accgtatctccaatg

SEQ ID NO: 1405773 - DNA, 15 bp, Homo sapiens
caccgtatctccaat

SEQ ID NO: 1405774 - DNA, 15 bp, Homo sapiens
tcaccgtatctccaa

SEQ ID NO: 1405775 - DNA, 15 bp, Homo sapiens
gtcaccgtatctcca

SEQ ID NO: 1405776 - DNA, 15 bp, Homo sapiens
agtcaccgtatctcc

SEQ ID NO: 1405777 - DNA, 15 bp, Homo sapiens
tagtcaccgtatctc

SEQ ID NO: 1405778 - DNA, 15 bp, Homo sapiens
ctagtcaccgtatct

SEQ ID NO: 1405779 - DNA, 15 bp, Homo sapiens
tctagtcaccgtatc

SEQ ID NO: 1405780 - DNA, 15 bp, Homo sapiens
atctagtcaccgtat

SEQ ID NO: 1405781 - DNA, 15 bp, Homo sapiens
catctagtcaccgta

SEQ ID NO: 1405782 - DNA, 15 bp, Homo sapiens
tcatctagtcaccgt

SEQ ID NO: 1405783 - DNA, 15 bp, Homo sapiens
gtcatctagtcaccg

SEQ ID NO: 1405784 - DNA, 15 bp, Homo sapiens
agtcatctagtcacc

SEQ ID NO: 1405785 - DNA, 15 bp, Homo sapiens
aagtcatctagtcac

SEQ ID NO: 1405786 - DNA, 15 bp, Homo sapiens
aaagtcatctagtca

SEQ ID NO: 1405787 - DNA, 15 bp, Homo sapiens
taaagtcatctagtc

SEQ ID NO: 1405788 - DNA, 15 bp, Homo sapiens
ttaaagtcatctagt

SEQ ID NO: 1405789 - DNA, 15 bp, Homo sapiens
tttaaagtcatctag

SEQ ID NO: 1405790 - DNA, 15 bp, Homo sapiens
ctttaaagtcatcta

SEQ ID NO: 1405791 - DNA, 15 bp, Homo sapiens
actttaaagtcatct

SEQ ID NO: 1405792 - DNA, 15 bp, Homo sapiens
aactttaaagtcatc

SEQ ID NO: 1405793 - DNA, 15 bp, Homo sapiens
gaactttaaagtcat

SEQ ID NO: 1405794 - DNA, 15 bp, Homo sapiens
agaactttaaagtca

SEQ ID NO: 1405795 - DNA, 15 bp, Homo sapiens
gagaactttaaagtc

SEQ ID NO: 1405796 - DNA, 15 bp, Homo sapiens
tgagaactttaaagt

SEQ ID NO: 1405797 - DNA, 15 bp, Homo sapiens
ttgagaactttaaag

SEQ ID NO: 1405798 - DNA, 15 bp, Homo sapiens
attgagaactttaaa

SEQ ID NO: 1405799 - DNA, 15 bp, Homo sapiens
aattgagaactttaa

SEQ ID NO: 1405800 - DNA, 15 bp, Homo sapiens
taattgagaacttta

SEQ ID NO: 1405801 - DNA, 15 bp, Homo sapiens
ctaattgagaacttt

SEQ ID NO: 1405802 - DNA, 15 bp, Homo sapiens
actaattgagaactt

SEQ ID NO: 1405803 - DNA, 15 bp, Homo sapiens
gactaattgagaact

SEQ ID NO: 1405804 - DNA, 15 bp, Homo sapiens
agactaattgagaac

SEQ ID NO: 1405805 - DNA, 15 bp, Homo sapiens
aagactaattgagaa

SEQ ID NO: 1405806 - DNA, 15 bp, Homo sapiens
aaagactaattgaga

SEQ ID NO: 1405807 - DNA, 15 bp, Homo sapiens
aaaagactaattgag

SEQ ID NO: 1405808 - DNA, 15 bp, Homo sapiens
caaaagactaattga

SEQ ID NO: 1405809 - DNA, 15 bp, Homo sapiens
tcaaaagactaattg

SEQ ID NO: 1405810 - DNA, 15 bp, Homo sapiens
gtcaaaagactaatt

SEQ ID NO: 1405811 - DNA, 15 bp, Homo sapiens
agtcaaaagactaat

SEQ ID NO: 1405812 - DNA, 15 bp, Homo sapiens
aagtcaaaagactaa

SEQ ID NO: 1405813 - DNA, 15 bp, Homo sapiens
gaagtcaaaagacta

SEQ ID NO: 1405814 - DNA, 15 bp, Homo sapiens
agaagtcaaaagact

SEQ ID NO: 1405815 - DNA, 15 bp, Homo sapiens
aagaagtcaaaagac

SEQ ID NO: 1405816 - DNA, 15 bp, Homo sapiens
aaagaagtcaaaaga

SEQ ID NO: 1405817 - DNA, 15 bp, Homo sapiens
caaagaagtcaaaag

SEQ ID NO: 1405818 - DNA, 15 bp, Homo sapiens
tcaaagaagtcaaaa

SEQ ID NO: 1405819 - DNA, 15 bp, Homo sapiens
gtcaaagaagtcaaa

SEQ ID NO: 1405820 - DNA, 15 bp, Homo sapiens
agtcaaagaagtcaa

SEQ ID NO: 1405821 - DNA, 15 bp, Homo sapiens
cagtcaaagaagtca

SEQ ID NO: 1405822 - DNA, 15 bp, Homo sapiens
acagtcaaagaagtc

SEQ ID NO: 1405823 - DNA, 15 bp, Homo sapiens
tacagtcaaagaagt

SEQ ID NO: 1405824 - DNA, 15 bp, Homo sapiens
ttacagtcaaagaag

SEQ ID NO: 1405825 - DNA, 15 bp, Homo sapiens
tttacagtcaaagaa

SEQ ID NO: 1405826 - DNA, 15 bp, Homo sapiens
ttttacagtcaaaga

SEQ ID NO: 1405827 - DNA, 15 bp, Homo sapiens
attttacagtcaaag

SEQ ID NO: 1405828 - DNA, 15 bp, Homo sapiens
aattttacagtcaaa

SEQ ID NO: 1405829 - DNA, 15 bp, Homo sapiens
taattttacagtcaa

SEQ ID NO: 1405830 - DNA, 15 bp, Homo sapiens
ctaattttacagtca

SEQ ID NO: 1405831 - DNA, 15 bp, Homo sapiens
cctaattttacagtc

SEQ ID NO: 1405832 - DNA, 15 bp, Homo sapiens
tcctaattttacagt

SEQ ID NO: 1405833 - DNA, 15 bp, Homo sapiens
ctcctaattttacag

SEQ ID NO: 1405834 - DNA, 15 bp, Homo sapiens
cctcctaattttaca

SEQ ID NO: 1405835 - DNA, 15 bp, Homo sapiens
acctcctaattttac

SEQ ID NO: 1405836 - DNA, 15 bp, Homo sapiens
cacctcctaatttta

SEQ ID NO: 1405837 - DNA, 15 bp, Homo sapiens
tcacctcctaatttt

SEQ ID NO: 1405838 - DNA, 15 bp, Homo sapiens
ttcacctcctaattt

SEQ ID NO: 1405839 - DNA, 15 bp, Homo sapiens
cttcacctcctaatt

SEQ ID NO: 1405840 - DNA, 15 bp, Homo sapiens
acttcacctcctaat

SEQ ID NO: 1405841 - DNA, 15 bp, Homo sapiens
gacttcacctcctaa

SEQ ID NO: 1405842 - DNA, 15 bp, Homo sapiens
tgacttcacctccta

SEQ ID NO: 1405843 - DNA, 15 bp, Homo sapiens
ctgacttcacctcct

SEQ ID NO: 1405844 - DNA, 15 bp, Homo sapiens
gctgacttcacctcc

SEQ ID NO: 1405845 - DNA, 15 bp, Homo sapiens
agctgacttcacctc

SEQ ID NO: 1405846 - DNA, 15 bp, Homo sapiens
cagctgacttcacct

SEQ ID NO: 1405847 - DNA, 15 bp, Homo sapiens
tcagctgacttcacc

SEQ ID NO: 1405848 - DNA, 15 bp, Homo sapiens
atcagctgacttcac

SEQ ID NO: 1405849 - DNA, 15 bp, Homo sapiens
gatcagctgacttca

SEQ ID NO: 1405850 - DNA, 15 bp, Homo sapiens
tgatcagctgacttc

SEQ ID NO: 1405851 - DNA, 15 bp, Homo sapiens
atgatcagctgactt

SEQ ID NO: 1405852 - DNA, 15 bp, Homo sapiens
gatgatcagctgact

SEQ ID NO: 1405853 - DNA, 15 bp, Homo sapiens
tgatgatcagctgac

SEQ ID NO: 1405854 - DNA, 15 bp, Homo sapiens
ttgatgatcagctga

SEQ ID NO: 1405855 - DNA, 15 bp, Homo sapiens
cttgatgatcagctg

SEQ ID NO: 1405856 - DNA, 15 bp, Homo sapiens
ccttgatgatcagct

SEQ ID NO: 1405857 - DNA, 15 bp, Homo sapiens
accttgatgatcagc

SEQ ID NO: 1405858 - DNA, 15 bp, Homo sapiens
gaccttgatgatcag

SEQ ID NO: 1405859 - DNA, 15 bp, Homo sapiens
ggaccttgatgatca

SEQ ID NO: 1405860 - DNA, 15 bp, Homo sapiens
gggaccttgatgatc

SEQ ID NO: 1405861 - DNA, 15 bp, Homo sapiens
agggaccttgatgat

SEQ ID NO: 1405862 - DNA, 15 bp, Homo sapiens
aagggaccttgatga

SEQ ID NO: 1405863 - DNA, 15 bp, Homo sapiens
aaagggaccttgatg

SEQ ID NO: 1405864 - DNA, 15 bp, Homo sapiens
aaaagggaccttgat

SEQ ID NO: 1405865 - DNA, 15 bp, Homo sapiens
taaaagggaccttga

SEQ ID NO: 1405866 - DNA, 15 bp, Homo sapiens
ttaaaagggaccttg

SEQ ID NO: 1405867 - DNA, 15 bp, Homo sapiens
gttaaaagggacctt

SEQ ID NO: 1405868 - DNA, 15 bp, Homo sapiens
tgttaaaagggacct

SEQ ID NO: 1405869 - DNA, 15 bp, Homo sapiens
gtgttaaaagggacc

SEQ ID NO: 1405870 - DNA, 15 bp, Homo sapiens
cgtgttaaaagggac

SEQ ID NO: 1405871 - DNA, 15 bp, Homo sapiens
tcgtgttaaaaggga

SEQ ID NO: 1405872 - DNA, 15 bp, Homo sapiens
ttcgtgttaaaaggg

SEQ ID NO: 1405873 - DNA, 15 bp, Homo sapiens
gttcgtgttaaaagg

SEQ ID NO: 1405874 - DNA, 15 bp, Homo sapiens
tgttcgtgttaaaag

SEQ ID NO: 1405875 - DNA, 15 bp, Homo sapiens
atgttcgtgttaaaa

SEQ ID NO: 1405876 - DNA, 15 bp, Homo sapiens
aatgttcgtgttaaa

SEQ ID NO: 1405877 - DNA, 15 bp, Homo sapiens
gaatgttcgtgttaa

SEQ ID NO: 1405878 - DNA, 15 bp, Homo sapiens
ggaatgttcgtgtta

SEQ ID NO: 1405879 - DNA, 15 bp, Homo sapiens
tggaatgttcgtgtt

SEQ ID NO: 1405880 - DNA, 15 bp, Homo sapiens
atggaatgttcgtgt

SEQ ID NO: 1405881 - DNA, 15 bp, Homo sapiens
gatggaatgttcgtg

SEQ ID NO: 1405882 - DNA, 15 bp, Homo sapiens
ggatggaatgttcgt

SEQ ID NO: 1405883 - DNA, 15 bp, Homo sapiens
aggatggaatgttcg

SEQ ID NO: 1405884 - DNA, 15 bp, Homo sapiens
taggatggaatgttc

SEQ ID NO: 1405885 - DNA, 15 bp, Homo sapiens
ctaggatggaatgtt

SEQ ID NO: 1405886 - DNA, 15 bp, Homo sapiens
cctaggatggaatgt

SEQ ID NO: 1405887 - DNA, 15 bp, Homo sapiens
acctaggatggaatg

SEQ ID NO: 1405888 - DNA, 15 bp, Homo sapiens
tacctaggatggaat

SEQ ID NO: 1405889 - DNA, 15 bp, Homo sapiens
atacctaggatggaa

SEQ ID NO: 1405890 - DNA, 15 bp, Homo sapiens
catacctaggatgga

SEQ ID NO: 1405891 - DNA, 15 bp, Homo sapiens
acatacctaggatgg

SEQ ID NO: 1405892 - DNA, 15 bp, Homo sapiens
cacatacctaggatg

SEQ ID NO: 1405893 - DNA, 15 bp, Homo sapiens
ccacatacctaggat

SEQ ID NO: 1405894 - DNA, 15 bp, Homo sapiens
tccacatacctagga

SEQ ID NO: 1405895 - DNA, 15 bp, Homo sapiens
ttccacatacctagg

SEQ ID NO: 1405896 - DNA, 15 bp, Homo sapiens
tttccacatacctag

SEQ ID NO: 1405897 - DNA, 15 bp, Homo sapiens
ctttccacataccta

SEQ ID NO: 1405898 - DNA, 15 bp, Homo sapiens
tctttccacatacct

SEQ ID NO: 1405899 - DNA, 15 bp, Homo sapiens
ctctttccacatacc

SEQ ID NO: 1405900 - DNA, 15 bp, Homo sapiens
cctctttccacatac

SEQ ID NO: 1405901 - DNA, 15 bp, Homo sapiens
tcctctttccacata

SEQ ID NO: 1405902 - DNA, 15 bp, Homo sapiens
ttcctctttccacat

SEQ ID NO: 1405903 - DNA, 15 bp, Homo sapiens
attcctctttccaca

SEQ ID NO: 1405904 - DNA, 15 bp, Homo sapiens
cattcctctttccac

SEQ ID NO: 1405905 - DNA, 15 bp, Homo sapiens
tcattcctctttcca

SEQ ID NO: 1405906 - DNA, 15 bp, Homo sapiens
ttcattcctctttcc

SEQ ID NO: 1405907 - DNA, 15 bp, Homo sapiens
attcattcctctttc

SEQ ID NO: 1405908 - DNA, 15 bp, Homo sapiens
tattcattcctcttt

SEQ ID NO: 1405909 - DNA, 15 bp, Homo sapiens
gtattcattcctctt

SEQ ID NO: 1405910 - DNA, 15 bp, Homo sapiens
ggtattcattcctct

SEQ ID NO: 1405911 - DNA, 15 bp, Homo sapiens
tggtattcattcctc

SEQ ID NO: 1405912 - DNA, 15 bp, Homo sapiens
atggtattcattcct

SEQ ID NO: 1405913 - DNA, 15 bp, Homo sapiens
aatggtattcattcc

SEQ ID NO: 1405914 - DNA, 15 bp, Homo sapiens
aaatggtattcattc

SEQ ID NO: 1405915 - DNA, 15 bp, Homo sapiens
caaatggtattcatt

SEQ ID NO: 1405916 - DNA, 15 bp, Homo sapiens
gcaaatggtattcat

SEQ ID NO: 1405917 - DNA, 15 bp, Homo sapiens
agcaaatggtattca

SEQ ID NO: 1405918 - DNA, 15 bp, Homo sapiens
tagcaaatggtattc

SEQ ID NO: 1405919 - DNA, 15 bp, Homo sapiens
ttagcaaatggtatt

SEQ ID NO: 1405920 - DNA, 15 bp, Homo sapiens
gttagcaaatggtat

SEQ ID NO: 1405921 - DNA, 15 bp, Homo sapiens
ggttagcaaatggta

SEQ ID NO: 1405922 - DNA, 15 bp, Homo sapiens
aggttagcaaatggt

SEQ ID NO: 1405923 - DNA, 15 bp, Homo sapiens
aaggttagcaaatgg

SEQ ID NO: 1405924 - DNA, 15 bp, Homo sapiens
gaaggttagcaaatg

SEQ ID NO: 1405925 - DNA, 15 bp, Homo sapiens
tgaaggttagcaaat

SEQ ID NO: 1405926 - DNA, 15 bp, Homo sapiens
ctgaaggttagcaaa

SEQ ID NO: 1405927 - DNA, 15 bp, Homo sapiens
tctgaaggttagcaa

SEQ ID NO: 1405928 - DNA, 15 bp, Homo sapiens
ctctgaaggttagca

SEQ ID NO: 1405929 - DNA, 15 bp, Homo sapiens
gctctgaaggttagc

SEQ ID NO: 1405930 - DNA, 15 bp, Homo sapiens
tgctctgaaggttag

SEQ ID NO: 1405931 - DNA, 15 bp, Homo sapiens
gtgctctgaaggtta

SEQ ID NO: 1405932 - DNA, 15 bp, Homo sapiens
tgtgctctgaaggtt

SEQ ID NO: 1405933 - DNA, 15 bp, Homo sapiens
ctgtgctctgaaggt

SEQ ID NO: 1405934 - DNA, 15 bp, Homo sapiens
cctgtgctctgaagg

SEQ ID NO: 1405935 - DNA, 15 bp, Homo sapiens
acctgtgctctgaag

SEQ ID NO: 1405936 - DNA, 15 bp, Homo sapiens
gacctgtgctctgaa

SEQ ID NO: 1405937 - DNA, 15 bp, Homo sapiens
agacctgtgctctga

SEQ ID NO: 1405938 - DNA, 15 bp, Homo sapiens
atcagacctgtgctc

SEQ ID NO: 1405939 - DNA, 15 bp, Homo sapiens
aatcagacctgtgct

SEQ ID NO: 1405940 - DNA, 15 bp, Homo sapiens
gaatcagacctgtgc

SEQ ID NO: 1405941 - DNA, 15 bp, Homo sapiens
agaatcagacctgtg

SEQ ID NO: 1405942 - DNA, 15 bp, Homo sapiens
gagaatcagacctgt

SEQ ID NO: 1405943 - DNA, 15 bp, Homo sapiens
tgagaatcagacctg

SEQ ID NO: 1405944 - DNA, 15 bp, Homo sapiens
ttgagaatcagacct

SEQ ID NO: 1405945 - DNA, 15 bp, Homo sapiens
tttgagaatcagacc

SEQ ID NO: 1405946 - DNA, 15 bp, Homo sapiens
gtttgagaatcagac

SEQ ID NO: 1405947 - DNA, 15 bp, Homo sapiens
tgtttgagaatcaga

SEQ ID NO: 1405948 - DNA, 15 bp, Homo sapiens
ctgtttgagaatcag

SEQ ID NO: 1405949 - DNA, 15 bp, Homo sapiens
tctgtttgagaatca

SEQ ID NO: 1405950 - DNA, 15 bp, Homo sapiens
ttctgtttgagaatc

SEQ ID NO: 1405951 - DNA, 15 bp, Homo sapiens
attctgtttgagaat

SEQ ID NO: 1405952 - DNA, 15 bp, Homo sapiens
gattctgtttgagaa

SEQ ID NO: 1405953 - DNA, 15 bp, Homo sapiens
agattctgtttgaga

SEQ ID NO: 1405954 - DNA, 15 bp, Homo sapiens
cagattctgtttgag

SEQ ID NO: 1405955 - DNA, 15 bp, Homo sapiens
acagattctgtttga

SEQ ID NO: 1405956 - DNA, 15 bp, Homo sapiens
tacagattctgtttg

SEQ ID NO: 1405957 - DNA, 15 bp, Homo sapiens
atacagattctgttt

SEQ ID NO: 1405958 - DNA, 15 bp, Homo sapiens
tatacagattctgtt

SEQ ID NO: 1405959 - DNA, 15 bp, Homo sapiens
atatacagattctgt

SEQ ID NO: 1405960 - DNA, 15 bp, Homo sapiens
tatatacagattctg

SEQ ID NO: 1405961 - DNA, 15 bp, Homo sapiens
atatatacagattct

SEQ ID NO: 1405962 - DNA, 15 bp, Homo sapiens
aatatatacagattc

SEQ ID NO: 1405963 - DNA, 15 bp, Homo sapiens
taatatatacagatt

SEQ ID NO: 1405964 - DNA, 15 bp, Homo sapiens
ttaatatatacagat

SEQ ID NO: 1405965 - DNA, 15 bp, Homo sapiens
attaatatatacaga

SEQ ID NO: 1405966 - DNA, 15 bp, Homo sapiens
gattaatatatacag

SEQ ID NO: 1405967 - DNA, 15 bp, Homo sapiens
agattaatatataca

SEQ ID NO: 1405968 - DNA, 15 bp, Homo sapiens
tagattaatatatac

SEQ ID NO: 1405969 - DNA, 15 bp, Homo sapiens
atagattaatatata

SEQ ID NO: 1405970 - DNA, 15 bp, Homo sapiens
catagattaatatat

SEQ ID NO: 1405971 - DNA, 15 bp, Homo sapiens
ccatagattaatata

SEQ ID NO: 1405972 - DNA, 15 bp, Homo sapiens
tccatagattaatat

SEQ ID NO: 1405973 - DNA, 15 bp, Homo sapiens
atccatagattaata

SEQ ID NO: 1405974 - DNA, 15 bp, Homo sapiens
aatccatagattaat

SEQ ID NO: 1405975 - DNA, 15 bp, Homo sapiens
caatccatagattaa

SEQ ID NO: 1405976 - DNA, 15 bp, Homo sapiens
tcaatccatagatta

SEQ ID NO: 1405977 - DNA, 15 bp, Homo sapiens
ttcaatccatagatt

SEQ ID NO: 1405978 - DNA, 15 bp, Homo sapiens
tttcaatccatagat

SEQ ID NO: 1405979 - DNA, 15 bp, Homo sapiens
ttttcaatccataga

SEQ ID NO: 1405980 - DNA, 15 bp, Homo sapiens
tttttcaatccatag

SEQ ID NO: 1405981 - DNA, 15 bp, Homo sapiens
gtttttcaatccata

SEQ ID NO: 1405982 - DNA, 15 bp, Homo sapiens
tgtttttcaatccat

SEQ ID NO: 1405983 - DNA, 15 bp, Homo sapiens
ctgtttttcaatcca

SEQ ID NO: 1405984 - DNA, 15 bp, Homo sapiens
gctgtttttcaatcc

SEQ ID NO: 1405985 - DNA, 15 bp, Homo sapiens
agctgtttttcaatc

SEQ ID NO: 1405986 - DNA, 15 bp, Homo sapiens
aagctgtttttcaat

SEQ ID NO: 1405987 - DNA, 15 bp, Homo sapiens
aaagctgtttttcaa

SEQ ID NO: 1405988 - DNA, 15 bp, Homo sapiens
aaaagctgtttttca

SEQ ID NO: 1405989 - DNA, 15 bp, Homo sapiens
gaaaagctgtttttc

SEQ ID NO: 1405990 - DNA, 15 bp, Homo sapiens
agaaaagctgttttt

SEQ ID NO: 1405991 - DNA, 15 bp, Homo sapiens
tagaaaagctgtttt

SEQ ID NO: 1405992 - DNA, 15 bp, Homo sapiens
atagaaaagctgttt

SEQ ID NO: 1405993 - DNA, 15 bp, Homo sapiens
aatagaaaagctgtt

SEQ ID NO: 1405994 - DNA, 15 bp, Homo sapiens
caatagaaaagctgt

SEQ ID NO: 1405995 - DNA, 15 bp, Homo sapiens
tcaatagaaaagctg

SEQ ID NO: 1405996 - DNA, 15 bp, Homo sapiens
atcaatagaaaagct

SEQ ID NO: 1405997 - DNA, 15 bp, Homo sapiens
tatcaatagaaaagc

SEQ ID NO: 1405998 - DNA, 15 bp, Homo sapiens
atatcaatagaaaag

SEQ ID NO: 1405999 - DNA, 15 bp, Homo sapiens
aatatcaatagaaaa

SEQ ID NO: 1406000 - DNA, 15 bp, Homo sapiens
gaatatcaatagaaa

SEQ ID NO: 1406001 - DNA, 15 bp, Homo sapiens
ggaatatcaatagaa

SEQ ID NO: 1406002 - DNA, 15 bp, Homo sapiens
aggaatatcaataga

SEQ ID NO: 1406003 - DNA, 15 bp, Homo sapiens
taggaatatcaatag

SEQ ID NO: 1406004 - DNA, 15 bp, Homo sapiens
ctaggaatatcaata

SEQ ID NO: 1406005 - DNA, 15 bp, Homo sapiens
actaggaatatcaat

SEQ ID NO: 1406006 - DNA, 15 bp, Homo sapiens
tactaggaatatcaa

SEQ ID NO: 1406007 - DNA, 15 bp, Homo sapiens
ttactaggaatatca

SEQ ID NO: 1406008 - DNA, 15 bp, Homo sapiens
cttactaggaatatc

SEQ ID NO: 1406009 - DNA, 15 bp, Homo sapiens
acttactaggaatat

SEQ ID NO: 1406010 - DNA, 15 bp, Homo sapiens
gacttactaggaata

SEQ ID NO: 1406011 - DNA, 15 bp, Homo sapiens
agacttactaggaat

SEQ ID NO: 1406012 - DNA, 15 bp, Homo sapiens
aagacttactaggaa

SEQ ID NO: 1406013 - DNA, 15 bp, Homo sapiens
aaagacttactagga

SEQ ID NO: 1406014 - DNA, 15 bp, Homo sapiens
gaaagacttactagg

SEQ ID NO: 1406015 - DNA, 15 bp, Homo sapiens
tgaaagacttactag

SEQ ID NO: 1406016 - DNA, 15 bp, Homo sapiens
atgaaagacttacta

SEQ ID NO: 1406017 - DNA, 15 bp, Homo sapiens
aatgaaagacttact

SEQ ID NO: 1406018 - DNA, 15 bp, Homo sapiens
aaatgaaagacttac

SEQ ID NO: 1406019 - DNA, 15 bp, Homo sapiens
aaaatgaaagactta

SEQ ID NO: 1406020 - DNA, 15 bp, Homo sapiens
aaaaatgaaagactt

SEQ ID NO: 1406021 - DNA, 15 bp, Homo sapiens
taaaaatgaaagact

SEQ ID NO: 1406022 - DNA, 15 bp, Homo sapiens
ttaaaaatgaaagac

SEQ ID NO: 1406023 - DNA, 15 bp, Homo sapiens
cttaaaaatgaaaga

SEQ ID NO: 1406024 - DNA, 15 bp, Homo sapiens
gcttaaaaatgaaag

SEQ ID NO: 1406025 - DNA, 15 bp, Homo sapiens
ggcttaaaaatgaaa

SEQ ID NO: 1406026 - DNA, 15 bp, Homo sapiens
gggcttaaaaatgaa

SEQ ID NO: 1406027 - DNA, 15 bp, Homo sapiens
agggcttaaaaatga

SEQ ID NO: 1406028 - DNA, 15 bp, Homo sapiens
tagggcttaaaaatg

SEQ ID NO: 1406029 - DNA, 15 bp, Homo sapiens
ttagggcttaaaaat

SEQ ID NO: 1406030 - DNA, 15 bp, Homo sapiens
tttagggcttaaaaa

SEQ ID NO: 1406031 - DNA, 15 bp, Homo sapiens
ctttagggcttaaaa

SEQ ID NO: 1406032 - DNA, 15 bp, Homo sapiens
gctttagggcttaaa

SEQ ID NO: 1406033 - DNA, 15 bp, Homo sapiens
agctttagggcttaa

SEQ ID NO: 1406034 - DNA, 15 bp, Homo sapiens
tagctttagggctta

SEQ ID NO: 1406035 - DNA, 15 bp, Homo sapiens
atagctttagggctt

SEQ ID NO: 1406036 - DNA, 15 bp, Homo sapiens
tatagctttagggct

SEQ ID NO: 1406037 - DNA, 15 bp, Homo sapiens
atatagctttagggc

SEQ ID NO: 1406038 - DNA, 15 bp, Homo sapiens
aatatagctttaggg

SEQ ID NO: 1406039 - DNA, 15 bp, Homo sapiens
aaatatagctttagg

SEQ ID NO: 1406040 - DNA, 15 bp, Homo sapiens
gaaatatagctttag

SEQ ID NO: 1406041 - DNA, 15 bp, Homo sapiens
ggaaatatagcttta

SEQ ID NO: 1406042 - DNA, 15 bp, Homo sapiens
tggaaatatagcttt

SEQ ID NO: 1406043 - DNA, 15 bp, Homo sapiens
atggaaatatagctt

SEQ ID NO: 1406044 - DNA, 15 bp, Homo sapiens
gatggaaatatagct

SEQ ID NO: 1406045 - DNA, 15 bp, Homo sapiens
agatggaaatatagc

SEQ ID NO: 1406046 - DNA, 15 bp, Homo sapiens
cagatggaaatatag

SEQ ID NO: 1406047 - DNA, 15 bp, Homo sapiens
gcagatggaaatata

SEQ ID NO: 1406048 - DNA, 15 bp, Homo sapiens
agcagatggaaatat

SEQ ID NO: 1406049 - DNA, 15 bp, Homo sapiens
tagcagatggaaata

SEQ ID NO: 1406050 - DNA, 15 bp, Homo sapiens
ctagcagatggaaat

SEQ ID NO: 1406051 - DNA, 15 bp, Homo sapiens
tctagcagatggaaa

SEQ ID NO: 1406052 - DNA, 15 bp, Homo sapiens
ttctagcagatggaa

SEQ ID NO: 1406053 - DNA, 15 bp, Homo sapiens
cttctagcagatgga

SEQ ID NO: 1406054 - DNA, 15 bp, Homo sapiens
gcttctagcagatgg

SEQ ID NO: 1406055 - DNA, 15 bp, Homo sapiens
tgcttctagcagatg

SEQ ID NO: 1406056 - DNA, 15 bp, Homo sapiens
ctgcttctagcagat

SEQ ID NO: 1406057 - DNA, 15 bp, Homo sapiens
tctgcttctagcaga

SEQ ID NO: 1406058 - DNA, 15 bp, Homo sapiens
ctctgcttctagcag

SEQ ID NO: 1406059 - DNA, 15 bp, Homo sapiens
gctctgcttctagca

SEQ ID NO: 1406060 - DNA, 15 bp, Homo sapiens
agctctgcttctagc

SEQ ID NO: 1406061 - DNA, 15 bp, Homo sapiens
gagctctgcttctag

SEQ ID NO: 1406062 - DNA, 15 bp, Homo sapiens
agagctctgcttcta

SEQ ID NO: 1406063 - DNA, 15 bp, Homo sapiens
cagagctctgcttct

SEQ ID NO: 1406064 - DNA, 15 bp, Homo sapiens
tcagagctctgcttc

SEQ ID NO: 1406065 - DNA, 15 bp, Homo sapiens
atcagagctctgctt

SEQ ID NO: 1406066 - DNA, 15 bp, Homo sapiens
gatcagagctctgct

SEQ ID NO: 1406067 - DNA, 15 bp, Homo sapiens
agatcagagctctgc

SEQ ID NO: 1406068 - DNA, 15 bp, Homo sapiens
gagatcagagctctg

SEQ ID NO: 1406069 - DNA, 15 bp, Homo sapiens
ggagatcagagctct

SEQ ID NO: 1406070 - DNA, 15 bp, Homo sapiens
tggagatcagagctc

SEQ ID NO: 1406071 - DNA, 15 bp, Homo sapiens
atggagatcagagct

SEQ ID NO: 1406072 - DNA, 15 bp, Homo sapiens
tatggagatcagagc

SEQ ID NO: 1406073 - DNA, 15 bp, Homo sapiens
atatggagatcagag

SEQ ID NO: 1406074 - DNA, 15 bp, Homo sapiens
catatggagatcaga

SEQ ID NO: 1406075 - DNA, 15 bp, Homo sapiens
tcatatggagatcag

SEQ ID NO: 1406076 - DNA, 15 bp, Homo sapiens
atcatatggagatca

SEQ ID NO: 1406077 - DNA, 15 bp, Homo sapiens
aatcatatggagatc

SEQ ID NO: 1406078 - DNA, 15 bp, Homo sapiens
gaatcatatggagat

SEQ ID NO: 1406079 - DNA, 15 bp, Homo sapiens
tgaatcatatggaga

SEQ ID NO: 1406080 - DNA, 15 bp, Homo sapiens
atgaatcatatggag

SEQ ID NO: 1406081 - DNA, 15 bp, Homo sapiens
gatgaatcatatgga

SEQ ID NO: 1406082 - DNA, 15 bp, Homo sapiens
tgatgaatcatatgg

SEQ ID NO: 1406083 - DNA, 15 bp, Homo sapiens
ttgatgaatcatatg

SEQ ID NO: 1406084 - DNA, 15 bp, Homo sapiens
cttgatgaatcatat

SEQ ID NO: 1406085 - DNA, 15 bp, Homo sapiens
tcttgatgaatcata

SEQ ID NO: 1406086 - DNA, 15 bp, Homo sapiens
ttcttgatgaatcat

SEQ ID NO: 1406087 - DNA, 15 bp, Homo sapiens
attcttgatgaatca

SEQ ID NO: 1406088 - DNA, 15 bp, Homo sapiens
cattcttgatgaatc

SEQ ID NO: 1406089 - DNA, 15 bp, Homo sapiens
tcattcttgatgaat

SEQ ID NO: 1406090 - DNA, 15 bp, Homo sapiens
gtcattcttgatgaa

SEQ ID NO: 1406091 - DNA, 15 bp, Homo sapiens
agtcattcttgatga

SEQ ID NO: 1406092 - DNA, 15 bp, Homo sapiens
aagtcattcttgatg

SEQ ID NO: 1406093 - DNA, 15 bp, Homo sapiens
gaagtcattcttgat

SEQ ID NO: 1406094 - DNA, 15 bp, Homo sapiens
ggaagtcattcttga

SEQ ID NO: 1406095 - DNA, 15 bp, Homo sapiens
gggaagtcattcttg

SEQ ID NO: 1406096 - DNA, 15 bp, Homo sapiens
agggaagtcattctt

SEQ ID NO: 1406097 - DNA, 15 bp, Homo sapiens
tagggaagtcattct

SEQ ID NO: 1406098 - DNA, 15 bp, Homo sapiens
ttagggaagtcattc

SEQ ID NO: 1406099 - DNA, 15 bp, Homo sapiens
tttagggaagtcatt

SEQ ID NO: 1406100 - DNA, 15 bp, Homo sapiens
atttagggaagtcat

SEQ ID NO: 1406101 - DNA, 15 bp, Homo sapiens
catttagggaagtca

SEQ ID NO: 1406102 - DNA, 15 bp, Homo sapiens
ccatttagggaagtc

SEQ ID NO: 1406103 - DNA, 15 bp, Homo sapiens
accatttagggaagt

SEQ ID NO: 1406104 - DNA, 15 bp, Homo sapiens
taccatttagggaag

SEQ ID NO: 1406105 - DNA, 15 bp, Homo sapiens
ataccatttagggaa

SEQ ID NO: 1406106 - DNA, 15 bp, Homo sapiens
tataccatttaggga

SEQ ID NO: 1406107 - DNA, 15 bp, Homo sapiens
ttataccatttaggg

SEQ ID NO: 1406108 - DNA, 15 bp, Homo sapiens
tttataccatttagg

SEQ ID NO: 1406109 - DNA, 15 bp, Homo sapiens
gtttataccatttag

SEQ ID NO: 1406110 - DNA, 15 bp, Homo sapiens
cgtttataccattta

SEQ ID NO: 1406111 - DNA, 15 bp, Homo sapiens
acgtttataccattt

SEQ ID NO: 1406112 - DNA, 15 bp, Homo sapiens
gacgtttataccatt

SEQ ID NO: 1406113 - DNA, 15 bp, Homo sapiens
agacgtttataccat

SEQ ID NO: 1406114 - DNA, 15 bp, Homo sapiens
tagacgtttatacca

SEQ ID NO: 1406115 - DNA, 15 bp, Homo sapiens
gtagacgtttatacc

SEQ ID NO: 1406116 - DNA, 15 bp, Homo sapiens
tgtagacgtttatac

SEQ ID NO: 1406117 - DNA, 15 bp, Homo sapiens
gtgtagacgtttata

SEQ ID NO: 1406118 - DNA, 15 bp, Homo sapiens
agtgtagacgtttat

SEQ ID NO: 1406119 - DNA, 15 bp, Homo sapiens
aagtgtagacgttta

SEQ ID NO: 1406120 - DNA, 15 bp, Homo sapiens
gaagtgtagacgttt

SEQ ID NO: 1406121 - DNA, 15 bp, Homo sapiens
ggaagtgtagacgtt

SEQ ID NO: 1406122 - DNA, 15 bp, Homo sapiens
tggaagtgtagacgt

SEQ ID NO: 1406123 - DNA, 15 bp, Homo sapiens
ttggaagtgtagacg

SEQ ID NO: 1406124 - DNA, 15 bp, Homo sapiens
tttggaagtgtagac

SEQ ID NO: 1406125 - DNA, 15 bp, Homo sapiens
atttggaagtgtaga

SEQ ID NO: 1406126 - DNA, 15 bp, Homo sapiens
gatttggaagtgtag

SEQ ID NO: 1406127 - DNA, 15 bp, Homo sapiens
tgatttggaagtgta

SEQ ID NO: 1406128 - DNA, 15 bp, Homo sapiens
gtgatttggaagtgt

SEQ ID NO: 1406129 - DNA, 15 bp, Homo sapiens
agtgatttggaagtg

SEQ ID NO: 1406130 - DNA, 15 bp, Homo sapiens
aagtgatttggaagt

SEQ ID NO: 1406131 - DNA, 15 bp, Homo sapiens
aaagtgatttggaag

SEQ ID NO: 1406132 - DNA, 15 bp, Homo sapiens
gaaagtgatttggaa

SEQ ID NO: 1406133 - DNA, 15 bp, Homo sapiens
tgaaagtgatttgga

SEQ ID NO: 1406134 - DNA, 15 bp, Homo sapiens
atgaaagtgatttgg

SEQ ID NO: 1406135 - DNA, 15 bp, Homo sapiens
aatgaaagtgatttg

SEQ ID NO: 1406136 - DNA, 15 bp, Homo sapiens
taatgaaagtgattt

SEQ ID NO: 1406137 - DNA, 15 bp, Homo sapiens
ataatgaaagtgatt

SEQ ID NO: 1406138 - DNA, 15 bp, Homo sapiens
gataatgaaagtgat

SEQ ID NO: 1406139 - DNA, 15 bp, Homo sapiens
ggataatgaaagtga

SEQ ID NO: 1406140 - DNA, 15 bp, Homo sapiens
tggataatgaaagtg

SEQ ID NO: 1406141 - DNA, 15 bp, Homo sapiens
ttggataatgaaagt

SEQ ID NO: 1406142 - DNA, 15 bp, Homo sapiens
attggataatgaaag

SEQ ID NO: 1406143 - DNA, 15 bp, Homo sapiens
aattggataatgaaa

SEQ ID NO: 1406144 - DNA, 15 bp, Homo sapiens
caattggataatgaa

SEQ ID NO: 1406145 - DNA, 15 bp, Homo sapiens
ccaattggataatga

SEQ ID NO: 1406146 - DNA, 15 bp, Homo sapiens
gccaattggataatg

SEQ ID NO: 1406147 - DNA, 15 bp, Homo sapiens
tgccaattggataat

SEQ ID NO: 1406148 - DNA, 15 bp, Homo sapiens
gtgccaattggataa

SEQ ID NO: 1406149 - DNA, 15 bp, Homo sapiens
tgtgccaattggata

SEQ ID NO: 1406150 - DNA, 15 bp, Homo sapiens
gtgtgccaattggat

SEQ ID NO: 1406151 - DNA, 15 bp, Homo sapiens
ggtgtgccaattgga

SEQ ID NO: 1406152 - DNA, 15 bp, Homo sapiens
gggtgtgccaattgg

SEQ ID NO: 1406153 - DNA, 15 bp, Homo sapiens
ggggtgtgccaattg

SEQ ID NO: 1406154 - DNA, 15 bp, Homo sapiens
tggggtgtgccaatt

SEQ ID NO: 1406155 - DNA, 15 bp, Homo sapiens
atggggtgtgccaat

SEQ ID NO: 1406156 - DNA, 15 bp, Homo sapiens
gatggggtgtgccaa

SEQ ID NO: 1406157 - DNA, 15 bp, Homo sapiens
agatggggtgtgcca

SEQ ID NO: 1406158 - DNA, 15 bp, Homo sapiens
tagatggggtgtgcc

SEQ ID NO: 1406159 - DNA, 15 bp, Homo sapiens
ttagatggggtgtgc

SEQ ID NO: 1406160 - DNA, 15 bp, Homo sapiens
tttagatggggtgtg

SEQ ID NO: 1406161 - DNA, 15 bp, Homo sapiens
ttttagatggggtgt

SEQ ID NO: 1406162 - DNA, 15 bp, Homo sapiens
gttttagatggggtg

SEQ ID NO: 1406163 - DNA, 15 bp, Homo sapiens
agttttagatggggt

SEQ ID NO: 1406164 - DNA, 15 bp, Homo sapiens
aagttttagatgggg

SEQ ID NO: 1406165 - DNA, 15 bp, Homo sapiens
taagttttagatggg

SEQ ID NO: 1406166 - DNA, 15 bp, Homo sapiens
ttaagttttagatgg

SEQ ID NO: 1406167 - DNA, 15 bp, Homo sapiens
attaagttttagatg

SEQ ID NO: 1406168 - DNA, 15 bp, Homo sapiens
aattaagttttagat

SEQ ID NO: 1406169 - DNA, 15 bp, Homo sapiens
caattaagttttaga

SEQ ID NO: 1406170 - DNA, 15 bp, Homo sapiens
tcaattaagttttag

SEQ ID NO: 1406171 - DNA, 15 bp, Homo sapiens
atcaattaagtttta

SEQ ID NO: 1406172 - DNA, 15 bp, Homo sapiens
aatcaattaagtttt

SEQ ID NO: 1406173 - DNA, 15 bp, Homo sapiens
aaatcaattaagttt

SEQ ID NO: 1406174 - DNA, 15 bp, Homo sapiens
gaaatcaattaagtt

SEQ ID NO: 1406175 - DNA, 15 bp, Homo sapiens
tgaaatcaattaagt

SEQ ID NO: 1406176 - DNA, 15 bp, Homo sapiens
ctgaaatcaattaag

SEQ ID NO: 1406177 - DNA, 15 bp, Homo sapiens
tctgaaatcaattaa

SEQ ID NO: 1406178 - DNA, 15 bp, Homo sapiens
atctgaaatcaatta

SEQ ID NO: 1406179 - DNA, 15 bp, Homo sapiens
aatctgaaatcaatt

SEQ ID NO: 1406180 - DNA, 15 bp, Homo sapiens
gaatctgaaatcaat

SEQ ID NO: 1406181 - DNA, 15 bp, Homo sapiens
agaatctgaaatcaa

SEQ ID NO: 1406182 - DNA, 15 bp, Homo sapiens
gagaatctgaaatca

SEQ ID NO: 1406183 - DNA, 15 bp, Homo sapiens
agagaatctgaaatc

SEQ ID NO: 1406184 - DNA, 15 bp, Homo sapiens
cagagaatctgaaat

SEQ ID NO: 1406185 - DNA, 15 bp, Homo sapiens
tcagagaatctgaaa

SEQ ID NO: 1406186 - DNA, 15 bp, Homo sapiens
ctcagagaatctgaa

SEQ ID NO: 1406187 - DNA, 15 bp, Homo sapiens
actcagagaatctga

SEQ ID NO: 1406188 - DNA, 15 bp, Homo sapiens
aactcagagaatctg

SEQ ID NO: 1406189 - DNA, 15 bp, Homo sapiens
caactcagagaatct

SEQ ID NO: 1406190 - DNA, 15 bp, Homo sapiens
gcaactcagagaatc

SEQ ID NO: 1406191 - DNA, 15 bp, Homo sapiens
tgcaactcagagaat

SEQ ID NO: 1406192 - DNA, 15 bp, Homo sapiens
ttgcaactcagagaa

SEQ ID NO: 1406193 - DNA, 15 bp, Homo sapiens
attgcaactcagaga

SEQ ID NO: 1406194 - DNA, 15 bp, Homo sapiens
aattgcaactcagag

SEQ ID NO: 1406195 - DNA, 15 bp, Homo sapiens
caattgcaactcaga

SEQ ID NO: 1406196 - DNA, 15 bp, Homo sapiens
acaattgcaactcag

SEQ ID NO: 1406197 - DNA, 15 bp, Homo sapiens
tacaattgcaactca

SEQ ID NO: 1406198 - DNA, 15 bp, Homo sapiens
atacaattgcaactc

SEQ ID NO: 1406199 - DNA, 15 bp, Homo sapiens
aatacaattgcaact

SEQ ID NO: 1406200 - DNA, 15 bp, Homo sapiens
taatacaattgcaac

SEQ ID NO: 1406201 - DNA, 15 bp, Homo sapiens
ttaatacaattgcaa

SEQ ID NO: 1406202 - DNA, 15 bp, Homo sapiens
tttaatacaattgca

SEQ ID NO: 1406203 - DNA, 15 bp, Homo sapiens
ttttaatacaattgc

SEQ ID NO: 1406204 - DNA, 15 bp, Homo sapiens
gttttaatacaattg

SEQ ID NO: 1406205 - DNA, 15 bp, Homo sapiens
ggttttaatacaatt

SEQ ID NO: 1406206 - DNA, 15 bp, Homo sapiens
gggttttaatacaat

SEQ ID NO: 1406207 - DNA, 15 bp, Homo sapiens
tgggttttaatacaa

SEQ ID NO: 1406208 - DNA, 15 bp, Homo sapiens
ctgggttttaataca

SEQ ID NO: 1406209 - DNA, 15 bp, Homo sapiens
cctgggttttaatac

SEQ ID NO: 1406210 - DNA, 15 bp, Homo sapiens
tcctgggttttaata

SEQ ID NO: 1406211 - DNA, 15 bp, Homo sapiens
ttcctgggttttaat

SEQ ID NO: 1406212 - DNA, 15 bp, Homo sapiens
attcctgggttttaa

SEQ ID NO: 1406213 - DNA, 15 bp, Homo sapiens
cattcctgggtttta

SEQ ID NO: 1406214 - DNA, 15 bp, Homo sapiens
ccattcctgggtttt

SEQ ID NO: 1406215 - DNA, 15 bp, Homo sapiens
accattcctgggttt

SEQ ID NO: 1406216 - DNA, 15 bp, Homo sapiens
taccattcctgggtt

SEQ ID NO: 1406217 - DNA, 15 bp, Homo sapiens
ttaccattcctgggt

SEQ ID NO: 1406218 - DNA, 15 bp, Homo sapiens
tttaccattcctggg

SEQ ID NO: 1406219 - DNA, 15 bp, Homo sapiens
atttaccattcctgg

SEQ ID NO: 1406220 - DNA, 15 bp, Homo sapiens
catttaccattcctg

SEQ ID NO: 1406221 - DNA, 15 bp, Homo sapiens
gcatttaccattcct

SEQ ID NO: 1406222 - DNA, 15 bp, Homo sapiens
tgcatttaccattcc

SEQ ID NO: 1406223 - DNA, 15 bp, Homo sapiens
gtgcatttaccattc

SEQ ID NO: 1406224 - DNA, 15 bp, Homo sapiens
ggtgcatttaccatt

SEQ ID NO: 1406225 - DNA, 15 bp, Homo sapiens
tggtgcatttaccat

SEQ ID NO: 1406226 - DNA, 15 bp, Homo sapiens
ttggtgcatttacca

SEQ ID NO: 1406227 - DNA, 15 bp, Homo sapiens
attggtgcatttacc

SEQ ID NO: 1406228 - DNA, 15 bp, Homo sapiens
cattggtgcatttac

SEQ ID NO: 1406229 - DNA, 15 bp, Homo sapiens
tcattggtgcattta

SEQ ID NO: 1406230 - DNA, 15 bp, Homo sapiens
atcattggtgcattt

SEQ ID NO: 1406231 - DNA, 15 bp, Homo sapiens
aatcattggtgcatt

SEQ ID NO: 1406232 - DNA, 15 bp, Homo sapiens
caatcattggtgcat

SEQ ID NO: 1406233 - DNA, 15 bp, Homo sapiens
gcaatcattggtgca

SEQ ID NO: 1406234 - DNA, 15 bp, Homo sapiens
agcaatcattggtgc

SEQ ID NO: 1406235 - DNA, 15 bp, Homo sapiens
aagcaatcattggtg

SEQ ID NO: 1406236 - DNA, 15 bp, Homo sapiens
caagcaatcattggt

SEQ ID NO: 1406237 - DNA, 15 bp, Homo sapiens
gcaagcaatcattgg

SEQ ID NO: 1406238 - DNA, 15 bp, Homo sapiens
tgcaagcaatcattg

SEQ ID NO: 1406239 - DNA, 15 bp, Homo sapiens
ttgcaagcaatcatt

SEQ ID NO: 1406240 - DNA, 15 bp, Homo sapiens
tttgcaagcaatcat

SEQ ID NO: 1406241 - DNA, 15 bp, Homo sapiens
atttgcaagcaatca

SEQ ID NO: 1406242 - DNA, 15 bp, Homo sapiens
tatttgcaagcaatc

SEQ ID NO: 1406243 - DNA, 15 bp, Homo sapiens
ctatttgcaagcaat

SEQ ID NO: 1406244 - DNA, 15 bp, Homo sapiens
gctatttgcaagcaa

SEQ ID NO: 1406245 - DNA, 15 bp, Homo sapiens
agctatttgcaagca

SEQ ID NO: 1406246 - DNA, 15 bp, Homo sapiens
tagctatttgcaagc

SEQ ID NO: 1406247 - DNA, 15 bp, Homo sapiens
atagctatttgcaag

SEQ ID NO: 1406248 - DNA, 15 bp, Homo sapiens
tatagctatttgcaa

SEQ ID NO: 1406249 - DNA, 15 bp, Homo sapiens
ttatagctatttgca

SEQ ID NO: 1406250 - DNA, 15 bp, Homo sapiens
attatagctatttgc

SEQ ID NO: 1406251 - DNA, 15 bp, Homo sapiens
tattatagctatttg

SEQ ID NO: 1406252 - DNA, 15 bp, Homo sapiens
ttattatagctattt

SEQ ID NO: 1406253 - DNA, 15 bp, Homo sapiens
tttattatagctatt

SEQ ID NO: 1406254 - DNA, 15 bp, Homo sapiens
atttattatagctat

SEQ ID NO: 1406255 - DNA, 15 bp, Homo sapiens
tatttattatagcta

SEQ ID NO: 1406256 - DNA, 15 bp, Homo sapiens
atatttattatagct

SEQ ID NO: 1406257 - DNA, 15 bp, Homo sapiens
tatatttattatagc

SEQ ID NO: 1406258 - DNA, 15 bp, Homo sapiens
atatatttattatag

SEQ ID NO: 1406259 - DNA, 15 bp, Homo sapiens
catatatttattata

SEQ ID NO: 1406260 - DNA, 15 bp, Homo sapiens
tcatatatttattat

SEQ ID NO: 1406261 - DNA, 15 bp, Homo sapiens
atcatatatttatta

SEQ ID NO: 1406262 - DNA, 15 bp, Homo sapiens
aatcatatatttatt

SEQ ID NO: 1406263 - DNA, 15 bp, Homo sapiens
gaatcatatatttat

SEQ ID NO: 1406264 - DNA, 15 bp, Homo sapiens
agaatcatatattta

SEQ ID NO: 1406265 - DNA, 15 bp, Homo sapiens
cagaatcatatattt

SEQ ID NO: 1406266 - DNA, 15 bp, Homo sapiens
acagaatcatatatt

SEQ ID NO: 1406267 - DNA, 15 bp, Homo sapiens
tacagaatcatatat

SEQ ID NO: 1406268 - DNA, 15 bp, Homo sapiens
ctacagaatcatata

SEQ ID NO: 1406269 - DNA, 15 bp, Homo sapiens
tctacagaatcatat

SEQ ID NO: 1406270 - DNA, 15 bp, Homo sapiens
ttctacagaatcata

SEQ ID NO: 1406271 - DNA, 15 bp, Homo sapiens
tttctacagaatcat

SEQ ID NO: 1406272 - DNA, 15 bp, Homo sapiens
ctttctacagaatca

SEQ ID NO: 1406273 - DNA, 15 bp, Homo sapiens
gctttctacagaatc

SEQ ID NO: 1406274 - DNA, 15 bp, Homo sapiens
agctttctacagaat

SEQ ID NO: 1406275 - DNA, 15 bp, Homo sapiens
tagctttctacagaa

SEQ ID NO: 1406276 - DNA, 15 bp, Homo sapiens
gtagctttctacaga

SEQ ID NO: 1406277 - DNA, 15 bp, Homo sapiens
agtagctttctacag

SEQ ID NO: 1406278 - DNA, 15 bp, Homo sapiens
cagtagctttctaca

SEQ ID NO: 1406279 - DNA, 15 bp, Homo sapiens
ccagtagctttctac

SEQ ID NO: 1406280 - DNA, 15 bp, Homo sapiens
gccagtagctttcta

SEQ ID NO: 1406281 - DNA, 15 bp, Homo sapiens
tgccagtagctttct

SEQ ID NO: 1406282 - DNA, 15 bp, Homo sapiens
ttgccagtagctttc

SEQ ID NO: 1406283 - DNA, 15 bp, Homo sapiens
tttgccagtagcttt

SEQ ID NO: 1406284 - DNA, 15 bp, Homo sapiens
ttttgccagtagctt

SEQ ID NO: 1406285 - DNA, 15 bp, Homo sapiens
gttttgccagtagct

SEQ ID NO: 1406286 - DNA, 15 bp, Homo sapiens
tgttttgccagtagc

SEQ ID NO: 1406287 - DNA, 15 bp, Homo sapiens
gtgttttgccagtag

SEQ ID NO: 1406288 - DNA, 15 bp, Homo sapiens
agtgttttgccagta

SEQ ID NO: 1406289 - DNA, 15 bp, Homo sapiens
tagtgttttgccagt

SEQ ID NO: 1406290 - DNA, 15 bp, Homo sapiens
ctagtgttttgccag

SEQ ID NO: 1406291 - DNA, 15 bp, Homo sapiens
gctagtgttttgcca

SEQ ID NO: 1406292 - DNA, 15 bp, Homo sapiens
agctagtgttttgcc

SEQ ID NO: 1406293 - DNA, 15 bp, Homo sapiens
cagctagtgttttgc

SEQ ID NO: 1406294 - DNA, 15 bp, Homo sapiens
tcagctagtgttttg

SEQ ID NO: 1406295 - DNA, 15 bp, Homo sapiens
gtcagctagtgtttt

SEQ ID NO: 1406296 - DNA, 15 bp, Homo sapiens
tgtcagctagtgttt

SEQ ID NO: 1406297 - DNA, 15 bp, Homo sapiens
gtgtcagctagtgtt

SEQ ID NO: 1406298 - DNA, 15 bp, Homo sapiens
agtgtcagctagtgt

SEQ ID NO: 1406299 - DNA, 15 bp, Homo sapiens
cagtgtcagctagtg

SEQ ID NO: 1406300 - DNA, 15 bp, Homo sapiens
ccagtgtcagctagt

SEQ ID NO: 1406301 - DNA, 15 bp, Homo sapiens
accagtgtcagctag

SEQ ID NO: 1406302 - DNA, 15 bp, Homo sapiens
taccagtgtcagcta

SEQ ID NO: 1406303 - DNA, 15 bp, Homo sapiens
ttaccagtgtcagct

SEQ ID NO: 1406304 - DNA, 15 bp, Homo sapiens
attaccagtgtcagc

SEQ ID NO: 1406305 - DNA, 15 bp, Homo sapiens
tattaccagtgtcag

SEQ ID NO: 1406306 - DNA, 15 bp, Homo sapiens
ttattaccagtgtca

SEQ ID NO: 1406307 - DNA, 15 bp, Homo sapiens
gttattaccagtgtc

SEQ ID NO: 1406308 - DNA, 15 bp, Homo sapiens
tgttattaccagtgt

SEQ ID NO: 1406309 - DNA, 15 bp, Homo sapiens
ctgttattaccagtg

SEQ ID NO: 1406310 - DNA, 15 bp, Homo sapiens
actgttattaccagt

SEQ ID NO: 1406311 - DNA, 15 bp, Homo sapiens
cactgttattaccag

SEQ ID NO: 1406312 - DNA, 15 bp, Homo sapiens
acactgttattacca

SEQ ID NO: 1406313 - DNA, 15 bp, Homo sapiens
tacactgttattacc

SEQ ID NO: 1406314 - DNA, 15 bp, Homo sapiens
ctacactgttattac

SEQ ID NO: 1406315 - DNA, 15 bp, Homo sapiens
cctacactgttatta

SEQ ID NO: 1406316 - DNA, 15 bp, Homo sapiens
gcctacactgttatt

SEQ ID NO: 1406317 - DNA, 15 bp, Homo sapiens
tgcctacactgttat

SEQ ID NO: 1406318 - DNA, 15 bp, Homo sapiens
ttgcctacactgtta

SEQ ID NO: 1406319 - DNA, 15 bp, Homo sapiens
attgcctacactgtt

SEQ ID NO: 1406320 - DNA, 15 bp, Homo sapiens
gattgcctacactgt

SEQ ID NO: 1406321 - DNA, 15 bp, Homo sapiens
tgattgcctacactg

SEQ ID NO: 1406322 - DNA, 15 bp, Homo sapiens
atgattgcctacact

SEQ ID NO: 1406323 - DNA, 15 bp, Homo sapiens
tatgattgcctacac

SEQ ID NO: 1406324 - DNA, 15 bp, Homo sapiens
ttatgattgcctaca

SEQ ID NO: 1406325 - DNA, 15 bp, Homo sapiens
tttatgattgcctac

SEQ ID NO: 1406326 - DNA, 15 bp, Homo sapiens
ttttatgattgccta

SEQ ID NO: 1406327 - DNA, 15 bp, Homo sapiens
attttatgattgcct

SEQ ID NO: 1406328 - DNA, 15 bp, Homo sapiens
tattttatgattgcc

SEQ ID NO: 1406329 - DNA, 15 bp, Homo sapiens
gtattttatgattgc

SEQ ID NO: 1406330 - DNA, 15 bp, Homo sapiens
ggtattttatgattg

SEQ ID NO: 1406331 - DNA, 15 bp, Homo sapiens
aggtattttatgatt

SEQ ID NO: 1406332 - DNA, 15 bp, Homo sapiens
gaggtattttatgat

SEQ ID NO: 1406333 - DNA, 15 bp, Homo sapiens
agaggtattttatga

SEQ ID NO: 1406334 - DNA, 15 bp, Homo sapiens
aagaggtattttatg

SEQ ID NO: 1406335 - DNA, 15 bp, Homo sapiens
taagaggtattttat

SEQ ID NO: 1406336 - DNA, 15 bp, Homo sapiens
ataagaggtatttta

SEQ ID NO: 1406337 - DNA, 15 bp, Homo sapiens
cataagaggtatttt

SEQ ID NO: 1406338 - DNA, 15 bp, Homo sapiens
acataagaggtattt

SEQ ID NO: 1406339 - DNA, 15 bp, Homo sapiens
tacataagaggtatt

SEQ ID NO: 1406340 - DNA, 15 bp, Homo sapiens
ctacataagaggtat

SEQ ID NO: 1406341 - DNA, 15 bp, Homo sapiens
tctacataagaggta

SEQ ID NO: 1406342 - DNA, 15 bp, Homo sapiens
gtctacataagaggt

SEQ ID NO: 1406343 - DNA, 15 bp, Homo sapiens
ggtctacataagagg

SEQ ID NO: 1406344 - DNA, 15 bp, Homo sapiens
tggtctacataagag

SEQ ID NO: 1406345 - DNA, 15 bp, Homo sapiens
gtggtctacataaga

SEQ ID NO: 1406346 - DNA, 15 bp, Homo sapiens
cgtggtctacataag

SEQ ID NO: 1406347 - DNA, 15 bp, Homo sapiens
acgtggtctacataa

SEQ ID NO: 1406348 - DNA, 15 bp, Homo sapiens
cacgtggtctacata

SEQ ID NO: 1406349 - DNA, 15 bp, Homo sapiens
tcacgtggtctacat

SEQ ID NO: 1406350 - DNA, 15 bp, Homo sapiens
gtcacgtggtctaca

SEQ ID NO: 1406351 - DNA, 15 bp, Homo sapiens
tgtcacgtggtctac

SEQ ID NO: 1406352 - DNA, 15 bp, Homo sapiens
atgtcacgtggtcta

SEQ ID NO: 1406353 - DNA, 15 bp, Homo sapiens
catgtcacgtggtct

SEQ ID NO: 1406354 - DNA, 15 bp, Homo sapiens
acatgtcacgtggtc

SEQ ID NO: 1406355 - DNA, 15 bp, Homo sapiens
tacatgtcacgtggt

SEQ ID NO: 1406356 - DNA, 15 bp, Homo sapiens
ctacatgtcacgtgg

SEQ ID NO: 1406357 - DNA, 15 bp, Homo sapiens
tctacatgtcacgtg

SEQ ID NO: 1406358 - DNA, 15 bp, Homo sapiens
ctctacatgtcacgt

SEQ ID NO: 1406359 - DNA, 15 bp, Homo sapiens
actctacatgtcacg

SEQ ID NO: 1406360 - DNA, 15 bp, Homo sapiens
aactctacatgtcac

SEQ ID NO: 1406361 - DNA, 15 bp, Homo sapiens
gaactctacatgtca

SEQ ID NO: 1406362 - DNA, 15 bp, Homo sapiens
ggaactctacatgtc

SEQ ID NO: 1406363 - DNA, 15 bp, Homo sapiens
tggaactctacatgt

SEQ ID NO: 1406364 - DNA, 15 bp, Homo sapiens
ctggaactctacatg

SEQ ID NO: 1406365 - DNA, 15 bp, Homo sapiens
gctggaactctacat

SEQ ID NO: 1406366 - DNA, 15 bp, Homo sapiens
tgctggaactctaca

SEQ ID NO: 1406367 - DNA, 15 bp, Homo sapiens
ctgctggaactctac

SEQ ID NO: 1406368 - DNA, 15 bp, Homo sapiens
cctgctggaactcta

SEQ ID NO: 1406369 - DNA, 15 bp, Homo sapiens
gcctgctggaactct

SEQ ID NO: 1406370 - DNA, 15 bp, Homo sapiens
agcctgctggaactc

SEQ ID NO: 1406371 - DNA, 15 bp, Homo sapiens
tagcctgctggaact

SEQ ID NO: 1406372 - DNA, 15 bp, Homo sapiens
gtagcctgctggaac

SEQ ID NO: 1406373 - DNA, 15 bp, Homo sapiens
ggtagcctgctggaa

SEQ ID NO: 1406374 - DNA, 15 bp, Homo sapiens
cggtagcctgctgga

SEQ ID NO: 1406375 - DNA, 15 bp, Homo sapiens
acggtagcctgctgg

SEQ ID NO: 1406376 - DNA, 15 bp, Homo sapiens
aacggtagcctgctg

SEQ ID NO: 1406377 - DNA, 15 bp, Homo sapiens
aaacggtagcctgct

SEQ ID NO: 1406378 - DNA, 15 bp, Homo sapiens
gaaacggtagcctgc

SEQ ID NO: 1406379 - DNA, 15 bp, Homo sapiens
ggaaacggtagcctg

SEQ ID NO: 1406380 - DNA, 15 bp, Homo sapiens
gggaaacggtagcct

SEQ ID NO: 1406381 - DNA, 15 bp, Homo sapiens
tgggaaacggtagcc

SEQ ID NO: 1406382 - DNA, 15 bp, Homo sapiens
atgggaaacggtagc

SEQ ID NO: 1406383 - DNA, 15 bp, Homo sapiens
aatgggaaacggtag

SEQ ID NO: 1406384 - DNA, 15 bp, Homo sapiens
caatgggaaacggta

SEQ ID NO: 1406385 - DNA, 15 bp, Homo sapiens
gcaatgggaaacggt

SEQ ID NO: 1406386 - DNA, 15 bp, Homo sapiens
agcaatgggaaacgg

SEQ ID NO: 1406387 - DNA, 15 bp, Homo sapiens
cagcaatgggaaacg

SEQ ID NO: 1406388 - DNA, 15 bp, Homo sapiens
acagcaatgggaaac

SEQ ID NO: 1406389 - DNA, 15 bp, Homo sapiens
cacagcaatgggaaa

SEQ ID NO: 1406390 - DNA, 15 bp, Homo sapiens
tcacagcaatgggaa

SEQ ID NO: 1406391 - DNA, 15 bp, Homo sapiens
ttcacagcaatggga

SEQ ID NO: 1406392 - DNA, 15 bp, Homo sapiens
attcacagcaatggg

SEQ ID NO: 1406393 - DNA, 15 bp, Homo sapiens
cattcacagcaatgg

SEQ ID NO: 1406394 - DNA, 15 bp, Homo sapiens
tcattcacagcaatg

SEQ ID NO: 1406395 - DNA, 15 bp, Homo sapiens
gtcattcacagcaat

SEQ ID NO: 1406396 - DNA, 15 bp, Homo sapiens
ggtcattcacagcaa

SEQ ID NO: 1406397 - DNA, 15 bp, Homo sapiens
tggtcattcacagca

SEQ ID NO: 1406398 - DNA, 15 bp, Homo sapiens
atggtcattcacagc

SEQ ID NO: 1406399 - DNA, 15 bp, Homo sapiens
catggtcattcacag

SEQ ID NO: 1406400 - DNA, 15 bp, Homo sapiens
acatggtcattcaca

SEQ ID NO: 1406401 - DNA, 15 bp, Homo sapiens
aacatggtcattcac

SEQ ID NO: 1406402 - DNA, 15 bp, Homo sapiens
caacatggtcattca

SEQ ID NO: 1406403 - DNA, 15 bp, Homo sapiens
ccaacatggtcattc

SEQ ID NO: 1406404 - DNA, 15 bp, Homo sapiens
gccaacatggtcatt

SEQ ID NO: 1406405 - DNA, 15 bp, Homo sapiens
ggccaacatggtcat

SEQ ID NO: 1406406 - DNA, 15 bp, Homo sapiens
tggccaacatggtca

SEQ ID NO: 1406407 - DNA, 15 bp, Homo sapiens
atggccaacatggtc

SEQ ID NO: 1406408 - DNA, 15 bp, Homo sapiens
catggccaacatggt

SEQ ID NO: 1406409 - DNA, 15 bp, Homo sapiens
gcatggccaacatgg

SEQ ID NO: 1406410 - DNA, 15 bp, Homo sapiens
agcatggccaacatg

SEQ ID NO: 1406411 - DNA, 15 bp, Homo sapiens
cagcatggccaacat

SEQ ID NO: 1406412 - DNA, 15 bp, Homo sapiens
acagcatggccaaca

SEQ ID NO: 1406413 - DNA, 15 bp, Homo sapiens
cacagcatggccaac

SEQ ID NO: 1406414 - DNA, 15 bp, Homo sapiens
tcacagcatggccaa

SEQ ID NO: 1406415 - DNA, 15 bp, Homo sapiens
ttcacagcatggcca

SEQ ID NO: 1406416 - DNA, 15 bp, Homo sapiens
attcacagcatggcc

SEQ ID NO: 1406417 - DNA, 15 bp, Homo sapiens
cattcacagcatggc

SEQ ID NO: 1406418 - DNA, 15 bp, Homo sapiens
gcattcacagcatgg

SEQ ID NO: 1406419 - DNA, 15 bp, Homo sapiens
tgcattcacagcatg

SEQ ID NO: 1406420 - DNA, 15 bp, Homo sapiens
atgcattcacagcat

SEQ ID NO: 1406421 - DNA, 15 bp, Homo sapiens
catgcattcacagca

SEQ ID NO: 1406422 - DNA, 15 bp, Homo sapiens
ccatgcattcacagc

SEQ ID NO: 1406423 - DNA, 15 bp, Homo sapiens
gccatgcattcacag

SEQ ID NO: 1406424 - DNA, 15 bp, Homo sapiens
tgccatgcattcaca

SEQ ID NO: 1406425 - DNA, 15 bp, Homo sapiens
atgccatgcattcac

SEQ ID NO: 1406426 - DNA, 15 bp, Homo sapiens
aatgccatgcattca

SEQ ID NO: 1406427 - DNA, 15 bp, Homo sapiens
aaatgccatgcattc

SEQ ID NO: 1406428 - DNA, 15 bp, Homo sapiens
taaatgccatgcatt

SEQ ID NO: 1406429 - DNA, 15 bp, Homo sapiens
ataaatgccatgcat

SEQ ID NO: 1406430 - DNA, 15 bp, Homo sapiens
tataaatgccatgca

SEQ ID NO: 1406431 - DNA, 15 bp, Homo sapiens
ttataaatgccatgc

SEQ ID NO: 1406432 - DNA, 15 bp, Homo sapiens
tttataaatgccatg

SEQ ID NO: 1406433 - DNA, 15 bp, Homo sapiens
ctttataaatgccat

SEQ ID NO: 1406434 - DNA, 15 bp, Homo sapiens
gctttataaatgcca

SEQ ID NO: 1406435 - DNA, 15 bp, Homo sapiens
tgctttataaatgcc

SEQ ID NO: 1406436 - DNA, 15 bp, Homo sapiens
ttgctttataaatgc

SEQ ID NO: 1406437 - DNA, 15 bp, Homo sapiens
tttgctttataaatg

SEQ ID NO: 1406438 - DNA, 15 bp, Homo sapiens
atttgctttataaat

SEQ ID NO: 1406439 - DNA, 15 bp, Homo sapiens
tatttgctttataaa

SEQ ID NO: 1406440 - DNA, 15 bp, Homo sapiens
atatttgctttataa

SEQ ID NO: 1406441 - DNA, 15 bp, Homo sapiens
aatatttgctttata

SEQ ID NO: 1406442 - DNA, 15 bp, Homo sapiens
taatatttgctttat

SEQ ID NO: 1406443 - DNA, 15 bp, Homo sapiens
ataatatttgcttta

SEQ ID NO: 1406444 - DNA, 15 bp, Homo sapiens
aataatatttgcttt

SEQ ID NO: 1406445 - DNA, 15 bp, Homo sapiens
aaataatatttgctt

SEQ ID NO: 1406446 - DNA, 15 bp, Homo sapiens
aaaataatatttgct

SEQ ID NO: 1406447 - DNA, 15 bp, Homo sapiens
gaaaataatatttgc

SEQ ID NO: 1406448 - DNA, 15 bp, Homo sapiens
tgaaaataatatttg

SEQ ID NO: 1406449 - DNA, 15 bp, Homo sapiens
ctgaaaataatattt

SEQ ID NO: 1406450 - DNA, 15 bp, Homo sapiens
tctgaaaataatatt

SEQ ID NO: 1406451 - DNA, 15 bp, Homo sapiens
ttctgaaaataatat

SEQ ID NO: 1406452 - DNA, 15 bp, Homo sapiens
attctgaaaataata

SEQ ID NO: 1406453 - DNA, 15 bp, Homo sapiens
cattctgaaaataat

SEQ ID NO: 1406454 - DNA, 15 bp, Homo sapiens
acattctgaaaataa

SEQ ID NO: 1406455 - DNA, 15 bp, Homo sapiens
gacattctgaaaata

SEQ ID NO: 1406456 - DNA, 15 bp, Homo sapiens
tgacattctgaaaat

SEQ ID NO: 1406457 - DNA, 15 bp, Homo sapiens
ttgacattctgaaaa

SEQ ID NO: 1406458 - DNA, 15 bp, Homo sapiens
cttgacattctgaaa

SEQ ID NO: 1406459 - DNA, 15 bp, Homo sapiens
gcttgacattctgaa

SEQ ID NO: 1406460 - DNA, 15 bp, Homo sapiens
ggcttgacattctga

SEQ ID NO: 1406461 - DNA, 15 bp, Homo sapiens
tggcttgacattctg

SEQ ID NO: 1406462 - DNA, 15 bp, Homo sapiens
atggcttgacattct

SEQ ID NO: 1406463 - DNA, 15 bp, Homo sapiens
tatggcttgacattc

SEQ ID NO: 1406464 - DNA, 15 bp, Homo sapiens
ttatggcttgacatt

SEQ ID NO: 1406465 - DNA, 15 bp, Homo sapiens
tttatggcttgacat

SEQ ID NO: 1406466 - DNA, 15 bp, Homo sapiens
atttatggcttgaca

SEQ ID NO: 1406467 - DNA, 15 bp, Homo sapiens
aatttatggcttgac

SEQ ID NO: 1406468 - DNA, 15 bp, Homo sapiens
aaatttatggcttga

SEQ ID NO: 1406469 - DNA, 15 bp, Homo sapiens
gaaatttatggcttg

SEQ ID NO: 1406470 - DNA, 15 bp, Homo sapiens
agaaatttatggctt

SEQ ID NO: 1406471 - DNA, 15 bp, Homo sapiens
aagaaatttatggct

SEQ ID NO: 1406472 - DNA, 15 bp, Homo sapiens
taagaaatttatggc

SEQ ID NO: 1406473 - DNA, 15 bp, Homo sapiens
gtaagaaatttatgg

SEQ ID NO: 1406474 - DNA, 15 bp, Homo sapiens
ggtaagaaatttatg

SEQ ID NO: 1406475 - DNA, 15 bp, Homo sapiens
tggtaagaaatttat

SEQ ID NO: 1406476 - DNA, 15 bp, Homo sapiens
gtggtaagaaattta

SEQ ID NO: 1406477 - DNA, 15 bp, Homo sapiens
tgtggtaagaaattt

SEQ ID NO: 1406478 - DNA, 15 bp, Homo sapiens
atgtggtaagaaatt

SEQ ID NO: 1406479 - DNA, 15 bp, Homo sapiens
aatgtggtaagaaat

SEQ ID NO: 1406480 - DNA, 15 bp, Homo sapiens
aaatgtggtaagaaa

SEQ ID NO: 1406481 - DNA, 15 bp, Homo sapiens
gaaatgtggtaagaa

SEQ ID NO: 1406482 - DNA, 15 bp, Homo sapiens
agaaatgtggtaaga

SEQ ID NO: 1406483 - DNA, 15 bp, Homo sapiens
cagaaatgtggtaag

SEQ ID NO: 1406484 - DNA, 15 bp, Homo sapiens
acagaaatgtggtaa

SEQ ID NO: 1406485 - DNA, 15 bp, Homo sapiens
cacagaaatgtggta

SEQ ID NO: 1406486 - DNA, 15 bp, Homo sapiens
ccacagaaatgtggt

SEQ ID NO: 1406487 - DNA, 15 bp, Homo sapiens
cccacagaaatgtgg

SEQ ID NO: 1406488 - DNA, 15 bp, Homo sapiens
acccacagaaatgtg

SEQ ID NO: 1406489 - DNA, 15 bp, Homo sapiens
cacccacagaaatgt

SEQ ID NO: 1406490 - DNA, 15 bp, Homo sapiens
tcacccacagaaatg

SEQ ID NO: 1406491 - DNA, 15 bp, Homo sapiens
ttcacccacagaaat

SEQ ID NO: 1406492 - DNA, 15 bp, Homo sapiens
tttcacccacagaaa

SEQ ID NO: 1406493 - DNA, 15 bp, Homo sapiens
gtttcacccacagaa

SEQ ID NO: 1406494 - DNA, 15 bp, Homo sapiens
tgtttcacccacaga

SEQ ID NO: 1406495 - DNA, 15 bp, Homo sapiens
atgtttcacccacag

SEQ ID NO: 1406496 - DNA, 15 bp, Homo sapiens
gatgtttcacccaca

SEQ ID NO: 1406497 - DNA, 15 bp, Homo sapiens
agatgtttcacccac

SEQ ID NO: 1406498 - DNA, 15 bp, Homo sapiens
aagatgtttcaccca

SEQ ID NO: 1406499 - DNA, 15 bp, Homo sapiens
taagatgtttcaccc

SEQ ID NO: 1406500 - DNA, 15 bp, Homo sapiens
ttaagatgtttcacc

SEQ ID NO: 1406501 - DNA, 15 bp, Homo sapiens
gttaagatgtttcac

SEQ ID NO: 1406502 - DNA, 15 bp, Homo sapiens
tgttaagatgtttca

SEQ ID NO: 1406503 - DNA, 15 bp, Homo sapiens
gtgttaagatgtttc

SEQ ID NO: 1406504 - DNA, 15 bp, Homo sapiens
agtgttaagatgttt

SEQ ID NO: 1406505 - DNA, 15 bp, Homo sapiens
cagtgttaagatgtt

SEQ ID NO: 1406506 - DNA, 15 bp, Homo sapiens
acagtgttaagatgt

SEQ ID NO: 1406507 - DNA, 15 bp, Homo sapiens
tacagtgttaagatg

SEQ ID NO: 1406508 - DNA, 15 bp, Homo sapiens
ttacagtgttaagat

SEQ ID NO: 1406509 - DNA, 15 bp, Homo sapiens
attacagtgttaaga

SEQ ID NO: 1406510 - DNA, 15 bp, Homo sapiens
gattacagtgttaag

SEQ ID NO: 1406511 - DNA, 15 bp, Homo sapiens
tgattacagtgttaa

SEQ ID NO: 1406512 - DNA, 15 bp, Homo sapiens
atgattacagtgtta

SEQ ID NO: 1406513 - DNA, 15 bp, Homo sapiens
aatgattacagtgtt

SEQ ID NO: 1406514 - DNA, 15 bp, Homo sapiens
gaatgattacagtgt

SEQ ID NO: 1406515 - DNA, 15 bp, Homo sapiens
ggaatgattacagtg

SEQ ID NO: 1406516 - DNA, 15 bp, Homo sapiens
tggaatgattacagt

SEQ ID NO: 1406517 - DNA, 15 bp, Homo sapiens
gtggaatgattacag

SEQ ID NO: 1406518 - DNA, 15 bp, Homo sapiens
agtggaatgattaca

SEQ ID NO: 1406519 - DNA, 15 bp, Homo sapiens
cagtggaatgattac

SEQ ID NO: 1406520 - DNA, 15 bp, Homo sapiens
ccagtggaatgatta

SEQ ID NO: 1406521 - DNA, 15 bp, Homo sapiens
gccagtggaatgatt

SEQ ID NO: 1406522 - DNA, 15 bp, Homo sapiens
tgccagtggaatgat

SEQ ID NO: 1406523 - DNA, 15 bp, Homo sapiens
atgccagtggaatga

SEQ ID NO: 1406524 - DNA, 15 bp, Homo sapiens
aatgccagtggaatg

SEQ ID NO: 1406525 - DNA, 15 bp, Homo sapiens
taatgccagtggaat

SEQ ID NO: 1406526 - DNA, 15 bp, Homo sapiens
ttaatgccagtggaa

SEQ ID NO: 1406527 - DNA, 15 bp, Homo sapiens
tttaatgccagtgga

SEQ ID NO: 1406528 - DNA, 15 bp, Homo sapiens
ttttaatgccagtgg

SEQ ID NO: 1406529 - DNA, 15 bp, Homo sapiens
tttttaatgccagtg

SEQ ID NO: 1406530 - DNA, 15 bp, Homo sapiens
atttttaatgccagt

SEQ ID NO: 1406531 - DNA, 15 bp, Homo sapiens
catttttaatgccag

SEQ ID NO: 1406532 - DNA, 15 bp, Homo sapiens
tcatttttaatgcca

SEQ ID NO: 1406533 - DNA, 15 bp, Homo sapiens
ctcatttttaatgcc

SEQ ID NO: 1406534 - DNA, 15 bp, Homo sapiens
tctcatttttaatgc

SEQ ID NO: 1406535 - DNA, 15 bp, Homo sapiens
gtctcatttttaatg

SEQ ID NO: 1406536 - DNA, 15 bp, Homo sapiens
ggtctcatttttaat

SEQ ID NO: 1406537 - DNA, 15 bp, Homo sapiens
tggtctcatttttaa

SEQ ID NO: 1406538 - DNA, 15 bp, Homo sapiens
ctggtctcattttta

SEQ ID NO: 1406539 - DNA, 15 bp, Homo sapiens
gctggtctcattttt

SEQ ID NO: 1406540 - DNA, 15 bp, Homo sapiens
tgctggtctcatttt

SEQ ID NO: 1406541 - DNA, 15 bp, Homo sapiens
ctgctggtctcattt

SEQ ID NO: 1406542 - DNA, 15 bp, Homo sapiens
cctgctggtctcatt

SEQ ID NO: 1406543 - DNA, 15 bp, Homo sapiens
gcctgctggtctcat

SEQ ID NO: 1406544 - DNA, 15 bp, Homo sapiens
agcctgctggtctca

SEQ ID NO: 1406545 - DNA, 15 bp, Homo sapiens
tagcctgctggtctc

SEQ ID NO: 1406546 - DNA, 15 bp, Homo sapiens
ctagcctgctggtct

SEQ ID NO: 1406547 - DNA, 15 bp, Homo sapiens
gctagcctgctggtc

SEQ ID NO: 1406548 - DNA, 15 bp, Homo sapiens
tgctagcctgctggt

SEQ ID NO: 1406549 - DNA, 15 bp, Homo sapiens
ttgctagcctgctgg

SEQ ID NO: 1406550 - DNA, 15 bp, Homo sapiens
tttgctagcctgctg

SEQ ID NO: 1406551 - DNA, 15 bp, Homo sapiens
ttttgctagcctgct

SEQ ID NO: 1406552 - DNA, 15 bp, Homo sapiens
gttttgctagcctgc

SEQ ID NO: 1406553 - DNA, 15 bp, Homo sapiens
tgttttgctagcctg

SEQ ID NO: 1406554 - DNA, 15 bp, Homo sapiens
ttgttttgctagcct

SEQ ID NO: 1406555 - DNA, 15 bp, Homo sapiens
attgttttgctagcc

SEQ ID NO: 1406556 - DNA, 15 bp, Homo sapiens
tattgttttgctagc

SEQ ID NO: 1406557 - DNA, 15 bp, Homo sapiens
atattgttttgctag

SEQ ID NO: 1406558 - DNA, 15 bp, Homo sapiens
catattgttttgcta

SEQ ID NO: 1406559 - DNA, 15 bp, Homo sapiens
tcatattgttttgct

SEQ ID NO: 1406560 - DNA, 15 bp, Homo sapiens
ctcatattgttttgc

SEQ ID NO: 1406561 - DNA, 15 bp, Homo sapiens
actcatattgttttg

SEQ ID NO: 1406562 - DNA, 15 bp, Homo sapiens
tactcatattgtttt

SEQ ID NO: 1406563 - DNA, 15 bp, Homo sapiens
ttactcatattgttt

SEQ ID NO: 1406564 - DNA, 15 bp, Homo sapiens
attactcatattgtt

SEQ ID NO: 1406565 - DNA, 15 bp, Homo sapiens
aattactcatattgt

SEQ ID NO: 1406566 - DNA, 15 bp, Homo sapiens
caattactcatattg

SEQ ID NO: 1406567 - DNA, 15 bp, Homo sapiens
tcaattactcatatt

SEQ ID NO: 1406568 - DNA, 15 bp, Homo sapiens
gtcaattactcatat

SEQ ID NO: 1406569 - DNA, 15 bp, Homo sapiens
agtcaattactcata

SEQ ID NO: 1406570 - DNA, 15 bp, Homo sapiens
gagtcaattactcat

SEQ ID NO: 1406571 - DNA, 15 bp, Homo sapiens
tgagtcaattactca

SEQ ID NO: 1406572 - DNA, 15 bp, Homo sapiens
ttgagtcaattactc

SEQ ID NO: 1406573 - DNA, 15 bp, Homo sapiens
cttgagtcaattact

SEQ ID NO: 1406574 - DNA, 15 bp, Homo sapiens
acttgagtcaattac

SEQ ID NO: 1406575 - DNA, 15 bp, Homo sapiens
cacttgagtcaatta

SEQ ID NO: 1406576 - DNA, 15 bp, Homo sapiens
tcacttgagtcaatt

SEQ ID NO: 1406577 - DNA, 15 bp, Homo sapiens
ctcacttgagtcaat

SEQ ID NO: 1406578 - DNA, 15 bp, Homo sapiens
actcacttgagtcaa

SEQ ID NO: 1406579 - DNA, 15 bp, Homo sapiens
aactcacttgagtca

SEQ ID NO: 1406580 - DNA, 15 bp, Homo sapiens
taactcacttgagtc

SEQ ID NO: 1406581 - DNA, 15 bp, Homo sapiens
ttaactcacttgagt

SEQ ID NO: 1406582 - DNA, 15 bp, Homo sapiens
tttaactcacttgag

SEQ ID NO: 1406583 - DNA, 15 bp, Homo sapiens
ttttaactcacttga

SEQ ID NO: 1406584 - DNA, 15 bp, Homo sapiens
gttttaactcacttg

SEQ ID NO: 1406585 - DNA, 15 bp, Homo sapiens
tgttttaactcactt

SEQ ID NO: 1406586 - DNA, 15 bp, Homo sapiens
ttgttttaactcact

SEQ ID NO: 1406587 - DNA, 15 bp, Homo sapiens
attgttttaactcac

SEQ ID NO: 1406588 - DNA, 15 bp, Homo sapiens
tattgttttaactca

SEQ ID NO: 1406589 - DNA, 15 bp, Homo sapiens
ttattgttttaactc

SEQ ID NO: 1406590 - DNA, 15 bp, Homo sapiens
attattgttttaact

SEQ ID NO: 1406591 - DNA, 15 bp, Homo sapiens
aattattgttttaac

SEQ ID NO: 1406592 - DNA, 15 bp, Homo sapiens
aaattattgttttaa

SEQ ID NO: 1406593 - DNA, 15 bp, Homo sapiens
aaaattattgtttta

SEQ ID NO: 1406594 - DNA, 15 bp, Homo sapiens
taaaattattgtttt

SEQ ID NO: 1406595 - DNA, 15 bp, Homo sapiens
ttaaaattattgttt

SEQ ID NO: 1406596 - DNA, 15 bp, Homo sapiens
tttaaaattattgtt

SEQ ID NO: 1406597 - DNA, 15 bp, Homo sapiens
ctttaaaattattgt

SEQ ID NO: 1406598 - DNA, 15 bp, Homo sapiens
gctttaaaattattg

SEQ ID NO: 1406599 - DNA, 15 bp, Homo sapiens
tgctttaaaattatt

SEQ ID NO: 1406600 - DNA, 15 bp, Homo sapiens
ttgctttaaaattat

SEQ ID NO: 1406601 - DNA, 15 bp, Homo sapiens
attgctttaaaatta

SEQ ID NO: 1406602 - DNA, 15 bp, Homo sapiens
cattgctttaaaatt

SEQ ID NO: 1406603 - DNA, 15 bp, Homo sapiens
ccattgctttaaaat

SEQ ID NO: 1406604 - DNA, 15 bp, Homo sapiens
accattgctttaaaa

SEQ ID NO: 1406605 - DNA, 15 bp, Homo sapiens
aaccattgctttaaa

SEQ ID NO: 1406606 - DNA, 15 bp, Homo sapiens
aaaccattgctttaa

SEQ ID NO: 1406607 - DNA, 15 bp, Homo sapiens
caaaccattgcttta

SEQ ID NO: 1406608 - DNA, 15 bp, Homo sapiens
acaaaccattgcttt

SEQ ID NO: 1406609 - DNA, 15 bp, Homo sapiens
aacaaaccattgctt

SEQ ID NO: 1406610 - DNA, 15 bp, Homo sapiens
gaacaaaccattgct

SEQ ID NO: 1406611 - DNA, 15 bp, Homo sapiens
agaacaaaccattgc

SEQ ID NO: 1406612 - DNA, 15 bp, Homo sapiens
tagaacaaaccattg

SEQ ID NO: 1406613 - DNA, 15 bp, Homo sapiens
ttagaacaaaccatt

SEQ ID NO: 1406614 - DNA, 15 bp, Homo sapiens
attagaacaaaccat

SEQ ID NO: 1406615 - DNA, 15 bp, Homo sapiens
tattagaacaaacca

SEQ ID NO: 1406616 - DNA, 15 bp, Homo sapiens
gtattagaacaaacc

SEQ ID NO: 1406617 - DNA, 15 bp, Homo sapiens
tgtattagaacaaac

SEQ ID NO: 1406618 - DNA, 15 bp, Homo sapiens
ttgtattagaacaaa

SEQ ID NO: 1406619 - DNA, 15 bp, Homo sapiens
cttgtattagaacaa

SEQ ID NO: 1406620 - DNA, 15 bp, Homo sapiens
gcttgtattagaaca

SEQ ID NO: 1406621 - DNA, 15 bp, Homo sapiens
tgcttgtattagaac

SEQ ID NO: 1406622 - DNA, 15 bp, Homo sapiens
atgcttgtattagaa

SEQ ID NO: 1406623 - DNA, 15 bp, Homo sapiens
tatgcttgtattaga

SEQ ID NO: 1406624 - DNA, 15 bp, Homo sapiens
ctatgcttgtattag

SEQ ID NO: 1406625 - DNA, 15 bp, Homo sapiens
actatgcttgtatta

SEQ ID NO: 1406626 - DNA, 15 bp, Homo sapiens
aactatgcttgtatt

SEQ ID NO: 1406627 - DNA, 15 bp, Homo sapiens
taactatgcttgtat

SEQ ID NO: 1406628 - DNA, 15 bp, Homo sapiens
ttaactatgcttgta

SEQ ID NO: 1406629 - DNA, 15 bp, Homo sapiens
tttaactatgcttgt

SEQ ID NO: 1406630 - DNA, 15 bp, Homo sapiens
atttaactatgcttg

SEQ ID NO: 1406631 - DNA, 15 bp, Homo sapiens
aatttaactatgctt

SEQ ID NO: 1406632 - DNA, 15 bp, Homo sapiens
aaatttaactatgct

SEQ ID NO: 1406633 - DNA, 15 bp, Homo sapiens
gaaatttaactatgc

SEQ ID NO: 1406634 - DNA, 15 bp, Homo sapiens
ggaaatttaactatg

SEQ ID NO: 1406635 - DNA, 15 bp, Homo sapiens
aggaaatttaactat

SEQ ID NO: 1406636 - DNA, 15 bp, Homo sapiens
gaggaaatttaacta

SEQ ID NO: 1406637 - DNA, 15 bp, Homo sapiens
ggaggaaatttaact

SEQ ID NO: 1406638 - DNA, 15 bp, Homo sapiens
gggaggaaatttaac

SEQ ID NO: 1406639 - DNA, 15 bp, Homo sapiens
agggaggaaatttaa

SEQ ID NO: 1406640 - DNA, 15 bp, Homo sapiens
gagggaggaaattta

SEQ ID NO: 1406641 - DNA, 15 bp, Homo sapiens
ggagggaggaaattt

SEQ ID NO: 1406642 - DNA, 15 bp, Homo sapiens
gggagggaggaaatt

SEQ ID NO: 1406643 - DNA, 15 bp, Homo sapiens
ggggagggaggaaat

SEQ ID NO: 1406644 - DNA, 15 bp, Homo sapiens
gggggagggaggaaa

SEQ ID NO: 1406645 - DNA, 15 bp, Homo sapiens
tgggggagggaggaa

SEQ ID NO: 1406646 - DNA, 15 bp, Homo sapiens
tggtgggggagggag

SEQ ID NO: 1406647 - DNA, 15 bp, Homo sapiens
ttggtgggggaggga

SEQ ID NO: 1406648 - DNA, 15 bp, Homo sapiens
tttggtgggggaggg

SEQ ID NO: 1406649 - DNA, 15 bp, Homo sapiens
ttttggtgggggagg

SEQ ID NO: 1406650 - DNA, 15 bp, Homo sapiens
gttttggtgggggag

SEQ ID NO: 1406651 - DNA, 15 bp, Homo sapiens
tgttttggtggggga

SEQ ID NO: 1406652 - DNA, 15 bp, Homo sapiens
gtgttttggtggggg

SEQ ID NO: 1406653 - DNA, 15 bp, Homo sapiens
agtgttttggtgggg

SEQ ID NO: 1406654 - DNA, 15 bp, Homo sapiens
cagtgttttggtggg

SEQ ID NO: 1406655 - DNA, 15 bp, Homo sapiens
tcagtgttttggtgg

SEQ ID NO: 1406656 - DNA, 15 bp, Homo sapiens
ttcagtgttttggtg

SEQ ID NO: 1406657 - DNA, 15 bp, Homo sapiens
tttcagtgttttggt

SEQ ID NO: 1406658 - DNA, 15 bp, Homo sapiens
atttcagtgttttgg

SEQ ID NO: 1406659 - DNA, 15 bp, Homo sapiens
catttcagtgttttg

SEQ ID NO: 1406660 - DNA, 15 bp, Homo sapiens
ttcatttcagtgttt

SEQ ID NO: 1406661 - DNA, 15 bp, Homo sapiens
gttcatttcagtgtt

SEQ ID NO: 1406662 - DNA, 15 bp, Homo sapiens
tgttcatttcagtgt

SEQ ID NO: 1406663 - DNA, 15 bp, Homo sapiens
ttgttcatttcagtg

SEQ ID NO: 1406664 - DNA, 15 bp, Homo sapiens
attgttcatttcagt

SEQ ID NO: 1406665 - DNA, 15 bp, Homo sapiens
cattgttcatttcag

SEQ ID NO: 1406666 - DNA, 15 bp, Homo sapiens
ccattgttcatttca

SEQ ID NO: 1406667 - DNA, 15 bp, Homo sapiens
accattgttcatttc

SEQ ID NO: 1406668 - DNA, 15 bp, Homo sapiens
aaccattgttcattt

SEQ ID NO: 1406669 - DNA, 15 bp, Homo sapiens
taaccattgttcatt

SEQ ID NO: 1406670 - DNA, 15 bp, Homo sapiens
ttaaccattgttcat

SEQ ID NO: 1406671 - DNA, 15 bp, Homo sapiens
cttaaccattgttca

SEQ ID NO: 1406672 - DNA, 15 bp, Homo sapiens
acttaaccattgttc

SEQ ID NO: 1406673 - DNA, 15 bp, Homo sapiens
tacttaaccattgtt

SEQ ID NO: 1406674 - DNA, 15 bp, Homo sapiens
ttacttaaccattgt

SEQ ID NO: 1406675 - DNA, 15 bp, Homo sapiens
cttacttaaccattg

SEQ ID NO: 1406676 - DNA, 15 bp, Homo sapiens
acttacttaaccatt

SEQ ID NO: 1406677 - DNA, 15 bp, Homo sapiens
tacttacttaaccat

SEQ ID NO: 1406678 - DNA, 15 bp, Homo sapiens
ttacttacttaacca

SEQ ID NO: 1406679 - DNA, 15 bp, Homo sapiens
cttacttacttaacc

SEQ ID NO: 1406680 - DNA, 15 bp, Homo sapiens
ccttacttacttaac

SEQ ID NO: 1406681 - DNA, 15 bp, Homo sapiens
accttacttacttaa

SEQ ID NO: 1406682 - DNA, 15 bp, Homo sapiens
taccttacttactta

SEQ ID NO: 1406683 - DNA, 15 bp, Homo sapiens
ctaccttacttactt

SEQ ID NO: 1406684 - DNA, 15 bp, Homo sapiens
actaccttacttact

SEQ ID NO: 1406685 - DNA, 15 bp, Homo sapiens
aactaccttacttac

SEQ ID NO: 1406686 - DNA, 15 bp, Homo sapiens
gaactaccttactta

SEQ ID NO: 1406687 - DNA, 15 bp, Homo sapiens
agaactaccttactt

SEQ ID NO: 1406688 - DNA, 15 bp, Homo sapiens
gagaactaccttact

SEQ ID NO: 1406689 - DNA, 15 bp, Homo sapiens
tgagaactaccttac

SEQ ID NO: 1406690 - DNA, 15 bp, Homo sapiens
atgagaactacctta

SEQ ID NO: 1406691 - DNA, 15 bp, Homo sapiens
aatgagaactacctt

SEQ ID NO: 1406692 - DNA, 15 bp, Homo sapiens
caatgagaactacct

SEQ ID NO: 1406693 - DNA, 15 bp, Homo sapiens
acaatgagaactacc

SEQ ID NO: 1406694 - DNA, 15 bp, Homo sapiens
gacaatgagaactac

SEQ ID NO: 1406695 - DNA, 15 bp, Homo sapiens
ggacaatgagaacta

SEQ ID NO: 1406696 - DNA, 15 bp, Homo sapiens
cggacaatgagaact

SEQ ID NO: 1406697 - DNA, 15 bp, Homo sapiens
acggacaatgagaac

SEQ ID NO: 1406698 - DNA, 15 bp, Homo sapiens
tacggacaatgagaa

SEQ ID NO: 1406699 - DNA, 15 bp, Homo sapiens
atacggacaatgaga

SEQ ID NO: 1406700 - DNA, 15 bp, Homo sapiens
tatacggacaatgag

SEQ ID NO: 1406701 - DNA, 15 bp, Homo sapiens
ttatacggacaatga

SEQ ID NO: 1406702 - DNA, 15 bp, Homo sapiens
cttatacggacaatg

SEQ ID NO: 1406703 - DNA, 15 bp, Homo sapiens
ccttatacggacaat

SEQ ID NO: 1406704 - DNA, 15 bp, Homo sapiens
tccttatacggacaa

SEQ ID NO: 1406705 - DNA, 15 bp, Homo sapiens
ttccttatacggaca

SEQ ID NO: 1406706 - DNA, 15 bp, Homo sapiens
cttccttatacggac

SEQ ID NO: 1406707 - DNA, 15 bp, Homo sapiens
tcttccttatacgga

SEQ ID NO: 1406708 - DNA, 15 bp, Homo sapiens
ttcttccttatacgg

SEQ ID NO: 1406709 - DNA, 15 bp, Homo sapiens
cttcttccttatacg

SEQ ID NO: 1406710 - DNA, 15 bp, Homo sapiens
ccttcttccttatac

SEQ ID NO: 1406711 - DNA, 15 bp, Homo sapiens
cccttcttccttata

SEQ ID NO: 1406712 - DNA, 15 bp, Homo sapiens
tcccttcttccttat

SEQ ID NO: 1406713 - DNA, 15 bp, Homo sapiens
atcccttcttcctta

SEQ ID NO: 1406714 - DNA, 15 bp, Homo sapiens
catcccttcttcctt

SEQ ID NO: 1406715 - DNA, 15 bp, Homo sapiens
tcatcccttcttcct

SEQ ID NO: 1406716 - DNA, 15 bp, Homo sapiens
atcatcccttcttcc

SEQ ID NO: 1406717 - DNA, 15 bp, Homo sapiens
aatcatcccttcttc

SEQ ID NO: 1406718 - DNA, 15 bp, Homo sapiens
taatcatcccttctt

SEQ ID NO: 1406719 - DNA, 15 bp, Homo sapiens
ttaatcatcccttct

SEQ ID NO: 1406720 - DNA, 15 bp, Homo sapiens
tttaatcatcccttc

SEQ ID NO: 1406721 - DNA, 15 bp, Homo sapiens
ctttaatcatccctt

SEQ ID NO: 1406722 - DNA, 15 bp, Homo sapiens
cctttaatcatccct

SEQ ID NO: 1406723 - DNA, 15 bp, Homo sapiens
ccctttaatcatccc

SEQ ID NO: 1406724 - DNA, 15 bp, Homo sapiens
accctttaatcatcc

SEQ ID NO: 1406725 - DNA, 15 bp, Homo sapiens
taccctttaatcatc

SEQ ID NO: 1406726 - DNA, 15 bp, Homo sapiens
ctaccctttaatcat

SEQ ID NO: 1406727 - DNA, 15 bp, Homo sapiens
tctaccctttaatca

SEQ ID NO: 1406728 - DNA, 15 bp, Homo sapiens
gtctaccctttaatc

SEQ ID NO: 1406729 - DNA, 15 bp, Homo sapiens
tgtctaccctttaat

SEQ ID NO: 1406730 - DNA, 15 bp, Homo sapiens
gtgtctaccctttaa

SEQ ID NO: 1406731 - DNA, 15 bp, Homo sapiens
agtgtctacccttta

SEQ ID NO: 1406732 - DNA, 15 bp, Homo sapiens
cagtgtctacccttt

SEQ ID NO: 1406733 - DNA, 15 bp, Homo sapiens
acagtgtctaccctt

SEQ ID NO: 1406734 - DNA, 15 bp, Homo sapiens
aacagtgtctaccct

SEQ ID NO: 1406735 - DNA, 15 bp, Homo sapiens
gaacagtgtctaccc

SEQ ID NO: 1406736 - DNA, 15 bp, Homo sapiens
ggaacagtgtctacc

SEQ ID NO: 1406737 - DNA, 15 bp, Homo sapiens
aggaacagtgtctac

SEQ ID NO: 1406738 - DNA, 15 bp, Homo sapiens
aaggaacagtgtcta

SEQ ID NO: 1406739 - DNA, 15 bp, Homo sapiens
gaaggaacagtgtct

SEQ ID NO: 1406740 - DNA, 15 bp, Homo sapiens
agaaggaacagtgtc

SEQ ID NO: 1406741 - DNA, 15 bp, Homo sapiens
gagaaggaacagtgt

SEQ ID NO: 1406742 - DNA, 15 bp, Homo sapiens
agagaaggaacagtg

SEQ ID NO: 1406743 - DNA, 15 bp, Homo sapiens
aagagaaggaacagt

SEQ ID NO: 1406744 - DNA, 15 bp, Homo sapiens
gaagagaaggaacag

SEQ ID NO: 1406745 - DNA, 15 bp, Homo sapiens
agaagagaaggaaca

SEQ ID NO: 1406746 - DNA, 15 bp, Homo sapiens
aagaagagaaggaac

SEQ ID NO: 1406747 - DNA, 15 bp, Homo sapiens
taagaagagaaggaa

SEQ ID NO: 1406748 - DNA, 15 bp, Homo sapiens
ttaagaagagaagga

SEQ ID NO: 1406749 - DNA, 15 bp, Homo sapiens
gttaagaagagaagg

SEQ ID NO: 1406750 - DNA, 15 bp, Homo sapiens
agttaagaagagaag

SEQ ID NO: 1406751 - DNA, 15 bp, Homo sapiens
aagttaagaagagaa

SEQ ID NO: 1406752 - DNA, 15 bp, Homo sapiens
gaagttaagaagaga

SEQ ID NO: 1406753 - DNA, 15 bp, Homo sapiens
agaagttaagaagag

SEQ ID NO: 1406754 - DNA, 15 bp, Homo sapiens
cagaagttaagaaga

SEQ ID NO: 1406755 - DNA, 15 bp, Homo sapiens
gcagaagttaagaag

SEQ ID NO: 1406756 - DNA, 15 bp, Homo sapiens
agcagaagttaagaa

SEQ ID NO: 1406757 - DNA, 15 bp, Homo sapiens
gagcagaagttaaga

SEQ ID NO: 1406758 - DNA, 15 bp, Homo sapiens
agagcagaagttaag

SEQ ID NO: 1406759 - DNA, 15 bp, Homo sapiens
aagagcagaagttaa

SEQ ID NO: 1406760 - DNA, 15 bp, Homo sapiens
aaagagcagaagtta

SEQ ID NO: 1406761 - DNA, 15 bp, Homo sapiens
aaaagagcagaagtt

SEQ ID NO: 1406762 - DNA, 15 bp, Homo sapiens
gaaaagagcagaagt

SEQ ID NO: 1406763 - DNA, 15 bp, Homo sapiens
agaaaagagcagaag

SEQ ID NO: 1406764 - DNA, 15 bp, Homo sapiens
gagaaaagagcagaa

SEQ ID NO: 1406765 - DNA, 15 bp, Homo sapiens
agagaaaagagcaga

SEQ ID NO: 1406766 - DNA, 15 bp, Homo sapiens
gagagaaaagagcag

SEQ ID NO: 1406767 - DNA, 15 bp, Homo sapiens
agagagaaaagagca

SEQ ID NO: 1406768 - DNA, 15 bp, Homo sapiens
gagagagaaaagagc

SEQ ID NO: 1406769 - DNA, 15 bp, Homo sapiens
ggagagagaaaagag

SEQ ID NO: 1406770 - DNA, 15 bp, Homo sapiens
gggagagagaaaaga

SEQ ID NO: 1406771 - DNA, 15 bp, Homo sapiens
agggagagagaaaag

SEQ ID NO: 1406772 - DNA, 15 bp, Homo sapiens
aagggagagagaaaa

SEQ ID NO: 1406773 - DNA, 15 bp, Homo sapiens
caagggagagagaaa

SEQ ID NO: 1406774 - DNA, 15 bp, Homo sapiens
acaagggagagagaa

SEQ ID NO: 1406775 - DNA, 15 bp, Homo sapiens
tacaagggagagaga

SEQ ID NO: 1406776 - DNA, 15 bp, Homo sapiens
ttacaagggagagag

SEQ ID NO: 1406777 - DNA, 15 bp, Homo sapiens
tttacaagggagaga

SEQ ID NO: 1406778 - DNA, 15 bp, Homo sapiens
ttttacaagggagag

SEQ ID NO: 1406779 - DNA, 15 bp, Homo sapiens
attttacaagggaga

SEQ ID NO: 1406780 - DNA, 15 bp, Homo sapiens
tattttacaagggag

SEQ ID NO: 1406781 - DNA, 15 bp, Homo sapiens
ttattttacaaggga

SEQ ID NO: 1406782 - DNA, 15 bp, Homo sapiens
attattttacaaggg

SEQ ID NO: 1406783 - DNA, 15 bp, Homo sapiens
aattattttacaagg

SEQ ID NO: 1406784 - DNA, 15 bp, Homo sapiens
aaattattttacaag

SEQ ID NO: 1406785 - DNA, 15 bp, Homo sapiens
taaattattttacaa

SEQ ID NO: 1406786 - DNA, 15 bp, Homo sapiens
ctaaattattttaca

SEQ ID NO: 1406787 - DNA, 15 bp, Homo sapiens
actaaattattttac

SEQ ID NO: 1406788 - DNA, 15 bp, Homo sapiens
tactaaattatttta

SEQ ID NO: 1406789 - DNA, 15 bp, Homo sapiens
ttactaaattatttt

SEQ ID NO: 1406790 - DNA, 15 bp, Homo sapiens
cttactaaattattt

SEQ ID NO: 1406791 - DNA, 15 bp, Homo sapiens
tcttactaaattatt

SEQ ID NO: 1406792 - DNA, 15 bp, Homo sapiens
ttcttactaaattat

SEQ ID NO: 1406793 - DNA, 15 bp, Homo sapiens
gttcttactaaatta

SEQ ID NO: 1406794 - DNA, 15 bp, Homo sapiens
tgttcttactaaatt

SEQ ID NO: 1406795 - DNA, 15 bp, Homo sapiens
ctgttcttactaaat

SEQ ID NO: 1406796 - DNA, 15 bp, Homo sapiens
actgttcttactaaa

SEQ ID NO: 1406797 - DNA, 15 bp, Homo sapiens
gactgttcttactaa

SEQ ID NO: 1406798 - DNA, 15 bp, Homo sapiens
tgactgttcttacta

SEQ ID NO: 1406799 - DNA, 15 bp, Homo sapiens
gtgactgttcttact

SEQ ID NO: 1406800 - DNA, 15 bp, Homo sapiens
tgtgactgttcttac

SEQ ID NO: 1406801 - DNA, 15 bp, Homo sapiens
ctgtgactgttctta

SEQ ID NO: 1406802 - DNA, 15 bp, Homo sapiens
actgtgactgttctt

SEQ ID NO: 1406803 - DNA, 15 bp, Homo sapiens
aactgtgactgttct

SEQ ID NO: 1406804 - DNA, 15 bp, Homo sapiens
gaactgtgactgttc

SEQ ID NO: 1406805 - DNA, 15 bp, Homo sapiens
agaactgtgactgtt

SEQ ID NO: 1406806 - DNA, 15 bp, Homo sapiens
tagaactgtgactgt

SEQ ID NO: 1406807 - DNA, 15 bp, Homo sapiens
gtagaactgtgactg

SEQ ID NO: 1406808 - DNA, 15 bp, Homo sapiens
tgtagaactgtgact

SEQ ID NO: 1406809 - DNA, 15 bp, Homo sapiens
ttgtagaactgtgac

SEQ ID NO: 1406810 - DNA, 15 bp, Homo sapiens
attgtagaactgtga

SEQ ID NO: 1406811 - DNA, 15 bp, Homo sapiens
tattgtagaactgtg

SEQ ID NO: 1406812 - DNA, 15 bp, Homo sapiens
ttattgtagaactgt

SEQ ID NO: 1406813 - DNA, 15 bp, Homo sapiens
gttattgtagaactg

SEQ ID NO: 1406814 - DNA, 15 bp, Homo sapiens
ggttattgtagaact

SEQ ID NO: 1406815 - DNA, 15 bp, Homo sapiens
tggttattgtagaac

SEQ ID NO: 1406816 - DNA, 15 bp, Homo sapiens
gtggttattgtagaa

SEQ ID NO: 1406817 - DNA, 15 bp, Homo sapiens
agtggttattgtaga

SEQ ID NO: 1406818 - DNA, 15 bp, Homo sapiens
aagtggttattgtag

SEQ ID NO: 1406819 - DNA, 15 bp, Homo sapiens
gaagtggttattgta

SEQ ID NO: 1406820 - DNA, 15 bp, Homo sapiens
cgaagtggttattgt

SEQ ID NO: 1406821 - DNA, 15 bp, Homo sapiens
tcgaagtggttattg

SEQ ID NO: 1406822 - DNA, 15 bp, Homo sapiens
atcgaagtggttatt

SEQ ID NO: 1406823 - DNA, 15 bp, Homo sapiens
catcgaagtggttat

SEQ ID NO: 1406824 - DNA, 15 bp, Homo sapiens
acatcgaagtggtta

SEQ ID NO: 1406825 - DNA, 15 bp, Homo sapiens
tacatcgaagtggtt

SEQ ID NO: 1406826 - DNA, 15 bp, Homo sapiens
atacatcgaagtggt

SEQ ID NO: 1406827 - DNA, 15 bp, Homo sapiens
catacatcgaagtgg

SEQ ID NO: 1406828 - DNA, 15 bp, Homo sapiens
ccatacatcgaagtg

SEQ ID NO: 1406829 - DNA, 15 bp, Homo sapiens
tccatacatcgaagt

SEQ ID NO: 1406830 - DNA, 15 bp, Homo sapiens
atccatacatcgaag

SEQ ID NO: 1406831 - DNA, 15 bp, Homo sapiens
gatccatacatcgaa

SEQ ID NO: 1406832 - DNA, 15 bp, Homo sapiens
tgatccatacatcga

SEQ ID NO: 1406833 - DNA, 15 bp, Homo sapiens
atgatccatacatcg

SEQ ID NO: 1406834 - DNA, 15 bp, Homo sapiens
catgatccatacatc

SEQ ID NO: 1406835 - DNA, 15 bp, Homo sapiens
acatgatccatacat

SEQ ID NO: 1406836 - DNA, 15 bp, Homo sapiens
tacatgatccataca

SEQ ID NO: 1406837 - DNA, 15 bp, Homo sapiens
ctacatgatccatac

SEQ ID NO: 1406838 - DNA, 15 bp, Homo sapiens
cctacatgatccata

SEQ ID NO: 1406839 - DNA, 15 bp, Homo sapiens
tcctacatgatccat

SEQ ID NO: 1406840 - DNA, 15 bp, Homo sapiens
ttcctacatgatcca

SEQ ID NO: 1406841 - DNA, 15 bp, Homo sapiens
tttcctacatgatcc

SEQ ID NO: 1406842 - DNA, 15 bp, Homo sapiens
ctttcctacatgatc

SEQ ID NO: 1406843 - DNA, 15 bp, Homo sapiens
actttcctacatgat

SEQ ID NO: 1406844 - DNA, 15 bp, Homo sapiens
tactttcctacatga

SEQ ID NO: 1406845 - DNA, 15 bp, Homo sapiens
ctactttcctacatg

SEQ ID NO: 1406846 - DNA, 15 bp, Homo sapiens
tctactttcctacat

SEQ ID NO: 1406847 - DNA, 15 bp, Homo sapiens
gtctactttcctaca

SEQ ID NO: 1406848 - DNA, 15 bp, Homo sapiens
agtctactttcctac

SEQ ID NO: 1406849 - DNA, 15 bp, Homo sapiens
gagtctactttccta

SEQ ID NO: 1406850 - DNA, 15 bp, Homo sapiens
tgagtctactttcct

SEQ ID NO: 1406851 - DNA, 15 bp, Homo sapiens
ttgagtctactttcc

SEQ ID NO: 1406852 - DNA, 15 bp, Homo sapiens
cttgagtctactttc

SEQ ID NO: 1406853 - DNA, 15 bp, Homo sapiens
tcttgagtctacttt

SEQ ID NO: 1406854 - DNA, 15 bp, Homo sapiens
ttcttgagtctactt

SEQ ID NO: 1406855 - DNA, 15 bp, Homo sapiens
tttcttgagtctact

SEQ ID NO: 1406856 - DNA, 15 bp, Homo sapiens
atttcttgagtctac

SEQ ID NO: 1406857 - DNA, 15 bp, Homo sapiens
tatttcttgagtcta

SEQ ID NO: 1406858 - DNA, 15 bp, Homo sapiens
ctatttcttgagtct

SEQ ID NO: 1406859 - DNA, 15 bp, Homo sapiens
actatttcttgagtc

SEQ ID NO: 1406860 - DNA, 15 bp, Homo sapiens
aactatttcttgagt

SEQ ID NO: 1406861 - DNA, 15 bp, Homo sapiens
aaactatttcttgag

SEQ ID NO: 1406862 - DNA, 15 bp, Homo sapiens
gaaactatttcttga

SEQ ID NO: 1406863 - DNA, 15 bp, Homo sapiens
tgaaactatttcttg

SEQ ID NO: 1406864 - DNA, 15 bp, Homo sapiens
ctgaaactatttctt

SEQ ID NO: 1406865 - DNA, 15 bp, Homo sapiens
cctgaaactatttct

SEQ ID NO: 1406866 - DNA, 15 bp, Homo sapiens
tcctgaaactatttc

SEQ ID NO: 1406867 - DNA, 15 bp, Homo sapiens
gtcctgaaactattt

SEQ ID NO: 1406868 - DNA, 15 bp, Homo sapiens
agtcctgaaactatt

SEQ ID NO: 1406869 - DNA, 15 bp, Homo sapiens
gagtcctgaaactat

SEQ ID NO: 1406870 - DNA, 15 bp, Homo sapiens
ggagtcctgaaacta

SEQ ID NO: 1406871 - DNA, 15 bp, Homo sapiens
gggagtcctgaaact

SEQ ID NO: 1406872 - DNA, 15 bp, Homo sapiens
ggggagtcctgaaac

SEQ ID NO: 1406873 - DNA, 15 bp, Homo sapiens
aggggagtcctgaaa

SEQ ID NO: 1406874 - DNA, 15 bp, Homo sapiens
caggggagtcctgaa

SEQ ID NO: 1406875 - DNA, 15 bp, Homo sapiens
tcaggggagtcctga

SEQ ID NO: 1406876 - DNA, 15 bp, Homo sapiens
ttcaggggagtcctg

SEQ ID NO: 1406877 - DNA, 15 bp, Homo sapiens
tttcaggggagtcct

SEQ ID NO: 1406878 - DNA, 15 bp, Homo sapiens
ttttcaggggagtcc

SEQ ID NO: 1406879 - DNA, 15 bp, Homo sapiens
cttttcaggggagtc

SEQ ID NO: 1406880 - DNA, 15 bp, Homo sapiens
acttttcaggggagt

SEQ ID NO: 1406881 - DNA, 15 bp, Homo sapiens
aacttttcaggggag

SEQ ID NO: 1406882 - DNA, 15 bp, Homo sapiens
aaacttttcagggga

SEQ ID NO: 1406883 - DNA, 15 bp, Homo sapiens
caaacttttcagggg

SEQ ID NO: 1406884 - DNA, 15 bp, Homo sapiens
acaaacttttcaggg

SEQ ID NO: 1406885 - DNA, 15 bp, Homo sapiens
gacaaacttttcagg

SEQ ID NO: 1406886 - DNA, 15 bp, Homo sapiens
tgacaaacttttcag

SEQ ID NO: 1406887 - DNA, 15 bp, Homo sapiens
ctgacaaacttttca

SEQ ID NO: 1406888 - DNA, 15 bp, Homo sapiens
gctgacaaacttttc

SEQ ID NO: 1406889 - DNA, 15 bp, Homo sapiens
tgctgacaaactttt

SEQ ID NO: 1406890 - DNA, 15 bp, Homo sapiens
atgctgacaaacttt

SEQ ID NO: 1406891 - DNA, 15 bp, Homo sapiens
catgctgacaaactt

SEQ ID NO: 1406892 - DNA, 15 bp, Homo sapiens
tcatgctgacaaact

SEQ ID NO: 1406893 - DNA, 15 bp, Homo sapiens
atcatgctgacaaac

SEQ ID NO: 1406894 - DNA, 15 bp, Homo sapiens
tatcatgctgacaaa

SEQ ID NO: 1406895 - DNA, 15 bp, Homo sapiens
atatcatgctgacaa

SEQ ID NO: 1406896 - DNA, 15 bp, Homo sapiens
catatcatgctgaca

SEQ ID NO: 1406897 - DNA, 15 bp, Homo sapiens
gcatatcatgctgac

SEQ ID NO: 1406898 - DNA, 15 bp, Homo sapiens
tgcatatcatgctga

SEQ ID NO: 1406899 - DNA, 15 bp, Homo sapiens
gtgcatatcatgctg

SEQ ID NO: 1406900 - DNA, 15 bp, Homo sapiens
tgtgcatatcatgct

SEQ ID NO: 1406901 - DNA, 15 bp, Homo sapiens
ctgtgcatatcatgc

SEQ ID NO: 1406902 - DNA, 15 bp, Homo sapiens
gctgtgcatatcatg

SEQ ID NO: 1406903 - DNA, 15 bp, Homo sapiens
tgctgtgcatatcat

SEQ ID NO: 1406904 - DNA, 15 bp, Homo sapiens
ctgctgtgcatatca

SEQ ID NO: 1406905 - DNA, 15 bp, Homo sapiens
cctgctgtgcatatc

SEQ ID NO: 1406906 - DNA, 15 bp, Homo sapiens
tcctgctgtgcatat

SEQ ID NO: 1406907 - DNA, 15 bp, Homo sapiens
gtcctgctgtgcata

SEQ ID NO: 1406908 - DNA, 15 bp, Homo sapiens
agtcctgctgtgcat

SEQ ID NO: 1406909 - DNA, 15 bp, Homo sapiens
cagtcctgctgtgca

SEQ ID NO: 1406910 - DNA, 15 bp, Homo sapiens
tcagtcctgctgtgc

SEQ ID NO: 1406911 - DNA, 15 bp, Homo sapiens
ttcagtcctgctgtg

SEQ ID NO: 1406912 - DNA, 15 bp, Homo sapiens
cttcagtcctgctgt

SEQ ID NO: 1406913 - DNA, 15 bp, Homo sapiens
tcttcagtcctgctg

SEQ ID NO: 1406914 - DNA, 15 bp, Homo sapiens
ttcttcagtcctgct

SEQ ID NO: 1406915 - DNA, 15 bp, Homo sapiens
tttcttcagtcctgc

SEQ ID NO: 1406916 - DNA, 15 bp, Homo sapiens
atttcttcagtcctg

SEQ ID NO: 1406917 - DNA, 15 bp, Homo sapiens
tatttcttcagtcct

SEQ ID NO: 1406918 - DNA, 15 bp, Homo sapiens
ttatttcttcagtcc

SEQ ID NO: 1406919 - DNA, 15 bp, Homo sapiens
gttatttcttcagtc

SEQ ID NO: 1406920 - DNA, 15 bp, Homo sapiens
agttatttcttcagt

SEQ ID NO: 1406921 - DNA, 15 bp, Homo sapiens
aagttatttcttcag

SEQ ID NO: 1406922 - DNA, 15 bp, Homo sapiens
gaagttatttcttca

SEQ ID NO: 1406923 - DNA, 15 bp, Homo sapiens
agaagttatttcttc

SEQ ID NO: 1406924 - DNA, 15 bp, Homo sapiens
tagaagttatttctt

SEQ ID NO: 1406925 - DNA, 15 bp, Homo sapiens
gtagaagttatttct

SEQ ID NO: 1406926 - DNA, 15 bp, Homo sapiens
cgtagaagttatttc

SEQ ID NO: 1406927 - DNA, 15 bp, Homo sapiens
acgtagaagttattt

SEQ ID NO: 1406928 - DNA, 15 bp, Homo sapiens
aacgtagaagttatt

SEQ ID NO: 1406929 - DNA, 15 bp, Homo sapiens
caacgtagaagttat

SEQ ID NO: 1406930 - DNA, 15 bp, Homo sapiens
tcaacgtagaagtta

SEQ ID NO: 1406931 - DNA, 15 bp, Homo sapiens
ttcaacgtagaagtt

SEQ ID NO: 1406932 - DNA, 15 bp, Homo sapiens
attcaacgtagaagt

SEQ ID NO: 1406933 - DNA, 15 bp, Homo sapiens
gattcaacgtagaag

SEQ ID NO: 1406934 - DNA, 15 bp, Homo sapiens
agattcaacgtagaa

SEQ ID NO: 1406935 - DNA, 15 bp, Homo sapiens
cagattcaacgtaga

SEQ ID NO: 1406936 - DNA, 15 bp, Homo sapiens
acagattcaacgtag

SEQ ID NO: 1406937 - DNA, 15 bp, Homo sapiens
aacagattcaacgta

SEQ ID NO: 1406938 - DNA, 15 bp, Homo sapiens
gaacagattcaacgt

SEQ ID NO: 1406939 - DNA, 15 bp, Homo sapiens
ggaacagattcaacg

SEQ ID NO: 1406940 - DNA, 15 bp, Homo sapiens
tggaacagattcaac

SEQ ID NO: 1406941 - DNA, 15 bp, Homo sapiens
gtggaacagattcaa

SEQ ID NO: 1406942 - DNA, 15 bp, Homo sapiens
ggtggaacagattca

SEQ ID NO: 1406943 - DNA, 15 bp, Homo sapiens
aggtggaacagattc

SEQ ID NO: 1406944 - DNA, 15 bp, Homo sapiens
aaggtggaacagatt

SEQ ID NO: 1406945 - DNA, 15 bp, Homo sapiens
aaaggtggaacagat

SEQ ID NO: 1406946 - DNA, 15 bp, Homo sapiens
gaaaggtggaacaga

SEQ ID NO: 1406947 - DNA, 15 bp, Homo sapiens
ggaaaggtggaacag

SEQ ID NO: 1406948 - DNA, 15 bp, Homo sapiens
tggaaaggtggaaca

SEQ ID NO: 1406949 - DNA, 15 bp, Homo sapiens
atggaaaggtggaac

SEQ ID NO: 1406950 - DNA, 15 bp, Homo sapiens
tatggaaaggtggaa

SEQ ID NO: 1406951 - DNA, 15 bp, Homo sapiens
atatggaaaggtgga

SEQ ID NO: 1406952 - DNA, 15 bp, Homo sapiens
aatatggaaaggtgg

SEQ ID NO: 1406953 - DNA, 15 bp, Homo sapiens
aaatatggaaaggtg

SEQ ID NO: 1406954 - DNA, 15 bp, Homo sapiens
caaatatggaaaggt

SEQ ID NO: 1406955 - DNA, 15 bp, Homo sapiens
tcaaatatggaaagg

SEQ ID NO: 1406956 - DNA, 15 bp, Homo sapiens
ttcaaatatggaaag

SEQ ID NO: 1406957 - DNA, 15 bp, Homo sapiens
cttcaaatatggaaa

SEQ ID NO: 1406958 - DNA, 15 bp, Homo sapiens
acttcaaatatggaa

SEQ ID NO: 1406959 - DNA, 15 bp, Homo sapiens
tacttcaaatatgga

SEQ ID NO: 1406960 - DNA, 15 bp, Homo sapiens
ttacttcaaatatgg

SEQ ID NO: 1406961 - DNA, 15 bp, Homo sapiens
gttacttcaaatatg

SEQ ID NO: 1406962 - DNA, 15 bp, Homo sapiens
agttacttcaaatat

SEQ ID NO: 1406963 - DNA, 15 bp, Homo sapiens
cagttacttcaaata

SEQ ID NO: 1406964 - DNA, 15 bp, Homo sapiens
acagttacttcaaat

SEQ ID NO: 1406965 - DNA, 15 bp, Homo sapiens
tacagttacttcaaa

SEQ ID NO: 1406966 - DNA, 15 bp, Homo sapiens
ttacagttacttcaa

SEQ ID NO: 1406967 - DNA, 15 bp, Homo sapiens
cttacagttacttca

SEQ ID NO: 1406968 - DNA, 15 bp, Homo sapiens
tcttacagttacttc

SEQ ID NO: 1406969 - DNA, 15 bp, Homo sapiens
ttcttacagttactt

SEQ ID NO: 1406970 - DNA, 15 bp, Homo sapiens
tttcttacagttact

SEQ ID NO: 1406971 - DNA, 15 bp, Homo sapiens
atttcttacagttac

SEQ ID NO: 1406972 - DNA, 15 bp, Homo sapiens
tatttcttacagtta

SEQ ID NO: 1406973 - DNA, 15 bp, Homo sapiens
ttatttcttacagtt

SEQ ID NO: 1406974 - DNA, 15 bp, Homo sapiens
attatttcttacagt

SEQ ID NO: 1406975 - DNA, 15 bp, Homo sapiens
tattatttcttacag

SEQ ID NO: 1406976 - DNA, 15 bp, Homo sapiens
gtattatttcttaca

SEQ ID NO: 1406977 - DNA, 15 bp, Homo sapiens
tgtattatttcttac

SEQ ID NO: 1406978 - DNA, 15 bp, Homo sapiens
ttgtattatttctta

SEQ ID NO: 1406979 - DNA, 15 bp, Homo sapiens
tttgtattatttctt

SEQ ID NO: 1406980 - DNA, 15 bp, Homo sapiens
ctttgtattatttct

SEQ ID NO: 1406981 - DNA, 15 bp, Homo sapiens
actttgtattatttc

SEQ ID NO: 1406982 - DNA, 15 bp, Homo sapiens
tactttgtattattt

SEQ ID NO: 1406983 - DNA, 15 bp, Homo sapiens
atactttgtattatt

SEQ ID NO: 1406984 - DNA, 15 bp, Homo sapiens
tatactttgtattat

SEQ ID NO: 1406985 - DNA, 15 bp, Homo sapiens
atatactttgtatta

SEQ ID NO: 1406986 - DNA, 15 bp, Homo sapiens
tatatactttgtatt

SEQ ID NO: 1406987 - DNA, 15 bp, Homo sapiens
ttatatactttgtat

SEQ ID NO: 1406988 - DNA, 15 bp, Homo sapiens
gttatatactttgta

SEQ ID NO: 1406989 - DNA, 15 bp, Homo sapiens
ggttatatactttgt

SEQ ID NO: 1406990 - DNA, 15 bp, Homo sapiens
gggttatatactttg

SEQ ID NO: 1406991 - DNA, 15 bp, Homo sapiens
agggttatatacttt

SEQ ID NO: 1406992 - DNA, 15 bp, Homo sapiens
cagggttatatactt

SEQ ID NO: 1406993 - DNA, 15 bp, Homo sapiens
gcagggttatatact

SEQ ID NO: 1406994 - DNA, 15 bp, Homo sapiens
ggcagggttatatac

SEQ ID NO: 1406995 - DNA, 15 bp, Homo sapiens
aggcagggttatata

SEQ ID NO: 1406996 - DNA, 15 bp, Homo sapiens
aaggcagggttatat

SEQ ID NO: 1406997 - DNA, 15 bp, Homo sapiens
taaggcagggttata

SEQ ID NO: 1406998 - DNA, 15 bp, Homo sapiens
ataaggcagggttat

SEQ ID NO: 1406999 - DNA, 15 bp, Homo sapiens
tataaggcagggtta

SEQ ID NO: 1407000 - DNA, 15 bp, Homo sapiens
atataaggcagggtt

SEQ ID NO: 1407001 - DNA, 15 bp, Homo sapiens
aatataaggcagggt

SEQ ID NO: 1407002 - DNA, 15 bp, Homo sapiens
aaatataaggcaggg

SEQ ID NO: 1407003 - DNA, 15 bp, Homo sapiens
aaaatataaggcagg

SEQ ID NO: 1407004 - DNA, 15 bp, Homo sapiens
taaaatataaggcag

SEQ ID NO: 1407005 - DNA, 15 bp, Homo sapiens
ttaaaatataaggca

SEQ ID NO: 1407006 - DNA, 15 bp, Homo sapiens
cttaaaatataaggc

SEQ ID NO: 1407007 - DNA, 15 bp, Homo sapiens
tcttaaaatataagg

SEQ ID NO: 1407008 - DNA, 15 bp, Homo sapiens
ttcttaaaatataag

SEQ ID NO: 1407009 - DNA, 15 bp, Homo sapiens
attcttaaaatataa

SEQ ID NO: 1407010 - DNA, 15 bp, Homo sapiens
cattcttaaaatata

SEQ ID NO: 1407011 - DNA, 15 bp, Homo sapiens
gcattcttaaaatat

SEQ ID NO: 1407012 - DNA, 15 bp, Homo sapiens
ggcattcttaaaata

SEQ ID NO: 1407013 - DNA, 15 bp, Homo sapiens
aggcattcttaaaat

SEQ ID NO: 1407014 - DNA, 15 bp, Homo sapiens
aaggcattcttaaaa

SEQ ID NO: 1407015 - DNA, 15 bp, Homo sapiens
aaaggcattcttaaa

SEQ ID NO: 1407016 - DNA, 15 bp, Homo sapiens
caaaggcattcttaa

SEQ ID NO: 1407017 - DNA, 15 bp, Homo sapiens
acaaaggcattctta

SEQ ID NO: 1407018 - DNA, 15 bp, Homo sapiens
tacaaaggcattctt

SEQ ID NO: 1407019 - DNA, 15 bp, Homo sapiens
ttacaaaggcattct

SEQ ID NO: 1407020 - DNA, 15 bp, Homo sapiens
attacaaaggcattc

SEQ ID NO: 1407021 - DNA, 15 bp, Homo sapiens
gattacaaaggcatt

SEQ ID NO: 1407022 - DNA, 15 bp, Homo sapiens
agattacaaaggcat

SEQ ID NO: 1407023 - DNA, 15 bp, Homo sapiens
tagattacaaaggca

SEQ ID NO: 1407024 - DNA, 15 bp, Homo sapiens
gtagattacaaaggc

SEQ ID NO: 1407025 - DNA, 15 bp, Homo sapiens
agtagattacaaagg

SEQ ID NO: 1407026 - DNA, 15 bp, Homo sapiens
tagtagattacaaag

SEQ ID NO: 1407027 - DNA, 15 bp, Homo sapiens
ctagtagattacaaa

SEQ ID NO: 1407028 - DNA, 15 bp, Homo sapiens
tctagtagattacaa

SEQ ID NO: 1407029 - DNA, 15 bp, Homo sapiens
atctagtagattaca

SEQ ID NO: 1407030 - DNA, 15 bp, Homo sapiens
catctagtagattac

SEQ ID NO: 1407031 - DNA, 15 bp, Homo sapiens
ccatctagtagatta

SEQ ID NO: 1407032 - DNA, 15 bp, Homo sapiens
cccatctagtagatt

SEQ ID NO: 1407033 - DNA, 15 bp, Homo sapiens
acccatctagtagat

SEQ ID NO: 1407034 - DNA, 15 bp, Homo sapiens
gacccatctagtaga

SEQ ID NO: 1407035 - DNA, 15 bp, Homo sapiens
tgacccatctagtag

SEQ ID NO: 1407036 - DNA, 15 bp, Homo sapiens
ttgacccatctagta

SEQ ID NO: 1407037 - DNA, 15 bp, Homo sapiens
gttgacccatctagt

SEQ ID NO: 1407038 - DNA, 15 bp, Homo sapiens
tgttgacccatctag

SEQ ID NO: 1407039 - DNA, 15 bp, Homo sapiens
ttgttgacccatcta

SEQ ID NO: 1407040 - DNA, 15 bp, Homo sapiens
tttgttgacccatct

SEQ ID NO: 1407041 - DNA, 15 bp, Homo sapiens
gtttgttgacccatc

SEQ ID NO: 1407042 - DNA, 15 bp, Homo sapiens
tgtttgttgacccat

SEQ ID NO: 1407043 - DNA, 15 bp, Homo sapiens
gtgtttgttgaccca

SEQ ID NO: 1407044 - DNA, 15 bp, Homo sapiens
tgtgtttgttgaccc

SEQ ID NO: 1407045 - DNA, 15 bp, Homo sapiens
gtgtgtttgttgacc

SEQ ID NO: 1407046 - DNA, 15 bp, Homo sapiens
tgtgtgtttgttgac

SEQ ID NO: 1407047 - DNA, 15 bp, Homo sapiens
atgtgtgtttgttga

SEQ ID NO: 1407048 - DNA, 15 bp, Homo sapiens
catgtgtgtttgttg

SEQ ID NO: 1407049 - DNA, 15 bp, Homo sapiens
tcatgtgtgtttgtt

SEQ ID NO: 1407050 - DNA, 15 bp, Homo sapiens
ttcatgtgtgtttgt

SEQ ID NO: 1407051 - DNA, 15 bp, Homo sapiens
tttcatgtgtgtttg

SEQ ID NO: 1407052 - DNA, 15 bp, Homo sapiens
atttcatgtgtgttt

SEQ ID NO: 1407053 - DNA, 15 bp, Homo sapiens
aatttcatgtgtgtt

SEQ ID NO: 1407054 - DNA, 15 bp, Homo sapiens
taatttcatgtgtgt

SEQ ID NO: 1407055 - DNA, 15 bp, Homo sapiens
ttaatttcatgtgtg

SEQ ID NO: 1407056 - DNA, 15 bp, Homo sapiens
tttaatttcatgtgt

SEQ ID NO: 1407057 - DNA, 15 bp, Homo sapiens
ttttaatttcatgtg

SEQ ID NO: 1407058 - DNA, 15 bp, Homo sapiens
tttttaatttcatgt

SEQ ID NO: 1407059 - DNA, 15 bp, Homo sapiens
atttttaatttcatg

SEQ ID NO: 1407060 - DNA, 15 bp, Homo sapiens
tatttttaatttcat

SEQ ID NO: 1407061 - DNA, 15 bp, Homo sapiens
ctatttttaatttca

SEQ ID NO: 1407062 - DNA, 15 bp, Homo sapiens
tctatttttaatttc

SEQ ID NO: 1407063 - DNA, 15 bp, Homo sapiens
ctctatttttaattt

SEQ ID NO: 1407064 - DNA, 15 bp, Homo sapiens
tctctatttttaatt

SEQ ID NO: 1407065 - DNA, 15 bp, Homo sapiens
ttctctatttttaat

SEQ ID NO: 1407066 - DNA, 15 bp, Homo sapiens
gttctctatttttaa

SEQ ID NO: 1407067 - DNA, 15 bp, Homo sapiens
tgttctctattttta

SEQ ID NO: 1407068 - DNA, 15 bp, Homo sapiens
ttgttctctattttt

SEQ ID NO: 1407069 - DNA, 15 bp, Homo sapiens
gttgttctctatttt

SEQ ID NO: 1407070 - DNA, 15 bp, Homo sapiens
tgttgttctctattt

SEQ ID NO: 1407071 - DNA, 15 bp, Homo sapiens
ttgttgttctctatt

SEQ ID NO: 1407072 - DNA, 15 bp, Homo sapiens
attgttgttctctat

SEQ ID NO: 1407073 - DNA, 15 bp, Homo sapiens
aattgttgttctcta

SEQ ID NO: 1407074 - DNA, 15 bp, Homo sapiens
taattgttgttctct

SEQ ID NO: 1407075 - DNA, 15 bp, Homo sapiens
ctaattgttgttctc

SEQ ID NO: 1407076 - DNA, 15 bp, Homo sapiens
cctaattgttgttct

SEQ ID NO: 1407077 - DNA, 15 bp, Homo sapiens
acctaattgttgttc

SEQ ID NO: 1407078 - DNA, 15 bp, Homo sapiens
tacctaattgttgtt

SEQ ID NO: 1407079 - DNA, 15 bp, Homo sapiens
atacctaattgttgt

SEQ ID NO: 1407080 - DNA, 15 bp, Homo sapiens
gatacctaattgttg

SEQ ID NO: 1407081 - DNA, 15 bp, Homo sapiens
ggatacctaattgtt

SEQ ID NO: 1407082 - DNA, 15 bp, Homo sapiens
tggatacctaattgt

SEQ ID NO: 1407083 - DNA, 15 bp, Homo sapiens
gtggatacctaattg

SEQ ID NO: 1407084 - DNA, 15 bp, Homo sapiens
tgtggatacctaatt

SEQ ID NO: 1407085 - DNA, 15 bp, Homo sapiens
atgtggatacctaat

SEQ ID NO: 1407086 - DNA, 15 bp, Homo sapiens
catgtggatacctaa

SEQ ID NO: 1407087 - DNA, 15 bp, Homo sapiens
ccatgtggataccta

SEQ ID NO: 1407088 - DNA, 15 bp, Homo sapiens
cccatgtggatacct

SEQ ID NO: 1407089 - DNA, 15 bp, Homo sapiens
acccatgtggatacc

SEQ ID NO: 1407090 - DNA, 15 bp, Homo sapiens
cacccatgtggatac

SEQ ID NO: 1407091 - DNA, 15 bp, Homo sapiens
ccacccatgtggata

SEQ ID NO: 1407092 - DNA, 15 bp, Homo sapiens
cccacccatgtggat

SEQ ID NO: 1407093 - DNA, 15 bp, Homo sapiens
ccccacccatgtgga

SEQ ID NO: 1407094 - DNA, 15 bp, Homo sapiens
tccccacccatgtgg

SEQ ID NO: 1407095 - DNA, 15 bp, Homo sapiens
atccccacccatgtg

SEQ ID NO: 1407096 - DNA, 15 bp, Homo sapiens
tatccccacccatgt

SEQ ID NO: 1407097 - DNA, 15 bp, Homo sapiens
ttatccccacccatg

SEQ ID NO: 1407098 - DNA, 15 bp, Homo sapiens
attatccccacccat

SEQ ID NO: 1407099 - DNA, 15 bp, Homo sapiens
tattatccccaccca

SEQ ID NO: 1407100 - DNA, 15 bp, Homo sapiens
atattatccccaccc

SEQ ID NO: 1407101 - DNA, 15 bp, Homo sapiens
aatattatccccacc

SEQ ID NO: 1407102 - DNA, 15 bp, Homo sapiens
aaatattatccccac

SEQ ID NO: 1407103 - DNA, 15 bp, Homo sapiens
taaatattatcccca

SEQ ID NO: 1407104 - DNA, 15 bp, Homo sapiens
gtaaatattatcccc

SEQ ID NO: 1407105 - DNA, 15 bp, Homo sapiens
tgtaaatattatccc

SEQ ID NO: 1407106 - DNA, 15 bp, Homo sapiens
ttgtaaatattatcc

SEQ ID NO: 1407107 - DNA, 15 bp, Homo sapiens
tttgtaaatattatc

SEQ ID NO: 1407108 - DNA, 15 bp, Homo sapiens
ctttgtaaatattat

SEQ ID NO: 1407109 - DNA, 15 bp, Homo sapiens
actttgtaaatatta

SEQ ID NO: 1407110 - DNA, 15 bp, Homo sapiens
tactttgtaaatatt

SEQ ID NO: 1407111 - DNA, 15 bp, Homo sapiens
atactttgtaaatat

SEQ ID NO: 1407112 - DNA, 15 bp, Homo sapiens
aatactttgtaaata

SEQ ID NO: 1407113 - DNA, 15 bp, Homo sapiens
caatactttgtaaat

SEQ ID NO: 1407114 - DNA, 15 bp, Homo sapiens
ccaatactttgtaaa

SEQ ID NO: 1407115 - DNA, 15 bp, Homo sapiens
accaatactttgtaa

SEQ ID NO: 1407116 - DNA, 15 bp, Homo sapiens
taccaatactttgta

SEQ ID NO: 1407117 - DNA, 15 bp, Homo sapiens
ataccaatactttgt

SEQ ID NO: 1407118 - DNA, 15 bp, Homo sapiens
cataccaatactttg

SEQ ID NO: 1407119 - DNA, 15 bp, Homo sapiens
ccataccaatacttt

SEQ ID NO: 1407120 - DNA, 15 bp, Homo sapiens
cccataccaatactt

SEQ ID NO: 1407121 - DNA, 15 bp, Homo sapiens
ccccataccaatact

SEQ ID NO: 1407122 - DNA, 15 bp, Homo sapiens
gccccataccaatac

SEQ ID NO: 1407123 - DNA, 15 bp, Homo sapiens
agccccataccaata

SEQ ID NO: 1407124 - DNA, 15 bp, Homo sapiens
aagccccataccaat

SEQ ID NO: 1407125 - DNA, 15 bp, Homo sapiens
taagccccataccaa

SEQ ID NO: 1407126 - DNA, 15 bp, Homo sapiens
ttaagccccatacca

SEQ ID NO: 1407127 - DNA, 15 bp, Homo sapiens
tttaagccccatacc

SEQ ID NO: 1407128 - DNA, 15 bp, Homo sapiens
atttaagccccatac

SEQ ID NO: 1407129 - DNA, 15 bp, Homo sapiens
catttaagccccata

SEQ ID NO: 1407130 - DNA, 15 bp, Homo sapiens
ccatttaagccccat

SEQ ID NO: 1407131 - DNA, 15 bp, Homo sapiens
gccatttaagcccca

SEQ ID NO: 1407132 - DNA, 15 bp, Homo sapiens
agccatttaagcccc

SEQ ID NO: 1407133 - DNA, 15 bp, Homo sapiens
aagccatttaagccc

SEQ ID NO: 1407134 - DNA, 15 bp, Homo sapiens
taagccatttaagcc

SEQ ID NO: 1407135 - DNA, 15 bp, Homo sapiens
ataagccatttaagc

SEQ ID NO: 1407136 - DNA, 15 bp, Homo sapiens
cataagccatttaag

SEQ ID NO: 1407137 - DNA, 15 bp, Homo sapiens
acataagccatttaa

SEQ ID NO: 1407138 - DNA, 15 bp, Homo sapiens
tacataagccattta

SEQ ID NO: 1407139 - DNA, 15 bp, Homo sapiens
atacataagccattt

SEQ ID NO: 1407140 - DNA, 15 bp, Homo sapiens
catacataagccatt

SEQ ID NO: 1407141 - DNA, 15 bp, Homo sapiens
acatacataagccat

SEQ ID NO: 1407142 - DNA, 15 bp, Homo sapiens
tacatacataagcca

SEQ ID NO: 1407143 - DNA, 15 bp, Homo sapiens
ttacatacataagcc

SEQ ID NO: 1407144 - DNA, 15 bp, Homo sapiens
tttacatacataagc

SEQ ID NO: 1407145 - DNA, 15 bp, Homo sapiens
atttacatacataag

SEQ ID NO: 1407146 - DNA, 15 bp, Homo sapiens
tatttacatacataa

SEQ ID NO: 1407147 - DNA, 15 bp, Homo sapiens
atatttacatacata

SEQ ID NO: 1407148 - DNA, 15 bp, Homo sapiens
gatatttacatacat

SEQ ID NO: 1407149 - DNA, 15 bp, Homo sapiens
tgatatttacataca

SEQ ID NO: 1407150 - DNA, 15 bp, Homo sapiens
ttgatatttacatac

SEQ ID NO: 1407151 - DNA, 15 bp, Homo sapiens
cttgatatttacata

SEQ ID NO: 1407152 - DNA, 15 bp, Homo sapiens
gcttgatatttacat

SEQ ID NO: 1407153 - DNA, 15 bp, Homo sapiens
tgcttgatatttaca

SEQ ID NO: 1407154 - DNA, 15 bp, Homo sapiens
atgcttgatatttac

SEQ ID NO: 1407155 - DNA, 15 bp, Homo sapiens
aatgcttgatattta

SEQ ID NO: 1407156 - DNA, 15 bp, Homo sapiens
caatgcttgatattt

SEQ ID NO: 1407157 - DNA, 15 bp, Homo sapiens
acaatgcttgatatt

SEQ ID NO: 1407158 - DNA, 15 bp, Homo sapiens
tacaatgcttgatat

SEQ ID NO: 1407159 - DNA, 15 bp, Homo sapiens
atacaatgcttgata

SEQ ID NO: 1407160 - DNA, 15 bp, Homo sapiens
tatacaatgcttgat

SEQ ID NO: 1407161 - DNA, 15 bp, Homo sapiens
gtatacaatgcttga

SEQ ID NO: 1407162 - DNA, 15 bp, Homo sapiens
tgtatacaatgcttg

SEQ ID NO: 1407163 - DNA, 15 bp, Homo sapiens
ctgtatacaatgctt

SEQ ID NO: 1407164 - DNA, 15 bp, Homo sapiens
gctgtatacaatgct

SEQ ID NO: 1407165 - DNA, 15 bp, Homo sapiens
tgctgtatacaatgc

SEQ ID NO: 1407166 - DNA, 15 bp, Homo sapiens
atgctgtatacaatg

SEQ ID NO: 1407167 - DNA, 15 bp, Homo sapiens
tatgctgtatacaat

SEQ ID NO: 1407168 - DNA, 15 bp, Homo sapiens
atatgctgtatacaa

SEQ ID NO: 1407169 - DNA, 15 bp, Homo sapiens
tatatgctgtataca

SEQ ID NO: 1407170 - DNA, 15 bp, Homo sapiens
ttatatgctgtatac

SEQ ID NO: 1407171 - DNA, 15 bp, Homo sapiens
gttatatgctgtata

SEQ ID NO: 1407172 - DNA, 15 bp, Homo sapiens
tgttatatgctgtat

SEQ ID NO: 1407173 - DNA, 15 bp, Homo sapiens
ctgttatatgctgta

SEQ ID NO: 1407174 - DNA, 15 bp, Homo sapiens
tctgttatatgctgt

SEQ ID NO: 1407175 - DNA, 15 bp, Homo sapiens
gtctgttatatgctg

SEQ ID NO: 1407176 - DNA, 15 bp, Homo sapiens
tgtctgttatatgct

SEQ ID NO: 1407177 - DNA, 15 bp, Homo sapiens
atgtctgttatatgc

SEQ ID NO: 1407178 - DNA, 15 bp, Homo sapiens
tatgtctgttatatg

SEQ ID NO: 1407179 - DNA, 15 bp, Homo sapiens
ttatgtctgttatat

SEQ ID NO: 1407180 - DNA, 15 bp, Homo sapiens
attatgtctgttata

SEQ ID NO: 1407181 - DNA, 15 bp, Homo sapiens
tattatgtctgttat

SEQ ID NO: 1407182 - DNA, 15 bp, Homo sapiens
ctattatgtctgtta

SEQ ID NO: 1407183 - DNA, 15 bp, Homo sapiens
actattatgtctgtt

SEQ ID NO: 1407184 - DNA, 15 bp, Homo sapiens
tactattatgtctgt

SEQ ID NO: 1407185 - DNA, 15 bp, Homo sapiens
ttactattatgtctg

SEQ ID NO: 1407186 - DNA, 15 bp, Homo sapiens
tttactattatgtct

SEQ ID NO: 1407187 - DNA, 15 bp, Homo sapiens
atttactattatgtc

SEQ ID NO: 1407188 - DNA, 15 bp, Homo sapiens
tatttactattatgt

SEQ ID NO: 1407189 - DNA, 15 bp, Homo sapiens
ttatttactattatg

SEQ ID NO: 1407190 - DNA, 15 bp, Homo sapiens
gttatttactattat

SEQ ID NO: 1407191 - DNA, 15 bp, Homo sapiens
tgttatttactatta

SEQ ID NO: 1407192 - DNA, 15 bp, Homo sapiens
ctgttatttactatt

SEQ ID NO: 1407193 - DNA, 15 bp, Homo sapiens
actgttatttactat

SEQ ID NO: 1407194 - DNA, 15 bp, Homo sapiens
tactgttatttacta

SEQ ID NO: 1407195 - DNA, 15 bp, Homo sapiens
ctactgttatttact

SEQ ID NO: 1407196 - DNA, 15 bp, Homo sapiens
gctactgttatttac

SEQ ID NO: 1407197 - DNA, 15 bp, Homo sapiens
agctactgttattta

SEQ ID NO: 1407198 - DNA, 15 bp, Homo sapiens
tagctactgttattt

SEQ ID NO: 1407199 - DNA, 15 bp, Homo sapiens
atagctactgttatt

SEQ ID NO: 1407200 - DNA, 15 bp, Homo sapiens
aatagctactgttat

SEQ ID NO: 1407201 - DNA, 15 bp, Homo sapiens
taatagctactgtta

SEQ ID NO: 1407202 - DNA, 15 bp, Homo sapiens
ataatagctactgtt

SEQ ID NO: 1407203 - DNA, 15 bp, Homo sapiens
tataatagctactgt

SEQ ID NO: 1407204 - DNA, 15 bp, Homo sapiens
ttataatagctactg

SEQ ID NO: 1407205 - DNA, 15 bp, Homo sapiens
attataatagctact

SEQ ID NO: 1407206 - DNA, 15 bp, Homo sapiens
aattataatagctac

SEQ ID NO: 1407207 - DNA, 15 bp, Homo sapiens
taattataatagcta

SEQ ID NO: 1407208 - DNA, 15 bp, Homo sapiens
ttaattataatagct

SEQ ID NO: 1407209 - DNA, 15 bp, Homo sapiens
attaattataatagc

SEQ ID NO: 1407210 - DNA, 15 bp, Homo sapiens
tattaattataatag

SEQ ID NO: 1407211 - DNA, 15 bp, Homo sapiens
ttattaattataata

SEQ ID NO: 1407212 - DNA, 15 bp, Homo sapiens
attattaattataat

SEQ ID NO: 1407213 - DNA, 15 bp, Homo sapiens
tattattaattataa

SEQ ID NO: 1407214 - DNA, 15 bp, Homo sapiens
ttattattaattata

SEQ ID NO: 1407215 - DNA, 15 bp, Homo sapiens
tttattattaattat

SEQ ID NO: 1407216 - DNA, 15 bp, Homo sapiens
atttattattaatta

SEQ ID NO: 1407217 - DNA, 15 bp, Homo sapiens
catttattattaatt

SEQ ID NO: 1407218 - DNA, 15 bp, Homo sapiens
acatttattattaat

SEQ ID NO: 1407219 - DNA, 15 bp, Homo sapiens
tacatttattattaa

SEQ ID NO: 1407220 - DNA, 15 bp, Homo sapiens
gtacatttattatta

SEQ ID NO: 1407221 - DNA, 15 bp, Homo sapiens
tgtacatttattatt

SEQ ID NO: 1407222 - DNA, 15 bp, Homo sapiens
ttgtacatttattat

SEQ ID NO: 1407223 - DNA, 15 bp, Homo sapiens
cttgtacatttatta

SEQ ID NO: 1407224 - DNA, 15 bp, Homo sapiens
gacttgtacatttat

SEQ ID NO: 1407225 - DNA, 15 bp, Homo sapiens
cgacttgtacattta

SEQ ID NO: 1407226 - DNA, 15 bp, Homo sapiens
acgacttgtacattt

SEQ ID NO: 1407227 - DNA, 15 bp, Homo sapiens
tacgacttgtacatt

SEQ ID NO: 1407228 - DNA, 15 bp, Homo sapiens
atacgacttgtacat

SEQ ID NO: 1407229 - DNA, 15 bp, Homo sapiens
aatacgacttgtaca

SEQ ID NO: 1407230 - DNA, 15 bp, Homo sapiens
taatacgacttgtac

SEQ ID NO: 1407231 - DNA, 15 bp, Homo sapiens
ctaatacgacttgta

SEQ ID NO: 1407232 - DNA, 15 bp, Homo sapiens
actaatacgacttgt

SEQ ID NO: 1407233 - DNA, 15 bp, Homo sapiens
tactaatacgacttg

SEQ ID NO: 1407234 - DNA, 15 bp, Homo sapiens
atactaatacgactt

SEQ ID NO: 1407235 - DNA, 15 bp, Homo sapiens
tatactaatacgact

SEQ ID NO: 1407236 - DNA, 15 bp, Homo sapiens
gtatactaatacgac

SEQ ID NO: 1407237 - DNA, 15 bp, Homo sapiens
ggtatactaatacga

SEQ ID NO: 1407238 - DNA, 15 bp, Homo sapiens
gggtatactaatacg

SEQ ID NO: 1407239 - DNA, 15 bp, Homo sapiens
tgggtatactaatac

SEQ ID NO: 1407240 - DNA, 15 bp, Homo sapiens
gtgggtatactaata

SEQ ID NO: 1407241 - DNA, 15 bp, Homo sapiens
agtgggtatactaat

SEQ ID NO: 1407242 - DNA, 15 bp, Homo sapiens
tagtgggtatactaa

SEQ ID NO: 1407243 - DNA, 15 bp, Homo sapiens
ctagtgggtatacta

SEQ ID NO: 1407244 - DNA, 15 bp, Homo sapiens
actagtgggtatact

SEQ ID NO: 1407245 - DNA, 15 bp, Homo sapiens
tactagtgggtatac

SEQ ID NO: 1407246 - DNA, 15 bp, Homo sapiens
ctactagtgggtata

SEQ ID NO: 1407247 - DNA, 15 bp, Homo sapiens
actactagtgggtat

SEQ ID NO: 1407248 - DNA, 15 bp, Homo sapiens
tactactagtgggta

SEQ ID NO: 1407249 - DNA, 15 bp, Homo sapiens
atactactagtgggt

SEQ ID NO: 1407250 - DNA, 15 bp, Homo sapiens
tatactactagtggg

SEQ ID NO: 1407251 - DNA, 15 bp, Homo sapiens
atatactactagtgg

SEQ ID NO: 1407252 - DNA, 15 bp, Homo sapiens
tatatactactagtg

SEQ ID NO: 1407253 - DNA, 15 bp, Homo sapiens
ttatatactactagt

SEQ ID NO: 1407254 - DNA, 15 bp, Homo sapiens
attatatactactag

SEQ ID NO: 1407255 - DNA, 15 bp, Homo sapiens
gattatatactacta

SEQ ID NO: 1407256 - DNA, 15 bp, Homo sapiens
agattatatactact

SEQ ID NO: 1407257 - DNA, 15 bp, Homo sapiens
gagattatatactac

SEQ ID NO: 1407258 - DNA, 15 bp, Homo sapiens
agagattatatacta

SEQ ID NO: 1407259 - DNA, 15 bp, Homo sapiens
aagagattatatact

SEQ ID NO: 1407260 - DNA, 15 bp, Homo sapiens
caagagattatatac

SEQ ID NO: 1407261 - DNA, 15 bp, Homo sapiens
ccaagagattatata

SEQ ID NO: 1407262 - DNA, 15 bp, Homo sapiens
tccaagagattatat

SEQ ID NO: 1407263 - DNA, 15 bp, Homo sapiens
ctccaagagattata

SEQ ID NO: 1407264 - DNA, 15 bp, Homo sapiens
gctccaagagattat

SEQ ID NO: 1407265 - DNA, 15 bp, Homo sapiens
agctccaagagatta

SEQ ID NO: 1407266 - DNA, 15 bp, Homo sapiens
tagctccaagagatt

SEQ ID NO: 1407267 - DNA, 15 bp, Homo sapiens
ctagctccaagagat

SEQ ID NO: 1407268 - DNA, 15 bp, Homo sapiens
tctagctccaagaga

SEQ ID NO: 1407269 - DNA, 15 bp, Homo sapiens
ttctagctccaagag

SEQ ID NO: 1407270 - DNA, 15 bp, Homo sapiens
attctagctccaaga

SEQ ID NO: 1407271 - DNA, 15 bp, Homo sapiens
tattctagctccaag

SEQ ID NO: 1407272 - DNA, 15 bp, Homo sapiens
ctattctagctccaa

SEQ ID NO: 1407273 - DNA, 15 bp, Homo sapiens
gctattctagctcca

SEQ ID NO: 1407274 - DNA, 15 bp, Homo sapiens
agctattctagctcc

SEQ ID NO: 1407275 - DNA, 15 bp, Homo sapiens
gagctattctagctc

SEQ ID NO: 1407276 - DNA, 15 bp, Homo sapiens
agagctattctagct

SEQ ID NO: 1407277 - DNA, 15 bp, Homo sapiens
tagagctattctagc

SEQ ID NO: 1407278 - DNA, 15 bp, Homo sapiens
ttagagctattctag

SEQ ID NO: 1407279 - DNA, 15 bp, Homo sapiens
tttagagctattcta

SEQ ID NO: 1407280 - DNA, 15 bp, Homo sapiens
ttttagagctattct

SEQ ID NO: 1407281 - DNA, 15 bp, Homo sapiens
attttagagctattc

SEQ ID NO: 1407282 - DNA, 15 bp, Homo sapiens
cattttagagctatt

SEQ ID NO: 1407283 - DNA, 15 bp, Homo sapiens
acattttagagctat

SEQ ID NO: 1407284 - DNA, 15 bp, Homo sapiens
gacattttagagcta

SEQ ID NO: 1407285 - DNA, 15 bp, Homo sapiens
tgacattttagagct

SEQ ID NO: 1407286 - DNA, 15 bp, Homo sapiens
atgacattttagagc

SEQ ID NO: 1407287 - DNA, 15 bp, Homo sapiens
aatgacattttagag

SEQ ID NO: 1407288 - DNA, 15 bp, Homo sapiens
aaatgacattttaga

SEQ ID NO: 1407289 - DNA, 15 bp, Homo sapiens
aaaatgacattttag

SEQ ID NO: 1407290 - DNA, 15 bp, Homo sapiens
caaaatgacatttta

SEQ ID NO: 1407291 - DNA, 15 bp, Homo sapiens
gcaaaatgacatttt

SEQ ID NO: 1407292 - DNA, 15 bp, Homo sapiens
ggcaaaatgacattt

SEQ ID NO: 1407293 - DNA, 15 bp, Homo sapiens
gggcaaaatgacatt

SEQ ID NO: 1407294 - DNA, 15 bp, Homo sapiens
tgggcaaaatgacat

SEQ ID NO: 1407295 - DNA, 15 bp, Homo sapiens
ttgggcaaaatgaca

SEQ ID NO: 1407296 - DNA, 15 bp, Homo sapiens
tttgggcaaaatgac

SEQ ID NO: 1407297 - DNA, 15 bp, Homo sapiens
ttttgggcaaaatga

SEQ ID NO: 1407298 - DNA, 15 bp, Homo sapiens
gttttgggcaaaatg

SEQ ID NO: 1407299 - DNA, 15 bp, Homo sapiens
cgttttgggcaaaat

SEQ ID NO: 1407300 - DNA, 15 bp, Homo sapiens
gcgttttgggcaaaa

SEQ ID NO: 1407301 - DNA, 15 bp, Homo sapiens
tgcgttttgggcaaa

SEQ ID NO: 1407302 - DNA, 15 bp, Homo sapiens
gtgcgttttgggcaa

SEQ ID NO: 1407303 - DNA, 15 bp, Homo sapiens
tgtgcgttttgggca

SEQ ID NO: 1407304 - DNA, 15 bp, Homo sapiens
atgtgcgttttgggc

SEQ ID NO: 1407305 - DNA, 15 bp, Homo sapiens
gatgtgcgttttggg

SEQ ID NO: 1407306 - DNA, 15 bp, Homo sapiens
tgatgtgcgttttgg

SEQ ID NO: 1407307 - DNA, 15 bp, Homo sapiens
ttgatgtgcgttttg

SEQ ID NO: 1407308 - DNA, 15 bp, Homo sapiens
gttgatgtgcgtttt

SEQ ID NO: 1407309 - DNA, 15 bp, Homo sapiens
tgttgatgtgcgttt

SEQ ID NO: 1407310 - DNA, 15 bp, Homo sapiens
ttgttgatgtgcgtt

SEQ ID NO: 1407311 - DNA, 15 bp, Homo sapiens
tttgttgatgtgcgt

SEQ ID NO: 1407312 - DNA, 15 bp, Homo sapiens
atttgttgatgtgcg

SEQ ID NO: 1407313 - DNA, 15 bp, Homo sapiens
aatttgttgatgtgc

SEQ ID NO: 1407314 - DNA, 15 bp, Homo sapiens
gaatttgttgatgtg

SEQ ID NO: 1407315 - DNA, 15 bp, Homo sapiens
ggaatttgttgatgt

SEQ ID NO: 1407316 - DNA, 15 bp, Homo sapiens
aggaatttgttgatg

SEQ ID NO: 1407317 - DNA, 15 bp, Homo sapiens
aaggaatttgttgat

SEQ ID NO: 1407318 - DNA, 15 bp, Homo sapiens
gaaggaatttgttga

SEQ ID NO: 1407319 - DNA, 15 bp, Homo sapiens
agaaggaatttgttg

SEQ ID NO: 1407320 - DNA, 15 bp, Homo sapiens
tagaaggaatttgtt

SEQ ID NO: 1407321 - DNA, 15 bp, Homo sapiens
atagaaggaatttgt

SEQ ID NO: 1407322 - DNA, 15 bp, Homo sapiens
tatagaaggaatttg

SEQ ID NO: 1407323 - DNA, 15 bp, Homo sapiens
ctatagaaggaattt

SEQ ID NO: 1407324 - DNA, 15 bp, Homo sapiens
tctatagaaggaatt

SEQ ID NO: 1407325 - DNA, 15 bp, Homo sapiens
atctatagaaggaat

SEQ ID NO: 1407326 - DNA, 15 bp, Homo sapiens
aatctatagaaggaa

SEQ ID NO: 1407327 - DNA, 15 bp, Homo sapiens
aaatctatagaagga

SEQ ID NO: 1407328 - DNA, 15 bp, Homo sapiens
aaaatctatagaagg

SEQ ID NO: 1407329 - DNA, 15 bp, Homo sapiens
taaaatctatagaag

SEQ ID NO: 1407330 - DNA, 15 bp, Homo sapiens
ttaaaatctatagaa

SEQ ID NO: 1407331 - DNA, 15 bp, Homo sapiens
cttaaaatctataga

SEQ ID NO: 1407332 - DNA, 15 bp, Homo sapiens
gcttaaaatctatag

SEQ ID NO: 1407333 - DNA, 15 bp, Homo sapiens
tgcttaaaatctata

SEQ ID NO: 1407334 - DNA, 15 bp, Homo sapiens
ctgcttaaaatctat

SEQ ID NO: 1407335 - DNA, 15 bp, Homo sapiens
cctgcttaaaatcta

SEQ ID NO: 1407336 - DNA, 15 bp, Homo sapiens
tcctgcttaaaatct

SEQ ID NO: 1407337 - DNA, 15 bp, Homo sapiens
ttcctgcttaaaatc

SEQ ID NO: 1407338 - DNA, 15 bp, Homo sapiens
attcctgcttaaaat

SEQ ID NO: 1407339 - DNA, 15 bp, Homo sapiens
gattcctgcttaaaa

SEQ ID NO: 1407340 - DNA, 15 bp, Homo sapiens
tgattcctgcttaaa

SEQ ID NO: 1407341 - DNA, 15 bp, Homo sapiens
atgattcctgcttaa

SEQ ID NO: 1407342 - DNA, 15 bp, Homo sapiens
gatgattcctgctta

SEQ ID NO: 1407343 - DNA, 15 bp, Homo sapiens
agatgattcctgctt

SEQ ID NO: 1407344 - DNA, 15 bp, Homo sapiens
tagatgattcctgct

SEQ ID NO: 1407345 - DNA, 15 bp, Homo sapiens
ctagatgattcctgc

SEQ ID NO: 1407346 - DNA, 15 bp, Homo sapiens
gctagatgattcctg

SEQ ID NO: 1407347 - DNA, 15 bp, Homo sapiens
tgctagatgattcct

SEQ ID NO: 1407348 - DNA, 15 bp, Homo sapiens
ttgctagatgattcc

SEQ ID NO: 1407349 - DNA, 15 bp, Homo sapiens
attgctagatgattc

SEQ ID NO: 1407350 - DNA, 15 bp, Homo sapiens
tattgctagatgatt

SEQ ID NO: 1407351 - DNA, 15 bp, Homo sapiens
ctattgctagatgat

SEQ ID NO: 1407352 - DNA, 15 bp, Homo sapiens
cctattgctagatga

SEQ ID NO: 1407353 - DNA, 15 bp, Homo sapiens
tcctattgctagatg

SEQ ID NO: 1407354 - DNA, 15 bp, Homo sapiens
ttcctattgctagat

SEQ ID NO: 1407355 - DNA, 15 bp, Homo sapiens
attcctattgctaga

SEQ ID NO: 1407356 - DNA, 15 bp, Homo sapiens
cattcctattgctag

SEQ ID NO: 1407357 - DNA, 15 bp, Homo sapiens
ccattcctattgcta

SEQ ID NO: 1407358 - DNA, 15 bp, Homo sapiens
accattcctattgct

SEQ ID NO: 1407359 - DNA, 15 bp, Homo sapiens
aaccattcctattgc

SEQ ID NO: 1407360 - DNA, 15 bp, Homo sapiens
taaccattcctattg

SEQ ID NO: 1407361 - DNA, 15 bp, Homo sapiens
gtaaccattcctatt

SEQ ID NO: 1407362 - DNA, 15 bp, Homo sapiens
agtaaccattcctat

SEQ ID NO: 1407363 - DNA, 15 bp, Homo sapiens
tagtaaccattccta

SEQ ID NO: 1407364 - DNA, 15 bp, Homo sapiens
gtagtaaccattcct

SEQ ID NO: 1407365 - DNA, 15 bp, Homo sapiens
ggtagtaaccattcc

SEQ ID NO: 1407366 - DNA, 15 bp, Homo sapiens
aggtagtaaccattc

SEQ ID NO: 1407367 - DNA, 15 bp, Homo sapiens
caggtagtaaccatt

SEQ ID NO: 1407368 - DNA, 15 bp, Homo sapiens
tcaggtagtaaccat

SEQ ID NO: 1407369 - DNA, 15 bp, Homo sapiens
ttcaggtagtaacca

SEQ ID NO: 1407370 - DNA, 15 bp, Homo sapiens
attcaggtagtaacc

SEQ ID NO: 1407371 - DNA, 15 bp, Homo sapiens
gattcaggtagtaac

SEQ ID NO: 1407372 - DNA, 15 bp, Homo sapiens
ggattcaggtagtaa

SEQ ID NO: 1407373 - DNA, 15 bp, Homo sapiens
aggattcaggtagta

SEQ ID NO: 1407374 - DNA, 15 bp, Homo sapiens
caggattcaggtagt

SEQ ID NO: 1407375 - DNA, 15 bp, Homo sapiens
gcaggattcaggtag

SEQ ID NO: 1407376 - DNA, 15 bp, Homo sapiens
ggcaggattcaggta

SEQ ID NO: 1407377 - DNA, 15 bp, Homo sapiens
tggcaggattcaggt

SEQ ID NO: 1407378 - DNA, 15 bp, Homo sapiens
ctggcaggattcagg

SEQ ID NO: 1407379 - DNA, 15 bp, Homo sapiens
actggcaggattcag

SEQ ID NO: 1407380 - DNA, 15 bp, Homo sapiens
cactggcaggattca

SEQ ID NO: 1407381 - DNA, 15 bp, Homo sapiens
tcactggcaggattc

SEQ ID NO: 1407382 - DNA, 15 bp, Homo sapiens
atcactggcaggatt

SEQ ID NO: 1407383 - DNA, 15 bp, Homo sapiens
tatcactggcaggat

SEQ ID NO: 1407384 - DNA, 15 bp, Homo sapiens
ctatcactggcagga

SEQ ID NO: 1407385 - DNA, 15 bp, Homo sapiens
cctatcactggcagg

SEQ ID NO: 1407386 - DNA, 15 bp, Homo sapiens
tcctatcactggcag

SEQ ID NO: 1407387 - DNA, 15 bp, Homo sapiens
gtcctatcactggca

SEQ ID NO: 1407388 - DNA, 15 bp, Homo sapiens
tgtcctatcactggc

SEQ ID NO: 1407389 - DNA, 15 bp, Homo sapiens
ctgtcctatcactgg

SEQ ID NO: 1407390 - DNA, 15 bp, Homo sapiens
cctgtcctatcactg

SEQ ID NO: 1407391 - DNA, 15 bp, Homo sapiens
acctgtcctatcact

SEQ ID NO: 1407392 - DNA, 15 bp, Homo sapiens
gacctgtcctatcac

SEQ ID NO: 1407393 - DNA, 15 bp, Homo sapiens
tgacctgtcctatca

SEQ ID NO: 1407394 - DNA, 15 bp, Homo sapiens
gtgacctgtcctatc

SEQ ID NO: 1407395 - DNA, 15 bp, Homo sapiens
ggtgacctgtcctat

SEQ ID NO: 1407396 - DNA, 15 bp, Homo sapiens
tggtgacctgtccta

SEQ ID NO: 1407397 - DNA, 15 bp, Homo sapiens
gtggtgacctgtcct

SEQ ID NO: 1407398 - DNA, 15 bp, Homo sapiens
agtggtgacctgtcc

SEQ ID NO: 1407399 - DNA, 15 bp, Homo sapiens
aagtggtgacctgtc

SEQ ID NO: 1407400 - DNA, 15 bp, Homo sapiens
taagtggtgacctgt

SEQ ID NO: 1407401 - DNA, 15 bp, Homo sapiens
ttaagtggtgacctg

SEQ ID NO: 1407402 - DNA, 15 bp, Homo sapiens
attaagtggtgacct

SEQ ID NO: 1407403 - DNA, 15 bp, Homo sapiens
cattaagtggtgacc

SEQ ID NO: 1407404 - DNA, 15 bp, Homo sapiens
gcattaagtggtgac

SEQ ID NO: 1407405 - DNA, 15 bp, Homo sapiens
agcattaagtggtga

SEQ ID NO: 1407406 - DNA, 15 bp, Homo sapiens
tagcattaagtggtg

SEQ ID NO: 1407407 - DNA, 15 bp, Homo sapiens
ttagcattaagtggt

SEQ ID NO: 1407408 - DNA, 15 bp, Homo sapiens
gttagcattaagtgg

SEQ ID NO: 1407409 - DNA, 15 bp, Homo sapiens
tgttagcattaagtg

SEQ ID NO: 1407410 - DNA, 15 bp, Homo sapiens
atgttagcattaagt

SEQ ID NO: 1407411 - DNA, 15 bp, Homo sapiens
catgttagcattaag

SEQ ID NO: 1407412 - DNA, 15 bp, Homo sapiens
acatgttagcattaa

SEQ ID NO: 1407413 - DNA, 15 bp, Homo sapiens
aacatgttagcatta

SEQ ID NO: 1407414 - DNA, 15 bp, Homo sapiens
aaacatgttagcatt

SEQ ID NO: 1407415 - DNA, 15 bp, Homo sapiens
aaaacatgttagcat

SEQ ID NO: 1407416 - DNA, 15 bp, Homo sapiens
gaaaacatgttagca

SEQ ID NO: 1407417 - DNA, 15 bp, Homo sapiens
ggaaaacatgttagc

SEQ ID NO: 1407418 - DNA, 15 bp, Homo sapiens
aggaaaacatgttag

SEQ ID NO: 1407419 - DNA, 15 bp, Homo sapiens
gaggaaaacatgtta

SEQ ID NO: 1407420 - DNA, 15 bp, Homo sapiens
atgaggaaaacatgt

SEQ ID NO: 1407421 - DNA, 15 bp, Homo sapiens
tatgaggaaaacatg

SEQ ID NO: 1407422 - DNA, 15 bp, Homo sapiens
ttatgaggaaaacat

SEQ ID NO: 1407423 - DNA, 15 bp, Homo sapiens
gttatgaggaaaaca

SEQ ID NO: 1407424 - DNA, 15 bp, Homo sapiens
tgttatgaggaaaac

SEQ ID NO: 1407425 - DNA, 15 bp, Homo sapiens
ttgttatgaggaaaa

SEQ ID NO: 1407426 - DNA, 15 bp, Homo sapiens
cttgttatgaggaaa

SEQ ID NO: 1407427 - DNA, 15 bp, Homo sapiens
acttgttatgaggaa

SEQ ID NO: 1407428 - DNA, 15 bp, Homo sapiens
aacttgttatgagga

SEQ ID NO: 1407429 - DNA, 15 bp, Homo sapiens
caacttgttatgagg

SEQ ID NO: 1407430 - DNA, 15 bp, Homo sapiens
tcaacttgttatgag

SEQ ID NO: 1407431 - DNA, 15 bp, Homo sapiens
ttcaacttgttatga

SEQ ID NO: 1407432 - DNA, 15 bp, Homo sapiens
cttcaacttgttatg

SEQ ID NO: 1407433 - DNA, 15 bp, Homo sapiens
acttcaacttgttat

SEQ ID NO: 1407434 - DNA, 15 bp, Homo sapiens
gacttcaacttgtta

SEQ ID NO: 1407435 - DNA, 15 bp, Homo sapiens
agacttcaacttgtt

SEQ ID NO: 1407436 - DNA, 15 bp, Homo sapiens
cagacttcaacttgt

SEQ ID NO: 1407437 - DNA, 15 bp, Homo sapiens
acagacttcaacttg

SEQ ID NO: 1407438 - DNA, 15 bp, Homo sapiens
gacagacttcaactt

SEQ ID NO: 1407439 - DNA, 15 bp, Homo sapiens
agacagacttcaact

SEQ ID NO: 1407440 - DNA, 15 bp, Homo sapiens
gagacagacttcaac

SEQ ID NO: 1407441 - DNA, 15 bp, Homo sapiens
ggagacagacttcaa

SEQ ID NO: 1407442 - DNA, 15 bp, Homo sapiens
gggagacagacttca

SEQ ID NO: 1407443 - DNA, 15 bp, Homo sapiens
agggagacagacttc

SEQ ID NO: 1407444 - DNA, 15 bp, Homo sapiens
cagggagacagactt

SEQ ID NO: 1407445 - DNA, 15 bp, Homo sapiens
acagggagacagact

SEQ ID NO: 1407446 - DNA, 15 bp, Homo sapiens
tacagggagacagac

SEQ ID NO: 1407447 - DNA, 15 bp, Homo sapiens
ttacagggagacaga

SEQ ID NO: 1407448 - DNA, 15 bp, Homo sapiens
attacagggagacag

SEQ ID NO: 1407449 - DNA, 15 bp, Homo sapiens
tattacagggagaca

SEQ ID NO: 1407450 - DNA, 15 bp, Homo sapiens
atattacagggagac

SEQ ID NO: 1407451 - DNA, 15 bp, Homo sapiens
gatattacagggaga

SEQ ID NO: 1407452 - DNA, 15 bp, Homo sapiens
agatattacagggag

SEQ ID NO: 1407453 - DNA, 15 bp, Homo sapiens
tagatattacaggga

SEQ ID NO: 1407454 - DNA, 15 bp, Homo sapiens
gtagatattacaggg

SEQ ID NO: 1407455 - DNA, 15 bp, Homo sapiens
ggtagatattacagg

SEQ ID NO: 1407456 - DNA, 15 bp, Homo sapiens
gggtagatattacag

SEQ ID NO: 1407457 - DNA, 15 bp, Homo sapiens
tgggtagatattaca

SEQ ID NO: 1407458 - DNA, 15 bp, Homo sapiens
gtgggtagatattac

SEQ ID NO: 1407459 - DNA, 15 bp, Homo sapiens
ggtgggtagatatta

SEQ ID NO: 1407460 - DNA, 15 bp, Homo sapiens
tggtgggtagatatt

SEQ ID NO: 1407461 - DNA, 15 bp, Homo sapiens
ttggtgggtagatat

SEQ ID NO: 1407462 - DNA, 15 bp, Homo sapiens
tttggtgggtagata

SEQ ID NO: 1407463 - DNA, 15 bp, Homo sapiens
atttggtgggtagat

SEQ ID NO: 1407464 - DNA, 15 bp, Homo sapiens
gatttggtgggtaga

SEQ ID NO: 1407465 - DNA, 15 bp, Homo sapiens
agatttggtgggtag

SEQ ID NO: 1407466 - DNA, 15 bp, Homo sapiens
tagatttggtgggta

SEQ ID NO: 1407467 - DNA, 15 bp, Homo sapiens
atagatttggtgggt

SEQ ID NO: 1407468 - DNA, 15 bp, Homo sapiens
tatagatttggtggg

SEQ ID NO: 1407469 - DNA, 15 bp, Homo sapiens
gtatagatttggtgg

SEQ ID NO: 1407470 - DNA, 15 bp, Homo sapiens
tgtatagatttggtg

SEQ ID NO: 1407471 - DNA, 15 bp, Homo sapiens
ttgtatagatttggt

SEQ ID NO: 1407472 - DNA, 15 bp, Homo sapiens
attgtatagatttgg

SEQ ID NO: 1407473 - DNA, 15 bp, Homo sapiens
tattgtatagatttg

SEQ ID NO: 1407474 - DNA, 15 bp, Homo sapiens
ttattgtatagattt

SEQ ID NO: 1407475 - DNA, 15 bp, Homo sapiens
tttattgtatagatt

SEQ ID NO: 1407476 - DNA, 15 bp, Homo sapiens
ttttattgtatagat

SEQ ID NO: 1407477 - DNA, 15 bp, Homo sapiens
attttattgtataga

SEQ ID NO: 1407478 - DNA, 15 bp, Homo sapiens
gattttattgtatag

SEQ ID NO: 1407479 - DNA, 15 bp, Homo sapiens
tgattttattgtata

SEQ ID NO: 1407480 - DNA, 15 bp, Homo sapiens
ttgattttattgtat

SEQ ID NO: 1407481 - DNA, 15 bp, Homo sapiens
attgattttattgta

SEQ ID NO: 1407482 - DNA, 15 bp, Homo sapiens
tattgattttattgt

SEQ ID NO: 1407483 - DNA, 15 bp, Homo sapiens
gtattgattttattg

SEQ ID NO: 1407484 - DNA, 15 bp, Homo sapiens
agtattgattttatt

SEQ ID NO: 1407485 - DNA, 15 bp, Homo sapiens
gagtattgattttat

SEQ ID NO: 1407486 - DNA, 15 bp, Homo sapiens
ggagtattgatttta

SEQ ID NO: 1407487 - DNA, 15 bp, Homo sapiens
aggagtattgatttt

SEQ ID NO: 1407488 - DNA, 15 bp, Homo sapiens
caggagtattgattt

SEQ ID NO: 1407489 - DNA, 15 bp, Homo sapiens
gcaggagtattgatt

SEQ ID NO: 1407490 - DNA, 15 bp, Homo sapiens
tgcaggagtattgat

SEQ ID NO: 1407491 - DNA, 15 bp, Homo sapiens
gtgcaggagtattga

SEQ ID NO: 1407492 - DNA, 15 bp, Homo sapiens
agtgcaggagtattg

SEQ ID NO: 1407493 - DNA, 15 bp, Homo sapiens
cagtgcaggagtatt

SEQ ID NO: 1407494 - DNA, 15 bp, Homo sapiens
tcagtgcaggagtat

SEQ ID NO: 1407495 - DNA, 15 bp, Homo sapiens
gtcagtgcaggagta

SEQ ID NO: 1407496 - DNA, 15 bp, Homo sapiens
agtcagtgcaggagt

SEQ ID NO: 1407497 - DNA, 15 bp, Homo sapiens
aagtcagtgcaggag

SEQ ID NO: 1407498 - DNA, 15 bp, Homo sapiens
taagtcagtgcagga

SEQ ID NO: 1407499 - DNA, 15 bp, Homo sapiens
ataagtcagtgcagg

SEQ ID NO: 1407500 - DNA, 15 bp, Homo sapiens
aataagtcagtgcag

SEQ ID NO: 1407501 - DNA, 15 bp, Homo sapiens
aaataagtcagtgca

SEQ ID NO: 1407502 - DNA, 15 bp, Homo sapiens
aaaataagtcagtgc

SEQ ID NO: 1407503 - DNA, 15 bp, Homo sapiens
taaaataagtcagtg

SEQ ID NO: 1407504 - DNA, 15 bp, Homo sapiens
ataaaataagtcagt

SEQ ID NO: 1407505 - DNA, 15 bp, Homo sapiens
aataaaataagtcag

SEQ ID NO: 1407506 - DNA, 15 bp, Homo sapiens
taataaaataagtca

SEQ ID NO: 1407507 - DNA, 15 bp, Homo sapiens
ctaataaaataagtc

SEQ ID NO: 1407508 - DNA, 15 bp, Homo sapiens
actaataaaataagt

SEQ ID NO: 1407509 - DNA, 15 bp, Homo sapiens
cactaataaaataag

SEQ ID NO: 1407510 - DNA, 15 bp, Homo sapiens
acactaataaaataa

SEQ ID NO: 1407511 - DNA, 15 bp, Homo sapiens
aacactaataaaata

SEQ ID NO: 1407512 - DNA, 15 bp, Homo sapiens
taacactaataaaat

SEQ ID NO: 1407513 - DNA, 15 bp, Homo sapiens
ataacactaataaaa

SEQ ID NO: 1407514 - DNA, 15 bp, Homo sapiens
aataacactaataaa

SEQ ID NO: 1407515 - DNA, 15 bp, Homo sapiens
aaataacactaataa

SEQ ID NO: 1407516 - DNA, 15 bp, Homo sapiens
aaaataacactaata

SEQ ID NO: 1407517 - DNA, 15 bp, Homo sapiens
taaaataacactaat

SEQ ID NO: 1407518 - DNA, 15 bp, Homo sapiens
ataaaataacactaa

SEQ ID NO: 1407519 - DNA, 15 bp, Homo sapiens
aataaaataacacta

SEQ ID NO: 1407520 - DNA, 15 bp, Homo sapiens
caataaaataacact

SEQ ID NO: 1407521 - DNA, 15 bp, Homo sapiens
tcaataaaataacac

SEQ ID NO: 1407522 - DNA, 15 bp, Homo sapiens
ttcaataaaataaca

SEQ ID NO: 1407523 - DNA, 15 bp, Homo sapiens
tttcaataaaataac

SEQ ID NO: 1407524 - DNA, 15 bp, Homo sapiens
atttcaataaaataa

SEQ ID NO: 1407525 - DNA, 15 bp, Homo sapiens
catttcaataaaata

SEQ ID NO: 1407526 - DNA, 15 bp, Homo sapiens
tcatttcaataaaat

SEQ ID NO: 1407527 - DNA, 15 bp, Homo sapiens
ttcatttcaataaaa

SEQ ID NO: 1407528 - DNA, 15 bp, Homo sapiens
cttcatttcaataaa

SEQ ID NO: 1407529 - DNA, 15 bp, Homo sapiens
ccttcatttcaataa

SEQ ID NO: 1407530 - DNA, 15 bp, Homo sapiens
tccttcatttcaata

SEQ ID NO: 1407531 - DNA, 15 bp, Homo sapiens
ctccttcatttcaat

SEQ ID NO: 1407532 - DNA, 15 bp, Homo sapiens
cctccttcatttcaa

SEQ ID NO: 1407533 - DNA, 15 bp, Homo sapiens
ccctccttcatttca

SEQ ID NO: 1407534 - DNA, 15 bp, Homo sapiens
cccctccttcatttc

SEQ ID NO: 1407535 - DNA, 15 bp, Homo sapiens
tcccctccttcattt

SEQ ID NO: 1407536 - DNA, 15 bp, Homo sapiens
atcccctccttcatt

SEQ ID NO: 1407537 - DNA, 15 bp, Homo sapiens
catcccctccttcat

SEQ ID NO: 1407538 - DNA, 15 bp, Homo sapiens
ccatcccctccttca

SEQ ID NO: 1407539 - DNA, 15 bp, Homo sapiens
cccatcccctccttc

SEQ ID NO: 1407540 - DNA, 15 bp, Homo sapiens
ccccatcccctcctt

SEQ ID NO: 1407541 - DNA, 15 bp, Homo sapiens
tccccatcccctcct

SEQ ID NO: 1407542 - DNA, 15 bp, Homo sapiens
ttccccatcccctcc

SEQ ID NO: 1407543 - DNA, 15 bp, Homo sapiens
cttccccatcccctc

SEQ ID NO: 1407544 - DNA, 15 bp, Homo sapiens
tcttccccatcccct

SEQ ID NO: 1407545 - DNA, 15 bp, Homo sapiens
ctcttccccatcccc

SEQ ID NO: 1407546 - DNA, 15 bp, Homo sapiens
gctcttccccatccc

SEQ ID NO: 1407547 - DNA, 15 bp, Homo sapiens
tgctcttccccatcc

SEQ ID NO: 1407548 - DNA, 15 bp, Homo sapiens
ttgctcttccccatc

SEQ ID NO: 1407549 - DNA, 15 bp, Homo sapiens
attgctcttccccat

SEQ ID NO: 1407550 - DNA, 15 bp, Homo sapiens
aattgctcttcccca

SEQ ID NO: 1407551 - DNA, 15 bp, Homo sapiens
aaattgctcttcccc

SEQ ID NO: 1407552 - DNA, 15 bp, Homo sapiens
gaaattgctcttccc

SEQ ID NO: 1407553 - DNA, 15 bp, Homo sapiens
ggaaattgctcttcc

SEQ ID NO: 1407554 - DNA, 15 bp, Homo sapiens
tggaaattgctcttc

SEQ ID NO: 1407555 - DNA, 15 bp, Homo sapiens
atggaaattgctctt

SEQ ID NO: 1407556 - DNA, 15 bp, Homo sapiens
aatggaaattgctct

SEQ ID NO: 1407557 - DNA, 15 bp, Homo sapiens
aaatggaaattgctc

SEQ ID NO: 1407558 - DNA, 15 bp, Homo sapiens
caaatggaaattgct

SEQ ID NO: 1407559 - DNA, 15 bp, Homo sapiens
acaaatggaaattgc

SEQ ID NO: 1407560 - DNA, 15 bp, Homo sapiens
gacaaatggaaattg

SEQ ID NO: 1407561 - DNA, 15 bp, Homo sapiens
agacaaatggaaatt

SEQ ID NO: 1407562 - DNA, 15 bp, Homo sapiens
gagacaaatggaaat

SEQ ID NO: 1407563 - DNA, 15 bp, Homo sapiens
tgagacaaatggaaa

SEQ ID NO: 1407564 - DNA, 15 bp, Homo sapiens
ttgagacaaatggaa

SEQ ID NO: 1407565 - DNA, 15 bp, Homo sapiens
tttgagacaaatgga

SEQ ID NO: 1407566 - DNA, 15 bp, Homo sapiens
gtttgagacaaatgg

SEQ ID NO: 1407567 - DNA, 15 bp, Homo sapiens
tgtttgagacaaatg

SEQ ID NO: 1407568 - DNA, 15 bp, Homo sapiens
atgtttgagacaaat

SEQ ID NO: 1407569 - DNA, 15 bp, Homo sapiens
tatgtttgagacaaa

SEQ ID NO: 1407570 - DNA, 15 bp, Homo sapiens
ttatgtttgagacaa

SEQ ID NO: 1407571 - DNA, 15 bp, Homo sapiens
cttatgtttgagaca

SEQ ID NO: 1407572 - DNA, 15 bp, Homo sapiens
gtcttatgtttgaga

SEQ ID NO: 1407573 - DNA, 15 bp, Homo sapiens
ggtcttatgtttgag

SEQ ID NO: 1407574 - DNA, 15 bp, Homo sapiens
tggtcttatgtttga

SEQ ID NO: 1407575 - DNA, 15 bp, Homo sapiens
atggtcttatgtttg

SEQ ID NO: 1407576 - DNA, 15 bp, Homo sapiens
catggtcttatgttt

SEQ ID NO: 1407577 - DNA, 15 bp, Homo sapiens
tcatggtcttatgtt

SEQ ID NO: 1407578 - DNA, 15 bp, Homo sapiens
ttcatggtcttatgt

SEQ ID NO: 1407579 - DNA, 15 bp, Homo sapiens
tttcatggtcttatg

SEQ ID NO: 1407580 - DNA, 15 bp, Homo sapiens
ttttcatggtcttat

SEQ ID NO: 1407581 - DNA, 15 bp, Homo sapiens
tttttcatggtctta

SEQ ID NO: 1407582 - DNA, 15 bp, Homo sapiens
atttttcatggtctt

SEQ ID NO: 1407583 - DNA, 15 bp, Homo sapiens
tatttttcatggtct

SEQ ID NO: 1407584 - DNA, 15 bp, Homo sapiens
ttatttttcatggtc

SEQ ID NO: 1407585 - DNA, 15 bp, Homo sapiens
gttatttttcatggt

SEQ ID NO: 1407586 - DNA, 15 bp, Homo sapiens
ggttatttttcatgg

SEQ ID NO: 1407587 - DNA, 15 bp, Homo sapiens
gggttatttttcatg

SEQ ID NO: 1407588 - DNA, 15 bp, Homo sapiens
tgggttatttttcat

SEQ ID NO: 1407589 - DNA, 15 bp, Homo sapiens
atgggttatttttca

SEQ ID NO: 1407590 - DNA, 15 bp, Homo sapiens
aatgggttatttttc

SEQ ID NO: 1407591 - DNA, 15 bp, Homo sapiens
gaatgggttattttt

SEQ ID NO: 1407592 - DNA, 15 bp, Homo sapiens
tgaatgggttatttt

SEQ ID NO: 1407593 - DNA, 15 bp, Homo sapiens
ctgaatgggttattt

SEQ ID NO: 1407594 - DNA, 15 bp, Homo sapiens
tctgaatgggttatt

SEQ ID NO: 1407595 - DNA, 15 bp, Homo sapiens
gtctgaatgggttat

SEQ ID NO: 1407596 - DNA, 15 bp, Homo sapiens
tgtctgaatgggtta

SEQ ID NO: 1407597 - DNA, 15 bp, Homo sapiens
ctgtctgaatgggtt

SEQ ID NO: 1407598 - DNA, 15 bp, Homo sapiens
tctgtctgaatgggt

SEQ ID NO: 1407599 - DNA, 15 bp, Homo sapiens
ttctgtctgaatggg

SEQ ID NO: 1407600 - DNA, 15 bp, Homo sapiens
attctgtctgaatgg

SEQ ID NO: 1407601 - DNA, 15 bp, Homo sapiens
aattctgtctgaatg

SEQ ID NO: 1407602 - DNA, 15 bp, Homo sapiens
taattctgtctgaat

SEQ ID NO: 1407603 - DNA, 15 bp, Homo sapiens
ataattctgtctgaa

SEQ ID NO: 1407604 - DNA, 15 bp, Homo sapiens
cataattctgtctga

SEQ ID NO: 1407605 - DNA, 15 bp, Homo sapiens
tcataattctgtctg

SEQ ID NO: 1407606 - DNA, 15 bp, Homo sapiens
gtcataattctgtct

SEQ ID NO: 1407607 - DNA, 15 bp, Homo sapiens
tgtcataattctgtc

SEQ ID NO: 1407608 - DNA, 15 bp, Homo sapiens
atgtcataattctgt

SEQ ID NO: 1407609 - DNA, 15 bp, Homo sapiens
tatgtcataattctg

SEQ ID NO: 1407610 - DNA, 15 bp, Homo sapiens
ttatgtcataattct

SEQ ID NO: 1407611 - DNA, 15 bp, Homo sapiens
tttatgtcataattc

SEQ ID NO: 1407612 - DNA, 15 bp, Homo sapiens
ctttatgtcataatt

SEQ ID NO: 1407613 - DNA, 15 bp, Homo sapiens
cctttatgtcataat
